United States Patent Application Publication US 2021/0180091 A1 - sequence listing, part 6

SEQ ID NO: 112318 - DNA, 22 bp, Artificial Sequence
  Synthetic oligonucleotide; TTC chr11 5399022 5399043 5399039 5399044 +
ctaagacagtagtcacctccct

SEQ ID NO: 112319 - DNA, 22 bp, Artificial Sequence
  Synthetic oligonucleotide; CTA chr11 5399025 5399046 5399042 5399047 +
agacagtagtcacctccctagc

SEQ ID NO: 112320 - DNA, 22 bp, Artificial Sequence
  Synthetic oligonucleotide; CTC chr11 5399041 5399062 5399058 5399063 +
cctagcttcttgaacctgtctg

SEQ ID NO: 112321 - DNA, 22 bp, Artificial Sequence
  Synthetic oligonucleotide; CTA chr11 5399045 5399066 5399062 5399067 +
gcttcttgaacctgtctggcag

SEQ ID NO: 112322 - DNA, 22 bp, Artificial Sequence
  Synthetic oligonucleotide; CTT chr11 5399049 5399070 5399066 5399071 +
cttgaacctgtctggcagaagg

SEQ ID NO: 112323 - DNA, 22 bp, Artificial Sequence
  Synthetic oligonucleotide; TTC chr11 5399050 5399071 5399067 5399072 +
ttgaacctgtctggcagaagga

SEQ ID NO: 112324 - DNA, 22 bp, Artificial Sequence
  Synthetic oligonucleotide; CTT chr11 5399052 5399073 5399069 5399074 +
gaacctgtctggcagaaggaga

SEQ ID NO: 112325 - DNA, 22 bp, Artificial Sequence
  Synthetic oligonucleotide; TTG chr11 5399053 5399074 5399070 5399075 +
aacctgtctggcagaaggagag

SEQ ID NO: 112326 - DNA, 22 bp, Artificial Sequence
  Synthetic oligonucleotide; CTG chr11 5399059 5399080 5399076 5399081 +
tctggcagaaggagaggaatca

SEQ ID NO: 112327 - DNA, 22 bp, Artificial Sequence
  Synthetic oligonucleotide; CTG chr11 5399063 5399084 5399080 5399085 +
gcagaaggagaggaatcacatc

SEQ ID NO: 112328 - DNA, 22 bp, Artificial Sequence
  Synthetic oligonucleotide; CTA chr11 5399088 5399109 5399105 5399110 +
aattggtggcagatggaaaaca

SEQ ID NO: 112329 - DNA, 22 bp, Artificial Sequence
  Synthetic oligonucleotide; TTG chr11 5399093 5399114 5399110 5399115 +
gtggcagatggaaaacaaaaca

SEQ ID NO: 112330 - DNA, 22 bp, Artificial Sequence
  Synthetic oligonucleotide; TTC chr11 5399141 5399162 5399158 5399163 +
ttgaaatagttttgccatcata

SEQ ID NO: 112331 - DNA, 22 bp, Artificial Sequence
  Synthetic oligonucleotide; CTT chr11 5399143 5399164 5399160 5399165 +
gaaatagttttgccatcatatt

SEQ ID NO: 112332 - DNA, 22 bp, Artificial Sequence
  Synthetic oligonucleotide; TTG chr11 5399144 5399165 5399161 5399166 +
aaatagttttgccatcatatta

SEQ ID NO: 112333 - DNA, 22 bp, Artificial Sequence
  Synthetic oligonucleotide; TTT chr11 5399153 5399174 5399170 5399175 +
tgccatcatattatcttgggtt

SEQ ID NO: 112334 - DNA, 22 bp, Artificial Sequence
  Synthetic oligonucleotide; TTT chr11 5399154 5399175 5399171 5399176 +
gccatcatattatcttgggtta

SEQ ID NO: 112335 - DNA, 22 bp, Artificial Sequence
  Synthetic oligonucleotide; TTG chr11 5399155 5399176 5399172 5399177 +
ccatcatattatcttgggttac

SEQ ID NO: 112336 - DNA, 22 bp, Artificial Sequence
  Synthetic oligonucleotide; TTA chr11 5399166 5399187 5399183 5399188 +
tcttgggttactcacaaaatgc

SEQ ID NO: 112337 - DNA, 22 bp, Artificial Sequence
  Synthetic oligonucleotide; CTT chr11 5399170 5399191 5399187 5399192 +
gggttactcacaaaatgcttat

SEQ ID NO: 112338 - DNA, 22 bp, Artificial Sequence
  Synthetic oligonucleotide; TTG chr11 5399171 5399192 5399188 5399193 +
ggttactcacaaaatgcttatg

SEQ ID NO: 112339 - DNA, 22 bp, Artificial Sequence
  Synthetic oligonucleotide; TTA chr11 5399176 5399197 5399193 5399198 +
ctcacaaaatgcttatgtctgg

SEQ ID NO: 112340 - DNA, 22 bp, Artificial Sequence
  Synthetic oligonucleotide; CTC chr11 5399179 5399200 5399196 5399201 +
acaaaatgcttatgtctggttt

SEQ ID NO: 112341 - DNA, 22 bp, Artificial Sequence
  Synthetic oligonucleotide; CTT chr11 5399190 5399211 5399207 5399212 +
atgtctggtttatatgctcatc

SEQ ID NO: 112342 - DNA, 22 bp, Artificial Sequence
  Synthetic oligonucleotide; TTA chr11 5399191 5399212 5399208 5399213 +
tgtctggtttatatgctcatct

SEQ ID NO: 112343 - DNA, 22 bp, Artificial Sequence
  Synthetic oligonucleotide; CTG chr11 5399197 5399218 5399214 5399219 +
gtttatatgctcatctattaag

SEQ ID NO: 112344 - DNA, 22 bp, Artificial Sequence
  Synthetic oligonucleotide; TTT chr11 5399201 5399222 5399218 5399223 +
atatgctcatctattaagtggg

SEQ ID NO: 112345 - DNA, 22 bp, Artificial Sequence
  Synthetic oligonucleotide; TTA chr11 5399202 5399223 5399219 5399224 +
tatgctcatctattaagtggga

SEQ ID NO: 112346 - DNA, 22 bp, Artificial Sequence
  Synthetic oligonucleotide; CTC chr11 5399209 5399230 5399226 5399231 +
atctattaagtgggaaattctt

SEQ ID NO: 112347 - DNA, 22 bp, Artificial Sequence
  Synthetic oligonucleotide; CTA chr11 5399214 5399235 5399231 5399236 +
ttaagtgggaaattcttgtctc

SEQ ID NO: 112348 - DNA, 22 bp, Artificial Sequence
  Synthetic oligonucleotide; TTA chr11 5399217 5399238 5399234 5399239 +
agtgggaaattcttgtctcctt

SEQ ID NO: 112349 - DNA, 22 bp, Artificial Sequence
  Synthetic oligonucleotide; TTC chr11 5399229 5399250 5399246 5399251 +
ttgtctccttgtttacctcaca

SEQ ID NO: 112350 - DNA, 22 bp, Artificial Sequence
  Synthetic oligonucleotide; CTT chr11 5399231 5399252 5399248 5399253 +
gtctccttgtttacctcacaga

SEQ ID NO: 112351 - DNA, 22 bp, Artificial Sequence
  Synthetic oligonucleotide; TTG chr11 5399232 5399253 5399249 5399254 +
tctccttgtttacctcacagat

SEQ ID NO: 112352 - DNA, 22 bp, Artificial Sequence
  Synthetic oligonucleotide; CTC chr11 5399236 5399257 5399253 5399258 +
cttgtttacctcacagatgtgg

SEQ ID NO: 112353 - DNA, 22 bp, Artificial Sequence
  Synthetic oligonucleotide; CTT chr11 5399239 5399260 5399256 5399261 +
gtttacctcacagatgtggtct

SEQ ID NO: 112354 - DNA, 22 bp, Artificial Sequence
  Synthetic oligonucleotide; TTG chr11 5399240 5399261 5399257 5399262 +
tttacctcacagatgtggtctg

SEQ ID NO: 112355 - DNA, 22 bp, Artificial Sequence
  Synthetic oligonucleotide; TTT chr11 5399243 5399264 5399260 5399265 +
acctcacagatgtggtctgagt

SEQ ID NO: 112356 - DNA, 22 bp, Artificial Sequence
  Synthetic oligonucleotide; TTA chr11 5399244 5399265 5399261 5399266 +
cctcacagatgtggtctgagta

SEQ ID NO: 112357 - DNA, 22 bp, Artificial Sequence
  Synthetic oligonucleotide; CTC chr11 5399248 5399269 5399265 5399270 +
acagatgtggtctgagtatcag

SEQ ID NO: 112358 - DNA, 22 bp, Artificial Sequence
  Synthetic oligonucleotide; CTG chr11 5399262 5399283 5399279 5399284 +
agtatcagtgagccaataacaa

SEQ ID NO: 112359 - DNA, 22 bp, Artificial Sequence
  Synthetic oligonucleotide; TTA chr11 5399297 5399318 5399314 5399319 +
ttaataaaaagttggaaataag

SEQ ID NO: 112360 - DNA, 22 bp, Artificial Sequence
  Synthetic oligonucleotide; TTA chr11 5399300 5399321 5399317 5399322 +
ataaaaagttggaaataagctg

SEQ ID NO: 112361 - DNA, 22 bp, Artificial Sequence
  Synthetic oligonucleotide; TTG chr11 5399311 5399332 5399328 5399333 +
gaaataagctgactgtgattga

SEQ ID NO: 112362 - DNA, 22 bp, Artificial Sequence
  Synthetic oligonucleotide; CTG chr11 5399322 5399343 5399339 5399344 +
actgtgattgactcctgagaat

SEQ ID NO: 112363 - DNA, 22 bp, Artificial Sequence
  Synthetic oligonucleotide; CTG chr11 5399326 5399347 5399343 5399348 +
tgattgactcctgagaattcct

SEQ ID NO: 112364 - DNA, 22 bp, Artificial Sequence
  Synthetic oligonucleotide; TTG chr11 5399332 5399353 5399349 5399354 +
actcctgagaattcctgaaaga

SEQ ID NO: 112365 - DNA, 22 bp, Artificial Sequence
  Synthetic oligonucleotide; CTC chr11 5399336 5399357 5399353 5399358 +
ctgagaattcctgaaagagata

SEQ ID NO: 112366 - DNA, 22 bp, Artificial Sequence
  Synthetic oligonucleotide; CTG chr11 5399339 5399360 5399356 5399361 +
agaattcctgaaagagatatag

SEQ ID NO: 112367 - DNA, 22 bp, Artificial Sequence
  Synthetic oligonucleotide; TTC chr11 5399346 5399367 5399363 5399368 +
ctgaaagagatatagagtggag

SEQ ID NO: 112368 - DNA, 22 bp, Artificial Sequence
  Synthetic oligonucleotide; CTG chr11 5399349 5399370 5399366 5399371 +
aaagagatatagagtggagaga

SEQ ID NO: 112369 - DNA, 22 bp, Artificial Sequence
  Synthetic oligonucleotide; TTA chr11 5399377 5399398 5399394 5399399 +
acattcactggttgctaaaggc

SEQ ID NO: 112370 - DNA, 22 bp, Artificial Sequence
  Synthetic oligonucleotide; TTC chr11 5399383 5399404 5399400 5399405 +
actggttgctaaaggctcacat

SEQ ID NO: 112371 - DNA, 22 bp, Artificial Sequence
  Synthetic oligonucleotide; CTG chr11 5399387 5399408 5399404 5399409 +
gttgctaaaggctcacattaaa

SEQ ID NO: 112372 - DNA, 22 bp, Artificial Sequence
  Synthetic oligonucleotide; TTG chr11 5399391 5399412 5399408 5399413 +
ctaaaggctcacattaaatatt

SEQ ID NO: 112373 - DNA, 22 bp, Artificial Sequence
  Synthetic oligonucleotide; CTA chr11 5399394 5399415 5399411 5399416 +
aaggctcacattaaatatttag

SEQ ID NO: 112374 - DNA, 22 bp, Artificial Sequence
  Synthetic oligonucleotide; CTC chr11 5399401 5399422 5399418 5399423 +
acattaaatatttagagccagt

SEQ ID NO: 112375 - DNA, 22 bp, Artificial Sequence
  Synthetic oligonucleotide; TTA chr11 5399407 5399428 5399424 5399429 +
aatatttagagccagtccctga

SEQ ID NO: 112376 - DNA, 22 bp, Artificial Sequence
  Synthetic oligonucleotide; TTT chr11 5399414 5399435 5399431 5399436 +
agagccagtccctgaggtaagt

SEQ ID NO: 112377 - DNA, 22 bp, Artificial Sequence
  Synthetic oligonucleotide; TTA chr11 5399415 5399436 5399432 5399437 +
gagccagtccctgaggtaagta

SEQ ID NO: 112378 - DNA, 22 bp, Artificial Sequence
  Synthetic oligonucleotide; CTG chr11 5399428 5399449 5399445 5399450 +
aggtaagtattaacatctttat

SEQ ID NO: 112379 - DNA, 22 bp, Artificial Sequence
  Synthetic oligonucleotide; TTA chr11 5399440 5399461 5399457 5399462 +
acatctttatctttaaaaacaa

SEQ ID NO: 112380 - DNA, 22 bp, Artificial Sequence
  Synthetic oligonucleotide; CTT chr11 5399447 5399468 5399464 5399469 +
tatctttaaaaacaaagatact

SEQ ID NO: 112381 - DNA, 22 bp, Artificial Sequence
  Synthetic oligonucleotide; TTT chr11 5399448 5399469 5399465 5399470 +
atctttaaaaacaaagatacta

SEQ ID NO: 112382 - DNA, 22 bp, Artificial Sequence
  Synthetic oligonucleotide; TTA chr11 5399449 5399470 5399466 5399471 +
tctttaaaaacaaagatactaa

SEQ ID NO: 112383 - DNA, 22 bp, Artificial Sequence
  Synthetic oligonucleotide; CTT chr11 5399453 5399474 5399470 5399475 +
taaaaacaaagatactaatgtg

SEQ ID NO: 112384 - DNA, 22 bp, Artificial Sequence
  Synthetic oligonucleotide; TTT chr11 5399454 5399475 5399471 5399476 +
aaaaacaaagatactaatgtgc

SEQ ID NO: 112385 - DNA, 22 bp, Artificial Sequence
  Synthetic oligonucleotide; TTA chr11 5399455 5399476 5399472 5399477 +
aaaacaaagatactaatgtgca

SEQ ID NO: 112386 - DNA, 22 bp, Artificial Sequence
  Synthetic oligonucleotide; CTA chr11 5399470 5399491 5399487 5399492 +
atgtgcacaaaggtaaagtacg

SEQ ID NO: 112387 - DNA, 22 bp, Artificial Sequence
  Synthetic oligonucleotide; TTA chr11 5399500 5399521 5399517 5399522 +
taccgaacataagattcacctc

SEQ ID NO: 112388 - DNA, 22 bp, Artificial Sequence
  Synthetic oligonucleotide; TTC chr11 5399517 5399538 5399534 5399539 +
acctccaattctgtccagctcc

SEQ ID NO: 112389 - DNA, 22 bp, Artificial Sequence
  Synthetic oligonucleotide; CTC chr11 5399522 5399543 5399539 5399544 +
caattctgtccagctccagggg

SEQ ID NO: 112390 - DNA, 22 bp, Artificial Sequence
  Synthetic oligonucleotide; TTC chr11 5399528 5399549 5399545 5399550 +
tgtccagctccaggggtacagt

SEQ ID NO: 112391 - DNA, 22 bp, Artificial Sequence
  Synthetic oligonucleotide; CTG chr11 5399530 5399551 5399547 5399552 +
tccagctccaggggtacagtca

SEQ ID NO: 112392 - DNA, 22 bp, Artificial Sequence
  Synthetic oligonucleotide; CTC chr11 5399538 5399559 5399555 5399560 +
caggggtacagtcatcactgtc

SEQ ID NO: 112393 - DNA, 22 bp, Artificial Sequence
  Synthetic oligonucleotide; CTG chr11 5399558 5399579 5399575 5399580 +
tcccacattctactttttttct

SEQ ID NO: 112394 - DNA, 22 bp, Artificial Sequence
  Synthetic oligonucleotide; TTC chr11 5399568 5399589 5399585 5399590 +
tactttttttctgatttgttgt

SEQ ID NO: 112395 - DNA, 22 bp, Artificial Sequence
  Synthetic oligonucleotide; CTA chr11 5399570 5399591 5399587 5399592 +
ctttttttctgatttgttgtgt

SEQ ID NO: 112396 - DNA, 22 bp, Artificial Sequence
  Synthetic oligonucleotide; CTT chr11 5399573 5399594 5399590 5399595 +
tttttctgatttgttgtgtcct

SEQ ID NO: 112397 - DNA, 22 bp, Artificial Sequence
  Synthetic oligonucleotide; TTT chr11 5399574 5399595 5399591 5399596 +
ttttctgatttgttgtgtccta

SEQ ID NO: 112398 - DNA, 22 bp, Artificial Sequence
  Synthetic oligonucleotide; TTT chr11 5399575 5399596 5399592 5399597 +
tttctgatttgttgtgtcctat

SEQ ID NO: 112399 - DNA, 22 bp, Artificial Sequence
  Synthetic oligonucleotide; TTT chr11 5399576 5399597 5399593 5399598 +
ttctgatttgttgtgtcctatt

SEQ ID NO: 112400 - DNA, 22 bp, Artificial Sequence
  Synthetic oligonucleotide; TTT chr11 5399577 5399598 5399594 5399599 +
tctgatttgttgtgtcctatta

SEQ ID NO: 112401 - DNA, 22 bp, Artificial Sequence
  Synthetic oligonucleotide; TTT chr11 5399578 5399599 5399595 5399600 +
ctgatttgttgtgtcctattat

SEQ ID NO: 112402 - DNA, 22 bp, Artificial Sequence
  Synthetic oligonucleotide; TTC chr11 5399579 5399600 5399596 5399601 +
tgatttgttgtgtcctattata

SEQ ID NO: 112403 - DNA, 22 bp, Artificial Sequence
  Synthetic oligonucleotide; CTG chr11 5399581 5399602 5399598 5399603 +
atttgttgtgtcctattatact

SEQ ID NO: 112404 - DNA, 22 bp, Artificial Sequence
  Synthetic oligonucleotide; TTT chr11 5399585 5399606 5399602 5399607 +
gttgtgtcctattatactgggc

SEQ ID NO: 112405 - DNA, 22 bp, Artificial Sequence
  Synthetic oligonucleotide; TTG chr11 5399586 5399607 5399603 5399608 +
ttgtgtcctattatactgggct

SEQ ID NO: 112406 - DNA, 22 bp, Artificial Sequence
  Synthetic oligonucleotide; TTG chr11 5399589 5399610 5399606 5399611 +
tgtcctattatactgggctata

SEQ ID NO: 112407 - DNA, 22 bp, Artificial Sequence
  Synthetic oligonucleotide; CTA chr11 5399596 5399617 5399613 5399618 +
ttatactgggctatagactaca

SEQ ID NO: 112408 - DNA, 22 bp, Artificial Sequence
  Synthetic oligonucleotide; TTA chr11 5399599 5399620 5399616 5399621 +
tactgggctatagactacatga

SEQ ID NO: 112409 - DNA, 22 bp, Artificial Sequence
  Synthetic oligonucleotide; CTG chr11 5399604 5399625 5399621 5399626 +
ggctatagactacatgatccct

SEQ ID NO: 112410 - DNA, 22 bp, Artificial Sequence
  Synthetic oligonucleotide; CTA chr11 5399609 5399630 5399626 5399631 +
tagactacatgatcccttttgt

SEQ ID NO: 112411 - DNA, 22 bp, Artificial Sequence
  Synthetic oligonucleotide; CTA chr11 5399616 5399637 5399633 5399638 +
catgatcccttttgtaaccttt

SEQ ID NO: 112412 - DNA, 22 bp, Artificial Sequence
  Synthetic oligonucleotide; CTT chr11 5399627 5399648 5399644 5399649 +
ttgtaacctttcaagctaaaat

SEQ ID NO: 112413 - DNA, 22 bp, Artificial Sequence
  Synthetic oligonucleotide; TTT chr11 5399628 5399649 5399645 5399650 +
tgtaacctttcaagctaaaatg

SEQ ID NO: 112414 - DNA, 22 bp, Artificial Sequence
  Synthetic oligonucleotide; TTT chr11 5399629 5399650 5399646 5399651 +
gtaacctttcaagctaaaatgc

SEQ ID NO: 112415 - DNA, 22 bp, Artificial Sequence
  Synthetic oligonucleotide; TTG chr11 5399630 5399651 5399647 5399652 +
taacctttcaagctaaaatgct

SEQ ID NO: 112416 - DNA, 22 bp, Artificial Sequence
  Synthetic oligonucleotide; CTT chr11 5399637 5399658 5399654 5399659 +
tcaagctaaaatgctcttgtca

SEQ ID NO: 112417 - DNA, 22 bp, Artificial Sequence
  Synthetic oligonucleotide; TTT chr11 5399638 5399659 5399655 5399660 +
caagctaaaatgctcttgtcaa

SEQ ID NO: 112418 - DNA, 22 bp, Artificial Sequence
  Synthetic oligonucleotide; TTC chr11 5399639 5399660 5399656 5399661 +
aagctaaaatgctcttgtcaaa

SEQ ID NO: 112419 - DNA, 22 bp, Artificial Sequence
  Synthetic oligonucleotide; CTA chr11 5399645 5399666 5399662 5399667 +
aaatgctcttgtcaaacaaatc

SEQ ID NO: 112420 - DNA, 22 bp, Artificial Sequence
  Synthetic oligonucleotide; CTC chr11 5399653 5399674 5399670 5399675 +
ttgtcaaacaaatcctaaactc

SEQ ID NO: 112421 - DNA, 22 bp, Artificial Sequence
  Synthetic oligonucleotide; CTT chr11 5399655 5399676 5399672 5399677 +
gtcaaacaaatcctaaactcag

SEQ ID NO: 112422 - DNA, 22 bp, Artificial Sequence
  Synthetic oligonucleotide; TTG chr11 5399656 5399677 5399673 5399678 +
tcaaacaaatcctaaactcagg

SEQ ID NO: 112423 - DNA, 22 bp, Artificial Sequence
  Synthetic oligonucleotide; CTA chr11 5399670 5399691 5399687 5399692 +
aactcaggagaatgattgtgtt

SEQ ID NO: 112424 - DNA, 22 bp, Artificial Sequence
  Synthetic oligonucleotide; CTC chr11 5399675 5399696 5399692 5399697 +
aggagaatgattgtgttttaag

SEQ ID NO: 112425 - DNA, 22 bp, Artificial Sequence
  Synthetic oligonucleotide; TTG chr11 5399688 5399709 5399705 5399710 +
tgttttaagatctctttcaagg

SEQ ID NO: 112426 - DNA, 22 bp, Artificial Sequence
  Synthetic oligonucleotide; TTT chr11 5399693 5399714 5399710 5399715 +
taagatctctttcaaggagatc

SEQ ID NO: 112427 - DNA, 22 bp, Artificial Sequence
  Synthetic oligonucleotide; TTT chr11 5399694 5399715 5399711 5399716 +
aagatctctttcaaggagatct

SEQ ID NO: 112428 - DNA, 22 bp, Artificial Sequence
  Synthetic oligonucleotide; TTA chr11 5399695 5399716 5399712 5399717 +
agatctctttcaaggagatctg

SEQ ID NO: 112429 - DNA, 22 bp, Artificial Sequence
  Synthetic oligonucleotide; CTC chr11 5399702 5399723 5399719 5399724 +
tttcaaggagatctgaccctta

SEQ ID NO: 112430 - DNA, 22 bp, Artificial Sequence
  Synthetic oligonucleotide; CTT chr11 5399704 5399725 5399721 5399726 +
tcaaggagatctgacccttatc

SEQ ID NO: 112431 - DNA, 22 bp, Artificial Sequence
  Synthetic oligonucleotide; TTT chr11 5399705 5399726 5399722 5399727 +
caaggagatctgacccttatct

SEQ ID NO: 112432 - DNA, 22 bp, Artificial Sequence
  Synthetic oligonucleotide; TTC chr11 5399706 5399727 5399723 5399728 +
aaggagatctgacccttatctg

SEQ ID NO: 112433 - DNA, 22 bp, Artificial Sequence
  Synthetic oligonucleotide; CTG chr11 5399717 5399738 5399734 5399739 +
acccttatctggcggtagagac

SEQ ID NO: 112434 - DNA, 22 bp, Artificial Sequence
  Synthetic oligonucleotide; CTT chr11 5399723 5399744 5399740 5399745 +
atctggcggtagagactctgga

SEQ ID NO: 112435 - DNA, 22 bp, Artificial Sequence
  Synthetic oligonucleotide; TTA chr11 5399724 5399745 5399741 5399746 +
tctggcggtagagactctggag

SEQ ID NO: 112436 - DNA, 22 bp, Artificial Sequence
  Synthetic oligonucleotide; CTG chr11 5399728 5399749 5399745 5399750 +
gcggtagagactctggagatgg

SEQ ID NO: 112437 - DNA, 22 bp, Artificial Sequence
  Synthetic oligonucleotide; CTC chr11 5399741 5399762 5399758 5399763 +
tggagatggaaactgagaagga

SEQ ID NO: 112438 - DNA, 22 bp, Artificial Sequence
  Synthetic oligonucleotide; CTG chr11 5399743 5399764 5399760 5399765 +
gagatggaaactgagaaggatg

SEQ ID NO: 112439 - DNA, 22 bp, Artificial Sequence
  Synthetic oligonucleotide; CTG chr11 5399756 5399777 5399773 5399778 +
agaaggatgcaaaaaaaaaaaa

SEQ ID NO: 112440 - DNA, 22 bp, Artificial Sequence
  Synthetic oligonucleotide; CTC chr11 5399853 5399874 5399870 5399875 +
tagtttcaagtatcagtcaaga

SEQ ID NO: 112441 - DNA, 22 bp, Artificial Sequence
  Synthetic oligonucleotide; CTA chr11 5399855 5399876 5399872 5399877 +
gtttcaagtatcagtcaagatt

SEQ ID NO: 112442 - DNA, 22 bp, Artificial Sequence
  Synthetic oligonucleotide; TTT chr11 5399859 5399880 5399876 5399881 +
caagtatcagtcaagatttgtt

SEQ ID NO: 112443 - DNA, 22 bp, Artificial Sequence
  Synthetic oligonucleotide; TTC chr11 5399860 5399881 5399877 5399882 +
aagtatcagtcaagatttgttt

SEQ ID NO: 112444 - DNA, 22 bp, Artificial Sequence
  Synthetic oligonucleotide; TTT chr11 5399878 5399899 5399895 5399900 +
gtttcttccaatatccggttat

SEQ ID NO: 112445 - DNA, 22 bp, Artificial Sequence
  Synthetic oligonucleotide; TTG chr11 5399879 5399900 5399896 5399901 +
tttcttccaatatccggttatt

SEQ ID NO: 112446 - DNA, 22 bp, Artificial Sequence
  Synthetic oligonucleotide; TTT chr11 5399882 5399903 5399899 5399904 +
cttccaatatccggttatttga

SEQ ID NO: 112447 - DNA, 22 bp, Artificial Sequence
  Synthetic oligonucleotide; TTC chr11 5399883 5399904 5399900 5399905 +
ttccaatatccggttatttgag

SEQ ID NO: 112448 - DNA, 22 bp, Artificial Sequence
  Synthetic oligonucleotide; CTT chr11 5399885 5399906 5399902 5399907 +
ccaatatccggttatttgaggt

SEQ ID NO: 112449 - DNA, 22 bp, Artificial Sequence
  Synthetic oligonucleotide; TTC chr11 5399886 5399907 5399903 5399908 +
caatatccggttatttgaggtg

SEQ ID NO: 112450 - DNA, 22 bp, Artificial Sequence
  Synthetic oligonucleotide; TTA chr11 5399899 5399920 5399916 5399921 +
tttgaggtgtggcaggcaagat

SEQ ID NO: 112451 - DNA, 22 bp, Artificial Sequence
  Synthetic oligonucleotide; TTT chr11 5399902 5399923 5399919 5399924 +
gaggtgtggcaggcaagataca

SEQ ID NO: 112452 - DNA, 22 bp, Artificial Sequence
  Synthetic oligonucleotide; TTG chr11 5399903 5399924 5399920 5399925 +
aggtgtggcaggcaagatacag

SEQ ID NO: 112453 - DNA, 22 bp, Artificial Sequence
  Synthetic oligonucleotide; TTC chr11 5399947 5399968 5399964 5399969 +
agtaaggcagcacacgggaaga

SEQ ID NO: 112454 - DNA, 22 bp, Artificial Sequence
  Synthetic oligonucleotide; CTG chr11 5399976 5399997 5399993 5399998 +
ctcaatccagaggcagatcaat

SEQ ID NO: 112455 - DNA, 22 bp, Artificial Sequence
  Synthetic oligonucleotide; CTC chr11 5399979 5400000 5399996 5400001 +
aatccagaggcagatcaatatt

SEQ ID NO: 112456 - DNA, 22 bp, Artificial Sequence
  Synthetic oligonucleotide; TTG chr11 5399972 5399993 5399977 5399972 -
atctgcctctggattgagcagc

SEQ ID NO: 112457 - DNA, 22 bp, Artificial Sequence
  Synthetic oligonucleotide; CTG chr11 5399967 5399988 5399972 5399967 -
cctctggattgagcagctgttc

SEQ ID NO: 112458 - DNA, 22 bp, Artificial Sequence
  Synthetic oligonucleotide; CTC chr11 5399963 5399984 5399968 5399963 -
tggattgagcagctgttcttcc

SEQ ID NO: 112459 - DNA, 22 bp, Artificial Sequence
  Synthetic oligonucleotide; CTG chr11 5399961 5399982 5399966 5399961 -
gattgagcagctgttcttcccg

SEQ ID NO: 112460 - DNA, 22 bp, Artificial Sequence
  Synthetic oligonucleotide; TTG chr11 5399956 5399977 5399961 5399956 -
agcagctgttcttcccgtgtgc

SEQ ID NO: 112461 - DNA, 22 bp, Artificial Sequence
  Synthetic oligonucleotide; CTG chr11 5399948 5399969 5399953 5399948 -
ttcttcccgtgtgctgccttac

SEQ ID NO: 112462 - DNA, 22 bp, Artificial Sequence
  Synthetic oligonucleotide; TTC chr11 5399945 5399966 5399950 5399945 -
ttcccgtgtgctgccttactga

SEQ ID NO: 112463 - DNA, 22 bp, Artificial Sequence
  Synthetic oligonucleotide; CTT chr11 5399943 5399964 5399948 5399943 -
cccgtgtgctgccttactgaat

SEQ ID NO: 112464 - DNA, 22 bp, Artificial Sequence
  Synthetic oligonucleotide; TTC chr11 5399942 5399963 5399947 5399942 -
ccgtgtgctgccttactgaatc

SEQ ID NO: 112465 - DNA, 22 bp, Artificial Sequence
  Synthetic oligonucleotide; CTG chr11 5399932 5399953 5399937 5399932 -
ccttactgaatccttgatccca

SEQ ID NO: 112466 - DNA, 22 bp, Artificial Sequence
  Synthetic oligonucleotide; CTT chr11 5399928 5399949 5399933 5399928 -
actgaatccttgatcccactgc

SEQ ID NO: 112467 - DNA, 22 bp, Artificial Sequence
  Synthetic oligonucleotide; TTA chr11 5399927 5399948 5399932 5399927 -
ctgaatccttgatcccactgca

SEQ ID NO: 112468 - DNA, 22 bp, Artificial Sequence
  Synthetic oligonucleotide; CTG chr11 5399924 5399945 5399929 5399924 -
aatccttgatcccactgcaccc

SEQ ID NO: 112469 - DNA, 22 bp, Artificial Sequence
  Synthetic oligonucleotide; CTT chr11 5399917 5399938 5399922 5399917 -
gatcccactgcaccctgtatct

SEQ ID NO: 112470 - DNA, 22 bp, Artificial Sequence
  Synthetic oligonucleotide; TTG chr11 5399916 5399937 5399921 5399916 -
atcccactgcaccctgtatctt

SEQ ID NO: 112471 - DNA, 22 bp, Artificial Sequence
  Synthetic oligonucleotide; CTG chr11 5399907 5399928 5399912 5399907 -
caccctgtatcttgcctgccac

SEQ ID NO: 112472 - DNA, 22 bp, Artificial Sequence
  Synthetic oligonucleotide; CTG chr11 5399900 5399921 5399905 5399900 -
tatcttgcctgccacacctcaa

SEQ ID NO: 112473 - DNA, 22 bp, Artificial Sequence
  Synthetic oligonucleotide; CTT chr11 5399894 5399915 5399899 5399894 -
gcctgccacacctcaaataacc

SEQ ID NO: 112474 - DNA, 22 bp, Artificial Sequence
  Synthetic oligonucleotide; TTG chr11 5399893 5399914 5399898 5399893 -
cctgccacacctcaaataaccg

SEQ ID NO: 112475 - DNA, 22 bp, Artificial Sequence
  Synthetic oligonucleotide; CTG chr11 5399889 5399910 5399894 5399889 -
ccacacctcaaataaccggata

SEQ ID NO: 112476 - DNA, 22 bp, Artificial Sequence
  Synthetic oligonucleotide; CTC chr11 5399880 5399901 5399885 5399880 -
aaataaccggatattggaagaa

SEQ ID NO: 112477 - DNA, 22 bp, Artificial Sequence
  Synthetic oligonucleotide; TTG chr11 5399864 5399885 5399869 5399864 -
gaagaaacaaatcttgactgat

SEQ ID NO: 112478 - DNA, 22 bp, Artificial Sequence
  Synthetic oligonucleotide; CTT chr11 5399849 5399870 5399854 5399849 -
gactgatacttgaaactagagt

SEQ ID NO: 112479 - DNA, 22 bp, Artificial Sequence
  Synthetic oligonucleotide; TTG chr11 5399848 5399869 5399853 5399848 -
actgatacttgaaactagagtc

SEQ ID NO: 112480 - DNA, 22 bp, Artificial Sequence
  Synthetic oligonucleotide; CTG chr11 5399844 5399865 5399849 5399844 -
atacttgaaactagagtctctc

SEQ ID NO: 112481 - DNA, 22 bp, Artificial Sequence
  Synthetic oligonucleotide; CTT chr11 5399838 5399859 5399843 5399838 -
gaaactagagtctctcctcctc

SEQ ID NO: 112482 - DNA, 22 bp, Artificial Sequence
  Synthetic oligonucleotide; TTG chr11 5399837 5399858 5399842 5399837 -
aaactagagtctctcctcctct

SEQ ID NO: 112483 - DNA, 22 bp, Artificial Sequence
  Synthetic oligonucleotide; CTA chr11 5399831 5399852 5399836 5399831 -
gagtctctcctcctctgccttc

SEQ ID NO: 112484 - DNA, 22 bp, Artificial Sequence
  Synthetic oligonucleotide; CTC chr11 5399824 5399845 5399829 5399824 -
tcctcctctgccttctctgcct

SEQ ID NO: 112485 - DNA, 22 bp, Artificial Sequence
  Synthetic oligonucleotide; CTC chr11 5399822 5399843 5399827 5399822 -
ctcctctgccttctctgcctgt

SEQ ID NO: 112486 - DNA, 22 bp, Artificial Sequence
  Synthetic oligonucleotide; CTC chr11 5399819 5399840 5399824 5399819 -
ctctgccttctctgcctgtctg

SEQ ID NO: 112487 - DNA, 22 bp, Artificial Sequence
  Synthetic oligonucleotide; CTC chr11 5399816 5399837 5399821 5399816 -
tgccttctctgcctgtctgtgg

SEQ ID NO: 112488 - DNA, 22 bp, Artificial Sequence
  Synthetic oligonucleotide; CTG chr11 5399814 5399835 5399819 5399814 -
ccttctctgcctgtctgtggtc

SEQ ID NO: 112489 - DNA, 22 bp, Artificial Sequence
  Synthetic oligonucleotide; CTT chr11 5399810 5399831 5399815 5399810 -
ctctgcctgtctgtggtctctt

SEQ ID NO: 112490 - DNA, 22 bp, Artificial Sequence
  Synthetic oligonucleotide; TTC chr11 5399809 5399830 5399814 5399809 -
tctgcctgtctgtggtctcttt

SEQ ID NO: 112491 - DNA, 22 bp, Artificial Sequence
  Synthetic oligonucleotide; CTC chr11 5399807 5399828 5399812 5399807 -
tgcctgtctgtggtctcttttg

SEQ ID NO: 112492 - DNA, 22 bp, Artificial Sequence
  Synthetic oligonucleotide; CTG chr11 5399805 5399826 5399810 5399805 -
cctgtctgtggtctcttttgtt

SEQ ID NO: 112493 - DNA, 22 bp, Artificial Sequence
  Synthetic oligonucleotide; CTG chr11 5399801 5399822 5399806 5399801 -
tctgtggtctcttttgttttct

SEQ ID NO: 112494 - DNA, 22 bp, Artificial Sequence
  Synthetic oligonucleotide; CTG chr11 5399797 5399818 5399802 5399797 -
tggtctcttttgttttcttcct

SEQ ID NO: 112495 - DNA, 22 bp, Artificial Sequence
  Synthetic oligonucleotide; CTC chr11 5399790 5399811 5399795 5399790 -
ttttgttttcttcctttttttt

SEQ ID NO: 112496 - DNA, 22 bp, Artificial Sequence
  Synthetic oligonucleotide; CTT chr11 5399788 5399809 5399793 5399788 -
ttgttttcttcctttttttttc

SEQ ID NO: 112497 - DNA, 22 bp, Artificial Sequence
  Synthetic oligonucleotide; TTT chr11 5399787 5399808 5399792 5399787 -
tgttttcttcctttttttttct

SEQ ID NO: 112498 - DNA, 22 bp, Artificial Sequence
  Synthetic oligonucleotide; TTT chr11 5399786 5399807 5399791 5399786 -
gttttcttcctttttttttctt

SEQ ID NO: 112499 - DNA, 22 bp, Artificial Sequence
  Synthetic oligonucleotide; TTG chr11 5399785 5399806 5399790 5399785 -
ttttcttcctttttttttcttt

SEQ ID NO: 112500 - DNA, 22 bp, Artificial Sequence
  Synthetic oligonucleotide; TTT chr11 5399782 5399803 5399787 5399782 -
tcttcctttttttttctttctt

SEQ ID NO: 112501 - DNA, 22 bp, Artificial Sequence
  Synthetic oligonucleotide; TTT chr11 5399781 5399802 5399786 5399781 -
cttcctttttttttctttcttg

SEQ ID NO: 112502 - DNA, 22 bp, Artificial Sequence
  Synthetic oligonucleotide; TTC chr11 5399780 5399801 5399785 5399780 -
ttcctttttttttctttcttgc

SEQ ID NO: 112503 - DNA, 22 bp, Artificial Sequence
  Synthetic oligonucleotide; CTT chr11 5399778 5399799 5399783 5399778 -
cctttttttttctttcttgcat

SEQ ID NO: 112504 - DNA, 22 bp, Artificial Sequence
  Synthetic oligonucleotide; TTC chr11 5399777 5399798 5399782 5399777 -
ctttttttttctttcttgcatt

SEQ ID NO: 112505 - DNA, 22 bp, Artificial Sequence
  Synthetic oligonucleotide; CTT chr11 5399774 5399795 5399779 5399774 -
tttttttctttcttgcattttt

SEQ ID NO: 112506 - DNA, 22 bp, Artificial Sequence
  Synthetic oligonucleotide; TTT chr11 5399773 5399794 5399778 5399773 -
ttttttctttcttgcatttttt

SEQ ID NO: 112507 - DNA, 22 bp, Artificial Sequence
  Synthetic oligonucleotide; TTT chr11 5399772 5399793 5399777 5399772 -
tttttctttcttgcattttttt

SEQ ID NO: 112508 - DNA, 22 bp, Artificial Sequence
  Synthetic oligonucleotide; TTT chr11 5399771 5399792 5399776 5399771 -
ttttctttcttgcatttttttt

SEQ ID NO: 112509 - DNA, 22 bp, Artificial Sequence
  Synthetic oligonucleotide; TTT chr11 5399770 5399791 5399775 5399770 -
tttctttcttgcattttttttt

SEQ ID NO: 112510 - DNA, 22 bp, Artificial Sequence
  Synthetic oligonucleotide; TTT chr11 5399769 5399790 5399774 5399769 -
ttctttcttgcatttttttttt

SEQ ID NO: 112511 - DNA, 22 bp, Artificial Sequence
  Synthetic oligonucleotide; TTT chr11 5399768 5399789 5399773 5399768 -
tctttcttgcattttttttttt

SEQ ID NO: 112512 - DNA, 22 bp, Artificial Sequence
  Synthetic oligonucleotide; TTT chr11 5399767 5399788 5399772 5399767 -
ctttcttgcatttttttttttt

SEQ ID NO: 112513 - DNA, 22 bp, Artificial Sequence
  Synthetic oligonucleotide; TTC chr11 5399766 5399787 5399771 5399766 -
tttcttgcattttttttttttt

SEQ ID NO: 112514 - DNA, 22 bp, Artificial Sequence
  Synthetic oligonucleotide; CTT chr11 5399764 5399785 5399769 5399764 -
tcttgcatttttttttttttgc

SEQ ID NO: 112515 - DNA, 22 bp, Artificial Sequence
  Synthetic oligonucleotide; TTT chr11 5399763 5399784 5399768 5399763 -
cttgcatttttttttttttgca

SEQ ID NO: 112516 - DNA, 22 bp, Artificial Sequence
  Synthetic oligonucleotide; TTC chr11 5399762 5399783 5399767 5399762 -
ttgcatttttttttttttgcat

SEQ ID NO: 112517 - DNA, 22 bp, Artificial Sequence
  Synthetic oligonucleotide; CTT chr11 5399760 5399781 5399765 5399760 -
gcatttttttttttttgcatcc

SEQ ID NO: 112518 - DNA, 22 bp, Artificial Sequence
  Synthetic oligonucleotide; TTG chr11 5399759 5399780 5399764 5399759 -
catttttttttttttgcatcct

SEQ ID NO: 112519 - DNA, 22 bp, Artificial Sequence
  Synthetic oligonucleotide; TTT chr11 5399754 5399775 5399759 5399754 -
ttttttttttgcatccttctca

SEQ ID NO: 112520 - DNA, 22 bp, Artificial Sequence
  Synthetic oligonucleotide; TTT chr11 5399753 5399774 5399758 5399753 -
tttttttttgcatccttctcag

SEQ ID NO: 112521 - DNA, 22 bp, Artificial Sequence
  Synthetic oligonucleotide; TTT chr11 5399752 5399773 5399757 5399752 -
ttttttttgcatccttctcagt

SEQ ID NO: 112522 - DNA, 22 bp, Artificial Sequence
  Synthetic oligonucleotide; TTT chr11 5399751 5399772 5399756 5399751 -
tttttttgcatccttctcagtt

SEQ ID NO: 112523 - DNA, 22 bp, Artificial Sequence
  Synthetic oligonucleotide; TTT chr11 5399750 5399771 5399755 5399750 -
ttttttgcatccttctcagttt

SEQ ID NO: 112524 - DNA, 22 bp, Artificial Sequence
  Synthetic oligonucleotide; TTT chr11 5399749 5399770 5399754 5399749 -
tttttgcatccttctcagtttc

SEQ ID NO: 112525 - DNA, 22 bp, Artificial Sequence
  Synthetic oligonucleotide; TTT chr11 5399748 5399769 5399753 5399748 -
ttttgcatccttctcagtttcc

SEQ ID NO: 112526 - DNA, 22 bp, Artificial Sequence
  Synthetic oligonucleotide; TTT chr11 5399747 5399768 5399752 5399747 -
tttgcatccttctcagtttcca

SEQ ID NO: 112527 - DNA, 22 bp, Artificial Sequence
  Synthetic oligonucleotide; TTT chr11 5399746 5399767 5399751 5399746 -
ttgcatccttctcagtttccat

SEQ ID NO: 112528 - DNA, 22 bp, Artificial Sequence
  Synthetic oligonucleotide; TTT chr11 5399745 5399766 5399750 5399745 -
tgcatccttctcagtttccatc

SEQ ID NO: 112529 - DNA, 22 bp, Artificial Sequence
  Synthetic oligonucleotide; TTT chr11 5399744 5399765 5399749 5399744 -
gcatccttctcagtttccatct

SEQ ID NO: 112530 - DNA, 22 bp, Artificial Sequence
  Synthetic oligonucleotide; TTG chr11 5399743 5399764 5399748 5399743 -
catccttctcagtttccatctc

SEQ ID NO: 112531 - DNA, 22 bp, Artificial Sequence
  Synthetic oligonucleotide; CTT chr11 5399736 5399757 5399741 5399736 -
ctcagtttccatctccagagtc

SEQ ID NO: 112532 - DNA, 22 bp, Artificial Sequence
  Synthetic oligonucleotide; TTC chr11 5399735 5399756 5399740 5399735 -
tcagtttccatctccagagtct

SEQ ID NO: 112533 - DNA, 22 bp, Artificial Sequence
  Synthetic oligonucleotide; CTC chr11 5399733 5399754 5399738 5399733 -
agtttccatctccagagtctct

SEQ ID NO: 112534 - DNA, 22 bp, Artificial Sequence
  Synthetic oligonucleotide; TTT chr11 5399728 5399749 5399733 5399728 -
ccatctccagagtctctaccgc

SEQ ID NO: 112535 - DNA, 22 bp, Artificial Sequence
  Synthetic oligonucleotide; TTC chr11 5399727 5399748 5399732 5399727 -
catctccagagtctctaccgcc

SEQ ID NO: 112536 - DNA, 22 bp, Artificial Sequence
  Synthetic oligonucleotide; CTC chr11 5399721 5399742 5399726 5399721 -
cagagtctctaccgccagataa

SEQ ID NO: 112537 - DNA, 22 bp, Artificial Sequence
  Synthetic oligonucleotide; CTC chr11 5399712 5399733 5399717 5399712 -
taccgccagataagggtcagat

SEQ ID NO: 112538 - DNA, 22 bp, Artificial Sequence
  Synthetic oligonucleotide; CTA chr11 5399710 5399731 5399715 5399710 -
ccgccagataagggtcagatct

SEQ ID NO: 112539 - DNA, 22 bp, Artificial Sequence
  Synthetic oligonucleotide; CTC chr11 5399687 5399708 5399692 5399687 -
cttgaaagagatcttaaaacac

SEQ ID NO: 112540 - DNA, 22 bp, Artificial Sequence
  Synthetic oligonucleotide; CTT chr11 5399684 5399705 5399689 5399684 -
gaaagagatcttaaaacacaat

SEQ ID NO: 112541 - DNA, 22 bp, Artificial Sequence
  Synthetic oligonucleotide; TTG chr11 5399683 5399704 5399688 5399683 -
aaagagatcttaaaacacaatc

SEQ ID NO: 112542 - DNA, 22 bp, Artificial Sequence
  Synthetic oligonucleotide; CTT chr11 5399672 5399693 5399677 5399672 -
aaaacacaatcattctcctgag

SEQ ID NO: 112543 - DNA, 22 bp, Artificial Sequence
  Synthetic oligonucleotide; TTA chr11 5399671 5399692 5399676 5399671 -
aaacacaatcattctcctgagt

SEQ ID NO: 112544 - DNA, 22 bp, Artificial Sequence
  Synthetic oligonucleotide; TTC chr11 5399657 5399678 5399662 5399657 -
tcctgagtttaggatttgtttg

SEQ ID NO: 112545 - DNA, 22 bp, Artificial Sequence
  Synthetic oligonucleotide; CTC chr11 5399655 5399676 5399660 5399655 -
ctgagtttaggatttgtttgac

SEQ ID NO: 112546 - DNA, 22 bp, Artificial Sequence
  Synthetic oligonucleotide; CTG chr11 5399652 5399673 5399657 5399652 -
agtttaggatttgtttgacaag

SEQ ID NO: 112547 - DNA, 22 bp, Artificial Sequence
  Synthetic oligonucleotide; TTT chr11 5399647 5399668 5399652 5399647 -
aggatttgtttgacaagagcat

SEQ ID NO: 112548 - DNA, 22 bp, Artificial Sequence
  Synthetic oligonucleotide; TTA chr11 5399646 5399667 5399651 5399646 -
ggatttgtttgacaagagcatt

SEQ ID NO: 112549 - DNA, 22 bp, Artificial Sequence
  Synthetic oligonucleotide; TTT chr11 5399640 5399661 5399645 5399640 -
gtttgacaagagcattttagct

SEQ ID NO: 112550 - DNA, 22 bp, Artificial Sequence
  Synthetic oligonucleotide; TTG chr11 5399639 5399660 5399644 5399639 -
tttgacaagagcattttagctt

SEQ ID NO: 112551 - DNA, 22 bp, Artificial Sequence
  Synthetic oligonucleotide; TTT chr11 5399636 5399657 5399641 5399636 -
gacaagagcattttagcttgaa

SEQ ID NO: 112552 - DNA, 22 bp, Artificial Sequence
  Synthetic oligonucleotide; TTG chr11 5399635 5399656 5399640 5399635 -
acaagagcattttagcttgaaa

SEQ ID NO: 112553 - DNA, 22 bp, Artificial Sequence
  Synthetic oligonucleotide; TTT chr11 5399623 5399644 5399628 5399623 -
tagcttgaaaggttacaaaagg

SEQ ID NO: 112554 - DNA, 22 bp, Artificial Sequence
  Synthetic oligonucleotide; TTT chr11 5399622 5399643 5399627 5399622 -
agcttgaaaggttacaaaaggg

SEQ ID NO: 112555 - DNA, 22 bp, Artificial Sequence
  Synthetic oligonucleotide; TTA chr11 5399621 5399642 5399626 5399621 -
gcttgaaaggttacaaaaggga

SEQ ID NO: 112556 - DNA, 22 bp, Artificial Sequence
  Synthetic oligonucleotide; CTT chr11 5399617 5399638 5399622 5399617 -
gaaaggttacaaaagggatcat

SEQ ID NO: 112557 - DNA, 22 bp, Artificial Sequence
  Synthetic oligonucleotide; TTG chr11 5399616 5399637 5399621 5399616 -
aaaggttacaaaagggatcatg

SEQ ID NO: 112558 - DNA, 22 bp, Artificial Sequence
  Synthetic oligonucleotide; TTA chr11 5399608 5399629 5399613 5399608 -
caaaagggatcatgtagtctat

SEQ ID NO: 112559 - DNA, 22 bp, Artificial Sequence
  Synthetic oligonucleotide; CTA chr11 5399587 5399608 5399592 5399587 -
tagcccagtataataggacaca

SEQ ID NO: 112560 - DNA, 22 bp, Artificial Sequence
  Synthetic oligonucleotide; CTG chr11 5399524 5399545 5399529 5399524 -
tacccctggagctggacagaat

SEQ ID NO: 112561 - DNA, 22 bp, Artificial Sequence
  Synthetic oligonucleotide; CTG chr11 5399516 5399537 5399521 5399516 -
gagctggacagaattggaggtg

SEQ ID NO: 112562 - DNA, 22 bp, Artificial Sequence
  Synthetic oligonucleotide; CTG chr11 5399510 5399531 5399515 5399510 -
gacagaattggaggtgaatctt

SEQ ID NO: 112563 - DNA, 22 bp, Artificial Sequence
  Synthetic oligonucleotide; TTG chr11 5399500 5399521 5399505 5399500 -
gaggtgaatcttatgttcggta

SEQ ID NO: 112564 - DNA, 22 bp, Artificial Sequence
  Synthetic oligonucleotide; CTT chr11 5399488 5399509 5399493 5399488 -
atgttcggtataactttacgta

SEQ ID NO: 112565 - DNA, 22 bp, Artificial Sequence
  Synthetic oligonucleotide; TTA chr11 5399487 5399508 5399492 5399487 -
tgttcggtataactttacgtac

SEQ ID NO: 112566 - DNA, 22 bp, Artificial Sequence
  Synthetic oligonucleotide; TTC chr11 5399482 5399503 5399487 5399482 -
ggtataactttacgtactttac

SEQ ID NO: 112567 - DNA, 22 bp, Artificial Sequence
  Synthetic oligonucleotide; CTT chr11 5399472 5399493 5399477 5399472 -
tacgtactttacctttgtgcac

SEQ ID NO: 112568 - DNA, 22 bp, Artificial Sequence
  Synthetic oligonucleotide; TTT chr11 5399471 5399492 5399476 5399471 -
acgtactttacctttgtgcaca

SEQ ID NO: 112569 - DNA, 22 bp, Artificial Sequence
  Synthetic oligonucleotide; TTA chr11 5399470 5399491 5399475 5399470 -
cgtactttacctttgtgcacat

SEQ ID NO: 112570 - DNA, 22 bp, Artificial Sequence
  Synthetic oligonucleotide; CTT chr11 5399463 5399484 5399468 5399463 -
tacctttgtgcacattagtatc

SEQ ID NO: 112571 - DNA, 22 bp, Artificial Sequence
  Synthetic oligonucleotide; TTT chr11 5399462 5399483 5399467 5399462 -
acctttgtgcacattagtatct

SEQ ID NO: 112572 - DNA, 22 bp, Artificial Sequence
  Synthetic oligonucleotide; TTA chr11 5399461 5399482 5399466 5399461 -
cctttgtgcacattagtatctt

SEQ ID NO: 112573 - DNA, 22 bp, Artificial Sequence
  Synthetic oligonucleotide; CTT chr11 5399457 5399478 5399462 5399457 -
tgtgcacattagtatctttgtt

SEQ ID NO: 112574 - DNA, 22 bp, Artificial Sequence
  Synthetic oligonucleotide; TTT chr11 5399456 5399477 5399461 5399456 -
gtgcacattagtatctttgttt

SEQ ID NO: 112575 - DNA, 22 bp, Artificial Sequence
  Synthetic oligonucleotide; TTG chr11 5399455 5399476 5399460 5399455 -
tgcacattagtatctttgtttt

SEQ ID NO: 112576 - DNA, 22 bp, Artificial Sequence
  Synthetic oligonucleotide; TTA chr11 5399446 5399467 5399451 5399446 -
gtatctttgtttttaaagataa

SEQ ID NO: 112577 - DNA, 22 bp, Artificial Sequence
  Synthetic oligonucleotide; CTT chr11 5399439 5399460 5399444 5399439 -
tgtttttaaagataaagatgtt

SEQ ID NO: 112578 - DNA, 22 bp, Artificial Sequence
  Synthetic oligonucleotide; TTT chr11 5399438 5399459 5399443 5399438 -
gtttttaaagataaagatgtta

SEQ ID NO: 112579 - DNA, 22 bp, Artificial Sequence
  Synthetic oligonucleotide; TTG chr11 5399437 5399458 5399442 5399437 -
tttttaaagataaagatgttaa

SEQ ID NO: 112580 - DNA, 22 bp, Artificial Sequence
  Synthetic oligonucleotide; TTT chr11 5399434 5399455 5399439 5399434 -
ttaaagataaagatgttaatac

SEQ ID NO: 112581 - DNA, 22 bp, Artificial Sequence
  Synthetic oligonucleotide; TTT chr11 5399433 5399454 5399438 5399433 -
taaagataaagatgttaatact

SEQ ID NO: 112582 - DNA, 22 bp, Artificial Sequence
  Synthetic oligonucleotide; TTT chr11 5399432 5399453 5399437 5399432 -
aaagataaagatgttaatactt

SEQ ID NO: 112583 - DNA, 22 bp, Artificial Sequence
  Synthetic oligonucleotide; TTA chr11 5399431 5399452 5399436 5399431 -
aagataaagatgttaatactta

SEQ ID NO: 112584 - DNA, 22 bp, Artificial Sequence
  Synthetic oligonucleotide; TTA chr11 5399416 5399437 5399421 5399416 -
atacttacctcagggactggct

SEQ ID NO: 112585 - DNA, 22 bp, Artificial Sequence
  Synthetic oligonucleotide; CTT chr11 5399410 5399431 5399415 5399410 -
acctcagggactggctctaaat

SEQ ID NO: 112586 - DNA, 22 bp, Artificial Sequence
  Synthetic oligonucleotide; TTA chr11 5399409 5399430 5399414 5399409 -
cctcagggactggctctaaata

SEQ ID NO: 112587 - DNA, 22 bp, Artificial Sequence
  Synthetic oligonucleotide; CTC chr11 5399405 5399426 5399410 5399405 -
agggactggctctaaatattta

SEQ ID NO: 112588 - DNA, 22 bp, Artificial Sequence
  Synthetic oligonucleotide; CTG chr11 5399397 5399418 5399402 5399397 -
gctctaaatatttaatgtgagc

SEQ ID NO: 112589 - DNA, 22 bp, Artificial Sequence
  Synthetic oligonucleotide; CTC chr11 5399393 5399414 5399398 5399393 -
taaatatttaatgtgagccttt

SEQ ID NO: 112590 - DNA, 22 bp, Artificial Sequence
  Synthetic oligonucleotide; CTA chr11 5399391 5399412 5399396 5399391 -
aatatttaatgtgagcctttag

SEQ ID NO: 112591 - DNA, 22 bp, Artificial Sequence
  Synthetic oligonucleotide; TTT chr11 5399384 5399405 5399389 5399384 -
aatgtgagcctttagcaaccag

SEQ ID NO: 112592 - DNA, 22 bp, Artificial Sequence
  Synthetic oligonucleotide; TTA chr11 5399383 5399404 5399388 5399383 -
atgtgagcctttagcaaccagt

SEQ ID NO: 112593 - DNA, 22 bp, Artificial Sequence
  Synthetic oligonucleotide; CTT chr11 5399372 5399393 5399377 5399372 -
tagcaaccagtgaatgttaata

SEQ ID NO: 112594 - DNA, 22 bp, Artificial Sequence
  Synthetic oligonucleotide; TTT chr11 5399371 5399392 5399376 5399371 -
agcaaccagtgaatgttaatat

SEQ ID NO: 112595 - DNA, 22 bp, Artificial Sequence
  Synthetic oligonucleotide; TTA chr11 5399370 5399391 5399375 5399370 -
gcaaccagtgaatgttaatatt

SEQ ID NO: 112596 - DNA, 22 bp, Artificial Sequence
  Synthetic oligonucleotide; TTA chr11 5399353 5399374 5399358 5399353 -
atattctctccactctatatct

SEQ ID NO: 112597 - DNA, 22 bp, Artificial Sequence
  Synthetic oligonucleotide; TTC chr11 5399347 5399368 5399352 5399347 -
tctccactctatatctctttca

SEQ ID NO: 112598 - DNA, 22 bp, Artificial Sequence
  Synthetic oligonucleotide; CTC chr11 5399345 5399366 5399350 5399345 -
tccactctatatctctttcagg

SEQ ID NO: 112599 - DNA, 22 bp, Artificial Sequence
  Synthetic oligonucleotide; CTC chr11 5399343 5399364 5399348 5399343 -
cactctatatctctttcaggaa

SEQ ID NO: 112600 - DNA, 22 bp, Artificial Sequence
  Synthetic oligonucleotide; CTC chr11 5399338 5399359 5399343 5399338 -
tatatctctttcaggaattctc

SEQ ID NO: 112601 - DNA, 22 bp, Artificial Sequence
  Synthetic oligonucleotide; CTA chr11 5399336 5399357 5399341 5399336 -
tatctctttcaggaattctcag

SEQ ID NO: 112602 - DNA, 22 bp, Artificial Sequence
  Synthetic oligonucleotide; CTC chr11 5399330 5399351 5399335 5399330 -
tttcaggaattctcaggagtca

SEQ ID NO: 112603 - DNA, 22 bp, Artificial Sequence
  Synthetic oligonucleotide; CTT chr11 5399328 5399349 5399333 5399328 -
tcaggaattctcaggagtcaat

SEQ ID NO: 112604 - DNA, 22 bp, Artificial Sequence
  Synthetic oligonucleotide; TTT chr11 5399327 5399348 5399332 5399327 -
caggaattctcaggagtcaatc

SEQ ID NO: 112605 - DNA, 22 bp, Artificial Sequence
  Synthetic oligonucleotide; TTC chr11 5399326 5399347 5399331 5399326 -
aggaattctcaggagtcaatca

SEQ ID NO: 112606 - DNA, 22 bp, Artificial Sequence
  Synthetic oligonucleotide; TTC chr11 5399318 5399339 5399323 5399318 -
tcaggagtcaatcacagtcagc

SEQ ID NO: 112607 - DNA, 22 bp, Artificial Sequence
  Synthetic oligonucleotide; CTC chr11 5399316 5399337 5399321 5399316 -
aggagtcaatcacagtcagctt

SEQ ID NO: 112608 - DNA, 22 bp, Artificial Sequence
  Synthetic oligonucleotide; CTT chr11 5399294 5399315 5399299 5399294 -
atttccaactttttattaataa

SEQ ID NO: 112609 - DNA, 22 bp, Artificial Sequence
  Synthetic oligonucleotide; TTA chr11 5399293 5399314 5399298 5399293 -
tttccaactttttattaataat

SEQ ID NO: 112610 - DNA, 22 bp, Artificial Sequence
  Synthetic oligonucleotide; TTT chr11 5399290 5399311 5399295 5399290 -
ccaactttttattaataattgt

SEQ ID NO: 112611 - DNA, 22 bp, Artificial Sequence
  Synthetic oligonucleotide; TTC chr11 5399289 5399310 5399294 5399289 -
caactttttattaataattgtc

SEQ ID NO: 112612 - DNA, 22 bp, Artificial Sequence
  Synthetic oligonucleotide; CTT chr11 5399283 5399304 5399288 5399283 -
tttattaataattgtctttcct

SEQ ID NO: 112613 - DNA, 22 bp, Artificial Sequence
  Synthetic oligonucleotide; TTT chr11 5399282 5399303 5399287 5399282 -
ttattaataattgtctttcctt

SEQ ID NO: 112614 - DNA, 22 bp, Artificial Sequence
  Synthetic oligonucleotide; TTT chr11 5399281 5399302 5399286 5399281 -
tattaataattgtctttccttg

SEQ ID NO: 112615 - DNA, 22 bp, Artificial Sequence
  Synthetic oligonucleotide; TTT chr11 5399280 5399301 5399285 5399280 -
attaataattgtctttccttgt

SEQ ID NO: 112616 - DNA, 22 bp, Artificial Sequence
  Synthetic oligonucleotide; TTA chr11 5399279 5399300 5399284 5399279 -
ttaataattgtctttccttgtt

SEQ ID NO: 112617 - DNA, 22 bp, Artificial Sequence
  Synthetic oligonucleotide; TTA chr11 5399276 5399297 5399281 5399276 -
ataattgtctttccttgttatt

SEQ ID NO: 112618 - DNA, 22 bp, Artificial Sequence
  Synthetic oligonucleotide; TTG chr11 5399269 5399290 5399274 5399269 -
tctttccttgttattggctcac

SEQ ID NO: 112619 - DNA, 22 bp, Artificial Sequence
  Synthetic oligonucleotide; CTT chr11 5399265 5399286 5399270 5399265 -
tccttgttattggctcactgat

SEQ ID NO: 112620 - DNA, 22 bp, Artificial Sequence
  Synthetic oligonucleotide; TTT chr11 5399264 5399285 5399269 5399264 -
ccttgttattggctcactgata

SEQ ID NO: 112621 - DNA, 22 bp, Artificial Sequence
  Synthetic oligonucleotide; TTC chr11 5399263 5399284 5399268 5399263 -
cttgttattggctcactgatac

SEQ ID NO: 112622 - DNA, 22 bp, Artificial Sequence
  Synthetic oligonucleotide; CTT chr11 5399260 5399281 5399265 5399260 -
gttattggctcactgatactca

SEQ ID NO: 112623 - DNA, 22 bp, Artificial Sequence
  Synthetic oligonucleotide; TTG chr11 5399259 5399280 5399264 5399259 -
ttattggctcactgatactcag

SEQ ID NO: 112624 - DNA, 22 bp, Artificial Sequence
  Synthetic oligonucleotide; TTA chr11 5399256 5399277 5399261 5399256 -
ttggctcactgatactcagacc

SEQ ID NO: 112625 - DNA, 22 bp, Artificial Sequence
  Synthetic oligonucleotide; TTG chr11 5399253 5399274 5399258 5399253 -
gctcactgatactcagaccaca

SEQ ID NO: 112626 - DNA, 22 bp, Artificial Sequence
  Synthetic oligonucleotide; CTC chr11 5399249 5399270 5399254 5399249 -
actgatactcagaccacatctg

SEQ ID NO: 112627 - DNA, 22 bp, Artificial Sequence
  Synthetic oligonucleotide; CTG chr11 5399245 5399266 5399250 5399245 -
atactcagaccacatctgtgag

SEQ ID NO: 112628 - DNA, 22 bp, Artificial Sequence
  Synthetic oligonucleotide; CTC chr11 5399239 5399260 5399244 5399239 -
agaccacatctgtgaggtaaac

SEQ ID NO: 112629 - DNA, 22 bp, Artificial Sequence
  Synthetic oligonucleotide; CTG chr11 5399227 5399248 5399232 5399227 -
tgaggtaaacaaggagacaaga

SEQ ID NO: 112630 - DNA, 22 bp, Artificial Sequence
  Synthetic oligonucleotide; TTT chr11 5399201 5399222 5399206 5399201 -
cccacttaatagatgagcatat

SEQ ID NO: 112631 - DNA, 22 bp, Artificial Sequence
  Synthetic oligonucleotide; TTC chr11 5399200 5399221 5399205 5399200 -
ccacttaatagatgagcatata

SEQ ID NO: 112632 - DNA, 22 bp, Artificial Sequence
  Synthetic oligonucleotide; CTT chr11 5399194 5399215 5399199 5399194 -
aatagatgagcatataaaccag

SEQ ID NO: 112633 - DNA, 22 bp, Artificial Sequence
  Synthetic oligonucleotide; TTA chr11 5399193 5399214 5399198 5399193 -
atagatgagcatataaaccaga

SEQ ID NO: 112634 - DNA, 22 bp, Artificial Sequence
  Synthetic oligonucleotide; TTT chr11 5399160 5399181 5399165 5399160 -
tgtgagtaacccaagataatat

SEQ ID NO: 112635 - DNA, 22 bp, Artificial Sequence
  Synthetic oligonucleotide; TTT chr11 5399159 5399180 5399164 5399159 -
gtgagtaacccaagataatatg

SEQ ID NO: 112636 - DNA, 22 bp, Artificial Sequence
  Synthetic oligonucleotide; TTG chr11 5399158 5399179 5399163 5399158 -
tgagtaacccaagataatatga

SEQ ID NO: 112637 - DNA, 22 bp, Artificial Sequence
  Synthetic oligonucleotide; CTA chr11 5399125 5399146 5399130 5399125 -
tttcaagaattcatgatgtgct

SEQ ID NO: 112638 - DNA, 22 bp, Artificial Sequence
  Synthetic oligonucleotide; TTT chr11 5399122 5399143 5399127 5399122 -
caagaattcatgatgtgctctg

SEQ ID NO: 112639 - DNA, 22 bp, Artificial Sequence
  Synthetic oligonucleotide; TTC chr11 5399121 5399142 5399126 5399121 -
aagaattcatgatgtgctctgg

SEQ ID NO: 112640 - DNA, 22 bp, Artificial Sequence
  Synthetic oligonucleotide; TTC chr11 5399113 5399134 5399118 5399113 -
atgatgtgctctggtgtttttg

SEQ ID NO: 112641 - DNA, 22 bp, Artificial Sequence
  Synthetic oligonucleotide; CTC chr11 5399102 5399123 5399107 5399102 -
tggtgtttttgttttgttttcc

SEQ ID NO: 112642 - DNA, 22 bp, Artificial Sequence
  Synthetic oligonucleotide; CTG chr11 5399100 5399121 5399105 5399100 -
gtgtttttgttttgttttccat

SEQ ID NO: 112643 - DNA, 22 bp, Artificial Sequence
  Synthetic oligonucleotide; TTT chr11 5399094 5399115 5399099 5399094 -
ttgttttgttttccatctgcca

SEQ ID NO: 112644 - DNA, 22 bp, Artificial Sequence
  Synthetic oligonucleotide; TTT chr11 5399093 5399114 5399098 5399093 -
tgttttgttttccatctgccac

SEQ ID NO: 112645 - DNA, 22 bp, Artificial Sequence
  Synthetic oligonucleotide; TTT chr11 5399092 5399113 5399097 5399092 -
gttttgttttccatctgccacc

SEQ ID NO: 112646 - DNA, 22 bp, Artificial Sequence
  Synthetic oligonucleotide; TTG chr11 5399091 5399112 5399096 5399091 -
ttttgttttccatctgccacca

SEQ ID NO: 112647 - DNA, 22 bp, Artificial Sequence
  Synthetic oligonucleotide; TTT chr11 5399088 5399109 5399093 5399088 -
tgttttccatctgccaccaatt

SEQ ID NO: 112648 - DNA, 22 bp, Artificial Sequence
  Synthetic oligonucleotide; TTT chr11 5399087 5399108 5399092 5399087 -
gttttccatctgccaccaattt

SEQ ID NO: 112649 - DNA, 22 bp, Artificial Sequence
  Synthetic oligonucleotide; TTG chr11 5399086 5399107 5399091 5399086 -
ttttccatctgccaccaattta

SEQ ID NO: 112650 - DNA, 22 bp, Artificial Sequence
  Synthetic oligonucleotide; TTT chr11 5399083 5399104 5399088 5399083 -
tccatctgccaccaatttagga

SEQ ID NO: 112651 - DNA, 22 bp, Artificial Sequence
  Synthetic oligonucleotide; TTT chr11 5399082 5399103 5399087 5399082 -
ccatctgccaccaatttaggat

SEQ ID NO: 112652 - DNA, 22 bp, Artificial Sequence
  Synthetic oligonucleotide; TTC chr11 5399081 5399102 5399086 5399081 -
catctgccaccaatttaggatg

SEQ ID NO: 112653 - DNA, 22 bp, Artificial Sequence
  Synthetic oligonucleotide; CTG chr11 5399075 5399096 5399080 5399075 -
ccaccaatttaggatgtgattc

SEQ ID NO: 112654 - DNA, 22 bp, Artificial Sequence
  Synthetic oligonucleotide; TTT chr11 5399065 5399086 5399070 5399065 -
aggatgtgattcctctccttct

SEQ ID NO: 112655 - DNA, 22 bp, Artificial Sequence
  Synthetic oligonucleotide; TTA chr11 5399064 5399085 5399069 5399064 -
ggatgtgattcctctccttctg

SEQ ID NO: 112656 - DNA, 22 bp, Artificial Sequence
  Synthetic oligonucleotide; TTC chr11 5399053 5399074 5399058 5399053 -
ctctccttctgccagacaggtt

SEQ ID NO: 112657 - DNA, 22 bp, Artificial Sequence
  Synthetic oligonucleotide; CTC chr11 5399050 5399071 5399055 5399050 -
tccttctgccagacaggttcaa

SEQ ID NO: 112658 - DNA, 22 bp, Artificial Sequence
  Synthetic oligonucleotide; CTC chr11 5399048 5399069 5399053 5399048 -
cttctgccagacaggttcaaga

SEQ ID NO: 112659 - DNA, 22 bp, Artificial Sequence
  Synthetic oligonucleotide; CTT chr11 5399045 5399066 5399050 5399045 -
ctgccagacaggttcaagaagc

SEQ ID NO: 112660 - DNA, 22 bp, Artificial Sequence
  Synthetic oligonucleotide; TTC chr11 5399044 5399065 5399049 5399044 -
tgccagacaggttcaagaagct

SEQ ID NO: 112661 - DNA, 22 bp, Artificial Sequence
  Synthetic oligonucleotide; CTG chr11 5399042 5399063 5399047 5399042 -
ccagacaggttcaagaagctag

SEQ ID NO: 112662 - DNA, 22 bp, Artificial Sequence
  Synthetic oligonucleotide; TTC chr11 5399030 5399051 5399035 5399030 -
aagaagctagggaggtgactac

SEQ ID NO: 112663 - DNA, 22 bp, Artificial Sequence
  Synthetic oligonucleotide; CTA chr11 5399021 5399042 5399026 5399021 -
gggaggtgactactgtcttagg

SEQ ID NO: 112664 - DNA, 22 bp, Artificial Sequence
  Synthetic oligonucleotide; CTA chr11 5399009 5399030 5399014 5399009 -
ctgtcttaggaaaaatgctaag

SEQ ID NO: 112665 - DNA, 22 bp, Artificial Sequence
  Synthetic oligonucleotide; CTG chr11 5399006 5399027 5399011 5399006 -
tcttaggaaaaatgctaagggc

SEQ ID NO: 112666 - DNA, 22 bp, Artificial Sequence
  Synthetic oligonucleotide; CTT chr11 5399002 5399023 5399007 5399002 -
aggaaaaatgctaagggcttca

SEQ ID NO: 112667 - DNA, 22 bp, Artificial Sequence
  Synthetic oligonucleotide; TTA chr11 5399001 5399022 5399006 5399001 -
ggaaaaatgctaagggcttcac

SEQ ID NO: 112668 - DNA, 22 bp, Artificial Sequence
  Synthetic oligonucleotide; CTA chr11 5398989 5399010 5398994 5398989 -
agggcttcacactgtgacatgg

SEQ ID NO: 112669 - DNA, 22 bp, Artificial Sequence
  Synthetic oligonucleotide; CTT chr11 5398982 5399003 5398987 5398982 -
cacactgtgacatggggttggg

SEQ ID NO: 112670 - DNA, 22 bp, Artificial Sequence
  Synthetic oligonucleotide; TTC chr11 5398981 5399002 5398986 5398981 -
acactgtgacatggggttggga

SEQ ID NO: 112671 - DNA, 22 bp, Artificial Sequence
  Synthetic oligonucleotide; CTG chr11 5398975 5398996 5398980 5398975 -
tgacatggggttgggagtcctg

SEQ ID NO: 112672 - DNA, 22 bp, Artificial Sequence
  Synthetic oligonucleotide; TTG chr11 5398962 5398983 5398967 5398962 -
ggagtcctgaatgctgcttcag

SEQ ID NO: 112673 - DNA, 22 bp, Artificial Sequence
  Synthetic oligonucleotide; CTG chr11 5398953 5398974 5398958 5398953 -
aatgctgcttcagaaggcaggg

SEQ ID NO: 112674 - DNA, 22 bp, Artificial Sequence
  Synthetic oligonucleotide; CTG chr11 5398946 5398967 5398951 5398946 -
cttcagaaggcagggcttgggg

SEQ ID NO: 112675 - DNA, 22 bp, Artificial Sequence
  Synthetic oligonucleotide; CTT chr11 5398943 5398964 5398948 5398943 -
cagaaggcagggcttggggatt

SEQ ID NO: 112676 - DNA, 22 bp, Artificial Sequence
  Synthetic oligonucleotide; TTC chr11 5398942 5398963 5398947 5398942 -
agaaggcagggcttggggattg

SEQ ID NO: 112677 - DNA, 22 bp, Artificial Sequence
  Synthetic oligonucleotide; CTT chr11 5398928 5398949 5398933 5398928 -
ggggattgtattagttcattct

SEQ ID NO: 112678 - DNA, 22 bp, Artificial Sequence
  Synthetic oligonucleotide; TTG chr11 5398927 5398948 5398932 5398927 -
gggattgtattagttcattctc

SEQ ID NO: 112679 - DNA, 22 bp, Artificial Sequence
  Synthetic oligonucleotide; TTG chr11 5398920 5398941 5398925 5398920 -
tattagttcattctcacactgc

SEQ ID NO: 112680 - DNA, 22 bp, Artificial Sequence
  Synthetic oligonucleotide; TTA chr11 5398915 5398936 5398920 5398915 -
gttcattctcacactgctctaa

SEQ ID NO: 112681 - DNA, 22 bp, Artificial Sequence
  Synthetic oligonucleotide; TTC chr11 5398911 5398932 5398916 5398911 -
attctcacactgctctaaagat

SEQ ID NO: 112682 - DNA, 22 bp, Artificial Sequence
  Synthetic oligonucleotide; TTC chr11 5398907 5398928 5398912 5398907 -
tcacactgctctaaagatacta

SEQ ID NO: 112683 - DNA, 22 bp, Artificial Sequence
  Synthetic oligonucleotide; CTC chr11 5398905 5398926 5398910 5398905 -
acactgctctaaagatactacc

SEQ ID NO: 112684 - DNA, 22 bp, Artificial Sequence
  Synthetic oligonucleotide; CTG chr11 5398899 5398920 5398904 5398899 -
ctctaaagatactacctgagac

SEQ ID NO: 112685 - DNA, 22 bp, Artificial Sequence
  Synthetic oligonucleotide; CTC chr11 5398896 5398917 5398901 5398896 -
taaagatactacctgagactgg

SEQ ID NO: 112686 - DNA, 22 bp, Artificial Sequence
  Synthetic oligonucleotide; CTA chr11 5398894 5398915 5398899 5398894 -
aagatactacctgagactgggt

SEQ ID NO: 112687 - DNA, 22 bp, Artificial Sequence
  Synthetic oligonucleotide; CTA chr11 5398885 5398906 5398890 5398885 -
cctgagactgggtaatttatta

SEQ ID NO: 112688 - DNA, 22 bp, Artificial Sequence
  Synthetic oligonucleotide; CTG chr11 5398881 5398902 5398886 5398881 -
agactgggtaatttattaacaa

SEQ ID NO: 112689 - DNA, 22 bp, Artificial Sequence
  Synthetic oligonucleotide; CTG chr11 5398875 5398896 5398880 5398875 -
ggtaatttattaacaaaggagg

SEQ ID NO: 112690 - DNA, 22 bp, Artificial Sequence
  Synthetic oligonucleotide; TTT chr11 5398867 5398888 5398872 5398867 -
attaacaaaggaggtttaattg

SEQ ID NO: 112691 - DNA, 22 bp, Artificial Sequence
  Synthetic oligonucleotide; TTA chr11 5398866 5398887 5398871 5398866 -
ttaacaaaggaggtttaattga

SEQ ID NO: 112692 - DNA, 22 bp, Artificial Sequence
  Synthetic oligonucleotide; TTA chr11 5398863 5398884 5398868 5398863 -
acaaaggaggtttaattgactc

SEQ ID NO: 112693 - DNA, 22 bp, Artificial Sequence
  Synthetic oligonucleotide; TTT chr11 5398850 5398871 5398855 5398850 -
aattgactcacatttccacata

SEQ ID NO: 112694 - DNA, 22 bp, Artificial Sequence
  Synthetic oligonucleotide; TTA chr11 5398849 5398870 5398854 5398849 -
attgactcacatttccacatag

SEQ ID NO: 112695 - DNA, 22 bp, Artificial Sequence
  Synthetic oligonucleotide; TTG chr11 5398845 5398866 5398850 5398845 -
actcacatttccacatagctgg

SEQ ID NO: 112696 - DNA, 22 bp, Artificial Sequence
  Synthetic oligonucleotide; CTC chr11 5398841 5398862 5398846 5398841 -
acatttccacatagctggggag

SEQ ID NO: 112697 - DNA, 22 bp, Artificial Sequence
  Synthetic oligonucleotide; TTT chr11 5398835 5398856 5398840 5398835 -
ccacatagctggggaggcctca

SEQ ID NO: 112698 - DNA, 22 bp, Artificial Sequence
  Synthetic oligonucleotide; TTC chr11 5398834 5398855 5398839 5398834 -
cacatagctggggaggcctcag

SEQ ID NO: 112699 - DNA, 22 bp, Artificial Sequence
  Synthetic oligonucleotide; CTG chr11 5398824 5398845 5398829 5398824 -
gggaggcctcaggaaacttaca

SEQ ID NO: 112700 - DNA, 22 bp, Artificial Sequence
  Synthetic oligonucleotide; CTC chr11 5398814 5398835 5398819 5398814 -
aggaaacttacaattatggcag

SEQ ID NO: 112701 - DNA, 22 bp, Artificial Sequence
  Synthetic oligonucleotide; CTT chr11 5398805 5398826 5398810 5398805 -
acaattatggcagaaggagaag

SEQ ID NO: 112702 - DNA, 22 bp, Artificial Sequence
  Synthetic oligonucleotide; TTA chr11 5398804 5398825 5398809 5398804 -
caattatggcagaaggagaagc

SEQ ID NO: 112703 - DNA, 22 bp, Artificial Sequence
  Synthetic oligonucleotide; TTA chr11 5398798 5398819 5398803 5398798 -
tggcagaaggagaagcaggcac

SEQ ID NO: 112704 - DNA, 22 bp, Artificial Sequence
  Synthetic oligonucleotide; CTT chr11 5398771 5398792 5398776 5398771 -
acttggtggcaggcaagagaga

SEQ ID NO: 112705 - DNA, 22 bp, Artificial Sequence
  Synthetic oligonucleotide; TTA chr11 5398770 5398791 5398775 5398770 -
cttggtggcaggcaagagagag

SEQ ID NO: 112706 - DNA, 22 bp, Artificial Sequence
  Synthetic oligonucleotide; CTT chr11 5398767 5398788 5398772 5398767 -
ggtggcaggcaagagagagtga

SEQ ID NO: 112707 - DNA, 22 bp, Artificial Sequence
  Synthetic oligonucleotide; TTG chr11 5398766 5398787 5398771 5398766 -
gtggcaggcaagagagagtgag

SEQ ID NO: 112708 - DNA, 22 bp, Artificial Sequence
  Synthetic oligonucleotide; CTG chr11 5398726 5398747 5398731 5398726 -
ccttataaaaccatcagatctc

SEQ ID NO: 112709 - DNA, 22 bp, Artificial Sequence
  Synthetic oligonucleotide; CTT chr11 5398722 5398743 5398727 5398722 -
ataaaaccatcagatctcatga

SEQ ID NO: 112710 - DNA, 22 bp, Artificial Sequence
  Synthetic oligonucleotide; TTA chr11 5398721 5398742 5398726 5398721 -
taaaaccatcagatctcatgaa

SEQ ID NO: 112711 - DNA, 22 bp, Artificial Sequence
  Synthetic oligonucleotide; CTC chr11 5398704 5398725 5398709 5398704 -
atgaaaactcactcagtatcac

SEQ ID NO: 112712 - DNA, 22 bp, Artificial Sequence
  Synthetic oligonucleotide; CTC chr11 5398694 5398715 5398699 5398694 -
actcagtatcacgagaactgca

SEQ ID NO: 112713 - DNA, 22 bp, Artificial Sequence
  Synthetic oligonucleotide; CTC chr11 5398690 5398711 5398695 5398690 -
agtatcacgagaactgcatggg

SEQ ID NO: 112714 - DNA, 22 bp, Artificial Sequence
  Synthetic oligonucleotide; CTG chr11 5398674 5398695 5398679 5398674 -
catgggggaaactgctcccatg

SEQ ID NO: 112715 - DNA, 22 bp, Artificial Sequence
  Synthetic oligonucleotide; CTG chr11 5398660 5398681 5398665 5398660 -
ctcccatgatccaataatctcc

SEQ ID NO: 112716 - DNA, 22 bp, Artificial Sequence
  Synthetic oligonucleotide; CTC chr11 5398657 5398678 5398662 5398657 -
ccatgatccaataatctcccac

SEQ ID NO: 112717 - DNA, 22 bp, Artificial Sequence
  Synthetic oligonucleotide; CTC chr11 5398639 5398660 5398644 5398639 -
ccacctggtccctcccccgaca

SEQ ID NO: 112718 - DNA, 22 bp, Artificial Sequence
  Synthetic oligonucleotide; CTG chr11 5398632 5398653 5398637 5398632 -
gtccctcccccgacatataggg

SEQ ID NO: 112719 - DNA, 22 bp, Artificial Sequence
  Synthetic oligonucleotide; CTC chr11 5398625 5398646 5398630 5398625 -
ccccgacatatagggattatgg

SEQ ID NO: 112720 - DNA, 22 bp, Artificial Sequence
  Synthetic oligonucleotide; TTA chr11 5398606 5398627 5398611 5398606 -
tggggattacaattcaatatga

SEQ ID NO: 112721 - DNA, 22 bp, Artificial Sequence
  Synthetic oligonucleotide; TTA chr11 5398597 5398618 5398602 5398597 -
caattcaatatgaaatttgggt

SEQ ID NO: 112722 - DNA, 22 bp, Artificial Sequence
  Synthetic oligonucleotide; TTC chr11 5398591 5398612 5398596 5398591 -
aatatgaaatttgggtggagac

SEQ ID NO: 112723 - DNA, 22 bp, Artificial Sequence
  Synthetic oligonucleotide; TTT chr11 5398579 5398600 5398584 5398579 -
gggtggagacacagagccaagc

SEQ ID NO: 112724 - DNA, 22 bp, Artificial Sequence
  Synthetic oligonucleotide; TTG chr11 5398578 5398599 5398583 5398578 -
ggtggagacacagagccaagcc

SEQ ID NO: 112725 - DNA, 22 bp, Artificial Sequence
  Synthetic oligonucleotide; CTT chr11 5398536 5398557 5398541 5398536 -
gtgcactcaccacaagtgaaac

SEQ ID NO: 112726 - DNA, 22 bp, Artificial Sequence
  Synthetic oligonucleotide; TTG chr11 5398535 5398556 5398540 5398535 -
tgcactcaccacaagtgaaact

SEQ ID NO: 112727 - DNA, 22 bp, Artificial Sequence
  Synthetic oligonucleotide; CTC chr11 5398528 5398549 5398533 5398528 -
accacaagtgaaactggcctct

SEQ ID NO: 112728 - DNA, 22 bp, Artificial Sequence
  Synthetic oligonucleotide; CTG chr11 5398512 5398533 5398517 5398512 -
gcctctgagcctcaggtgggat

SEQ ID NO: 112729 - DNA, 22 bp, Artificial Sequence
  Synthetic oligonucleotide; CTC chr11 5398507 5398528 5398512 5398507 -
tgagcctcaggtgggatgggga

SEQ ID NO: 112730 - DNA, 22 bp, Artificial Sequence
  Synthetic oligonucleotide; CTG chr11 5398505 5398526 5398510 5398505 -
agcctcaggtgggatggggaag

SEQ ID NO: 112731 - DNA, 22 bp, Artificial Sequence
  Synthetic oligonucleotide; CTC chr11 5398499 5398520 5398504 5398499 -
aggtgggatggggaagctcact

SEQ ID NO: 112732 - DNA, 22 bp, Artificial Sequence
  Synthetic oligonucleotide; CTC chr11 5398480 5398501 5398485 5398480 -
acttcagcaagtccctgccact

SEQ ID NO: 112733 - DNA, 22 bp, Artificial Sequence
  Synthetic oligonucleotide; CTT chr11 5398476 5398497 5398481 5398476 -
cagcaagtccctgccactgtgg

SEQ ID NO: 112734 - DNA, 22 bp, Artificial Sequence
  Synthetic oligonucleotide; TTC chr11 5398475 5398496 5398480 5398475 -
agcaagtccctgccactgtggc

SEQ ID NO: 112735 - DNA, 22 bp, Artificial Sequence
  Synthetic oligonucleotide; CTG chr11 5398463 5398484 5398468 5398463 -
ccactgtggcattcatatcttc

SEQ ID NO: 112736 - DNA, 22 bp, Artificial Sequence
  Synthetic oligonucleotide; CTG chr11 5398457 5398478 5398462 5398457 -
tggcattcatatcttcttagtc

SEQ ID NO: 112737 - DNA, 22 bp, Artificial Sequence
  Synthetic oligonucleotide; TTC chr11 5398449 5398470 5398454 5398449 -
atatcttcttagtcctggggct

SEQ ID NO: 112738 - DNA, 22 bp, Artificial Sequence
  Synthetic oligonucleotide; CTT chr11 5398442 5398463 5398447 5398442 -
cttagtcctggggctggaatgc

SEQ ID NO: 112739 - DNA, 22 bp, Artificial Sequence
  Synthetic oligonucleotide; TTC chr11 5398441 5398462 5398446 5398441 -
ttagtcctggggctggaatgct

SEQ ID NO: 112740 - DNA, 22 bp, Artificial Sequence
  Synthetic oligonucleotide; CTT chr11 5398439 5398460 5398444 5398439 -
agtcctggggctggaatgctgc

SEQ ID NO: 112741 - DNA, 22 bp, Artificial Sequence
  Synthetic oligonucleotide; TTA chr11 5398438 5398459 5398443 5398438 -
gtcctggggctggaatgctgcc

SEQ ID NO: 112742 - DNA, 22 bp, Artificial Sequence
  Synthetic oligonucleotide; CTG chr11 5398432 5398453 5398437 5398432 -
gggctggaatgctgcccatttt

SEQ ID NO: 112743 - DNA, 22 bp, Artificial Sequence
  Synthetic oligonucleotide; CTG chr11 5398426 5398447 5398431 5398426 -
gaatgctgcccattttttgaaa

SEQ ID NO: 112744 - DNA, 22 bp, Artificial Sequence
  Synthetic oligonucleotide; CTG chr11 5398418 5398439 5398423 5398418 -
cccattttttgaaaaagctgat

SEQ ID NO: 112745 - DNA, 22 bp, Artificial Sequence
  Synthetic oligonucleotide; TTT chr11 5398411 5398432 5398416 5398411 -
tttgaaaaagctgatcagagtc

SEQ ID NO: 112746 - DNA, 22 bp, Artificial Sequence
  Synthetic oligonucleotide; TTT chr11 5398410 5398431 5398415 5398410 -
ttgaaaaagctgatcagagtct

SEQ ID NO: 112747 - DNA, 22 bp, Artificial Sequence
  Synthetic oligonucleotide; TTT chr11 5398409 5398430 5398414 5398409 -
tgaaaaagctgatcagagtctc

SEQ ID NO: 112748 - DNA, 22 bp, Artificial Sequence
  Synthetic oligonucleotide; TTT chr11 5398408 5398429 5398413 5398408 -
gaaaaagctgatcagagtctct

SEQ ID NO: 112749 - DNA, 22 bp, Artificial Sequence
  Synthetic oligonucleotide; TTG chr11 5398407 5398428 5398412 5398407 -
aaaaagctgatcagagtctcta

SEQ ID NO: 112750 - DNA, 22 bp, Artificial Sequence
  Synthetic oligonucleotide; CTG chr11 5398398 5398419 5398403 5398398 -
atcagagtctctaggagtagag

SEQ ID NO: 112751 - DNA, 22 bp, Artificial Sequence
  Synthetic oligonucleotide; CTC chr11 5398387 5398408 5398392 5398387 -
taggagtagagtaatggggaga

SEQ ID NO: 112752 - DNA, 22 bp, Artificial Sequence
  Synthetic oligonucleotide; CTA chr11 5398385 5398406 5398390 5398385 -
ggagtagagtaatggggagaaa

SEQ ID NO: 112753 - DNA, 22 bp, Artificial Sequence
  Synthetic oligonucleotide; TTA chr11 5398359 5398380 5398364 5398359 -
ggttccctgaggagcaattacc

SEQ ID NO: 112754 - DNA, 22 bp, Artificial Sequence
  Synthetic oligonucleotide; TTC chr11 5398354 5398375 5398359 5398354 -
cctgaggagcaattacccaggt

SEQ ID NO: 112755 - DNA, 22 bp, Artificial Sequence
  Synthetic oligonucleotide; CTG chr11 5398350 5398371 5398355 5398350 -
aggagcaattacccaggtaatt

SEQ ID NO: 112756 - DNA, 22 bp, Artificial Sequence
  Synthetic oligonucleotide; TTA chr11 5398339 5398360 5398344 5398339 -
cccaggtaattacattagcctc

SEQ ID NO: 112757 - DNA, 22 bp, Artificial Sequence
  Synthetic oligonucleotide; TTA chr11 5398327 5398348 5398332 5398327 -
cattagcctctctcaatatcca

SEQ ID NO: 112758 - DNA, 22 bp, Artificial Sequence
  Synthetic oligonucleotide; TTA chr11 5398322 5398343 5398327 5398322 -
gcctctctcaatatccagagaa

SEQ ID NO: 112759 - DNA, 22 bp, Artificial Sequence
  Synthetic oligonucleotide; CTC chr11 5398317 5398338 5398322 5398317 -
tctcaatatccagagaacctaa

SEQ ID NO: 112760 - DNA, 22 bp, Artificial Sequence
  Synthetic oligonucleotide; CTC chr11 5398315 5398336 5398320 5398315 -
tcaatatccagagaacctaagg

SEQ ID NO: 112761 - DNA, 22 bp, Artificial Sequence
  Synthetic oligonucleotide; CTC chr11 5398313 5398334 5398318 5398313 -
aatatccagagaacctaaggga

SEQ ID NO: 112762 - DNA, 22 bp, Artificial Sequence
  Synthetic oligonucleotide; CTA chr11 5398296 5398317 5398301 5398296 -
agggaaacaagcaaagatatag

SEQ ID NO: 112763 - DNA, 22 bp, Artificial Sequence
  Synthetic oligonucleotide; CTT chr11 5398262 5398283 5398267 5398262 -
tgtgaaatgagtgtaatagtat

SEQ ID NO: 112764 - DNA, 22 bp, Artificial Sequence
  Synthetic oligonucleotide; TTT chr11 5398261 5398282 5398266 5398261 -
gtgaaatgagtgtaatagtatt

SEQ ID NO: 112765 - DNA, 22 bp, Artificial Sequence
  Synthetic oligonucleotide; TTG chr11 5398260 5398281 5398265 5398260 -
tgaaatgagtgtaatagtattt

SEQ ID NO: 112766 - DNA, 22 bp, Artificial Sequence
  Synthetic oligonucleotide; TTT chr11 5398238 5398259 5398243 5398238 -
atccagcatatttaaataacta

SEQ ID NO: 112767 - DNA, 22 bp, Artificial Sequence
  Synthetic oligonucleotide; TTA chr11 5398237 5398258 5398242 5398237 -
tccagcatatttaaataactaa

SEQ ID NO: 112768 - DNA, 22 bp, Artificial Sequence
  Synthetic oligonucleotide; TTT chr11 5398225 5398246 5398230 5398225 -
aaataactaatatatgtaaatt

SEQ ID NO: 112769 - DNA, 22 bp, Artificial Sequence
  Synthetic oligonucleotide; TTA chr11 5398224 5398245 5398229 5398224 -
aataactaatatatgtaaattt

SEQ ID NO: 112770 - DNA, 22 bp, Artificial Sequence
  Synthetic oligonucleotide; CTA chr11 5398216 5398237 5398221 5398216 -
atatatgtaaatttcttttttc

SEQ ID NO: 112771 - DNA, 22 bp, Artificial Sequence
  Synthetic oligonucleotide; TTT chr11 5398202 5398223 5398207 5398202 -
cttttttctaacttattttttg

SEQ ID NO: 112772 - DNA, 22 bp, Artificial Sequence
  Synthetic oligonucleotide; TTC chr11 5398201 5398222 5398206 5398201 -
ttttttctaacttattttttgt

SEQ ID NO: 112773 - DNA, 22 bp, Artificial Sequence
  Synthetic oligonucleotide; CTT chr11 5398199 5398220 5398204 5398199 -
ttttctaacttattttttgtta

SEQ ID NO: 112774 - DNA, 22 bp, Artificial Sequence
  Synthetic oligonucleotide; TTT chr11 5398198 5398219 5398203 5398198 -
tttctaacttattttttgttat

SEQ ID NO: 112775 - DNA, 22 bp, Artificial Sequence
  Synthetic oligonucleotide; TTT chr11 5398197 5398218 5398202 5398197 -
ttctaacttattttttgttata

SEQ ID NO: 112776 - DNA, 22 bp, Artificial Sequence
  Synthetic oligonucleotide; TTT chr11 5398196 5398217 5398201 5398196 -
tctaacttattttttgttatac

SEQ ID NO: 112777 - DNA, 22 bp, Artificial Sequence
  Synthetic oligonucleotide; TTT chr11 5398195 5398216 5398200 5398195 -
ctaacttattttttgttatact

SEQ ID NO: 112778 - DNA, 22 bp, Artificial Sequence
  Synthetic oligonucleotide; TTC chr11 5398194 5398215 5398199 5398194 -
taacttattttttgttatactt

SEQ ID NO: 112779 - DNA, 22 bp, Artificial Sequence
  Synthetic oligonucleotide; CTA chr11 5398192 5398213 5398197 5398192 -
acttattttttgttatactttt

SEQ ID NO: 112780 - DNA, 22 bp, Artificial Sequence
  Synthetic oligonucleotide; CTT chr11 5398188 5398209 5398193 5398188 -
attttttgttatacttttaagt

SEQ ID NO: 112781 - DNA, 22 bp, Artificial Sequence
  Synthetic oligonucleotide; TTA chr11 5398187 5398208 5398192 5398187 -
ttttttgttatacttttaagtt

SEQ ID NO: 112782 - DNA, 22 bp, Artificial Sequence
  Synthetic oligonucleotide; TTT chr11 5398184 5398205 5398189 5398184 -
tttgttatacttttaagtttta

SEQ ID NO: 112783 - DNA, 22 bp, Artificial Sequence
  Synthetic oligonucleotide; TTT chr11 5398183 5398204 5398188 5398183 -
ttgttatacttttaagttttag

SEQ ID NO: 112784 - DNA, 22 bp, Artificial Sequence
  Synthetic oligonucleotide; TTT chr11 5398182 5398203 5398187 5398182 -
tgttatacttttaagttttagg

SEQ ID NO: 112785 - DNA, 22 bp, Artificial Sequence
  Synthetic oligonucleotide; TTT chr11 5398181 5398202 5398186 5398181 -
gttatacttttaagttttaggg

SEQ ID NO: 112786 - DNA, 22 bp, Artificial Sequence
  Synthetic oligonucleotide; TTG chr11 5398180 5398201 5398185 5398180 -
ttatacttttaagttttagggt

SEQ ID NO: 112787 - DNA, 22 bp, Artificial Sequence
  Synthetic oligonucleotide; TTA chr11 5398177 5398198 5398182 5398177 -
tacttttaagttttagggtaca

SEQ ID NO: 112788 - DNA, 22 bp, Artificial Sequence
  Synthetic oligonucleotide; CTT chr11 5398172 5398193 5398177 5398172 -
ttaagttttagggtacatgtgc

SEQ ID NO: 112789 - DNA, 22 bp, Artificial Sequence
  Synthetic oligonucleotide; TTT chr11 5398171 5398192 5398176 5398171 -
taagttttagggtacatgtgca

SEQ ID NO: 112790 - DNA, 22 bp, Artificial Sequence
  Synthetic oligonucleotide; TTT chr11 5398170 5398191 5398175 5398170 -
aagttttagggtacatgtgcac

SEQ ID NO: 112791 - DNA, 22 bp, Artificial Sequence
  Synthetic oligonucleotide; TTA chr11 5398169 5398190 5398174 5398169 -
agttttagggtacatgtgcaca

SEQ ID NO: 112792 - DNA, 22 bp, Artificial Sequence
  Synthetic oligonucleotide; TTT chr11 5398164 5398185 5398169 5398164 -
tagggtacatgtgcacaaggtg

SEQ ID NO: 112793 - DNA, 22 bp, Artificial Sequence
  Synthetic oligonucleotide; TTT chr11 5398163 5398184 5398168 5398163 -
agggtacatgtgcacaaggtgc

SEQ ID NO: 112794 - DNA, 22 bp, Artificial Sequence
  Synthetic oligonucleotide; TTA chr11 5398162 5398183 5398167 5398162 -
gggtacatgtgcacaaggtgca

SEQ ID NO: 112795 - DNA, 22 bp, Artificial Sequence
  Synthetic oligonucleotide; TTA chr11 5398135 5398156 5398140 5398135 -
gttacatatgtatacatgtgcc

SEQ ID NO: 112796 - DNA, 22 bp, Artificial Sequence
  Synthetic oligonucleotide; TTA chr11 5398131 5398152 5398136 5398131 -
catatgtatacatgtgccatgt

SEQ ID NO: 112797 - DNA, 22 bp, Artificial Sequence
  Synthetic oligonucleotide; TTG chr11 5398107 5398128 5398112 5398107 -
gtgtgctgcacccattaactca

SEQ ID NO: 112798 - DNA, 22 bp, Artificial Sequence
  Synthetic oligonucleotide; CTG chr11 5398099 5398120 5398104 5398099 -
cacccattaactcaccatttaa

SEQ ID NO: 112799 - DNA, 22 bp, Artificial Sequence
  Synthetic oligonucleotide; TTA chr11 5398090 5398111 5398095 5398090 -
actcaccatttaacattaggta

SEQ ID NO: 112800 - DNA, 22 bp, Artificial Sequence
  Synthetic oligonucleotide; CTC chr11 5398086 5398107 5398091 5398086 -
accatttaacattaggtatatc

SEQ ID NO: 112801 - DNA, 22 bp, Artificial Sequence
  Synthetic oligonucleotide; TTT chr11 5398079 5398100 5398084 5398079 -
aacattaggtatatctcctaat

SEQ ID NO: 112802 - DNA, 22 bp, Artificial Sequence
  Synthetic oligonucleotide; TTA chr11 5398078 5398099 5398083 5398078 -
acattaggtatatctcctaatg

SEQ ID NO: 112803 - DNA, 22 bp, Artificial Sequence
  Synthetic oligonucleotide; TTA chr11 5398072 5398093 5398077 5398072 -
ggtatatctcctaatgctatcc

SEQ ID NO: 112804 - DNA, 22 bp, Artificial Sequence
  Synthetic oligonucleotide; CTC chr11 5398062 5398083 5398067 5398062 -
ctaatgctatccctgccccctc

SEQ ID NO: 112805 - DNA, 22 bp, Artificial Sequence
  Synthetic oligonucleotide; CTA chr11 5398059 5398080 5398064 5398059 -
atgctatccctgccccctcctc

SEQ ID NO: 112806 - DNA, 22 bp, Artificial Sequence
  Synthetic oligonucleotide; CTA chr11 5398053 5398074 5398058 5398053 -
tccctgccccctcctcccaccc

SEQ ID NO: 112807 - DNA, 22 bp, Artificial Sequence
  Synthetic oligonucleotide; CTG chr11 5398047 5398068 5398052 5398047 -
ccccctcctcccaccccacaac

SEQ ID NO: 112808 - DNA, 22 bp, Artificial Sequence
  Synthetic oligonucleotide; CTC chr11 5398040 5398061 5398045 5398040 -
ctcccaccccacaacaggcccc

SEQ ID NO: 112809 - DNA, 22 bp, Artificial Sequence
  Synthetic oligonucleotide; CTC chr11 5398037 5398058 5398042 5398037 -
ccaccccacaacaggccccggt

SEQ ID NO: 112810 - DNA, 22 bp, Artificial Sequence
  Synthetic oligonucleotide; TTC chr11 5398004 5398025 5398009 5398004 -
cccttcctgtgtccatgtgttc

SEQ ID NO: 112811 - DNA, 22 bp, Artificial Sequence
  Synthetic oligonucleotide; CTT chr11 5397999 5398020 5398004 5397999 -
cctgtgtccatgtgttctcatt

SEQ ID NO: 112812 - DNA, 22 bp, Artificial Sequence
  Synthetic oligonucleotide; TTC chr11 5397998 5398019 5398003 5397998 -
ctgtgtccatgtgttctcattg

SEQ ID NO: 112813 - DNA, 22 bp, Artificial Sequence
  Synthetic oligonucleotide; CTG chr11 5397995 5398016 5398000 5397995 -
tgtccatgtgttctcattgttc

SEQ ID NO: 112814 - DNA, 22 bp, Artificial Sequence
  Synthetic oligonucleotide; TTC chr11 5397982 5398003 5397987 5397982 -
tcattgttcagttcccacctat

SEQ ID NO: 112815 - DNA, 22 bp, Artificial Sequence
  Synthetic oligonucleotide; CTC chr11 5397980 5398001 5397985 5397980 -
attgttcagttcccacctatga

SEQ ID NO: 112816 - DNA, 22 bp, Artificial Sequence
  Synthetic oligonucleotide; TTG chr11 5397976 5397997 5397981 5397976 -
ttcagttcccacctatgagtga

SEQ ID NO: 112817 - DNA, 22 bp, Artificial Sequence
  Synthetic oligonucleotide; TTC chr11 5397973 5397994 5397978 5397973 -
agttcccacctatgagtgagaa

SEQ ID NO: 112818 - DNA, 22 bp, Artificial Sequence
  Synthetic oligonucleotide; TTC chr11 5397968 5397989 5397973 5397968 -
ccacctatgagtgagaacatgt

SEQ ID NO: 112819 - DNA, 22 bp, Artificial Sequence
  Synthetic oligonucleotide; CTA chr11 5397961 5397982 5397966 5397961 -
tgagtgagaacatgtggtgttt

SEQ ID NO: 112820 - DNA, 22 bp, Artificial Sequence
  Synthetic oligonucleotide; TTT chr11 5397939 5397960 5397944 5397939 -
ggctttttgtccttgtgatagt

SEQ ID NO: 112821 - DNA, 22 bp, Artificial Sequence
  Synthetic oligonucleotide; TTG chr11 5397938 5397959 5397943 5397938 -
gctttttgtccttgtgatagtt

SEQ ID NO: 112822 - DNA, 22 bp, Artificial Sequence
  Synthetic oligonucleotide; CTT chr11 5397934 5397955 5397939 5397934 -
tttgtccttgtgatagtttgct

SEQ ID NO: 112823 - DNA, 22 bp, Artificial Sequence
  Synthetic oligonucleotide; TTT chr11 5397933 5397954 5397938 5397933 -
ttgtccttgtgatagtttgctg

SEQ ID NO: 112824 - DNA, 22 bp, Artificial Sequence
  Synthetic oligonucleotide; TTT chr11 5397932 5397953 5397937 5397932 -
tgtccttgtgatagtttgctga

SEQ ID NO: 112825 - DNA, 22 bp, Artificial Sequence
  Synthetic oligonucleotide; TTT chr11 5397931 5397952 5397936 5397931 -
gtccttgtgatagtttgctgag

SEQ ID NO: 112826 - DNA, 22 bp, Artificial Sequence
  Synthetic oligonucleotide; TTG chr11 5397930 5397951 5397935 5397930 -
tccttgtgatagtttgctgaga

SEQ ID NO: 112827 - DNA, 22 bp, Artificial Sequence
  Synthetic oligonucleotide; CTT chr11 5397925 5397946 5397930 5397925 -
gtgatagtttgctgagaatgat

SEQ ID NO: 112828 - DNA, 22 bp, Artificial Sequence
  Synthetic oligonucleotide; TTG chr11 5397924 5397945 5397929 5397924 -
tgatagtttgctgagaatgatg

SEQ ID NO: 112829 - DNA, 22 bp, Artificial Sequence
  Synthetic oligonucleotide; TTT chr11 5397915 5397936 5397920 5397915 -
gctgagaatgatggtttccagc

SEQ ID NO: 112830 - DNA, 22 bp, Artificial Sequence
  Synthetic oligonucleotide; TTG chr11 5397914 5397935 5397919 5397914 -
ctgagaatgatggtttccagct

SEQ ID NO: 112831 - DNA, 22 bp, Artificial Sequence
  Synthetic oligonucleotide; CTG chr11 5397911 5397932 5397916 5397911 -
agaatgatggtttccagcttca

SEQ ID NO: 112832 - DNA, 22 bp, Artificial Sequence
  Synthetic oligonucleotide; TTT chr11 5397898 5397919 5397903 5397898 -
ccagcttcatccatgtccctac

SEQ ID NO: 112833 - DNA, 22 bp, Artificial Sequence
  Synthetic oligonucleotide; TTC chr11 5397897 5397918 5397902 5397897 -
cagcttcatccatgtccctaca

SEQ ID NO: 112834 - DNA, 22 bp, Artificial Sequence
  Synthetic oligonucleotide; CTT chr11 5397891 5397912 5397896 5397891 -
catccatgtccctacaaaggac

SEQ ID NO: 112835 - DNA, 22 bp, Artificial Sequence
  Synthetic oligonucleotide; TTC chr11 5397890 5397911 5397895 5397890 -
atccatgtccctacaaaggaca

SEQ ID NO: 112836 - DNA, 22 bp, Artificial Sequence
  Synthetic oligonucleotide; CTA chr11 5397877 5397898 5397882 5397877 -
caaaggacatgaactcatcatt

SEQ ID NO: 112837 - DNA, 22 bp, Artificial Sequence
  Synthetic oligonucleotide; CTC chr11 5397861 5397882 5397866 5397861 -
atcattttttatggctgcatag

SEQ ID NO: 112838 - DNA, 22 bp, Artificial Sequence
  Synthetic oligonucleotide; TTT chr11 5397854 5397875 5397859 5397854 -
tttatggctgcatagtattcca

SEQ ID NO: 112839 - DNA, 22 bp, Artificial Sequence
  Synthetic oligonucleotide; TTT chr11 5397853 5397874 5397858 5397853 -
ttatggctgcatagtattccat

SEQ ID NO: 112840 - DNA, 22 bp, Artificial Sequence
  Synthetic oligonucleotide; TTT chr11 5397852 5397873 5397857 5397852 -
tatggctgcatagtattccatg

SEQ ID NO: 112841 - DNA, 22 bp, Artificial Sequence
  Synthetic oligonucleotide; TTT chr11 5397851 5397872 5397856 5397851 -
atggctgcatagtattccatgg

SEQ ID NO: 112842 - DNA, 22 bp, Artificial Sequence
  Synthetic oligonucleotide; TTA chr11 5397850 5397871 5397855 5397850 -
tggctgcatagtattccatggt

SEQ ID NO: 112843 - DNA, 22 bp, Artificial Sequence
  Synthetic oligonucleotide; CTG chr11 5397844 5397865 5397849 5397844 -
catagtattccatggtgtatat

SEQ ID NO: 112844 - DNA, 22 bp, Artificial Sequence
  Synthetic oligonucleotide; TTC chr11 5397834 5397855 5397839 5397834 -
catggtgtatatgtgccacatt

SEQ ID NO: 112845 - DNA, 22 bp, Artificial Sequence
  Synthetic oligonucleotide; TTT chr11 5397811 5397832 5397816 5397811 -
tcttaatccagtctatcattgt

SEQ ID NO: 112846 - DNA, 22 bp, Artificial Sequence
  Synthetic oligonucleotide; TTT chr11 5397810 5397831 5397815 5397810 -
cttaatccagtctatcattgtt

SEQ ID NO: 112847 - DNA, 22 bp, Artificial Sequence
  Synthetic oligonucleotide; TTC chr11 5397809 5397830 5397814 5397809 -
ttaatccagtctatcattgttg

SEQ ID NO: 112848 - DNA, 22 bp, Artificial Sequence
  Synthetic oligonucleotide; CTT chr11 5397807 5397828 5397812 5397807 -
aatccagtctatcattgttgga

SEQ ID NO: 112849 - DNA, 22 bp, Artificial Sequence
  Synthetic oligonucleotide; TTA chr11 5397806 5397827 5397811 5397806 -
atccagtctatcattgttggac

SEQ ID NO: 112850 - DNA, 22 bp, Artificial Sequence
  Synthetic oligonucleotide; CTA chr11 5397796 5397817 5397801 5397796 -
tcattgttggacatttgggttg

SEQ ID NO: 112851 - DNA, 22 bp, Artificial Sequence
  Synthetic oligonucleotide; TTG chr11 5397790 5397811 5397795 5397790 -
ttggacatttgggttggttcca

SEQ ID NO: 112852 - DNA, 22 bp, Artificial Sequence
  Synthetic oligonucleotide; TTG chr11 5397787 5397808 5397792 5397787 -
gacatttgggttggttccaagt

SEQ ID NO: 112853 - DNA, 22 bp, Artificial Sequence
  Synthetic oligonucleotide; TTT chr11 5397780 5397801 5397785 5397780 -
gggttggttccaagtctttgct

SEQ ID NO: 112854 - DNA, 22 bp, Artificial Sequence
  Synthetic oligonucleotide; TTG chr11 5397779 5397800 5397784 5397779 -
ggttggttccaagtctttgcta

SEQ ID NO: 112855 - DNA, 22 bp, Artificial Sequence
  Synthetic oligonucleotide; TTG chr11 5397774 5397795 5397779 5397774 -
gttccaagtctttgctattgtg

SEQ ID NO: 112856 - DNA, 22 bp, Artificial Sequence
  Synthetic oligonucleotide; TTC chr11 5397770 5397791 5397775 5397770 -
caagtctttgctattgtgaata

SEQ ID NO: 112857 - DNA, 22 bp, Artificial Sequence
  Synthetic oligonucleotide; CTT chr11 5397762 5397783 5397767 5397762 -
tgctattgtgaatagtgccgca

SEQ ID NO: 112858 - DNA, 22 bp, Artificial Sequence
  Synthetic oligonucleotide; TTT chr11 5397761 5397782 5397766 5397761 -
gctattgtgaatagtgccgcaa

SEQ ID NO: 112859 - DNA, 22 bp, Artificial Sequence
  Synthetic oligonucleotide; TTG chr11 5397760 5397781 5397765 5397760 -
ctattgtgaatagtgccgcaat

SEQ ID NO: 112860 - DNA, 22 bp, Artificial Sequence
  Synthetic oligonucleotide; CTA chr11 5397757 5397778 5397762 5397757 -
ttgtgaatagtgccgcaataaa

SEQ ID NO: 112861 - DNA, 22 bp, Artificial Sequence
  Synthetic oligonucleotide; TTG chr11 5397754 5397775 5397759 5397754 -
tgaatagtgccgcaataaacat

SEQ ID NO: 112862 - DNA, 22 bp, Artificial Sequence
  Synthetic oligonucleotide; CTT chr11 5397715 5397736 5397720 5397715 -
tatagcagcatgatttataatc

SEQ ID NO: 112863 - DNA, 22 bp, Artificial Sequence
  Synthetic oligonucleotide; TTT chr11 5397714 5397735 5397719 5397714 -
atagcagcatgatttataatcc

SEQ ID NO: 112864 - DNA, 22 bp, Artificial Sequence
  Synthetic oligonucleotide; TTA chr11 5397713 5397734 5397718 5397713 -
tagcagcatgatttataatcct

SEQ ID NO: 112865 - DNA, 22 bp, Artificial Sequence
  Synthetic oligonucleotide; TTT chr11 5397699 5397720 5397704 5397699 -
ataatcctttgggtgtataccc

SEQ ID NO: 112866 - DNA, 22 bp, Artificial Sequence
  Synthetic oligonucleotide; TTA chr11 5397698 5397719 5397703 5397698 -
taatcctttgggtgtataccca

SEQ ID NO: 112867 - DNA, 22 bp, Artificial Sequence
  Synthetic oligonucleotide; CTT chr11 5397690 5397711 5397695 5397690 -
tgggtgtatacccagtaatggg

SEQ ID NO: 112868 - DNA, 22 bp, Artificial Sequence
  Synthetic oligonucleotide; TTT chr11 5397689 5397710 5397694 5397689 -
gggtgtatacccagtaatggga

SEQ ID NO: 112869 - DNA, 22 bp, Artificial Sequence
  Synthetic oligonucleotide; TTG chr11 5397688 5397709 5397693 5397688 -
ggtgtatacccagtaatgggat

SEQ ID NO: 112870 - DNA, 22 bp, Artificial Sequence
  Synthetic oligonucleotide; CTG chr11 5397661 5397682 5397666 5397661 -
ggtcaaatggtatttctagttc

SEQ ID NO: 112871 - DNA, 22 bp, Artificial Sequence
  Synthetic oligonucleotide; TTT chr11 5397646 5397667 5397651 5397646 -
ctagttctagatccctgaggaa

SEQ ID NO: 112872 - DNA, 22 bp, Artificial Sequence
  Synthetic oligonucleotide; TTC chr11 5397645 5397666 5397650 5397645 -
tagttctagatccctgaggaat

SEQ ID NO: 112873 - DNA, 22 bp, Artificial Sequence
  Synthetic oligonucleotide; CTA chr11 5397643 5397664 5397648 5397643 -
gttctagatccctgaggaatca

SEQ ID NO: 112874 - DNA, 22 bp, Artificial Sequence
  Synthetic oligonucleotide; TTC chr11 5397639 5397660 5397644 5397639 -
tagatccctgaggaatcaccac

SEQ ID NO: 112875 - DNA, 22 bp, Artificial Sequence
  Synthetic oligonucleotide; CTA chr11 5397637 5397658 5397642 5397637 -
gatccctgaggaatcaccacac

SEQ ID NO: 112876 - DNA, 22 bp, Artificial Sequence
  Synthetic oligonucleotide; CTG chr11 5397629 5397650 5397634 5397629 -
aggaatcaccacactgacttcc

SEQ ID NO: 112877 - DNA, 22 bp, Artificial Sequence
  Synthetic oligonucleotide; CTG chr11 5397613 5397634 5397618 5397613 -
acttccacaatgtttgaactag

SEQ ID NO: 112878 - DNA, 22 bp, Artificial Sequence
  Synthetic oligonucleotide; CTT chr11 5397609 5397630 5397614 5397609 -
ccacaatgtttgaactagttta

SEQ ID NO: 112879 - DNA, 22 bp, Artificial Sequence
  Synthetic oligonucleotide; TTC chr11 5397608 5397629 5397613 5397608 -
cacaatgtttgaactagtttac

SEQ ID NO: 112880 - DNA, 22 bp, Artificial Sequence
  Synthetic oligonucleotide; TTT chr11 5397598 5397619 5397603 5397598 -
gaactagtttacagtcccacca

SEQ ID NO: 112881 - DNA, 22 bp, Artificial Sequence
  Synthetic oligonucleotide; TTG chr11 5397597 5397618 5397602 5397597 -
aactagtttacagtcccaccaa

SEQ ID NO: 112882 - DNA, 22 bp, Artificial Sequence
  Synthetic oligonucleotide; CTA chr11 5397592 5397613 5397597 5397592 -
gtttacagtcccaccaacagtg

SEQ ID NO: 112883 - DNA, 22 bp, Artificial Sequence
  Synthetic oligonucleotide; TTT chr11 5397588 5397609 5397593 5397588 -
acagtcccaccaacagtgtaaa

SEQ ID NO: 112884 - DNA, 22 bp, Artificial Sequence
  Synthetic oligonucleotide; TTA chr11 5397587 5397608 5397592 5397587 -
cagtcccaccaacagtgtaaaa

SEQ ID NO: 112885 - DNA, 22 bp, Artificial Sequence
  Synthetic oligonucleotide; TTC chr11 5397559 5397580 5397564 5397559 -
ctatttctccacatcctctcca

SEQ ID NO: 112886 - DNA, 22 bp, Artificial Sequence
  Synthetic oligonucleotide; CTA chr11 5397556 5397577 5397561 5397556 -
tttctccacatcctctccagca

SEQ ID NO: 112887 - DNA, 22 bp, Artificial Sequence
  Synthetic oligonucleotide; TTT chr11 5397553 5397574 5397558 5397553 -
ctccacatcctctccagcacct

SEQ ID NO: 112888 - DNA, 22 bp, Artificial Sequence
  Synthetic oligonucleotide; TTC chr11 5397552 5397573 5397557 5397552 -
tccacatcctctccagcacctg

SEQ ID NO: 112889 - DNA, 22 bp, Artificial Sequence
  Synthetic oligonucleotide; CTC chr11 5397550 5397571 5397555 5397550 -
cacatcctctccagcacctgtt

SEQ ID NO: 112890 - DNA, 22 bp, Artificial Sequence
  Synthetic oligonucleotide; CTC chr11 5397541 5397562 5397546 5397541 -
tccagcacctgttgtttcctga

SEQ ID NO: 112891 - DNA, 22 bp, Artificial Sequence
  Synthetic oligonucleotide; CTC chr11 5397539 5397560 5397544 5397539 -
cagcacctgttgtttcctgact

SEQ ID NO: 112892 - DNA, 22 bp, Artificial Sequence
  Synthetic oligonucleotide; CTG chr11 5397530 5397551 5397535 5397530 -
ttgtttcctgactttttaatga

SEQ ID NO: 112893 - DNA, 22 bp, Artificial Sequence
  Synthetic oligonucleotide; TTG chr11 5397527 5397548 5397532 5397527 -
tttcctgactttttaatgattg

SEQ ID NO: 112894 - DNA, 22 bp, Artificial Sequence
  Synthetic oligonucleotide; TTT chr11 5397524 5397545 5397529 5397524 -
cctgactttttaatgattgcca

SEQ ID NO: 112895 - DNA, 22 bp, Artificial Sequence
  Synthetic oligonucleotide; TTC chr11 5397523 5397544 5397528 5397523 -
ctgactttttaatgattgccat

SEQ ID NO: 112896 - DNA, 22 bp, Artificial Sequence
  Synthetic oligonucleotide; CTG chr11 5397520 5397541 5397525 5397520 -
actttttaatgattgccattct

SEQ ID NO: 112897 - DNA, 22 bp, Artificial Sequence
  Synthetic oligonucleotide; CTT chr11 5397516 5397537 5397521 5397516 -
tttaatgattgccattctaact

SEQ ID NO: 112898 - DNA, 22 bp, Artificial Sequence
  Synthetic oligonucleotide; TTT chr11 5397515 5397536 5397520 5397515 -
ttaatgattgccattctaactg

SEQ ID NO: 112899 - DNA, 22 bp, Artificial Sequence
  Synthetic oligonucleotide; TTT chr11 5397514 5397535 5397519 5397514 -
taatgattgccattctaactgg

SEQ ID NO: 112900 - DNA, 22 bp, Artificial Sequence
  Synthetic oligonucleotide; TTT chr11 5397513 5397534 5397518 5397513 -
aatgattgccattctaactggt

SEQ ID NO: 112901 - DNA, 22 bp, Artificial Sequence
  Synthetic oligonucleotide; TTA chr11 5397512 5397533 5397517 5397512 -
atgattgccattctaactggtg

SEQ ID NO: 112902 - DNA, 22 bp, Artificial Sequence
  Synthetic oligonucleotide; TTG chr11 5397505 5397526 5397510 5397505 -
ccattctaactggtgtgagatg

SEQ ID NO: 112903 - DNA, 22 bp, Artificial Sequence
  Synthetic oligonucleotide; TTC chr11 5397499 5397520 5397504 5397499 -
taactggtgtgagatggtatct

SEQ ID NO: 112904 - DNA, 22 bp, Artificial Sequence
  Synthetic oligonucleotide; CTA chr11 5397497 5397518 5397502 5397497 -
actggtgtgagatggtatctca

SEQ ID NO: 112905 - DNA, 22 bp, Artificial Sequence
  Synthetic oligonucleotide; CTG chr11 5397493 5397514 5397498 5397493 -
gtgtgagatggtatctcattgt

SEQ ID NO: 112906 - DNA, 22 bp, Artificial Sequence
  Synthetic oligonucleotide; CTC chr11 5397476 5397497 5397481 5397476 -
attgtggttttgatttgcattt

SEQ ID NO: 112907 - DNA, 22 bp, Artificial Sequence
  Synthetic oligonucleotide; TTG chr11 5397472 5397493 5397477 5397472 -
tggttttgatttgcatttctct

SEQ ID NO: 112908 - DNA, 22 bp, Artificial Sequence
  Synthetic oligonucleotide; TTT chr11 5397466 5397487 5397471 5397466 -
tgatttgcatttctctgatggc

SEQ ID NO: 112909 - DNA, 22 bp, Artificial Sequence
  Synthetic oligonucleotide; TTT chr11 5397465 5397486 5397470 5397465 -
gatttgcatttctctgatggcc

SEQ ID NO: 112910 - DNA, 22 bp, Artificial Sequence
  Synthetic oligonucleotide; TTG chr11 5397464 5397485 5397469 5397464 -
atttgcatttctctgatggcca

SEQ ID NO: 112911 - DNA, 22 bp, Artificial Sequence
  Synthetic oligonucleotide; TTT chr11 5397460 5397481 5397465 5397460 -
gcatttctctgatggccagtga

SEQ ID NO: 112912 - DNA, 22 bp, Artificial Sequence
  Synthetic oligonucleotide; TTG chr11 5397459 5397480 5397464 5397459 -
catttctctgatggccagtgat

SEQ ID NO: 112913 - DNA, 22 bp, Artificial Sequence
  Synthetic oligonucleotide; TTT chr11 5397454 5397475 5397459 5397454 -
ctctgatggccagtgatgatga

SEQ ID NO: 112914 - DNA, 22 bp, Artificial Sequence
  Synthetic oligonucleotide; TTC chr11 5397453 5397474 5397458 5397453 -
tctgatggccagtgatgatgag

SEQ ID NO: 112915 - DNA, 22 bp, Artificial Sequence
  Synthetic oligonucleotide; CTC chr11 5397451 5397472 5397456 5397451 -
tgatggccagtgatgatgagca

SEQ ID NO: 112916 - DNA, 22 bp, Artificial Sequence
  Synthetic oligonucleotide; CTG chr11 5397449 5397470 5397454 5397449 -
atggccagtgatgatgagcatt

SEQ ID NO: 112917 - DNA, 22 bp, Artificial Sequence
  Synthetic oligonucleotide; TTT chr11 5397426 5397447 5397431 5397426 -
tttcatgtgtcttttggctgca

SEQ ID NO: 112918 - DNA, 22 bp, Artificial Sequence
  Synthetic oligonucleotide; TTT chr11 5397425 5397446 5397430 5397425 -
ttcatgtgtcttttggctgcat

SEQ ID NO: 112919 - DNA, 22 bp, Artificial Sequence
  Synthetic oligonucleotide; TTT chr11 5397424 5397445 5397429 5397424 -
tcatgtgtcttttggctgcata

SEQ ID NO: 112920 - DNA, 22 bp, Artificial Sequence
  Synthetic oligonucleotide; TTT chr11 5397423 5397444 5397428 5397423 -
catgtgtcttttggctgcataa

SEQ ID NO: 112921 - DNA, 22 bp, Artificial Sequence
  Synthetic oligonucleotide; TTC chr11 5397422 5397443 5397427 5397422 -
atgtgtcttttggctgcataaa

SEQ ID NO: 112922 - DNA, 22 bp, Artificial Sequence
  Synthetic oligonucleotide; CTT chr11 5397413 5397434 5397418 5397413 -
ttggctgcataaatgtcttctt

SEQ ID NO: 112923 - DNA, 22 bp, Artificial Sequence
  Synthetic oligonucleotide; TTT chr11 5397412 5397433 5397417 5397412 -
tggctgcataaatgtcttcttt

SEQ ID NO: 112924 - DNA, 22 bp, Artificial Sequence
  Synthetic oligonucleotide; TTT chr11 5397411 5397432 5397416 5397411 -
ggctgcataaatgtcttctttt

SEQ ID NO: 112925 - DNA, 22 bp, Artificial Sequence
  Synthetic oligonucleotide; TTG chr11 5397410 5397431 5397415 5397410 -
gctgcataaatgtcttcttttg

SEQ ID NO: 112926 - DNA, 22 bp, Artificial Sequence
  Synthetic oligonucleotide; CTG chr11 5397406 5397427 5397411 5397406 -
cataaatgtcttcttttgagaa

SEQ ID NO: 112927 - DNA, 22 bp, Artificial Sequence
  Synthetic oligonucleotide; CTT chr11 5397394 5397415 5397399 5397394 -
cttttgagaagtgtctgttcat

SEQ ID NO: 112928 - DNA, 22 bp, Artificial Sequence
  Synthetic oligonucleotide; TTC chr11 5397393 5397414 5397398 5397393 -
ttttgagaagtgtctgttcata

SEQ ID NO: 112929 - DNA, 22 bp, Artificial Sequence
  Synthetic oligonucleotide; CTT chr11 5397391 5397412 5397396 5397391 -
ttgagaagtgtctgttcatatc

SEQ ID NO: 112930 - DNA, 22 bp, Artificial Sequence
  Synthetic oligonucleotide; TTT chr11 5397390 5397411 5397395 5397390 -
tgagaagtgtctgttcatatcc

SEQ ID NO: 112931 - DNA, 22 bp, Artificial Sequence
  Synthetic oligonucleotide; TTT chr11 5397389 5397410 5397394 5397389 -
gagaagtgtctgttcatatcct

SEQ ID NO: 112932 - DNA, 22 bp, Artificial Sequence
  Synthetic oligonucleotide; TTG chr11 5397388 5397409 5397393 5397388 -
agaagtgtctgttcatatcctt

SEQ ID NO: 112933 - DNA, 22 bp, Artificial Sequence
  Synthetic oligonucleotide; CTG chr11 5397377 5397398 5397382 5397377 -
ttcatatcctttgcccactttt

SEQ ID NO: 112934 - DNA, 22 bp, Artificial Sequence
  Synthetic oligonucleotide; TTC chr11 5397374 5397395 5397379 5397374 -
atatcctttgcccactttttga

SEQ ID NO: 112935 - DNA, 22 bp, Artificial Sequence
  Synthetic oligonucleotide; CTT chr11 5397366 5397387 5397371 5397366 -
tgcccactttttgatggggttt

SEQ ID NO: 112936 - DNA, 22 bp, Artificial Sequence
  Synthetic oligonucleotide; TTT chr11 5397365 5397386 5397370 5397365 -
gcccactttttgatggggtttt

SEQ ID NO: 112937 - DNA, 22 bp, Artificial Sequence
  Synthetic oligonucleotide; TTG chr11 5397364 5397385 5397369 5397364 -
cccactttttgatggggttttt

SEQ ID NO: 112938 - DNA, 22 bp, Artificial Sequence
  Synthetic oligonucleotide; CTT chr11 5397357 5397378 5397362 5397357 -
tttgatggggttttttttctct

SEQ ID NO: 112939 - DNA, 22 bp, Artificial Sequence
  Synthetic oligonucleotide; TTT chr11 5397356 5397377 5397361 5397356 -
ttgatggggttttttttctctt

SEQ ID NO: 112940 - DNA, 22 bp, Artificial Sequence
  Synthetic oligonucleotide; TTT chr11 5397355 5397376 5397360 5397355 -
tgatggggttttttttctcttg

SEQ ID NO: 112941 - DNA, 22 bp, Artificial Sequence
  Synthetic oligonucleotide; TTT chr11 5397354 5397375 5397359 5397354 -
gatggggttttttttctcttgt

SEQ ID NO: 112942 - DNA, 22 bp, Artificial Sequence
  Synthetic oligonucleotide; TTG chr11 5397353 5397374 5397358 5397353 -
atggggttttttttctcttgta

SEQ ID NO: 112943 - DNA, 22 bp, Artificial Sequence
  Synthetic oligonucleotide; TTT chr11 5397344 5397365 5397349 5397344 -
tttttctcttgtaaatttgttt

SEQ ID NO: 112944 - DNA, 22 bp, Artificial Sequence
  Synthetic oligonucleotide; TTT chr11 5397343 5397364 5397348 5397343 -
ttttctcttgtaaatttgtttg

SEQ ID NO: 112945 - DNA, 22 bp, Artificial Sequence
  Synthetic oligonucleotide; TTT chr11 5397342 5397363 5397347 5397342 -
tttctcttgtaaatttgtttga

SEQ ID NO: 112946 - DNA, 22 bp, Artificial Sequence
  Synthetic oligonucleotide; TTT chr11 5397341 5397362 5397346 5397341 -
ttctcttgtaaatttgtttgag

SEQ ID NO: 112947 - DNA, 22 bp, Artificial Sequence
  Synthetic oligonucleotide; TTT chr11 5397340 5397361 5397345 5397340 -
tctcttgtaaatttgtttgagt

SEQ ID NO: 112948 - DNA, 22 bp, Artificial Sequence
  Synthetic oligonucleotide; TTT chr11 5397339 5397360 5397344 5397339 -
ctcttgtaaatttgtttgagtt

SEQ ID NO: 112949 - DNA, 22 bp, Artificial Sequence
  Synthetic oligonucleotide; TTC chr11 5397338 5397359 5397343 5397338 -
tcttgtaaatttgtttgagttc

SEQ ID NO: 112950 - DNA, 22 bp, Artificial Sequence
  Synthetic oligonucleotide; CTC chr11 5397336 5397357 5397341 5397336 -
ttgtaaatttgtttgagttcat

SEQ ID NO: 112951 - DNA, 22 bp, Artificial Sequence
  Synthetic oligonucleotide; CTT chr11 5397334 5397355 5397339 5397334 -
gtaaatttgtttgagttcattg

SEQ ID NO: 112952 - DNA, 22 bp, Artificial Sequence
  Synthetic oligonucleotide; TTG chr11 5397333 5397354 5397338 5397333 -
taaatttgtttgagttcattgt

SEQ ID NO: 112953 - DNA, 22 bp, Artificial Sequence
  Synthetic oligonucleotide; TTT chr11 5397326 5397347 5397331 5397326 -
gtttgagttcattgtagattct

SEQ ID NO: 112954 - DNA, 22 bp, Artificial Sequence
  Synthetic oligonucleotide; TTG chr11 5397325 5397346 5397330 5397325 -
tttgagttcattgtagattctg

SEQ ID NO: 112955 - DNA, 22 bp, Artificial Sequence
  Synthetic oligonucleotide; TTT chr11 5397322 5397343 5397327 5397322 -
gagttcattgtagattctggat

SEQ ID NO: 112956 - DNA, 22 bp, Artificial Sequence
  Synthetic oligonucleotide; TTG chr11 5397321 5397342 5397326 5397321 -
agttcattgtagattctggata

SEQ ID NO: 112957 - DNA, 22 bp, Artificial Sequence
  Synthetic oligonucleotide; TTC chr11 5397316 5397337 5397321 5397316 -
attgtagattctggatattagc

SEQ ID NO: 112958 - DNA, 22 bp, Artificial Sequence
  Synthetic oligonucleotide; TTG chr11 5397312 5397333 5397317 5397312 -
tagattctggatattagccctt

SEQ ID NO: 112959 - DNA, 22 bp, Artificial Sequence
  Synthetic oligonucleotide; TTC chr11 5397305 5397326 5397310 5397305 -
tggatattagccctttgtcaga

SEQ ID NO: 112960 - DNA, 22 bp, Artificial Sequence
  Synthetic oligonucleotide; CTG chr11 5397303 5397324 5397308 5397303 -
gatattagccctttgtcagatg

SEQ ID NO: 112961 - DNA, 22 bp, Artificial Sequence
  Synthetic oligonucleotide; TTA chr11 5397296 5397317 5397301 5397296 -
gccctttgtcagatgagtagat

SEQ ID NO: 112962 - DNA, 22 bp, Artificial Sequence
  Synthetic oligonucleotide; CTT chr11 5397290 5397311 5397295 5397290 -
tgtcagatgagtagattgcaaa

SEQ ID NO: 112963 - DNA, 22 bp, Artificial Sequence
  Synthetic oligonucleotide; TTT chr11 5397289 5397310 5397294 5397289 -
gtcagatgagtagattgcaaaa

SEQ ID NO: 112964 - DNA, 22 bp, Artificial Sequence
  Synthetic oligonucleotide; TTG chr11 5397288 5397309 5397293 5397288 -
tcagatgagtagattgcaaaaa

SEQ ID NO: 112965 - DNA, 22 bp, Artificial Sequence
  Synthetic oligonucleotide; TTG chr11 5397272 5397293 5397277 5397272 -
caaaaattttctcccattgtgt

SEQ ID NO: 112966 - DNA, 22 bp, Artificial Sequence
  Synthetic oligonucleotide; TTT chr11 5397263 5397284 5397268 5397263 -
tctcccattgtgtaggttgcct

SEQ ID NO: 112967 - DNA, 22 bp, Artificial Sequence
  Synthetic oligonucleotide; TTT chr11 5397262 5397283 5397267 5397262 -
ctcccattgtgtaggttgcctg

SEQ ID NO: 112968 - DNA, 22 bp, Artificial Sequence
  Synthetic oligonucleotide; TTC chr11 5397261 5397282 5397266 5397261 -
tcccattgtgtaggttgcctgt

SEQ ID NO: 112969 - DNA, 22 bp, Artificial Sequence
  Synthetic oligonucleotide; CTC chr11 5397259 5397280 5397264 5397259 -
ccattgtgtaggttgcctgttc

SEQ ID NO: 112970 - DNA, 22 bp, Artificial Sequence
  Synthetic oligonucleotide; TTG chr11 5397253 5397274 5397258 5397253 -
tgtaggttgcctgttcactctg

SEQ ID NO: 112971 - DNA, 22 bp, Artificial Sequence
  Synthetic oligonucleotide; TTG chr11 5397244 5397265 5397249 5397244 -
cctgttcactctgatggtagtt

SEQ ID NO: 112972 - DNA, 22 bp, Artificial Sequence
  Synthetic oligonucleotide; CTG chr11 5397240 5397261 5397245 5397240 -
ttcactctgatggtagtttctt

SEQ ID NO: 112973 - DNA, 22 bp, Artificial Sequence
  Synthetic oligonucleotide; TTC chr11 5397237 5397258 5397242 5397237 -
actctgatggtagtttcttttg

SEQ ID NO: 112974 - DNA, 22 bp, Artificial Sequence
  Synthetic oligonucleotide; CTC chr11 5397233 5397254 5397238 5397233 -
tgatggtagtttcttttgctgt

SEQ ID NO: 112975 - DNA, 22 bp, Artificial Sequence
  Synthetic oligonucleotide; CTG chr11 5397231 5397252 5397236 5397231 -
atggtagtttcttttgctgtgc

SEQ ID NO: 112976 - DNA, 22 bp, Artificial Sequence
  Synthetic oligonucleotide; TTT chr11 5397221 5397242 5397226 5397221 -
cttttgctgtgcagaagatctt

SEQ ID NO: 112977 - DNA, 22 bp, Artificial Sequence
  Synthetic oligonucleotide; TTC chr11 5397220 5397241 5397225 5397220 -
ttttgctgtgcagaagatcttt

SEQ ID NO: 112978 - DNA, 22 bp, Artificial Sequence
  Synthetic oligonucleotide; CTT chr11 5397218 5397239 5397223 5397218 -
ttgctgtgcagaagatctttag

SEQ ID NO: 112979 - DNA, 22 bp, Artificial Sequence
  Synthetic oligonucleotide; TTT chr11 5397217 5397238 5397222 5397217 -
tgctgtgcagaagatctttagt

SEQ ID NO: 112980 - DNA, 22 bp, Artificial Sequence
  Synthetic oligonucleotide; TTT chr11 5397216 5397237 5397221 5397216 -
gctgtgcagaagatctttagtt

SEQ ID NO: 112981 - DNA, 22 bp, Artificial Sequence
  Synthetic oligonucleotide; TTG chr11 5397215 5397236 5397220 5397215 -
ctgtgcagaagatctttagttt

SEQ ID NO: 112982 - DNA, 22 bp, Artificial Sequence
  Synthetic oligonucleotide; CTG chr11 5397212 5397233 5397217 5397212 -
tgcagaagatctttagtttaat

SEQ ID NO: 112983 - DNA, 22 bp, Artificial Sequence
  Synthetic oligonucleotide; CTT chr11 5397199 5397220 5397204 5397199 -
tagtttaattagatcccattag

SEQ ID NO: 112984 - DNA, 22 bp, Artificial Sequence
  Synthetic oligonucleotide; TTT chr11 5397198 5397219 5397203 5397198 -
agtttaattagatcccattagt

SEQ ID NO: 112985 - DNA, 22 bp, Artificial Sequence
  Synthetic oligonucleotide; TTA chr11 5397197 5397218 5397202 5397197 -
gtttaattagatcccattagtg

SEQ ID NO: 112986 - DNA, 22 bp, Artificial Sequence
  Synthetic oligonucleotide; TTT chr11 5397193 5397214 5397198 5397193 -
aattagatcccattagtgaatt

SEQ ID NO: 112987 - DNA, 22 bp, Artificial Sequence
  Synthetic oligonucleotide; TTA chr11 5397192 5397213 5397197 5397192 -
attagatcccattagtgaattt

SEQ ID NO: 112988 - DNA, 22 bp, Artificial Sequence
  Synthetic oligonucleotide; TTA chr11 5397188 5397209 5397193 5397188 -
gatcccattagtgaattttggc

SEQ ID NO: 112989 - DNA, 22 bp, Artificial Sequence
  Synthetic oligonucleotide; TTA chr11 5397178 5397199 5397183 5397178 -
gtgaattttggcttttgttgcc

SEQ ID NO: 112990 - DNA, 22 bp, Artificial Sequence
  Synthetic oligonucleotide; TTT chr11 5397170 5397191 5397175 5397170 -
tggcttttgttgccattgcttt

SEQ ID NO: 112991 - DNA, 22 bp, Artificial Sequence
  Synthetic oligonucleotide; TTT chr11 5397169 5397190 5397174 5397169 -
ggcttttgttgccattgctttt

SEQ ID NO: 112992 - DNA, 22 bp, Artificial Sequence
  Synthetic oligonucleotide; TTG chr11 5397168 5397189 5397173 5397168 -
gcttttgttgccattgcttttg

SEQ ID NO: 112993 - DNA, 22 bp, Artificial Sequence
  Synthetic oligonucleotide; CTT chr11 5397164 5397185 5397169 5397164 -
ttgttgccattgcttttggtgt

SEQ ID NO: 112994 - DNA, 22 bp, Artificial Sequence
  Synthetic oligonucleotide; TTT chr11 5397163 5397184 5397168 5397163 -
tgttgccattgcttttggtgtt

SEQ ID NO: 112995 - DNA, 22 bp, Artificial Sequence
  Synthetic oligonucleotide; TTT chr11 5397162 5397183 5397167 5397162 -
gttgccattgcttttggtgttt

SEQ ID NO: 112996 - DNA, 22 bp, Artificial Sequence
  Synthetic oligonucleotide; TTG chr11 5397161 5397182 5397166 5397161 -
ttgccattgcttttggtgtttt

SEQ ID NO: 112997 - DNA, 22 bp, Artificial Sequence
  Synthetic oligonucleotide; TTG chr11 5397158 5397179 5397163 5397158 -
ccattgcttttggtgttttaga

SEQ ID NO: 112998 - DNA, 22 bp, Artificial Sequence
  Synthetic oligonucleotide; TTG chr11 5397152 5397173 5397157 5397152 -
cttttggtgttttagacatgaa

SEQ ID NO: 112999 - DNA, 22 bp, Artificial Sequence
  Synthetic oligonucleotide; CTT chr11 5397149 5397170 5397154 5397149 -
ttggtgttttagacatgaagtc

SEQ ID NO: 113000 - DNA, 22 bp, Artificial Sequence
  Synthetic oligonucleotide; TTT chr11 5397148 5397169 5397153 5397148 -
tggtgttttagacatgaagtcc

SEQ ID NO: 113001 - DNA, 22 bp, Artificial Sequence
  Synthetic oligonucleotide; TTT chr11 5397147 5397168 5397152 5397147 -
ggtgttttagacatgaagtcca

SEQ ID NO: 113002 - DNA, 22 bp, Artificial Sequence
  Synthetic oligonucleotide; TTG chr11 5397146 5397167 5397151 5397146 -
gtgttttagacatgaagtccat

SEQ ID NO: 113003 - DNA, 22 bp, Artificial Sequence
  Synthetic oligonucleotide; TTT chr11 5397140 5397161 5397145 5397140 -
tagacatgaagtccatgcccat

SEQ ID NO: 113004 - DNA, 22 bp, Artificial Sequence
  Synthetic oligonucleotide; TTT chr11 5397139 5397160 5397144 5397139 -
agacatgaagtccatgcccatg

SEQ ID NO: 113005 - DNA, 22 bp, Artificial Sequence
  Synthetic oligonucleotide; TTA chr11 5397138 5397159 5397143 5397138 -
gacatgaagtccatgcccatgc

SEQ ID NO: 113006 - DNA, 22 bp, Artificial Sequence
  Synthetic oligonucleotide; CTA chr11 5397113 5397134 5397118 5397113 -
tgtcctgaatggtattgcttag

SEQ ID NO: 113007 - DNA, 22 bp, Artificial Sequence
  Synthetic oligonucleotide; CTG chr11 5397106 5397127 5397111 5397106 -
aatggtattgcttaggttttct

SEQ ID NO: 113008 - DNA, 22 bp, Artificial Sequence
  Synthetic oligonucleotide; TTG chr11 5397096 5397117 5397101 5397096 -
cttaggttttcttctagagttt

SEQ ID NO: 113009 - DNA, 22 bp, Artificial Sequence
  Synthetic oligonucleotide; CTT chr11 5397093 5397114 5397098 5397093 -
aggttttcttctagagttttta

SEQ ID NO: 113010 - DNA, 22 bp, Artificial Sequence
  Synthetic oligonucleotide; TTA chr11 5397092 5397113 5397097 5397092 -
ggttttcttctagagtttttat

SEQ ID NO: 113011 - DNA, 22 bp, Artificial Sequence
  Synthetic oligonucleotide; TTT chr11 5397087 5397108 5397092 5397087 -
tcttctagagtttttatggttt

SEQ ID NO: 113012 - DNA, 22 bp, Artificial Sequence
  Synthetic oligonucleotide; TTT chr11 5397086 5397107 5397091 5397086 -
cttctagagtttttatggtttt

SEQ ID NO: 113013 - DNA, 22 bp, Artificial Sequence
  Synthetic oligonucleotide; TTC chr11 5397085 5397106 5397090 5397085 -
ttctagagtttttatggtttta

SEQ ID NO: 113014 - DNA, 22 bp, Artificial Sequence
  Synthetic oligonucleotide; CTT chr11 5397083 5397104 5397088 5397083 -
ctagagtttttatggttttagg

SEQ ID NO: 113015 - DNA, 22 bp, Artificial Sequence
  Synthetic oligonucleotide; TTC chr11 5397082 5397103 5397087 5397082 -
tagagtttttatggttttaggt

SEQ ID NO: 113016 - DNA, 22 bp, Artificial Sequence
  Synthetic oligonucleotide; CTA chr11 5397080 5397101 5397085 5397080 -
gagtttttatggttttaggtct

SEQ ID NO: 113017 - DNA, 22 bp, Artificial Sequence
  Synthetic oligonucleotide; TTT chr11 5397074 5397095 5397079 5397074 -
ttatggttttaggtctaacatt

SEQ ID NO: 113018 - DNA, 22 bp, Artificial Sequence
  Synthetic oligonucleotide; TTT chr11 5397073 5397094 5397078 5397073 -
tatggttttaggtctaacattt

SEQ ID NO: 113019 - DNA, 22 bp, Artificial Sequence
  Synthetic oligonucleotide; TTT chr11 5397072 5397093 5397077 5397072 -
atggttttaggtctaacattta

SEQ ID NO: 113020 - DNA, 22 bp, Artificial Sequence
  Synthetic oligonucleotide; TTA chr11 5397071 5397092 5397076 5397071 -
tggttttaggtctaacatttaa

SEQ ID NO: 113021 - DNA, 22 bp, Artificial Sequence
  Synthetic oligonucleotide; TTT chr11 5397065 5397086 5397070 5397065 -
taggtctaacatttaagtcttt

SEQ ID NO: 113022 - DNA, 22 bp, Artificial Sequence
  Synthetic oligonucleotide; TTT chr11 5397064 5397085 5397069 5397064 -
aggtctaacatttaagtcttta

SEQ ID NO: 113023 - DNA, 22 bp, Artificial Sequence
  Synthetic oligonucleotide; TTA chr11 5397063 5397084 5397068 5397063 -
ggtctaacatttaagtctttaa

SEQ ID NO: 113024 - DNA, 22 bp, Artificial Sequence
  Synthetic oligonucleotide; CTA chr11 5397057 5397078 5397062 5397057 -
acatttaagtctttaatccatc

SEQ ID NO: 113025 - DNA, 22 bp, Artificial Sequence
  Synthetic oligonucleotide; TTT chr11 5397051 5397072 5397056 5397051 -
aagtctttaatccatcttgagt

SEQ ID NO: 113026 - DNA, 22 bp, Artificial Sequence
  Synthetic oligonucleotide; TTA chr11 5397050 5397071 5397055 5397050 -
agtctttaatccatcttgagtt

SEQ ID NO: 113027 - DNA, 22 bp, Artificial Sequence
  Synthetic oligonucleotide; CTT chr11 5397044 5397065 5397049 5397044 -
taatccatcttgagttaatttt

SEQ ID NO: 113028 - DNA, 22 bp, Artificial Sequence
  Synthetic oligonucleotide; TTT chr11 5397043 5397064 5397048 5397043 -
aatccatcttgagttaattttt

SEQ ID NO: 113029 - DNA, 22 bp, Artificial Sequence
  Synthetic oligonucleotide; TTA chr11 5397042 5397063 5397047 5397042 -
atccatcttgagttaatttttg

SEQ ID NO: 113030 - DNA, 22 bp, Artificial Sequence
  Synthetic oligonucleotide; CTT chr11 5397033 5397054 5397038 5397033 -
gagttaatttttgtataaggtg

SEQ ID NO: 113031 - DNA, 22 bp, Artificial Sequence
  Synthetic oligonucleotide; TTG chr11 5397032 5397053 5397037 5397032 -
agttaatttttgtataaggtgt

SEQ ID NO: 113032 - DNA, 22 bp, Artificial Sequence
  Synthetic oligonucleotide; TTA chr11 5397027 5397048 5397032 5397027 -
atttttgtataaggtgtaagga

SEQ ID NO: 113033 - DNA, 22 bp, Artificial Sequence
  Synthetic oligonucleotide; TTT chr11 5397023 5397044 5397028 5397023 -
ttgtataaggtgtaaggaaggg

SEQ ID NO: 113034 - DNA, 22 bp, Artificial Sequence
  Synthetic oligonucleotide; TTT chr11 5397022 5397043 5397027 5397022 -
tgtataaggtgtaaggaaggga

SEQ ID NO: 113035 - DNA, 22 bp, Artificial Sequence
  Synthetic oligonucleotide; TTT chr11 5397021 5397042 5397026 5397021 -
gtataaggtgtaaggaagggat

SEQ ID NO: 113036 - DNA, 22 bp, Artificial Sequence
  Synthetic oligonucleotide; TTG chr11 5397020 5397041 5397025 5397020 -
tataaggtgtaaggaagggatc

SEQ ID NO: 113037 - DNA, 22 bp, Artificial Sequence
  Synthetic oligonucleotide; TTT chr11 5396992 5397013 5396997 5396992 -
cagcttcctacatttggctagc

SEQ ID NO: 113038 - DNA, 22 bp, Artificial Sequence
  Synthetic oligonucleotide; TTC chr11 5396991 5397012 5396996 5396991 -
agcttcctacatttggctagcc

SEQ ID NO: 113039 - DNA, 22 bp, Artificial Sequence
  Synthetic oligonucleotide; CTT chr11 5396986 5397007 5396991 5396986 -
cctacatttggctagccagttt

SEQ ID NO: 113040 - DNA, 22 bp, Artificial Sequence
  Synthetic oligonucleotide; TTC chr11 5396985 5397006 5396990 5396985 -
ctacatttggctagccagtttt

SEQ ID NO: 113041 - DNA, 22 bp, Artificial Sequence
  Synthetic oligonucleotide; CTA chr11 5396982 5397003 5396987 5396982 -
catttggctagccagttttccc

SEQ ID NO: 113042 - DNA, 22 bp, Artificial Sequence
  Synthetic oligonucleotide; TTT chr11 5396977 5396998 5396982 5396977 -
ggctagccagttttcccagcac

SEQ ID NO: 113043 - DNA, 22 bp, Artificial Sequence
  Synthetic oligonucleotide; TTG chr11 5396976 5396997 5396981 5396976 -
gctagccagttttcccagcacc

SEQ ID NO: 113044 - DNA, 22 bp, Artificial Sequence
  Synthetic oligonucleotide; CTA chr11 5396972 5396993 5396977 5396972 -
gccagttttcccagcaccattt

SEQ ID NO: 113045 - DNA, 22 bp, Artificial Sequence
  Synthetic oligonucleotide; TTT chr11 5396964 5396985 5396969 5396964 -
tcccagcaccatttattaaaca

SEQ ID NO: 113046 - DNA, 22 bp, Artificial Sequence
  Synthetic oligonucleotide; TTT chr11 5396963 5396984 5396968 5396963 -
cccagcaccatttattaaacag

SEQ ID NO: 113047 - DNA, 22 bp, Artificial Sequence
  Synthetic oligonucleotide; TTC chr11 5396962 5396983 5396967 5396962 -
ccagcaccatttattaaacagg

SEQ ID NO: 113048 - DNA, 22 bp, Artificial Sequence
  Synthetic oligonucleotide; TTT chr11 5396950 5396971 5396955 5396950 -
attaaacagggaatcctttccc

SEQ ID NO: 113049 - DNA, 22 bp, Artificial Sequence
  Synthetic oligonucleotide; TTA chr11 5396949 5396970 5396954 5396949 -
ttaaacagggaatcctttcccc

SEQ ID NO: 113050 - DNA, 22 bp, Artificial Sequence
  Synthetic oligonucleotide; TTA chr11 5396946 5396967 5396951 5396946 -
aacagggaatcctttccccatt

SEQ ID NO: 113051 - DNA, 22 bp, Artificial Sequence
  Synthetic oligonucleotide; CTT chr11 5396932 5396953 5396937 5396932 -
tccccatttcttgtttttctca

SEQ ID NO: 113052 - DNA, 22 bp, Artificial Sequence
  Synthetic oligonucleotide; TTT chr11 5396931 5396952 5396936 5396931 -
ccccatttcttgtttttctcag

SEQ ID NO: 113053 - DNA, 22 bp, Artificial Sequence
  Synthetic oligonucleotide; TTC chr11 5396930 5396951 5396935 5396930 -
cccatttcttgtttttctcagg

SEQ ID NO: 113054 - DNA, 22 bp, Artificial Sequence
  Synthetic oligonucleotide; TTT chr11 5396923 5396944 5396928 5396923 -
cttgtttttctcaggtttgtca

SEQ ID NO: 113055 - DNA, 22 bp, Artificial Sequence
  Synthetic oligonucleotide; TTC chr11 5396922 5396943 5396927 5396922 -
ttgtttttctcaggtttgtcaa

SEQ ID NO: 113056 - DNA, 22 bp, Artificial Sequence
  Synthetic oligonucleotide; CTT chr11 5396920 5396941 5396925 5396920 -
gtttttctcaggtttgtcaaag

SEQ ID NO: 113057 - DNA, 22 bp, Artificial Sequence
  Synthetic oligonucleotide; TTG chr11 5396919 5396940 5396924 5396919 -
tttttctcaggtttgtcaaaga

SEQ ID NO: 113058 - DNA, 22 bp, Artificial Sequence
  Synthetic oligonucleotide; TTT chr11 5396916 5396937 5396921 5396916 -
ttctcaggtttgtcaaagatca

SEQ ID NO: 113059 - DNA, 22 bp, Artificial Sequence
  Synthetic oligonucleotide; TTT chr11 5396915 5396936 5396920 5396915 -
tctcaggtttgtcaaagatcag

SEQ ID NO: 113060 - DNA, 22 bp, Artificial Sequence
  Synthetic oligonucleotide; TTT chr11 5396914 5396935 5396919 5396914 -
ctcaggtttgtcaaagatcaga

SEQ ID NO: 113061 - DNA, 22 bp, Artificial Sequence
  Synthetic oligonucleotide; TTC chr11 5396913 5396934 5396918 5396913 -
tcaggtttgtcaaagatcagat

SEQ ID NO: 113062 - DNA, 22 bp, Artificial Sequence
  Synthetic oligonucleotide; CTC chr11 5396911 5396932 5396916 5396911 -
aggtttgtcaaagatcagatag

SEQ ID NO: 113063 - DNA, 22 bp, Artificial Sequence
  Synthetic oligonucleotide; TTT chr11 5396905 5396926 5396910 5396905 -
gtcaaagatcagatagttgtag

SEQ ID NO: 113064 - DNA, 22 bp, Artificial Sequence
  Synthetic oligonucleotide; TTG chr11 5396904 5396925 5396909 5396904 -
tcaaagatcagatagttgtaga

SEQ ID NO: 113065 - DNA, 22 bp, Artificial Sequence
  Synthetic oligonucleotide; TTG chr11 5396886 5396907 5396891 5396886 -
tagatagacagcattatttctg

SEQ ID NO: 113066 - DNA, 22 bp, Artificial Sequence
  Synthetic oligonucleotide; TTA chr11 5396870 5396891 5396875 5396870 -
tttctgagggctctgttttgtt

SEQ ID NO: 113067 - DNA, 22 bp, Artificial Sequence
  Synthetic oligonucleotide; TTT chr11 5396867 5396888 5396872 5396867 -
ctgagggctctgttttgttcca

SEQ ID NO: 113068 - DNA, 22 bp, Artificial Sequence
  Synthetic oligonucleotide; TTC chr11 5396866 5396887 5396871 5396866 -
tgagggctctgttttgttccat

SEQ ID NO: 113069 - DNA, 22 bp, Artificial Sequence
  Synthetic oligonucleotide; CTG chr11 5396864 5396885 5396869 5396864 -
agggctctgttttgttccattg

SEQ ID NO: 113070 - DNA, 22 bp, Artificial Sequence
  Synthetic oligonucleotide; CTC chr11 5396857 5396878 5396862 5396857 -
tgttttgttccattggtctata

SEQ ID NO: 113071 - DNA, 22 bp, Artificial Sequence
  Synthetic oligonucleotide; CTG chr11 5396855 5396876 5396860 5396855 -
ttttgttccattggtctatatc

SEQ ID NO: 113072 - DNA, 22 bp, Artificial Sequence
  Synthetic oligonucleotide; TTT chr11 5396852 5396873 5396857 5396852 -
tgttccattggtctatatctct

SEQ ID NO: 113073 - DNA, 22 bp, Artificial Sequence
  Synthetic oligonucleotide; TTT chr11 5396851 5396872 5396856 5396851 -
gttccattggtctatatctctg

SEQ ID NO: 113074 - DNA, 22 bp, Artificial Sequence
  Synthetic oligonucleotide; TTG chr11 5396850 5396871 5396855 5396850 -
ttccattggtctatatctctgt

SEQ ID NO: 113075 - DNA, 22 bp, Artificial Sequence
  Synthetic oligonucleotide; TTC chr11 5396847 5396868 5396852 5396847 -
cattggtctatatctctgtttt

SEQ ID NO: 113076 - DNA, 22 bp, Artificial Sequence
  Synthetic oligonucleotide; TTG chr11 5396842 5396863 5396847 5396842 -
gtctatatctctgttttggtac

SEQ ID NO: 113077 - DNA, 22 bp, Artificial Sequence
  Synthetic oligonucleotide; CTA chr11 5396837 5396858 5396842 5396837 -
tatctctgttttggtaccagta

SEQ ID NO: 113078 - DNA, 22 bp, Artificial Sequence
  Synthetic oligonucleotide; CTC chr11 5396831 5396852 5396836 5396831 -
tgttttggtaccagtactatgc

SEQ ID NO: 113079 - DNA, 22 bp, Artificial Sequence
  Synthetic oligonucleotide; CTG chr11 5396829 5396850 5396834 5396829 -
ttttggtaccagtactatgctg

SEQ ID NO: 113080 - DNA, 22 bp, Artificial Sequence
  Synthetic oligonucleotide; TTT chr11 5396826 5396847 5396831 5396826 -
tggtaccagtactatgctgttt

SEQ ID NO: 113081 - DNA, 22 bp, Artificial Sequence
  Synthetic oligonucleotide; TTT chr11 5396825 5396846 5396830 5396825 -
ggtaccagtactatgctgtttt

SEQ ID NO: 113082 - DNA, 22 bp, Artificial Sequence
  Synthetic oligonucleotide; TTG chr11 5396824 5396845 5396829 5396824 -
gtaccagtactatgctgttttg

SEQ ID NO: 113083 - DNA, 22 bp, Artificial Sequence
  Synthetic oligonucleotide; CTA chr11 5396812 5396833 5396817 5396812 -
tgctgttttggttactgtagcc

SEQ ID NO: 113084 - DNA, 22 bp, Artificial Sequence
  Synthetic oligonucleotide; CTG chr11 5396807 5396828 5396812 5396807 -
ttttggttactgtagccttgta

SEQ ID NO: 113085 - DNA, 22 bp, Artificial Sequence
  Synthetic oligonucleotide; TTT chr11 5396804 5396825 5396809 5396804 -
tggttactgtagccttgtagta

SEQ ID NO: 113086 - DNA, 22 bp, Artificial Sequence
  Synthetic oligonucleotide; TTT chr11 5396803 5396824 5396808 5396803 -
ggttactgtagccttgtagtat

SEQ ID NO: 113087 - DNA, 22 bp, Artificial Sequence
  Synthetic oligonucleotide; TTG chr11 5396802 5396823 5396807 5396802 -
gttactgtagccttgtagtata

SEQ ID NO: 113088 - DNA, 22 bp, Artificial Sequence
  Synthetic oligonucleotide; TTA chr11 5396798 5396819 5396803 5396798 -
ctgtagccttgtagtatagttt

SEQ ID NO: 113089 - DNA, 22 bp, Artificial Sequence
  Synthetic oligonucleotide; CTG chr11 5396795 5396816 5396800 5396795 -
tagccttgtagtatagtttgaa

SEQ ID NO: 113090 - DNA, 22 bp, Artificial Sequence
  Synthetic oligonucleotide; CTT chr11 5396788 5396809 5396793 5396788 -
gtagtatagtttgaaatcaggt

SEQ ID NO: 113091 - DNA, 22 bp, Artificial Sequence
  Synthetic oligonucleotide; TTG chr11 5396787 5396808 5396792 5396787 -
tagtatagtttgaaatcaggta

SEQ ID NO: 113092 - DNA, 22 bp, Artificial Sequence
  Synthetic oligonucleotide; TTT chr11 5396776 5396797 5396781 5396776 -
gaaatcaggtagtgtgatgcct

SEQ ID NO: 113093 - DNA, 22 bp, Artificial Sequence
  Synthetic oligonucleotide; TTG chr11 5396775 5396796 5396780 5396775 -
aaatcaggtagtgtgatgcctc

SEQ ID NO: 113094 - DNA, 22 bp, Artificial Sequence
  Synthetic oligonucleotide; CTC chr11 5396753 5396774 5396758 5396753 -
cagctttgttcttttggcttag

SEQ ID NO: 113095 - DNA, 22 bp, Artificial Sequence
  Synthetic oligonucleotide; CTT chr11 5396747 5396768 5396752 5396747 -
tgttcttttggcttaggattga

SEQ ID NO: 113096 - DNA, 22 bp, Artificial Sequence
  Synthetic oligonucleotide; TTT chr11 5396746 5396767 5396751 5396746 -
gttcttttggcttaggattgac

SEQ ID NO: 113097 - DNA, 22 bp, Artificial Sequence
  Synthetic oligonucleotide; TTG chr11 5396745 5396766 5396750 5396745 -
ttcttttggcttaggattgact

SEQ ID NO: 113098 - DNA, 22 bp, Artificial Sequence
  Synthetic oligonucleotide; TTC chr11 5396742 5396763 5396747 5396742 -
ttttggcttaggattgacttgg

SEQ ID NO: 113099 - DNA, 22 bp, Artificial Sequence
  Synthetic oligonucleotide; CTT chr11 5396740 5396761 5396745 5396740 -
ttggcttaggattgacttggcg

SEQ ID NO: 113100 - DNA, 22 bp, Artificial Sequence
  Synthetic oligonucleotide; TTT chr11 5396739 5396760 5396744 5396739 -
tggcttaggattgacttggcga

SEQ ID NO: 113101 - DNA, 22 bp, Artificial Sequence
  Synthetic oligonucleotide; TTT chr11 5396738 5396759 5396743 5396738 -
ggcttaggattgacttggcgat

SEQ ID NO: 113102 - DNA, 22 bp, Artificial Sequence
  Synthetic oligonucleotide; TTG chr11 5396737 5396758 5396742 5396737 -
gcttaggattgacttggcgatg

SEQ ID NO: 113103 - DNA, 22 bp, Artificial Sequence
  Synthetic oligonucleotide; CTT chr11 5396733 5396754 5396738 5396733 -
aggattgacttggcgatgcggg

SEQ ID NO: 113104 - DNA, 22 bp, Artificial Sequence
  Synthetic oligonucleotide; TTA chr11 5396732 5396753 5396737 5396732 -
ggattgacttggcgatgcgggc

SEQ ID NO: 113105 - DNA, 22 bp, Artificial Sequence
  Synthetic oligonucleotide; TTG chr11 5396726 5396747 5396731 5396726 -
acttggcgatgcgggctctttt

SEQ ID NO: 113106 - DNA, 22 bp, Artificial Sequence
  Synthetic oligonucleotide; CTT chr11 5396722 5396743 5396727 5396722 -
ggcgatgcgggctcttttttgg

SEQ ID NO: 113107 - DNA, 22 bp, Artificial Sequence
  Synthetic oligonucleotide; TTG chr11 5396721 5396742 5396726 5396721 -
gcgatgcgggctcttttttggt

SEQ ID NO: 113108 - DNA, 22 bp, Artificial Sequence
  Synthetic oligonucleotide; CTC chr11 5396708 5396729 5396713 5396708 -
ttttttggttccatatgaactt

SEQ ID NO: 113109 - DNA, 22 bp, Artificial Sequence
  Synthetic oligonucleotide; CTT chr11 5396706 5396727 5396711 5396706 -
ttttggttccatatgaacttta

SEQ ID NO: 113110 - DNA, 22 bp, Artificial Sequence
  Synthetic oligonucleotide; TTT chr11 5396705 5396726 5396710 5396705 -
tttggttccatatgaactttaa

SEQ ID NO: 113111 - DNA, 22 bp, Artificial Sequence
  Synthetic oligonucleotide; TTT chr11 5396704 5396725 5396709 5396704 -
ttggttccatatgaactttaaa

SEQ ID NO: 113112 - DNA, 22 bp, Artificial Sequence
  Synthetic oligonucleotide; TTT chr11 5396703 5396724 5396708 5396703 -
tggttccatatgaactttaaag

SEQ ID NO: 113113 - DNA, 22 bp, Artificial Sequence
  Synthetic oligonucleotide; TTT chr11 5396702 5396723 5396707 5396702 -
ggttccatatgaactttaaagt

SEQ ID NO: 113114 - DNA, 22 bp, Artificial Sequence
  Synthetic oligonucleotide; TTG chr11 5396701 5396722 5396706 5396701 -
gttccatatgaactttaaagta

SEQ ID NO: 113115 - DNA, 22 bp, Artificial Sequence
  Synthetic oligonucleotide; TTC chr11 5396697 5396718 5396702 5396697 -
catatgaactttaaagtagttt

SEQ ID NO: 113116 - DNA, 22 bp, Artificial Sequence
  Synthetic oligonucleotide; CTT chr11 5396686 5396707 5396691 5396686 -
taaagtagttttttccaattct

SEQ ID NO: 113117 - DNA, 22 bp, Artificial Sequence
  Synthetic oligonucleotide; TTT chr11 5396685 5396706 5396690 5396685 -
aaagtagttttttccaattctg

SEQ ID NO: 113118 - DNA, 22 bp, Artificial Sequence
  Synthetic oligonucleotide; TTA chr11 5396684 5396705 5396689 5396684 -
aagtagttttttccaattctgt

SEQ ID NO: 113119 - DNA, 22 bp, Artificial Sequence
  Synthetic oligonucleotide; TTT chr11 5396675 5396696 5396680 5396675 -
tttccaattctgtgaagaaagt

SEQ ID NO: 113120 - DNA, 22 bp, Artificial Sequence
  Synthetic oligonucleotide; TTT chr11 5396674 5396695 5396679 5396674 -
ttccaattctgtgaagaaagtc

SEQ ID NO: 113121 - DNA, 22 bp, Artificial Sequence
  Synthetic oligonucleotide; TTT chr11 5396673 5396694 5396678 5396673 -
tccaattctgtgaagaaagtca

SEQ ID NO: 113122 - DNA, 22 bp, Artificial Sequence
  Synthetic oligonucleotide; TTT chr11 5396672 5396693 5396677 5396672 -
ccaattctgtgaagaaagtcat

SEQ ID NO: 113123 - DNA, 22 bp, Artificial Sequence
  Synthetic oligonucleotide; TTC chr11 5396671 5396692 5396676 5396671 -
caattctgtgaagaaagtcatt

SEQ ID NO: 113124 - DNA, 22 bp, Artificial Sequence
  Synthetic oligonucleotide; TTC chr11 5396665 5396686 5396670 5396665 -
tgtgaagaaagtcattggtagc

SEQ ID NO: 113125 - DNA, 22 bp, Artificial Sequence
  Synthetic oligonucleotide; CTG chr11 5396663 5396684 5396668 5396663 -
tgaagaaagtcattggtagctt

SEQ ID NO: 113126 - DNA, 22 bp, Artificial Sequence
  Synthetic oligonucleotide; TTG chr11 5396648 5396669 5396653 5396648 -
gtagcttgatggggatggcatt

SEQ ID NO: 113127 - DNA, 22 bp, Artificial Sequence
  Synthetic oligonucleotide; CTT chr11 5396641 5396662 5396646 5396641 -
gatggggatggcattgaatcta

SEQ ID NO: 113128 - DNA, 22 bp, Artificial Sequence
  Synthetic oligonucleotide; TTG chr11 5396640 5396661 5396645 5396640 -
atggggatggcattgaatctat

SEQ ID NO: 113129 - DNA, 22 bp, Artificial Sequence
  Synthetic oligonucleotide; TTG chr11 5396625 5396646 5396630 5396625 -
aatctataaattaccttgggca

SEQ ID NO: 113130 - DNA, 22 bp, Artificial Sequence
  Synthetic oligonucleotide; CTA chr11 5396619 5396640 5396624 5396619 -
taaattaccttgggcagtatgg

SEQ ID NO: 113131 - DNA, 22 bp, Artificial Sequence
  Synthetic oligonucleotide; TTA chr11 5396612 5396633 5396617 5396612 -
ccttgggcagtatggccatttt

SEQ ID NO: 113132 - DNA, 22 bp, Artificial Sequence
  Synthetic oligonucleotide; CTT chr11 5396608 5396629 5396613 5396608 -
gggcagtatggccattttcacg

SEQ ID NO: 113133 - DNA, 22 bp, Artificial Sequence
  Synthetic oligonucleotide; TTG chr11 5396607 5396628 5396612 5396607 -
ggcagtatggccattttcacga

SEQ ID NO: 113134 - DNA, 22 bp, Artificial Sequence
  Synthetic oligonucleotide; TTT chr11 5396591 5396612 5396596 5396591 -
tcacgatattgtttcttcctat

SEQ ID NO: 113135 - DNA, 22 bp, Artificial Sequence
  Synthetic oligonucleotide; TTT chr11 5396590 5396611 5396595 5396590 -
cacgatattgtttcttcctatc

SEQ ID NO: 113136 - DNA, 22 bp, Artificial Sequence
  Synthetic oligonucleotide; TTC chr11 5396589 5396610 5396594 5396589 -
acgatattgtttcttcctatcc

SEQ ID NO: 113137 - DNA, 22 bp, Artificial Sequence
  Synthetic oligonucleotide; TTG chr11 5396580 5396601 5396585 5396580 -
tttcttcctatccatgagcatg

SEQ ID NO: 113138 - DNA, 22 bp, Artificial Sequence
  Synthetic oligonucleotide; TTT chr11 5396577 5396598 5396582 5396577 -
cttcctatccatgagcatggaa

SEQ ID NO: 113139 - DNA, 22 bp, Artificial Sequence
  Synthetic oligonucleotide; TTC chr11 5396576 5396597 5396581 5396576 -
ttcctatccatgagcatggaat

SEQ ID NO: 113140 - DNA, 22 bp, Artificial Sequence
  Synthetic oligonucleotide; CTT chr11 5396574 5396595 5396579 5396574 -
cctatccatgagcatggaatgt

SEQ ID NO: 113141 - DNA, 22 bp, Artificial Sequence
  Synthetic oligonucleotide; TTC chr11 5396573 5396594 5396578 5396573 -
ctatccatgagcatggaatgtt

SEQ ID NO: 113142 - DNA, 22 bp, Artificial Sequence
  Synthetic oligonucleotide; CTA chr11 5396570 5396591 5396575 5396570 -
tccatgagcatggaatgttctt

SEQ ID NO: 113143 - DNA, 22 bp, Artificial Sequence
  Synthetic oligonucleotide; TTC chr11 5396550 5396571 5396555 5396550 -
ttccatttgtttgtatcttatt

SEQ ID NO: 113144 - DNA, 22 bp, Artificial Sequence
  Synthetic oligonucleotide; CTT chr11 5396548 5396569 5396553 5396548 -
ccatttgtttgtatcttatttc

SEQ ID NO: 113145 - DNA, 22 bp, Artificial Sequence
  Synthetic oligonucleotide; TTC chr11 5396547 5396568 5396552 5396547 -
catttgtttgtatcttatttcc

SEQ ID NO: 113146 - DNA, 22 bp, Artificial Sequence
  Synthetic oligonucleotide; TTT chr11 5396542 5396563 5396547 5396542 -
gtttgtatcttatttccttgag

SEQ ID NO: 113147 - DNA, 22 bp, Artificial Sequence
  Synthetic oligonucleotide; TTG chr11 5396541 5396562 5396546 5396541 -
tttgtatcttatttccttgagc

SEQ ID NO: 113148 - DNA, 22 bp, Artificial Sequence
  Synthetic oligonucleotide; TTT chr11 5396538 5396559 5396543 5396538 -
gtatcttatttccttgagcagt

SEQ ID NO: 113149 - DNA, 22 bp, Artificial Sequence
  Synthetic oligonucleotide; TTG chr11 5396537 5396558 5396542 5396537 -
tatcttatttccttgagcagtg

SEQ ID NO: 113150 - DNA, 22 bp, Artificial Sequence
  Synthetic oligonucleotide; CTT chr11 5396531 5396552 5396536 5396531 -
atttccttgagcagtggtttgt

SEQ ID NO: 113151 - DNA, 22 bp, Artificial Sequence
  Synthetic oligonucleotide; TTA chr11 5396530 5396551 5396535 5396530 -
tttccttgagcagtggtttgta

SEQ ID NO: 113152 - DNA, 22 bp, Artificial Sequence
  Synthetic oligonucleotide; TTT chr11 5396527 5396548 5396532 5396527 -
ccttgagcagtggtttgtagtt

SEQ ID NO: 113153 - DNA, 22 bp, Artificial Sequence
  Synthetic oligonucleotide; TTC chr11 5396526 5396547 5396531 5396526 -
cttgagcagtggtttgtagttc

SEQ ID NO: 113154 - DNA, 22 bp, Artificial Sequence
  Synthetic oligonucleotide; CTT chr11 5396523 5396544 5396528 5396523 -
gagcagtggtttgtagttctcc

SEQ ID NO: 113155 - DNA, 22 bp, Artificial Sequence
  Synthetic oligonucleotide; TTG chr11 5396522 5396543 5396527 5396522 -
agcagtggtttgtagttctcct

SEQ ID NO: 113156 - DNA, 22 bp, Artificial Sequence
  Synthetic oligonucleotide; TTT chr11 5396511 5396532 5396516 5396511 -
gtagttctccttgaagaggtcc

SEQ ID NO: 113157 - DNA, 22 bp, Artificial Sequence
  Synthetic oligonucleotide; TTG chr11 5396510 5396531 5396515 5396510 -
tagttctccttgaagaggtcct

SEQ ID NO: 113158 - DNA, 22 bp, Artificial Sequence
  Synthetic oligonucleotide; TTC chr11 5396504 5396525 5396509 5396504 -
tccttgaagaggtccttcacat

SEQ ID NO: 113159 - DNA, 22 bp, Artificial Sequence
  Synthetic oligonucleotide; CTC chr11 5396502 5396523 5396507 5396502 -
cttgaagaggtccttcacatcc

SEQ ID NO: 113160 - DNA, 22 bp, Artificial Sequence
  Synthetic oligonucleotide; CTT chr11 5396499 5396520 5396504 5396499 -
gaagaggtccttcacatccctt

SEQ ID NO: 113161 - DNA, 22 bp, Artificial Sequence
  Synthetic oligonucleotide; TTG chr11 5396498 5396519 5396503 5396498 -
aagaggtccttcacatcccttg

SEQ ID NO: 113162 - DNA, 22 bp, Artificial Sequence
  Synthetic oligonucleotide; CTT chr11 5396487 5396508 5396492 5396487 -
cacatcccttgtaagttggatt

SEQ ID NO: 113163 - DNA, 22 bp, Artificial Sequence
  Synthetic oligonucleotide; TTC chr11 5396486 5396507 5396491 5396486 -
acatcccttgtaagttggattc

SEQ ID NO: 113164 - DNA, 22 bp, Artificial Sequence
  Synthetic oligonucleotide; CTT chr11 5396477 5396498 5396482 5396477 -
gtaagttggattcctaggtatt

SEQ ID NO: 113165 - DNA, 22 bp, Artificial Sequence
  Synthetic oligonucleotide; TTG chr11 5396476 5396497 5396481 5396476 -
taagttggattcctaggtatta

SEQ ID NO: 113166 - DNA, 22 bp, Artificial Sequence
  Synthetic oligonucleotide; TTG chr11 5396469 5396490 5396474 5396469 -
gattcctaggtattatattctc

SEQ ID NO: 113167 - DNA, 22 bp, Artificial Sequence
  Synthetic oligonucleotide; TTC chr11 5396464 5396485 5396469 5396464 -
ctaggtattatattctctctga

SEQ ID NO: 113168 - DNA, 22 bp, Artificial Sequence
  Synthetic oligonucleotide; CTA chr11 5396461 5396482 5396466 5396461 -
ggtattatattctctctgaagc

SEQ ID NO: 113169 - DNA, 22 bp, Artificial Sequence
  Synthetic oligonucleotide; TTA chr11 5396454 5396475 5396459 5396454 -
tattctctctgaagcaattgtg

SEQ ID NO: 113170 - DNA, 22 bp, Artificial Sequence
  Synthetic oligonucleotide; TTC chr11 5396449 5396470 5396454 5396449 -
tctctgaagcaattgtgaatgg

SEQ ID NO: 113171 - DNA, 22 bp, Artificial Sequence
  Synthetic oligonucleotide; CTC chr11 5396447 5396468 5396452 5396447 -
tctgaagcaattgtgaatggga

SEQ ID NO: 113172 - DNA, 22 bp, Artificial Sequence
  Synthetic oligonucleotide; CTC chr11 5396445 5396466 5396450 5396445 -
tgaagcaattgtgaatgggagt

SEQ ID NO: 113173 - DNA, 22 bp, Artificial Sequence
  Synthetic oligonucleotide; CTG chr11 5396443 5396464 5396448 5396443 -
aagcaattgtgaatgggagttc

SEQ ID NO: 113174 - DNA, 22 bp, Artificial Sequence
  Synthetic oligonucleotide; TTG chr11 5396434 5396455 5396439 5396434 -
tgaatgggagttcactcactgt

SEQ ID NO: 113175 - DNA, 22 bp, Artificial Sequence
  Synthetic oligonucleotide; TTC chr11 5396421 5396442 5396426 5396421 -
actcactgtttgtctgttattg

SEQ ID NO: 113176 - DNA, 22 bp, Artificial Sequence
  Synthetic oligonucleotide; CTC chr11 5396417 5396438 5396422 5396417 -
actgtttgtctgttattggtgt

SEQ ID NO: 113177 - DNA, 22 bp, Artificial Sequence
  Synthetic oligonucleotide; CTG chr11 5396413 5396434 5396418 5396413 -
tttgtctgttattggtgtataa

SEQ ID NO: 113178 - DNA, 22 bp, Artificial Sequence
  Synthetic oligonucleotide; TTT chr11 5396410 5396431 5396415 5396410 -
gtctgttattggtgtataagaa

SEQ ID NO: 113179 - DNA, 22 bp, Artificial Sequence
  Synthetic oligonucleotide; TTG chr11 5396409 5396430 5396414 5396409 -
tctgttattggtgtataagaat

SEQ ID NO: 113180 - DNA, 22 bp, Artificial Sequence
  Synthetic oligonucleotide; CTG chr11 5396405 5396426 5396410 5396405 -
ttattggtgtataagaatgctt

SEQ ID NO: 113181 - DNA, 22 bp, Artificial Sequence
  Synthetic oligonucleotide; TTA chr11 5396402 5396423 5396407 5396402 -
ttggtgtataagaatgcttgtg

SEQ ID NO: 113182 - DNA, 22 bp, Artificial Sequence
  Synthetic oligonucleotide; TTG chr11 5396399 5396420 5396404 5396399 -
gtgtataagaatgcttgtgatt

SEQ ID NO: 113183 - DNA, 22 bp, Artificial Sequence
  Synthetic oligonucleotide; CTT chr11 5396383 5396404 5396388 5396383 -
gtgatttttgcacattgatttt

SEQ ID NO: 113184 - DNA, 22 bp, Artificial Sequence
  Synthetic oligonucleotide; TTG chr11 5396382 5396403 5396387 5396382 -
tgatttttgcacattgattttg

SEQ ID NO: 113185 - DNA, 22 bp, Artificial Sequence
  Synthetic oligonucleotide; TTT chr11 5396376 5396397 5396381 5396376 -
ttgcacattgattttgtatcct

SEQ ID NO: 113186 - DNA, 22 bp, Artificial Sequence
  Synthetic oligonucleotide; TTT chr11 5396375 5396396 5396380 5396375 -
tgcacattgattttgtatcctg

SEQ ID NO: 113187 - DNA, 22 bp, Artificial Sequence
  Synthetic oligonucleotide; TTT chr11 5396374 5396395 5396379 5396374 -
gcacattgattttgtatcctga

SEQ ID NO: 113188 - DNA, 22 bp, Artificial Sequence
  Synthetic oligonucleotide; TTG chr11 5396373 5396394 5396378 5396373 -
cacattgattttgtatcctgag

SEQ ID NO: 113189 - DNA, 22 bp, Artificial Sequence
  Synthetic oligonucleotide; TTG chr11 5396366 5396387 5396371 5396366 -
attttgtatcctgagactttgc

SEQ ID NO: 113190 - DNA, 22 bp, Artificial Sequence
  Synthetic oligonucleotide; TTT chr11 5396362 5396383 5396367 5396362 -
tgtatcctgagactttgctgaa

SEQ ID NO: 113191 - DNA, 22 bp, Artificial Sequence
  Synthetic oligonucleotide; TTT chr11 5396361 5396382 5396366 5396361 -
gtatcctgagactttgctgaag

SEQ ID NO: 113192 - DNA, 22 bp, Artificial Sequence
  Synthetic oligonucleotide; TTG chr11 5396360 5396381 5396365 5396360 -
tatcctgagactttgctgaagt

SEQ ID NO: 113193 - DNA, 22 bp, Artificial Sequence
  Synthetic oligonucleotide; CTG chr11 5396353 5396374 5396358 5396353 -
agactttgctgaagttgcttat

SEQ ID NO: 113194 - DNA, 22 bp, Artificial Sequence
  Synthetic oligonucleotide; CTT chr11 5396347 5396368 5396352 5396347 -
tgctgaagttgcttatcagctt

SEQ ID NO: 113195 - DNA, 22 bp, Artificial Sequence
  Synthetic oligonucleotide; TTT chr11 5396346 5396367 5396351 5396346 -
gctgaagttgcttatcagctta

SEQ ID NO: 113196 - DNA, 22 bp, Artificial Sequence
  Synthetic oligonucleotide; TTG chr11 5396345 5396366 5396350 5396345 -
ctgaagttgcttatcagcttaa

SEQ ID NO: 113197 - DNA, 22 bp, Artificial Sequence
  Synthetic oligonucleotide; CTG chr11 5396342 5396363 5396347 5396342 -
aagttgcttatcagcttaaggg

SEQ ID NO: 113198 - DNA, 22 bp, Artificial Sequence
  Synthetic oligonucleotide; TTG chr11 5396336 5396357 5396341 5396336 -
cttatcagcttaaggggatttt

SEQ ID NO: 113199 - DNA, 22 bp, Artificial Sequence
  Synthetic oligonucleotide; CTT chr11 5396333 5396354 5396338 5396333 -
atcagcttaaggggattttggg

SEQ ID NO: 113200 - DNA, 22 bp, Artificial Sequence
  Synthetic oligonucleotide; TTA chr11 5396332 5396353 5396337 5396332 -
tcagcttaaggggattttgggc

SEQ ID NO: 113201 - DNA, 22 bp, Artificial Sequence
  Synthetic oligonucleotide; CTT chr11 5396325 5396346 5396330 5396325 -
aaggggattttgggctgagaca

SEQ ID NO: 113202 - DNA, 22 bp, Artificial Sequence
  Synthetic oligonucleotide; TTA chr11 5396324 5396345 5396329 5396324 -
aggggattttgggctgagacaa

SEQ ID NO: 113203 - DNA, 22 bp, Artificial Sequence
  Synthetic oligonucleotide; TTT chr11 5396315 5396336 5396320 5396315 -
tgggctgagacaatggggtttt

SEQ ID NO: 113204 - DNA, 22 bp, Artificial Sequence
  Synthetic oligonucleotide; TTT chr11 5396314 5396335 5396319 5396314 -
gggctgagacaatggggttttc

SEQ ID NO: 113205 - DNA, 22 bp, Artificial Sequence
  Synthetic oligonucleotide; TTG chr11 5396313 5396334 5396318 5396313 -
ggctgagacaatggggttttct

SEQ ID NO: 113206 - DNA, 22 bp, Artificial Sequence
  Synthetic oligonucleotide; CTG chr11 5396308 5396329 5396313 5396308 -
agacaatggggttttctagata

SEQ ID NO: 113207 - DNA, 22 bp, Artificial Sequence
  Synthetic oligonucleotide; TTT chr11 5396294 5396315 5396299 5396294 -
tctagatatgcaatcacgtcat

SEQ ID NO: 113208 - DNA, 22 bp, Artificial Sequence
  Synthetic oligonucleotide; TTT chr11 5396293 5396314 5396298 5396293 -
ctagatatgcaatcacgtcatc

SEQ ID NO: 113209 - DNA, 22 bp, Artificial Sequence
  Synthetic oligonucleotide; TTC chr11 5396292 5396313 5396297 5396292 -
tagatatgcaatcacgtcatct

SEQ ID NO: 113210 - DNA, 22 bp, Artificial Sequence
  Synthetic oligonucleotide; CTA chr11 5396290 5396311 5396295 5396290 -
gatatgcaatcacgtcatctgc

SEQ ID NO: 113211 - DNA, 22 bp, Artificial Sequence
  Synthetic oligonucleotide; CTG chr11 5396269 5396290 5396274 5396269 -
caaacagggacaatttgacttt

SEQ ID NO: 113212 - DNA, 22 bp, Artificial Sequence
  Synthetic oligonucleotide; TTT chr11 5396253 5396274 5396258 5396253 -
gactttctctttacataattga

SEQ ID NO: 113213 - DNA, 22 bp, Artificial Sequence
  Synthetic oligonucleotide; TTG chr11 5396252 5396273 5396257 5396252 -
actttctctttacataattgaa

SEQ ID NO: 113214 - DNA, 22 bp, Artificial Sequence
  Synthetic oligonucleotide; CTT chr11 5396248 5396269 5396253 5396248 -
tctctttacataattgaatgcc

SEQ ID NO: 113215 - DNA, 22 bp, Artificial Sequence
  Synthetic oligonucleotide; TTT chr11 5396247 5396268 5396252 5396247 -
ctctttacataattgaatgcct

SEQ ID NO: 113216 - DNA, 22 bp, Artificial Sequence
  Synthetic oligonucleotide; TTC chr11 5396246 5396267 5396251 5396246 -
tctttacataattgaatgcctt

SEQ ID NO: 113217 - DNA, 22 bp, Artificial Sequence
  Synthetic oligonucleotide; CTC chr11 5396244 5396265 5396249 5396244 -
tttacataattgaatgcctttt

SEQ ID NO: 113218 - DNA, 22 bp, Artificial Sequence
  Synthetic oligonucleotide; CTT chr11 5396242 5396263 5396247 5396242 -
tacataattgaatgccttttat

SEQ ID NO: 113219 - DNA, 22 bp, Artificial Sequence
  Synthetic oligonucleotide; TTT chr11 5396241 5396262 5396246 5396241 -
acataattgaatgccttttatt

SEQ ID NO: 113220 - DNA, 22 bp, Artificial Sequence
  Synthetic oligonucleotide; TTA chr11 5396240 5396261 5396245 5396240 -
cataattgaatgccttttattt

SEQ ID NO: 113221 - DNA, 22 bp, Artificial Sequence
  Synthetic oligonucleotide; TTG chr11 5396232 5396253 5396237 5396232 -
aatgccttttatttccttctcc

SEQ ID NO: 113222 - DNA, 22 bp, Artificial Sequence
  Synthetic oligonucleotide; CTT chr11 5396224 5396245 5396229 5396224 -
ttatttccttctcctgcccgat

SEQ ID NO: 113223 - DNA, 22 bp, Artificial Sequence
  Synthetic oligonucleotide; TTT chr11 5396223 5396244 5396228 5396223 -
tatttccttctcctgcccgatt

SEQ ID NO: 113224 - DNA, 22 bp, Artificial Sequence
  Synthetic oligonucleotide; TTT chr11 5396222 5396243 5396227 5396222 -
atttccttctcctgcccgattg

SEQ ID NO: 113225 - DNA, 22 bp, Artificial Sequence
  Synthetic oligonucleotide; TTA chr11 5396221 5396242 5396226 5396221 -
tttccttctcctgcccgattgc

SEQ ID NO: 113226 - DNA, 22 bp, Artificial Sequence
  Synthetic oligonucleotide; TTT chr11 5396218 5396239 5396223 5396218 -
ccttctcctgcccgattgcccg

SEQ ID NO: 113227 - DNA, 22 bp, Artificial Sequence
  Synthetic oligonucleotide; TTC chr11 5396217 5396238 5396222 5396217 -
cttctcctgcccgattgcccgg

SEQ ID NO: 113228 - DNA, 22 bp, Artificial Sequence
  Synthetic oligonucleotide; CTT chr11 5396214 5396235 5396219 5396214 -
ctcctgcccgattgcccgggcc

SEQ ID NO: 113229 - DNA, 22 bp, Artificial Sequence
  Synthetic oligonucleotide; TTC chr11 5396213 5396234 5396218 5396213 -
tcctgcccgattgcccgggcca

SEQ ID NO: 113230 - DNA, 22 bp, Artificial Sequence
  Synthetic oligonucleotide; CTC chr11 5396211 5396232 5396216 5396211 -
ctgcccgattgcccgggccaga

SEQ ID NO: 113231 - DNA, 22 bp, Artificial Sequence
  Synthetic oligonucleotide; CTG chr11 5396208 5396229 5396213 5396208 -
cccgattgcccgggccagaact

SEQ ID NO: 113232 - DNA, 22 bp, Artificial Sequence
  Synthetic oligonucleotide; TTG chr11 5396200 5396221 5396205 5396200 -
cccgggccagaacttccaacac

SEQ ID NO: 113233 - DNA, 22 bp, Artificial Sequence
  Synthetic oligonucleotide; CTT chr11 5396185 5396206 5396190 5396185 -
ccaacactatgttgaataggag

SEQ ID NO: 113234 - DNA, 22 bp, Artificial Sequence
  Synthetic oligonucleotide; TTC chr11 5396184 5396205 5396189 5396184 -
caacactatgttgaataggagt

SEQ ID NO: 113235 - DNA, 22 bp, Artificial Sequence
  Synthetic oligonucleotide; CTA chr11 5396176 5396197 5396181 5396176 -
tgttgaataggagtggtgagag

SEQ ID NO: 113236 - DNA, 22 bp, Artificial Sequence
  Synthetic oligonucleotide; TTG chr11 5396171 5396192 5396176 5396171 -
aataggagtggtgagagagggc

SEQ ID NO: 113237 - DNA, 22 bp, Artificial Sequence
  Synthetic oligonucleotide; CTG chr11 5396142 5396163 5396147 5396142 -
tcttgcagcctaggcacatttt

SEQ ID NO: 113238 - DNA, 22 bp, Artificial Sequence
  Synthetic oligonucleotide; CTT chr11 5396138 5396159 5396143 5396138 -
gcagcctaggcacattttcatt

SEQ ID NO: 113239 - DNA, 22 bp, Artificial Sequence
  Synthetic oligonucleotide; TTG chr11 5396137 5396158 5396142 5396137 -
cagcctaggcacattttcatta

SEQ ID NO: 113240 - DNA, 22 bp, Artificial Sequence
  Synthetic oligonucleotide; CTA chr11 5396130 5396151 5396135 5396130 -
ggcacattttcattaggcagtg

SEQ ID NO: 113241 - DNA, 22 bp, Artificial Sequence
  Synthetic oligonucleotide; TTT chr11 5396121 5396142 5396126 5396121 -
tcattaggcagtgcagtgtggt

SEQ ID NO: 113242 - DNA, 22 bp, Artificial Sequence
  Synthetic oligonucleotide; TTT chr11 5396120 5396141 5396125 5396120 -
cattaggcagtgcagtgtggtt

SEQ ID NO: 113243 - DNA, 22 bp, Artificial Sequence
  Synthetic oligonucleotide; TTC chr11 5396119 5396140 5396124 5396119 -
attaggcagtgcagtgtggtta

SEQ ID NO: 113244 - DNA, 22 bp, Artificial Sequence
  Synthetic oligonucleotide; TTA chr11 5396115 5396136 5396120 5396115 -
ggcagtgcagtgtggttaagag

SEQ ID NO: 113245 - DNA, 22 bp, Artificial Sequence
  Synthetic oligonucleotide; TTA chr11 5396097 5396118 5396102 5396097 -
agagcagtgtctctgggaccag

SEQ ID NO: 113246 - DNA, 22 bp, Artificial Sequence
  Synthetic oligonucleotide; CTC chr11 5396084 5396105 5396089 5396084 -
tgggaccagatctgtattacaa

SEQ ID NO: 113247 - DNA, 22 bp, Artificial Sequence
  Synthetic oligonucleotide; CTG chr11 5396082 5396103 5396087 5396082 -
ggaccagatctgtattacaatc

SEQ ID NO: 113248 - DNA, 22 bp, Artificial Sequence
  Synthetic oligonucleotide; CTG chr11 5396070 5396091 5396075 5396070 -
tattacaatcataacttcaata

SEQ ID NO: 113249 - DNA, 22 bp, Artificial Sequence
  Synthetic oligonucleotide; TTA chr11 5396065 5396086 5396070 5396065 -
caatcataacttcaatagctct

SEQ ID NO: 113250 - DNA, 22 bp, Artificial Sequence
  Synthetic oligonucleotide; CTT chr11 5396053 5396074 5396058 5396053 -
caatagctcttcactctatgat

SEQ ID NO: 113251 - DNA, 22 bp, Artificial Sequence
  Synthetic oligonucleotide; TTC chr11 5396052 5396073 5396057 5396052 -
aatagctcttcactctatgatt

SEQ ID NO: 113252 - DNA, 22 bp, Artificial Sequence
  Synthetic oligonucleotide; CTC chr11 5396044 5396065 5396049 5396044 -
ttcactctatgattgtgcaaag

SEQ ID NO: 113253 - DNA, 22 bp, Artificial Sequence
  Synthetic oligonucleotide; CTT chr11 5396042 5396063 5396047 5396042 -
cactctatgattgtgcaaagta

SEQ ID NO: 113254 - DNA, 22 bp, Artificial Sequence
  Synthetic oligonucleotide; TTC chr11 5396041 5396062 5396046 5396041 -
actctatgattgtgcaaagtat

SEQ ID NO: 113255 - DNA, 22 bp, Artificial Sequence
  Synthetic oligonucleotide; CTC chr11 5396037 5396058 5396042 5396037 -
tatgattgtgcaaagtatctga

SEQ ID NO: 113256 - DNA, 22 bp, Artificial Sequence
  Synthetic oligonucleotide; CTA chr11 5396035 5396056 5396040 5396035 -
tgattgtgcaaagtatctgatt

SEQ ID NO: 113257 - DNA, 22 bp, Artificial Sequence
  Synthetic oligonucleotide; TTG chr11 5396029 5396050 5396034 5396029 -
tgcaaagtatctgattaatctt

SEQ ID NO: 113258 - DNA, 22 bp, Artificial Sequence
  Synthetic oligonucleotide; CTG chr11 5396016 5396037 5396021 5396016 -
attaatcttagtttcttcatct

SEQ ID NO: 113259 - DNA, 22 bp, Artificial Sequence
  Synthetic oligonucleotide; TTA chr11 5396012 5396033 5396017 5396012 -
atcttagtttcttcatctgaaa

SEQ ID NO: 113260 - DNA, 22 bp, Artificial Sequence
  Synthetic oligonucleotide; CTT chr11 5396007 5396028 5396012 5396007 -
agtttcttcatctgaaaaattg

SEQ ID NO: 113261 - DNA, 22 bp, Artificial Sequence
  Synthetic oligonucleotide; TTA chr11 5396006 5396027 5396011 5396006 -
gtttcttcatctgaaaaattga

SEQ ID NO: 113262 - DNA, 22 bp, Artificial Sequence
  Synthetic oligonucleotide; TTT chr11 5396002 5396023 5396007 5396002 -
cttcatctgaaaaattgagaca

SEQ ID NO: 113263 - DNA, 22 bp, Artificial Sequence
  Synthetic oligonucleotide; TTC chr11 5396001 5396022 5396006 5396001 -
ttcatctgaaaaattgagacaa

SEQ ID NO: 113264 - DNA, 22 bp, Artificial Sequence
  Synthetic oligonucleotide; CTT chr11 5395999 5396020 5396004 5395999 -
catctgaaaaattgagacaatt

SEQ ID NO: 113265 - DNA, 22 bp, Artificial Sequence
  Synthetic oligonucleotide; TTC chr11 5395998 5396019 5396003 5395998 -
atctgaaaaattgagacaattc

SEQ ID NO: 113266 - DNA, 22 bp, Artificial Sequence
  Synthetic oligonucleotide; CTG chr11 5395993 5396014 5395998 5395993 -
aaaaattgagacaattctacct

SEQ ID NO: 113267 - DNA, 22 bp, Artificial Sequence
  Synthetic oligonucleotide; TTG chr11 5395985 5396006 5395990 5395985 -
agacaattctacctactccata

SEQ ID NO: 113268 - DNA, 22 bp, Artificial Sequence
  Synthetic oligonucleotide; TTC chr11 5395976 5395997 5395981 5395976 -
tacctactccatagattagaga

SEQ ID NO: 113269 - DNA, 22 bp, Artificial Sequence
  Synthetic oligonucleotide; CTA chr11 5395974 5395995 5395979 5395974 -
cctactccatagattagagagc

SEQ ID NO: 113270 - DNA, 22 bp, Artificial Sequence
  Synthetic oligonucleotide; CTA chr11 5395970 5395991 5395975 5395970 -
ctccatagattagagagccatt

SEQ ID NO: 113271 - DNA, 22 bp, Artificial Sequence
  Synthetic oligonucleotide; CTC chr11 5395967 5395988 5395972 5395967 -
catagattagagagccattcat

SEQ ID NO: 113272 - DNA, 22 bp, Artificial Sequence
  Synthetic oligonucleotide; TTA chr11 5395958 5395979 5395963 5395958 -
gagagccattcatatgcaattt

SEQ ID NO: 113273 - DNA, 22 bp, Artificial Sequence
  Synthetic oligonucleotide; TTC chr11 5395947 5395968 5395952 5395947 -
atatgcaattttaaatggagta

SEQ ID NO: 113274 - DNA, 22 bp, Artificial Sequence
  Synthetic oligonucleotide; TTT chr11 5395936 5395957 5395941 5395936 -
taaatggagtacagttagaagc

SEQ ID NO: 113275 - DNA, 22 bp, Artificial Sequence
  Synthetic oligonucleotide; TTT chr11 5395935 5395956 5395940 5395935 -
aaatggagtacagttagaagca

SEQ ID NO: 113276 - DNA, 22 bp, Artificial Sequence
  Synthetic oligonucleotide; TTA chr11 5395934 5395955 5395939 5395934 -
aatggagtacagttagaagcaa

SEQ ID NO: 113277 - DNA, 22 bp, Artificial Sequence
  Synthetic oligonucleotide; TTA chr11 5395919 5395940 5395924 5395919 -
gaagcaaatactcaatagacac

SEQ ID NO: 113278 - DNA, 22 bp, Artificial Sequence
  Synthetic oligonucleotide; CTC chr11 5395906 5395927 5395911 5395906 -
aatagacacattttattagttg

SEQ ID NO: 113279 - DNA, 22 bp, Artificial Sequence
  Synthetic oligonucleotide; TTT chr11 5395893 5395914 5395898 5395893 -
tattagttgtactttccagcat

SEQ ID NO: 113280 - DNA, 22 bp, Artificial Sequence
  Synthetic oligonucleotide; TTT chr11 5395892 5395913 5395897 5395892 -
attagttgtactttccagcatt

SEQ ID NO: 113281 - DNA, 22 bp, Artificial Sequence
  Synthetic oligonucleotide; TTA chr11 5395891 5395912 5395896 5395891 -
ttagttgtactttccagcattc

SEQ ID NO: 113282 - DNA, 22 bp, Artificial Sequence
  Synthetic oligonucleotide; TTA chr11 5395888 5395909 5395893 5395888 -
gttgtactttccagcattccag

SEQ ID NO: 113283 - DNA, 22 bp, Artificial Sequence
  Synthetic oligonucleotide; TTG chr11 5395884 5395905 5395889 5395884 -
tactttccagcattccagtgag

SEQ ID NO: 113284 - DNA, 22 bp, Artificial Sequence
  Synthetic oligonucleotide; CTT chr11 5395879 5395900 5395884 5395879 -
tccagcattccagtgagcaatg

SEQ ID NO: 113285 - DNA, 22 bp, Artificial Sequence
  Synthetic oligonucleotide; TTT chr11 5395878 5395899 5395883 5395878 -
ccagcattccagtgagcaatgt

SEQ ID NO: 113286 - DNA, 22 bp, Artificial Sequence
  Synthetic oligonucleotide; TTC chr11 5395877 5395898 5395882 5395877 -
cagcattccagtgagcaatgtt

SEQ ID NO: 113287 - DNA, 22 bp, Artificial Sequence
  Synthetic oligonucleotide; TTC chr11 5395869 5395890 5395874 5395869 -
cagtgagcaatgttgcagtgag

SEQ ID NO: 113288 - DNA, 22 bp, Artificial Sequence
  Synthetic oligonucleotide; TTG chr11 5395854 5395875 5395859 5395854 -
cagtgagctctaagaaaagatt

SEQ ID NO: 113289 - DNA, 22 bp, Artificial Sequence
  Synthetic oligonucleotide; CTC chr11 5395844 5395865 5395849 5395844 -
taagaaaagattgaaaaataat

SEQ ID NO: 113290 - DNA, 22 bp, Artificial Sequence
  Synthetic oligonucleotide; CTA chr11 5395842 5395863 5395847 5395842 -
agaaaagattgaaaaataatct

SEQ ID NO: 113291 - DNA, 22 bp, Artificial Sequence
  Synthetic oligonucleotide; TTG chr11 5395831 5395852 5395836 5395831 -
aaaaataatctgacaacaatga

SEQ ID NO: 113292 - DNA, 22 bp, Artificial Sequence
  Synthetic oligonucleotide; CTG chr11 5395819 5395840 5395824 5395819 -
acaacaatgaagcgtaaggtat

SEQ ID NO: 113293 - DNA, 22 bp, Artificial Sequence
  Synthetic oligonucleotide; TTT chr11 5395795 5395816 5395800 5395795 -
ggagtgggaagccatgagctct

SEQ ID NO: 113294 - DNA, 22 bp, Artificial Sequence
  Synthetic oligonucleotide; TTG chr11 5395794 5395815 5395799 5395794 -
gagtgggaagccatgagctctt

SEQ ID NO: 113295 - DNA, 22 bp, Artificial Sequence
  Synthetic oligonucleotide; CTC chr11 5395774 5395795 5395779 5395774 -
ttgcacaggtttttggacaatc

SEQ ID NO: 113296 - DNA, 22 bp, Artificial Sequence
  Synthetic oligonucleotide; CTT chr11 5395772 5395793 5395777 5395772 -
gcacaggtttttggacaatcct

SEQ ID NO: 113297 - DNA, 22 bp, Artificial Sequence
  Synthetic oligonucleotide; TTG chr11 5395771 5395792 5395776 5395771 -
cacaggtttttggacaatcctt

SEQ ID NO: 113298 - DNA, 22 bp, Artificial Sequence
  Synthetic oligonucleotide; TTT chr11 5395762 5395783 5395767 5395762 -
ttggacaatccttccatatggc

SEQ ID NO: 113299 - DNA, 22 bp, Artificial Sequence
  Synthetic oligonucleotide; TTT chr11 5395761 5395782 5395766 5395761 -
tggacaatccttccatatggct

SEQ ID NO: 113300 - DNA, 22 bp, Artificial Sequence
  Synthetic oligonucleotide; TTT chr11 5395760 5395781 5395765 5395760 -
ggacaatccttccatatggctt

SEQ ID NO: 113301 - DNA, 22 bp, Artificial Sequence
  Synthetic oligonucleotide; TTG chr11 5395759 5395780 5395764 5395759 -
gacaatccttccatatggcttt

SEQ ID NO: 113302 - DNA, 22 bp, Artificial Sequence
  Synthetic oligonucleotide; CTT chr11 5395749 5395770 5395754 5395749 -
ccatatggctttggcaaagtta

SEQ ID NO: 113303 - DNA, 22 bp, Artificial Sequence
  Synthetic oligonucleotide; TTC chr11 5395748 5395769 5395753 5395748 -
catatggctttggcaaagttac

SEQ ID NO: 113304 - DNA, 22 bp, Artificial Sequence
  Synthetic oligonucleotide; CTT chr11 5395738 5395759 5395743 5395738 -
tggcaaagttactgaatctttc

SEQ ID NO: 113305 - DNA, 22 bp, Artificial Sequence
  Synthetic oligonucleotide; TTT chr11 5395737 5395758 5395742 5395737 -
ggcaaagttactgaatctttct

SEQ ID NO: 113306 - DNA, 22 bp, Artificial Sequence
  Synthetic oligonucleotide; TTG chr11 5395736 5395757 5395741 5395736 -
gcaaagttactgaatctttcta

SEQ ID NO: 113307 - DNA, 22 bp, Artificial Sequence
  Synthetic oligonucleotide; TTA chr11 5395727 5395748 5395732 5395727 -
ctgaatctttctaaaccttagc

SEQ ID NO: 113308 - DNA, 22 bp, Artificial Sequence
  Synthetic oligonucleotide; CTG chr11 5395724 5395745 5395729 5395724 -
aatctttctaaaccttagcttt

SEQ ID NO: 113309 - DNA, 22 bp, Artificial Sequence
  Synthetic oligonucleotide; CTT chr11 5395718 5395739 5395723 5395718 -
tctaaaccttagcttttttact

SEQ ID NO: 113310 - DNA, 22 bp, Artificial Sequence
  Synthetic oligonucleotide; TTT chr11 5395717 5395738 5395722 5395717 -
ctaaaccttagcttttttacta

SEQ ID NO: 113311 - DNA, 22 bp, Artificial Sequence
  Synthetic oligonucleotide; TTC chr11 5395716 5395737 5395721 5395716 -
taaaccttagcttttttactat

SEQ ID NO: 113312 - DNA, 22 bp, Artificial Sequence
  Synthetic oligonucleotide; CTA chr11 5395714 5395735 5395719 5395714 -
aaccttagcttttttactatgt

SEQ ID NO: 113313 - DNA, 22 bp, Artificial Sequence
  Synthetic oligonucleotide; CTT chr11 5395708 5395729 5395713 5395708 -
agcttttttactatgttgaaag

SEQ ID NO: 113314 - DNA, 22 bp, Artificial Sequence
  Synthetic oligonucleotide; TTA chr11 5395707 5395728 5395712 5395707 -
gcttttttactatgttgaaaga

SEQ ID NO: 113315 - DNA, 22 bp, Artificial Sequence
  Synthetic oligonucleotide; CTT chr11 5395703 5395724 5395708 5395703 -
ttttactatgttgaaagatttc

SEQ ID NO: 113316 - DNA, 22 bp, Artificial Sequence
  Synthetic oligonucleotide; TTT chr11 5395702 5395723 5395707 5395702 -
tttactatgttgaaagatttcc

SEQ ID NO: 113317 - DNA, 22 bp, Artificial Sequence
  Synthetic oligonucleotide; TTT chr11 5395701 5395722 5395706 5395701 -
ttactatgttgaaagatttcca

SEQ ID NO: 113318 - DNA, 22 bp, Artificial Sequence
  Synthetic oligonucleotide; TTT chr11 5395700 5395721 5395705 5395700 -
tactatgttgaaagatttccac

SEQ ID NO: 113319 - DNA, 22 bp, Artificial Sequence
  Synthetic oligonucleotide; TTT chr11 5395699 5395720 5395704 5395699 -
actatgttgaaagatttccaca

SEQ ID NO: 113320 - DNA, 22 bp, Artificial Sequence
  Synthetic oligonucleotide; TTA chr11 5395698 5395719 5395703 5395698 -
ctatgttgaaagatttccacat

SEQ ID NO: 113321 - DNA, 22 bp, Artificial Sequence
  Synthetic oligonucleotide; CTA chr11 5395695 5395716 5395700 5395695 -
tgttgaaagatttccacatggg

SEQ ID NO: 113322 - DNA, 22 bp, Artificial Sequence
  Synthetic oligonucleotide; TTG chr11 5395690 5395711 5395695 5395690 -
aaagatttccacatgggccctg

SEQ ID NO: 113323 - DNA, 22 bp, Artificial Sequence
  Synthetic oligonucleotide; TTT chr11 5395682 5395703 5395687 5395682 -
ccacatgggccctgcctctttt

SEQ ID NO: 113324 - DNA, 22 bp, Artificial Sequence
  Synthetic oligonucleotide; TTC chr11 5395681 5395702 5395686 5395681 -
cacatgggccctgcctcttttc

SEQ ID NO: 113325 - DNA, 22 bp, Artificial Sequence
  Synthetic oligonucleotide; CTG chr11 5395668 5395689 5395673 5395668 -
cctcttttcgagagaaatgatt

SEQ ID NO: 113326 - DNA, 22 bp, Artificial Sequence
  Synthetic oligonucleotide; CTC chr11 5395664 5395685 5395669 5395664 -
ttttcgagagaaatgattaggt

SEQ ID NO: 113327 - DNA, 22 bp, Artificial Sequence
  Synthetic oligonucleotide; CTT chr11 5395662 5395683 5395667 5395662 -
ttcgagagaaatgattaggttt

SEQ ID NO: 113328 - DNA, 22 bp, Artificial Sequence
  Synthetic oligonucleotide; TTT chr11 5395661 5395682 5395666 5395661 -
tcgagagaaatgattaggttta

SEQ ID NO: 113329 - DNA, 22 bp, Artificial Sequence
  Synthetic oligonucleotide; TTT chr11 5395660 5395681 5395665 5395660 -
cgagagaaatgattaggtttaa

SEQ ID NO: 113330 - DNA, 22 bp, Artificial Sequence
  Synthetic oligonucleotide; TTC chr11 5395659 5395680 5395664 5395659 -
gagagaaatgattaggtttaat

SEQ ID NO: 113331 - DNA, 22 bp, Artificial Sequence
  Synthetic oligonucleotide; TTA chr11 5395645 5395666 5395650 5395645 -
ggtttaatggggctgtggagga

SEQ ID NO: 113332 - DNA, 22 bp, Artificial Sequence
  Synthetic oligonucleotide; TTT chr11 5395640 5395661 5395645 5395640 -
aatggggctgtggaggaaagca

SEQ ID NO: 113333 - DNA, 22 bp, Artificial Sequence
  Synthetic oligonucleotide; TTA chr11 5395639 5395660 5395644 5395639 -
atggggctgtggaggaaagcac

SEQ ID NO: 113334 - DNA, 22 bp, Artificial Sequence
  Synthetic oligonucleotide; CTG chr11 5395630 5395651 5395635 5395630 -
tggaggaaagcactctgaaatg

SEQ ID NO: 113335 - DNA, 22 bp, Artificial Sequence
  Synthetic oligonucleotide; CTC chr11 5395615 5395636 5395620 5395615 -
tgaaatgttagaagcttcatca

SEQ ID NO: 113336 - DNA, 22 bp, Artificial Sequence
  Synthetic oligonucleotide; CTG chr11 5395613 5395634 5395618 5395613 -
aaatgttagaagcttcatcaat

SEQ ID NO: 113337 - DNA, 22 bp, Artificial Sequence
  Synthetic oligonucleotide; TTA chr11 5395605 5395626 5395610 5395605 -
gaagcttcatcaattggagcaa

SEQ ID NO: 113338 - DNA, 22 bp, Artificial Sequence
  Synthetic oligonucleotide; CTT chr11 5395598 5395619 5395603 5395598 -
catcaattggagcaattgctga

SEQ ID NO: 113339 - DNA, 22 bp, Artificial Sequence
  Synthetic oligonucleotide; TTC chr11 5395597 5395618 5395602 5395597 -
atcaattggagcaattgctgag

SEQ ID NO: 113340 - DNA, 22 bp, Artificial Sequence
  Synthetic oligonucleotide; TTG chr11 5395589 5395610 5395594 5395589 -
gagcaattgctgagattatgtt

SEQ ID NO: 113341 - DNA, 22 bp, Artificial Sequence
  Synthetic oligonucleotide; TTG chr11 5395580 5395601 5395585 5395580 -
ctgagattatgtttccttgcct

SEQ ID NO: 113342 - DNA, 22 bp, Artificial Sequence
  Synthetic oligonucleotide; CTG chr11 5395577 5395598 5395582 5395577 -
agattatgtttccttgcctgcc

SEQ ID NO: 113343 - DNA, 22 bp, Artificial Sequence
  Synthetic oligonucleotide; TTA chr11 5395571 5395592 5395576 5395571 -
tgtttccttgcctgccacaacc

SEQ ID NO: 113344 - DNA, 22 bp, Artificial Sequence
  Synthetic oligonucleotide; TTT chr11 5395566 5395587 5395571 5395566 -
ccttgcctgccacaaccctgta

SEQ ID NO: 113345 - DNA, 22 bp, Artificial Sequence
  Synthetic oligonucleotide; TTC chr11 5395565 5395586 5395570 5395565 -
cttgcctgccacaaccctgtat

SEQ ID NO: 113346 - DNA, 22 bp, Artificial Sequence
  Synthetic oligonucleotide; CTT chr11 5395562 5395583 5395567 5395562 -
gcctgccacaaccctgtatcat

SEQ ID NO: 113347 - DNA, 22 bp, Artificial Sequence
  Synthetic oligonucleotide; TTG chr11 5395561 5395582 5395566 5395561 -
cctgccacaaccctgtatcatt

SEQ ID NO: 113348 - DNA, 22 bp, Artificial Sequence
  Synthetic oligonucleotide; CTG chr11 5395557 5395578 5395562 5395557 -
ccacaaccctgtatcattctct

SEQ ID NO: 113349 - DNA, 22 bp, Artificial Sequence
  Synthetic oligonucleotide; CTG chr11 5395546 5395567 5395551 5395546 -
tatcattctctacaaggcatag

SEQ ID NO: 113350 - DNA, 22 bp, Artificial Sequence
  Synthetic oligonucleotide; TTC chr11 5395538 5395559 5395543 5395538 -
tctacaaggcatagcccagtaa

SEQ ID NO: 113351 - DNA, 22 bp, Artificial Sequence
  Synthetic oligonucleotide; CTC chr11 5395536 5395557 5395541 5395536 -
tacaaggcatagcccagtaaca

SEQ ID NO: 113352 - DNA, 22 bp, Artificial Sequence
  Synthetic oligonucleotide; CTA chr11 5395534 5395555 5395539 5395534 -
caaggcatagcccagtaacaag

SEQ ID NO: 113353 - DNA, 22 bp, Artificial Sequence
  Synthetic oligonucleotide; CTG chr11 5395502 5395523 5395507 5395502 -
tcttccccatcaaaaacatcac

SEQ ID NO: 113354 - DNA, 22 bp, Artificial Sequence
  Synthetic oligonucleotide; CTT chr11 5395498 5395519 5395503 5395498 -
ccccatcaaaaacatcacggga

SEQ ID NO: 113355 - DNA, 22 bp, Artificial Sequence
  Synthetic oligonucleotide; TTC chr11 5395497 5395518 5395502 5395497 -
cccatcaaaaacatcacgggag

SEQ ID NO: 113356 - DNA, 22 bp, Artificial Sequence
  Synthetic oligonucleotide; CTA chr11 5395453 5395474 5395458 5395453 -
acaacagattggccatcttcct

SEQ ID NO: 113357 - DNA, 22 bp, Artificial Sequence
  Synthetic oligonucleotide; TTG chr11 5395442 5395463 5395447 5395442 -
gccatcttcctggaagctgccc

SEQ ID NO: 113358 - DNA, 22 bp, Artificial Sequence
  Synthetic oligonucleotide; CTT chr11 5395434 5395455 5395439 5395434 -
cctggaagctgccctattccat

SEQ ID NO: 113359 - DNA, 22 bp, Artificial Sequence
  Synthetic oligonucleotide; TTC chr11 5395433 5395454 5395438 5395433 -
ctggaagctgccctattccata

SEQ ID NO: 113360 - DNA, 22 bp, Artificial Sequence
  Synthetic oligonucleotide; CTG chr11 5395430 5395451 5395435 5395430 -
gaagctgccctattccataacc

SEQ ID NO: 113361 - DNA, 22 bp, Artificial Sequence
  Synthetic oligonucleotide; CTG chr11 5395423 5395444 5395428 5395423 -
ccctattccataaccctgcata

SEQ ID NO: 113362 - DNA, 22 bp, Artificial Sequence
  Synthetic oligonucleotide; CTA chr11 5395418 5395439 5395423 5395418 -
ttccataaccctgcatatagtc

SEQ ID NO: 113363 - DNA, 22 bp, Artificial Sequence
  Synthetic oligonucleotide; TTC chr11 5395415 5395436 5395420 5395415 -
cataaccctgcatatagtcatg

SEQ ID NO: 113364 - DNA, 22 bp, Artificial Sequence
  Synthetic oligonucleotide; CTG chr11 5395405 5395426 5395410 5395405 -
catatagtcatgctagataagg

SEQ ID NO: 113365 - DNA, 22 bp, Artificial Sequence
  Synthetic oligonucleotide; CTA chr11 5395390 5395411 5395395 5395390 -
gataagggatattagagaggtc

SEQ ID NO: 113366 - DNA, 22 bp, Artificial Sequence
  Synthetic oligonucleotide; TTA chr11 5395376 5395397 5395381 5395376 -
gagaggtcactccaatgacttc

SEQ ID NO: 113367 - DNA, 22 bp, Artificial Sequence
  Synthetic oligonucleotide; CTC chr11 5395364 5395385 5395369 5395364 -
caatgacttcctttatccacaa

SEQ ID NO: 113368 - DNA, 22 bp, Artificial Sequence
  Synthetic oligonucleotide; CTT chr11 5395355 5395376 5395360 5395355 -
cctttatccacaaaacaaagga

SEQ ID NO: 113369 - DNA, 22 bp, Artificial Sequence
  Synthetic oligonucleotide; TTC chr11 5395354 5395375 5395359 5395354 -
ctttatccacaaaacaaaggac

SEQ ID NO: 113370 - DNA, 22 bp, Artificial Sequence
  Synthetic oligonucleotide; CTT chr11 5395351 5395372 5395356 5395351 -
tatccacaaaacaaaggacctt

SEQ ID NO: 113371 - DNA, 22 bp, Artificial Sequence
  Synthetic oligonucleotide; TTT chr11 5395350 5395371 5395355 5395350 -
atccacaaaacaaaggaccttc

SEQ ID NO: 113372 - DNA, 22 bp, Artificial Sequence
  Synthetic oligonucleotide; TTA chr11 5395349 5395370 5395354 5395349 -
tccacaaaacaaaggaccttca

SEQ ID NO: 113373 - DNA, 22 bp, Artificial Sequence
  Synthetic oligonucleotide; CTT chr11 5395329 5395350 5395334 5395329 -
cagcaacttactggtcctttct

SEQ ID NO: 113374 - DNA, 22 bp, Artificial Sequence
  Synthetic oligonucleotide; TTC chr11 5395328 5395349 5395333 5395328 -
agcaacttactggtcctttctt

SEQ ID NO: 113375 - DNA, 22 bp, Artificial Sequence
  Synthetic oligonucleotide; CTT chr11 5395320 5395341 5395325 5395320 -
actggtcctttcttctctgtag

SEQ ID NO: 113376 - DNA, 22 bp, Artificial Sequence
  Synthetic oligonucleotide; TTA chr11 5395319 5395340 5395324 5395319 -
ctggtcctttcttctctgtagc

SEQ ID NO: 113377 - DNA, 22 bp, Artificial Sequence
  Synthetic oligonucleotide; CTG chr11 5395316 5395337 5395321 5395316 -
gtcctttcttctctgtagcttc

SEQ ID NO: 113378 - DNA, 22 bp, Artificial Sequence
  Synthetic oligonucleotide; CTT chr11 5395310 5395331 5395315 5395310 -
tcttctctgtagcttctttctc

SEQ ID NO: 113379 - DNA, 22 bp, Artificial Sequence
  Synthetic oligonucleotide; TTT chr11 5395309 5395330 5395314 5395309 -
cttctctgtagcttctttctca

SEQ ID NO: 113380 - DNA, 22 bp, Artificial Sequence
  Synthetic oligonucleotide; TTC chr11 5395308 5395329 5395313 5395308 -
ttctctgtagcttctttctcat

SEQ ID NO: 113381 - DNA, 22 bp, Artificial Sequence
  Synthetic oligonucleotide; CTT chr11 5395306 5395327 5395311 5395306 -
ctctgtagcttctttctcatgc

SEQ ID NO: 113382 - DNA, 22 bp, Artificial Sequence
  Synthetic oligonucleotide; TTC chr11 5395305 5395326 5395310 5395305 -
tctgtagcttctttctcatgca

SEQ ID NO: 113383 - DNA, 22 bp, Artificial Sequence
  Synthetic oligonucleotide; CTC chr11 5395303 5395324 5395308 5395303 -
tgtagcttctttctcatgcagc

SEQ ID NO: 113384 - DNA, 22 bp, Artificial Sequence
  Synthetic oligonucleotide; CTG chr11 5395301 5395322 5395306 5395301 -
tagcttctttctcatgcagccc

SEQ ID NO: 113385 - DNA, 22 bp, Artificial Sequence
  Synthetic oligonucleotide; CTT chr11 5395295 5395316 5395300 5395295 -
ctttctcatgcagcccttccac

SEQ ID NO: 113386 - DNA, 22 bp, Artificial Sequence
  Synthetic oligonucleotide; TTC chr11 5395294 5395315 5395299 5395294 -
tttctcatgcagcccttccact

SEQ ID NO: 113387 - DNA, 22 bp, Artificial Sequence
  Synthetic oligonucleotide; CTT chr11 5395292 5395313 5395297 5395292 -
tctcatgcagcccttccactcc

SEQ ID NO: 113388 - DNA, 22 bp, Artificial Sequence
  Synthetic oligonucleotide; TTT chr11 5395291 5395312 5395296 5395291 -
ctcatgcagcccttccactcca

SEQ ID NO: 113389 - DNA, 22 bp, Artificial Sequence
  Synthetic oligonucleotide; TTC chr11 5395290 5395311 5395295 5395290 -
tcatgcagcccttccactccat

SEQ ID NO: 113390 - DNA, 22 bp, Artificial Sequence
  Synthetic oligonucleotide; CTC chr11 5395288 5395309 5395293 5395288 -
atgcagcccttccactccatgc

SEQ ID NO: 113391 - DNA, 22 bp, Artificial Sequence
  Synthetic oligonucleotide; CTT chr11 5395277 5395298 5395282 5395277 -
ccactccatgccagcatcttcc

SEQ ID NO: 113392 - DNA, 22 bp, Artificial Sequence
  Synthetic oligonucleotide; TTC chr11 5395276 5395297 5395281 5395276 -
cactccatgccagcatcttcca

SEQ ID NO: 113393 - DNA, 22 bp, Artificial Sequence
  Synthetic oligonucleotide; CTC chr11 5395271 5395292 5395276 5395271 -
catgccagcatcttccatttga

SEQ ID NO: 113394 - DNA, 22 bp, Artificial Sequence
  Synthetic oligonucleotide; CTT chr11 5395257 5395278 5395262 5395257 -
ccatttgactcaggatgctgtt

SEQ ID NO: 113395 - DNA, 22 bp, Artificial Sequence
  Synthetic oligonucleotide; TTC chr11 5395256 5395277 5395261 5395256 -
catttgactcaggatgctgttc

SEQ ID NO: 113396 - DNA, 22 bp, Artificial Sequence
  Synthetic oligonucleotide; TTT chr11 5395251 5395272 5395256 5395251 -
gactcaggatgctgttctacgt

SEQ ID NO: 113397 - DNA, 22 bp, Artificial Sequence
  Synthetic oligonucleotide; TTG chr11 5395250 5395271 5395255 5395250 -
actcaggatgctgttctacgtg

SEQ ID NO: 113398 - DNA, 22 bp, Artificial Sequence
  Synthetic oligonucleotide; CTC chr11 5395246 5395267 5395251 5395246 -
aggatgctgttctacgtgggct

SEQ ID NO: 113399 - DNA, 22 bp, Artificial Sequence
  Synthetic oligonucleotide; CTG chr11 5395237 5395258 5395242 5395237 -
ttctacgtgggctgcactggca

SEQ ID NO: 113400 - DNA, 22 bp, Artificial Sequence
  Synthetic oligonucleotide; TTC chr11 5395234 5395255 5395239 5395234 -
tacgtgggctgcactggcactt

SEQ ID NO: 113401 - DNA, 22 bp, Artificial Sequence
  Synthetic oligonucleotide; CTA chr11 5395232 5395253 5395237 5395232 -
cgtgggctgcactggcacttat

SEQ ID NO: 113402 - DNA, 22 bp, Artificial Sequence
  Synthetic oligonucleotide; CTG chr11 5395223 5395244 5395228 5395223 -
cactggcacttataaagctgtc

SEQ ID NO: 113403 - DNA, 22 bp, Artificial Sequence
  Synthetic oligonucleotide; CTG chr11 5395218 5395239 5395223 5395218 -
gcacttataaagctgtctctct

SEQ ID NO: 113404 - DNA, 22 bp, Artificial Sequence
  Synthetic oligonucleotide; CTT chr11 5395212 5395233 5395217 5395212 -
ataaagctgtctctcttccttg

SEQ ID NO: 113405 - DNA, 22 bp, Artificial Sequence
  Synthetic oligonucleotide; TTA chr11 5395211 5395232 5395216 5395211 -
taaagctgtctctcttccttgg

SEQ ID NO: 113406 - DNA, 22 bp, Artificial Sequence
  Synthetic oligonucleotide; CTG chr11 5395203 5395224 5395208 5395203 -
tctctcttccttgggtctttgg

SEQ ID NO: 113407 - DNA, 22 bp, Artificial Sequence
  Synthetic oligonucleotide; CTC chr11 5395199 5395220 5395204 5395199 -
tcttccttgggtctttggccct

SEQ ID NO: 113408 - DNA, 22 bp, Artificial Sequence
  Synthetic oligonucleotide; CTC chr11 5395197 5395218 5395202 5395197 -
ttccttgggtctttggccctca

SEQ ID NO: 113409 - DNA, 22 bp, Artificial Sequence
  Synthetic oligonucleotide; CTT chr11 5395195 5395216 5395200 5395195 -
ccttgggtctttggccctcaaa

SEQ ID NO: 113410 - DNA, 22 bp, Artificial Sequence
  Synthetic oligonucleotide; TTC chr11 5395194 5395215 5395199 5395194 -
cttgggtctttggccctcaaag

SEQ ID NO: 113411 - DNA, 22 bp, Artificial Sequence
  Synthetic oligonucleotide; CTT chr11 5395191 5395212 5395196 5395191 -
gggtctttggccctcaaaggaa

SEQ ID NO: 113412 - DNA, 22 bp, Artificial Sequence
  Synthetic oligonucleotide; TTG chr11 5395190 5395211 5395195 5395190 -
ggtctttggccctcaaaggaat

SEQ ID NO: 113413 - DNA, 22 bp, Artificial Sequence
  Synthetic oligonucleotide; CTT chr11 5395184 5395205 5395189 5395184 -
tggccctcaaaggaatctccct

SEQ ID NO: 113414 - DNA, 22 bp, Artificial Sequence
  Synthetic oligonucleotide; TTT chr11 5395183 5395204 5395188 5395183 -
ggccctcaaaggaatctcccta

SEQ ID NO: 113415 - DNA, 22 bp, Artificial Sequence
  Synthetic oligonucleotide; TTG chr11 5395182 5395203 5395187 5395182 -
gccctcaaaggaatctccctag

SEQ ID NO: 113416 - DNA, 22 bp, Artificial Sequence
  Synthetic oligonucleotide; CTC chr11 5395176 5395197 5395181 5395176 -
aaaggaatctccctagatggac

SEQ ID NO: 113417 - DNA, 22 bp, Artificial Sequence
  Synthetic oligonucleotide; CTC chr11 5395165 5395186 5395170 5395165 -
cctagatggacgcagacttgat

SEQ ID NO: 113418 - DNA, 22 bp, Artificial Sequence
  Synthetic oligonucleotide; CTA chr11 5395161 5395182 5395166 5395161 -
gatggacgcagacttgatgaat

SEQ ID NO: 113419 - DNA, 22 bp, Artificial Sequence
  Synthetic oligonucleotide; CTT chr11 5395146 5395167 5395151 5395146 -
gatgaatgtcaaagagggatta

SEQ ID NO: 113420 - DNA, 22 bp, Artificial Sequence
  Synthetic oligonucleotide; TTG chr11 5395145 5395166 5395150 5395145 -
atgaatgtcaaagagggattag

SEQ ID NO: 113421 - DNA, 22 bp, Artificial Sequence
  Synthetic oligonucleotide; TTA chr11 5395124 5395145 5395129 5395124 -
gcatcctcctagaccaaagcat

SEQ ID NO: 113422 - DNA, 22 bp, Artificial Sequence
  Synthetic oligonucleotide; CTC chr11 5395116 5395137 5395121 5395116 -
ctagaccaaagcatttgagatg

SEQ ID NO: 113423 - DNA, 22 bp, Artificial Sequence
  Synthetic oligonucleotide; CTA chr11 5395113 5395134 5395118 5395113 -
gaccaaagcatttgagatgccc

SEQ ID NO: 113424 - DNA, 22 bp, Artificial Sequence
  Synthetic oligonucleotide; TTT chr11 5395100 5395121 5395105 5395100 -
gagatgcccagttatcttaaat

SEQ ID NO: 113425 - DNA, 22 bp, Artificial Sequence
  Synthetic oligonucleotide; TTG chr11 5395099 5395120 5395104 5395099 -
agatgcccagttatcttaaatg

SEQ ID NO: 113426 - DNA, 22 bp, Artificial Sequence
  Synthetic oligonucleotide; TTA chr11 5395086 5395107 5395091 5395086 -
tcttaaatggaaatttagtgaa

SEQ ID NO: 113427 - DNA, 22 bp, Artificial Sequence
  Synthetic oligonucleotide; CTT chr11 5395082 5395103 5395087 5395082 -
aaatggaaatttagtgaaccat

SEQ ID NO: 113428 - DNA, 22 bp, Artificial Sequence
  Synthetic oligonucleotide; TTA chr11 5395081 5395102 5395086 5395081 -
aatggaaatttagtgaaccatg

SEQ ID NO: 113429 - DNA, 22 bp, Artificial Sequence
  Synthetic oligonucleotide; TTT chr11 5395070 5395091 5395075 5395070 -
agtgaaccatgagtacctctag

SEQ ID NO: 113430 - DNA, 22 bp, Artificial Sequence
  Synthetic oligonucleotide; TTA chr11 5395069 5395090 5395074 5395069 -
gtgaaccatgagtacctctagg

SEQ ID NO: 113431 - DNA, 22 bp, Artificial Sequence
  Synthetic oligonucleotide; CTC chr11 5395051 5395072 5395056 5395051 -
taggaggtatttcagtgagcca

SEQ ID NO: 113432 - DNA, 22 bp, Artificial Sequence
  Synthetic oligonucleotide; CTA chr11 5395049 5395070 5395054 5395049 -
ggaggtatttcagtgagccaga

SEQ ID NO: 113433 - DNA, 22 bp, Artificial Sequence
  Synthetic oligonucleotide; TTT chr11 5395039 5395060 5395044 5395039 -
cagtgagccagaggatccttga

SEQ ID NO: 113434 - DNA, 22 bp, Artificial Sequence
  Synthetic oligonucleotide; TTC chr11 5395038 5395059 5395043 5395038 -
agtgagccagaggatccttgac

SEQ ID NO: 113435 - DNA, 22 bp, Artificial Sequence
  Synthetic oligonucleotide; CTT chr11 5395019 5395040 5395024 5395019 -
gactgtcttctctccccagctg

SEQ ID NO: 113436 - DNA, 22 bp, Artificial Sequence
  Synthetic oligonucleotide; TTG chr11 5395018 5395039 5395023 5395018 -
actgtcttctctccccagctgc

SEQ ID NO: 113437 - DNA, 22 bp, Artificial Sequence
  Synthetic oligonucleotide; CTG chr11 5395014 5395035 5395019 5395014 -
tcttctctccccagctgccaac

SEQ ID NO: 113438 - DNA, 22 bp, Artificial Sequence
  Synthetic oligonucleotide; CTT chr11 5395010 5395031 5395015 5395010 -
ctctccccagctgccaacttca

SEQ ID NO: 113439 - DNA, 22 bp, Artificial Sequence
  Synthetic oligonucleotide; TTC chr11 5395009 5395030 5395014 5395009 -
tctccccagctgccaacttcat

SEQ ID NO: 113440 - DNA, 22 bp, Artificial Sequence
  Synthetic oligonucleotide; CTC chr11 5395007 5395028 5395012 5395007 -
tccccagctgccaacttcataa

SEQ ID NO: 113441 - DNA, 22 bp, Artificial Sequence
  Synthetic oligonucleotide; CTC chr11 5395005 5395026 5395010 5395005 -
cccagctgccaacttcataaga

SEQ ID NO: 113442 - DNA, 22 bp, Artificial Sequence
  Synthetic oligonucleotide; CTG chr11 5394997 5395018 5395002 5394997 -
ccaacttcataagaaaatttat

SEQ ID NO: 113443 - DNA, 22 bp, Artificial Sequence
  Synthetic oligonucleotide; CTT chr11 5394990 5395011 5394995 5394990 -
cataagaaaatttattgggtgc

SEQ ID NO: 113444 - DNA, 22 bp, Artificial Sequence
  Synthetic oligonucleotide; TTC chr11 5394989 5395010 5394994 5394989 -
ataagaaaatttattgggtgct

SEQ ID NO: 113445 - DNA, 22 bp, Artificial Sequence
  Synthetic oligonucleotide; TTT chr11 5394977 5394998 5394982 5394977 -
attgggtgcttctcaatcctct

SEQ ID NO: 113446 - DNA, 22 bp, Artificial Sequence
  Synthetic oligonucleotide; TTA chr11 5394976 5394997 5394981 5394976 -
ttgggtgcttctcaatcctctt

SEQ ID NO: 113447 - DNA, 22 bp, Artificial Sequence
  Synthetic oligonucleotide; TTG chr11 5394973 5394994 5394978 5394973 -
ggtgcttctcaatcctcttttt

SEQ ID NO: 113448 - DNA, 22 bp, Artificial Sequence
  Synthetic oligonucleotide; CTT chr11 5394966 5394987 5394971 5394966 -
ctcaatcctcttttttgtcttt

SEQ ID NO: 113449 - DNA, 22 bp, Artificial Sequence
  Synthetic oligonucleotide; TTC chr11 5394965 5394986 5394970 5394965 -
tcaatcctcttttttgtctttc

SEQ ID NO: 113450 - DNA, 22 bp, Artificial Sequence
  Synthetic oligonucleotide; CTC chr11 5394963 5394984 5394968 5394963 -
aatcctcttttttgtctttctt

SEQ ID NO: 113451 - DNA, 22 bp, Artificial Sequence
  Synthetic oligonucleotide; CTC chr11 5394956 5394977 5394961 5394956 -
ttttttgtctttcttttctttt

SEQ ID NO: 113452 - DNA, 22 bp, Artificial Sequence
  Synthetic oligonucleotide; CTT chr11 5394954 5394975 5394959 5394954 -
ttttgtctttcttttcttttcc

SEQ ID NO: 113453 - DNA, 22 bp, Artificial Sequence
  Synthetic oligonucleotide; TTT chr11 5394953 5394974 5394958 5394953 -
tttgtctttcttttcttttccc

SEQ ID NO: 113454 - DNA, 22 bp, Artificial Sequence
  Synthetic oligonucleotide; TTT chr11 5394952 5394973 5394957 5394952 -
ttgtctttcttttcttttccca

SEQ ID NO: 113455 - DNA, 22 bp, Artificial Sequence
  Synthetic oligonucleotide; TTT chr11 5394951 5394972 5394956 5394951 -
tgtctttcttttcttttcccag

SEQ ID NO: 113456 - DNA, 22 bp, Artificial Sequence
  Synthetic oligonucleotide; TTT chr11 5394950 5394971 5394955 5394950 -
gtctttcttttcttttcccaga

SEQ ID NO: 113457 - DNA, 22 bp, Artificial Sequence
  Synthetic oligonucleotide; TTG chr11 5394949 5394970 5394954 5394949 -
tctttcttttcttttcccagac

SEQ ID NO: 113458 - DNA, 22 bp, Artificial Sequence
  Synthetic oligonucleotide; CTT chr11 5394945 5394966 5394950 5394945 -
tcttttcttttcccagacaaaa

SEQ ID NO: 113459 - DNA, 22 bp, Artificial Sequence
  Synthetic oligonucleotide; TTT chr11 5394944 5394965 5394949 5394944 -
cttttcttttcccagacaaaag

SEQ ID NO: 113460 - DNA, 22 bp, Artificial Sequence
  Synthetic oligonucleotide; TTC chr11 5394943 5394964 5394948 5394943 -
ttttcttttcccagacaaaagt

SEQ ID NO: 113461 - DNA, 22 bp, Artificial Sequence
  Synthetic oligonucleotide; CTT chr11 5394941 5394962 5394946 5394941 -
ttcttttcccagacaaaagtcc

SEQ ID NO: 113462 - DNA, 22 bp, Artificial Sequence
  Synthetic oligonucleotide; TTT chr11 5394940 5394961 5394945 5394940 -
tcttttcccagacaaaagtccc

SEQ ID NO: 113463 - DNA, 22 bp, Artificial Sequence
  Synthetic oligonucleotide; TTT chr11 5394939 5394960 5394944 5394939 -
cttttcccagacaaaagtcccc

SEQ ID NO: 113464 - DNA, 22 bp, Artificial Sequence
  Synthetic oligonucleotide; TTC chr11 5394938 5394959 5394943 5394938 -
ttttcccagacaaaagtcccct

SEQ ID NO: 113465 - DNA, 22 bp, Artificial Sequence
  Synthetic oligonucleotide; CTT chr11 5394936 5394957 5394941 5394936 -
ttcccagacaaaagtccccttg

SEQ ID NO: 113466 - DNA, 22 bp, Artificial Sequence
  Synthetic oligonucleotide; TTT chr11 5394935 5394956 5394940 5394935 -
tcccagacaaaagtccccttga

SEQ ID NO: 113467 - DNA, 22 bp, Artificial Sequence
  Synthetic oligonucleotide; TTT chr11 5394934 5394955 5394939 5394934 -
cccagacaaaagtccccttgag

SEQ ID NO: 113468 - DNA, 22 bp, Artificial Sequence
  Synthetic oligonucleotide; TTC chr11 5394933 5394954 5394938 5394933 -
ccagacaaaagtccccttgaga

SEQ ID NO: 113469 - DNA, 22 bp, Artificial Sequence
  Synthetic oligonucleotide; CTT chr11 5394915 5394936 5394920 5394915 -
gagacagtctttacaaccaggt

SEQ ID NO: 113470 - DNA, 22 bp, Artificial Sequence
  Synthetic oligonucleotide; TTG chr11 5394914 5394935 5394919 5394914 -
agacagtctttacaaccaggta

SEQ ID NO: 113471 - DNA, 22 bp, Artificial Sequence
  Synthetic oligonucleotide; CTT chr11 5394904 5394925 5394909 5394904 -
tacaaccaggtagttattcact

SEQ ID NO: 113472 - DNA, 22 bp, Artificial Sequence
  Synthetic oligonucleotide; TTT chr11 5394903 5394924 5394908 5394903 -
acaaccaggtagttattcactg

SEQ ID NO: 113473 - DNA, 22 bp, Artificial Sequence
  Synthetic oligonucleotide; TTA chr11 5394902 5394923 5394907 5394902 -
caaccaggtagttattcactgt

SEQ ID NO: 113474 - DNA, 22 bp, Artificial Sequence
  Synthetic oligonucleotide; TTA chr11 5394888 5394909 5394893 5394888 -
ttcactgtcattcactgagcaa

SEQ ID NO: 113475 - DNA, 22 bp, Artificial Sequence
  Synthetic oligonucleotide; TTC chr11 5394885 5394906 5394890 5394885 -
actgtcattcactgagcaagta

SEQ ID NO: 113476 - DNA, 22 bp, Artificial Sequence
  Synthetic oligonucleotide; CTG chr11 5394881 5394902 5394886 5394881 -
tcattcactgagcaagtatgta

SEQ ID NO: 113477 - DNA, 22 bp, Artificial Sequence
  Synthetic oligonucleotide; TTC chr11 5394875 5394896 5394880 5394875 -
actgagcaagtatgtaaagatc

SEQ ID NO: 113478 - DNA, 22 bp, Artificial Sequence
  Synthetic oligonucleotide; CTG chr11 5394871 5394892 5394876 5394871 -
agcaagtatgtaaagatcacaa

SEQ ID NO: 113479 - DNA, 22 bp, Artificial Sequence
  Synthetic oligonucleotide; CTT chr11 5394845 5394866 5394850 5394845 -
tgggtcagatatttgaatgcaa

SEQ ID NO: 113480 - DNA, 22 bp, Artificial Sequence
  Synthetic oligonucleotide; TTT chr11 5394844 5394865 5394849 5394844 -
gggtcagatatttgaatgcaag

SEQ ID NO: 113481 - DNA, 22 bp, Artificial Sequence
  Synthetic oligonucleotide; TTG chr11 5394843 5394864 5394848 5394843 -
ggtcagatatttgaatgcaagc

SEQ ID NO: 113482 - DNA, 22 bp, Artificial Sequence
  Synthetic oligonucleotide; TTT chr11 5394831 5394852 5394836 5394831 -
gaatgcaagcattaataagaca

SEQ ID NO: 113483 - DNA, 22 bp, Artificial Sequence
  Synthetic oligonucleotide; TTG chr11 5394830 5394851 5394835 5394830 -
aatgcaagcattaataagacac

SEQ ID NO: 113484 - DNA, 22 bp, Artificial Sequence
  Synthetic oligonucleotide; TTA chr11 5394817 5394838 5394822 5394817 -
ataagacacaaactctgtcttt

SEQ ID NO: 113485 - DNA, 22 bp, Artificial Sequence
  Synthetic oligonucleotide; CTC chr11 5394802 5394823 5394807 5394802 -
tgtctttcagaaagcattgtct

SEQ ID NO: 113486 - DNA, 22 bp, Artificial Sequence
  Synthetic oligonucleotide; CTG chr11 5394800 5394821 5394805 5394800 -
tctttcagaaagcattgtcttc

SEQ ID NO: 113487 - DNA, 22 bp, Artificial Sequence
  Synthetic oligonucleotide; CTT chr11 5394796 5394817 5394801 5394796 -
tcagaaagcattgtcttctgca

SEQ ID NO: 113488 - DNA, 22 bp, Artificial Sequence
  Synthetic oligonucleotide; TTT chr11 5394795 5394816 5394800 5394795 -
cagaaagcattgtcttctgcag

SEQ ID NO: 113489 - DNA, 22 bp, Artificial Sequence
  Synthetic oligonucleotide; TTC chr11 5394794 5394815 5394799 5394794 -
agaaagcattgtcttctgcagg

SEQ ID NO: 113490 - DNA, 22 bp, Artificial Sequence
  Synthetic oligonucleotide; TTG chr11 5394783 5394804 5394788 5394783 -
tcttctgcaggaggttgatgtg

SEQ ID NO: 113491 - DNA, 22 bp, Artificial Sequence
  Synthetic oligonucleotide; CTT chr11 5394779 5394800 5394784 5394779 -
ctgcaggaggttgatgtgaaaa

SEQ ID NO: 113492 - DNA, 22 bp, Artificial Sequence
  Synthetic oligonucleotide; TTC chr11 5394778 5394799 5394783 5394778 -
tgcaggaggttgatgtgaaaaa

SEQ ID NO: 113493 - DNA, 22 bp, Artificial Sequence
  Synthetic oligonucleotide; CTG chr11 5394776 5394797 5394781 5394776 -
caggaggttgatgtgaaaaaaa

SEQ ID NO: 113494 - DNA, 22 bp, Artificial Sequence
  Synthetic oligonucleotide; TTG chr11 5394766 5394787 5394771 5394766 -
atgtgaaaaaaactaacgtccc

SEQ ID NO: 113495 - DNA, 22 bp, Artificial Sequence
  Synthetic oligonucleotide; CTA chr11 5394751 5394772 5394756 5394751 -
acgtcccctgatgaagcaaaaa

SEQ ID NO: 113496 - DNA, 22 bp, Artificial Sequence
  Synthetic oligonucleotide; CTG chr11 5394741 5394762 5394746 5394741 -
atgaagcaaaaacaggcttccc

SEQ ID NO: 113497 - DNA, 22 bp, Artificial Sequence
  Synthetic oligonucleotide; CTT chr11 5394722 5394743 5394727 5394722 -
cccaggtgatacaaatatttag

SEQ ID NO: 113498 - DNA, 22 bp, Artificial Sequence
  Synthetic oligonucleotide; TTC chr11 5394721 5394742 5394726 5394721 -
ccaggtgatacaaatatttagc

SEQ ID NO: 113499 - DNA, 22 bp, Artificial Sequence
  Synthetic oligonucleotide; TTT chr11 5394702 5394723 5394707 5394702 -
agcaagctttccttactaatgt

SEQ ID NO: 113500 - DNA, 22 bp, Artificial Sequence
  Synthetic oligonucleotide; TTA chr11 5394701 5394722 5394706 5394701 -
gcaagctttccttactaatgtc

SEQ ID NO: 113501 - DNA, 22 bp, Artificial Sequence
  Synthetic oligonucleotide; CTT chr11 5394693 5394714 5394698 5394693 -
tccttactaatgtctgcactat

SEQ ID NO: 113502 - DNA, 22 bp, Artificial Sequence
  Synthetic oligonucleotide; TTT chr11 5394692 5394713 5394697 5394692 -
ccttactaatgtctgcactatc

SEQ ID NO: 113503 - DNA, 22 bp, Artificial Sequence
  Synthetic oligonucleotide; TTC chr11 5394691 5394712 5394696 5394691 -
cttactaatgtctgcactatca

SEQ ID NO: 113504 - DNA, 22 bp, Artificial Sequence
  Synthetic oligonucleotide; CTT chr11 5394688 5394709 5394693 5394688 -
actaatgtctgcactatcattc

SEQ ID NO: 113505 - DNA, 22 bp, Artificial Sequence
  Synthetic oligonucleotide; TTA chr11 5394687 5394708 5394692 5394687 -
ctaatgtctgcactatcattca

SEQ ID NO: 113506 - DNA, 22 bp, Artificial Sequence
  Synthetic oligonucleotide; CTA chr11 5394684 5394705 5394689 5394684 -
atgtctgcactatcattcaaaa

SEQ ID NO: 113507 - DNA, 22 bp, Artificial Sequence
  Synthetic oligonucleotide; CTG chr11 5394677 5394698 5394682 5394677 -
cactatcattcaaaataggtaa

SEQ ID NO: 113508 - DNA, 22 bp, Artificial Sequence
  Synthetic oligonucleotide; CTA chr11 5394672 5394693 5394677 5394672 -
tcattcaaaataggtaacattt

SEQ ID NO: 113509 - DNA, 22 bp, Artificial Sequence
  Synthetic oligonucleotide; TTC chr11 5394666 5394687 5394671 5394666 -
aaaataggtaacattttagata

SEQ ID NO: 113510 - DNA, 22 bp, Artificial Sequence
  Synthetic oligonucleotide; TTT chr11 5394650 5394671 5394655 5394650 -
tagatagaggggaaaacatgta

SEQ ID NO: 113511 - DNA, 22 bp, Artificial Sequence
  Synthetic oligonucleotide; TTT chr11 5394649 5394670 5394654 5394649 -
agatagaggggaaaacatgtac

SEQ ID NO: 113512 - DNA, 22 bp, Artificial Sequence
  Synthetic oligonucleotide; TTA chr11 5394648 5394669 5394653 5394648 -
gatagaggggaaaacatgtaca

SEQ ID NO: 113513 - DNA, 22 bp, Artificial Sequence
  Synthetic oligonucleotide; CTC chr11 5394619 5394640 5394624 5394619 -
agagttgtcacaaagcaaaaca

SEQ ID NO: 113514 - DNA, 22 bp, Artificial Sequence
  Synthetic oligonucleotide; TTG chr11 5394612 5394633 5394617 5394612 -
tcacaaagcaaaacataaaatt

SEQ ID NO: 113515 - DNA, 22 bp, Artificial Sequence
  Synthetic oligonucleotide; TTC chr11 5394589 5394610 5394594 5394589 -
tgtgaacttcaattacatgagc

SEQ ID NO: 113516 - DNA, 22 bp, Artificial Sequence
  Synthetic oligonucleotide; CTG chr11 5394587 5394608 5394592 5394587 -
tgaacttcaattacatgagcca

SEQ ID NO: 113517 - DNA, 22 bp, Artificial Sequence
  Synthetic oligonucleotide; CTT chr11 5394580 5394601 5394585 5394580 -
caattacatgagccatctgtgt

SEQ ID NO: 113518 - DNA, 22 bp, Artificial Sequence
  Synthetic oligonucleotide; TTC chr11 5394579 5394600 5394584 5394579 -
aattacatgagccatctgtgtt

SEQ ID NO: 113519 - DNA, 22 bp, Artificial Sequence
  Synthetic oligonucleotide; TTA chr11 5394574 5394595 5394579 5394574 -
catgagccatctgtgttttaca

SEQ ID NO: 113520 - DNA, 22 bp, Artificial Sequence
  Synthetic oligonucleotide; CTG chr11 5394561 5394582 5394566 5394561 -
tgttttacaaatacagtatcaa

SEQ ID NO: 113521 - DNA, 22 bp, Artificial Sequence
  Synthetic oligonucleotide; TTT chr11 5394556 5394577 5394561 5394556 -
tacaaatacagtatcaatttca

SEQ ID NO: 113522 - DNA, 22 bp, Artificial Sequence
  Synthetic oligonucleotide; TTT chr11 5394555 5394576 5394560 5394555 -
acaaatacagtatcaatttcaa

SEQ ID NO: 113523 - DNA, 22 bp, Artificial Sequence
  Synthetic oligonucleotide; TTA chr11 5394554 5394575 5394559 5394554 -
caaatacagtatcaatttcaaa

SEQ ID NO: 113524 - DNA, 22 bp, Artificial Sequence
  Synthetic oligonucleotide; TTT chr11 5394536 5394557 5394541 5394536 -
caaaggcttagagaggcttgtg

SEQ ID NO: 113525 - DNA, 22 bp, Artificial Sequence
  Synthetic oligonucleotide; TTC chr11 5394535 5394556 5394540 5394535 -
aaaggcttagagaggcttgtgg

SEQ ID NO: 113526 - DNA, 22 bp, Artificial Sequence
  Synthetic oligonucleotide; CTT chr11 5394527 5394548 5394532 5394527 -
agagaggcttgtggatattaaa

SEQ ID NO: 113527 - DNA, 22 bp, Artificial Sequence
  Synthetic oligonucleotide; TTA chr11 5394526 5394547 5394531 5394526 -
gagaggcttgtggatattaaat

SEQ ID NO: 113528 - DNA, 22 bp, Artificial Sequence
  Synthetic oligonucleotide; CTT chr11 5394517 5394538 5394522 5394517 -
gtggatattaaataacgggata

SEQ ID NO: 113529 - DNA, 22 bp, Artificial Sequence
  Synthetic oligonucleotide; TTG chr11 5394516 5394537 5394521 5394516 -
tggatattaaataacgggatag

SEQ ID NO: 113530 - DNA, 22 bp, Artificial Sequence
  Synthetic oligonucleotide; TTA chr11 5394507 5394528 5394512 5394507 -
aataacgggatagttgtaaaga

SEQ ID NO: 113531 - DNA, 22 bp, Artificial Sequence
  Synthetic oligonucleotide; TTG chr11 5394491 5394512 5394496 5394491 -
taaagatttttgcctgcaggaa

SEQ ID NO: 113532 - DNA, 22 bp, Artificial Sequence
  Synthetic oligonucleotide; TTT chr11 5394482 5394503 5394487 5394482 -
ttgcctgcaggaatataggctt

SEQ ID NO: 113533 - DNA, 22 bp, Artificial Sequence
  Synthetic oligonucleotide; TTT chr11 5394481 5394502 5394486 5394481 -
tgcctgcaggaatataggcttg

SEQ ID NO: 113534 - DNA, 22 bp, Artificial Sequence
  Synthetic oligonucleotide; TTT chr11 5394480 5394501 5394485 5394480 -
gcctgcaggaatataggcttgt

SEQ ID NO: 113535 - DNA, 22 bp, Artificial Sequence
  Synthetic oligonucleotide; TTG chr11 5394479 5394500 5394484 5394479 -
cctgcaggaatataggcttgtg

SEQ ID NO: 113536 - DNA, 22 bp, Artificial Sequence
  Synthetic oligonucleotide; CTG chr11 5394475 5394496 5394480 5394475 -
caggaatataggcttgtgctga

SEQ ID NO: 113537 - DNA, 22 bp, Artificial Sequence
  Synthetic oligonucleotide; CTT chr11 5394460 5394481 5394465 5394460 -
gtgctgaggaatgggccagatg

SEQ ID NO: 113538 - DNA, 22 bp, Artificial Sequence
  Synthetic oligonucleotide; TTG chr11 5394459 5394480 5394464 5394459 -
tgctgaggaatgggccagatga

SEQ ID NO: 113539 - DNA, 22 bp, Artificial Sequence
  Synthetic oligonucleotide; CTG chr11 5394454 5394475 5394459 5394454 -
aggaatgggccagatgatttaa

SEQ ID NO: 113540 - DNA, 22 bp, Artificial Sequence
  Synthetic oligonucleotide; TTT chr11 5394434 5394455 5394439 5394434 -
aaagcagatactgtcattagca

SEQ ID NO: 113541 - DNA, 22 bp, Artificial Sequence
  Synthetic oligonucleotide; TTA chr11 5394433 5394454 5394438 5394433 -
aagcagatactgtcattagcag

SEQ ID NO: 113542 - DNA, 22 bp, Artificial Sequence
  Synthetic oligonucleotide; CTG chr11 5394421 5394442 5394426 5394421 -
tcattagcaggaatatgtacag

SEQ ID NO: 113543 - DNA, 22 bp, Artificial Sequence
  Synthetic oligonucleotide; TTA chr11 5394415 5394436 5394420 5394415 -
gcaggaatatgtacagctttgg

SEQ ID NO: 113544 - DNA, 22 bp, Artificial Sequence
  Synthetic oligonucleotide; CTT chr11 5394396 5394417 5394401 5394396 -
tggctgattttatgtttttttt

SEQ ID NO: 113545 - DNA, 22 bp, Artificial Sequence
  Synthetic oligonucleotide; TTT chr11 5394395 5394416 5394400 5394395 -
ggctgattttatgttttttttg

SEQ ID NO: 113546 - DNA, 22 bp, Artificial Sequence
  Synthetic oligonucleotide; TTG chr11 5394394 5394415 5394399 5394394 -
gctgattttatgttttttttgg

SEQ ID NO: 113547 - DNA, 22 bp, Artificial Sequence
  Synthetic oligonucleotide; CTG chr11 5394390 5394411 5394395 5394390 -
attttatgttttttttggtttg

SEQ ID NO: 113548 - DNA, 22 bp, Artificial Sequence
  Synthetic oligonucleotide; TTT chr11 5394386 5394407 5394391 5394386 -
tatgttttttttggtttgttgt

SEQ ID NO: 113549 - DNA, 22 bp, Artificial Sequence
  Synthetic oligonucleotide; TTT chr11 5394385 5394406 5394390 5394385 -
atgttttttttggtttgttgtt

SEQ ID NO: 113550 - DNA, 22 bp, Artificial Sequence
  Synthetic oligonucleotide; TTA chr11 5394384 5394405 5394389 5394384 -
tgttttttttggtttgttgttg

SEQ ID NO: 113551 - DNA, 22 bp, Artificial Sequence
  Synthetic oligonucleotide; TTT chr11 5394379 5394400 5394384 5394379 -
tttttggtttgttgttgttgtt

SEQ ID NO: 113552 - DNA, 22 bp, Artificial Sequence
  Synthetic oligonucleotide; TTT chr11 5394378 5394399 5394383 5394378 -
ttttggtttgttgttgttgttg

SEQ ID NO: 113553 - DNA, 22 bp, Artificial Sequence
  Synthetic oligonucleotide; TTT chr11 5394377 5394398 5394382 5394377 -
tttggtttgttgttgttgttga

SEQ ID NO: 113554 - DNA, 22 bp, Artificial Sequence
  Synthetic oligonucleotide; TTT chr11 5394376 5394397 5394381 5394376 -
ttggtttgttgttgttgttgaa

SEQ ID NO: 113555 - DNA, 22 bp, Artificial Sequence
  Synthetic oligonucleotide; TTT chr11 5394375 5394396 5394380 5394375 -
tggtttgttgttgttgttgaat

SEQ ID NO: 113556 - DNA, 22 bp, Artificial Sequence
  Synthetic oligonucleotide; TTT chr11 5394374 5394395 5394379 5394374 -
ggtttgttgttgttgttgaatc

SEQ ID NO: 113557 - DNA, 22 bp, Artificial Sequence
  Synthetic oligonucleotide; TTG chr11 5394373 5394394 5394378 5394373 -
gtttgttgttgttgttgaatca

SEQ ID NO: 113558 - DNA, 22 bp, Artificial Sequence
  Synthetic oligonucleotide; TTT chr11 5394369 5394390 5394374 5394369 -
gttgttgttgttgaatcagtgg

SEQ ID NO: 113559 - DNA, 22 bp, Artificial Sequence
  Synthetic oligonucleotide; TTG chr11 5394368 5394389 5394373 5394368 -
ttgttgttgttgaatcagtgga

SEQ ID NO: 113560 - DNA, 22 bp, Artificial Sequence
  Synthetic oligonucleotide; TTG chr11 5394365 5394386 5394370 5394365 -
ttgttgttgaatcagtggagca

SEQ ID NO: 113561 - DNA, 22 bp, Artificial Sequence
  Synthetic oligonucleotide; TTG chr11 5394362 5394383 5394367 5394362 -
ttgttgaatcagtggagcatag

SEQ ID NO: 113562 - DNA, 22 bp, Artificial Sequence
  Synthetic oligonucleotide; TTG chr11 5394359 5394380 5394364 5394359 -
ttgaatcagtggagcatagtta

SEQ ID NO: 113563 - DNA, 22 bp, Artificial Sequence
  Synthetic oligonucleotide; TTG chr11 5394356 5394377 5394361 5394356 -
aatcagtggagcatagttaaaa

SEQ ID NO: 113564 - DNA, 22 bp, Artificial Sequence
  Synthetic oligonucleotide; TTA chr11 5394337 5394358 5394342 5394337 -
aaactacaagcaccacagtcag

SEQ ID NO: 113565 - DNA, 22 bp, Artificial Sequence
  Synthetic oligonucleotide; CTA chr11 5394331 5394352 5394336 5394331 -
caagcaccacagtcagaactgt

SEQ ID NO: 113566 - DNA, 22 bp, Artificial Sequence
  Synthetic oligonucleotide; CTG chr11 5394310 5394331 5394315 5394310 -
tcaaacttggtataatattggg

SEQ ID NO: 113567 - DNA, 22 bp, Artificial Sequence
  Synthetic oligonucleotide; CTT chr11 5394302 5394323 5394307 5394302 -
ggtataatattgggcaagatat

SEQ ID NO: 113568 - DNA, 22 bp, Artificial Sequence
  Synthetic oligonucleotide; TTG chr11 5394301 5394322 5394306 5394301 -
gtataatattgggcaagatatt

SEQ ID NO: 113569 - DNA, 22 bp, Artificial Sequence
  Synthetic oligonucleotide; TTG chr11 5394290 5394311 5394295 5394290 -
ggcaagatattttgtctctgag

SEQ ID NO: 113570 - DNA, 22 bp, Artificial Sequence
  Synthetic oligonucleotide; TTT chr11 5394278 5394299 5394283 5394278 -
tgtctctgagcctcagtgtact

SEQ ID NO: 113571 - DNA, 22 bp, Artificial Sequence
  Synthetic oligonucleotide; TTT chr11 5394277 5394298 5394282 5394277 -
gtctctgagcctcagtgtactt

SEQ ID NO: 113572 - DNA, 22 bp, Artificial Sequence
  Synthetic oligonucleotide; TTG chr11 5394276 5394297 5394281 5394276 -
tctctgagcctcagtgtactta

SEQ ID NO: 113573 - DNA, 22 bp, Artificial Sequence
  Synthetic oligonucleotide; CTC chr11 5394272 5394293 5394277 5394272 -
tgagcctcagtgtacttatctg

SEQ ID NO: 113574 - DNA, 22 bp, Artificial Sequence
  Synthetic oligonucleotide; CTG chr11 5394270 5394291 5394275 5394270 -
agcctcagtgtacttatctgta

SEQ ID NO: 113575 - DNA, 22 bp, Artificial Sequence
  Synthetic oligonucleotide; CTC chr11 5394264 5394285 5394269 5394264 -
agtgtacttatctgtaaaatgg

SEQ ID NO: 113576 - DNA, 22 bp, Artificial Sequence
  Synthetic oligonucleotide; CTT chr11 5394255 5394276 5394260 5394255 -
atctgtaaaatgggtaatctag

SEQ ID NO: 113577 - DNA, 22 bp, Artificial Sequence
  Synthetic oligonucleotide; TTA chr11 5394254 5394275 5394259 5394254 -
tctgtaaaatgggtaatctagt

SEQ ID NO: 113578 - DNA, 22 bp, Artificial Sequence
  Synthetic oligonucleotide; CTG chr11 5394250 5394271 5394255 5394250 -
taaaatgggtaatctagtagta

SEQ ID NO: 113579 - DNA, 22 bp, Artificial Sequence
  Synthetic oligonucleotide; CTA chr11 5394234 5394255 5394239 5394234 -
gtagtatccatctcataaggtt

SEQ ID NO: 113580 - DNA, 22 bp, Artificial Sequence
  Synthetic oligonucleotide; CTC chr11 5394220 5394241 5394225 5394220 -
ataaggttattgtcaagataaa

SEQ ID NO: 113581 - DNA, 22 bp, Artificial Sequence
  Synthetic oligonucleotide; TTA chr11 5394211 5394232 5394216 5394211 -
ttgtcaagataaagtgacttat

SEQ ID NO: 113582 - DNA, 22 bp, Artificial Sequence
  Synthetic oligonucleotide; TTG chr11 5394208 5394229 5394213 5394208 -
tcaagataaagtgacttatagt

SEQ ID NO: 113583 - DNA, 22 bp, Artificial Sequence
  Synthetic oligonucleotide; CTT chr11 5394191 5394212 5394196 5394191 -
atagtgtattatgcccttagaa

SEQ ID NO: 113584 - DNA, 22 bp, Artificial Sequence
  Synthetic oligonucleotide; TTA chr11 5394190 5394211 5394195 5394190 -
tagtgtattatgcccttagaat

SEQ ID NO: 113585 - DNA, 22 bp, Artificial Sequence
  Synthetic oligonucleotide; TTA chr11 5394180 5394201 5394185 5394180 -
tgcccttagaataatacctagg

SEQ ID NO: 113586 - DNA, 22 bp, Artificial Sequence
  Synthetic oligonucleotide; CTT chr11 5394173 5394194 5394178 5394173 -
agaataatacctaggttataat

SEQ ID NO: 113587 - DNA, 22 bp, Artificial Sequence
  Synthetic oligonucleotide; TTA chr11 5394172 5394193 5394177 5394172 -
gaataatacctaggttataata

SEQ ID NO: 113588 - DNA, 22 bp, Artificial Sequence
  Synthetic oligonucleotide; CTA chr11 5394160 5394181 5394165 5394160 -
ggttataatatgtgcttaaaaa

SEQ ID NO: 113589 - DNA, 22 bp, Artificial Sequence
  Synthetic oligonucleotide; TTA chr11 5394155 5394176 5394160 5394155 -
taatatgtgcttaaaaaaccat

SEQ ID NO: 113590 - DNA, 22 bp, Artificial Sequence
  Synthetic oligonucleotide; CTT chr11 5394143 5394164 5394148 5394143 -
aaaaaaccatgatatgcaaaat

SEQ ID NO: 113591 - DNA, 22 bp, Artificial Sequence
  Synthetic oligonucleotide; TTA chr11 5394142 5394163 5394147 5394142 -
aaaaaccatgatatgcaaaata

SEQ ID NO: 113592 - DNA, 22 bp, Artificial Sequence
  Synthetic oligonucleotide; CTC chr11 5394110 5394131 5394115 5394110 -
agtaccttctactgagtttttc

SEQ ID NO: 113593 - DNA, 22 bp, Artificial Sequence
  Synthetic oligonucleotide; CTT chr11 5394102 5394123 5394107 5394102 -
ctactgagtttttctgtgaatc

SEQ ID NO: 113594 - DNA, 22 bp, Artificial Sequence
  Synthetic oligonucleotide; TTC chr11 5394101 5394122 5394106 5394101 -
tactgagtttttctgtgaatct

SEQ ID NO: 113595 - DNA, 22 bp, Artificial Sequence
  Synthetic oligonucleotide; CTA chr11 5394099 5394120 5394104 5394099 -
ctgagtttttctgtgaatctat

SEQ ID NO: 113596 - DNA, 22 bp, Artificial Sequence
  Synthetic oligonucleotide; CTG chr11 5394096 5394117 5394101 5394096 -
agtttttctgtgaatctataac

SEQ ID NO: 113597 - DNA, 22 bp, Artificial Sequence
  Synthetic oligonucleotide; TTT chr11 5394091 5394112 5394096 5394091 -
ttctgtgaatctataactctta

SEQ ID NO: 113598 - DNA, 22 bp, Artificial Sequence
  Synthetic oligonucleotide; TTT chr11 5394090 5394111 5394095 5394090 -
tctgtgaatctataactcttaa

SEQ ID NO: 113599 - DNA, 22 bp, Artificial Sequence
  Synthetic oligonucleotide; TTT chr11 5394089 5394110 5394094 5394089 -
ctgtgaatctataactcttaaa

SEQ ID NO: 113600 - DNA, 22 bp, Artificial Sequence
  Synthetic oligonucleotide; TTC chr11 5394088 5394109 5394093 5394088 -
tgtgaatctataactcttaaaa

SEQ ID NO: 113601 - DNA, 22 bp, Artificial Sequence
  Synthetic oligonucleotide; CTG chr11 5394086 5394107 5394091 5394086 -
tgaatctataactcttaaaatc

SEQ ID NO: 113602 - DNA, 22 bp, Artificial Sequence
  Synthetic oligonucleotide; CTA chr11 5394078 5394099 5394083 5394078 -
taactcttaaaatcaagtctat

SEQ ID NO: 113603 - DNA, 22 bp, Artificial Sequence
  Synthetic oligonucleotide; CTC chr11 5394072 5394093 5394077 5394072 -
ttaaaatcaagtctattaaaaa

SEQ ID NO: 113604 - DNA, 22 bp, Artificial Sequence
  Synthetic oligonucleotide; CTT chr11 5394070 5394091 5394075 5394070 -
aaaatcaagtctattaaaaagt

SEQ ID NO: 113605 - DNA, 22 bp, Artificial Sequence
  Synthetic oligonucleotide; TTA chr11 5394069 5394090 5394074 5394069 -
aaatcaagtctattaaaaagta

SEQ ID NO: 113606 - DNA, 22 bp, Artificial Sequence
  Synthetic oligonucleotide; CTA chr11 5394057 5394078 5394062 5394057 -
ttaaaaagtatttaatacaata

SEQ ID NO: 113607 - DNA, 22 bp, Artificial Sequence
  Synthetic oligonucleotide; TTA chr11 5394054 5394075 5394059 5394054 -
aaaagtatttaatacaataatt

SEQ ID NO: 113608 - DNA, 22 bp, Artificial Sequence
  Synthetic oligonucleotide; TTT chr11 5394044 5394065 5394049 5394044 -
aatacaataattttatgttact

SEQ ID NO: 113609 - DNA, 22 bp, Artificial Sequence
  Synthetic oligonucleotide; TTA chr11 5394043 5394064 5394048 5394043 -
atacaataattttatgttactg

SEQ ID NO: 113610 - DNA, 22 bp, Artificial Sequence
  Synthetic oligonucleotide; TTT chr11 5394031 5394052 5394036 5394031 -
tatgttactgttttctgttgct

SEQ ID NO: 113611 - DNA, 22 bp, Artificial Sequence
  Synthetic oligonucleotide; TTT chr11 5394030 5394051 5394035 5394030 -
atgttactgttttctgttgcta

SEQ ID NO: 113612 - DNA, 22 bp, Artificial Sequence
  Synthetic oligonucleotide; TTA chr11 5394029 5394050 5394034 5394029 -
tgttactgttttctgttgctat

SEQ ID NO: 113613 - DNA, 22 bp, Artificial Sequence
  Synthetic oligonucleotide; TTA chr11 5394024 5394045 5394029 5394024 -
ctgttttctgttgctatctttt

SEQ ID NO: 113614 - DNA, 22 bp, Artificial Sequence
  Synthetic oligonucleotide; CTG chr11 5394021 5394042 5394026 5394021 -
ttttctgttgctatcttttcct

SEQ ID NO: 113615 - DNA, 22 bp, Artificial Sequence
  Synthetic oligonucleotide; TTT chr11 5394018 5394039 5394023 5394018 -
tctgttgctatcttttcctgat

SEQ ID NO: 113616 - DNA, 22 bp, Artificial Sequence
  Synthetic oligonucleotide; TTT chr11 5394017 5394038 5394022 5394017 -
ctgttgctatcttttcctgata

SEQ ID NO: 113617 - DNA, 22 bp, Artificial Sequence
  Synthetic oligonucleotide; TTC chr11 5394016 5394037 5394021 5394016 -
tgttgctatcttttcctgatac

SEQ ID NO: 113618 - DNA, 22 bp, Artificial Sequence
  Synthetic oligonucleotide; CTG chr11 5394014 5394035 5394019 5394014 -
ttgctatcttttcctgatacta

SEQ ID NO: 113619 - DNA, 22 bp, Artificial Sequence
  Synthetic oligonucleotide; TTG chr11 5394011 5394032 5394016 5394011 -
ctatcttttcctgatactaaat

SEQ ID NO: 113620 - DNA, 22 bp, Artificial Sequence
  Synthetic oligonucleotide; CTA chr11 5394008 5394029 5394013 5394008 -
tcttttcctgatactaaatgga

SEQ ID NO: 113621 - DNA, 22 bp, Artificial Sequence
  Synthetic oligonucleotide; CTT chr11 5394004 5394025 5394009 5394004 -
ttcctgatactaaatggaaaaa

SEQ ID NO: 113622 - DNA, 22 bp, Artificial Sequence
  Synthetic oligonucleotide; TTT chr11 5394003 5394024 5394008 5394003 -
tcctgatactaaatggaaaaat

SEQ ID NO: 113623 - DNA, 22 bp, Artificial Sequence
  Synthetic oligonucleotide; TTT chr11 5394002 5394023 5394007 5394002 -
cctgatactaaatggaaaaata

SEQ ID NO: 113624 - DNA, 22 bp, Artificial Sequence
  Synthetic oligonucleotide; TTC chr11 5394001 5394022 5394006 5394001 -
ctgatactaaatggaaaaatag

SEQ ID NO: 113625 - DNA, 22 bp, Artificial Sequence
  Synthetic oligonucleotide; CTG chr11 5393998 5394019 5394003 5393998 -
atactaaatggaaaaatagata

SEQ ID NO: 113626 - DNA, 22 bp, Artificial Sequence
  Synthetic oligonucleotide; CTA chr11 5393992 5394013 5393997 5393992 -
aatggaaaaatagataacatat

SEQ ID NO: 113627 - DNA, 22 bp, Artificial Sequence
  Synthetic oligonucleotide; TTC chr11 5393968 5393989 5393973 5393968 -
taggaaagggaacaaaaagtta

SEQ ID NO: 113628 - DNA, 22 bp, Artificial Sequence
  Synthetic oligonucleotide; CTA chr11 5393966 5393987 5393971 5393966 -
ggaaagggaacaaaaagttagg

SEQ ID NO: 113629 - DNA, 22 bp, Artificial Sequence
  Synthetic oligonucleotide; TTA chr11 5393946 5393967 5393951 5393946 -
gggagaagccaatgatgggact

SEQ ID NO: 113630 - DNA, 22 bp, Artificial Sequence
  Synthetic oligonucleotide; CTT chr11 5393923 5393944 5393928 5393923 -
ccttcagtataacatggaaaac

SEQ ID NO: 113631 - DNA, 22 bp, Artificial Sequence
  Synthetic oligonucleotide; TTC chr11 5393922 5393943 5393927 5393922 -
cttcagtataacatggaaaaca

SEQ ID NO: 113632 - DNA, 22 bp, Artificial Sequence
  Synthetic oligonucleotide; CTT chr11 5393919 5393940 5393924 5393919 -
cagtataacatggaaaacatgg

SEQ ID NO: 113633 - DNA, 22 bp, Artificial Sequence
  Synthetic oligonucleotide; TTC chr11 5393918 5393939 5393923 5393918 -
agtataacatggaaaacatggc

SEQ ID NO: 113634 - DNA, 22 bp, Artificial Sequence
  Synthetic oligonucleotide; CTG chr11 5393892 5393913 5393897 5393892 -
aaacgagtggtcctgtttggag

SEQ ID NO: 113635 - DNA, 22 bp, Artificial Sequence
  Synthetic oligonucleotide; CTG chr11 5393877 5393898 5393882 5393877 -
tttggagaggagtccagcataa

SEQ ID NO: 113636 - DNA, 22 bp, Artificial Sequence
  Synthetic oligonucleotide; TTT chr11 5393874 5393895 5393879 5393874 -
ggagaggagtccagcataatgg

SEQ ID NO: 113637 - DNA, 22 bp, Artificial Sequence
  Synthetic oligonucleotide; TTG chr11 5393873 5393894 5393878 5393873 -
gagaggagtccagcataatggt

SEQ ID NO: 113638 - DNA, 22 bp, Artificial Sequence
  Synthetic oligonucleotide; TTT chr11 5393849 5393870 5393854 5393849 -
aagaaaatcagatgcgcttgat

SEQ ID NO: 113639 - DNA, 22 bp, Artificial Sequence
  Synthetic oligonucleotide; TTA chr11 5393848 5393869 5393853 5393848 -
agaaaatcagatgcgcttgata

SEQ ID NO: 113640 - DNA, 22 bp, Artificial Sequence
  Synthetic oligonucleotide; CTT chr11 5393830 5393851 5393835 5393830 -
gatattgaatttcagttctgac

SEQ ID NO: 113641 - DNA, 22 bp, Artificial Sequence
  Synthetic oligonucleotide; TTG chr11 5393829 5393850 5393834 5393829 -
atattgaatttcagttctgact

SEQ ID NO: 113642 - DNA, 22 bp, Artificial Sequence
  Synthetic oligonucleotide; TTG chr11 5393823 5393844 5393828 5393823 -
aatttcagttctgacttacatt

SEQ ID NO: 113643 - DNA, 22 bp, Artificial Sequence
  Synthetic oligonucleotide; TTT chr11 5393818 5393839 5393823 5393818 -
cagttctgacttacattaatga

SEQ ID NO: 113644 - DNA, 22 bp, Artificial Sequence
  Synthetic oligonucleotide; TTC chr11 5393817 5393838 5393822 5393817 -
agttctgacttacattaatgat

SEQ ID NO: 113645 - DNA, 22 bp, Artificial Sequence
  Synthetic oligonucleotide; TTC chr11 5393812 5393833 5393817 5393812 -
tgacttacattaatgatttaac

SEQ ID NO: 113646 - DNA, 22 bp, Artificial Sequence
  Synthetic oligonucleotide; CTG chr11 5393810 5393831 5393815 5393810 -
acttacattaatgatttaacta

SEQ ID NO: 113647 - DNA, 22 bp, Artificial Sequence
  Synthetic oligonucleotide; CTT chr11 5393806 5393827 5393811 5393806 -
acattaatgatttaactaagga

SEQ ID NO: 113648 - DNA, 22 bp, Artificial Sequence
  Synthetic oligonucleotide; TTA chr11 5393805 5393826 5393810 5393805 -
cattaatgatttaactaaggaa

SEQ ID NO: 113649 - DNA, 22 bp, Artificial Sequence
  Synthetic oligonucleotide; TTA chr11 5393800 5393821 5393805 5393800 -
atgatttaactaaggaaagttg

SEQ ID NO: 113650 - DNA, 22 bp, Artificial Sequence
  Synthetic oligonucleotide; TTT chr11 5393793 5393814 5393798 5393793 -
aactaaggaaagttgctttcct

SEQ ID NO: 113651 - DNA, 22 bp, Artificial Sequence
  Synthetic oligonucleotide; TTA chr11 5393792 5393813 5393797 5393792 -
actaaggaaagttgctttcctc

SEQ ID NO: 113652 - DNA, 22 bp, Artificial Sequence
  Synthetic oligonucleotide; CTA chr11 5393788 5393809 5393793 5393788 -
aggaaagttgctttcctctgtg

SEQ ID NO: 113653 - DNA, 22 bp, Artificial Sequence
  Synthetic oligonucleotide; TTG chr11 5393778 5393799 5393783 5393778 -
ctttcctctgtgagcctcagtt

SEQ ID NO: 113654 - DNA, 22 bp, Artificial Sequence
  Synthetic oligonucleotide; CTT chr11 5393775 5393796 5393780 5393775 -
tcctctgtgagcctcagtttcc

SEQ ID NO: 113655 - DNA, 22 bp, Artificial Sequence
  Synthetic oligonucleotide; TTT chr11 5393774 5393795 5393779 5393774 -
cctctgtgagcctcagtttcct

SEQ ID NO: 113656 - DNA, 22 bp, Artificial Sequence
  Synthetic oligonucleotide; TTC chr11 5393773 5393794 5393778 5393773 -
ctctgtgagcctcagtttccta

SEQ ID NO: 113657 - DNA, 22 bp, Artificial Sequence
  Synthetic oligonucleotide; CTC chr11 5393770 5393791 5393775 5393770 -
tgtgagcctcagtttcctaatt

SEQ ID NO: 113658 - DNA, 22 bp, Artificial Sequence
  Synthetic oligonucleotide; CTG chr11 5393768 5393789 5393773 5393768 -
tgagcctcagtttcctaatttt

SEQ ID NO: 113659 - DNA, 22 bp, Artificial Sequence
  Synthetic oligonucleotide; CTC chr11 5393760 5393781 5393765 5393760 -
agtttcctaattttaaaacatt

SEQ ID NO: 113660 - DNA, 22 bp, Artificial Sequence
  Synthetic oligonucleotide; TTT chr11 5393755 5393776 5393760 5393755 -
cctaattttaaaacattgaaaa

SEQ ID NO: 113661 - DNA, 22 bp, Artificial Sequence
  Synthetic oligonucleotide; TTC chr11 5393754 5393775 5393759 5393754 -
ctaattttaaaacattgaaaat

SEQ ID NO: 113662 - DNA, 22 bp, Artificial Sequence
  Synthetic oligonucleotide; CTA chr11 5393751 5393772 5393756 5393751 -
attttaaaacattgaaaataat

SEQ ID NO: 113663 - DNA, 22 bp, Artificial Sequence
  Synthetic oligonucleotide; TTT chr11 5393747 5393768 5393752 5393747 -
taaaacattgaaaataataata

SEQ ID NO: 113664 - DNA, 22 bp, Artificial Sequence
  Synthetic oligonucleotide; TTT chr11 5393746 5393767 5393751 5393746 -
aaaacattgaaaataataatac

SEQ ID NO: 113665 - DNA, 22 bp, Artificial Sequence
  Synthetic oligonucleotide; TTA chr11 5393745 5393766 5393750 5393745 -
aaacattgaaaataataatacc

SEQ ID NO: 113666 - DNA, 22 bp, Artificial Sequence
  Synthetic oligonucleotide; TTG chr11 5393737 5393758 5393742 5393737 -
aaaataataatacctccctact

SEQ ID NO: 113667 - DNA, 22 bp, Artificial Sequence
  Synthetic oligonucleotide; CTC chr11 5393721 5393742 5393726 5393721 -
cctacttcacaggtttggtgag

SEQ ID NO: 113668 - DNA, 22 bp, Artificial Sequence
  Synthetic oligonucleotide; CTA chr11 5393717 5393738 5393722 5393717 -
cttcacaggtttggtgagaaaa

SEQ ID NO: 113669 - DNA, 22 bp, Artificial Sequence
  Synthetic oligonucleotide; CTT chr11 5393714 5393735 5393719 5393714 -
cacaggtttggtgagaaaatta

SEQ ID NO: 113670 - DNA, 22 bp, Artificial Sequence
  Synthetic oligonucleotide; TTC chr11 5393713 5393734 5393718 5393713 -
acaggtttggtgagaaaattaa

SEQ ID NO: 113671 - DNA, 22 bp, Artificial Sequence
  Synthetic oligonucleotide; TTT chr11 5393705 5393726 5393710 5393705 -
ggtgagaaaattaaatgaaata

SEQ ID NO: 113672 - DNA, 22 bp, Artificial Sequence
  Synthetic oligonucleotide; TTG chr11 5393704 5393725 5393709 5393704 -
gtgagaaaattaaatgaaataa

SEQ ID NO: 113673 - DNA, 22 bp, Artificial Sequence
  Synthetic oligonucleotide; TTA chr11 5393692 5393713 5393697 5393692 -
aatgaaataatgtaaaataatg

SEQ ID NO: 113674 - DNA, 22 bp, Artificial Sequence
  Synthetic oligonucleotide; CTC chr11 5393654 5393675 5393659 5393654 -
agccctctctaccgtgagttaa

SEQ ID NO: 113675 - DNA, 22 bp, Artificial Sequence
  Synthetic oligonucleotide; CTC chr11 5393647 5393668 5393652 5393647 -
tctaccgtgagttaaatgctta

SEQ ID NO: 113676 - DNA, 22 bp, Artificial Sequence
  Synthetic oligonucleotide; CTC chr11 5393645 5393666 5393650 5393645 -
taccgtgagttaaatgcttaat

SEQ ID NO: 113677 - DNA, 22 bp, Artificial Sequence
  Synthetic oligonucleotide; CTA chr11 5393643 5393664 5393648 5393643 -
ccgtgagttaaatgcttaataa

SEQ ID NO: 113678 - DNA, 22 bp, Artificial Sequence
  Synthetic oligonucleotide; TTA chr11 5393633 5393654 5393638 5393633 -
aatgcttaataaacattagcat

SEQ ID NO: 113679 - DNA, 22 bp, Artificial Sequence
  Synthetic oligonucleotide; CTT chr11 5393626 5393647 5393631 5393626 -
aataaacattagcatttatcat

SEQ ID NO: 113680 - DNA, 22 bp, Artificial Sequence
  Synthetic oligonucleotide; TTA chr11 5393625 5393646 5393630 5393625 -
ataaacattagcatttatcatg

SEQ ID NO: 113681 - DNA, 22 bp, Artificial Sequence
  Synthetic oligonucleotide; TTA chr11 5393615 5393636 5393620 5393615 -
gcatttatcatgatcataatta

SEQ ID NO: 113682 - DNA, 22 bp, Artificial Sequence
  Synthetic oligonucleotide; TTT chr11 5393609 5393630 5393614 5393609 -
atcatgatcataattatcatct

SEQ ID NO: 113683 - DNA, 22 bp, Artificial Sequence
  Synthetic oligonucleotide; TTA chr11 5393608 5393629 5393613 5393608 -
tcatgatcataattatcatctt

SEQ ID NO: 113684 - DNA, 22 bp, Artificial Sequence
  Synthetic oligonucleotide; TTA chr11 5393593 5393614 5393598 5393593 -
tcatcttcattgtcatcttcag

SEQ ID NO: 113685 - DNA, 22 bp, Artificial Sequence
  Synthetic oligonucleotide; CTT chr11 5393586 5393607 5393591 5393586 -
cattgtcatcttcagcataatc

SEQ ID NO: 113686 - DNA, 22 bp, Artificial Sequence
  Synthetic oligonucleotide; TTC chr11 5393585 5393606 5393590 5393585 -
attgtcatcttcagcataatcg

SEQ ID NO: 113687 - DNA, 22 bp, Artificial Sequence
  Synthetic oligonucleotide; TTG chr11 5393581 5393602 5393586 5393581 -
tcatcttcagcataatcgtata

SEQ ID NO: 113688 - DNA, 22 bp, Artificial Sequence
  Synthetic oligonucleotide; CTT chr11 5393574 5393595 5393579 5393574 -
cagcataatcgtatataacttt

SEQ ID NO: 113689 - DNA, 22 bp, Artificial Sequence
  Synthetic oligonucleotide; TTC chr11 5393573 5393594 5393578 5393573 -
agcataatcgtatataactttt

SEQ ID NO: 113690 - DNA, 22 bp, Artificial Sequence
  Synthetic oligonucleotide; CTT chr11 5393553 5393574 5393558 5393553 -
tttatagtcattgtaaaatgct

SEQ ID NO: 113691 - DNA, 22 bp, Artificial Sequence
  Synthetic oligonucleotide; TTT chr11 5393552 5393573 5393557 5393552 -
ttatagtcattgtaaaatgctc

SEQ ID NO: 113692 - DNA, 22 bp, Artificial Sequence
  Synthetic oligonucleotide; TTT chr11 5393551 5393572 5393556 5393551 -
tatagtcattgtaaaatgctct

SEQ ID NO: 113693 - DNA, 22 bp, Artificial Sequence
  Synthetic oligonucleotide; TTT chr11 5393550 5393571 5393555 5393550 -
atagtcattgtaaaatgctctt

SEQ ID NO: 113694 - DNA, 22 bp, Artificial Sequence
  Synthetic oligonucleotide; TTA chr11 5393549 5393570 5393554 5393549 -
tagtcattgtaaaatgctcttt

SEQ ID NO: 113695 - DNA, 22 bp, Artificial Sequence
  Synthetic oligonucleotide; TTG chr11 5393540 5393561 5393545 5393540 -
taaaatgctctttttagattat

SEQ ID NO: 113696 - DNA, 22 bp, Artificial Sequence
  Synthetic oligonucleotide; CTC chr11 5393530 5393551 5393535 5393530 -
tttttagattataaaaccgaaa

SEQ ID NO: 113697 - DNA, 22 bp, Artificial Sequence
  Synthetic oligonucleotide; CTT chr11 5393528 5393549 5393533 5393528 -
tttagattataaaaccgaaatg

SEQ ID NO: 113698 - DNA, 22 bp, Artificial Sequence
  Synthetic oligonucleotide; TTT chr11 5393527 5393548 5393532 5393527 -
ttagattataaaaccgaaatgt

SEQ ID NO: 113699 - DNA, 22 bp, Artificial Sequence
  Synthetic oligonucleotide; TTT chr11 5393526 5393547 5393531 5393526 -
tagattataaaaccgaaatgtc

SEQ ID NO: 113700 - DNA, 22 bp, Artificial Sequence
  Synthetic oligonucleotide; TTT chr11 5393525 5393546 5393530 5393525 -
agattataaaaccgaaatgtct

SEQ ID NO: 113701 - DNA, 22 bp, Artificial Sequence
  Synthetic oligonucleotide; TTA chr11 5393524 5393545 5393529 5393524 -
gattataaaaccgaaatgtctt

SEQ ID NO: 113702 - DNA, 22 bp, Artificial Sequence
  Synthetic oligonucleotide; TTA chr11 5393519 5393540 5393524 5393519 -
taaaaccgaaatgtcttcttca

SEQ ID NO: 113703 - DNA, 22 bp, Artificial Sequence
  Synthetic oligonucleotide; CTT chr11 5393502 5393523 5393507 5393502 -
cttcagaaaatttgtatacggc

SEQ ID NO: 113704 - DNA, 22 bp, Artificial Sequence
  Synthetic oligonucleotide; TTC chr11 5393501 5393522 5393506 5393501 -
ttcagaaaatttgtatacggca

SEQ ID NO: 113705 - DNA, 22 bp, Artificial Sequence
  Synthetic oligonucleotide; CTT chr11 5393499 5393520 5393504 5393499 -
cagaaaatttgtatacggcaaa

SEQ ID NO: 113706 - DNA, 22 bp, Artificial Sequence
  Synthetic oligonucleotide; TTC chr11 5393498 5393519 5393503 5393498 -
agaaaatttgtatacggcaaag

SEQ ID NO: 113707 - DNA, 22 bp, Artificial Sequence
  Synthetic oligonucleotide; TTT chr11 5393489 5393510 5393494 5393489 -
gtatacggcaaagatagagaaa

SEQ ID NO: 113708 - DNA, 22 bp, Artificial Sequence
  Synthetic oligonucleotide; TTG chr11 5393488 5393509 5393493 5393488 -
tatacggcaaagatagagaaat

SEQ ID NO: 113709 - DNA, 22 bp, Artificial Sequence
  Synthetic oligonucleotide; CTA chr11 5393463 5393484 5393468 5393463 -
tatagaaaataagattatatat

SEQ ID NO: 113710 - DNA, 22 bp, Artificial Sequence
  Synthetic oligonucleotide; TTA chr11 5393446 5393467 5393451 5393446 -
tatataacagctgtttttcttt

SEQ ID NO: 113711 - DNA, 22 bp, Artificial Sequence
  Synthetic oligonucleotide; CTG chr11 5393433 5393454 5393438 5393433 -
tttttcttttgatacaaatatt

SEQ ID NO: 113712 - DNA, 22 bp, Artificial Sequence
  Synthetic oligonucleotide; TTT chr11 5393430 5393451 5393435 5393430 -
ttcttttgatacaaatatttat

SEQ ID NO: 113713 - DNA, 22 bp, Artificial Sequence
  Synthetic oligonucleotide; TTT chr11 5393429 5393450 5393434 5393429 -
tcttttgatacaaatatttata

SEQ ID NO: 113714 - DNA, 22 bp, Artificial Sequence
  Synthetic oligonucleotide; TTT chr11 5393428 5393449 5393433 5393428 -
cttttgatacaaatatttatag

SEQ ID NO: 113715 - DNA, 22 bp, Artificial Sequence
  Synthetic oligonucleotide; TTC chr11 5393427 5393448 5393432 5393427 -
ttttgatacaaatatttatagc

SEQ ID NO: 113716 - DNA, 22 bp, Artificial Sequence
  Synthetic oligonucleotide; CTT chr11 5393425 5393446 5393430 5393425 -
ttgatacaaatatttatagcct

SEQ ID NO: 113717 - DNA, 22 bp, Artificial Sequence
  Synthetic oligonucleotide; TTT chr11 5393424 5393445 5393429 5393424 -
tgatacaaatatttatagcctt

SEQ ID NO: 113718 - DNA, 22 bp, Artificial Sequence
  Synthetic oligonucleotide; TTT chr11 5393423 5393444 5393428 5393423 -
gatacaaatatttatagccttt

SEQ ID NO: 113719 - DNA, 22 bp, Artificial Sequence
  Synthetic oligonucleotide; TTG chr11 5393422 5393443 5393427 5393422 -
atacaaatatttatagcctttt

SEQ ID NO: 113720 - DNA, 22 bp, Artificial Sequence
  Synthetic oligonucleotide; TTT chr11 5393410 5393431 5393415 5393410 -
atagccttttacatagtgattg

SEQ ID NO: 113721 - DNA, 22 bp, Artificial Sequence
  Synthetic oligonucleotide; TTA chr11 5393409 5393430 5393414 5393409 -
tagccttttacatagtgattgt

SEQ ID NO: 113722 - DNA, 22 bp, Artificial Sequence
  Synthetic oligonucleotide; CTT chr11 5393402 5393423 5393407 5393402 -
ttacatagtgattgttctgtac

SEQ ID NO: 113723 - DNA, 22 bp, Artificial Sequence
  Synthetic oligonucleotide; TTT chr11 5393401 5393422 5393406 5393401 -
tacatagtgattgttctgtacc

SEQ ID NO: 113724 - DNA, 22 bp, Artificial Sequence
  Synthetic oligonucleotide; TTT chr11 5393400 5393421 5393405 5393400 -
acatagtgattgttctgtacct

SEQ ID NO: 113725 - DNA, 22 bp, Artificial Sequence
  Synthetic oligonucleotide; TTA chr11 5393399 5393420 5393404 5393399 -
catagtgattgttctgtaccta

SEQ ID NO: 113726 - DNA, 22 bp, Artificial Sequence
  Synthetic oligonucleotide; TTG chr11 5393388 5393409 5393393 5393388 -
ttctgtacctaattttgcttat

SEQ ID NO: 113727 - DNA, 22 bp, Artificial Sequence
  Synthetic oligonucleotide; TTC chr11 5393385 5393406 5393390 5393385 -
tgtacctaattttgcttatttt

SEQ ID NO: 113728 - DNA, 22 bp, Artificial Sequence
  Synthetic oligonucleotide; CTG chr11 5393383 5393404 5393388 5393383 -
tacctaattttgcttattttta

SEQ ID NO: 113729 - DNA, 22 bp, Artificial Sequence
  Synthetic oligonucleotide; CTA chr11 5393377 5393398 5393382 5393377 -
attttgcttatttttatttaat

SEQ ID NO: 113730 - DNA, 22 bp, Artificial Sequence
  Synthetic oligonucleotide; TTT chr11 5393373 5393394 5393378 5393373 -
tgcttatttttatttaatattt

SEQ ID NO: 113731 - DNA, 22 bp, Artificial Sequence
  Synthetic oligonucleotide; TTT chr11 5393372 5393393 5393377 5393372 -
gcttatttttatttaatatttt

SEQ ID NO: 113732 - DNA, 22 bp, Artificial Sequence
  Synthetic oligonucleotide; TTG chr11 5393371 5393392 5393376 5393371 -
cttatttttatttaatattttg

SEQ ID NO: 113733 - DNA, 22 bp, Artificial Sequence
  Synthetic oligonucleotide; CTT chr11 5393368 5393389 5393373 5393368 -
atttttatttaatattttgcca

SEQ ID NO: 113734 - DNA, 22 bp, Artificial Sequence
  Synthetic oligonucleotide; TTA chr11 5393367 5393388 5393372 5393367 -
tttttatttaatattttgccaa

SEQ ID NO: 113735 - DNA, 22 bp, Artificial Sequence
  Synthetic oligonucleotide; TTT chr11 5393364 5393385 5393369 5393364 -
ttatttaatattttgccaacag

SEQ ID NO: 113736 - DNA, 22 bp, Artificial Sequence
  Synthetic oligonucleotide; TTT chr11 5393363 5393384 5393368 5393363 -
tatttaatattttgccaacagt

SEQ ID NO: 113737 - DNA, 22 bp, Artificial Sequence
  Synthetic oligonucleotide; TTT chr11 5393362 5393383 5393367 5393362 -
atttaatattttgccaacagtt

SEQ ID NO: 113738 - DNA, 22 bp, Artificial Sequence
  Synthetic oligonucleotide; TTA chr11 5393361 5393382 5393366 5393361 -
tttaatattttgccaacagttt

SEQ ID NO: 113739 - DNA, 22 bp, Artificial Sequence
  Synthetic oligonucleotide; TTT chr11 5393358 5393379 5393363 5393358 -
aatattttgccaacagtttcct

SEQ ID NO: 113740 - DNA, 22 bp, Artificial Sequence
  Synthetic oligonucleotide; TTA chr11 5393357 5393378 5393362 5393357 -
atattttgccaacagtttccta

SEQ ID NO: 113741 - DNA, 22 bp, Artificial Sequence
  Synthetic oligonucleotide; TTT chr11 5393351 5393372 5393356 5393351 -
tgccaacagtttcctaagcatt

SEQ ID NO: 113742 - DNA, 22 bp, Artificial Sequence
  Synthetic oligonucleotide; TTT chr11 5393350 5393371 5393355 5393350 -
gccaacagtttcctaagcattt

SEQ ID NO: 113743 - DNA, 22 bp, Artificial Sequence
  Synthetic oligonucleotide; TTG chr11 5393349 5393370 5393354 5393349 -
ccaacagtttcctaagcattta

SEQ ID NO: 113744 - DNA, 22 bp, Artificial Sequence
  Synthetic oligonucleotide; TTT chr11 5393339 5393360 5393344 5393339 -
cctaagcatttaaatgtcattt

SEQ ID NO: 113745 - DNA, 22 bp, Artificial Sequence
  Synthetic oligonucleotide; TTC chr11 5393338 5393359 5393343 5393338 -
ctaagcatttaaatgtcatttt

SEQ ID NO: 113746 - DNA, 22 bp, Artificial Sequence
  Synthetic oligonucleotide; CTA chr11 5393335 5393356 5393340 5393335 -
agcatttaaatgtcattttaat

SEQ ID NO: 113747 - DNA, 22 bp, Artificial Sequence
  Synthetic oligonucleotide; TTT chr11 5393328 5393349 5393333 5393328 -
aaatgtcattttaataatagtg

SEQ ID NO: 113748 - DNA, 22 bp, Artificial Sequence
  Synthetic oligonucleotide; TTA chr11 5393327 5393348 5393332 5393327 -
aatgtcattttaataatagtgt

SEQ ID NO: 113749 - DNA, 22 bp, Artificial Sequence
  Synthetic oligonucleotide; TTT chr11 5393317 5393338 5393322 5393317 -
taataatagtgtatcaaatgaa

SEQ ID NO: 113750 - DNA, 22 bp, Artificial Sequence
  Synthetic oligonucleotide; TTT chr11 5393316 5393337 5393321 5393316 -
aataatagtgtatcaaatgaat

SEQ ID NO: 113751 - DNA, 22 bp, Artificial Sequence
  Synthetic oligonucleotide; TTA chr11 5393315 5393336 5393320 5393315 -
ataatagtgtatcaaatgaata

SEQ ID NO: 113752 - DNA, 22 bp, Artificial Sequence
  Synthetic oligonucleotide; CTT chr11 5393288 5393309 5393293 5393288 -
tgatttatgtaatatttttatt

SEQ ID NO: 113753 - DNA, 22 bp, Artificial Sequence
  Synthetic oligonucleotide; TTT chr11 5393287 5393308 5393292 5393287 -
gatttatgtaatatttttattc

SEQ ID NO: 113754 - DNA, 22 bp, Artificial Sequence
  Synthetic oligonucleotide; TTG chr11 5393286 5393307 5393291 5393286 -
atttatgtaatatttttattct

SEQ ID NO: 113755 - DNA, 22 bp, Artificial Sequence
  Synthetic oligonucleotide; TTT chr11 5393282 5393303 5393287 5393282 -
atgtaatatttttattctagac

SEQ ID NO: 113756 - DNA, 22 bp, Artificial Sequence
  Synthetic oligonucleotide; TTA chr11 5393281 5393302 5393286 5393281 -
tgtaatatttttattctagaca

SEQ ID NO: 113757 - DNA, 22 bp, Artificial Sequence
  Synthetic oligonucleotide; TTT chr11 5393271 5393292 5393276 5393271 -
ttattctagacattttgtatgc

SEQ ID NO: 113758 - DNA, 22 bp, Artificial Sequence
  Synthetic oligonucleotide; TTT chr11 5393270 5393291 5393275 5393270 -
tattctagacattttgtatgct

SEQ ID NO: 113759 - DNA, 22 bp, Artificial Sequence
  Synthetic oligonucleotide; TTT chr11 5393269 5393290 5393274 5393269 -
attctagacattttgtatgctt

SEQ ID NO: 113760 - DNA, 22 bp, Artificial Sequence
  Synthetic oligonucleotide; TTA chr11 5393268 5393289 5393273 5393268 -
ttctagacattttgtatgctta

SEQ ID NO: 113761 - DNA, 22 bp, Artificial Sequence
  Synthetic oligonucleotide; TTC chr11 5393265 5393286 5393270 5393265 -
tagacattttgtatgcttacat

SEQ ID NO: 113762 - DNA, 22 bp, Artificial Sequence
  Synthetic oligonucleotide; CTA chr11 5393263 5393284 5393268 5393263 -
gacattttgtatgcttacattc

SEQ ID NO: 113763 - DNA, 22 bp, Artificial Sequence
  Synthetic oligonucleotide; TTT chr11 5393256 5393277 5393261 5393256 -
tgtatgcttacattcttaaaat

SEQ ID NO: 113764 - DNA, 22 bp, Artificial Sequence
  Synthetic oligonucleotide; TTT chr11 5393255 5393276 5393260 5393255 -
gtatgcttacattcttaaaatt

SEQ ID NO: 113765 - DNA, 22 bp, Artificial Sequence
  Synthetic oligonucleotide; TTG chr11 5393254 5393275 5393259 5393254 -
tatgcttacattcttaaaatta

SEQ ID NO: 113766 - DNA, 22 bp, Artificial Sequence
  Synthetic oligonucleotide; CTT chr11 5393247 5393268 5393252 5393247 -
acattcttaaaattatgaacaa

SEQ ID NO: 113767 - DNA, 22 bp, Artificial Sequence
  Synthetic oligonucleotide; TTA chr11 5393246 5393267 5393251 5393246 -
cattcttaaaattatgaacaat

SEQ ID NO: 113768 - DNA, 22 bp, Artificial Sequence
  Synthetic oligonucleotide; TTC chr11 5393241 5393262 5393246 5393241 -
ttaaaattatgaacaataacac

SEQ ID NO: 113769 - DNA, 22 bp, Artificial Sequence
  Synthetic oligonucleotide; CTT chr11 5393239 5393260 5393244 5393239 -
aaaattatgaacaataacacaa

SEQ ID NO: 113770 - DNA, 22 bp, Artificial Sequence
  Synthetic oligonucleotide; TTA chr11 5393238 5393259 5393243 5393238 -
aaattatgaacaataacacaaa

SEQ ID NO: 113771 - DNA, 22 bp, Artificial Sequence
  Synthetic oligonucleotide; TTA chr11 5393232 5393253 5393237 5393232 -
tgaacaataacacaaattataa

SEQ ID NO: 113772 - DNA, 22 bp, Artificial Sequence
  Synthetic oligonucleotide; TTA chr11 5393213 5393234 5393218 5393213 -
taatattcacttattaaatagt

SEQ ID NO: 113773 - DNA, 22 bp, Artificial Sequence
  Synthetic oligonucleotide; TTC chr11 5393205 5393226 5393210 5393205 -
acttattaaatagttcaacaca

SEQ ID NO: 113774 - DNA, 22 bp, Artificial Sequence
  Synthetic oligonucleotide; CTT chr11 5393201 5393222 5393206 5393201 -
attaaatagttcaacacatatt

SEQ ID NO: 113775 - DNA, 22 bp, Artificial Sequence
  Synthetic oligonucleotide; TTA chr11 5393200 5393221 5393205 5393200 -
ttaaatagttcaacacatattt

SEQ ID NO: 113776 - DNA, 22 bp, Artificial Sequence
  Synthetic oligonucleotide; TTA chr11 5393197 5393218 5393202 5393197 -
aatagttcaacacatatttatt

SEQ ID NO: 113777 - DNA, 22 bp, Artificial Sequence
  Synthetic oligonucleotide; TTC chr11 5393189 5393210 5393194 5393189 -
aacacatatttattgatcactg

SEQ ID NO: 113778 - DNA, 22 bp, Artificial Sequence
  Synthetic oligonucleotide; TTT chr11 5393178 5393199 5393183 5393178 -
attgatcactgacctaggagat

SEQ ID NO: 113779 - DNA, 22 bp, Artificial Sequence
  Synthetic oligonucleotide; TTA chr11 5393177 5393198 5393182 5393177 -
ttgatcactgacctaggagatg

SEQ ID NO: 113780 - DNA, 22 bp, Artificial Sequence
  Synthetic oligonucleotide; TTG chr11 5393174 5393195 5393179 5393174 -
atcactgacctaggagatggat

SEQ ID NO: 113781 - DNA, 22 bp, Artificial Sequence
  Synthetic oligonucleotide; CTG chr11 5393167 5393188 5393172 5393167 -
acctaggagatggatttagaac

SEQ ID NO: 113782 - DNA, 22 bp, Artificial Sequence
  Synthetic oligonucleotide; CTA chr11 5393162 5393183 5393167 5393162 -
ggagatggatttagaactgtga

SEQ ID NO: 113783 - DNA, 22 bp, Artificial Sequence
  Synthetic oligonucleotide; TTT chr11 5393150 5393171 5393155 5393150 -
agaactgtgagcaaacaggaaa

SEQ ID NO: 113784 - DNA, 22 bp, Artificial Sequence
  Synthetic oligonucleotide; TTA chr11 5393149 5393170 5393154 5393149 -
gaactgtgagcaaacaggaaaa

SEQ ID NO: 113785 - DNA, 22 bp, Artificial Sequence
  Synthetic oligonucleotide; CTG chr11 5393143 5393164 5393148 5393143 -
tgagcaaacaggaaaaaaattt

SEQ ID NO: 113786 - DNA, 22 bp, Artificial Sequence
  Synthetic oligonucleotide; TTT chr11 5393121 5393142 5393126 5393121 -
tgccacaaacagcttacatcct

SEQ ID NO: 113787 - DNA, 22 bp, Artificial Sequence
  Synthetic oligonucleotide; TTT chr11 5393120 5393141 5393125 5393120 -
gccacaaacagcttacatccta

SEQ ID NO: 113788 - DNA, 22 bp, Artificial Sequence
  Synthetic oligonucleotide; TTG chr11 5393119 5393140 5393124 5393119 -
ccacaaacagcttacatcctaa

SEQ ID NO: 113789 - DNA, 22 bp, Artificial Sequence
  Synthetic oligonucleotide; CTT chr11 5393106 5393127 5393111 5393106 -
acatcctaaatttttaatttat

SEQ ID NO: 113790 - DNA, 22 bp, Artificial Sequence
  Synthetic oligonucleotide; TTA chr11 5393105 5393126 5393110 5393105 -
catcctaaatttttaatttatc

SEQ ID NO: 113791 - DNA, 22 bp, Artificial Sequence
  Synthetic oligonucleotide; CTA chr11 5393098 5393119 5393103 5393098 -
aatttttaatttatcatttatt

SEQ ID NO: 113792 - DNA, 22 bp, Artificial Sequence
  Synthetic oligonucleotide; TTT chr11 5393093 5393114 5393098 5393093 -
ttaatttatcatttatttagga

SEQ ID NO: 113793 - DNA, 22 bp, Artificial Sequence
  Synthetic oligonucleotide; TTT chr11 5393092 5393113 5393097 5393092 -
taatttatcatttatttaggac

SEQ ID NO: 113794 - DNA, 22 bp, Artificial Sequence
  Synthetic oligonucleotide; TTT chr11 5393091 5393112 5393096 5393091 -
aatttatcatttatttaggaca

SEQ ID NO: 113795 - DNA, 22 bp, Artificial Sequence
  Synthetic oligonucleotide; TTA chr11 5393090 5393111 5393095 5393090 -
atttatcatttatttaggacag

SEQ ID NO: 113796 - DNA, 22 bp, Artificial Sequence
  Synthetic oligonucleotide; TTT chr11 5393086 5393107 5393091 5393086 -
atcatttatttaggacagattt

SEQ ID NO: 113797 - DNA, 22 bp, Artificial Sequence
  Synthetic oligonucleotide; TTA chr11 5393085 5393106 5393090 5393085 -
tcatttatttaggacagatttt

SEQ ID NO: 113798 - DNA, 22 bp, Artificial Sequence
  Synthetic oligonucleotide; TTT chr11 5393079 5393100 5393084 5393079 -
atttaggacagatttttagaag

SEQ ID NO: 113799 - DNA, 22 bp, Artificial Sequence
  Synthetic oligonucleotide; TTA chr11 5393078 5393099 5393083 5393078 -
tttaggacagatttttagaagt

SEQ ID NO: 113800 - DNA, 22 bp, Artificial Sequence
  Synthetic oligonucleotide; TTT chr11 5393075 5393096 5393080 5393075 -
aggacagatttttagaagtggc

SEQ ID NO: 113801 - DNA, 22 bp, Artificial Sequence
  Synthetic oligonucleotide; TTA chr11 5393074 5393095 5393079 5393074 -
ggacagatttttagaagtggca

SEQ ID NO: 113802 - DNA, 22 bp, Artificial Sequence
  Synthetic oligonucleotide; TTT chr11 5393064 5393085 5393069 5393064 -
ttagaagtggcatttctgagac

SEQ ID NO: 113803 - DNA, 22 bp, Artificial Sequence
  Synthetic oligonucleotide; TTT chr11 5393063 5393084 5393068 5393063 -
tagaagtggcatttctgagaca

SEQ ID NO: 113804 - DNA, 22 bp, Artificial Sequence
  Synthetic oligonucleotide; TTT chr11 5393062 5393083 5393067 5393062 -
agaagtggcatttctgagacac

SEQ ID NO: 113805 - DNA, 22 bp, Artificial Sequence
  Synthetic oligonucleotide; TTA chr11 5393061 5393082 5393066 5393061 -
gaagtggcatttctgagacaca

SEQ ID NO: 113806 - DNA, 22 bp, Artificial Sequence
  Synthetic oligonucleotide; TTT chr11 5393049 5393070 5393054 5393049 -
ctgagacacagagcatgaatat

SEQ ID NO: 113807 - DNA, 22 bp, Artificial Sequence
  Synthetic oligonucleotide; TTC chr11 5393048 5393069 5393053 5393048 -
tgagacacagagcatgaatatt

SEQ ID NO: 113808 - DNA, 22 bp, Artificial Sequence
  Synthetic oligonucleotide; CTG chr11 5393046 5393067 5393051 5393046 -
agacacagagcatgaatatttt

SEQ ID NO: 113809 - DNA, 22 bp, Artificial Sequence
  Synthetic oligonucleotide; TTT chr11 5393025 5393046 5393030 5393025 -
tcaagtcttttgatgtattttg

SEQ ID NO: 113810 - DNA, 22 bp, Artificial Sequence
  Synthetic oligonucleotide; TTT chr11 5393024 5393045 5393029 5393024 -
caagtcttttgatgtattttgt

SEQ ID NO: 113811 - DNA, 22 bp, Artificial Sequence
  Synthetic oligonucleotide; TTC chr11 5393023 5393044 5393028 5393023 -
aagtcttttgatgtattttgtt

SEQ ID NO: 113812 - DNA, 22 bp, Artificial Sequence
  Synthetic oligonucleotide; CTT chr11 5393016 5393037 5393021 5393016 -
ttgatgtattttgttttttata

SEQ ID NO: 113813 - DNA, 22 bp, Artificial Sequence
  Synthetic oligonucleotide; TTT chr11 5393015 5393036 5393020 5393015 -
tgatgtattttgttttttataa

SEQ ID NO: 113814 - DNA, 22 bp, Artificial Sequence
  Synthetic oligonucleotide; TTT chr11 5393014 5393035 5393019 5393014 -
gatgtattttgttttttataaa

SEQ ID NO: 113815 - DNA, 22 bp, Artificial Sequence
  Synthetic oligonucleotide; TTG chr11 5393013 5393034 5393018 5393013 -
atgtattttgttttttataaaa

SEQ ID NO: 113816 - DNA, 22 bp, Artificial Sequence
  Synthetic oligonucleotide; TTT chr11 5393005 5393026 5393010 5393005 -
tgttttttataaaaggcaaatt

SEQ ID NO: 113817 - DNA, 22 bp, Artificial Sequence
  Synthetic oligonucleotide; TTT chr11 5393004 5393025 5393009 5393004 -
gttttttataaaaggcaaatta

SEQ ID NO: 113818 - DNA, 22 bp, Artificial Sequence
  Synthetic oligonucleotide; TTG chr11 5393003 5393024 5393008 5393003 -
ttttttataaaaggcaaattaa

SEQ ID NO: 113819 - DNA, 22 bp, Artificial Sequence
  Synthetic oligonucleotide; TTT chr11 5393000 5393021 5393005 5393000 -
tttataaaaggcaaattaaatt

SEQ ID NO: 113820 - DNA, 22 bp, Artificial Sequence
  Synthetic oligonucleotide; TTT chr11 5392999 5393020 5393004 5392999 -
ttataaaaggcaaattaaatta

SEQ ID NO: 113821 - DNA, 22 bp, Artificial Sequence
  Synthetic oligonucleotide; TTT chr11 5392998 5393019 5393003 5392998 -
tataaaaggcaaattaaattat

SEQ ID NO: 113822 - DNA, 22 bp, Artificial Sequence
  Synthetic oligonucleotide; TTT chr11 5392997 5393018 5393002 5392997 -
ataaaaggcaaattaaattatg

SEQ ID NO: 113823 - DNA, 22 bp, Artificial Sequence
  Synthetic oligonucleotide; TTA chr11 5392996 5393017 5393001 5392996 -
taaaaggcaaattaaattatgt

SEQ ID NO: 113824 - DNA, 22 bp, Artificial Sequence
  Synthetic oligonucleotide; TTA chr11 5392982 5393003 5392987 5392982 -
aattatgttttcattctggtat

SEQ ID NO: 113825 - DNA, 22 bp, Artificial Sequence
  Synthetic oligonucleotide; TTA chr11 5392977 5392998 5392982 5392977 -
tgttttcattctggtatgtgaa

SEQ ID NO: 113826 - DNA, 22 bp, Artificial Sequence
  Synthetic oligonucleotide; TTT chr11 5392972 5392993 5392977 5392972 -
tcattctggtatgtgaaaatac

SEQ ID NO: 113827 - DNA, 22 bp, Artificial Sequence
  Synthetic oligonucleotide; TTT chr11 5392971 5392992 5392976 5392971 -
cattctggtatgtgaaaatacc

SEQ ID NO: 113828 - DNA, 22 bp, Artificial Sequence
  Synthetic oligonucleotide; TTC chr11 5392970 5392991 5392975 5392970 -
attctggtatgtgaaaatacct

SEQ ID NO: 113829 - DNA, 22 bp, Artificial Sequence
  Synthetic oligonucleotide; TTC chr11 5392966 5392987 5392971 5392966 -
tggtatgtgaaaatacctcttt

SEQ ID NO: 113830 - DNA, 22 bp, Artificial Sequence
  Synthetic oligonucleotide; CTG chr11 5392964 5392985 5392969 5392964 -
gtatgtgaaaatacctctttta

SEQ ID NO: 113831 - DNA, 22 bp, Artificial Sequence
  Synthetic oligonucleotide; CTC chr11 5392947 5392968 5392952 5392947 -
ttttaccacatacttaacagca

SEQ ID NO: 113832 - DNA, 22 bp, Artificial Sequence
  Synthetic oligonucleotide; CTT chr11 5392945 5392966 5392950 5392945 -
ttaccacatacttaacagcaca

SEQ ID NO: 113833 - DNA, 22 bp, Artificial Sequence
  Synthetic oligonucleotide; TTT chr11 5392944 5392965 5392949 5392944 -
taccacatacttaacagcacag

SEQ ID NO: 113834 - DNA, 22 bp, Artificial Sequence
  Synthetic oligonucleotide; TTT chr11 5392943 5392964 5392948 5392943 -
accacatacttaacagcacaga

SEQ ID NO: 113835 - DNA, 22 bp, Artificial Sequence
  Synthetic oligonucleotide; TTA chr11 5392942 5392963 5392947 5392942 -
ccacatacttaacagcacagat

SEQ ID NO: 113836 - DNA, 22 bp, Artificial Sequence
  Synthetic oligonucleotide; CTT chr11 5392932 5392953 5392937 5392932 -
aacagcacagatatttatttat

SEQ ID NO: 113837 - DNA, 22 bp, Artificial Sequence
  Synthetic oligonucleotide; TTA chr11 5392931 5392952 5392936 5392931 -
acagcacagatatttatttatt

SEQ ID NO: 113838 - DNA, 22 bp, Artificial Sequence
  Synthetic oligonucleotide; TTT chr11 5392916 5392937 5392921 5392916 -
atttatttttctttttttttgt

SEQ ID NO: 113839 - DNA, 22 bp, Artificial Sequence
  Synthetic oligonucleotide; TTA chr11 5392915 5392936 5392920 5392915 -
tttatttttctttttttttgtt

SEQ ID NO: 113840 - DNA, 22 bp, Artificial Sequence
  Synthetic oligonucleotide; TTT chr11 5392912 5392933 5392917 5392912 -
atttttctttttttttgttttt

SEQ ID NO: 113841 - DNA, 22 bp, Artificial Sequence
  Synthetic oligonucleotide; TTA chr11 5392911 5392932 5392916 5392911 -
tttttctttttttttgtttttg

SEQ ID NO: 113842 - DNA, 22 bp, Artificial Sequence
  Synthetic oligonucleotide; TTT chr11 5392908 5392929 5392913 5392908 -
ttctttttttttgtttttgaga

SEQ ID NO: 113843 - DNA, 22 bp, Artificial Sequence
  Synthetic oligonucleotide; TTT chr11 5392907 5392928 5392912 5392907 -
tctttttttttgtttttgagaa

SEQ ID NO: 113844 - DNA, 22 bp, Artificial Sequence
  Synthetic oligonucleotide; TTT chr11 5392906 5392927 5392911 5392906 -
ctttttttttgtttttgagaag

SEQ ID NO: 113845 - DNA, 22 bp, Artificial Sequence
  Synthetic oligonucleotide; TTC chr11 5392905 5392926 5392910 5392905 -
tttttttttgtttttgagaagg

SEQ ID NO: 113846 - DNA, 22 bp, Artificial Sequence
  Synthetic oligonucleotide; CTT chr11 5392903 5392924 5392908 5392903 -
tttttttgtttttgagaaggag

SEQ ID NO: 113847 - DNA, 22 bp, Artificial Sequence
  Synthetic oligonucleotide; TTT chr11 5392902 5392923 5392907 5392902 -
ttttttgtttttgagaaggagt

SEQ ID NO: 113848 - DNA, 22 bp, Artificial Sequence
  Synthetic oligonucleotide; TTT chr11 5392901 5392922 5392906 5392901 -
tttttgtttttgagaaggagtc

SEQ ID NO: 113849 - DNA, 22 bp, Artificial Sequence
  Synthetic oligonucleotide; TTT chr11 5392900 5392921 5392905 5392900 -
ttttgtttttgagaaggagtct

SEQ ID NO: 113850 - DNA, 22 bp, Artificial Sequence
  Synthetic oligonucleotide; TTT chr11 5392899 5392920 5392904 5392899 -
tttgtttttgagaaggagtctt

SEQ ID NO: 113851 - DNA, 22 bp, Artificial Sequence
  Synthetic oligonucleotide; TTT chr11 5392898 5392919 5392903 5392898 -
ttgtttttgagaaggagtcttg

SEQ ID NO: 113852 - DNA, 22 bp, Artificial Sequence
  Synthetic oligonucleotide; TTT chr11 5392897 5392918 5392902 5392897 -
tgtttttgagaaggagtcttgc

SEQ ID NO: 113853 - DNA, 22 bp, Artificial Sequence
  Synthetic oligonucleotide; TTT chr11 5392896 5392917 5392901 5392896 -
gtttttgagaaggagtcttgct

SEQ ID NO: 113854 - DNA, 22 bp, Artificial Sequence
  Synthetic oligonucleotide; TTG chr11 5392895 5392916 5392900 5392895 -
tttttgagaaggagtcttgctc

SEQ ID NO: 113855 - DNA, 22 bp, Artificial Sequence
  Synthetic oligonucleotide; TTT chr11 5392892 5392913 5392897 5392892 -
ttgagaaggagtcttgctctgt

SEQ ID NO: 113856 - DNA, 22 bp, Artificial Sequence
  Synthetic oligonucleotide; TTT chr11 5392891 5392912 5392896 5392891 -
tgagaaggagtcttgctctgtt

SEQ ID NO: 113857 - DNA, 22 bp, Artificial Sequence
  Synthetic oligonucleotide; TTT chr11 5392890 5392911 5392895 5392890 -
gagaaggagtcttgctctgttg

SEQ ID NO: 113858 - DNA, 22 bp, Artificial Sequence
  Synthetic oligonucleotide; TTG chr11 5392889 5392910 5392894 5392889 -
agaaggagtcttgctctgttgc

SEQ ID NO: 113859 - DNA, 22 bp, Artificial Sequence
  Synthetic oligonucleotide; CTT chr11 5392877 5392898 5392882 5392877 -
gctctgttgcccaggctggagt

SEQ ID NO: 113860 - DNA, 22 bp, Artificial Sequence
  Synthetic oligonucleotide; TTG chr11 5392876 5392897 5392881 5392876 -
ctctgttgcccaggctggagtg

SEQ ID NO: 113861 - DNA, 22 bp, Artificial Sequence
  Synthetic oligonucleotide; CTC chr11 5392873 5392894 5392878 5392873 -
tgttgcccaggctggagtgcag

SEQ ID NO: 113862 - DNA, 22 bp, Artificial Sequence
  Synthetic oligonucleotide; CTG chr11 5392871 5392892 5392876 5392871 -
ttgcccaggctggagtgcagtg

SEQ ID NO: 113863 - DNA, 22 bp, Artificial Sequence
  Synthetic oligonucleotide; TTG chr11 5392868 5392889 5392873 5392868 -
cccaggctggagtgcagtggca

SEQ ID NO: 113864 - DNA, 22 bp, Artificial Sequence
  Synthetic oligonucleotide; CTG chr11 5392859 5392880 5392864 5392859 -
gagtgcagtggcacgatctcgg

SEQ ID NO: 113865 - DNA, 22 bp, Artificial Sequence
  Synthetic oligonucleotide; CTC chr11 5392839 5392860 5392844 5392839 -
ggctcactgcaagctccacctc

SEQ ID NO: 113866 - DNA, 22 bp, Artificial Sequence
  Synthetic oligonucleotide; CTC chr11 5392834 5392855 5392839 5392834 -
actgcaagctccacctcctggg

SEQ ID NO: 113867 - DNA, 22 bp, Artificial Sequence
  Synthetic oligonucleotide; CTG chr11 5392830 5392851 5392835 5392830 -
caagctccacctcctgggttca

SEQ ID NO: 113868 - DNA, 22 bp, Artificial Sequence
  Synthetic oligonucleotide; CTC chr11 5392823 5392844 5392828 5392823 -
cacctcctgggttcacgccatt

SEQ ID NO: 113869 - DNA, 22 bp, Artificial Sequence
  Synthetic oligonucleotide; CTC chr11 5392817 5392838 5392822 5392817 -
ctgggttcacgccattctgctg

SEQ ID NO: 113870 - DNA, 22 bp, Artificial Sequence
  Synthetic oligonucleotide; CTG chr11 5392814 5392835 5392819 5392814 -
ggttcacgccattctgctgccc

SEQ ID NO: 113871 - DNA, 22 bp, Artificial Sequence
  Synthetic oligonucleotide; TTC chr11 5392809 5392830 5392814 5392809 -
acgccattctgctgccccagcc

SEQ ID NO: 113872 - DNA, 22 bp, Artificial Sequence
  Synthetic oligonucleotide; TTC chr11 5392800 5392821 5392805 5392800 -
tgctgccccagcctcctgagta

SEQ ID NO: 113873 - DNA, 22 bp, Artificial Sequence
  Synthetic oligonucleotide; CTG chr11 5392798 5392819 5392803 5392798 -
ctgccccagcctcctgagtagc

SEQ ID NO: 113874 - DNA, 22 bp, Artificial Sequence
  Synthetic oligonucleotide; CTG chr11 5392795 5392816 5392800 5392795 -
ccccagcctcctgagtagctgg

SEQ ID NO: 113875 - DNA, 22 bp, Artificial Sequence
  Synthetic oligonucleotide; CTC chr11 5392785 5392806 5392790 5392785 -
ctgagtagctgggactacaggt

SEQ ID NO: 113876 - DNA, 22 bp, Artificial Sequence
  Synthetic oligonucleotide; CTG chr11 5392782 5392803 5392787 5392782 -
agtagctgggactacaggtgcc

SEQ ID NO: 113877 - DNA, 22 bp, Artificial Sequence
  Synthetic oligonucleotide; CTG chr11 5392774 5392795 5392779 5392774 -
ggactacaggtgcccaccacca

SEQ ID NO: 113878 - DNA, 22 bp, Artificial Sequence
  Synthetic oligonucleotide; CTA chr11 5392768 5392789 5392773 5392768 -
caggtgcccaccaccatgcccg

SEQ ID NO: 113879 - DNA, 22 bp, Artificial Sequence
  Synthetic oligonucleotide; CTA chr11 5392742 5392763 5392747 5392742 -
actttttgtatttttagtagag

SEQ ID NO: 113880 - DNA, 22 bp, Artificial Sequence
  Synthetic oligonucleotide; CTT chr11 5392738 5392759 5392743 5392738 -
tttgtatttttagtagagactg

SEQ ID NO: 113881 - DNA, 22 bp, Artificial Sequence
  Synthetic oligonucleotide; TTT chr11 5392737 5392758 5392742 5392737 -
ttgtatttttagtagagactgg

SEQ ID NO: 113882 - DNA, 22 bp, Artificial Sequence
  Synthetic oligonucleotide; TTT chr11 5392736 5392757 5392741 5392736 -
tgtatttttagtagagactggg

SEQ ID NO: 113883 - DNA, 22 bp, Artificial Sequence
  Synthetic oligonucleotide; TTT chr11 5392735 5392756 5392740 5392735 -
gtatttttagtagagactgggt

SEQ ID NO: 113884 - DNA, 22 bp, Artificial Sequence
  Synthetic oligonucleotide; TTG chr11 5392734 5392755 5392739 5392734 -
tatttttagtagagactgggtt

SEQ ID NO: 113885 - DNA, 22 bp, Artificial Sequence
  Synthetic oligonucleotide; TTT chr11 5392729 5392750 5392734 5392729 -
ttagtagagactgggttccacc

SEQ ID NO: 113886 - DNA, 22 bp, Artificial Sequence
  Synthetic oligonucleotide; TTT chr11 5392728 5392749 5392733 5392728 -
tagtagagactgggttccaccg

SEQ ID NO: 113887 - DNA, 22 bp, Artificial Sequence
  Synthetic oligonucleotide; TTT chr11 5392727 5392748 5392732 5392727 -
agtagagactgggttccaccgt

SEQ ID NO: 113888 - DNA, 22 bp, Artificial Sequence
  Synthetic oligonucleotide; TTA chr11 5392726 5392747 5392731 5392726 -
gtagagactgggttccaccgtg

SEQ ID NO: 113889 - DNA, 22 bp, Artificial Sequence
  Synthetic oligonucleotide; CTG chr11 5392716 5392737 5392721 5392716 -
ggttccaccgtgttagccagga

SEQ ID NO: 113890 - DNA, 22 bp, Artificial Sequence
  Synthetic oligonucleotide; TTC chr11 5392711 5392732 5392716 5392711 -
caccgtgttagccaggatggtc

SEQ ID NO: 113891 - DNA, 22 bp, Artificial Sequence
  Synthetic oligonucleotide; TTA chr11 5392701 5392722 5392706 5392701 -
gccaggatggtctcgatctcct

SEQ ID NO: 113892 - DNA, 22 bp, Artificial Sequence
  Synthetic oligonucleotide; CTC chr11 5392687 5392708 5392692 5392687 -
gatctcctgacctcgtgatcca

SEQ ID NO: 113893 - DNA, 22 bp, Artificial Sequence
  Synthetic oligonucleotide; CTC chr11 5392681 5392702 5392686 5392681 -
ctgacctcgtgatccacccgcc

SEQ ID NO: 113894 - DNA, 22 bp, Artificial Sequence
  Synthetic oligonucleotide; CTG chr11 5392678 5392699 5392683 5392678 -
acctcgtgatccacccgcctcg

SEQ ID NO: 113895 - DNA, 22 bp, Artificial Sequence
  Synthetic oligonucleotide; CTC chr11 5392673 5392694 5392678 5392673 -
gtgatccacccgcctcggcctc

SEQ ID NO: 113896 - DNA, 22 bp, Artificial Sequence
  Synthetic oligonucleotide; CTC chr11 5392657 5392678 5392662 5392657 -
ggcctcccagagtgctgggatt

SEQ ID NO: 113897 - DNA, 22 bp, Artificial Sequence
  Synthetic oligonucleotide; CTC chr11 5392651 5392672 5392656 5392651 -
ccagagtgctgggattacaggc

SEQ ID NO: 113898 - DNA, 22 bp, Artificial Sequence
  Synthetic oligonucleotide; CTG chr11 5392640 5392661 5392645 5392640 -
ggattacaggcgtgagccaccg

SEQ ID NO: 113899 - DNA, 22 bp, Artificial Sequence
  Synthetic oligonucleotide; TTA chr11 5392634 5392655 5392639 5392634 -
caggcgtgagccaccgcgccca

SEQ ID NO: 113900 - DNA, 22 bp, Artificial Sequence
  Synthetic oligonucleotide; TTG chr11 5392601 5392622 5392606 5392601 -
attgttaactctattcttcaat

SEQ ID NO: 113901 - DNA, 22 bp, Artificial Sequence
  Synthetic oligonucleotide; TTG chr11 5392597 5392618 5392602 5392597 -
ttaactctattcttcaatattc

SEQ ID NO: 113902 - DNA, 22 bp, Artificial Sequence
  Synthetic oligonucleotide; TTA chr11 5392594 5392615 5392599 5392594 -
actctattcttcaatattcgtt

SEQ ID NO: 113903 - DNA, 22 bp, Artificial Sequence
  Synthetic oligonucleotide; CTC chr11 5392590 5392611 5392595 5392590 -
tattcttcaatattcgtttagt

SEQ ID NO: 113904 - DNA, 22 bp, Artificial Sequence
  Synthetic oligonucleotide; CTA chr11 5392588 5392609 5392593 5392588 -
ttcttcaatattcgtttagtaa

SEQ ID NO: 113905 - DNA, 22 bp, Artificial Sequence
  Synthetic oligonucleotide; TTC chr11 5392585 5392606 5392590 5392585 -
ttcaatattcgtttagtaacaa

SEQ ID NO: 113906 - DNA, 22 bp, Artificial Sequence
  Synthetic oligonucleotide; CTT chr11 5392583 5392604 5392588 5392583 -
caatattcgtttagtaacaaat

SEQ ID NO: 113907 - DNA, 22 bp, Artificial Sequence
  Synthetic oligonucleotide; TTC chr11 5392582 5392603 5392587 5392582 -
aatattcgtttagtaacaaatt

SEQ ID NO: 113908 - DNA, 22 bp, Artificial Sequence
  Synthetic oligonucleotide; TTC chr11 5392575 5392596 5392580 5392575 -
gtttagtaacaaattaagatat

SEQ ID NO: 113909 - DNA, 22 bp, Artificial Sequence
  Synthetic oligonucleotide; TTT chr11 5392571 5392592 5392576 5392571 -
agtaacaaattaagatatgtta

SEQ ID NO: 113910 - DNA, 22 bp, Artificial Sequence
  Synthetic oligonucleotide; TTA chr11 5392570 5392591 5392575 5392570 -
gtaacaaattaagatatgttaa

SEQ ID NO: 113911 - DNA, 22 bp, Artificial Sequence
  Synthetic oligonucleotide; TTA chr11 5392559 5392580 5392564 5392559 -
agatatgttaatttgcatttta

SEQ ID NO: 113912 - DNA, 22 bp, Artificial Sequence
  Synthetic oligonucleotide; TTA chr11 5392549 5392570 5392554 5392549 -
atttgcattttaaatttgagta

SEQ ID NO: 113913 - DNA, 22 bp, Artificial Sequence
  Synthetic oligonucleotide; TTT chr11 5392545 5392566 5392550 5392545 -
gcattttaaatttgagtaaggt

SEQ ID NO: 113914 - DNA, 22 bp, Artificial Sequence
  Synthetic oligonucleotide; TTG chr11 5392544 5392565 5392549 5392544 -
cattttaaatttgagtaaggta

SEQ ID NO: 113915 - DNA, 22 bp, Artificial Sequence
  Synthetic oligonucleotide; TTT chr11 5392539 5392560 5392544 5392539 -
taaatttgagtaaggtagaagt

SEQ ID NO: 113916 - DNA, 22 bp, Artificial Sequence
  Synthetic oligonucleotide; TTT chr11 5392538 5392559 5392543 5392538 -
aaatttgagtaaggtagaagtt

SEQ ID NO: 113917 - DNA, 22 bp, Artificial Sequence
  Synthetic oligonucleotide; TTA chr11 5392537 5392558 5392542 5392537 -
aatttgagtaaggtagaagttt

SEQ ID NO: 113918 - DNA, 22 bp, Artificial Sequence
  Synthetic oligonucleotide; TTT chr11 5392532 5392553 5392537 5392532 -
gagtaaggtagaagttttcaaa

SEQ ID NO: 113919 - DNA, 22 bp, Artificial Sequence
  Synthetic oligonucleotide; TTG chr11 5392531 5392552 5392536 5392531 -
agtaaggtagaagttttcaaat

SEQ ID NO: 113920 - DNA, 22 bp, Artificial Sequence
  Synthetic oligonucleotide; TTT chr11 5392515 5392536 5392520 5392515 -
tcaaatatgttattacctgtac

SEQ ID NO: 113921 - DNA, 22 bp, Artificial Sequence
  Synthetic oligonucleotide; TTT chr11 5392514 5392535 5392519 5392514 -
caaatatgttattacctgtacg

SEQ ID NO: 113922 - DNA, 22 bp, Artificial Sequence
  Synthetic oligonucleotide; TTC chr11 5392513 5392534 5392518 5392513 -
aaatatgttattacctgtacgt

SEQ ID NO: 113923 - DNA, 22 bp, Artificial Sequence
  Synthetic oligonucleotide; TTA chr11 5392503 5392524 5392508 5392503 -
ttacctgtacgtatttcctaat

SEQ ID NO: 113924 - DNA, 22 bp, Artificial Sequence
  Synthetic oligonucleotide; TTA chr11 5392500 5392521 5392505 5392500 -
cctgtacgtatttcctaatttg

SEQ ID NO: 113925 - DNA, 22 bp, Artificial Sequence
  Synthetic oligonucleotide; CTG chr11 5392496 5392517 5392501 5392496 -
tacgtatttcctaatttgaaaa

SEQ ID NO: 113926 - DNA, 22 bp, Artificial Sequence
  Synthetic oligonucleotide; TTT chr11 5392487 5392508 5392492 5392487 -
cctaatttgaaaatgaaattta

SEQ ID NO: 113927 - DNA, 22 bp, Artificial Sequence
  Synthetic oligonucleotide; TTC chr11 5392486 5392507 5392491 5392486 -
ctaatttgaaaatgaaatttag

SEQ ID NO: 113928 - DNA, 22 bp, Artificial Sequence
  Synthetic oligonucleotide; CTA chr11 5392483 5392504 5392488 5392483 -
atttgaaaatgaaatttagatg

SEQ ID NO: 113929 - DNA, 22 bp, Artificial Sequence
  Synthetic oligonucleotide; TTT chr11 5392479 5392500 5392484 5392479 -
gaaaatgaaatttagatgtcag

SEQ ID NO: 113930 - DNA, 22 bp, Artificial Sequence
  Synthetic oligonucleotide; TTG chr11 5392478 5392499 5392483 5392478 -
aaaatgaaatttagatgtcagt

SEQ ID NO: 113931 - DNA, 22 bp, Artificial Sequence
  Synthetic oligonucleotide; TTT chr11 5392466 5392487 5392471 5392466 -
agatgtcagtggtctatttgtt

SEQ ID NO: 113932 - DNA, 22 bp, Artificial Sequence
  Synthetic oligonucleotide; TTA chr11 5392465 5392486 5392470 5392465 -
gatgtcagtggtctatttgtta

SEQ ID NO: 113933 - DNA, 22 bp, Artificial Sequence
  Synthetic oligonucleotide; CTA chr11 5392450 5392471 5392455 5392450 -
tttgttaataagaggcaaaatg

SEQ ID NO: 113934 - DNA, 22 bp, Artificial Sequence
  Synthetic oligonucleotide; TTT chr11 5392447 5392468 5392452 5392447 -
gttaataagaggcaaaatggga

SEQ ID NO: 113935 - DNA, 22 bp, Artificial Sequence
  Synthetic oligonucleotide; TTG chr11 5392446 5392467 5392451 5392446 -
ttaataagaggcaaaatgggac

SEQ ID NO: 113936 - DNA, 22 bp, Artificial Sequence
  Synthetic oligonucleotide; TTA chr11 5392443 5392464 5392448 5392443 -
ataagaggcaaaatgggacttc

SEQ ID NO: 113937 - DNA, 22 bp, Artificial Sequence
  Synthetic oligonucleotide; CTT chr11 5392422 5392443 5392427 5392422 -
cagtgctaatctaaatccaaat

SEQ ID NO: 113938 - DNA, 22 bp, Artificial Sequence
  Synthetic oligonucleotide; TTC chr11 5392421 5392442 5392426 5392421 -
agtgctaatctaaatccaaatc

SEQ ID NO: 113939 - DNA, 22 bp, Artificial Sequence
  Synthetic oligonucleotide; CTA chr11 5392414 5392435 5392419 5392414 -
atctaaatccaaatcctaaatt

SEQ ID NO: 113940 - DNA, 22 bp, Artificial Sequence
  Synthetic oligonucleotide; CTA chr11 5392409 5392430 5392414 5392409 -
aatccaaatcctaaattttttg

SEQ ID NO: 113941 - DNA, 22 bp, Artificial Sequence
  Synthetic oligonucleotide; CTA chr11 5392396 5392417 5392401 5392396 -
aattttttgtaccccattctac

SEQ ID NO: 113942 - DNA, 22 bp, Artificial Sequence
  Synthetic oligonucleotide; TTT chr11 5392391 5392412 5392396 5392391 -
tttgtaccccattctaccaaat

SEQ ID NO: 113943 - DNA, 22 bp, Artificial Sequence
  Synthetic oligonucleotide; TTT chr11 5392390 5392411 5392395 5392390 -
ttgtaccccattctaccaaatg

SEQ ID NO: 113944 - DNA, 22 bp, Artificial Sequence
  Synthetic oligonucleotide; TTT chr11 5392389 5392410 5392394 5392389 -
tgtaccccattctaccaaatga

SEQ ID NO: 113945 - DNA, 22 bp, Artificial Sequence
  Synthetic oligonucleotide; TTT chr11 5392388 5392409 5392393 5392388 -
gtaccccattctaccaaatgag

SEQ ID NO: 113946 - DNA, 22 bp, Artificial Sequence
  Synthetic oligonucleotide; TTG chr11 5392387 5392408 5392392 5392387 -
taccccattctaccaaatgaga

SEQ ID NO: 113947 - DNA, 22 bp, Artificial Sequence
  Synthetic oligonucleotide; TTC chr11 5392377 5392398 5392382 5392377 -
taccaaatgagatctatagaat

SEQ ID NO: 113948 - DNA, 22 bp, Artificial Sequence
  Synthetic oligonucleotide; CTA chr11 5392375 5392396 5392380 5392375 -
ccaaatgagatctatagaatag

SEQ ID NO: 113949 - DNA, 22 bp, Artificial Sequence
  Synthetic oligonucleotide; CTA chr11 5392361 5392382 5392366 5392361 -
tagaataggaatttcctctcaa

SEQ ID NO: 113950 - DNA, 22 bp, Artificial Sequence
  Synthetic oligonucleotide; TTT chr11 5392347 5392368 5392352 5392347 -
cctctcaacatggagaagaata

SEQ ID NO: 113951 - DNA, 22 bp, Artificial Sequence
  Synthetic oligonucleotide; TTC chr11 5392346 5392367 5392351 5392346 -
ctctcaacatggagaagaatat

SEQ ID NO: 113952 - DNA, 22 bp, Artificial Sequence
  Synthetic oligonucleotide; CTC chr11 5392343 5392364 5392348 5392343 -
tcaacatggagaagaatattct

SEQ ID NO: 113953 - DNA, 22 bp, Artificial Sequence
  Synthetic oligonucleotide; CTC chr11 5392341 5392362 5392346 5392341 -
aacatggagaagaatattctaa

SEQ ID NO: 113954 - DNA, 22 bp, Artificial Sequence
  Synthetic oligonucleotide; TTC chr11 5392322 5392343 5392327 5392322 -
taagtctcggaactgctattga

SEQ ID NO: 113955 - DNA, 22 bp, Artificial Sequence
  Synthetic oligonucleotide; CTA chr11 5392320 5392341 5392325 5392320 -
agtctcggaactgctattgagt

SEQ ID NO: 113956 - DNA, 22 bp, Artificial Sequence
  Synthetic oligonucleotide; CTC chr11 5392314 5392335 5392319 5392314 -
ggaactgctattgagtaatgtg

SEQ ID NO: 113957 - DNA, 22 bp, Artificial Sequence
  Synthetic oligonucleotide; CTG chr11 5392307 5392328 5392312 5392307 -
ctattgagtaatgtggcctact

SEQ ID NO: 113958 - DNA, 22 bp, Artificial Sequence
  Synthetic oligonucleotide; CTA chr11 5392304 5392325 5392309 5392304 -
ttgagtaatgtggcctactatg

SEQ ID NO: 113959 - DNA, 22 bp, Artificial Sequence
  Synthetic oligonucleotide; TTG chr11 5392301 5392322 5392306 5392301 -
agtaatgtggcctactatgtgg

SEQ ID NO: 113960 - DNA, 22 bp, Artificial Sequence
  Synthetic oligonucleotide; CTA chr11 5392287 5392308 5392292 5392287 -
ctatgtggatgtaaattaaagt

SEQ ID NO: 113961 - DNA, 22 bp, Artificial Sequence
  Synthetic oligonucleotide; CTA chr11 5392284 5392305 5392289 5392284 -
tgtggatgtaaattaaagttta

SEQ ID NO: 113962 - DNA, 22 bp, Artificial Sequence
  Synthetic oligonucleotide; TTA chr11 5392269 5392290 5392274 5392269 -
aagtttagaatggaacctatgt

SEQ ID NO: 113963 - DNA, 22 bp, Artificial Sequence
  Synthetic oligonucleotide; TTT chr11 5392263 5392284 5392268 5392263 -
agaatggaacctatgtttaagg

SEQ ID NO: 113964 - DNA, 22 bp, Artificial Sequence
  Synthetic oligonucleotide; TTA chr11 5392262 5392283 5392267 5392262 -
gaatggaacctatgtttaagga

SEQ ID NO: 113965 - DNA, 22 bp, Artificial Sequence
  Synthetic oligonucleotide; CTA chr11 5392250 5392271 5392255 5392250 -
tgtttaaggagtgccagcctgt

SEQ ID NO: 113966 - DNA, 22 bp, Artificial Sequence
  Synthetic oligonucleotide; TTT chr11 5392245 5392266 5392250 5392245 -
aaggagtgccagcctgtaaggc

SEQ ID NO: 113967 - DNA, 22 bp, Artificial Sequence
  Synthetic oligonucleotide; TTA chr11 5392244 5392265 5392249 5392244 -
aggagtgccagcctgtaaggct

SEQ ID NO: 113968 - DNA, 22 bp, Artificial Sequence
  Synthetic oligonucleotide; CTG chr11 5392229 5392250 5392234 5392229 -
taaggctgcagaaactgctggg

SEQ ID NO: 113969 - DNA, 22 bp, Artificial Sequence
  Synthetic oligonucleotide; CTG chr11 5392221 5392242 5392226 5392221 -
cagaaactgctgggttccagag

SEQ ID NO: 113970 - DNA, 22 bp, Artificial Sequence
  Synthetic oligonucleotide; CTG chr11 5392212 5392233 5392217 5392212 -
ctgggttccagaggggctccca

SEQ ID NO: 113971 - DNA, 22 bp, Artificial Sequence
  Synthetic oligonucleotide; CTG chr11 5392209 5392230 5392214 5392209 -
ggttccagaggggctcccaagc

SEQ ID NO: 113972 - DNA, 22 bp, Artificial Sequence
  Synthetic oligonucleotide; TTC chr11 5392204 5392225 5392209 5392204 -
cagaggggctcccaagcctgag

SEQ ID NO: 113973 - DNA, 22 bp, Artificial Sequence
  Synthetic oligonucleotide; CTC chr11 5392193 5392214 5392198 5392193 -
ccaagcctgagagtctgataac

SEQ ID NO: 113974 - DNA, 22 bp, Artificial Sequence
  Synthetic oligonucleotide; CTG chr11 5392184 5392205 5392189 5392184 -
agagtctgataacacccacaca

SEQ ID NO: 113975 - DNA, 22 bp, Artificial Sequence
  Synthetic oligonucleotide; CTG chr11 5392176 5392197 5392181 5392176 -
ataacacccacacatacaaaca

SEQ ID NO: 113976 - DNA, 22 bp, Artificial Sequence
  Synthetic oligonucleotide; TTT chr11 5392101 5392122 5392106 5392101 -
ttagagtttggttcttttttaa

SEQ ID NO: 113977 - DNA, 22 bp, Artificial Sequence
  Synthetic oligonucleotide; TTT chr11 5392100 5392121 5392105 5392100 -
tagagtttggttcttttttaaa

SEQ ID NO: 113978 - DNA, 22 bp, Artificial Sequence
  Synthetic oligonucleotide; TTT chr11 5392099 5392120 5392104 5392099 -
agagtttggttcttttttaaat

SEQ ID NO: 113979 - DNA, 22 bp, Artificial Sequence
  Synthetic oligonucleotide; TTA chr11 5392098 5392119 5392103 5392098 -
gagtttggttcttttttaaatt

SEQ ID NO: 113980 - DNA, 22 bp, Artificial Sequence
  Synthetic oligonucleotide; TTT chr11 5392092 5392113 5392097 5392092 -
ggttcttttttaaatttcgctt

SEQ ID NO: 113981 - DNA, 22 bp, Artificial Sequence
  Synthetic oligonucleotide; TTG chr11 5392091 5392112 5392096 5392091 -
gttcttttttaaatttcgcttt

SEQ ID NO: 113982 - DNA, 22 bp, Artificial Sequence
  Synthetic oligonucleotide; TTC chr11 5392087 5392108 5392092 5392087 -
ttttttaaatttcgctttgtaa

SEQ ID NO: 113983 - DNA, 22 bp, Artificial Sequence
  Synthetic oligonucleotide; CTT chr11 5392085 5392106 5392090 5392085 -
ttttaaatttcgctttgtaatt

SEQ ID NO: 113984 - DNA, 22 bp, Artificial Sequence
  Synthetic oligonucleotide; TTT chr11 5392084 5392105 5392089 5392084 -
tttaaatttcgctttgtaattt

SEQ ID NO: 113985 - DNA, 22 bp, Artificial Sequence
  Synthetic oligonucleotide; TTT chr11 5392083 5392104 5392088 5392083 -
ttaaatttcgctttgtaatttt

SEQ ID NO: 113986 - DNA, 22 bp, Artificial Sequence
  Synthetic oligonucleotide; TTT chr11 5392082 5392103 5392087 5392082 -
taaatttcgctttgtaattttg

SEQ ID NO: 113987 - DNA, 22 bp, Artificial Sequence
  Synthetic oligonucleotide; TTT chr11 5392081 5392102 5392086 5392081 -
aaatttcgctttgtaattttgt

SEQ ID NO: 113988 - DNA, 22 bp, Artificial Sequence
  Synthetic oligonucleotide; TTA chr11 5392080 5392101 5392085 5392080 -
aatttcgctttgtaattttgtt

SEQ ID NO: 113989 - DNA, 22 bp, Artificial Sequence
  Synthetic oligonucleotide; TTT chr11 5392075 5392096 5392080 5392075 -
cgctttgtaattttgtttgttt

SEQ ID NO: 113990 - DNA, 22 bp, Artificial Sequence
  Synthetic oligonucleotide; TTC chr11 5392074 5392095 5392079 5392074 -
gctttgtaattttgtttgtttt

SEQ ID NO: 113991 - DNA, 22 bp, Artificial Sequence
  Synthetic oligonucleotide; CTT chr11 5392070 5392091 5392075 5392070 -
tgtaattttgtttgttttcctt

SEQ ID NO: 113992 - DNA, 22 bp, Artificial Sequence
  Synthetic oligonucleotide; TTT chr11 5392069 5392090 5392074 5392069 -
gtaattttgtttgttttccttt

SEQ ID NO: 113993 - DNA, 22 bp, Artificial Sequence
  Synthetic oligonucleotide; TTG chr11 5392068 5392089 5392073 5392068 -
taattttgtttgttttcctttt

SEQ ID NO: 113994 - DNA, 22 bp, Artificial Sequence
  Synthetic oligonucleotide; TTT chr11 5392062 5392083 5392067 5392062 -
tgtttgttttcctttttatttt

SEQ ID NO: 113995 - DNA, 22 bp, Artificial Sequence
  Synthetic oligonucleotide; TTT chr11 5392061 5392082 5392066 5392061 -
gtttgttttcctttttattttt

SEQ ID NO: 113996 - DNA, 22 bp, Artificial Sequence
  Synthetic oligonucleotide; TTG chr11 5392060 5392081 5392065 5392060 -
tttgttttcctttttatttttg

SEQ ID NO: 113997 - DNA, 22 bp, Artificial Sequence
  Synthetic oligonucleotide; TTT chr11 5392057 5392078 5392062 5392057 -
gttttcctttttatttttgaat

SEQ ID NO: 113998 - DNA, 22 bp, Artificial Sequence
  Synthetic oligonucleotide; TTG chr11 5392056 5392077 5392061 5392056 -
ttttcctttttatttttgaatc

SEQ ID NO: 113999 - DNA, 22 bp, Artificial Sequence
  Synthetic oligonucleotide; TTT chr11 5392053 5392074 5392058 5392053 -
tcctttttatttttgaatcggg

SEQ ID NO: 114000 - DNA, 22 bp, Artificial Sequence
  Synthetic oligonucleotide; TTT chr11 5392052 5392073 5392057 5392052 -
cctttttatttttgaatcgggg

SEQ ID NO: 114001 - DNA, 22 bp, Artificial Sequence
  Synthetic oligonucleotide; TTC chr11 5392051 5392072 5392056 5392051 -
ctttttatttttgaatcggggt

SEQ ID NO: 114002 - DNA, 22 bp, Artificial Sequence
  Synthetic oligonucleotide; CTT chr11 5392048 5392069 5392053 5392048 -
tttatttttgaatcggggtctc

SEQ ID NO: 114003 - DNA, 22 bp, Artificial Sequence
  Synthetic oligonucleotide; TTT chr11 5392047 5392068 5392052 5392047 -
ttatttttgaatcggggtctca

SEQ ID NO: 114004 - DNA, 22 bp, Artificial Sequence
  Synthetic oligonucleotide; TTT chr11 5392046 5392067 5392051 5392046 -
tatttttgaatcggggtctcac

SEQ ID NO: 114005 - DNA, 22 bp, Artificial Sequence
  Synthetic oligonucleotide; TTT chr11 5392045 5392066 5392050 5392045 -
atttttgaatcggggtctcact

SEQ ID NO: 114006 - DNA, 22 bp, Artificial Sequence
  Synthetic oligonucleotide; TTA chr11 5392044 5392065 5392049 5392044 -
tttttgaatcggggtctcactt

SEQ ID NO: 114007 - DNA, 22 bp, Artificial Sequence
  Synthetic oligonucleotide; TTT chr11 5392041 5392062 5392046 5392041 -
ttgaatcggggtctcacttggt

SEQ ID NO: 114008 - DNA, 22 bp, Artificial Sequence
  Synthetic oligonucleotide; TTT chr11 5392040 5392061 5392045 5392040 -
tgaatcggggtctcacttggtc

SEQ ID NO: 114009 - DNA, 22 bp, Artificial Sequence
  Synthetic oligonucleotide; TTT chr11 5392039 5392060 5392044 5392039 -
gaatcggggtctcacttggtca

SEQ ID NO: 114010 - DNA, 22 bp, Artificial Sequence
  Synthetic oligonucleotide; TTG chr11 5392038 5392059 5392043 5392038 -
aatcggggtctcacttggtcac

SEQ ID NO: 114011 - DNA, 22 bp, Artificial Sequence
  Synthetic oligonucleotide; CTC chr11 5392026 5392047 5392031 5392026 -
acttggtcacccaggcagtagt

SEQ ID NO: 114012 - DNA, 22 bp, Artificial Sequence
  Synthetic oligonucleotide; CTT chr11 5392022 5392043 5392027 5392022 -
ggtcacccaggcagtagtgtga

SEQ ID NO: 114013 - DNA, 22 bp, Artificial Sequence
  Synthetic oligonucleotide; TTG chr11 5392021 5392042 5392026 5392021 -
gtcacccaggcagtagtgtgat

SEQ ID NO: 114014 - DNA, 22 bp, Artificial Sequence
  Synthetic oligonucleotide; TTA chr11 5391997 5392018 5392002 5391997 -
tggctcactgcagcctcaacct

SEQ ID NO: 114015 - DNA, 22 bp, Artificial Sequence
  Synthetic oligonucleotide; CTC chr11 5391991 5392012 5391996 5391991 -
actgcagcctcaacctcctggg

SEQ ID NO: 114016 - DNA, 22 bp, Artificial Sequence
  Synthetic oligonucleotide; CTG chr11 5391987 5392008 5391992 5391987 -
cagcctcaacctcctgggctca

SEQ ID NO: 114017 - DNA, 22 bp, Artificial Sequence
  Synthetic oligonucleotide; CTC chr11 5391980 5392001 5391985 5391980 -
aacctcctgggctcaagcattc

SEQ ID NO: 114018 - DNA, 22 bp, Artificial Sequence
  Synthetic oligonucleotide; CTC chr11 5391974 5391995 5391979 5391974 -
ctgggctcaagcattcttccca

SEQ ID NO: 114019 - DNA, 22 bp, Artificial Sequence
  Synthetic oligonucleotide; CTG chr11 5391971 5391992 5391976 5391971 -
ggctcaagcattcttcccacct

SEQ ID NO: 114020 - DNA, 22 bp, Artificial Sequence
  Synthetic oligonucleotide; CTC chr11 5391966 5391987 5391971 5391966 -
aagcattcttcccacctcagcc

SEQ ID NO: 114021 - DNA, 22 bp, Artificial Sequence
  Synthetic oligonucleotide; TTC chr11 5391958 5391979 5391963 5391958 -
ttcccacctcagcctcccaggt

SEQ ID NO: 114022 - DNA, 22 bp, Artificial Sequence
  Synthetic oligonucleotide; CTT chr11 5391956 5391977 5391961 5391956 -
cccacctcagcctcccaggtag

SEQ ID NO: 114023 - DNA, 22 bp, Artificial Sequence
  Synthetic oligonucleotide; TTC chr11 5391955 5391976 5391960 5391955 -
ccacctcagcctcccaggtagc

SEQ ID NO: 114024 - DNA, 22 bp, Artificial Sequence
  Synthetic oligonucleotide; CTC chr11 5391948 5391969 5391953 5391948 -
agcctcccaggtagctgagact

SEQ ID NO: 114025 - DNA, 22 bp, Artificial Sequence
  Synthetic oligonucleotide; CTC chr11 5391942 5391963 5391947 5391942 -
ccaggtagctgagactacagac

SEQ ID NO: 114026 - DNA, 22 bp, Artificial Sequence
  Synthetic oligonucleotide; CTG chr11 5391931 5391952 5391936 5391931 -
agactacagacgtgcaccgcca

SEQ ID NO: 114027 - DNA, 22 bp, Artificial Sequence
  Synthetic oligonucleotide; CTA chr11 5391925 5391946 5391930 5391925 -
cagacgtgcaccgccacacatg

SEQ ID NO: 114028 - DNA, 22 bp, Artificial Sequence
  Synthetic oligonucleotide; CTA chr11 5391899 5391920 5391904 5391899 -
attttaattttttttgtagaga

SEQ ID NO: 114029 - DNA, 22 bp, Artificial Sequence
  Synthetic oligonucleotide; TTT chr11 5391895 5391916 5391900 5391895 -
taattttttttgtagagatagg

SEQ ID NO: 114030 - DNA, 22 bp, Artificial Sequence
  Synthetic oligonucleotide; TTT chr11 5391894 5391915 5391899 5391894 -
aattttttttgtagagataggg

SEQ ID NO: 114031 - DNA, 22 bp, Artificial Sequence
  Synthetic oligonucleotide; TTA chr11 5391893 5391914 5391898 5391893 -
attttttttgtagagatagggt

SEQ ID NO: 114032 - DNA, 22 bp, Artificial Sequence
  Synthetic oligonucleotide; TTT chr11 5391889 5391910 5391894 5391889 -
tttttgtagagatagggtcttg

SEQ ID NO: 114033 - DNA, 22 bp, Artificial Sequence
  Synthetic oligonucleotide; TTT chr11 5391888 5391909 5391893 5391888 -
ttttgtagagatagggtcttgc

SEQ ID NO: 114034 - DNA, 22 bp, Artificial Sequence
  Synthetic oligonucleotide; TTT chr11 5391887 5391908 5391892 5391887 -
tttgtagagatagggtcttgct

SEQ ID NO: 114035 - DNA, 22 bp, Artificial Sequence
  Synthetic oligonucleotide; TTT chr11 5391886 5391907 5391891 5391886 -
ttgtagagatagggtcttgctg

SEQ ID NO: 114036 - DNA, 22 bp, Artificial Sequence
  Synthetic oligonucleotide; TTT chr11 5391885 5391906 5391890 5391885 -
tgtagagatagggtcttgctgt

SEQ ID NO: 114037 - DNA, 22 bp, Artificial Sequence
  Synthetic oligonucleotide; TTT chr11 5391884 5391905 5391889 5391884 -
gtagagatagggtcttgctgta

SEQ ID NO: 114038 - DNA, 22 bp, Artificial Sequence
  Synthetic oligonucleotide; TTG chr11 5391883 5391904 5391888 5391883 -
tagagatagggtcttgctgtat

SEQ ID NO: 114039 - DNA, 22 bp, Artificial Sequence
  Synthetic oligonucleotide; CTT chr11 5391868 5391889 5391873 5391868 -
gctgtattgttcaggctggtct

SEQ ID NO: 114040 - DNA, 22 bp, Artificial Sequence
  Synthetic oligonucleotide; TTG chr11 5391867 5391888 5391872 5391867 -
ctgtattgttcaggctggtctc

SEQ ID NO: 114041 - DNA, 22 bp, Artificial Sequence
  Synthetic oligonucleotide; CTG chr11 5391864 5391885 5391869 5391864 -
tattgttcaggctggtctcaaa

SEQ ID NO: 114042 - DNA, 22 bp, Artificial Sequence
  Synthetic oligonucleotide; TTG chr11 5391859 5391880 5391864 5391859 -
ttcaggctggtctcaaactcct

SEQ ID NO: 114043 - DNA, 22 bp, Artificial Sequence
  Synthetic oligonucleotide; TTC chr11 5391856 5391877 5391861 5391856 -
aggctggtctcaaactcctgga

SEQ ID NO: 114044 - DNA, 22 bp, Artificial Sequence
  Synthetic oligonucleotide; CTG chr11 5391850 5391871 5391855 5391850 -
gtctcaaactcctggactcaag

SEQ ID NO: 114045 - DNA, 22 bp, Artificial Sequence
  Synthetic oligonucleotide; CTC chr11 5391845 5391866 5391850 5391845 -
aaactcctggactcaagtaatc

SEQ ID NO: 114046 - DNA, 22 bp, Artificial Sequence
  Synthetic oligonucleotide; CTC chr11 5391839 5391860 5391844 5391839 -
ctggactcaagtaatcttcttg

SEQ ID NO: 114047 - DNA, 22 bp, Artificial Sequence
  Synthetic oligonucleotide; CTG chr11 5391836 5391857 5391841 5391836 -
gactcaagtaatcttcttgcct

SEQ ID NO: 114048 - DNA, 22 bp, Artificial Sequence
  Synthetic oligonucleotide; CTC chr11 5391831 5391852 5391836 5391831 -
aagtaatcttcttgcctgaagt

SEQ ID NO: 114049 - DNA, 22 bp, Artificial Sequence
  Synthetic oligonucleotide; CTT chr11 5391821 5391842 5391826 5391821 -
cttgcctgaagttggtctcaaa

SEQ ID NO: 114050 - DNA, 22 bp, Artificial Sequence
  Synthetic oligonucleotide; TTC chr11 5391820 5391841 5391825 5391820 -
ttgcctgaagttggtctcaaac

SEQ ID NO: 114051 - DNA, 22 bp, Artificial Sequence
  Synthetic oligonucleotide; CTT chr11 5391818 5391839 5391823 5391818 -
gcctgaagttggtctcaaactc

SEQ ID NO: 114052 - DNA, 22 bp, Artificial Sequence
  Synthetic oligonucleotide; TTG chr11 5391817 5391838 5391822 5391817 -
cctgaagttggtctcaaactcc

SEQ ID NO: 114053 - DNA, 22 bp, Artificial Sequence
  Synthetic oligonucleotide; CTG chr11 5391813 5391834 5391818 5391813 -
aagttggtctcaaactcctggc

SEQ ID NO: 114054 - DNA, 22 bp, Artificial Sequence
  Synthetic oligonucleotide; TTG chr11 5391807 5391828 5391812 5391807 -
gtctcaaactcctggccttcag

SEQ ID NO: 114055 - DNA, 22 bp, Artificial Sequence
  Synthetic oligonucleotide; CTC chr11 5391802 5391823 5391807 5391802 -
aaactcctggccttcagcaatc

SEQ ID NO: 114056 - DNA, 22 bp, Artificial Sequence
  Synthetic oligonucleotide; CTC chr11 5391796 5391817 5391801 5391796 -
ctggccttcagcaatcctccca

SEQ ID NO: 114057 - DNA, 22 bp, Artificial Sequence
  Synthetic oligonucleotide; CTG chr11 5391793 5391814 5391798 5391793 -
gccttcagcaatcctcccacct

SEQ ID NO: 114058 - DNA, 22 bp, Artificial Sequence
  Synthetic oligonucleotide; CTT chr11 5391788 5391809 5391793 5391788 -
cagcaatcctcccaccttggtc

SEQ ID NO: 114059 - DNA, 22 bp, Artificial Sequence
  Synthetic oligonucleotide; TTC chr11 5391787 5391808 5391792 5391787 -
agcaatcctcccaccttggtct

SEQ ID NO: 114060 - DNA, 22 bp, Artificial Sequence
  Synthetic oligonucleotide; CTC chr11 5391777 5391798 5391782 5391777 -
ccaccttggtctcccaaagtgc

SEQ ID NO: 114061 - DNA, 22 bp, Artificial Sequence
  Synthetic oligonucleotide; CTT chr11 5391770 5391791 5391775 5391770 -
ggtctcccaaagtgctgggatt

SEQ ID NO: 114062 - DNA, 22 bp, Artificial Sequence
  Synthetic oligonucleotide; TTG chr11 5391769 5391790 5391774 5391769 -
gtctcccaaagtgctgggatta

SEQ ID NO: 114063 - DNA, 22 bp, Artificial Sequence
  Synthetic oligonucleotide; CTC chr11 5391764 5391785 5391769 5391764 -
ccaaagtgctgggattatagca

SEQ ID NO: 114064 - DNA, 22 bp, Artificial Sequence
  Synthetic oligonucleotide; CTG chr11 5391753 5391774 5391758 5391753 -
ggattatagcataagccaccgt

SEQ ID NO: 114065 - DNA, 22 bp, Artificial Sequence
  Synthetic oligonucleotide; TTA chr11 5391747 5391768 5391752 5391747 -
tagcataagccaccgtgcctgg

SEQ ID NO: 114066 - DNA, 22 bp, Artificial Sequence
  Synthetic oligonucleotide; CTG chr11 5391726 5391747 5391731 5391726 -
gcctcatggtaattttaacctg

SEQ ID NO: 114067 - DNA, 22 bp, Artificial Sequence
  Synthetic oligonucleotide; CTC chr11 5391721 5391742 5391726 5391721 -
atggtaattttaacctgtagga

SEQ ID NO: 114068 - DNA, 22 bp, Artificial Sequence
  Synthetic oligonucleotide; TTT chr11 5391711 5391732 5391716 5391711 -
taacctgtaggagaatgggtgg

SEQ ID NO: 114069 - DNA, 22 bp, Artificial Sequence
  Synthetic oligonucleotide; TTT chr11 5391710 5391731 5391715 5391710 -
aacctgtaggagaatgggtggg

SEQ ID NO: 114070 - DNA, 22 bp, Artificial Sequence
  Synthetic oligonucleotide; TTA chr11 5391709 5391730 5391714 5391709 -
acctgtaggagaatgggtggga

SEQ ID NO: 114071 - DNA, 22 bp, Artificial Sequence
  Synthetic oligonucleotide; CTG chr11 5391704 5391725 5391709 5391704 -
taggagaatgggtgggaggatc

SEQ ID NO: 114072 - DNA, 22 bp, Artificial Sequence
  Synthetic oligonucleotide; CTG chr11 5391671 5391692 5391676 5391671 -
agtaaagtagaactgggacaat

SEQ ID NO: 114073 - DNA, 22 bp, Artificial Sequence
  Synthetic oligonucleotide; CTG chr11 5391656 5391677 5391661 5391656 -
ggacaatgaagatataccacct

SEQ ID NO: 114074 - DNA, 22 bp, Artificial Sequence
  Synthetic oligonucleotide; CTT chr11 5391633 5391654 5391638 5391633 -
gatggatgccagcagaaaggtg

SEQ ID NO: 114075 - DNA, 22 bp, Artificial Sequence
  Synthetic oligonucleotide; TTG chr11 5391632 5391653 5391637 5391632 -
atggatgccagcagaaaggtgt

SEQ ID NO: 114076 - DNA, 22 bp, Artificial Sequence
  Synthetic oligonucleotide; CTT chr11 5391607 5391628 5391612 5391607 -
cttgggcttctgaatgtgaaga

SEQ ID NO: 114077 - DNA, 22 bp, Artificial Sequence
  Synthetic oligonucleotide; TTC chr11 5391606 5391627 5391611 5391606 -
ttgggcttctgaatgtgaagag

SEQ ID NO: 114078 - DNA, 22 bp, Artificial Sequence
  Synthetic oligonucleotide; CTT chr11 5391604 5391625 5391609 5391604 -
gggcttctgaatgtgaagagga

SEQ ID NO: 114079 - DNA, 22 bp, Artificial Sequence
  Synthetic oligonucleotide; TTG chr11 5391603 5391624 5391608 5391603 -
ggcttctgaatgtgaagaggag

SEQ ID NO: 114080 - DNA, 22 bp, Artificial Sequence
  Synthetic oligonucleotide; CTT chr11 5391598 5391619 5391603 5391598 -
ctgaatgtgaagaggaggagtt

SEQ ID NO: 114081 - DNA, 22 bp, Artificial Sequence
  Synthetic oligonucleotide; TTC chr11 5391597 5391618 5391602 5391597 -
tgaatgtgaagaggaggagttc

SEQ ID NO: 114082 - DNA, 22 bp, Artificial Sequence
  Synthetic oligonucleotide; CTG chr11 5391595 5391616 5391600 5391595 -
aatgtgaagaggaggagttcct

SEQ ID NO: 114083 - DNA, 22 bp, Artificial Sequence
  Synthetic oligonucleotide; TTC chr11 5391575 5391596 5391580 5391575 -
ctcgagacaagaagagaacttc

SEQ ID NO: 114084 - DNA, 22 bp, Artificial Sequence
  Synthetic oligonucleotide; CTC chr11 5391572 5391593 5391577 5391572 -
gagacaagaagagaacttctgt

SEQ ID NO: 114085 - DNA, 22 bp, Artificial Sequence
  Synthetic oligonucleotide; CTT chr11 5391554 5391575 5391559 5391554 -
ctgttagctctggatccctctt

SEQ ID NO: 114086 - DNA, 22 bp, Artificial Sequence
  Synthetic oligonucleotide; TTC chr11 5391553 5391574 5391558 5391553 -
tgttagctctggatccctcttt

SEQ ID NO: 114087 - DNA, 22 bp, Artificial Sequence
  Synthetic oligonucleotide; CTG chr11 5391551 5391572 5391556 5391551 -
ttagctctggatccctctttat

SEQ ID NO: 114088 - DNA, 22 bp, Artificial Sequence
  Synthetic oligonucleotide; TTA chr11 5391548 5391569 5391553 5391548 -
gctctggatccctctttatgta

SEQ ID NO: 114089 - DNA, 22 bp, Artificial Sequence
  Synthetic oligonucleotide; CTC chr11 5391544 5391565 5391549 5391544 -
tggatccctctttatgtatcta

SEQ ID NO: 114090 - DNA, 22 bp, Artificial Sequence
  Synthetic oligonucleotide; CTG chr11 5391542 5391563 5391547 5391542 -
gatccctctttatgtatctata

SEQ ID NO: 114091 - DNA, 22 bp, Artificial Sequence
  Synthetic oligonucleotide; CTC chr11 5391534 5391555 5391539 5391534 -
tttatgtatctatatgtccacg

SEQ ID NO: 114092 - DNA, 22 bp, Artificial Sequence
  Synthetic oligonucleotide; CTT chr11 5391532 5391553 5391537 5391532 -
tatgtatctatatgtccacgca

SEQ ID NO: 114093 - DNA, 22 bp, Artificial Sequence
  Synthetic oligonucleotide; TTT chr11 5391531 5391552 5391536 5391531 -
atgtatctatatgtccacgcat

SEQ ID NO: 114094 - DNA, 22 bp, Artificial Sequence
  Synthetic oligonucleotide; TTA chr11 5391530 5391551 5391535 5391530 -
tgtatctatatgtccacgcata

SEQ ID NO: 114095 - DNA, 22 bp, Artificial Sequence
  Synthetic oligonucleotide; CTA chr11 5391522 5391543 5391527 5391522 -
tatgtccacgcatacatttaat

SEQ ID NO: 114096 - DNA, 22 bp, Artificial Sequence
  Synthetic oligonucleotide; TTT chr11 5391503 5391524 5391508 5391503 -
aatatttattgagtatatggca

SEQ ID NO: 114097 - DNA, 22 bp, Artificial Sequence
  Synthetic oligonucleotide; TTA chr11 5391502 5391523 5391507 5391502 -
atatttattgagtatatggcat

SEQ ID NO: 114098 - DNA, 22 bp, Artificial Sequence
  Synthetic oligonucleotide; TTT chr11 5391496 5391517 5391501 5391496 -
attgagtatatggcatgtgcta

SEQ ID NO: 114099 - DNA, 22 bp, Artificial Sequence
  Synthetic oligonucleotide; TTA chr11 5391495 5391516 5391500 5391495 -
ttgagtatatggcatgtgctag

SEQ ID NO: 114100 - DNA, 22 bp, Artificial Sequence
  Synthetic oligonucleotide; TTG chr11 5391492 5391513 5391497 5391492 -
agtatatggcatgtgctaggca

SEQ ID NO: 114101 - DNA, 22 bp, Artificial Sequence
  Synthetic oligonucleotide; CTA chr11 5391474 5391495 5391479 5391474 -
ggcattgtatttatatacattt

SEQ ID NO: 114102 - DNA, 22 bp, Artificial Sequence
  Synthetic oligonucleotide; TTG chr11 5391467 5391488 5391472 5391467 -
tatttatatacatttactggcg

SEQ ID NO: 114103 - DNA, 22 bp, Artificial Sequence
  Synthetic oligonucleotide; TTT chr11 5391462 5391483 5391467 5391462 -
atatacatttactggcgagcaa

SEQ ID NO: 114104 - DNA, 22 bp, Artificial Sequence
  Synthetic oligonucleotide; TTA chr11 5391461 5391482 5391466 5391461 -
tatacatttactggcgagcaag

SEQ ID NO: 114105 - DNA, 22 bp, Artificial Sequence
  Synthetic oligonucleotide; TTT chr11 5391452 5391473 5391457 5391452 -
actggcgagcaagacatgccta

SEQ ID NO: 114106 - DNA, 22 bp, Artificial Sequence
  Synthetic oligonucleotide; TTA chr11 5391451 5391472 5391456 5391451 -
ctggcgagcaagacatgcctaa

SEQ ID NO: 114107 - DNA, 22 bp, Artificial Sequence
  Synthetic oligonucleotide; CTG chr11 5391448 5391469 5391453 5391448 -
gcgagcaagacatgcctaattc

SEQ ID NO: 114108 - DNA, 22 bp, Artificial Sequence
  Synthetic oligonucleotide; CTA chr11 5391430 5391451 5391435 5391430 -
attcctccagggatcttgattt

SEQ ID NO: 114109 - DNA, 22 bp, Artificial Sequence
  Synthetic oligonucleotide; TTC chr11 5391426 5391447 5391431 5391426 -
ctccagggatcttgatttagtc

SEQ ID NO: 114110 - DNA, 22 bp, Artificial Sequence
  Synthetic oligonucleotide; CTC chr11 5391423 5391444 5391428 5391423 -
cagggatcttgatttagtcatt

SEQ ID NO: 114111 - DNA, 22 bp, Artificial Sequence
  Synthetic oligonucleotide; CTT chr11 5391413 5391434 5391418 5391413 -
gatttagtcattctaatggaca

SEQ ID NO: 114112 - DNA, 22 bp, Artificial Sequence
  Synthetic oligonucleotide; TTG chr11 5391412 5391433 5391417 5391412 -
atttagtcattctaatggacac

SEQ ID NO: 114113 - DNA, 22 bp, Artificial Sequence
  Synthetic oligonucleotide; TTT chr11 5391408 5391429 5391413 5391408 -
agtcattctaatggacacatgc

SEQ ID NO: 114114 - DNA, 22 bp, Artificial Sequence
  Synthetic oligonucleotide; TTA chr11 5391407 5391428 5391412 5391407 -
gtcattctaatggacacatgca

SEQ ID NO: 114115 - DNA, 22 bp, Artificial Sequence
  Synthetic oligonucleotide; TTC chr11 5391400 5391421 5391405 5391400 -
taatggacacatgcacacacct

SEQ ID NO: 114116 - DNA, 22 bp, Artificial Sequence
  Synthetic oligonucleotide; CTA chr11 5391398 5391419 5391403 5391398 -
atggacacatgcacacaccttc

SEQ ID NO: 114117 - DNA, 22 bp, Artificial Sequence
  Synthetic oligonucleotide; CTT chr11 5391377 5391398 5391382 5391377 -
cataaacaggacattactgtgt

SEQ ID NO: 114118 - DNA, 22 bp, Artificial Sequence
  Synthetic oligonucleotide; TTC chr11 5391376 5391397 5391381 5391376 -
ataaacaggacattactgtgtg

SEQ ID NO: 114119 - DNA, 22 bp, Artificial Sequence
  Synthetic oligonucleotide; TTA chr11 5391361 5391382 5391366 5391361 -
ctgtgtgacaaatgttacaacg

SEQ ID NO: 114120 - DNA, 22 bp, Artificial Sequence
  Synthetic oligonucleotide; CTG chr11 5391358 5391379 5391363 5391358 -
tgtgacaaatgttacaacggga

SEQ ID NO: 114121 - DNA, 22 bp, Artificial Sequence
  Synthetic oligonucleotide; TTA chr11 5391344 5391365 5391349 5391344 -
caacgggaaatgcagggcactg

SEQ ID NO: 114122 - DNA, 22 bp, Artificial Sequence
  Synthetic oligonucleotide; CTG chr11 5391322 5391343 5391327 5391322 -
tggaaggaaaccgatggagcat

SEQ ID NO: 114123 - DNA, 22 bp, Artificial Sequence
  Synthetic oligonucleotide; TTT chr11 5391298 5391319 5391303 5391298 -
ggtgctttaccattggaaaggg

SEQ ID NO: 114124 - DNA, 22 bp, Artificial Sequence
  Synthetic oligonucleotide; TTG chr11 5391297 5391318 5391302 5391297 -
gtgctttaccattggaaaggga

SEQ ID NO: 114125 - DNA, 22 bp, Artificial Sequence
  Synthetic oligonucleotide; CTT chr11 5391291 5391312 5391296 5391291 -
taccattggaaagggaggagct

SEQ ID NO: 114126 - DNA, 22 bp, Artificial Sequence
  Synthetic oligonucleotide; TTT chr11 5391290 5391311 5391295 5391290 -
accattggaaagggaggagcta

SEQ ID NO: 114127 - DNA, 22 bp, Artificial Sequence
  Synthetic oligonucleotide; TTA chr11 5391289 5391310 5391294 5391289 -
ccattggaaagggaggagctat

SEQ ID NO: 114128 - DNA, 22 bp, Artificial Sequence
  Synthetic oligonucleotide; TTG chr11 5391283 5391304 5391288 5391283 -
gaaagggaggagctatctgtga

SEQ ID NO: 114129 - DNA, 22 bp, Artificial Sequence
  Synthetic oligonucleotide; CTA chr11 5391268 5391289 5391273 5391268 -
tctgtgaaaatgtccttgagga

SEQ ID NO: 114130 - DNA, 22 bp, Artificial Sequence
  Synthetic oligonucleotide; CTG chr11 5391264 5391285 5391269 5391264 -
tgaaaatgtccttgaggaagca

SEQ ID NO: 114131 - DNA, 22 bp, Artificial Sequence
  Synthetic oligonucleotide; CTT chr11 5391251 5391272 5391256 5391251 -
gaggaagcaatttcaaagctga

SEQ ID NO: 114132 - DNA, 22 bp, Artificial Sequence
  Synthetic oligonucleotide; TTG chr11 5391250 5391271 5391255 5391250 -
aggaagcaatttcaaagctgag

SEQ ID NO: 114133 - DNA, 22 bp, Artificial Sequence
  Synthetic oligonucleotide; TTT chr11 5391238 5391259 5391243 5391238 -
caaagctgagacccctgcaagg

SEQ ID NO: 114134 - DNA, 22 bp, Artificial Sequence
  Synthetic oligonucleotide; TTC chr11 5391237 5391258 5391242 5391237 -
aaagctgagacccctgcaagga

SEQ ID NO: 114135 - DNA, 22 bp, Artificial Sequence
  Synthetic oligonucleotide; CTG chr11 5391230 5391251 5391235 5391230 -
agacccctgcaaggattgcatt

SEQ ID NO: 114136 - DNA, 22 bp, Artificial Sequence
  Synthetic oligonucleotide; CTG chr11 5391221 5391242 5391226 5391221 -
caaggattgcatttagtcactc

SEQ ID NO: 114137 - DNA, 22 bp, Artificial Sequence
  Synthetic oligonucleotide; TTG chr11 5391212 5391233 5391217 5391212 -
catttagtcactcgtagggaca

SEQ ID NO: 114138 - DNA, 22 bp, Artificial Sequence
  Synthetic oligonucleotide; TTT chr11 5391207 5391228 5391212 5391207 -
agtcactcgtagggacaggctg

SEQ ID NO: 114139 - DNA, 22 bp, Artificial Sequence
  Synthetic oligonucleotide; TTA chr11 5391206 5391227 5391211 5391206 -
gtcactcgtagggacaggctga

SEQ ID NO: 114140 - DNA, 22 bp, Artificial Sequence
  Synthetic oligonucleotide; CTC chr11 5391199 5391220 5391204 5391199 -
gtagggacaggctgatcagcca

SEQ ID NO: 114141 - DNA, 22 bp, Artificial Sequence
  Synthetic oligonucleotide; CTG chr11 5391185 5391206 5391190 5391185 -
atcagccaatgtaaagtttatt

SEQ ID NO: 114142 - DNA, 22 bp, Artificial Sequence
  Synthetic oligonucleotide; TTT chr11 5391166 5391187 5391171 5391166 -
atttcctcctgagcaatgggat

SEQ ID NO: 114143 - DNA, 22 bp, Artificial Sequence
  Synthetic oligonucleotide; TTA chr11 5391165 5391186 5391170 5391165 -
tttcctcctgagcaatgggatt

SEQ ID NO: 114144 - DNA, 22 bp, Artificial Sequence
  Synthetic oligonucleotide; TTT chr11 5391162 5391183 5391167 5391162 -
cctcctgagcaatgggattgtg

SEQ ID NO: 114145 - DNA, 22 bp, Artificial Sequence
  Synthetic oligonucleotide; TTC chr11 5391161 5391182 5391166 5391161 -
ctcctgagcaatgggattgtga

SEQ ID NO: 114146 - DNA, 22 bp, Artificial Sequence
  Synthetic oligonucleotide; CTC chr11 5391158 5391179 5391163 5391158 -
ctgagcaatgggattgtgactt

SEQ ID NO: 114147 - DNA, 22 bp, Artificial Sequence
  Synthetic oligonucleotide; CTG chr11 5391155 5391176 5391160 5391155 -
agcaatgggattgtgacttcaa

SEQ ID NO: 114148 - DNA, 22 bp, Artificial Sequence
  Synthetic oligonucleotide; TTG chr11 5391142 5391163 5391147 5391142 -
tgacttcaatatgtttgtgtga

SEQ ID NO: 114149 - DNA, 22 bp, Artificial Sequence
  Synthetic oligonucleotide; CTT chr11 5391136 5391157 5391141 5391136 -
caatatgtttgtgtgagtttcc

SEQ ID NO: 114150 - DNA, 22 bp, Artificial Sequence
  Synthetic oligonucleotide; TTC chr11 5391135 5391156 5391140 5391135 -
aatatgtttgtgtgagtttcct

SEQ ID NO: 114151 - DNA, 22 bp, Artificial Sequence
  Synthetic oligonucleotide; TTT chr11 5391126 5391147 5391131 5391126 -
gtgtgagtttccttggctgaag

SEQ ID NO: 114152 - DNA, 22 bp, Artificial Sequence
  Synthetic oligonucleotide; TTG chr11 5391125 5391146 5391130 5391125 -
tgtgagtttccttggctgaagc

SEQ ID NO: 114153 - DNA, 22 bp, Artificial Sequence
  Synthetic oligonucleotide; TTT chr11 5391116 5391137 5391121 5391116 -
ccttggctgaagctttctcacg

SEQ ID NO: 114154 - DNA, 22 bp, Artificial Sequence
  Synthetic oligonucleotide; TTC chr11 5391115 5391136 5391120 5391115 -
cttggctgaagctttctcacgt

SEQ ID NO: 114155 - DNA, 22 bp, Artificial Sequence
  Synthetic oligonucleotide; CTT chr11 5391112 5391133 5391117 5391112 -
ggctgaagctttctcacgttac

SEQ ID NO: 114156 - DNA, 22 bp, Artificial Sequence
  Synthetic oligonucleotide; TTG chr11 5391111 5391132 5391116 5391111 -
gctgaagctttctcacgttaca

SEQ ID NO: 114157 - DNA, 22 bp, Artificial Sequence
  Synthetic oligonucleotide; CTG chr11 5391107 5391128 5391112 5391107 -
aagctttctcacgttacatgtc

SEQ ID NO: 114158 - DNA, 22 bp, Artificial Sequence
  Synthetic oligonucleotide; CTT chr11 5391101 5391122 5391106 5391101 -
tctcacgttacatgtcattgtt

SEQ ID NO: 114159 - DNA, 22 bp, Artificial Sequence
  Synthetic oligonucleotide; TTT chr11 5391100 5391121 5391105 5391100 -
ctcacgttacatgtcattgttc

SEQ ID NO: 114160 - DNA, 22 bp, Artificial Sequence
  Synthetic oligonucleotide; TTC chr11 5391099 5391120 5391104 5391099 -
tcacgttacatgtcattgttca

SEQ ID NO: 114161 - DNA, 22 bp, Artificial Sequence
  Synthetic oligonucleotide; CTC chr11 5391097 5391118 5391102 5391097 -
acgttacatgtcattgttcaat

SEQ ID NO: 114162 - DNA, 22 bp, Artificial Sequence
  Synthetic oligonucleotide; TTA chr11 5391091 5391112 5391096 5391091 -
catgtcattgttcaatatcaca

SEQ ID NO: 114163 - DNA, 22 bp, Artificial Sequence
  Synthetic oligonucleotide; TTG chr11 5391081 5391102 5391086 5391081 -
ttcaatatcacacaactaaaac

SEQ ID NO: 114164 - DNA, 22 bp, Artificial Sequence
  Synthetic oligonucleotide; TTC chr11 5391078 5391099 5391083 5391078 -
aatatcacacaactaaaacacc

SEQ ID NO: 114165 - DNA, 22 bp, Artificial Sequence
  Synthetic oligonucleotide; CTA chr11 5391063 5391084 5391068 5391063 -
aaacacctacaagtaaatactg

SEQ ID NO: 114166 - DNA, 22 bp, Artificial Sequence
  Synthetic oligonucleotide; CTA chr11 5391054 5391075 5391059 5391054 -
caagtaaatactgactgtagct

SEQ ID NO: 114167 - DNA, 22 bp, Artificial Sequence
  Synthetic oligonucleotide; CTG chr11 5391041 5391062 5391046 5391041 -
actgtagcttaatgtcagactt

SEQ ID NO: 114168 - DNA, 22 bp, Artificial Sequence
  Synthetic oligonucleotide; CTG chr11 5391037 5391058 5391042 5391037 -
tagcttaatgtcagacttgagg

SEQ ID NO: 114169 - DNA, 22 bp, Artificial Sequence
  Synthetic oligonucleotide; CTT chr11 5391031 5391052 5391036 5391031 -
aatgtcagacttgaggttgtaa

SEQ ID NO: 114170 - DNA, 22 bp, Artificial Sequence
  Synthetic oligonucleotide; TTA chr11 5391030 5391051 5391035 5391030 -
atgtcagacttgaggttgtaag

SEQ ID NO: 114171 - DNA, 22 bp, Artificial Sequence
  Synthetic oligonucleotide; CTT chr11 5391019 5391040 5391024 5391019 -
gaggttgtaaggtaaaatcaga

SEQ ID NO: 114172 - DNA, 22 bp, Artificial Sequence
  Synthetic oligonucleotide; TTG chr11 5391018 5391039 5391023 5391018 -
aggttgtaaggtaaaatcagag

SEQ ID NO: 114173 - DNA, 22 bp, Artificial Sequence
  Synthetic oligonucleotide; TTG chr11 5391012 5391033 5391017 5391012 -
taaggtaaaatcagagatgaga

SEQ ID NO: 114174 - DNA, 22 bp, Artificial Sequence
  Synthetic oligonucleotide; CTC chr11 5390964 5390985 5390969 5390964 -
ttcttctagaggaatatggtca

SEQ ID NO: 114175 - DNA, 22 bp, Artificial Sequence
  Synthetic oligonucleotide; CTT chr11 5390962 5390983 5390967 5390962 -
cttctagaggaatatggtcagg

SEQ ID NO: 114176 - DNA, 22 bp, Artificial Sequence
  Synthetic oligonucleotide; TTC chr11 5390961 5390982 5390966 5390961 -
ttctagaggaatatggtcagga

SEQ ID NO: 114177 - DNA, 22 bp, Artificial Sequence
  Synthetic oligonucleotide; CTT chr11 5390959 5390980 5390964 5390959 -
ctagaggaatatggtcaggaga

SEQ ID NO: 114178 - DNA, 22 bp, Artificial Sequence
  Synthetic oligonucleotide; TTC chr11 5390958 5390979 5390963 5390958 -
tagaggaatatggtcaggagag

SEQ ID NO: 114179 - DNA, 22 bp, Artificial Sequence
  Synthetic oligonucleotide; CTA chr11 5390956 5390977 5390961 5390956 -
gaggaatatggtcaggagagag

SEQ ID NO: 114180 - DNA, 22 bp, Artificial Sequence
  Synthetic oligonucleotide; CTT chr11 5390925 5390946 5390930 5390925 -
agaaatttgggggggtgttgct

SEQ ID NO: 114181 - DNA, 22 bp, Artificial Sequence
  Synthetic oligonucleotide; TTA chr11 5390924 5390945 5390929 5390924 -
gaaatttgggggggtgttgctt

SEQ ID NO: 114182 - DNA, 22 bp, Artificial Sequence
  Synthetic oligonucleotide; TTT chr11 5390917 5390938 5390922 5390917 -
gggggggtgttgcttgaaacag

SEQ ID NO: 114183 - DNA, 22 bp, Artificial Sequence
  Synthetic oligonucleotide; TTG chr11 5390916 5390937 5390921 5390916 -
ggggggtgttgcttgaaacagg

SEQ ID NO: 114184 - DNA, 22 bp, Artificial Sequence
  Synthetic oligonucleotide; TTG chr11 5390905 5390926 5390910 5390905 -
cttgaaacaggtgttgaggaag

SEQ ID NO: 114185 - DNA, 22 bp, Artificial Sequence
  Synthetic oligonucleotide; CTT chr11 5390902 5390923 5390907 5390902 -
gaaacaggtgttgaggaagaat

SEQ ID NO: 114186 - DNA, 22 bp, Artificial Sequence
  Synthetic oligonucleotide; TTG chr11 5390901 5390922 5390906 5390901 -
aaacaggtgttgaggaagaatg

SEQ ID NO: 114187 - DNA, 22 bp, Artificial Sequence
  Synthetic oligonucleotide; TTG chr11 5390889 5390910 5390894 5390889 -
aggaagaatgcaggagttctga

SEQ ID NO: 114188 - DNA, 22 bp, Artificial Sequence
  Synthetic oligonucleotide; TTC chr11 5390870 5390891 5390875 5390870 -
tgaggtttctgatgtgacttgg

SEQ ID NO: 114189 - DNA, 22 bp, Artificial Sequence
  Synthetic oligonucleotide; CTG chr11 5390868 5390889 5390873 5390868 -
aggtttctgatgtgacttgggg

SEQ ID NO: 114190 - DNA, 22 bp, Artificial Sequence
  Synthetic oligonucleotide; TTT chr11 5390862 5390883 5390867 5390862 -
ctgatgtgacttgggggtctga

SEQ ID NO: 114191 - DNA, 22 bp, Artificial Sequence
  Synthetic oligonucleotide; TTC chr11 5390861 5390882 5390866 5390861 -
tgatgtgacttgggggtctgaa

SEQ ID NO: 114192 - DNA, 22 bp, Artificial Sequence
  Synthetic oligonucleotide; CTG chr11 5390859 5390880 5390864 5390859 -
atgtgacttgggggtctgaaag

SEQ ID NO: 114193 - DNA, 22 bp, Artificial Sequence
  Synthetic oligonucleotide; CTT chr11 5390850 5390871 5390855 5390850 -
gggggtctgaaagttactgctg

SEQ ID NO: 114194 - DNA, 22 bp, Artificial Sequence
  Synthetic oligonucleotide; TTG chr11 5390849 5390870 5390854 5390849 -
ggggtctgaaagttactgctga

SEQ ID NO: 114195 - DNA, 22 bp, Artificial Sequence
  Synthetic oligonucleotide; CTG chr11 5390841 5390862 5390846 5390841 -
aaagttactgctgaccaggata

SEQ ID NO: 114196 - DNA, 22 bp, Artificial Sequence
  Synthetic oligonucleotide; TTA chr11 5390834 5390855 5390839 5390834 -
ctgctgaccaggatagaaaaag

SEQ ID NO: 114197 - DNA, 22 bp, Artificial Sequence
  Synthetic oligonucleotide; CTG chr11 5390831 5390852 5390836 5390831 -
ctgaccaggatagaaaaagatg

SEQ ID NO: 114198 - DNA, 22 bp, Artificial Sequence
  Synthetic oligonucleotide; CTG chr11 5390828 5390849 5390833 5390828 -
accaggatagaaaaagatgaga

SEQ ID NO: 114199 - DNA, 22 bp, Artificial Sequence
  Synthetic oligonucleotide; CTT chr11 5390798 5390819 5390803 5390798 -
ggccaggtagataagatggaag

SEQ ID NO: 114200 - DNA, 22 bp, Artificial Sequence
  Synthetic oligonucleotide; TTG chr11 5390797 5390818 5390802 5390797 -
gccaggtagataagatggaagc

SEQ ID NO: 114201 - DNA, 22 bp, Artificial Sequence
  Synthetic oligonucleotide; TTT chr11 5390743 5390764 5390748 5390743 -
ccggaggtgagttagagcaaat

SEQ ID NO: 114202 - DNA, 22 bp, Artificial Sequence
  Synthetic oligonucleotide; TTC chr11 5390742 5390763 5390747 5390742 -
cggaggtgagttagagcaaatg

SEQ ID NO: 114203 - DNA, 22 bp, Artificial Sequence
  Synthetic oligonucleotide; TTA chr11 5390729 5390750 5390734 5390729 -
gagcaaatggcatttacctggt

SEQ ID NO: 114204 - DNA, 22 bp, Artificial Sequence
  Synthetic oligonucleotide; TTT chr11 5390714 5390735 5390719 5390714 -
acctggtctctgccaggctctc

SEQ ID NO: 114205 - DNA, 22 bp, Artificial Sequence
  Synthetic oligonucleotide; TTA chr11 5390713 5390734 5390718 5390713 -
cctggtctctgccaggctctcc

SEQ ID NO: 114206 - DNA, 22 bp, Artificial Sequence
  Synthetic oligonucleotide; CTG chr11 5390709 5390730 5390714 5390709 -
gtctctgccaggctctcctctg

SEQ ID NO: 114207 - DNA, 22 bp, Artificial Sequence
  Synthetic oligonucleotide; CTC chr11 5390704 5390725 5390709 5390704 -
tgccaggctctcctctgggtgc

SEQ ID NO: 114208 - DNA, 22 bp, Artificial Sequence
  Synthetic oligonucleotide; CTG chr11 5390702 5390723 5390707 5390702 -
ccaggctctcctctgggtgctc

SEQ ID NO: 114209 - DNA, 22 bp, Artificial Sequence
  Synthetic oligonucleotide; CTC chr11 5390694 5390715 5390699 5390694 -
tcctctgggtgctctggtattt

SEQ ID NO: 114210 - DNA, 22 bp, Artificial Sequence
  Synthetic oligonucleotide; CTC chr11 5390692 5390713 5390697 5390692 -
ctctgggtgctctggtatttat

SEQ ID NO: 114211 - DNA, 22 bp, Artificial Sequence
  Synthetic oligonucleotide; CTC chr11 5390689 5390710 5390694 5390689 -
tgggtgctctggtatttattgt

SEQ ID NO: 114212 - DNA, 22 bp, Artificial Sequence
  Synthetic oligonucleotide; CTG chr11 5390687 5390708 5390692 5390687 -
ggtgctctggtatttattgttc

SEQ ID NO: 114213 - DNA, 22 bp, Artificial Sequence
  Synthetic oligonucleotide; CTC chr11 5390680 5390701 5390685 5390680 -
tggtatttattgttctttttag

SEQ ID NO: 114214 - DNA, 22 bp, Artificial Sequence
  Synthetic oligonucleotide; CTG chr11 5390678 5390699 5390683 5390678 -
gtatttattgttctttttagtt

SEQ ID NO: 114215 - DNA, 22 bp, Artificial Sequence
  Synthetic oligonucleotide; TTT chr11 5390672 5390693 5390677 5390672 -
attgttctttttagtttttatt

SEQ ID NO: 114216 - DNA, 22 bp, Artificial Sequence
  Synthetic oligonucleotide; TTA chr11 5390671 5390692 5390676 5390671 -
ttgttctttttagtttttattt

SEQ ID NO: 114217 - DNA, 22 bp, Artificial Sequence
  Synthetic oligonucleotide; TTG chr11 5390668 5390689 5390673 5390668 -
ttctttttagtttttatttagt

SEQ ID NO: 114218 - DNA, 22 bp, Artificial Sequence
  Synthetic oligonucleotide; TTC chr11 5390665 5390686 5390670 5390665 -
tttttagtttttatttagtttc

SEQ ID NO: 114219 - DNA, 22 bp, Artificial Sequence
  Synthetic oligonucleotide; CTT chr11 5390663 5390684 5390668 5390663 -
tttagtttttatttagtttcat

SEQ ID NO: 114220 - DNA, 22 bp, Artificial Sequence
  Synthetic oligonucleotide; TTT chr11 5390662 5390683 5390667 5390662 -
ttagtttttatttagtttcatt

SEQ ID NO: 114221 - DNA, 22 bp, Artificial Sequence
  Synthetic oligonucleotide; TTT chr11 5390661 5390682 5390666 5390661 -
tagtttttatttagtttcattt

SEQ ID NO: 114222 - DNA, 22 bp, Artificial Sequence
  Synthetic oligonucleotide; TTT chr11 5390660 5390681 5390665 5390660 -
agtttttatttagtttcatttt

SEQ ID NO: 114223 - DNA, 22 bp, Artificial Sequence
  Synthetic oligonucleotide; TTA chr11 5390659 5390680 5390664 5390659 -
gtttttatttagtttcatttta

SEQ ID NO: 114224 - DNA, 22 bp, Artificial Sequence
  Synthetic oligonucleotide; TTT chr11 5390655 5390676 5390660 5390655 -
ttatttagtttcattttagttt

SEQ ID NO: 114225 - DNA, 22 bp, Artificial Sequence
  Synthetic oligonucleotide; TTT chr11 5390654 5390675 5390659 5390654 -
tatttagtttcattttagtttt

SEQ ID NO: 114226 - DNA, 22 bp, Artificial Sequence
  Synthetic oligonucleotide; TTT chr11 5390653 5390674 5390658 5390653 -
atttagtttcattttagtttta

SEQ ID NO: 114227 - DNA, 22 bp, Artificial Sequence
  Synthetic oligonucleotide; TTA chr11 5390652 5390673 5390657 5390652 -
tttagtttcattttagttttag

SEQ ID NO: 114228 - DNA, 22 bp, Artificial Sequence
  Synthetic oligonucleotide; TTT chr11 5390649 5390670 5390654 5390649 -
agtttcattttagttttagtta

SEQ ID NO: 114229 - DNA, 22 bp, Artificial Sequence
  Synthetic oligonucleotide; TTA chr11 5390648 5390669 5390653 5390648 -
gtttcattttagttttagttac

SEQ ID NO: 114230 - DNA, 22 bp, Artificial Sequence
  Synthetic oligonucleotide; TTT chr11 5390644 5390665 5390649 5390644 -
cattttagttttagttacattg

SEQ ID NO: 114231 - DNA, 22 bp, Artificial Sequence
  Synthetic oligonucleotide; TTC chr11 5390643 5390664 5390648 5390643 -
attttagttttagttacattga

SEQ ID NO: 114232 - DNA, 22 bp, Artificial Sequence
  Synthetic oligonucleotide; TTT chr11 5390639 5390660 5390644 5390639 -
tagttttagttacattgatgat

SEQ ID NO: 114233 - DNA, 22 bp, Artificial Sequence
  Synthetic oligonucleotide; TTT chr11 5390638 5390659 5390643 5390638 -
agttttagttacattgatgatg

SEQ ID NO: 114234 - DNA, 22 bp, Artificial Sequence
  Synthetic oligonucleotide; TTA chr11 5390637 5390658 5390642 5390637 -
gttttagttacattgatgatga

SEQ ID NO: 114235 - DNA, 22 bp, Artificial Sequence
  Synthetic oligonucleotide; TTT chr11 5390633 5390654 5390638 5390633 -
tagttacattgatgatgacctt

SEQ ID NO: 114236 - DNA, 22 bp, Artificial Sequence
  Synthetic oligonucleotide; TTT chr11 5390632 5390653 5390637 5390632 -
agttacattgatgatgaccttc

SEQ ID NO: 114237 - DNA, 22 bp, Artificial Sequence
  Synthetic oligonucleotide; TTA chr11 5390631 5390652 5390636 5390631 -
gttacattgatgatgaccttca

SEQ ID NO: 114238 - DNA, 22 bp, Artificial Sequence
  Synthetic oligonucleotide; TTA chr11 5390627 5390648 5390632 5390627 -
cattgatgatgaccttcaataa

SEQ ID NO: 114239 - DNA, 22 bp, Artificial Sequence
  Synthetic oligonucleotide; TTG chr11 5390622 5390643 5390627 5390622 -
atgatgaccttcaataaagttg

SEQ ID NO: 114240 - DNA, 22 bp, Artificial Sequence
  Synthetic oligonucleotide; CTT chr11 5390611 5390632 5390616 5390611 -
caataaagttgccttctggata

SEQ ID NO: 114241 - DNA, 22 bp, Artificial Sequence
  Synthetic oligonucleotide; TTC chr11 5390610 5390631 5390615 5390610 -
aataaagttgccttctggatag

SEQ ID NO: 114242 - DNA, 22 bp, Artificial Sequence
  Synthetic oligonucleotide; TTG chr11 5390600 5390621 5390605 5390600 -
ccttctggatagctttgatgct

SEQ ID NO: 114243 - DNA, 22 bp, Artificial Sequence
  Synthetic oligonucleotide; CTT chr11 5390596 5390617 5390601 5390596 -
ctggatagctttgatgctacca

SEQ ID NO: 114244 - DNA, 22 bp, Artificial Sequence
  Synthetic oligonucleotide; TTC chr11 5390595 5390616 5390600 5390595 -
tggatagctttgatgctaccaa

SEQ ID NO: 114245 - DNA, 22 bp, Artificial Sequence
  Synthetic oligonucleotide; CTG chr11 5390593 5390614 5390598 5390593 -
gatagctttgatgctaccaaaa

SEQ ID NO: 114246 - DNA, 22 bp, Artificial Sequence
  Synthetic oligonucleotide; CTT chr11 5390585 5390606 5390590 5390585 -
tgatgctaccaaaaatgccagt

SEQ ID NO: 114247 - DNA, 22 bp, Artificial Sequence
  Synthetic oligonucleotide; TTT chr11 5390584 5390605 5390589 5390584 -
gatgctaccaaaaatgccagtt

SEQ ID NO: 114248 - DNA, 22 bp, Artificial Sequence
  Synthetic oligonucleotide; TTG chr11 5390583 5390604 5390588 5390583 -
atgctaccaaaaatgccagttc

SEQ ID NO: 114249 - DNA, 22 bp, Artificial Sequence
  Synthetic oligonucleotide; CTA chr11 5390577 5390598 5390582 5390577 -
ccaaaaatgccagttctcagct

SEQ ID NO: 114250 - DNA, 22 bp, Artificial Sequence
  Synthetic oligonucleotide; TTC chr11 5390561 5390582 5390566 5390561 -
tcagctgtaggaggagccatta

SEQ ID NO: 114251 - DNA, 22 bp, Artificial Sequence
  Synthetic oligonucleotide; CTC chr11 5390559 5390580 5390564 5390559 -
agctgtaggaggagccattaaa

SEQ ID NO: 114252 - DNA, 22 bp, Artificial Sequence
  Synthetic oligonucleotide; CTG chr11 5390554 5390575 5390559 5390554 -
taggaggagccattaaaatcta

SEQ ID NO: 114253 - DNA, 22 bp, Artificial Sequence
  Synthetic oligonucleotide; TTA chr11 5390539 5390560 5390544 5390539 -
aaatctaagcaagagaagttca

SEQ ID NO: 114254 - DNA, 22 bp, Artificial Sequence
  Synthetic oligonucleotide; CTA chr11 5390532 5390553 5390537 5390532 -
agcaagagaagttcagtttttt

SEQ ID NO: 114255 - DNA, 22 bp, Artificial Sequence
  Synthetic oligonucleotide; TTC chr11 5390518 5390539 5390523 5390518 -
agttttttaaagccacaactcc

SEQ ID NO: 114256 - DNA, 22 bp, Artificial Sequence
  Synthetic oligonucleotide; TTT chr11 5390513 5390534 5390518 5390513 -
tttaaagccacaactccagaca

SEQ ID NO: 114257 - DNA, 22 bp, Artificial Sequence
  Synthetic oligonucleotide; TTT chr11 5390512 5390533 5390517 5390512 -
ttaaagccacaactccagacat

SEQ ID NO: 114258 - DNA, 22 bp, Artificial Sequence
  Synthetic oligonucleotide; TTT chr11 5390511 5390532 5390516 5390511 -
taaagccacaactccagacata

SEQ ID NO: 114259 - DNA, 22 bp, Artificial Sequence
  Synthetic oligonucleotide; TTT chr11 5390510 5390531 5390515 5390510 -
aaagccacaactccagacataa

SEQ ID NO: 114260 - DNA, 22 bp, Artificial Sequence
  Synthetic oligonucleotide; TTA chr11 5390509 5390530 5390514 5390509 -
aagccacaactccagacataaa

SEQ ID NO: 114261 - DNA, 22 bp, Artificial Sequence
  Synthetic oligonucleotide; CTC chr11 5390497 5390518 5390502 5390497 -
cagacataaatttgcccatatt

SEQ ID NO: 114262 - DNA, 22 bp, Artificial Sequence
  Synthetic oligonucleotide; TTT chr11 5390484 5390505 5390489 5390484 -
gcccatattttatttaggacag

SEQ ID NO: 114263 - DNA, 22 bp, Artificial Sequence
  Synthetic oligonucleotide; TTG chr11 5390483 5390504 5390488 5390483 -
cccatattttatttaggacagg

SEQ ID NO: 114264 - DNA, 22 bp, Artificial Sequence
  Synthetic oligonucleotide; TTT chr11 5390474 5390495 5390479 5390474 -
tatttaggacaggggcaaaaaa

SEQ ID NO: 114265 - DNA, 22 bp, Artificial Sequence
  Synthetic oligonucleotide; TTT chr11 5390473 5390494 5390478 5390473 -
atttaggacaggggcaaaaaat

SEQ ID NO: 114266 - DNA, 22 bp, Artificial Sequence
  Synthetic oligonucleotide; TTA chr11 5390472 5390493 5390477 5390472 -
tttaggacaggggcaaaaaatc

SEQ ID NO: 114267 - DNA, 22 bp, Artificial Sequence
  Synthetic oligonucleotide; TTT chr11 5390469 5390490 5390474 5390469 -
aggacaggggcaaaaaatcttt

SEQ ID NO: 114268 - DNA, 22 bp, Artificial Sequence
  Synthetic oligonucleotide; TTA chr11 5390468 5390489 5390473 5390468 -
ggacaggggcaaaaaatcttta

SEQ ID NO: 114269 - DNA, 22 bp, Artificial Sequence
  Synthetic oligonucleotide; CTT chr11 5390448 5390469 5390453 5390448 -
taagagcatgctatatactcaa

SEQ ID NO: 114270 - DNA, 22 bp, Artificial Sequence
  Synthetic oligonucleotide; TTT chr11 5390447 5390468 5390452 5390447 -
aagagcatgctatatactcaat

SEQ ID NO: 114271 - DNA, 22 bp, Artificial Sequence
  Synthetic oligonucleotide; TTA chr11 5390446 5390467 5390451 5390446 -
agagcatgctatatactcaata

SEQ ID NO: 114272 - DNA, 22 bp, Artificial Sequence
  Synthetic oligonucleotide; CTA chr11 5390435 5390456 5390440 5390435 -
tatactcaatactccaaatttt

SEQ ID NO: 114273 - DNA, 22 bp, Artificial Sequence
  Synthetic oligonucleotide; CTC chr11 5390428 5390449 5390433 5390428 -
aatactccaaattttcagtcca

SEQ ID NO: 114274 - DNA, 22 bp, Artificial Sequence
  Synthetic oligonucleotide; CTC chr11 5390421 5390442 5390426 5390421 -
caaattttcagtccaatttggg

SEQ ID NO: 114275 - DNA, 22 bp, Artificial Sequence
  Synthetic oligonucleotide; TTT chr11 5390414 5390435 5390419 5390414 -
tcagtccaatttggggccttct

SEQ ID NO: 114276 - DNA, 22 bp, Artificial Sequence
  Synthetic oligonucleotide; TTT chr11 5390413 5390434 5390418 5390413 -
cagtccaatttggggccttctt

SEQ ID NO: 114277 - DNA, 22 bp, Artificial Sequence
  Synthetic oligonucleotide; TTC chr11 5390412 5390433 5390417 5390412 -
agtccaatttggggccttctta

SEQ ID NO: 114278 - DNA, 22 bp, Artificial Sequence
  Synthetic oligonucleotide; TTT chr11 5390402 5390423 5390407 5390402 -
ggggccttcttataggcctcta

SEQ ID NO: 114279 - DNA, 22 bp, Artificial Sequence
  Synthetic oligonucleotide; TTG chr11 5390401 5390422 5390406 5390401 -
gggccttcttataggcctctag

SEQ ID NO: 114280 - DNA, 22 bp, Artificial Sequence
  Synthetic oligonucleotide; CTT chr11 5390394 5390415 5390399 5390394 -
cttataggcctctagggggagt

SEQ ID NO: 114281 - DNA, 22 bp, Artificial Sequence
  Synthetic oligonucleotide; TTC chr11 5390393 5390414 5390398 5390393 -
ttataggcctctagggggagtt

SEQ ID NO: 114282 - DNA, 22 bp, Artificial Sequence
  Synthetic oligonucleotide; CTT chr11 5390391 5390412 5390396 5390391 -
ataggcctctagggggagtttt

SEQ ID NO: 114283 - DNA, 22 bp, Artificial Sequence
  Synthetic oligonucleotide; TTA chr11 5390390 5390411 5390395 5390390 -
taggcctctagggggagtttta

SEQ ID NO: 114284 - DNA, 22 bp, Artificial Sequence
  Synthetic oligonucleotide; CTC chr11 5390382 5390403 5390387 5390382 -
tagggggagttttagccccagg

SEQ ID NO: 114285 - DNA, 22 bp, Artificial Sequence
  Synthetic oligonucleotide; CTA chr11 5390380 5390401 5390385 5390380 -
gggggagttttagccccaggac

SEQ ID NO: 114286 - DNA, 22 bp, Artificial Sequence
  Synthetic oligonucleotide; TTT chr11 5390370 5390391 5390375 5390370 -
tagccccaggactcatttactg

SEQ ID NO: 114287 - DNA, 22 bp, Artificial Sequence
  Synthetic oligonucleotide; TTT chr11 5390369 5390390 5390374 5390369 -
agccccaggactcatttactgg

SEQ ID NO: 114288 - DNA, 22 bp, Artificial Sequence
  Synthetic oligonucleotide; TTA chr11 5390368 5390389 5390373 5390368 -
gccccaggactcatttactggc

SEQ ID NO: 114289 - DNA, 22 bp, Artificial Sequence
  Synthetic oligonucleotide; CTC chr11 5390356 5390377 5390361 5390356 -
atttactggcctttttaagacc

SEQ ID NO: 114290 - DNA, 22 bp, Artificial Sequence
  Synthetic oligonucleotide; TTT chr11 5390352 5390373 5390357 5390352 -
actggcctttttaagacctagg

SEQ ID NO: 114291 - DNA, 22 bp, Artificial Sequence
  Synthetic oligonucleotide; TTA chr11 5390351 5390372 5390356 5390351 -
ctggcctttttaagacctagga

SEQ ID NO: 114292 - DNA, 22 bp, Artificial Sequence
  Synthetic oligonucleotide; CTG chr11 5390348 5390369 5390353 5390348 -
gcctttttaagacctaggaact

SEQ ID NO: 114293 - DNA, 22 bp, Artificial Sequence
  Synthetic oligonucleotide; CTT chr11 5390343 5390364 5390348 5390343 -
tttaagacctaggaacttgata

SEQ ID NO: 114294 - DNA, 22 bp, Artificial Sequence
  Synthetic oligonucleotide; TTT chr11 5390342 5390363 5390347 5390342 -
ttaagacctaggaacttgataa

SEQ ID NO: 114295 - DNA, 22 bp, Artificial Sequence
  Synthetic oligonucleotide; TTT chr11 5390341 5390362 5390346 5390341 -
taagacctaggaacttgataat

SEQ ID NO: 114296 - DNA, 22 bp, Artificial Sequence
  Synthetic oligonucleotide; TTT chr11 5390340 5390361 5390345 5390340 -
aagacctaggaacttgataatg

SEQ ID NO: 114297 - DNA, 22 bp, Artificial Sequence
  Synthetic oligonucleotide; TTA chr11 5390339 5390360 5390344 5390339 -
agacctaggaacttgataatgg

SEQ ID NO: 114298 - DNA, 22 bp, Artificial Sequence
  Synthetic oligonucleotide; CTA chr11 5390332 5390353 5390337 5390332 -
ggaacttgataatggcacggtg

SEQ ID NO: 114299 - DNA, 22 bp, Artificial Sequence
  Synthetic oligonucleotide; CTT chr11 5390325 5390346 5390330 5390325 -
gataatggcacggtggatctcc

SEQ ID NO: 114300 - DNA, 22 bp, Artificial Sequence
  Synthetic oligonucleotide; TTG chr11 5390324 5390345 5390329 5390324 -
ataatggcacggtggatctcct

SEQ ID NO: 114301 - DNA, 22 bp, Artificial Sequence
  Synthetic oligonucleotide; CTC chr11 5390304 5390325 5390309 5390304 -
cttggtcttaatgctgtatatg

SEQ ID NO: 114302 - DNA, 22 bp, Artificial Sequence
  Synthetic oligonucleotide; CTT chr11 5390301 5390322 5390306 5390301 -
ggtcttaatgctgtatatgatt

SEQ ID NO: 114303 - DNA, 22 bp, Artificial Sequence
  Synthetic oligonucleotide; TTG chr11 5390300 5390321 5390305 5390300 -
gtcttaatgctgtatatgattg

SEQ ID NO: 114304 - DNA, 22 bp, Artificial Sequence
  Synthetic oligonucleotide; CTT chr11 5390295 5390316 5390300 5390295 -
aatgctgtatatgattgggtta

SEQ ID NO: 114305 - DNA, 22 bp, Artificial Sequence
  Synthetic oligonucleotide; TTA chr11 5390294 5390315 5390299 5390294 -
atgctgtatatgattgggttaa

SEQ ID NO: 114306 - DNA, 22 bp, Artificial Sequence
  Synthetic oligonucleotide; CTG chr11 5390288 5390309 5390293 5390288 -
tatatgattgggttaagcatgg

SEQ ID NO: 114307 - DNA, 22 bp, Artificial Sequence
  Synthetic oligonucleotide; TTG chr11 5390278 5390299 5390283 5390278 -
ggttaagcatgggaggcacaaa

SEQ ID NO: 114308 - DNA, 22 bp, Artificial Sequence
  Synthetic oligonucleotide; TTA chr11 5390273 5390294 5390278 5390273 -
agcatgggaggcacaaaaaggt

SEQ ID NO: 114309 - DNA, 22 bp, Artificial Sequence
  Synthetic oligonucleotide; TTG chr11 5390243 5390264 5390248 5390243 -
gccataagaagatgaatagcag

SEQ ID NO: 114310 - DNA, 22 bp, Artificial Sequence
  Synthetic oligonucleotide; CTT chr11 5390208 5390229 5390213 5390208 -
cccaaaacggtgcaccagggac

SEQ ID NO: 114311 - DNA, 22 bp, Artificial Sequence
  Synthetic oligonucleotide; TTC chr11 5390207 5390228 5390212 5390207 -
ccaaaacggtgcaccagggaca

SEQ ID NO: 114312 - DNA, 22 bp, Artificial Sequence
  Synthetic oligonucleotide; CTA chr11 5390158 5390179 5390163 5390158 -
gcacagcacagagaggagcggt

SEQ ID NO: 114313 - DNA, 22 bp, Artificial Sequence
  Synthetic oligonucleotide; CTG chr11 5390127 5390148 5390132 5390127 -
aaaggcacggcgctgctcctct

SEQ ID NO: 114314 - DNA, 22 bp, Artificial Sequence
  Synthetic oligonucleotide; CTG chr11 5390112 5390133 5390117 5390112 -
ctcctcttgggaggccaggcct

SEQ ID NO: 114315 - DNA, 22 bp, Artificial Sequence
  Synthetic oligonucleotide; CTC chr11 5390109 5390130 5390114 5390109 -
ctcttgggaggccaggcctgct

SEQ ID NO: 114316 - DNA, 22 bp, Artificial Sequence
  Synthetic oligonucleotide; CTC chr11 5390106 5390127 5390111 5390106 -
ttgggaggccaggcctgctact

SEQ ID NO: 114317 - DNA, 22 bp, Artificial Sequence
  Synthetic oligonucleotide; CTT chr11 5390104 5390125 5390109 5390104 -
gggaggccaggcctgctactgt

SEQ ID NO: 114318 - DNA, 22 bp, Artificial Sequence
  Synthetic oligonucleotide; TTG chr11 5390103 5390124 5390108 5390103 -
ggaggccaggcctgctactgtg

SEQ ID NO: 114319 - DNA, 22 bp, Artificial Sequence
  Synthetic oligonucleotide; CTG chr11 5390089 5390110 5390094 5390089 -
ctactgtgtgcaggatgagtcc

SEQ ID NO: 114320 - DNA, 22 bp, Artificial Sequence
  Synthetic oligonucleotide; CTA chr11 5390086 5390107 5390091 5390086 -
ctgtgtgcaggatgagtccata

SEQ ID NO: 114321 - DNA, 22 bp, Artificial Sequence
  Synthetic oligonucleotide; CTG chr11 5390083 5390104 5390088 5390083 -
tgtgcaggatgagtccatagga

SEQ ID NO: 114322 - DNA, 22 bp, Artificial Sequence
  Synthetic oligonucleotide; CTA chr11 5390020 5390041 5390025 5390020 -
ccaccatcagtccatacagatt

SEQ ID NO: 114323 - DNA, 22 bp, Artificial Sequence
  Synthetic oligonucleotide; TTA chr11 5389997 5390018 5390002 5389997 -
ttgaaggtgatatctgtgcagg

SEQ ID NO: 114324 - DNA, 22 bp, Artificial Sequence
  Synthetic oligonucleotide; TTG chr11 5389994 5390015 5389999 5389994 -
aaggtgatatctgtgcaggcca

SEQ ID NO: 114325 - DNA, 22 bp, Artificial Sequence
  Synthetic oligonucleotide; CTG chr11 5389981 5390002 5389986 5389981 -
tgcaggccagctgtatcacttc

SEQ ID NO: 114326 - DNA, 22 bp, Artificial Sequence
  Synthetic oligonucleotide; CTG chr11 5389968 5389989 5389973 5389968 -
tatcacttcctggtgcaggcaa

SEQ ID NO: 114327 - DNA, 22 bp, Artificial Sequence
  Synthetic oligonucleotide; CTT chr11 5389960 5389981 5389965 5389960 -
cctggtgcaggcaaaatgagtg

SEQ ID NO: 114328 - DNA, 22 bp, Artificial Sequence
  Synthetic oligonucleotide; TTC chr11 5389959 5389980 5389964 5389959 -
ctggtgcaggcaaaatgagtgg

SEQ ID NO: 114329 - DNA, 22 bp, Artificial Sequence
  Synthetic oligonucleotide; CTG chr11 5389956 5389977 5389961 5389956 -
gtgcaggcaaaatgagtgggag

SEQ ID NO: 114330 - DNA, 22 bp, Artificial Sequence
  Synthetic oligonucleotide; CTT chr11 5389902 5389923 5389907 5389902 -
caggaggaggacaatagggata

SEQ ID NO: 114331 - DNA, 22 bp, Artificial Sequence
  Synthetic oligonucleotide; TTC chr11 5389901 5389922 5389906 5389901 -
aggaggaggacaatagggatag

SEQ ID NO: 114332 - DNA, 22 bp, Artificial Sequence
  Synthetic oligonucleotide; TTA chr11 5389849 5389870 5389854 5389849 -
ggcctgctctgaccacttgctg

SEQ ID NO: 114333 - DNA, 22 bp, Artificial Sequence
  Synthetic oligonucleotide; CTG chr11 5389843 5389864 5389848 5389843 -
ctctgaccacttgctggccagt

SEQ ID NO: 114334 - DNA, 22 bp, Artificial Sequence
  Synthetic oligonucleotide; CTC chr11 5389840 5389861 5389845 5389840 -
tgaccacttgctggccagtgat

SEQ ID NO: 114335 - DNA, 22 bp, Artificial Sequence
  Synthetic oligonucleotide; CTG chr11 5389838 5389859 5389843 5389838 -
accacttgctggccagtgataa

SEQ ID NO: 114336 - DNA, 22 bp, Artificial Sequence
  Synthetic oligonucleotide; CTT chr11 5389831 5389852 5389836 5389831 -
gctggccagtgataatgaccga

SEQ ID NO: 114337 - DNA, 22 bp, Artificial Sequence
  Synthetic oligonucleotide; TTG chr11 5389830 5389851 5389835 5389830 -
ctggccagtgataatgaccgaa

SEQ ID NO: 114338 - DNA, 22 bp, Artificial Sequence
  Synthetic oligonucleotide; CTG chr11 5389827 5389848 5389832 5389827 -
gccagtgataatgaccgaatac

SEQ ID NO: 114339 - DNA, 22 bp, Artificial Sequence
  Synthetic oligonucleotide; CTC chr11 5389802 5389823 5389807 5389802 -
agagggtggcagatggccacaa

SEQ ID NO: 114340 - DNA, 22 bp, Artificial Sequence
  Synthetic oligonucleotide; CTG chr11 5389750 5389771 5389755 5389750 -
aggactccatgaaggaaaaaga

SEQ ID NO: 114341 - DNA, 22 bp, Artificial Sequence
  Synthetic oligonucleotide; CTC chr11 5389743 5389764 5389748 5389743 -
catgaaggaaaaagagtggatg

SEQ ID NO: 114342 - DNA, 22 bp, Artificial Sequence
  Synthetic oligonucleotide; CTG chr11 5389710 5389731 5389715 5389710 -
gatttgacacgctccaaagtag

SEQ ID NO: 114343 - DNA, 22 bp, Artificial Sequence
  Synthetic oligonucleotide; TTT chr11 5389705 5389726 5389710 5389705 -
gacacgctccaaagtagatact

SEQ ID NO: 114344 - DNA, 22 bp, Artificial Sequence
  Synthetic oligonucleotide; TTG chr11 5389704 5389725 5389709 5389704 -
acacgctccaaagtagatacta

SEQ ID NO: 114345 - DNA, 22 bp, Artificial Sequence
  Synthetic oligonucleotide; CTC chr11 5389696 5389717 5389701 5389696 -
caaagtagatactatgggagtt

SEQ ID NO: 114346 - DNA, 22 bp, Artificial Sequence
  Synthetic oligonucleotide; CTA chr11 5389682 5389703 5389687 5389682 -
tgggagttaaaccagaagatcc

SEQ ID NO: 114347 - DNA, 22 bp, Artificial Sequence
  Synthetic oligonucleotide; TTA chr11 5389673 5389694 5389678 5389673 -
aaccagaagatccccatagtgg

SEQ ID NO: 114348 - DNA, 22 bp, Artificial Sequence
  Synthetic oligonucleotide; TTG chr11 5389565 5389586 5389570 5389565 -
gtcttaataatgatcagaatga

SEQ ID NO: 114349 - DNA, 22 bp, Artificial Sequence
  Synthetic oligonucleotide; CTT chr11 5389560 5389581 5389565 5389560 -
aataatgatcagaatgaaacaa

SEQ ID NO: 114350 - DNA, 22 bp, Artificial Sequence
  Synthetic oligonucleotide; TTA chr11 5389559 5389580 5389564 5389559 -
ataatgatcagaatgaaacaat

SEQ ID NO: 114351 - DNA, 22 bp, Artificial Sequence
  Synthetic oligonucleotide; TTG chr11 5389535 5389556 5389540 5389535 -
cctgagatggcaaccatgtaca

SEQ ID NO: 114352 - DNA, 22 bp, Artificial Sequence
  Synthetic oligonucleotide; CTG chr11 5389531 5389552 5389536 5389531 -
agatggcaaccatgtacataaa

SEQ ID NO: 114353 - DNA, 22 bp, Artificial Sequence
  Synthetic oligonucleotide; TTT chr11 5389482 5389503 5389487 5389482 -
gatgccttccaatccaggaaag

SEQ ID NO: 114354 - DNA, 22 bp, Artificial Sequence
  Synthetic oligonucleotide; TTG chr11 5389481 5389502 5389486 5389481 -
atgccttccaatccaggaaagc

SEQ ID NO: 114355 - DNA, 22 bp, Artificial Sequence
  Synthetic oligonucleotide; CTT chr11 5389474 5389495 5389479 5389474 -
ccaatccaggaaagctggtgag

SEQ ID NO: 114356 - DNA, 22 bp, Artificial Sequence
  Synthetic oligonucleotide; TTC chr11 5389473 5389494 5389478 5389473 -
caatccaggaaagctggtgaga

SEQ ID NO: 114357 - DNA, 22 bp, Artificial Sequence
  Synthetic oligonucleotide; CTG chr11 5389457 5389478 5389462 5389457 -
gtgagatagaatatggggctaa

SEQ ID NO: 114358 - DNA, 22 bp, Artificial Sequence
  Synthetic oligonucleotide; CTA chr11 5389436 5389457 5389441 5389436 -
aactgagtaatgttggatagca

SEQ ID NO: 114359 - DNA, 22 bp, Artificial Sequence
  Synthetic oligonucleotide; CTG chr11 5389431 5389452 5389436 5389431 -
agtaatgttggatagcagcatg

SEQ ID NO: 114360 - DNA, 22 bp, Artificial Sequence
  Synthetic oligonucleotide; TTG chr11 5389421 5389442 5389426 5389421 -
gatagcagcatgaattgaggac

SEQ ID NO: 114361 - DNA, 22 bp, Artificial Sequence
  Synthetic oligonucleotide; TTG chr11 5389404 5389425 5389409 5389404 -
aggactgagcgaatattggact

SEQ ID NO: 114362 - DNA, 22 bp, Artificial Sequence
  Synthetic oligonucleotide; CTG chr11 5389397 5389418 5389402 5389397 -
agcgaatattggactgacattc

SEQ ID NO: 114363 - DNA, 22 bp, Artificial Sequence
  Synthetic oligonucleotide; TTG chr11 5389386 5389407 5389391 5389386 -
gactgacattcctcggggattg

SEQ ID NO: 114364 - DNA, 22 bp, Artificial Sequence
  Synthetic oligonucleotide; CTG chr11 5389381 5389402 5389386 5389381 -
acattcctcggggattgagctg

SEQ ID NO: 114365 - DNA, 22 bp, Artificial Sequence
  Synthetic oligonucleotide; TTC chr11 5389375 5389396 5389380 5389375 -
ctcggggattgagctgaaaata

SEQ ID NO: 114366 - DNA, 22 bp, Artificial Sequence
  Synthetic oligonucleotide; CTC chr11 5389372 5389393 5389377 5389372 -
ggggattgagctgaaaataaat

SEQ ID NO: 114367 - DNA, 22 bp, Artificial Sequence
  Synthetic oligonucleotide; TTG chr11 5389364 5389385 5389369 5389364 -
agctgaaaataaatggatattt

SEQ ID NO: 114368 - DNA, 22 bp, Artificial Sequence
  Synthetic oligonucleotide; CTG chr11 5389359 5389380 5389364 5389359 -
aaaataaatggatatttctggt

SEQ ID NO: 114369 - DNA, 22 bp, Artificial Sequence
  Synthetic oligonucleotide; TTT chr11 5389342 5389363 5389347 5389342 -
ctggttattaattcttcagctt

SEQ ID NO: 114370 - DNA, 22 bp, Artificial Sequence
  Synthetic oligonucleotide; TTC chr11 5389341 5389362 5389346 5389341 -
tggttattaattcttcagcttc

SEQ ID NO: 114371 - DNA, 22 bp, Artificial Sequence
  Synthetic oligonucleotide; CTG chr11 5389339 5389360 5389344 5389339 -
gttattaattcttcagcttcac

SEQ ID NO: 114372 - DNA, 22 bp, Artificial Sequence
  Synthetic oligonucleotide; TTA chr11 5389335 5389356 5389340 5389335 -
ttaattcttcagcttcactaac

SEQ ID NO: 114373 - DNA, 22 bp, Artificial Sequence
  Synthetic oligonucleotide; TTA chr11 5389332 5389353 5389337 5389332 -
attcttcagcttcactaacatt

SEQ ID NO: 114374 - DNA, 22 bp, Artificial Sequence
  Synthetic oligonucleotide; TTC chr11 5389328 5389349 5389333 5389328 -
ttcagcttcactaacattcaca

SEQ ID NO: 114375 - DNA, 22 bp, Artificial Sequence
  Synthetic oligonucleotide; CTT chr11 5389326 5389347 5389331 5389326 -
cagcttcactaacattcacaac

SEQ ID NO: 114376 - DNA, 22 bp, Artificial Sequence
  Synthetic oligonucleotide; TTC chr11 5389325 5389346 5389330 5389325 -
agcttcactaacattcacaaca

SEQ ID NO: 114377 - DNA, 22 bp, Artificial Sequence
  Synthetic oligonucleotide; CTT chr11 5389320 5389341 5389325 5389320 -
cactaacattcacaacatcaca

SEQ ID NO: 114378 - DNA, 22 bp, Artificial Sequence
  Synthetic oligonucleotide; TTC chr11 5389319 5389340 5389324 5389319 -
actaacattcacaacatcacaa

SEQ ID NO: 114379 - DNA, 22 bp, Artificial Sequence
  Synthetic oligonucleotide; CTA chr11 5389315 5389336 5389320 5389315 -
acattcacaacatcacaagcag

SEQ ID NO: 114380 - DNA, 22 bp, Artificial Sequence
  Synthetic oligonucleotide; TTC chr11 5389309 5389330 5389314 5389309 -
acaacatcacaagcagtaccat

SEQ ID NO: 114381 - DNA, 22 bp, Artificial Sequence
  Synthetic oligonucleotide; CTT chr11 5389272 5389293 5389277 5389272 -
tagtattatctactccaccctt

SEQ ID NO: 114382 - DNA, 22 bp, Artificial Sequence
  Synthetic oligonucleotide; TTT chr11 5389271 5389292 5389276 5389271 -
agtattatctactccaccctta

SEQ ID NO: 114383 - DNA, 22 bp, Artificial Sequence
  Synthetic oligonucleotide; TTA chr11 5389270 5389291 5389275 5389270 -
gtattatctactccacccttat

SEQ ID NO: 114384 - DNA, 22 bp, Artificial Sequence
  Synthetic oligonucleotide; TTA chr11 5389264 5389285 5389269 5389264 -
tctactccacccttatgaattc

SEQ ID NO: 114385 - DNA, 22 bp, Artificial Sequence
  Synthetic oligonucleotide; CTA chr11 5389260 5389281 5389265 5389260 -
ctccacccttatgaattctgcc

SEQ ID NO: 114386 - DNA, 22 bp, Artificial Sequence
  Synthetic oligonucleotide; CTC chr11 5389257 5389278 5389262 5389257 -
cacccttatgaattctgccaat

SEQ ID NO: 114387 - DNA, 22 bp, Artificial Sequence
  Synthetic oligonucleotide; CTT chr11 5389250 5389271 5389255 5389250 -
atgaattctgccaatctcacta

SEQ ID NO: 114388 - DNA, 22 bp, Artificial Sequence
  Synthetic oligonucleotide; TTA chr11 5389249 5389270 5389254 5389249 -
tgaattctgccaatctcactac

SEQ ID NO: 114389 - DNA, 22 bp, Artificial Sequence
  Synthetic oligonucleotide; TTC chr11 5389242 5389263 5389247 5389242 -
tgccaatctcactactttattg

SEQ ID NO: 114390 - DNA, 22 bp, Artificial Sequence
  Synthetic oligonucleotide; CTG chr11 5389240 5389261 5389245 5389240 -
ccaatctcactactttattgaa

SEQ ID NO: 114391 - DNA, 22 bp, Artificial Sequence
  Synthetic oligonucleotide; CTC chr11 5389232 5389253 5389237 5389232 -
actactttattgaactttcttt

SEQ ID NO: 114392 - DNA, 22 bp, Artificial Sequence
  Synthetic oligonucleotide; CTA chr11 5389228 5389249 5389233 5389228 -
ctttattgaactttctttgata

SEQ ID NO: 114393 - DNA, 22 bp, Artificial Sequence
  Synthetic oligonucleotide; CTT chr11 5389225 5389246 5389230 5389225 -
tattgaactttctttgataacc

SEQ ID NO: 114394 - DNA, 22 bp, Artificial Sequence
  Synthetic oligonucleotide; TTT chr11 5389224 5389245 5389229 5389224 -
attgaactttctttgataacct

SEQ ID NO: 114395 - DNA, 22 bp, Artificial Sequence
  Synthetic oligonucleotide; TTA chr11 5389223 5389244 5389228 5389223 -
ttgaactttctttgataacctc

SEQ ID NO: 114396 - DNA, 22 bp, Artificial Sequence
  Synthetic oligonucleotide; TTG chr11 5389220 5389241 5389225 5389220 -
aactttctttgataacctcgcc

SEQ ID NO: 114397 - DNA, 22 bp, Artificial Sequence
  Synthetic oligonucleotide; CTT chr11 5389215 5389236 5389220 5389215 -
tctttgataacctcgccctcac

SEQ ID NO: 114398 - DNA, 22 bp, Artificial Sequence
  Synthetic oligonucleotide; TTT chr11 5389214 5389235 5389219 5389214 -
ctttgataacctcgccctcacc

SEQ ID NO: 114399 - DNA, 22 bp, Artificial Sequence
  Synthetic oligonucleotide; TTC chr11 5389213 5389234 5389218 5389213 -
tttgataacctcgccctcacca

SEQ ID NO: 114400 - DNA, 22 bp, Artificial Sequence
  Synthetic oligonucleotide; CTT chr11 5389211 5389232 5389216 5389211 -
tgataacctcgccctcaccagt

SEQ ID NO: 114401 - DNA, 22 bp, Artificial Sequence
  Synthetic oligonucleotide; TTT chr11 5389210 5389231 5389215 5389210 -
gataacctcgccctcaccagtt

SEQ ID NO: 114402 - DNA, 22 bp, Artificial Sequence
  Synthetic oligonucleotide; TTG chr11 5389209 5389230 5389214 5389209 -
ataacctcgccctcaccagttt

SEQ ID NO: 114403 - DNA, 22 bp, Artificial Sequence
  Synthetic oligonucleotide; CTC chr11 5389201 5389222 5389206 5389201 -
gccctcaccagttttcctctgt

SEQ ID NO: 114404 - DNA, 22 bp, Artificial Sequence
  Synthetic oligonucleotide; CTC chr11 5389195 5389216 5389200 5389195 -
accagttttcctctgtatttca

SEQ ID NO: 114405 - DNA, 22 bp, Artificial Sequence
  Synthetic oligonucleotide; TTT chr11 5389187 5389208 5389192 5389187 -
tcctctgtatttcaattatttc

SEQ ID NO: 114406 - DNA, 22 bp, Artificial Sequence
  Synthetic oligonucleotide; TTT chr11 5389186 5389207 5389191 5389186 -
cctctgtatttcaattatttca

SEQ ID NO: 114407 - DNA, 22 bp, Artificial Sequence
  Synthetic oligonucleotide; TTC chr11 5389185 5389206 5389190 5389185 -
ctctgtatttcaattatttcag

SEQ ID NO: 114408 - DNA, 22 bp, Artificial Sequence
  Synthetic oligonucleotide; CTC chr11 5389182 5389203 5389187 5389182 -
tgtatttcaattatttcagttc

SEQ ID NO: 114409 - DNA, 22 bp, Artificial Sequence
  Synthetic oligonucleotide; CTG chr11 5389180 5389201 5389185 5389180 -
tatttcaattatttcagttcct

SEQ ID NO: 114410 - DNA, 22 bp, Artificial Sequence
  Synthetic oligonucleotide; TTT chr11 5389175 5389196 5389180 5389175 -
caattatttcagttcctctctg

SEQ ID NO: 114411 - DNA, 22 bp, Artificial Sequence
  Synthetic oligonucleotide; TTC chr11 5389174 5389195 5389179 5389174 -
aattatttcagttcctctctgc

SEQ ID NO: 114412 - DNA, 22 bp, Artificial Sequence
  Synthetic oligonucleotide; TTA chr11 5389169 5389190 5389174 5389169 -
tttcagttcctctctgcctctt

SEQ ID NO: 114413 - DNA, 22 bp, Artificial Sequence
  Synthetic oligonucleotide; TTT chr11 5389166 5389187 5389171 5389166 -
cagttcctctctgcctctttgc

SEQ ID NO: 114414 - DNA, 22 bp, Artificial Sequence
  Synthetic oligonucleotide; TTC chr11 5389165 5389186 5389170 5389165 -
agttcctctctgcctctttgct

SEQ ID NO: 114415 - DNA, 22 bp, Artificial Sequence
  Synthetic oligonucleotide; TTC chr11 5389160 5389181 5389165 5389160 -
ctctctgcctctttgctggtgt

SEQ ID NO: 114416 - DNA, 22 bp, Artificial Sequence
  Synthetic oligonucleotide; CTC chr11 5389157 5389178 5389162 5389157 -
tctgcctctttgctggtgtgcc

SEQ ID NO: 114417 - DNA, 22 bp, Artificial Sequence
  Synthetic oligonucleotide; CTC chr11 5389155 5389176 5389160 5389155 -
tgcctctttgctggtgtgcctt

SEQ ID NO: 114418 - DNA, 22 bp, Artificial Sequence
  Synthetic oligonucleotide; CTG chr11 5389153 5389174 5389158 5389153 -
cctctttgctggtgtgccttta

SEQ ID NO: 114419 - DNA, 22 bp, Artificial Sequence
  Synthetic oligonucleotide; CTC chr11 5389149 5389170 5389154 5389149 -
tttgctggtgtgcctttattgc

SEQ ID NO: 114420 - DNA, 22 bp, Artificial Sequence
  Synthetic oligonucleotide; CTT chr11 5389147 5389168 5389152 5389147 -
tgctggtgtgcctttattgctc

SEQ ID NO: 114421 - DNA, 22 bp, Artificial Sequence
  Synthetic oligonucleotide; TTT chr11 5389146 5389167 5389151 5389146 -
gctggtgtgcctttattgctca

SEQ ID NO: 114422 - DNA, 22 bp, Artificial Sequence
  Synthetic oligonucleotide; TTG chr11 5389145 5389166 5389150 5389145 -
ctggtgtgcctttattgctcaa

SEQ ID NO: 114423 - DNA, 22 bp, Artificial Sequence
  Synthetic oligonucleotide; CTG chr11 5389142 5389163 5389147 5389142 -
gtgtgcctttattgctcaaccc

SEQ ID NO: 114424 - DNA, 22 bp, Artificial Sequence
  Synthetic oligonucleotide; CTT chr11 5389133 5389154 5389138 5389133 -
tattgctcaacccttaagtata

SEQ ID NO: 114425 - DNA, 22 bp, Artificial Sequence
  Synthetic oligonucleotide; TTT chr11 5389132 5389153 5389137 5389132 -
attgctcaacccttaagtatag

SEQ ID NO: 114426 - DNA, 22 bp, Artificial Sequence
  Synthetic oligonucleotide; TTA chr11 5389131 5389152 5389136 5389131 -
ttgctcaacccttaagtatagt

SEQ ID NO: 114427 - DNA, 22 bp, Artificial Sequence
  Synthetic oligonucleotide; TTG chr11 5389128 5389149 5389133 5389128 -
ctcaacccttaagtatagttct

SEQ ID NO: 114428 - DNA, 22 bp, Artificial Sequence
  Synthetic oligonucleotide; CTC chr11 5389125 5389146 5389130 5389125 -
aacccttaagtatagttcttcc

SEQ ID NO: 114429 - DNA, 22 bp, Artificial Sequence
  Synthetic oligonucleotide; CTT chr11 5389118 5389139 5389123 5389118 -
aagtatagttcttcccatcctt

SEQ ID NO: 114430 - DNA, 22 bp, Artificial Sequence
  Synthetic oligonucleotide; TTA chr11 5389117 5389138 5389122 5389117 -
agtatagttcttcccatccttg

SEQ ID NO: 114431 - DNA, 22 bp, Artificial Sequence
  Synthetic oligonucleotide; TTC chr11 5389107 5389128 5389112 5389107 -
ttcccatccttggcaatttcct

SEQ ID NO: 114432 - DNA, 22 bp, Artificial Sequence
  Synthetic oligonucleotide; CTT chr11 5389105 5389126 5389110 5389105 -
cccatccttggcaatttcctgg

SEQ ID NO: 114433 - DNA, 22 bp, Artificial Sequence
  Synthetic oligonucleotide; TTC chr11 5389104 5389125 5389109 5389104 -
ccatccttggcaatttcctggc

SEQ ID NO: 114434 - DNA, 22 bp, Artificial Sequence
  Synthetic oligonucleotide; CTT chr11 5389096 5389117 5389101 5389096 -
ggcaatttcctggccatattct

SEQ ID NO: 114435 - DNA, 22 bp, Artificial Sequence
  Synthetic oligonucleotide; TTG chr11 5389095 5389116 5389100 5389095 -
gcaatttcctggccatattcta

SEQ ID NO: 114436 - DNA, 22 bp, Artificial Sequence
  Synthetic oligonucleotide; TTT chr11 5389088 5389109 5389093 5389088 -
cctggccatattctattatttc

SEQ ID NO: 114437 - DNA, 22 bp, Artificial Sequence
  Synthetic oligonucleotide; TTC chr11 5389087 5389108 5389092 5389087 -
ctggccatattctattatttct

SEQ ID NO: 114438 - DNA, 22 bp, Artificial Sequence
  Synthetic oligonucleotide; CTG chr11 5389084 5389105 5389089 5389084 -
gccatattctattatttcttct

SEQ ID NO: 114439 - DNA, 22 bp, Artificial Sequence
  Synthetic oligonucleotide; TTC chr11 5389075 5389096 5389080 5389075 -
tattatttcttcttaatgtcat

SEQ ID NO: 114440 - DNA, 22 bp, Artificial Sequence
  Synthetic oligonucleotide; CTA chr11 5389073 5389094 5389078 5389073 -
ttatttcttcttaatgtcatcc

SEQ ID NO: 114441 - DNA, 22 bp, Artificial Sequence
  Synthetic oligonucleotide; TTA chr11 5389070 5389091 5389075 5389070 -
tttcttcttaatgtcatccact

SEQ ID NO: 114442 - DNA, 22 bp, Artificial Sequence
  Synthetic oligonucleotide; TTT chr11 5389067 5389088 5389072 5389067 -
cttcttaatgtcatccactacc

SEQ ID NO: 114443 - DNA, 22 bp, Artificial Sequence
  Synthetic oligonucleotide; TTC chr11 5389066 5389087 5389071 5389066 -
ttcttaatgtcatccactacca

SEQ ID NO: 114444 - DNA, 22 bp, Artificial Sequence
  Synthetic oligonucleotide; CTT chr11 5389064 5389085 5389069 5389064 -
cttaatgtcatccactaccatg

SEQ ID NO: 114445 - DNA, 22 bp, Artificial Sequence
  Synthetic oligonucleotide; TTC chr11 5389063 5389084 5389068 5389063 -
ttaatgtcatccactaccatga

SEQ ID NO: 114446 - DNA, 22 bp, Artificial Sequence
  Synthetic oligonucleotide; CTT chr11 5389061 5389082 5389066 5389061 -
aatgtcatccactaccatgatt

SEQ ID NO: 114447 - DNA, 22 bp, Artificial Sequence
  Synthetic oligonucleotide; TTA chr11 5389060 5389081 5389065 5389060 -
atgtcatccactaccatgattt

SEQ ID NO: 114448 - DNA, 22 bp, Artificial Sequence
  Synthetic oligonucleotide; CTA chr11 5389047 5389068 5389052 5389047 -
ccatgatttcatttaccatcca

SEQ ID NO: 114449 - DNA, 22 bp, Artificial Sequence
  Synthetic oligonucleotide; TTT chr11 5389038 5389059 5389043 5389038 -
catttaccatccatatattgat

SEQ ID NO: 114450 - DNA, 22 bp, Artificial Sequence
  Synthetic oligonucleotide; TTC chr11 5389037 5389058 5389042 5389037 -
atttaccatccatatattgata

SEQ ID NO: 114451 - DNA, 22 bp, Artificial Sequence
  Synthetic oligonucleotide; TTT chr11 5389033 5389054 5389038 5389033 -
accatccatatattgataaata

SEQ ID NO: 114452 - DNA, 22 bp, Artificial Sequence
  Synthetic oligonucleotide; TTA chr11 5389032 5389053 5389037 5389032 -
ccatccatatattgataaataa

SEQ ID NO: 114453 - DNA, 22 bp, Artificial Sequence
  Synthetic oligonucleotide; TTG chr11 5389018 5389039 5389023 5389018 -
ataaataacaaatatataattc

SEQ ID NO: 114454 - DNA, 22 bp, Artificial Sequence
  Synthetic oligonucleotide; TTC chr11 5388996 5389017 5389001 5388996 -
cagaacttgtctttctctcttt

SEQ ID NO: 114455 - DNA, 22 bp, Artificial Sequence
  Synthetic oligonucleotide; CTT chr11 5388988 5389009 5388993 5388988 -
gtctttctctcttttgatttcc

SEQ ID NO: 114456 - DNA, 22 bp, Artificial Sequence
  Synthetic oligonucleotide; TTG chr11 5388987 5389008 5388992 5388987 -
tctttctctcttttgatttcca

SEQ ID NO: 114457 - DNA, 22 bp, Artificial Sequence
  Synthetic oligonucleotide; CTT chr11 5388983 5389004 5388988 5388983 -
tctctcttttgatttccagact

SEQ ID NO: 114458 - DNA, 22 bp, Artificial Sequence
  Synthetic oligonucleotide; TTT chr11 5388982 5389003 5388987 5388982 -
ctctcttttgatttccagactc

SEQ ID NO: 114459 - DNA, 22 bp, Artificial Sequence
  Synthetic oligonucleotide; TTC chr11 5388981 5389002 5388986 5388981 -
tctcttttgatttccagactct

SEQ ID NO: 114460 - DNA, 22 bp, Artificial Sequence
  Synthetic oligonucleotide; CTC chr11 5388979 5389000 5388984 5388979 -
tcttttgatttccagactctag

SEQ ID NO: 114461 - DNA, 22 bp, Artificial Sequence
  Synthetic oligonucleotide; CTC chr11 5388977 5388998 5388982 5388977 -
ttttgatttccagactctagca

SEQ ID NO: 114462 - DNA, 22 bp, Artificial Sequence
  Synthetic oligonucleotide; CTT chr11 5388975 5388996 5388980 5388975 -
ttgatttccagactctagcaac

SEQ ID NO: 114463 - DNA, 22 bp, Artificial Sequence
  Synthetic oligonucleotide; TTT chr11 5388974 5388995 5388979 5388974 -
tgatttccagactctagcaaca

SEQ ID NO: 114464 - DNA, 22 bp, Artificial Sequence
  Synthetic oligonucleotide; TTT chr11 5388973 5388994 5388978 5388973 -
gatttccagactctagcaacat

SEQ ID NO: 114465 - DNA, 22 bp, Artificial Sequence
  Synthetic oligonucleotide; TTG chr11 5388972 5388993 5388977 5388972 -
atttccagactctagcaacatc

SEQ ID NO: 114466 - DNA, 22 bp, Artificial Sequence
  Synthetic oligonucleotide; TTT chr11 5388968 5388989 5388973 5388968 -
ccagactctagcaacatctgta

SEQ ID NO: 114467 - DNA, 22 bp, Artificial Sequence
  Synthetic oligonucleotide; TTC chr11 5388967 5388988 5388972 5388967 -
cagactctagcaacatctgtac

SEQ ID NO: 114468 - DNA, 22 bp, Artificial Sequence
  Synthetic oligonucleotide; CTC chr11 5388960 5388981 5388965 5388960 -
tagcaacatctgtacttttcat

SEQ ID NO: 114469 - DNA, 22 bp, Artificial Sequence
  Synthetic oligonucleotide; CTA chr11 5388958 5388979 5388963 5388958 -
gcaacatctgtacttttcatta

SEQ ID NO: 114470 - DNA, 22 bp, Artificial Sequence
  Synthetic oligonucleotide; CTG chr11 5388948 5388969 5388953 5388948 -
tacttttcattatctcagtggc

SEQ ID NO: 114471 - DNA, 22 bp, Artificial Sequence
  Synthetic oligonucleotide; CTT chr11 5388943 5388964 5388948 5388943 -
ttcattatctcagtggctcaag

SEQ ID NO: 114472 - DNA, 22 bp, Artificial Sequence
  Synthetic oligonucleotide; TTT chr11 5388942 5388963 5388947 5388942 -
tcattatctcagtggctcaagt

SEQ ID NO: 114473 - DNA, 22 bp, Artificial Sequence
  Synthetic oligonucleotide; TTT chr11 5388941 5388962 5388946 5388941 -
cattatctcagtggctcaagtc

SEQ ID NO: 114474 - DNA, 22 bp, Artificial Sequence
  Synthetic oligonucleotide; TTC chr11 5388940 5388961 5388945 5388940 -
attatctcagtggctcaagtca

SEQ ID NO: 114475 - DNA, 22 bp, Artificial Sequence
  Synthetic oligonucleotide; TTA chr11 5388936 5388957 5388941 5388936 -
tctcagtggctcaagtcaaatg

SEQ ID NO: 114476 - DNA, 22 bp, Artificial Sequence
  Synthetic oligonucleotide; CTC chr11 5388932 5388953 5388937 5388932 -
agtggctcaagtcaaatgtcat

SEQ ID NO: 114477 - DNA, 22 bp, Artificial Sequence
  Synthetic oligonucleotide; CTC chr11 5388924 5388945 5388929 5388924 -
aagtcaaatgtcatgttttatg

SEQ ID NO: 114478 - DNA, 22 bp, Artificial Sequence
  Synthetic oligonucleotide; TTT chr11 5388906 5388927 5388911 5388906 -
tatgttagacttctccatatca

SEQ ID NO: 114479 - DNA, 22 bp, Artificial Sequence
  Synthetic oligonucleotide; TTT chr11 5388905 5388926 5388910 5388905 -
atgttagacttctccatatcac

SEQ ID NO: 114480 - DNA, 22 bp, Artificial Sequence
  Synthetic oligonucleotide; TTA chr11 5388904 5388925 5388909 5388904 -
tgttagacttctccatatcaca

SEQ ID NO: 114481 - DNA, 22 bp, Artificial Sequence
  Synthetic oligonucleotide; TTA chr11 5388899 5388920 5388904 5388899 -
gacttctccatatcacatctct

SEQ ID NO: 114482 - DNA, 22 bp, Artificial Sequence
  Synthetic oligonucleotide; CTT chr11 5388894 5388915 5388899 5388894 -
ctccatatcacatctctccata

SEQ ID NO: 114483 - DNA, 22 bp, Artificial Sequence
  Synthetic oligonucleotide; TTC chr11 5388893 5388914 5388898 5388893 -
tccatatcacatctctccatag

SEQ ID NO: 114484 - DNA, 22 bp, Artificial Sequence
  Synthetic oligonucleotide; CTC chr11 5388891 5388912 5388896 5388891 -
catatcacatctctccatagta

SEQ ID NO: 114485 - DNA, 22 bp, Artificial Sequence
  Synthetic oligonucleotide; CTC chr11 5388878 5388899 5388883 5388878 -
tccatagtatctaatcaaccaa

SEQ ID NO: 114486 - DNA, 22 bp, Artificial Sequence
  Synthetic oligonucleotide; CTC chr11 5388876 5388897 5388881 5388876 -
catagtatctaatcaaccaatc

SEQ ID NO: 114487 - DNA, 22 bp, Artificial Sequence
  Synthetic oligonucleotide; CTA chr11 5388865 5388886 5388870 5388865 -
atcaaccaatcaccaagtccta

SEQ ID NO: 114488 - DNA, 22 bp, Artificial Sequence
  Synthetic oligonucleotide; CTA chr11 5388843 5388864 5388848 5388843 -
gggtttctgtttactgaatacc

SEQ ID NO: 114489 - DNA, 22 bp, Artificial Sequence
  Synthetic oligonucleotide; TTT chr11 5388837 5388858 5388842 5388837 -
ctgtttactgaatacctcaagt

SEQ ID NO: 114490 - DNA, 22 bp, Artificial Sequence
  Synthetic oligonucleotide; TTC chr11 5388836 5388857 5388841 5388836 -
tgtttactgaatacctcaagtc

SEQ ID NO: 114491 - DNA, 22 bp, Artificial Sequence
  Synthetic oligonucleotide; CTG chr11 5388834 5388855 5388839 5388834 -
tttactgaatacctcaagtctg

SEQ ID NO: 114492 - DNA, 22 bp, Artificial Sequence
  Synthetic oligonucleotide; TTT chr11 5388831 5388852 5388836 5388831 -
actgaatacctcaagtctgttt

SEQ ID NO: 114493 - DNA, 22 bp, Artificial Sequence
  Synthetic oligonucleotide; TTA chr11 5388830 5388851 5388835 5388830 -
ctgaatacctcaagtctgttta

SEQ ID NO: 114494 - DNA, 22 bp, Artificial Sequence
  Synthetic oligonucleotide; CTG chr11 5388827 5388848 5388832 5388827 -
aatacctcaagtctgtttactc

SEQ ID NO: 114495 - DNA, 22 bp, Artificial Sequence
  Synthetic oligonucleotide; CTC chr11 5388819 5388840 5388824 5388819 -
aagtctgtttactcaccgtcac

SEQ ID NO: 114496 - DNA, 22 bp, Artificial Sequence
  Synthetic oligonucleotide; CTG chr11 5388812 5388833 5388817 5388812 -
tttactcaccgtcaccttcatt

SEQ ID NO: 114497 - DNA, 22 bp, Artificial Sequence
  Synthetic oligonucleotide; TTT chr11 5388809 5388830 5388814 5388809 -
actcaccgtcaccttcattgat

SEQ ID NO: 114498 - DNA, 22 bp, Artificial Sequence
  Synthetic oligonucleotide; TTA chr11 5388808 5388829 5388813 5388808 -
ctcaccgtcaccttcattgatg

SEQ ID NO: 114499 - DNA, 22 bp, Artificial Sequence
  Synthetic oligonucleotide; CTC chr11 5388805 5388826 5388810 5388805 -
accgtcaccttcattgatgcta

SEQ ID NO: 114500 - DNA, 22 bp, Artificial Sequence
  Synthetic oligonucleotide; CTT chr11 5388794 5388815 5388799 5388794 -
cattgatgctattctaattcag

SEQ ID NO: 114501 - DNA, 22 bp, Artificial Sequence
  Synthetic oligonucleotide; TTC chr11 5388793 5388814 5388798 5388793 -
attgatgctattctaattcaga

SEQ ID NO: 114502 - DNA, 22 bp, Artificial Sequence
  Synthetic oligonucleotide; TTG chr11 5388789 5388810 5388794 5388789 -
atgctattctaattcagatcac

SEQ ID NO: 114503 - DNA, 22 bp, Artificial Sequence
  Synthetic oligonucleotide; CTA chr11 5388783 5388804 5388788 5388783 -
ttctaattcagatcactctttc

SEQ ID NO: 114504 - DNA, 22 bp, Artificial Sequence
  Synthetic oligonucleotide; TTC chr11 5388780 5388801 5388785 5388780 -
taattcagatcactctttcagg

SEQ ID NO: 114505 - DNA, 22 bp, Artificial Sequence
  Synthetic oligonucleotide; CTA chr11 5388778 5388799 5388783 5388778 -
attcagatcactctttcaggac

SEQ ID NO: 114506 - DNA, 22 bp, Artificial Sequence
  Synthetic oligonucleotide; TTC chr11 5388774 5388795 5388779 5388774 -
agatcactctttcaggactatt

SEQ ID NO: 114507 - DNA, 22 bp, Artificial Sequence
  Synthetic oligonucleotide; CTC chr11 5388765 5388786 5388770 5388765 -
tttcaggactattccagtgact

SEQ ID NO: 114508 - DNA, 22 bp, Artificial Sequence
  Synthetic oligonucleotide; CTT chr11 5388763 5388784 5388768 5388763 -
tcaggactattccagtgactca

SEQ ID NO: 114509 - DNA, 22 bp, Artificial Sequence
  Synthetic oligonucleotide; TTT chr11 5388762 5388783 5388767 5388762 -
caggactattccagtgactcat

SEQ ID NO: 114510 - DNA, 22 bp, Artificial Sequence
  Synthetic oligonucleotide; TTC chr11 5388761 5388782 5388766 5388761 -
aggactattccagtgactcatc

SEQ ID NO: 114511 - DNA, 22 bp, Artificial Sequence
  Synthetic oligonucleotide; CTA chr11 5388754 5388775 5388759 5388754 -
ttccagtgactcatcttttgta

SEQ ID NO: 114512 - DNA, 22 bp, Artificial Sequence
  Synthetic oligonucleotide; TTC chr11 5388751 5388772 5388756 5388751 -
cagtgactcatcttttgtacta

SEQ ID NO: 114513 - DNA, 22 bp, Artificial Sequence
  Synthetic oligonucleotide; CTC chr11 5388742 5388763 5388747 5388742 -
atcttttgtactactgtattca

SEQ ID NO: 114514 - DNA, 22 bp, Artificial Sequence
  Synthetic oligonucleotide; CTT chr11 5388737 5388758 5388742 5388737 -
ttgtactactgtattcagttga

SEQ ID NO: 114515 - DNA, 22 bp, Artificial Sequence
  Synthetic oligonucleotide; TTT chr11 5388736 5388757 5388741 5388736 -
tgtactactgtattcagttgac

SEQ ID NO: 114516 - DNA, 22 bp, Artificial Sequence
  Synthetic oligonucleotide; TTT chr11 5388735 5388756 5388740 5388735 -
gtactactgtattcagttgact

SEQ ID NO: 114517 - DNA, 22 bp, Artificial Sequence
  Synthetic oligonucleotide; TTG chr11 5388734 5388755 5388739 5388734 -
tactactgtattcagttgacta

SEQ ID NO: 114518 - DNA, 22 bp, Artificial Sequence
  Synthetic oligonucleotide; CTA chr11 5388729 5388750 5388734 5388729 -
ctgtattcagttgactactata

SEQ ID NO: 114519 - DNA, 22 bp, Artificial Sequence
  Synthetic oligonucleotide; CTG chr11 5388726 5388747 5388731 5388726 -
tattcagttgactactatatag

SEQ ID NO: 114520 - DNA, 22 bp, Artificial Sequence
  Synthetic oligonucleotide; TTC chr11 5388721 5388742 5388726 5388721 -
agttgactactatatagcaaga

SEQ ID NO: 114521 - DNA, 22 bp, Artificial Sequence
  Synthetic oligonucleotide; TTG chr11 5388716 5388737 5388721 5388716 -
actactatatagcaagagagac

SEQ ID NO: 114522 - DNA, 22 bp, Artificial Sequence
  Synthetic oligonucleotide; CTA chr11 5388712 5388733 5388717 5388712 -
ctatatagcaagagagacgtat

SEQ ID NO: 114523 - DNA, 22 bp, Artificial Sequence
  Synthetic oligonucleotide; CTA chr11 5388709 5388730 5388714 5388709 -
tatagcaagagagacgtataca

SEQ ID NO: 114524 - DNA, 22 bp, Artificial Sequence
  Synthetic oligonucleotide; TTT chr11 5388676 5388697 5388681 5388676 -
ttaatgaagtaaaaaaggttta

SEQ ID NO: 114525 - DNA, 22 bp, Artificial Sequence
  Synthetic oligonucleotide; TTT chr11 5388675 5388696 5388680 5388675 -
taatgaagtaaaaaaggtttaa

SEQ ID NO: 114526 - DNA, 22 bp, Artificial Sequence
  Synthetic oligonucleotide; TTT chr11 5388674 5388695 5388679 5388674 -
aatgaagtaaaaaaggtttaaa

SEQ ID NO: 114527 - DNA, 22 bp, Artificial Sequence
  Synthetic oligonucleotide; TTA chr11 5388673 5388694 5388678 5388673 -
atgaagtaaaaaaggtttaaaa

SEQ ID NO: 114528 - DNA, 22 bp, Artificial Sequence
  Synthetic oligonucleotide; TTT chr11 5388655 5388676 5388660 5388655 -
aaaatgacattcaagaccctac

SEQ ID NO: 114529 - DNA, 22 bp, Artificial Sequence
  Synthetic oligonucleotide; TTA chr11 5388654 5388675 5388659 5388654 -
aaatgacattcaagaccctacc

SEQ ID NO: 114530 - DNA, 22 bp, Artificial Sequence
  Synthetic oligonucleotide; TTC chr11 5388643 5388664 5388648 5388643 -
aagaccctaccttattttctct

SEQ ID NO: 114531 - DNA, 22 bp, Artificial Sequence
  Synthetic oligonucleotide; CTA chr11 5388634 5388655 5388639 5388634 -
ccttattttctctccgtgtata

SEQ ID NO: 114532 - DNA, 22 bp, Artificial Sequence
  Synthetic oligonucleotide; CTT chr11 5388630 5388651 5388635 5388630 -
attttctctccgtgtatatcct

SEQ ID NO: 114533 - DNA, 22 bp, Artificial Sequence
  Synthetic oligonucleotide; TTA chr11 5388629 5388650 5388634 5388629 -
ttttctctccgtgtatatccta

SEQ ID NO: 114534 - DNA, 22 bp, Artificial Sequence
  Synthetic oligonucleotide; TTT chr11 5388626 5388647 5388631 5388626 -
tctctccgtgtatatcctattt

SEQ ID NO: 114535 - DNA, 22 bp, Artificial Sequence
  Synthetic oligonucleotide; TTT chr11 5388625 5388646 5388630 5388625 -
ctctccgtgtatatcctatttt

SEQ ID NO: 114536 - DNA, 22 bp, Artificial Sequence
  Synthetic oligonucleotide; TTC chr11 5388624 5388645 5388629 5388624 -
tctccgtgtatatcctattttc

SEQ ID NO: 114537 - DNA, 22 bp, Artificial Sequence
  Synthetic oligonucleotide; CTC chr11 5388622 5388643 5388627 5388622 -
tccgtgtatatcctattttctt

SEQ ID NO: 114538 - DNA, 22 bp, Artificial Sequence
  Synthetic oligonucleotide; CTC chr11 5388620 5388641 5388625 5388620 -
cgtgtatatcctattttcttat

SEQ ID NO: 114539 - DNA, 22 bp, Artificial Sequence
  Synthetic oligonucleotide; CTA chr11 5388607 5388628 5388612 5388607 -
ttttcttatctatcctaatttc

SEQ ID NO: 114540 - DNA, 22 bp, Artificial Sequence
  Synthetic oligonucleotide; TTT chr11 5388604 5388625 5388609 5388604 -
tcttatctatcctaatttcctc

SEQ ID NO: 114541 - DNA, 22 bp, Artificial Sequence
  Synthetic oligonucleotide; TTT chr11 5388603 5388624 5388608 5388603 -
cttatctatcctaatttcctct

SEQ ID NO: 114542 - DNA, 22 bp, Artificial Sequence
  Synthetic oligonucleotide; TTC chr11 5388602 5388623 5388607 5388602 -
ttatctatcctaatttcctctg

SEQ ID NO: 114543 - DNA, 22 bp, Artificial Sequence
  Synthetic oligonucleotide; CTT chr11 5388600 5388621 5388605 5388600 -
atctatcctaatttcctctgta

SEQ ID NO: 114544 - DNA, 22 bp, Artificial Sequence
  Synthetic oligonucleotide; TTA chr11 5388599 5388620 5388604 5388599 -
tctatcctaatttcctctgtat

SEQ ID NO: 114545 - DNA, 22 bp, Artificial Sequence
  Synthetic oligonucleotide; CTA chr11 5388595 5388616 5388600 5388595 -
tcctaatttcctctgtatattc

SEQ ID NO: 114546 - DNA, 22 bp, Artificial Sequence
  Synthetic oligonucleotide; CTA chr11 5388590 5388611 5388595 5388590 -
atttcctctgtatattcacggt

SEQ ID NO: 114547 - DNA, 22 bp, Artificial Sequence
  Synthetic oligonucleotide; TTT chr11 5388586 5388607 5388591 5388586 -
cctctgtatattcacggtgtta

SEQ ID NO: 114548 - DNA, 22 bp, Artificial Sequence
  Synthetic oligonucleotide; TTC chr11 5388585 5388606 5388590 5388585 -
ctctgtatattcacggtgttaa

SEQ ID NO: 114549 - DNA, 22 bp, Artificial Sequence
  Synthetic oligonucleotide; CTC chr11 5388582 5388603 5388587 5388582 -
tgtatattcacggtgttaatga

SEQ ID NO: 114550 - DNA, 22 bp, Artificial Sequence
  Synthetic oligonucleotide; CTG chr11 5388580 5388601 5388585 5388580 -
tatattcacggtgttaatgaca

SEQ ID NO: 114551 - DNA, 22 bp, Artificial Sequence
  Synthetic oligonucleotide; TTC chr11 5388573 5388594 5388578 5388573 -
acggtgttaatgacactaaaca

SEQ ID NO: 114552 - DNA, 22 bp, Artificial Sequence
  Synthetic oligonucleotide; TTA chr11 5388564 5388585 5388569 5388564 -
atgacactaaacaattcttcca

SEQ ID NO: 114553 - DNA, 22 bp, Artificial Sequence
  Synthetic oligonucleotide; CTA chr11 5388555 5388576 5388560 5388555 -
aacaattcttccagtttatcta

SEQ ID NO: 114554 - DNA, 22 bp, Artificial Sequence
  Synthetic oligonucleotide; TTC chr11 5388547 5388568 5388552 5388547 -
ttccagtttatctagtatgctt

SEQ ID NO: 114555 - DNA, 22 bp, Artificial Sequence
  Synthetic oligonucleotide; CTT chr11 5388545 5388566 5388550 5388545 -
ccagtttatctagtatgcttgc

SEQ ID NO: 114556 - DNA, 22 bp, Artificial Sequence
  Synthetic oligonucleotide; TTC chr11 5388544 5388565 5388549 5388544 -
cagtttatctagtatgcttgct

SEQ ID NO: 114557 - DNA, 22 bp, Artificial Sequence
  Synthetic oligonucleotide; TTT chr11 5388538 5388559 5388543 5388538 -
atctagtatgcttgctcatagg

SEQ ID NO: 114558 - DNA, 22 bp, Artificial Sequence
  Synthetic oligonucleotide; TTA chr11 5388537 5388558 5388542 5388537 -
tctagtatgcttgctcataggt

SEQ ID NO: 114559 - DNA, 22 bp, Artificial Sequence
  Synthetic oligonucleotide; CTA chr11 5388533 5388554 5388538 5388533 -
gtatgcttgctcataggtaaac

SEQ ID NO: 114560 - DNA, 22 bp, Artificial Sequence
  Synthetic oligonucleotide; CTT chr11 5388525 5388546 5388530 5388525 -
gctcataggtaaacatttgtat

SEQ ID NO: 114561 - DNA, 22 bp, Artificial Sequence
  Synthetic oligonucleotide; TTG chr11 5388524 5388545 5388529 5388524 -
ctcataggtaaacatttgtatt

SEQ ID NO: 114562 - DNA, 22 bp, Artificial Sequence
  Synthetic oligonucleotide; CTC chr11 5388521 5388542 5388526 5388521 -
ataggtaaacatttgtattttc

SEQ ID NO: 114563 - DNA, 22 bp, Artificial Sequence
  Synthetic oligonucleotide; TTT chr11 5388507 5388528 5388512 5388507 -
gtattttcattcttcctggaat

SEQ ID NO: 114564 - DNA, 22 bp, Artificial Sequence
  Synthetic oligonucleotide; TTG chr11 5388506 5388527 5388511 5388506 -
tattttcattcttcctggaata

SEQ ID NO: 114565 - DNA, 22 bp, Artificial Sequence
  Synthetic oligonucleotide; TTT chr11 5388501 5388522 5388506 5388501 -
tcattcttcctggaataaaaac

SEQ ID NO: 114566 - DNA, 22 bp, Artificial Sequence
  Synthetic oligonucleotide; TTT chr11 5388500 5388521 5388505 5388500 -
cattcttcctggaataaaaaca

SEQ ID NO: 114567 - DNA, 22 bp, Artificial Sequence
  Synthetic oligonucleotide; TTC chr11 5388499 5388520 5388504 5388499 -
attcttcctggaataaaaacat

SEQ ID NO: 114568 - DNA, 22 bp, Artificial Sequence
  Synthetic oligonucleotide; TTC chr11 5388495 5388516 5388500 5388495 -
ttcctggaataaaaacattttt

SEQ ID NO: 114569 - DNA, 22 bp, Artificial Sequence
  Synthetic oligonucleotide; CTT chr11 5388493 5388514 5388498 5388493 -
cctggaataaaaacattttttc

SEQ ID NO: 114570 - DNA, 22 bp, Artificial Sequence
  Synthetic oligonucleotide; TTC chr11 5388492 5388513 5388497 5388492 -
ctggaataaaaacattttttcc

SEQ ID NO: 114571 - DNA, 22 bp, Artificial Sequence
  Synthetic oligonucleotide; CTG chr11 5388489 5388510 5388494 5388489 -
gaataaaaacattttttcctga

SEQ ID NO: 114572 - DNA, 22 bp, Artificial Sequence
  Synthetic oligonucleotide; TTT chr11 5388475 5388496 5388480 5388475 -
tttcctgaaatagctttccctt

SEQ ID NO: 114573 - DNA, 22 bp, Artificial Sequence
  Synthetic oligonucleotide; TTT chr11 5388474 5388495 5388479 5388474 -
ttcctgaaatagctttccctta

SEQ ID NO: 114574 - DNA, 22 bp, Artificial Sequence
  Synthetic oligonucleotide; TTT chr11 5388473 5388494 5388478 5388473 -
tcctgaaatagctttcccttaa

SEQ ID NO: 114575 - DNA, 22 bp, Artificial Sequence
  Synthetic oligonucleotide; TTT chr11 5388472 5388493 5388477 5388472 -
cctgaaatagctttcccttaat

SEQ ID NO: 114576 - DNA, 22 bp, Artificial Sequence
  Synthetic oligonucleotide; TTC chr11 5388471 5388492 5388476 5388471 -
ctgaaatagctttcccttaatc

SEQ ID NO: 114577 - DNA, 22 bp, Artificial Sequence
  Synthetic oligonucleotide; CTG chr11 5388468 5388489 5388473 5388468 -
aaatagctttcccttaatcttt

SEQ ID NO: 114578 - DNA, 22 bp, Artificial Sequence
  Synthetic oligonucleotide; CTT chr11 5388459 5388480 5388464 5388459 -
tcccttaatctttgtctagtta

SEQ ID NO: 114579 - DNA, 22 bp, Artificial Sequence
  Synthetic oligonucleotide; TTT chr11 5388458 5388479 5388463 5388458 -
cccttaatctttgtctagttaa

SEQ ID NO: 114580 - DNA, 22 bp, Artificial Sequence
  Synthetic oligonucleotide; TTC chr11 5388457 5388478 5388462 5388457 -
ccttaatctttgtctagttaac

SEQ ID NO: 114581 - DNA, 22 bp, Artificial Sequence
  Synthetic oligonucleotide; CTT chr11 5388453 5388474 5388458 5388453 -
aatctttgtctagttaacttct

SEQ ID NO: 114582 - DNA, 22 bp, Artificial Sequence
  Synthetic oligonucleotide; TTA chr11 5388452 5388473 5388457 5388452 -
atctttgtctagttaacttcta

SEQ ID NO: 114583 - DNA, 22 bp, Artificial Sequence
  Synthetic oligonucleotide; CTT chr11 5388447 5388468 5388452 5388447 -
tgtctagttaacttctactaat

SEQ ID NO: 114584 - DNA, 22 bp, Artificial Sequence
  Synthetic oligonucleotide; TTT chr11 5388446 5388467 5388451 5388446 -
gtctagttaacttctactaata

SEQ ID NO: 114585 - DNA, 22 bp, Artificial Sequence
  Synthetic oligonucleotide; TTG chr11 5388445 5388466 5388450 5388445 -
tctagttaacttctactaatat

SEQ ID NO: 114586 - DNA, 22 bp, Artificial Sequence
  Synthetic oligonucleotide; CTA chr11 5388441 5388462 5388446 5388441 -
gttaacttctactaatataacc

SEQ ID NO: 114587 - DNA, 22 bp, Artificial Sequence
  Synthetic oligonucleotide; TTA chr11 5388437 5388458 5388442 5388437 -
acttctactaatataacccacc

SEQ ID NO: 114588 - DNA, 22 bp, Artificial Sequence
  Synthetic oligonucleotide; CTT chr11 5388433 5388454 5388438 5388433 -
ctactaatataacccaccttag

SEQ ID NO: 114589 - DNA, 22 bp, Artificial Sequence
  Synthetic oligonucleotide; TTC chr11 5388432 5388453 5388437 5388432 -
tactaatataacccaccttagc

SEQ ID NO: 114590 - DNA, 22 bp, Artificial Sequence
  Synthetic oligonucleotide; CTA chr11 5388430 5388451 5388435 5388430 -
ctaatataacccaccttagctt

SEQ ID NO: 114591 - DNA, 22 bp, Artificial Sequence
  Synthetic oligonucleotide; CTA chr11 5388427 5388448 5388432 5388427 -
atataacccaccttagcttaga

SEQ ID NO: 114592 - DNA, 22 bp, Artificial Sequence
  Synthetic oligonucleotide; CTT chr11 5388413 5388434 5388418 5388413 -
agcttagatatgatgtccttca

SEQ ID NO: 114593 - DNA, 22 bp, Artificial Sequence
  Synthetic oligonucleotide; TTA chr11 5388412 5388433 5388417 5388412 -
gcttagatatgatgtccttcag

SEQ ID NO: 114594 - DNA, 22 bp, Artificial Sequence
  Synthetic oligonucleotide; CTT chr11 5388408 5388429 5388413 5388408 -
agatatgatgtccttcagaagg

SEQ ID NO: 114595 - DNA, 22 bp, Artificial Sequence
  Synthetic oligonucleotide; TTA chr11 5388407 5388428 5388412 5388407 -
gatatgatgtccttcagaaggc

SEQ ID NO: 114596 - DNA, 22 bp, Artificial Sequence
  Synthetic oligonucleotide; CTT chr11 5388393 5388414 5388398 5388393 -
cagaaggccttcttaaattccc

SEQ ID NO: 114597 - DNA, 22 bp, Artificial Sequence
  Synthetic oligonucleotide; TTC chr11 5388392 5388413 5388397 5388392 -
agaaggccttcttaaattcccc

SEQ ID NO: 114598 - DNA, 22 bp, Artificial Sequence
  Synthetic oligonucleotide; CTT chr11 5388382 5388403 5388387 5388382 -
cttaaattccccaagtttagtt

SEQ ID NO: 114599 - DNA, 22 bp, Artificial Sequence
  Synthetic oligonucleotide; TTC chr11 5388381 5388402 5388386 5388381 -
ttaaattccccaagtttagttt

SEQ ID NO: 114600 - DNA, 22 bp, Artificial Sequence
  Synthetic oligonucleotide; CTT chr11 5388379 5388400 5388384 5388379 -
aaattccccaagtttagtttga

SEQ ID NO: 114601 - DNA, 22 bp, Artificial Sequence
  Synthetic oligonucleotide; TTA chr11 5388378 5388399 5388383 5388378 -
aattccccaagtttagtttgaa

SEQ ID NO: 114602 - DNA, 22 bp, Artificial Sequence
  Synthetic oligonucleotide; TTC chr11 5388373 5388394 5388378 5388373 -
cccaagtttagtttgaataccc

SEQ ID NO: 114603 - DNA, 22 bp, Artificial Sequence
  Synthetic oligonucleotide; TTT chr11 5388364 5388385 5388369 5388364 -
agtttgaataccctctcctatg

SEQ ID NO: 114604 - DNA, 22 bp, Artificial Sequence
  Synthetic oligonucleotide; TTA chr11 5388363 5388384 5388368 5388363 -
gtttgaataccctctcctatgt

SEQ ID NO: 114605 - DNA, 22 bp, Artificial Sequence
  Synthetic oligonucleotide; TTT chr11 5388359 5388380 5388364 5388359 -
gaataccctctcctatgtgttc

SEQ ID NO: 114606 - DNA, 22 bp, Artificial Sequence
  Synthetic oligonucleotide; TTG chr11 5388358 5388379 5388363 5388358 -
aataccctctcctatgtgttcc

SEQ ID NO: 114607 - DNA, 22 bp, Artificial Sequence
  Synthetic oligonucleotide; CTC chr11 5388349 5388370 5388354 5388349 -
tcctatgtgttcctgtagttca

SEQ ID NO: 114608 - DNA, 22 bp, Artificial Sequence
  Synthetic oligonucleotide; CTC chr11 5388347 5388368 5388352 5388347 -
ctatgtgttcctgtagttcact

SEQ ID NO: 114609 - DNA, 22 bp, Artificial Sequence
  Synthetic oligonucleotide; CTA chr11 5388344 5388365 5388349 5388344 -
tgtgttcctgtagttcactatg

SEQ ID NO: 114610 - DNA, 22 bp, Artificial Sequence
  Synthetic oligonucleotide; TTC chr11 5388337 5388358 5388342 5388337 -
ctgtagttcactatgcactaat

SEQ ID NO: 114611 - DNA, 22 bp, Artificial Sequence
  Synthetic oligonucleotide; CTG chr11 5388334 5388355 5388339 5388334 -
tagttcactatgcactaattac

SEQ ID NO: 114612 - DNA, 22 bp, Artificial Sequence
  Synthetic oligonucleotide; TTC chr11 5388328 5388349 5388333 5388328 -
actatgcactaattaccatgat

SEQ ID NO: 114613 - DNA, 22 bp, Artificial Sequence
  Synthetic oligonucleotide; CTA chr11 5388324 5388345 5388329 5388324 -
tgcactaattaccatgatattt

SEQ ID NO: 114614 - DNA, 22 bp, Artificial Sequence
  Synthetic oligonucleotide; CTA chr11 5388317 5388338 5388322 5388317 -
attaccatgatattttccctgc

SEQ ID NO: 114615 - DNA, 22 bp, Artificial Sequence
  Synthetic oligonucleotide; TTA chr11 5388313 5388334 5388318 5388313 -
ccatgatattttccctgcagca

SEQ ID NO: 114616 - DNA, 22 bp, Artificial Sequence
  Synthetic oligonucleotide; TTT chr11 5388302 5388323 5388307 5388302 -
tccctgcagcattgtcaatttc

SEQ ID NO: 114617 - DNA, 22 bp, Artificial Sequence
  Synthetic oligonucleotide; TTT chr11 5388301 5388322 5388306 5388301 -
ccctgcagcattgtcaatttct

SEQ ID NO: 114618 - DNA, 22 bp, Artificial Sequence
  Synthetic oligonucleotide; TTC chr11 5388300 5388321 5388305 5388300 -
cctgcagcattgtcaatttctg

SEQ ID NO: 114619 - DNA, 22 bp, Artificial Sequence
  Synthetic oligonucleotide; CTG chr11 5388296 5388317 5388301 5388296 -
cagcattgtcaatttctgtatt

SEQ ID NO: 114620 - DNA, 22 bp, Artificial Sequence
  Synthetic oligonucleotide; TTG chr11 5388288 5388309 5388293 5388288 -
tcaatttctgtattgcttctat

SEQ ID NO: 114621 - DNA, 22 bp, Artificial Sequence
  Synthetic oligonucleotide; TTT chr11 5388281 5388302 5388286 5388281 -
ctgtattgcttctataatgtga

SEQ ID NO: 114622 - DNA, 22 bp, Artificial Sequence
  Synthetic oligonucleotide; TTC chr11 5388280 5388301 5388285 5388280 -
tgtattgcttctataatgtgaa

SEQ ID NO: 114623 - DNA, 22 bp, Artificial Sequence
  Synthetic oligonucleotide; CTG chr11 5388278 5388299 5388283 5388278 -
tattgcttctataatgtgaatt

SEQ ID NO: 114624 - DNA, 22 bp, Artificial Sequence
  Synthetic oligonucleotide; TTG chr11 5388273 5388294 5388278 5388273 -
cttctataatgtgaattccttg

SEQ ID NO: 114625 - DNA, 22 bp, Artificial Sequence
  Synthetic oligonucleotide; CTT chr11 5388270 5388291 5388275 5388270 -
ctataatgtgaattccttgtgg

SEQ ID NO: 114626 - DNA, 22 bp, Artificial Sequence
  Synthetic oligonucleotide; TTC chr11 5388269 5388290 5388274 5388269 -
tataatgtgaattccttgtgga

SEQ ID NO: 114627 - DNA, 22 bp, Artificial Sequence
  Synthetic oligonucleotide; CTA chr11 5388267 5388288 5388272 5388267 -
taatgtgaattccttgtggaca

SEQ ID NO: 114628 - DNA, 22 bp, Artificial Sequence
  Synthetic oligonucleotide; TTC chr11 5388255 5388276 5388260 5388255 -
cttgtggacataaaccatgact

SEQ ID NO: 114629 - DNA, 22 bp, Artificial Sequence
  Synthetic oligonucleotide; CTT chr11 5388252 5388273 5388257 5388252 -
gtggacataaaccatgactgtc

SEQ ID NO: 114630 - DNA, 22 bp, Artificial Sequence
  Synthetic oligonucleotide; TTG chr11 5388251 5388272 5388256 5388251 -
tggacataaaccatgactgtct

SEQ ID NO: 114631 - DNA, 22 bp, Artificial Sequence
  Synthetic oligonucleotide; CTG chr11 5388232 5388253 5388237 5388232 -
tctcttttttaattttaatatt

SEQ ID NO: 114632 - DNA, 22 bp, Artificial Sequence
  Synthetic oligonucleotide; CTC chr11 5388228 5388249 5388233 5388228 -
ttttttaattttaatattagct

SEQ ID NO: 114633 - DNA, 22 bp, Artificial Sequence
  Synthetic oligonucleotide; CTT chr11 5388226 5388247 5388231 5388226 -
ttttaattttaatattagctct

SEQ ID NO: 114634 - DNA, 22 bp, Artificial Sequence
  Synthetic oligonucleotide; TTT chr11 5388225 5388246 5388230 5388225 -
tttaattttaatattagctcta

SEQ ID NO: 114635 - DNA, 22 bp, Artificial Sequence
  Synthetic oligonucleotide; TTT chr11 5388224 5388245 5388229 5388224 -
ttaattttaatattagctctag

SEQ ID NO: 114636 - DNA, 22 bp, Artificial Sequence
  Synthetic oligonucleotide; TTT chr11 5388223 5388244 5388228 5388223 -
taattttaatattagctctagg

SEQ ID NO: 114637 - DNA, 22 bp, Artificial Sequence
  Synthetic oligonucleotide; TTT chr11 5388222 5388243 5388227 5388222 -
aattttaatattagctctaggg

SEQ ID NO: 114638 - DNA, 22 bp, Artificial Sequence
  Synthetic oligonucleotide; TTA chr11 5388221 5388242 5388226 5388221 -
attttaatattagctctaggga

SEQ ID NO: 114639 - DNA, 22 bp, Artificial Sequence
  Synthetic oligonucleotide; TTT chr11 5388217 5388238 5388222 5388217 -
taatattagctctagggattga

SEQ ID NO: 114640 - DNA, 22 bp, Artificial Sequence
  Synthetic oligonucleotide; TTT chr11 5388216 5388237 5388221 5388216 -
aatattagctctagggattgac

SEQ ID NO: 114641 - DNA, 22 bp, Artificial Sequence
  Synthetic oligonucleotide; TTA chr11 5388215 5388236 5388220 5388215 -
atattagctctagggattgact

SEQ ID NO: 114642 - DNA, 22 bp, Artificial Sequence
  Synthetic oligonucleotide; TTA chr11 5388209 5388230 5388214 5388209 -
gctctagggattgactttttta

SEQ ID NO: 114643 - DNA, 22 bp, Artificial Sequence
  Synthetic oligonucleotide; CTC chr11 5388205 5388226 5388210 5388205 -
tagggattgacttttttagcca

SEQ ID NO: 114644 - DNA, 22 bp, Artificial Sequence
  Synthetic oligonucleotide; CTA chr11 5388203 5388224 5388208 5388203 -
gggattgacttttttagccacc

SEQ ID NO: 114645 - DNA, 22 bp, Artificial Sequence
  Synthetic oligonucleotide; TTG chr11 5388196 5388217 5388201 5388196 -
acttttttagccaccatatcat

SEQ ID NO: 114646 - DNA, 22 bp, Artificial Sequence
  Synthetic oligonucleotide; CTT chr11 5388192 5388213 5388197 5388192 -
ttttagccaccatatcattgga

SEQ ID NO: 114647 - DNA, 22 bp, Artificial Sequence
  Synthetic oligonucleotide; TTT chr11 5388191 5388212 5388196 5388191 -
tttagccaccatatcattggaa

SEQ ID NO: 114648 - DNA, 22 bp, Artificial Sequence
  Synthetic oligonucleotide; TTT chr11 5388190 5388211 5388195 5388190 -
ttagccaccatatcattggaat

SEQ ID NO: 114649 - DNA, 22 bp, Artificial Sequence
  Synthetic oligonucleotide; TTT chr11 5388189 5388210 5388194 5388189 -
tagccaccatatcattggaatc

SEQ ID NO: 114650 - DNA, 22 bp, Artificial Sequence
  Synthetic oligonucleotide; TTT chr11 5388188 5388209 5388193 5388188 -
agccaccatatcattggaatcc

SEQ ID NO: 114651 - DNA, 22 bp, Artificial Sequence
  Synthetic oligonucleotide; TTA chr11 5388187 5388208 5388192 5388187 -
gccaccatatcattggaatcct

SEQ ID NO: 114652 - DNA, 22 bp, Artificial Sequence
  Synthetic oligonucleotide; TTG chr11 5388172 5388193 5388177 5388172 -
gaatcctttaaatattatttga

SEQ ID NO: 114653 - DNA, 22 bp, Artificial Sequence
  Synthetic oligonucleotide; CTT chr11 5388164 5388185 5388169 5388164 -
taaatattatttgaataaatta

SEQ ID NO: 114654 - DNA, 22 bp, Artificial Sequence
  Synthetic oligonucleotide; TTT chr11 5388163 5388184 5388168 5388163 -
aaatattatttgaataaattat

SEQ ID NO: 114655 - DNA, 22 bp, Artificial Sequence
  Synthetic oligonucleotide; TTA chr11 5388162 5388183 5388167 5388162 -
aatattatttgaataaattatt

SEQ ID NO: 114656 - DNA, 22 bp, Artificial Sequence
  Synthetic oligonucleotide; TTA chr11 5388155 5388176 5388160 5388155 -
tttgaataaattattaaatatg

SEQ ID NO: 114657 - DNA, 22 bp, Artificial Sequence
  Synthetic oligonucleotide; TTT chr11 5388152 5388173 5388157 5388152 -
gaataaattattaaatatgtat

SEQ ID NO: 114658 - DNA, 22 bp, Artificial Sequence
  Synthetic oligonucleotide; TTG chr11 5388151 5388172 5388156 5388151 -
aataaattattaaatatgtatc

SEQ ID NO: 114659 - DNA, 22 bp, Artificial Sequence
  Synthetic oligonucleotide; TTA chr11 5388142 5388163 5388147 5388142 -
ttaaatatgtatcattaccatt

SEQ ID NO: 114660 - DNA, 22 bp, Artificial Sequence
  Synthetic oligonucleotide; TTA chr11 5388139 5388160 5388144 5388139 -
aatatgtatcattaccattaat

SEQ ID NO: 114661 - DNA, 22 bp, Artificial Sequence
  Synthetic oligonucleotide; TTA chr11 5388125 5388146 5388130 5388125 -
ccattaatcttatttcaataat

SEQ ID NO: 114662 - DNA, 22 bp, Artificial Sequence
  Synthetic oligonucleotide; TTA chr11 5388119 5388140 5388124 5388119 -
atcttatttcaataattatttc

SEQ ID NO: 114663 - DNA, 22 bp, Artificial Sequence
  Synthetic oligonucleotide; CTT chr11 5388114 5388135 5388119 5388114 -
atttcaataattatttcaatat

SEQ ID NO: 114664 - DNA, 22 bp, Artificial Sequence
  Synthetic oligonucleotide; TTA chr11 5388113 5388134 5388118 5388113 -
tttcaataattatttcaatatt

SEQ ID NO: 114665 - DNA, 22 bp, Artificial Sequence
  Synthetic oligonucleotide; TTT chr11 5388110 5388131 5388115 5388110 -
caataattatttcaatattcaa

SEQ ID NO: 114666 - DNA, 22 bp, Artificial Sequence
  Synthetic oligonucleotide; TTC chr11 5388109 5388130 5388114 5388109 -
aataattatttcaatattcaat

SEQ ID NO: 114667 - DNA, 22 bp, Artificial Sequence
  Synthetic oligonucleotide; TTA chr11 5388101 5388122 5388106 5388101 -
tttcaatattcaattatttcaa

SEQ ID NO: 114668 - DNA, 22 bp, Artificial Sequence
  Synthetic oligonucleotide; TTT chr11 5388098 5388119 5388103 5388098 -
caatattcaattatttcaataa

SEQ ID NO: 114669 - DNA, 22 bp, Artificial Sequence
  Synthetic oligonucleotide; TTC chr11 5388097 5388118 5388102 5388097 -
aatattcaattatttcaataat

SEQ ID NO: 114670 - DNA, 22 bp, Artificial Sequence
  Synthetic oligonucleotide; TTC chr11 5388090 5388111 5388095 5388090 -
aattatttcaataattattcat

SEQ ID NO: 114671 - DNA, 22 bp, Artificial Sequence
  Synthetic oligonucleotide; TTA chr11 5388085 5388106 5388090 5388085 -
tttcaataattattcattaatt

SEQ ID NO: 114672 - DNA, 22 bp, Artificial Sequence
  Synthetic oligonucleotide; TTT chr11 5388082 5388103 5388087 5388082 -
caataattattcattaattgat

SEQ ID NO: 114673 - DNA, 22 bp, Artificial Sequence
  Synthetic oligonucleotide; TTC chr11 5388081 5388102 5388086 5388081 -
aataattattcattaattgatt

SEQ ID NO: 114674 - DNA, 22 bp, Artificial Sequence
  Synthetic oligonucleotide; TTA chr11 5388073 5388094 5388078 5388073 -
ttcattaattgattcaataaat

SEQ ID NO: 114675 - DNA, 22 bp, Artificial Sequence
  Synthetic oligonucleotide; TTC chr11 5388070 5388091 5388075 5388070 -
attaattgattcaataaataca

SEQ ID NO: 114676 - DNA, 22 bp, Artificial Sequence
  Synthetic oligonucleotide; TTA chr11 5388066 5388087 5388071 5388066 -
attgattcaataaatacatatt

SEQ ID NO: 114677 - DNA, 22 bp, Artificial Sequence
  Synthetic oligonucleotide; TTG chr11 5388062 5388083 5388067 5388062 -
attcaataaatacatattgaaa

SEQ ID NO: 114678 - DNA, 22 bp, Artificial Sequence
  Synthetic oligonucleotide; TTC chr11 5388058 5388079 5388063 5388058 -
aataaatacatattgaaattgt

SEQ ID NO: 114679 - DNA, 22 bp, Artificial Sequence
  Synthetic oligonucleotide; TTG chr11 5388043 5388064 5388048 5388043 -
aaattgtattacatggcagaca

SEQ ID NO: 114680 - DNA, 22 bp, Artificial Sequence
  Synthetic oligonucleotide; TTG chr11 5388037 5388058 5388042 5388037 -
tattacatggcagacataattc

SEQ ID NO: 114681 - DNA, 22 bp, Artificial Sequence
  Synthetic oligonucleotide; TTA chr11 5388032 5388053 5388037 5388032 -
catggcagacataattctatta

SEQ ID NO: 114682 - DNA, 22 bp, Artificial Sequence
  Synthetic oligonucleotide; TTC chr11 5388015 5388036 5388020 5388015 -
tattaggttggtgcaaaagtaa

SEQ ID NO: 114683 - DNA, 22 bp, Artificial Sequence
  Synthetic oligonucleotide; CTA chr11 5388013 5388034 5388018 5388013 -
ttaggttggtgcaaaagtaatt

SEQ ID NO: 114684 - DNA, 22 bp, Artificial Sequence
  Synthetic oligonucleotide; TTA chr11 5388010 5388031 5388015 5388010 -
ggttggtgcaaaagtaattgtg

SEQ ID NO: 114685 - DNA, 22 bp, Artificial Sequence
  Synthetic oligonucleotide; TTG chr11 5388005 5388026 5388010 5388005 -
gtgcaaaagtaattgtggtttt

SEQ ID NO: 114686 - DNA, 22 bp, Artificial Sequence
  Synthetic oligonucleotide; TTG chr11 5387990 5388011 5387995 5387990 -
tggtttttaccattactttcaa

SEQ ID NO: 114687 - DNA, 22 bp, Artificial Sequence
  Synthetic oligonucleotide; TTT chr11 5387984 5388005 5387989 5387984 -
ttaccattactttcaatggcaa

SEQ ID NO: 114688 - DNA, 22 bp, Artificial Sequence
  Synthetic oligonucleotide; TTT chr11 5387983 5388004 5387988 5387983 -
taccattactttcaatggcaag

SEQ ID NO: 114689 - DNA, 22 bp, Artificial Sequence
  Synthetic oligonucleotide; TTT chr11 5387982 5388003 5387987 5387982 -
accattactttcaatggcaaga

SEQ ID NO: 114690 - DNA, 22 bp, Artificial Sequence
  Synthetic oligonucleotide; TTA chr11 5387981 5388002 5387986 5387981 -
ccattactttcaatggcaagaa

SEQ ID NO: 114691 - DNA, 22 bp, Artificial Sequence
  Synthetic oligonucleotide; TTA chr11 5387975 5387996 5387980 5387975 -
ctttcaatggcaagaactgcaa

SEQ ID NO: 114692 - DNA, 22 bp, Artificial Sequence
  Synthetic oligonucleotide; CTT chr11 5387972 5387993 5387977 5387972 -
tcaatggcaagaactgcaatta

SEQ ID NO: 114693 - DNA, 22 bp, Artificial Sequence
  Synthetic oligonucleotide; TTT chr11 5387971 5387992 5387976 5387971 -
caatggcaagaactgcaattac

SEQ ID NO: 114694 - DNA, 22 bp, Artificial Sequence
  Synthetic oligonucleotide; TTC chr11 5387970 5387991 5387975 5387970 -
aatggcaagaactgcaattact

SEQ ID NO: 114695 - DNA, 22 bp, Artificial Sequence
  Synthetic oligonucleotide; CTG chr11 5387956 5387977 5387961 5387956 -
caattacttttacacctaggta

SEQ ID NO: 114696 - DNA, 22 bp, Artificial Sequence
  Synthetic oligonucleotide; TTA chr11 5387950 5387971 5387955 5387950 -
cttttacacctaggtactgaaa

SEQ ID NO: 114697 - DNA, 22 bp, Artificial Sequence
  Synthetic oligonucleotide; CTT chr11 5387947 5387968 5387952 5387947 -
ttacacctaggtactgaaaata

SEQ ID NO: 114698 - DNA, 22 bp, Artificial Sequence
  Synthetic oligonucleotide; TTT chr11 5387946 5387967 5387951 5387946 -
tacacctaggtactgaaaatac

SEQ ID NO: 114699 - DNA, 22 bp, Artificial Sequence
  Synthetic oligonucleotide; TTT chr11 5387945 5387966 5387950 5387945 -
acacctaggtactgaaaataca

SEQ ID NO: 114700 - DNA, 22 bp, Artificial Sequence
  Synthetic oligonucleotide; TTA chr11 5387944 5387965 5387949 5387944 -
cacctaggtactgaaaatacaa

SEQ ID NO: 114701 - DNA, 22 bp, Artificial Sequence
  Synthetic oligonucleotide; CTA chr11 5387938 5387959 5387943 5387938 -
ggtactgaaaatacaatgaaca

SEQ ID NO: 114702 - DNA, 22 bp, Artificial Sequence
  Synthetic oligonucleotide; CTG chr11 5387931 5387952 5387936 5387931 -
aaaatacaatgaacagaaacag

SEQ ID NO: 114703 - DNA, 22 bp, Artificial Sequence
  Synthetic oligonucleotide; CTG chr11 5387874 5387895 5387879 5387874 -
caatgcaaggtaatgtaatgca

SEQ ID NO: 114704 - DNA, 22 bp, Artificial Sequence
  Synthetic oligonucleotide; TTT chr11 5387807 5387828 5387812 5387807 -
tatatagggtagtcagagaaga

SEQ ID NO: 114705 - DNA, 22 bp, Artificial Sequence
  Synthetic oligonucleotide; TTT chr11 5387806 5387827 5387811 5387806 -
atatagggtagtcagagaagac

SEQ ID NO: 114706 - DNA, 22 bp, Artificial Sequence
  Synthetic oligonucleotide; TTA chr11 5387805 5387826 5387810 5387805 -
tatagggtagtcagagaagacc

SEQ ID NO: 114707 - DNA, 22 bp, Artificial Sequence
  Synthetic oligonucleotide; CTC chr11 5387781 5387802 5387786 5387781 -
tctgagtaggtaattttagaga

SEQ ID NO: 114708 - DNA, 22 bp, Artificial Sequence
  Synthetic oligonucleotide; CTC chr11 5387779 5387800 5387784 5387779 -
tgagtaggtaattttagagaag

SEQ ID NO: 114709 - DNA, 22 bp, Artificial Sequence
  Synthetic oligonucleotide; CTG chr11 5387777 5387798 5387782 5387777 -
agtaggtaattttagagaagaa

SEQ ID NO: 114710 - DNA, 22 bp, Artificial Sequence
  Synthetic oligonucleotide; TTT chr11 5387765 5387786 5387770 5387765 -
tagagaagaaatcaaaatcaga

SEQ ID NO: 114711 - DNA, 22 bp, Artificial Sequence
  Synthetic oligonucleotide; TTT chr11 5387764 5387785 5387769 5387764 -
agagaagaaatcaaaatcagag

SEQ ID NO: 114712 - DNA, 22 bp, Artificial Sequence
  Synthetic oligonucleotide; TTA chr11 5387763 5387784 5387768 5387763 -
gagaagaaatcaaaatcagagg

SEQ ID NO: 114713 - DNA, 22 bp, Artificial Sequence
  Synthetic oligonucleotide; CTA chr11 5387726 5387747 5387731 5387726 -
tcttagggaaaaacattcaagg

SEQ ID NO: 114714 - DNA, 22 bp, Artificial Sequence
  Synthetic oligonucleotide; CTT chr11 5387722 5387743 5387727 5387722 -
agggaaaaacattcaaggaagg

SEQ ID NO: 114715 - DNA, 22 bp, Artificial Sequence
  Synthetic oligonucleotide; TTA chr11 5387721 5387742 5387726 5387721 -
gggaaaaacattcaaggaagga

SEQ ID NO: 114716 - DNA, 22 bp, Artificial Sequence
  Synthetic oligonucleotide; TTC chr11 5387708 5387729 5387713 5387708 -
aaggaaggaggaagaacaagtg

SEQ ID NO: 114717 - DNA, 22 bp, Artificial Sequence
  Synthetic oligonucleotide; TTC chr11 5387679 5387700 5387684 5387679 -
ctgaagcagagagcagcttgac

SEQ ID NO: 114718 - DNA, 22 bp, Artificial Sequence
  Synthetic oligonucleotide; CTG chr11 5387676 5387697 5387681 5387676 -
aagcagagagcagcttgacaag

SEQ ID NO: 114719 - DNA, 22 bp, Artificial Sequence
  Synthetic oligonucleotide; CTT chr11 5387660 5387681 5387665 5387660 -
gacaagtttaaaagacaaaaga

SEQ ID NO: 114720 - DNA, 22 bp, Artificial Sequence
  Synthetic oligonucleotide; TTG chr11 5387659 5387680 5387664 5387659 -
acaagtttaaaagacaaaagaa

SEQ ID NO: 114721 - DNA, 22 bp, Artificial Sequence
  Synthetic oligonucleotide; TTT chr11 5387651 5387672 5387656 5387651 -
aaaagacaaaagaaggccaatg

SEQ ID NO: 114722 - DNA, 22 bp, Artificial Sequence
  Synthetic oligonucleotide; TTA chr11 5387650 5387671 5387655 5387650 -
aaagacaaaagaaggccaatgt

SEQ ID NO: 114723 - DNA, 22 bp, Artificial Sequence
  Synthetic oligonucleotide; TTC chr11 5387622 5387643 5387627 5387622 -
aatggaggaagcaaggtgggga

SEQ ID NO: 114724 - DNA, 22 bp, Artificial Sequence
  Synthetic oligonucleotide; CTT chr11 5387582 5387603 5387587 5387582 -
gaagtagcagctaaatgctacg

SEQ ID NO: 114725 - DNA, 22 bp, Artificial Sequence
  Synthetic oligonucleotide; TTG chr11 5387581 5387602 5387586 5387581 -
aagtagcagctaaatgctacgt

SEQ ID NO: 114726 - DNA, 22 bp, Artificial Sequence
  Synthetic oligonucleotide; CTA chr11 5387569 5387590 5387574 5387569 -
aatgctacgtcatgtatgatct

SEQ ID NO: 114727 - DNA, 22 bp, Artificial Sequence
  Synthetic oligonucleotide; CTA chr11 5387562 5387583 5387567 5387562 -
cgtcatgtatgatcttgcaggt

SEQ ID NO: 114728 - DNA, 22 bp, Artificial Sequence
  Synthetic oligonucleotide; CTT chr11 5387546 5387567 5387551 5387546 -
gcaggtcacgcaagctactttg

SEQ ID NO: 114729 - DNA, 22 bp, Artificial Sequence
  Synthetic oligonucleotide; TTG chr11 5387545 5387566 5387550 5387545 -
caggtcacgcaagctactttga

SEQ ID NO: 114730 - DNA, 22 bp, Artificial Sequence
  Synthetic oligonucleotide; CTA chr11 5387529 5387550 5387534 5387529 -
ctttgaattttattatacttgt

SEQ ID NO: 114731 - DNA, 22 bp, Artificial Sequence
  Synthetic oligonucleotide; CTT chr11 5387526 5387547 5387531 5387526 -
tgaattttattatacttgtgag

SEQ ID NO: 114732 - DNA, 22 bp, Artificial Sequence
  Synthetic oligonucleotide; TTT chr11 5387525 5387546 5387530 5387525 -
gaattttattatacttgtgagc

SEQ ID NO: 114733 - DNA, 22 bp, Artificial Sequence
  Synthetic oligonucleotide; TTG chr11 5387524 5387545 5387529 5387524 -
aattttattatacttgtgagct

SEQ ID NO: 114734 - DNA, 22 bp, Artificial Sequence
  Synthetic oligonucleotide; TTT chr11 5387519 5387540 5387524 5387519 -
tattatacttgtgagcttcgag

SEQ ID NO: 114735 - DNA, 22 bp, Artificial Sequence
  Synthetic oligonucleotide; TTT chr11 5387518 5387539 5387523 5387518 -
attatacttgtgagcttcgagt

SEQ ID NO: 114736 - DNA, 22 bp, Artificial Sequence
  Synthetic oligonucleotide; TTA chr11 5387517 5387538 5387522 5387517 -
ttatacttgtgagcttcgagtt

SEQ ID NO: 114737 - DNA, 22 bp, Artificial Sequence
  Synthetic oligonucleotide; TTA chr11 5387514 5387535 5387519 5387514 -
tacttgtgagcttcgagttgag

SEQ ID NO: 114738 - DNA, 22 bp, Artificial Sequence
  Synthetic oligonucleotide; CTT chr11 5387509 5387530 5387514 5387509 -
gtgagcttcgagttgagagcag

SEQ ID NO: 114739 - DNA, 22 bp, Artificial Sequence
  Synthetic oligonucleotide; TTG chr11 5387508 5387529 5387513 5387508 -
tgagcttcgagttgagagcaga

SEQ ID NO: 114740 - DNA, 22 bp, Artificial Sequence
  Synthetic oligonucleotide; CTT chr11 5387501 5387522 5387506 5387501 -
cgagttgagagcagaggtgctg

SEQ ID NO: 114741 - DNA, 22 bp, Artificial Sequence
  Synthetic oligonucleotide; TTC chr11 5387500 5387521 5387505 5387500 -
gagttgagagcagaggtgctgc

SEQ ID NO: 114742 - DNA, 22 bp, Artificial Sequence
  Synthetic oligonucleotide; TTG chr11 5387494 5387515 5387499 5387494 -
agagcagaggtgctgcatggat

SEQ ID NO: 114743 - DNA, 22 bp, Artificial Sequence
  Synthetic oligonucleotide; CTG chr11 5387479 5387500 5387484 5387479 -
catggatataaggcttacatca

SEQ ID NO: 114744 - DNA, 22 bp, Artificial Sequence
  Synthetic oligonucleotide; CTT chr11 5387463 5387484 5387468 5387463 -
acatcactttggcaaggggtaa

SEQ ID NO: 114745 - DNA, 22 bp, Artificial Sequence
  Synthetic oligonucleotide; TTA chr11 5387462 5387483 5387467 5387462 -
catcactttggcaaggggtaaa

SEQ ID NO: 114746 - DNA, 22 bp, Artificial Sequence
  Synthetic oligonucleotide; CTT chr11 5387454 5387475 5387459 5387454 -
tggcaaggggtaaaaaatagtc

SEQ ID NO: 114747 - DNA, 22 bp, Artificial Sequence
  Synthetic oligonucleotide; TTT chr11 5387453 5387474 5387458 5387453 -
ggcaaggggtaaaaaatagtcc

SEQ ID NO: 114748 - DNA, 22 bp, Artificial Sequence
  Synthetic oligonucleotide; TTG chr11 5387452 5387473 5387457 5387452 -
gcaaggggtaaaaaatagtcca

SEQ ID NO: 114749 - DNA, 22 bp, Artificial Sequence
  Synthetic oligonucleotide; TTT chr11 5387425 5387446 5387430 5387425 -
atcttttccatttctttacttc

SEQ ID NO: 114750 - DNA, 22 bp, Artificial Sequence
  Synthetic oligonucleotide; TTA chr11 5387424 5387445 5387429 5387424 -
tcttttccatttctttacttct

SEQ ID NO: 114751 - DNA, 22 bp, Artificial Sequence
  Synthetic oligonucleotide; CTT chr11 5387420 5387441 5387425 5387420 -
ttccatttctttacttctcagt

SEQ ID NO: 114752 - DNA, 22 bp, Artificial Sequence
  Synthetic oligonucleotide; TTT chr11 5387419 5387440 5387424 5387419 -
tccatttctttacttctcagtt

SEQ ID NO: 114753 - DNA, 22 bp, Artificial Sequence
  Synthetic oligonucleotide; TTT chr11 5387418 5387439 5387423 5387418 -
ccatttctttacttctcagttt

SEQ ID NO: 114754 - DNA, 22 bp, Artificial Sequence
  Synthetic oligonucleotide; TTC chr11 5387417 5387438 5387422 5387417 -
catttctttacttctcagttta

SEQ ID NO: 114755 - DNA, 22 bp, Artificial Sequence
  Synthetic oligonucleotide; TTT chr11 5387412 5387433 5387417 5387412 -
ctttacttctcagtttactact

SEQ ID NO: 114756 - DNA, 22 bp, Artificial Sequence
  Synthetic oligonucleotide; TTC chr11 5387411 5387432 5387416 5387411 -
tttacttctcagtttactactc

SEQ ID NO: 114757 - DNA, 22 bp, Artificial Sequence
  Synthetic oligonucleotide; CTT chr11 5387409 5387430 5387414 5387409 -
tacttctcagtttactactcaa

SEQ ID NO: 114758 - DNA, 22 bp, Artificial Sequence
  Synthetic oligonucleotide; TTT chr11 5387408 5387429 5387413 5387408 -
acttctcagtttactactcaac

SEQ ID NO: 114759 - DNA, 22 bp, Artificial Sequence
  Synthetic oligonucleotide; TTA chr11 5387407 5387428 5387412 5387407 -
cttctcagtttactactcaacc

SEQ ID NO: 114760 - DNA, 22 bp, Artificial Sequence
  Synthetic oligonucleotide; CTT chr11 5387404 5387425 5387409 5387404 -
ctcagtttactactcaaccaac

SEQ ID NO: 114761 - DNA, 22 bp, Artificial Sequence
  Synthetic oligonucleotide; TTC chr11 5387403 5387424 5387408 5387403 -
tcagtttactactcaaccaacc

SEQ ID NO: 114762 - DNA, 22 bp, Artificial Sequence
  Synthetic oligonucleotide; CTC chr11 5387401 5387422 5387406 5387401 -
agtttactactcaaccaaccac

SEQ ID NO: 114763 - DNA, 22 bp, Artificial Sequence
  Synthetic oligonucleotide; TTT chr11 5387396 5387417 5387401 5387396 -
actactcaaccaaccaccctat

SEQ ID NO: 114764 - DNA, 22 bp, Artificial Sequence
  Synthetic oligonucleotide; TTA chr11 5387395 5387416 5387400 5387395 -
ctactcaaccaaccaccctata

SEQ ID NO: 114765 - DNA, 22 bp, Artificial Sequence
  Synthetic oligonucleotide; CTA chr11 5387392 5387413 5387397 5387392 -
ctcaaccaaccaccctataatg

SEQ ID NO: 114766 - DNA, 22 bp, Artificial Sequence
  Synthetic oligonucleotide; CTC chr11 5387389 5387410 5387394 5387389 -
aaccaaccaccctataatgttt

SEQ ID NO: 114767 - DNA, 22 bp, Artificial Sequence
  Synthetic oligonucleotide; CTA chr11 5387375 5387396 5387380 5387375 -
taatgttttttttaaaacccac

SEQ ID NO: 114768 - DNA, 22 bp, Artificial Sequence
  Synthetic oligonucleotide; TTT chr11 5387367 5387388 5387372 5387367 -
tttttaaaacccacttagctaa

SEQ ID NO: 114769 - DNA, 22 bp, Artificial Sequence
  Synthetic oligonucleotide; TTT chr11 5387366 5387387 5387371 5387366 -
ttttaaaacccacttagctaaa

SEQ ID NO: 114770 - DNA, 22 bp, Artificial Sequence
  Synthetic oligonucleotide; TTT chr11 5387365 5387386 5387370 5387365 -
tttaaaacccacttagctaaag

SEQ ID NO: 114771 - DNA, 22 bp, Artificial Sequence
  Synthetic oligonucleotide; TTT chr11 5387364 5387385 5387369 5387364 -
ttaaaacccacttagctaaagc

SEQ ID NO: 114772 - DNA, 22 bp, Artificial Sequence
  Synthetic oligonucleotide; TTT chr11 5387363 5387384 5387368 5387363 -
taaaacccacttagctaaagca

SEQ ID NO: 114773 - DNA, 22 bp, Artificial Sequence
  Synthetic oligonucleotide; TTT chr11 5387362 5387383 5387367 5387362 -
aaaacccacttagctaaagcaa

SEQ ID NO: 114774 - DNA, 22 bp, Artificial Sequence
  Synthetic oligonucleotide; TTA chr11 5387361 5387382 5387366 5387361 -
aaacccacttagctaaagcaat

SEQ ID NO: 114775 - DNA, 22 bp, Artificial Sequence
  Synthetic oligonucleotide; CTT chr11 5387351 5387372 5387356 5387351 -
agctaaagcaatgctccttaaa

SEQ ID NO: 114776 - DNA, 22 bp, Artificial Sequence
  Synthetic oligonucleotide; TTA chr11 5387350 5387371 5387355 5387350 -
gctaaagcaatgctccttaaat

SEQ ID NO: 114777 - DNA, 22 bp, Artificial Sequence
  Synthetic oligonucleotide; CTA chr11 5387346 5387367 5387351 5387346 -
aagcaatgctccttaaattcac

SEQ ID NO: 114778 - DNA, 22 bp, Artificial Sequence
  Synthetic oligonucleotide; CTC chr11 5387335 5387356 5387340 5387335 -
cttaaattcaccagtgacttct

SEQ ID NO: 114779 - DNA, 22 bp, Artificial Sequence
  Synthetic oligonucleotide; CTT chr11 5387332 5387353 5387337 5387332 -
aaattcaccagtgacttctagg

SEQ ID NO: 114780 - DNA, 22 bp, Artificial Sequence
  Synthetic oligonucleotide; TTA chr11 5387331 5387352 5387336 5387331 -
aattcaccagtgacttctaggg

SEQ ID NO: 114781 - DNA, 22 bp, Artificial Sequence
  Synthetic oligonucleotide; TTC chr11 5387326 5387347 5387331 5387326 -
accagtgacttctaggggccaa

SEQ ID NO: 114782 - DNA, 22 bp, Artificial Sequence
  Synthetic oligonucleotide; CTT chr11 5387315 5387336 5387320 5387315 -
ctaggggccaaatgcaatggag

SEQ ID NO: 114783 - DNA, 22 bp, Artificial Sequence
  Synthetic oligonucleotide; TTC chr11 5387314 5387335 5387319 5387314 -
taggggccaaatgcaatggaga

SEQ ID NO: 114784 - DNA, 22 bp, Artificial Sequence
  Synthetic oligonucleotide; CTA chr11 5387312 5387333 5387317 5387312 -
ggggccaaatgcaatggagagt

SEQ ID NO: 114785 - DNA, 22 bp, Artificial Sequence
  Synthetic oligonucleotide; CTT chr11 5387287 5387308 5387292 5387287 -
aatcatacctgcttttattgat

SEQ ID NO: 114786 - DNA, 22 bp, Artificial Sequence
  Synthetic oligonucleotide; TTA chr11 5387286 5387307 5387291 5387286 -
atcatacctgcttttattgatt

SEQ ID NO: 114787 - DNA, 22 bp, Artificial Sequence
  Synthetic oligonucleotide; CTG chr11 5387276 5387297 5387281 5387276 -
cttttattgatttttttgtgca

SEQ ID NO: 114788 - DNA, 22 bp, Artificial Sequence
  Synthetic oligonucleotide; CTT chr11 5387273 5387294 5387278 5387273 -
ttattgatttttttgtgcaata

SEQ ID NO: 114789 - DNA, 22 bp, Artificial Sequence
  Synthetic oligonucleotide; TTT chr11 5387272 5387293 5387277 5387272 -
tattgatttttttgtgcaatag

SEQ ID NO: 114790 - DNA, 22 bp, Artificial Sequence
  Synthetic oligonucleotide; TTT chr11 5387271 5387292 5387276 5387271 -
attgatttttttgtgcaatagt

SEQ ID NO: 114791 - DNA, 22 bp, Artificial Sequence
  Synthetic oligonucleotide; TTA chr11 5387270 5387291 5387275 5387270 -
ttgatttttttgtgcaatagtt

SEQ ID NO: 114792 - DNA, 22 bp, Artificial Sequence
  Synthetic oligonucleotide; TTG chr11 5387267 5387288 5387272 5387267 -
atttttttgtgcaatagttgtg

SEQ ID NO: 114793 - DNA, 22 bp, Artificial Sequence
  Synthetic oligonucleotide; TTT chr11 5387263 5387284 5387268 5387263 -
ttttgtgcaatagttgtgtgct

SEQ ID NO: 114794 - DNA, 22 bp, Artificial Sequence
  Synthetic oligonucleotide; TTT chr11 5387262 5387283 5387267 5387262 -
tttgtgcaatagttgtgtgctc

SEQ ID NO: 114795 - DNA, 22 bp, Artificial Sequence
  Synthetic oligonucleotide; TTT chr11 5387261 5387282 5387266 5387261 -
ttgtgcaatagttgtgtgctct

SEQ ID NO: 114796 - DNA, 22 bp, Artificial Sequence
  Synthetic oligonucleotide; TTT chr11 5387260 5387281 5387265 5387260 -
tgtgcaatagttgtgtgctctg

SEQ ID NO: 114797 - DNA, 22 bp, Artificial Sequence
  Synthetic oligonucleotide; TTT chr11 5387259 5387280 5387264 5387259 -
gtgcaatagttgtgtgctctgg

SEQ ID NO: 114798 - DNA, 22 bp, Artificial Sequence
  Synthetic oligonucleotide; TTG chr11 5387258 5387279 5387263 5387258 -
tgcaatagttgtgtgctctggc

SEQ ID NO: 114799 - DNA, 22 bp, Artificial Sequence
  Synthetic oligonucleotide; TTG chr11 5387247 5387268 5387252 5387247 -
tgtgctctggccatgccttcct

SEQ ID NO: 114800 - DNA, 22 bp, Artificial Sequence
  Synthetic oligonucleotide; CTC chr11 5387240 5387261 5387245 5387240 -
tggccatgccttcctttttaga

SEQ ID NO: 114801 - DNA, 22 bp, Artificial Sequence
  Synthetic oligonucleotide; CTG chr11 5387238 5387259 5387243 5387238 -
gccatgccttcctttttagagc

SEQ ID NO: 114802 - DNA, 22 bp, Artificial Sequence
  Synthetic oligonucleotide; CTT chr11 5387228 5387249 5387233 5387228 -
cctttttagagctctctctaga

SEQ ID NO: 114803 - DNA, 22 bp, Artificial Sequence
  Synthetic oligonucleotide; TTC chr11 5387227 5387248 5387232 5387227 -
ctttttagagctctctctagaa

SEQ ID NO: 114804 - DNA, 22 bp, Artificial Sequence
  Synthetic oligonucleotide; CTT chr11 5387224 5387245 5387229 5387224 -
tttagagctctctctagaaatt

SEQ ID NO: 114805 - DNA, 22 bp, Artificial Sequence
  Synthetic oligonucleotide; TTT chr11 5387223 5387244 5387228 5387223 -
ttagagctctctctagaaattc

SEQ ID NO: 114806 - DNA, 22 bp, Artificial Sequence
  Synthetic oligonucleotide; TTT chr11 5387222 5387243 5387227 5387222 -
tagagctctctctagaaattct

SEQ ID NO: 114807 - DNA, 22 bp, Artificial Sequence
  Synthetic oligonucleotide; TTT chr11 5387221 5387242 5387226 5387221 -
agagctctctctagaaattctt

SEQ ID NO: 114808 - DNA, 22 bp, Artificial Sequence
  Synthetic oligonucleotide; TTA chr11 5387220 5387241 5387225 5387220 -
gagctctctctagaaattctta

SEQ ID NO: 114809 - DNA, 22 bp, Artificial Sequence
  Synthetic oligonucleotide; CTC chr11 5387214 5387235 5387219 5387214 -
tctctagaaattcttaatgcca

SEQ ID NO: 114810 - DNA, 22 bp, Artificial Sequence
  Synthetic oligonucleotide; CTC chr11 5387212 5387233 5387217 5387212 -
tctagaaattcttaatgccaag

SEQ ID NO: 114811 - DNA, 22 bp, Artificial Sequence
  Synthetic oligonucleotide; CTC chr11 5387210 5387231 5387215 5387210 -
tagaaattcttaatgccaagat

SEQ ID NO: 114812 - DNA, 22 bp, Artificial Sequence
  Synthetic oligonucleotide; CTA chr11 5387208 5387229 5387213 5387208 -
gaaattcttaatgccaagatct

SEQ ID NO: 114813 - DNA, 22 bp, Artificial Sequence
  Synthetic oligonucleotide; TTC chr11 5387201 5387222 5387206 5387201 -
ttaatgccaagatctgctggtt

SEQ ID NO: 114814 - DNA, 22 bp, Artificial Sequence
  Synthetic oligonucleotide; CTT chr11 5387199 5387220 5387204 5387199 -
aatgccaagatctgctggttct

SEQ ID NO: 114815 - DNA, 22 bp, Artificial Sequence
  Synthetic oligonucleotide; TTA chr11 5387198 5387219 5387203 5387198 -
atgccaagatctgctggttctc

SEQ ID NO: 114816 - DNA, 22 bp, Artificial Sequence
  Synthetic oligonucleotide; CTG chr11 5387185 5387206 5387190 5387185 -
ctggttctcttctgatttttgt

SEQ ID NO: 114817 - DNA, 22 bp, Artificial Sequence
  Synthetic oligonucleotide; CTG chr11 5387182 5387203 5387187 5387182 -
gttctcttctgatttttgtgat

SEQ ID NO: 114818 - DNA, 22 bp, Artificial Sequence
  Synthetic oligonucleotide; TTC chr11 5387178 5387199 5387183 5387178 -
tcttctgatttttgtgatagct

SEQ ID NO: 114819 - DNA, 22 bp, Artificial Sequence
  Synthetic oligonucleotide; CTC chr11 5387176 5387197 5387181 5387176 -
ttctgatttttgtgatagcttc

SEQ ID NO: 114820 - DNA, 22 bp, Artificial Sequence
  Synthetic oligonucleotide; CTT chr11 5387174 5387195 5387179 5387174 -
ctgatttttgtgatagcttcta

SEQ ID NO: 114821 - DNA, 22 bp, Artificial Sequence
  Synthetic oligonucleotide; TTC chr11 5387173 5387194 5387178 5387173 -
tgatttttgtgatagcttctat

SEQ ID NO: 114822 - DNA, 22 bp, Artificial Sequence
  Synthetic oligonucleotide; CTG chr11 5387171 5387192 5387176 5387171 -
atttttgtgatagcttctatgc

SEQ ID NO: 114823 - DNA, 22 bp, Artificial Sequence
  Synthetic oligonucleotide; TTT chr11 5387167 5387188 5387172 5387167 -
ttgtgatagcttctatgcactc

SEQ ID NO: 114824 - DNA, 22 bp, Artificial Sequence
  Synthetic oligonucleotide; TTT chr11 5387166 5387187 5387171 5387166 -
tgtgatagcttctatgcactct

SEQ ID NO: 114825 - DNA, 22 bp, Artificial Sequence
  Synthetic oligonucleotide; TTT chr11 5387165 5387186 5387170 5387165 -
gtgatagcttctatgcactctc

SEQ ID NO: 114826 - DNA, 22 bp, Artificial Sequence
  Synthetic oligonucleotide; TTG chr11 5387164 5387185 5387169 5387164 -
tgatagcttctatgcactctct

SEQ ID NO: 114827 - DNA, 22 bp, Artificial Sequence
  Synthetic oligonucleotide; CTT chr11 5387155 5387176 5387160 5387155 -
ctatgcactctcttatttccat

SEQ ID NO: 114828 - DNA, 22 bp, Artificial Sequence
  Synthetic oligonucleotide; TTC chr11 5387154 5387175 5387159 5387154 -
tatgcactctcttatttccatt

SEQ ID NO: 114829 - DNA, 22 bp, Artificial Sequence
  Synthetic oligonucleotide; CTA chr11 5387152 5387173 5387157 5387152 -
tgcactctcttatttccattgc

SEQ ID NO: 114830 - DNA, 22 bp, Artificial Sequence
  Synthetic oligonucleotide; CTC chr11 5387145 5387166 5387150 5387145 -
tcttatttccattgctcaaata

SEQ ID NO: 114831 - DNA, 22 bp, Artificial Sequence
  Synthetic oligonucleotide; CTC chr11 5387143 5387164 5387148 5387143 -
ttatttccattgctcaaatatt

SEQ ID NO: 114832 - DNA, 22 bp, Artificial Sequence
  Synthetic oligonucleotide; CTT chr11 5387141 5387162 5387146 5387141 -
atttccattgctcaaatattta

SEQ ID NO: 114833 - DNA, 22 bp, Artificial Sequence
  Synthetic oligonucleotide; TTA chr11 5387140 5387161 5387145 5387140 -
tttccattgctcaaatatttat

SEQ ID NO: 114834 - DNA, 22 bp, Artificial Sequence
  Synthetic oligonucleotide; TTT chr11 5387137 5387158 5387142 5387137 -
ccattgctcaaatatttatgtt

SEQ ID NO: 114835 - DNA, 22 bp, Artificial Sequence
  Synthetic oligonucleotide; TTC chr11 5387136 5387157 5387141 5387136 -
cattgctcaaatatttatgtta

SEQ ID NO: 114836 - DNA, 22 bp, Artificial Sequence
  Synthetic oligonucleotide; TTG chr11 5387131 5387152 5387136 5387131 -
ctcaaatatttatgttattcag

SEQ ID NO: 114837 - DNA, 22 bp, Artificial Sequence
  Synthetic oligonucleotide; CTC chr11 5387128 5387149 5387133 5387128 -
aaatatttatgttattcagttt

SEQ ID NO: 114838 - DNA, 22 bp, Artificial Sequence
  Synthetic oligonucleotide; TTT chr11 5387120 5387141 5387125 5387120 -
atgttattcagtttactgtcct

SEQ ID NO: 114839 - DNA, 22 bp, Artificial Sequence
  Synthetic oligonucleotide; TTA chr11 5387119 5387140 5387124 5387119 -
tgttattcagtttactgtcctt

SEQ ID NO: 114840 - DNA, 22 bp, Artificial Sequence
  Synthetic oligonucleotide; TTA chr11 5387114 5387135 5387119 5387114 -
ttcagtttactgtccttgaaca

SEQ ID NO: 114841 - DNA, 22 bp, Artificial Sequence
  Synthetic oligonucleotide; TTC chr11 5387111 5387132 5387116 5387111 -
agtttactgtccttgaacacct

SEQ ID NO: 114842 - DNA, 22 bp, Artificial Sequence
  Synthetic oligonucleotide; TTT chr11 5387106 5387127 5387111 5387106 -
actgtccttgaacaccttaact

SEQ ID NO: 114843 - DNA, 22 bp, Artificial Sequence
  Synthetic oligonucleotide; TTA chr11 5387105 5387126 5387110 5387105 -
ctgtccttgaacaccttaactt

SEQ ID NO: 114844 - DNA, 22 bp, Artificial Sequence
  Synthetic oligonucleotide; CTG chr11 5387102 5387123 5387107 5387102 -
tccttgaacaccttaacttctc

SEQ ID NO: 114845 - DNA, 22 bp, Artificial Sequence
  Synthetic oligonucleotide; CTT chr11 5387097 5387118 5387102 5387097 -
gaacaccttaacttctcattca

SEQ ID NO: 114846 - DNA, 22 bp, Artificial Sequence
  Synthetic oligonucleotide; TTG chr11 5387096 5387117 5387101 5387096 -
aacaccttaacttctcattcat

SEQ ID NO: 114847 - DNA, 22 bp, Artificial Sequence
  Synthetic oligonucleotide; CTT chr11 5387088 5387109 5387093 5387088 -
aacttctcattcattatattat

SEQ ID NO: 114848 - DNA, 22 bp, Artificial Sequence
  Synthetic oligonucleotide; TTA chr11 5387087 5387108 5387092 5387087 -
acttctcattcattatattatc

SEQ ID NO: 114849 - DNA, 22 bp, Artificial Sequence
  Synthetic oligonucleotide; CTT chr11 5387083 5387104 5387088 5387083 -
ctcattcattatattatctatt

SEQ ID NO: 114850 - DNA, 22 bp, Artificial Sequence
  Synthetic oligonucleotide; TTC chr11 5387082 5387103 5387087 5387082 -
tcattcattatattatctatta

SEQ ID NO: 114851 - DNA, 22 bp, Artificial Sequence
  Synthetic oligonucleotide; CTC chr11 5387080 5387101 5387085 5387080 -
attcattatattatctattatt

SEQ ID NO: 114852 - DNA, 22 bp, Artificial Sequence
  Synthetic oligonucleotide; TTC chr11 5387076 5387097 5387081 5387076 -
attatattatctattattatta

SEQ ID NO: 114853 - DNA, 22 bp, Artificial Sequence
  Synthetic oligonucleotide; TTA chr11 5387072 5387093 5387077 5387072 -
tattatctattattattattac

SEQ ID NO: 114854 - DNA, 22 bp, Artificial Sequence
  Synthetic oligonucleotide; TTA chr11 5387067 5387088 5387072 5387067 -
tctattattattattacttata

SEQ ID NO: 114855 - DNA, 22 bp, Artificial Sequence
  Synthetic oligonucleotide; CTA chr11 5387063 5387084 5387068 5387063 -
ttattattattacttatacagt

SEQ ID NO: 114856 - DNA, 22 bp, Artificial Sequence
  Synthetic oligonucleotide; TTA chr11 5387060 5387081 5387065 5387060 -
ttattattacttatacagtggt

SEQ ID NO: 114857 - DNA, 22 bp, Artificial Sequence
  Synthetic oligonucleotide; TTA chr11 5387057 5387078 5387062 5387057 -
ttattacttatacagtggtggc

SEQ ID NO: 114858 - DNA, 22 bp, Artificial Sequence
  Synthetic oligonucleotide; TTA chr11 5387054 5387075 5387059 5387054 -
ttacttatacagtggtggctct

SEQ ID NO: 114859 - DNA, 22 bp, Artificial Sequence
  Synthetic oligonucleotide; TTA chr11 5387051 5387072 5387056 5387051 -
cttatacagtggtggctcttag

SEQ ID NO: 114860 - DNA, 22 bp, Artificial Sequence
  Synthetic oligonucleotide; CTT chr11 5387048 5387069 5387053 5387048 -
atacagtggtggctcttagaca

SEQ ID NO: 114861 - DNA, 22 bp, Artificial Sequence
  Synthetic oligonucleotide; TTA chr11 5387047 5387068 5387052 5387047 -
tacagtggtggctcttagacat

SEQ ID NO: 114862 - DNA, 22 bp, Artificial Sequence
  Synthetic oligonucleotide; CTC chr11 5387033 5387054 5387038 5387033 -
ttagacattaatctctagtcca

SEQ ID NO: 114863 - DNA, 22 bp, Artificial Sequence
  Synthetic oligonucleotide; CTT chr11 5387031 5387052 5387036 5387031 -
agacattaatctctagtccaga

SEQ ID NO: 114864 - DNA, 22 bp, Artificial Sequence
  Synthetic oligonucleotide; TTA chr11 5387030 5387051 5387035 5387030 -
gacattaatctctagtccagat

SEQ ID NO: 114865 - DNA, 22 bp, Artificial Sequence
  Synthetic oligonucleotide; TTA chr11 5387023 5387044 5387028 5387023 -
atctctagtccagataactccg

SEQ ID NO: 114866 - DNA, 22 bp, Artificial Sequence
  Synthetic oligonucleotide; CTC chr11 5387018 5387039 5387023 5387018 -
tagtccagataactccgttaca

SEQ ID NO: 114867 - DNA, 22 bp, Artificial Sequence
  Synthetic oligonucleotide; CTA chr11 5387016 5387037 5387021 5387016 -
gtccagataactccgttacata

SEQ ID NO: 114868 - DNA, 22 bp, Artificial Sequence
  Synthetic oligonucleotide; CTC chr11 5387003 5387024 5387008 5387003 -
cgttacatatcaggcctgagtt

SEQ ID NO: 114869 - DNA, 22 bp, Artificial Sequence
  Synthetic oligonucleotide; TTA chr11 5386998 5387019 5387003 5386998 -
catatcaggcctgagtttctgc

SEQ ID NO: 114870 - DNA, 22 bp, Artificial Sequence
  Synthetic oligonucleotide; CTG chr11 5386985 5387006 5386990 5386985 -
agtttctgccttctcactaggt

SEQ ID NO: 114871 - DNA, 22 bp, Artificial Sequence
  Synthetic oligonucleotide; TTT chr11 5386980 5387001 5386985 5386980 -
ctgccttctcactaggtgtttc

SEQ ID NO: 114872 - DNA, 22 bp, Artificial Sequence
  Synthetic oligonucleotide; TTC chr11 5386979 5387000 5386984 5386979 -
tgccttctcactaggtgtttcc

SEQ ID NO: 114873 - DNA, 22 bp, Artificial Sequence
  Synthetic oligonucleotide; CTG chr11 5386977 5386998 5386982 5386977 -
ccttctcactaggtgtttccaa

SEQ ID NO: 114874 - DNA, 22 bp, Artificial Sequence
  Synthetic oligonucleotide; CTT chr11 5386973 5386994 5386978 5386973 -
ctcactaggtgtttccaaaagg

SEQ ID NO: 114875 - DNA, 22 bp, Artificial Sequence
  Synthetic oligonucleotide; TTC chr11 5386972 5386993 5386977 5386972 -
tcactaggtgtttccaaaagga

SEQ ID NO: 114876 - DNA, 22 bp, Artificial Sequence
  Synthetic oligonucleotide; CTC chr11 5386970 5386991 5386975 5386970 -
actaggtgtttccaaaaggata

SEQ ID NO: 114877 - DNA, 22 bp, Artificial Sequence
  Synthetic oligonucleotide; CTA chr11 5386966 5386987 5386971 5386966 -
ggtgtttccaaaaggatactga

SEQ ID NO: 114878 - DNA, 22 bp, Artificial Sequence
  Synthetic oligonucleotide; TTT chr11 5386959 5386980 5386964 5386959 -
ccaaaaggatactgatgaaact

SEQ ID NO: 114879 - DNA, 22 bp, Artificial Sequence
  Synthetic oligonucleotide; TTC chr11 5386958 5386979 5386963 5386958 -
caaaaggatactgatgaaactc

SEQ ID NO: 114880 - DNA, 22 bp, Artificial Sequence
  Synthetic oligonucleotide; CTG chr11 5386945 5386966 5386950 5386945 -
atgaaactcaacacgtctaata

SEQ ID NO: 114881 - DNA, 22 bp, Artificial Sequence
  Synthetic oligonucleotide; CTC chr11 5386936 5386957 5386941 5386936 -
aacacgtctaatattgagccca

SEQ ID NO: 114882 - DNA, 22 bp, Artificial Sequence
  Synthetic oligonucleotide; CTA chr11 5386926 5386947 5386931 5386926 -
atattgagcccagcatccatct

SEQ ID NO: 114883 - DNA, 22 bp, Artificial Sequence
  Synthetic oligonucleotide; TTG chr11 5386920 5386941 5386925 5386920 -
agcccagcatccatcttttcac

SEQ ID NO: 114884 - DNA, 22 bp, Artificial Sequence
  Synthetic oligonucleotide; CTT chr11 5386903 5386924 5386908 5386903 -
ttcacacctgattcttctcata

SEQ ID NO: 114885 - DNA, 22 bp, Artificial Sequence
  Synthetic oligonucleotide; TTT chr11 5386902 5386923 5386907 5386902 -
tcacacctgattcttctcatat

SEQ ID NO: 114886 - DNA, 22 bp, Artificial Sequence
  Synthetic oligonucleotide; TTT chr11 5386901 5386922 5386906 5386901 -
cacacctgattcttctcatatt

SEQ ID NO: 114887 - DNA, 22 bp, Artificial Sequence
  Synthetic oligonucleotide; TTC chr11 5386900 5386921 5386905 5386900 -
acacctgattcttctcatattt

SEQ ID NO: 114888 - DNA, 22 bp, Artificial Sequence
  Synthetic oligonucleotide; CTG chr11 5386893 5386914 5386898 5386893 -
attcttctcatatttatgcatt

SEQ ID NO: 114889 - DNA, 22 bp, Artificial Sequence
  Synthetic oligonucleotide; TTC chr11 5386889 5386910 5386894 5386889 -
ttctcatatttatgcatttttt

SEQ ID NO: 114890 - DNA, 22 bp, Artificial Sequence
  Synthetic oligonucleotide; CTT chr11 5386887 5386908 5386892 5386887 -
ctcatatttatgcattttttat

SEQ ID NO: 114891 - DNA, 22 bp, Artificial Sequence
  Synthetic oligonucleotide; TTC chr11 5386886 5386907 5386891 5386886 -
tcatatttatgcattttttata

SEQ ID NO: 114892 - DNA, 22 bp, Artificial Sequence
  Synthetic oligonucleotide; CTC chr11 5386884 5386905 5386889 5386884 -
atatttatgcattttttataat

SEQ ID NO: 114893 - DNA, 22 bp, Artificial Sequence
  Synthetic oligonucleotide; TTT chr11 5386878 5386899 5386883 5386878 -
atgcattttttataatattatt

SEQ ID NO: 114894 - DNA, 22 bp, Artificial Sequence
  Synthetic oligonucleotide; TTA chr11 5386877 5386898 5386882 5386877 -
tgcattttttataatattattc

SEQ ID NO: 114895 - DNA, 22 bp, Artificial Sequence
  Synthetic oligonucleotide; TTT chr11 5386870 5386891 5386875 5386870 -
tttataatattattcaccattt

SEQ ID NO: 114896 - DNA, 22 bp, Artificial Sequence
  Synthetic oligonucleotide; TTT chr11 5386869 5386890 5386874 5386869 -
ttataatattattcaccatttc

SEQ ID NO: 114897 - DNA, 22 bp, Artificial Sequence
  Synthetic oligonucleotide; TTT chr11 5386868 5386889 5386873 5386868 -
tataatattattcaccatttcc

SEQ ID NO: 114898 - DNA, 22 bp, Artificial Sequence
  Synthetic oligonucleotide; TTT chr11 5386867 5386888 5386872 5386867 -
ataatattattcaccatttcct

SEQ ID NO: 114899 - DNA, 22 bp, Artificial Sequence
  Synthetic oligonucleotide; TTA chr11 5386866 5386887 5386871 5386866 -
taatattattcaccatttcctg

SEQ ID NO: 114900 - DNA, 22 bp, Artificial Sequence
  Synthetic oligonucleotide; TTA chr11 5386858 5386879 5386863 5386858 -
ttcaccatttcctgccattcaa

SEQ ID NO: 114901 - DNA, 22 bp, Artificial Sequence
  Synthetic oligonucleotide; TTC chr11 5386855 5386876 5386860 5386855 -
accatttcctgccattcaagac

SEQ ID NO: 114902 - DNA, 22 bp, Artificial Sequence
  Synthetic oligonucleotide; TTT chr11 5386848 5386869 5386853 5386848 -
cctgccattcaagacaacattt

SEQ ID NO: 114903 - DNA, 22 bp, Artificial Sequence
  Synthetic oligonucleotide; TTC chr11 5386847 5386868 5386852 5386847 -
ctgccattcaagacaacatttt

SEQ ID NO: 114904 - DNA, 22 bp, Artificial Sequence
  Synthetic oligonucleotide; CTG chr11 5386844 5386865 5386849 5386844 -
ccattcaagacaacatttttga

SEQ ID NO: 114905 - DNA, 22 bp, Artificial Sequence
  Synthetic oligonucleotide; TTC chr11 5386838 5386859 5386843 5386838 -
aagacaacatttttgagctgat

SEQ ID NO: 114906 - DNA, 22 bp, Artificial Sequence
  Synthetic oligonucleotide; TTT chr11 5386826 5386847 5386831 5386826 -
ttgagctgatgctctactcaac

SEQ ID NO: 114907 - DNA, 22 bp, Artificial Sequence
  Synthetic oligonucleotide; TTT chr11 5386825 5386846 5386830 5386825 -
tgagctgatgctctactcaacc

SEQ ID NO: 114908 - DNA, 22 bp, Artificial Sequence
  Synthetic oligonucleotide; TTT chr11 5386824 5386845 5386829 5386824 -
gagctgatgctctactcaaccc

SEQ ID NO: 114909 - DNA, 22 bp, Artificial Sequence
  Synthetic oligonucleotide; TTG chr11 5386823 5386844 5386828 5386823 -
agctgatgctctactcaaccct

SEQ ID NO: 114910 - DNA, 22 bp, Artificial Sequence
  Synthetic oligonucleotide; CTG chr11 5386818 5386839 5386823 5386818 -
atgctctactcaaccctctccc

SEQ ID NO: 114911 - DNA, 22 bp, Artificial Sequence
  Synthetic oligonucleotide; CTC chr11 5386812 5386833 5386817 5386812 -
tactcaaccctctccctctttc

SEQ ID NO: 114912 - DNA, 22 bp, Artificial Sequence
  Synthetic oligonucleotide; CTA chr11 5386810 5386831 5386815 5386810 -
ctcaaccctctccctctttctg

SEQ ID NO: 114913 - DNA, 22 bp, Artificial Sequence
  Synthetic oligonucleotide; CTC chr11 5386807 5386828 5386812 5386807 -
aaccctctccctctttctgtat

SEQ ID NO: 114914 - DNA, 22 bp, Artificial Sequence
  Synthetic oligonucleotide; CTC chr11 5386800 5386821 5386805 5386800 -
tccctctttctgtatctaattt

SEQ ID NO: 114915 - DNA, 22 bp, Artificial Sequence
  Synthetic oligonucleotide; CTC chr11 5386798 5386819 5386803 5386798 -
cctctttctgtatctaattttt

SEQ ID NO: 114916 - DNA, 22 bp, Artificial Sequence
  Synthetic oligonucleotide; CTC chr11 5386794 5386815 5386799 5386794 -
tttctgtatctaatttttaact

SEQ ID NO: 114917 - DNA, 22 bp, Artificial Sequence
  Synthetic oligonucleotide; CTT chr11 5386792 5386813 5386797 5386792 -
tctgtatctaatttttaactaa

SEQ ID NO: 114918 - DNA, 22 bp, Artificial Sequence
  Synthetic oligonucleotide; TTT chr11 5386791 5386812 5386796 5386791 -
ctgtatctaatttttaactaag

SEQ ID NO: 114919 - DNA, 22 bp, Artificial Sequence
  Synthetic oligonucleotide; TTC chr11 5386790 5386811 5386795 5386790 -
tgtatctaatttttaactaagt

SEQ ID NO: 114920 - DNA, 22 bp, Artificial Sequence
  Synthetic oligonucleotide; CTG chr11 5386788 5386809 5386793 5386788 -
tatctaatttttaactaagttc

SEQ ID NO: 114921 - DNA, 22 bp, Artificial Sequence
  Synthetic oligonucleotide; CTA chr11 5386782 5386803 5386787 5386782 -
atttttaactaagttcttttaa

SEQ ID NO: 114922 - DNA, 22 bp, Artificial Sequence
  Synthetic oligonucleotide; TTT chr11 5386778 5386799 5386783 5386778 -
ttaactaagttcttttaatcta

SEQ ID NO: 114923 - DNA, 22 bp, Artificial Sequence
  Synthetic oligonucleotide; TTT chr11 5386777 5386798 5386782 5386777 -
taactaagttcttttaatctat

SEQ ID NO: 114924 - DNA, 22 bp, Artificial Sequence
  Synthetic oligonucleotide; TTT chr11 5386776 5386797 5386781 5386776 -
aactaagttcttttaatctatc

SEQ ID NO: 114925 - DNA, 22 bp, Artificial Sequence
  Synthetic oligonucleotide; TTA chr11 5386775 5386796 5386780 5386775 -
actaagttcttttaatctatcc

SEQ ID NO: 114926 - DNA, 22 bp, Artificial Sequence
  Synthetic oligonucleotide; CTA chr11 5386771 5386792 5386776 5386771 -
agttcttttaatctatccctgt

SEQ ID NO: 114927 - DNA, 22 bp, Artificial Sequence
  Synthetic oligonucleotide; TTC chr11 5386766 5386787 5386771 5386766 -
ttttaatctatccctgtaatct

SEQ ID NO: 114928 - DNA, 22 bp, Artificial Sequence
  Synthetic oligonucleotide; CTT chr11 5386764 5386785 5386769 5386764 -
ttaatctatccctgtaatctat

SEQ ID NO: 114929 - DNA, 22 bp, Artificial Sequence
  Synthetic oligonucleotide; TTT chr11 5386763 5386784 5386768 5386763 -
taatctatccctgtaatctatt

SEQ ID NO: 114930 - DNA, 22 bp, Artificial Sequence
  Synthetic oligonucleotide; TTT chr11 5386762 5386783 5386767 5386762 -
aatctatccctgtaatctattc

SEQ ID NO: 114931 - DNA, 22 bp, Artificial Sequence
  Synthetic oligonucleotide; TTA chr11 5386761 5386782 5386766 5386761 -
atctatccctgtaatctattca

SEQ ID NO: 114932 - DNA, 22 bp, Artificial Sequence
  Synthetic oligonucleotide; CTA chr11 5386756 5386777 5386761 5386756 -
tccctgtaatctattcatcttc

SEQ ID NO: 114933 - DNA, 22 bp, Artificial Sequence
  Synthetic oligonucleotide; CTG chr11 5386750 5386771 5386755 5386750 -
taatctattcatcttcatctct

SEQ ID NO: 114934 - DNA, 22 bp, Artificial Sequence
  Synthetic oligonucleotide; CTA chr11 5386743 5386764 5386748 5386743 -
ttcatcttcatctctgtagcca

SEQ ID NO: 114935 - DNA, 22 bp, Artificial Sequence
  Synthetic oligonucleotide; TTC chr11 5386740 5386761 5386745 5386740 -
atcttcatctctgtagccaatg

SEQ ID NO: 114936 - DNA, 22 bp, Artificial Sequence
  Synthetic oligonucleotide; CTT chr11 5386735 5386756 5386740 5386735 -
catctctgtagccaatgtcctt

SEQ ID NO: 114937 - DNA, 22 bp, Artificial Sequence
  Synthetic oligonucleotide; TTC chr11 5386734 5386755 5386739 5386734 -
atctctgtagccaatgtccttg

SEQ ID NO: 114938 - DNA, 22 bp, Artificial Sequence
  Synthetic oligonucleotide; CTC chr11 5386729 5386750 5386734 5386729 -
tgtagccaatgtccttgttctt

SEQ ID NO: 114939 - DNA, 22 bp, Artificial Sequence
  Synthetic oligonucleotide; CTG chr11 5386727 5386748 5386732 5386727 -
tagccaatgtccttgttcttag

SEQ ID NO: 114940 - DNA, 22 bp, Artificial Sequence
  Synthetic oligonucleotide; CTT chr11 5386713 5386734 5386718 5386713 -
gttcttagcttttccacacctg

SEQ ID NO: 114941 - DNA, 22 bp, Artificial Sequence
  Synthetic oligonucleotide; TTG chr11 5386712 5386733 5386717 5386712 -
ttcttagcttttccacacctgc

SEQ ID NO: 114942 - DNA, 22 bp, Artificial Sequence
  Synthetic oligonucleotide; TTC chr11 5386709 5386730 5386714 5386709 -
ttagcttttccacacctgcttg

SEQ ID NO: 114943 - DNA, 22 bp, Artificial Sequence
  Synthetic oligonucleotide; CTT chr11 5386707 5386728 5386712 5386707 -
agcttttccacacctgcttgcc

SEQ ID NO: 114944 - DNA, 22 bp, Artificial Sequence
  Synthetic oligonucleotide; TTA chr11 5386706 5386727 5386711 5386706 -
gcttttccacacctgcttgcct

SEQ ID NO: 114945 - DNA, 22 bp, Artificial Sequence
  Synthetic oligonucleotide; CTT chr11 5386702 5386723 5386707 5386702 -
ttccacacctgcttgcctgacc

SEQ ID NO: 114946 - DNA, 22 bp, Artificial Sequence
  Synthetic oligonucleotide; TTT chr11 5386701 5386722 5386706 5386701 -
tccacacctgcttgcctgacct

SEQ ID NO: 114947 - DNA, 22 bp, Artificial Sequence
  Synthetic oligonucleotide; TTT chr11 5386700 5386721 5386705 5386700 -
ccacacctgcttgcctgacctg

SEQ ID NO: 114948 - DNA, 22 bp, Artificial Sequence
  Synthetic oligonucleotide; TTC chr11 5386699 5386720 5386704 5386699 -
cacacctgcttgcctgacctgt

SEQ ID NO: 114949 - DNA, 22 bp, Artificial Sequence
  Synthetic oligonucleotide; CTG chr11 5386691 5386712 5386696 5386691 -
cttgcctgacctgtcattcaac

SEQ ID NO: 114950 - DNA, 22 bp, Artificial Sequence
  Synthetic oligonucleotide; CTT chr11 5386688 5386709 5386693 5386688 -
gcctgacctgtcattcaacatg

SEQ ID NO: 114951 - DNA, 22 bp, Artificial Sequence
  Synthetic oligonucleotide; TTG chr11 5386687 5386708 5386692 5386687 -
cctgacctgtcattcaacatgc

SEQ ID NO: 114952 - DNA, 22 bp, Artificial Sequence
  Synthetic oligonucleotide; CTG chr11 5386683 5386704 5386688 5386683 -
acctgtcattcaacatgcaaag

SEQ ID NO: 114953 - DNA, 22 bp, Artificial Sequence
  Synthetic oligonucleotide; CTG chr11 5386678 5386699 5386683 5386678 -
tcattcaacatgcaaagccagg

SEQ ID NO: 114954 - DNA, 22 bp, Artificial Sequence
  Synthetic oligonucleotide; TTC chr11 5386672 5386693 5386677 5386672 -
aacatgcaaagccaggctcctc

SEQ ID NO: 114955 - DNA, 22 bp, Artificial Sequence
  Synthetic oligonucleotide; CTC chr11 5386653 5386674 5386658 5386653 -
ctccttcccttggtccatcctc

SEQ ID NO: 114956 - DNA, 22 bp, Artificial Sequence
  Synthetic oligonucleotide; CTC chr11 5386650 5386671 5386655 5386650 -
cttcccttggtccatcctctac

SEQ ID NO: 114957 - DNA, 22 bp, Artificial Sequence
  Synthetic oligonucleotide; CTT chr11 5386647 5386668 5386652 5386647 -
cccttggtccatcctctactgc

SEQ ID NO: 114958 - DNA, 22 bp, Artificial Sequence
  Synthetic oligonucleotide; TTC chr11 5386646 5386667 5386651 5386646 -
ccttggtccatcctctactgca

SEQ ID NO: 114959 - DNA, 22 bp, Artificial Sequence
  Synthetic oligonucleotide; CTT chr11 5386642 5386663 5386647 5386642 -
ggtccatcctctactgcagcca

SEQ ID NO: 114960 - DNA, 22 bp, Artificial Sequence
  Synthetic oligonucleotide; TTG chr11 5386641 5386662 5386646 5386641 -
gtccatcctctactgcagccac

SEQ ID NO: 114961 - DNA, 22 bp, Artificial Sequence
  Synthetic oligonucleotide; CTC chr11 5386631 5386652 5386636 5386631 -
tactgcagccaccgagattatg

SEQ ID NO: 114962 - DNA, 22 bp, Artificial Sequence
  Synthetic oligonucleotide; CTA chr11 5386629 5386650 5386634 5386629 -
ctgcagccaccgagattatgca

SEQ ID NO: 114963 - DNA, 22 bp, Artificial Sequence
  Synthetic oligonucleotide; CTG chr11 5386626 5386647 5386631 5386626 -
cagccaccgagattatgcagaa

SEQ ID NO: 114964 - DNA, 22 bp, Artificial Sequence
  Synthetic oligonucleotide; TTA chr11 5386611 5386632 5386616 5386611 -
tgcagaaagtactaactctatg

SEQ ID NO: 114965 - DNA, 22 bp, Artificial Sequence
  Synthetic oligonucleotide; CTA chr11 5386597 5386618 5386602 5386597 -
actctatgaatcactgcactgt

SEQ ID NO: 114966 - DNA, 22 bp, Artificial Sequence
  Synthetic oligonucleotide; CTC chr11 5386593 5386614 5386598 5386593 -
tatgaatcactgcactgttttc

SEQ ID NO: 114967 - DNA, 22 bp, Artificial Sequence
  Synthetic oligonucleotide; CTA chr11 5386591 5386612 5386596 5386591 -
tgaatcactgcactgttttcag

SEQ ID NO: 114968 - DNA, 22 bp, Artificial Sequence
  Synthetic oligonucleotide; CTG chr11 5386581 5386602 5386586 5386581 -
cactgttttcagtacttcagta

SEQ ID NO: 114969 - DNA, 22 bp, Artificial Sequence
  Synthetic oligonucleotide; CTG chr11 5386576 5386597 5386581 5386576 -
ttttcagtacttcagtagctcc

SEQ ID NO: 114970 - DNA, 22 bp, Artificial Sequence
  Synthetic oligonucleotide; TTT chr11 5386573 5386594 5386578 5386573 -
tcagtacttcagtagctcctat

SEQ ID NO: 114971 - DNA, 22 bp, Artificial Sequence
  Synthetic oligonucleotide; TTT chr11 5386572 5386593 5386577 5386572 -
cagtacttcagtagctcctatc

SEQ ID NO: 114972 - DNA, 22 bp, Artificial Sequence
  Synthetic oligonucleotide; TTC chr11 5386571 5386592 5386576 5386571 -
agtacttcagtagctcctatca

SEQ ID NO: 114973 - DNA, 22 bp, Artificial Sequence
  Synthetic oligonucleotide; CTT chr11 5386564 5386585 5386569 5386564 -
cagtagctcctatcattagaat

SEQ ID NO: 114974 - DNA, 22 bp, Artificial Sequence
  Synthetic oligonucleotide; TTC chr11 5386563 5386584 5386568 5386563 -
agtagctcctatcattagaata

SEQ ID NO: 114975 - DNA, 22 bp, Artificial Sequence
  Synthetic oligonucleotide; CTC chr11 5386555 5386576 5386560 5386555 -
ctatcattagaataaagttcaa

SEQ ID NO: 114976 - DNA, 22 bp, Artificial Sequence
  Synthetic oligonucleotide; CTA chr11 5386552 5386573 5386557 5386552 -
tcattagaataaagttcaaact

SEQ ID NO: 114977 - DNA, 22 bp, Artificial Sequence
  Synthetic oligonucleotide; TTA chr11 5386546 5386567 5386551 5386546 -
gaataaagttcaaacttgtaaa

SEQ ID NO: 114978 - DNA, 22 bp, Artificial Sequence
  Synthetic oligonucleotide; TTC chr11 5386535 5386556 5386540 5386535 -
aaacttgtaaaagatctgtggt

SEQ ID NO: 114979 - DNA, 22 bp, Artificial Sequence
  Synthetic oligonucleotide; CTT chr11 5386529 5386550 5386534 5386529 -
gtaaaagatctgtggtgatagt

SEQ ID NO: 114980 - DNA, 22 bp, Artificial Sequence
  Synthetic oligonucleotide; TTG chr11 5386528 5386549 5386533 5386528 -
taaaagatctgtggtgatagtc

SEQ ID NO: 114981 - DNA, 22 bp, Artificial Sequence
  Synthetic oligonucleotide; CTG chr11 5386517 5386538 5386522 5386517 -
tggtgatagtccaatttattga

SEQ ID NO: 114982 - DNA, 22 bp, Artificial Sequence
  Synthetic oligonucleotide; TTT chr11 5386500 5386521 5386505 5386500 -
attgaggccatacatgatttag

SEQ ID NO: 114983 - DNA, 22 bp, Artificial Sequence
  Synthetic oligonucleotide; TTA chr11 5386499 5386520 5386504 5386499 -
ttgaggccatacatgatttaga

SEQ ID NO: 114984 - DNA, 22 bp, Artificial Sequence
  Synthetic oligonucleotide; TTG chr11 5386496 5386517 5386501 5386496 -
aggccatacatgatttagatgc

SEQ ID NO: 114985 - DNA, 22 bp, Artificial Sequence
  Synthetic oligonucleotide; TTT chr11 5386480 5386501 5386485 5386480 -
agatgctgtgaaaagcttgaca

SEQ ID NO: 114986 - DNA, 22 bp, Artificial Sequence
  Synthetic oligonucleotide; TTA chr11 5386479 5386500 5386484 5386479 -
gatgctgtgaaaagcttgacat

SEQ ID NO: 114987 - DNA, 22 bp, Artificial Sequence
  Synthetic oligonucleotide; CTG chr11 5386472 5386493 5386477 5386472 -
tgaaaagcttgacataatcatg

SEQ ID NO: 114988 - DNA, 22 bp, Artificial Sequence
  Synthetic oligonucleotide; CTT chr11 5386462 5386483 5386467 5386462 -
gacataatcatgaatatttcat

SEQ ID NO: 114989 - DNA, 22 bp, Artificial Sequence
  Synthetic oligonucleotide; TTG chr11 5386461 5386482 5386466 5386461 -
acataatcatgaatatttcatg

SEQ ID NO: 114990 - DNA, 22 bp, Artificial Sequence
  Synthetic oligonucleotide; TTT chr11 5386443 5386464 5386448 5386443 -
catgtaactatgaaacatttta

SEQ ID NO: 114991 - DNA, 22 bp, Artificial Sequence
  Synthetic oligonucleotide; TTC chr11 5386442 5386463 5386447 5386442 -
atgtaactatgaaacattttat

SEQ ID NO: 114992 - DNA, 22 bp, Artificial Sequence
  Synthetic oligonucleotide; CTA chr11 5386433 5386454 5386438 5386433 -
tgaaacattttattactacttc

SEQ ID NO: 114993 - DNA, 22 bp, Artificial Sequence
  Synthetic oligonucleotide; TTT chr11 5386423 5386444 5386428 5386423 -
tattactacttcacaaggagaa

SEQ ID NO: 114994 - DNA, 22 bp, Artificial Sequence
  Synthetic oligonucleotide; TTT chr11 5386422 5386443 5386427 5386422 -
attactacttcacaaggagaaa

SEQ ID NO: 114995 - DNA, 22 bp, Artificial Sequence
  Synthetic oligonucleotide; TTA chr11 5386421 5386442 5386426 5386421 -
ttactacttcacaaggagaaaa

SEQ ID NO: 114996 - DNA, 22 bp, Artificial Sequence
  Synthetic oligonucleotide; TTA chr11 5386418 5386439 5386423 5386418 -
ctacttcacaaggagaaaacta

SEQ ID NO: 114997 - DNA, 22 bp, Artificial Sequence
  Synthetic oligonucleotide; CTA chr11 5386415 5386436 5386420 5386415 -
cttcacaaggagaaaactacaa

SEQ ID NO: 114998 - DNA, 22 bp, Artificial Sequence
  Synthetic oligonucleotide; CTT chr11 5386412 5386433 5386417 5386412 -
cacaaggagaaaactacaaaaa

SEQ ID NO: 114999 - DNA, 22 bp, Artificial Sequence
  Synthetic oligonucleotide; TTC chr11 5386411 5386432 5386416 5386411 -
acaaggagaaaactacaaaaag

SEQ ID NO: 115000 - DNA, 22 bp, Artificial Sequence
  Synthetic oligonucleotide; CTA chr11 5386396 5386417 5386401 5386396 -
caaaaaggtaaacaatcatccc

SEQ ID NO: 115001 - DNA, 22 bp, Artificial Sequence
  Synthetic oligonucleotide; CTG chr11 5386366 5386387 5386371 5386366 -
gtagtgagcgaaaatcaggata

SEQ ID NO: 115002 - DNA, 22 bp, Artificial Sequence
  Synthetic oligonucleotide; CTT chr11 5386331 5386352 5386336 5386331 -
tgtctctctatgcatggccctg

SEQ ID NO: 115003 - DNA, 22 bp, Artificial Sequence
  Synthetic oligonucleotide; TTT chr11 5386330 5386351 5386335 5386330 -
gtctctctatgcatggccctgg

SEQ ID NO: 115004 - DNA, 22 bp, Artificial Sequence
  Synthetic oligonucleotide; TTG chr11 5386329 5386350 5386334 5386329 -
tctctctatgcatggccctggt

SEQ ID NO: 115005 - DNA, 22 bp, Artificial Sequence
  Synthetic oligonucleotide; CTC chr11 5386325 5386346 5386330 5386325 -
tctatgcatggccctggtagcc

SEQ ID NO: 115006 - DNA, 22 bp, Artificial Sequence
  Synthetic oligonucleotide; CTC chr11 5386323 5386344 5386328 5386323 -
tatgcatggccctggtagcctc

SEQ ID NO: 115007 - DNA, 22 bp, Artificial Sequence
  Synthetic oligonucleotide; CTA chr11 5386321 5386342 5386326 5386321 -
tgcatggccctggtagcctcaa

SEQ ID NO: 115008 - DNA, 22 bp, Artificial Sequence
  Synthetic oligonucleotide; CTG chr11 5386309 5386330 5386314 5386309 -
gtagcctcaaacaccctgtaac

SEQ ID NO: 115009 - DNA, 22 bp, Artificial Sequence
  Synthetic oligonucleotide; CTC chr11 5386301 5386322 5386306 5386301 -
aaacaccctgtaacaccatctt

SEQ ID NO: 115010 - DNA, 22 bp, Artificial Sequence
  Synthetic oligonucleotide; CTG chr11 5386291 5386312 5386296 5386291 -
taacaccatctttagcccggtc

SEQ ID NO: 115011 - DNA, 22 bp, Artificial Sequence
  Synthetic oligonucleotide; CTT chr11 5386279 5386300 5386284 5386279 -
tagcccggtccttcttgttttg

SEQ ID NO: 115012 - DNA, 22 bp, Artificial Sequence
  Synthetic oligonucleotide; TTT chr11 5386278 5386299 5386283 5386278 -
agcccggtccttcttgttttgg

SEQ ID NO: 115013 - DNA, 22 bp, Artificial Sequence
  Synthetic oligonucleotide; TTA chr11 5386277 5386298 5386282 5386277 -
gcccggtccttcttgttttggc

SEQ ID NO: 115014 - DNA, 22 bp, Artificial Sequence
  Synthetic oligonucleotide; CTT chr11 5386266 5386287 5386271 5386266 -
cttgttttggcacctttccaaa

SEQ ID NO: 115015 - DNA, 22 bp, Artificial Sequence
  Synthetic oligonucleotide; TTC chr11 5386265 5386286 5386270 5386265 -
ttgttttggcacctttccaaac

SEQ ID NO: 115016 - DNA, 22 bp, Artificial Sequence
  Synthetic oligonucleotide; CTT chr11 5386263 5386284 5386268 5386263 -
gttttggcacctttccaaaccc

SEQ ID NO: 115017 - DNA, 22 bp, Artificial Sequence
  Synthetic oligonucleotide; TTG chr11 5386262 5386283 5386267 5386262 -
ttttggcacctttccaaaccca

SEQ ID NO: 115018 - DNA, 22 bp, Artificial Sequence
  Synthetic oligonucleotide; TTT chr11 5386259 5386280 5386264 5386259 -
tggcacctttccaaacccatct

SEQ ID NO: 115019 - DNA, 22 bp, Artificial Sequence
  Synthetic oligonucleotide; TTT chr11 5386258 5386279 5386263 5386258 -
ggcacctttccaaacccatctt

SEQ ID NO: 115020 - DNA, 22 bp, Artificial Sequence
  Synthetic oligonucleotide; TTG chr11 5386257 5386278 5386262 5386257 -
gcacctttccaaacccatcttt

SEQ ID NO: 115021 - DNA, 22 bp, Artificial Sequence
  Synthetic oligonucleotide; CTT chr11 5386250 5386271 5386255 5386250 -
tccaaacccatcttttcccagt

SEQ ID NO: 115022 - DNA, 22 bp, Artificial Sequence
  Synthetic oligonucleotide; TTT chr11 5386249 5386270 5386254 5386249 -
ccaaacccatcttttcccagtc

SEQ ID NO: 115023 - DNA, 22 bp, Artificial Sequence
  Synthetic oligonucleotide; TTC chr11 5386248 5386269 5386253 5386248 -
caaacccatcttttcccagtca

SEQ ID NO: 115024 - DNA, 22 bp, Artificial Sequence
  Synthetic oligonucleotide; CTT chr11 5386236 5386257 5386241 5386236 -
ttcccagtcaacacacccatat

SEQ ID NO: 115025 - DNA, 22 bp, Artificial Sequence
  Synthetic oligonucleotide; TTT chr11 5386235 5386256 5386240 5386235 -
tcccagtcaacacacccatatc

SEQ ID NO: 115026 - DNA, 22 bp, Artificial Sequence
  Synthetic oligonucleotide; TTT chr11 5386234 5386255 5386239 5386234 -
cccagtcaacacacccatatca

SEQ ID NO: 115027 - DNA, 22 bp, Artificial Sequence
  Synthetic oligonucleotide; TTC chr11 5386233 5386254 5386238 5386233 -
ccagtcaacacacccatatcat

SEQ ID NO: 115028 - DNA, 22 bp, Artificial Sequence
  Synthetic oligonucleotide; TTT chr11 5386209 5386230 5386214 5386209 -
ttttcttcaattccctacacat

SEQ ID NO: 115029 - DNA, 22 bp, Artificial Sequence
  Synthetic oligonucleotide; TTT chr11 5386208 5386229 5386213 5386208 -
tttcttcaattccctacacata

SEQ ID NO: 115030 - DNA, 22 bp, Artificial Sequence
  Synthetic oligonucleotide; TTT chr11 5386207 5386228 5386212 5386207 -
ttcttcaattccctacacatac

SEQ ID NO: 115031 - DNA, 22 bp, Artificial Sequence
  Synthetic oligonucleotide; TTT chr11 5386206 5386227 5386211 5386206 -
tcttcaattccctacacatact

SEQ ID NO: 115032 - DNA, 22 bp, Artificial Sequence
  Synthetic oligonucleotide; TTT chr11 5386205 5386226 5386210 5386205 -
cttcaattccctacacatactt

SEQ ID NO: 115033 - DNA, 22 bp, Artificial Sequence
  Synthetic oligonucleotide; TTC chr11 5386204 5386225 5386209 5386204 -
ttcaattccctacacatacttt

SEQ ID NO: 115034 - DNA, 22 bp, Artificial Sequence
  Synthetic oligonucleotide; CTT chr11 5386202 5386223 5386207 5386202 -
caattccctacacatacttttc

SEQ ID NO: 115035 - DNA, 22 bp, Artificial Sequence
  Synthetic oligonucleotide; TTC chr11 5386201 5386222 5386206 5386201 -
aattccctacacatacttttct

SEQ ID NO: 115036 - DNA, 22 bp, Artificial Sequence
  Synthetic oligonucleotide; TTC chr11 5386196 5386217 5386201 5386196 -
cctacacatacttttcttgttt

SEQ ID NO: 115037 - DNA, 22 bp, Artificial Sequence
  Synthetic oligonucleotide; CTA chr11 5386192 5386213 5386197 5386192 -
cacatacttttcttgtttttat

SEQ ID NO: 115038 - DNA, 22 bp, Artificial Sequence
  Synthetic oligonucleotide; CTT chr11 5386183 5386204 5386188 5386183 -
ttcttgtttttattcttctata

SEQ ID NO: 115039 - DNA, 22 bp, Artificial Sequence
  Synthetic oligonucleotide; TTT chr11 5386182 5386203 5386187 5386182 -
tcttgtttttattcttctatat

SEQ ID NO: 115040 - DNA, 22 bp, Artificial Sequence
  Synthetic oligonucleotide; TTT chr11 5386181 5386202 5386186 5386181 -
cttgtttttattcttctatatt

SEQ ID NO: 115041 - DNA, 22 bp, Artificial Sequence
  Synthetic oligonucleotide; TTC chr11 5386180 5386201 5386185 5386180 -
ttgtttttattcttctatattt

SEQ ID NO: 115042 - DNA, 22 bp, Artificial Sequence
  Synthetic oligonucleotide; CTT chr11 5386178 5386199 5386183 5386178 -
gtttttattcttctatatttat

SEQ ID NO: 115043 - DNA, 22 bp, Artificial Sequence
  Synthetic oligonucleotide; TTG chr11 5386177 5386198 5386182 5386177 -
tttttattcttctatatttatt

SEQ ID NO: 115044 - DNA, 22 bp, Artificial Sequence
  Synthetic oligonucleotide; TTT chr11 5386174 5386195 5386179 5386174 -
ttattcttctatatttattgct

SEQ ID NO: 115045 - DNA, 22 bp, Artificial Sequence
  Synthetic oligonucleotide; TTT chr11 5386173 5386194 5386178 5386173 -
tattcttctatatttattgctt

SEQ ID NO: 115046 - DNA, 22 bp, Artificial Sequence
  Synthetic oligonucleotide; TTT chr11 5386172 5386193 5386177 5386172 -
attcttctatatttattgcttt

SEQ ID NO: 115047 - DNA, 22 bp, Artificial Sequence
  Synthetic oligonucleotide; TTA chr11 5386171 5386192 5386176 5386171 -
ttcttctatatttattgctttc

SEQ ID NO: 115048 - DNA, 22 bp, Artificial Sequence
  Synthetic oligonucleotide; TTC chr11 5386168 5386189 5386173 5386168 -
ttctatatttattgctttcttg

SEQ ID NO: 115049 - DNA, 22 bp, Artificial Sequence
  Synthetic oligonucleotide; CTT chr11 5386166 5386187 5386171 5386166 -
ctatatttattgctttcttggc

SEQ ID NO: 115050 - DNA, 22 bp, Artificial Sequence
  Synthetic oligonucleotide; TTC chr11 5386165 5386186 5386170 5386165 -
tatatttattgctttcttggca

SEQ ID NO: 115051 - DNA, 22 bp, Artificial Sequence
  Synthetic oligonucleotide; CTA chr11 5386163 5386184 5386168 5386163 -
tatttattgctttcttggcaaa

SEQ ID NO: 115052 - DNA, 22 bp, Artificial Sequence
  Synthetic oligonucleotide; TTT chr11 5386158 5386179 5386163 5386158 -
attgctttcttggcaaaaacca

SEQ ID NO: 115053 - DNA, 22 bp, Artificial Sequence
  Synthetic oligonucleotide; TTA chr11 5386157 5386178 5386162 5386157 -
ttgctttcttggcaaaaaccac

SEQ ID NO: 115054 - DNA, 22 bp, Artificial Sequence
  Synthetic oligonucleotide; TTG chr11 5386154 5386175 5386159 5386154 -
ctttcttggcaaaaaccacccc

SEQ ID NO: 115055 - DNA, 22 bp, Artificial Sequence
  Synthetic oligonucleotide; CTT chr11 5386151 5386172 5386156 5386151 -
tcttggcaaaaaccacccctgt

SEQ ID NO: 115056 - DNA, 22 bp, Artificial Sequence
  Synthetic oligonucleotide; TTT chr11 5386150 5386171 5386155 5386150 -
cttggcaaaaaccacccctgtt

SEQ ID NO: 115057 - DNA, 22 bp, Artificial Sequence
  Synthetic oligonucleotide; TTC chr11 5386149 5386170 5386154 5386149 -
ttggcaaaaaccacccctgttt

SEQ ID NO: 115058 - DNA, 22 bp, Artificial Sequence
  Synthetic oligonucleotide; CTT chr11 5386147 5386168 5386152 5386147 -
ggcaaaaaccacccctgttttt

SEQ ID NO: 115059 - DNA, 22 bp, Artificial Sequence
  Synthetic oligonucleotide; TTG chr11 5386146 5386167 5386151 5386146 -
gcaaaaaccacccctgtttttc

SEQ ID NO: 115060 - DNA, 22 bp, Artificial Sequence
  Synthetic oligonucleotide; CTG chr11 5386130 5386151 5386135 5386130 -
tttttccaaccagtaaacactt

SEQ ID NO: 115061 - DNA, 22 bp, Artificial Sequence
  Synthetic oligonucleotide; TTT chr11 5386127 5386148 5386132 5386127 -
ttccaaccagtaaacacttgcg

SEQ ID NO: 115062 - DNA, 22 bp, Artificial Sequence
  Synthetic oligonucleotide; TTT chr11 5386126 5386147 5386131 5386126 -
tccaaccagtaaacacttgcgg

SEQ ID NO: 115063 - DNA, 22 bp, Artificial Sequence
  Synthetic oligonucleotide; TTT chr11 5386125 5386146 5386130 5386125 -
ccaaccagtaaacacttgcgga

SEQ ID NO: 115064 - DNA, 22 bp, Artificial Sequence
  Synthetic oligonucleotide; TTC chr11 5386124 5386145 5386129 5386124 -
caaccagtaaacacttgcggat

SEQ ID NO: 115065 - DNA, 22 bp, Artificial Sequence
  Synthetic oligonucleotide; CTT chr11 5386108 5386129 5386113 5386108 -
gcggatcctttaagacttagta

SEQ ID NO: 115066 - DNA, 22 bp, Artificial Sequence
  Synthetic oligonucleotide; TTG chr11 5386107 5386128 5386112 5386107 -
cggatcctttaagacttagtac

SEQ ID NO: 115067 - DNA, 22 bp, Artificial Sequence
  Synthetic oligonucleotide; CTT chr11 5386098 5386119 5386103 5386098 -
taagacttagtacaaatatcac

SEQ ID NO: 115068 - DNA, 22 bp, Artificial Sequence
  Synthetic oligonucleotide; TTT chr11 5386097 5386118 5386102 5386097 -
aagacttagtacaaatatcact

SEQ ID NO: 115069 - DNA, 22 bp, Artificial Sequence
  Synthetic oligonucleotide; TTA chr11 5386096 5386117 5386101 5386096 -
agacttagtacaaatatcactt

SEQ ID NO: 115070 - DNA, 22 bp, Artificial Sequence
  Synthetic oligonucleotide; CTT chr11 5386090 5386111 5386095 5386090 -
agtacaaatatcacttcttctg

SEQ ID NO: 115071 - DNA, 22 bp, Artificial Sequence
  Synthetic oligonucleotide; TTA chr11 5386089 5386110 5386094 5386089 -
gtacaaatatcacttcttctgt

SEQ ID NO: 115072 - DNA, 22 bp, Artificial Sequence
  Synthetic oligonucleotide; CTT chr11 5386074 5386095 5386079 5386074 -
cttctgtcaaatctctcctgac

SEQ ID NO: 115073 - DNA, 22 bp, Artificial Sequence
  Synthetic oligonucleotide; TTC chr11 5386073 5386094 5386078 5386073 -
ttctgtcaaatctctcctgact

SEQ ID NO: 115074 - DNA, 22 bp, Artificial Sequence
  Synthetic oligonucleotide; CTT chr11 5386071 5386092 5386076 5386071 -
ctgtcaaatctctcctgacttc

SEQ ID NO: 115075 - DNA, 22 bp, Artificial Sequence
  Synthetic oligonucleotide; TTC chr11 5386070 5386091 5386075 5386070 -
tgtcaaatctctcctgacttcc

SEQ ID NO: 115076 - DNA, 22 bp, Artificial Sequence
  Synthetic oligonucleotide; CTG chr11 5386068 5386089 5386073 5386068 -
tcaaatctctcctgacttcctt

SEQ ID NO: 115077 - DNA, 22 bp, Artificial Sequence
  Synthetic oligonucleotide; CTC chr11 5386059 5386080 5386064 5386059 -
tcctgacttccttctgtagcat

SEQ ID NO: 115078 - DNA, 22 bp, Artificial Sequence
  Synthetic oligonucleotide; CTC chr11 5386057 5386078 5386062 5386057 -
ctgacttccttctgtagcatta

SEQ ID NO: 115079 - DNA, 22 bp, Artificial Sequence
  Synthetic oligonucleotide; CTG chr11 5386054 5386075 5386059 5386054 -
acttccttctgtagcattaggt

SEQ ID NO: 115080 - DNA, 22 bp, Artificial Sequence
  Synthetic oligonucleotide; CTT chr11 5386050 5386071 5386055 5386050 -
ccttctgtagcattaggtacat

SEQ ID NO: 115081 - DNA, 22 bp, Artificial Sequence
  Synthetic oligonucleotide; TTC chr11 5386049 5386070 5386054 5386049 -
cttctgtagcattaggtacatc

SEQ ID NO: 115082 - DNA, 22 bp, Artificial Sequence
  Synthetic oligonucleotide; CTT chr11 5386046 5386067 5386051 5386046 -
ctgtagcattaggtacatcttt

SEQ ID NO: 115083 - DNA, 22 bp, Artificial Sequence
  Synthetic oligonucleotide; TTC chr11 5386045 5386066 5386050 5386045 -
tgtagcattaggtacatctttc

SEQ ID NO: 115084 - DNA, 22 bp, Artificial Sequence
  Synthetic oligonucleotide; CTG chr11 5386043 5386064 5386048 5386043 -
tagcattaggtacatctttctc

SEQ ID NO: 115085 - DNA, 22 bp, Artificial Sequence
  Synthetic oligonucleotide; TTA chr11 5386035 5386056 5386040 5386035 -
ggtacatctttctctgttctca

SEQ ID NO: 115086 - DNA, 22 bp, Artificial Sequence
  Synthetic oligonucleotide; CTT chr11 5386025 5386046 5386030 5386025 -
tctctgttctcacgtagtacct

SEQ ID NO: 115087 - DNA, 22 bp, Artificial Sequence
  Synthetic oligonucleotide; TTT chr11 5386024 5386045 5386029 5386024 -
ctctgttctcacgtagtacctg

SEQ ID NO: 115088 - DNA, 22 bp, Artificial Sequence
  Synthetic oligonucleotide; TTC chr11 5386023 5386044 5386028 5386023 -
tctgttctcacgtagtacctgt

SEQ ID NO: 115089 - DNA, 22 bp, Artificial Sequence
  Synthetic oligonucleotide; CTC chr11 5386021 5386042 5386026 5386021 -
tgttctcacgtagtacctgtaa

SEQ ID NO: 115090 - DNA, 22 bp, Artificial Sequence
  Synthetic oligonucleotide; CTG chr11 5386019 5386040 5386024 5386019 -
ttctcacgtagtacctgtaatg

SEQ ID NO: 115091 - DNA, 22 bp, Artificial Sequence
  Synthetic oligonucleotide; TTC chr11 5386016 5386037 5386021 5386016 -
tcacgtagtacctgtaatgtac

SEQ ID NO: 115092 - DNA, 22 bp, Artificial Sequence
  Synthetic oligonucleotide; CTC chr11 5386014 5386035 5386019 5386014 -
acgtagtacctgtaatgtacta

SEQ ID NO: 115093 - DNA, 22 bp, Artificial Sequence
  Synthetic oligonucleotide; CTG chr11 5386002 5386023 5386007 5386002 -
taatgtactattaaggtgtaaa

SEQ ID NO: 115094 - DNA, 22 bp, Artificial Sequence
  Synthetic oligonucleotide; CTA chr11 5385992 5386013 5385997 5385992 -
ttaaggtgtaaatacacacaca

SEQ ID NO: 115095 - DNA, 22 bp, Artificial Sequence
  Synthetic oligonucleotide; TTA chr11 5385989 5386010 5385994 5385989 -
aggtgtaaatacacacacacat

SEQ ID NO: 115096 - DNA, 22 bp, Artificial Sequence
  Synthetic oligonucleotide; TTC chr11 5385965 5385986 5385970 5385965 -
tttatatttttatatttatata

SEQ ID NO: 115097 - DNA, 22 bp, Artificial Sequence
  Synthetic oligonucleotide; CTT chr11 5385963 5385984 5385968 5385963 -
tatatttttatatttatatata

SEQ ID NO: 115098 - DNA, 22 bp, Artificial Sequence
  Synthetic oligonucleotide; TTT chr11 5385962 5385983 5385967 5385962 -
atatttttatatttatatatac

SEQ ID NO: 115099 - DNA, 22 bp, Artificial Sequence
  Synthetic oligonucleotide; TTA chr11 5385961 5385982 5385966 5385961 -
tatttttatatttatatatact

SEQ ID NO: 115100 - DNA, 22 bp, Artificial Sequence
  Synthetic oligonucleotide; TTT chr11 5385956 5385977 5385961 5385956 -
ttatatttatatatacttattg

SEQ ID NO: 115101 - DNA, 22 bp, Artificial Sequence
  Synthetic oligonucleotide; TTT chr11 5385955 5385976 5385960 5385955 -
tatatttatatatacttattga

SEQ ID NO: 115102 - DNA, 22 bp, Artificial Sequence
  Synthetic oligonucleotide; TTT chr11 5385954 5385975 5385959 5385954 -
atatttatatatacttattgat

SEQ ID NO: 115103 - DNA, 22 bp, Artificial Sequence
  Synthetic oligonucleotide; TTA chr11 5385953 5385974 5385958 5385953 -
tatttatatatacttattgata

SEQ ID NO: 115104 - DNA, 22 bp, Artificial Sequence
  Synthetic oligonucleotide; TTT chr11 5385948 5385969 5385953 5385948 -
atatatacttattgatatatat

SEQ ID NO: 115105 - DNA, 22 bp, Artificial Sequence
  Synthetic oligonucleotide; TTA chr11 5385947 5385968 5385952 5385947 -
tatatacttattgatatatata

SEQ ID NO: 115106 - DNA, 22 bp, Artificial Sequence
  Synthetic oligonucleotide; CTT chr11 5385938 5385959 5385943 5385938 -
attgatatatatatagaacata

SEQ ID NO: 115107 - DNA, 22 bp, Artificial Sequence
  Synthetic oligonucleotide; TTA chr11 5385937 5385958 5385942 5385937 -
ttgatatatatatagaacatac

SEQ ID NO: 115108 - DNA, 22 bp, Artificial Sequence
  Synthetic oligonucleotide; TTG chr11 5385934 5385955 5385939 5385934 -
atatatatatagaacatactta

SEQ ID NO: 115109 - DNA, 22 bp, Artificial Sequence
  Synthetic oligonucleotide; CTT chr11 5385913 5385934 5385918 5385913 -
atacatccatataagtacacat

SEQ ID NO: 115110 - DNA, 22 bp, Artificial Sequence
  Synthetic oligonucleotide; TTA chr11 5385912 5385933 5385917 5385912 -
tacatccatataagtacacata

SEQ ID NO: 115111 - DNA, 22 bp, Artificial Sequence
  Synthetic oligonucleotide; TTT chr11 5385879 5385900 5385884 5385879 -
aaataacatataagtgtataga

SEQ ID NO: 115112 - DNA, 22 bp, Artificial Sequence
  Synthetic oligonucleotide; TTA chr11 5385878 5385899 5385883 5385878 -
aataacatataagtgtatagat

SEQ ID NO: 115113 - DNA, 22 bp, Artificial Sequence
  Synthetic oligonucleotide; TTT chr11 5385854 5385875 5385859 5385854 -
actcataaatactttatagaat

SEQ ID NO: 115114 - DNA, 22 bp, Artificial Sequence
  Synthetic oligonucleotide; TTA chr11 5385853 5385874 5385858 5385853 -
ctcataaatactttatagaata

SEQ ID NO: 115115 - DNA, 22 bp, Artificial Sequence
  Synthetic oligonucleotide; CTC chr11 5385850 5385871 5385855 5385850 -
ataaatactttatagaatatac

SEQ ID NO: 115116 - DNA, 22 bp, Artificial Sequence
  Synthetic oligonucleotide; CTT chr11 5385840 5385861 5385845 5385840 -
tatagaatatacattttagtat

SEQ ID NO: 115117 - DNA, 22 bp, Artificial Sequence
  Synthetic oligonucleotide; TTT chr11 5385839 5385860 5385844 5385839 -
atagaatatacattttagtata

SEQ ID NO: 115118 - DNA, 22 bp, Artificial Sequence
  Synthetic oligonucleotide; TTA chr11 5385838 5385859 5385843 5385838 -
tagaatatacattttagtatat

SEQ ID NO: 115119 - DNA, 22 bp, Artificial Sequence
  Synthetic oligonucleotide; TTT chr11 5385824 5385845 5385829 5385824 -
tagtatatacattatatattct

SEQ ID NO: 115120 - DNA, 22 bp, Artificial Sequence
  Synthetic oligonucleotide; TTT chr11 5385823 5385844 5385828 5385823 -
agtatatacattatatattctt

SEQ ID NO: 115121 - DNA, 22 bp, Artificial Sequence
  Synthetic oligonucleotide; TTA chr11 5385822 5385843 5385827 5385822 -
gtatatacattatatattcttt

SEQ ID NO: 115122 - DNA, 22 bp, Artificial Sequence
  Synthetic oligonucleotide; TTA chr11 5385810 5385831 5385815 5385810 -
tatattctttatatactttata

SEQ ID NO: 115123 - DNA, 22 bp, Artificial Sequence
  Synthetic oligonucleotide; TTC chr11 5385803 5385824 5385808 5385803 -
tttatatactttatagattttt

SEQ ID NO: 115124 - DNA, 22 bp, Artificial Sequence
  Synthetic oligonucleotide; CTT chr11 5385801 5385822 5385806 5385801 -
tatatactttatagatttttta

SEQ ID NO: 115125 - DNA, 22 bp, Artificial Sequence
  Synthetic oligonucleotide; TTT chr11 5385800 5385821 5385805 5385800 -
atatactttatagattttttat

SEQ ID NO: 115126 - DNA, 22 bp, Artificial Sequence
  Synthetic oligonucleotide; TTA chr11 5385799 5385820 5385804 5385799 -
tatactttatagattttttata

SEQ ID NO: 115127 - DNA, 22 bp, Artificial Sequence
  Synthetic oligonucleotide; CTT chr11 5385792 5385813 5385797 5385792 -
tatagattttttatatataagt

SEQ ID NO: 115128 - DNA, 22 bp, Artificial Sequence
  Synthetic oligonucleotide; TTT chr11 5385791 5385812 5385796 5385791 -
atagattttttatatataagta

SEQ ID NO: 115129 - DNA, 22 bp, Artificial Sequence
  Synthetic oligonucleotide; TTA chr11 5385790 5385811 5385795 5385790 -
tagattttttatatataagtat

SEQ ID NO: 115130 - DNA, 22 bp, Artificial Sequence
  Synthetic oligonucleotide; TTT chr11 5385783 5385804 5385788 5385783 -
tttatatataagtatagggtat

SEQ ID NO: 115131 - DNA, 22 bp, Artificial Sequence
  Synthetic oligonucleotide; TTT chr11 5385782 5385803 5385787 5385782 -
ttatatataagtatagggtata

SEQ ID NO: 115132 - DNA, 22 bp, Artificial Sequence
  Synthetic oligonucleotide; TTT chr11 5385781 5385802 5385786 5385781 -
tatatataagtatagggtatac

SEQ ID NO: 115133 - DNA, 22 bp, Artificial Sequence
  Synthetic oligonucleotide; TTT chr11 5385780 5385801 5385785 5385780 -
atatataagtatagggtataca

SEQ ID NO: 115134 - DNA, 22 bp, Artificial Sequence
  Synthetic oligonucleotide; TTA chr11 5385779 5385800 5385784 5385779 -
tatataagtatagggtatacat

SEQ ID NO: 115135 - DNA, 22 bp, Artificial Sequence
  Synthetic oligonucleotide; CTG chr11 5385746 5385767 5385751 5385746 -
tatatttatatatgtaaacaaa

SEQ ID NO: 115136 - DNA, 22 bp, Artificial Sequence
  Synthetic oligonucleotide; TTT chr11 5385739 5385760 5385744 5385739 -
atatatgtaaacaaatatacaa

SEQ ID NO: 115137 - DNA, 22 bp, Artificial Sequence
  Synthetic oligonucleotide; TTA chr11 5385738 5385759 5385743 5385738 -
tatatgtaaacaaatatacaaa

SEQ ID NO: 115138 - DNA, 22 bp, Artificial Sequence
  Synthetic oligonucleotide; TTA chr11 5385709 5385730 5385714 5385709 -
gatatttgtacacatatatata

SEQ ID NO: 115139 - DNA, 22 bp, Artificial Sequence
  Synthetic oligonucleotide; TTT chr11 5385702 5385723 5385707 5385702 -
gtacacatatatatactttgta

SEQ ID NO: 115140 - DNA, 22 bp, Artificial Sequence
  Synthetic oligonucleotide; TTG chr11 5385701 5385722 5385706 5385701 -
tacacatatatatactttgtac

SEQ ID NO: 115141 - DNA, 22 bp, Artificial Sequence
  Synthetic oligonucleotide; CTT chr11 5385684 5385705 5385689 5385684 -
tgtacaacatatatattatagg

SEQ ID NO: 115142 - DNA, 22 bp, Artificial Sequence
  Synthetic oligonucleotide; TTT chr11 5385683 5385704 5385688 5385683 -
gtacaacatatatattataggt

SEQ ID NO: 115143 - DNA, 22 bp, Artificial Sequence
  Synthetic oligonucleotide; TTG chr11 5385682 5385703 5385687 5385682 -
tacaacatatatattataggta

SEQ ID NO: 115144 - DNA, 22 bp, Artificial Sequence
  Synthetic oligonucleotide; TTA chr11 5385666 5385687 5385671 5385666 -
taggtagtatttatacgtattc

SEQ ID NO: 115145 - DNA, 22 bp, Artificial Sequence
  Synthetic oligonucleotide; TTT chr11 5385654 5385675 5385659 5385654 -
atacgtattctttattatacat

SEQ ID NO: 115146 - DNA, 22 bp, Artificial Sequence
  Synthetic oligonucleotide; TTA chr11 5385653 5385674 5385658 5385653 -
tacgtattctttattatacatg

SEQ ID NO: 115147 - DNA, 22 bp, Artificial Sequence
  Synthetic oligonucleotide; TTC chr11 5385644 5385665 5385649 5385644 -
tttattatacatgtttagaaca

SEQ ID NO: 115148 - DNA, 22 bp, Artificial Sequence
  Synthetic oligonucleotide; CTT chr11 5385642 5385663 5385647 5385642 -
tattatacatgtttagaacata

SEQ ID NO: 115149 - DNA, 22 bp, Artificial Sequence
  Synthetic oligonucleotide; TTT chr11 5385641 5385662 5385646 5385641 -
attatacatgtttagaacataa

SEQ ID NO: 115150 - DNA, 22 bp, Artificial Sequence
  Synthetic oligonucleotide; TTA chr11 5385640 5385661 5385645 5385640 -
ttatacatgtttagaacataaa

SEQ ID NO: 115151 - DNA, 22 bp, Artificial Sequence
  Synthetic oligonucleotide; TTA chr11 5385637 5385658 5385642 5385637 -
tacatgtttagaacataaattt

SEQ ID NO: 115152 - DNA, 22 bp, Artificial Sequence
  Synthetic oligonucleotide; TTT chr11 5385628 5385649 5385633 5385628 -
agaacataaatttatattggca

SEQ ID NO: 115153 - DNA, 22 bp, Artificial Sequence
  Synthetic oligonucleotide; TTA chr11 5385627 5385648 5385632 5385627 -
gaacataaatttatattggcaa

SEQ ID NO: 115154 - DNA, 22 bp, Artificial Sequence
  Synthetic oligonucleotide; TTT chr11 5385615 5385636 5385620 5385615 -
atattggcaaaaactgccatta

SEQ ID NO: 115155 - DNA, 22 bp, Artificial Sequence
  Synthetic oligonucleotide; TTA chr11 5385614 5385635 5385619 5385614 -
tattggcaaaaactgccattaa

SEQ ID NO: 115156 - DNA, 22 bp, Artificial Sequence
  Synthetic oligonucleotide; TTG chr11 5385609 5385630 5385614 5385609 -
gcaaaaactgccattaattttt

SEQ ID NO: 115157 - DNA, 22 bp, Artificial Sequence
  Synthetic oligonucleotide; CTG chr11 5385599 5385620 5385604 5385599 -
ccattaatttttcaccaaccta

SEQ ID NO: 115158 - DNA, 22 bp, Artificial Sequence
  Synthetic oligonucleotide; TTA chr11 5385593 5385614 5385598 5385593 -
atttttcaccaacctaataatt

SEQ ID NO: 115159 - DNA, 22 bp, Artificial Sequence
  Synthetic oligonucleotide; TTT chr11 5385589 5385610 5385594 5385589 -
ttcaccaacctaataattcatt

SEQ ID NO: 115160 - DNA, 22 bp, Artificial Sequence
  Synthetic oligonucleotide; TTT chr11 5385588 5385609 5385593 5385588 -
tcaccaacctaataattcattt

SEQ ID NO: 115161 - DNA, 22 bp, Artificial Sequence
  Synthetic oligonucleotide; TTT chr11 5385587 5385608 5385592 5385587 -
caccaacctaataattcatttt

SEQ ID NO: 115162 - DNA, 22 bp, Artificial Sequence
  Synthetic oligonucleotide; TTC chr11 5385586 5385607 5385591 5385586 -
accaacctaataattcattttt

SEQ ID NO: 115163 - DNA, 22 bp, Artificial Sequence
  Synthetic oligonucleotide; CTA chr11 5385577 5385598 5385582 5385577 -
ataattcattttttaagttgat

SEQ ID NO: 115164 - DNA, 22 bp, Artificial Sequence
  Synthetic oligonucleotide; TTC chr11 5385570 5385591 5385575 5385570 -
attttttaagttgattagactg

SEQ ID NO: 115165 - DNA, 22 bp, Artificial Sequence
  Synthetic oligonucleotide; TTT chr11 5385566 5385587 5385571 5385566 -
tttaagttgattagactggaat

SEQ ID NO: 115166 - DNA, 22 bp, Artificial Sequence
  Synthetic oligonucleotide; TTT chr11 5385565 5385586 5385570 5385565 -
ttaagttgattagactggaatt

SEQ ID NO: 115167 - DNA, 22 bp, Artificial Sequence
  Synthetic oligonucleotide; TTT chr11 5385564 5385585 5385569 5385564 -
taagttgattagactggaattc

SEQ ID NO: 115168 - DNA, 22 bp, Artificial Sequence
  Synthetic oligonucleotide; TTT chr11 5385563 5385584 5385568 5385563 -
aagttgattagactggaattct

SEQ ID NO: 115169 - DNA, 22 bp, Artificial Sequence
  Synthetic oligonucleotide; TTA chr11 5385562 5385583 5385567 5385562 -
agttgattagactggaattctc

SEQ ID NO: 115170 - DNA, 22 bp, Artificial Sequence
  Synthetic oligonucleotide; TTG chr11 5385557 5385578 5385562 5385557 -
attagactggaattctctaaag

SEQ ID NO: 115171 - DNA, 22 bp, Artificial Sequence
  Synthetic oligonucleotide; TTA chr11 5385553 5385574 5385558 5385553 -
gactggaattctctaaaggccc

SEQ ID NO: 115172 - DNA, 22 bp, Artificial Sequence
  Synthetic oligonucleotide; CTG chr11 5385548 5385569 5385553 5385548 -
gaattctctaaaggcccctgga

SEQ ID NO: 115173 - DNA, 22 bp, Artificial Sequence
  Synthetic oligonucleotide; TTC chr11 5385542 5385563 5385547 5385542 -
tctaaaggcccctggagcctga

SEQ ID NO: 115174 - DNA, 22 bp, Artificial Sequence
  Synthetic oligonucleotide; CTC chr11 5385540 5385561 5385545 5385540 -
taaaggcccctggagcctgaca

SEQ ID NO: 115175 - DNA, 22 bp, Artificial Sequence
  Synthetic oligonucleotide; CTA chr11 5385538 5385559 5385543 5385538 -
aaggcccctggagcctgacagt

SEQ ID NO: 115176 - DNA, 22 bp, Artificial Sequence
  Synthetic oligonucleotide; CTG chr11 5385528 5385549 5385533 5385528 -
gagcctgacagtgtctaagatg

SEQ ID NO: 115177 - DNA, 22 bp, Artificial Sequence
  Synthetic oligonucleotide; CTG chr11 5385521 5385542 5385526 5385521 -
acagtgtctaagatgtggtagg

SEQ ID NO: 115178 - DNA, 22 bp, Artificial Sequence
  Synthetic oligonucleotide; CTA chr11 5385511 5385532 5385516 5385511 -
agatgtggtaggtaccactata

SEQ ID NO: 115179 - DNA, 22 bp, Artificial Sequence
  Synthetic oligonucleotide; CTA chr11 5385491 5385512 5385496 5385491 -
tatatatatttttttgcatgaa

SEQ ID NO: 115180 - DNA, 22 bp, Artificial Sequence
  Synthetic oligonucleotide; TTT chr11 5385480 5385501 5385485 5385480 -
ttttgcatgaaaaactaaatgg

SEQ ID NO: 115181 - DNA, 22 bp, Artificial Sequence
  Synthetic oligonucleotide; TTT chr11 5385479 5385500 5385484 5385479 -
tttgcatgaaaaactaaatggg

SEQ ID NO: 115182 - DNA, 22 bp, Artificial Sequence
  Synthetic oligonucleotide; TTT chr11 5385478 5385499 5385483 5385478 -
ttgcatgaaaaactaaatgggt

SEQ ID NO: 115183 - DNA, 22 bp, Artificial Sequence
  Synthetic oligonucleotide; TTT chr11 5385477 5385498 5385482 5385477 -
tgcatgaaaaactaaatgggtg

SEQ ID NO: 115184 - DNA, 22 bp, Artificial Sequence
  Synthetic oligonucleotide; TTT chr11 5385476 5385497 5385481 5385476 -
gcatgaaaaactaaatgggtga

SEQ ID NO: 115185 - DNA, 22 bp, Artificial Sequence
  Synthetic oligonucleotide; TTG chr11 5385475 5385496 5385480 5385475 -
catgaaaaactaaatgggtgaa

SEQ ID NO: 115186 - DNA, 22 bp, Artificial Sequence
  Synthetic oligonucleotide; CTA chr11 5385463 5385484 5385468 5385463 -
aatgggtgaataaataaagtac

SEQ ID NO: 115187 - DNA, 22 bp, Artificial Sequence
  Synthetic oligonucleotide; CTC chr11 5385439 5385460 5385444 5385439 -
acctcttatcctgattctttgt

SEQ ID NO: 115188 - DNA, 22 bp, Artificial Sequence
  Synthetic oligonucleotide; CTC chr11 5385434 5385455 5385439 5385434 -
ttatcctgattctttgtgcctg

SEQ ID NO: 115189 - DNA, 22 bp, Artificial Sequence
  Synthetic oligonucleotide; CTT chr11 5385432 5385453 5385437 5385432 -
atcctgattctttgtgcctggg

SEQ ID NO: 115190 - DNA, 22 bp, Artificial Sequence
  Synthetic oligonucleotide; TTA chr11 5385431 5385452 5385436 5385431 -
tcctgattctttgtgcctgggg

SEQ ID NO: 115191 - DNA, 22 bp, Artificial Sequence
  Synthetic oligonucleotide; CTG chr11 5385426 5385447 5385431 5385426 -
attctttgtgcctggggttctg

SEQ ID NO: 115192 - DNA, 22 bp, Artificial Sequence
  Synthetic oligonucleotide; TTC chr11 5385422 5385443 5385427 5385422 -
tttgtgcctggggttctgttgt

SEQ ID NO: 115193 - DNA, 22 bp, Artificial Sequence
  Synthetic oligonucleotide; CTT chr11 5385420 5385441 5385425 5385420 -
tgtgcctggggttctgttgtca

SEQ ID NO: 115194 - DNA, 22 bp, Artificial Sequence
  Synthetic oligonucleotide; TTT chr11 5385419 5385440 5385424 5385419 -
gtgcctggggttctgttgtcag

SEQ ID NO: 115195 - DNA, 22 bp, Artificial Sequence
  Synthetic oligonucleotide; TTG chr11 5385418 5385439 5385423 5385418 -
tgcctggggttctgttgtcagc

SEQ ID NO: 115196 - DNA, 22 bp, Artificial Sequence
  Synthetic oligonucleotide; CTG chr11 5385412 5385433 5385417 5385412 -
gggttctgttgtcagctctgtg

SEQ ID NO: 115197 - DNA, 22 bp, Artificial Sequence
  Synthetic oligonucleotide; TTC chr11 5385406 5385427 5385411 5385406 -
tgttgtcagctctgtgttcacc

SEQ ID NO: 115198 - DNA, 22 bp, Artificial Sequence
  Synthetic oligonucleotide; CTG chr11 5385404 5385425 5385409 5385404 -
ttgtcagctctgtgttcaccaa

SEQ ID NO: 115199 - DNA, 22 bp, Artificial Sequence
  Synthetic oligonucleotide; TTG chr11 5385401 5385422 5385406 5385401 -
tcagctctgtgttcaccaactt

SEQ ID NO: 115200 - DNA, 22 bp, Artificial Sequence
  Synthetic oligonucleotide; CTC chr11 5385394 5385415 5385399 5385394 -
tgtgttcaccaacttcagagtg

SEQ ID NO: 115201 - DNA, 22 bp, Artificial Sequence
  Synthetic oligonucleotide; CTG chr11 5385392 5385413 5385397 5385392 -
tgttcaccaacttcagagtgat

SEQ ID NO: 115202 - DNA, 22 bp, Artificial Sequence
  Synthetic oligonucleotide; TTC chr11 5385387 5385408 5385392 5385387 -
accaacttcagagtgatgagat

SEQ ID NO: 115203 - DNA, 22 bp, Artificial Sequence
  Synthetic oligonucleotide; CTT chr11 5385379 5385400 5385384 5385379 -
cagagtgatgagatggacaggg

SEQ ID NO: 115204 - DNA, 22 bp, Artificial Sequence
  Synthetic oligonucleotide; TTC chr11 5385378 5385399 5385383 5385378 -
agagtgatgagatggacaggga

SEQ ID NO: 115205 - DNA, 22 bp, Artificial Sequence
  Synthetic oligonucleotide; CTG chr11 5385346 5385367 5385351 5385346 -
gtagaaacaagatgtctataca

SEQ ID NO: 115206 - DNA, 22 bp, Artificial Sequence
  Synthetic oligonucleotide; CTA chr11 5385328 5385349 5385333 5385328 -
tacagagacaatgacagggctg

SEQ ID NO: 115207 - DNA, 22 bp, Artificial Sequence
  Synthetic oligonucleotide; CTG chr11 5385306 5385327 5385311 5385306 -
ggattatttctcttggaaagta

SEQ ID NO: 115208 - DNA, 22 bp, Artificial Sequence
  Synthetic oligonucleotide; TTA chr11 5385300 5385321 5385305 5385300 -
tttctcttggaaagtatacttc

SEQ ID NO: 115209 - DNA, 22 bp, Artificial Sequence
  Synthetic oligonucleotide; TTT chr11 5385297 5385318 5385302 5385297 -
ctcttggaaagtatacttcctc

SEQ ID NO: 115210 - DNA, 22 bp, Artificial Sequence
  Synthetic oligonucleotide; TTC chr11 5385296 5385317 5385301 5385296 -
tcttggaaagtatacttcctct

SEQ ID NO: 115211 - DNA, 22 bp, Artificial Sequence
  Synthetic oligonucleotide; CTC chr11 5385294 5385315 5385299 5385294 -
ttggaaagtatacttcctcttg

SEQ ID NO: 115212 - DNA, 22 bp, Artificial Sequence
  Synthetic oligonucleotide; CTT chr11 5385292 5385313 5385297 5385292 -
ggaaagtatacttcctcttggg

SEQ ID NO: 115213 - DNA, 22 bp, Artificial Sequence
  Synthetic oligonucleotide; TTG chr11 5385291 5385312 5385296 5385291 -
gaaagtatacttcctcttggga

SEQ ID NO: 115214 - DNA, 22 bp, Artificial Sequence
  Synthetic oligonucleotide; CTT chr11 5385279 5385300 5385284 5385279 -
cctcttgggaagaaagctttag

SEQ ID NO: 115215 - DNA, 22 bp, Artificial Sequence
  Synthetic oligonucleotide; TTC chr11 5385278 5385299 5385283 5385278 -
ctcttgggaagaaagctttagg

SEQ ID NO: 115216 - DNA, 22 bp, Artificial Sequence
  Synthetic oligonucleotide; CTC chr11 5385275 5385296 5385280 5385275 -
ttgggaagaaagctttagggga

SEQ ID NO: 115217 - DNA, 22 bp, Artificial Sequence
  Synthetic oligonucleotide; CTT chr11 5385273 5385294 5385278 5385273 -
gggaagaaagctttaggggatt

SEQ ID NO: 115218 - DNA, 22 bp, Artificial Sequence
  Synthetic oligonucleotide; TTG chr11 5385272 5385293 5385277 5385272 -
ggaagaaagctttaggggattt

SEQ ID NO: 115219 - DNA, 22 bp, Artificial Sequence
  Synthetic oligonucleotide; CTT chr11 5385260 5385281 5385265 5385260 -
taggggatttctcctagcaaga

SEQ ID NO: 115220 - DNA, 22 bp, Artificial Sequence
  Synthetic oligonucleotide; TTT chr11 5385259 5385280 5385264 5385259 -
aggggatttctcctagcaagag

SEQ ID NO: 115221 - DNA, 22 bp, Artificial Sequence
  Synthetic oligonucleotide; TTA chr11 5385258 5385279 5385263 5385258 -
ggggatttctcctagcaagaga

SEQ ID NO: 115222 - DNA, 22 bp, Artificial Sequence
  Synthetic oligonucleotide; TTT chr11 5385250 5385271 5385255 5385250 -
ctcctagcaagagagataatta

SEQ ID NO: 115223 - DNA, 22 bp, Artificial Sequence
  Synthetic oligonucleotide; TTC chr11 5385249 5385270 5385254 5385249 -
tcctagcaagagagataattat

SEQ ID NO: 115224 - DNA, 22 bp, Artificial Sequence
  Synthetic oligonucleotide; CTC chr11 5385247 5385268 5385252 5385247 -
ctagcaagagagataattatcc

SEQ ID NO: 115225 - DNA, 22 bp, Artificial Sequence
  Synthetic oligonucleotide; CTA chr11 5385244 5385265 5385249 5385244 -
gcaagagagataattatccatg

SEQ ID NO: 115226 - DNA, 22 bp, Artificial Sequence
  Synthetic oligonucleotide; TTA chr11 5385228 5385249 5385233 5385228 -
tccatgataggagagcaacagt

SEQ ID NO: 115227 - DNA, 22 bp, Artificial Sequence
  Synthetic oligonucleotide; TTT chr11 5385201 5385222 5385206 5385201 -
tttcatgtctactaagcaatgg

SEQ ID NO: 115228 - DNA, 22 bp, Artificial Sequence
  Synthetic oligonucleotide; TTT chr11 5385200 5385221 5385205 5385200 -
ttcatgtctactaagcaatgga

SEQ ID NO: 115229 - DNA, 22 bp, Artificial Sequence
  Synthetic oligonucleotide; TTT chr11 5385199 5385220 5385204 5385199 -
tcatgtctactaagcaatggag

SEQ ID NO: 115230 - DNA, 22 bp, Artificial Sequence
  Synthetic oligonucleotide; TTT chr11 5385198 5385219 5385203 5385198 -
catgtctactaagcaatggagg

SEQ ID NO: 115231 - DNA, 22 bp, Artificial Sequence
  Synthetic oligonucleotide; TTC chr11 5385197 5385218 5385202 5385197 -
atgtctactaagcaatggagga

SEQ ID NO: 115232 - DNA, 22 bp, Artificial Sequence
  Synthetic oligonucleotide; CTA chr11 5385190 5385211 5385195 5385190 -
ctaagcaatggaggagtccact

SEQ ID NO: 115233 - DNA, 22 bp, Artificial Sequence
  Synthetic oligonucleotide; CTA chr11 5385187 5385208 5385192 5385187 -
agcaatggaggagtccactcag

SEQ ID NO: 115234 - DNA, 22 bp, Artificial Sequence
  Synthetic oligonucleotide; CTC chr11 5385167 5385188 5385172 5385167 -
agagcagtcagttacatctaat

SEQ ID NO: 115235 - DNA, 22 bp, Artificial Sequence
  Synthetic oligonucleotide; TTA chr11 5385153 5385174 5385158 5385153 -
catctaattacaacataattaa

SEQ ID NO: 115236 - DNA, 22 bp, Artificial Sequence
  Synthetic oligonucleotide; CTA chr11 5385147 5385168 5385152 5385147 -
attacaacataattaaaatatt

SEQ ID NO: 115237 - DNA, 22 bp, Artificial Sequence
  Synthetic oligonucleotide; TTA chr11 5385143 5385164 5385148 5385143 -
caacataattaaaatattcaag

SEQ ID NO: 115238 - DNA, 22 bp, Artificial Sequence
  Synthetic oligonucleotide; TTA chr11 5385132 5385153 5385137 5385132 -
aaatattcaaggcagagtagat

SEQ ID NO: 115239 - DNA, 22 bp, Artificial Sequence
  Synthetic oligonucleotide; TTC chr11 5385124 5385145 5385129 5385124 -
aaggcagagtagattcatctta

SEQ ID NO: 115240 - DNA, 22 bp, Artificial Sequence
  Synthetic oligonucleotide; TTC chr11 5385108 5385129 5385113 5385108 -
atcttagatcacaggagaaaat

SEQ ID NO: 115241 - DNA, 22 bp, Artificial Sequence
  Synthetic oligonucleotide; CTT chr11 5385103 5385124 5385108 5385103 -
agatcacaggagaaaattcctg

SEQ ID NO: 115242 - DNA, 22 bp, Artificial Sequence
  Synthetic oligonucleotide; TTA chr11 5385102 5385123 5385107 5385102 -
gatcacaggagaaaattcctga

SEQ ID NO: 115243 - DNA, 22 bp, Artificial Sequence
  Synthetic oligonucleotide; TTC chr11 5385084 5385105 5385089 5385084 -
ctgaaaagagattttcagtata

SEQ ID NO: 115244 - DNA, 22 bp, Artificial Sequence
  Synthetic oligonucleotide; CTG chr11 5385081 5385102 5385086 5385081 -
aaaagagattttcagtatacaa

SEQ ID NO: 115245 - DNA, 22 bp, Artificial Sequence
  Synthetic oligonucleotide; TTT chr11 5385070 5385091 5385075 5385070 -
tcagtatacaatgagtaattgg

SEQ ID NO: 115246 - DNA, 22 bp, Artificial Sequence
  Synthetic oligonucleotide; TTT chr11 5385069 5385090 5385074 5385069 -
cagtatacaatgagtaattggc

SEQ ID NO: 115247 - DNA, 22 bp, Artificial Sequence
  Synthetic oligonucleotide; TTC chr11 5385068 5385089 5385073 5385068 -
agtatacaatgagtaattggct

SEQ ID NO: 115248 - DNA, 22 bp, Artificial Sequence
  Synthetic oligonucleotide; TTG chr11 5385049 5385070 5385054 5385049 -
gctctctacctcacctgtgtct

SEQ ID NO: 115249 - DNA, 22 bp, Artificial Sequence
  Synthetic oligonucleotide; CTC chr11 5385045 5385066 5385050 5385045 -
tctacctcacctgtgtctaaat

SEQ ID NO: 115250 - DNA, 22 bp, Artificial Sequence
  Synthetic oligonucleotide; CTC chr11 5385043 5385064 5385048 5385043 -
tacctcacctgtgtctaaatat

SEQ ID NO: 115251 - DNA, 22 bp, Artificial Sequence
  Synthetic oligonucleotide; CTA chr11 5385041 5385062 5385046 5385041 -
cctcacctgtgtctaaatattc

SEQ ID NO: 115252 - DNA, 22 bp, Artificial Sequence
  Synthetic oligonucleotide; CTC chr11 5385037 5385058 5385042 5385037 -
acctgtgtctaaatattctttt

SEQ ID NO: 115253 - DNA, 22 bp, Artificial Sequence
  Synthetic oligonucleotide; CTG chr11 5385032 5385053 5385037 5385032 -
tgtctaaatattcttttgtttg

SEQ ID NO: 115254 - DNA, 22 bp, Artificial Sequence
  Synthetic oligonucleotide; CTA chr11 5385026 5385047 5385031 5385026 -
aatattcttttgtttgaattta

SEQ ID NO: 115255 - DNA, 22 bp, Artificial Sequence
  Synthetic oligonucleotide; TTC chr11 5385019 5385040 5385024 5385019 -
ttttgtttgaatttaatattag

SEQ ID NO: 115256 - DNA, 22 bp, Artificial Sequence
  Synthetic oligonucleotide; CTT chr11 5385017 5385038 5385022 5385017 -
ttgtttgaatttaatattagtt

SEQ ID NO: 115257 - DNA, 22 bp, Artificial Sequence
  Synthetic oligonucleotide; TTT chr11 5385016 5385037 5385021 5385016 -
tgtttgaatttaatattagtta

SEQ ID NO: 115258 - DNA, 22 bp, Artificial Sequence
  Synthetic oligonucleotide; TTT chr11 5385015 5385036 5385020 5385015 -
gtttgaatttaatattagttat

SEQ ID NO: 115259 - DNA, 22 bp, Artificial Sequence
  Synthetic oligonucleotide; TTG chr11 5385014 5385035 5385019 5385014 -
tttgaatttaatattagttatt

SEQ ID NO: 115260 - DNA, 22 bp, Artificial Sequence
  Synthetic oligonucleotide; TTT chr11 5385011 5385032 5385016 5385011 -
gaatttaatattagttattttt

SEQ ID NO: 115261 - DNA, 22 bp, Artificial Sequence
  Synthetic oligonucleotide; TTG chr11 5385010 5385031 5385015 5385010 -
aatttaatattagttatttttt

SEQ ID NO: 115262 - DNA, 22 bp, Artificial Sequence
  Synthetic oligonucleotide; TTT chr11 5385005 5385026 5385010 5385005 -
aatattagttattttttaatga

SEQ ID NO: 115263 - DNA, 22 bp, Artificial Sequence
  Synthetic oligonucleotide; TTA chr11 5385004 5385025 5385009 5385004 -
atattagttattttttaatgaa

SEQ ID NO: 115264 - DNA, 22 bp, Artificial Sequence
  Synthetic oligonucleotide; TTA chr11 5384998 5385019 5385003 5384998 -
gttattttttaatgaactacat

SEQ ID NO: 115265 - DNA, 22 bp, Artificial Sequence
  Synthetic oligonucleotide; TTA chr11 5384994 5385015 5384999 5384994 -
ttttttaatgaactacattggt

SEQ ID NO: 115266 - DNA, 22 bp, Artificial Sequence
  Synthetic oligonucleotide; TTT chr11 5384991 5385012 5384996 5384991 -
tttaatgaactacattggtgga

SEQ ID NO: 115267 - DNA, 22 bp, Artificial Sequence
  Synthetic oligonucleotide; TTT chr11 5384990 5385011 5384995 5384990 -
ttaatgaactacattggtggag

SEQ ID NO: 115268 - DNA, 22 bp, Artificial Sequence
  Synthetic oligonucleotide; TTT chr11 5384989 5385010 5384994 5384989 -
taatgaactacattggtggagg

SEQ ID NO: 115269 - DNA, 22 bp, Artificial Sequence
  Synthetic oligonucleotide; TTT chr11 5384988 5385009 5384993 5384988 -
aatgaactacattggtggagga

SEQ ID NO: 115270 - DNA, 22 bp, Artificial Sequence
  Synthetic oligonucleotide; TTA chr11 5384987 5385008 5384992 5384987 -
atgaactacattggtggaggat

SEQ ID NO: 115271 - DNA, 22 bp, Artificial Sequence
  Synthetic oligonucleotide; CTA chr11 5384979 5385000 5384984 5384979 -
cattggtggaggatactgtttc

SEQ ID NO: 115272 - DNA, 22 bp, Artificial Sequence
  Synthetic oligonucleotide; TTG chr11 5384974 5384995 5384979 5384974 -
gtggaggatactgtttcttgta

SEQ ID NO: 115273 - DNA, 22 bp, Artificial Sequence
  Synthetic oligonucleotide; CTG chr11 5384961 5384982 5384966 5384961 -
tttcttgtaaataggagaatat

SEQ ID NO: 115274 - DNA, 22 bp, Artificial Sequence
  Synthetic oligonucleotide; TTT chr11 5384958 5384979 5384963 5384958 -
cttgtaaataggagaatatgca

SEQ ID NO: 115275 - DNA, 22 bp, Artificial Sequence
  Synthetic oligonucleotide; TTC chr11 5384957 5384978 5384962 5384957 -
ttgtaaataggagaatatgcaa

SEQ ID NO: 115276 - DNA, 22 bp, Artificial Sequence
  Synthetic oligonucleotide; CTT chr11 5384955 5384976 5384960 5384955 -
gtaaataggagaatatgcaaaa

SEQ ID NO: 115277 - DNA, 22 bp, Artificial Sequence
  Synthetic oligonucleotide; TTG chr11 5384954 5384975 5384959 5384954 -
taaataggagaatatgcaaaag

SEQ ID NO: 115278 - DNA, 22 bp, Artificial Sequence
  Synthetic oligonucleotide; CTG chr11 5384926 5384947 5384931 5384926 -
cacctaaacacaaggacttgaa

SEQ ID NO: 115279 - DNA, 22 bp, Artificial Sequence
  Synthetic oligonucleotide; CTA chr11 5384920 5384941 5384925 5384920 -
aacacaaggacttgaaccagat

SEQ ID NO: 115280 - DNA, 22 bp, Artificial Sequence
  Synthetic oligonucleotide; CTT chr11 5384907 5384928 5384912 5384907 -
gaaccagattattcatttttga

SEQ ID NO: 115281 - DNA, 22 bp, Artificial Sequence
  Synthetic oligonucleotide; TTG chr11 5384906 5384927 5384911 5384906 -
aaccagattattcatttttgaa

SEQ ID NO: 115282 - DNA, 22 bp, Artificial Sequence
  Synthetic oligonucleotide; TTA chr11 5384896 5384917 5384901 5384896 -
ttcatttttgaacccctagaga

SEQ ID NO: 115283 - DNA, 22 bp, Artificial Sequence
  Synthetic oligonucleotide; TTC chr11 5384893 5384914 5384898 5384893 -
atttttgaacccctagagaaca

SEQ ID NO: 115284 - DNA, 22 bp, Artificial Sequence
  Synthetic oligonucleotide; TTT chr11 5384889 5384910 5384894 5384889 -
ttgaacccctagagaacatttc

SEQ ID NO: 115285 - DNA, 22 bp, Artificial Sequence
  Synthetic oligonucleotide; TTT chr11 5384888 5384909 5384893 5384888 -
tgaacccctagagaacatttcc

SEQ ID NO: 115286 - DNA, 22 bp, Artificial Sequence
  Synthetic oligonucleotide; TTT chr11 5384887 5384908 5384892 5384887 -
gaacccctagagaacatttcca

SEQ ID NO: 115287 - DNA, 22 bp, Artificial Sequence
  Synthetic oligonucleotide; TTG chr11 5384886 5384907 5384891 5384886 -
aacccctagagaacatttccac

SEQ ID NO: 115288 - DNA, 22 bp, Artificial Sequence
  Synthetic oligonucleotide; CTA chr11 5384878 5384899 5384883 5384878 -
gagaacatttccacagtggtca

SEQ ID NO: 115289 - DNA, 22 bp, Artificial Sequence
  Synthetic oligonucleotide; TTT chr11 5384868 5384889 5384873 5384868 -
ccacagtggtcaaactcatctg

SEQ ID NO: 115290 - DNA, 22 bp, Artificial Sequence
  Synthetic oligonucleotide; TTC chr11 5384867 5384888 5384872 5384867 -
cacagtggtcaaactcatctgt

SEQ ID NO: 115291 - DNA, 22 bp, Artificial Sequence
  Synthetic oligonucleotide; CTC chr11 5384851 5384872 5384856 5384851 -
atctgtaaacatgcctgttttt

SEQ ID NO: 115292 - DNA, 22 bp, Artificial Sequence
  Synthetic oligonucleotide; CTG chr11 5384846 5384867 5384851 5384846 -
taaacatgcctgtttttagtag

SEQ ID NO: 115293 - DNA, 22 bp, Artificial Sequence
  Synthetic oligonucleotide; CTG chr11 5384834 5384855 5384839 5384834 -
tttttagtaggatagaggagga

SEQ ID NO: 115294 - DNA, 22 bp, Artificial Sequence
  Synthetic oligonucleotide; TTT chr11 5384831 5384852 5384836 5384831 -
ttagtaggatagaggaggattt

SEQ ID NO: 115295 - DNA, 22 bp, Artificial Sequence
  Synthetic oligonucleotide; TTT chr11 5384830 5384851 5384835 5384830 -
tagtaggatagaggaggatttt

SEQ ID NO: 115296 - DNA, 22 bp, Artificial Sequence
  Synthetic oligonucleotide; TTT chr11 5384829 5384850 5384834 5384829 -
agtaggatagaggaggattttg

SEQ ID NO: 115297 - DNA, 22 bp, Artificial Sequence
  Synthetic oligonucleotide; TTA chr11 5384828 5384849 5384833 5384828 -
gtaggatagaggaggattttgg

SEQ ID NO: 115298 - DNA, 22 bp, Artificial Sequence
  Synthetic oligonucleotide; TTT chr11 5384809 5384830 5384814 5384809 -
tggaaggcgaaggccatatcct

SEQ ID NO: 115299 - DNA, 22 bp, Artificial Sequence
  Synthetic oligonucleotide; TTT chr11 5384808 5384829 5384813 5384808 -
ggaaggcgaaggccatatcctg

SEQ ID NO: 115300 - DNA, 22 bp, Artificial Sequence
  Synthetic oligonucleotide; TTG chr11 5384807 5384828 5384812 5384807 -
gaaggcgaaggccatatcctgg

SEQ ID NO: 115301 - DNA, 22 bp, Artificial Sequence
  Synthetic oligonucleotide; CTG chr11 5384786 5384807 5384791 5384786 -
gatactggggaagttacaaggt

SEQ ID NO: 115302 - DNA, 22 bp, Artificial Sequence
  Synthetic oligonucleotide; CTG chr11 5384779 5384800 5384784 5384779 -
gggaagttacaaggtgttgttt

SEQ ID NO: 115303 - DNA, 22 bp, Artificial Sequence
  Synthetic oligonucleotide; TTA chr11 5384770 5384791 5384775 5384770 -
caaggtgttgtttggattaaaa

SEQ ID NO: 115304 - DNA, 22 bp, Artificial Sequence
  Synthetic oligonucleotide; TTG chr11 5384760 5384781 5384765 5384760 -
tttggattaaaataagcagatt

SEQ ID NO: 115305 - DNA, 22 bp, Artificial Sequence
  Synthetic oligonucleotide; TTT chr11 5384757 5384778 5384762 5384757 -
ggattaaaataagcagattgag

SEQ ID NO: 115306 - DNA, 22 bp, Artificial Sequence
  Synthetic oligonucleotide; TTG chr11 5384756 5384777 5384761 5384756 -
gattaaaataagcagattgagg

SEQ ID NO: 115307 - DNA, 22 bp, Artificial Sequence
  Synthetic oligonucleotide; TTA chr11 5384751 5384772 5384756 5384751 -
aaataagcagattgaggatggg

SEQ ID NO: 115308 - DNA, 22 bp, Artificial Sequence
  Synthetic oligonucleotide; TTG chr11 5384737 5384758 5384742 5384737 -
aggatggggtcttttctatgtt

SEQ ID NO: 115309 - DNA, 22 bp, Artificial Sequence
  Synthetic oligonucleotide; CTT chr11 5384724 5384745 5384729 5384724 -
ttctatgttaactggaccagca

SEQ ID NO: 115310 - DNA, 22 bp, Artificial Sequence
  Synthetic oligonucleotide; TTT chr11 5384723 5384744 5384728 5384723 -
tctatgttaactggaccagcat

SEQ ID NO: 115311 - DNA, 22 bp, Artificial Sequence
  Synthetic oligonucleotide; TTT chr11 5384722 5384743 5384727 5384722 -
ctatgttaactggaccagcata

SEQ ID NO: 115312 - DNA, 22 bp, Artificial Sequence
  Synthetic oligonucleotide; TTC chr11 5384721 5384742 5384726 5384721 -
tatgttaactggaccagcatat

SEQ ID NO: 115313 - DNA, 22 bp, Artificial Sequence
  Synthetic oligonucleotide; CTA chr11 5384719 5384740 5384724 5384719 -
tgttaactggaccagcatataa

SEQ ID NO: 115314 - DNA, 22 bp, Artificial Sequence
  Synthetic oligonucleotide; TTA chr11 5384714 5384735 5384719 5384714 -
actggaccagcatataaaatgc

SEQ ID NO: 115315 - DNA, 22 bp, Artificial Sequence
  Synthetic oligonucleotide; CTG chr11 5384710 5384731 5384715 5384710 -
gaccagcatataaaatgcattt

SEQ ID NO: 115316 - DNA, 22 bp, Artificial Sequence
  Synthetic oligonucleotide; TTT chr11 5384688 5384709 5384693 5384688 -
aataatttgttgaataagtgaa

SEQ ID NO: 115317 - DNA, 22 bp, Artificial Sequence
  Synthetic oligonucleotide; TTA chr11 5384687 5384708 5384692 5384687 -
ataatttgttgaataagtgaat

SEQ ID NO: 115318 - DNA, 22 bp, Artificial Sequence
  Synthetic oligonucleotide; TTT chr11 5384680 5384701 5384685 5384680 -
gttgaataagtgaatgactgtt

SEQ ID NO: 115319 - DNA, 22 bp, Artificial Sequence
  Synthetic oligonucleotide; TTG chr11 5384679 5384700 5384684 5384679 -
ttgaataagtgaatgactgttt

SEQ ID NO: 115320 - DNA, 22 bp, Artificial Sequence
  Synthetic oligonucleotide; TTG chr11 5384676 5384697 5384681 5384676 -
aataagtgaatgactgtttttc

SEQ ID NO: 115321 - DNA, 22 bp, Artificial Sequence
  Synthetic oligonucleotide; CTG chr11 5384660 5384681 5384665 5384660 -
tttttctgatgagagtaaggag

SEQ ID NO: 115322 - DNA, 22 bp, Artificial Sequence
  Synthetic oligonucleotide; TTT chr11 5384657 5384678 5384662 5384657 -
ttctgatgagagtaaggagagg

SEQ ID NO: 115323 - DNA, 22 bp, Artificial Sequence
  Synthetic oligonucleotide; TTT chr11 5384656 5384677 5384661 5384656 -
tctgatgagagtaaggagaggg

SEQ ID NO: 115324 - DNA, 22 bp, Artificial Sequence
  Synthetic oligonucleotide; TTT chr11 5384655 5384676 5384660 5384655 -
ctgatgagagtaaggagagggt

SEQ ID NO: 115325 - DNA, 22 bp, Artificial Sequence
  Synthetic oligonucleotide; TTC chr11 5384654 5384675 5384659 5384654 -
tgatgagagtaaggagagggtg

SEQ ID NO: 115326 - DNA, 22 bp, Artificial Sequence
  Synthetic oligonucleotide; CTG chr11 5384652 5384673 5384657 5384652 -
atgagagtaaggagagggtgtg

SEQ ID NO: 115327 - DNA, 22 bp, Artificial Sequence
  Synthetic oligonucleotide; CTC chr11 5384615 5384636 5384620 5384615 -
ggcaggaaagagtatagagacc

SEQ ID NO: 115328 - DNA, 22 bp, Artificial Sequence
  Synthetic oligonucleotide; CTT chr11 5384584 5384605 5384589 5384584 -
ctgccatcctgacttctagaca

SEQ ID NO: 115329 - DNA, 22 bp, Artificial Sequence
  Synthetic oligonucleotide; TTC chr11 5384583 5384604 5384588 5384583 -
tgccatcctgacttctagacat

SEQ ID NO: 115330 - DNA, 22 bp, Artificial Sequence
  Synthetic oligonucleotide; CTG chr11 5384581 5384602 5384586 5384581 -
ccatcctgacttctagacatga

SEQ ID NO: 115331 - DNA, 22 bp, Artificial Sequence
  Synthetic oligonucleotide; CTG chr11 5384573 5384594 5384578 5384573 -
acttctagacatgatccaggga

SEQ ID NO: 115332 - DNA, 22 bp, Artificial Sequence
  Synthetic oligonucleotide; CTT chr11 5384569 5384590 5384574 5384569 -
ctagacatgatccagggagggg

SEQ ID NO: 115333 - DNA, 22 bp, Artificial Sequence
  Synthetic oligonucleotide; TTC chr11 5384568 5384589 5384573 5384568 -
tagacatgatccagggaggggc

SEQ ID NO: 115334 - DNA, 22 bp, Artificial Sequence
  Synthetic oligonucleotide; CTA chr11 5384566 5384587 5384571 5384566 -
gacatgatccagggaggggctg

SEQ ID NO: 115335 - DNA, 22 bp, Artificial Sequence
  Synthetic oligonucleotide; CTG chr11 5384544 5384565 5384549 5384544 -
gcctggccatgcaggcactcat

SEQ ID NO: 115336 - DNA, 22 bp, Artificial Sequence
  Synthetic oligonucleotide; CTG chr11 5384539 5384560 5384544 5384539 -
gccatgcaggcactcatcaggg

SEQ ID NO: 115337 - DNA, 22 bp, Artificial Sequence
  Synthetic oligonucleotide; CTC chr11 5384524 5384545 5384529 5384524 -
atcaggggagtgaggcagccct

SEQ ID NO: 115338 - DNA, 22 bp, Artificial Sequence
  Synthetic oligonucleotide; CTG chr11 5384501 5384522 5384506 5384501 -
cctcctggccttcctaacagaa

SEQ ID NO: 115339 - DNA, 22 bp, Artificial Sequence
  Synthetic oligonucleotide; CTC chr11 5384497 5384518 5384502 5384497 -
ctggccttcctaacagaatact

SEQ ID NO: 115340 - DNA, 22 bp, Artificial Sequence
  Synthetic oligonucleotide; CTG chr11 5384494 5384515 5384499 5384494 -
gccttcctaacagaatactgca

SEQ ID NO: 115341 - DNA, 22 bp, Artificial Sequence
  Synthetic oligonucleotide; CTT chr11 5384489 5384510 5384494 5384489 -
cctaacagaatactgcagatga

SEQ ID NO: 115342 - DNA, 22 bp, Artificial Sequence
  Synthetic oligonucleotide; TTC chr11 5384488 5384509 5384493 5384488 -
ctaacagaatactgcagatgag

SEQ ID NO: 115343 - DNA, 22 bp, Artificial Sequence
  Synthetic oligonucleotide; CTA chr11 5384485 5384506 5384490 5384485 -
acagaatactgcagatgagctc

SEQ ID NO: 115344 - DNA, 22 bp, Artificial Sequence
  Synthetic oligonucleotide; CTG chr11 5384474 5384495 5384479 5384474 -
cagatgagctcgcctcttttcc

SEQ ID NO: 115345 - DNA, 22 bp, Artificial Sequence
  Synthetic oligonucleotide; CTC chr11 5384463 5384484 5384468 5384463 -
gcctcttttccagcaagagaag

SEQ ID NO: 115346 - DNA, 22 bp, Artificial Sequence
  Synthetic oligonucleotide; CTC chr11 5384458 5384479 5384463 5384458 -
ttttccagcaagagaaggtcct

SEQ ID NO: 115347 - DNA, 22 bp, Artificial Sequence
  Synthetic oligonucleotide; CTT chr11 5384456 5384477 5384461 5384456 -
ttccagcaagagaaggtcctgt

SEQ ID NO: 115348 - DNA, 22 bp, Artificial Sequence
  Synthetic oligonucleotide; TTT chr11 5384455 5384476 5384460 5384455 -
tccagcaagagaaggtcctgtt

SEQ ID NO: 115349 - DNA, 22 bp, Artificial Sequence
  Synthetic oligonucleotide; TTT chr11 5384454 5384475 5384459 5384454 -
ccagcaagagaaggtcctgttt

SEQ ID NO: 115350 - DNA, 22 bp, Artificial Sequence
  Synthetic oligonucleotide; TTC chr11 5384453 5384474 5384458 5384453 -
cagcaagagaaggtcctgtttt

SEQ ID NO: 115351 - DNA, 22 bp, Artificial Sequence
  Synthetic oligonucleotide; CTG chr11 5384435 5384456 5384440 5384435 -
ttttctgttctttctctggctc

SEQ ID NO: 115352 - DNA, 22 bp, Artificial Sequence
  Synthetic oligonucleotide; TTT chr11 5384432 5384453 5384437 5384432 -
tctgttctttctctggctctgg

SEQ ID NO: 115353 - DNA, 22 bp, Artificial Sequence
  Synthetic oligonucleotide; TTT chr11 5384431 5384452 5384436 5384431 -
ctgttctttctctggctctggt

SEQ ID NO: 115354 - DNA, 22 bp, Artificial Sequence
  Synthetic oligonucleotide; TTC chr11 5384430 5384451 5384435 5384430 -
tgttctttctctggctctggtt

SEQ ID NO: 115355 - DNA, 22 bp, Artificial Sequence
  Synthetic oligonucleotide; CTG chr11 5384428 5384449 5384433 5384428 -
ttctttctctggctctggttct

SEQ ID NO: 115356 - DNA, 22 bp, Artificial Sequence
  Synthetic oligonucleotide; TTC chr11 5384425 5384446 5384430 5384425 -
tttctctggctctggttctgtg

SEQ ID NO: 115357 - DNA, 22 bp, Artificial Sequence
  Synthetic oligonucleotide; CTT chr11 5384423 5384444 5384428 5384423 -
tctctggctctggttctgtgca

SEQ ID NO: 115358 - DNA, 22 bp, Artificial Sequence
  Synthetic oligonucleotide; TTT chr11 5384422 5384443 5384427 5384422 -
ctctggctctggttctgtgcat

SEQ ID NO: 115359 - DNA, 22 bp, Artificial Sequence
  Synthetic oligonucleotide; TTC chr11 5384421 5384442 5384426 5384421 -
tctggctctggttctgtgcata

SEQ ID NO: 115360 - DNA, 22 bp, Artificial Sequence
  Synthetic oligonucleotide; CTC chr11 5384419 5384440 5384424 5384419 -
tggctctggttctgtgcataga

SEQ ID NO: 115361 - DNA, 22 bp, Artificial Sequence
  Synthetic oligonucleotide; CTG chr11 5384417 5384438 5384422 5384417 -
gctctggttctgtgcatagact

SEQ ID NO: 115362 - DNA, 22 bp, Artificial Sequence
  Synthetic oligonucleotide; CTC chr11 5384413 5384434 5384418 5384413 -
tggttctgtgcatagactctga

SEQ ID NO: 115363 - DNA, 22 bp, Artificial Sequence
  Synthetic oligonucleotide; CTG chr11 5384411 5384432 5384416 5384411 -
gttctgtgcatagactctgaga

SEQ ID NO: 115364 - DNA, 22 bp, Artificial Sequence
  Synthetic oligonucleotide; TTC chr11 5384407 5384428 5384412 5384407 -
tgtgcatagactctgagaatat

SEQ ID NO: 115365 - DNA, 22 bp, Artificial Sequence
  Synthetic oligonucleotide; CTG chr11 5384405 5384426 5384410 5384405 -
tgcatagactctgagaatatca

SEQ ID NO: 115366 - DNA, 22 bp, Artificial Sequence
  Synthetic oligonucleotide; CTC chr11 5384394 5384415 5384399 5384394 -
tgagaatatcagaagagattct

SEQ ID NO: 115367 - DNA, 22 bp, Artificial Sequence
  Synthetic oligonucleotide; CTG chr11 5384392 5384413 5384397 5384392 -
agaatatcagaagagattctgt

SEQ ID NO: 115368 - DNA, 22 bp, Artificial Sequence
  Synthetic oligonucleotide; TTC chr11 5384373 5384394 5384378 5384373 -
tgtgagaaccctggtttctaag

SEQ ID NO: 115369 - DNA, 22 bp, Artificial Sequence
  Synthetic oligonucleotide; CTG chr11 5384371 5384392 5384376 5384371 -
tgagaaccctggtttctaagac

SEQ ID NO: 115370 - DNA, 22 bp, Artificial Sequence
  Synthetic oligonucleotide; CTG chr11 5384360 5384381 5384365 5384360 -
gtttctaagacttcattttcca

SEQ ID NO: 115371 - DNA, 22 bp, Artificial Sequence
  Synthetic oligonucleotide; TTT chr11 5384356 5384377 5384361 5384356 -
ctaagacttcattttccaagtg

SEQ ID NO: 115372 - DNA, 22 bp, Artificial Sequence
  Synthetic oligonucleotide; TTC chr11 5384355 5384376 5384360 5384355 -
taagacttcattttccaagtga

SEQ ID NO: 115373 - DNA, 22 bp, Artificial Sequence
  Synthetic oligonucleotide; CTA chr11 5384353 5384374 5384358 5384353 -
agacttcattttccaagtgaaa

SEQ ID NO: 115374 - DNA, 22 bp, Artificial Sequence
  Synthetic oligonucleotide; CTT chr11 5384347 5384368 5384352 5384347 -
cattttccaagtgaaaaatcta

SEQ ID NO: 115375 - DNA, 22 bp, Artificial Sequence
  Synthetic oligonucleotide; TTC chr11 5384346 5384367 5384351 5384346 -
attttccaagtgaaaaatctaa

SEQ ID NO: 115376 - DNA, 22 bp, Artificial Sequence
  Synthetic oligonucleotide; TTT chr11 5384342 5384363 5384347 5384342 -
tccaagtgaaaaatctaaggcc

SEQ ID NO: 115377 - DNA, 22 bp, Artificial Sequence
  Synthetic oligonucleotide; TTT chr11 5384341 5384362 5384346 5384341 -
ccaagtgaaaaatctaaggccc

SEQ ID NO: 115378 - DNA, 22 bp, Artificial Sequence
  Synthetic oligonucleotide; TTC chr11 5384340 5384361 5384345 5384340 -
caagtgaaaaatctaaggccca

SEQ ID NO: 115379 - DNA, 22 bp, Artificial Sequence
  Synthetic oligonucleotide; CTA chr11 5384325 5384346 5384330 5384325 -
aggcccagactgctgtatatgg

SEQ ID NO: 115380 - DNA, 22 bp, Artificial Sequence
  Synthetic oligonucleotide; CTG chr11 5384313 5384334 5384318 5384313 -
ctgtatatggtggttcacactt

SEQ ID NO: 115381 - DNA, 22 bp, Artificial Sequence
  Synthetic oligonucleotide; CTG chr11 5384310 5384331 5384315 5384310 -
tatatggtggttcacacttata

SEQ ID NO: 115382 - DNA, 22 bp, Artificial Sequence
  Synthetic oligonucleotide; TTC chr11 5384297 5384318 5384302 5384297 -
acacttataatcctggcaactt

SEQ ID NO: 115383 - DNA, 22 bp, Artificial Sequence
  Synthetic oligonucleotide; CTT chr11 5384291 5384312 5384296 5384291 -
ataatcctggcaacttggaaga

SEQ ID NO: 115384 - DNA, 22 bp, Artificial Sequence
  Synthetic oligonucleotide; TTA chr11 5384290 5384311 5384295 5384290 -
taatcctggcaacttggaagaa

SEQ ID NO: 115385 - DNA, 22 bp, Artificial Sequence
  Synthetic oligonucleotide; CTG chr11 5384282 5384303 5384287 5384282 -
gcaacttggaagaataaggtgg

SEQ ID NO: 115386 - DNA, 22 bp, Artificial Sequence
  Synthetic oligonucleotide; CTT chr11 5384275 5384296 5384280 5384275 -
ggaagaataaggtgggaggatt

SEQ ID NO: 115387 - DNA, 22 bp, Artificial Sequence
  Synthetic oligonucleotide; TTG chr11 5384274 5384295 5384279 5384274 -
gaagaataaggtgggaggattg

SEQ ID NO: 115388 - DNA, 22 bp, Artificial Sequence
  Synthetic oligonucleotide; TTG chr11 5384252 5384273 5384257 5384252 -
cttgaatccggtttgagtttac

SEQ ID NO: 115389 - DNA, 22 bp, Artificial Sequence
  Synthetic oligonucleotide; CTT chr11 5384249 5384270 5384254 5384249 -
gaatccggtttgagtttacagt

SEQ ID NO: 115390 - DNA, 22 bp, Artificial Sequence
  Synthetic oligonucleotide; TTG chr11 5384248 5384269 5384253 5384248 -
aatccggtttgagtttacagtg

SEQ ID NO: 115391 - DNA, 22 bp, Artificial Sequence
  Synthetic oligonucleotide; TTT chr11 5384238 5384259 5384243 5384238 -
gagtttacagtgagctatgatt

SEQ ID NO: 115392 - DNA, 22 bp, Artificial Sequence
  Synthetic oligonucleotide; TTG chr11 5384237 5384258 5384242 5384237 -
agtttacagtgagctatgatta

SEQ ID NO: 115393 - DNA, 22 bp, Artificial Sequence
  Synthetic oligonucleotide; TTT chr11 5384232 5384253 5384237 5384232 -
acagtgagctatgattacacca

SEQ ID NO: 115394 - DNA, 22 bp, Artificial Sequence
  Synthetic oligonucleotide; TTA chr11 5384231 5384252 5384236 5384231 -
cagtgagctatgattacaccac

SEQ ID NO: 115395 - DNA, 22 bp, Artificial Sequence
  Synthetic oligonucleotide; CTA chr11 5384221 5384242 5384226 5384221 -
tgattacaccactgcactgtag

SEQ ID NO: 115396 - DNA, 22 bp, Artificial Sequence
  Synthetic oligonucleotide; TTA chr11 5384215 5384236 5384220 5384215 -
caccactgcactgtagcctggg

SEQ ID NO: 115397 - DNA, 22 bp, Artificial Sequence
  Synthetic oligonucleotide; CTG chr11 5384207 5384228 5384212 5384207 -
cactgtagcctgggtaacagag

SEQ ID NO: 115398 - DNA, 22 bp, Artificial Sequence
  Synthetic oligonucleotide; CTG chr11 5384202 5384223 5384207 5384202 -
tagcctgggtaacagagctaga

SEQ ID NO: 115399 - DNA, 22 bp, Artificial Sequence
  Synthetic oligonucleotide; CTG chr11 5384195 5384216 5384200 5384195 -
ggtaacagagctagacctcatt

SEQ ID NO: 115400 - DNA, 22 bp, Artificial Sequence
  Synthetic oligonucleotide; CTA chr11 5384182 5384203 5384187 5384182 -
gacctcatttctaaaaacaaca

SEQ ID NO: 115401 - DNA, 22 bp, Artificial Sequence
  Synthetic oligonucleotide; CTC chr11 5384176 5384197 5384181 5384176 -
atttctaaaaacaacaaacaaa

SEQ ID NO: 115402 - DNA, 22 bp, Artificial Sequence
  Synthetic oligonucleotide; TTT chr11 5384172 5384193 5384177 5384172 -
ctaaaaacaacaaacaaagaaa

SEQ ID NO: 115403 - DNA, 22 bp, Artificial Sequence
  Synthetic oligonucleotide; TTC chr11 5384171 5384192 5384176 5384171 -
taaaaacaacaaacaaagaaac

SEQ ID NO: 115404 - DNA, 22 bp, Artificial Sequence
  Synthetic oligonucleotide; CTA chr11 5384169 5384190 5384174 5384169 -
aaaacaacaaacaaagaaacaa

SEQ ID NO: 115405 - DNA, 22 bp, Artificial Sequence
  Synthetic oligonucleotide; TTA chr11 5384112 5384133 5384117 5384112 -
ggcttagtgcagggaatgtggg

SEQ ID NO: 115406 - DNA, 22 bp, Artificial Sequence
  Synthetic oligonucleotide; CTT chr11 5384107 5384128 5384112 5384107 -
agtgcagggaatgtggggaatc

SEQ ID NO: 115407 - DNA, 22 bp, Artificial Sequence
  Synthetic oligonucleotide; TTA chr11 5384106 5384127 5384111 5384106 -
gtgcagggaatgtggggaatcc

SEQ ID NO: 115408 - DNA, 22 bp, Artificial Sequence
  Synthetic oligonucleotide; TTT chr11 5384080 5384101 5384085 5384080 -
ggctaaggacattcaaacattt

SEQ ID NO: 115409 - DNA, 22 bp, Artificial Sequence
  Synthetic oligonucleotide; TTG chr11 5384079 5384100 5384084 5384079 -
gctaaggacattcaaacatttg

SEQ ID NO: 115410 - DNA, 22 bp, Artificial Sequence
  Synthetic oligonucleotide; CTA chr11 5384075 5384096 5384080 5384075 -
aggacattcaaacatttggggg

SEQ ID NO: 115411 - DNA, 22 bp, Artificial Sequence
  Synthetic oligonucleotide; TTC chr11 5384066 5384087 5384071 5384066 -
aaacatttgggggaaaagcctt

SEQ ID NO: 115412 - DNA, 22 bp, Artificial Sequence
  Synthetic oligonucleotide; TTT chr11 5384058 5384079 5384063 5384058 -
gggggaaaagccttaattgtaa

SEQ ID NO: 115413 - DNA, 22 bp, Artificial Sequence
  Synthetic oligonucleotide; TTG chr11 5384057 5384078 5384062 5384057 -
ggggaaaagccttaattgtaac

SEQ ID NO: 115414 - DNA, 22 bp, Artificial Sequence
  Synthetic oligonucleotide; CTT chr11 5384044 5384065 5384049 5384044 -
aattgtaactgagaccatgtct

SEQ ID NO: 115415 - DNA, 22 bp, Artificial Sequence
  Synthetic oligonucleotide; TTA chr11 5384043 5384064 5384048 5384043 -
attgtaactgagaccatgtctt

SEQ ID NO: 115416 - DNA, 22 bp, Artificial Sequence
  Synthetic oligonucleotide; TTG chr11 5384039 5384060 5384044 5384039 -
taactgagaccatgtctttttg

SEQ ID NO: 115417 - DNA, 22 bp, Artificial Sequence
  Synthetic oligonucleotide; CTG chr11 5384033 5384054 5384038 5384033 -
agaccatgtctttttgggctca

SEQ ID NO: 115418 - DNA, 22 bp, Artificial Sequence
  Synthetic oligonucleotide; CTT chr11 5384021 5384042 5384026 5384021 -
tttgggctcactgcttttgtga

SEQ ID NO: 115419 - DNA, 22 bp, Artificial Sequence
  Synthetic oligonucleotide; TTT chr11 5384020 5384041 5384025 5384020 -
ttgggctcactgcttttgtgat

SEQ ID NO: 115420 - DNA, 22 bp, Artificial Sequence
  Synthetic oligonucleotide; TTT chr11 5384019 5384040 5384024 5384019 -
tgggctcactgcttttgtgata

SEQ ID NO: 115421 - DNA, 22 bp, Artificial Sequence
  Synthetic oligonucleotide; TTT chr11 5384018 5384039 5384023 5384018 -
gggctcactgcttttgtgatac

SEQ ID NO: 115422 - DNA, 22 bp, Artificial Sequence
  Synthetic oligonucleotide; TTG chr11 5384017 5384038 5384022 5384017 -
ggctcactgcttttgtgatacc

SEQ ID NO: 115423 - DNA, 22 bp, Artificial Sequence
  Synthetic oligonucleotide; CTC chr11 5384012 5384033 5384017 5384012 -
actgcttttgtgatacctatgc

SEQ ID NO: 115424 - DNA, 22 bp, Artificial Sequence
  Synthetic oligonucleotide; CTG chr11 5384008 5384029 5384013 5384008 -
cttttgtgatacctatgcattc

SEQ ID NO: 115425 - DNA, 22 bp, Artificial Sequence
  Synthetic oligonucleotide; CTT chr11 5384005 5384026 5384010 5384005 -
ttgtgatacctatgcattccca

SEQ ID NO: 115426 - DNA, 22 bp, Artificial Sequence
  Synthetic oligonucleotide; TTT chr11 5384004 5384025 5384009 5384004 -
tgtgatacctatgcattcccat

SEQ ID NO: 115427 - DNA, 22 bp, Artificial Sequence
  Synthetic oligonucleotide; TTT chr11 5384003 5384024 5384008 5384003 -
gtgatacctatgcattcccatt

SEQ ID NO: 115428 - DNA, 22 bp, Artificial Sequence
  Synthetic oligonucleotide; TTG chr11 5384002 5384023 5384007 5384002 -
tgatacctatgcattcccattt

SEQ ID NO: 115429 - DNA, 22 bp, Artificial Sequence
  Synthetic oligonucleotide; CTA chr11 5383993 5384014 5383998 5383993 -
tgcattcccattttccctcatt

SEQ ID NO: 115430 - DNA, 22 bp, Artificial Sequence
  Synthetic oligonucleotide; TTC chr11 5383986 5384007 5383991 5383986 -
ccattttccctcattttctccc

SEQ ID NO: 115431 - DNA, 22 bp, Artificial Sequence
  Synthetic oligonucleotide; TTT chr11 5383980 5384001 5383985 5383980 -
tccctcattttctccctcctct

SEQ ID NO: 115432 - DNA, 22 bp, Artificial Sequence
  Synthetic oligonucleotide; TTT chr11 5383979 5384000 5383984 5383979 -
ccctcattttctccctcctctc

SEQ ID NO: 115433 - DNA, 22 bp, Artificial Sequence
  Synthetic oligonucleotide; TTC chr11 5383978 5383999 5383983 5383978 -
cctcattttctccctcctctct

SEQ ID NO: 115434 - DNA, 22 bp, Artificial Sequence
  Synthetic oligonucleotide; CTC chr11 5383974 5383995 5383979 5383974 -
attttctccctcctctctccca

SEQ ID NO: 115435 - DNA, 22 bp, Artificial Sequence
  Synthetic oligonucleotide; TTT chr11 5383970 5383991 5383975 5383970 -
tctccctcctctctcccatgtc

SEQ ID NO: 115436 - DNA, 22 bp, Artificial Sequence
  Synthetic oligonucleotide; TTT chr11 5383969 5383990 5383974 5383969 -
ctccctcctctctcccatgtcc

SEQ ID NO: 115437 - DNA, 22 bp, Artificial Sequence
  Synthetic oligonucleotide; TTC chr11 5383968 5383989 5383973 5383968 -
tccctcctctctcccatgtccc

SEQ ID NO: 115438 - DNA, 22 bp, Artificial Sequence
  Synthetic oligonucleotide; CTC chr11 5383966 5383987 5383971 5383966 -
cctcctctctcccatgtccccc

SEQ ID NO: 115439 - DNA, 22 bp, Artificial Sequence
  Synthetic oligonucleotide; CTC chr11 5383962 5383983 5383967 5383962 -
ctctctcccatgtccccctaat

SEQ ID NO: 115440 - DNA, 22 bp, Artificial Sequence
  Synthetic oligonucleotide; CTC chr11 5383959 5383980 5383964 5383959 -
tctcccatgtccccctaattac

SEQ ID NO: 115441 - DNA, 22 bp, Artificial Sequence
  Synthetic oligonucleotide; CTC chr11 5383957 5383978 5383962 5383957 -
tcccatgtccccctaattaccc

SEQ ID NO: 115442 - DNA, 22 bp, Artificial Sequence
  Synthetic oligonucleotide; CTC chr11 5383955 5383976 5383960 5383955 -
ccatgtccccctaattacccac

SEQ ID NO: 115443 - DNA, 22 bp, Artificial Sequence
  Synthetic oligonucleotide; CTA chr11 5383942 5383963 5383947 5383942 -
attacccactcctgaaaccccg

SEQ ID NO: 115444 - DNA, 22 bp, Artificial Sequence
  Synthetic oligonucleotide; TTA chr11 5383938 5383959 5383943 5383938 -
cccactcctgaaaccccggcac

SEQ ID NO: 115445 - DNA, 22 bp, Artificial Sequence
  Synthetic oligonucleotide; CTC chr11 5383931 5383952 5383936 5383931 -
ctgaaaccccggcacaagacag

SEQ ID NO: 115446 - DNA, 22 bp, Artificial Sequence
  Synthetic oligonucleotide; CTG chr11 5383928 5383949 5383933 5383928 -
aaaccccggcacaagacagtag

SEQ ID NO: 115447 - DNA, 22 bp, Artificial Sequence
  Synthetic oligonucleotide; CTC chr11 5383898 5383919 5383903 5383898 -
accagcaggtaataacaaaaat

SEQ ID NO: 115448 - DNA, 22 bp, Artificial Sequence
  Synthetic oligonucleotide; TTC chr11 5383855 5383876 5383860 5383855 -
caaaggaagaaagaagagtata

SEQ ID NO: 115449 - DNA, 22 bp, Artificial Sequence
  Synthetic oligonucleotide; CTG chr11 5383808 5383829 5383813 5383808 -
agaggcacaaggctgtggctgt

SEQ ID NO: 115450 - DNA, 22 bp, Artificial Sequence
  Synthetic oligonucleotide; CTG chr11 5383793 5383814 5383798 5383793 -
tggctgtcacagaaggatttat

SEQ ID NO: 115451 - DNA, 22 bp, Artificial Sequence
  Synthetic oligonucleotide; CTG chr11 5383787 5383808 5383792 5383787 -
tcacagaaggatttatcctcct

SEQ ID NO: 115452 - DNA, 22 bp, Artificial Sequence
  Synthetic oligonucleotide; TTT chr11 5383773 5383794 5383778 5383773 -
atcctcctaaagaccatggctc

SEQ ID NO: 115453 - DNA, 22 bp, Artificial Sequence
  Synthetic oligonucleotide; TTA chr11 5383772 5383793 5383777 5383772 -
tcctcctaaagaccatggctcc

SEQ ID NO: 115454 - DNA, 22 bp, Artificial Sequence
  Synthetic oligonucleotide; CTC chr11 5383767 5383788 5383772 5383767 -
ctaaagaccatggctccagctg

SEQ ID NO: 115455 - DNA, 22 bp, Artificial Sequence
  Synthetic oligonucleotide; CTA chr11 5383764 5383785 5383769 5383764 -
aagaccatggctccagctggga

SEQ ID NO: 115456 - DNA, 22 bp, Artificial Sequence
  Synthetic oligonucleotide; CTC chr11 5383751 5383772 5383756 5383751 -
cagctgggagaacttaatggta

SEQ ID NO: 115457 - DNA, 22 bp, Artificial Sequence
  Synthetic oligonucleotide; CTG chr11 5383745 5383766 5383750 5383745 -
ggagaacttaatggtaaacaaa

SEQ ID NO: 115458 - DNA, 22 bp, Artificial Sequence
  Synthetic oligonucleotide; CTT chr11 5383736 5383757 5383741 5383736 -
aatggtaaacaaagggtcccca

SEQ ID NO: 115459 - DNA, 22 bp, Artificial Sequence
  Synthetic oligonucleotide; TTA chr11 5383735 5383756 5383740 5383735 -
atggtaaacaaagggtccccag

SEQ ID NO: 115460 - DNA, 22 bp, Artificial Sequence
  Synthetic oligonucleotide; CTG chr11 5383708 5383729 5383713 5383708 -
ggaatcctatgggcaggaaact

SEQ ID NO: 115461 - DNA, 22 bp, Artificial Sequence
  Synthetic oligonucleotide; CTA chr11 5383699 5383720 5383704 5383699 -
tgggcaggaaactttctttatc

SEQ ID NO: 115462 - DNA, 22 bp, Artificial Sequence
  Synthetic oligonucleotide; CTT chr11 5383685 5383706 5383690 5383685 -
tctttatctccacccctgtctc

SEQ ID NO: 115463 - DNA, 22 bp, Artificial Sequence
  Synthetic oligonucleotide; TTT chr11 5383684 5383705 5383689 5383684 -
ctttatctccacccctgtctcc

SEQ ID NO: 115464 - DNA, 22 bp, Artificial Sequence
  Synthetic oligonucleotide; TTC chr11 5383683 5383704 5383688 5383683 -
tttatctccacccctgtctcct

SEQ ID NO: 115465 - DNA, 22 bp, Artificial Sequence
  Synthetic oligonucleotide; CTT chr11 5383681 5383702 5383686 5383681 -
tatctccacccctgtctcctga

SEQ ID NO: 115466 - DNA, 22 bp, Artificial Sequence
  Synthetic oligonucleotide; TTT chr11 5383680 5383701 5383685 5383680 -
atctccacccctgtctcctgaa

SEQ ID NO: 115467 - DNA, 22 bp, Artificial Sequence
  Synthetic oligonucleotide; TTA chr11 5383679 5383700 5383684 5383679 -
tctccacccctgtctcctgaag

SEQ ID NO: 115468 - DNA, 22 bp, Artificial Sequence
  Synthetic oligonucleotide; CTC chr11 5383675 5383696 5383680 5383675 -
cacccctgtctcctgaagctga

SEQ ID NO: 115469 - DNA, 22 bp, Artificial Sequence
  Synthetic oligonucleotide; CTG chr11 5383667 5383688 5383672 5383667 -
tctcctgaagctgaagagccct

SEQ ID NO: 115470 - DNA, 22 bp, Artificial Sequence
  Synthetic oligonucleotide; CTC chr11 5383663 5383684 5383668 5383663 -
ctgaagctgaagagccctaact

SEQ ID NO: 115471 - DNA, 22 bp, Artificial Sequence
  Synthetic oligonucleotide; CTG chr11 5383660 5383681 5383665 5383660 -
aagctgaagagccctaactttt

SEQ ID NO: 115472 - DNA, 22 bp, Artificial Sequence
  Synthetic oligonucleotide; CTG chr11 5383654 5383675 5383659 5383654 -
aagagccctaactttttagcat

SEQ ID NO: 115473 - DNA, 22 bp, Artificial Sequence
  Synthetic oligonucleotide; CTA chr11 5383644 5383665 5383649 5383644 -
actttttagcattcagtcccca

SEQ ID NO: 115474 - DNA, 22 bp, Artificial Sequence
  Synthetic oligonucleotide; CTT chr11 5383640 5383661 5383645 5383640 -
tttagcattcagtccccaggtt

SEQ ID NO: 115475 - DNA, 22 bp, Artificial Sequence
  Synthetic oligonucleotide; TTT chr11 5383639 5383660 5383644 5383639 -
ttagcattcagtccccaggttt

SEQ ID NO: 115476 - DNA, 22 bp, Artificial Sequence
  Synthetic oligonucleotide; TTT chr11 5383638 5383659 5383643 5383638 -
tagcattcagtccccaggtttt

SEQ ID NO: 115477 - DNA, 22 bp, Artificial Sequence
  Synthetic oligonucleotide; TTT chr11 5383637 5383658 5383642 5383637 -
agcattcagtccccaggttttg

SEQ ID NO: 115478 - DNA, 22 bp, Artificial Sequence
  Synthetic oligonucleotide; TTA chr11 5383636 5383657 5383641 5383636 -
gcattcagtccccaggttttgg

SEQ ID NO: 115479 - DNA, 22 bp, Artificial Sequence
  Synthetic oligonucleotide; TTC chr11 5383630 5383651 5383635 5383630 -
agtccccaggttttggctacac

SEQ ID NO: 115480 - DNA, 22 bp, Artificial Sequence
  Synthetic oligonucleotide; TTT chr11 5383617 5383638 5383622 5383617 -
tggctacacagacatctgctgc

SEQ ID NO: 115481 - DNA, 22 bp, Artificial Sequence
  Synthetic oligonucleotide; TTT chr11 5383616 5383637 5383621 5383616 -
ggctacacagacatctgctgca

SEQ ID NO: 115482 - DNA, 22 bp, Artificial Sequence
  Synthetic oligonucleotide; TTG chr11 5383615 5383636 5383620 5383615 -
gctacacagacatctgctgcaa

SEQ ID NO: 115483 - DNA, 22 bp, Artificial Sequence
  Synthetic oligonucleotide; CTA chr11 5383611 5383632 5383616 5383611 -
cacagacatctgctgcaacaaa

SEQ ID NO: 115484 - DNA, 22 bp, Artificial Sequence
  Synthetic oligonucleotide; CTG chr11 5383599 5383620 5383604 5383599 -
ctgcaacaaaagtactactgcc

SEQ ID NO: 115485 - DNA, 22 bp, Artificial Sequence
  Synthetic oligonucleotide; CTG chr11 5383596 5383617 5383601 5383596 -
caacaaaagtactactgcctta

SEQ ID NO: 115486 - DNA, 22 bp, Artificial Sequence
  Synthetic oligonucleotide; CTA chr11 5383582 5383603 5383587 5383582 -
ctgccttatctgtttattttta

SEQ ID NO: 115487 - DNA, 22 bp, Artificial Sequence
  Synthetic oligonucleotide; CTG chr11 5383579 5383600 5383584 5383579 -
ccttatctgtttatttttaatt

SEQ ID NO: 115488 - DNA, 22 bp, Artificial Sequence
  Synthetic oligonucleotide; CTT chr11 5383575 5383596 5383580 5383575 -
atctgtttatttttaatttcat

SEQ ID NO: 115489 - DNA, 22 bp, Artificial Sequence
  Synthetic oligonucleotide; TTA chr11 5383574 5383595 5383579 5383574 -
tctgtttatttttaatttcata

SEQ ID NO: 115490 - DNA, 22 bp, Artificial Sequence
  Synthetic oligonucleotide; CTG chr11 5383570 5383591 5383575 5383570 -
tttatttttaatttcataaaga

SEQ ID NO: 115491 - DNA, 22 bp, Artificial Sequence
  Synthetic oligonucleotide; TTT chr11 5383567 5383588 5383572 5383567 -
atttttaatttcataaagaagt

SEQ ID NO: 115492 - DNA, 22 bp, Artificial Sequence
  Synthetic oligonucleotide; TTA chr11 5383566 5383587 5383571 5383566 -
tttttaatttcataaagaagtc

SEQ ID NO: 115493 - DNA, 22 bp, Artificial Sequence
  Synthetic oligonucleotide; TTT chr11 5383563 5383584 5383568 5383563 -
ttaatttcataaagaagtcaat

SEQ ID NO: 115494 - DNA, 22 bp, Artificial Sequence
  Synthetic oligonucleotide; TTT chr11 5383562 5383583 5383567 5383562 -
taatttcataaagaagtcaatt

SEQ ID NO: 115495 - DNA, 22 bp, Artificial Sequence
  Synthetic oligonucleotide; TTT chr11 5383561 5383582 5383566 5383561 -
aatttcataaagaagtcaattc

SEQ ID NO: 115496 - DNA, 22 bp, Artificial Sequence
  Synthetic oligonucleotide; TTA chr11 5383560 5383581 5383565 5383560 -
atttcataaagaagtcaattca

SEQ ID NO: 115497 - DNA, 22 bp, Artificial Sequence
  Synthetic oligonucleotide; TTT chr11 5383556 5383577 5383561 5383556 -
cataaagaagtcaattcatatc

SEQ ID NO: 115498 - DNA, 22 bp, Artificial Sequence
  Synthetic oligonucleotide; TTC chr11 5383555 5383576 5383560 5383555 -
ataaagaagtcaattcatatca

SEQ ID NO: 115499 - DNA, 22 bp, Artificial Sequence
  Synthetic oligonucleotide; TTC chr11 5383539 5383560 5383544 5383539 -
atatcacttatcattttattta

SEQ ID NO: 115500 - DNA, 22 bp, Artificial Sequence
  Synthetic oligonucleotide; CTT chr11 5383530 5383551 5383535 5383530 -
atcattttatttactgtcttct

SEQ ID NO: 115501 - DNA, 22 bp, Artificial Sequence
  Synthetic oligonucleotide; TTA chr11 5383529 5383550 5383534 5383529 -
tcattttatttactgtcttctg

SEQ ID NO: 115502 - DNA, 22 bp, Artificial Sequence
  Synthetic oligonucleotide; TTT chr11 5383523 5383544 5383528 5383523 -
tatttactgtcttctgttatcc

SEQ ID NO: 115503 - DNA, 22 bp, Artificial Sequence
  Synthetic oligonucleotide; TTT chr11 5383522 5383543 5383527 5383522 -
atttactgtcttctgttatcca

SEQ ID NO: 115504 - DNA, 22 bp, Artificial Sequence
  Synthetic oligonucleotide; TTA chr11 5383521 5383542 5383526 5383521 -
tttactgtcttctgttatccac

SEQ ID NO: 115505 - DNA, 22 bp, Artificial Sequence
  Synthetic oligonucleotide; TTT chr11 5383518 5383539 5383523 5383518 -
actgtcttctgttatccactag

SEQ ID NO: 115506 - DNA, 22 bp, Artificial Sequence
  Synthetic oligonucleotide; TTA chr11 5383517 5383538 5383522 5383517 -
ctgtcttctgttatccactagt

SEQ ID NO: 115507 - DNA, 22 bp, Artificial Sequence
  Synthetic oligonucleotide; CTG chr11 5383514 5383535 5383519 5383514 -
tcttctgttatccactagtaat

SEQ ID NO: 115508 - DNA, 22 bp, Artificial Sequence
  Synthetic oligonucleotide; CTT chr11 5383510 5383531 5383515 5383510 -
ctgttatccactagtaatggac

SEQ ID NO: 115509 - DNA, 22 bp, Artificial Sequence
  Synthetic oligonucleotide; TTC chr11 5383509 5383530 5383514 5383509 -
tgttatccactagtaatggacc

SEQ ID NO: 115510 - DNA, 22 bp, Artificial Sequence
  Synthetic oligonucleotide; CTG chr11 5383507 5383528 5383512 5383507 -
ttatccactagtaatggacccg

SEQ ID NO: 115511 - DNA, 22 bp, Artificial Sequence
  Synthetic oligonucleotide; TTA chr11 5383504 5383525 5383509 5383504 -
tccactagtaatggacccgtcg

SEQ ID NO: 115512 - DNA, 22 bp, Artificial Sequence
  Synthetic oligonucleotide; CTA chr11 5383497 5383518 5383502 5383497 -
gtaatggacccgtcgttttcca

SEQ ID NO: 115513 - DNA, 22 bp, Artificial Sequence
  Synthetic oligonucleotide; TTT chr11 5383479 5383500 5383484 5383479 -
tccagagaggtcggatgtagta

SEQ ID NO: 115514 - DNA, 22 bp, Artificial Sequence
  Synthetic oligonucleotide; TTT chr11 5383478 5383499 5383483 5383478 -
ccagagaggtcggatgtagtat

SEQ ID NO: 115515 - DNA, 22 bp, Artificial Sequence
  Synthetic oligonucleotide; TTC chr11 5383477 5383498 5383482 5383477 -
cagagaggtcggatgtagtata

SEQ ID NO: 115516 - DNA, 22 bp, Artificial Sequence
  Synthetic oligonucleotide; TTA chr11 5383443 5383464 5383448 5383443 -
tccatgtgatgttcacagtggc

SEQ ID NO: 115517 - DNA, 22 bp, Artificial Sequence
  Synthetic oligonucleotide; TTC chr11 5383429 5383450 5383434 5383429 -
acagtggcttttaaattgcaca

SEQ ID NO: 115518 - DNA, 22 bp, Artificial Sequence
  Synthetic oligonucleotide; CTT chr11 5383419 5383440 5383424 5383419 -
ttaaattgcacatctgccttga

SEQ ID NO: 115519 - DNA, 22 bp, Artificial Sequence
  Synthetic oligonucleotide; TTT chr11 5383418 5383439 5383423 5383418 -
taaattgcacatctgccttgaa

SEQ ID NO: 115520 - DNA, 22 bp, Artificial Sequence
  Synthetic oligonucleotide; TTT chr11 5383417 5383438 5383422 5383417 -
aaattgcacatctgccttgaag

SEQ ID NO: 115521 - DNA, 22 bp, Artificial Sequence
  Synthetic oligonucleotide; TTA chr11 5383416 5383437 5383421 5383416 -
aattgcacatctgccttgaagc

SEQ ID NO: 115522 - DNA, 22 bp, Artificial Sequence
  Synthetic oligonucleotide; TTG chr11 5383411 5383432 5383416 5383411 -
cacatctgccttgaagcaccac

SEQ ID NO: 115523 - DNA, 22 bp, Artificial Sequence
  Synthetic oligonucleotide; CTG chr11 5383403 5383424 5383408 5383403 -
ccttgaagcaccacaatcacca

SEQ ID NO: 115524 - DNA, 22 bp, Artificial Sequence
  Synthetic oligonucleotide; CTT chr11 5383399 5383420 5383404 5383399 -
gaagcaccacaatcaccactac

SEQ ID NO: 115525 - DNA, 22 bp, Artificial Sequence
  Synthetic oligonucleotide; TTG chr11 5383398 5383419 5383403 5383398 -
aagcaccacaatcaccactact

SEQ ID NO: 115526 - DNA, 22 bp, Artificial Sequence
  Synthetic oligonucleotide; CTA chr11 5383378 5383399 5383383 5383378 -
cttcaagattctctcactcctg

SEQ ID NO: 115527 - DNA, 22 bp, Artificial Sequence
  Synthetic oligonucleotide; CTT chr11 5383375 5383396 5383380 5383375 -
caagattctctcactcctgcac

SEQ ID NO: 115528 - DNA, 22 bp, Artificial Sequence
  Synthetic oligonucleotide; TTC chr11 5383374 5383395 5383379 5383374 -
aagattctctcactcctgcact

SEQ ID NO: 115529 - DNA, 22 bp, Artificial Sequence
  Synthetic oligonucleotide; TTC chr11 5383367 5383388 5383372 5383367 -
tctcactcctgcactcattttc

SEQ ID NO: 115530 - DNA, 22 bp, Artificial Sequence
  Synthetic oligonucleotide; CTC chr11 5383365 5383386 5383370 5383365 -
tcactcctgcactcattttcct

SEQ ID NO: 115531 - DNA, 22 bp, Artificial Sequence
  Synthetic oligonucleotide; CTC chr11 5383363 5383384 5383368 5383363 -
actcctgcactcattttcctgt

SEQ ID NO: 115532 - DNA, 22 bp, Artificial Sequence
  Synthetic oligonucleotide; CTC chr11 5383359 5383380 5383364 5383359 -
ctgcactcattttcctgtctat

SEQ ID NO: 115533 - DNA, 22 bp, Artificial Sequence
  Synthetic oligonucleotide; CTG chr11 5383356 5383377 5383361 5383356 -
cactcattttcctgtctatttt

SEQ ID NO: 115534 - DNA, 22 bp, Artificial Sequence
  Synthetic oligonucleotide; CTC chr11 5383351 5383372 5383356 5383351 -
attttcctgtctatttttatat

SEQ ID NO: 115535 - DNA, 22 bp, Artificial Sequence
  Synthetic oligonucleotide; TTT chr11 5383347 5383368 5383352 5383347 -
tcctgtctatttttatatttcc

SEQ ID NO: 115536 - DNA, 22 bp, Artificial Sequence
  Synthetic oligonucleotide; TTT chr11 5383346 5383367 5383351 5383346 -
cctgtctatttttatatttcca

SEQ ID NO: 115537 - DNA, 22 bp, Artificial Sequence
  Synthetic oligonucleotide; TTC chr11 5383345 5383366 5383350 5383345 -
ctgtctatttttatatttccat

SEQ ID NO: 115538 - DNA, 22 bp, Artificial Sequence
  Synthetic oligonucleotide; CTG chr11 5383342 5383363 5383347 5383342 -
tctatttttatatttccattta

SEQ ID NO: 115539 - DNA, 22 bp, Artificial Sequence
  Synthetic oligonucleotide; CTA chr11 5383338 5383359 5383343 5383338 -
tttttatatttccatttactgc

SEQ ID NO: 115540 - DNA, 22 bp, Artificial Sequence
  Synthetic oligonucleotide; TTT chr11 5383335 5383356 5383340 5383335 -
ttatatttccatttactgcaga

SEQ ID NO: 115541 - DNA, 22 bp, Artificial Sequence
  Synthetic oligonucleotide; TTT chr11 5383334 5383355 5383339 5383334 -
tatatttccatttactgcagat

SEQ ID NO: 115542 - DNA, 22 bp, Artificial Sequence
  Synthetic oligonucleotide; TTT chr11 5383333 5383354 5383338 5383333 -
atatttccatttactgcagata

SEQ ID NO: 115543 - DNA, 22 bp, Artificial Sequence
  Synthetic oligonucleotide; TTA chr11 5383332 5383353 5383337 5383332 -
tatttccatttactgcagataa

SEQ ID NO: 115544 - DNA, 22 bp, Artificial Sequence
  Synthetic oligonucleotide; TTT chr11 5383327 5383348 5383332 5383327 -
ccatttactgcagataattaaa

SEQ ID NO: 115545 - DNA, 22 bp, Artificial Sequence
  Synthetic oligonucleotide; TTC chr11 5383326 5383347 5383331 5383326 -
catttactgcagataattaaat

SEQ ID NO: 115546 - DNA, 22 bp, Artificial Sequence
  Synthetic oligonucleotide; TTT chr11 5383321 5383342 5383326 5383321 -
actgcagataattaaattgccc

SEQ ID NO: 115547 - DNA, 22 bp, Artificial Sequence
  Synthetic oligonucleotide; TTA chr11 5383320 5383341 5383325 5383320 -
ctgcagataattaaattgccct

SEQ ID NO: 115548 - DNA, 22 bp, Artificial Sequence
  Synthetic oligonucleotide; CTG chr11 5383317 5383338 5383322 5383317 -
cagataattaaattgccctcca

SEQ ID NO: 115549 - DNA, 22 bp, Artificial Sequence
  Synthetic oligonucleotide; TTA chr11 5383307 5383328 5383312 5383307 -
aattgccctccatctctgccag

SEQ ID NO: 115550 - DNA, 22 bp, Artificial Sequence
  Synthetic oligonucleotide; TTG chr11 5383302 5383323 5383307 5383302 -
ccctccatctctgccagcctct

SEQ ID NO: 115551 - DNA, 22 bp, Artificial Sequence
  Synthetic oligonucleotide; CTC chr11 5383297 5383318 5383302 5383297 -
catctctgccagcctctatatc

SEQ ID NO: 115552 - DNA, 22 bp, Artificial Sequence
  Synthetic oligonucleotide; CTC chr11 5383291 5383312 5383296 5383291 -
tgccagcctctatatctttgga

SEQ ID NO: 115553 - DNA, 22 bp, Artificial Sequence
  Synthetic oligonucleotide; CTG chr11 5383289 5383310 5383294 5383289 -
ccagcctctatatctttggacc

SEQ ID NO: 115554 - DNA, 22 bp, Artificial Sequence
  Synthetic oligonucleotide; CTC chr11 5383281 5383302 5383286 5383281 -
tatatctttggacctagaagtc

SEQ ID NO: 115555 - DNA, 22 bp, Artificial Sequence
  Synthetic oligonucleotide; CTA chr11 5383279 5383300 5383284 5383279 -
tatctttggacctagaagtcaa

SEQ ID NO: 115556 - DNA, 22 bp, Artificial Sequence
  Synthetic oligonucleotide; CTT chr11 5383273 5383294 5383278 5383273 -
tggacctagaagtcaatcttgc

SEQ ID NO: 115557 - DNA, 22 bp, Artificial Sequence
  Synthetic oligonucleotide; TTT chr11 5383272 5383293 5383277 5383272 -
ggacctagaagtcaatcttgca

SEQ ID NO: 115558 - DNA, 22 bp, Artificial Sequence
  Synthetic oligonucleotide; TTG chr11 5383271 5383292 5383276 5383271 -
gacctagaagtcaatcttgcat

SEQ ID NO: 115559 - DNA, 22 bp, Artificial Sequence
  Synthetic oligonucleotide; CTA chr11 5383265 5383286 5383270 5383265 -
gaagtcaatcttgcatattcaa

SEQ ID NO: 115560 - DNA, 22 bp, Artificial Sequence
  Synthetic oligonucleotide; CTT chr11 5383253 5383274 5383258 5383253 -
gcatattcaatcctaccccaaa

SEQ ID NO: 115561 - DNA, 22 bp, Artificial Sequence
  Synthetic oligonucleotide; TTG chr11 5383252 5383273 5383257 5383252 -
catattcaatcctaccccaaac

SEQ ID NO: 115562 - DNA, 22 bp, Artificial Sequence
  Synthetic oligonucleotide; TTC chr11 5383245 5383266 5383250 5383245 -
aatcctaccccaaacaaatgtc

SEQ ID NO: 115563 - DNA, 22 bp, Artificial Sequence
  Synthetic oligonucleotide; CTA chr11 5383238 5383259 5383243 5383238 -
ccccaaacaaatgtccaggtca

SEQ ID NO: 115564 - DNA, 22 bp, Artificial Sequence
  Synthetic oligonucleotide; CTC chr11 5383209 5383230 5383214 5383209 -
aggctttcccaaagctctctac

SEQ ID NO: 115565 - DNA, 22 bp, Artificial Sequence
  Synthetic oligonucleotide; CTT chr11 5383203 5383224 5383208 5383203 -
tcccaaagctctctacttcatc

SEQ ID NO: 115566 - DNA, 22 bp, Artificial Sequence
  Synthetic oligonucleotide; TTT chr11 5383202 5383223 5383207 5383202 -
cccaaagctctctacttcatct

SEQ ID NO: 115567 - DNA, 22 bp, Artificial Sequence
  Synthetic oligonucleotide; TTC chr11 5383201 5383222 5383206 5383201 -
ccaaagctctctacttcatctt

SEQ ID NO: 115568 - DNA, 22 bp, Artificial Sequence
  Synthetic oligonucleotide; CTC chr11 5383192 5383213 5383197 5383192 -
tctacttcatctttgaatgcac

SEQ ID NO: 115569 - DNA, 22 bp, Artificial Sequence
  Synthetic oligonucleotide; CTC chr11 5383190 5383211 5383195 5383190 -
tacttcatctttgaatgcactg

SEQ ID NO: 115570 - DNA, 22 bp, Artificial Sequence
  Synthetic oligonucleotide; CTA chr11 5383188 5383209 5383193 5383188 -
cttcatctttgaatgcactgga

SEQ ID NO: 115571 - DNA, 22 bp, Artificial Sequence
  Synthetic oligonucleotide; CTT chr11 5383185 5383206 5383190 5383185 -
catctttgaatgcactggactt

SEQ ID NO: 115572 - DNA, 22 bp, Artificial Sequence
  Synthetic oligonucleotide; TTC chr11 5383184 5383205 5383189 5383184 -
atctttgaatgcactggacttt

SEQ ID NO: 115573 - DNA, 22 bp, Artificial Sequence
  Synthetic oligonucleotide; CTT chr11 5383179 5383200 5383184 5383179 -
tgaatgcactggactttccttc

SEQ ID NO: 115574 - DNA, 22 bp, Artificial Sequence
  Synthetic oligonucleotide; TTT chr11 5383178 5383199 5383183 5383178 -
gaatgcactggactttccttca

SEQ ID NO: 115575 - DNA, 22 bp, Artificial Sequence
  Synthetic oligonucleotide; TTG chr11 5383177 5383198 5383182 5383177 -
aatgcactggactttccttcaa

SEQ ID NO: 115576 - DNA, 22 bp, Artificial Sequence
  Synthetic oligonucleotide; CTG chr11 5383168 5383189 5383173 5383168 -
gactttccttcaatgagcccta

SEQ ID NO: 115577 - DNA, 22 bp, Artificial Sequence
  Synthetic oligonucleotide; CTT chr11 5383163 5383184 5383168 5383163 -
tccttcaatgagccctacaaca

SEQ ID NO: 115578 - DNA, 22 bp, Artificial Sequence
  Synthetic oligonucleotide; TTT chr11 5383162 5383183 5383167 5383162 -
ccttcaatgagccctacaacaa

SEQ ID NO: 115579 - DNA, 22 bp, Artificial Sequence
  Synthetic oligonucleotide; TTC chr11 5383161 5383182 5383166 5383161 -
cttcaatgagccctacaacaag

SEQ ID NO: 115580 - DNA, 22 bp, Artificial Sequence
  Synthetic oligonucleotide; CTT chr11 5383158 5383179 5383163 5383158 -
caatgagccctacaacaagtag

SEQ ID NO: 115581 - DNA, 22 bp, Artificial Sequence
  Synthetic oligonucleotide; TTC chr11 5383157 5383178 5383162 5383157 -
aatgagccctacaacaagtagc

SEQ ID NO: 115582 - DNA, 22 bp, Artificial Sequence
  Synthetic oligonucleotide; CTA chr11 5383146 5383167 5383151 5383146 -
caacaagtagcctttacaaaac

SEQ ID NO: 115583 - DNA, 22 bp, Artificial Sequence
  Synthetic oligonucleotide; CTT chr11 5383132 5383153 5383137 5383132 -
tacaaaacttttttccttcttt

SEQ ID NO: 115584 - DNA, 22 bp, Artificial Sequence
  Synthetic oligonucleotide; TTT chr11 5383131 5383152 5383136 5383131 -
acaaaacttttttccttctttt

SEQ ID NO: 115585 - DNA, 22 bp, Artificial Sequence
  Synthetic oligonucleotide; TTA chr11 5383130 5383151 5383135 5383130 -
caaaacttttttccttcttttc

SEQ ID NO: 115586 - DNA, 22 bp, Artificial Sequence
  Synthetic oligonucleotide; CTT chr11 5383122 5383143 5383127 5383122 -
ttttccttcttttctggtagca

SEQ ID NO: 115587 - DNA, 22 bp, Artificial Sequence
  Synthetic oligonucleotide; TTT chr11 5383121 5383142 5383126 5383121 -
tttccttcttttctggtagcaa

SEQ ID NO: 115588 - DNA, 22 bp, Artificial Sequence
  Synthetic oligonucleotide; TTT chr11 5383120 5383141 5383125 5383120 -
ttccttcttttctggtagcaaa

SEQ ID NO: 115589 - DNA, 22 bp, Artificial Sequence
  Synthetic oligonucleotide; TTT chr11 5383119 5383140 5383124 5383119 -
tccttcttttctggtagcaaat

SEQ ID NO: 115590 - DNA, 22 bp, Artificial Sequence
  Synthetic oligonucleotide; TTT chr11 5383118 5383139 5383123 5383118 -
ccttcttttctggtagcaaatg

SEQ ID NO: 115591 - DNA, 22 bp, Artificial Sequence
  Synthetic oligonucleotide; TTC chr11 5383117 5383138 5383122 5383117 -
cttcttttctggtagcaaatgc

SEQ ID NO: 115592 - DNA, 22 bp, Artificial Sequence
  Synthetic oligonucleotide; CTT chr11 5383114 5383135 5383119 5383114 -
cttttctggtagcaaatgccat

SEQ ID NO: 115593 - DNA, 22 bp, Artificial Sequence
  Synthetic oligonucleotide; TTC chr11 5383113 5383134 5383118 5383113 -
ttttctggtagcaaatgccatc

SEQ ID NO: 115594 - DNA, 22 bp, Artificial Sequence
  Synthetic oligonucleotide; CTT chr11 5383111 5383132 5383116 5383111 -
ttctggtagcaaatgccatcaa

SEQ ID NO: 115595 - DNA, 22 bp, Artificial Sequence
  Synthetic oligonucleotide; TTT chr11 5383110 5383131 5383115 5383110 -
tctggtagcaaatgccatcaac

SEQ ID NO: 115596 - DNA, 22 bp, Artificial Sequence
  Synthetic oligonucleotide; TTT chr11 5383109 5383130 5383114 5383109 -
ctggtagcaaatgccatcaaca

SEQ ID NO: 115597 - DNA, 22 bp, Artificial Sequence
  Synthetic oligonucleotide; TTC chr11 5383108 5383129 5383113 5383108 -
tggtagcaaatgccatcaacat

SEQ ID NO: 115598 - DNA, 22 bp, Artificial Sequence
  Synthetic oligonucleotide; CTG chr11 5383106 5383127 5383111 5383106 -
gtagcaaatgccatcaacattt

SEQ ID NO: 115599 - DNA, 22 bp, Artificial Sequence
  Synthetic oligonucleotide; TTT chr11 5383084 5383105 5383089 5383084 -
agaaaaaaaaaaatagtcttgt

SEQ ID NO: 115600 - DNA, 22 bp, Artificial Sequence
  Synthetic oligonucleotide; TTA chr11 5383083 5383104 5383088 5383083 -
gaaaaaaaaaaatagtcttgta

SEQ ID NO: 115601 - DNA, 22 bp, Artificial Sequence
  Synthetic oligonucleotide; CTT chr11 5383064 5383085 5383069 5383064 -
gtacttcttccccagactatgc

SEQ ID NO: 115602 - DNA, 22 bp, Artificial Sequence
  Synthetic oligonucleotide; TTG chr11 5383063 5383084 5383068 5383063 -
tacttcttccccagactatgct

SEQ ID NO: 115603 - DNA, 22 bp, Artificial Sequence
  Synthetic oligonucleotide; CTT chr11 5383058 5383079 5383063 5383058 -
cttccccagactatgctacaga

SEQ ID NO: 115604 - DNA, 22 bp, Artificial Sequence
  Synthetic oligonucleotide; TTC chr11 5383057 5383078 5383062 5383057 -
ttccccagactatgctacagaa

SEQ ID NO: 115605 - DNA, 22 bp, Artificial Sequence
  Synthetic oligonucleotide; CTT chr11 5383055 5383076 5383060 5383055 -
ccccagactatgctacagaacc

SEQ ID NO: 115606 - DNA, 22 bp, Artificial Sequence
  Synthetic oligonucleotide; TTC chr11 5383054 5383075 5383059 5383054 -
cccagactatgctacagaacct

SEQ ID NO: 115607 - DNA, 22 bp, Artificial Sequence
  Synthetic oligonucleotide; CTA chr11 5383045 5383066 5383050 5383045 -
tgctacagaacctgagttaatg

SEQ ID NO: 115608 - DNA, 22 bp, Artificial Sequence
  Synthetic oligonucleotide; CTA chr11 5383040 5383061 5383045 5383040 -
cagaacctgagttaatgtgatc

SEQ ID NO: 115609 - DNA, 22 bp, Artificial Sequence
  Synthetic oligonucleotide; CTG chr11 5383031 5383052 5383036 5383031 -
agttaatgtgatcaggtcatgt

SEQ ID NO: 115610 - DNA, 22 bp, Artificial Sequence
  Synthetic oligonucleotide; TTA chr11 5383026 5383047 5383031 5383026 -
atgtgatcaggtcatgtgtaca

SEQ ID NO: 115611 - DNA, 22 bp, Artificial Sequence
  Synthetic oligonucleotide; TTT chr11 5383001 5383022 5383006 5383001 -
ctcttttctttcaaaactcaca

SEQ ID NO: 115612 - DNA, 22 bp, Artificial Sequence
  Synthetic oligonucleotide; TTC chr11 5383000 5383021 5383005 5383000 -
tcttttctttcaaaactcacac

SEQ ID NO: 115613 - DNA, 22 bp, Artificial Sequence
  Synthetic oligonucleotide; CTC chr11 5382998 5383019 5383003 5382998 -
ttttctttcaaaactcacacac

SEQ ID NO: 115614 - DNA, 22 bp, Artificial Sequence
  Synthetic oligonucleotide; CTT chr11 5382996 5383017 5383001 5382996 -
ttctttcaaaactcacacacaa

SEQ ID NO: 115615 - DNA, 22 bp, Artificial Sequence
  Synthetic oligonucleotide; TTT chr11 5382995 5383016 5383000 5382995 -
tctttcaaaactcacacacaac

SEQ ID NO: 115616 - DNA, 22 bp, Artificial Sequence
  Synthetic oligonucleotide; TTT chr11 5382994 5383015 5382999 5382994 -
ctttcaaaactcacacacaacc

SEQ ID NO: 115617 - DNA, 22 bp, Artificial Sequence
  Synthetic oligonucleotide; TTC chr11 5382993 5383014 5382998 5382993 -
tttcaaaactcacacacaacct

SEQ ID NO: 115618 - DNA, 22 bp, Artificial Sequence
  Synthetic oligonucleotide; CTT chr11 5382991 5383012 5382996 5382991 -
tcaaaactcacacacaacctct

SEQ ID NO: 115619 - DNA, 22 bp, Artificial Sequence
  Synthetic oligonucleotide; TTT chr11 5382990 5383011 5382995 5382990 -
caaaactcacacacaacctctc

SEQ ID NO: 115620 - DNA, 22 bp, Artificial Sequence
  Synthetic oligonucleotide; TTC chr11 5382989 5383010 5382994 5382989 -
aaaactcacacacaacctctcc

SEQ ID NO: 115621 - DNA, 22 bp, Artificial Sequence
  Synthetic oligonucleotide; CTC chr11 5382982 5383003 5382987 5382982 -
acacacaacctctccaccacaa

SEQ ID NO: 115622 - DNA, 22 bp, Artificial Sequence
  Synthetic oligonucleotide; CTC chr11 5382970 5382991 5382975 5382970 -
tccaccacaaacacacacacac

SEQ ID NO: 115623 - DNA, 22 bp, Artificial Sequence
  Synthetic oligonucleotide; CTC chr11 5382968 5382989 5382973 5382968 -
caccacaaacacacacacactc

SEQ ID NO: 115624 - DNA, 22 bp, Artificial Sequence
  Synthetic oligonucleotide; CTC chr11 5382946 5382967 5382951 5382946 -
ttggagactggcatgaagcaag

SEQ ID NO: 115625 - DNA, 22 bp, Artificial Sequence
  Synthetic oligonucleotide; CTT chr11 5382944 5382965 5382949 5382944 -
ggagactggcatgaagcaaggt

SEQ ID NO: 115626 - DNA, 22 bp, Artificial Sequence
  Synthetic oligonucleotide; TTG chr11 5382943 5382964 5382948 5382943 -
gagactggcatgaagcaaggta

SEQ ID NO: 115627 - DNA, 22 bp, Artificial Sequence
  Synthetic oligonucleotide; CTG chr11 5382936 5382957 5382941 5382936 -
gcatgaagcaaggtattacatc

SEQ ID NO: 115628 - DNA, 22 bp, Artificial Sequence
  Synthetic oligonucleotide; TTA chr11 5382918 5382939 5382923 5382918 -
catcctttaaatagggcatggt

SEQ ID NO: 115629 - DNA, 22 bp, Artificial Sequence
  Synthetic oligonucleotide; CTT chr11 5382911 5382932 5382916 5382911 -
taaatagggcatggttgattag

SEQ ID NO: 115630 - DNA, 22 bp, Artificial Sequence
  Synthetic oligonucleotide; TTT chr11 5382910 5382931 5382915 5382910 -
aaatagggcatggttgattaga

SEQ ID NO: 115631 - DNA, 22 bp, Artificial Sequence
  Synthetic oligonucleotide; TTA chr11 5382909 5382930 5382914 5382909 -
aatagggcatggttgattagag

SEQ ID NO: 115632 - DNA, 22 bp, Artificial Sequence
  Synthetic oligonucleotide; TTG chr11 5382894 5382915 5382899 5382894 -
attagagttgtgtggggatgag

SEQ ID NO: 115633 - DNA, 22 bp, Artificial Sequence
  Synthetic oligonucleotide; TTA chr11 5382890 5382911 5382895 5382890 -
gagttgtgtggggatgagctcc

SEQ ID NO: 115634 - DNA, 22 bp, Artificial Sequence
  Synthetic oligonucleotide; TTG chr11 5382884 5382905 5382889 5382884 -
tgtggggatgagctccaaaacg

SEQ ID NO: 115635 - DNA, 22 bp, Artificial Sequence
  Synthetic oligonucleotide; CTC chr11 5382869 5382890 5382874 5382869 -
caaaacggggcatacagatcta

SEQ ID NO: 115636 - DNA, 22 bp, Artificial Sequence
  Synthetic oligonucleotide; CTA chr11 5382847 5382868 5382852 5382847 -
aaaccaggacagagacccatga

SEQ ID NO: 115637 - DNA, 22 bp, Artificial Sequence
  Synthetic oligonucleotide; TTT chr11 5382820 5382841 5382825 5382820 -
atgacatgccattgtgatcaga

SEQ ID NO: 115638 - DNA, 22 bp, Artificial Sequence
  Synthetic oligonucleotide; TTA chr11 5382819 5382840 5382824 5382819 -
tgacatgccattgtgatcagac

SEQ ID NO: 115639 - DNA, 22 bp, Artificial Sequence
  Synthetic oligonucleotide; TTG chr11 5382806 5382827 5382811 5382806 -
tgatcagaccacacccagacag

SEQ ID NO: 115640 - DNA, 22 bp, Artificial Sequence
  Synthetic oligonucleotide; CTT chr11 5382769 5382790 5382774 5382769 -
acaccgggtaagtaactggttg

SEQ ID NO: 115641 - DNA, 22 bp, Artificial Sequence
  Synthetic oligonucleotide; TTA chr11 5382768 5382789 5382773 5382768 -
caccgggtaagtaactggttgt

SEQ ID NO: 115642 - DNA, 22 bp, Artificial Sequence
  Synthetic oligonucleotide; CTG chr11 5382751 5382772 5382756 5382751 -
gttgttagggccagagtgtagg

SEQ ID NO: 115643 - DNA, 22 bp, Artificial Sequence
  Synthetic oligonucleotide; TTG chr11 5382747 5382768 5382752 5382747 -
ttagggccagagtgtaggagag

SEQ ID NO: 115644 - DNA, 22 bp, Artificial Sequence
  Synthetic oligonucleotide; TTA chr11 5382744 5382765 5382749 5382744 -
gggccagagtgtaggagagtca

SEQ ID NO: 115645 - DNA, 22 bp, Artificial Sequence
  Synthetic oligonucleotide; CTT chr11 5382686 5382707 5382691 5382686 -
attaaattgtagttatgaggaa

SEQ ID NO: 115646 - DNA, 22 bp, Artificial Sequence
  Synthetic oligonucleotide; TTA chr11 5382685 5382706 5382690 5382685 -
ttaaattgtagttatgaggaag

SEQ ID NO: 115647 - DNA, 22 bp, Artificial Sequence
  Synthetic oligonucleotide; TTA chr11 5382682 5382703 5382687 5382682 -
aattgtagttatgaggaaggtt

SEQ ID NO: 115648 - DNA, 22 bp, Artificial Sequence
  Synthetic oligonucleotide; TTG chr11 5382677 5382698 5382682 5382677 -
tagttatgaggaaggttctggc

SEQ ID NO: 115649 - DNA, 22 bp, Artificial Sequence
  Synthetic oligonucleotide; TTA chr11 5382671 5382692 5382676 5382671 -
tgaggaaggttctggcttcggt

SEQ ID NO: 115650 - DNA, 22 bp, Artificial Sequence
  Synthetic oligonucleotide; TTC chr11 5382659 5382680 5382664 5382659 -
tggcttcggtacaataggaagg

SEQ ID NO: 115651 - DNA, 22 bp, Artificial Sequence
  Synthetic oligonucleotide; CTG chr11 5382657 5382678 5382662 5382657 -
gcttcggtacaataggaaggag

SEQ ID NO: 115652 - DNA, 22 bp, Artificial Sequence
  Synthetic oligonucleotide; CTT chr11 5382653 5382674 5382658 5382653 -
cggtacaataggaaggagctga

SEQ ID NO: 115653 - DNA, 22 bp, Artificial Sequence
  Synthetic oligonucleotide; TTC chr11 5382652 5382673 5382657 5382652 -
ggtacaataggaaggagctgag

SEQ ID NO: 115654 - DNA, 22 bp, Artificial Sequence
  Synthetic oligonucleotide; CTG chr11 5382632 5382653 5382637 5382632 -
agcatcttcatttaggcttgta

SEQ ID NO: 115655 - DNA, 22 bp, Artificial Sequence
  Synthetic oligonucleotide; CTT chr11 5382624 5382645 5382629 5382624 -
catttaggcttgtaggagaggg

SEQ ID NO: 115656 - DNA, 22 bp, Artificial Sequence
  Synthetic oligonucleotide; TTC chr11 5382623 5382644 5382628 5382623 -
atttaggcttgtaggagagggc

SEQ ID NO: 115657 - DNA, 22 bp, Artificial Sequence
  Synthetic oligonucleotide; TTT chr11 5382619 5382640 5382624 5382619 -
aggcttgtaggagagggcacca

SEQ ID NO: 115658 - DNA, 22 bp, Artificial Sequence
  Synthetic oligonucleotide; TTA chr11 5382618 5382639 5382623 5382618 -
ggcttgtaggagagggcaccac

SEQ ID NO: 115659 - DNA, 22 bp, Artificial Sequence
  Synthetic oligonucleotide; CTT chr11 5382613 5382634 5382618 5382613 -
gtaggagagggcaccactacca

SEQ ID NO: 115660 - DNA, 22 bp, Artificial Sequence
  Synthetic oligonucleotide; TTG chr11 5382612 5382633 5382617 5382612 -
taggagagggcaccactaccag

SEQ ID NO: 115661 - DNA, 22 bp, Artificial Sequence
  Synthetic oligonucleotide; CTA chr11 5382594 5382615 5382599 5382594 -
ccagaaaaatttcagaaaatcc

SEQ ID NO: 115662 - DNA, 22 bp, Artificial Sequence
  Synthetic oligonucleotide; TTT chr11 5382582 5382603 5382587 5382582 -
cagaaaatcctgcatttattaa

SEQ ID NO: 115663 - DNA, 22 bp, Artificial Sequence
  Synthetic oligonucleotide; TTC chr11 5382581 5382602 5382586 5382581 -
agaaaatcctgcatttattaag

SEQ ID NO: 115664 - DNA, 22 bp, Artificial Sequence
  Synthetic oligonucleotide; CTG chr11 5382570 5382591 5382575 5382570 -
catttattaagaacatgatttt

SEQ ID NO: 115665 - DNA, 22 bp, Artificial Sequence
  Synthetic oligonucleotide; TTT chr11 5382565 5382586 5382570 5382565 -
attaagaacatgattttagcct

SEQ ID NO: 115666 - DNA, 22 bp, Artificial Sequence
  Synthetic oligonucleotide; TTA chr11 5382564 5382585 5382569 5382564 -
ttaagaacatgattttagccta

SEQ ID NO: 115667 - DNA, 22 bp, Artificial Sequence
  Synthetic oligonucleotide; TTA chr11 5382561 5382582 5382566 5382561 -
agaacatgattttagcctattt

SEQ ID NO: 115668 - DNA, 22 bp, Artificial Sequence
  Synthetic oligonucleotide; TTT chr11 5382549 5382570 5382554 5382549 -
tagcctatttcactgggatcct

SEQ ID NO: 115669 - DNA, 22 bp, Artificial Sequence
  Synthetic oligonucleotide; TTT chr11 5382548 5382569 5382553 5382548 -
agcctatttcactgggatccta

SEQ ID NO: 115670 - DNA, 22 bp, Artificial Sequence
  Synthetic oligonucleotide; TTA chr11 5382547 5382568 5382552 5382547 -
gcctatttcactgggatcctag

SEQ ID NO: 115671 - DNA, 22 bp, Artificial Sequence
  Synthetic oligonucleotide; CTA chr11 5382542 5382563 5382547 5382542 -
tttcactgggatcctagccaag

SEQ ID NO: 115672 - DNA, 22 bp, Artificial Sequence
  Synthetic oligonucleotide; TTT chr11 5382539 5382560 5382544 5382539 -
cactgggatcctagccaaggac

SEQ ID NO: 115673 - DNA, 22 bp, Artificial Sequence
  Synthetic oligonucleotide; TTC chr11 5382538 5382559 5382543 5382538 -
actgggatcctagccaaggaca

SEQ ID NO: 115674 - DNA, 22 bp, Artificial Sequence
  Synthetic oligonucleotide; CTG chr11 5382534 5382555 5382539 5382534 -
ggatcctagccaaggacagtat

SEQ ID NO: 115675 - DNA, 22 bp, Artificial Sequence
  Synthetic oligonucleotide; CTA chr11 5382526 5382547 5382531 5382526 -
gccaaggacagtataacagcaa

SEQ ID NO: 115676 - DNA, 22 bp, Artificial Sequence
  Synthetic oligonucleotide; CTG chr11 5382496 5382517 5382501 5382496 -
ctattattaccagcaacagcaa

SEQ ID NO: 115677 - DNA, 22 bp, Artificial Sequence
  Synthetic oligonucleotide; CTA chr11 5382493 5382514 5382498 5382493 -
ttattaccagcaacagcaaata

SEQ ID NO: 115678 - DNA, 22 bp, Artificial Sequence
  Synthetic oligonucleotide; TTA chr11 5382490 5382511 5382495 5382490 -
ttaccagcaacagcaaatattg

SEQ ID NO: 115679 - DNA, 22 bp, Artificial Sequence
  Synthetic oligonucleotide; TTA chr11 5382487 5382508 5382492 5382487 -
ccagcaacagcaaatattgcta

SEQ ID NO: 115680 - DNA, 22 bp, Artificial Sequence
  Synthetic oligonucleotide; TTG chr11 5382468 5382489 5382473 5382468 -
ctattattcaggggcatctatc

SEQ ID NO: 115681 - DNA, 22 bp, Artificial Sequence
  Synthetic oligonucleotide; CTA chr11 5382465 5382486 5382470 5382465 -
ttattcaggggcatctatcaca

SEQ ID NO: 115682 - DNA, 22 bp, Artificial Sequence
  Synthetic oligonucleotide; TTA chr11 5382462 5382483 5382467 5382462 -
ttcaggggcatctatcacacat

SEQ ID NO: 115683 - DNA, 22 bp, Artificial Sequence
  Synthetic oligonucleotide; TTC chr11 5382459 5382480 5382464 5382459 -
aggggcatctatcacacataag

SEQ ID NO: 115684 - DNA, 22 bp, Artificial Sequence
  Synthetic oligonucleotide; CTA chr11 5382448 5382469 5382453 5382448 -
tcacacataagataggaaaaca

SEQ ID NO: 115685 - DNA, 22 bp, Artificial Sequence
  Synthetic oligonucleotide; CTA chr11 5382422 5382443 5382427 5382422 -
tcttagcgcaatgtaagagatg

SEQ ID NO: 115686 - DNA, 22 bp, Artificial Sequence
  Synthetic oligonucleotide; CTT chr11 5382418 5382439 5382423 5382418 -
agcgcaatgtaagagatggaca

SEQ ID NO: 115687 - DNA, 22 bp, Artificial Sequence
  Synthetic oligonucleotide; TTA chr11 5382417 5382438 5382422 5382417 -
gcgcaatgtaagagatggacat

SEQ ID NO: 115688 - DNA, 22 bp, Artificial Sequence
  Synthetic oligonucleotide; TTA chr11 5382387 5382408 5382392 5382387 -
tattaatatttgtgggtagcac

SEQ ID NO: 115689 - DNA, 22 bp, Artificial Sequence
  Synthetic oligonucleotide; TTA chr11 5382382 5382403 5382387 5382382 -
atatttgtgggtagcacctggc

SEQ ID NO: 115690 - DNA, 22 bp, Artificial Sequence
  Synthetic oligonucleotide; TTT chr11 5382376 5382397 5382381 5382376 -
gtgggtagcacctggcccacag

SEQ ID NO: 115691 - DNA, 22 bp, Artificial Sequence
  Synthetic oligonucleotide; TTG chr11 5382375 5382396 5382380 5382375 -
tgggtagcacctggcccacagg

SEQ ID NO: 115692 - DNA, 22 bp, Artificial Sequence
  Synthetic oligonucleotide; CTG chr11 5382362 5382383 5382367 5382362 -
gcccacaggtgagggccaggga

SEQ ID NO: 115693 - DNA, 22 bp, Artificial Sequence
  Synthetic oligonucleotide; CTG chr11 5382327 5382348 5382332 5382327 -
agctatgaagactaattaagaa

SEQ ID NO: 115694 - DNA, 22 bp, Artificial Sequence
  Synthetic oligonucleotide; CTA chr11 5382322 5382343 5382327 5382322 -
tgaagactaattaagaatcaac

SEQ ID NO: 115695 - DNA, 22 bp, Artificial Sequence
  Synthetic oligonucleotide; CTA chr11 5382313 5382334 5382318 5382313 -
attaagaatcaaccacagatag

SEQ ID NO: 115696 - DNA, 22 bp, Artificial Sequence
  Synthetic oligonucleotide; TTA chr11 5382309 5382330 5382314 5382309 -
agaatcaaccacagatagggct

SEQ ID NO: 115697 - DNA, 22 bp, Artificial Sequence
  Synthetic oligonucleotide; CTT chr11 5382286 5382307 5382291 5382286 -
tatagaaaggtatttccaaaaa

SEQ ID NO: 115698 - DNA, 22 bp, Artificial Sequence
  Synthetic oligonucleotide; TTT chr11 5382285 5382306 5382290 5382285 -
atagaaaggtatttccaaaaag

SEQ ID NO: 115699 - DNA, 22 bp, Artificial Sequence
  Synthetic oligonucleotide; TTA chr11 5382284 5382305 5382289 5382284 -
tagaaaggtatttccaaaaagg

SEQ ID NO: 115700 - DNA, 22 bp, Artificial Sequence
  Synthetic oligonucleotide; TTT chr11 5382271 5382292 5382276 5382271 -
ccaaaaaggaggggtagtgtaa

SEQ ID NO: 115701 - DNA, 22 bp, Artificial Sequence
  Synthetic oligonucleotide; TTC chr11 5382270 5382291 5382275 5382270 -
caaaaaggaggggtagtgtaag

SEQ ID NO: 115702 - DNA, 22 bp, Artificial Sequence
  Synthetic oligonucleotide; TTG chr11 5382221 5382242 5382226 5382221 -
tttatgtgttttgagaactata

SEQ ID NO: 115703 - DNA, 22 bp, Artificial Sequence
  Synthetic oligonucleotide; TTT chr11 5382218 5382239 5382223 5382218 -
atgtgttttgagaactataaga

SEQ ID NO: 115704 - DNA, 22 bp, Artificial Sequence
  Synthetic oligonucleotide; TTA chr11 5382217 5382238 5382222 5382217 -
tgtgttttgagaactataagat

SEQ ID NO: 115705 - DNA, 22 bp, Artificial Sequence
  Synthetic oligonucleotide; TTT chr11 5382210 5382231 5382215 5382210 -
tgagaactataagattttccgg

SEQ ID NO: 115706 - DNA, 22 bp, Artificial Sequence
  Synthetic oligonucleotide; TTT chr11 5382209 5382230 5382214 5382209 -
gagaactataagattttccggt

SEQ ID NO: 115707 - DNA, 22 bp, Artificial Sequence
  Synthetic oligonucleotide; TTG chr11 5382208 5382229 5382213 5382208 -
agaactataagattttccggtg

SEQ ID NO: 115708 - DNA, 22 bp, Artificial Sequence
  Synthetic oligonucleotide; CTA chr11 5382201 5382222 5382206 5382201 -
taagattttccggtgatcaaat

SEQ ID NO: 115709 - DNA, 22 bp, Artificial Sequence
  Synthetic oligonucleotide; TTT chr11 5382193 5382214 5382198 5382193 -
tccggtgatcaaatataacatt

SEQ ID NO: 115710 - DNA, 22 bp, Artificial Sequence
  Synthetic oligonucleotide; TTT chr11 5382192 5382213 5382197 5382192 -
ccggtgatcaaatataacattt

SEQ ID NO: 115711 - DNA, 22 bp, Artificial Sequence
  Synthetic oligonucleotide; TTC chr11 5382191 5382212 5382196 5382191 -
cggtgatcaaatataacattta

SEQ ID NO: 115712 - DNA, 22 bp, Artificial Sequence
  Synthetic oligonucleotide; TTT chr11 5382170 5382191 5382175 5382170 -
aagagagttaataccttggaat

SEQ ID NO: 115713 - DNA, 22 bp, Artificial Sequence
  Synthetic oligonucleotide; TTA chr11 5382169 5382190 5382174 5382169 -
agagagttaataccttggaata

SEQ ID NO: 115714 - DNA, 22 bp, Artificial Sequence
  Synthetic oligonucleotide; TTA chr11 5382160 5382181 5382165 5382160 -
ataccttggaataaaacagtag

SEQ ID NO: 115715 - DNA, 22 bp, Artificial Sequence
  Synthetic oligonucleotide; CTT chr11 5382153 5382174 5382158 5382153 -
ggaataaaacagtagaggtagg

SEQ ID NO: 115716 - DNA, 22 bp, Artificial Sequence
  Synthetic oligonucleotide; TTG chr11 5382152 5382173 5382157 5382152 -
gaataaaacagtagaggtaggc

SEQ ID NO: 115717 - DNA, 22 bp, Artificial Sequence
  Synthetic oligonucleotide; CTG chr11 5382115 5382136 5382120 5382115 -
aatgagtttatatgacatgtca

SEQ ID NO: 115718 - DNA, 22 bp, Artificial Sequence
  Synthetic oligonucleotide; TTT chr11 5382106 5382127 5382111 5382106 -
atatgacatgtcaaacatggta

SEQ ID NO: 115719 - DNA, 22 bp, Artificial Sequence
  Synthetic oligonucleotide; TTA chr11 5382105 5382126 5382110 5382105 -
tatgacatgtcaaacatggtac

SEQ ID NO: 115720 - DNA, 22 bp, Artificial Sequence
  Synthetic oligonucleotide; TTT chr11 5382077 5382098 5382082 5382077 -
tgatggttgggtttaaaaaggc

SEQ ID NO: 115721 - DNA, 22 bp, Artificial Sequence
  Synthetic oligonucleotide; TTT chr11 5382076 5382097 5382081 5382076 -
gatggttgggtttaaaaaggca

SEQ ID NO: 115722 - DNA, 22 bp, Artificial Sequence
  Synthetic oligonucleotide; TTG chr11 5382075 5382096 5382080 5382075 -
atggttgggtttaaaaaggcag

SEQ ID NO: 115723 - DNA, 22 bp, Artificial Sequence
  Synthetic oligonucleotide; TTG chr11 5382068 5382089 5382073 5382068 -
ggtttaaaaaggcaggagataa

SEQ ID NO: 115724 - DNA, 22 bp, Artificial Sequence
  Synthetic oligonucleotide; TTT chr11 5382063 5382084 5382068 5382063 -
aaaaaggcaggagataacaatc

SEQ ID NO: 115725 - DNA, 22 bp, Artificial Sequence
  Synthetic oligonucleotide; TTA chr11 5382062 5382083 5382067 5382062 -
aaaaggcaggagataacaatca

SEQ ID NO: 115726 - DNA, 22 bp, Artificial Sequence
  Synthetic oligonucleotide; TTT chr11 5382035 5382056 5382040 5382035 -
tccagagtacattgttaacaat

SEQ ID NO: 115727 - DNA, 22 bp, Artificial Sequence
  Synthetic oligonucleotide; TTT chr11 5382034 5382055 5382039 5382034 -
ccagagtacattgttaacaata

SEQ ID NO: 115728 - DNA, 22 bp, Artificial Sequence
  Synthetic oligonucleotide; TTC chr11 5382033 5382054 5382038 5382033 -
cagagtacattgttaacaatat

SEQ ID NO: 115729 - DNA, 22 bp, Artificial Sequence
  Synthetic oligonucleotide; TTG chr11 5382021 5382042 5382026 5382021 -
ttaacaatatgcaggaaggatt

SEQ ID NO: 115730 - DNA, 22 bp, Artificial Sequence
  Synthetic oligonucleotide; TTA chr11 5382018 5382039 5382023 5382018 -
acaatatgcaggaaggatttaa

SEQ ID NO: 115731 - DNA, 22 bp, Artificial Sequence
  Synthetic oligonucleotide; TTT chr11 5381998 5382019 5382003 5381998 -
aaagtctgcactggaaacagat

SEQ ID NO: 115732 - DNA, 22 bp, Artificial Sequence
  Synthetic oligonucleotide; TTA chr11 5381997 5382018 5382002 5381997 -
aagtctgcactggaaacagatg

SEQ ID NO: 115733 - DNA, 22 bp, Artificial Sequence
  Synthetic oligonucleotide; CTG chr11 5381990 5382011 5381995 5381990 -
cactggaaacagatgttatttt

SEQ ID NO: 115734 - DNA, 22 bp, Artificial Sequence
  Synthetic oligonucleotide; CTG chr11 5381985 5382006 5381990 5381985 -
gaaacagatgttattttggtgt

SEQ ID NO: 115735 - DNA, 22 bp, Artificial Sequence
  Synthetic oligonucleotide; TTA chr11 5381972 5381993 5381977 5381972 -
ttttggtgtatggagctggatg

SEQ ID NO: 115736 - DNA, 22 bp, Artificial Sequence
  Synthetic oligonucleotide; TTT chr11 5381969 5381990 5381974 5381969 -
tggtgtatggagctggatgcag

SEQ ID NO: 115737 - DNA, 22 bp, Artificial Sequence
  Synthetic oligonucleotide; TTT chr11 5381968 5381989 5381973 5381968 -
ggtgtatggagctggatgcaga

SEQ ID NO: 115738 - DNA, 22 bp, Artificial Sequence
  Synthetic oligonucleotide; TTG chr11 5381967 5381988 5381972 5381967 -
gtgtatggagctggatgcagat

SEQ ID NO: 115739 - DNA, 22 bp, Artificial Sequence
  Synthetic oligonucleotide; CTG chr11 5381954 5381975 5381959 5381954 -
gatgcagatatgtaattgacag

SEQ ID NO: 115740 - DNA, 22 bp, Artificial Sequence
  Synthetic oligonucleotide; TTG chr11 5381936 5381957 5381941 5381936 -
acagctttttacgtagataaac

SEQ ID NO: 115741 - DNA, 22 bp, Artificial Sequence
  Synthetic oligonucleotide; CTT chr11 5381929 5381950 5381934 5381929 -
tttacgtagataaacaatactg

SEQ ID NO: 115742 - DNA, 22 bp, Artificial Sequence
  Synthetic oligonucleotide; TTT chr11 5381928 5381949 5381933 5381928 -
ttacgtagataaacaatactgt

SEQ ID NO: 115743 - DNA, 22 bp, Artificial Sequence
  Synthetic oligonucleotide; TTT chr11 5381927 5381948 5381932 5381927 -
tacgtagataaacaatactgtt

SEQ ID NO: 115744 - DNA, 22 bp, Artificial Sequence
  Synthetic oligonucleotide; TTT chr11 5381926 5381947 5381931 5381926 -
acgtagataaacaatactgttt

SEQ ID NO: 115745 - DNA, 22 bp, Artificial Sequence
  Synthetic oligonucleotide; TTA chr11 5381925 5381946 5381930 5381925 -
cgtagataaacaatactgttta

SEQ ID NO: 115746 - DNA, 22 bp, Artificial Sequence
  Synthetic oligonucleotide; CTG chr11 5381907 5381928 5381912 5381907 -
tttagtggataacctaccattt

SEQ ID NO: 115747 - DNA, 22 bp, Artificial Sequence
  Synthetic oligonucleotide; TTT chr11 5381904 5381925 5381909 5381904 -
agtggataacctaccatttaga

SEQ ID NO: 115748 - DNA, 22 bp, Artificial Sequence
  Synthetic oligonucleotide; TTA chr11 5381903 5381924 5381908 5381903 -
gtggataacctaccatttagag

SEQ ID NO: 115749 - DNA, 22 bp, Artificial Sequence
  Synthetic oligonucleotide; CTA chr11 5381891 5381912 5381896 5381891 -
ccatttagagatctctaatatt

SEQ ID NO: 115750 - DNA, 22 bp, Artificial Sequence
  Synthetic oligonucleotide; TTT chr11 5381885 5381906 5381890 5381885 -
agagatctctaatatttgctta

SEQ ID NO: 115751 - DNA, 22 bp, Artificial Sequence
  Synthetic oligonucleotide; TTA chr11 5381884 5381905 5381889 5381884 -
gagatctctaatatttgcttac

SEQ ID NO: 115752 - DNA, 22 bp, Artificial Sequence
  Synthetic oligonucleotide; CTC chr11 5381876 5381897 5381881 5381876 -
taatatttgcttacttttttaa

SEQ ID NO: 115753 - DNA, 22 bp, Artificial Sequence
  Synthetic oligonucleotide; CTA chr11 5381874 5381895 5381879 5381874 -
atatttgcttacttttttaaac

SEQ ID NO: 115754 - DNA, 22 bp, Artificial Sequence
  Synthetic oligonucleotide; TTT chr11 5381868 5381889 5381873 5381868 -
gcttacttttttaaactaacat

SEQ ID NO: 115755 - DNA, 22 bp, Artificial Sequence
  Synthetic oligonucleotide; TTG chr11 5381867 5381888 5381872 5381867 -
cttacttttttaaactaacatc

SEQ ID NO: 115756 - DNA, 22 bp, Artificial Sequence
  Synthetic oligonucleotide; CTT chr11 5381864 5381885 5381869 5381864 -
acttttttaaactaacatctgt

SEQ ID NO: 115757 - DNA, 22 bp, Artificial Sequence
  Synthetic oligonucleotide; TTA chr11 5381863 5381884 5381868 5381863 -
cttttttaaactaacatctgta

SEQ ID NO: 115758 - DNA, 22 bp, Artificial Sequence
  Synthetic oligonucleotide; CTT chr11 5381860 5381881 5381865 5381860 -
ttttaaactaacatctgtataa

SEQ ID NO: 115759 - DNA, 22 bp, Artificial Sequence
  Synthetic oligonucleotide; TTT chr11 5381859 5381880 5381864 5381859 -
tttaaactaacatctgtataat

SEQ ID NO: 115760 - DNA, 22 bp, Artificial Sequence
  Synthetic oligonucleotide; TTT chr11 5381858 5381879 5381863 5381858 -
ttaaactaacatctgtataata

SEQ ID NO: 115761 - DNA, 22 bp, Artificial Sequence
  Synthetic oligonucleotide; TTT chr11 5381857 5381878 5381862 5381857 -
taaactaacatctgtataatag

SEQ ID NO: 115762 - DNA, 22 bp, Artificial Sequence
  Synthetic oligonucleotide; TTT chr11 5381856 5381877 5381861 5381856 -
aaactaacatctgtataatagc

SEQ ID NO: 115763 - DNA, 22 bp, Artificial Sequence
  Synthetic oligonucleotide; TTA chr11 5381855 5381876 5381860 5381855 -
aactaacatctgtataatagct

SEQ ID NO: 115764 - DNA, 22 bp, Artificial Sequence
  Synthetic oligonucleotide; CTA chr11 5381850 5381871 5381855 5381850 -
acatctgtataatagctttata

SEQ ID NO: 115765 - DNA, 22 bp, Artificial Sequence
  Synthetic oligonucleotide; CTG chr11 5381843 5381864 5381848 5381843 -
tataatagctttatattctatt

SEQ ID NO: 115766 - DNA, 22 bp, Artificial Sequence
  Synthetic oligonucleotide; CTT chr11 5381832 5381853 5381837 5381832 -
tatattctatttctctgaatta

SEQ ID NO: 115767 - DNA, 22 bp, Artificial Sequence
  Synthetic oligonucleotide; TTT chr11 5381831 5381852 5381836 5381831 -
atattctatttctctgaattat

SEQ ID NO: 115768 - DNA, 22 bp, Artificial Sequence
  Synthetic oligonucleotide; TTA chr11 5381830 5381851 5381835 5381830 -
tattctatttctctgaattata

SEQ ID NO: 115769 - DNA, 22 bp, Artificial Sequence
  Synthetic oligonucleotide; TTC chr11 5381825 5381846 5381830 5381825 -
tatttctctgaattatataatt

SEQ ID NO: 115770 - DNA, 22 bp, Artificial Sequence
  Synthetic oligonucleotide; CTA chr11 5381823 5381844 5381828 5381823 -
tttctctgaattatataattga

SEQ ID NO: 115771 - DNA, 22 bp, Artificial Sequence
  Synthetic oligonucleotide; TTT chr11 5381820 5381841 5381825 5381820 -
ctctgaattatataattgaagg

SEQ ID NO: 115772 - DNA, 22 bp, Artificial Sequence
  Synthetic oligonucleotide; TTC chr11 5381819 5381840 5381824 5381819 -
tctgaattatataattgaagga

SEQ ID NO: 115773 - DNA, 22 bp, Artificial Sequence
  Synthetic oligonucleotide; CTC chr11 5381817 5381838 5381822 5381817 -
tgaattatataattgaaggacc

SEQ ID NO: 115774 - DNA, 22 bp, Artificial Sequence
  Synthetic oligonucleotide; CTG chr11 5381815 5381836 5381820 5381815 -
aattatataattgaaggaccag

SEQ ID NO: 115775 - DNA, 22 bp, Artificial Sequence
  Synthetic oligonucleotide; TTA chr11 5381810 5381831 5381815 5381810 -
tataattgaaggaccagtttcc

SEQ ID NO: 115776 - DNA, 22 bp, Artificial Sequence
  Synthetic oligonucleotide; TTG chr11 5381802 5381823 5381807 5381802 -
aaggaccagtttccaagcaata

SEQ ID NO: 115777 - DNA, 22 bp, Artificial Sequence
  Synthetic oligonucleotide; TTT chr11 5381790 5381811 5381795 5381790 -
ccaagcaatagatttatttgaa

SEQ ID NO: 115778 - DNA, 22 bp, Artificial Sequence
  Synthetic oligonucleotide; TTC chr11 5381789 5381810 5381794 5381789 -
caagcaatagatttatttgaaa

SEQ ID NO: 115779 - DNA, 22 bp, Artificial Sequence
  Synthetic oligonucleotide; TTT chr11 5381775 5381796 5381780 5381775 -
atttgaaaaccaaatgaaagaa

SEQ ID NO: 115780 - DNA, 22 bp, Artificial Sequence
  Synthetic oligonucleotide; TTA chr11 5381774 5381795 5381779 5381774 -
tttgaaaaccaaatgaaagaac

SEQ ID NO: 115781 - DNA, 22 bp, Artificial Sequence
  Synthetic oligonucleotide; TTT chr11 5381771 5381792 5381776 5381771 -
gaaaaccaaatgaaagaactca

SEQ ID NO: 115782 - DNA, 22 bp, Artificial Sequence
  Synthetic oligonucleotide; TTG chr11 5381770 5381791 5381775 5381770 -
aaaaccaaatgaaagaactcag

SEQ ID NO: 115783 - DNA, 22 bp, Artificial Sequence
  Synthetic oligonucleotide; CTC chr11 5381750 5381771 5381755 5381750 -
agcatttttgattctttattgc

SEQ ID NO: 115784 - DNA, 22 bp, Artificial Sequence
  Synthetic oligonucleotide; TTT chr11 5381743 5381764 5381748 5381743 -
ttgattctttattgctctaaat

SEQ ID NO: 115785 - DNA, 22 bp, Artificial Sequence
  Synthetic oligonucleotide; TTT chr11 5381742 5381763 5381747 5381742 -
tgattctttattgctctaaatg

SEQ ID NO: 115786 - DNA, 22 bp, Artificial Sequence
  Synthetic oligonucleotide; TTT chr11 5381741 5381762 5381746 5381741 -
gattctttattgctctaaatga

SEQ ID NO: 115787 - DNA, 22 bp, Artificial Sequence
  Synthetic oligonucleotide; TTG chr11 5381740 5381761 5381745 5381740 -
attctttattgctctaaatgac

SEQ ID NO: 115788 - DNA, 22 bp, Artificial Sequence
  Synthetic oligonucleotide; TTC chr11 5381736 5381757 5381741 5381736 -
tttattgctctaaatgaccttt

SEQ ID NO: 115789 - DNA, 22 bp, Artificial Sequence
  Synthetic oligonucleotide; CTT chr11 5381734 5381755 5381739 5381734 -
tattgctctaaatgacctttag

SEQ ID NO: 115790 - DNA, 22 bp, Artificial Sequence
  Synthetic oligonucleotide; TTT chr11 5381733 5381754 5381738 5381733 -
attgctctaaatgacctttaga

SEQ ID NO: 115791 - DNA, 22 bp, Artificial Sequence
  Synthetic oligonucleotide; TTA chr11 5381732 5381753 5381737 5381732 -
ttgctctaaatgacctttagat

SEQ ID NO: 115792 - DNA, 22 bp, Artificial Sequence
  Synthetic oligonucleotide; TTG chr11 5381729 5381750 5381734 5381729 -
ctctaaatgacctttagatttg

SEQ ID NO: 115793 - DNA, 22 bp, Artificial Sequence
  Synthetic oligonucleotide; CTC chr11 5381726 5381747 5381731 5381726 -
taaatgacctttagatttgttt

SEQ ID NO: 115794 - DNA, 22 bp, Artificial Sequence
  Synthetic oligonucleotide; CTA chr11 5381724 5381745 5381729 5381724 -
aatgacctttagatttgtttta

SEQ ID NO: 115795 - DNA, 22 bp, Artificial Sequence
  Synthetic oligonucleotide; CTT chr11 5381715 5381736 5381720 5381715 -
tagatttgttttatcatatcac

SEQ ID NO: 115796 - DNA, 22 bp, Artificial Sequence
  Synthetic oligonucleotide; TTT chr11 5381714 5381735 5381719 5381714 -
agatttgttttatcatatcaca

SEQ ID NO: 115797 - DNA, 22 bp, Artificial Sequence
  Synthetic oligonucleotide; TTA chr11 5381713 5381734 5381718 5381713 -
gatttgttttatcatatcacaa

SEQ ID NO: 115798 - DNA, 22 bp, Artificial Sequence
  Synthetic oligonucleotide; TTT chr11 5381708 5381729 5381713 5381708 -
gttttatcatatcacaaaatag

SEQ ID NO: 115799 - DNA, 22 bp, Artificial Sequence
  Synthetic oligonucleotide; TTG chr11 5381707 5381728 5381712 5381707 -
ttttatcatatcacaaaatagt

SEQ ID NO: 115800 - DNA, 22 bp, Artificial Sequence
  Synthetic oligonucleotide; TTT chr11 5381704 5381725 5381709 5381704 -
tatcatatcacaaaatagtcct

SEQ ID NO: 115801 - DNA, 22 bp, Artificial Sequence
  Synthetic oligonucleotide; TTT chr11 5381703 5381724 5381708 5381703 -
atcatatcacaaaatagtcctc

SEQ ID NO: 115802 - DNA, 22 bp, Artificial Sequence
  Synthetic oligonucleotide; TTA chr11 5381702 5381723 5381707 5381702 -
tcatatcacaaaatagtcctct

SEQ ID NO: 115803 - DNA, 22 bp, Artificial Sequence
  Synthetic oligonucleotide; CTC chr11 5381681 5381702 5381686 5381681 -
tttgaagtgtgactgaaattac

SEQ ID NO: 115804 - DNA, 22 bp, Artificial Sequence
  Synthetic oligonucleotide; CTT chr11 5381679 5381700 5381684 5381679 -
tgaagtgtgactgaaattacat

SEQ ID NO: 115805 - DNA, 22 bp, Artificial Sequence
  Synthetic oligonucleotide; TTT chr11 5381678 5381699 5381683 5381678 -
gaagtgtgactgaaattacatt

SEQ ID NO: 115806 - DNA, 22 bp, Artificial Sequence
  Synthetic oligonucleotide; TTG chr11 5381677 5381698 5381682 5381677 -
aagtgtgactgaaattacatta

SEQ ID NO: 115807 - DNA, 22 bp, Artificial Sequence
  Synthetic oligonucleotide; CTG chr11 5381666 5381687 5381671 5381666 -
aaattacattaaacattctcat

SEQ ID NO: 115808 - DNA, 22 bp, Artificial Sequence
  Synthetic oligonucleotide; TTA chr11 5381660 5381681 5381665 5381660 -
cattaaacattctcatcaattt

SEQ ID NO: 115809 - DNA, 22 bp, Artificial Sequence
  Synthetic oligonucleotide; TTA chr11 5381655 5381676 5381660 5381655 -
aacattctcatcaattttcatt

SEQ ID NO: 115810 - DNA, 22 bp, Artificial Sequence
  Synthetic oligonucleotide; TTC chr11 5381648 5381669 5381653 5381648 -
tcatcaattttcattgacgtgc

SEQ ID NO: 115811 - DNA, 22 bp, Artificial Sequence
  Synthetic oligonucleotide; CTC chr11 5381646 5381667 5381651 5381646 -
atcaattttcattgacgtgcat

SEQ ID NO: 115812 - DNA, 22 bp, Artificial Sequence
  Synthetic oligonucleotide; TTT chr11 5381638 5381659 5381643 5381638 -
tcattgacgtgcattaagtgcg

SEQ ID NO: 115813 - DNA, 22 bp, Artificial Sequence
  Synthetic oligonucleotide; TTT chr11 5381637 5381658 5381642 5381637 -
cattgacgtgcattaagtgcgt

SEQ ID NO: 115814 - DNA, 22 bp, Artificial Sequence
  Synthetic oligonucleotide; TTC chr11 5381636 5381657 5381641 5381636 -
attgacgtgcattaagtgcgtc

SEQ ID NO: 115815 - DNA, 22 bp, Artificial Sequence
  Synthetic oligonucleotide; TTG chr11 5381632 5381653 5381637 5381632 -
acgtgcattaagtgcgtcctgt

SEQ ID NO: 115816 - DNA, 22 bp, Artificial Sequence
  Synthetic oligonucleotide; TTA chr11 5381622 5381643 5381627 5381622 -
agtgcgtcctgtgagaaactct

SEQ ID NO: 115817 - DNA, 22 bp, Artificial Sequence
  Synthetic oligonucleotide; CTG chr11 5381611 5381632 5381616 5381611 -
tgagaaactctgatcaagaact

SEQ ID NO: 115818 - DNA, 22 bp, Artificial Sequence
  Synthetic oligonucleotide; CTC chr11 5381601 5381622 5381606 5381601 -
tgatcaagaacttgaagataga

SEQ ID NO: 115819 - DNA, 22 bp, Artificial Sequence
  Synthetic oligonucleotide; CTG chr11 5381599 5381620 5381604 5381599 -
atcaagaacttgaagatagaca

SEQ ID NO: 115820 - DNA, 22 bp, Artificial Sequence
  Synthetic oligonucleotide; CTT chr11 5381588 5381609 5381593 5381588 -
gaagatagacagattaacatgt

SEQ ID NO: 115821 - DNA, 22 bp, Artificial Sequence
  Synthetic oligonucleotide; TTG chr11 5381587 5381608 5381592 5381587 -
aagatagacagattaacatgtc

SEQ ID NO: 115822 - DNA, 22 bp, Artificial Sequence
  Synthetic oligonucleotide; TTA chr11 5381572 5381593 5381577 5381572 -
acatgtcatggtcttgccttta

SEQ ID NO: 115823 - DNA, 22 bp, Artificial Sequence
  Synthetic oligonucleotide; CTT chr11 5381557 5381578 5381562 5381557 -
gcctttatgaagctcacattga

SEQ ID NO: 115824 - DNA, 22 bp, Artificial Sequence
  Synthetic oligonucleotide; TTG chr11 5381556 5381577 5381561 5381556 -
cctttatgaagctcacattgag

SEQ ID NO: 115825 - DNA, 22 bp, Artificial Sequence
  Synthetic oligonucleotide; CTT chr11 5381552 5381573 5381557 5381552 -
tatgaagctcacattgagtaaa

SEQ ID NO: 115826 - DNA, 22 bp, Artificial Sequence
  Synthetic oligonucleotide; TTT chr11 5381551 5381572 5381556 5381551 -
atgaagctcacattgagtaaag

SEQ ID NO: 115827 - DNA, 22 bp, Artificial Sequence
  Synthetic oligonucleotide; TTA chr11 5381550 5381571 5381555 5381550 -
tgaagctcacattgagtaaaga

SEQ ID NO: 115828 - DNA, 22 bp, Artificial Sequence
  Synthetic oligonucleotide; CTC chr11 5381542 5381563 5381547 5381542 -
acattgagtaaagatgttagat

SEQ ID NO: 115829 - DNA, 22 bp, Artificial Sequence
  Synthetic oligonucleotide; TTG chr11 5381536 5381557 5381541 5381536 -
agtaaagatgttagattgttca

SEQ ID NO: 115830 - DNA, 22 bp, Artificial Sequence
  Synthetic oligonucleotide; TTA chr11 5381523 5381544 5381528 5381523 -
gattgttcaacgaagtttccaa

SEQ ID NO: 115831 - DNA, 22 bp, Artificial Sequence
  Synthetic oligonucleotide; TTG chr11 5381518 5381539 5381523 5381518 -
ttcaacgaagtttccaaaatag

SEQ ID NO: 115832 - DNA, 22 bp, Artificial Sequence
  Synthetic oligonucleotide; TTC chr11 5381515 5381536 5381520 5381515 -
aacgaagtttccaaaatagggt

SEQ ID NO: 115833 - DNA, 22 bp, Artificial Sequence
  Synthetic oligonucleotide; TTT chr11 5381505 5381526 5381510 5381505 -
ccaaaatagggtcactagccca

SEQ ID NO: 115834 - DNA, 22 bp, Artificial Sequence
  Synthetic oligonucleotide; TTC chr11 5381504 5381525 5381509 5381504 -
caaaatagggtcactagcccag

SEQ ID NO: 115835 - DNA, 22 bp, Artificial Sequence
  Synthetic oligonucleotide; CTA chr11 5381488 5381509 5381493 5381488 -
gcccaggctaggaaggcagagg

SEQ ID NO: 115836 - DNA, 22 bp, Artificial Sequence
  Synthetic oligonucleotide; CTA chr11 5381478 5381499 5381483 5381478 -
ggaaggcagaggtagtttctga

SEQ ID NO: 115837 - DNA, 22 bp, Artificial Sequence
  Synthetic oligonucleotide; TTT chr11 5381460 5381481 5381465 5381460 -
ctgaagcctggaggccaagagg

SEQ ID NO: 115838 - DNA, 22 bp, Artificial Sequence
  Synthetic oligonucleotide; TTC chr11 5381459 5381480 5381464 5381459 -
tgaagcctggaggccaagagga

SEQ ID NO: 115839 - DNA, 22 bp, Artificial Sequence
  Synthetic oligonucleotide; CTG chr11 5381457 5381478 5381462 5381457 -
aagcctggaggccaagaggagg

SEQ ID NO: 115840 - DNA, 22 bp, Artificial Sequence
  Synthetic oligonucleotide; CTG chr11 5381450 5381471 5381455 5381450 -
gaggccaagaggaggatgatgg

SEQ ID NO: 115841 - DNA, 22 bp, Artificial Sequence
  Synthetic oligonucleotide; CTC chr11 5381405 5381426 5381410 5381405 -
ggacctatctctatcactgtgg

SEQ ID NO: 115842 - DNA, 22 bp, Artificial Sequence
  Synthetic oligonucleotide; CTA chr11 5381398 5381419 5381403 5381398 -
tctctatcactgtgggtaatca

SEQ ID NO: 115843 - DNA, 22 bp, Artificial Sequence
  Synthetic oligonucleotide; CTC chr11 5381394 5381415 5381399 5381394 -
tatcactgtgggtaatcatgcg

SEQ ID NO: 115844 - DNA, 22 bp, Artificial Sequence
  Synthetic oligonucleotide; CTA chr11 5381392 5381413 5381397 5381392 -
tcactgtgggtaatcatgcgaa

SEQ ID NO: 115845 - DNA, 22 bp, Artificial Sequence
  Synthetic oligonucleotide; CTG chr11 5381386 5381407 5381391 5381386 -
tgggtaatcatgcgaatattag

SEQ ID NO: 115846 - DNA, 22 bp, Artificial Sequence
  Synthetic oligonucleotide; TTA chr11 5381365 5381386 5381370 5381365 -
ggtgaagtgaatgtgggtgcat

SEQ ID NO: 115847 - DNA, 22 bp, Artificial Sequence
  Synthetic oligonucleotide; TTG chr11 5381335 5381356 5381340 5381335 -
gggaaggtgaagtatcaacaca

SEQ ID NO: 115848 - DNA, 22 bp, Artificial Sequence
  Synthetic oligonucleotide; TTA chr11 5381310 5381331 5381315 5381310 -
gtgtgaggcattcaggccttaa

SEQ ID NO: 115849 - DNA, 22 bp, Artificial Sequence
  Synthetic oligonucleotide; TTC chr11 5381297 5381318 5381302 5381297 -
aggccttaacctttaaggtatt

SEQ ID NO: 115850 - DNA, 22 bp, Artificial Sequence
  Synthetic oligonucleotide; CTT chr11 5381290 5381311 5381295 5381290 -
aacctttaaggtattagaattc

SEQ ID NO: 115851 - DNA, 22 bp, Artificial Sequence
  Synthetic oligonucleotide; TTA chr11 5381289 5381310 5381294 5381289 -
acctttaaggtattagaattca

SEQ ID NO: 115852 - DNA, 22 bp, Artificial Sequence
  Synthetic oligonucleotide; CTT chr11 5381284 5381305 5381289 5381284 -
taaggtattagaattcattatt

SEQ ID NO: 115853 - DNA, 22 bp, Artificial Sequence
  Synthetic oligonucleotide; TTT chr11 5381283 5381304 5381288 5381283 -
aaggtattagaattcattatta

SEQ ID NO: 115854 - DNA, 22 bp, Artificial Sequence
  Synthetic oligonucleotide; TTA chr11 5381282 5381303 5381287 5381282 -
aggtattagaattcattattaa

SEQ ID NO: 115855 - DNA, 22 bp, Artificial Sequence
  Synthetic oligonucleotide; TTA chr11 5381274 5381295 5381279 5381274 -
gaattcattattaaagaatcta

SEQ ID NO: 115856 - DNA, 22 bp, Artificial Sequence
  Synthetic oligonucleotide; TTC chr11 5381268 5381289 5381273 5381268 -
attattaaagaatctaaatcca

SEQ ID NO: 115857 - DNA, 22 bp, Artificial Sequence
  Synthetic oligonucleotide; TTA chr11 5381264 5381285 5381269 5381264 -
ttaaagaatctaaatccattac

SEQ ID NO: 115858 - DNA, 22 bp, Artificial Sequence
  Synthetic oligonucleotide; TTA chr11 5381261 5381282 5381266 5381261 -
aagaatctaaatccattactaa

SEQ ID NO: 115859 - DNA, 22 bp, Artificial Sequence
  Synthetic oligonucleotide; CTA chr11 5381252 5381273 5381257 5381252 -
aatccattactaaaagtgaaaa

SEQ ID NO: 115860 - DNA, 22 bp, Artificial Sequence
  Synthetic oligonucleotide; TTA chr11 5381243 5381264 5381248 5381243 -
ctaaaagtgaaaagtgtcactg

SEQ ID NO: 115861 - DNA, 22 bp, Artificial Sequence
  Synthetic oligonucleotide; CTA chr11 5381240 5381261 5381245 5381240 -
aaagtgaaaagtgtcactgtaa

SEQ ID NO: 115862 - DNA, 22 bp, Artificial Sequence
  Synthetic oligonucleotide; CTG chr11 5381221 5381242 5381226 5381221 -
taacagtgtacctatttgttaa

SEQ ID NO: 115863 - DNA, 22 bp, Artificial Sequence
  Synthetic oligonucleotide; CTA chr11 5381207 5381228 5381212 5381207 -
tttgttaatgtgcaaatggttt

SEQ ID NO: 115864 - DNA, 22 bp, Artificial Sequence
  Synthetic oligonucleotide; TTT chr11 5381204 5381225 5381209 5381204 -
gttaatgtgcaaatggttttca

SEQ ID NO: 115865 - DNA, 22 bp, Artificial Sequence
  Synthetic oligonucleotide; TTG chr11 5381203 5381224 5381208 5381203 -
ttaatgtgcaaatggttttcat

SEQ ID NO: 115866 - DNA, 22 bp, Artificial Sequence
  Synthetic oligonucleotide; TTA chr11 5381200 5381221 5381205 5381200 -
atgtgcaaatggttttcattgc

SEQ ID NO: 115867 - DNA, 22 bp, Artificial Sequence
  Synthetic oligonucleotide; TTT chr11 5381185 5381206 5381190 5381185 -
tcattgcatgtaatattgtttg

SEQ ID NO: 115868 - DNA, 22 bp, Artificial Sequence
  Synthetic oligonucleotide; TTT chr11 5381184 5381205 5381189 5381184 -
cattgcatgtaatattgtttgt

SEQ ID NO: 115869 - DNA, 22 bp, Artificial Sequence
  Synthetic oligonucleotide; TTC chr11 5381183 5381204 5381188 5381183 -
attgcatgtaatattgtttgtg

SEQ ID NO: 115870 - DNA, 22 bp, Artificial Sequence
  Synthetic oligonucleotide; TTG chr11 5381179 5381200 5381184 5381179 -
catgtaatattgtttgtgtgtg

SEQ ID NO: 115871 - DNA, 22 bp, Artificial Sequence
  Synthetic oligonucleotide; TTG chr11 5381167 5381188 5381172 5381167 -
tttgtgtgtgtgtgagagagag

SEQ ID NO: 115872 - DNA, 22 bp, Artificial Sequence
  Synthetic oligonucleotide; TTT chr11 5381164 5381185 5381169 5381164 -
gtgtgtgtgtgagagagagaga

SEQ ID NO: 115873 - DNA, 22 bp, Artificial Sequence
  Synthetic oligonucleotide; TTG chr11 5381163 5381184 5381168 5381163 -
tgtgtgtgtgagagagagagag

SEQ ID NO: 115874 - DNA, 22 bp, Artificial Sequence
  Synthetic oligonucleotide; CTG chr11 5381076 5381097 5381081 5381076 -
gctttcaaggggccagtataag

SEQ ID NO: 115875 - DNA, 22 bp, Artificial Sequence
  Synthetic oligonucleotide; CTT chr11 5381072 5381093 5381077 5381072 -
tcaaggggccagtataagtttt

SEQ ID NO: 115876 - DNA, 22 bp, Artificial Sequence
  Synthetic oligonucleotide; TTT chr11 5381071 5381092 5381076 5381071 -
caaggggccagtataagtttta

SEQ ID NO: 115877 - DNA, 22 bp, Artificial Sequence
  Synthetic oligonucleotide; TTC chr11 5381070 5381091 5381075 5381070 -
aaggggccagtataagttttat

SEQ ID NO: 115878 - DNA, 22 bp, Artificial Sequence
  Synthetic oligonucleotide; TTT chr11 5381051 5381072 5381056 5381051 -
tatttaaggaacctctatccag

SEQ ID NO: 115879 - DNA, 22 bp, Artificial Sequence
  Synthetic oligonucleotide; TTT chr11 5381050 5381071 5381055 5381050 -
atttaaggaacctctatccaga

SEQ ID NO: 115880 - DNA, 22 bp, Artificial Sequence
  Synthetic oligonucleotide; TTA chr11 5381049 5381070 5381054 5381049 -
tttaaggaacctctatccagaa

SEQ ID NO: 115881 - DNA, 22 bp, Artificial Sequence
  Synthetic oligonucleotide; TTT chr11 5381046 5381067 5381051 5381046 -
aaggaacctctatccagaattg

SEQ ID NO: 115882 - DNA, 22 bp, Artificial Sequence
  Synthetic oligonucleotide; TTA chr11 5381045 5381066 5381050 5381045 -
aggaacctctatccagaattga

SEQ ID NO: 115883 - DNA, 22 bp, Artificial Sequence
  Synthetic oligonucleotide; CTC chr11 5381036 5381057 5381041 5381036 -
tatccagaattgatacctagcc

SEQ ID NO: 115884 - DNA, 22 bp, Artificial Sequence
  Synthetic oligonucleotide; CTA chr11 5381034 5381055 5381039 5381034 -
tccagaattgatacctagccag

SEQ ID NO: 115885 - DNA, 22 bp, Artificial Sequence
  Synthetic oligonucleotide; TTG chr11 5381024 5381045 5381029 5381024 -
atacctagccagcccactgagc

SEQ ID NO: 115886 - DNA, 22 bp, Artificial Sequence
  Synthetic oligonucleotide; CTA chr11 5381017 5381038 5381022 5381017 -
gccagcccactgagccaggctt

SEQ ID NO: 115887 - DNA, 22 bp, Artificial Sequence
  Synthetic oligonucleotide; CTG chr11 5381005 5381026 5381010 5381005 -
agccaggcttggtgaagtagga

SEQ ID NO: 115888 - DNA, 22 bp, Artificial Sequence
  Synthetic oligonucleotide; CTT chr11 5380995 5381016 5381000 5380995 -
ggtgaagtaggagattccttca

SEQ ID NO: 115889 - DNA, 22 bp, Artificial Sequence
  Synthetic oligonucleotide; TTG chr11 5380994 5381015 5380999 5380994 -
gtgaagtaggagattccttcag

SEQ ID NO: 115890 - DNA, 22 bp, Artificial Sequence
  Synthetic oligonucleotide; TTC chr11 5380978 5380999 5380983 5380978 -
cttcaggagaactgaatcccca

SEQ ID NO: 115891 - DNA, 22 bp, Artificial Sequence
  Synthetic oligonucleotide; CTT chr11 5380975 5380996 5380980 5380975 -
caggagaactgaatccccaagg

SEQ ID NO: 115892 - DNA, 22 bp, Artificial Sequence
  Synthetic oligonucleotide; TTC chr11 5380974 5380995 5380979 5380974 -
aggagaactgaatccccaaggt

SEQ ID NO: 115893 - DNA, 22 bp, Artificial Sequence
  Synthetic oligonucleotide; CTG chr11 5380964 5380985 5380969 5380964 -
aatccccaaggtctgtacacat

SEQ ID NO: 115894 - DNA, 22 bp, Artificial Sequence
  Synthetic oligonucleotide; CTG chr11 5380949 5380970 5380954 5380949 -
tacacatgctgtggttttccaa

SEQ ID NO: 115895 - DNA, 22 bp, Artificial Sequence
  Synthetic oligonucleotide; CTG chr11 5380938 5380959 5380943 5380938 -
tggttttccaatgtagccacca

SEQ ID NO: 115896 - DNA, 22 bp, Artificial Sequence
  Synthetic oligonucleotide; TTT chr11 5380932 5380953 5380937 5380932 -
tccaatgtagccaccaggggga

SEQ ID NO: 115897 - DNA, 22 bp, Artificial Sequence
  Synthetic oligonucleotide; TTT chr11 5380931 5380952 5380936 5380931 -
ccaatgtagccaccagggggag

SEQ ID NO: 115898 - DNA, 22 bp, Artificial Sequence
  Synthetic oligonucleotide; TTC chr11 5380930 5380951 5380935 5380930 -
caatgtagccaccagggggagc

SEQ ID NO: 115899 - DNA, 22 bp, Artificial Sequence
  Synthetic oligonucleotide; TTC chr11 5380904 5380925 5380909 5380904 -
agcccaaggataggcttaaatt

SEQ ID NO: 115900 - DNA, 22 bp, Artificial Sequence
  Synthetic oligonucleotide; CTT chr11 5380887 5380908 5380892 5380887 -
aaattctgaccagcaccaaggc

SEQ ID NO: 115901 - DNA, 22 bp, Artificial Sequence
  Synthetic oligonucleotide; TTA chr11 5380886 5380907 5380891 5380886 -
aattctgaccagcaccaaggcc

SEQ ID NO: 115902 - DNA, 22 bp, Artificial Sequence
  Synthetic oligonucleotide; TTC chr11 5380881 5380902 5380886 5380881 -
tgaccagcaccaaggccctact

SEQ ID NO: 115903 - DNA, 22 bp, Artificial Sequence
  Synthetic oligonucleotide; CTG chr11 5380879 5380900 5380884 5380879 -
accagcaccaaggccctactat

SEQ ID NO: 115904 - DNA, 22 bp, Artificial Sequence
  Synthetic oligonucleotide; CTA chr11 5380861 5380882 5380866 5380861 -
ctatccccagggcacaagaaaa

SEQ ID NO: 115905 - DNA, 22 bp, Artificial Sequence
  Synthetic oligonucleotide; CTA chr11 5380858 5380879 5380863 5380858 -
tccccagggcacaagaaaatgt

SEQ ID NO: 115906 - DNA, 22 bp, Artificial Sequence
  Synthetic oligonucleotide; CTT chr11 5380831 5380852 5380836 5380831 -
ttcttccagcaccaccttcccg

SEQ ID NO: 115907 - DNA, 22 bp, Artificial Sequence
  Synthetic oligonucleotide; TTT chr11 5380830 5380851 5380835 5380830 -
tcttccagcaccaccttcccgt

SEQ ID NO: 115908 - DNA, 22 bp, Artificial Sequence
  Synthetic oligonucleotide; TTT chr11 5380829 5380850 5380834 5380829 -
cttccagcaccaccttcccgtg

SEQ ID NO: 115909 - DNA, 22 bp, Artificial Sequence
  Synthetic oligonucleotide; TTC chr11 5380828 5380849 5380833 5380828 -
ttccagcaccaccttcccgtgt

SEQ ID NO: 115910 - DNA, 22 bp, Artificial Sequence
  Synthetic oligonucleotide; CTT chr11 5380826 5380847 5380831 5380826 -
ccagcaccaccttcccgtgtcc

SEQ ID NO: 115911 - DNA, 22 bp, Artificial Sequence
  Synthetic oligonucleotide; TTC chr11 5380825 5380846 5380830 5380825 -
cagcaccaccttcccgtgtcct

SEQ ID NO: 115912 - DNA, 22 bp, Artificial Sequence
  Synthetic oligonucleotide; CTT chr11 5380813 5380834 5380818 5380813 -
cccgtgtcctcaatacccacta

SEQ ID NO: 115913 - DNA, 22 bp, Artificial Sequence
  Synthetic oligonucleotide; TTC chr11 5380812 5380833 5380817 5380812 -
ccgtgtcctcaatacccactac

SEQ ID NO: 115914 - DNA, 22 bp, Artificial Sequence
  Synthetic oligonucleotide; CTC chr11 5380802 5380823 5380807 5380802 -
aatacccactacacagctgaaa

SEQ ID NO: 115915 - DNA, 22 bp, Artificial Sequence
  Synthetic oligonucleotide; CTA chr11 5380791 5380812 5380796 5380791 -
cacagctgaaagctgccaacca

SEQ ID NO: 115916 - DNA, 22 bp, Artificial Sequence
  Synthetic oligonucleotide; CTG chr11 5380783 5380804 5380788 5380783 -
aaagctgccaaccagttcattc

SEQ ID NO: 115917 - DNA, 22 bp, Artificial Sequence
  Synthetic oligonucleotide; CTG chr11 5380776 5380797 5380781 5380776 -
ccaaccagttcattcttccttt

SEQ ID NO: 115918 - DNA, 22 bp, Artificial Sequence
  Synthetic oligonucleotide; TTC chr11 5380765 5380786 5380770 5380765 -
attcttcctttgaggatgatct

SEQ ID NO: 115919 - DNA, 22 bp, Artificial Sequence
  Synthetic oligonucleotide; TTC chr11 5380761 5380782 5380766 5380761 -
ttcctttgaggatgatcttcct

SEQ ID NO: 115920 - DNA, 22 bp, Artificial Sequence
  Synthetic oligonucleotide; CTT chr11 5380759 5380780 5380764 5380759 -
cctttgaggatgatcttcctct

SEQ ID NO: 115921 - DNA, 22 bp, Artificial Sequence
  Synthetic oligonucleotide; TTC chr11 5380758 5380779 5380763 5380758 -
ctttgaggatgatcttcctctc

SEQ ID NO: 115922 - DNA, 22 bp, Artificial Sequence
  Synthetic oligonucleotide; CTT chr11 5380755 5380776 5380760 5380755 -
tgaggatgatcttcctctctct

SEQ ID NO: 115923 - DNA, 22 bp, Artificial Sequence
  Synthetic oligonucleotide; TTT chr11 5380754 5380775 5380759 5380754 -
gaggatgatcttcctctctctc

SEQ ID NO: 115924 - DNA, 22 bp, Artificial Sequence
  Synthetic oligonucleotide; TTG chr11 5380753 5380774 5380758 5380753 -
aggatgatcttcctctctctca

SEQ ID NO: 115925 - DNA, 22 bp, Artificial Sequence
  Synthetic oligonucleotide; CTT chr11 5380742 5380763 5380747 5380742 -
cctctctctcatgcacaaaata

SEQ ID NO: 115926 - DNA, 22 bp, Artificial Sequence
  Synthetic oligonucleotide; TTC chr11 5380741 5380762 5380746 5380741 -
ctctctctcatgcacaaaatag

SEQ ID NO: 115927 - DNA, 22 bp, Artificial Sequence
  Synthetic oligonucleotide; CTC chr11 5380738 5380759 5380743 5380738 -
tctctcatgcacaaaatagaca

SEQ ID NO: 115928 - DNA, 22 bp, Artificial Sequence
  Synthetic oligonucleotide; CTC chr11 5380736 5380757 5380741 5380736 -
tctcatgcacaaaatagacata

SEQ ID NO: 115929 - DNA, 22 bp, Artificial Sequence
  Synthetic oligonucleotide; CTC chr11 5380734 5380755 5380739 5380734 -
tcatgcacaaaatagacatatc

SEQ ID NO: 115930 - DNA, 22 bp, Artificial Sequence
  Synthetic oligonucleotide; CTC chr11 5380732 5380753 5380737 5380732 -
atgcacaaaatagacatatcta

SEQ ID NO: 115931 - DNA, 22 bp, Artificial Sequence
  Synthetic oligonucleotide; CTA chr11 5380710 5380731 5380715 5380710 -
catcttacaaacacataaaaac

SEQ ID NO: 115932 - DNA, 22 bp, Artificial Sequence
  Synthetic oligonucleotide; CTT chr11 5380704 5380725 5380709 5380704 -
acaaacacataaaaactaaaat

SEQ ID NO: 115933 - DNA, 22 bp, Artificial Sequence
  Synthetic oligonucleotide; TTA chr11 5380703 5380724 5380708 5380703 -
caaacacataaaaactaaaatt

SEQ ID NO: 115934 - DNA, 22 bp, Artificial Sequence
  Synthetic oligonucleotide; CTA chr11 5380686 5380707 5380691 5380686 -
aaattgatggagagagataggt

SEQ ID NO: 115935 - DNA, 22 bp, Artificial Sequence
  Synthetic oligonucleotide; TTG chr11 5380680 5380701 5380685 5380680 -
atggagagagataggttttctt

SEQ ID NO: 115936 - DNA, 22 bp, Artificial Sequence
  Synthetic oligonucleotide; TTT chr11 5380662 5380683 5380667 5380662 -
tcttagctttttcagattttta

SEQ ID NO: 115937 - DNA, 22 bp, Artificial Sequence
  Synthetic oligonucleotide; TTT chr11 5380661 5380682 5380666 5380661 -
cttagctttttcagatttttac

SEQ ID NO: 115938 - DNA, 22 bp, Artificial Sequence
  Synthetic oligonucleotide; TTC chr11 5380660 5380681 5380665 5380660 -
ttagctttttcagatttttaca

SEQ ID NO: 115939 - DNA, 22 bp, Artificial Sequence
  Synthetic oligonucleotide; CTT chr11 5380658 5380679 5380663 5380658 -
agctttttcagatttttacaga

SEQ ID NO: 115940 - DNA, 22 bp, Artificial Sequence
  Synthetic oligonucleotide; TTA chr11 5380657 5380678 5380662 5380657 -
gctttttcagatttttacagat

SEQ ID NO: 115941 - DNA, 22 bp, Artificial Sequence
  Synthetic oligonucleotide; CTT chr11 5380653 5380674 5380658 5380653 -
tttcagatttttacagatggta

SEQ ID NO: 115942 - DNA, 22 bp, Artificial Sequence
  Synthetic oligonucleotide; TTT chr11 5380652 5380673 5380657 5380652 -
ttcagatttttacagatggtaa

SEQ ID NO: 115943 - DNA, 22 bp, Artificial Sequence
  Synthetic oligonucleotide; TTT chr11 5380651 5380672 5380656 5380651 -
tcagatttttacagatggtaat

SEQ ID NO: 115944 - DNA, 22 bp, Artificial Sequence
  Synthetic oligonucleotide; TTT chr11 5380650 5380671 5380655 5380650 -
cagatttttacagatggtaatc

SEQ ID NO: 115945 - DNA, 22 bp, Artificial Sequence
  Synthetic oligonucleotide; TTC chr11 5380649 5380670 5380654 5380649 -
agatttttacagatggtaatct

SEQ ID NO: 115946 - DNA, 22 bp, Artificial Sequence
  Synthetic oligonucleotide; TTT chr11 5380643 5380664 5380648 5380643 -
ttacagatggtaatctcacaca

SEQ ID NO: 115947 - DNA, 22 bp, Artificial Sequence
  Synthetic oligonucleotide; TTT chr11 5380642 5380663 5380647 5380642 -
tacagatggtaatctcacacaa

SEQ ID NO: 115948 - DNA, 22 bp, Artificial Sequence
  Synthetic oligonucleotide; TTT chr11 5380641 5380662 5380646 5380641 -
acagatggtaatctcacacaaa

SEQ ID NO: 115949 - DNA, 22 bp, Artificial Sequence
  Synthetic oligonucleotide; TTA chr11 5380640 5380661 5380645 5380640 -
cagatggtaatctcacacaaat

SEQ ID NO: 115950 - DNA, 22 bp, Artificial Sequence
  Synthetic oligonucleotide; CTC chr11 5380626 5380647 5380631 5380626 -
acacaaatctatgtgtgtggcc

SEQ ID NO: 115951 - DNA, 22 bp, Artificial Sequence
  Synthetic oligonucleotide; CTA chr11 5380615 5380636 5380620 5380615 -
tgtgtgtggcctttagtcttaa

SEQ ID NO: 115952 - DNA, 22 bp, Artificial Sequence
  Synthetic oligonucleotide; CTT chr11 5380602 5380623 5380607 5380602 -
tagtcttaatcatattgaccaa

SEQ ID NO: 115953 - DNA, 22 bp, Artificial Sequence
  Synthetic oligonucleotide; TTT chr11 5380601 5380622 5380606 5380601 -
agtcttaatcatattgaccaag

SEQ ID NO: 115954 - DNA, 22 bp, Artificial Sequence
  Synthetic oligonucleotide; TTA chr11 5380600 5380621 5380605 5380600 -
gtcttaatcatattgaccaagc

SEQ ID NO: 115955 - DNA, 22 bp, Artificial Sequence
  Synthetic oligonucleotide; CTT chr11 5380595 5380616 5380600 5380595 -
aatcatattgaccaagccttaa

SEQ ID NO: 115956 - DNA, 22 bp, Artificial Sequence
  Synthetic oligonucleotide; TTA chr11 5380594 5380615 5380599 5380594 -
atcatattgaccaagccttaaa

SEQ ID NO: 115957 - DNA, 22 bp, Artificial Sequence
  Synthetic oligonucleotide; TTG chr11 5380585 5380606 5380590 5380585 -
accaagccttaaatccccactc

SEQ ID NO: 115958 - DNA, 22 bp, Artificial Sequence
  Synthetic oligonucleotide; CTT chr11 5380575 5380596 5380580 5380575 -
aaatccccactctgaccagaaa

SEQ ID NO: 115959 - DNA, 22 bp, Artificial Sequence
  Synthetic oligonucleotide; TTA chr11 5380574 5380595 5380579 5380574 -
aatccccactctgaccagaaac

SEQ ID NO: 115960 - DNA, 22 bp, Artificial Sequence
  Synthetic oligonucleotide; CTC chr11 5380563 5380584 5380568 5380563 -
tgaccagaaacagacctaaata

SEQ ID NO: 115961 - DNA, 22 bp, Artificial Sequence
  Synthetic oligonucleotide; CTG chr11 5380561 5380582 5380566 5380561 -
accagaaacagacctaaataaa

SEQ ID NO: 115962 - DNA, 22 bp, Artificial Sequence
  Synthetic oligonucleotide; CTA chr11 5380545 5380566 5380550 5380545 -
aataaaatccttactcacaggg

SEQ ID NO: 115963 - DNA, 22 bp, Artificial Sequence
  Synthetic oligonucleotide; CTT chr11 5380533 5380554 5380538 5380533 -
actcacagggttctcaatgtct

SEQ ID NO: 115964 - DNA, 22 bp, Artificial Sequence
  Synthetic oligonucleotide; TTA chr11 5380532 5380553 5380537 5380532 -
ctcacagggttctcaatgtctc

SEQ ID NO: 115965 - DNA, 22 bp, Artificial Sequence
  Synthetic oligonucleotide; CTC chr11 5380529 5380550 5380534 5380529 -
acagggttctcaatgtctccag

SEQ ID NO: 115966 - DNA, 22 bp, Artificial Sequence
  Synthetic oligonucleotide; TTC chr11 5380520 5380541 5380525 5380520 -
tcaatgtctccagactcacaac

SEQ ID NO: 115967 - DNA, 22 bp, Artificial Sequence
  Synthetic oligonucleotide; CTC chr11 5380518 5380539 5380523 5380518 -
aatgtctccagactcacaacag

SEQ ID NO: 115968 - DNA, 22 bp, Artificial Sequence
  Synthetic oligonucleotide; CTC chr11 5380510 5380531 5380515 5380510 -
cagactcacaacagactctttt

SEQ ID NO: 115969 - DNA, 22 bp, Artificial Sequence
  Synthetic oligonucleotide; CTC chr11 5380503 5380524 5380508 5380503 -
acaacagactctttttaggtgt

SEQ ID NO: 115970 - DNA, 22 bp, Artificial Sequence
  Synthetic oligonucleotide; CTC chr11 5380492 5380513 5380497 5380492 -
tttttaggtgtctctgtcacag

SEQ ID NO: 115971 - DNA, 22 bp, Artificial Sequence
  Synthetic oligonucleotide; CTT chr11 5380490 5380511 5380495 5380490 -
tttaggtgtctctgtcacagaa

SEQ ID NO: 115972 - DNA, 22 bp, Artificial Sequence
  Synthetic oligonucleotide; TTT chr11 5380489 5380510 5380494 5380489 -
ttaggtgtctctgtcacagaaa

SEQ ID NO: 115973 - DNA, 22 bp, Artificial Sequence
  Synthetic oligonucleotide; TTT chr11 5380488 5380509 5380493 5380488 -
taggtgtctctgtcacagaaaa

SEQ ID NO: 115974 - DNA, 22 bp, Artificial Sequence
  Synthetic oligonucleotide; TTT chr11 5380487 5380508 5380492 5380487 -
aggtgtctctgtcacagaaaat

SEQ ID NO: 115975 - DNA, 22 bp, Artificial Sequence
  Synthetic oligonucleotide; TTA chr11 5380486 5380507 5380491 5380486 -
ggtgtctctgtcacagaaaatg

SEQ ID NO: 115976 - DNA, 22 bp, Artificial Sequence
  Synthetic oligonucleotide; CTC chr11 5380478 5380499 5380483 5380478 -
tgtcacagaaaatggccacaag

SEQ ID NO: 115977 - DNA, 22 bp, Artificial Sequence
  Synthetic oligonucleotide; CTG chr11 5380476 5380497 5380481 5380476 -
tcacagaaaatggccacaaggt

SEQ ID NO: 115978 - DNA, 22 bp, Artificial Sequence
  Synthetic oligonucleotide; CTC chr11 5380448 5380469 5380453 5380448 -
actctcaggcctgttagaacaa

SEQ ID NO: 115979 - DNA, 22 bp, Artificial Sequence
  Synthetic oligonucleotide; CTC chr11 5380444 5380465 5380449 5380444 -
tcaggcctgttagaacaagtcc

SEQ ID NO: 115980 - DNA, 22 bp, Artificial Sequence
  Synthetic oligonucleotide; CTC chr11 5380442 5380463 5380447 5380442 -
aggcctgttagaacaagtcctt

SEQ ID NO: 115981 - DNA, 22 bp, Artificial Sequence
  Synthetic oligonucleotide; CTG chr11 5380435 5380456 5380440 5380435 -
ttagaacaagtccttcccagaa

SEQ ID NO: 115982 - DNA, 22 bp, Artificial Sequence
  Synthetic oligonucleotide; TTA chr11 5380432 5380453 5380437 5380432 -
gaacaagtccttcccagaagaa

SEQ ID NO: 115983 - DNA, 22 bp, Artificial Sequence
  Synthetic oligonucleotide; CTT chr11 5380420 5380441 5380425 5380420 -
cccagaagaactccattttgtg

SEQ ID NO: 115984 - DNA, 22 bp, Artificial Sequence
  Synthetic oligonucleotide; TTC chr11 5380419 5380440 5380424 5380419 -
ccagaagaactccattttgtgg

SEQ ID NO: 115985 - DNA, 22 bp, Artificial Sequence
  Synthetic oligonucleotide; CTC chr11 5380407 5380428 5380412 5380407 -
cattttgtggtgtgagatcgat

SEQ ID NO: 115986 - DNA, 22 bp, Artificial Sequence
  Synthetic oligonucleotide; TTT chr11 5380402 5380423 5380407 5380402 -
tgtggtgtgagatcgatgcggg

SEQ ID NO: 115987 - DNA, 22 bp, Artificial Sequence
  Synthetic oligonucleotide; TTT chr11 5380401 5380422 5380406 5380401 -
gtggtgtgagatcgatgcgggt

SEQ ID NO: 115988 - DNA, 22 bp, Artificial Sequence
  Synthetic oligonucleotide; TTG chr11 5380400 5380421 5380405 5380400 -
tggtgtgagatcgatgcgggtc

SEQ ID NO: 115989 - DNA, 22 bp, Artificial Sequence
  Synthetic oligonucleotide; CTT chr11 5380376 5380397 5380381 5380376 -
tcagactggagagacccacaga

SEQ ID NO: 115990 - DNA, 22 bp, Artificial Sequence
  Synthetic oligonucleotide; TTT chr11 5380375 5380396 5380380 5380375 -
cagactggagagacccacagaa

SEQ ID NO: 115991 - DNA, 22 bp, Artificial Sequence
  Synthetic oligonucleotide; TTC chr11 5380374 5380395 5380379 5380374 -
agactggagagacccacagaag

SEQ ID NO: 115992 - DNA, 22 bp, Artificial Sequence
  Synthetic oligonucleotide; CTG chr11 5380368 5380389 5380373 5380368 -
gagagacccacagaagttagga

SEQ ID NO: 115993 - DNA, 22 bp, Artificial Sequence
  Synthetic oligonucleotide; TTA chr11 5380349 5380370 5380354 5380349 -
ggattgccaaaagggtcttctg

SEQ ID NO: 115994 - DNA, 22 bp, Artificial Sequence
  Synthetic oligonucleotide; TTG chr11 5380343 5380364 5380348 5380343 -
ccaaaagggtcttctggactgg

SEQ ID NO: 115995 - DNA, 22 bp, Artificial Sequence
  Synthetic oligonucleotide; CTT chr11 5380330 5380351 5380335 5380330 -
ctggactggtccacagccccta

SEQ ID NO: 115996 - DNA, 22 bp, Artificial Sequence
  Synthetic oligonucleotide; TTC chr11 5380329 5380350 5380334 5380329 -
tggactggtccacagcccctaa

SEQ ID NO: 115997 - DNA, 22 bp, Artificial Sequence
  Synthetic oligonucleotide; CTG chr11 5380327 5380348 5380332 5380327 -
gactggtccacagcccctaaga

SEQ ID NO: 115998 - DNA, 22 bp, Artificial Sequence
  Synthetic oligonucleotide; CTG chr11 5380322 5380343 5380327 5380322 -
gtccacagcccctaagaaattt

SEQ ID NO: 115999 - DNA, 22 bp, Artificial Sequence
  Synthetic oligonucleotide; CTA chr11 5380308 5380329 5380313 5380308 -
agaaattttcatgttgcaattc

SEQ ID NO: 116000 - DNA, 22 bp, Artificial Sequence
  Synthetic oligonucleotide; TTT chr11 5380300 5380321 5380305 5380300 -
tcatgttgcaattcattttgtc

SEQ ID NO: 116001 - DNA, 22 bp, Artificial Sequence
  Synthetic oligonucleotide; TTT chr11 5380299 5380320 5380304 5380299 -
catgttgcaattcattttgtcc

SEQ ID NO: 116002 - DNA, 22 bp, Artificial Sequence
  Synthetic oligonucleotide; TTC chr11 5380298 5380319 5380303 5380298 -
atgttgcaattcattttgtcca

SEQ ID NO: 116003 - DNA, 22 bp, Artificial Sequence
  Synthetic oligonucleotide; TTG chr11 5380292 5380313 5380297 5380292 -
caattcattttgtccatccccc

SEQ ID NO: 116004 - DNA, 22 bp, Artificial Sequence
  Synthetic oligonucleotide; TTC chr11 5380286 5380307 5380291 5380286 -
attttgtccatccccctgcctc

SEQ ID NO: 116005 - DNA, 22 bp, Artificial Sequence
  Synthetic oligonucleotide; TTT chr11 5380282 5380303 5380287 5380282 -
tgtccatccccctgcctccctg

SEQ ID NO: 116006 - DNA, 22 bp, Artificial Sequence
  Synthetic oligonucleotide; TTT chr11 5380281 5380302 5380286 5380281 -
gtccatccccctgcctccctgg

SEQ ID NO: 116007 - DNA, 22 bp, Artificial Sequence
  Synthetic oligonucleotide; TTG chr11 5380280 5380301 5380285 5380280 -
tccatccccctgcctccctgga

SEQ ID NO: 116008 - DNA, 22 bp, Artificial Sequence
  Synthetic oligonucleotide; CTG chr11 5380268 5380289 5380273 5380268 -
cctccctggacacctgcatctg

SEQ ID NO: 116009 - DNA, 22 bp, Artificial Sequence
  Synthetic oligonucleotide; CTC chr11 5380264 5380285 5380269 5380264 -
cctggacacctgcatctgtgtg

SEQ ID NO: 116010 - DNA, 22 bp, Artificial Sequence
  Synthetic oligonucleotide; CTG chr11 5380260 5380281 5380265 5380260 -
gacacctgcatctgtgtgtgca

SEQ ID NO: 116011 - DNA, 22 bp, Artificial Sequence
  Synthetic oligonucleotide; CTG chr11 5380252 5380273 5380257 5380252 -
catctgtgtgtgcacagagagt

SEQ ID NO: 116012 - DNA, 22 bp, Artificial Sequence
  Synthetic oligonucleotide; CTG chr11 5380246 5380267 5380251 5380246 -
tgtgtgcacagagagtctggaa

SEQ ID NO: 116013 - DNA, 22 bp, Artificial Sequence
  Synthetic oligonucleotide; CTG chr11 5380227 5380248 5380232 5380227 -
gaaggtttacagagaagtctcc

SEQ ID NO: 116014 - DNA, 22 bp, Artificial Sequence
  Synthetic oligonucleotide; TTT chr11 5380219 5380240 5380224 5380219 -
acagagaagtctccacatcttc

SEQ ID NO: 116015 - DNA, 22 bp, Artificial Sequence
  Synthetic oligonucleotide; TTA chr11 5380218 5380239 5380223 5380218 -
cagagaagtctccacatcttcc

SEQ ID NO: 116016 - DNA, 22 bp, Artificial Sequence
  Synthetic oligonucleotide; CTC chr11 5380206 5380227 5380211 5380206 -
cacatcttcccacagcaactct

SEQ ID NO: 116017 - DNA, 22 bp, Artificial Sequence
  Synthetic oligonucleotide; CTT chr11 5380198 5380219 5380203 5380198 -
cccacagcaactctttcagaaa

SEQ ID NO: 116018 - DNA, 22 bp, Artificial Sequence
  Synthetic oligonucleotide; TTC chr11 5380197 5380218 5380202 5380197 -
ccacagcaactctttcagaaac

SEQ ID NO: 116019 - DNA, 22 bp, Artificial Sequence
  Synthetic oligonucleotide; CTC chr11 5380185 5380206 5380190 5380185 -
tttcagaaacgccttctttcgt

SEQ ID NO: 116020 - DNA, 22 bp, Artificial Sequence
  Synthetic oligonucleotide; CTT chr11 5380183 5380204 5380188 5380183 -
tcagaaacgccttctttcgtaa

SEQ ID NO: 116021 - DNA, 22 bp, Artificial Sequence
  Synthetic oligonucleotide; TTT chr11 5380182 5380203 5380187 5380182 -
cagaaacgccttctttcgtaac

SEQ ID NO: 116022 - DNA, 22 bp, Artificial Sequence
  Synthetic oligonucleotide; TTC chr11 5380181 5380202 5380186 5380181 -
agaaacgccttctttcgtaaca

SEQ ID NO: 116023 - DNA, 22 bp, Artificial Sequence
  Synthetic oligonucleotide; CTT chr11 5380170 5380191 5380175 5380170 -
ctttcgtaacatcctacctctc

SEQ ID NO: 116024 - DNA, 22 bp, Artificial Sequence
  Synthetic oligonucleotide; TTC chr11 5380169 5380190 5380174 5380169 -
tttcgtaacatcctacctctct

SEQ ID NO: 116025 - DNA, 22 bp, Artificial Sequence
  Synthetic oligonucleotide; CTT chr11 5380167 5380188 5380172 5380167 -
tcgtaacatcctacctctcttc

SEQ ID NO: 116026 - DNA, 22 bp, Artificial Sequence
  Synthetic oligonucleotide; TTT chr11 5380166 5380187 5380171 5380166 -
cgtaacatcctacctctcttca

SEQ ID NO: 116027 - DNA, 22 bp, Artificial Sequence
  Synthetic oligonucleotide; TTC chr11 5380165 5380186 5380170 5380165 -
gtaacatcctacctctcttcag

SEQ ID NO: 116028 - DNA, 22 bp, Artificial Sequence
  Synthetic oligonucleotide; CTA chr11 5380154 5380175 5380159 5380154 -
cctctcttcagtcattatgaaa

SEQ ID NO: 116029 - DNA, 22 bp, Artificial Sequence
  Synthetic oligonucleotide; CTC chr11 5380150 5380171 5380155 5380150 -
tcttcagtcattatgaaaggga

SEQ ID NO: 116030 - DNA, 22 bp, Artificial Sequence
  Synthetic oligonucleotide; CTC chr11 5380148 5380169 5380153 5380148 -
ttcagtcattatgaaagggaac

SEQ ID NO: 116031 - DNA, 22 bp, Artificial Sequence
  Synthetic oligonucleotide; CTT chr11 5380146 5380167 5380151 5380146 -
cagtcattatgaaagggaaccg

SEQ ID NO: 116032 - DNA, 22 bp, Artificial Sequence
  Synthetic oligonucleotide; TTC chr11 5380145 5380166 5380150 5380145 -
agtcattatgaaagggaaccga

SEQ ID NO: 116033 - DNA, 22 bp, Artificial Sequence
  Synthetic oligonucleotide; TTA chr11 5380137 5380158 5380142 5380137 -
tgaaagggaaccgattttcatt

SEQ ID NO: 116034 - DNA, 22 bp, Artificial Sequence
  Synthetic oligonucleotide; TTT chr11 5380120 5380141 5380125 5380120 -
tcattttcattgtgaaaacttt

SEQ ID NO: 116035 - DNA, 22 bp, Artificial Sequence
  Synthetic oligonucleotide; TTT chr11 5380119 5380140 5380124 5380119 -
cattttcattgtgaaaactttt

SEQ ID NO: 116036 - DNA, 22 bp, Artificial Sequence
  Synthetic oligonucleotide; TTC chr11 5380118 5380139 5380123 5380118 -
attttcattgtgaaaacttttc

SEQ ID NO: 116037 - DNA, 22 bp, Artificial Sequence
  Synthetic oligonucleotide; TTT chr11 5380114 5380135 5380119 5380114 -
tcattgtgaaaacttttcagag

SEQ ID NO: 116038 - DNA, 22 bp, Artificial Sequence
  Synthetic oligonucleotide; TTT chr11 5380113 5380134 5380118 5380113 -
cattgtgaaaacttttcagaga

SEQ ID NO: 116039 - DNA, 22 bp, Artificial Sequence
  Synthetic oligonucleotide; TTC chr11 5380112 5380133 5380117 5380112 -
attgtgaaaacttttcagagag

SEQ ID NO: 116040 - DNA, 22 bp, Artificial Sequence
  Synthetic oligonucleotide; TTG chr11 5380108 5380129 5380113 5380108 -
tgaaaacttttcagagagaccc

SEQ ID NO: 116041 - DNA, 22 bp, Artificial Sequence
  Synthetic oligonucleotide; CTT chr11 5380099 5380120 5380104 5380099 -
ttcagagagaccccttttggga

SEQ ID NO: 116042 - DNA, 22 bp, Artificial Sequence
  Synthetic oligonucleotide; TTT chr11 5380098 5380119 5380103 5380098 -
tcagagagaccccttttgggaa

SEQ ID NO: 116043 - DNA, 22 bp, Artificial Sequence
  Synthetic oligonucleotide; TTT chr11 5380097 5380118 5380102 5380097 -
cagagagaccccttttgggaaa

SEQ ID NO: 116044 - DNA, 22 bp, Artificial Sequence
  Synthetic oligonucleotide; TTC chr11 5380096 5380117 5380101 5380096 -
agagagaccccttttgggaaac

SEQ ID NO: 116045 - DNA, 22 bp, Artificial Sequence
  Synthetic oligonucleotide; CTT chr11 5380083 5380104 5380088 5380083 -
ttgggaaaccatctcttctccc

SEQ ID NO: 116046 - DNA, 22 bp, Artificial Sequence
  Synthetic oligonucleotide; TTT chr11 5380082 5380103 5380087 5380082 -
tgggaaaccatctcttctcccc

SEQ ID NO: 116047 - DNA, 22 bp, Artificial Sequence
  Synthetic oligonucleotide; TTT chr11 5380081 5380102 5380086 5380081 -
gggaaaccatctcttctcccca

SEQ ID NO: 116048 - DNA, 22 bp, Artificial Sequence
  Synthetic oligonucleotide; TTG chr11 5380080 5380101 5380085 5380080 -
ggaaaccatctcttctccccac

SEQ ID NO: 116049 - DNA, 22 bp, Artificial Sequence
  Synthetic oligonucleotide; CTC chr11 5380068 5380089 5380073 5380068 -
ttctccccactccaagttgggc

SEQ ID NO: 116050 - DNA, 22 bp, Artificial Sequence
  Synthetic oligonucleotide; CTT chr11 5380066 5380087 5380071 5380066 -
ctccccactccaagttgggcta

SEQ ID NO: 116051 - DNA, 22 bp, Artificial Sequence
  Synthetic oligonucleotide; TTC chr11 5380065 5380086 5380070 5380065 -
tccccactccaagttgggctaa

SEQ ID NO: 116052 - DNA, 22 bp, Artificial Sequence
  Synthetic oligonucleotide; CTC chr11 5380063 5380084 5380068 5380063 -
cccactccaagttgggctaaag

SEQ ID NO: 116053 - DNA, 22 bp, Artificial Sequence
  Synthetic oligonucleotide; CTC chr11 5380056 5380077 5380061 5380056 -
caagttgggctaaagttttagt

SEQ ID NO: 116054 - DNA, 22 bp, Artificial Sequence
  Synthetic oligonucleotide; TTG chr11 5380049 5380070 5380054 5380049 -
ggctaaagttttagtgtatttt

SEQ ID NO: 116055 - DNA, 22 bp, Artificial Sequence
  Synthetic oligonucleotide; CTA chr11 5380044 5380065 5380049 5380044 -
aagttttagtgtattttgcata

SEQ ID NO: 116056 - DNA, 22 bp, Artificial Sequence
  Synthetic oligonucleotide; TTT chr11 5380038 5380059 5380043 5380038 -
tagtgtattttgcatattttga

SEQ ID NO: 116057 - DNA, 22 bp, Artificial Sequence
  Synthetic oligonucleotide; TTT chr11 5380037 5380058 5380042 5380037 -
agtgtattttgcatattttgat

SEQ ID NO: 116058 - DNA, 22 bp, Artificial Sequence
  Synthetic oligonucleotide; TTA chr11 5380036 5380057 5380041 5380036 -
gtgtattttgcatattttgatt

SEQ ID NO: 116059 - DNA, 22 bp, Artificial Sequence
  Synthetic oligonucleotide; TTT chr11 5380028 5380049 5380033 5380028 -
tgcatattttgatttgctataa

SEQ ID NO: 116060 - DNA, 22 bp, Artificial Sequence
  Synthetic oligonucleotide; TTT chr11 5380027 5380048 5380032 5380027 -
gcatattttgatttgctataac

SEQ ID NO: 116061 - DNA, 22 bp, Artificial Sequence
  Synthetic oligonucleotide; TTG chr11 5380026 5380047 5380031 5380026 -
catattttgatttgctataaca

SEQ ID NO: 116062 - DNA, 22 bp, Artificial Sequence
  Synthetic oligonucleotide; TTT chr11 5380019 5380040 5380024 5380019 -
tgatttgctataacagagtacc

SEQ ID NO: 116063 - DNA, 22 bp, Artificial Sequence
  Synthetic oligonucleotide; TTT chr11 5380018 5380039 5380023 5380018 -
gatttgctataacagagtacct

SEQ ID NO: 116064 - DNA, 22 bp, Artificial Sequence
  Synthetic oligonucleotide; TTG chr11 5380017 5380038 5380022 5380017 -
atttgctataacagagtacctg

SEQ ID NO: 116065 - DNA, 22 bp, Artificial Sequence
  Synthetic oligonucleotide; TTT chr11 5380013 5380034 5380018 5380013 -
gctataacagagtacctgagtc

SEQ ID NO: 116066 - DNA, 22 bp, Artificial Sequence
  Synthetic oligonucleotide; TTG chr11 5380012 5380033 5380017 5380012 -
ctataacagagtacctgagtct

SEQ ID NO: 116067 - DNA, 22 bp, Artificial Sequence
  Synthetic oligonucleotide; CTA chr11 5380009 5380030 5380014 5380009 -
taacagagtacctgagtctggg

SEQ ID NO: 116068 - DNA, 22 bp, Artificial Sequence
  Synthetic oligonucleotide; CTG chr11 5379995 5380016 5380000 5379995 -
agtctgggtagcttattttttt

SEQ ID NO: 116069 - DNA, 22 bp, Artificial Sequence
  Synthetic oligonucleotide; CTG chr11 5379989 5380010 5379994 5379989 -
ggtagcttatttttttttttta

SEQ ID NO: 116070 - DNA, 22 bp, Artificial Sequence
  Synthetic oligonucleotide; CTT chr11 5379981 5380002 5379986 5379981 -
attttttttttttaaagttttg

SEQ ID NO: 116071 - DNA, 22 bp, Artificial Sequence
  Synthetic oligonucleotide; TTA chr11 5379980 5380001 5379985 5379980 -
ttttttttttttaaagttttgt

SEQ ID NO: 116072 - DNA, 22 bp, Artificial Sequence
  Synthetic oligonucleotide; TTT chr11 5379977 5379998 5379982 5379977 -
tttttttttaaagttttgtttg

SEQ ID NO: 116073 - DNA, 22 bp, Artificial Sequence
  Synthetic oligonucleotide; TTT chr11 5379976 5379997 5379981 5379976 -
ttttttttaaagttttgtttgg

SEQ ID NO: 116074 - DNA, 22 bp, Artificial Sequence
  Synthetic oligonucleotide; TTT chr11 5379975 5379996 5379980 5379975 -
tttttttaaagttttgtttggt

SEQ ID NO: 116075 - DNA, 22 bp, Artificial Sequence
  Synthetic oligonucleotide; TTT chr11 5379974 5379995 5379979 5379974 -
ttttttaaagttttgtttggtt

SEQ ID NO: 116076 - DNA, 22 bp, Artificial Sequence
  Synthetic oligonucleotide; TTT chr11 5379973 5379994 5379978 5379973 -
tttttaaagttttgtttggttc

SEQ ID NO: 116077 - DNA, 22 bp, Artificial Sequence
  Synthetic oligonucleotide; TTT chr11 5379972 5379993 5379977 5379972 -
ttttaaagttttgtttggttca

SEQ ID NO: 116078 - DNA, 22 bp, Artificial Sequence
  Synthetic oligonucleotide; TTT chr11 5379971 5379992 5379976 5379971 -
tttaaagttttgtttggttcat

SEQ ID NO: 116079 - DNA, 22 bp, Artificial Sequence
  Synthetic oligonucleotide; TTT chr11 5379970 5379991 5379975 5379970 -
ttaaagttttgtttggttcatg

SEQ ID NO: 116080 - DNA, 22 bp, Artificial Sequence
  Synthetic oligonucleotide; TTT chr11 5379969 5379990 5379974 5379969 -
taaagttttgtttggttcatga

SEQ ID NO: 116081 - DNA, 22 bp, Artificial Sequence
  Synthetic oligonucleotide; TTT chr11 5379968 5379989 5379973 5379968 -
aaagttttgtttggttcatgat

SEQ ID NO: 116082 - DNA, 22 bp, Artificial Sequence
  Synthetic oligonucleotide; TTA chr11 5379967 5379988 5379972 5379967 -
aagttttgtttggttcatgatt

SEQ ID NO: 116083 - DNA, 22 bp, Artificial Sequence
  Synthetic oligonucleotide; TTT chr11 5379961 5379982 5379966 5379961 -
tgtttggttcatgattctggtg

SEQ ID NO: 116084 - DNA, 22 bp, Artificial Sequence
  Synthetic oligonucleotide; TTT chr11 5379960 5379981 5379965 5379960 -
gtttggttcatgattctggtga

SEQ ID NO: 116085 - DNA, 22 bp, Artificial Sequence
  Synthetic oligonucleotide; TTG chr11 5379959 5379980 5379964 5379959 -
tttggttcatgattctggtgac

SEQ ID NO: 116086 - DNA, 22 bp, Artificial Sequence
  Synthetic oligonucleotide; TTT chr11 5379956 5379977 5379961 5379956 -
ggttcatgattctggtgactta

SEQ ID NO: 116087 - DNA, 22 bp, Artificial Sequence
  Synthetic oligonucleotide; TTG chr11 5379955 5379976 5379960 5379955 -
gttcatgattctggtgacttaa

SEQ ID NO: 116088 - DNA, 22 bp, Artificial Sequence
  Synthetic oligonucleotide; TTC chr11 5379951 5379972 5379956 5379951 -
atgattctggtgacttaaaagt

SEQ ID NO: 116089 - DNA, 22 bp, Artificial Sequence
  Synthetic oligonucleotide; TTC chr11 5379944 5379965 5379949 5379944 -
tggtgacttaaaagtccaagat

SEQ ID NO: 116090 - DNA, 22 bp, Artificial Sequence
  Synthetic oligonucleotide; CTG chr11 5379942 5379963 5379947 5379942 -
gtgacttaaaagtccaagatcg

SEQ ID NO: 116091 - DNA, 22 bp, Artificial Sequence
  Synthetic oligonucleotide; CTT chr11 5379935 5379956 5379940 5379935 -
aaaagtccaagatcgggcggtt

SEQ ID NO: 116092 - DNA, 22 bp, Artificial Sequence
  Synthetic oligonucleotide; TTA chr11 5379934 5379955 5379939 5379934 -
aaagtccaagatcgggcggttg

SEQ ID NO: 116093 - DNA, 22 bp, Artificial Sequence
  Synthetic oligonucleotide; TTG chr11 5379912 5379933 5379917 5379912 -
catctgataaaggtctcatgct

SEQ ID NO: 116094 - DNA, 22 bp, Artificial Sequence
  Synthetic oligonucleotide; CTG chr11 5379906 5379927 5379911 5379906 -
ataaaggtctcatgctggttcc

SEQ ID NO: 116095 - DNA, 22 bp, Artificial Sequence
  Synthetic oligonucleotide; CTC chr11 5379895 5379916 5379900 5379895 -
atgctggttccaaacatggcag

SEQ ID NO: 116096 - DNA, 22 bp, Artificial Sequence
  Synthetic oligonucleotide; CTG chr11 5379889 5379910 5379894 5379889 -
gttccaaacatggcagaaagca

SEQ ID NO: 116097 - DNA, 22 bp, Artificial Sequence
  Synthetic oligonucleotide; TTC chr11 5379885 5379906 5379890 5379885 -
caaacatggcagaaagcagaca

SEQ ID NO: 116098 - DNA, 22 bp, Artificial Sequence
  Synthetic oligonucleotide; CTC chr11 5379790 5379811 5379795 5379790 -
atgggaaagtatcaagctgtcc

SEQ ID NO: 116099 - DNA, 22 bp, Artificial Sequence
  Synthetic oligonucleotide; CTG chr11 5379771 5379792 5379776 5379771 -
tccaccatatgtgaaattagaa

SEQ ID NO: 116100 - DNA, 22 bp, Artificial Sequence
  Synthetic oligonucleotide; TTA chr11 5379752 5379773 5379757 5379752 -
gaattctaaaaggaaacaaaaa

SEQ ID NO: 116101 - DNA, 22 bp, Artificial Sequence
  Synthetic oligonucleotide; TTC chr11 5379746 5379767 5379751 5379746 -
taaaaggaaacaaaaaatggat

SEQ ID NO: 116102 - DNA, 22 bp, Artificial Sequence
  Synthetic oligonucleotide; CTA chr11 5379744 5379765 5379749 5379744 -
aaaggaaacaaaaaatggatta

SEQ ID NO: 116103 - DNA, 22 bp, Artificial Sequence
  Synthetic oligonucleotide; TTA chr11 5379722 5379743 5379727 5379722 -
aacgttttttgaggaattattg

SEQ ID NO: 116104 - DNA, 22 bp, Artificial Sequence
  Synthetic oligonucleotide; TTT chr11 5379715 5379736 5379720 5379715 -
tttgaggaattattgactgaat

SEQ ID NO: 116105 - DNA, 22 bp, Artificial Sequence
  Synthetic oligonucleotide; TTT chr11 5379714 5379735 5379719 5379714 -
ttgaggaattattgactgaatg

SEQ ID NO: 116106 - DNA, 22 bp, Artificial Sequence
  Synthetic oligonucleotide; TTT chr11 5379713 5379734 5379718 5379713 -
tgaggaattattgactgaatgt

SEQ ID NO: 116107 - DNA, 22 bp, Artificial Sequence
  Synthetic oligonucleotide; TTT chr11 5379712 5379733 5379717 5379712 -
gaggaattattgactgaatgtt

SEQ ID NO: 116108 - DNA, 22 bp, Artificial Sequence
  Synthetic oligonucleotide; TTG chr11 5379711 5379732 5379716 5379711 -
aggaattattgactgaatgttt

SEQ ID NO: 116109 - DNA, 22 bp, Artificial Sequence
  Synthetic oligonucleotide; TTA chr11 5379703 5379724 5379708 5379703 -
ttgactgaatgtttcaacatct

SEQ ID NO: 116110 - DNA, 22 bp, Artificial Sequence
  Synthetic oligonucleotide; TTG chr11 5379700 5379721 5379705 5379700 -
actgaatgtttcaacatctgga

SEQ ID NO: 116111 - DNA, 22 bp, Artificial Sequence
  Synthetic oligonucleotide; CTG chr11 5379696 5379717 5379701 5379696 -
aatgtttcaacatctggacata

SEQ ID NO: 116112 - DNA, 22 bp, Artificial Sequence
  Synthetic oligonucleotide; TTT chr11 5379689 5379710 5379694 5379689 -
caacatctggacataaaatcta

SEQ ID NO: 116113 - DNA, 22 bp, Artificial Sequence
  Synthetic oligonucleotide; TTC chr11 5379688 5379709 5379693 5379688 -
aacatctggacataaaatctat

SEQ ID NO: 116114 - DNA, 22 bp, Artificial Sequence
  Synthetic oligonucleotide; CTG chr11 5379680 5379701 5379685 5379680 -
gacataaaatctattaattcat

SEQ ID NO: 116115 - DNA, 22 bp, Artificial Sequence
  Synthetic oligonucleotide; CTA chr11 5379667 5379688 5379672 5379667 -
ttaattcatatctttagctaac

SEQ ID NO: 116116 - DNA, 22 bp, Artificial Sequence
  Synthetic oligonucleotide; TTA chr11 5379664 5379685 5379669 5379664 -
attcatatctttagctaacctt

SEQ ID NO: 116117 - DNA, 22 bp, Artificial Sequence
  Synthetic oligonucleotide; TTC chr11 5379660 5379681 5379665 5379660 -
atatctttagctaaccttgagc

SEQ ID NO: 116118 - DNA, 22 bp, Artificial Sequence
  Synthetic oligonucleotide; CTT chr11 5379653 5379674 5379658 5379653 -
tagctaaccttgagcaatgtca

SEQ ID NO: 116119 - DNA, 22 bp, Artificial Sequence
  Synthetic oligonucleotide; TTT chr11 5379652 5379673 5379657 5379652 -
agctaaccttgagcaatgtcaa

SEQ ID NO: 116120 - DNA, 22 bp, Artificial Sequence
  Synthetic oligonucleotide; TTA chr11 5379651 5379672 5379656 5379651 -
gctaaccttgagcaatgtcaat

SEQ ID NO: 116121 - DNA, 22 bp, Artificial Sequence
  Synthetic oligonucleotide; CTA chr11 5379647 5379668 5379652 5379647 -
accttgagcaatgtcaattaaa

SEQ ID NO: 116122 - DNA, 22 bp, Artificial Sequence
  Synthetic oligonucleotide; CTT chr11 5379642 5379663 5379647 5379642 -
gagcaatgtcaattaaaaaata

SEQ ID NO: 116123 - DNA, 22 bp, Artificial Sequence
  Synthetic oligonucleotide; TTG chr11 5379641 5379662 5379646 5379641 -
agcaatgtcaattaaaaaataa

SEQ ID NO: 116124 - DNA, 22 bp, Artificial Sequence
  Synthetic oligonucleotide; TTA chr11 5379627 5379648 5379632 5379627 -
aaaaataaaacacaactaaatg

SEQ ID NO: 116125 - DNA, 22 bp, Artificial Sequence
  Synthetic oligonucleotide; CTA chr11 5379609 5379630 5379614 5379609 -
aatgcatatcttacaaatggca

SEQ ID NO: 116126 - DNA, 22 bp, Artificial Sequence
  Synthetic oligonucleotide; CTT chr11 5379597 5379618 5379602 5379597 -
acaaatggcataaacaacaaat

SEQ ID NO: 116127 - DNA, 22 bp, Artificial Sequence
  Synthetic oligonucleotide; TTA chr11 5379596 5379617 5379601 5379596 -
caaatggcataaacaacaaatg

SEQ ID NO: 116128 - DNA, 22 bp, Artificial Sequence
  Synthetic oligonucleotide; CTT chr11 5379562 5379583 5379567 5379562 -
aaaagcagacatagaaaaagac

SEQ ID NO: 116129 - DNA, 22 bp, Artificial Sequence
  Synthetic oligonucleotide; TTA chr11 5379561 5379582 5379566 5379561 -
aaagcagacatagaaaaagaca

SEQ ID NO: 116130 - DNA, 22 bp, Artificial Sequence
  Synthetic oligonucleotide; TTG chr11 5379534 5379555 5379539 5379534 -
catacaagaaaattattagagg

SEQ ID NO: 116131 - DNA, 22 bp, Artificial Sequence
  Synthetic oligonucleotide; TTA chr11 5379519 5379540 5379524 5379519 -
ttagaggaaacaacggaaacct

SEQ ID NO: 116132 - DNA, 22 bp, Artificial Sequence
  Synthetic oligonucleotide; TTA chr11 5379516 5379537 5379521 5379516 -
gaggaaacaacggaaacctgaa

SEQ ID NO: 116133 - DNA, 22 bp, Artificial Sequence
  Synthetic oligonucleotide; CTG chr11 5379496 5379517 5379501 5379496 -
aaaaaataaactggaactttat

SEQ ID NO: 116134 - DNA, 22 bp, Artificial Sequence
  Synthetic oligonucleotide; CTG chr11 5379483 5379504 5379488 5379483 -
gaactttattttttattttttt

SEQ ID NO: 116135 - DNA, 22 bp, Artificial Sequence
  Synthetic oligonucleotide; CTT chr11 5379477 5379498 5379482 5379477 -
tattttttatttttttatttat

SEQ ID NO: 116136 - DNA, 22 bp, Artificial Sequence
  Synthetic oligonucleotide; TTT chr11 5379476 5379497 5379481 5379476 -
attttttatttttttatttatt

SEQ ID NO: 116137 - DNA, 22 bp, Artificial Sequence
  Synthetic oligonucleotide; TTA chr11 5379475 5379496 5379480 5379475 -
ttttttatttttttatttattt

SEQ ID NO: 116138 - DNA, 22 bp, Artificial Sequence
  Synthetic oligonucleotide; TTT chr11 5379472 5379493 5379477 5379472 -
tttatttttttatttattttat

SEQ ID NO: 116139 - DNA, 22 bp, Artificial Sequence
  Synthetic oligonucleotide; TTT chr11 5379471 5379492 5379476 5379471 -
ttatttttttatttattttatt

SEQ ID NO: 116140 - DNA, 22 bp, Artificial Sequence
  Synthetic oligonucleotide; TTT chr11 5379470 5379491 5379475 5379470 -
tatttttttatttattttattt

SEQ ID NO: 116141 - DNA, 22 bp, Artificial Sequence
  Synthetic oligonucleotide; TTT chr11 5379469 5379490 5379474 5379469 -
atttttttatttattttattta

SEQ ID NO: 116142 - DNA, 22 bp, Artificial Sequence
  Synthetic oligonucleotide; TTA chr11 5379468 5379489 5379473 5379468 -
tttttttatttattttatttat

SEQ ID NO: 116143 - DNA, 22 bp, Artificial Sequence
  Synthetic oligonucleotide; TTT chr11 5379465 5379486 5379470 5379465 -
ttttatttattttatttattat

SEQ ID NO: 116144 - DNA, 22 bp, Artificial Sequence
  Synthetic oligonucleotide; TTT chr11 5379464 5379485 5379469 5379464 -
tttatttattttatttattatt

SEQ ID NO: 116145 - DNA, 22 bp, Artificial Sequence
  Synthetic oligonucleotide; TTT chr11 5379463 5379484 5379468 5379463 -
ttatttattttatttattatta

SEQ ID NO: 116146 - DNA, 22 bp, Artificial Sequence
  Synthetic oligonucleotide; TTT chr11 5379462 5379483 5379467 5379462 -
tatttattttatttattattat

SEQ ID NO: 116147 - DNA, 22 bp, Artificial Sequence
  Synthetic oligonucleotide; TTT chr11 5379461 5379482 5379466 5379461 -
atttattttatttattattatt

SEQ ID NO: 116148 - DNA, 22 bp, Artificial Sequence
  Synthetic oligonucleotide; TTA chr11 5379460 5379481 5379465 5379460 -
tttattttatttattattatta

SEQ ID NO: 116149 - DNA, 22 bp, Artificial Sequence
  Synthetic oligonucleotide; TTT chr11 5379457 5379478 5379462 5379457 -
attttatttattattattatta

SEQ ID NO: 116150 - DNA, 22 bp, Artificial Sequence
  Synthetic oligonucleotide; TTA chr11 5379456 5379477 5379461 5379456 -
ttttatttattattattattat

SEQ ID NO: 116151 - DNA, 22 bp, Artificial Sequence
  Synthetic oligonucleotide; TTT chr11 5379453 5379474 5379458 5379453 -
tatttattattattattatact

SEQ ID NO: 116152 - DNA, 22 bp, Artificial Sequence
  Synthetic oligonucleotide; TTT chr11 5379452 5379473 5379457 5379452 -
atttattattattattatactt

SEQ ID NO: 116153 - DNA, 22 bp, Artificial Sequence
  Synthetic oligonucleotide; TTA chr11 5379451 5379472 5379456 5379451 -
tttattattattattatacttt

SEQ ID NO: 116154 - DNA, 22 bp, Artificial Sequence
  Synthetic oligonucleotide; TTT chr11 5379448 5379469 5379453 5379448 -
attattattattatactttaag

SEQ ID NO: 116155 - DNA, 22 bp, Artificial Sequence
  Synthetic oligonucleotide; TTA chr11 5379447 5379468 5379452 5379447 -
ttattattattatactttaaga

SEQ ID NO: 116156 - DNA, 22 bp, Artificial Sequence
  Synthetic oligonucleotide; TTA chr11 5379444 5379465 5379449 5379444 -
ttattattatactttaagattt

SEQ ID NO: 116157 - DNA, 22 bp, Artificial Sequence
  Synthetic oligonucleotide; TTA chr11 5379441 5379462 5379446 5379441 -
ttattatactttaagatttagg

SEQ ID NO: 116158 - DNA, 22 bp, Artificial Sequence
  Synthetic oligonucleotide; TTA chr11 5379438 5379459 5379443 5379438 -
ttatactttaagatttagggta

SEQ ID NO: 116159 - DNA, 22 bp, Artificial Sequence
  Synthetic oligonucleotide; TTA chr11 5379435 5379456 5379440 5379435 -
tactttaagatttagggtacat

SEQ ID NO: 116160 - DNA, 22 bp, Artificial Sequence
  Synthetic oligonucleotide; CTT chr11 5379430 5379451 5379435 5379430 -
taagatttagggtacatgtgca

SEQ ID NO: 116161 - DNA, 22 bp, Artificial Sequence
  Synthetic oligonucleotide; TTT chr11 5379429 5379450 5379434 5379429 -
aagatttagggtacatgtgcat

SEQ ID NO: 116162 - DNA, 22 bp, Artificial Sequence
  Synthetic oligonucleotide; TTA chr11 5379428 5379449 5379433 5379428 -
agatttagggtacatgtgcata

SEQ ID NO: 116163 - DNA, 22 bp, Artificial Sequence
  Synthetic oligonucleotide; TTT chr11 5379422 5379443 5379427 5379422 -
agggtacatgtgcataatgtgc

SEQ ID NO: 116164 - DNA, 22 bp, Artificial Sequence
  Synthetic oligonucleotide; TTA chr11 5379421 5379442 5379426 5379421 -
gggtacatgtgcataatgtgcc

SEQ ID NO: 116165 - DNA, 22 bp, Artificial Sequence
  Synthetic oligonucleotide; TTA chr11 5379394 5379415 5379399 5379394 -
gttacatatgtatacatgtgcc

SEQ ID NO: 116166 - DNA, 22 bp, Artificial Sequence
  Synthetic oligonucleotide; TTA chr11 5379390 5379411 5379395 5379390 -
catatgtatacatgtgccatgt

SEQ ID NO: 116167 - DNA, 22 bp, Artificial Sequence
  Synthetic oligonucleotide; TTG chr11 5379366 5379387 5379371 5379366 -
gtgtgctgcacccattaactcg

SEQ ID NO: 116168 - DNA, 22 bp, Artificial Sequence
  Synthetic oligonucleotide; CTG chr11 5379358 5379379 5379363 5379358 -
cacccattaactcgtaatttag

SEQ ID NO: 116169 - DNA, 22 bp, Artificial Sequence
  Synthetic oligonucleotide; TTA chr11 5379349 5379370 5379354 5379349 -
actcgtaatttagcattaggta

SEQ ID NO: 116170 - DNA, 22 bp, Artificial Sequence
  Synthetic oligonucleotide; CTC chr11 5379345 5379366 5379350 5379345 -
gtaatttagcattaggtatatc

SEQ ID NO: 116171 - DNA, 22 bp, Artificial Sequence
  Synthetic oligonucleotide; TTT chr11 5379338 5379359 5379343 5379338 -
agcattaggtatatctcctaat

SEQ ID NO: 116172 - DNA, 22 bp, Artificial Sequence
  Synthetic oligonucleotide; TTA chr11 5379337 5379358 5379342 5379337 -
gcattaggtatatctcctaatg

SEQ ID NO: 116173 - DNA, 22 bp, Artificial Sequence
  Synthetic oligonucleotide; TTA chr11 5379331 5379352 5379336 5379331 -
ggtatatctcctaatgccatcc

SEQ ID NO: 116174 - DNA, 22 bp, Artificial Sequence
  Synthetic oligonucleotide; CTC chr11 5379321 5379342 5379326 5379321 -
ctaatgccatccctccctgcac

SEQ ID NO: 116175 - DNA, 22 bp, Artificial Sequence
  Synthetic oligonucleotide; CTA chr11 5379318 5379339 5379323 5379318 -
atgccatccctccctgcacccc

SEQ ID NO: 116176 - DNA, 22 bp, Artificial Sequence
  Synthetic oligonucleotide; CTC chr11 5379306 5379327 5379311 5379306 -
cctgcacccccaccccacaaca

SEQ ID NO: 116177 - DNA, 22 bp, Artificial Sequence
  Synthetic oligonucleotide; CTG chr11 5379302 5379323 5379307 5379302 -
cacccccaccccacaacagtcc

SEQ ID NO: 116178 - DNA, 22 bp, Artificial Sequence
  Synthetic oligonucleotide; TTC chr11 5379264 5379285 5379269 5379264 -
cccttcctgtgtccatgtgttc

SEQ ID NO: 116179 - DNA, 22 bp, Artificial Sequence
  Synthetic oligonucleotide; CTT chr11 5379259 5379280 5379264 5379259 -
cctgtgtccatgtgttctcatt

SEQ ID NO: 116180 - DNA, 22 bp, Artificial Sequence
  Synthetic oligonucleotide; TTC chr11 5379258 5379279 5379263 5379258 -
ctgtgtccatgtgttctcattg

SEQ ID NO: 116181 - DNA, 22 bp, Artificial Sequence
  Synthetic oligonucleotide; CTG chr11 5379255 5379276 5379260 5379255 -
tgtccatgtgttctcattgttc

SEQ ID NO: 116182 - DNA, 22 bp, Artificial Sequence
  Synthetic oligonucleotide; TTC chr11 5379242 5379263 5379247 5379242 -
tcattgttcagttcccatctat

SEQ ID NO: 116183 - DNA, 22 bp, Artificial Sequence
  Synthetic oligonucleotide; CTC chr11 5379240 5379261 5379245 5379240 -
attgttcagttcccatctatga

SEQ ID NO: 116184 - DNA, 22 bp, Artificial Sequence
  Synthetic oligonucleotide; TTG chr11 5379236 5379257 5379241 5379236 -
ttcagttcccatctatgagtga

SEQ ID NO: 116185 - DNA, 22 bp, Artificial Sequence
  Synthetic oligonucleotide; TTC chr11 5379233 5379254 5379238 5379233 -
agttcccatctatgagtgagaa

SEQ ID NO: 116186 - DNA, 22 bp, Artificial Sequence
  Synthetic oligonucleotide; TTC chr11 5379228 5379249 5379233 5379228 -
ccatctatgagtgagaatatgt

SEQ ID NO: 116187 - DNA, 22 bp, Artificial Sequence
  Synthetic oligonucleotide; CTA chr11 5379221 5379242 5379226 5379221 -
tgagtgagaatatgtggtgttt

SEQ ID NO: 116188 - DNA, 22 bp, Artificial Sequence
  Synthetic oligonucleotide; TTT chr11 5379199 5379220 5379204 5379199 -
ggttttttgtccttgcgatagt

SEQ ID NO: 116189 - DNA, 22 bp, Artificial Sequence
  Synthetic oligonucleotide; TTG chr11 5379198 5379219 5379203 5379198 -
gttttttgtccttgcgatagtt

SEQ ID NO: 116190 - DNA, 22 bp, Artificial Sequence
  Synthetic oligonucleotide; TTT chr11 5379194 5379215 5379199 5379194 -
tttgtccttgcgatagtttact

SEQ ID NO: 116191 - DNA, 22 bp, Artificial Sequence
  Synthetic oligonucleotide; TTT chr11 5379193 5379214 5379198 5379193 -
ttgtccttgcgatagtttactg

SEQ ID NO: 116192 - DNA, 22 bp, Artificial Sequence
  Synthetic oligonucleotide; TTT chr11 5379192 5379213 5379197 5379192 -
tgtccttgcgatagtttactga

SEQ ID NO: 116193 - DNA, 22 bp, Artificial Sequence
  Synthetic oligonucleotide; TTT chr11 5379191 5379212 5379196 5379191 -
gtccttgcgatagtttactgag

SEQ ID NO: 116194 - DNA, 22 bp, Artificial Sequence
  Synthetic oligonucleotide; TTG chr11 5379190 5379211 5379195 5379190 -
tccttgcgatagtttactgaga

SEQ ID NO: 116195 - DNA, 22 bp, Artificial Sequence
  Synthetic oligonucleotide; CTT chr11 5379185 5379206 5379190 5379185 -
gcgatagtttactgagaatgat

SEQ ID NO: 116196 - DNA, 22 bp, Artificial Sequence
  Synthetic oligonucleotide; TTG chr11 5379184 5379205 5379189 5379184 -
cgatagtttactgagaatgatg

SEQ ID NO: 116197 - DNA, 22 bp, Artificial Sequence
  Synthetic oligonucleotide; TTT chr11 5379175 5379196 5379180 5379175 -
actgagaatgatgatttccaat

SEQ ID NO: 116198 - DNA, 22 bp, Artificial Sequence
  Synthetic oligonucleotide; TTA chr11 5379174 5379195 5379179 5379174 -
ctgagaatgatgatttccaatt

SEQ ID NO: 116199 - DNA, 22 bp, Artificial Sequence
  Synthetic oligonucleotide; CTG chr11 5379171 5379192 5379176 5379171 -
agaatgatgatttccaatttca

SEQ ID NO: 116200 - DNA, 22 bp, Artificial Sequence
  Synthetic oligonucleotide; TTT chr11 5379158 5379179 5379163 5379158 -
ccaatttcatccatgtccctac

SEQ ID NO: 116201 - DNA, 22 bp, Artificial Sequence
  Synthetic oligonucleotide; TTC chr11 5379157 5379178 5379162 5379157 -
caatttcatccatgtccctaca

SEQ ID NO: 116202 - DNA, 22 bp, Artificial Sequence
  Synthetic oligonucleotide; TTT chr11 5379151 5379172 5379156 5379151 -
catccatgtccctacaaaggac

SEQ ID NO: 116203 - DNA, 22 bp, Artificial Sequence
  Synthetic oligonucleotide; TTC chr11 5379150 5379171 5379155 5379150 -
atccatgtccctacaaaggaca

SEQ ID NO: 116204 - DNA, 22 bp, Artificial Sequence
  Synthetic oligonucleotide; CTA chr11 5379137 5379158 5379142 5379137 -
caaaggacatgaactcatcatt

SEQ ID NO: 116205 - DNA, 22 bp, Artificial Sequence
  Synthetic oligonucleotide; CTC chr11 5379121 5379142 5379126 5379121 -
atcatttttatggctgcatagt

SEQ ID NO: 116206 - DNA, 22 bp, Artificial Sequence
  Synthetic oligonucleotide; TTT chr11 5379114 5379135 5379119 5379114 -
ttatggctgcatagtattccat

SEQ ID NO: 116207 - DNA, 22 bp, Artificial Sequence
  Synthetic oligonucleotide; TTT chr11 5379113 5379134 5379118 5379113 -
tatggctgcatagtattccatg

SEQ ID NO: 116208 - DNA, 22 bp, Artificial Sequence
  Synthetic oligonucleotide; TTT chr11 5379112 5379133 5379117 5379112 -
atggctgcatagtattccatgg

SEQ ID NO: 116209 - DNA, 22 bp, Artificial Sequence
  Synthetic oligonucleotide; TTA chr11 5379111 5379132 5379116 5379111 -
tggctgcatagtattccatggt

SEQ ID NO: 116210 - DNA, 22 bp, Artificial Sequence
  Synthetic oligonucleotide; CTG chr11 5379105 5379126 5379110 5379105 -
catagtattccatggtgtatat

SEQ ID NO: 116211 - DNA, 22 bp, Artificial Sequence
  Synthetic oligonucleotide; TTC chr11 5379095 5379116 5379100 5379095 -
catggtgtatatgtgccacatt

SEQ ID NO: 116212 - DNA, 22 bp, Artificial Sequence
  Synthetic oligonucleotide; TTT chr11 5379072 5379093 5379077 5379072 -
tcttaatccagtctatcattgt

SEQ ID NO: 116213 - DNA, 22 bp, Artificial Sequence
  Synthetic oligonucleotide; TTT chr11 5379071 5379092 5379076 5379071 -
cttaatccagtctatcattgtt

SEQ ID NO: 116214 - DNA, 22 bp, Artificial Sequence
  Synthetic oligonucleotide; TTC chr11 5379070 5379091 5379075 5379070 -
ttaatccagtctatcattgttg

SEQ ID NO: 116215 - DNA, 22 bp, Artificial Sequence
  Synthetic oligonucleotide; CTT chr11 5379068 5379089 5379073 5379068 -
aatccagtctatcattgttgga

SEQ ID NO: 116216 - DNA, 22 bp, Artificial Sequence
  Synthetic oligonucleotide; TTA chr11 5379067 5379088 5379072 5379067 -
atccagtctatcattgttggac

SEQ ID NO: 116217 - DNA, 22 bp, Artificial Sequence
  Synthetic oligonucleotide; CTA chr11 5379057 5379078 5379062 5379057 -
tcattgttggacatttgggttg

SEQ ID NO: 116218 - DNA, 22 bp, Artificial Sequence
  Synthetic oligonucleotide; TTG chr11 5379051 5379072 5379056 5379051 -
ttggacatttgggttggttcca

SEQ ID NO: 116219 - DNA, 22 bp, Artificial Sequence
  Synthetic oligonucleotide; TTG chr11 5379048 5379069 5379053 5379048 -
gacatttgggttggttccaagt

SEQ ID NO: 116220 - DNA, 22 bp, Artificial Sequence
  Synthetic oligonucleotide; TTT chr11 5379041 5379062 5379046 5379041 -
gggttggttccaagtctttgct

SEQ ID NO: 116221 - DNA, 22 bp, Artificial Sequence
  Synthetic oligonucleotide; TTG chr11 5379040 5379061 5379045 5379040 -
ggttggttccaagtctttgcta

SEQ ID NO: 116222 - DNA, 22 bp, Artificial Sequence
  Synthetic oligonucleotide; TTG chr11 5379035 5379056 5379040 5379035 -
gttccaagtctttgctattgtg

SEQ ID NO: 116223 - DNA, 22 bp, Artificial Sequence
  Synthetic oligonucleotide; TTC chr11 5379031 5379052 5379036 5379031 -
caagtctttgctattgtgaata

SEQ ID NO: 116224 - DNA, 22 bp, Artificial Sequence
  Synthetic oligonucleotide; CTT chr11 5379023 5379044 5379028 5379023 -
tgctattgtgaatagtaccgca

SEQ ID NO: 116225 - DNA, 22 bp, Artificial Sequence
  Synthetic oligonucleotide; TTT chr11 5379022 5379043 5379027 5379022 -
gctattgtgaatagtaccgcaa

SEQ ID NO: 116226 - DNA, 22 bp, Artificial Sequence
  Synthetic oligonucleotide; TTG chr11 5379021 5379042 5379026 5379021 -
ctattgtgaatagtaccgcaat

SEQ ID NO: 116227 - DNA, 22 bp, Artificial Sequence
  Synthetic oligonucleotide; CTA chr11 5379018 5379039 5379023 5379018 -
ttgtgaatagtaccgcaataaa

SEQ ID NO: 116228 - DNA, 22 bp, Artificial Sequence
  Synthetic oligonucleotide; TTG chr11 5379015 5379036 5379020 5379015 -
tgaatagtaccgcaataaacat

SEQ ID NO: 116229 - DNA, 22 bp, Artificial Sequence
  Synthetic oligonucleotide; CTT chr11 5378976 5378997 5378981 5378976 -
tatagcagcatgatttatattc

SEQ ID NO: 116230 - DNA, 22 bp, Artificial Sequence
  Synthetic oligonucleotide; TTT chr11 5378975 5378996 5378980 5378975 -
atagcagcatgatttatattcc

SEQ ID NO: 116231 - DNA, 22 bp, Artificial Sequence
  Synthetic oligonucleotide; TTA chr11 5378974 5378995 5378979 5378974 -
tagcagcatgatttatattcct

SEQ ID NO: 116232 - DNA, 22 bp, Artificial Sequence
  Synthetic oligonucleotide; TTT chr11 5378960 5378981 5378965 5378960 -
atattcctttgggtatataccc

SEQ ID NO: 116233 - DNA, 22 bp, Artificial Sequence
  Synthetic oligonucleotide; TTA chr11 5378959 5378980 5378964 5378959 -
tattcctttgggtatataccca

SEQ ID NO: 116234 - DNA, 22 bp, Artificial Sequence
  Synthetic oligonucleotide; TTC chr11 5378954 5378975 5378959 5378954 -
ctttgggtatatacccagtaat

SEQ ID NO: 116235 - DNA, 22 bp, Artificial Sequence
  Synthetic oligonucleotide; CTT chr11 5378951 5378972 5378956 5378951 -
tgggtatatacccagtaatggg

SEQ ID NO: 116236 - DNA, 22 bp, Artificial Sequence
  Synthetic oligonucleotide; TTT chr11 5378950 5378971 5378955 5378950 -
gggtatatacccagtaatggga

SEQ ID NO: 116237 - DNA, 22 bp, Artificial Sequence
  Synthetic oligonucleotide; TTG chr11 5378949 5378970 5378954 5378949 -
ggtatatacccagtaatgggat

SEQ ID NO: 116238 - DNA, 22 bp, Artificial Sequence
  Synthetic oligonucleotide; CTG chr11 5378922 5378943 5378927 5378922 -
ggtcaaatggtatttctagttc

SEQ ID NO: 116239 - DNA, 22 bp, Artificial Sequence
  Synthetic oligonucleotide; TTT chr11 5378907 5378928 5378912 5378907 -
ctagttctagatccctgaggaa

SEQ ID NO: 116240 - DNA, 22 bp, Artificial Sequence
  Synthetic oligonucleotide; TTC chr11 5378906 5378927 5378911 5378906 -
tagttctagatccctgaggaat

SEQ ID NO: 116241 - DNA, 22 bp, Artificial Sequence
  Synthetic oligonucleotide; CTA chr11 5378904 5378925 5378909 5378904 -
gttctagatccctgaggaatcg

SEQ ID NO: 116242 - DNA, 22 bp, Artificial Sequence
  Synthetic oligonucleotide; TTC chr11 5378900 5378921 5378905 5378900 -
tagatccctgaggaatcgccac

SEQ ID NO: 116243 - DNA, 22 bp, Artificial Sequence
  Synthetic oligonucleotide; CTA chr11 5378898 5378919 5378903 5378898 -
gatccctgaggaatcgccacac

SEQ ID NO: 116244 - DNA, 22 bp, Artificial Sequence
  Synthetic oligonucleotide; CTG chr11 5378890 5378911 5378895 5378890 -
aggaatcgccacactgacttcc

SEQ ID NO: 116245 - DNA, 22 bp, Artificial Sequence
  Synthetic oligonucleotide; CTG chr11 5378874 5378895 5378879 5378874 -
acttccacaatggttgaactag

SEQ ID NO: 116246 - DNA, 22 bp, Artificial Sequence
  Synthetic oligonucleotide; CTT chr11 5378870 5378891 5378875 5378870 -
ccacaatggttgaactagttta

SEQ ID NO: 116247 - DNA, 22 bp, Artificial Sequence
  Synthetic oligonucleotide; TTC chr11 5378869 5378890 5378874 5378869 -
cacaatggttgaactagtttac

SEQ ID NO: 116248 - DNA, 22 bp, Artificial Sequence
  Synthetic oligonucleotide; TTG chr11 5378858 5378879 5378863 5378858 -
aactagtttacagtcccaccaa

SEQ ID NO: 116249 - DNA, 22 bp, Artificial Sequence
  Synthetic oligonucleotide; CTA chr11 5378853 5378874 5378858 5378853 -
gtttacagtcccaccaagagtg

SEQ ID NO: 116250 - DNA, 22 bp, Artificial Sequence
  Synthetic oligonucleotide; TTT chr11 5378849 5378870 5378854 5378849 -
acagtcccaccaagagtgtaaa

SEQ ID NO: 116251 - DNA, 22 bp, Artificial Sequence
  Synthetic oligonucleotide; TTA chr11 5378848 5378869 5378853 5378848 -
cagtcccaccaagagtgtaaaa

SEQ ID NO: 116252 - DNA, 22 bp, Artificial Sequence
  Synthetic oligonucleotide; TTC chr11 5378820 5378841 5378825 5378820 -
ctatttctccacatcctctcca

SEQ ID NO: 116253 - DNA, 22 bp, Artificial Sequence
  Synthetic oligonucleotide; CTA chr11 5378817 5378838 5378822 5378817 -
tttctccacatcctctccagca

SEQ ID NO: 116254 - DNA, 22 bp, Artificial Sequence
  Synthetic oligonucleotide; TTT chr11 5378814 5378835 5378819 5378814 -
ctccacatcctctccagcacct

SEQ ID NO: 116255 - DNA, 22 bp, Artificial Sequence
  Synthetic oligonucleotide; TTC chr11 5378813 5378834 5378818 5378813 -
tccacatcctctccagcacctg

SEQ ID NO: 116256 - DNA, 22 bp, Artificial Sequence
  Synthetic oligonucleotide; CTC chr11 5378811 5378832 5378816 5378811 -
cacatcctctccagcacctgtt

SEQ ID NO: 116257 - DNA, 22 bp, Artificial Sequence
  Synthetic oligonucleotide; CTC chr11 5378802 5378823 5378807 5378802 -
tccagcacctgttgtttcctga

SEQ ID NO: 116258 - DNA, 22 bp, Artificial Sequence
  Synthetic oligonucleotide; CTC chr11 5378800 5378821 5378805 5378800 -
cagcacctgttgtttcctgact

SEQ ID NO: 116259 - DNA, 22 bp, Artificial Sequence
  Synthetic oligonucleotide; CTG chr11 5378791 5378812 5378796 5378791 -
ttgtttcctgactttttaatga

SEQ ID NO: 116260 - DNA, 22 bp, Artificial Sequence
  Synthetic oligonucleotide; TTG chr11 5378788 5378809 5378793 5378788 -
tttcctgactttttaatgattg

SEQ ID NO: 116261 - DNA, 22 bp, Artificial Sequence
  Synthetic oligonucleotide; TTT chr11 5378785 5378806 5378790 5378785 -
cctgactttttaatgattgcca

SEQ ID NO: 116262 - DNA, 22 bp, Artificial Sequence
  Synthetic oligonucleotide; TTC chr11 5378784 5378805 5378789 5378784 -
ctgactttttaatgattgccat

SEQ ID NO: 116263 - DNA, 22 bp, Artificial Sequence
  Synthetic oligonucleotide; CTG chr11 5378781 5378802 5378786 5378781 -
actttttaatgattgccattct

SEQ ID NO: 116264 - DNA, 22 bp, Artificial Sequence
  Synthetic oligonucleotide; CTT chr11 5378777 5378798 5378782 5378777 -
tttaatgattgccattctaact

SEQ ID NO: 116265 - DNA, 22 bp, Artificial Sequence
  Synthetic oligonucleotide; TTT chr11 5378776 5378797 5378781 5378776 -
ttaatgattgccattctaactg

SEQ ID NO: 116266 - DNA, 22 bp, Artificial Sequence
  Synthetic oligonucleotide; TTT chr11 5378775 5378796 5378780 5378775 -
taatgattgccattctaactgg

SEQ ID NO: 116267 - DNA, 22 bp, Artificial Sequence
  Synthetic oligonucleotide; TTT chr11 5378774 5378795 5378779 5378774 -
aatgattgccattctaactggt

SEQ ID NO: 116268 - DNA, 22 bp, Artificial Sequence
  Synthetic oligonucleotide; TTA chr11 5378773 5378794 5378778 5378773 -
atgattgccattctaactggta

SEQ ID NO: 116269 - DNA, 22 bp, Artificial Sequence
  Synthetic oligonucleotide; TTG chr11 5378766 5378787 5378771 5378766 -
ccattctaactggtatgagatg

SEQ ID NO: 116270 - DNA, 22 bp, Artificial Sequence
  Synthetic oligonucleotide; TTC chr11 5378760 5378781 5378765 5378760 -
taactggtatgagatggtatct

SEQ ID NO: 116271 - DNA, 22 bp, Artificial Sequence
  Synthetic oligonucleotide; CTA chr11 5378758 5378779 5378763 5378758 -
actggtatgagatggtatctca

SEQ ID NO: 116272 - DNA, 22 bp, Artificial Sequence
  Synthetic oligonucleotide; CTG chr11 5378754 5378775 5378759 5378754 -
gtatgagatggtatctcattgt

SEQ ID NO: 116273 - DNA, 22 bp, Artificial Sequence
  Synthetic oligonucleotide; CTC chr11 5378737 5378758 5378742 5378737 -
attgtggttttgatttgcattt

SEQ ID NO: 116274 - DNA, 22 bp, Artificial Sequence
  Synthetic oligonucleotide; TTG chr11 5378733 5378754 5378738 5378733 -
tggttttgatttgcatttctct

SEQ ID NO: 116275 - DNA, 22 bp, Artificial Sequence
  Synthetic oligonucleotide; TTT chr11 5378727 5378748 5378732 5378727 -
tgatttgcatttctctgatggc

SEQ ID NO: 116276 - DNA, 22 bp, Artificial Sequence
  Synthetic oligonucleotide; TTT chr11 5378726 5378747 5378731 5378726 -
gatttgcatttctctgatggcc

SEQ ID NO: 116277 - DNA, 22 bp, Artificial Sequence
  Synthetic oligonucleotide; TTG chr11 5378725 5378746 5378730 5378725 -
atttgcatttctctgatggcca

SEQ ID NO: 116278 - DNA, 22 bp, Artificial Sequence
  Synthetic oligonucleotide; TTT chr11 5378721 5378742 5378726 5378721 -
gcatttctctgatggccagtga

SEQ ID NO: 116279 - DNA, 22 bp, Artificial Sequence
  Synthetic oligonucleotide; TTG chr11 5378720 5378741 5378725 5378720 -
catttctctgatggccagtgat

SEQ ID NO: 116280 - DNA, 22 bp, Artificial Sequence
  Synthetic oligonucleotide; TTT chr11 5378715 5378736 5378720 5378715 -
ctctgatggccagtgatgatga

SEQ ID NO: 116281 - DNA, 22 bp, Artificial Sequence
  Synthetic oligonucleotide; TTC chr11 5378714 5378735 5378719 5378714 -
tctgatggccagtgatgatgag

SEQ ID NO: 116282 - DNA, 22 bp, Artificial Sequence
  Synthetic oligonucleotide; CTC chr11 5378712 5378733 5378717 5378712 -
tgatggccagtgatgatgagca

SEQ ID NO: 116283 - DNA, 22 bp, Artificial Sequence
  Synthetic oligonucleotide; CTG chr11 5378710 5378731 5378715 5378710 -
atggccagtgatgatgagcatt

SEQ ID NO: 116284 - DNA, 22 bp, Artificial Sequence
  Synthetic oligonucleotide; TTT chr11 5378687 5378708 5378692 5378687 -
tttcatgtgtcttttggttgca

SEQ ID NO: 116285 - DNA, 22 bp, Artificial Sequence
  Synthetic oligonucleotide; TTT chr11 5378686 5378707 5378691 5378686 -
ttcatgtgtcttttggttgcat

SEQ ID NO: 116286 - DNA, 22 bp, Artificial Sequence
  Synthetic oligonucleotide; TTT chr11 5378685 5378706 5378690 5378685 -
tcatgtgtcttttggttgcata

SEQ ID NO: 116287 - DNA, 22 bp, Artificial Sequence
  Synthetic oligonucleotide; TTT chr11 5378684 5378705 5378689 5378684 -
catgtgtcttttggttgcataa

SEQ ID NO: 116288 - DNA, 22 bp, Artificial Sequence
  Synthetic oligonucleotide; TTC chr11 5378683 5378704 5378688 5378683 -
atgtgtcttttggttgcataaa

SEQ ID NO: 116289 - DNA, 22 bp, Artificial Sequence
  Synthetic oligonucleotide; CTT chr11 5378674 5378695 5378679 5378674 -
ttggttgcataaatgttttctt

SEQ ID NO: 116290 - DNA, 22 bp, Artificial Sequence
  Synthetic oligonucleotide; TTT chr11 5378673 5378694 5378678 5378673 -
tggttgcataaatgttttcttt

SEQ ID NO: 116291 - DNA, 22 bp, Artificial Sequence
  Synthetic oligonucleotide; TTT chr11 5378672 5378693 5378677 5378672 -
ggttgcataaatgttttctttt

SEQ ID NO: 116292 - DNA, 22 bp, Artificial Sequence
  Synthetic oligonucleotide; TTG chr11 5378671 5378692 5378676 5378671 -
gttgcataaatgttttcttttg

SEQ ID NO: 116293 - DNA, 22 bp, Artificial Sequence
  Synthetic oligonucleotide; TTG chr11 5378667 5378688 5378672 5378667 -
cataaatgttttcttttgagaa

SEQ ID NO: 116294 - DNA, 22 bp, Artificial Sequence
  Synthetic oligonucleotide; TTT chr11 5378656 5378677 5378661 5378656 -
tcttttgagaagtgtctgttca

SEQ ID NO: 116295 - DNA, 22 bp, Artificial Sequence
  Synthetic oligonucleotide; TTT chr11 5378655 5378676 5378660 5378655 -
cttttgagaagtgtctgttcat

SEQ ID NO: 116296 - DNA, 22 bp, Artificial Sequence
  Synthetic oligonucleotide; TTC chr11 5378654 5378675 5378659 5378654 -
ttttgagaagtgtctgttcata

SEQ ID NO: 116297 - DNA, 22 bp, Artificial Sequence
  Synthetic oligonucleotide; CTT chr11 5378652 5378673 5378657 5378652 -
ttgagaagtgtctgttcatatc

SEQ ID NO: 116298 - DNA, 22 bp, Artificial Sequence
  Synthetic oligonucleotide; TTT chr11 5378651 5378672 5378656 5378651 -
tgagaagtgtctgttcatatcc

SEQ ID NO: 116299 - DNA, 22 bp, Artificial Sequence
  Synthetic oligonucleotide; TTT chr11 5378650 5378671 5378655 5378650 -
gagaagtgtctgttcatatcct

SEQ ID NO: 116300 - DNA, 22 bp, Artificial Sequence
  Synthetic oligonucleotide; TTG chr11 5378649 5378670 5378654 5378649 -
agaagtgtctgttcatatcctt

SEQ ID NO: 116301 - DNA, 22 bp, Artificial Sequence
  Synthetic oligonucleotide; CTG chr11 5378638 5378659 5378643 5378638 -
ttcatatcctttgcccacttgt

SEQ ID NO: 116302 - DNA, 22 bp, Artificial Sequence
  Synthetic oligonucleotide; TTC chr11 5378635 5378656 5378640 5378635 -
atatcctttgcccacttgttga

SEQ ID NO: 116303 - DNA, 22 bp, Artificial Sequence
  Synthetic oligonucleotide; CTT chr11 5378627 5378648 5378632 5378627 -
tgcccacttgttgatggggctg

SEQ ID NO: 116304 - DNA, 22 bp, Artificial Sequence
  Synthetic oligonucleotide; TTT chr11 5378626 5378647 5378631 5378626 -
gcccacttgttgatggggctgt

SEQ ID NO: 116305 - DNA, 22 bp, Artificial Sequence
  Synthetic oligonucleotide; TTG chr11 5378625 5378646 5378630 5378625 -
cccacttgttgatggggctgtt

SEQ ID NO: 116306 - DNA, 22 bp, Artificial Sequence
  Synthetic oligonucleotide; CTT chr11 5378618 5378639 5378623 5378618 -
gttgatggggctgtttgttttt

SEQ ID NO: 116307 - DNA, 22 bp, Artificial Sequence
  Synthetic oligonucleotide; TTG chr11 5378617 5378638 5378622 5378617 -
ttgatggggctgtttgtttttt

SEQ ID NO: 116308 - DNA, 22 bp, Artificial Sequence
  Synthetic oligonucleotide; TTG chr11 5378614 5378635 5378619 5378614 -
atggggctgtttgtttttttct

SEQ ID NO: 116309 - DNA, 22 bp, Artificial Sequence
  Synthetic oligonucleotide; CTG chr11 5378605 5378626 5378610 5378605 -
tttgtttttttcttgtaaattt

SEQ ID NO: 116310 - DNA, 22 bp, Artificial Sequence
  Synthetic oligonucleotide; TTT chr11 5378602 5378623 5378607 5378602 -
gtttttttcttgtaaatttgtt

SEQ ID NO: 116311 - DNA, 22 bp, Artificial Sequence
  Synthetic oligonucleotide; TTG chr11 5378601 5378622 5378606 5378601 -
tttttttcttgtaaatttgttt

SEQ ID NO: 116312 - DNA, 22 bp, Artificial Sequence
  Synthetic oligonucleotide; TTT chr11 5378598 5378619 5378603 5378598 -
ttttcttgtaaatttgtttgag

SEQ ID NO: 116313 - DNA, 22 bp, Artificial Sequence
  Synthetic oligonucleotide; TTT chr11 5378597 5378618 5378602 5378597 -
tttcttgtaaatttgtttgagt

SEQ ID NO: 116314 - DNA, 22 bp, Artificial Sequence
  Synthetic oligonucleotide; TTT chr11 5378596 5378617 5378601 5378596 -
ttcttgtaaatttgtttgagtt

SEQ ID NO: 116315 - DNA, 22 bp, Artificial Sequence
  Synthetic oligonucleotide; TTT chr11 5378595 5378616 5378600 5378595 -
tcttgtaaatttgtttgagttc

SEQ ID NO: 116316 - DNA, 22 bp, Artificial Sequence
  Synthetic oligonucleotide; TTT chr11 5378594 5378615 5378599 5378594 -
cttgtaaatttgtttgagttca

SEQ ID NO: 116317 - DNA, 22 bp, Artificial Sequence
  Synthetic oligonucleotide; TTC chr11 5378593 5378614 5378598 5378593 -
ttgtaaatttgtttgagttcat

SEQ ID NO: 116318 - DNA, 22 bp, Artificial Sequence
  Synthetic oligonucleotide; CTT chr11 5378591 5378612 5378596 5378591 -
gtaaatttgtttgagttcatta

SEQ ID NO: 116319 - DNA, 22 bp, Artificial Sequence
  Synthetic oligonucleotide; TTG chr11 5378590 5378611 5378595 5378590 -
taaatttgtttgagttcattat

SEQ ID NO: 116320 - DNA, 22 bp, Artificial Sequence
  Synthetic oligonucleotide; TTT chr11 5378583 5378604 5378588 5378583 -
gtttgagttcattatagattct

SEQ ID NO: 116321 - DNA, 22 bp, Artificial Sequence
  Synthetic oligonucleotide; TTG chr11 5378582 5378603 5378587 5378582 -
tttgagttcattatagattctg

SEQ ID NO: 116322 - DNA, 22 bp, Artificial Sequence
  Synthetic oligonucleotide; TTT chr11 5378579 5378600 5378584 5378579 -
gagttcattatagattctggat

SEQ ID NO: 116323 - DNA, 22 bp, Artificial Sequence
  Synthetic oligonucleotide; TTG chr11 5378578 5378599 5378583 5378578 -
agttcattatagattctggata

SEQ ID NO: 116324 - DNA, 22 bp, Artificial Sequence
  Synthetic oligonucleotide; TTC chr11 5378573 5378594 5378578 5378573 -
attatagattctggatattagc

SEQ ID NO: 116325 - DNA, 22 bp, Artificial Sequence
  Synthetic oligonucleotide; TTA chr11 5378569 5378590 5378574 5378569 -
tagattctggatattagccctt

SEQ ID NO: 116326 - DNA, 22 bp, Artificial Sequence
  Synthetic oligonucleotide; TTC chr11 5378562 5378583 5378567 5378562 -
tggatattagccctttgtcaga

SEQ ID NO: 116327 - DNA, 22 bp, Artificial Sequence
  Synthetic oligonucleotide; CTG chr11 5378560 5378581 5378565 5378560 -
gatattagccctttgtcagatg

SEQ ID NO: 116328 - DNA, 22 bp, Artificial Sequence
  Synthetic oligonucleotide; TTA chr11 5378553 5378574 5378558 5378553 -
gccctttgtcagatgagtaggt

SEQ ID NO: 116329 - DNA, 22 bp, Artificial Sequence
  Synthetic oligonucleotide; CTT chr11 5378547 5378568 5378552 5378547 -
tgtcagatgagtaggttgtgaa

SEQ ID NO: 116330 - DNA, 22 bp, Artificial Sequence
  Synthetic oligonucleotide; TTT chr11 5378546 5378567 5378551 5378546 -
gtcagatgagtaggttgtgaaa

SEQ ID NO: 116331 - DNA, 22 bp, Artificial Sequence
  Synthetic oligonucleotide; TTG chr11 5378545 5378566 5378550 5378545 -
tcagatgagtaggttgtgaaaa

SEQ ID NO: 116332 - DNA, 22 bp, Artificial Sequence
  Synthetic oligonucleotide; TTG chr11 5378529 5378550 5378534 5378529 -
tgaaaattttctcccattgtgt

SEQ ID NO: 116333 - DNA, 22 bp, Artificial Sequence
  Synthetic oligonucleotide; TTT chr11 5378520 5378541 5378525 5378520 -
tctcccattgtgtaggttgcct

SEQ ID NO: 116334 - DNA, 22 bp, Artificial Sequence
  Synthetic oligonucleotide; TTT chr11 5378519 5378540 5378524 5378519 -
ctcccattgtgtaggttgcctg

SEQ ID NO: 116335 - DNA, 22 bp, Artificial Sequence
  Synthetic oligonucleotide; TTC chr11 5378518 5378539 5378523 5378518 -
tcccattgtgtaggttgcctgt

SEQ ID NO: 116336 - DNA, 22 bp, Artificial Sequence
  Synthetic oligonucleotide; CTC chr11 5378516 5378537 5378521 5378516 -
ccattgtgtaggttgcctgttc

SEQ ID NO: 116337 - DNA, 22 bp, Artificial Sequence
  Synthetic oligonucleotide; TTG chr11 5378510 5378531 5378515 5378510 -
tgtaggttgcctgttcactctg

SEQ ID NO: 116338 - DNA, 22 bp, Artificial Sequence
  Synthetic oligonucleotide; TTG chr11 5378501 5378522 5378506 5378501 -
cctgttcactctgatggtagtt

SEQ ID NO: 116339 - DNA, 22 bp, Artificial Sequence
  Synthetic oligonucleotide; CTG chr11 5378497 5378518 5378502 5378497 -
ttcactctgatggtagtttctt

SEQ ID NO: 116340 - DNA, 22 bp, Artificial Sequence
  Synthetic oligonucleotide; TTC chr11 5378494 5378515 5378499 5378494 -
actctgatggtagtttctttag

SEQ ID NO: 116341 - DNA, 22 bp, Artificial Sequence
  Synthetic oligonucleotide; CTC chr11 5378490 5378511 5378495 5378490 -
tgatggtagtttctttagctgt

SEQ ID NO: 116342 - DNA, 22 bp, Artificial Sequence
  Synthetic oligonucleotide; CTG chr11 5378488 5378509 5378493 5378488 -
atggtagtttctttagctgtgc

SEQ ID NO: 116343 - DNA, 22 bp, Artificial Sequence
  Synthetic oligonucleotide; TTT chr11 5378478 5378499 5378483 5378478 -
ctttagctgtgcagaagctctt

SEQ ID NO: 116344 - DNA, 22 bp, Artificial Sequence
  Synthetic oligonucleotide; TTC chr11 5378477 5378498 5378482 5378477 -
tttagctgtgcagaagctcttt

SEQ ID NO: 116345 - DNA, 22 bp, Artificial Sequence
  Synthetic oligonucleotide; CTT chr11 5378475 5378496 5378480 5378475 -
tagctgtgcagaagctctttag

SEQ ID NO: 116346 - DNA, 22 bp, Artificial Sequence
  Synthetic oligonucleotide; TTT chr11 5378474 5378495 5378479 5378474 -
agctgtgcagaagctctttagt

SEQ ID NO: 116347 - DNA, 22 bp, Artificial Sequence
  Synthetic oligonucleotide; TTA chr11 5378473 5378494 5378478 5378473 -
gctgtgcagaagctctttagtt

SEQ ID NO: 116348 - DNA, 22 bp, Artificial Sequence
  Synthetic oligonucleotide; CTG chr11 5378469 5378490 5378474 5378469 -
tgcagaagctctttagtttcat

SEQ ID NO: 116349 - DNA, 22 bp, Artificial Sequence
  Synthetic oligonucleotide; CTC chr11 5378458 5378479 5378463 5378458 -
tttagtttcattagatcccatt

SEQ ID NO: 116350 - DNA, 22 bp, Artificial Sequence
  Synthetic oligonucleotide; CTT chr11 5378456 5378477 5378461 5378456 -
tagtttcattagatcccattag

SEQ ID NO: 116351 - DNA, 22 bp, Artificial Sequence
  Synthetic oligonucleotide; TTT chr11 5378455 5378476 5378460 5378455 -
agtttcattagatcccattagt

SEQ ID NO: 116352 - DNA, 22 bp, Artificial Sequence
  Synthetic oligonucleotide; TTA chr11 5378454 5378475 5378459 5378454 -
gtttcattagatcccattagtg

SEQ ID NO: 116353 - DNA, 22 bp, Artificial Sequence
  Synthetic oligonucleotide; TTT chr11 5378450 5378471 5378455 5378450 -
cattagatcccattagtgaatt

SEQ ID NO: 116354 - DNA, 22 bp, Artificial Sequence
  Synthetic oligonucleotide; TTC chr11 5378449 5378470 5378454 5378449 -
attagatcccattagtgaattt

SEQ ID NO: 116355 - DNA, 22 bp, Artificial Sequence
  Synthetic oligonucleotide; TTA chr11 5378445 5378466 5378450 5378445 -
gatcccattagtgaattttggc

SEQ ID NO: 116356 - DNA, 22 bp, Artificial Sequence
  Synthetic oligonucleotide; TTA chr11 5378435 5378456 5378440 5378435 -
gtgaattttggcttttgttgcc

SEQ ID NO: 116357 - DNA, 22 bp, Artificial Sequence
  Synthetic oligonucleotide; TTT chr11 5378427 5378448 5378432 5378427 -
tggcttttgttgccatcgcttt

SEQ ID NO: 116358 - DNA, 22 bp, Artificial Sequence
  Synthetic oligonucleotide; TTT chr11 5378426 5378447 5378431 5378426 -
ggcttttgttgccatcgctttt

SEQ ID NO: 116359 - DNA, 22 bp, Artificial Sequence
  Synthetic oligonucleotide; TTG chr11 5378425 5378446 5378430 5378425 -
gcttttgttgccatcgcttttg

SEQ ID NO: 116360 - DNA, 22 bp, Artificial Sequence
  Synthetic oligonucleotide; CTT chr11 5378421 5378442 5378426 5378421 -
ttgttgccatcgcttttggtgt

SEQ ID NO: 116361 - DNA, 22 bp, Artificial Sequence
  Synthetic oligonucleotide; TTT chr11 5378420 5378441 5378425 5378420 -
tgttgccatcgcttttggtgtt

SEQ ID NO: 116362 - DNA, 22 bp, Artificial Sequence
  Synthetic oligonucleotide; TTT chr11 5378419 5378440 5378424 5378419 -
gttgccatcgcttttggtgttt

SEQ ID NO: 116363 - DNA, 22 bp, Artificial Sequence
  Synthetic oligonucleotide; TTG chr11 5378418 5378439 5378423 5378418 -
ttgccatcgcttttggtgtttt

SEQ ID NO: 116364 - DNA, 22 bp, Artificial Sequence
  Synthetic oligonucleotide; TTG chr11 5378415 5378436 5378420 5378415 -
ccatcgcttttggtgttttaga

SEQ ID NO: 116365 - DNA, 22 bp, Artificial Sequence
  Synthetic oligonucleotide; CTT chr11 5378406 5378427 5378411 5378406 -
ttggtgttttagacatgaagtc

SEQ ID NO: 116366 - DNA, 22 bp, Artificial Sequence
  Synthetic oligonucleotide; TTT chr11 5378405 5378426 5378410 5378405 -
tggtgttttagacatgaagtcc

SEQ ID NO: 116367 - DNA, 22 bp, Artificial Sequence
  Synthetic oligonucleotide; TTT chr11 5378404 5378425 5378409 5378404 -
ggtgttttagacatgaagtcct

SEQ ID NO: 116368 - DNA, 22 bp, Artificial Sequence
  Synthetic oligonucleotide; TTG chr11 5378403 5378424 5378408 5378403 -
gtgttttagacatgaagtcctt

SEQ ID NO: 116369 - DNA, 22 bp, Artificial Sequence
  Synthetic oligonucleotide; TTT chr11 5378397 5378418 5378402 5378397 -
tagacatgaagtccttgcccat

SEQ ID NO: 116370 - DNA, 22 bp, Artificial Sequence
  Synthetic oligonucleotide; TTT chr11 5378396 5378417 5378401 5378396 -
agacatgaagtccttgcccatg

SEQ ID NO: 116371 - DNA, 22 bp, Artificial Sequence
  Synthetic oligonucleotide; TTA chr11 5378395 5378416 5378400 5378395 -
gacatgaagtccttgcccatgc

SEQ ID NO: 116372 - DNA, 22 bp, Artificial Sequence
  Synthetic oligonucleotide; CTT chr11 5378381 5378402 5378386 5378381 -
gcccatgcctatgtcctgaatg

SEQ ID NO: 116373 - DNA, 22 bp, Artificial Sequence
  Synthetic oligonucleotide; TTG chr11 5378380 5378401 5378385 5378380 -
cccatgcctatgtcctgaatgg

SEQ ID NO: 116374 - DNA, 22 bp, Artificial Sequence
  Synthetic oligonucleotide; CTA chr11 5378370 5378391 5378375 5378370 -
tgtcctgaatggtaatgcctgc

SEQ ID NO: 116375 - DNA, 22 bp, Artificial Sequence
  Synthetic oligonucleotide; CTG chr11 5378363 5378384 5378368 5378363 -
aatggtaatgcctgcgttttct

SEQ ID NO: 116376 - DNA, 22 bp, Artificial Sequence
  Synthetic oligonucleotide; CTG chr11 5378349 5378370 5378354 5378349 -
cgttttcttctagggtttttat

SEQ ID NO: 116377 - DNA, 22 bp, Artificial Sequence
  Synthetic oligonucleotide; TTT chr11 5378344 5378365 5378349 5378344 -
tcttctagggtttttatggttt

SEQ ID NO: 116378 - DNA, 22 bp, Artificial Sequence
  Synthetic oligonucleotide; TTT chr11 5378343 5378364 5378348 5378343 -
cttctagggtttttatggtttt

SEQ ID NO: 116379 - DNA, 22 bp, Artificial Sequence
  Synthetic oligonucleotide; TTC chr11 5378342 5378363 5378347 5378342 -
ttctagggtttttatggtttta

SEQ ID NO: 116380 - DNA, 22 bp, Artificial Sequence
  Synthetic oligonucleotide; CTT chr11 5378340 5378361 5378345 5378340 -
ctagggtttttatggttttagg

SEQ ID NO: 116381 - DNA, 22 bp, Artificial Sequence
  Synthetic oligonucleotide; TTC chr11 5378339 5378360 5378344 5378339 -
tagggtttttatggttttaggt

SEQ ID NO: 116382 - DNA, 22 bp, Artificial Sequence
  Synthetic oligonucleotide; CTA chr11 5378337 5378358 5378342 5378337 -
gggtttttatggttttaggtct

SEQ ID NO: 116383 - DNA, 22 bp, Artificial Sequence
  Synthetic oligonucleotide; TTT chr11 5378331 5378352 5378336 5378331 -
ttatggttttaggtctaatgtt

SEQ ID NO: 116384 - DNA, 22 bp, Artificial Sequence
  Synthetic oligonucleotide; TTT chr11 5378330 5378351 5378335 5378330 -
tatggttttaggtctaatgttt

SEQ ID NO: 116385 - DNA, 22 bp, Artificial Sequence
  Synthetic oligonucleotide; TTT chr11 5378329 5378350 5378334 5378329 -
atggttttaggtctaatgttta

SEQ ID NO: 116386 - DNA, 22 bp, Artificial Sequence
  Synthetic oligonucleotide; TTA chr11 5378328 5378349 5378333 5378328 -
tggttttaggtctaatgtttaa

SEQ ID NO: 116387 - DNA, 22 bp, Artificial Sequence
  Synthetic oligonucleotide; TTT chr11 5378322 5378343 5378327 5378322 -
taggtctaatgtttaagtcttt

SEQ ID NO: 116388 - DNA, 22 bp, Artificial Sequence
  Synthetic oligonucleotide; TTT chr11 5378321 5378342 5378326 5378321 -
aggtctaatgtttaagtcttta

SEQ ID NO: 116389 - DNA, 22 bp, Artificial Sequence
  Synthetic oligonucleotide; TTA chr11 5378320 5378341 5378325 5378320 -
ggtctaatgtttaagtctttaa

SEQ ID NO: 116390 - DNA, 22 bp, Artificial Sequence
  Synthetic oligonucleotide; CTA chr11 5378314 5378335 5378319 5378314 -
atgtttaagtctttaatccatc

SEQ ID NO: 116391 - DNA, 22 bp, Artificial Sequence
  Synthetic oligonucleotide; TTT chr11 5378308 5378329 5378313 5378308 -
aagtctttaatccatcttgaat

SEQ ID NO: 116392 - DNA, 22 bp, Artificial Sequence
  Synthetic oligonucleotide; TTA chr11 5378307 5378328 5378312 5378307 -
agtctttaatccatcttgaatt

SEQ ID NO: 116393 - DNA, 22 bp, Artificial Sequence
  Synthetic oligonucleotide; CTT chr11 5378301 5378322 5378306 5378301 -
taatccatcttgaattaatttt

SEQ ID NO: 116394 - DNA, 22 bp, Artificial Sequence
  Synthetic oligonucleotide; TTT chr11 5378300 5378321 5378305 5378300 -
aatccatcttgaattaattttt

SEQ ID NO: 116395 - DNA, 22 bp, Artificial Sequence
  Synthetic oligonucleotide; TTA chr11 5378299 5378320 5378304 5378299 -
atccatcttgaattaatttttg

SEQ ID NO: 116396 - DNA, 22 bp, Artificial Sequence
  Synthetic oligonucleotide; CTT chr11 5378290 5378311 5378295 5378290 -
gaattaatttttgtataaggtg

SEQ ID NO: 116397 - DNA, 22 bp, Artificial Sequence
  Synthetic oligonucleotide; TTG chr11 5378289 5378310 5378294 5378289 -
aattaatttttgtataaggtgt

SEQ ID NO: 116398 - DNA, 22 bp, Artificial Sequence
  Synthetic oligonucleotide; TTA chr11 5378284 5378305 5378289 5378284 -
atttttgtataaggtgtaagga

SEQ ID NO: 116399 - DNA, 22 bp, Artificial Sequence
  Synthetic oligonucleotide; TTT chr11 5378280 5378301 5378285 5378280 -
ttgtataaggtgtaaggaaggg

SEQ ID NO: 116400 - DNA, 22 bp, Artificial Sequence
  Synthetic oligonucleotide; TTT chr11 5378279 5378300 5378284 5378279 -
tgtataaggtgtaaggaaggga

SEQ ID NO: 116401 - DNA, 22 bp, Artificial Sequence
  Synthetic oligonucleotide; TTT chr11 5378278 5378299 5378283 5378278 -
gtataaggtgtaaggaagggat

SEQ ID NO: 116402 - DNA, 22 bp, Artificial Sequence
  Synthetic oligonucleotide; TTG chr11 5378277 5378298 5378282 5378277 -
tataaggtgtaaggaagggatc

SEQ ID NO: 116403 - DNA, 22 bp, Artificial Sequence
  Synthetic oligonucleotide; TTT chr11 5378249 5378270 5378254 5378249 -
cagcattctacatatggctagc

SEQ ID NO: 116404 - DNA, 22 bp, Artificial Sequence
  Synthetic oligonucleotide; TTC chr11 5378248 5378269 5378253 5378248 -
agcattctacatatggctagcc

SEQ ID NO: 116405 - DNA, 22 bp, Artificial Sequence
  Synthetic oligonucleotide; TTC chr11 5378241 5378262 5378246 5378241 -
tacatatggctagccagttctc

SEQ ID NO: 116406 - DNA, 22 bp, Artificial Sequence
  Synthetic oligonucleotide; CTA chr11 5378239 5378260 5378244 5378239 -
catatggctagccagttctccc

SEQ ID NO: 116407 - DNA, 22 bp, Artificial Sequence
  Synthetic oligonucleotide; CTA chr11 5378229 5378250 5378234 5378229 -
gccagttctcccagcaccattt

SEQ ID NO: 116408 - DNA, 22 bp, Artificial Sequence
  Synthetic oligonucleotide; TTC chr11 5378221 5378242 5378226 5378221 -
tcccagcaccatttattaaata

SEQ ID NO: 116409 - DNA, 22 bp, Artificial Sequence
  Synthetic oligonucleotide; CTC chr11 5378219 5378240 5378224 5378219 -
ccagcaccatttattaaatagg

SEQ ID NO: 116410 - DNA, 22 bp, Artificial Sequence
  Synthetic oligonucleotide; TTT chr11 5378207 5378228 5378212 5378207 -
attaaatagggaatcctttccc

SEQ ID NO: 116411 - DNA, 22 bp, Artificial Sequence
  Synthetic oligonucleotide; TTA chr11 5378206 5378227 5378211 5378206 -
ttaaatagggaatcctttcccc

SEQ ID NO: 116412 - DNA, 22 bp, Artificial Sequence
  Synthetic oligonucleotide; TTA chr11 5378203 5378224 5378208 5378203 -
aatagggaatcctttccccatt

SEQ ID NO: 116413 - DNA, 22 bp, Artificial Sequence
  Synthetic oligonucleotide; CTT chr11 5378189 5378210 5378194 5378189 -
tccccatttcttgtttttctca

SEQ ID NO: 116414 - DNA, 22 bp, Artificial Sequence
  Synthetic oligonucleotide; TTT chr11 5378188 5378209 5378193 5378188 -
ccccatttcttgtttttctcag

SEQ ID NO: 116415 - DNA, 22 bp, Artificial Sequence
  Synthetic oligonucleotide; TTC chr11 5378187 5378208 5378192 5378187 -
cccatttcttgtttttctcagg

SEQ ID NO: 116416 - DNA, 22 bp, Artificial Sequence
  Synthetic oligonucleotide; TTT chr11 5378180 5378201 5378185 5378180 -
cttgtttttctcaggtttttca

SEQ ID NO: 116417 - DNA, 22 bp, Artificial Sequence
  Synthetic oligonucleotide; TTC chr11 5378179 5378200 5378184 5378179 -
ttgtttttctcaggtttttcaa

SEQ ID NO: 116418 - DNA, 22 bp, Artificial Sequence
  Synthetic oligonucleotide; CTT chr11 5378177 5378198 5378182 5378177 -
gtttttctcaggtttttcaaag

SEQ ID NO: 116419 - DNA, 22 bp, Artificial Sequence
  Synthetic oligonucleotide; TTG chr11 5378176 5378197 5378181 5378176 -
tttttctcaggtttttcaaaga

SEQ ID NO: 116420 - DNA, 22 bp, Artificial Sequence
  Synthetic oligonucleotide; TTT chr11 5378173 5378194 5378178 5378173 -
ttctcaggtttttcaaagatca

SEQ ID NO: 116421 - DNA, 22 bp, Artificial Sequence
  Synthetic oligonucleotide; TTT chr11 5378172 5378193 5378177 5378172 -
tctcaggtttttcaaagatcag

SEQ ID NO: 116422 - DNA, 22 bp, Artificial Sequence
  Synthetic oligonucleotide; TTT chr11 5378171 5378192 5378176 5378171 -
ctcaggtttttcaaagatcaga

SEQ ID NO: 116423 - DNA, 22 bp, Artificial Sequence
  Synthetic oligonucleotide; TTC chr11 5378170 5378191 5378175 5378170 -
tcaggtttttcaaagatcagat

SEQ ID NO: 116424 - DNA, 22 bp, Artificial Sequence
  Synthetic oligonucleotide; CTC chr11 5378168 5378189 5378173 5378168 -
aggtttttcaaagatcagatag

SEQ ID NO: 116425 - DNA, 22 bp, Artificial Sequence
  Synthetic oligonucleotide; TTT chr11 5378162 5378183 5378167 5378162 -
ttcaaagatcagatagttgtag

SEQ ID NO: 116426 - DNA, 22 bp, Artificial Sequence
  Synthetic oligonucleotide; TTT chr11 5378161 5378182 5378166 5378161 -
tcaaagatcagatagttgtaga

SEQ ID NO: 116427 - DNA, 22 bp, Artificial Sequence
  Synthetic oligonucleotide; TTT chr11 5378160 5378181 5378165 5378160 -
caaagatcagatagttgtagat

SEQ ID NO: 116428 - DNA, 22 bp, Artificial Sequence
  Synthetic oligonucleotide; TTC chr11 5378159 5378180 5378164 5378159 -
aaagatcagatagttgtagata

SEQ ID NO: 116429 - DNA, 22 bp, Artificial Sequence
  Synthetic oligonucleotide; TTG chr11 5378143 5378164 5378148 5378143 -
tagatatgcgtcgttatttctg

SEQ ID NO: 116430 - DNA, 22 bp, Artificial Sequence
  Synthetic oligonucleotide; TTA chr11 5378127 5378148 5378132 5378127 -
tttctgagggctctgttctgtt

SEQ ID NO: 116431 - DNA, 22 bp, Artificial Sequence
  Synthetic oligonucleotide; TTT chr11 5378124 5378145 5378129 5378124 -
ctgagggctctgttctgttcca

SEQ ID NO: 116432 - DNA, 22 bp, Artificial Sequence
  Synthetic oligonucleotide; TTC chr11 5378123 5378144 5378128 5378123 -
tgagggctctgttctgttccat

SEQ ID NO: 116433 - DNA, 22 bp, Artificial Sequence
  Synthetic oligonucleotide; CTG chr11 5378121 5378142 5378126 5378121 -
agggctctgttctgttccattg

SEQ ID NO: 116434 - DNA, 22 bp, Artificial Sequence
  Synthetic oligonucleotide; CTC chr11 5378114 5378135 5378119 5378114 -
tgttctgttccattgatctata

SEQ ID NO: 116435 - DNA, 22 bp, Artificial Sequence
  Synthetic oligonucleotide; CTG chr11 5378112 5378133 5378117 5378112 -
ttctgttccattgatctatatc

SEQ ID NO: 116436 - DNA, 22 bp, Artificial Sequence
  Synthetic oligonucleotide; TTC chr11 5378109 5378130 5378114 5378109 -
tgttccattgatctatatctgt

SEQ ID NO: 116437 - DNA, 22 bp, Artificial Sequence
  Synthetic oligonucleotide; CTG chr11 5378107 5378128 5378112 5378107 -
ttccattgatctatatctgtgt

SEQ ID NO: 116438 - DNA, 22 bp, Artificial Sequence
  Synthetic oligonucleotide; TTC chr11 5378104 5378125 5378109 5378104 -
cattgatctatatctgtgtttt

SEQ ID NO: 116439 - DNA, 22 bp, Artificial Sequence
  Synthetic oligonucleotide; TTG chr11 5378099 5378120 5378104 5378099 -
atctatatctgtgttttggtac

SEQ ID NO: 116440 - DNA, 22 bp, Artificial Sequence
  Synthetic oligonucleotide; CTA chr11 5378094 5378115 5378099 5378094 -
tatctgtgttttggtaccagta

SEQ ID NO: 116441 - DNA, 22 bp, Artificial Sequence
  Synthetic oligonucleotide; CTG chr11 5378088 5378109 5378093 5378088 -
tgttttggtaccagtaacatgc

SEQ ID NO: 116442 - DNA, 22 bp, Artificial Sequence
  Synthetic oligonucleotide; TTT chr11 5378083 5378104 5378088 5378083 -
tggtaccagtaacatgctgttt

SEQ ID NO: 116443 - DNA, 22 bp, Artificial Sequence
  Synthetic oligonucleotide; TTT chr11 5378082 5378103 5378087 5378082 -
ggtaccagtaacatgctgtttt

SEQ ID NO: 116444 - DNA, 22 bp, Artificial Sequence
  Synthetic oligonucleotide; TTG chr11 5378081 5378102 5378086 5378081 -
gtaccagtaacatgctgttttg

SEQ ID NO: 116445 - DNA, 22 bp, Artificial Sequence
  Synthetic oligonucleotide; CTG chr11 5378064 5378085 5378069 5378064 -
ttttggttactgtagccttgta

SEQ ID NO: 116446 - DNA, 22 bp, Artificial Sequence
  Synthetic oligonucleotide; TTT chr11 5378061 5378082 5378066 5378061 -
tggttactgtagccttgtagta

SEQ ID NO: 116447 - DNA, 22 bp, Artificial Sequence
  Synthetic oligonucleotide; TTT chr11 5378060 5378081 5378065 5378060 -
ggttactgtagccttgtagtat

SEQ ID NO: 116448 - DNA, 22 bp, Artificial Sequence
  Synthetic oligonucleotide; TTG chr11 5378059 5378080 5378064 5378059 -
gttactgtagccttgtagtata

SEQ ID NO: 116449 - DNA, 22 bp, Artificial Sequence
  Synthetic oligonucleotide; TTA chr11 5378055 5378076 5378060 5378055 -
ctgtagccttgtagtatagttt

SEQ ID NO: 116450 - DNA, 22 bp, Artificial Sequence
  Synthetic oligonucleotide; CTG chr11 5378052 5378073 5378057 5378052 -
tagccttgtagtatagtttgaa

SEQ ID NO: 116451 - DNA, 22 bp, Artificial Sequence
  Synthetic oligonucleotide; CTT chr11 5378045 5378066 5378050 5378045 -
gtagtatagtttgaagtgaggt

SEQ ID NO: 116452 - DNA, 22 bp, Artificial Sequence
  Synthetic oligonucleotide; TTG chr11 5378044 5378065 5378049 5378044 -
tagtatagtttgaagtgaggta

SEQ ID NO: 116453 - DNA, 22 bp, Artificial Sequence
  Synthetic oligonucleotide; TTT chr11 5378033 5378054 5378038 5378033 -
gaagtgaggtagcctgatgcct

SEQ ID NO: 116454 - DNA, 22 bp, Artificial Sequence
  Synthetic oligonucleotide; TTG chr11 5378032 5378053 5378037 5378032 -
aagtgaggtagcctgatgcctc

SEQ ID NO: 116455 - DNA, 22 bp, Artificial Sequence
  Synthetic oligonucleotide; CTG chr11 5378017 5378038 5378022 5378017 -
atgcctccagctttgttctttt

SEQ ID NO: 116456 - DNA, 22 bp, Artificial Sequence
  Synthetic oligonucleotide; CTC chr11 5378010 5378031 5378015 5378010 -
cagctttgttcttttggcttag

SEQ ID NO: 116457 - DNA, 22 bp, Artificial Sequence
  Synthetic oligonucleotide; CTT chr11 5378004 5378025 5378009 5378004 -
tgttcttttggcttaggattga

SEQ ID NO: 116458 - DNA, 22 bp, Artificial Sequence
  Synthetic oligonucleotide; TTT chr11 5378003 5378024 5378008 5378003 -
gttcttttggcttaggattgac

SEQ ID NO: 116459 - DNA, 22 bp, Artificial Sequence
  Synthetic oligonucleotide; TTG chr11 5378002 5378023 5378007 5378002 -
ttcttttggcttaggattgact

SEQ ID NO: 116460 - DNA, 22 bp, Artificial Sequence
  Synthetic oligonucleotide; TTC chr11 5377999 5378020 5378004 5377999 -
ttttggcttaggattgacttgg

SEQ ID NO: 116461 - DNA, 22 bp, Artificial Sequence
  Synthetic oligonucleotide; CTT chr11 5377997 5378018 5378002 5377997 -
ttggcttaggattgacttggca

SEQ ID NO: 116462 - DNA, 22 bp, Artificial Sequence
  Synthetic oligonucleotide; TTT chr11 5377996 5378017 5378001 5377996 -
tggcttaggattgacttggcaa

SEQ ID NO: 116463 - DNA, 22 bp, Artificial Sequence
  Synthetic oligonucleotide; TTT chr11 5377995 5378016 5378000 5377995 -
ggcttaggattgacttggcaat

SEQ ID NO: 116464 - DNA, 22 bp, Artificial Sequence
  Synthetic oligonucleotide; TTG chr11 5377994 5378015 5377999 5377994 -
gcttaggattgacttggcaatg

SEQ ID NO: 116465 - DNA, 22 bp, Artificial Sequence
  Synthetic oligonucleotide; CTT chr11 5377990 5378011 5377995 5377990 -
aggattgacttggcaatgcagg

SEQ ID NO: 116466 - DNA, 22 bp, Artificial Sequence
  Synthetic oligonucleotide; TTA chr11 5377989 5378010 5377994 5377989 -
ggattgacttggcaatgcaggc

SEQ ID NO: 116467 - DNA, 22 bp, Artificial Sequence
  Synthetic oligonucleotide; TTG chr11 5377983 5378004 5377988 5377983 -
acttggcaatgcaggctctttt

SEQ ID NO: 116468 - DNA, 22 bp, Artificial Sequence
  Synthetic oligonucleotide; CTT chr11 5377979 5378000 5377984 5377979 -
ggcaatgcaggctcttttttgg

SEQ ID NO: 116469 - DNA, 22 bp, Artificial Sequence
  Synthetic oligonucleotide; TTG chr11 5377978 5377999 5377983 5377978 -
gcaatgcaggctcttttttggt

SEQ ID NO: 116470 - DNA, 22 bp, Artificial Sequence
  Synthetic oligonucleotide; CTC chr11 5377965 5377986 5377970 5377965 -
ttttttggttccatatgaactt

SEQ ID NO: 116471 - DNA, 22 bp, Artificial Sequence
  Synthetic oligonucleotide; CTT chr11 5377963 5377984 5377968 5377963 -
ttttggttccatatgaacttta

SEQ ID NO: 116472 - DNA, 22 bp, Artificial Sequence
  Synthetic oligonucleotide; TTT chr11 5377962 5377983 5377967 5377962 -
tttggttccatatgaactttaa

SEQ ID NO: 116473 - DNA, 22 bp, Artificial Sequence
  Synthetic oligonucleotide; TTT chr11 5377961 5377982 5377966 5377961 -
ttggttccatatgaactttaaa

SEQ ID NO: 116474 - DNA, 22 bp, Artificial Sequence
  Synthetic oligonucleotide; TTT chr11 5377960 5377981 5377965 5377960 -
tggttccatatgaactttaaag

SEQ ID NO: 116475 - DNA, 22 bp, Artificial Sequence
  Synthetic oligonucleotide; TTT chr11 5377959 5377980 5377964 5377959 -
ggttccatatgaactttaaagt

SEQ ID NO: 116476 - DNA, 22 bp, Artificial Sequence
  Synthetic oligonucleotide; TTG chr11 5377958 5377979 5377963 5377958 -
gttccatatgaactttaaagtc

SEQ ID NO: 116477 - DNA, 22 bp, Artificial Sequence
  Synthetic oligonucleotide; TTC chr11 5377954 5377975 5377959 5377954 -
catatgaactttaaagtcgttt

SEQ ID NO: 116478 - DNA, 22 bp, Artificial Sequence
  Synthetic oligonucleotide; CTT chr11 5377943 5377964 5377948 5377943 -
taaagtcgtttttccaattctg

SEQ ID NO: 116479 - DNA, 22 bp, Artificial Sequence
  Synthetic oligonucleotide; TTT chr11 5377942 5377963 5377947 5377942 -
aaagtcgtttttccaattctgt

SEQ ID NO: 116480 - DNA, 22 bp, Artificial Sequence
  Synthetic oligonucleotide; TTA chr11 5377941 5377962 5377946 5377941 -
aagtcgtttttccaattctgtg

SEQ ID NO: 116481 - DNA, 22 bp, Artificial Sequence
  Synthetic oligonucleotide; TTT chr11 5377932 5377953 5377937 5377932 -
ttccaattctgtgaagaaaatc

SEQ ID NO: 116482 - DNA, 22 bp, Artificial Sequence
  Synthetic oligonucleotide; TTT chr11 5377931 5377952 5377936 5377931 -
tccaattctgtgaagaaaatca

SEQ ID NO: 116483 - DNA, 22 bp, Artificial Sequence
  Synthetic oligonucleotide; TTT chr11 5377930 5377951 5377935 5377930 -
ccaattctgtgaagaaaatcat

SEQ ID NO: 116484 - DNA, 22 bp, Artificial Sequence
  Synthetic oligonucleotide; TTC chr11 5377929 5377950 5377934 5377929 -
caattctgtgaagaaaatcatt

SEQ ID NO: 116485 - DNA, 22 bp, Artificial Sequence
  Synthetic oligonucleotide; TTC chr11 5377923 5377944 5377928 5377923 -
tgtgaagaaaatcattggtagc

SEQ ID NO: 116486 - DNA, 22 bp, Artificial Sequence
  Synthetic oligonucleotide; CTG chr11 5377921 5377942 5377926 5377921 -
tgaagaaaatcattggtagctt

SEQ ID NO: 116487 - DNA, 22 bp, Artificial Sequence
  Synthetic oligonucleotide; TTG chr11 5377906 5377927 5377911 5377906 -
gtagcttgatggggatggcatt

SEQ ID NO: 116488 - DNA, 22 bp, Artificial Sequence
  Synthetic oligonucleotide; CTT chr11 5377899 5377920 5377904 5377899 -
gatggggatggcattgaatcta

SEQ ID NO: 116489 - DNA, 22 bp, Artificial Sequence
  Synthetic oligonucleotide; TTG chr11 5377898 5377919 5377903 5377898 -
atggggatggcattgaatctat

SEQ ID NO: 116490 - DNA, 22 bp, Artificial Sequence
  Synthetic oligonucleotide; TTG chr11 5377883 5377904 5377888 5377883 -
aatctataaattaccttgggca

SEQ ID NO: 116491 - DNA, 22 bp, Artificial Sequence
  Synthetic oligonucleotide; CTA chr11 5377877 5377898 5377882 5377877 -
taaattaccttgggcattatgg

SEQ ID NO: 116492 - DNA, 22 bp, Artificial Sequence
  Synthetic oligonucleotide; TTA chr11 5377870 5377891 5377875 5377870 -
ccttgggcattatggccatttt

SEQ ID NO: 116493 - DNA, 22 bp, Artificial Sequence
  Synthetic oligonucleotide; CTT chr11 5377866 5377887 5377871 5377866 -
gggcattatggccattttgatg

SEQ ID NO: 116494 - DNA, 22 bp, Artificial Sequence
  Synthetic oligonucleotide; TTG chr11 5377865 5377886 5377870 5377865 -
ggcattatggccattttgatga

SEQ ID NO: 116495 - DNA, 22 bp, Artificial Sequence
  Synthetic oligonucleotide; TTA chr11 5377858 5377879 5377863 5377858 -
tggccattttgatgatattgat

SEQ ID NO: 116496 - DNA, 22 bp, Artificial Sequence
  Synthetic oligonucleotide; TTT chr11 5377849 5377870 5377854 5377849 -
tgatgatattgattcttcctac

SEQ ID NO: 116497 - DNA, 22 bp, Artificial Sequence
  Synthetic oligonucleotide; TTT chr11 5377848 5377869 5377853 5377848 -
gatgatattgattcttcctacc

SEQ ID NO: 116498 - DNA, 22 bp, Artificial Sequence
  Synthetic oligonucleotide; TTG chr11 5377847 5377868 5377852 5377847 -
atgatattgattcttcctaccc

SEQ ID NO: 116499 - DNA, 22 bp, Artificial Sequence
  Synthetic oligonucleotide; TTG chr11 5377838 5377859 5377843 5377838 -
attcttcctacccataagcatg

SEQ ID NO: 116500 - DNA, 22 bp, Artificial Sequence
  Synthetic oligonucleotide; TTC chr11 5377834 5377855 5377839 5377834 -
ttcctacccataagcatggaat

SEQ ID NO: 116501 - DNA, 22 bp, Artificial Sequence
  Synthetic oligonucleotide; CTT chr11 5377832 5377853 5377837 5377832 -
cctacccataagcatggaatgt

SEQ ID NO: 116502 - DNA, 22 bp, Artificial Sequence
  Synthetic oligonucleotide; TTC chr11 5377831 5377852 5377836 5377831 -
ctacccataagcatggaatgtt

SEQ ID NO: 116503 - DNA, 22 bp, Artificial Sequence
  Synthetic oligonucleotide; CTA chr11 5377828 5377849 5377833 5377828 -
cccataagcatggaatgttctt

SEQ ID NO: 116504 - DNA, 22 bp, Artificial Sequence
  Synthetic oligonucleotide; TTC chr11 5377808 5377829 5377813 5377808 -
ttccatttgtttgtatcttctt

SEQ ID NO: 116505 - DNA, 22 bp, Artificial Sequence
  Synthetic oligonucleotide; CTT chr11 5377806 5377827 5377811 5377806 -
ccatttgtttgtatcttctttt

SEQ ID NO: 116506 - DNA, 22 bp, Artificial Sequence
  Synthetic oligonucleotide; TTC chr11 5377805 5377826 5377810 5377805 -
catttgtttgtatcttctttta

SEQ ID NO: 116507 - DNA, 22 bp, Artificial Sequence
  Synthetic oligonucleotide; TTT chr11 5377800 5377821 5377805 5377800 -
gtttgtatcttcttttatttca

SEQ ID NO: 116508 - DNA, 22 bp, Artificial Sequence
  Synthetic oligonucleotide; TTG chr11 5377799 5377820 5377804 5377799 -
tttgtatcttcttttatttcat

SEQ ID NO: 116509 - DNA, 22 bp, Artificial Sequence
  Synthetic oligonucleotide; TTT chr11 5377796 5377817 5377801 5377796 -
gtatcttcttttatttcattga

SEQ ID NO: 116510 - DNA, 22 bp, Artificial Sequence
  Synthetic oligonucleotide; TTG chr11 5377795 5377816 5377800 5377795 -
tatcttcttttatttcattgag

SEQ ID NO: 116511 - DNA, 22 bp, Artificial Sequence
  Synthetic oligonucleotide; CTT chr11 5377789 5377810 5377794 5377789 -
cttttatttcattgagcagtgg

SEQ ID NO: 116512 - DNA, 22 bp, Artificial Sequence
  Synthetic oligonucleotide; TTC chr11 5377788 5377809 5377793 5377788 -
ttttatttcattgagcagtggt

SEQ ID NO: 116513 - DNA, 22 bp, Artificial Sequence
  Synthetic oligonucleotide; CTT chr11 5377786 5377807 5377791 5377786 -
ttatttcattgagcagtggttt

SEQ ID NO: 116514 - DNA, 22 bp, Artificial Sequence
  Synthetic oligonucleotide; TTT chr11 5377785 5377806 5377790 5377785 -
tatttcattgagcagtggtttg

SEQ ID NO: 116515 - DNA, 22 bp, Artificial Sequence
  Synthetic oligonucleotide; TTT chr11 5377784 5377805 5377789 5377784 -
atttcattgagcagtggtttgt

SEQ ID NO: 116516 - DNA, 22 bp, Artificial Sequence
  Synthetic oligonucleotide; TTA chr11 5377783 5377804 5377788 5377783 -
tttcattgagcagtggtttgta

SEQ ID NO: 116517 - DNA, 22 bp, Artificial Sequence
  Synthetic oligonucleotide; TTT chr11 5377780 5377801 5377785 5377780 -
cattgagcagtggtttgtagtt

SEQ ID NO: 116518 - DNA, 22 bp, Artificial Sequence
  Synthetic oligonucleotide; TTC chr11 5377779 5377800 5377784 5377779 -
attgagcagtggtttgtagttc

SEQ ID NO: 116519 - DNA, 22 bp, Artificial Sequence
  Synthetic oligonucleotide; TTG chr11 5377775 5377796 5377780 5377775 -
agcagtggtttgtagttctcct

SEQ ID NO: 116520 - DNA, 22 bp, Artificial Sequence
  Synthetic oligonucleotide; TTT chr11 5377764 5377785 5377769 5377764 -
gtagttctccttgaagaggtcc

SEQ ID NO: 116521 - DNA, 22 bp, Artificial Sequence
  Synthetic oligonucleotide; TTG chr11 5377763 5377784 5377768 5377763 -
tagttctccttgaagaggtcct

SEQ ID NO: 116522 - DNA, 22 bp, Artificial Sequence
  Synthetic oligonucleotide; TTC chr11 5377757 5377778 5377762 5377757 -
tccttgaagaggtccttcacat

SEQ ID NO: 116523 - DNA, 22 bp, Artificial Sequence
  Synthetic oligonucleotide; CTC chr11 5377755 5377776 5377760 5377755 -
cttgaagaggtccttcacatcc

SEQ ID NO: 116524 - DNA, 22 bp, Artificial Sequence
  Synthetic oligonucleotide; CTT chr11 5377752 5377773 5377757 5377752 -
gaagaggtccttcacatccctt

SEQ ID NO: 116525 - DNA, 22 bp, Artificial Sequence
  Synthetic oligonucleotide; TTG chr11 5377751 5377772 5377756 5377751 -
aagaggtccttcacatcccttg

SEQ ID NO: 116526 - DNA, 22 bp, Artificial Sequence
  Synthetic oligonucleotide; CTT chr11 5377740 5377761 5377745 5377740 -
cacatcccttgtaagttggatt

SEQ ID NO: 116527 - DNA, 22 bp, Artificial Sequence
  Synthetic oligonucleotide; TTC chr11 5377739 5377760 5377744 5377739 -
acatcccttgtaagttggattc

SEQ ID NO: 116528 - DNA, 22 bp, Artificial Sequence
  Synthetic oligonucleotide; CTT chr11 5377730 5377751 5377735 5377730 -
gtaagttggattcctaggtatt

SEQ ID NO: 116529 - DNA, 22 bp, Artificial Sequence
  Synthetic oligonucleotide; TTG chr11 5377729 5377750 5377734 5377729 -
taagttggattcctaggtattt

SEQ ID NO: 116530 - DNA, 22 bp, Artificial Sequence
  Synthetic oligonucleotide; TTG chr11 5377722 5377743 5377727 5377722 -
gattcctaggtattttattctc

SEQ ID NO: 116531 - DNA, 22 bp, Artificial Sequence
  Synthetic oligonucleotide; TTC chr11 5377717 5377738 5377722 5377717 -
ctaggtattttattctctttga

SEQ ID NO: 116532 - DNA, 22 bp, Artificial Sequence
  Synthetic oligonucleotide; CTA chr11 5377714 5377735 5377719 5377714 -
ggtattttattctctttgaagc

SEQ ID NO: 116533 - DNA, 22 bp, Artificial Sequence
  Synthetic oligonucleotide; TTT chr11 5377707 5377728 5377712 5377707 -
tattctctttgaagcaattgtg

SEQ ID NO: 116534 - DNA, 22 bp, Artificial Sequence
  Synthetic oligonucleotide; TTT chr11 5377706 5377727 5377711 5377706 -
attctctttgaagcaattgtga

SEQ ID NO: 116535 - DNA, 22 bp, Artificial Sequence
  Synthetic oligonucleotide; TTA chr11 5377705 5377726 5377710 5377705 -
ttctctttgaagcaattgtgaa

SEQ ID NO: 116536 - DNA, 22 bp, Artificial Sequence
  Synthetic oligonucleotide; TTC chr11 5377702 5377723 5377707 5377702 -
tctttgaagcaattgtgaatgg

SEQ ID NO: 116537 - DNA, 22 bp, Artificial Sequence
  Synthetic oligonucleotide; CTC chr11 5377700 5377721 5377705 5377700 -
tttgaagcaattgtgaatggga

SEQ ID NO: 116538 - DNA, 22 bp, Artificial Sequence
  Synthetic oligonucleotide; CTT chr11 5377698 5377719 5377703 5377698 -
tgaagcaattgtgaatgggagt

SEQ ID NO: 116539 - DNA, 22 bp, Artificial Sequence
  Synthetic oligonucleotide; TTT chr11 5377697 5377718 5377702 5377697 -
gaagcaattgtgaatgggagtt

SEQ ID NO: 116540 - DNA, 22 bp, Artificial Sequence
  Synthetic oligonucleotide; TTG chr11 5377696 5377717 5377701 5377696 -
aagcaattgtgaatgggagttc

SEQ ID NO: 116541 - DNA, 22 bp, Artificial Sequence
  Synthetic oligonucleotide; TTG chr11 5377687 5377708 5377692 5377687 -
tgaatgggagttccctcatgat

SEQ ID NO: 116542 - DNA, 22 bp, Artificial Sequence
  Synthetic oligonucleotide; TTC chr11 5377674 5377695 5377679 5377674 -
cctcatgatttggctctctgtt

SEQ ID NO: 116543 - DNA, 22 bp, Artificial Sequence
  Synthetic oligonucleotide; CTC chr11 5377670 5377691 5377675 5377670 -
atgatttggctctctgtttgtc

SEQ ID NO: 116544 - DNA, 22 bp, Artificial Sequence
  Synthetic oligonucleotide; TTT chr11 5377663 5377684 5377668 5377663 -
ggctctctgtttgtctgttatt

SEQ ID NO: 116545 - DNA, 22 bp, Artificial Sequence
  Synthetic oligonucleotide; TTG chr11 5377662 5377683 5377667 5377662 -
gctctctgtttgtctgttattg

SEQ ID NO: 116546 - DNA, 22 bp, Artificial Sequence
  Synthetic oligonucleotide; CTC chr11 5377658 5377679 5377663 5377658 -
tctgtttgtctgttattggtgt

SEQ ID NO: 116547 - DNA, 22 bp, Artificial Sequence
  Synthetic oligonucleotide; CTC chr11 5377656 5377677 5377661 5377656 -
tgtttgtctgttattggtgtat

SEQ ID NO: 116548 - DNA, 22 bp, Artificial Sequence
  Synthetic oligonucleotide; CTG chr11 5377654 5377675 5377659 5377654 -
tttgtctgttattggtgtataa

SEQ ID NO: 116549 - DNA, 22 bp, Artificial Sequence
  Synthetic oligonucleotide; TTT chr11 5377651 5377672 5377656 5377651 -
gtctgttattggtgtataagaa

SEQ ID NO: 116550 - DNA, 22 bp, Artificial Sequence
  Synthetic oligonucleotide; TTG chr11 5377650 5377671 5377655 5377650 -
tctgttattggtgtataagaat

SEQ ID NO: 116551 - DNA, 22 bp, Artificial Sequence
  Synthetic oligonucleotide; CTG chr11 5377646 5377667 5377651 5377646 -
ttattggtgtataagaatgctt

SEQ ID NO: 116552 - DNA, 22 bp, Artificial Sequence
  Synthetic oligonucleotide; TTA chr11 5377643 5377664 5377648 5377643 -
ttggtgtataagaatgcttgtg

SEQ ID NO: 116553 - DNA, 22 bp, Artificial Sequence
  Synthetic oligonucleotide; TTG chr11 5377640 5377661 5377645 5377640 -
gtgtataagaatgcttgtgatt

SEQ ID NO: 116554 - DNA, 22 bp, Artificial Sequence
  Synthetic oligonucleotide; CTT chr11 5377624 5377645 5377629 5377624 -
gtgatttttgcacattggtttt

SEQ ID NO: 116555 - DNA, 22 bp, Artificial Sequence
  Synthetic oligonucleotide; TTG chr11 5377623 5377644 5377628 5377623 -
tgatttttgcacattggttttg

SEQ ID NO: 116556 - DNA, 22 bp, Artificial Sequence
  Synthetic oligonucleotide; TTT chr11 5377617 5377638 5377622 5377617 -
ttgcacattggttttgtatcct

SEQ ID NO: 116557 - DNA, 22 bp, Artificial Sequence
  Synthetic oligonucleotide; TTT chr11 5377616 5377637 5377621 5377616 -
tgcacattggttttgtatcctg

SEQ ID NO: 116558 - DNA, 22 bp, Artificial Sequence
  Synthetic oligonucleotide; TTT chr11 5377615 5377636 5377620 5377615 -
gcacattggttttgtatcctga

SEQ ID NO: 116559 - DNA, 22 bp, Artificial Sequence
  Synthetic oligonucleotide; TTG chr11 5377614 5377635 5377619 5377614 -
cacattggttttgtatcctgag

SEQ ID NO: 116560 - DNA, 22 bp, Artificial Sequence
  Synthetic oligonucleotide; TTG chr11 5377607 5377628 5377612 5377607 -
gttttgtatcctgaggctttgc

SEQ ID NO: 116561 - DNA, 22 bp, Artificial Sequence
  Synthetic oligonucleotide; TTT chr11 5377603 5377624 5377608 5377603 -
tgtatcctgaggctttgctgaa

SEQ ID NO: 116562 - DNA, 22 bp, Artificial Sequence
  Synthetic oligonucleotide; TTT chr11 5377602 5377623 5377607 5377602 -
gtatcctgaggctttgctgaag

SEQ ID NO: 116563 - DNA, 22 bp, Artificial Sequence
  Synthetic oligonucleotide; TTG chr11 5377601 5377622 5377606 5377601 -
tatcctgaggctttgctgaagt

SEQ ID NO: 116564 - DNA, 22 bp, Artificial Sequence
  Synthetic oligonucleotide; CTG chr11 5377594 5377615 5377599 5377594 -
aggctttgctgaagttgcttat

SEQ ID NO: 116565 - DNA, 22 bp, Artificial Sequence
  Synthetic oligonucleotide; CTT chr11 5377588 5377609 5377593 5377588 -
tgctgaagttgcttatcagctt

SEQ ID NO: 116566 - DNA, 22 bp, Artificial Sequence
  Synthetic oligonucleotide; TTT chr11 5377587 5377608 5377592 5377587 -
gctgaagttgcttatcagctta

SEQ ID NO: 116567 - DNA, 22 bp, Artificial Sequence
  Synthetic oligonucleotide; TTG chr11 5377586 5377607 5377591 5377586 -
ctgaagttgcttatcagcttaa

SEQ ID NO: 116568 - DNA, 22 bp, Artificial Sequence
  Synthetic oligonucleotide; CTG chr11 5377583 5377604 5377588 5377583 -
aagttgcttatcagcttaagga

SEQ ID NO: 116569 - DNA, 22 bp, Artificial Sequence
  Synthetic oligonucleotide; TTG chr11 5377577 5377598 5377582 5377577 -
cttatcagcttaaggagatttt

SEQ ID NO: 116570 - DNA, 22 bp, Artificial Sequence
  Synthetic oligonucleotide; CTT chr11 5377574 5377595 5377579 5377574 -
atcagcttaaggagattttggg

SEQ ID NO: 116571 - DNA, 22 bp, Artificial Sequence
  Synthetic oligonucleotide; TTA chr11 5377573 5377594 5377578 5377573 -
tcagcttaaggagattttgggc

SEQ ID NO: 116572 - DNA, 22 bp, Artificial Sequence
  Synthetic oligonucleotide; CTT chr11 5377566 5377587 5377571 5377566 -
aaggagattttgggctgagaca

SEQ ID NO: 116573 - DNA, 22 bp, Artificial Sequence
  Synthetic oligonucleotide; TTA chr11 5377565 5377586 5377570 5377565 -
aggagattttgggctgagacaa

SEQ ID NO: 116574 - DNA, 22 bp, Artificial Sequence
  Synthetic oligonucleotide; TTT chr11 5377556 5377577 5377561 5377556 -
tgggctgagacaagggggtttt

SEQ ID NO: 116575 - DNA, 22 bp, Artificial Sequence
  Synthetic oligonucleotide; TTT chr11 5377555 5377576 5377560 5377555 -
gggctgagacaagggggttttc

SEQ ID NO: 116576 - DNA, 22 bp, Artificial Sequence
  Synthetic oligonucleotide; TTG chr11 5377554 5377575 5377559 5377554 -
ggctgagacaagggggttttct

SEQ ID NO: 116577 - DNA, 22 bp, Artificial Sequence
  Synthetic oligonucleotide; CTG chr11 5377549 5377570 5377554 5377549 -
agacaagggggttttctagata

SEQ ID NO: 116578 - DNA, 22 bp, Artificial Sequence
  Synthetic oligonucleotide; TTT chr11 5377535 5377556 5377540 5377535 -
tctagatatacaatcatgtcgt

SEQ ID NO: 116579 - DNA, 22 bp, Artificial Sequence
  Synthetic oligonucleotide; TTT chr11 5377534 5377555 5377539 5377534 -
ctagatatacaatcatgtcgtc

SEQ ID NO: 116580 - DNA, 22 bp, Artificial Sequence
  Synthetic oligonucleotide; TTC chr11 5377533 5377554 5377538 5377533 -
tagatatacaatcatgtcgtct

SEQ ID NO: 116581 - DNA, 22 bp, Artificial Sequence
  Synthetic oligonucleotide; CTA chr11 5377531 5377552 5377536 5377531 -
gatatacaatcatgtcgtctgc

SEQ ID NO: 116582 - DNA, 22 bp, Artificial Sequence
  Synthetic oligonucleotide; CTG chr11 5377510 5377531 5377515 5377510 -
caaacagggacaatttgacttc

SEQ ID NO: 116583 - DNA, 22 bp, Artificial Sequence
  Synthetic oligonucleotide; TTT chr11 5377494 5377515 5377499 5377494 -
gacttcctcttttcttaattga

SEQ ID NO: 116584 - DNA, 22 bp, Artificial Sequence
  Synthetic oligonucleotide; TTG chr11 5377493 5377514 5377498 5377493 -
acttcctcttttcttaattgaa

SEQ ID NO: 116585 - DNA, 22 bp, Artificial Sequence
  Synthetic oligonucleotide; CTT chr11 5377489 5377510 5377494 5377489 -
cctcttttcttaattgaatacc

SEQ ID NO: 116586 - DNA, 22 bp, Artificial Sequence
  Synthetic oligonucleotide; TTC chr11 5377488 5377509 5377493 5377488 -
ctcttttcttaattgaataccc

SEQ ID NO: 116587 - DNA, 22 bp, Artificial Sequence
  Synthetic oligonucleotide; CTC chr11 5377485 5377506 5377490 5377485 -
ttttcttaattgaatacccttt

SEQ ID NO: 116588 - DNA, 22 bp, Artificial Sequence
  Synthetic oligonucleotide; CTT chr11 5377483 5377504 5377488 5377483 -
ttcttaattgaatacccttttt

SEQ ID NO: 116589 - DNA, 22 bp, Artificial Sequence
  Synthetic oligonucleotide; TTT chr11 5377482 5377503 5377487 5377482 -
tcttaattgaataccctttttt

SEQ ID NO: 116590 - DNA, 22 bp, Artificial Sequence
  Synthetic oligonucleotide; TTT chr11 5377481 5377502 5377486 5377481 -
cttaattgaatacccttttttc

SEQ ID NO: 116591 - DNA, 22 bp, Artificial Sequence
  Synthetic oligonucleotide; TTC chr11 5377480 5377501 5377485 5377480 -
ttaattgaatacccttttttcc

SEQ ID NO: 116592 - DNA, 22 bp, Artificial Sequence
  Synthetic oligonucleotide; CTT chr11 5377478 5377499 5377483 5377478 -
aattgaatacccttttttcctg

SEQ ID NO: 116593 - DNA, 22 bp, Artificial Sequence
  Synthetic oligonucleotide; TTA chr11 5377477 5377498 5377482 5377477 -
attgaatacccttttttcctgt

SEQ ID NO: 116594 - DNA, 22 bp, Artificial Sequence
  Synthetic oligonucleotide; TTG chr11 5377473 5377494 5377478 5377473 -
aatacccttttttcctgtcttc

SEQ ID NO: 116595 - DNA, 22 bp, Artificial Sequence
  Synthetic oligonucleotide; CTT chr11 5377464 5377485 5377469 5377464 -
ttttcctgtcttctgcctaatt

SEQ ID NO: 116596 - DNA, 22 bp, Artificial Sequence
  Synthetic oligonucleotide; TTT chr11 5377463 5377484 5377468 5377463 -
tttcctgtcttctgcctaattg

SEQ ID NO: 116597 - DNA, 22 bp, Artificial Sequence
  Synthetic oligonucleotide; TTT chr11 5377462 5377483 5377467 5377462 -
ttcctgtcttctgcctaattgc

SEQ ID NO: 116598 - DNA, 22 bp, Artificial Sequence
  Synthetic oligonucleotide; TTT chr11 5377461 5377482 5377466 5377461 -
tcctgtcttctgcctaattgcc

SEQ ID NO: 116599 - DNA, 22 bp, Artificial Sequence
  Synthetic oligonucleotide; TTT chr11 5377460 5377481 5377465 5377460 -
cctgtcttctgcctaattgccc

SEQ ID NO: 116600 - DNA, 22 bp, Artificial Sequence
  Synthetic oligonucleotide; TTC chr11 5377459 5377480 5377464 5377459 -
ctgtcttctgcctaattgccct

SEQ ID NO: 116601 - DNA, 22 bp, Artificial Sequence
  Synthetic oligonucleotide; CTG chr11 5377456 5377477 5377461 5377456 -
tcttctgcctaattgccctggc

SEQ ID NO: 116602 - DNA, 22 bp, Artificial Sequence
  Synthetic oligonucleotide; CTT chr11 5377452 5377473 5377457 5377452 -
ctgcctaattgccctggccaga

SEQ ID NO: 116603 - DNA, 22 bp, Artificial Sequence
  Synthetic oligonucleotide; TTC chr11 5377451 5377472 5377456 5377451 -
tgcctaattgccctggccagaa

SEQ ID NO: 116604 - DNA, 22 bp, Artificial Sequence
  Synthetic oligonucleotide; CTG chr11 5377449 5377470 5377454 5377449 -
cctaattgccctggccagaact

SEQ ID NO: 116605 - DNA, 22 bp, Artificial Sequence
  Synthetic oligonucleotide; CTA chr11 5377445 5377466 5377450 5377445 -
attgccctggccagaacttcca

SEQ ID NO: 116606 - DNA, 22 bp, Artificial Sequence
  Synthetic oligonucleotide; TTG chr11 5377441 5377462 5377446 5377441 -
ccctggccagaacttccaacac

SEQ ID NO: 116607 - DNA, 22 bp, Artificial Sequence
  Synthetic oligonucleotide; CTG chr11 5377436 5377457 5377441 5377436 -
gccagaacttccaacactatgt

SEQ ID NO: 116608 - DNA, 22 bp, Artificial Sequence
  Synthetic oligonucleotide; CTT chr11 5377426 5377447 5377431 5377426 -
ccaacactatgttgaataggag

SEQ ID NO: 116609 - DNA, 22 bp, Artificial Sequence
  Synthetic oligonucleotide; TTC chr11 5377425 5377446 5377430 5377425 -
caacactatgttgaataggagt

SEQ ID NO: 116610 - DNA, 22 bp, Artificial Sequence
  Synthetic oligonucleotide; CTA chr11 5377417 5377438 5377422 5377417 -
tgttgaataggagtagtgagag

SEQ ID NO: 116611 - DNA, 22 bp, Artificial Sequence
  Synthetic oligonucleotide; TTG chr11 5377412 5377433 5377417 5377412 -
aataggagtagtgagagagggc

SEQ ID NO: 116612 - DNA, 22 bp, Artificial Sequence
  Synthetic oligonucleotide; CTG chr11 5377383 5377404 5377388 5377383 -
tcttgtgccagtttacaaaggg

SEQ ID NO: 116613 - DNA, 22 bp, Artificial Sequence
  Synthetic oligonucleotide; CTT chr11 5377379 5377400 5377384 5377379 -
gtgccagtttacaaagggaatg

SEQ ID NO: 116614 - DNA, 22 bp, Artificial Sequence
  Synthetic oligonucleotide; TTG chr11 5377378 5377399 5377383 5377378 -
tgccagtttacaaagggaatgc

SEQ ID NO: 116615 - DNA, 22 bp, Artificial Sequence
  Synthetic oligonucleotide; TTT chr11 5377369 5377390 5377374 5377369 -
acaaagggaatgcttccagttt

SEQ ID NO: 116616 - DNA, 22 bp, Artificial Sequence
  Synthetic oligonucleotide; TTA chr11 5377368 5377389 5377373 5377368 -
caaagggaatgcttccagtttt

SEQ ID NO: 116617 - DNA, 22 bp, Artificial Sequence
  Synthetic oligonucleotide; CTT chr11 5377354 5377375 5377359 5377354 -
ccagtttttgcccattcagtat

SEQ ID NO: 116618 - DNA, 22 bp, Artificial Sequence
  Synthetic oligonucleotide; TTC chr11 5377353 5377374 5377358 5377353 -
cagtttttgcccattcagtatg

SEQ ID NO: 116619 - DNA, 22 bp, Artificial Sequence
  Synthetic oligonucleotide; TTT chr11 5377347 5377368 5377352 5377347 -
ttgcccattcagtatgatattg

SEQ ID NO: 116620 - DNA, 22 bp, Artificial Sequence
  Synthetic oligonucleotide; TTT chr11 5377346 5377367 5377351 5377346 -
tgcccattcagtatgatattgg

SEQ ID NO: 116621 - DNA, 22 bp, Artificial Sequence
  Synthetic oligonucleotide; TTT chr11 5377345 5377366 5377350 5377345 -
gcccattcagtatgatattggc

SEQ ID NO: 116622 - DNA, 22 bp, Artificial Sequence
  Synthetic oligonucleotide; TTG chr11 5377344 5377365 5377349 5377344 -
cccattcagtatgatattggct

SEQ ID NO: 116623 - DNA, 22 bp, Artificial Sequence
  Synthetic oligonucleotide; TTC chr11 5377337 5377358 5377342 5377337 -
agtatgatattggctgtgggtt

SEQ ID NO: 116624 - DNA, 22 bp, Artificial Sequence
  Synthetic oligonucleotide; TTG chr11 5377325 5377346 5377330 5377325 -
gctgtgggtttgtcatagatag

SEQ ID NO: 116625 - DNA, 22 bp, Artificial Sequence
  Synthetic oligonucleotide; CTG chr11 5377321 5377342 5377326 5377321 -
tgggtttgtcatagatagctct

SEQ ID NO: 116626 - DNA, 22 bp, Artificial Sequence
  Synthetic oligonucleotide; TTT chr11 5377314 5377335 5377319 5377314 -
gtcatagatagctcttattatt

SEQ ID NO: 116627 - DNA, 22 bp, Artificial Sequence
  Synthetic oligonucleotide; TTG chr11 5377313 5377334 5377318 5377313 -
tcatagatagctcttattattt

SEQ ID NO: 116628 - DNA, 22 bp, Artificial Sequence
  Synthetic oligonucleotide; CTC chr11 5377300 5377321 5377305 5377300 -
ttattattttgagatatgtccc

SEQ ID NO: 116629 - DNA, 22 bp, Artificial Sequence
  Synthetic oligonucleotide; CTT chr11 5377298 5377319 5377303 5377298 -
attattttgagatatgtcccat

SEQ ID NO: 116630 - DNA, 22 bp, Artificial Sequence
  Synthetic oligonucleotide; TTA chr11 5377297 5377318 5377302 5377297 -
ttattttgagatatgtcccatc

SEQ ID NO: 116631 - DNA, 22 bp, Artificial Sequence
  Synthetic oligonucleotide; TTA chr11 5377294 5377315 5377299 5377294 -
ttttgagatatgtcccatcaat

SEQ ID NO: 116632 - DNA, 22 bp, Artificial Sequence
  Synthetic oligonucleotide; TTT chr11 5377291 5377312 5377296 5377291 -
tgagatatgtcccatcaatacc

SEQ ID NO: 116633 - DNA, 22 bp, Artificial Sequence
  Synthetic oligonucleotide; TTT chr11 5377290 5377311 5377295 5377290 -
gagatatgtcccatcaatacct

SEQ ID NO: 116634 - DNA, 22 bp, Artificial Sequence
  Synthetic oligonucleotide; TTG chr11 5377289 5377310 5377294 5377289 -
agatatgtcccatcaataccta

SEQ ID NO: 116635 - DNA, 22 bp, Artificial Sequence
  Synthetic oligonucleotide; CTA chr11 5377267 5377288 5377272 5377267 -
atttattgaaagtttttagcat

SEQ ID NO: 116636 - DNA, 22 bp, Artificial Sequence
  Synthetic oligonucleotide; TTT chr11 5377263 5377284 5377268 5377263 -
attgaaagtttttagcatgaag

SEQ ID NO: 116637 - DNA, 22 bp, Artificial Sequence
  Synthetic oligonucleotide; TTA chr11 5377262 5377283 5377267 5377262 -
ttgaaagtttttagcatgaagg

SEQ ID NO: 116638 - DNA, 22 bp, Artificial Sequence
  Synthetic oligonucleotide; TTG chr11 5377259 5377280 5377264 5377259 -
aaagtttttagcatgaagggtt

SEQ ID NO: 116639 - DNA, 22 bp, Artificial Sequence
  Synthetic oligonucleotide; TTT chr11 5377252 5377273 5377257 5377252 -
ttagcatgaagggttgttgaat

SEQ ID NO: 116640 - DNA, 22 bp, Artificial Sequence
  Synthetic oligonucleotide; TTT chr11 5377251 5377272 5377256 5377251 -
tagcatgaagggttgttgaatt

SEQ ID NO: 116641 - DNA, 22 bp, Artificial Sequence
  Synthetic oligonucleotide; TTT chr11 5377250 5377271 5377255 5377250 -
agcatgaagggttgttgaattt

SEQ ID NO: 116642 - DNA, 22 bp, Artificial Sequence
  Synthetic oligonucleotide; TTA chr11 5377249 5377270 5377254 5377249 -
gcatgaagggttgttgaatttt

SEQ ID NO: 116643 - DNA, 22 bp, Artificial Sequence
  Synthetic oligonucleotide; TTG chr11 5377236 5377257 5377241 5377236 -
ttgaattttgtcaaaggccttt

SEQ ID NO: 116644 - DNA, 22 bp, Artificial Sequence
  Synthetic oligonucleotide; TTG chr11 5377233 5377254 5377238 5377233 -
aattttgtcaaaggccttttct

SEQ ID NO: 116645 - DNA, 22 bp, Artificial Sequence
  Synthetic oligonucleotide; TTT chr11 5377228 5377249 5377233 5377228 -
tgtcaaaggccttttctgcatc

SEQ ID NO: 116646 - DNA, 22 bp, Artificial Sequence
  Synthetic oligonucleotide; TTT chr11 5377227 5377248 5377232 5377227 -
gtcaaaggccttttctgcatct

SEQ ID NO: 116647 - DNA, 22 bp, Artificial Sequence
  Synthetic oligonucleotide; TTG chr11 5377226 5377247 5377231 5377226 -
tcaaaggccttttctgcatcta

SEQ ID NO: 116648 - DNA, 22 bp, Artificial Sequence
  Synthetic oligonucleotide; CTT chr11 5377215 5377236 5377220 5377215 -
ttctgcatctattgagataatc

SEQ ID NO: 116649 - DNA, 22 bp, Artificial Sequence
  Synthetic oligonucleotide; TTT chr11 5377214 5377235 5377219 5377214 -
tctgcatctattgagataatca

SEQ ID NO: 116650 - DNA, 22 bp, Artificial Sequence
  Synthetic oligonucleotide; TTT chr11 5377213 5377234 5377218 5377213 -
ctgcatctattgagataatcat

SEQ ID NO: 116651 - DNA, 22 bp, Artificial Sequence
  Synthetic oligonucleotide; TTC chr11 5377212 5377233 5377217 5377212 -
tgcatctattgagataatcatg

SEQ ID NO: 116652 - DNA, 22 bp, Artificial Sequence
  Synthetic oligonucleotide; CTG chr11 5377210 5377231 5377215 5377210 -
catctattgagataatcatgtg

SEQ ID NO: 116653 - DNA, 22 bp, Artificial Sequence
  Synthetic oligonucleotide; CTA chr11 5377204 5377225 5377209 5377204 -
ttgagataatcatgtggttttt

SEQ ID NO: 116654 - DNA, 22 bp, Artificial Sequence
  Synthetic oligonucleotide; TTG chr11 5377201 5377222 5377206 5377201 -
agataatcatgtggtttttgtc

SEQ ID NO: 116655 - DNA, 22 bp, Artificial Sequence
  Synthetic oligonucleotide; TTT chr11 5377184 5377205 5377189 5377184 -
ttgtctttggttctgtttatat

SEQ ID NO: 116656 - DNA, 22 bp, Artificial Sequence
  Synthetic oligonucleotide; TTT chr11 5377183 5377204 5377188 5377183 -
tgtctttggttctgtttatatg

SEQ ID NO: 116657 - DNA, 22 bp, Artificial Sequence
  Synthetic oligonucleotide; TTT chr11 5377182 5377203 5377187 5377182 -
gtctttggttctgtttatatgc

SEQ ID NO: 116658 - DNA, 22 bp, Artificial Sequence
  Synthetic oligonucleotide; TTG chr11 5377181 5377202 5377186 5377181 -
tctttggttctgtttatatgct

SEQ ID NO: 116659 - DNA, 22 bp, Artificial Sequence
  Synthetic oligonucleotide; CTT chr11 5377177 5377198 5377182 5377177 -
tggttctgtttatatgctggat

SEQ ID NO: 116660 - DNA, 22 bp, Artificial Sequence
  Synthetic oligonucleotide; TTT chr11 5377176 5377197 5377181 5377176 -
ggttctgtttatatgctggatt

SEQ ID NO: 116661 - DNA, 22 bp, Artificial Sequence
  Synthetic oligonucleotide; TTG chr11 5377175 5377196 5377180 5377175 -
gttctgtttatatgctggatta

SEQ ID NO: 116662 - DNA, 22 bp, Artificial Sequence
  Synthetic oligonucleotide; TTC chr11 5377171 5377192 5377176 5377171 -
tgtttatatgctggattacatt

SEQ ID NO: 116663 - DNA, 22 bp, Artificial Sequence
  Synthetic oligonucleotide; CTG chr11 5377169 5377190 5377174 5377169 -
tttatatgctggattacattta

SEQ ID NO: 116664 - DNA, 22 bp, Artificial Sequence
  Synthetic oligonucleotide; TTT chr11 5377166 5377187 5377171 5377166 -
atatgctggattacatttattg

SEQ ID NO: 116665 - DNA, 22 bp, Artificial Sequence
  Synthetic oligonucleotide; TTA chr11 5377165 5377186 5377170 5377165 -
tatgctggattacatttattga

SEQ ID NO: 116666 - DNA, 22 bp, Artificial Sequence
  Synthetic oligonucleotide; CTG chr11 5377158 5377179 5377163 5377158 -
gattacatttattgatttgcat

SEQ ID NO: 116667 - DNA, 22 bp, Artificial Sequence
  Synthetic oligonucleotide; TTA chr11 5377153 5377174 5377158 5377153 -
catttattgatttgcatatatt

SEQ ID NO: 116668 - DNA, 22 bp, Artificial Sequence
  Synthetic oligonucleotide; TTT chr11 5377148 5377169 5377153 5377148 -
attgatttgcatatattgaacc

SEQ ID NO: 116669 - DNA, 22 bp, Artificial Sequence
  Synthetic oligonucleotide; TTA chr11 5377147 5377168 5377152 5377147 -
ttgatttgcatatattgaacca

SEQ ID NO: 116670 - DNA, 22 bp, Artificial Sequence
  Synthetic oligonucleotide; TTG chr11 5377144 5377165 5377149 5377144 -
atttgcatatattgaaccagcc

SEQ ID NO: 116671 - DNA, 22 bp, Artificial Sequence
  Synthetic oligonucleotide; TTT chr11 5377140 5377161 5377145 5377140 -
gcatatattgaaccagccttgc

SEQ ID NO: 116672 - DNA, 22 bp, Artificial Sequence
  Synthetic oligonucleotide; TTG chr11 5377139 5377160 5377144 5377139 -
catatattgaaccagccttgca

SEQ ID NO: 116673 - DNA, 22 bp, Artificial Sequence
  Synthetic oligonucleotide; TTG chr11 5377130 5377151 5377135 5377130 -
aaccagccttgcatcccaggga

SEQ ID NO: 116674 - DNA, 22 bp, Artificial Sequence
  Synthetic oligonucleotide; CTT chr11 5377120 5377141 5377125 5377120 -
gcatcccagggatgaagtccac

SEQ ID NO: 116675 - DNA, 22 bp, Artificial Sequence
  Synthetic oligonucleotide; TTG chr11 5377119 5377140 5377124 5377119 -
catcccagggatgaagtccact

SEQ ID NO: 116676 - DNA, 22 bp, Artificial Sequence
  Synthetic oligonucleotide; CTT chr11 5377096 5377117 5377101 5377096 -
gatcatcgtggataagcttttt

SEQ ID NO: 116677 - DNA, 22 bp, Artificial Sequence
  Synthetic oligonucleotide; TTG chr11 5377095 5377116 5377100 5377095 -
atcatcgtggataagctttttg

SEQ ID NO: 116678 - DNA, 22 bp, Artificial Sequence
  Synthetic oligonucleotide; CTT chr11 5377077 5377098 5377082 5377077 -
tttgatgtgctgctggattcgg

SEQ ID NO: 116679 - DNA, 22 bp, Artificial Sequence
  Synthetic oligonucleotide; TTT chr11 5377076 5377097 5377081 5377076 -
ttgatgtgctgctggattcggt

SEQ ID NO: 116680 - DNA, 22 bp, Artificial Sequence
  Synthetic oligonucleotide; TTT chr11 5377075 5377096 5377080 5377075 -
tgatgtgctgctggattcggtt

SEQ ID NO: 116681 - DNA, 22 bp, Artificial Sequence
  Synthetic oligonucleotide; TTT chr11 5377074 5377095 5377079 5377074 -
gatgtgctgctggattcggttt

SEQ ID NO: 116682 - DNA, 22 bp, Artificial Sequence
  Synthetic oligonucleotide; TTG chr11 5377073 5377094 5377078 5377073 -
atgtgctgctggattcggtttg

SEQ ID NO: 116683 - DNA, 22 bp, Artificial Sequence
  Synthetic oligonucleotide; CTG chr11 5377065 5377086 5377070 5377065 -
ctggattcggtttgccagtatt

SEQ ID NO: 116684 - DNA, 22 bp, Artificial Sequence
  Synthetic oligonucleotide; CTG chr11 5377062 5377083 5377067 5377062 -
gattcggtttgccagtatttta

SEQ ID NO: 116685 - DNA, 22 bp, Artificial Sequence
  Synthetic oligonucleotide; TTC chr11 5377057 5377078 5377062 5377057 -
ggtttgccagtattttattgag

SEQ ID NO: 116686 - DNA, 22 bp, Artificial Sequence
  Synthetic oligonucleotide; TTT chr11 5377052 5377073 5377057 5377052 -
gccagtattttattgaggattt

SEQ ID NO: 116687 - DNA, 22 bp, Artificial Sequence
  Synthetic oligonucleotide; TTG chr11 5377051 5377072 5377056 5377051 -
ccagtattttattgaggatttt

SEQ ID NO: 116688 - DNA, 22 bp, Artificial Sequence
  Synthetic oligonucleotide; TTT chr11 5377042 5377063 5377047 5377042 -
tattgaggatttttgcatcgat

SEQ ID NO: 116689 - DNA, 22 bp, Artificial Sequence
  Synthetic oligonucleotide; TTT chr11 5377041 5377062 5377046 5377041 -
attgaggatttttgcatcgatg

SEQ ID NO: 116690 - DNA, 22 bp, Artificial Sequence
  Synthetic oligonucleotide; TTA chr11 5377040 5377061 5377045 5377040 -
ttgaggatttttgcatcgatgt

SEQ ID NO: 116691 - DNA, 22 bp, Artificial Sequence
  Synthetic oligonucleotide; TTG chr11 5377037 5377058 5377042 5377037 -
aggatttttgcatcgatgttca

SEQ ID NO: 116692 - DNA, 22 bp, Artificial Sequence
  Synthetic oligonucleotide; TTT chr11 5377030 5377051 5377035 5377030 -
ttgcatcgatgttcatcaggga

SEQ ID NO: 116693 - DNA, 22 bp, Artificial Sequence
  Synthetic oligonucleotide; TTT chr11 5377029 5377050 5377034 5377029 -
tgcatcgatgttcatcagggat

SEQ ID NO: 116694 - DNA, 22 bp, Artificial Sequence
  Synthetic oligonucleotide; TTT chr11 5377028 5377049 5377033 5377028 -
gcatcgatgttcatcagggata

SEQ ID NO: 116695 - DNA, 22 bp, Artificial Sequence
  Synthetic oligonucleotide; TTG chr11 5377027 5377048 5377032 5377027 -
catcgatgttcatcagggatat

SEQ ID NO: 116696 - DNA, 22 bp, Artificial Sequence
  Synthetic oligonucleotide; TTC chr11 5377016 5377037 5377021 5377016 -
atcagggatattcatctaaaat

SEQ ID NO: 116697 - DNA, 22 bp, Artificial Sequence
  Synthetic oligonucleotide; TTC chr11 5377003 5377024 5377008 5377003 -
atctaaaattctcttttttggt

SEQ ID NO: 116698 - DNA, 22 bp, Artificial Sequence
  Synthetic oligonucleotide; CTA chr11 5376998 5377019 5377003 5376998 -
aaattctcttttttggttgtgt

SEQ ID NO: 116699 - DNA, 22 bp, Artificial Sequence
  Synthetic oligonucleotide; TTC chr11 5376992 5377013 5376997 5376992 -
tcttttttggttgtgtctcttt

SEQ ID NO: 116700 - DNA, 22 bp, Artificial Sequence
  Synthetic oligonucleotide; CTC chr11 5376990 5377011 5376995 5376990 -
ttttttggttgtgtctctttct

SEQ ID NO: 116701 - DNA, 22 bp, Artificial Sequence
  Synthetic oligonucleotide; CTT chr11 5376988 5377009 5376993 5376988 -
ttttggttgtgtctctttctgg

SEQ ID NO: 116702 - DNA, 22 bp, Artificial Sequence
  Synthetic oligonucleotide; TTT chr11 5376987 5377008 5376992 5376987 -
tttggttgtgtctctttctggc

SEQ ID NO: 116703 - DNA, 22 bp, Artificial Sequence
  Synthetic oligonucleotide; TTT chr11 5376986 5377007 5376991 5376986 -
ttggttgtgtctctttctggct

SEQ ID NO: 116704 - DNA, 22 bp, Artificial Sequence
  Synthetic oligonucleotide; TTT chr11 5376985 5377006 5376990 5376985 -
tggttgtgtctctttctggctt

SEQ ID NO: 116705 - DNA, 22 bp, Artificial Sequence
  Synthetic oligonucleotide; TTT chr11 5376984 5377005 5376989 5376984 -
ggttgtgtctctttctggcttt

SEQ ID NO: 116706 - DNA, 22 bp, Artificial Sequence
  Synthetic oligonucleotide; TTG chr11 5376983 5377004 5376988 5376983 -
gttgtgtctctttctggctttg

SEQ ID NO: 116707 - DNA, 22 bp, Artificial Sequence
  Synthetic oligonucleotide; TTG chr11 5376979 5377000 5376984 5376979 -
tgtctctttctggctttggtat

SEQ ID NO: 116708 - DNA, 22 bp, Artificial Sequence
  Synthetic oligonucleotide; CTC chr11 5376973 5376994 5376978 5376973 -
tttctggctttggtattaggat

SEQ ID NO: 116709 - DNA, 22 bp, Artificial Sequence
  Synthetic oligonucleotide; CTT chr11 5376971 5376992 5376976 5376971 -
tctggctttggtattaggatga

SEQ ID NO: 116710 - DNA, 22 bp, Artificial Sequence
  Synthetic oligonucleotide; TTT chr11 5376970 5376991 5376975 5376970 -
ctggctttggtattaggatgat

SEQ ID NO: 116711 - DNA, 22 bp, Artificial Sequence
  Synthetic oligonucleotide; TTC chr11 5376969 5376990 5376974 5376969 -
tggctttggtattaggatgatg

SEQ ID NO: 116712 - DNA, 22 bp, Artificial Sequence
  Synthetic oligonucleotide; CTG chr11 5376967 5376988 5376972 5376967 -
gctttggtattaggatgatgct

SEQ ID NO: 116713 - DNA, 22 bp, Artificial Sequence
  Synthetic oligonucleotide; CTT chr11 5376963 5376984 5376968 5376963 -
tggtattaggatgatgctggcc

SEQ ID NO: 116714 - DNA, 22 bp, Artificial Sequence
  Synthetic oligonucleotide; TTT chr11 5376962 5376983 5376967 5376962 -
ggtattaggatgatgctggcct

SEQ ID NO: 116715 - DNA, 22 bp, Artificial Sequence
  Synthetic oligonucleotide; TTG chr11 5376961 5376982 5376966 5376961 -
gtattaggatgatgctggcctc

SEQ ID NO: 116716 - DNA, 22 bp, Artificial Sequence
  Synthetic oligonucleotide; TTA chr11 5376955 5376976 5376960 5376955 -
ggatgatgctggcctcataaaa

SEQ ID NO: 116717 - DNA, 22 bp, Artificial Sequence
  Synthetic oligonucleotide; CTG chr11 5376944 5376965 5376949 5376944 -
gcctcataaaatgagttaggga

SEQ ID NO: 116718 - DNA, 22 bp, Artificial Sequence
  Synthetic oligonucleotide; CTC chr11 5376939 5376960 5376944 5376939 -
ataaaatgagttagggaggatt

SEQ ID NO: 116719 - DNA, 22 bp, Artificial Sequence
  Synthetic oligonucleotide; TTA chr11 5376926 5376947 5376931 5376926 -
gggaggattccttctttttctg

SEQ ID NO: 116720 - DNA, 22 bp, Artificial Sequence
  Synthetic oligonucleotide; TTC chr11 5376916 5376937 5376921 5376916 -
cttctttttctgttgattggaa

SEQ ID NO: 116721 - DNA, 22 bp, Artificial Sequence
  Synthetic oligonucleotide; CTT chr11 5376913 5376934 5376918 5376913 -
ctttttctgttgattggaatag

SEQ ID NO: 116722 - DNA, 22 bp, Artificial Sequence
  Synthetic oligonucleotide; TTC chr11 5376912 5376933 5376917 5376912 -
tttttctgttgattggaatagt

SEQ ID NO: 116723 - DNA, 22 bp, Artificial Sequence
  Synthetic oligonucleotide; CTT chr11 5376910 5376931 5376915 5376910 -
tttctgttgattggaatagttt

SEQ ID NO: 116724 - DNA, 22 bp, Artificial Sequence
  Synthetic oligonucleotide; TTT chr11 5376909 5376930 5376914 5376909 -
ttctgttgattggaatagtttc

SEQ ID NO: 116725 - DNA, 22 bp, Artificial Sequence
  Synthetic oligonucleotide; TTT chr11 5376908 5376929 5376913 5376908 -
tctgttgattggaatagtttca

SEQ ID NO: 116726 - DNA, 22 bp, Artificial Sequence
  Synthetic oligonucleotide; TTT chr11 5376907 5376928 5376912 5376907 -
ctgttgattggaatagtttcag

SEQ ID NO: 116727 - DNA, 22 bp, Artificial Sequence
  Synthetic oligonucleotide; TTC chr11 5376906 5376927 5376911 5376906 -
tgttgattggaatagtttcaga

SEQ ID NO: 116728 - DNA, 22 bp, Artificial Sequence
  Synthetic oligonucleotide; CTG chr11 5376904 5376925 5376909 5376904 -
ttgattggaatagtttcagaag

SEQ ID NO: 116729 - DNA, 22 bp, Artificial Sequence
  Synthetic oligonucleotide; TTG chr11 5376901 5376922 5376906 5376901 -
attggaatagtttcagaaggaa

SEQ ID NO: 116730 - DNA, 22 bp, Artificial Sequence
  Synthetic oligonucleotide; TTG chr11 5376897 5376918 5376902 5376897 -
gaatagtttcagaaggaatggt

SEQ ID NO: 116731 - DNA, 22 bp, Artificial Sequence
  Synthetic oligonucleotide; TTT chr11 5376888 5376909 5376893 5376888 -
cagaaggaatggtaccaattcc

SEQ ID NO: 116732 - DNA, 22 bp, Artificial Sequence
  Synthetic oligonucleotide; TTC chr11 5376887 5376908 5376892 5376887 -
agaaggaatggtaccaattcct

SEQ ID NO: 116733 - DNA, 22 bp, Artificial Sequence
  Synthetic oligonucleotide; TTC chr11 5376867 5376888 5376872 5376867 -
ctccttgtacctctgttagaat

SEQ ID NO: 116734 - DNA, 22 bp, Artificial Sequence
  Synthetic oligonucleotide; CTC chr11 5376864 5376885 5376869 5376864 -
cttgtacctctgttagaatttg

SEQ ID NO: 116735 - DNA, 22 bp, Artificial Sequence
  Synthetic oligonucleotide; CTT chr11 5376861 5376882 5376866 5376861 -
gtacctctgttagaatttggct

SEQ ID NO: 116736 - DNA, 22 bp, Artificial Sequence
  Synthetic oligonucleotide; TTG chr11 5376860 5376881 5376865 5376860 -
tacctctgttagaatttggctg

SEQ ID NO: 116737 - DNA, 22 bp, Artificial Sequence
  Synthetic oligonucleotide; CTC chr11 5376854 5376875 5376859 5376854 -
tgttagaatttggctgtgaatc

SEQ ID NO: 116738 - DNA, 22 bp, Artificial Sequence
  Synthetic oligonucleotide; CTG chr11 5376852 5376873 5376857 5376852 -
ttagaatttggctgtgaatcca

SEQ ID NO: 116739 - DNA, 22 bp, Artificial Sequence
  Synthetic oligonucleotide; TTA chr11 5376849 5376870 5376854 5376849 -
gaatttggctgtgaatccatct

SEQ ID NO: 116740 - DNA, 22 bp, Artificial Sequence
  Synthetic oligonucleotide; TTT chr11 5376843 5376864 5376848 5376843 -
ggctgtgaatccatctggtcct

SEQ ID NO: 116741 - DNA, 22 bp, Artificial Sequence
  Synthetic oligonucleotide; TTG chr11 5376842 5376863 5376847 5376842 -
gctgtgaatccatctggtcctg

SEQ ID NO: 116742 - DNA, 22 bp, Artificial Sequence
  Synthetic oligonucleotide; CTG chr11 5376838 5376859 5376843 5376838 -
tgaatccatctggtcctggact

SEQ ID NO: 116743 - DNA, 22 bp, Artificial Sequence
  Synthetic oligonucleotide; CTG chr11 5376826 5376847 5376831 5376826 -
gtcctggactctttttggttgg

SEQ ID NO: 116744 - DNA, 22 bp, Artificial Sequence
  Synthetic oligonucleotide; CTG chr11 5376820 5376841 5376825 5376820 -
gactctttttggttggtaagct

SEQ ID NO: 116745 - DNA, 22 bp, Artificial Sequence
  Synthetic oligonucleotide; CTC chr11 5376815 5376836 5376820 5376815 -
tttttggttggtaagctattga

SEQ ID NO: 116746 - DNA, 22 bp, Artificial Sequence
  Synthetic oligonucleotide; CTT chr11 5376813 5376834 5376818 5376813 -
tttggttggtaagctattgatt

SEQ ID NO: 116747 - DNA, 22 bp, Artificial Sequence
  Synthetic oligonucleotide; TTT chr11 5376812 5376833 5376817 5376812 -
ttggttggtaagctattgatta

SEQ ID NO: 116748 - DNA, 22 bp, Artificial Sequence
  Synthetic oligonucleotide; TTT chr11 5376811 5376832 5376816 5376811 -
tggttggtaagctattgattat

SEQ ID NO: 116749 - DNA, 22 bp, Artificial Sequence
  Synthetic oligonucleotide; TTT chr11 5376810 5376831 5376815 5376810 -
ggttggtaagctattgattatt

SEQ ID NO: 116750 - DNA, 22 bp, Artificial Sequence
  Synthetic oligonucleotide; TTG chr11 5376809 5376830 5376814 5376809 -
gttggtaagctattgattattg

SEQ ID NO: 116751 - DNA, 22 bp, Artificial Sequence
  Synthetic oligonucleotide; TTG chr11 5376805 5376826 5376810 5376805 -
gtaagctattgattattgccac

SEQ ID NO: 116752 - DNA, 22 bp, Artificial Sequence
  Synthetic oligonucleotide; CTA chr11 5376797 5376818 5376802 5376797 -
ttgattattgccacaatttcag

SEQ ID NO: 116753 - DNA, 22 bp, Artificial Sequence
  Synthetic oligonucleotide; TTG chr11 5376794 5376815 5376799 5376794 -
attattgccacaatttcagatc

SEQ ID NO: 116754 - DNA, 22 bp, Artificial Sequence
  Synthetic oligonucleotide; TTA chr11 5376790 5376811 5376795 5376790 -
ttgccacaatttcagatcctgt

SEQ ID NO: 116755 - DNA, 22 bp, Artificial Sequence
  Synthetic oligonucleotide; TTG chr11 5376787 5376808 5376792 5376787 -
ccacaatttcagatcctgttat

SEQ ID NO: 116756 - DNA, 22 bp, Artificial Sequence
  Synthetic oligonucleotide; TTT chr11 5376778 5376799 5376783 5376778 -
cagatcctgttattggtctatt

SEQ ID NO: 116757 - DNA, 22 bp, Artificial Sequence
  Synthetic oligonucleotide; TTC chr11 5376777 5376798 5376782 5376777 -
agatcctgttattggtctattc

SEQ ID NO: 116758 - DNA, 22 bp, Artificial Sequence
  Synthetic oligonucleotide; CTG chr11 5376769 5376790 5376774 5376769 -
ttattggtctattcagagattc

SEQ ID NO: 116759 - DNA, 22 bp, Artificial Sequence
  Synthetic oligonucleotide; TTA chr11 5376766 5376787 5376771 5376766 -
ttggtctattcagagattcaac

SEQ ID NO: 116760 - DNA, 22 bp, Artificial Sequence
  Synthetic oligonucleotide; TTG chr11 5376763 5376784 5376768 5376763 -
gtctattcagagattcaacttc

SEQ ID NO: 116761 - DNA, 22 bp, Artificial Sequence
  Synthetic oligonucleotide; CTA chr11 5376758 5376779 5376763 5376758 -
ttcagagattcaacttcttcct

SEQ ID NO: 116762 - DNA, 22 bp, Artificial Sequence
  Synthetic oligonucleotide; TTC chr11 5376755 5376776 5376760 5376755 -
agagattcaacttcttcctggt

SEQ ID NO: 116763 - DNA, 22 bp, Artificial Sequence
  Synthetic oligonucleotide; TTC chr11 5376747 5376768 5376752 5376747 -
aacttcttcctggtttagtctt

SEQ ID NO: 116764 - DNA, 22 bp, Artificial Sequence
  Synthetic oligonucleotide; CTT chr11 5376742 5376763 5376747 5376742 -
cttcctggtttagtcttgggat

SEQ ID NO: 116765 - DNA, 22 bp, Artificial Sequence
  Synthetic oligonucleotide; TTC chr11 5376741 5376762 5376746 5376741 -
ttcctggtttagtcttgggata

SEQ ID NO: 116766 - DNA, 22 bp, Artificial Sequence
  Synthetic oligonucleotide; CTT chr11 5376739 5376760 5376744 5376739 -
cctggtttagtcttgggatagt

SEQ ID NO: 116767 - DNA, 22 bp, Artificial Sequence
  Synthetic oligonucleotide; TTC chr11 5376738 5376759 5376743 5376738 -
ctggtttagtcttgggatagtg

SEQ ID NO: 116768 - DNA, 22 bp, Artificial Sequence
  Synthetic oligonucleotide; CTG chr11 5376735 5376756 5376740 5376735 -
gtttagtcttgggatagtgtat

SEQ ID NO: 116769 - DNA, 22 bp, Artificial Sequence
  Synthetic oligonucleotide; TTT chr11 5376731 5376752 5376736 5376731 -
agtcttgggatagtgtatgtgt

SEQ ID NO: 116770 - DNA, 22 bp, Artificial Sequence
  Synthetic oligonucleotide; TTA chr11 5376730 5376751 5376735 5376730 -
gtcttgggatagtgtatgtgtc

SEQ ID NO: 116771 - DNA, 22 bp, Artificial Sequence
  Synthetic oligonucleotide; CTT chr11 5376725 5376746 5376730 5376725 -
gggatagtgtatgtgtccagga

SEQ ID NO: 116772 - DNA, 22 bp, Artificial Sequence
  Synthetic oligonucleotide; TTG chr11 5376724 5376745 5376729 5376724 -
ggatagtgtatgtgtccaggaa

SEQ ID NO: 116773 - DNA, 22 bp, Artificial Sequence
  Synthetic oligonucleotide; TTT chr11 5376699 5376720 5376704 5376699 -
atccatttcttctagattttct

SEQ ID NO: 116774 - DNA, 22 bp, Artificial Sequence
  Synthetic oligonucleotide; TTA chr11 5376698 5376719 5376703 5376698 -
tccatttcttctagattttcta

SEQ ID NO: 116775 - DNA, 22 bp, Artificial Sequence
  Synthetic oligonucleotide; TTT chr11 5376691 5376712 5376696 5376691 -
cttctagattttctagtttatt

SEQ ID NO: 116776 - DNA, 22 bp, Artificial Sequence
  Synthetic oligonucleotide; TTC chr11 5376690 5376711 5376695 5376690 -
ttctagattttctagtttattt

SEQ ID NO: 116777 - DNA, 22 bp, Artificial Sequence
  Synthetic oligonucleotide; CTT chr11 5376688 5376709 5376693 5376688 -
ctagattttctagtttatttgc

SEQ ID NO: 116778 - DNA, 22 bp, Artificial Sequence
  Synthetic oligonucleotide; TTC chr11 5376687 5376708 5376692 5376687 -
tagattttctagtttatttgcg

SEQ ID NO: 116779 - DNA, 22 bp, Artificial Sequence
  Synthetic oligonucleotide; CTA chr11 5376685 5376706 5376690 5376685 -
gattttctagtttatttgcgta

SEQ ID NO: 116780 - DNA, 22 bp, Artificial Sequence
  Synthetic oligonucleotide; TTT chr11 5376680 5376701 5376685 5376680 -
tctagtttatttgcgtagaggt

SEQ ID NO: 116781 - DNA, 22 bp, Artificial Sequence
  Synthetic oligonucleotide; TTT chr11 5376679 5376700 5376684 5376679 -
ctagtttatttgcgtagaggtg

SEQ ID NO: 116782 - DNA, 22 bp, Artificial Sequence
  Synthetic oligonucleotide; TTC chr11 5376678 5376699 5376683 5376678 -
tagtttatttgcgtagaggtgt

SEQ ID NO: 116783 - DNA, 22 bp, Artificial Sequence
  Synthetic oligonucleotide; CTA chr11 5376676 5376697 5376681 5376676 -
gtttatttgcgtagaggtgttt

SEQ ID NO: 116784 - DNA, 22 bp, Artificial Sequence
  Synthetic oligonucleotide; TTT chr11 5376672 5376693 5376677 5376672 -
atttgcgtagaggtgtttgtag

SEQ ID NO: 116785 - DNA, 22 bp, Artificial Sequence
  Synthetic oligonucleotide; TTA chr11 5376671 5376692 5376676 5376671 -
tttgcgtagaggtgtttgtagt

SEQ ID NO: 116786 - DNA, 22 bp, Artificial Sequence
  Synthetic oligonucleotide; TTT chr11 5376668 5376689 5376673 5376668 -
gcgtagaggtgtttgtagtatt

SEQ ID NO: 116787 - DNA, 22 bp, Artificial Sequence
  Synthetic oligonucleotide; TTG chr11 5376667 5376688 5376672 5376667 -
cgtagaggtgtttgtagtattc

SEQ ID NO: 116788 - DNA, 22 bp, Artificial Sequence
  Synthetic oligonucleotide; TTT chr11 5376654 5376675 5376659 5376654 -
gtagtattctctgatggcagtt

SEQ ID NO: 116789 - DNA, 22 bp, Artificial Sequence
  Synthetic oligonucleotide; TTG chr11 5376653 5376674 5376658 5376653 -
tagtattctctgatggcagttt

SEQ ID NO: 116790 - DNA, 22 bp, Artificial Sequence
  Synthetic oligonucleotide; TTC chr11 5376645 5376666 5376650 5376645 -
tctgatggcagtttgtatttct

SEQ ID NO: 116791 - DNA, 22 bp, Artificial Sequence
  Synthetic oligonucleotide; CTC chr11 5376643 5376664 5376648 5376643 -
tgatggcagtttgtatttctgt

SEQ ID NO: 116792 - DNA, 22 bp, Artificial Sequence
  Synthetic oligonucleotide; CTG chr11 5376641 5376662 5376646 5376641 -
atggcagtttgtatttctgtgg

SEQ ID NO: 116793 - DNA, 22 bp, Artificial Sequence
  Synthetic oligonucleotide; TTT chr11 5376631 5376652 5376636 5376631 -
gtatttctgtgggatcggtggt

SEQ ID NO: 116794 - DNA, 22 bp, Artificial Sequence
  Synthetic oligonucleotide; TTG chr11 5376630 5376651 5376635 5376630 -
tatttctgtgggatcggtggtg

SEQ ID NO: 116795 - DNA, 22 bp, Artificial Sequence
  Synthetic oligonucleotide; TTT chr11 5376625 5376646 5376630 5376625 -
ctgtgggatcggtggtgatatc

SEQ ID NO: 116796 - DNA, 22 bp, Artificial Sequence
  Synthetic oligonucleotide; TTC chr11 5376624 5376645 5376629 5376624 -
tgtgggatcggtggtgatatcc

SEQ ID NO: 116797 - DNA, 22 bp, Artificial Sequence
  Synthetic oligonucleotide; CTG chr11 5376622 5376643 5376627 5376622 -
tgggatcggtggtgatatcccc

SEQ ID NO: 116798 - DNA, 22 bp, Artificial Sequence
  Synthetic oligonucleotide; CTT chr11 5376598 5376619 5376603 5376598 -
tatcatttttttattgtgtcta

SEQ ID NO: 116799 - DNA, 22 bp, Artificial Sequence
  Synthetic oligonucleotide; TTT chr11 5376597 5376618 5376602 5376597 -
atcatttttttattgtgtctat

SEQ ID NO: 116800 - DNA, 22 bp, Artificial Sequence
  Synthetic oligonucleotide; TTA chr11 5376596 5376617 5376601 5376596 -
tcatttttttattgtgtctatt

SEQ ID NO: 116801 - DNA, 22 bp, Artificial Sequence
  Synthetic oligonucleotide; TTT chr11 5376590 5376611 5376595 5376590 -
ttttattgtgtctatttgattc

SEQ ID NO: 116802 - DNA, 22 bp, Artificial Sequence
  Synthetic oligonucleotide; TTT chr11 5376589 5376610 5376594 5376589 -
tttattgtgtctatttgattct

SEQ ID NO: 116803 - DNA, 22 bp, Artificial Sequence
  Synthetic oligonucleotide; TTT chr11 5376588 5376609 5376593 5376588 -
ttattgtgtctatttgattctt

SEQ ID NO: 116804 - DNA, 22 bp, Artificial Sequence
  Synthetic oligonucleotide; TTT chr11 5376587 5376608 5376592 5376587 -
tattgtgtctatttgattcttc

SEQ ID NO: 116805 - DNA, 22 bp, Artificial Sequence
  Synthetic oligonucleotide; TTT chr11 5376586 5376607 5376591 5376586 -
attgtgtctatttgattcttct

SEQ ID NO: 116806 - DNA, 22 bp, Artificial Sequence
  Synthetic oligonucleotide; TTA chr11 5376585 5376606 5376590 5376585 -
ttgtgtctatttgattcttctc

SEQ ID NO: 116807 - DNA, 22 bp, Artificial Sequence
  Synthetic oligonucleotide; TTG chr11 5376582 5376603 5376587 5376582 -
tgtctatttgattcttctctct

SEQ ID NO: 116808 - DNA, 22 bp, Artificial Sequence
  Synthetic oligonucleotide; CTA chr11 5376576 5376597 5376581 5376576 -
tttgattcttctctcttttctt

SEQ ID NO: 116809 - DNA, 22 bp, Artificial Sequence
  Synthetic oligonucleotide; TTT chr11 5376573 5376594 5376578 5376573 -
gattcttctctcttttcttatt

SEQ ID NO: 116810 - DNA, 22 bp, Artificial Sequence
  Synthetic oligonucleotide; TTG chr11 5376572 5376593 5376577 5376572 -
attcttctctcttttcttatta

SEQ ID NO: 116811 - DNA, 22 bp, Artificial Sequence
  Synthetic oligonucleotide; TTC chr11 5376568 5376589 5376573 5376568 -
ttctctcttttcttattagtct

SEQ ID NO: 116812 - DNA, 22 bp, Artificial Sequence
  Synthetic oligonucleotide; CTT chr11 5376566 5376587 5376571 5376566 -
ctctcttttcttattagtcttg

SEQ ID NO: 116813 - DNA, 22 bp, Artificial Sequence
  Synthetic oligonucleotide; TTC chr11 5376565 5376586 5376570 5376565 -
tctcttttcttattagtcttgc

SEQ ID NO: 116814 - DNA, 22 bp, Artificial Sequence
  Synthetic oligonucleotide; CTC chr11 5376563 5376584 5376568 5376563 -
tcttttcttattagtcttgcta

SEQ ID NO: 116815 - DNA, 22 bp, Artificial Sequence
  Synthetic oligonucleotide; CTC chr11 5376561 5376582 5376566 5376561 -
ttttcttattagtcttgctagc

SEQ ID NO: 116816 - DNA, 22 bp, Artificial Sequence
  Synthetic oligonucleotide; CTT chr11 5376559 5376580 5376564 5376559 -
ttcttattagtcttgctagcgg

SEQ ID NO: 116817 - DNA, 22 bp, Artificial Sequence
  Synthetic oligonucleotide; TTT chr11 5376558 5376579 5376563 5376558 -
tcttattagtcttgctagcggt

SEQ ID NO: 116818 - DNA, 22 bp, Artificial Sequence
  Synthetic oligonucleotide; TTT chr11 5376557 5376578 5376562 5376557 -
cttattagtcttgctagcggtc

SEQ ID NO: 116819 - DNA, 22 bp, Artificial Sequence
  Synthetic oligonucleotide; TTC chr11 5376556 5376577 5376561 5376556 -
ttattagtcttgctagcggtct

SEQ ID NO: 116820 - DNA, 22 bp, Artificial Sequence
  Synthetic oligonucleotide; CTT chr11 5376554 5376575 5376559 5376554 -
attagtcttgctagcggtctat

SEQ ID NO: 116821 - DNA, 22 bp, Artificial Sequence
  Synthetic oligonucleotide; TTA chr11 5376553 5376574 5376558 5376553 -
ttagtcttgctagcggtctatc

SEQ ID NO: 116822 - DNA, 22 bp, Artificial Sequence
  Synthetic oligonucleotide; TTA chr11 5376550 5376571 5376555 5376550 -
gtcttgctagcggtctatcagt

SEQ ID NO: 116823 - DNA, 22 bp, Artificial Sequence
  Synthetic oligonucleotide; CTT chr11 5376545 5376566 5376550 5376545 -
gctagcggtctatcagttttgt

SEQ ID NO: 116824 - DNA, 22 bp, Artificial Sequence
  Synthetic oligonucleotide; TTG chr11 5376544 5376565 5376549 5376544 -
ctagcggtctatcagttttgtt

SEQ ID NO: 116825 - DNA, 22 bp, Artificial Sequence
  Synthetic oligonucleotide; CTA chr11 5376541 5376562 5376546 5376541 -
gcggtctatcagttttgttgat

SEQ ID NO: 116826 - DNA, 22 bp, Artificial Sequence
  Synthetic oligonucleotide; CTA chr11 5376533 5376554 5376538 5376533 -
tcagttttgttgatcctttcaa

SEQ ID NO: 116827 - DNA, 22 bp, Artificial Sequence
  Synthetic oligonucleotide; TTT chr11 5376526 5376547 5376531 5376526 -
tgttgatcctttcaaaaaacca

SEQ ID NO: 116828 - DNA, 22 bp, Artificial Sequence
  Synthetic oligonucleotide; TTT chr11 5376525 5376546 5376530 5376525 -
gttgatcctttcaaaaaaccag

SEQ ID NO: 116829 - DNA, 22 bp, Artificial Sequence
  Synthetic oligonucleotide; TTG chr11 5376524 5376545 5376529 5376524 -
ttgatcctttcaaaaaaccagc

SEQ ID NO: 116830 - DNA, 22 bp, Artificial Sequence
  Synthetic oligonucleotide; TTG chr11 5376521 5376542 5376526 5376521 -
atcctttcaaaaaaccagctcc

SEQ ID NO: 116831 - DNA, 22 bp, Artificial Sequence
  Synthetic oligonucleotide; CTT chr11 5376515 5376536 5376520 5376515 -
tcaaaaaaccagctcccagatt

SEQ ID NO: 116832 - DNA, 22 bp, Artificial Sequence
  Synthetic oligonucleotide; TTT chr11 5376514 5376535 5376519 5376514 -
caaaaaaccagctcccagattc

SEQ ID NO: 116833 - DNA, 22 bp, Artificial Sequence
  Synthetic oligonucleotide; TTC chr11 5376513 5376534 5376518 5376513 -
aaaaaaccagctcccagattca

SEQ ID NO: 116834 - DNA, 22 bp, Artificial Sequence
  Synthetic oligonucleotide; CTC chr11 5376500 5376521 5376505 5376500 -
ccagattcattaattttttgaa

SEQ ID NO: 116835 - DNA, 22 bp, Artificial Sequence
  Synthetic oligonucleotide; TTC chr11 5376492 5376513 5376497 5376492 -
attaattttttgaagggttttt

SEQ ID NO: 116836 - DNA, 22 bp, Artificial Sequence
  Synthetic oligonucleotide; TTA chr11 5376488 5376509 5376493 5376488 -
attttttgaagggttttttgtg

SEQ ID NO: 116837 - DNA, 22 bp, Artificial Sequence
  Synthetic oligonucleotide; TTT chr11 5376484 5376505 5376489 5376484 -
tttgaagggttttttgtgtctc

SEQ ID NO: 116838 - DNA, 22 bp, Artificial Sequence
  Synthetic oligonucleotide; TTT chr11 5376483 5376504 5376488 5376483 -
ttgaagggttttttgtgtctct

SEQ ID NO: 116839 - DNA, 22 bp, Artificial Sequence
  Synthetic oligonucleotide; TTT chr11 5376482 5376503 5376487 5376482 -
tgaagggttttttgtgtctctg

SEQ ID NO: 116840 - DNA, 22 bp, Artificial Sequence
  Synthetic oligonucleotide; TTT chr11 5376481 5376502 5376486 5376481 -
gaagggttttttgtgtctctgt

SEQ ID NO: 116841 - DNA, 22 bp, Artificial Sequence
  Synthetic oligonucleotide; TTG chr11 5376480 5376501 5376485 5376480 -
aagggttttttgtgtctctgtt

SEQ ID NO: 116842 - DNA, 22 bp, Artificial Sequence
  Synthetic oligonucleotide; TTT chr11 5376472 5376493 5376477 5376472 -
tttgtgtctctgtttccttcag

SEQ ID NO: 116843 - DNA, 22 bp, Artificial Sequence
  Synthetic oligonucleotide; TTT chr11 5376471 5376492 5376476 5376471 -
ttgtgtctctgtttccttcagt

SEQ ID NO: 116844 - DNA, 22 bp, Artificial Sequence
  Synthetic oligonucleotide; TTT chr11 5376470 5376491 5376475 5376470 -
tgtgtctctgtttccttcagtt

SEQ ID NO: 116845 - DNA, 22 bp, Artificial Sequence
  Synthetic oligonucleotide; TTT chr11 5376469 5376490 5376474 5376469 -
gtgtctctgtttccttcagttc

SEQ ID NO: 116846 - DNA, 22 bp, Artificial Sequence
  Synthetic oligonucleotide; TTG chr11 5376468 5376489 5376473 5376468 -
tgtctctgtttccttcagttct

SEQ ID NO: 116847 - DNA, 22 bp, Artificial Sequence
  Synthetic oligonucleotide; CTC chr11 5376462 5376483 5376467 5376462 -
tgtttccttcagttctgctctg

SEQ ID NO: 116848 - DNA, 22 bp, Artificial Sequence
  Synthetic oligonucleotide; CTG chr11 5376460 5376481 5376465 5376460 -
tttccttcagttctgctctgat

SEQ ID NO: 116849 - DNA, 22 bp, Artificial Sequence
  Synthetic oligonucleotide; TTT chr11 5376457 5376478 5376462 5376457 -
ccttcagttctgctctgatttt

SEQ ID NO: 116850 - DNA, 22 bp, Artificial Sequence
  Synthetic oligonucleotide; TTC chr11 5376456 5376477 5376461 5376456 -
cttcagttctgctctgatttta

SEQ ID NO: 116851 - DNA, 22 bp, Artificial Sequence
  Synthetic oligonucleotide; CTT chr11 5376453 5376474 5376458 5376453 -
cagttctgctctgattttagtt

SEQ ID NO: 116852 - DNA, 22 bp, Artificial Sequence
  Synthetic oligonucleotide; TTC chr11 5376452 5376473 5376457 5376452 -
agttctgctctgattttagtta

SEQ ID NO: 116853 - DNA, 22 bp, Artificial Sequence
  Synthetic oligonucleotide; TTC chr11 5376447 5376468 5376452 5376447 -
tgctctgattttagttatttct

SEQ ID NO: 116854 - DNA, 22 bp, Artificial Sequence
  Synthetic oligonucleotide; CTG chr11 5376445 5376466 5376450 5376445 -
ctctgattttagttatttcttg

SEQ ID NO: 116855 - DNA, 22 bp, Artificial Sequence
  Synthetic oligonucleotide; CTC chr11 5376442 5376463 5376447 5376442 -
tgattttagttatttcttgact

SEQ ID NO: 116856 - DNA, 22 bp, Artificial Sequence
  Synthetic oligonucleotide; CTG chr11 5376440 5376461 5376445 5376440 -
attttagttatttcttgacttc

SEQ ID NO: 116857 - DNA, 22 bp, Artificial Sequence
  Synthetic oligonucleotide; TTT chr11 5376436 5376457 5376441 5376436 -
tagttatttcttgacttctgct

SEQ ID NO: 116858 - DNA, 22 bp, Artificial Sequence
  Synthetic oligonucleotide; TTT chr11 5376435 5376456 5376440 5376435 -
agttatttcttgacttctgcta

SEQ ID NO: 116859 - DNA, 22 bp, Artificial Sequence
  Synthetic oligonucleotide; TTA chr11 5376434 5376455 5376439 5376434 -
gttatttcttgacttctgctag

SEQ ID NO: 116860 - DNA, 22 bp, Artificial Sequence
  Synthetic oligonucleotide; TTA chr11 5376430 5376451 5376435 5376430 -
tttcttgacttctgctagcttt

SEQ ID NO: 116861 - DNA, 22 bp, Artificial Sequence
  Synthetic oligonucleotide; TTT chr11 5376427 5376448 5376432 5376427 -
cttgacttctgctagcttttga

SEQ ID NO: 116862 - DNA, 22 bp, Artificial Sequence
  Synthetic oligonucleotide; TTC chr11 5376426 5376447 5376431 5376426 -
ttgacttctgctagcttttgaa

SEQ ID NO: 116863 - DNA, 22 bp, Artificial Sequence
  Synthetic oligonucleotide; CTT chr11 5376424 5376445 5376429 5376424 -
gacttctgctagcttttgaatg

SEQ ID NO: 116864 - DNA, 22 bp, Artificial Sequence
  Synthetic oligonucleotide; TTG chr11 5376423 5376444 5376428 5376423 -
acttctgctagcttttgaatgt

SEQ ID NO: 116865 - DNA, 22 bp, Artificial Sequence
  Synthetic oligonucleotide; CTT chr11 5376419 5376440 5376424 5376419 -
ctgctagcttttgaatgtgttt

SEQ ID NO: 116866 - DNA, 22 bp, Artificial Sequence
  Synthetic oligonucleotide; TTC chr11 5376418 5376439 5376423 5376418 -
tgctagcttttgaatgtgtttg

SEQ ID NO: 116867 - DNA, 22 bp, Artificial Sequence
  Synthetic oligonucleotide; CTG chr11 5376416 5376437 5376421 5376416 -
ctagcttttgaatgtgtttgct

SEQ ID NO: 116868 - DNA, 22 bp, Artificial Sequence
  Synthetic oligonucleotide; CTA chr11 5376413 5376434 5376418 5376413 -
gcttttgaatgtgtttgctctt

SEQ ID NO: 116869 - DNA, 22 bp, Artificial Sequence
  Synthetic oligonucleotide; CTT chr11 5376409 5376430 5376414 5376409 -
ttgaatgtgtttgctcttgctt

SEQ ID NO: 116870 - DNA, 22 bp, Artificial Sequence
  Synthetic oligonucleotide; TTT chr11 5376408 5376429 5376413 5376408 -
tgaatgtgtttgctcttgctta

SEQ ID NO: 116871 - DNA, 22 bp, Artificial Sequence
  Synthetic oligonucleotide; TTT chr11 5376407 5376428 5376412 5376407 -
gaatgtgtttgctcttgcttat

SEQ ID NO: 116872 - DNA, 22 bp, Artificial Sequence
  Synthetic oligonucleotide; TTG chr11 5376406 5376427 5376411 5376406 -
aatgtgtttgctcttgcttatc

SEQ ID NO: 116873 - DNA, 22 bp, Artificial Sequence
  Synthetic oligonucleotide; TTT chr11 5376397 5376418 5376402 5376397 -
gctcttgcttatctagttcttt

SEQ ID NO: 116874 - DNA, 22 bp, Artificial Sequence
  Synthetic oligonucleotide; TTG chr11 5376396 5376417 5376401 5376396 -
ctcttgcttatctagttctttt

SEQ ID NO: 116875 - DNA, 22 bp, Artificial Sequence
  Synthetic oligonucleotide; CTC chr11 5376393 5376414 5376398 5376393 -
ttgcttatctagttcttttaat

SEQ ID NO: 116876 - DNA, 22 bp, Artificial Sequence
  Synthetic oligonucleotide; CTT chr11 5376391 5376412 5376396 5376391 -
gcttatctagttcttttaattg

SEQ ID NO: 116877 - DNA, 22 bp, Artificial Sequence
  Synthetic oligonucleotide; TTG chr11 5376390 5376411 5376395 5376390 -
cttatctagttcttttaattgt

SEQ ID NO: 116878 - DNA, 22 bp, Artificial Sequence
  Synthetic oligonucleotide; CTT chr11 5376387 5376408 5376392 5376387 -
atctagttcttttaattgtgat

SEQ ID NO: 116879 - DNA, 22 bp, Artificial Sequence
  Synthetic oligonucleotide; TTA chr11 5376386 5376407 5376391 5376386 -
tctagttcttttaattgtgatg

SEQ ID NO: 116880 - DNA, 22 bp, Artificial Sequence
  Synthetic oligonucleotide; CTA chr11 5376382 5376403 5376387 5376382 -
gttcttttaattgtgatgttag

SEQ ID NO: 116881 - DNA, 22 bp, Artificial Sequence
  Synthetic oligonucleotide; TTC chr11 5376378 5376399 5376383 5376378 -
ttttaattgtgatgttagggtg

SEQ ID NO: 116882 - DNA, 22 bp, Artificial Sequence
  Synthetic oligonucleotide; CTT chr11 5376376 5376397 5376381 5376376 -
ttaattgtgatgttagggtgtc

SEQ ID NO: 116883 - DNA, 22 bp, Artificial Sequence
  Synthetic oligonucleotide; TTT chr11 5376375 5376396 5376380 5376375 -
taattgtgatgttagggtgtca

SEQ ID NO: 116884 - DNA, 22 bp, Artificial Sequence
  Synthetic oligonucleotide; TTT chr11 5376374 5376395 5376379 5376374 -
aattgtgatgttagggtgtcaa

SEQ ID NO: 116885 - DNA, 22 bp, Artificial Sequence
  Synthetic oligonucleotide; TTA chr11 5376373 5376394 5376378 5376373 -
attgtgatgttagggtgtcaat

SEQ ID NO: 116886 - DNA, 22 bp, Artificial Sequence
  Synthetic oligonucleotide; TTG chr11 5376369 5376390 5376374 5376369 -
tgatgttagggtgtcaattttg

SEQ ID NO: 116887 - DNA, 22 bp, Artificial Sequence
  Synthetic oligonucleotide; TTA chr11 5376361 5376382 5376366 5376361 -
gggtgtcaattttggatctttc

SEQ ID NO: 116888 - DNA, 22 bp, Artificial Sequence
  Synthetic oligonucleotide; TTT chr11 5376349 5376370 5376354 5376349 -
tggatctttcttgctttctctt

SEQ ID NO: 116889 - DNA, 22 bp, Artificial Sequence
  Synthetic oligonucleotide; TTT chr11 5376348 5376369 5376353 5376348 -
ggatctttcttgctttctcttg

SEQ ID NO: 116890 - DNA, 22 bp, Artificial Sequence
  Synthetic oligonucleotide; TTG chr11 5376347 5376368 5376352 5376347 -
gatctttcttgctttctcttgt

SEQ ID NO: 116891 - DNA, 22 bp, Artificial Sequence
  Synthetic oligonucleotide; CTT chr11 5376341 5376362 5376346 5376341 -
tcttgctttctcttgtgggcgt

SEQ ID NO: 116892 - DNA, 22 bp, Artificial Sequence
  Synthetic oligonucleotide; TTT chr11 5376340 5376361 5376345 5376340 -
cttgctttctcttgtgggcgtt

SEQ ID NO: 116893 - DNA, 22 bp, Artificial Sequence
  Synthetic oligonucleotide; TTC chr11 5376339 5376360 5376344 5376339 -
ttgctttctcttgtgggcgttt

SEQ ID NO: 116894 - DNA, 22 bp, Artificial Sequence
  Synthetic oligonucleotide; CTT chr11 5376337 5376358 5376342 5376337 -
gctttctcttgtgggcgtttag

SEQ ID NO: 116895 - DNA, 22 bp, Artificial Sequence
  Synthetic oligonucleotide; TTG chr11 5376336 5376357 5376341 5376336 -
ctttctcttgtgggcgtttagt

SEQ ID NO: 116896 - DNA, 22 bp, Artificial Sequence
  Synthetic oligonucleotide; CTT chr11 5376333 5376354 5376338 5376333 -
tctcttgtgggcgtttagtgct

SEQ ID NO: 116897 - DNA, 22 bp, Artificial Sequence
  Synthetic oligonucleotide; TTT chr11 5376332 5376353 5376337 5376332 -
ctcttgtgggcgtttagtgcta

SEQ ID NO: 116898 - DNA, 22 bp, Artificial Sequence
  Synthetic oligonucleotide; TTC chr11 5376331 5376352 5376336 5376331 -
tcttgtgggcgtttagtgctat

SEQ ID NO: 116899 - DNA, 22 bp, Artificial Sequence
  Synthetic oligonucleotide; CTC chr11 5376329 5376350 5376334 5376329 -
ttgtgggcgtttagtgctataa

SEQ ID NO: 116900 - DNA, 22 bp, Artificial Sequence
  Synthetic oligonucleotide; CTT chr11 5376327 5376348 5376332 5376327 -
gtgggcgtttagtgctataaat

SEQ ID NO: 116901 - DNA, 22 bp, Artificial Sequence
  Synthetic oligonucleotide; TTG chr11 5376326 5376347 5376331 5376326 -
tgggcgtttagtgctataaatt

SEQ ID NO: 116902 - DNA, 22 bp, Artificial Sequence
  Synthetic oligonucleotide; TTT chr11 5376317 5376338 5376322 5376317 -
agtgctataaatttccccctac

SEQ ID NO: 116903 - DNA, 22 bp, Artificial Sequence
  Synthetic oligonucleotide; TTA chr11 5376316 5376337 5376321 5376316 -
gtgctataaatttccccctaca

SEQ ID NO: 116904 - DNA, 22 bp, Artificial Sequence
  Synthetic oligonucleotide; CTA chr11 5376310 5376331 5376315 5376310 -
taaatttccccctacacactga

SEQ ID NO: 116905 - DNA, 22 bp, Artificial Sequence
  Synthetic oligonucleotide; TTT chr11 5376303 5376324 5376308 5376303 -
ccccctacacactgattcgaat

SEQ ID NO: 116906 - DNA, 22 bp, Artificial Sequence
  Synthetic oligonucleotide; TTC chr11 5376302 5376323 5376307 5376302 -
cccctacacactgattcgaatg

SEQ ID NO: 116907 - DNA, 22 bp, Artificial Sequence
  Synthetic oligonucleotide; CTA chr11 5376296 5376317 5376301 5376296 -
cacactgattcgaatgtgtccc

SEQ ID NO: 116908 - DNA, 22 bp, Artificial Sequence
  Synthetic oligonucleotide; CTG chr11 5376289 5376310 5376294 5376289 -
attcgaatgtgtcccagagatt

SEQ ID NO: 116909 - DNA, 22 bp, Artificial Sequence
  Synthetic oligonucleotide; TTC chr11 5376285 5376306 5376290 5376285 -
gaatgtgtcccagagattctgg

SEQ ID NO: 116910 - DNA, 22 bp, Artificial Sequence
  Synthetic oligonucleotide; TTC chr11 5376266 5376287 5376271 5376266 -
tggtatgttgtgtctttgttct

SEQ ID NO: 116911 - DNA, 22 bp, Artificial Sequence
  Synthetic oligonucleotide; CTG chr11 5376264 5376285 5376269 5376264 -
gtatgttgtgtctttgttctca

SEQ ID NO: 116912 - DNA, 22 bp, Artificial Sequence
  Synthetic oligonucleotide; TTG chr11 5376256 5376277 5376261 5376256 -
tgtctttgttctcattggtttc

SEQ ID NO: 116913 - DNA, 22 bp, Artificial Sequence
  Synthetic oligonucleotide; CTT chr11 5376250 5376271 5376255 5376250 -
tgttctcattggtttcaaagaa

SEQ ID NO: 116914 - DNA, 22 bp, Artificial Sequence
  Synthetic oligonucleotide; TTT chr11 5376249 5376270 5376254 5376249 -
gttctcattggtttcaaagaac

SEQ ID NO: 116915 - DNA, 22 bp, Artificial Sequence
  Synthetic oligonucleotide; TTG chr11 5376248 5376269 5376253 5376248 -
ttctcattggtttcaaagaaca

SEQ ID NO: 116916 - DNA, 22 bp, Artificial Sequence
  Synthetic oligonucleotide; TTC chr11 5376245 5376266 5376250 5376245 -
tcattggtttcaaagaacatct

SEQ ID NO: 116917 - DNA, 22 bp, Artificial Sequence
  Synthetic oligonucleotide; CTC chr11 5376243 5376264 5376248 5376243 -
attggtttcaaagaacatcttt

SEQ ID NO: 116918 - DNA, 22 bp, Artificial Sequence
  Synthetic oligonucleotide; TTG chr11 5376239 5376260 5376244 5376239 -
gtttcaaagaacatctttattt

SEQ ID NO: 116919 - DNA, 22 bp, Artificial Sequence
  Synthetic oligonucleotide; TTT chr11 5376235 5376256 5376240 5376235 -
caaagaacatctttatttctgc

SEQ ID NO: 116920 - DNA, 22 bp, Artificial Sequence
  Synthetic oligonucleotide; TTC chr11 5376234 5376255 5376239 5376234 -
aaagaacatctttatttctgcc

SEQ ID NO: 116921 - DNA, 22 bp, Artificial Sequence
  Synthetic oligonucleotide; CTT chr11 5376222 5376243 5376227 5376222 -
tatttctgccttcatttcgtta

SEQ ID NO: 116922 - DNA, 22 bp, Artificial Sequence
  Synthetic oligonucleotide; TTT chr11 5376221 5376242 5376226 5376221 -
atttctgccttcatttcgttat

SEQ ID NO: 116923 - DNA, 22 bp, Artificial Sequence
  Synthetic oligonucleotide; TTA chr11 5376220 5376241 5376225 5376220 -
tttctgccttcatttcgttatg

SEQ ID NO: 116924 - DNA, 22 bp, Artificial Sequence
  Synthetic oligonucleotide; TTT chr11 5376217 5376238 5376222 5376217 -
ctgccttcatttcgttatgtac

SEQ ID NO: 116925 - DNA, 22 bp, Artificial Sequence
  Synthetic oligonucleotide; TTC chr11 5376216 5376237 5376221 5376216 -
tgccttcatttcgttatgtacc

SEQ ID NO: 116926 - DNA, 22 bp, Artificial Sequence
  Synthetic oligonucleotide; CTG chr11 5376214 5376235 5376219 5376214 -
ccttcatttcgttatgtaccca

SEQ ID NO: 116927 - DNA, 22 bp, Artificial Sequence
  Synthetic oligonucleotide; CTT chr11 5376210 5376231 5376215 5376210 -
catttcgttatgtacccagtag

SEQ ID NO: 116928 - DNA, 22 bp, Artificial Sequence
  Synthetic oligonucleotide; TTC chr11 5376209 5376230 5376214 5376209 -
atttcgttatgtacccagtagt

SEQ ID NO: 116929 - DNA, 22 bp, Artificial Sequence
  Synthetic oligonucleotide; TTT chr11 5376205 5376226 5376210 5376205 -
cgttatgtacccagtagtcatt

SEQ ID NO: 116930 - DNA, 22 bp, Artificial Sequence
  Synthetic oligonucleotide; TTC chr11 5376204 5376225 5376209 5376204 -
gttatgtacccagtagtcattc

SEQ ID NO: 116931 - DNA, 22 bp, Artificial Sequence
  Synthetic oligonucleotide; TTA chr11 5376200 5376221 5376205 5376200 -
tgtacccagtagtcattcagga

SEQ ID NO: 116932 - DNA, 22 bp, Artificial Sequence
  Synthetic oligonucleotide; TTC chr11 5376182 5376203 5376187 5376182 -
aggagcaggttgttcagtttcc

SEQ ID NO: 116933 - DNA, 22 bp, Artificial Sequence
  Synthetic oligonucleotide; TTG chr11 5376170 5376191 5376175 5376170 -
ttcagtttccatgtagttgagt

SEQ ID NO: 116934 - DNA, 22 bp, Artificial Sequence
  Synthetic oligonucleotide; TTC chr11 5376167 5376188 5376172 5376167 -
agtttccatgtagttgagtggt

SEQ ID NO: 116935 - DNA, 22 bp, Artificial Sequence
  Synthetic oligonucleotide; TTT chr11 5376162 5376183 5376167 5376162 -
ccatgtagttgagtggttttga

SEQ ID NO: 116936 - DNA, 22 bp, Artificial Sequence
  Synthetic oligonucleotide; TTC chr11 5376161 5376182 5376166 5376161 -
catgtagttgagtggttttgag

SEQ ID NO: 116937 - DNA, 22 bp, Artificial Sequence
  Synthetic oligonucleotide; TTG chr11 5376151 5376172 5376156 5376151 -
agtggttttgagtgagtttctt

SEQ ID NO: 116938 - DNA, 22 bp, Artificial Sequence
  Synthetic oligonucleotide; TTT chr11 5376143 5376164 5376148 5376143 -
tgagtgagtttcttaatcctga

SEQ ID NO: 116939 - DNA, 22 bp, Artificial Sequence
  Synthetic oligonucleotide; TTT chr11 5376142 5376163 5376147 5376142 -
gagtgagtttcttaatcctgag

SEQ ID NO: 116940 - DNA, 22 bp, Artificial Sequence
  Synthetic oligonucleotide; TTG chr11 5376141 5376162 5376146 5376141 -
agtgagtttcttaatcctgagt

SEQ ID NO: 116941 - DNA, 22 bp, Artificial Sequence
  Synthetic oligonucleotide; TTT chr11 5376132 5376153 5376137 5376132 -
cttaatcctgagttctagtttg

SEQ ID NO: 116942 - DNA, 22 bp, Artificial Sequence
  Synthetic oligonucleotide; TTC chr11 5376131 5376152 5376136 5376131 -
ttaatcctgagttctagtttga

SEQ ID NO: 116943 - DNA, 22 bp, Artificial Sequence
  Synthetic oligonucleotide; CTT chr11 5376129 5376150 5376134 5376129 -
aatcctgagttctagtttgatt

SEQ ID NO: 116944 - DNA, 22 bp, Artificial Sequence
  Synthetic oligonucleotide; TTA chr11 5376128 5376149 5376133 5376128 -
atcctgagttctagtttgattg

SEQ ID NO: 116945 - DNA, 22 bp, Artificial Sequence
  Synthetic oligonucleotide; CTG chr11 5376122 5376143 5376127 5376122 -
agttctagtttgattgcactgt

SEQ ID NO: 116946 - DNA, 22 bp, Artificial Sequence
  Synthetic oligonucleotide; TTC chr11 5376117 5376138 5376122 5376117 -
tagtttgattgcactgtggtct

SEQ ID NO: 116947 - DNA, 22 bp, Artificial Sequence
  Synthetic oligonucleotide; CTA chr11 5376115 5376136 5376120 5376115 -
gtttgattgcactgtggtctga

SEQ ID NO: 116948 - DNA, 22 bp, Artificial Sequence
  Synthetic oligonucleotide; TTT chr11 5376111 5376132 5376116 5376111 -
gattgcactgtggtctgagaga

SEQ ID NO: 116949 - DNA, 22 bp, Artificial Sequence
  Synthetic oligonucleotide; TTG chr11 5376110 5376131 5376115 5376110 -
attgcactgtggtctgagagac

SEQ ID NO: 116950 - DNA, 22 bp, Artificial Sequence
  Synthetic oligonucleotide; TTG chr11 5376106 5376127 5376111 5376106 -
cactgtggtctgagagacagtt

SEQ ID NO: 116951 - DNA, 22 bp, Artificial Sequence
  Synthetic oligonucleotide; CTG chr11 5376101 5376122 5376106 5376101 -
tggtctgagagacagtttgtta

SEQ ID NO: 116952 - DNA, 22 bp, Artificial Sequence
  Synthetic oligonucleotide; CTG chr11 5376094 5376115 5376099 5376094 -
agagacagtttgttataatttc

SEQ ID NO: 116953 - DNA, 22 bp, Artificial Sequence
  Synthetic oligonucleotide; TTT chr11 5376083 5376104 5376088 5376083 -
gttataatttctgttcttttat

SEQ ID NO: 116954 - DNA, 22 bp, Artificial Sequence
  Synthetic oligonucleotide; TTG chr11 5376082 5376103 5376087 5376082 -
ttataatttctgttcttttata

SEQ ID NO: 116955 - DNA, 22 bp, Artificial Sequence
  Synthetic oligonucleotide; TTA chr11 5376079 5376100 5376084 5376079 -
taatttctgttcttttatattt

SEQ ID NO: 116956 - DNA, 22 bp, Artificial Sequence
  Synthetic oligonucleotide; TTT chr11 5376073 5376094 5376078 5376073 -
ctgttcttttatatttgctgag

SEQ ID NO: 116957 - DNA, 22 bp, Artificial Sequence
  Synthetic oligonucleotide; TTC chr11 5376072 5376093 5376077 5376072 -
tgttcttttatatttgctgagg

SEQ ID NO: 116958 - DNA, 22 bp, Artificial Sequence
  Synthetic oligonucleotide; CTG chr11 5376070 5376091 5376075 5376070 -
ttcttttatatttgctgaggag

SEQ ID NO: 116959 - DNA, 22 bp, Artificial Sequence
  Synthetic oligonucleotide; TTC chr11 5376067 5376088 5376072 5376067 -
ttttatatttgctgaggagagc

SEQ ID NO: 116960 - DNA, 22 bp, Artificial Sequence
  Synthetic oligonucleotide; CTT chr11 5376065 5376086 5376070 5376065 -
ttatatttgctgaggagagctt

SEQ ID NO: 116961 - DNA, 22 bp, Artificial Sequence
  Synthetic oligonucleotide; TTT chr11 5376064 5376085 5376069 5376064 -
tatatttgctgaggagagcttt

SEQ ID NO: 116962 - DNA, 22 bp, Artificial Sequence
  Synthetic oligonucleotide; TTT chr11 5376063 5376084 5376068 5376063 -
atatttgctgaggagagcttta

SEQ ID NO: 116963 - DNA, 22 bp, Artificial Sequence
  Synthetic oligonucleotide; TTA chr11 5376062 5376083 5376067 5376062 -
tatttgctgaggagagctttac

SEQ ID NO: 116964 - DNA, 22 bp, Artificial Sequence
  Synthetic oligonucleotide; TTT chr11 5376057 5376078 5376062 5376057 -
gctgaggagagctttacttcca

SEQ ID NO: 116965 - DNA, 22 bp, Artificial Sequence
  Synthetic oligonucleotide; TTG chr11 5376056 5376077 5376061 5376056 -
ctgaggagagctttacttccaa

SEQ ID NO: 116966 - DNA, 22 bp, Artificial Sequence
  Synthetic oligonucleotide; CTG chr11 5376053 5376074 5376058 5376053 -
aggagagctttacttccaagta

SEQ ID NO: 116967 - DNA, 22 bp, Artificial Sequence
  Synthetic oligonucleotide; CTT chr11 5376043 5376064 5376048 5376043 -
tacttccaagtatgtggtcaat

SEQ ID NO: 116968 - DNA, 22 bp, Artificial Sequence
  Synthetic oligonucleotide; TTT chr11 5376042 5376063 5376047 5376042 -
acttccaagtatgtggtcaatt

SEQ ID NO: 116969 - DNA, 22 bp, Artificial Sequence
  Synthetic oligonucleotide; TTA chr11 5376041 5376062 5376046 5376041 -
cttccaagtatgtggtcaattt

SEQ ID NO: 116970 - DNA, 22 bp, Artificial Sequence
  Synthetic oligonucleotide; CTT chr11 5376038 5376059 5376043 5376038 -
ccaagtatgtggtcaattttgg

SEQ ID NO: 116971 - DNA, 22 bp, Artificial Sequence
  Synthetic oligonucleotide; TTC chr11 5376037 5376058 5376042 5376037 -
caagtatgtggtcaattttgga

SEQ ID NO: 116972 - DNA, 22 bp, Artificial Sequence
  Synthetic oligonucleotide; TTT chr11 5376019 5376040 5376024 5376019 -
tggaataggtgttgtgtggtgc

SEQ ID NO: 116973 - DNA, 22 bp, Artificial Sequence
  Synthetic oligonucleotide; TTT chr11 5376018 5376039 5376023 5376018 -
ggaataggtgttgtgtggtgct

SEQ ID NO: 116974 - DNA, 22 bp, Artificial Sequence
  Synthetic oligonucleotide; TTG chr11 5376017 5376038 5376022 5376017 -
gaataggtgttgtgtggtgctg

SEQ ID NO: 116975 - DNA, 22 bp, Artificial Sequence
  Synthetic oligonucleotide; TTG chr11 5376005 5376026 5376010 5376005 -
tgtggtgctgaaaaaaaatgta

SEQ ID NO: 116976 - DNA, 22 bp, Artificial Sequence
  Synthetic oligonucleotide; CTG chr11 5375995 5376016 5376000 5375995 -
aaaaaaaatgtatattctgttg

SEQ ID NO: 116977 - DNA, 22 bp, Artificial Sequence
  Synthetic oligonucleotide; TTC chr11 5375978 5375999 5375983 5375978 -
tgttgatttggggtggagagtt

SEQ ID NO: 116978 - DNA, 22 bp, Artificial Sequence
  Synthetic oligonucleotide; CTG chr11 5375976 5375997 5375981 5375976 -
ttgatttggggtggagagttct

SEQ ID NO: 116979 - DNA, 22 bp, Artificial Sequence
  Synthetic oligonucleotide; TTG chr11 5375973 5375994 5375978 5375973 -
atttggggtggagagttctgta

SEQ ID NO: 116980 - DNA, 22 bp, Artificial Sequence
  Synthetic oligonucleotide; TTT chr11 5375969 5375990 5375974 5375969 -
ggggtggagagttctgtagatg

SEQ ID NO: 116981 - DNA, 22 bp, Artificial Sequence
  Synthetic oligonucleotide; TTG chr11 5375968 5375989 5375973 5375968 -
gggtggagagttctgtagatgt

SEQ ID NO: 116982 - DNA, 22 bp, Artificial Sequence
  Synthetic oligonucleotide; TTC chr11 5375955 5375976 5375960 5375955 -
tgtagatgtctattaggtctgc

SEQ ID NO: 116983 - DNA, 22 bp, Artificial Sequence
  Synthetic oligonucleotide; CTG chr11 5375953 5375974 5375958 5375953 -
tagatgtctattaggtctgctt

SEQ ID NO: 116984 - DNA, 22 bp, Artificial Sequence
  Synthetic oligonucleotide; CTA chr11 5375943 5375964 5375948 5375943 -
ttaggtctgcttggtgcagagc

SEQ ID NO: 116985 - DNA, 22 bp, Artificial Sequence
  Synthetic oligonucleotide; TTA chr11 5375940 5375961 5375945 5375940 -
ggtctgcttggtgcagagctgt

SEQ ID NO: 116986 - DNA, 22 bp, Artificial Sequence
  Synthetic oligonucleotide; CTG chr11 5375934 5375955 5375939 5375934 -
cttggtgcagagctgtgttcaa

SEQ ID NO: 116987 - DNA, 22 bp, Artificial Sequence
  Synthetic oligonucleotide; CTT chr11 5375931 5375952 5375936 5375931 -
ggtgcagagctgtgttcaattc

SEQ ID NO: 116988 - DNA, 22 bp, Artificial Sequence
  Synthetic oligonucleotide; TTG chr11 5375930 5375951 5375935 5375930 -
gtgcagagctgtgttcaattcc

SEQ ID NO: 116989 - DNA, 22 bp, Artificial Sequence
  Synthetic oligonucleotide; CTG chr11 5375919 5375940 5375924 5375919 -
tgttcaattcctggatatcctt

SEQ ID NO: 116990 - DNA, 22 bp, Artificial Sequence
  Synthetic oligonucleotide; TTC chr11 5375914 5375935 5375919 5375914 -
aattcctggatatccttgttaa

SEQ ID NO: 116991 - DNA, 22 bp, Artificial Sequence
  Synthetic oligonucleotide; TTC chr11 5375909 5375930 5375914 5375909 -
ctggatatccttgttaactttc

SEQ ID NO: 116992 - DNA, 22 bp, Artificial Sequence
  Synthetic oligonucleotide; CTG chr11 5375906 5375927 5375911 5375906 -
gatatccttgttaactttctgt

SEQ ID NO: 116993 - DNA, 22 bp, Artificial Sequence
  Synthetic oligonucleotide; CTT chr11 5375897 5375918 5375902 5375897 -
gttaactttctgtctcgttgat

SEQ ID NO: 116994 - DNA, 22 bp, Artificial Sequence
  Synthetic oligonucleotide; TTG chr11 5375896 5375917 5375901 5375896 -
ttaactttctgtctcgttgatc

SEQ ID NO: 116995 - DNA, 22 bp, Artificial Sequence
  Synthetic oligonucleotide; TTA chr11 5375893 5375914 5375898 5375893 -
actttctgtctcgttgatctgt

SEQ ID NO: 116996 - DNA, 22 bp, Artificial Sequence
  Synthetic oligonucleotide; CTT chr11 5375889 5375910 5375894 5375889 -
tctgtctcgttgatctgtctaa

SEQ ID NO: 116997 - DNA, 22 bp, Artificial Sequence
  Synthetic oligonucleotide; TTT chr11 5375888 5375909 5375893 5375888 -
ctgtctcgttgatctgtctaat

SEQ ID NO: 116998 - DNA, 22 bp, Artificial Sequence
  Synthetic oligonucleotide; TTC chr11 5375887 5375908 5375892 5375887 -
tgtctcgttgatctgtctaatg

SEQ ID NO: 116999 - DNA, 22 bp, Artificial Sequence
  Synthetic oligonucleotide; CTG chr11 5375885 5375906 5375890 5375885 -
tctcgttgatctgtctaatgtt

SEQ ID NO: 117000 - DNA, 22 bp, Artificial Sequence
  Synthetic oligonucleotide; CTC chr11 5375881 5375902 5375886 5375881 -
gttgatctgtctaatgttgaca

SEQ ID NO: 117001 - DNA, 22 bp, Artificial Sequence
  Synthetic oligonucleotide; TTG chr11 5375877 5375898 5375882 5375877 -
atctgtctaatgttgacagtgg

SEQ ID NO: 117002 - DNA, 22 bp, Artificial Sequence
  Synthetic oligonucleotide; CTG chr11 5375872 5375893 5375877 5375872 -
tctaatgttgacagtggggtat

SEQ ID NO: 117003 - DNA, 22 bp, Artificial Sequence
  Synthetic oligonucleotide; CTA chr11 5375868 5375889 5375873 5375868 -
atgttgacagtggggtattaaa

SEQ ID NO: 117004 - DNA, 22 bp, Artificial Sequence
  Synthetic oligonucleotide; TTG chr11 5375862 5375883 5375867 5375862 -
acagtggggtattaaagtctcc

SEQ ID NO: 117005 - DNA, 22 bp, Artificial Sequence
  Synthetic oligonucleotide; TTA chr11 5375848 5375869 5375853 5375848 -
aagtctcccattattaaagtgt

SEQ ID NO: 117006 - DNA, 22 bp, Artificial Sequence
  Synthetic oligonucleotide; CTC chr11 5375841 5375862 5375846 5375841 -
ccattattaaagtgtgggagtc

SEQ ID NO: 117007 - DNA, 22 bp, Artificial Sequence
  Synthetic oligonucleotide; TTA chr11 5375835 5375856 5375840 5375835 -
ttaaagtgtgggagtctaagtc

SEQ ID NO: 117008 - DNA, 22 bp, Artificial Sequence
  Synthetic oligonucleotide; TTA chr11 5375832 5375853 5375837 5375832 -
aagtgtgggagtctaagtctct

SEQ ID NO: 117009 - DNA, 22 bp, Artificial Sequence
  Synthetic oligonucleotide; CTA chr11 5375817 5375838 5375822 5375817 -
agtctctttgtaggtctctaag

SEQ ID NO: 117010 - DNA, 22 bp, Artificial Sequence
  Synthetic oligonucleotide; CTC chr11 5375811 5375832 5375816 5375811 -
tttgtaggtctctaaggacttg

SEQ ID NO: 117011 - DNA, 22 bp, Artificial Sequence
  Synthetic oligonucleotide; CTT chr11 5375809 5375830 5375814 5375809 -
tgtaggtctctaaggacttgct

SEQ ID NO: 117012 - DNA, 22 bp, Artificial Sequence
  Synthetic oligonucleotide; TTT chr11 5375808 5375829 5375813 5375808 -
gtaggtctctaaggacttgctt

SEQ ID NO: 117013 - DNA, 22 bp, Artificial Sequence
  Synthetic oligonucleotide; TTG chr11 5375807 5375828 5375812 5375807 -
taggtctctaaggacttgcttt

SEQ ID NO: 117014 - DNA, 22 bp, Artificial Sequence
  Synthetic oligonucleotide; CTC chr11 5375799 5375820 5375804 5375799 -
taaggacttgctttatgaatct

SEQ ID NO: 117015 - DNA, 22 bp, Artificial Sequence
  Synthetic oligonucleotide; CTA chr11 5375797 5375818 5375802 5375797 -
aggacttgctttatgaatctgg

SEQ ID NO: 117016 - DNA, 22 bp, Artificial Sequence
  Synthetic oligonucleotide; CTT chr11 5375790 5375811 5375795 5375790 -
gctttatgaatctgggtgctcc

SEQ ID NO: 117017 - DNA, 22 bp, Artificial Sequence
  Synthetic oligonucleotide; TTG chr11 5375789 5375810 5375794 5375789 -
ctttatgaatctgggtgctcct

SEQ ID NO: 117018 - DNA, 22 bp, Artificial Sequence
  Synthetic oligonucleotide; CTT chr11 5375786 5375807 5375791 5375786 -
tatgaatctgggtgctcctgta

SEQ ID NO: 117019 - DNA, 22 bp, Artificial Sequence
  Synthetic oligonucleotide; TTT chr11 5375785 5375806 5375790 5375785 -
atgaatctgggtgctcctgtat

SEQ ID NO: 117020 - DNA, 22 bp, Artificial Sequence
  Synthetic oligonucleotide; TTA chr11 5375784 5375805 5375789 5375784 -
tgaatctgggtgctcctgtatt

SEQ ID NO: 117021 - DNA, 22 bp, Artificial Sequence
  Synthetic oligonucleotide; CTG chr11 5375776 5375797 5375781 5375776 -
ggtgctcctgtattgggtgcat

SEQ ID NO: 117022 - DNA, 22 bp, Artificial Sequence
  Synthetic oligonucleotide; CTC chr11 5375769 5375790 5375774 5375769 -
ctgtattgggtgcatatatatt

SEQ ID NO: 117023 - DNA, 22 bp, Artificial Sequence
  Synthetic oligonucleotide; CTG chr11 5375766 5375787 5375771 5375766 -
tattgggtgcatatatatttag

SEQ ID NO: 117024 - DNA, 22 bp, Artificial Sequence
  Synthetic oligonucleotide; TTG chr11 5375761 5375782 5375766 5375761 -
ggtgcatatatatttaggatag

SEQ ID NO: 117025 - DNA, 22 bp, Artificial Sequence
  Synthetic oligonucleotide; TTT chr11 5375746 5375767 5375751 5375746 -
aggatagttagctcttcttgtt

SEQ ID NO: 117026 - DNA, 22 bp, Artificial Sequence
  Synthetic oligonucleotide; TTA chr11 5375745 5375766 5375750 5375745 -
ggatagttagctcttcttgttg

SEQ ID NO: 117027 - DNA, 22 bp, Artificial Sequence
  Synthetic oligonucleotide; TTA chr11 5375736 5375757 5375741 5375736 -
gctcttcttgttgaattgatcc

SEQ ID NO: 117028 - DNA, 22 bp, Artificial Sequence
  Synthetic oligonucleotide; CTC chr11 5375732 5375753 5375737 5375732 -
ttcttgttgaattgatcccttt

SEQ ID NO: 117029 - DNA, 22 bp, Artificial Sequence
  Synthetic oligonucleotide; CTT chr11 5375730 5375751 5375735 5375730 -
cttgttgaattgatccctttac

SEQ ID NO: 117030 - DNA, 22 bp, Artificial Sequence
  Synthetic oligonucleotide; TTC chr11 5375729 5375750 5375734 5375729 -
ttgttgaattgatccctttacc

SEQ ID NO: 117031 - DNA, 22 bp, Artificial Sequence
  Synthetic oligonucleotide; CTT chr11 5375727 5375748 5375732 5375727 -
gttgaattgatccctttaccat

SEQ ID NO: 117032 - DNA, 22 bp, Artificial Sequence
  Synthetic oligonucleotide; TTG chr11 5375726 5375747 5375731 5375726 -
ttgaattgatccctttaccatt

SEQ ID NO: 117033 - DNA, 22 bp, Artificial Sequence
  Synthetic oligonucleotide; TTG chr11 5375723 5375744 5375728 5375723 -
aattgatccctttaccattatg

SEQ ID NO: 117034 - DNA, 22 bp, Artificial Sequence
  Synthetic oligonucleotide; TTG chr11 5375718 5375739 5375723 5375718 -
atccctttaccattatgtaatg

SEQ ID NO: 117035 - DNA, 22 bp, Artificial Sequence
  Synthetic oligonucleotide; CTT chr11 5375711 5375732 5375716 5375711 -
taccattatgtaatggccttct

SEQ ID NO: 117036 - DNA, 22 bp, Artificial Sequence
  Synthetic oligonucleotide; TTT chr11 5375710 5375731 5375715 5375710 -
accattatgtaatggccttctt

SEQ ID NO: 117037 - DNA, 22 bp, Artificial Sequence
  Synthetic oligonucleotide; TTA chr11 5375709 5375730 5375714 5375709 -
ccattatgtaatggccttcttt

SEQ ID NO: 117038 - DNA, 22 bp, Artificial Sequence
  Synthetic oligonucleotide; TTA chr11 5375703 5375724 5375708 5375703 -
tgtaatggccttctttgtctct

SEQ ID NO: 117039 - DNA, 22 bp, Artificial Sequence
  Synthetic oligonucleotide; CTT chr11 5375691 5375712 5375696 5375691 -
ctttgtctcttttgatctttgt

SEQ ID NO: 117040 - DNA, 22 bp, Artificial Sequence
  Synthetic oligonucleotide; TTC chr11 5375690 5375711 5375695 5375690 -
tttgtctcttttgatctttgtt

SEQ ID NO: 117041 - DNA, 22 bp, Artificial Sequence
  Synthetic oligonucleotide; CTT chr11 5375688 5375709 5375693 5375688 -
tgtctcttttgatctttgttgg

SEQ ID NO: 117042 - DNA, 22 bp, Artificial Sequence
  Synthetic oligonucleotide; TTT chr11 5375687 5375708 5375692 5375687 -
gtctcttttgatctttgttggt

SEQ ID NO: 117043 - DNA, 22 bp, Artificial Sequence
  Synthetic oligonucleotide; TTG chr11 5375686 5375707 5375691 5375686 -
tctcttttgatctttgttggtt

SEQ ID NO: 117044 - DNA, 22 bp, Artificial Sequence
  Synthetic oligonucleotide; CTC chr11 5375682 5375703 5375687 5375682 -
ttttgatctttgttggtttaaa

SEQ ID NO: 117045 - DNA, 22 bp, Artificial Sequence
  Synthetic oligonucleotide; CTT chr11 5375680 5375701 5375685 5375680 -
ttgatctttgttggtttaaagc

SEQ ID NO: 117046 - DNA, 22 bp, Artificial Sequence
  Synthetic oligonucleotide; TTT chr11 5375679 5375700 5375684 5375679 -
tgatctttgttggtttaaagcc

SEQ ID NO: 117047 - DNA, 22 bp, Artificial Sequence
  Synthetic oligonucleotide; TTT chr11 5375678 5375699 5375683 5375678 -
gatctttgttggtttaaagcct

SEQ ID NO: 117048 - DNA, 22 bp, Artificial Sequence
  Synthetic oligonucleotide; TTG chr11 5375677 5375698 5375682 5375677 -
atctttgttggtttaaagcctg

SEQ ID NO: 117049 - DNA, 22 bp, Artificial Sequence
  Synthetic oligonucleotide; CTT chr11 5375672 5375693 5375677 5375672 -
tgttggtttaaagcctgtttta

SEQ ID NO: 117050 - DNA, 22 bp, Artificial Sequence
  Synthetic oligonucleotide; TTT chr11 5375671 5375692 5375676 5375671 -
gttggtttaaagcctgttttat

SEQ ID NO: 117051 - DNA, 22 bp, Artificial Sequence
  Synthetic oligonucleotide; TTG chr11 5375670 5375691 5375675 5375670 -
ttggtttaaagcctgttttatc

SEQ ID NO: 117052 - DNA, 22 bp, Artificial Sequence
  Synthetic oligonucleotide; TTG chr11 5375667 5375688 5375672 5375667 -
gtttaaagcctgttttatcaga

SEQ ID NO: 117053 - DNA, 22 bp, Artificial Sequence
  Synthetic oligonucleotide; TTT chr11 5375663 5375684 5375668 5375663 -
aaagcctgttttatcagagact

SEQ ID NO: 117054 - DNA, 22 bp, Artificial Sequence
  Synthetic oligonucleotide; TTA chr11 5375662 5375683 5375667 5375662 -
aagcctgttttatcagagacta

SEQ ID NO: 117055 - DNA, 22 bp, Artificial Sequence
  Synthetic oligonucleotide; CTG chr11 5375655 5375676 5375660 5375655 -
ttttatcagagactaggattgc

SEQ ID NO: 117056 - DNA, 22 bp, Artificial Sequence
  Synthetic oligonucleotide; TTT chr11 5375652 5375673 5375657 5375652 -
tatcagagactaggattgcaac

SEQ ID NO: 117057 - DNA, 22 bp, Artificial Sequence
  Synthetic oligonucleotide; TTT chr11 5375651 5375672 5375656 5375651 -
atcagagactaggattgcaacc

SEQ ID NO: 117058 - DNA, 22 bp, Artificial Sequence
  Synthetic oligonucleotide; TTA chr11 5375650 5375671 5375655 5375650 -
tcagagactaggattgcaaccc

SEQ ID NO: 117059 - DNA, 22 bp, Artificial Sequence
  Synthetic oligonucleotide; CTA chr11 5375640 5375661 5375645 5375640 -
ggattgcaacccctgccttttt

SEQ ID NO: 117060 - DNA, 22 bp, Artificial Sequence
  Synthetic oligonucleotide; TTG chr11 5375634 5375655 5375639 5375634 -
caacccctgcctttttttgttt

SEQ ID NO: 117061 - DNA, 22 bp, Artificial Sequence
  Synthetic oligonucleotide; CTG chr11 5375625 5375646 5375630 5375625 -
cctttttttgttttccatttgc

SEQ ID NO: 117062 - DNA, 22 bp, Artificial Sequence
  Synthetic oligonucleotide; CTT chr11 5375621 5375642 5375626 5375621 -
tttttgttttccatttgcttgg

SEQ ID NO: 117063 - DNA, 22 bp, Artificial Sequence
  Synthetic oligonucleotide; TTT chr11 5375620 5375641 5375625 5375620 -
ttttgttttccatttgcttggt

SEQ ID NO: 117064 - DNA, 22 bp, Artificial Sequence
  Synthetic oligonucleotide; TTT chr11 5375619 5375640 5375624 5375619 -
tttgttttccatttgcttggta

SEQ ID NO: 117065 - DNA, 22 bp, Artificial Sequence
  Synthetic oligonucleotide; TTT chr11 5375618 5375639 5375623 5375618 -
ttgttttccatttgcttggtag

SEQ ID NO: 117066 - DNA, 22 bp, Artificial Sequence
  Synthetic oligonucleotide; TTT chr11 5375617 5375638 5375622 5375617 -
tgttttccatttgcttggtaga

SEQ ID NO: 117067 - DNA, 22 bp, Artificial Sequence
  Synthetic oligonucleotide; TTT chr11 5375616 5375637 5375621 5375616 -
gttttccatttgcttggtagat

SEQ ID NO: 117068 - DNA, 22 bp, Artificial Sequence
  Synthetic oligonucleotide; TTG chr11 5375615 5375636 5375620 5375615 -
ttttccatttgcttggtagatc

SEQ ID NO: 117069 - DNA, 22 bp, Artificial Sequence
  Synthetic oligonucleotide; TTT chr11 5375612 5375633 5375617 5375612 -
tccatttgcttggtagatcttc

SEQ ID NO: 117070 - DNA, 22 bp, Artificial Sequence
  Synthetic oligonucleotide; TTT chr11 5375611 5375632 5375616 5375611 -
ccatttgcttggtagatcttcc

SEQ ID NO: 117071 - DNA, 22 bp, Artificial Sequence
  Synthetic oligonucleotide; TTC chr11 5375610 5375631 5375615 5375610 -
catttgcttggtagatcttcct

SEQ ID NO: 117072 - DNA, 22 bp, Artificial Sequence
  Synthetic oligonucleotide; TTT chr11 5375605 5375626 5375610 5375605 -
gcttggtagatcttcctccatc

SEQ ID NO: 117073 - DNA, 22 bp, Artificial Sequence
  Synthetic oligonucleotide; TTG chr11 5375604 5375625 5375609 5375604 -
cttggtagatcttcctccatcc

SEQ ID NO: 117074 - DNA, 22 bp, Artificial Sequence
  Synthetic oligonucleotide; CTT chr11 5375601 5375622 5375606 5375601 -
ggtagatcttcctccatccttt

SEQ ID NO: 117075 - DNA, 22 bp, Artificial Sequence
  Synthetic oligonucleotide; TTG chr11 5375600 5375621 5375605 5375600 -
gtagatcttcctccatcctttt

SEQ ID NO: 117076 - DNA, 22 bp, Artificial Sequence
  Synthetic oligonucleotide; CTT chr11 5375591 5375612 5375596 5375591 -
cctccatccttttattttgagc

SEQ ID NO: 117077 - DNA, 22 bp, Artificial Sequence
  Synthetic oligonucleotide; TTC chr11 5375590 5375611 5375595 5375590 -
ctccatccttttattttgagcc

SEQ ID NO: 117078 - DNA, 22 bp, Artificial Sequence
  Synthetic oligonucleotide; CTC chr11 5375587 5375608 5375592 5375587 -
catccttttattttgagcctat

SEQ ID NO: 117079 - DNA, 22 bp, Artificial Sequence
  Synthetic oligonucleotide; CTT chr11 5375580 5375601 5375585 5375580 -
ttattttgagcctatgtgtgtg

SEQ ID NO: 117080 - DNA, 22 bp, Artificial Sequence
  Synthetic oligonucleotide; TTT chr11 5375579 5375600 5375584 5375579 -
tattttgagcctatgtgtgtgt

SEQ ID NO: 117081 - DNA, 22 bp, Artificial Sequence
  Synthetic oligonucleotide; TTT chr11 5375578 5375599 5375583 5375578 -
attttgagcctatgtgtgtgtg

SEQ ID NO: 117082 - DNA, 22 bp, Artificial Sequence
  Synthetic oligonucleotide; TTA chr11 5375577 5375598 5375582 5375577 -
ttttgagcctatgtgtgtgtgt

SEQ ID NO: 117083 - DNA, 22 bp, Artificial Sequence
  Synthetic oligonucleotide; TTT chr11 5375574 5375595 5375579 5375574 -
tgagcctatgtgtgtgtgtgca

SEQ ID NO: 117084 - DNA, 22 bp, Artificial Sequence
  Synthetic oligonucleotide; TTT chr11 5375573 5375594 5375578 5375573 -
gagcctatgtgtgtgtgtgcac

SEQ ID NO: 117085 - DNA, 22 bp, Artificial Sequence
  Synthetic oligonucleotide; TTG chr11 5375572 5375593 5375577 5375572 -
agcctatgtgtgtgtgtgcaca

SEQ ID NO: 117086 - DNA, 22 bp, Artificial Sequence
  Synthetic oligonucleotide; CTA chr11 5375566 5375587 5375571 5375566 -
tgtgtgtgtgtgcacatgagat

SEQ ID NO: 117087 - DNA, 22 bp, Artificial Sequence
  Synthetic oligonucleotide; TTT chr11 5375538 5375559 5375543 5375538 -
cctgaatacactctttatccaa

SEQ ID NO: 117088 - DNA, 22 bp, Artificial Sequence
  Synthetic oligonucleotide; TTC chr11 5375537 5375558 5375542 5375537 -
ctgaatacactctttatccaat

SEQ ID NO: 117089 - DNA, 22 bp, Artificial Sequence
  Synthetic oligonucleotide; CTG chr11 5375534 5375555 5375539 5375534 -
aatacactctttatccaatttg

SEQ ID NO: 117090 - DNA, 22 bp, Artificial Sequence
  Synthetic oligonucleotide; CTC chr11 5375525 5375546 5375530 5375525 -
tttatccaatttgccagtctgt

SEQ ID NO: 117091 - DNA, 22 bp, Artificial Sequence
  Synthetic oligonucleotide; CTT chr11 5375523 5375544 5375528 5375523 -
tatccaatttgccagtctgtgt

SEQ ID NO: 117092 - DNA, 22 bp, Artificial Sequence
  Synthetic oligonucleotide; TTT chr11 5375522 5375543 5375527 5375522 -
atccaatttgccagtctgtgtc

SEQ ID NO: 117093 - DNA, 22 bp, Artificial Sequence
  Synthetic oligonucleotide; TTA chr11 5375521 5375542 5375526 5375521 -
tccaatttgccagtctgtgtct

SEQ ID NO: 117094 - DNA, 22 bp, Artificial Sequence
  Synthetic oligonucleotide; TTT chr11 5375513 5375534 5375518 5375513 -
gccagtctgtgtctttcaattg

SEQ ID NO: 117095 - DNA, 22 bp, Artificial Sequence
  Synthetic oligonucleotide; TTG chr11 5375512 5375533 5375517 5375512 -
ccagtctgtgtctttcaattgg

SEQ ID NO: 117096 - DNA, 22 bp, Artificial Sequence
  Synthetic oligonucleotide; CTG chr11 5375504 5375525 5375509 5375504 -
tgtctttcaattggagcactta

SEQ ID NO: 117097 - DNA, 22 bp, Artificial Sequence
  Synthetic oligonucleotide; CTT chr11 5375498 5375519 5375503 5375498 -
tcaattggagcacttagtccat

SEQ ID NO: 117098 - DNA, 22 bp, Artificial Sequence
  Synthetic oligonucleotide; TTT chr11 5375497 5375518 5375502 5375497 -
caattggagcacttagtccatt

SEQ ID NO: 117099 - DNA, 22 bp, Artificial Sequence
  Synthetic oligonucleotide; TTC chr11 5375496 5375517 5375501 5375496 -
aattggagcacttagtccattt

SEQ ID NO: 117100 - DNA, 22 bp, Artificial Sequence
  Synthetic oligonucleotide; TTG chr11 5375491 5375512 5375496 5375491 -
gagcacttagtccatttacatt

SEQ ID NO: 117101 - DNA, 22 bp, Artificial Sequence
  Synthetic oligonucleotide; CTT chr11 5375483 5375504 5375488 5375483 -
agtccatttacatttaaagtta

SEQ ID NO: 117102 - DNA, 22 bp, Artificial Sequence
  Synthetic oligonucleotide; TTA chr11 5375482 5375503 5375487 5375482 -
gtccatttacatttaaagttaa

SEQ ID NO: 117103 - DNA, 22 bp, Artificial Sequence
  Synthetic oligonucleotide; TTT chr11 5375474 5375495 5375479 5375474 -
acatttaaagttaatattgtat

SEQ ID NO: 117104 - DNA, 22 bp, Artificial Sequence
  Synthetic oligonucleotide; TTA chr11 5375473 5375494 5375478 5375473 -
catttaaagttaatattgtatg

SEQ ID NO: 117105 - DNA, 22 bp, Artificial Sequence
  Synthetic oligonucleotide; TTT chr11 5375468 5375489 5375473 5375468 -
aaagttaatattgtatgtgtga

SEQ ID NO: 117106 - DNA, 22 bp, Artificial Sequence
  Synthetic oligonucleotide; TTA chr11 5375467 5375488 5375472 5375467 -
aagttaatattgtatgtgtgaa

SEQ ID NO: 117107 - DNA, 22 bp, Artificial Sequence
  Synthetic oligonucleotide; TTA chr11 5375461 5375482 5375466 5375461 -
atattgtatgtgtgaatttgat

SEQ ID NO: 117108 - DNA, 22 bp, Artificial Sequence
  Synthetic oligonucleotide; TTG chr11 5375455 5375476 5375460 5375455 -
tatgtgtgaatttgatcctgtc

SEQ ID NO: 117109 - DNA, 22 bp, Artificial Sequence
  Synthetic oligonucleotide; TTT chr11 5375442 5375463 5375447 5375442 -
gatcctgtcattatgatagctg

SEQ ID NO: 117110 - DNA, 22 bp, Artificial Sequence
  Synthetic oligonucleotide; TTG chr11 5375441 5375462 5375446 5375441 -
atcctgtcattatgatagctgg

SEQ ID NO: 117111 - DNA, 22 bp, Artificial Sequence
  Synthetic oligonucleotide; CTG chr11 5375435 5375456 5375440 5375435 -
tcattatgatagctggttattt

SEQ ID NO: 117112 - DNA, 22 bp, Artificial Sequence
  Synthetic oligonucleotide; TTA chr11 5375429 5375450 5375434 5375429 -
tgatagctggttattttgctcg

SEQ ID NO: 117113 - DNA, 22 bp, Artificial Sequence
  Synthetic oligonucleotide; CTG chr11 5375420 5375441 5375425 5375420 -
gttattttgctcgttagttgat

SEQ ID NO: 117114 - DNA, 22 bp, Artificial Sequence
  Synthetic oligonucleotide; TTA chr11 5375416 5375437 5375421 5375416 -
ttttgctcgttagttgatgcag

SEQ ID NO: 117115 - DNA, 22 bp, Artificial Sequence
  Synthetic oligonucleotide; TTT chr11 5375413 5375434 5375418 5375413 -
tgctcgttagttgatgcagttt

SEQ ID NO: 117116 - DNA, 22 bp, Artificial Sequence
  Synthetic oligonucleotide; TTT chr11 5375412 5375433 5375417 5375412 -
gctcgttagttgatgcagtttc

SEQ ID NO: 117117 - DNA, 22 bp, Artificial Sequence
  Synthetic oligonucleotide; TTG chr11 5375411 5375432 5375416 5375411 -
ctcgttagttgatgcagtttct

SEQ ID NO: 117118 - DNA, 22 bp, Artificial Sequence
  Synthetic oligonucleotide; CTC chr11 5375408 5375429 5375413 5375408 -
gttagttgatgcagtttcttcc

SEQ ID NO: 117119 - DNA, 22 bp, Artificial Sequence
  Synthetic oligonucleotide; TTA chr11 5375404 5375425 5375409 5375404 -
gttgatgcagtttcttcctagt

SEQ ID NO: 117120 - DNA, 22 bp, Artificial Sequence
  Synthetic oligonucleotide; TTG chr11 5375400 5375421 5375405 5375400 -
atgcagtttcttcctagtcttg

SEQ ID NO: 117121 - DNA, 22 bp, Artificial Sequence
  Synthetic oligonucleotide; TTT chr11 5375391 5375412 5375396 5375391 -
cttcctagtcttgatggtcttc

SEQ ID NO: 117122 - DNA, 22 bp, Artificial Sequence
  Synthetic oligonucleotide; TTC chr11 5375390 5375411 5375395 5375390 -
ttcctagtcttgatggtcttca

SEQ ID NO: 117123 - DNA, 22 bp, Artificial Sequence
  Synthetic oligonucleotide; CTT chr11 5375388 5375409 5375393 5375388 -
cctagtcttgatggtcttcaca

SEQ ID NO: 117124 - DNA, 22 bp, Artificial Sequence
  Synthetic oligonucleotide; TTC chr11 5375387 5375408 5375392 5375387 -
ctagtcttgatggtcttcacat

SEQ ID NO: 117125 - DNA, 22 bp, Artificial Sequence
  Synthetic oligonucleotide; CTA chr11 5375384 5375405 5375389 5375384 -
gtcttgatggtcttcacatttt

SEQ ID NO: 117126 - DNA, 22 bp, Artificial Sequence
  Synthetic oligonucleotide; CTT chr11 5375379 5375400 5375384 5375379 -
gatggtcttcacattttggcct

SEQ ID NO: 117127 - DNA, 22 bp, Artificial Sequence
  Synthetic oligonucleotide; TTG chr11 5375378 5375399 5375383 5375378 -
atggtcttcacattttggcctg

SEQ ID NO: 117128 - DNA, 22 bp, Artificial Sequence
  Synthetic oligonucleotide; CTT chr11 5375370 5375391 5375375 5375370 -
cacattttggcctgattttgca

SEQ ID NO: 117129 - DNA, 22 bp, Artificial Sequence
  Synthetic oligonucleotide; TTC chr11 5375369 5375390 5375374 5375369 -
acattttggcctgattttgcag

SEQ ID NO: 117130 - DNA, 22 bp, Artificial Sequence
  Synthetic oligonucleotide; TTT chr11 5375363 5375384 5375368 5375363 -
tggcctgattttgcagtggctg

SEQ ID NO: 117131 - DNA, 22 bp, Artificial Sequence
  Synthetic oligonucleotide; TTT chr11 5375362 5375383 5375367 5375362 -
ggcctgattttgcagtggctgg

SEQ ID NO: 117132 - DNA, 22 bp, Artificial Sequence
  Synthetic oligonucleotide; TTG chr11 5375361 5375382 5375366 5375361 -
gcctgattttgcagtggctggt

SEQ ID NO: 117133 - DNA, 22 bp, Artificial Sequence
  Synthetic oligonucleotide; CTG chr11 5375356 5375377 5375361 5375356 -
attttgcagtggctggtaccgg

SEQ ID NO: 117134 - DNA, 22 bp, Artificial Sequence
  Synthetic oligonucleotide; TTT chr11 5375352 5375373 5375357 5375352 -
tgcagtggctggtaccggttgt

SEQ ID NO: 117135 - DNA, 22 bp, Artificial Sequence
  Synthetic oligonucleotide; TTT chr11 5375351 5375372 5375356 5375351 -
gcagtggctggtaccggttgtg

SEQ ID NO: 117136 - DNA, 22 bp, Artificial Sequence
  Synthetic oligonucleotide; TTG chr11 5375350 5375371 5375355 5375350 -
cagtggctggtaccggttgtgc

SEQ ID NO: 117137 - DNA, 22 bp, Artificial Sequence
  Synthetic oligonucleotide; CTG chr11 5375341 5375362 5375346 5375341 -
gtaccggttgtgcctttccatg

SEQ ID NO: 117138 - DNA, 22 bp, Artificial Sequence
  Synthetic oligonucleotide; TTG chr11 5375331 5375352 5375336 5375331 -
tgcctttccatgtttagtgctt

SEQ ID NO: 117139 - DNA, 22 bp, Artificial Sequence
  Synthetic oligonucleotide; CTT chr11 5375325 5375346 5375330 5375325 -
tccatgtttagtgcttccttca

SEQ ID NO: 117140 - DNA, 22 bp, Artificial Sequence
  Synthetic oligonucleotide; TTT chr11 5375324 5375345 5375329 5375324 -
ccatgtttagtgcttccttcag

SEQ ID NO: 117141 - DNA, 22 bp, Artificial Sequence
  Synthetic oligonucleotide; TTC chr11 5375323 5375344 5375328 5375323 -
catgtttagtgcttccttcagg

SEQ ID NO: 117142 - DNA, 22 bp, Artificial Sequence
  Synthetic oligonucleotide; TTT chr11 5375316 5375337 5375321 5375316 -
agtgcttccttcaggagctctt

SEQ ID NO: 117143 - DNA, 22 bp, Artificial Sequence
  Synthetic oligonucleotide; TTA chr11 5375315 5375336 5375320 5375315 -
gtgcttccttcaggagctcttt

SEQ ID NO: 117144 - DNA, 22 bp, Artificial Sequence
  Synthetic oligonucleotide; CTT chr11 5375309 5375330 5375314 5375309 -
ccttcaggagctcttttaggtc

SEQ ID NO: 117145 - DNA, 22 bp, Artificial Sequence
  Synthetic oligonucleotide; TTC chr11 5375308 5375329 5375313 5375308 -
cttcaggagctcttttaggtca

SEQ ID NO: 117146 - DNA, 22 bp, Artificial Sequence
  Synthetic oligonucleotide; CTT chr11 5375305 5375326 5375310 5375305 -
caggagctcttttaggtcaggc

SEQ ID NO: 117147 - DNA, 22 bp, Artificial Sequence
  Synthetic oligonucleotide; TTC chr11 5375304 5375325 5375309 5375304 -
aggagctcttttaggtcaggcc

SEQ ID NO: 117148 - DNA, 22 bp, Artificial Sequence
  Synthetic oligonucleotide; CTC chr11 5375296 5375317 5375301 5375296 -
ttttaggtcaggcctggtgatg

SEQ ID NO: 117149 - DNA, 22 bp, Artificial Sequence
  Synthetic oligonucleotide; CTT chr11 5375294 5375315 5375299 5375294 -
ttaggtcaggcctggtgatgac

SEQ ID NO: 117150 - DNA, 22 bp, Artificial Sequence
  Synthetic oligonucleotide; TTT chr11 5375293 5375314 5375298 5375293 -
taggtcaggcctggtgatgaca

SEQ ID NO: 117151 - DNA, 22 bp, Artificial Sequence
  Synthetic oligonucleotide; TTT chr11 5375292 5375313 5375297 5375292 -
aggtcaggcctggtgatgacaa

SEQ ID NO: 117152 - DNA, 22 bp, Artificial Sequence
  Synthetic oligonucleotide; TTA chr11 5375291 5375312 5375296 5375291 -
ggtcaggcctggtgatgacaaa

SEQ ID NO: 117153 - DNA, 22 bp, Artificial Sequence
  Synthetic oligonucleotide; CTG chr11 5375280 5375301 5375285 5375280 -
gtgatgacaaaatctctcagca

SEQ ID NO: 117154 - DNA, 22 bp, Artificial Sequence
  Synthetic oligonucleotide; CTC chr11 5375264 5375285 5375269 5375264 -
tcagcatttgcttgtctgtaaa

SEQ ID NO: 117155 - DNA, 22 bp, Artificial Sequence
  Synthetic oligonucleotide; CTC chr11 5375262 5375283 5375267 5375262 -
agcatttgcttgtctgtaaagt

SEQ ID NO: 117156 - DNA, 22 bp, Artificial Sequence
  Synthetic oligonucleotide; TTT chr11 5375255 5375276 5375260 5375255 -
gcttgtctgtaaagtattttat

SEQ ID NO: 117157 - DNA, 22 bp, Artificial Sequence
  Synthetic oligonucleotide; TTG chr11 5375254 5375275 5375259 5375254 -
cttgtctgtaaagtattttatt

SEQ ID NO: 117158 - DNA, 22 bp, Artificial Sequence
  Synthetic oligonucleotide; CTT chr11 5375251 5375272 5375256 5375251 -
gtctgtaaagtattttatttct

SEQ ID NO: 117159 - DNA, 22 bp, Artificial Sequence
  Synthetic oligonucleotide; TTG chr11 5375250 5375271 5375255 5375250 -
tctgtaaagtattttatttctc

SEQ ID NO: 117160 - DNA, 22 bp, Artificial Sequence
  Synthetic oligonucleotide; CTG chr11 5375246 5375267 5375251 5375246 -
taaagtattttatttctccttc

SEQ ID NO: 117161 - DNA, 22 bp, Artificial Sequence
  Synthetic oligonucleotide; TTT chr11 5375236 5375257 5375241 5375236 -
tatttctccttcacttatgaag

SEQ ID NO: 117162 - DNA, 22 bp, Artificial Sequence
  Synthetic oligonucleotide; TTT chr11 5375235 5375256 5375240 5375235 -
atttctccttcacttatgaagc

SEQ ID NO: 117163 - DNA, 22 bp, Artificial Sequence
  Synthetic oligonucleotide; TTA chr11 5375234 5375255 5375239 5375234 -
tttctccttcacttatgaagct

SEQ ID NO: 117164 - DNA, 22 bp, Artificial Sequence
  Synthetic oligonucleotide; TTT chr11 5375231 5375252 5375236 5375231 -
ctccttcacttatgaagcttag

SEQ ID NO: 117165 - DNA, 22 bp, Artificial Sequence
  Synthetic oligonucleotide; TTC chr11 5375230 5375251 5375235 5375230 -
tccttcacttatgaagcttagt

SEQ ID NO: 117166 - DNA, 22 bp, Artificial Sequence
  Synthetic oligonucleotide; CTC chr11 5375228 5375249 5375233 5375228 -
cttcacttatgaagcttagttt

SEQ ID NO: 117167 - DNA, 22 bp, Artificial Sequence
  Synthetic oligonucleotide; CTT chr11 5375225 5375246 5375230 5375225 -
cacttatgaagcttagtttggc

SEQ ID NO: 117168 - DNA, 22 bp, Artificial Sequence
  Synthetic oligonucleotide; TTC chr11 5375224 5375245 5375229 5375224 -
acttatgaagcttagtttggct

SEQ ID NO: 117169 - DNA, 22 bp, Artificial Sequence
  Synthetic oligonucleotide; CTT chr11 5375220 5375241 5375225 5375220 -
atgaagcttagtttggctggat

SEQ ID NO: 117170 - DNA, 22 bp, Artificial Sequence
  Synthetic oligonucleotide; TTA chr11 5375219 5375240 5375224 5375219 -
tgaagcttagtttggctggata

SEQ ID NO: 117171 - DNA, 22 bp, Artificial Sequence
  Synthetic oligonucleotide; CTT chr11 5375211 5375232 5375216 5375211 -
agtttggctggatattaaattc

SEQ ID NO: 117172 - DNA, 22 bp, Artificial Sequence
  Synthetic oligonucleotide; TTA chr11 5375210 5375231 5375215 5375210 -
gtttggctggatattaaattct

SEQ ID NO: 117173 - DNA, 22 bp, Artificial Sequence
  Synthetic oligonucleotide; TTT chr11 5375206 5375227 5375211 5375206 -
ggctggatattaaattctgtgt

SEQ ID NO: 117174 - DNA, 22 bp, Artificial Sequence
  Synthetic oligonucleotide; TTG chr11 5375205 5375226 5375210 5375205 -
gctggatattaaattctgtgtt

SEQ ID NO: 117175 - DNA, 22 bp, Artificial Sequence
  Synthetic oligonucleotide; CTG chr11 5375201 5375222 5375206 5375201 -
gatattaaattctgtgttgaaa

SEQ ID NO: 117176 - DNA, 22 bp, Artificial Sequence
  Synthetic oligonucleotide; TTA chr11 5375194 5375215 5375199 5375194 -
aattctgtgttgaaaattcttt

SEQ ID NO: 117177 - DNA, 22 bp, Artificial Sequence
  Synthetic oligonucleotide; TTC chr11 5375189 5375210 5375194 5375189 -
tgtgttgaaaattctttccttt

SEQ ID NO: 117178 - DNA, 22 bp, Artificial Sequence
  Synthetic oligonucleotide; CTG chr11 5375187 5375208 5375192 5375187 -
tgttgaaaattctttcctttaa

SEQ ID NO: 117179 - DNA, 22 bp, Artificial Sequence
  Synthetic oligonucleotide; TTG chr11 5375182 5375203 5375187 5375182 -
aaaattctttcctttaaggatg

SEQ ID NO: 117180 - DNA, 22 bp, Artificial Sequence
  Synthetic oligonucleotide; TTC chr11 5375175 5375196 5375180 5375175 -
tttcctttaaggatgttgaata

SEQ ID NO: 117181 - DNA, 22 bp, Artificial Sequence
  Synthetic oligonucleotide; CTT chr11 5375173 5375194 5375178 5375173 -
tcctttaaggatgttgaatatt

SEQ ID NO: 117182 - DNA, 22 bp, Artificial Sequence
  Synthetic oligonucleotide; TTT chr11 5375172 5375193 5375177 5375172 -
cctttaaggatgttgaatattg

SEQ ID NO: 117183 - DNA, 22 bp, Artificial Sequence
  Synthetic oligonucleotide; TTC chr11 5375171 5375192 5375176 5375171 -
ctttaaggatgttgaatattgg

SEQ ID NO: 117184 - DNA, 22 bp, Artificial Sequence
  Synthetic oligonucleotide; CTT chr11 5375168 5375189 5375173 5375168 -
taaggatgttgaatattggccc

SEQ ID NO: 117185 - DNA, 22 bp, Artificial Sequence
  Synthetic oligonucleotide; TTT chr11 5375167 5375188 5375172 5375167 -
aaggatgttgaatattggcccc

SEQ ID NO: 117186 - DNA, 22 bp, Artificial Sequence
  Synthetic oligonucleotide; TTA chr11 5375166 5375187 5375171 5375166 -
aggatgttgaatattggccccc

SEQ ID NO: 117187 - DNA, 22 bp, Artificial Sequence
  Synthetic oligonucleotide; TTG chr11 5375157 5375178 5375162 5375157 -
aatattggcccccactctcttc

SEQ ID NO: 117188 - DNA, 22 bp, Artificial Sequence
  Synthetic oligonucleotide; TTG chr11 5375150 5375171 5375155 5375150 -
gcccccactctcttctggcttg

SEQ ID NO: 117189 - DNA, 22 bp, Artificial Sequence
  Synthetic oligonucleotide; CTC chr11 5375140 5375161 5375145 5375140 -
tcttctggcttgtagagtttct

SEQ ID NO: 117190 - DNA, 22 bp, Artificial Sequence
  Synthetic oligonucleotide; CTC chr11 5375138 5375159 5375143 5375138 -
ttctggcttgtagagtttctgc

SEQ ID NO: 117191 - DNA, 22 bp, Artificial Sequence
  Synthetic oligonucleotide; CTT chr11 5375136 5375157 5375141 5375136 -
ctggcttgtagagtttctgcca

SEQ ID NO: 117192 - DNA, 22 bp, Artificial Sequence
  Synthetic oligonucleotide; TTC chr11 5375135 5375156 5375140 5375135 -
tggcttgtagagtttctgccaa

SEQ ID NO: 117193 - DNA, 22 bp, Artificial Sequence
  Synthetic oligonucleotide; CTG chr11 5375133 5375154 5375138 5375133 -
gcttgtagagtttctgccaaga

SEQ ID NO: 117194 - DNA, 22 bp, Artificial Sequence
  Synthetic oligonucleotide; CTT chr11 5375129 5375150 5375134 5375129 -
gtagagtttctgccaagagagc

SEQ ID NO: 117195 - DNA, 22 bp, Artificial Sequence
  Synthetic oligonucleotide; TTG chr11 5375128 5375149 5375133 5375128 -
tagagtttctgccaagagagct

SEQ ID NO: 117196 - DNA, 22 bp, Artificial Sequence
  Synthetic oligonucleotide; TTT chr11 5375120 5375141 5375125 5375120 -
ctgccaagagagctgctgttag

SEQ ID NO: 117197 - DNA, 22 bp, Artificial Sequence
  Synthetic oligonucleotide; TTC chr11 5375119 5375140 5375124 5375119 -
tgccaagagagctgctgttagt

SEQ ID NO: 117198 - DNA, 22 bp, Artificial Sequence
  Synthetic oligonucleotide; CTG chr11 5375117 5375138 5375122 5375117 -
ccaagagagctgctgttagtct

SEQ ID NO: 117199 - DNA, 22 bp, Artificial Sequence
  Synthetic oligonucleotide; CTG chr11 5375105 5375126 5375110 5375105 -
ctgttagtctgatgggcttccc

SEQ ID NO: 117200 - DNA, 22 bp, Artificial Sequence
  Synthetic oligonucleotide; CTG chr11 5375102 5375123 5375107 5375102 -
ttagtctgatgggcttcccttt

SEQ ID NO: 117201 - DNA, 22 bp, Artificial Sequence
  Synthetic oligonucleotide; TTA chr11 5375099 5375120 5375104 5375099 -
gtctgatgggcttccctttgtg

SEQ ID NO: 117202 - DNA, 22 bp, Artificial Sequence
  Synthetic oligonucleotide; CTG chr11 5375094 5375115 5375099 5375094 -
atgggcttccctttgtgggtaa

SEQ ID NO: 117203 - DNA, 22 bp, Artificial Sequence
  Synthetic oligonucleotide; CTT chr11 5375086 5375107 5375091 5375086 -
ccctttgtgggtaacccgacct

SEQ ID NO: 117204 - DNA, 22 bp, Artificial Sequence
  Synthetic oligonucleotide; TTC chr11 5375085 5375106 5375090 5375085 -
cctttgtgggtaacccgacctt

SEQ ID NO: 117205 - DNA, 22 bp, Artificial Sequence
  Synthetic oligonucleotide; CTT chr11 5375081 5375102 5375086 5375081 -
tgtgggtaacccgacctttctc

SEQ ID NO: 117206 - DNA, 22 bp, Artificial Sequence
  Synthetic oligonucleotide; TTT chr11 5375080 5375101 5375085 5375080 -
gtgggtaacccgacctttctct

SEQ ID NO: 117207 - DNA, 22 bp, Artificial Sequence
  Synthetic oligonucleotide; TTG chr11 5375079 5375100 5375084 5375079 -
tgggtaacccgacctttctctc

SEQ ID NO: 117208 - DNA, 22 bp, Artificial Sequence
  Synthetic oligonucleotide; CTT chr11 5375063 5375084 5375068 5375063 -
tctctctggctgcccttaacat

SEQ ID NO: 117209 - DNA, 22 bp, Artificial Sequence
  Synthetic oligonucleotide; TTT chr11 5375062 5375083 5375067 5375062 -
ctctctggctgcccttaacatt

SEQ ID NO: 117210 - DNA, 22 bp, Artificial Sequence
  Synthetic oligonucleotide; TTC chr11 5375061 5375082 5375066 5375061 -
tctctggctgcccttaacattt

SEQ ID NO: 117211 - DNA, 22 bp, Artificial Sequence
  Synthetic oligonucleotide; CTC chr11 5375059 5375080 5375064 5375059 -
tctggctgcccttaacattttt

SEQ ID NO: 117212 - DNA, 22 bp, Artificial Sequence
  Synthetic oligonucleotide; CTC chr11 5375057 5375078 5375062 5375057 -
tggctgcccttaacattttttc

SEQ ID NO: 117213 - DNA, 22 bp, Artificial Sequence
  Synthetic oligonucleotide; CTG chr11 5375055 5375076 5375060 5375055 -
gctgcccttaacattttttcct

SEQ ID NO: 117214 - DNA, 22 bp, Artificial Sequence
  Synthetic oligonucleotide; CTG chr11 5375051 5375072 5375056 5375051 -
cccttaacattttttccttcat

SEQ ID NO: 117215 - DNA, 22 bp, Artificial Sequence
  Synthetic oligonucleotide; CTT chr11 5375046 5375067 5375051 5375046 -
aacattttttccttcatttcaa

SEQ ID NO: 117216 - DNA, 22 bp, Artificial Sequence
  Synthetic oligonucleotide; TTA chr11 5375045 5375066 5375050 5375045 -
acattttttccttcatttcaac

SEQ ID NO: 117217 - DNA, 22 bp, Artificial Sequence
  Synthetic oligonucleotide; TTT chr11 5375039 5375060 5375044 5375039 -
tttccttcatttcaactttggt

SEQ ID NO: 117218 - DNA, 22 bp, Artificial Sequence
  Synthetic oligonucleotide; TTT chr11 5375038 5375059 5375043 5375038 -
ttccttcatttcaactttggtg

SEQ ID NO: 117219 - DNA, 22 bp, Artificial Sequence
  Synthetic oligonucleotide; TTT chr11 5375037 5375058 5375042 5375037 -
tccttcatttcaactttggtga

SEQ ID NO: 117220 - DNA, 22 bp, Artificial Sequence
  Synthetic oligonucleotide; TTT chr11 5375036 5375057 5375041 5375036 -
ccttcatttcaactttggtgaa

SEQ ID NO: 117221 - DNA, 22 bp, Artificial Sequence
  Synthetic oligonucleotide; TTC chr11 5375035 5375056 5375040 5375035 -
cttcatttcaactttggtgaat

SEQ ID NO: 117222 - DNA, 22 bp, Artificial Sequence
  Synthetic oligonucleotide; CTT chr11 5375032 5375053 5375037 5375032 -
catttcaactttggtgaatctg

SEQ ID NO: 117223 - DNA, 22 bp, Artificial Sequence
  Synthetic oligonucleotide; TTC chr11 5375031 5375052 5375036 5375031 -
atttcaactttggtgaatctga

SEQ ID NO: 117224 - DNA, 22 bp, Artificial Sequence
  Synthetic oligonucleotide; TTT chr11 5375027 5375048 5375032 5375027 -
caactttggtgaatctgacaat

SEQ ID NO: 117225 - DNA, 22 bp, Artificial Sequence
  Synthetic oligonucleotide; TTC chr11 5375026 5375047 5375031 5375026 -
aactttggtgaatctgacaatt

SEQ ID NO: 117226 - DNA, 22 bp, Artificial Sequence
  Synthetic oligonucleotide; CTT chr11 5375021 5375042 5375026 5375021 -
tggtgaatctgacaattatgtg

SEQ ID NO: 117227 - DNA, 22 bp, Artificial Sequence
  Synthetic oligonucleotide; TTT chr11 5375020 5375041 5375025 5375020 -
ggtgaatctgacaattatgtgt

SEQ ID NO: 117228 - DNA, 22 bp, Artificial Sequence
  Synthetic oligonucleotide; TTG chr11 5375019 5375040 5375024 5375019 -
gtgaatctgacaattatgtgtc

SEQ ID NO: 117229 - DNA, 22 bp, Artificial Sequence
  Synthetic oligonucleotide; CTG chr11 5375010 5375031 5375015 5375010 -
acaattatgtgtcttggagttg

SEQ ID NO: 117230 - DNA, 22 bp, Artificial Sequence
  Synthetic oligonucleotide; TTA chr11 5375003 5375024 5375008 5375003 -
tgtgtcttggagttgctcttct

SEQ ID NO: 117231 - DNA, 22 bp, Artificial Sequence
  Synthetic oligonucleotide; CTT chr11 5374995 5375016 5375000 5374995 -
ggagttgctcttctcgaggagt

SEQ ID NO: 117232 - DNA, 22 bp, Artificial Sequence
  Synthetic oligonucleotide; TTG chr11 5374994 5375015 5374999 5374994 -
gagttgctcttctcgaggagta

SEQ ID NO: 117233 - DNA, 22 bp, Artificial Sequence
  Synthetic oligonucleotide; TTG chr11 5374988 5375009 5374993 5374988 -
ctcttctcgaggagtatgtttg

SEQ ID NO: 117234 - DNA, 22 bp, Artificial Sequence
  Synthetic oligonucleotide; CTC chr11 5374985 5375006 5374990 5374985 -
ttctcgaggagtatgtttgtgg

SEQ ID NO: 117235 - DNA, 22 bp, Artificial Sequence
  Synthetic oligonucleotide; CTT chr11 5374983 5375004 5374988 5374983 -
ctcgaggagtatgtttgtggcg

SEQ ID NO: 117236 - DNA, 22 bp, Artificial Sequence
  Synthetic oligonucleotide; TTC chr11 5374982 5375003 5374987 5374982 -
tcgaggagtatgtttgtggcgt

SEQ ID NO: 117237 - DNA, 22 bp, Artificial Sequence
  Synthetic oligonucleotide; CTC chr11 5374980 5375001 5374985 5374980 -
gaggagtatgtttgtggcgttc

SEQ ID NO: 117238 - DNA, 22 bp, Artificial Sequence
  Synthetic oligonucleotide; TTT chr11 5374967 5374988 5374972 5374967 -
gtggcgttctctgtatttcctg

SEQ ID NO: 117239 - DNA, 22 bp, Artificial Sequence
  Synthetic oligonucleotide; TTG chr11 5374966 5374987 5374971 5374966 -
tggcgttctctgtatttcctga

SEQ ID NO: 117240 - DNA, 22 bp, Artificial Sequence
  Synthetic oligonucleotide; TTC chr11 5374958 5374979 5374963 5374958 -
tctgtatttcctgaatctgaat

SEQ ID NO: 117241 - DNA, 22 bp, Artificial Sequence
  Synthetic oligonucleotide; CTC chr11 5374956 5374977 5374961 5374956 -
tgtatttcctgaatctgaatgt

SEQ ID NO: 117242 - DNA, 22 bp, Artificial Sequence
  Synthetic oligonucleotide; CTG chr11 5374954 5374975 5374959 5374954 -
tatttcctgaatctgaatgttg

SEQ ID NO: 117243 - DNA, 22 bp, Artificial Sequence
  Synthetic oligonucleotide; TTT chr11 5374949 5374970 5374954 5374949 -
cctgaatctgaatgttggcctg

SEQ ID NO: 117244 - DNA, 22 bp, Artificial Sequence
  Synthetic oligonucleotide; TTC chr11 5374948 5374969 5374953 5374948 -
ctgaatctgaatgttggcctgc

SEQ ID NO: 117245 - DNA, 22 bp, Artificial Sequence
  Synthetic oligonucleotide; CTG chr11 5374945 5374966 5374950 5374945 -
aatctgaatgttggcctgcctt

SEQ ID NO: 117246 - DNA, 22 bp, Artificial Sequence
  Synthetic oligonucleotide; CTG chr11 5374939 5374960 5374944 5374939 -
aatgttggcctgccttgctaga

SEQ ID NO: 117247 - DNA, 22 bp, Artificial Sequence
  Synthetic oligonucleotide; TTG chr11 5374932 5374953 5374937 5374932 -
gcctgccttgctagattgggga

SEQ ID NO: 117248 - DNA, 22 bp, Artificial Sequence
  Synthetic oligonucleotide; CTG chr11 5374927 5374948 5374932 5374927 -
ccttgctagattggggaagttc

SEQ ID NO: 117249 - DNA, 22 bp, Artificial Sequence
  Synthetic oligonucleotide; CTT chr11 5374923 5374944 5374928 5374923 -
gctagattggggaagttctcct

SEQ ID NO: 117250 - DNA, 22 bp, Artificial Sequence
  Synthetic oligonucleotide; TTG chr11 5374922 5374943 5374927 5374922 -
ctagattggggaagttctcctg

SEQ ID NO: 117251 - DNA, 22 bp, Artificial Sequence
  Synthetic oligonucleotide; CTA chr11 5374919 5374940 5374924 5374919 -
gattggggaagttctcctggat

SEQ ID NO: 117252 - DNA, 22 bp, Artificial Sequence
  Synthetic oligonucleotide; TTG chr11 5374914 5374935 5374919 5374914 -
gggaagttctcctggataatat

SEQ ID NO: 117253 - DNA, 22 bp, Artificial Sequence
  Synthetic oligonucleotide; TTC chr11 5374905 5374926 5374910 5374905 -
tcctggataatatcctgcagag

SEQ ID NO: 117254 - DNA, 22 bp, Artificial Sequence
  Synthetic oligonucleotide; CTC chr11 5374903 5374924 5374908 5374903 -
ctggataatatcctgcagagtg

SEQ ID NO: 117255 - DNA, 22 bp, Artificial Sequence
  Synthetic oligonucleotide; CTG chr11 5374900 5374921 5374905 5374900 -
gataatatcctgcagagtgttt

SEQ ID NO: 117256 - DNA, 22 bp, Artificial Sequence
  Synthetic oligonucleotide; CTG chr11 5374888 5374909 5374893 5374888 -
cagagtgttttccaacttggtt

SEQ ID NO: 117257 - DNA, 22 bp, Artificial Sequence
  Synthetic oligonucleotide; TTT chr11 5374878 5374899 5374883 5374878 -
tccaacttggttcgattctccc

SEQ ID NO: 117258 - DNA, 22 bp, Artificial Sequence
  Synthetic oligonucleotide; TTT chr11 5374877 5374898 5374882 5374877 -
ccaacttggttcgattctcccc

SEQ ID NO: 117259 - DNA, 22 bp, Artificial Sequence
  Synthetic oligonucleotide; TTC chr11 5374876 5374897 5374881 5374876 -
caacttggttcgattctccccg

SEQ ID NO: 117260 - DNA, 22 bp, Artificial Sequence
  Synthetic oligonucleotide; CTT chr11 5374870 5374891 5374875 5374870 -
ggttcgattctccccgtcactt

SEQ ID NO: 117261 - DNA, 22 bp, Artificial Sequence
  Synthetic oligonucleotide; TTG chr11 5374869 5374890 5374874 5374869 -
gttcgattctccccgtcacttt

SEQ ID NO: 117262 - DNA, 22 bp, Artificial Sequence
  Synthetic oligonucleotide; TTC chr11 5374865 5374886 5374870 5374865 -
gattctccccgtcactttcagg

SEQ ID NO: 117263 - DNA, 22 bp, Artificial Sequence
  Synthetic oligonucleotide; TTC chr11 5374860 5374881 5374865 5374860 -
tccccgtcactttcaggtacac

SEQ ID NO: 117264 - DNA, 22 bp, Artificial Sequence
  Synthetic oligonucleotide; CTC chr11 5374858 5374879 5374863 5374858 -
cccgtcactttcaggtacacca

SEQ ID NO: 117265 - DNA, 22 bp, Artificial Sequence
  Synthetic oligonucleotide; CTT chr11 5374848 5374869 5374853 5374848 -
tcaggtacaccaatcagaccta

SEQ ID NO: 117266 - DNA, 22 bp, Artificial Sequence
  Synthetic oligonucleotide; TTT chr11 5374847 5374868 5374852 5374847 -
caggtacaccaatcagacctag

SEQ ID NO: 117267 - DNA, 22 bp, Artificial Sequence
  Synthetic oligonucleotide; TTC chr11 5374846 5374867 5374851 5374846 -
aggtacaccaatcagacctaga

SEQ ID NO: 117268 - DNA, 22 bp, Artificial Sequence
  Synthetic oligonucleotide; CTA chr11 5374826 5374847 5374831 5374826 -
gatttgatcttttcacatagtc

SEQ ID NO: 117269 - DNA, 22 bp, Artificial Sequence
  Synthetic oligonucleotide; TTT chr11 5374821 5374842 5374826 5374821 -
gatcttttcacatagtcccata

SEQ ID NO: 117270 - DNA, 22 bp, Artificial Sequence
  Synthetic oligonucleotide; TTG chr11 5374820 5374841 5374825 5374820 -
atcttttcacatagtcccatat

SEQ ID NO: 117271 - DNA, 22 bp, Artificial Sequence
  Synthetic oligonucleotide; CTT chr11 5374815 5374836 5374820 5374815 -
ttcacatagtcccatatttctt

SEQ ID NO: 117272 - DNA, 22 bp, Artificial Sequence
  Synthetic oligonucleotide; TTT chr11 5374814 5374835 5374819 5374814 -
tcacatagtcccatatttcttg

SEQ ID NO: 117273 - DNA, 22 bp, Artificial Sequence
  Synthetic oligonucleotide; TTT chr11 5374813 5374834 5374818 5374813 -
cacatagtcccatatttcttgg

SEQ ID NO: 117274 - DNA, 22 bp, Artificial Sequence
  Synthetic oligonucleotide; TTC chr11 5374812 5374833 5374817 5374812 -
acatagtcccatatttcttgga

SEQ ID NO: 117275 - DNA, 22 bp, Artificial Sequence
  Synthetic oligonucleotide; TTT chr11 5374796 5374817 5374801 5374796 -
cttggaggctttgttcatttct

SEQ ID NO: 117276 - DNA, 22 bp, Artificial Sequence
  Synthetic oligonucleotide; TTC chr11 5374795 5374816 5374800 5374795 -
ttggaggctttgttcatttctt

SEQ ID NO: 117277 - DNA, 22 bp, Artificial Sequence
  Synthetic oligonucleotide; CTT chr11 5374793 5374814 5374798 5374793 -
ggaggctttgttcatttctttt

SEQ ID NO: 117278 - DNA, 22 bp, Artificial Sequence
  Synthetic oligonucleotide; TTG chr11 5374792 5374813 5374797 5374792 -
gaggctttgttcatttcttttt

SEQ ID NO: 117279 - DNA, 22 bp, Artificial Sequence
  Synthetic oligonucleotide; CTT chr11 5374785 5374806 5374790 5374785 -
tgttcatttctttttattcttt

SEQ ID NO: 117280 - DNA, 22 bp, Artificial Sequence
  Synthetic oligonucleotide; TTT chr11 5374784 5374805 5374789 5374784 -
gttcatttctttttattctttt

SEQ ID NO: 117281 - DNA, 22 bp, Artificial Sequence
  Synthetic oligonucleotide; TTG chr11 5374783 5374804 5374788 5374783 -
ttcatttctttttattcttttt

SEQ ID NO: 117282 - DNA, 22 bp, Artificial Sequence
  Synthetic oligonucleotide; TTC chr11 5374780 5374801 5374785 5374780 -
atttctttttattcttttttct

SEQ ID NO: 117283 - DNA, 22 bp, Artificial Sequence
  Synthetic oligonucleotide; TTT chr11 5374776 5374797 5374781 5374776 -
ctttttattcttttttctctaa

SEQ ID NO: 117284 - DNA, 22 bp, Artificial Sequence
  Synthetic oligonucleotide; TTC chr11 5374775 5374796 5374780 5374775 -
tttttattcttttttctctaaa

SEQ ID NO: 117285 - DNA, 22 bp, Artificial Sequence
  Synthetic oligonucleotide; CTT chr11 5374773 5374794 5374778 5374773 -
tttattcttttttctctaaact

SEQ ID NO: 117286 - DNA, 22 bp, Artificial Sequence
  Synthetic oligonucleotide; TTT chr11 5374772 5374793 5374777 5374772 -
ttattcttttttctctaaactt

SEQ ID NO: 117287 - DNA, 22 bp, Artificial Sequence
  Synthetic oligonucleotide; TTT chr11 5374771 5374792 5374776 5374771 -
tattcttttttctctaaacttc

SEQ ID NO: 117288 - DNA, 22 bp, Artificial Sequence
  Synthetic oligonucleotide; TTT chr11 5374770 5374791 5374775 5374770 -
attcttttttctctaaacttcc

SEQ ID NO: 117289 - DNA, 22 bp, Artificial Sequence
  Synthetic oligonucleotide; TTA chr11 5374769 5374790 5374774 5374769 -
ttcttttttctctaaacttccc

SEQ ID NO: 117290 - DNA, 22 bp, Artificial Sequence
  Synthetic oligonucleotide; TTC chr11 5374766 5374787 5374771 5374766 -
ttttttctctaaacttcccttc

SEQ ID NO: 117291 - DNA, 22 bp, Artificial Sequence
  Synthetic oligonucleotide; CTT chr11 5374764 5374785 5374769 5374764 -
ttttctctaaacttcccttctc

SEQ ID NO: 117292 - DNA, 22 bp, Artificial Sequence
  Synthetic oligonucleotide; TTT chr11 5374763 5374784 5374768 5374763 -
tttctctaaacttcccttctcg

SEQ ID NO: 117293 - DNA, 22 bp, Artificial Sequence
  Synthetic oligonucleotide; TTT chr11 5374762 5374783 5374767 5374762 -
ttctctaaacttcccttctcgc

SEQ ID NO: 117294 - DNA, 22 bp, Artificial Sequence
  Synthetic oligonucleotide; TTT chr11 5374761 5374782 5374766 5374761 -
tctctaaacttcccttctcgct

SEQ ID NO: 117295 - DNA, 22 bp, Artificial Sequence
  Synthetic oligonucleotide; TTT chr11 5374760 5374781 5374765 5374760 -
ctctaaacttcccttctcgctt

SEQ ID NO: 117296 - DNA, 22 bp, Artificial Sequence
  Synthetic oligonucleotide; TTC chr11 5374759 5374780 5374764 5374759 -
tctaaacttcccttctcgcttc

SEQ ID NO: 117297 - DNA, 22 bp, Artificial Sequence
  Synthetic oligonucleotide; CTC chr11 5374757 5374778 5374762 5374757 -
taaacttcccttctcgcttcat

SEQ ID NO: 117298 - DNA, 22 bp, Artificial Sequence
  Synthetic oligonucleotide; CTA chr11 5374755 5374776 5374760 5374755 -
aacttcccttctcgcttcattt

SEQ ID NO: 117299 - DNA, 22 bp, Artificial Sequence
  Synthetic oligonucleotide; CTT chr11 5374750 5374771 5374755 5374750 -
cccttctcgcttcatttcattt

SEQ ID NO: 117300 - DNA, 22 bp, Artificial Sequence
  Synthetic oligonucleotide; TTC chr11 5374749 5374770 5374754 5374749 -
ccttctcgcttcatttcattta

SEQ ID NO: 117301 - DNA, 22 bp, Artificial Sequence
  Synthetic oligonucleotide; CTT chr11 5374745 5374766 5374750 5374745 -
ctcgcttcatttcatttatttc

SEQ ID NO: 117302 - DNA, 22 bp, Artificial Sequence
  Synthetic oligonucleotide; TTC chr11 5374744 5374765 5374749 5374744 -
tcgcttcatttcatttatttca

SEQ ID NO: 117303 - DNA, 22 bp, Artificial Sequence
  Synthetic oligonucleotide; CTC chr11 5374742 5374763 5374747 5374742 -
gcttcatttcatttatttcatc

SEQ ID NO: 117304 - DNA, 22 bp, Artificial Sequence
  Synthetic oligonucleotide; CTT chr11 5374738 5374759 5374743 5374738 -
catttcatttatttcatcttcc

SEQ ID NO: 117305 - DNA, 22 bp, Artificial Sequence
  Synthetic oligonucleotide; TTC chr11 5374737 5374758 5374742 5374737 -
atttcatttatttcatcttcca

SEQ ID NO: 117306 - DNA, 22 bp, Artificial Sequence
  Synthetic oligonucleotide; TTT chr11 5374733 5374754 5374738 5374733 -
catttatttcatcttccatcac

SEQ ID NO: 117307 - DNA, 22 bp, Artificial Sequence
  Synthetic oligonucleotide; TTC chr11 5374732 5374753 5374737 5374732 -
atttatttcatcttccatcact

SEQ ID NO: 117308 - DNA, 22 bp, Artificial Sequence
  Synthetic oligonucleotide; TTT chr11 5374728 5374749 5374733 5374728 -
atttcatcttccatcactgata

SEQ ID NO: 117309 - DNA, 22 bp, Artificial Sequence
  Synthetic oligonucleotide; TTA chr11 5374727 5374748 5374732 5374727 -
tttcatcttccatcactgatac

SEQ ID NO: 117310 - DNA, 22 bp, Artificial Sequence
  Synthetic oligonucleotide; TTT chr11 5374724 5374745 5374729 5374724 -
catcttccatcactgataccct

SEQ ID NO: 117311 - DNA, 22 bp, Artificial Sequence
  Synthetic oligonucleotide; TTC chr11 5374723 5374744 5374728 5374723 -
atcttccatcactgataccctt

SEQ ID NO: 117312 - DNA, 22 bp, Artificial Sequence
  Synthetic oligonucleotide; CTT chr11 5374718 5374739 5374723 5374718 -
ccatcactgataccctttcttc

SEQ ID NO: 117313 - DNA, 22 bp, Artificial Sequence
  Synthetic oligonucleotide; TTC chr11 5374717 5374738 5374722 5374717 -
catcactgataccctttcttcc

SEQ ID NO: 117314 - DNA, 22 bp, Artificial Sequence
  Synthetic oligonucleotide; CTG chr11 5374709 5374730 5374714 5374709 -
ataccctttcttccagttgatc

SEQ ID NO: 117315 - DNA, 22 bp, Artificial Sequence
  Synthetic oligonucleotide; CTT chr11 5374701 5374722 5374706 5374701 -
tcttccagttgatcgcatcagc

SEQ ID NO: 117316 - DNA, 22 bp, Artificial Sequence
  Synthetic oligonucleotide; TTT chr11 5374700 5374721 5374705 5374700 -
cttccagttgatcgcatcagct

SEQ ID NO: 117317 - DNA, 22 bp, Artificial Sequence
  Synthetic oligonucleotide; TTC chr11 5374699 5374720 5374704 5374699 -
ttccagttgatcgcatcagctc

SEQ ID NO: 117318 - DNA, 22 bp, Artificial Sequence
  Synthetic oligonucleotide; CTT chr11 5374697 5374718 5374702 5374697 -
ccagttgatcgcatcagctcct

SEQ ID NO: 117319 - DNA, 22 bp, Artificial Sequence
  Synthetic oligonucleotide; TTC chr11 5374696 5374717 5374701 5374696 -
cagttgatcgcatcagctcctg

SEQ ID NO: 117320 - DNA, 22 bp, Artificial Sequence
  Synthetic oligonucleotide; TTG chr11 5374690 5374711 5374695 5374690 -
atcgcatcagctcctgaggctt

SEQ ID NO: 117321 - DNA, 22 bp, Artificial Sequence
  Synthetic oligonucleotide; CTC chr11 5374677 5374698 5374682 5374677 -
ctgaggcttctccattcttcac

SEQ ID NO: 117322 - DNA, 22 bp, Artificial Sequence
  Synthetic oligonucleotide; CTG chr11 5374674 5374695 5374679 5374674 -
aggcttctccattcttcacgtc

SEQ ID NO: 117323 - DNA, 22 bp, Artificial Sequence
  Synthetic oligonucleotide; CTT chr11 5374668 5374689 5374673 5374668 -
ctccattcttcacgtcattctc

SEQ ID NO: 117324 - DNA, 22 bp, Artificial Sequence
  Synthetic oligonucleotide; TTC chr11 5374667 5374688 5374672 5374667 -
tccattcttcacgtcattctcg

SEQ ID NO: 117325 - DNA, 22 bp, Artificial Sequence
  Synthetic oligonucleotide; CTC chr11 5374665 5374686 5374670 5374665 -
cattcttcacgtcattctcgag

SEQ ID NO: 117326 - DNA, 22 bp, Artificial Sequence
  Synthetic oligonucleotide; TTC chr11 5374660 5374681 5374665 5374660 -
ttcacgtcattctcgagccttg

SEQ ID NO: 117327 - DNA, 22 bp, Artificial Sequence
  Synthetic oligonucleotide; CTT chr11 5374658 5374679 5374663 5374658 -
cacgtcattctcgagccttggc

SEQ ID NO: 117328 - DNA, 22 bp, Artificial Sequence
  Synthetic oligonucleotide; TTC chr11 5374657 5374678 5374662 5374657 -
acgtcattctcgagccttggct

SEQ ID NO: 117329 - DNA, 22 bp, Artificial Sequence
  Synthetic oligonucleotide; TTC chr11 5374648 5374669 5374653 5374648 -
tcgagccttggctttcagctcc

SEQ ID NO: 117330 - DNA, 22 bp, Artificial Sequence
  Synthetic oligonucleotide; CTC chr11 5374646 5374667 5374651 5374646 -
gagccttggctttcagctccat

SEQ ID NO: 117331 - DNA, 22 bp, Artificial Sequence
  Synthetic oligonucleotide; CTT chr11 5374639 5374660 5374644 5374639 -
ggctttcagctccatcagctcc

SEQ ID NO: 117332 - DNA, 22 bp, Artificial Sequence
  Synthetic oligonucleotide; TTG chr11 5374638 5374659 5374643 5374638 -
gctttcagctccatcagctcct

SEQ ID NO: 117333 - DNA, 22 bp, Artificial Sequence
  Synthetic oligonucleotide; CTT chr11 5374634 5374655 5374639 5374634 -
tcagctccatcagctcctttaa

SEQ ID NO: 117334 - DNA, 22 bp, Artificial Sequence
  Synthetic oligonucleotide; TTT chr11 5374633 5374654 5374638 5374633 -
cagctccatcagctcctttaag

SEQ ID NO: 117335 - DNA, 22 bp, Artificial Sequence
  Synthetic oligonucleotide; TTC chr11 5374632 5374653 5374637 5374632 -
agctccatcagctcctttaagc

SEQ ID NO: 117336 - DNA, 22 bp, Artificial Sequence
  Synthetic oligonucleotide; CTC chr11 5374627 5374648 5374632 5374627 -
catcagctcctttaagcacttc

SEQ ID NO: 117337 - DNA, 22 bp, Artificial Sequence
  Synthetic oligonucleotide; CTC chr11 5374618 5374639 5374623 5374618 -
ctttaagcacttctctgtattg

SEQ ID NO: 117338 - DNA, 22 bp, Artificial Sequence
  Synthetic oligonucleotide; CTT chr11 5374615 5374636 5374620 5374615 -
taagcacttctctgtattggtt

SEQ ID NO: 117339 - DNA, 22 bp, Artificial Sequence
  Synthetic oligonucleotide; TTT chr11 5374614 5374635 5374619 5374614 -
aagcacttctctgtattggtta

SEQ ID NO: 117340 - DNA, 22 bp, Artificial Sequence
  Synthetic oligonucleotide; TTA chr11 5374613 5374634 5374618 5374613 -
agcacttctctgtattggttat

SEQ ID NO: 117341 - DNA, 22 bp, Artificial Sequence
  Synthetic oligonucleotide; CTT chr11 5374606 5374627 5374611 5374606 -
ctctgtattggttattctagtt

SEQ ID NO: 117342 - DNA, 22 bp, Artificial Sequence
  Synthetic oligonucleotide; TTC chr11 5374605 5374626 5374610 5374605 -
tctgtattggttattctagtta

SEQ ID NO: 117343 - DNA, 22 bp, Artificial Sequence
  Synthetic oligonucleotide; CTC chr11 5374603 5374624 5374608 5374603 -
tgtattggttattctagttata

SEQ ID NO: 117344 - DNA, 22 bp, Artificial Sequence
  Synthetic oligonucleotide; CTG chr11 5374601 5374622 5374606 5374601 -
tattggttattctagttataca

SEQ ID NO: 117345 - DNA, 22 bp, Artificial Sequence
  Synthetic oligonucleotide; TTG chr11 5374596 5374617 5374601 5374596 -
gttattctagttatacattcat

SEQ ID NO: 117346 - DNA, 22 bp, Artificial Sequence
  Synthetic oligonucleotide; TTA chr11 5374592 5374613 5374597 5374592 -
ttctagttatacattcatctaa

SEQ ID NO: 117347 - DNA, 22 bp, Artificial Sequence
  Synthetic oligonucleotide; TTC chr11 5374589 5374610 5374594 5374589 -
tagttatacattcatctaaatt

SEQ ID NO: 117348 - DNA, 22 bp, Artificial Sequence
  Synthetic oligonucleotide; CTA chr11 5374587 5374608 5374592 5374587 -
gttatacattcatctaaatttt

SEQ ID NO: 117349 - DNA, 22 bp, Artificial Sequence
  Synthetic oligonucleotide; TTA chr11 5374583 5374604 5374588 5374583 -
tacattcatctaaatttttttt

SEQ ID NO: 117350 - DNA, 22 bp, Artificial Sequence
  Synthetic oligonucleotide; TTC chr11 5374576 5374597 5374581 5374576 -
atctaaattttttttcaaagtt

SEQ ID NO: 117351 - DNA, 22 bp, Artificial Sequence
  Synthetic oligonucleotide; CTA chr11 5374571 5374592 5374576 5374571 -
aattttttttcaaagtttttat

SEQ ID NO: 117352 - DNA, 22 bp, Artificial Sequence
  Synthetic oligonucleotide; TTT chr11 5374566 5374587 5374571 5374566 -
tttttcaaagtttttatcttct

SEQ ID NO: 117353 - DNA, 22 bp, Artificial Sequence
  Synthetic oligonucleotide; TTT chr11 5374565 5374586 5374570 5374565 -
ttttcaaagtttttatcttctt

SEQ ID NO: 117354 - DNA, 22 bp, Artificial Sequence
  Synthetic oligonucleotide; TTT chr11 5374564 5374585 5374569 5374564 -
tttcaaagtttttatcttcttt

SEQ ID NO: 117355 - DNA, 22 bp, Artificial Sequence
  Synthetic oligonucleotide; TTT chr11 5374563 5374584 5374568 5374563 -
ttcaaagtttttatcttctttg

SEQ ID NO: 117356 - DNA, 22 bp, Artificial Sequence
  Synthetic oligonucleotide; TTT chr11 5374562 5374583 5374567 5374562 -
tcaaagtttttatcttctttgc

SEQ ID NO: 117357 - DNA, 22 bp, Artificial Sequence
  Synthetic oligonucleotide; TTT chr11 5374561 5374582 5374566 5374561 -
caaagtttttatcttctttgcc

SEQ ID NO: 117358 - DNA, 22 bp, Artificial Sequence
  Synthetic oligonucleotide; TTC chr11 5374560 5374581 5374565 5374560 -
aaagtttttatcttctttgcct

SEQ ID NO: 117359 - DNA, 22 bp, Artificial Sequence
  Synthetic oligonucleotide; TTT chr11 5374553 5374574 5374558 5374553 -
ttatcttctttgcctttggttt

SEQ ID NO: 117360 - DNA, 22 bp, Artificial Sequence
  Synthetic oligonucleotide; TTT chr11 5374552 5374573 5374557 5374552 -
tatcttctttgcctttggtttg

SEQ ID NO: 117361 - DNA, 22 bp, Artificial Sequence
  Synthetic oligonucleotide; TTT chr11 5374551 5374572 5374556 5374551 -
atcttctttgcctttggtttga

SEQ ID NO: 117362 - DNA, 22 bp, Artificial Sequence
  Synthetic oligonucleotide; TTA chr11 5374550 5374571 5374555 5374550 -
tcttctttgcctttggtttgaa

SEQ ID NO: 117363 - DNA, 22 bp, Artificial Sequence
  Synthetic oligonucleotide; CTT chr11 5374546 5374567 5374551 5374546 -
ctttgcctttggtttgaatttc

SEQ ID NO: 117364 - DNA, 22 bp, Artificial Sequence
  Synthetic oligonucleotide; TTC chr11 5374545 5374566 5374550 5374545 -
tttgcctttggtttgaatttcc

SEQ ID NO: 117365 - DNA, 22 bp, Artificial Sequence
  Synthetic oligonucleotide; CTT chr11 5374543 5374564 5374548 5374543 -
tgcctttggtttgaatttcctc

SEQ ID NO: 117366 - DNA, 22 bp, Artificial Sequence
  Synthetic oligonucleotide; TTT chr11 5374542 5374563 5374547 5374542 -
gcctttggtttgaatttcctcc

SEQ ID NO: 117367 - DNA, 22 bp, Artificial Sequence
  Synthetic oligonucleotide; TTG chr11 5374541 5374562 5374546 5374541 -
cctttggtttgaatttcctcct

SEQ ID NO: 117368 - DNA, 22 bp, Artificial Sequence
  Synthetic oligonucleotide; CTT chr11 5374537 5374558 5374542 5374537 -
tggtttgaatttcctcctgtag

SEQ ID NO: 117369 - DNA, 22 bp, Artificial Sequence
  Synthetic oligonucleotide; TTT chr11 5374536 5374557 5374541 5374536 -
ggtttgaatttcctcctgtagc

SEQ ID NO: 117370 - DNA, 22 bp, Artificial Sequence
  Synthetic oligonucleotide; TTG chr11 5374535 5374556 5374540 5374535 -
gtttgaatttcctcctgtagct

SEQ ID NO: 117371 - DNA, 22 bp, Artificial Sequence
  Synthetic oligonucleotide; TTT chr11 5374531 5374552 5374536 5374531 -
gaatttcctcctgtagctcgga

SEQ ID NO: 117372 - DNA, 22 bp, Artificial Sequence
  Synthetic oligonucleotide; TTG chr11 5374530 5374551 5374535 5374530 -
aatttcctcctgtagctcggag

SEQ ID NO: 117373 - DNA, 22 bp, Artificial Sequence
  Synthetic oligonucleotide; TTT chr11 5374525 5374546 5374530 5374525 -
cctcctgtagctcggagtagtt

SEQ ID NO: 117374 - DNA, 22 bp, Artificial Sequence
  Synthetic oligonucleotide; TTC chr11 5374524 5374545 5374529 5374524 -
ctcctgtagctcggagtagttt

SEQ ID NO: 117375 - DNA, 22 bp, Artificial Sequence
  Synthetic oligonucleotide; CTC chr11 5374521 5374542 5374526 5374521 -
ctgtagctcggagtagtttcat

SEQ ID NO: 117376 - DNA, 22 bp, Artificial Sequence
  Synthetic oligonucleotide; CTG chr11 5374518 5374539 5374523 5374518 -
tagctcggagtagtttcatcgt

SEQ ID NO: 117377 - DNA, 22 bp, Artificial Sequence
  Synthetic oligonucleotide; CTC chr11 5374512 5374533 5374517 5374512 -
ggagtagtttcatcgtctgaag

SEQ ID NO: 117378 - DNA, 22 bp, Artificial Sequence
  Synthetic oligonucleotide; TTT chr11 5374502 5374523 5374507 5374502 -
catcgtctgaagtcttcttctc

SEQ ID NO: 117379 - DNA, 22 bp, Artificial Sequence
  Synthetic oligonucleotide; TTC chr11 5374501 5374522 5374506 5374501 -
atcgtctgaagtcttcttctct

SEQ ID NO: 117380 - DNA, 22 bp, Artificial Sequence
  Synthetic oligonucleotide; CTG chr11 5374493 5374514 5374498 5374493 -
aagtcttcttctctcagctcgt

SEQ ID NO: 117381 - DNA, 22 bp, Artificial Sequence
  Synthetic oligonucleotide; CTT chr11 5374486 5374507 5374491 5374486 -
cttctctcagctcgtcaaagtc

SEQ ID NO: 117382 - DNA, 22 bp, Artificial Sequence
  Synthetic oligonucleotide; TTC chr11 5374485 5374506 5374490 5374485 -
ttctctcagctcgtcaaagtca

SEQ ID NO: 117383 - DNA, 22 bp, Artificial Sequence
  Synthetic oligonucleotide; CTT chr11 5374483 5374504 5374488 5374483 -
ctctcagctcgtcaaagtcatt

SEQ ID NO: 117384 - DNA, 22 bp, Artificial Sequence
  Synthetic oligonucleotide; TTC chr11 5374482 5374503 5374487 5374482 -
tctcagctcgtcaaagtcattc

SEQ ID NO: 117385 - DNA, 22 bp, Artificial Sequence
  Synthetic oligonucleotide; CTC chr11 5374480 5374501 5374485 5374480 -
tcagctcgtcaaagtcattctc

SEQ ID NO: 117386 - DNA, 22 bp, Artificial Sequence
  Synthetic oligonucleotide; CTC chr11 5374478 5374499 5374483 5374478 -
agctcgtcaaagtcattctcca

SEQ ID NO: 117387 - DNA, 22 bp, Artificial Sequence
  Synthetic oligonucleotide; CTC chr11 5374473 5374494 5374478 5374473 -
gtcaaagtcattctccatccag

SEQ ID NO: 117388 - DNA, 22 bp, Artificial Sequence
  Synthetic oligonucleotide; TTC chr11 5374460 5374481 5374465 5374460 -
tccatccagctttgttccgttg

SEQ ID NO: 117389 - DNA, 22 bp, Artificial Sequence
  Synthetic oligonucleotide; CTC chr11 5374458 5374479 5374463 5374458 -
catccagctttgttccgttgct

SEQ ID NO: 117390 - DNA, 22 bp, Artificial Sequence
  Synthetic oligonucleotide; CTT chr11 5374448 5374469 5374453 5374448 -
tgttccgttgctggtgaggaac

SEQ ID NO: 117391 - DNA, 22 bp, Artificial Sequence
  Synthetic oligonucleotide; TTT chr11 5374447 5374468 5374452 5374447 -
gttccgttgctggtgaggaact

SEQ ID NO: 117392 - DNA, 22 bp, Artificial Sequence
  Synthetic oligonucleotide; TTG chr11 5374446 5374467 5374451 5374446 -
ttccgttgctggtgaggaactg

SEQ ID NO: 117393 - DNA, 22 bp, Artificial Sequence
  Synthetic oligonucleotide; TTC chr11 5374443 5374464 5374448 5374443 -
cgttgctggtgaggaactgctt

SEQ ID NO: 117394 - DNA, 22 bp, Artificial Sequence
  Synthetic oligonucleotide; TTG chr11 5374438 5374459 5374443 5374438 -
ctggtgaggaactgctttcctt

SEQ ID NO: 117395 - DNA, 22 bp, Artificial Sequence
  Synthetic oligonucleotide; CTG chr11 5374435 5374456 5374440 5374435 -
gtgaggaactgctttcctttgg

SEQ ID NO: 117396 - DNA, 22 bp, Artificial Sequence
  Synthetic oligonucleotide; CTG chr11 5374424 5374445 5374429 5374424 -
ctttcctttggaggaggaaagg

SEQ ID NO: 117397 - DNA, 22 bp, Artificial Sequence
  Synthetic oligonucleotide; CTT chr11 5374421 5374442 5374426 5374421 -
tcctttggaggaggaaaggtgc

SEQ ID NO: 117398 - DNA, 22 bp, Artificial Sequence
  Synthetic oligonucleotide; TTT chr11 5374420 5374441 5374425 5374420 -
cctttggaggaggaaaggtgct

SEQ ID NO: 117399 - DNA, 22 bp, Artificial Sequence
  Synthetic oligonucleotide; TTC chr11 5374419 5374440 5374424 5374419 -
ctttggaggaggaaaggtgctc

SEQ ID NO: 117400 - DNA, 22 bp, Artificial Sequence
  Synthetic oligonucleotide; CTT chr11 5374416 5374437 5374421 5374416 -
tggaggaggaaaggtgctctgc

SEQ ID NO: 117401 - DNA, 22 bp, Artificial Sequence
  Synthetic oligonucleotide; TTT chr11 5374415 5374436 5374420 5374415 -
ggaggaggaaaggtgctctgct

SEQ ID NO: 117402 - DNA, 22 bp, Artificial Sequence
  Synthetic oligonucleotide; TTG chr11 5374414 5374435 5374419 5374414 -
gaggaggaaaggtgctctgctt

SEQ ID NO: 117403 - DNA, 22 bp, Artificial Sequence
  Synthetic oligonucleotide; CTC chr11 5374397 5374418 5374402 5374397 -
tgctttttagagtttccagttt

SEQ ID NO: 117404 - DNA, 22 bp, Artificial Sequence
  Synthetic oligonucleotide; CTG chr11 5374395 5374416 5374400 5374395 -
ctttttagagtttccagttttt

SEQ ID NO: 117405 - DNA, 22 bp, Artificial Sequence
  Synthetic oligonucleotide; CTT chr11 5374392 5374413 5374397 5374392 -
tttagagtttccagtttttctg

SEQ ID NO: 117406 - DNA, 22 bp, Artificial Sequence
  Synthetic oligonucleotide; TTT chr11 5374391 5374412 5374396 5374391 -
ttagagtttccagtttttctgc

SEQ ID NO: 117407 - DNA, 22 bp, Artificial Sequence
  Synthetic oligonucleotide; TTT chr11 5374390 5374411 5374395 5374390 -
tagagtttccagtttttctgct

SEQ ID NO: 117408 - DNA, 22 bp, Artificial Sequence
  Synthetic oligonucleotide; TTT chr11 5374389 5374410 5374394 5374389 -
agagtttccagtttttctgctc

SEQ ID NO: 117409 - DNA, 22 bp, Artificial Sequence
  Synthetic oligonucleotide; TTA chr11 5374388 5374409 5374393 5374388 -
gagtttccagtttttctgctct

SEQ ID NO: 117410 - DNA, 22 bp, Artificial Sequence
  Synthetic oligonucleotide; TTT chr11 5374382 5374403 5374387 5374382 -
ccagtttttctgctctgttttt

SEQ ID NO: 117411 - DNA, 22 bp, Artificial Sequence
  Synthetic oligonucleotide; TTC chr11 5374381 5374402 5374386 5374381 -
cagtttttctgctctgtttttt

SEQ ID NO: 117412 - DNA, 22 bp, Artificial Sequence
  Synthetic oligonucleotide; TTT chr11 5374375 5374396 5374380 5374375 -
ttctgctctgttttttccccaa

SEQ ID NO: 117413 - DNA, 22 bp, Artificial Sequence
  Synthetic oligonucleotide; TTT chr11 5374374 5374395 5374379 5374374 -
tctgctctgttttttccccaac

SEQ ID NO: 117414 - DNA, 22 bp, Artificial Sequence
  Synthetic oligonucleotide; TTT chr11 5374373 5374394 5374378 5374373 -
ctgctctgttttttccccaact

SEQ ID NO: 117415 - DNA, 22 bp, Artificial Sequence
  Synthetic oligonucleotide; TTC chr11 5374372 5374393 5374377 5374372 -
tgctctgttttttccccaactt

SEQ ID NO: 117416 - DNA, 22 bp, Artificial Sequence
  Synthetic oligonucleotide; CTG chr11 5374370 5374391 5374375 5374370 -
ctctgttttttccccaactttg

SEQ ID NO: 117417 - DNA, 22 bp, Artificial Sequence
  Synthetic oligonucleotide; CTC chr11 5374367 5374388 5374372 5374367 -
tgttttttccccaactttgtgg

SEQ ID NO: 117418 - DNA, 22 bp, Artificial Sequence
  Synthetic oligonucleotide; CTG chr11 5374365 5374386 5374370 5374365 -
ttttttccccaactttgtggtt

SEQ ID NO: 117419 - DNA, 22 bp, Artificial Sequence
  Synthetic oligonucleotide; TTT chr11 5374362 5374383 5374367 5374362 -
tttccccaactttgtggttgta

SEQ ID NO: 117420 - DNA, 22 bp, Artificial Sequence
  Synthetic oligonucleotide; TTT chr11 5374361 5374382 5374366 5374361 -
ttccccaactttgtggttgtat

SEQ ID NO: 117421 - DNA, 22 bp, Artificial Sequence
  Synthetic oligonucleotide; TTT chr11 5374360 5374381 5374365 5374360 -
tccccaactttgtggttgtatc

SEQ ID NO: 117422 - DNA, 22 bp, Artificial Sequence
  Synthetic oligonucleotide; TTT chr11 5374359 5374380 5374364 5374359 -
ccccaactttgtggttgtatct

SEQ ID NO: 117423 - DNA, 22 bp, Artificial Sequence
  Synthetic oligonucleotide; TTC chr11 5374358 5374379 5374363 5374358 -
cccaactttgtggttgtatcta

SEQ ID NO: 117424 - DNA, 22 bp, Artificial Sequence
  Synthetic oligonucleotide; CTT chr11 5374350 5374371 5374355 5374350 -
tgtggttgtatctacttttggt

SEQ ID NO: 117425 - DNA, 22 bp, Artificial Sequence
  Synthetic oligonucleotide; TTT chr11 5374349 5374370 5374354 5374349 -
gtggttgtatctacttttggtc

SEQ ID NO: 117426 - DNA, 22 bp, Artificial Sequence
  Synthetic oligonucleotide; TTG chr11 5374348 5374369 5374353 5374348 -
tggttgtatctacttttggtct

SEQ ID NO: 117427 - DNA, 22 bp, Artificial Sequence
  Synthetic oligonucleotide; TTG chr11 5374342 5374363 5374347 5374342 -
tatctacttttggtctttgatg

SEQ ID NO: 117428 - DNA, 22 bp, Artificial Sequence
  Synthetic oligonucleotide; CTA chr11 5374336 5374357 5374341 5374336 -
cttttggtctttgatgatagtg

SEQ ID NO: 117429 - DNA, 22 bp, Artificial Sequence
  Synthetic oligonucleotide; CTT chr11 5374333 5374354 5374338 5374333 -
ttggtctttgatgatagtgatg

SEQ ID NO: 117430 - DNA, 22 bp, Artificial Sequence
  Synthetic oligonucleotide; TTT chr11 5374332 5374353 5374337 5374332 -
tggtctttgatgatagtgatgt

SEQ ID NO: 117431 - DNA, 22 bp, Artificial Sequence
  Synthetic oligonucleotide; TTT chr11 5374331 5374352 5374336 5374331 -
ggtctttgatgatagtgatgta

SEQ ID NO: 117432 - DNA, 22 bp, Artificial Sequence
  Synthetic oligonucleotide; TTG chr11 5374330 5374351 5374335 5374330 -
gtctttgatgatagtgatgtac

SEQ ID NO: 117433 - DNA, 22 bp, Artificial Sequence
  Synthetic oligonucleotide; CTT chr11 5374325 5374346 5374330 5374325 -
tgatgatagtgatgtaccgatg

SEQ ID NO: 117434 - DNA, 22 bp, Artificial Sequence
  Synthetic oligonucleotide; TTT chr11 5374324 5374345 5374329 5374324 -
gatgatagtgatgtaccgatgg

SEQ ID NO: 117435 - DNA, 22 bp, Artificial Sequence
  Synthetic oligonucleotide; TTG chr11 5374323 5374344 5374328 5374323 -
atgatagtgatgtaccgatggg

SEQ ID NO: 117436 - DNA, 22 bp, Artificial Sequence
  Synthetic oligonucleotide; TTT chr11 5374298 5374319 5374303 5374298 -
ttggtgtggatgtcctttctgt

SEQ ID NO: 117437 - DNA, 22 bp, Artificial Sequence
  Synthetic oligonucleotide; TTT chr11 5374297 5374318 5374302 5374297 -
tggtgtggatgtcctttctgtt

SEQ ID NO: 117438 - DNA, 22 bp, Artificial Sequence
  Synthetic oligonucleotide; TTT chr11 5374296 5374317 5374301 5374296 -
ggtgtggatgtcctttctgttt

SEQ ID NO: 117439 - DNA, 22 bp, Artificial Sequence
  Synthetic oligonucleotide; TTG chr11 5374295 5374316 5374300 5374295 -
gtgtggatgtcctttctgtttg

SEQ ID NO: 117440 - DNA, 22 bp, Artificial Sequence
  Synthetic oligonucleotide; CTT chr11 5374281 5374302 5374286 5374281 -
tctgtttgttagttttccttct

SEQ ID NO: 117441 - DNA, 22 bp, Artificial Sequence
  Synthetic oligonucleotide; TTT chr11 5374280 5374301 5374285 5374280 -
ctgtttgttagttttccttcta

SEQ ID NO: 117442 - DNA, 22 bp, Artificial Sequence
  Synthetic oligonucleotide; TTC chr11 5374279 5374300 5374284 5374279 -
tgtttgttagttttccttctaa

SEQ ID NO: 117443 - DNA, 22 bp, Artificial Sequence
  Synthetic oligonucleotide; CTG chr11 5374277 5374298 5374282 5374277 -
tttgttagttttccttctaaca

SEQ ID NO: 117444 - DNA, 22 bp, Artificial Sequence
  Synthetic oligonucleotide; TTT chr11 5374274 5374295 5374279 5374274 -
gttagttttccttctaacagac

SEQ ID NO: 117445 - DNA, 22 bp, Artificial Sequence
  Synthetic oligonucleotide; TTG chr11 5374273 5374294 5374278 5374273 -
ttagttttccttctaacagaca

SEQ ID NO: 117446 - DNA, 22 bp, Artificial Sequence
  Synthetic oligonucleotide; TTA chr11 5374270 5374291 5374275 5374270 -
gttttccttctaacagacagga

SEQ ID NO: 117447 - DNA, 22 bp, Artificial Sequence
  Synthetic oligonucleotide; TTT chr11 5374266 5374287 5374271 5374266 -
tccttctaacagacaggaccct

SEQ ID NO: 117448 - DNA, 22 bp, Artificial Sequence
  Synthetic oligonucleotide; TTT chr11 5374265 5374286 5374270 5374265 -
ccttctaacagacaggaccctc

SEQ ID NO: 117449 - DNA, 22 bp, Artificial Sequence
  Synthetic oligonucleotide; TTC chr11 5374264 5374285 5374269 5374264 -
cttctaacagacaggaccctca

SEQ ID NO: 117450 - DNA, 22 bp, Artificial Sequence
  Synthetic oligonucleotide; CTT chr11 5374261 5374282 5374266 5374261 -
ctaacagacaggaccctcagct

SEQ ID NO: 117451 - DNA, 22 bp, Artificial Sequence
  Synthetic oligonucleotide; TTC chr11 5374260 5374281 5374265 5374260 -
taacagacaggaccctcagctg

SEQ ID NO: 117452 - DNA, 22 bp, Artificial Sequence
  Synthetic oligonucleotide; CTA chr11 5374258 5374279 5374263 5374258 -
acagacaggaccctcagctgca

SEQ ID NO: 117453 - DNA, 22 bp, Artificial Sequence
  Synthetic oligonucleotide; CTC chr11 5374243 5374264 5374248 5374243 -
agctgcaggtctgttggagttt

SEQ ID NO: 117454 - DNA, 22 bp, Artificial Sequence
  Synthetic oligonucleotide; CTG chr11 5374238 5374259 5374243 5374238 -
caggtctgttggagtttgctag

SEQ ID NO: 117455 - DNA, 22 bp, Artificial Sequence
  Synthetic oligonucleotide; CTG chr11 5374230 5374251 5374235 5374230 -
ttggagtttgctagaggtccac

SEQ ID NO: 117456 - DNA, 22 bp, Artificial Sequence
  Synthetic oligonucleotide; TTG chr11 5374227 5374248 5374232 5374227 -
gagtttgctagaggtccactcc

SEQ ID NO: 117457 - DNA, 22 bp, Artificial Sequence
  Synthetic oligonucleotide; TTT chr11 5374221 5374242 5374226 5374221 -
gctagaggtccactccagaccc

SEQ ID NO: 117458 - DNA, 22 bp, Artificial Sequence
  Synthetic oligonucleotide; TTG chr11 5374220 5374241 5374225 5374220 -
ctagaggtccactccagaccct

SEQ ID NO: 117459 - DNA, 22 bp, Artificial Sequence
  Synthetic oligonucleotide; CTA chr11 5374217 5374238 5374222 5374217 -
gaggtccactccagaccctgtt

SEQ ID NO: 117460 - DNA, 22 bp, Artificial Sequence
  Synthetic oligonucleotide; CTC chr11 5374206 5374227 5374211 5374206 -
cagaccctgtttgcctgggtat

SEQ ID NO: 117461 - DNA, 22 bp, Artificial Sequence
  Synthetic oligonucleotide; CTG chr11 5374197 5374218 5374202 5374197 -
tttgcctgggtatcagcagcgg

SEQ ID NO: 117462 - DNA, 22 bp, Artificial Sequence
  Synthetic oligonucleotide; TTT chr11 5374194 5374215 5374199 5374194 -
gcctgggtatcagcagcggtgt

SEQ ID NO: 117463 - DNA, 22 bp, Artificial Sequence
  Synthetic oligonucleotide; TTG chr11 5374193 5374214 5374198 5374193 -
cctgggtatcagcagcggtgtc

SEQ ID NO: 117464 - DNA, 22 bp, Artificial Sequence
  Synthetic oligonucleotide; CTG chr11 5374189 5374210 5374194 5374189 -
ggtatcagcagcggtgtctgca

SEQ ID NO: 117465 - DNA, 22 bp, Artificial Sequence
  Synthetic oligonucleotide; CTG chr11 5374169 5374190 5374174 5374169 -
cagaaccgcagattttcgtgat

SEQ ID NO: 117466 - DNA, 22 bp, Artificial Sequence
  Synthetic oligonucleotide; TTT chr11 5374154 5374175 5374159 5374154 -
tcgtgatccgcgaatgctgctg

SEQ ID NO: 117467 - DNA, 22 bp, Artificial Sequence
  Synthetic oligonucleotide; TTT chr11 5374153 5374174 5374158 5374153 -
cgtgatccgcgaatgctgctgt

SEQ ID NO: 117468 - DNA, 22 bp, Artificial Sequence
  Synthetic oligonucleotide; TTC chr11 5374152 5374173 5374157 5374152 -
gtgatccgcgaatgctgctgtc

SEQ ID NO: 117469 - DNA, 22 bp, Artificial Sequence
  Synthetic oligonucleotide; CTG chr11 5374135 5374156 5374140 5374135 -
ctgtctgatcgttcctctggaa

SEQ ID NO: 117470 - DNA, 22 bp, Artificial Sequence
  Synthetic oligonucleotide; CTG chr11 5374132 5374153 5374137 5374132 -
tctgatcgttcctctggaagtt

SEQ ID NO: 117471 - DNA, 22 bp, Artificial Sequence
  Synthetic oligonucleotide; CTG chr11 5374128 5374149 5374133 5374128 -
atcgttcctctggaagttttgt

SEQ ID NO: 117472 - DNA, 22 bp, Artificial Sequence
  Synthetic oligonucleotide; TTC chr11 5374121 5374142 5374126 5374121 -
ctctggaagttttgtctcagag

SEQ ID NO: 117473 - DNA, 22 bp, Artificial Sequence
  Synthetic oligonucleotide; CTC chr11 5374118 5374139 5374123 5374118 -
tggaagttttgtctcagaggag

SEQ ID NO: 117474 - DNA, 22 bp, Artificial Sequence
  Synthetic oligonucleotide; CTG chr11 5374116 5374137 5374121 5374116 -
gaagttttgtctcagaggagta

SEQ ID NO: 117475 - DNA, 22 bp, Artificial Sequence
  Synthetic oligonucleotide; TTT chr11 5374109 5374130 5374114 5374109 -
tgtctcagaggagtacctggcc

SEQ ID NO: 117476 - DNA, 22 bp, Artificial Sequence
  Synthetic oligonucleotide; TTT chr11 5374108 5374129 5374113 5374108 -
gtctcagaggagtacctggccg

SEQ ID NO: 117477 - DNA, 22 bp, Artificial Sequence
  Synthetic oligonucleotide; TTG chr11 5374107 5374128 5374112 5374107 -
tctcagaggagtacctggccgt

SEQ ID NO: 117478 - DNA, 22 bp, Artificial Sequence
  Synthetic oligonucleotide; CTC chr11 5374103 5374124 5374108 5374103 -
agaggagtacctggccgtgtga

SEQ ID NO: 117479 - DNA, 22 bp, Artificial Sequence
  Synthetic oligonucleotide; CTG chr11 5374090 5374111 5374095 5374090 -
gccgtgtgaggtgtcagtctgc

SEQ ID NO: 117480 - DNA, 22 bp, Artificial Sequence
  Synthetic oligonucleotide; CTG chr11 5374069 5374090 5374074 5374069 -
cccttacttgggggtgcctccc

SEQ ID NO: 117481 - DNA, 22 bp, Artificial Sequence
  Synthetic oligonucleotide; CTT chr11 5374064 5374085 5374069 5374064 -
acttgggggtgcctcccagtta

SEQ ID NO: 117482 - DNA, 22 bp, Artificial Sequence
  Synthetic oligonucleotide; TTA chr11 5374063 5374084 5374068 5374063 -
cttgggggtgcctcccagttag

SEQ ID NO: 117483 - DNA, 22 bp, Artificial Sequence
  Synthetic oligonucleotide; CTT chr11 5374060 5374081 5374065 5374060 -
gggggtgcctcccagttaggct

SEQ ID NO: 117484 - DNA, 22 bp, Artificial Sequence
  Synthetic oligonucleotide; TTG chr11 5374059 5374080 5374064 5374059 -
ggggtgcctcccagttaggctg

SEQ ID NO: 117485 - DNA, 22 bp, Artificial Sequence
  Synthetic oligonucleotide; CTC chr11 5374049 5374070 5374054 5374049 -
ccagttaggctgctcgggggtc

SEQ ID NO: 117486 - DNA, 22 bp, Artificial Sequence
  Synthetic oligonucleotide; TTA chr11 5374042 5374063 5374047 5374042 -
ggctgctcgggggtcaggggtc

SEQ ID NO: 117487 - DNA, 22 bp, Artificial Sequence
  Synthetic oligonucleotide; CTG chr11 5374037 5374058 5374042 5374037 -
ctcgggggtcaggggtcaggga

SEQ ID NO: 117488 - DNA, 22 bp, Artificial Sequence
  Synthetic oligonucleotide; CTC chr11 5374034 5374055 5374039 5374034 -
gggggtcaggggtcagggaccc

SEQ ID NO: 117489 - DNA, 22 bp, Artificial Sequence
  Synthetic oligonucleotide; CTT chr11 5374008 5374029 5374013 5374008 -
gaggaggcagtctgcccgttct

SEQ ID NO: 117490 - DNA, 22 bp, Artificial Sequence
  Synthetic oligonucleotide; TTG chr11 5374007 5374028 5374012 5374007 -
aggaggcagtctgcccgttctc

SEQ ID NO: 117491 - DNA, 22 bp, Artificial Sequence
  Synthetic oligonucleotide; CTG chr11 5373994 5374015 5373999 5373994 -
cccgttctcagatctccagctg

SEQ ID NO: 117492 - DNA, 22 bp, Artificial Sequence
  Synthetic oligonucleotide; TTC chr11 5373987 5374008 5373992 5373987 -
tcagatctccagctgtgtgctg

SEQ ID NO: 117493 - DNA, 22 bp, Artificial Sequence
  Synthetic oligonucleotide; CTC chr11 5373985 5374006 5373990 5373985 -
agatctccagctgtgtgctggg

SEQ ID NO: 117494 - DNA, 22 bp, Artificial Sequence
  Synthetic oligonucleotide; CTC chr11 5373978 5373999 5373983 5373978 -
cagctgtgtgctgggagaacca

SEQ ID NO: 117495 - DNA, 22 bp, Artificial Sequence
  Synthetic oligonucleotide; CTG chr11 5373972 5373993 5373977 5373972 -
tgtgctgggagaaccactgctc

SEQ ID NO: 117496 - DNA, 22 bp, Artificial Sequence
  Synthetic oligonucleotide; CTG chr11 5373965 5373986 5373970 5373965 -
ggagaaccactgctctcctcaa

SEQ ID NO: 117497 - DNA, 22 bp, Artificial Sequence
  Synthetic oligonucleotide; CTG chr11 5373953 5373974 5373958 5373953 -
ctctcctcaaagctgtcagaca

SEQ ID NO: 117498 - DNA, 22 bp, Artificial Sequence
  Synthetic oligonucleotide; CTC chr11 5373950 5373971 5373955 5373950 -
tcctcaaagctgtcagacaggg

SEQ ID NO: 117499 - DNA, 22 bp, Artificial Sequence
  Synthetic oligonucleotide; CTC chr11 5373948 5373969 5373953 5373948 -
ctcaaagctgtcagacagggac

SEQ ID NO: 117500 - DNA, 22 bp, Artificial Sequence
  Synthetic oligonucleotide; CTC chr11 5373945 5373966 5373950 5373945 -
aaagctgtcagacagggacatt

SEQ ID NO: 117501 - DNA, 22 bp, Artificial Sequence
  Synthetic oligonucleotide; CTG chr11 5373938 5373959 5373943 5373938 -
tcagacagggacatttaagtct

SEQ ID NO: 117502 - DNA, 22 bp, Artificial Sequence
  Synthetic oligonucleotide; TTT chr11 5373922 5373943 5373927 5373922 -
aagtctgcagaggttactgctg

SEQ ID NO: 117503 - DNA, 22 bp, Artificial Sequence
  Synthetic oligonucleotide; TTA chr11 5373921 5373942 5373926 5373921 -
agtctgcagaggttactgctgt

SEQ ID NO: 117504 - DNA, 22 bp, Artificial Sequence
  Synthetic oligonucleotide; CTG chr11 5373915 5373936 5373920 5373915 -
cagaggttactgctgtcttttt

SEQ ID NO: 117505 - DNA, 22 bp, Artificial Sequence
  Synthetic oligonucleotide; TTA chr11 5373906 5373927 5373911 5373906 -
ctgctgtctttttgtttgtctg

SEQ ID NO: 117506 - DNA, 22 bp, Artificial Sequence
  Synthetic oligonucleotide; CTG chr11 5373903 5373924 5373908 5373903 -
ctgtctttttgtttgtctgtgc

SEQ ID NO: 117507 - DNA, 22 bp, Artificial Sequence
  Synthetic oligonucleotide; CTG chr11 5373900 5373921 5373905 5373900 -
tctttttgtttgtctgtgccct

SEQ ID NO: 117508 - DNA, 22 bp, Artificial Sequence
  Synthetic oligonucleotide; CTT chr11 5373896 5373917 5373901 5373896 -
tttgtttgtctgtgccctgccc

SEQ ID NO: 117509 - DNA, 22 bp, Artificial Sequence
  Synthetic oligonucleotide; TTT chr11 5373895 5373916 5373900 5373895 -
ttgtttgtctgtgccctgcccc

SEQ ID NO: 117510 - DNA, 22 bp, Artificial Sequence
  Synthetic oligonucleotide; TTT chr11 5373894 5373915 5373899 5373894 -
tgtttgtctgtgccctgccccc

SEQ ID NO: 117511 - DNA, 22 bp, Artificial Sequence
  Synthetic oligonucleotide; TTT chr11 5373893 5373914 5373898 5373893 -
gtttgtctgtgccctgccccca

SEQ ID NO: 117512 - DNA, 22 bp, Artificial Sequence
  Synthetic oligonucleotide; TTG chr11 5373892 5373913 5373897 5373892 -
tttgtctgtgccctgcccccaa

SEQ ID NO: 117513 - DNA, 22 bp, Artificial Sequence
  Synthetic oligonucleotide; TTT chr11 5373889 5373910 5373894 5373889 -
gtctgtgccctgcccccaaagg

SEQ ID NO: 117514 - DNA, 22 bp, Artificial Sequence
  Synthetic oligonucleotide; TTG chr11 5373888 5373909 5373893 5373888 -
tctgtgccctgcccccaaaggt

SEQ ID NO: 117515 - DNA, 22 bp, Artificial Sequence
  Synthetic oligonucleotide; CTG chr11 5373884 5373905 5373889 5373884 -
tgccctgcccccaaaggtggag

SEQ ID NO: 117516 - DNA, 22 bp, Artificial Sequence
  Synthetic oligonucleotide; CTG chr11 5373877 5373898 5373882 5373877 -
cccccaaaggtggagcctacag

SEQ ID NO: 117517 - DNA, 22 bp, Artificial Sequence
  Synthetic oligonucleotide; CTA chr11 5373858 5373879 5373863 5373858 -
cagaggcaggcaggcctccttg

SEQ ID NO: 117518 - DNA, 22 bp, Artificial Sequence
  Synthetic oligonucleotide; CTC chr11 5373840 5373861 5373845 5373840 -
cttgagctgtggtggggtccac

SEQ ID NO: 117519 - DNA, 22 bp, Artificial Sequence
  Synthetic oligonucleotide; CTT chr11 5373837 5373858 5373842 5373837 -
gagctgtggtggggtccaccca

SEQ ID NO: 117520 - DNA, 22 bp, Artificial Sequence
  Synthetic oligonucleotide; TTG chr11 5373836 5373857 5373841 5373836 -
agctgtggtggggtccacccag

SEQ ID NO: 117521 - DNA, 22 bp, Artificial Sequence
  Synthetic oligonucleotide; CTG chr11 5373831 5373852 5373836 5373831 -
tggtggggtccacccagtttga

SEQ ID NO: 117522 - DNA, 22 bp, Artificial Sequence
  Synthetic oligonucleotide; TTT chr11 5373811 5373832 5373816 5373811 -
gagcttcctggctgctttgttt

SEQ ID NO: 117523 - DNA, 22 bp, Artificial Sequence
  Synthetic oligonucleotide; TTG chr11 5373810 5373831 5373815 5373810 -
agcttcctggctgctttgttta

SEQ ID NO: 117524 - DNA, 22 bp, Artificial Sequence
  Synthetic oligonucleotide; CTT chr11 5373805 5373826 5373810 5373805 -
cctggctgctttgtttacctaa

SEQ ID NO: 117525 - DNA, 22 bp, Artificial Sequence
  Synthetic oligonucleotide; TTC chr11 5373804 5373825 5373809 5373804 -
ctggctgctttgtttacctaag

SEQ ID NO: 117526 - DNA, 22 bp, Artificial Sequence
  Synthetic oligonucleotide; CTG chr11 5373801 5373822 5373806 5373801 -
gctgctttgtttacctaagcaa

SEQ ID NO: 117527 - DNA, 22 bp, Artificial Sequence
  Synthetic oligonucleotide; CTG chr11 5373797 5373818 5373802 5373797 -
ctttgtttacctaagcaagcct

SEQ ID NO: 117528 - DNA, 22 bp, Artificial Sequence
  Synthetic oligonucleotide; CTT chr11 5373794 5373815 5373799 5373794 -
tgtttacctaagcaagcctggg

SEQ ID NO: 117529 - DNA, 22 bp, Artificial Sequence
  Synthetic oligonucleotide; TTT chr11 5373793 5373814 5373798 5373793 -
gtttacctaagcaagcctgggc

SEQ ID NO: 117530 - DNA, 22 bp, Artificial Sequence
  Synthetic oligonucleotide; TTG chr11 5373792 5373813 5373797 5373792 -
tttacctaagcaagcctgggca

SEQ ID NO: 117531 - DNA, 22 bp, Artificial Sequence
  Synthetic oligonucleotide; TTT chr11 5373789 5373810 5373794 5373789 -
acctaagcaagcctgggcaatg

SEQ ID NO: 117532 - DNA, 22 bp, Artificial Sequence
  Synthetic oligonucleotide; TTA chr11 5373788 5373809 5373793 5373788 -
cctaagcaagcctgggcaatgg

SEQ ID NO: 117533 - DNA, 22 bp, Artificial Sequence
  Synthetic oligonucleotide; CTA chr11 5373784 5373805 5373789 5373784 -
agcaagcctgggcaatggcggc

SEQ ID NO: 117534 - DNA, 22 bp, Artificial Sequence
  Synthetic oligonucleotide; CTG chr11 5373774 5373795 5373779 5373774 -
ggcaatggcggctgcccctccc

SEQ ID NO: 117535 - DNA, 22 bp, Artificial Sequence
  Synthetic oligonucleotide; CTG chr11 5373760 5373781 5373765 5373760 -
cccctcccccagcctcgctgcc

SEQ ID NO: 117536 - DNA, 22 bp, Artificial Sequence
  Synthetic oligonucleotide; CTC chr11 5373754 5373775 5373759 5373754 -
ccccagcctcgctgccaccttg

SEQ ID NO: 117537 - DNA, 22 bp, Artificial Sequence
  Synthetic oligonucleotide; CTC chr11 5373744 5373765 5373749 5373744 -
gctgccaccttgcagtttgatc

SEQ ID NO: 117538 - DNA, 22 bp, Artificial Sequence
  Synthetic oligonucleotide; CTG chr11 5373740 5373761 5373745 5373740 -
ccaccttgcagtttgatctcag

SEQ ID NO: 117539 - DNA, 22 bp, Artificial Sequence
  Synthetic oligonucleotide; CTT chr11 5373733 5373754 5373738 5373733 -
gcagtttgatctcagactgctg

SEQ ID NO: 117540 - DNA, 22 bp, Artificial Sequence
  Synthetic oligonucleotide; TTG chr11 5373732 5373753 5373737 5373732 -
cagtttgatctcagactgctgt

SEQ ID NO: 117541 - DNA, 22 bp, Artificial Sequence
  Synthetic oligonucleotide; TTT chr11 5373726 5373747 5373731 5373726 -
gatctcagactgctgtgctagc

SEQ ID NO: 117542 - DNA, 22 bp, Artificial Sequence
  Synthetic oligonucleotide; TTG chr11 5373725 5373746 5373730 5373725 -
atctcagactgctgtgctagca

SEQ ID NO: 117543 - DNA, 22 bp, Artificial Sequence
  Synthetic oligonucleotide; CTC chr11 5373720 5373741 5373725 5373720 -
agactgctgtgctagcaatcag

SEQ ID NO: 117544 - DNA, 22 bp, Artificial Sequence
  Synthetic oligonucleotide; CTG chr11 5373714 5373735 5373719 5373714 -
ctgtgctagcaatcagggagac

SEQ ID NO: 117545 - DNA, 22 bp, Artificial Sequence
  Synthetic oligonucleotide; CTG chr11 5373711 5373732 5373716 5373711 -
tgctagcaatcagggagactcc

SEQ ID NO: 117546 - DNA, 22 bp, Artificial Sequence
  Synthetic oligonucleotide; CTA chr11 5373706 5373727 5373711 5373706 -
gcaatcagggagactccgtggg

SEQ ID NO: 117547 - DNA, 22 bp, Artificial Sequence
  Synthetic oligonucleotide; CTC chr11 5373690 5373711 5373695 5373690 -
cgtgggcgtaggaccctcggag

SEQ ID NO: 117548 - DNA, 22 bp, Artificial Sequence
  Synthetic oligonucleotide; CTC chr11 5373672 5373693 5373677 5373672 -
ggagccatgtgcaggatataat

SEQ ID NO: 117549 - DNA, 22 bp, Artificial Sequence
  Synthetic oligonucleotide; CTC chr11 5373647 5373668 5373652 5373647 -
ctggtgcgccatttcctaagcc

SEQ ID NO: 117550 - DNA, 22 bp, Artificial Sequence
  Synthetic oligonucleotide; CTG chr11 5373644 5373665 5373649 5373644 -
gtgcgccatttcctaagcctgt

SEQ ID NO: 117551 - DNA, 22 bp, Artificial Sequence
  Synthetic oligonucleotide; TTT chr11 5373633 5373654 5373638 5373633 -
cctaagcctgtcagaaaagcac

SEQ ID NO: 117552 - DNA, 22 bp, Artificial Sequence
  Synthetic oligonucleotide; TTC chr11 5373632 5373653 5373637 5373632 -
ctaagcctgtcagaaaagcaca

SEQ ID NO: 117553 - DNA, 22 bp, Artificial Sequence
  Synthetic oligonucleotide; CTA chr11 5373629 5373650 5373634 5373629 -
agcctgtcagaaaagcacagta

SEQ ID NO: 117554 - DNA, 22 bp, Artificial Sequence
  Synthetic oligonucleotide; CTG chr11 5373623 5373644 5373628 5373623 -
tcagaaaagcacagtattcggg

SEQ ID NO: 117555 - DNA, 22 bp, Artificial Sequence
  Synthetic oligonucleotide; TTC chr11 5373604 5373625 5373609 5373604 -
gggtgggagtggcccaattttc

SEQ ID NO: 117556 - DNA, 22 bp, Artificial Sequence
  Synthetic oligonucleotide; TTT chr11 5373584 5373605 5373589 5373584 -
tccaggtgccgtatgtcacccc

SEQ ID NO: 117557 - DNA, 22 bp, Artificial Sequence
  Synthetic oligonucleotide; TTT chr11 5373583 5373604 5373588 5373583 -
ccaggtgccgtatgtcacccct

SEQ ID NO: 117558 - DNA, 22 bp, Artificial Sequence
  Synthetic oligonucleotide; TTC chr11 5373582 5373603 5373587 5373582 -
caggtgccgtatgtcacccctt

SEQ ID NO: 117559 - DNA, 22 bp, Artificial Sequence
  Synthetic oligonucleotide; CTT chr11 5373560 5373581 5373565 5373560 -
tccttgaccaggaaagggaact

SEQ ID NO: 117560 - DNA, 22 bp, Artificial Sequence
  Synthetic oligonucleotide; TTT chr11 5373559 5373580 5373564 5373559 -
ccttgaccaggaaagggaactc

SEQ ID NO: 117561 - DNA, 22 bp, Artificial Sequence
  Synthetic oligonucleotide; TTC chr11 5373558 5373579 5373563 5373558 -
cttgaccaggaaagggaactcc

SEQ ID NO: 117562 - DNA, 22 bp, Artificial Sequence
  Synthetic oligonucleotide; CTT chr11 5373555 5373576 5373560 5373555 -
gaccaggaaagggaactccatg

SEQ ID NO: 117563 - DNA, 22 bp, Artificial Sequence
  Synthetic oligonucleotide; TTG chr11 5373554 5373575 5373559 5373554 -
accaggaaagggaactccatga

SEQ ID NO: 117564 - DNA, 22 bp, Artificial Sequence
  Synthetic oligonucleotide; CTC chr11 5373537 5373558 5373542 5373537 -
catgaccccttgtgcttcccaa

SEQ ID NO: 117565 - DNA, 22 bp, Artificial Sequence
  Synthetic oligonucleotide; CTT chr11 5373526 5373547 5373531 5373526 -
gtgcttcccaagtgaggcaatg

SEQ ID NO: 117566 - DNA, 22 bp, Artificial Sequence
  Synthetic oligonucleotide; TTG chr11 5373525 5373546 5373530 5373525 -
tgcttcccaagtgaggcaatgc

SEQ ID NO: 117567 - DNA, 22 bp, Artificial Sequence
  Synthetic oligonucleotide; CTT chr11 5373520 5373541 5373525 5373520 -
cccaagtgaggcaatgcctcac

SEQ ID NO: 117568 - DNA, 22 bp, Artificial Sequence
  Synthetic oligonucleotide; TTC chr11 5373519 5373540 5373524 5373519 -
ccaagtgaggcaatgcctcacc

SEQ ID NO: 117569 - DNA, 22 bp, Artificial Sequence
  Synthetic oligonucleotide; CTC chr11 5373500 5373521 5373505 5373500 -
accctgcttcggctggtgcatg

SEQ ID NO: 117570 - DNA, 22 bp, Artificial Sequence
  Synthetic oligonucleotide; CTG chr11 5373494 5373515 5373499 5373494 -
cttcggctggtgcatggtgtgc

SEQ ID NO: 117571 - DNA, 22 bp, Artificial Sequence
  Synthetic oligonucleotide; CTT chr11 5373491 5373512 5373496 5373491 -
cggctggtgcatggtgtgctgc

SEQ ID NO: 117572 - DNA, 22 bp, Artificial Sequence
  Synthetic oligonucleotide; TTC chr11 5373490 5373511 5373495 5373490 -
ggctggtgcatggtgtgctgca

SEQ ID NO: 117573 - DNA, 22 bp, Artificial Sequence
  Synthetic oligonucleotide; CTG chr11 5373485 5373506 5373490 5373485 -
gtgcatggtgtgctgcacccac

SEQ ID NO: 117574 - DNA, 22 bp, Artificial Sequence
  Synthetic oligonucleotide; CTG chr11 5373470 5373491 5373475 5373470 -
cacccactgacctgtgcccact

SEQ ID NO: 117575 - DNA, 22 bp, Artificial Sequence
  Synthetic oligonucleotide; CTG chr11 5373461 5373482 5373466 5373461 -
acctgtgcccactgtctggcac

SEQ ID NO: 117576 - DNA, 22 bp, Artificial Sequence
  Synthetic oligonucleotide; CTG chr11 5373456 5373477 5373461 5373456 -
tgcccactgtctggcactccct

SEQ ID NO: 117577 - DNA, 22 bp, Artificial Sequence
  Synthetic oligonucleotide; CTG chr11 5373447 5373468 5373452 5373447 -
tctggcactccctagcgagatg

SEQ ID NO: 117578 - DNA, 22 bp, Artificial Sequence
  Synthetic oligonucleotide; CTG chr11 5373443 5373464 5373448 5373443 -
gcactccctagcgagatgaacc

SEQ ID NO: 117579 - DNA, 22 bp, Artificial Sequence
  Synthetic oligonucleotide; CTC chr11 5373437 5373458 5373442 5373437 -
cctagcgagatgaaccccatac

SEQ ID NO: 117580 - DNA, 22 bp, Artificial Sequence
  Synthetic oligonucleotide; CTA chr11 5373433 5373454 5373438 5373433 -
gcgagatgaaccccatacctca

SEQ ID NO: 117581 - DNA, 22 bp, Artificial Sequence
  Synthetic oligonucleotide; CTC chr11 5373412 5373433 5373417 5373412 -
agatggaaatgcagaaatcacc

SEQ ID NO: 117582 - DNA, 22 bp, Artificial Sequence
  Synthetic oligonucleotide; CTT chr11 5373384 5373405 5373389 5373384 -
ctgtgttgttcacgctgggagc

SEQ ID NO: 117583 - DNA, 22 bp, Artificial Sequence
  Synthetic oligonucleotide; TTC chr11 5373383 5373404 5373388 5373383 -
tgtgttgttcacgctgggagct

SEQ ID NO: 117584 - DNA, 22 bp, Artificial Sequence
  Synthetic oligonucleotide; CTG chr11 5373381 5373402 5373386 5373381 -
tgttgttcacgctgggagctgt

SEQ ID NO: 117585 - DNA, 22 bp, Artificial Sequence
  Synthetic oligonucleotide; TTG chr11 5373376 5373397 5373381 5373376 -
ttcacgctgggagctgtagacc

SEQ ID NO: 117586 - DNA, 22 bp, Artificial Sequence
  Synthetic oligonucleotide; TTC chr11 5373373 5373394 5373378 5373373 -
acgctgggagctgtagaccaga

SEQ ID NO: 117587 - DNA, 22 bp, Artificial Sequence
  Synthetic oligonucleotide; CTG chr11 5373367 5373388 5373372 5373367 -
ggagctgtagaccagagctgtt

SEQ ID NO: 117588 - DNA, 22 bp, Artificial Sequence
  Synthetic oligonucleotide; CTG chr11 5373360 5373381 5373365 5373360 -
tagaccagagctgttcctattt

SEQ ID NO: 117589 - DNA, 22 bp, Artificial Sequence
  Synthetic oligonucleotide; CTG chr11 5373347 5373368 5373352 5373347 -
ttcctatttggccatcttggct

SEQ ID NO: 117590 - DNA, 22 bp, Artificial Sequence
  Synthetic oligonucleotide; TTC chr11 5373344 5373365 5373349 5373344 -
ctatttggccatcttggctcaa

SEQ ID NO: 117591 - DNA, 22 bp, Artificial Sequence
  Synthetic oligonucleotide; CTA chr11 5373341 5373362 5373346 5373341 -
tttggccatcttggctcaaaaa

SEQ ID NO: 117592 - DNA, 22 bp, Artificial Sequence
  Synthetic oligonucleotide; TTT chr11 5373338 5373359 5373343 5373338 -
ggccatcttggctcaaaaactg

SEQ ID NO: 117593 - DNA, 22 bp, Artificial Sequence
  Synthetic oligonucleotide; TTG chr11 5373337 5373358 5373342 5373337 -
gccatcttggctcaaaaactgg

SEQ ID NO: 117594 - DNA, 22 bp, Artificial Sequence
  Synthetic oligonucleotide; CTT chr11 5373329 5373350 5373334 5373329 -
ggctcaaaaactggaactttat

SEQ ID NO: 117595 - DNA, 22 bp, Artificial Sequence
  Synthetic oligonucleotide; TTG chr11 5373328 5373349 5373333 5373328 -
gctcaaaaactggaactttatt

SEQ ID NO: 117596 - DNA, 22 bp, Artificial Sequence
  Synthetic oligonucleotide; CTC chr11 5373324 5373345 5373329 5373324 -
aaaaactggaactttatttgtg

SEQ ID NO: 117597 - DNA, 22 bp, Artificial Sequence
  Synthetic oligonucleotide; CTG chr11 5373316 5373337 5373321 5373316 -
gaactttatttgtgaaagaaaa

SEQ ID NO: 117598 - DNA, 22 bp, Artificial Sequence
  Synthetic oligonucleotide; CTT chr11 5373310 5373331 5373315 5373310 -
tatttgtgaaagaaaaaatcga

SEQ ID NO: 117599 - DNA, 22 bp, Artificial Sequence
  Synthetic oligonucleotide; TTT chr11 5373309 5373330 5373314 5373309 -
atttgtgaaagaaaaaatcgat

SEQ ID NO: 117600 - DNA, 22 bp, Artificial Sequence
  Synthetic oligonucleotide; TTA chr11 5373308 5373329 5373313 5373308 -
tttgtgaaagaaaaaatcgatc

SEQ ID NO: 117601 - DNA, 22 bp, Artificial Sequence
  Synthetic oligonucleotide; TTT chr11 5373305 5373326 5373310 5373305 -
gtgaaagaaaaaatcgatcaat

SEQ ID NO: 117602 - DNA, 22 bp, Artificial Sequence
  Synthetic oligonucleotide; TTG chr11 5373304 5373325 5373309 5373304 -
tgaaagaaaaaatcgatcaata

SEQ ID NO: 117603 - DNA, 22 bp, Artificial Sequence
  Synthetic oligonucleotide; CTT chr11 5373275 5373296 5373280 5373275 -
ccagtgaaaattttcttcaaat

SEQ ID NO: 117604 - DNA, 22 bp, Artificial Sequence
  Synthetic oligonucleotide; TTC chr11 5373274 5373295 5373279 5373274 -
cagtgaaaattttcttcaaatc

SEQ ID NO: 117605 - DNA, 22 bp, Artificial Sequence
  Synthetic oligonucleotide; TTT chr11 5373262 5373283 5373267 5373262 -
tcttcaaatcaagacaatatct

SEQ ID NO: 117606 - DNA, 22 bp, Artificial Sequence
  Synthetic oligonucleotide; TTT chr11 5373261 5373282 5373266 5373261 -
cttcaaatcaagacaatatcta

SEQ ID NO: 117607 - DNA, 22 bp, Artificial Sequence
  Synthetic oligonucleotide; TTC chr11 5373260 5373281 5373265 5373260 -
ttcaaatcaagacaatatctaa

SEQ ID NO: 117608 - DNA, 22 bp, Artificial Sequence
  Synthetic oligonucleotide; CTT chr11 5373258 5373279 5373263 5373258 -
caaatcaagacaatatctaaaa

SEQ ID NO: 117609 - DNA, 22 bp, Artificial Sequence
  Synthetic oligonucleotide; TTC chr11 5373257 5373278 5373262 5373257 -
aaatcaagacaatatctaaaaa

SEQ ID NO: 117610 - DNA, 22 bp, Artificial Sequence
  Synthetic oligonucleotide; CTA chr11 5373239 5373260 5373244 5373239 -
aaaaattgccgagactgatatc

SEQ ID NO: 117611 - DNA, 22 bp, Artificial Sequence
  Synthetic oligonucleotide; TTG chr11 5373231 5373252 5373236 5373231 -
ccgagactgatatcaagcagct

SEQ ID NO: 117612 - DNA, 22 bp, Artificial Sequence
  Synthetic oligonucleotide; CTG chr11 5373222 5373243 5373227 5373222 -
atatcaagcagctatctctata

SEQ ID NO: 117613 - DNA, 22 bp, Artificial Sequence
  Synthetic oligonucleotide; CTA chr11 5373208 5373229 5373213 5373208 -
tctctatacatgttcttccagg

SEQ ID NO: 117614 - DNA, 22 bp, Artificial Sequence
  Synthetic oligonucleotide; CTC chr11 5373204 5373225 5373209 5373204 -
tatacatgttcttccaggagtt

SEQ ID NO: 117615 - DNA, 22 bp, Artificial Sequence
  Synthetic oligonucleotide; CTA chr11 5373202 5373223 5373207 5373202 -
tacatgttcttccaggagtttt

SEQ ID NO: 117616 - DNA, 22 bp, Artificial Sequence
  Synthetic oligonucleotide; TTC chr11 5373193 5373214 5373198 5373193 -
ttccaggagttttgtgatttca

SEQ ID NO: 117617 - DNA, 22 bp, Artificial Sequence
  Synthetic oligonucleotide; CTT chr11 5373191 5373212 5373196 5373191 -
ccaggagttttgtgatttcagg

SEQ ID NO: 117618 - DNA, 22 bp, Artificial Sequence
  Synthetic oligonucleotide; TTC chr11 5373190 5373211 5373195 5373190 -
caggagttttgtgatttcaggt

SEQ ID NO: 117619 - DNA, 22 bp, Artificial Sequence
  Synthetic oligonucleotide; TTT chr11 5373181 5373202 5373186 5373181 -
tgtgatttcaggtcttacattt

SEQ ID NO: 117620 - DNA, 22 bp, Artificial Sequence
  Synthetic oligonucleotide; TTT chr11 5373180 5373201 5373185 5373180 -
gtgatttcaggtcttacattta

SEQ ID NO: 117621 - DNA, 22 bp, Artificial Sequence
  Synthetic oligonucleotide; TTG chr11 5373179 5373200 5373184 5373179 -
tgatttcaggtcttacatttat

SEQ ID NO: 117622 - DNA, 22 bp, Artificial Sequence
  Synthetic oligonucleotide; TTT chr11 5373173 5373194 5373178 5373173 -
caggtcttacatttatgtcttt

SEQ ID NO: 117623 - DNA, 22 bp, Artificial Sequence
  Synthetic oligonucleotide; TTC chr11 5373172 5373193 5373177 5373172 -
aggtcttacatttatgtcttta

SEQ ID NO: 117624 - DNA, 22 bp, Artificial Sequence
  Synthetic oligonucleotide; CTT chr11 5373165 5373186 5373170 5373165 -
acatttatgtctttaatctatt

SEQ ID NO: 117625 - DNA, 22 bp, Artificial Sequence
  Synthetic oligonucleotide; TTA chr11 5373164 5373185 5373169 5373164 -
catttatgtctttaatctattt

SEQ ID NO: 117626 - DNA, 22 bp, Artificial Sequence
  Synthetic oligonucleotide; TTT chr11 5373159 5373180 5373164 5373159 -
atgtctttaatctattttgagt

SEQ ID NO: 117627 - DNA, 22 bp, Artificial Sequence
  Synthetic oligonucleotide; TTA chr11 5373158 5373179 5373163 5373158 -
tgtctttaatctattttgagtt

SEQ ID NO: 117628 - DNA, 22 bp, Artificial Sequence
  Synthetic oligonucleotide; CTT chr11 5373152 5373173 5373157 5373152 -
taatctattttgagttgactta

SEQ ID NO: 117629 - DNA, 22 bp, Artificial Sequence
  Synthetic oligonucleotide; TTT chr11 5373151 5373172 5373156 5373151 -
aatctattttgagttgacttat

SEQ ID NO: 117630 - DNA, 22 bp, Artificial Sequence
  Synthetic oligonucleotide; TTA chr11 5373150 5373171 5373155 5373150 -
atctattttgagttgacttatg

SEQ ID NO: 117631 - DNA, 22 bp, Artificial Sequence
  Synthetic oligonucleotide; CTA chr11 5373145 5373166 5373150 5373145 -
ttttgagttgacttatggctta

SEQ ID NO: 117632 - DNA, 22 bp, Artificial Sequence
  Synthetic oligonucleotide; TTT chr11 5373142 5373163 5373147 5373142 -
tgagttgacttatggcttaagg

SEQ ID NO: 117633 - DNA, 22 bp, Artificial Sequence
  Synthetic oligonucleotide; TTT chr11 5373141 5373162 5373146 5373141 -
gagttgacttatggcttaaggt

SEQ ID NO: 117634 - DNA, 22 bp, Artificial Sequence
  Synthetic oligonucleotide; TTG chr11 5373140 5373161 5373145 5373140 -
agttgacttatggcttaaggta

SEQ ID NO: 117635 - DNA, 22 bp, Artificial Sequence
  Synthetic oligonucleotide; TTG chr11 5373135 5373156 5373140 5373135 -
acttatggcttaaggtaaaggt

SEQ ID NO: 117636 - DNA, 22 bp, Artificial Sequence
  Synthetic oligonucleotide; CTT chr11 5373131 5373152 5373136 5373131 -
atggcttaaggtaaaggtccaa

SEQ ID NO: 117637 - DNA, 22 bp, Artificial Sequence
  Synthetic oligonucleotide; TTA chr11 5373130 5373151 5373135 5373130 -
tggcttaaggtaaaggtccaat

SEQ ID NO: 117638 - DNA, 22 bp, Artificial Sequence
  Synthetic oligonucleotide; CTT chr11 5373124 5373145 5373129 5373124 -
aaggtaaaggtccaattttatt

SEQ ID NO: 117639 - DNA, 22 bp, Artificial Sequence
  Synthetic oligonucleotide; TTA chr11 5373123 5373144 5373128 5373123 -
aggtaaaggtccaattttattc

SEQ ID NO: 117640 - DNA, 22 bp, Artificial Sequence
  Synthetic oligonucleotide; TTT chr11 5373106 5373127 5373111 5373106 -
tattcttttgcatttggatatc

SEQ ID NO: 117641 - DNA, 22 bp, Artificial Sequence
  Synthetic oligonucleotide; TTT chr11 5373105 5373126 5373110 5373105 -
attcttttgcatttggatatcc

SEQ ID NO: 117642 - DNA, 22 bp, Artificial Sequence
  Synthetic oligonucleotide; TTA chr11 5373104 5373125 5373109 5373104 -
ttcttttgcatttggatatcca

SEQ ID NO: 117643 - DNA, 22 bp, Artificial Sequence
  Synthetic oligonucleotide; TTC chr11 5373101 5373122 5373106 5373101 -
ttttgcatttggatatccagtt

SEQ ID NO: 117644 - DNA, 22 bp, Artificial Sequence
  Synthetic oligonucleotide; CTT chr11 5373099 5373120 5373104 5373099 -
ttgcatttggatatccagtttt

SEQ ID NO: 117645 - DNA, 22 bp, Artificial Sequence
  Synthetic oligonucleotide; TTT chr11 5373098 5373119 5373103 5373098 -
tgcatttggatatccagttttc

SEQ ID NO: 117646 - DNA, 22 bp, Artificial Sequence
  Synthetic oligonucleotide; TTT chr11 5373097 5373118 5373102 5373097 -
gcatttggatatccagttttcc

SEQ ID NO: 117647 - DNA, 22 bp, Artificial Sequence
  Synthetic oligonucleotide; TTG chr11 5373096 5373117 5373101 5373096 -
catttggatatccagttttccc

SEQ ID NO: 117648 - DNA, 22 bp, Artificial Sequence
  Synthetic oligonucleotide; TTT chr11 5373091 5373112 5373096 5373091 -
ggatatccagttttcccaacac

SEQ ID NO: 117649 - DNA, 22 bp, Artificial Sequence
  Synthetic oligonucleotide; TTG chr11 5373090 5373111 5373095 5373090 -
gatatccagttttcccaacact

SEQ ID NO: 117650 - DNA, 22 bp, Artificial Sequence
  Synthetic oligonucleotide; TTT chr11 5373078 5373099 5373083 5373078 -
tcccaacactatttgttgagga

SEQ ID NO: 117651 - DNA, 22 bp, Artificial Sequence
  Synthetic oligonucleotide; TTT chr11 5373077 5373098 5373082 5373077 -
cccaacactatttgttgaggag

SEQ ID NO: 117652 - DNA, 22 bp, Artificial Sequence
  Synthetic oligonucleotide; TTC chr11 5373076 5373097 5373081 5373076 -
ccaacactatttgttgaggaga

SEQ ID NO: 117653 - DNA, 22 bp, Artificial Sequence
  Synthetic oligonucleotide; CTA chr11 5373067 5373088 5373072 5373067 -
tttgttgaggagactatccttc

SEQ ID NO: 117654 - DNA, 22 bp, Artificial Sequence
  Synthetic oligonucleotide; TTT chr11 5373064 5373085 5373069 5373064 -
gttgaggagactatccttcccc

SEQ ID NO: 117655 - DNA, 22 bp, Artificial Sequence
  Synthetic oligonucleotide; TTG chr11 5373063 5373084 5373068 5373063 -
ttgaggagactatccttcccct

SEQ ID NO: 117656 - DNA, 22 bp, Artificial Sequence
  Synthetic oligonucleotide; TTG chr11 5373060 5373081 5373065 5373060 -
aggagactatccttcccctatt

SEQ ID NO: 117657 - DNA, 22 bp, Artificial Sequence
  Synthetic oligonucleotide; CTA chr11 5373051 5373072 5373056 5373051 -
tccttcccctattgtgttggtg

SEQ ID NO: 117658 - DNA, 22 bp, Artificial Sequence
  Synthetic oligonucleotide; CTT chr11 5373046 5373067 5373051 5373046 -
cccctattgtgttggtggcctt

SEQ ID NO: 117659 - DNA, 22 bp, Artificial Sequence
  Synthetic oligonucleotide; TTC chr11 5373045 5373066 5373050 5373045 -
ccctattgtgttggtggccttg

SEQ ID NO: 117660 - DNA, 22 bp, Artificial Sequence
  Synthetic oligonucleotide; CTA chr11 5373040 5373061 5373045 5373040 -
ttgtgttggtggccttgttgag

SEQ ID NO: 117661 - DNA, 22 bp, Artificial Sequence
  Synthetic oligonucleotide; TTG chr11 5373037 5373058 5373042 5373037 -
tgttggtggccttgttgagaat

SEQ ID NO: 117662 - DNA, 22 bp, Artificial Sequence
  Synthetic oligonucleotide; TTG chr11 5373032 5373053 5373037 5373032 -
gtggccttgttgagaattactg

SEQ ID NO: 117663 - DNA, 22 bp, Artificial Sequence
  Synthetic oligonucleotide; CTT chr11 5373024 5373045 5373029 5373024 -
gttgagaattactggactgtat

SEQ ID NO: 117664 - DNA, 22 bp, Artificial Sequence
  Synthetic oligonucleotide; TTG chr11 5373023 5373044 5373028 5373023 -
ttgagaattactggactgtata

SEQ ID NO: 117665 - DNA, 22 bp, Artificial Sequence
  Synthetic oligonucleotide; TTG chr11 5373020 5373041 5373025 5373020 -
agaattactggactgtatatac

SEQ ID NO: 117666 - DNA, 22 bp, Artificial Sequence
  Synthetic oligonucleotide; TTA chr11 5373013 5373034 5373018 5373013 -
ctggactgtatatacgtaaatt

SEQ ID NO: 117667 - DNA, 22 bp, Artificial Sequence
  Synthetic oligonucleotide; CTG chr11 5373010 5373031 5373015 5373010 -
gactgtatatacgtaaatttat

SEQ ID NO: 117668 - DNA, 22 bp, Artificial Sequence
  Synthetic oligonucleotide; CTG chr11 5373005 5373026 5373010 5373005 -
tatatacgtaaatttatttctg

SEQ ID NO: 117669 - DNA, 22 bp, Artificial Sequence
  Synthetic oligonucleotide; TTT chr11 5372990 5373011 5372995 5372990 -
atttctgggctctttattctgt

SEQ ID NO: 117670 - DNA, 22 bp, Artificial Sequence
  Synthetic oligonucleotide; TTA chr11 5372989 5373010 5372994 5372989 -
tttctgggctctttattctgtt

SEQ ID NO: 117671 - DNA, 22 bp, Artificial Sequence
  Synthetic oligonucleotide; TTT chr11 5372986 5373007 5372991 5372986 -
ctgggctctttattctgttcaa

SEQ ID NO: 117672 - DNA, 22 bp, Artificial Sequence
  Synthetic oligonucleotide; TTC chr11 5372985 5373006 5372990 5372985 -
tgggctctttattctgttcaat

SEQ ID NO: 117673 - DNA, 22 bp, Artificial Sequence
  Synthetic oligonucleotide; CTG chr11 5372983 5373004 5372988 5372983 -
ggctctttattctgttcaattt

SEQ ID NO: 117674 - DNA, 22 bp, Artificial Sequence
  Synthetic oligonucleotide; CTC chr11 5372978 5372999 5372983 5372978 -
tttattctgttcaatttggtct

SEQ ID NO: 117675 - DNA, 22 bp, Artificial Sequence
  Synthetic oligonucleotide; CTT chr11 5372976 5372997 5372981 5372976 -
tattctgttcaatttggtctat

SEQ ID NO: 117676 - DNA, 22 bp, Artificial Sequence
  Synthetic oligonucleotide; TTT chr11 5372975 5372996 5372980 5372975 -
attctgttcaatttggtctatg

SEQ ID NO: 117677 - DNA, 22 bp, Artificial Sequence
  Synthetic oligonucleotide; TTA chr11 5372974 5372995 5372979 5372974 -
ttctgttcaatttggtctatgt

SEQ ID NO: 117678 - DNA, 22 bp, Artificial Sequence
  Synthetic oligonucleotide; TTC chr11 5372971 5372992 5372976 5372971 -
tgttcaatttggtctatgtgtc

SEQ ID NO: 117679 - DNA, 22 bp, Artificial Sequence
  Synthetic oligonucleotide; CTG chr11 5372969 5372990 5372974 5372969 -
ttcaatttggtctatgtgtcta

SEQ ID NO: 117680 - DNA, 22 bp, Artificial Sequence
  Synthetic oligonucleotide; TTC chr11 5372966 5372987 5372971 5372966 -
aatttggtctatgtgtctattt

SEQ ID NO: 117681 - DNA, 22 bp, Artificial Sequence
  Synthetic oligonucleotide; TTT chr11 5372961 5372982 5372966 5372961 -
ggtctatgtgtctatttatgtg

SEQ ID NO: 117682 - DNA, 22 bp, Artificial Sequence
  Synthetic oligonucleotide; TTG chr11 5372960 5372981 5372965 5372960 -
gtctatgtgtctatttatgtga

SEQ ID NO: 117683 - DNA, 22 bp, Artificial Sequence
  Synthetic oligonucleotide; CTA chr11 5372955 5372976 5372960 5372955 -
tgtgtctatttatgtgatagta

SEQ ID NO: 117684 - DNA, 22 bp, Artificial Sequence
  Synthetic oligonucleotide; CTA chr11 5372947 5372968 5372952 5372947 -
tttatgtgatagtaccatactt

SEQ ID NO: 117685 - DNA, 22 bp, Artificial Sequence
  Synthetic oligonucleotide; TTT chr11 5372944 5372965 5372949 5372944 -
atgtgatagtaccatacttttt

SEQ ID NO: 117686 - DNA, 22 bp, Artificial Sequence
  Synthetic oligonucleotide; TTA chr11 5372943 5372964 5372948 5372943 -
tgtgatagtaccatactttttt

SEQ ID NO: 117687 - DNA, 22 bp, Artificial Sequence
  Synthetic oligonucleotide; CTT chr11 5372925 5372946 5372930 5372925 -
ttttggttactatagctttgta

SEQ ID NO: 117688 - DNA, 22 bp, Artificial Sequence
  Synthetic oligonucleotide; TTT chr11 5372924 5372945 5372929 5372924 -
tttggttactatagctttgtaa

SEQ ID NO: 117689 - DNA, 22 bp, Artificial Sequence
  Synthetic oligonucleotide; TTT chr11 5372923 5372944 5372928 5372923 -
ttggttactatagctttgtaat

SEQ ID NO: 117690 - DNA, 22 bp, Artificial Sequence
  Synthetic oligonucleotide; TTT chr11 5372922 5372943 5372927 5372922 -
tggttactatagctttgtaata

SEQ ID NO: 117691 - DNA, 22 bp, Artificial Sequence
  Synthetic oligonucleotide; TTT chr11 5372921 5372942 5372926 5372921 -
ggttactatagctttgtaatat

SEQ ID NO: 117692 - DNA, 22 bp, Artificial Sequence
  Synthetic oligonucleotide; TTG chr11 5372920 5372941 5372925 5372920 -
gttactatagctttgtaatata

SEQ ID NO: 117693 - DNA, 22 bp, Artificial Sequence
  Synthetic oligonucleotide; TTA chr11 5372916 5372937 5372921 5372916 -
ctatagctttgtaatataattt

SEQ ID NO: 117694 - DNA, 22 bp, Artificial Sequence
  Synthetic oligonucleotide; CTA chr11 5372913 5372934 5372918 5372913 -
tagctttgtaatataatttgaa

SEQ ID NO: 117695 - DNA, 22 bp, Artificial Sequence
  Synthetic oligonucleotide; CTT chr11 5372907 5372928 5372912 5372907 -
tgtaatataatttgaaatcaga

SEQ ID NO: 117696 - DNA, 22 bp, Artificial Sequence
  Synthetic oligonucleotide; TTT chr11 5372906 5372927 5372911 5372906 -
gtaatataatttgaaatcagaa

SEQ ID NO: 117697 - DNA, 22 bp, Artificial Sequence
  Synthetic oligonucleotide; TTG chr11 5372905 5372926 5372910 5372905 -
taatataatttgaaatcagaac

SEQ ID NO: 117698 - DNA, 22 bp, Artificial Sequence
  Synthetic oligonucleotide; TTT chr11 5372894 5372915 5372899 5372894 -
gaaatcagaacgtgtgctgcca

SEQ ID NO: 117699 - DNA, 22 bp, Artificial Sequence
  Synthetic oligonucleotide; TTG chr11 5372893 5372914 5372898 5372893 -
aaatcagaacgtgtgctgccat

SEQ ID NO: 117700 - DNA, 22 bp, Artificial Sequence
  Synthetic oligonucleotide; CTG chr11 5372875 5372896 5372880 5372875 -
ccatcaagttggtttttctttc

SEQ ID NO: 117701 - DNA, 22 bp, Artificial Sequence
  Synthetic oligonucleotide; TTG chr11 5372864 5372885 5372869 5372864 -
gtttttctttctcaagattgtt

SEQ ID NO: 117702 - DNA, 22 bp, Artificial Sequence
  Synthetic oligonucleotide; TTT chr11 5372860 5372881 5372865 5372860 -
ttctttctcaagattgttttgg

SEQ ID NO: 117703 - DNA, 22 bp, Artificial Sequence
  Synthetic oligonucleotide; TTT chr11 5372859 5372880 5372864 5372859 -
tctttctcaagattgttttggc

SEQ ID NO: 117704 - DNA, 22 bp, Artificial Sequence
  Synthetic oligonucleotide; TTT chr11 5372858 5372879 5372863 5372858 -
ctttctcaagattgttttggcc

SEQ ID NO: 117705 - DNA, 22 bp, Artificial Sequence
  Synthetic oligonucleotide; TTC chr11 5372857 5372878 5372862 5372857 -
tttctcaagattgttttggcca

SEQ ID NO: 117706 - DNA, 22 bp, Artificial Sequence
  Synthetic oligonucleotide; CTT chr11 5372855 5372876 5372860 5372855 -
tctcaagattgttttggccatt

SEQ ID NO: 117707 - DNA, 22 bp, Artificial Sequence
  Synthetic oligonucleotide; TTT chr11 5372854 5372875 5372859 5372854 -
ctcaagattgttttggccattt

SEQ ID NO: 117708 - DNA, 22 bp, Artificial Sequence
  Synthetic oligonucleotide; TTC chr11 5372853 5372874 5372858 5372853 -
tcaagattgttttggccatttg

SEQ ID NO: 117709 - DNA, 22 bp, Artificial Sequence
  Synthetic oligonucleotide; CTC chr11 5372851 5372872 5372856 5372851 -
aagattgttttggccatttggg

SEQ ID NO: 117710 - DNA, 22 bp, Artificial Sequence
  Synthetic oligonucleotide; TTG chr11 5372844 5372865 5372849 5372844 -
ttttggccatttgggggtgttc

SEQ ID NO: 117711 - DNA, 22 bp, Artificial Sequence
  Synthetic oligonucleotide; TTT chr11 5372841 5372862 5372846 5372841 -
tggccatttgggggtgttctgt

SEQ ID NO: 117712 - DNA, 22 bp, Artificial Sequence
  Synthetic oligonucleotide; TTT chr11 5372840 5372861 5372845 5372840 -
ggccatttgggggtgttctgtg

SEQ ID NO: 117713 - DNA, 22 bp, Artificial Sequence
  Synthetic oligonucleotide; TTG chr11 5372839 5372860 5372844 5372839 -
gccatttgggggtgttctgtgg

SEQ ID NO: 117714 - DNA, 22 bp, Artificial Sequence
  Synthetic oligonucleotide; TTT chr11 5372832 5372853 5372837 5372832 -
gggggtgttctgtggtttcata

SEQ ID NO: 117715 - DNA, 22 bp, Artificial Sequence
  Synthetic oligonucleotide; TTG chr11 5372831 5372852 5372836 5372831 -
ggggtgttctgtggtttcatac

SEQ ID NO: 117716 - DNA, 22 bp, Artificial Sequence
  Synthetic oligonucleotide; TTC chr11 5372822 5372843 5372827 5372822 -
tgtggtttcatacaaattttca

SEQ ID NO: 117717 - DNA, 22 bp, Artificial Sequence
  Synthetic oligonucleotide; CTG chr11 5372820 5372841 5372825 5372820 -
tggtttcatacaaattttcaaa

SEQ ID NO: 117718 - DNA, 22 bp, Artificial Sequence
  Synthetic oligonucleotide; TTT chr11 5372814 5372835 5372819 5372814 -
catacaaattttcaaattgttt

SEQ ID NO: 117719 - DNA, 22 bp, Artificial Sequence
  Synthetic oligonucleotide; TTC chr11 5372813 5372834 5372818 5372813 -
atacaaattttcaaattgtttt

SEQ ID NO: 117720 - DNA, 22 bp, Artificial Sequence
  Synthetic oligonucleotide; TTT chr11 5372803 5372824 5372808 5372803 -
tcaaattgttttctgtaaaatg

SEQ ID NO: 117721 - DNA, 22 bp, Artificial Sequence
  Synthetic oligonucleotide; TTT chr11 5372802 5372823 5372807 5372802 -
caaattgttttctgtaaaatgt

SEQ ID NO: 117722 - DNA, 22 bp, Artificial Sequence
  Synthetic oligonucleotide; TTC chr11 5372801 5372822 5372806 5372801 -
aaattgttttctgtaaaatgtg

SEQ ID NO: 117723 - DNA, 22 bp, Artificial Sequence
  Synthetic oligonucleotide; TTG chr11 5372795 5372816 5372800 5372795 -
ttttctgtaaaatgtgccagag

SEQ ID NO: 117724 - DNA, 22 bp, Artificial Sequence
  Synthetic oligonucleotide; TTT chr11 5372792 5372813 5372797 5372792 -
tctgtaaaatgtgccagagctc

SEQ ID NO: 117725 - DNA, 22 bp, Artificial Sequence
  Synthetic oligonucleotide; TTT chr11 5372791 5372812 5372796 5372791 -
ctgtaaaatgtgccagagctca

SEQ ID NO: 117726 - DNA, 22 bp, Artificial Sequence
  Synthetic oligonucleotide; TTC chr11 5372790 5372811 5372795 5372790 -
tgtaaaatgtgccagagctcag

SEQ ID NO: 117727 - DNA, 22 bp, Artificial Sequence
  Synthetic oligonucleotide; CTG chr11 5372788 5372809 5372793 5372788 -
taaaatgtgccagagctcaggt

SEQ ID NO: 117728 - DNA, 22 bp, Artificial Sequence
  Synthetic oligonucleotide; CTC chr11 5372770 5372791 5372775 5372770 -
aggtaacaaaagcaaaaataaa

SEQ ID NO: 117729 - DNA, 22 bp, Artificial Sequence
  Synthetic oligonucleotide; CTA chr11 5372726 5372747 5372731 5372726 -
aatattttctgcacagcaaaga

SEQ ID NO: 117730 - DNA, 22 bp, Artificial Sequence
  Synthetic oligonucleotide; TTT chr11 5372719 5372740 5372724 5372719 -
tctgcacagcaaagaaaacaat

SEQ ID NO: 117731 - DNA, 22 bp, Artificial Sequence
  Synthetic oligonucleotide; TTT chr11 5372718 5372739 5372723 5372718 -
ctgcacagcaaagaaaacaatc

SEQ ID NO: 117732 - DNA, 22 bp, Artificial Sequence
  Synthetic oligonucleotide; TTC chr11 5372717 5372738 5372722 5372717 -
tgcacagcaaagaaaacaatca

SEQ ID NO: 117733 - DNA, 22 bp, Artificial Sequence
  Synthetic oligonucleotide; CTG chr11 5372715 5372736 5372720 5372715 -
cacagcaaagaaaacaatcatc

SEQ ID NO: 117734 - DNA, 22 bp, Artificial Sequence
  Synthetic oligonucleotide; TTT chr11 5372679 5372700 5372684 5372679 -
gggagaaaatatttacagatca

SEQ ID NO: 117735 - DNA, 22 bp, Artificial Sequence
  Synthetic oligonucleotide; TTG chr11 5372678 5372699 5372683 5372678 -
ggagaaaatatttacagatcat

SEQ ID NO: 117736 - DNA, 22 bp, Artificial Sequence
  Synthetic oligonucleotide; TTT chr11 5372665 5372686 5372670 5372665 -
acagatcatatatctgatacaa

SEQ ID NO: 117737 - DNA, 22 bp, Artificial Sequence
  Synthetic oligonucleotide; TTA chr11 5372664 5372685 5372669 5372664 -
cagatcatatatctgatacaag

SEQ ID NO: 117738 - DNA, 22 bp, Artificial Sequence
  Synthetic oligonucleotide; CTG chr11 5372649 5372670 5372654 5372649 -
atacaagtctaatacccaaaat

SEQ ID NO: 117739 - DNA, 22 bp, Artificial Sequence
  Synthetic oligonucleotide; CTA chr11 5372638 5372659 5372643 5372638 -
atacccaaaatatataaggaac

SEQ ID NO: 117740 - DNA, 22 bp, Artificial Sequence
  Synthetic oligonucleotide; CTC chr11 5372614 5372635 5372619 5372614 -
aatcaactaaatatgaaaaaat

SEQ ID NO: 117741 - DNA, 22 bp, Artificial Sequence
  Synthetic oligonucleotide; CTA chr11 5372605 5372626 5372610 5372605 -
aatatgaaaaaatataatagta

SEQ ID NO: 117742 - DNA, 22 bp, Artificial Sequence
  Synthetic oligonucleotide; CTA chr11 5372578 5372599 5372583 5372578 -
agtaaaaatgggcaaaggatct

SEQ ID NO: 117743 - DNA, 22 bp, Artificial Sequence
  Synthetic oligonucleotide; CTG chr11 5372555 5372576 5372560 5372555 -
aatatacatttctctgaagaca

SEQ ID NO: 117744 - DNA, 22 bp, Artificial Sequence
  Synthetic oligonucleotide; TTT chr11 5372544 5372565 5372549 5372544 -
ctctgaagacatgcaaatggtc

SEQ ID NO: 117745 - DNA, 22 bp, Artificial Sequence
  Synthetic oligonucleotide; TTC chr11 5372543 5372564 5372548 5372543 -
tctgaagacatgcaaatggtca

SEQ ID NO: 117746 - DNA, 22 bp, Artificial Sequence
  Synthetic oligonucleotide; CTC chr11 5372541 5372562 5372546 5372541 -
tgaagacatgcaaatggtcagc

SEQ ID NO: 117747 - DNA, 22 bp, Artificial Sequence
  Synthetic oligonucleotide; CTG chr11 5372539 5372560 5372544 5372539 -
aagacatgcaaatggtcagcag

SEQ ID NO: 117748 - DNA, 22 bp, Artificial Sequence
  Synthetic oligonucleotide; CTA chr11 5372497 5372518 5372502 5372497 -
catcaccaatcatcaggaaaat

SEQ ID NO: 117749 - DNA, 22 bp, Artificial Sequence
  Synthetic oligonucleotide; CTC chr11 5372449 5372470 5372454 5372449 -
acacctgttgagatggctatta

SEQ ID NO: 117750 - DNA, 22 bp, Artificial Sequence
  Synthetic oligonucleotide; CTG chr11 5372442 5372463 5372447 5372442 -
ttgagatggctattatcaaaaa

SEQ ID NO: 117751 - DNA, 22 bp, Artificial Sequence
  Synthetic oligonucleotide; TTG chr11 5372439 5372460 5372444 5372439 -
agatggctattatcaaaaaaga

SEQ ID NO: 117752 - DNA, 22 bp, Artificial Sequence
  Synthetic oligonucleotide; CTA chr11 5372430 5372451 5372435 5372430 -
ttatcaaaaaagacaagagata

SEQ ID NO: 117753 - DNA, 22 bp, Artificial Sequence
  Synthetic oligonucleotide; TTA chr11 5372427 5372448 5372432 5372427 -
tcaaaaaagacaagagataggg

SEQ ID NO: 117754 - DNA, 22 bp, Artificial Sequence
  Synthetic oligonucleotide; TTG chr11 5372401 5372422 5372406 5372401 -
gagaggctgtggagaaaggaga

SEQ ID NO: 117755 - DNA, 22 bp, Artificial Sequence
  Synthetic oligonucleotide; CTG chr11 5372392 5372413 5372397 5372392 -
tggagaaaggagaactcttgtg

SEQ ID NO: 117756 - DNA, 22 bp, Artificial Sequence
  Synthetic oligonucleotide; CTC chr11 5372375 5372396 5372380 5372375 -
ttgtgcatagctggtgggaatg

SEQ ID NO: 117757 - DNA, 22 bp, Artificial Sequence
  Synthetic oligonucleotide; CTT chr11 5372373 5372394 5372378 5372373 -
gtgcatagctggtgggaatgta

SEQ ID NO: 117758 - DNA, 22 bp, Artificial Sequence
  Synthetic oligonucleotide; TTG chr11 5372372 5372393 5372377 5372372 -
tgcatagctggtgggaatgtaa

SEQ ID NO: 117759 - DNA, 22 bp, Artificial Sequence
  Synthetic oligonucleotide; CTG chr11 5372362 5372383 5372367 5372362 -
gtgggaatgtaagttaacatag

SEQ ID NO: 117760 - DNA, 22 bp, Artificial Sequence
  Synthetic oligonucleotide; TTA chr11 5372346 5372367 5372351 5372346 -
acatagccattatagaaaacgt

SEQ ID NO: 117761 - DNA, 22 bp, Artificial Sequence
  Synthetic oligonucleotide; TTA chr11 5372334 5372355 5372339 5372334 -
tagaaaacgtatggaagtttct

SEQ ID NO: 117762 - DNA, 22 bp, Artificial Sequence
  Synthetic oligonucleotide; TTT chr11 5372314 5372335 5372319 5372314 -
ctcaaacaactaaaaatagagt

SEQ ID NO: 117763 - DNA, 22 bp, Artificial Sequence
  Synthetic oligonucleotide; TTC chr11 5372313 5372334 5372318 5372313 -
tcaaacaactaaaaatagagtt

SEQ ID NO: 117764 - DNA, 22 bp, Artificial Sequence
  Synthetic oligonucleotide; CTC chr11 5372311 5372332 5372316 5372311 -
aaacaactaaaaatagagttat

SEQ ID NO: 117765 - DNA, 22 bp, Artificial Sequence
  Synthetic oligonucleotide; CTA chr11 5372302 5372323 5372307 5372302 -
aaaatagagttattgtatgatg

SEQ ID NO: 117766 - DNA, 22 bp, Artificial Sequence
  Synthetic oligonucleotide; TTA chr11 5372290 5372311 5372295 5372290 -
ttgtatgatgaagaaatttctc

SEQ ID NO: 117767 - DNA, 22 bp, Artificial Sequence
  Synthetic oligonucleotide; TTG chr11 5372287 5372308 5372292 5372287 -
tatgatgaagaaatttctctgc

SEQ ID NO: 117768 - DNA, 22 bp, Artificial Sequence
  Synthetic oligonucleotide; TTT chr11 5372271 5372292 5372276 5372271 -
ctctgctgtatatgtatccaaa

SEQ ID NO: 117769 - DNA, 22 bp, Artificial Sequence
  Synthetic oligonucleotide; TTC chr11 5372270 5372291 5372275 5372270 -
tctgctgtatatgtatccaaaa

SEQ ID NO: 117770 - DNA, 22 bp, Artificial Sequence
  Synthetic oligonucleotide; CTC chr11 5372268 5372289 5372273 5372268 -
tgctgtatatgtatccaaaata

SEQ ID NO: 117771 - DNA, 22 bp, Artificial Sequence
  Synthetic oligonucleotide; CTG chr11 5372266 5372287 5372271 5372266 -
ctgtatatgtatccaaaataaa

SEQ ID NO: 117772 - DNA, 22 bp, Artificial Sequence
  Synthetic oligonucleotide; CTG chr11 5372263 5372284 5372268 5372263 -
tatatgtatccaaaataaataa

SEQ ID NO: 117773 - DNA, 22 bp, Artificial Sequence
  Synthetic oligonucleotide; TTT chr11 5372230 5372251 5372235 5372230 -
tctagagctatctgcactctca

SEQ ID NO: 117774 - DNA, 22 bp, Artificial Sequence
  Synthetic oligonucleotide; TTT chr11 5372229 5372250 5372234 5372229 -
ctagagctatctgcactctcat

SEQ ID NO: 117775 - DNA, 22 bp, Artificial Sequence
  Synthetic oligonucleotide; TTC chr11 5372228 5372249 5372233 5372228 -
tagagctatctgcactctcatg

SEQ ID NO: 117776 - DNA, 22 bp, Artificial Sequence
  Synthetic oligonucleotide; CTA chr11 5372226 5372247 5372231 5372226 -
gagctatctgcactctcatgtt

SEQ ID NO: 117777 - DNA, 22 bp, Artificial Sequence
  Synthetic oligonucleotide; CTA chr11 5372220 5372241 5372225 5372220 -
tctgcactctcatgttaattgc

SEQ ID NO: 117778 - DNA, 22 bp, Artificial Sequence
  Synthetic oligonucleotide; CTG chr11 5372216 5372237 5372221 5372216 -
cactctcatgttaattgcagca

SEQ ID NO: 117779 - DNA, 22 bp, Artificial Sequence
  Synthetic oligonucleotide; CTC chr11 5372211 5372232 5372216 5372211 -
tcatgttaattgcagcattatt

SEQ ID NO: 117780 - DNA, 22 bp, Artificial Sequence
  Synthetic oligonucleotide; CTC chr11 5372209 5372230 5372214 5372209 -
atgttaattgcagcattattca

SEQ ID NO: 117781 - DNA, 22 bp, Artificial Sequence
  Synthetic oligonucleotide; TTA chr11 5372203 5372224 5372208 5372203 -
attgcagcattattcacaatag

SEQ ID NO: 117782 - DNA, 22 bp, Artificial Sequence
  Synthetic oligonucleotide; TTG chr11 5372199 5372220 5372204 5372199 -
cagcattattcacaatagccaa

SEQ ID NO: 117783 - DNA, 22 bp, Artificial Sequence
  Synthetic oligonucleotide; TTA chr11 5372191 5372212 5372196 5372191 -
ttcacaatagccaagacatgga

SEQ ID NO: 117784 - DNA, 22 bp, Artificial Sequence
  Synthetic oligonucleotide; TTC chr11 5372188 5372209 5372193 5372188 -
acaatagccaagacatggaaac

SEQ ID NO: 117785 - DNA, 22 bp, Artificial Sequence
  Synthetic oligonucleotide; CTA chr11 5372160 5372181 5372165 5372160 -
agtggtatctatatatagatga

SEQ ID NO: 117786 - DNA, 22 bp, Artificial Sequence
  Synthetic oligonucleotide; CTA chr11 5372149 5372170 5372154 5372149 -
tatatagatgaacagataaaga

SEQ ID NO: 117787 - DNA, 22 bp, Artificial Sequence
  Synthetic oligonucleotide; TTG chr11 5372122 5372143 5372127 5372122 -
tgacaggtctgtatatgatatt

SEQ ID NO: 117788 - DNA, 22 bp, Artificial Sequence
  Synthetic oligonucleotide; CTG chr11 5372111 5372132 5372116 5372111 -
tatatgatattgtgatatatgt

SEQ ID NO: 117789 - DNA, 22 bp, Artificial Sequence
  Synthetic oligonucleotide; TTG chr11 5372099 5372120 5372104 5372099 -
tgatatatgtcatatgtatgta

SEQ ID NO: 117790 - DNA, 22 bp, Artificial Sequence
  Synthetic oligonucleotide; TTA chr11 5372061 5372082 5372066 5372061 -
ttcagccttaaaaaaggagatg

SEQ ID NO: 117791 - DNA, 22 bp, Artificial Sequence
  Synthetic oligonucleotide; TTC chr11 5372058 5372079 5372063 5372058 -
agccttaaaaaaggagatgggg

SEQ ID NO: 117792 - DNA, 22 bp, Artificial Sequence
  Synthetic oligonucleotide; CTT chr11 5372052 5372073 5372057 5372052 -
aaaaaaggagatggggggaatg

SEQ ID NO: 117793 - DNA, 22 bp, Artificial Sequence
  Synthetic oligonucleotide; TTA chr11 5372051 5372072 5372056 5372051 -
aaaaaggagatggggggaatgt

SEQ ID NO: 117794 - DNA, 22 bp, Artificial Sequence
  Synthetic oligonucleotide; CTA chr11 5372020 5372041 5372025 5372020 -
gagtacattttgctaagtgaaa

SEQ ID NO: 117795 - DNA, 22 bp, Artificial Sequence
  Synthetic oligonucleotide; TTT chr11 5372010 5372031 5372015 5372010 -
tgctaagtgaaataaaccagac

SEQ ID NO: 117796 - DNA, 22 bp, Artificial Sequence
  Synthetic oligonucleotide; TTT chr11 5372009 5372030 5372014 5372009 -
gctaagtgaaataaaccagaca

SEQ ID NO: 117797 - DNA, 22 bp, Artificial Sequence
  Synthetic oligonucleotide; TTG chr11 5372008 5372029 5372013 5372008 -
ctaagtgaaataaaccagacac

SEQ ID NO: 117798 - DNA, 22 bp, Artificial Sequence
  Synthetic oligonucleotide; CTA chr11 5372005 5372026 5372010 5372005 -
agtgaaataaaccagacacaga

SEQ ID NO: 117799 - DNA, 22 bp, Artificial Sequence
  Synthetic oligonucleotide; TTA chr11 5371961 5371982 5371966 5371961 -
cttatatgtggaatctcaaaag

SEQ ID NO: 117800 - DNA, 22 bp, Artificial Sequence
  Synthetic oligonucleotide; CTT chr11 5371958 5371979 5371963 5371958 -
atatgtggaatctcaaaagaaa

SEQ ID NO: 117801 - DNA, 22 bp, Artificial Sequence
  Synthetic oligonucleotide; TTA chr11 5371957 5371978 5371962 5371957 -
tatgtggaatctcaaaagaaaa

SEQ ID NO: 117802 - DNA, 22 bp, Artificial Sequence
  Synthetic oligonucleotide; CTC chr11 5371944 5371965 5371949 5371944 -
aaaagaaaaataaggtcaaatg

SEQ ID NO: 117803 - DNA, 22 bp, Artificial Sequence
  Synthetic oligonucleotide; TTA chr11 5371858 5371879 5371863 5371858 -
taaacttgcagctgtataggat

SEQ ID NO: 117804 - DNA, 22 bp, Artificial Sequence
  Synthetic oligonucleotide; CTT chr11 5371851 5371872 5371856 5371851 -
gcagctgtataggataaataag

SEQ ID NO: 117805 - DNA, 22 bp, Artificial Sequence
  Synthetic oligonucleotide; TTG chr11 5371850 5371871 5371855 5371850 -
cagctgtataggataaataagt

SEQ ID NO: 117806 - DNA, 22 bp, Artificial Sequence
  Synthetic oligonucleotide; CTG chr11 5371844 5371865 5371849 5371844 -
tataggataaataagtttagag

SEQ ID NO: 117807 - DNA, 22 bp, Artificial Sequence
  Synthetic oligonucleotide; TTT chr11 5371826 5371847 5371831 5371826 -
agagatctagtgtatggcatga

SEQ ID NO: 117808 - DNA, 22 bp, Artificial Sequence
  Synthetic oligonucleotide; TTA chr11 5371825 5371846 5371830 5371825 -
gagatctagtgtatggcatgaa

SEQ ID NO: 117809 - DNA, 22 bp, Artificial Sequence
  Synthetic oligonucleotide; CTA chr11 5371817 5371838 5371822 5371817 -
gtgtatggcatgaagacttaat

SEQ ID NO: 117810 - DNA, 22 bp, Artificial Sequence
  Synthetic oligonucleotide; CTT chr11 5371798 5371819 5371803 5371798 -
aatactgtactgtaaactaaac

SEQ ID NO: 117811 - DNA, 22 bp, Artificial Sequence
  Synthetic oligonucleotide; TTA chr11 5371797 5371818 5371802 5371797 -
atactgtactgtaaactaaaca

SEQ ID NO: 117812 - DNA, 22 bp, Artificial Sequence
  Synthetic oligonucleotide; CTG chr11 5371791 5371812 5371796 5371791 -
tactgtaaactaaacatttgtt

SEQ ID NO: 117813 - DNA, 22 bp, Artificial Sequence
  Synthetic oligonucleotide; CTG chr11 5371786 5371807 5371791 5371786 -
taaactaaacatttgttatgac

SEQ ID NO: 117814 - DNA, 22 bp, Artificial Sequence
  Synthetic oligonucleotide; CTA chr11 5371779 5371800 5371784 5371779 -
aacatttgttatgacagtagat

SEQ ID NO: 117815 - DNA, 22 bp, Artificial Sequence
  Synthetic oligonucleotide; TTT chr11 5371772 5371793 5371777 5371772 -
gttatgacagtagatgttagat

SEQ ID NO: 117816 - DNA, 22 bp, Artificial Sequence
  Synthetic oligonucleotide; TTG chr11 5371771 5371792 5371776 5371771 -
ttatgacagtagatgttagatg

SEQ ID NO: 117817 - DNA, 22 bp, Artificial Sequence
  Synthetic oligonucleotide; TTA chr11 5371768 5371789 5371773 5371768 -
tgacagtagatgttagatgccc

SEQ ID NO: 117818 - DNA, 22 bp, Artificial Sequence
  Synthetic oligonucleotide; TTA chr11 5371753 5371774 5371758 5371753 -
gatgcccttacacaaagaaaaa

SEQ ID NO: 117819 - DNA, 22 bp, Artificial Sequence
  Synthetic oligonucleotide; CTT chr11 5371744 5371765 5371749 5371744 -
acacaaagaaaaagcaaaaggt

SEQ ID NO: 117820 - DNA, 22 bp, Artificial Sequence
  Synthetic oligonucleotide; TTA chr11 5371743 5371764 5371748 5371743 -
cacaaagaaaaagcaaaaggta

SEQ ID NO: 117821 - DNA, 22 bp, Artificial Sequence
  Synthetic oligonucleotide; CTA chr11 5371717 5371738 5371722 5371717 -
tggaaggtgttgtattgatgga

SEQ ID NO: 117822 - DNA, 22 bp, Artificial Sequence
  Synthetic oligonucleotide; TTG chr11 5371705 5371726 5371710 5371705 -
tattgatggataggttaatttg

SEQ ID NO: 117823 - DNA, 22 bp, Artificial Sequence
  Synthetic oligonucleotide; TTG chr11 5371700 5371721 5371705 5371700 -
atggataggttaatttgcttga

SEQ ID NO: 117824 - DNA, 22 bp, Artificial Sequence
  Synthetic oligonucleotide; TTA chr11 5371688 5371709 5371693 5371688 -
atttgcttgattgaagtaatca

SEQ ID NO: 117825 - DNA, 22 bp, Artificial Sequence
  Synthetic oligonucleotide; TTT chr11 5371684 5371705 5371689 5371684 -
gcttgattgaagtaatcatctc

SEQ ID NO: 117826 - DNA, 22 bp, Artificial Sequence
  Synthetic oligonucleotide; TTG chr11 5371683 5371704 5371688 5371683 -
cttgattgaagtaatcatctca

SEQ ID NO: 117827 - DNA, 22 bp, Artificial Sequence
  Synthetic oligonucleotide; CTT chr11 5371680 5371701 5371685 5371680 -
gattgaagtaatcatctcacta

SEQ ID NO: 117828 - DNA, 22 bp, Artificial Sequence
  Synthetic oligonucleotide; TTG chr11 5371679 5371700 5371684 5371679 -
attgaagtaatcatctcactat

SEQ ID NO: 117829 - DNA, 22 bp, Artificial Sequence
  Synthetic oligonucleotide; TTG chr11 5371675 5371696 5371680 5371675 -
aagtaatcatctcactatgtac

SEQ ID NO: 117830 - DNA, 22 bp, Artificial Sequence
  Synthetic oligonucleotide; CTC chr11 5371662 5371683 5371667 5371662 -
actatgtacacatatatcctat

SEQ ID NO: 117831 - DNA, 22 bp, Artificial Sequence
  Synthetic oligonucleotide; CTA chr11 5371658 5371679 5371663 5371658 -
tgtacacatatatcctatattt

SEQ ID NO: 117832 - DNA, 22 bp, Artificial Sequence
  Synthetic oligonucleotide; CTA chr11 5371641 5371662 5371646 5371641 -
tattttttgaacaagcttactt

SEQ ID NO: 117833 - DNA, 22 bp, Artificial Sequence
  Synthetic oligonucleotide; TTT chr11 5371636 5371657 5371641 5371636 -
tttgaacaagcttacttgtttc

SEQ ID NO: 117834 - DNA, 22 bp, Artificial Sequence
  Synthetic oligonucleotide; TTT chr11 5371635 5371656 5371640 5371635 -
ttgaacaagcttacttgtttca

SEQ ID NO: 117835 - DNA, 22 bp, Artificial Sequence
  Synthetic oligonucleotide; TTT chr11 5371634 5371655 5371639 5371634 -
tgaacaagcttacttgtttcag

SEQ ID NO: 117836 - DNA, 22 bp, Artificial Sequence
  Synthetic oligonucleotide; TTT chr11 5371633 5371654 5371638 5371633 -
gaacaagcttacttgtttcaga

SEQ ID NO: 117837 - DNA, 22 bp, Artificial Sequence
  Synthetic oligonucleotide; TTG chr11 5371632 5371653 5371637 5371632 -
aacaagcttacttgtttcagat

SEQ ID NO: 117838 - DNA, 22 bp, Artificial Sequence
  Synthetic oligonucleotide; CTT chr11 5371623 5371644 5371628 5371623 -
acttgtttcagataaaatattt

SEQ ID NO: 117839 - DNA, 22 bp, Artificial Sequence
  Synthetic oligonucleotide; TTA chr11 5371622 5371643 5371627 5371622 -
cttgtttcagataaaatatttt

SEQ ID NO: 117840 - DNA, 22 bp, Artificial Sequence
  Synthetic oligonucleotide; CTT chr11 5371619 5371640 5371624 5371619 -
gtttcagataaaatattttaaa

SEQ ID NO: 117841 - DNA, 22 bp, Artificial Sequence
  Synthetic oligonucleotide; TTG chr11 5371618 5371639 5371623 5371618 -
tttcagataaaatattttaaaa

SEQ ID NO: 117842 - DNA, 22 bp, Artificial Sequence
  Synthetic oligonucleotide; TTT chr11 5371615 5371636 5371620 5371615 -
cagataaaatattttaaaagct

SEQ ID NO: 117843 - DNA, 22 bp, Artificial Sequence
  Synthetic oligonucleotide; TTC chr11 5371614 5371635 5371619 5371614 -
agataaaatattttaaaagctt

SEQ ID NO: 117844 - DNA, 22 bp, Artificial Sequence
  Synthetic oligonucleotide; TTT chr11 5371601 5371622 5371606 5371601 -
taaaagcttttatctgaagcaa

SEQ ID NO: 117845 - DNA, 22 bp, Artificial Sequence
  Synthetic oligonucleotide; TTT chr11 5371600 5371621 5371605 5371600 -
aaaagcttttatctgaagcaag

SEQ ID NO: 117846 - DNA, 22 bp, Artificial Sequence
  Synthetic oligonucleotide; TTA chr11 5371599 5371620 5371604 5371599 -
aaagcttttatctgaagcaagt

SEQ ID NO: 117847 - DNA, 22 bp, Artificial Sequence
  Synthetic oligonucleotide; CTT chr11 5371592 5371613 5371597 5371592 -
ttatctgaagcaagtcaaattt

SEQ ID NO: 117848 - DNA, 22 bp, Artificial Sequence
  Synthetic oligonucleotide; TTT chr11 5371591 5371612 5371596 5371591 -
tatctgaagcaagtcaaatttc

SEQ ID NO: 117849 - DNA, 22 bp, Artificial Sequence
  Synthetic oligonucleotide; TTT chr11 5371590 5371611 5371595 5371590 -
atctgaagcaagtcaaatttct

SEQ ID NO: 117850 - DNA, 22 bp, Artificial Sequence
  Synthetic oligonucleotide; TTA chr11 5371589 5371610 5371594 5371589 -
tctgaagcaagtcaaatttctg

SEQ ID NO: 117851 - DNA, 22 bp, Artificial Sequence
  Synthetic oligonucleotide; CTG chr11 5371585 5371606 5371590 5371585 -
aagcaagtcaaatttctgtttc

SEQ ID NO: 117852 - DNA, 22 bp, Artificial Sequence
  Synthetic oligonucleotide; TTT chr11 5371570 5371591 5371575 5371570 -
ctgtttcctaattgtttagggt

SEQ ID NO: 117853 - DNA, 22 bp, Artificial Sequence
  Synthetic oligonucleotide; TTC chr11 5371569 5371590 5371574 5371569 -
tgtttcctaattgtttagggtc

SEQ ID NO: 117854 - DNA, 22 bp, Artificial Sequence
  Synthetic oligonucleotide; CTG chr11 5371567 5371588 5371572 5371567 -
tttcctaattgtttagggtcct

SEQ ID NO: 117855 - DNA, 22 bp, Artificial Sequence
  Synthetic oligonucleotide; TTT chr11 5371564 5371585 5371569 5371564 -
cctaattgtttagggtccttca

SEQ ID NO: 117856 - DNA, 22 bp, Artificial Sequence
  Synthetic oligonucleotide; TTC chr11 5371563 5371584 5371568 5371563 -
ctaattgtttagggtccttcat

SEQ ID NO: 117857 - DNA, 22 bp, Artificial Sequence
  Synthetic oligonucleotide; CTA chr11 5371560 5371581 5371565 5371560 -
attgtttagggtccttcatgtt

SEQ ID NO: 117858 - DNA, 22 bp, Artificial Sequence
  Synthetic oligonucleotide; TTG chr11 5371556 5371577 5371561 5371556 -
tttagggtccttcatgttattt

SEQ ID NO: 117859 - DNA, 22 bp, Artificial Sequence
  Synthetic oligonucleotide; TTT chr11 5371553 5371574 5371558 5371553 -
agggtccttcatgttatttcca

SEQ ID NO: 117860 - DNA, 22 bp, Artificial Sequence
  Synthetic oligonucleotide; TTA chr11 5371552 5371573 5371557 5371552 -
gggtccttcatgttatttccac

SEQ ID NO: 117861 - DNA, 22 bp, Artificial Sequence
  Synthetic oligonucleotide; CTT chr11 5371544 5371565 5371549 5371544 -
catgttatttccactcttaaaa

SEQ ID NO: 117862 - DNA, 22 bp, Artificial Sequence
  Synthetic oligonucleotide; TTC chr11 5371543 5371564 5371548 5371543 -
atgttatttccactcttaaaac

SEQ ID NO: 117863 - DNA, 22 bp, Artificial Sequence
  Synthetic oligonucleotide; TTA chr11 5371537 5371558 5371542 5371537 -
tttccactcttaaaacttatgt

SEQ ID NO: 117864 - DNA, 22 bp, Artificial Sequence
  Synthetic oligonucleotide; TTT chr11 5371534 5371555 5371539 5371534 -
ccactcttaaaacttatgtaac

SEQ ID NO: 117865 - DNA, 22 bp, Artificial Sequence
  Synthetic oligonucleotide; TTC chr11 5371533 5371554 5371538 5371533 -
cactcttaaaacttatgtaacc

SEQ ID NO: 117866 - DNA, 22 bp, Artificial Sequence
  Synthetic oligonucleotide; CTC chr11 5371528 5371549 5371533 5371528 -
ttaaaacttatgtaaccctttg

SEQ ID NO: 117867 - DNA, 22 bp, Artificial Sequence
  Synthetic oligonucleotide; CTT chr11 5371526 5371547 5371531 5371526 -
aaaacttatgtaaccctttgga

SEQ ID NO: 117868 - DNA, 22 bp, Artificial Sequence
  Synthetic oligonucleotide; TTA chr11 5371525 5371546 5371530 5371525 -
aaacttatgtaaccctttggat

SEQ ID NO: 117869 - DNA, 22 bp, Artificial Sequence
  Synthetic oligonucleotide; CTT chr11 5371519 5371540 5371524 5371519 -
atgtaaccctttggatataatg

SEQ ID NO: 117870 - DNA, 22 bp, Artificial Sequence
  Synthetic oligonucleotide; TTA chr11 5371518 5371539 5371523 5371518 -
tgtaaccctttggatataatga

SEQ ID NO: 117871 - DNA, 22 bp, Artificial Sequence
  Synthetic oligonucleotide; CTT chr11 5371508 5371529 5371513 5371508 -
tggatataatgagatatatgtt

SEQ ID NO: 117872 - DNA, 22 bp, Artificial Sequence
  Synthetic oligonucleotide; TTT chr11 5371507 5371528 5371512 5371507 -
ggatataatgagatatatgttt

SEQ ID NO: 117873 - DNA, 22 bp, Artificial Sequence
  Synthetic oligonucleotide; TTG chr11 5371506 5371527 5371511 5371506 -
gatataatgagatatatgtttt

SEQ ID NO: 117874 - DNA, 22 bp, Artificial Sequence
  Synthetic oligonucleotide; TTT chr11 5371485 5371506 5371490 5371485 -
ttctctatttttaatatcagta

SEQ ID NO: 117875 - DNA, 22 bp, Artificial Sequence
  Synthetic oligonucleotide; TTT chr11 5371484 5371505 5371489 5371484 -
tctctatttttaatatcagtac

SEQ ID NO: 117876 - DNA, 22 bp, Artificial Sequence
  Synthetic oligonucleotide; TTT chr11 5371483 5371504 5371488 5371483 -
ctctatttttaatatcagtact

SEQ ID NO: 117877 - DNA, 22 bp, Artificial Sequence
  Synthetic oligonucleotide; TTC chr11 5371482 5371503 5371487 5371482 -
tctatttttaatatcagtactc

SEQ ID NO: 117878 - DNA, 22 bp, Artificial Sequence
  Synthetic oligonucleotide; CTC chr11 5371480 5371501 5371485 5371480 -
tatttttaatatcagtactctt

SEQ ID NO: 117879 - DNA, 22 bp, Artificial Sequence
  Synthetic oligonucleotide; CTA chr11 5371478 5371499 5371483 5371478 -
tttttaatatcagtactcttta

SEQ ID NO: 117880 - DNA, 22 bp, Artificial Sequence
  Synthetic oligonucleotide; TTT chr11 5371475 5371496 5371480 5371475 -
ttaatatcagtactctttagat

SEQ ID NO: 117881 - DNA, 22 bp, Artificial Sequence
  Synthetic oligonucleotide; TTT chr11 5371474 5371495 5371479 5371474 -
taatatcagtactctttagata

SEQ ID NO: 117882 - DNA, 22 bp, Artificial Sequence
  Synthetic oligonucleotide; TTT chr11 5371473 5371494 5371478 5371473 -
aatatcagtactctttagatac

SEQ ID NO: 117883 - DNA, 22 bp, Artificial Sequence
  Synthetic oligonucleotide; TTA chr11 5371472 5371493 5371477 5371472 -
atatcagtactctttagataca

SEQ ID NO: 117884 - DNA, 22 bp, Artificial Sequence
  Synthetic oligonucleotide; CTC chr11 5371460 5371481 5371465 5371460 -
tttagatacagctatcactgtc

SEQ ID NO: 117885 - DNA, 22 bp, Artificial Sequence
  Synthetic oligonucleotide; CTT chr11 5371458 5371479 5371463 5371458 -
tagatacagctatcactgtctc

SEQ ID NO: 117886 - DNA, 22 bp, Artificial Sequence
  Synthetic oligonucleotide; TTT chr11 5371457 5371478 5371462 5371457 -
agatacagctatcactgtctct

SEQ ID NO: 117887 - DNA, 22 bp, Artificial Sequence
  Synthetic oligonucleotide; TTA chr11 5371456 5371477 5371461 5371456 -
gatacagctatcactgtctctc

SEQ ID NO: 117888 - DNA, 22 bp, Artificial Sequence
  Synthetic oligonucleotide; CTA chr11 5371446 5371467 5371451 5371446 -
tcactgtctctcagggtacctc

SEQ ID NO: 117889 - DNA, 22 bp, Artificial Sequence
  Synthetic oligonucleotide; CTG chr11 5371440 5371461 5371445 5371440 -
tctctcagggtacctctgcctc

SEQ ID NO: 117890 - DNA, 22 bp, Artificial Sequence
  Synthetic oligonucleotide; CTC chr11 5371436 5371457 5371441 5371436 -
tcagggtacctctgcctctggt

SEQ ID NO: 117891 - DNA, 22 bp, Artificial Sequence
  Synthetic oligonucleotide; CTC chr11 5371434 5371455 5371439 5371434 -
agggtacctctgcctctggtca

SEQ ID NO: 117892 - DNA, 22 bp, Artificial Sequence
  Synthetic oligonucleotide; CTC chr11 5371424 5371445 5371429 5371424 -
tgcctctggtcattttgttcat

SEQ ID NO: 117893 - DNA, 22 bp, Artificial Sequence
  Synthetic oligonucleotide; CTG chr11 5371422 5371443 5371427 5371422 -
cctctggtcattttgttcattc

SEQ ID NO: 117894 - DNA, 22 bp, Artificial Sequence
  Synthetic oligonucleotide; CTC chr11 5371418 5371439 5371423 5371418 -
tggtcattttgttcattcttta

SEQ ID NO: 117895 - DNA, 22 bp, Artificial Sequence
  Synthetic oligonucleotide; CTG chr11 5371416 5371437 5371421 5371416 -
gtcattttgttcattctttatg

SEQ ID NO: 117896 - DNA, 22 bp, Artificial Sequence
  Synthetic oligonucleotide; TTT chr11 5371409 5371430 5371414 5371409 -
tgttcattctttatgttgaaat

SEQ ID NO: 117897 - DNA, 22 bp, Artificial Sequence
  Synthetic oligonucleotide; TTT chr11 5371408 5371429 5371413 5371408 -
gttcattctttatgttgaaatt

SEQ ID NO: 117898 - DNA, 22 bp, Artificial Sequence
  Synthetic oligonucleotide; TTG chr11 5371407 5371428 5371412 5371407 -
ttcattctttatgttgaaattt

SEQ ID NO: 117899 - DNA, 22 bp, Artificial Sequence
  Synthetic oligonucleotide; TTC chr11 5371404 5371425 5371409 5371404 -
attctttatgttgaaattttat

SEQ ID NO: 117900 - DNA, 22 bp, Artificial Sequence
  Synthetic oligonucleotide; TTC chr11 5371400 5371421 5371405 5371400 -
tttatgttgaaattttatatct

SEQ ID NO: 117901 - DNA, 22 bp, Artificial Sequence
  Synthetic oligonucleotide; CTT chr11 5371398 5371419 5371403 5371398 -
tatgttgaaattttatatctcc

SEQ ID NO: 117902 - DNA, 22 bp, Artificial Sequence
  Synthetic oligonucleotide; TTT chr11 5371397 5371418 5371402 5371397 -
atgttgaaattttatatctccg

SEQ ID NO: 117903 - DNA, 22 bp, Artificial Sequence
  Synthetic oligonucleotide; TTA chr11 5371396 5371417 5371401 5371396 -
tgttgaaattttatatctccgg

SEQ ID NO: 117904 - DNA, 22 bp, Artificial Sequence
  Synthetic oligonucleotide; TTG chr11 5371391 5371412 5371396 5371391 -
aaattttatatctccggcctac

SEQ ID NO: 117905 - DNA, 22 bp, Artificial Sequence
  Synthetic oligonucleotide; TTT chr11 5371385 5371406 5371390 5371385 -
tatatctccggcctacaactca

SEQ ID NO: 117906 - DNA, 22 bp, Artificial Sequence
  Synthetic oligonucleotide; TTT chr11 5371384 5371405 5371389 5371384 -
atatctccggcctacaactcag

SEQ ID NO: 117907 - DNA, 22 bp, Artificial Sequence
  Synthetic oligonucleotide; TTA chr11 5371383 5371404 5371388 5371383 -
tatctccggcctacaactcagg

SEQ ID NO: 117908 - DNA, 22 bp, Artificial Sequence
  Synthetic oligonucleotide; CTC chr11 5371377 5371398 5371382 5371377 -
cggcctacaactcagggtttta

SEQ ID NO: 117909 - DNA, 22 bp, Artificial Sequence
  Synthetic oligonucleotide; CTA chr11 5371370 5371391 5371375 5371370 -
caactcagggttttacagtttc

SEQ ID NO: 117910 - DNA, 22 bp, Artificial Sequence
  Synthetic oligonucleotide; CTC chr11 5371364 5371385 5371369 5371364 -
agggttttacagtttcatcaat

SEQ ID NO: 117911 - DNA, 22 bp, Artificial Sequence
  Synthetic oligonucleotide; TTT chr11 5371357 5371378 5371362 5371357 -
tacagtttcatcaatgtctcta

SEQ ID NO: 117912 - DNA, 22 bp, Artificial Sequence
  Synthetic oligonucleotide; TTT chr11 5371356 5371377 5371361 5371356 -
acagtttcatcaatgtctctat

SEQ ID NO: 117913 - DNA, 22 bp, Artificial Sequence
  Synthetic oligonucleotide; TTA chr11 5371355 5371376 5371360 5371355 -
cagtttcatcaatgtctctatt

SEQ ID NO: 117914 - DNA, 22 bp, Artificial Sequence
  Synthetic oligonucleotide; TTT chr11 5371349 5371370 5371354 5371349 -
catcaatgtctctattaaatgt

SEQ ID NO: 117915 - DNA, 22 bp, Artificial Sequence
  Synthetic oligonucleotide; TTC chr11 5371348 5371369 5371353 5371348 -
atcaatgtctctattaaatgtt

SEQ ID NO: 117916 - DNA, 22 bp, Artificial Sequence
  Synthetic oligonucleotide; CTC chr11 5371337 5371358 5371342 5371337 -
tattaaatgtttatgagccaca

SEQ ID NO: 117917 - DNA, 22 bp, Artificial Sequence
  Synthetic oligonucleotide; CTA chr11 5371335 5371356 5371340 5371335 -
ttaaatgtttatgagccacaga

SEQ ID NO: 117918 - DNA, 22 bp, Artificial Sequence
  Synthetic oligonucleotide; TTA chr11 5371332 5371353 5371337 5371332 -
aatgtttatgagccacagagaa

SEQ ID NO: 117919 - DNA, 22 bp, Artificial Sequence
  Synthetic oligonucleotide; TTT chr11 5371325 5371346 5371330 5371325 -
atgagccacagagaatgagaat

SEQ ID NO: 117920 - DNA, 22 bp, Artificial Sequence
  Synthetic oligonucleotide; TTA chr11 5371324 5371345 5371329 5371324 -
tgagccacagagaatgagaatt

SEQ ID NO: 117921 - DNA, 22 bp, Artificial Sequence
  Synthetic oligonucleotide; TTA chr11 5371301 5371322 5371306 5371301 -
tatgttcaatttttttgaactt

SEQ ID NO: 117922 - DNA, 22 bp, Artificial Sequence
  Synthetic oligonucleotide; TTC chr11 5371294 5371315 5371299 5371294 -
aatttttttgaacttctgtgtt

SEQ ID NO: 117923 - DNA, 22 bp, Artificial Sequence
  Synthetic oligonucleotide; TTT chr11 5371289 5371310 5371294 5371289 -
ttttgaacttctgtgtttgagt

SEQ ID NO: 117924 - DNA, 22 bp, Artificial Sequence
  Synthetic oligonucleotide; TTT chr11 5371288 5371309 5371293 5371288 -
tttgaacttctgtgtttgagtt

SEQ ID NO: 117925 - DNA, 22 bp, Artificial Sequence
  Synthetic oligonucleotide; TTT chr11 5371287 5371308 5371292 5371287 -
ttgaacttctgtgtttgagttt

SEQ ID NO: 117926 - DNA, 22 bp, Artificial Sequence
  Synthetic oligonucleotide; TTT chr11 5371286 5371307 5371291 5371286 -
tgaacttctgtgtttgagtttt

SEQ ID NO: 117927 - DNA, 22 bp, Artificial Sequence
  Synthetic oligonucleotide; TTT chr11 5371285 5371306 5371290 5371285 -
gaacttctgtgtttgagtttta

SEQ ID NO: 117928 - DNA, 22 bp, Artificial Sequence
  Synthetic oligonucleotide; TTG chr11 5371284 5371305 5371289 5371284 -
aacttctgtgtttgagttttaa

SEQ ID NO: 117929 - DNA, 22 bp, Artificial Sequence
  Synthetic oligonucleotide; CTT chr11 5371279 5371300 5371284 5371279 -
ctgtgtttgagttttaaaaaaa

SEQ ID NO: 117930 - DNA, 22 bp, Artificial Sequence
  Synthetic oligonucleotide; TTC chr11 5371278 5371299 5371283 5371278 -
tgtgtttgagttttaaaaaaat

SEQ ID NO: 117931 - DNA, 22 bp, Artificial Sequence
  Synthetic oligonucleotide; CTG chr11 5371276 5371297 5371281 5371276 -
tgtttgagttttaaaaaaatta

SEQ ID NO: 117932 - DNA, 22 bp, Artificial Sequence
  Synthetic oligonucleotide; TTT chr11 5371271 5371292 5371276 5371271 -
gagttttaaaaaaattaaccta

SEQ ID NO: 117933 - DNA, 22 bp, Artificial Sequence
  Synthetic oligonucleotide; TTG chr11 5371270 5371291 5371275 5371270 -
agttttaaaaaaattaacctaa

SEQ ID NO: 117934 - DNA, 22 bp, Artificial Sequence
  Synthetic oligonucleotide; TTT chr11 5371265 5371286 5371270 5371265 -
taaaaaaattaacctaatgtga

SEQ ID NO: 117935 - DNA, 22 bp, Artificial Sequence
  Synthetic oligonucleotide; TTT chr11 5371264 5371285 5371269 5371264 -
aaaaaaattaacctaatgtgaa

SEQ ID NO: 117936 - DNA, 22 bp, Artificial Sequence
  Synthetic oligonucleotide; TTA chr11 5371263 5371284 5371268 5371263 -
aaaaaattaacctaatgtgaaa

SEQ ID NO: 117937 - DNA, 22 bp, Artificial Sequence
  Synthetic oligonucleotide; TTA chr11 5371254 5371275 5371259 5371254 -
acctaatgtgaaagaccctaga

SEQ ID NO: 117938 - DNA, 22 bp, Artificial Sequence
  Synthetic oligonucleotide; CTA chr11 5371249 5371270 5371254 5371249 -
atgtgaaagaccctagatccgg

SEQ ID NO: 117939 - DNA, 22 bp, Artificial Sequence
  Synthetic oligonucleotide; CTA chr11 5371234 5371255 5371239 5371234 -
gatccggggaaaggtgctgtgt

SEQ ID NO: 117940 - DNA, 22 bp, Artificial Sequence
  Synthetic oligonucleotide; CTG chr11 5371215 5371236 5371220 5371215 -
tgtggcttagagtataaacatc

SEQ ID NO: 117941 - DNA, 22 bp, Artificial Sequence
  Synthetic oligonucleotide; CTT chr11 5371207 5371228 5371212 5371207 -
agagtataaacatcagaatgtg

SEQ ID NO: 117942 - DNA, 22 bp, Artificial Sequence
  Synthetic oligonucleotide; TTA chr11 5371206 5371227 5371211 5371206 -
gagtataaacatcagaatgtgc

SEQ ID NO: 117943 - DNA, 22 bp, Artificial Sequence
  Synthetic oligonucleotide; CTA chr11 5371182 5371203 5371187 5371182 -
tggactttctagaatatttcag

SEQ ID NO: 117944 - DNA, 22 bp, Artificial Sequence
  Synthetic oligonucleotide; CTT chr11 5371175 5371196 5371180 5371175 -
tctagaatatttcagtgccctt

SEQ ID NO: 117945 - DNA, 22 bp, Artificial Sequence
  Synthetic oligonucleotide; TTT chr11 5371174 5371195 5371179 5371174 -
ctagaatatttcagtgcccttg

SEQ ID NO: 117946 - DNA, 22 bp, Artificial Sequence
  Synthetic oligonucleotide; TTC chr11 5371173 5371194 5371178 5371173 -
tagaatatttcagtgcccttgt

SEQ ID NO: 117947 - DNA, 22 bp, Artificial Sequence
  Synthetic oligonucleotide; CTA chr11 5371171 5371192 5371176 5371171 -
gaatatttcagtgcccttgtat

SEQ ID NO: 117948 - DNA, 22 bp, Artificial Sequence
  Synthetic oligonucleotide; TTT chr11 5371163 5371184 5371168 5371163 -
cagtgcccttgtatatcctcag

SEQ ID NO: 117949 - DNA, 22 bp, Artificial Sequence
  Synthetic oligonucleotide; TTC chr11 5371162 5371183 5371167 5371162 -
agtgcccttgtatatcctcaga

SEQ ID NO: 117950 - DNA, 22 bp, Artificial Sequence
  Synthetic oligonucleotide; CTT chr11 5371153 5371174 5371158 5371153 -
gtatatcctcagaatgtgtgga

SEQ ID NO: 117951 - DNA, 22 bp, Artificial Sequence
  Synthetic oligonucleotide; TTG chr11 5371152 5371173 5371157 5371152 -
tatatcctcagaatgtgtggag

SEQ ID NO: 117952 - DNA, 22 bp, Artificial Sequence
  Synthetic oligonucleotide; CTC chr11 5371143 5371164 5371148 5371143 -
agaatgtgtggagagtaattcc

SEQ ID NO: 117953 - DNA, 22 bp, Artificial Sequence
  Synthetic oligonucleotide; TTC chr11 5371122 5371143 5371127 5371122 -
caaaacaaagcccttacttcaa

SEQ ID NO: 117954 - DNA, 22 bp, Artificial Sequence
  Synthetic oligonucleotide; CTT chr11 5371107 5371128 5371112 5371107 -
acttcaatatccatggtggtcc

SEQ ID NO: 117955 - DNA, 22 bp, Artificial Sequence
  Synthetic oligonucleotide; TTA chr11 5371106 5371127 5371111 5371106 -
cttcaatatccatggtggtcca

SEQ ID NO: 117956 - DNA, 22 bp, Artificial Sequence
  Synthetic oligonucleotide; CTT chr11 5371103 5371124 5371108 5371103 -
caatatccatggtggtccatag

SEQ ID NO: 117957 - DNA, 22 bp, Artificial Sequence
  Synthetic oligonucleotide; TTC chr11 5371102 5371123 5371107 5371102 -
aatatccatggtggtccatagc

SEQ ID NO: 117958 - DNA, 22 bp, Artificial Sequence
  Synthetic oligonucleotide; CTA chr11 5371078 5371099 5371083 5371078 -
gggctagcagaaggaagggttc

SEQ ID NO: 117959 - DNA, 22 bp, Artificial Sequence
  Synthetic oligonucleotide; CTA chr11 5371072 5371093 5371077 5371072 -
gcagaaggaagggttcaaaatc

SEQ ID NO: 117960 - DNA, 22 bp, Artificial Sequence
  Synthetic oligonucleotide; TTC chr11 5371056 5371077 5371061 5371056 -
aaaatcactatttttatcactc

SEQ ID NO: 117961 - DNA, 22 bp, Artificial Sequence
  Synthetic oligonucleotide; CTA chr11 5371046 5371067 5371051 5371046 -
tttttatcactcaaattatctg

SEQ ID NO: 117962 - DNA, 22 bp, Artificial Sequence
  Synthetic oligonucleotide; TTT chr11 5371043 5371064 5371048 5371043 -
ttatcactcaaattatctgctc

SEQ ID NO: 117963 - DNA, 22 bp, Artificial Sequence
  Synthetic oligonucleotide; TTT chr11 5371042 5371063 5371047 5371042 -
tatcactcaaattatctgctct

SEQ ID NO: 117964 - DNA, 22 bp, Artificial Sequence
  Synthetic oligonucleotide; TTT chr11 5371041 5371062 5371046 5371041 -
atcactcaaattatctgctctt

SEQ ID NO: 117965 - DNA, 22 bp, Artificial Sequence
  Synthetic oligonucleotide; TTA chr11 5371040 5371061 5371045 5371040 -
tcactcaaattatctgctcttg

SEQ ID NO: 117966 - DNA, 22 bp, Artificial Sequence
  Synthetic oligonucleotide; CTC chr11 5371034 5371055 5371039 5371034 -
aaattatctgctcttggaaaaa

SEQ ID NO: 117967 - DNA, 22 bp, Artificial Sequence
  Synthetic oligonucleotide; TTA chr11 5371028 5371049 5371033 5371028 -
tctgctcttggaaaaaccagtc

SEQ ID NO: 117968 - DNA, 22 bp, Artificial Sequence
  Synthetic oligonucleotide; CTG chr11 5371024 5371045 5371029 5371024 -
ctcttggaaaaaccagtccctt

SEQ ID NO: 117969 - DNA, 22 bp, Artificial Sequence
  Synthetic oligonucleotide; CTC chr11 5371021 5371042 5371026 5371021 -
ttggaaaaaccagtccctttgg

SEQ ID NO: 117970 - DNA, 22 bp, Artificial Sequence
  Synthetic oligonucleotide; CTT chr11 5371019 5371040 5371024 5371019 -
ggaaaaaccagtccctttgggt

SEQ ID NO: 117971 - DNA, 22 bp, Artificial Sequence
  Synthetic oligonucleotide; TTG chr11 5371018 5371039 5371023 5371018 -
gaaaaaccagtccctttgggta

SEQ ID NO: 117972 - DNA, 22 bp, Artificial Sequence
  Synthetic oligonucleotide; CTT chr11 5371002 5371023 5371007 5371002 -
tgggtagccccaatcatgtgta

SEQ ID NO: 117973 - DNA, 22 bp, Artificial Sequence
  Synthetic oligonucleotide; TTT chr11 5371001 5371022 5371006 5371001 -
gggtagccccaatcatgtgtaa

SEQ ID NO: 117974 - DNA, 22 bp, Artificial Sequence
  Synthetic oligonucleotide; TTG chr11 5371000 5371021 5371005 5371000 -
ggtagccccaatcatgtgtaag

SEQ ID NO: 117975 - DNA, 22 bp, Artificial Sequence
  Synthetic oligonucleotide; CTT chr11 5370974 5370995 5370979 5370974 -
tttcctgaagtatgatcatatg

SEQ ID NO: 117976 - DNA, 22 bp, Artificial Sequence
  Synthetic oligonucleotide; TTT chr11 5370973 5370994 5370978 5370973 -
ttcctgaagtatgatcatatgg

SEQ ID NO: 117977 - DNA, 22 bp, Artificial Sequence
  Synthetic oligonucleotide; TTT chr11 5370972 5370993 5370977 5370972 -
tcctgaagtatgatcatatggt

SEQ ID NO: 117978 - DNA, 22 bp, Artificial Sequence
  Synthetic oligonucleotide; TTT chr11 5370971 5370992 5370976 5370971 -
cctgaagtatgatcatatggtt

SEQ ID NO: 117979 - DNA, 22 bp, Artificial Sequence
  Synthetic oligonucleotide; TTC chr11 5370970 5370991 5370975 5370970 -
ctgaagtatgatcatatggttc

SEQ ID NO: 117980 - DNA, 22 bp, Artificial Sequence
  Synthetic oligonucleotide; CTG chr11 5370967 5370988 5370972 5370967 -
aagtatgatcatatggttctct

SEQ ID NO: 117981 - DNA, 22 bp, Artificial Sequence
  Synthetic oligonucleotide; TTC chr11 5370948 5370969 5370953 5370948 -
tcttccttctgtctgctcattg

SEQ ID NO: 117982 - DNA, 22 bp, Artificial Sequence
  Synthetic oligonucleotide; CTC chr11 5370946 5370967 5370951 5370946 -
ttccttctgtctgctcattgaa

SEQ ID NO: 117983 - DNA, 22 bp, Artificial Sequence
  Synthetic oligonucleotide; CTT chr11 5370944 5370965 5370949 5370944 -
ccttctgtctgctcattgaacc

SEQ ID NO: 117984 - DNA, 22 bp, Artificial Sequence
  Synthetic oligonucleotide; TTC chr11 5370943 5370964 5370948 5370943 -
cttctgtctgctcattgaacca

SEQ ID NO: 117985 - DNA, 22 bp, Artificial Sequence
  Synthetic oligonucleotide; CTT chr11 5370940 5370961 5370945 5370940 -
ctgtctgctcattgaaccagag

SEQ ID NO: 117986 - DNA, 22 bp, Artificial Sequence
  Synthetic oligonucleotide; TTC chr11 5370939 5370960 5370944 5370939 -
tgtctgctcattgaaccagagc

SEQ ID NO: 117987 - DNA, 22 bp, Artificial Sequence
  Synthetic oligonucleotide; CTG chr11 5370937 5370958 5370942 5370937 -
tctgctcattgaaccagagctc

SEQ ID NO: 117988 - DNA, 22 bp, Artificial Sequence
  Synthetic oligonucleotide; CTG chr11 5370933 5370954 5370938 5370933 -
ctcattgaaccagagctccagg

SEQ ID NO: 117989 - DNA, 22 bp, Artificial Sequence
  Synthetic oligonucleotide; CTC chr11 5370930 5370951 5370935 5370930 -
attgaaccagagctccaggacc

SEQ ID NO: 117990 - DNA, 22 bp, Artificial Sequence
  Synthetic oligonucleotide; TTG chr11 5370926 5370947 5370931 5370926 -
aaccagagctccaggaccaata

SEQ ID NO: 117991 - DNA, 22 bp, Artificial Sequence
  Synthetic oligonucleotide; CTC chr11 5370915 5370936 5370920 5370915 -
caggaccaataccactatggca

SEQ ID NO: 117992 - DNA, 22 bp, Artificial Sequence
  Synthetic oligonucleotide; CTA chr11 5370898 5370919 5370903 5370898 -
tggcaatacttcttttgcctct

SEQ ID NO: 117993 - DNA, 22 bp, Artificial Sequence
  Synthetic oligonucleotide; CTT chr11 5370887 5370908 5370892 5370887 -
cttttgcctctacaactctcag

SEQ ID NO: 117994 - DNA, 22 bp, Artificial Sequence
  Synthetic oligonucleotide; TTC chr11 5370886 5370907 5370891 5370886 -
ttttgcctctacaactctcagg

SEQ ID NO: 117995 - DNA, 22 bp, Artificial Sequence
  Synthetic oligonucleotide; CTT chr11 5370884 5370905 5370889 5370884 -
ttgcctctacaactctcaggtc

SEQ ID NO: 117996 - DNA, 22 bp, Artificial Sequence
  Synthetic oligonucleotide; TTT chr11 5370883 5370904 5370888 5370883 -
tgcctctacaactctcaggtca

SEQ ID NO: 117997 - DNA, 22 bp, Artificial Sequence
  Synthetic oligonucleotide; TTT chr11 5370882 5370903 5370887 5370882 -
gcctctacaactctcaggtcac

SEQ ID NO: 117998 - DNA, 22 bp, Artificial Sequence
  Synthetic oligonucleotide; TTG chr11 5370881 5370902 5370886 5370881 -
cctctacaactctcaggtcaca

SEQ ID NO: 117999 - DNA, 22 bp, Artificial Sequence
  Synthetic oligonucleotide; CTC chr11 5370877 5370898 5370882 5370877 -
tacaactctcaggtcacagctg

SEQ ID NO: 118000 - DNA, 22 bp, Artificial Sequence
  Synthetic oligonucleotide; CTA chr11 5370875 5370896 5370880 5370875 -
caactctcaggtcacagctgaa

SEQ ID NO: 118001 - DNA, 22 bp, Artificial Sequence
  Synthetic oligonucleotide; CTC chr11 5370869 5370890 5370874 5370869 -
tcaggtcacagctgaaatatta

SEQ ID NO: 118002 - DNA, 22 bp, Artificial Sequence
  Synthetic oligonucleotide; CTC chr11 5370867 5370888 5370872 5370867 -
aggtcacagctgaaatattacc

SEQ ID NO: 118003 - DNA, 22 bp, Artificial Sequence
  Synthetic oligonucleotide; CTG chr11 5370855 5370876 5370860 5370855 -
aaatattacctcctctcagaac

SEQ ID NO: 118004 - DNA, 22 bp, Artificial Sequence
  Synthetic oligonucleotide; TTA chr11 5370847 5370868 5370852 5370847 -
cctcctctcagaacccgcattt

SEQ ID NO: 118005 - DNA, 22 bp, Artificial Sequence
  Synthetic oligonucleotide; CTC chr11 5370843 5370864 5370848 5370843 -
ctctcagaacccgcatttgtca

SEQ ID NO: 118006 - DNA, 22 bp, Artificial Sequence
  Synthetic oligonucleotide; CTC chr11 5370840 5370861 5370845 5370840 -
tcagaacccgcatttgtcacac

SEQ ID NO: 118007 - DNA, 22 bp, Artificial Sequence
  Synthetic oligonucleotide; CTC chr11 5370838 5370859 5370843 5370838 -
agaacccgcatttgtcacacta

SEQ ID NO: 118008 - DNA, 22 bp, Artificial Sequence
  Synthetic oligonucleotide; TTT chr11 5370825 5370846 5370830 5370825 -
gtcacactagcttacataaatt

SEQ ID NO: 118009 - DNA, 22 bp, Artificial Sequence
  Synthetic oligonucleotide; TTG chr11 5370824 5370845 5370829 5370824 -
tcacactagcttacataaattt

SEQ ID NO: 118010 - DNA, 22 bp, Artificial Sequence
  Synthetic oligonucleotide; CTA chr11 5370816 5370837 5370821 5370816 -
gcttacataaattttgttattc

SEQ ID NO: 118011 - DNA, 22 bp, Artificial Sequence
  Synthetic oligonucleotide; CTT chr11 5370812 5370833 5370817 5370812 -
acataaattttgttattctcta

SEQ ID NO: 118012 - DNA, 22 bp, Artificial Sequence
  Synthetic oligonucleotide; TTA chr11 5370811 5370832 5370816 5370811 -
cataaattttgttattctctat

SEQ ID NO: 118013 - DNA, 22 bp, Artificial Sequence
  Synthetic oligonucleotide; TTT chr11 5370802 5370823 5370807 5370802 -
tgttattctctattgcatcaaa

SEQ ID NO: 118014 - DNA, 22 bp, Artificial Sequence
  Synthetic oligonucleotide; TTT chr11 5370801 5370822 5370806 5370801 -
gttattctctattgcatcaaat

SEQ ID NO: 118015 - DNA, 22 bp, Artificial Sequence
  Synthetic oligonucleotide; TTG chr11 5370800 5370821 5370805 5370800 -
ttattctctattgcatcaaatt

SEQ ID NO: 118016 - DNA, 22 bp, Artificial Sequence
  Synthetic oligonucleotide; TTA chr11 5370797 5370818 5370802 5370797 -
ttctctattgcatcaaattttt

SEQ ID NO: 118017 - DNA, 22 bp, Artificial Sequence
  Synthetic oligonucleotide; TTC chr11 5370794 5370815 5370799 5370794 -
tctattgcatcaaattttttct

SEQ ID NO: 118018 - DNA, 22 bp, Artificial Sequence
  Synthetic oligonucleotide; CTC chr11 5370792 5370813 5370797 5370792 -
tattgcatcaaattttttcttt

SEQ ID NO: 118019 - DNA, 22 bp, Artificial Sequence
  Synthetic oligonucleotide; CTA chr11 5370790 5370811 5370795 5370790 -
ttgcatcaaattttttctttct

SEQ ID NO: 118020 - DNA, 22 bp, Artificial Sequence
  Synthetic oligonucleotide; TTG chr11 5370787 5370808 5370792 5370787 -
catcaaattttttctttctttc

SEQ ID NO: 118021 - DNA, 22 bp, Artificial Sequence
  Synthetic oligonucleotide; TTT chr11 5370777 5370798 5370782 5370777 -
tttctttctttcatagcagcta

SEQ ID NO: 118022 - DNA, 22 bp, Artificial Sequence
  Synthetic oligonucleotide; TTT chr11 5370776 5370797 5370781 5370776 -
ttctttctttcatagcagctat

SEQ ID NO: 118023 - DNA, 22 bp, Artificial Sequence
  Synthetic oligonucleotide; TTT chr11 5370775 5370796 5370780 5370775 -
tctttctttcatagcagctata

SEQ ID NO: 118024 - DNA, 22 bp, Artificial Sequence
  Synthetic oligonucleotide; TTT chr11 5370774 5370795 5370779 5370774 -
ctttctttcatagcagctatat

SEQ ID NO: 118025 - DNA, 22 bp, Artificial Sequence
  Synthetic oligonucleotide; TTC chr11 5370773 5370794 5370778 5370773 -
tttctttcatagcagctatatg

SEQ ID NO: 118026 - DNA, 22 bp, Artificial Sequence
  Synthetic oligonucleotide; CTT chr11 5370771 5370792 5370776 5370771 -
tctttcatagcagctatatgag

SEQ ID NO: 118027 - DNA, 22 bp, Artificial Sequence
  Synthetic oligonucleotide; TTT chr11 5370770 5370791 5370775 5370770 -
ctttcatagcagctatatgagg

SEQ ID NO: 118028 - DNA, 22 bp, Artificial Sequence
  Synthetic oligonucleotide; TTC chr11 5370769 5370790 5370774 5370769 -
tttcatagcagctatatgaggt

SEQ ID NO: 118029 - DNA, 22 bp, Artificial Sequence
  Synthetic oligonucleotide; CTT chr11 5370767 5370788 5370772 5370767 -
tcatagcagctatatgaggttg

SEQ ID NO: 118030 - DNA, 22 bp, Artificial Sequence
  Synthetic oligonucleotide; TTT chr11 5370766 5370787 5370771 5370766 -
catagcagctatatgaggttgt

SEQ ID NO: 118031 - DNA, 22 bp, Artificial Sequence
  Synthetic oligonucleotide; TTC chr11 5370765 5370786 5370770 5370765 -
atagcagctatatgaggttgta

SEQ ID NO: 118032 - DNA, 22 bp, Artificial Sequence
  Synthetic oligonucleotide; CTA chr11 5370755 5370776 5370760 5370755 -
tatgaggttgtaattatttttg

SEQ ID NO: 118033 - DNA, 22 bp, Artificial Sequence
  Synthetic oligonucleotide; TTG chr11 5370745 5370766 5370750 5370745 -
taattatttttgtcactttttt

SEQ ID NO: 118034 - DNA, 22 bp, Artificial Sequence
  Synthetic oligonucleotide; TTA chr11 5370739 5370760 5370744 5370739 -
tttttgtcacttttttattatt

SEQ ID NO: 118035 - DNA, 22 bp, Artificial Sequence
  Synthetic oligonucleotide; TTT chr11 5370736 5370757 5370741 5370736 -
ttgtcacttttttattatttcc

SEQ ID NO: 118036 - DNA, 22 bp, Artificial Sequence
  Synthetic oligonucleotide; TTT chr11 5370735 5370756 5370740 5370735 -
tgtcacttttttattatttcct

SEQ ID NO: 118037 - DNA, 22 bp, Artificial Sequence
  Synthetic oligonucleotide; TTT chr11 5370734 5370755 5370739 5370734 -
gtcacttttttattatttcctt

SEQ ID NO: 118038 - DNA, 22 bp, Artificial Sequence
  Synthetic oligonucleotide; TTG chr11 5370733 5370754 5370738 5370733 -
tcacttttttattatttccttt

SEQ ID NO: 118039 - DNA, 22 bp, Artificial Sequence
  Synthetic oligonucleotide; CTT chr11 5370727 5370748 5370732 5370727 -
ttttattatttcctttccgtta

SEQ ID NO: 118040 - DNA, 22 bp, Artificial Sequence
  Synthetic oligonucleotide; TTT chr11 5370726 5370747 5370731 5370726 -
tttattatttcctttccgttaa

SEQ ID NO: 118041 - DNA, 22 bp, Artificial Sequence
  Synthetic oligonucleotide; TTT chr11 5370725 5370746 5370730 5370725 -
ttattatttcctttccgttaaa

SEQ ID NO: 118042 - DNA, 22 bp, Artificial Sequence
  Synthetic oligonucleotide; TTT chr11 5370724 5370745 5370729 5370724 -
tattatttcctttccgttaaaa

SEQ ID NO: 118043 - DNA, 22 bp, Artificial Sequence
  Synthetic oligonucleotide; TTT chr11 5370723 5370744 5370728 5370723 -
attatttcctttccgttaaaat

SEQ ID NO: 118044 - DNA, 22 bp, Artificial Sequence
  Synthetic oligonucleotide; TTA chr11 5370722 5370743 5370727 5370722 -
ttatttcctttccgttaaaata

SEQ ID NO: 118045 - DNA, 22 bp, Artificial Sequence
  Synthetic oligonucleotide; TTA chr11 5370719 5370740 5370724 5370719 -
tttcctttccgttaaaatacaa

SEQ ID NO: 118046 - DNA, 22 bp, Artificial Sequence
  Synthetic oligonucleotide; TTT chr11 5370716 5370737 5370721 5370716 -
cctttccgttaaaatacaagct

SEQ ID NO: 118047 - DNA, 22 bp, Artificial Sequence
  Synthetic oligonucleotide; TTC chr11 5370715 5370736 5370720 5370715 -
ctttccgttaaaatacaagctt

SEQ ID NO: 118048 - DNA, 22 bp, Artificial Sequence
  Synthetic oligonucleotide; CTT chr11 5370712 5370733 5370717 5370712 -
tccgttaaaatacaagcttcat

SEQ ID NO: 118049 - DNA, 22 bp, Artificial Sequence
  Synthetic oligonucleotide; TTT chr11 5370711 5370732 5370716 5370711 -
ccgttaaaatacaagcttcata

SEQ ID NO: 118050 - DNA, 22 bp, Artificial Sequence
  Synthetic oligonucleotide; TTC chr11 5370710 5370731 5370715 5370710 -
cgttaaaatacaagcttcatag

SEQ ID NO: 118051 - DNA, 22 bp, Artificial Sequence
  Synthetic oligonucleotide; TTA chr11 5370705 5370726 5370710 5370705 -
aaatacaagcttcataggaaca

SEQ ID NO: 118052 - DNA, 22 bp, Artificial Sequence
  Synthetic oligonucleotide; CTT chr11 5370693 5370714 5370698 5370693 -
cataggaacagagaatatatgc

SEQ ID NO: 118053 - DNA, 22 bp, Artificial Sequence
  Synthetic oligonucleotide; TTC chr11 5370692 5370713 5370697 5370692 -
ataggaacagagaatatatgca

SEQ ID NO: 118054 - DNA, 22 bp, Artificial Sequence
  Synthetic oligonucleotide; TTT chr11 5370659 5370680 5370664 5370659 -
ttgtacccagtagttgctaaaa

SEQ ID NO: 118055 - DNA, 22 bp, Artificial Sequence
  Synthetic oligonucleotide; TTT chr11 5370658 5370679 5370663 5370658 -
tgtacccagtagttgctaaaat

SEQ ID NO: 118056 - DNA, 22 bp, Artificial Sequence
  Synthetic oligonucleotide; TTT chr11 5370657 5370678 5370662 5370657 -
gtacccagtagttgctaaaata

SEQ ID NO: 118057 - DNA, 22 bp, Artificial Sequence
  Synthetic oligonucleotide; TTG chr11 5370656 5370677 5370661 5370656 -
tacccagtagttgctaaaatag

SEQ ID NO: 118058 - DNA, 22 bp, Artificial Sequence
  Synthetic oligonucleotide; TTG chr11 5370643 5370664 5370648 5370643 -
ctaaaatagagaagcctctcat

SEQ ID NO: 118059 - DNA, 22 bp, Artificial Sequence
  Synthetic oligonucleotide; CTA chr11 5370640 5370661 5370645 5370640 -
aaatagagaagcctctcattag

SEQ ID NO: 118060 - DNA, 22 bp, Artificial Sequence
  Synthetic oligonucleotide; CTC chr11 5370625 5370646 5370630 5370625 -
tcattagataaacaaacaacta

SEQ ID NO: 118061 - DNA, 22 bp, Artificial Sequence
  Synthetic oligonucleotide; CTC chr11 5370623 5370644 5370628 5370623 -
attagataaacaaacaactaaa

SEQ ID NO: 118062 - DNA, 22 bp, Artificial Sequence
  Synthetic oligonucleotide; TTA chr11 5370619 5370640 5370624 5370619 -
gataaacaaacaactaaacaat

SEQ ID NO: 118063 - DNA, 22 bp, Artificial Sequence
  Synthetic oligonucleotide; CTA chr11 5370603 5370624 5370608 5370603 -
aacaatgaccgcttgttaaata

SEQ ID NO: 118064 - DNA, 22 bp, Artificial Sequence
  Synthetic oligonucleotide; CTT chr11 5370589 5370610 5370594 5370589 -
gttaaataaatgtatttagtta

SEQ ID NO: 118065 - DNA, 22 bp, Artificial Sequence
  Synthetic oligonucleotide; TTG chr11 5370588 5370609 5370593 5370588 -
ttaaataaatgtatttagttat

SEQ ID NO: 118066 - DNA, 22 bp, Artificial Sequence
  Synthetic oligonucleotide; TTA chr11 5370585 5370606 5370590 5370585 -
aataaatgtatttagttattct

SEQ ID NO: 118067 - DNA, 22 bp, Artificial Sequence
  Synthetic oligonucleotide; TTT chr11 5370572 5370593 5370577 5370572 -
agttattctattattcatttct

SEQ ID NO: 118068 - DNA, 22 bp, Artificial Sequence
  Synthetic oligonucleotide; TTA chr11 5370571 5370592 5370576 5370571 -
gttattctattattcatttcta

SEQ ID NO: 118069 - DNA, 22 bp, Artificial Sequence
  Synthetic oligonucleotide; TTA chr11 5370567 5370588 5370572 5370567 -
ttctattattcatttctaaaca

SEQ ID NO: 118070 - DNA, 22 bp, Artificial Sequence
  Synthetic oligonucleotide; TTC chr11 5370564 5370585 5370569 5370564 -
tattattcatttctaaacacag

SEQ ID NO: 118071 - DNA, 22 bp, Artificial Sequence
  Synthetic oligonucleotide; CTA chr11 5370562 5370583 5370567 5370562 -
ttattcatttctaaacacagaa

SEQ ID NO: 118072 - DNA, 22 bp, Artificial Sequence
  Synthetic oligonucleotide; TTA chr11 5370559 5370580 5370564 5370559 -
ttcatttctaaacacagaaaga

SEQ ID NO: 118073 - DNA, 22 bp, Artificial Sequence
  Synthetic oligonucleotide; TTC chr11 5370556 5370577 5370561 5370556 -
atttctaaacacagaaagagtg

SEQ ID NO: 118074 - DNA, 22 bp, Artificial Sequence
  Synthetic oligonucleotide; TTT chr11 5370552 5370573 5370557 5370552 -
ctaaacacagaaagagtgagaa

SEQ ID NO: 118075 - DNA, 22 bp, Artificial Sequence
  Synthetic oligonucleotide; TTC chr11 5370551 5370572 5370556 5370551 -
taaacacagaaagagtgagaaa

SEQ ID NO: 118076 - DNA, 22 bp, Artificial Sequence
  Synthetic oligonucleotide; CTA chr11 5370549 5370570 5370554 5370549 -
aacacagaaagagtgagaaagg

SEQ ID NO: 118077 - DNA, 22 bp, Artificial Sequence
  Synthetic oligonucleotide; TTT chr11 5370471 5370492 5370476 5370471 -
tctggcattaaattattgccct

SEQ ID NO: 118078 - DNA, 22 bp, Artificial Sequence
  Synthetic oligonucleotide; TTT chr11 5370470 5370491 5370475 5370470 -
ctggcattaaattattgccctc

SEQ ID NO: 118079 - DNA, 22 bp, Artificial Sequence
  Synthetic oligonucleotide; TTC chr11 5370469 5370490 5370474 5370469 -
tggcattaaattattgccctca

SEQ ID NO: 118080 - DNA, 22 bp, Artificial Sequence
  Synthetic oligonucleotide; CTG chr11 5370467 5370488 5370472 5370467 -
gcattaaattattgccctcaaa

SEQ ID NO: 118081 - DNA, 22 bp, Artificial Sequence
  Synthetic oligonucleotide; TTA chr11 5370461 5370482 5370466 5370461 -
aattattgccctcaaattggac

SEQ ID NO: 118082 - DNA, 22 bp, Artificial Sequence
  Synthetic oligonucleotide; TTA chr11 5370456 5370477 5370461 5370456 -
ttgccctcaaattggacagaga

SEQ ID NO: 118083 - DNA, 22 bp, Artificial Sequence
  Synthetic oligonucleotide; TTG chr11 5370453 5370474 5370458 5370453 -
ccctcaaattggacagagacat

SEQ ID NO: 118084 - DNA, 22 bp, Artificial Sequence
  Synthetic oligonucleotide; CTC chr11 5370448 5370469 5370453 5370448 -
aaattggacagagacataccaa

SEQ ID NO: 118085 - DNA, 22 bp, Artificial Sequence
  Synthetic oligonucleotide; TTG chr11 5370442 5370463 5370447 5370442 -
gacagagacataccaacaaatg

SEQ ID NO: 118086 - DNA, 22 bp, Artificial Sequence
  Synthetic oligonucleotide; CTC chr11 5370414 5370435 5370419 5370414 -
tgaagatttgaatttaattttc

SEQ ID NO: 118087 - DNA, 22 bp, Artificial Sequence
  Synthetic oligonucleotide; CTG chr11 5370412 5370433 5370417 5370412 -
aagatttgaatttaattttccc

SEQ ID NO: 118088 - DNA, 22 bp, Artificial Sequence
  Synthetic oligonucleotide; TTT chr11 5370405 5370426 5370410 5370405 -
gaatttaattttccctgtaaat

SEQ ID NO: 118089 - DNA, 22 bp, Artificial Sequence
  Synthetic oligonucleotide; TTG chr11 5370404 5370425 5370409 5370404 -
aatttaattttccctgtaaatt

SEQ ID NO: 118090 - DNA, 22 bp, Artificial Sequence
  Synthetic oligonucleotide; TTT chr11 5370399 5370420 5370404 5370399 -
aattttccctgtaaattgctct

SEQ ID NO: 118091 - DNA, 22 bp, Artificial Sequence
  Synthetic oligonucleotide; TTA chr11 5370398 5370419 5370403 5370398 -
attttccctgtaaattgctctg

SEQ ID NO: 118092 - DNA, 22 bp, Artificial Sequence
  Synthetic oligonucleotide; TTT chr11 5370394 5370415 5370399 5370394 -
tccctgtaaattgctctgacct

SEQ ID NO: 118093 - DNA, 22 bp, Artificial Sequence
  Synthetic oligonucleotide; TTT chr11 5370393 5370414 5370398 5370393 -
ccctgtaaattgctctgacctg

SEQ ID NO: 118094 - DNA, 22 bp, Artificial Sequence
  Synthetic oligonucleotide; TTC chr11 5370392 5370413 5370397 5370392 -
cctgtaaattgctctgacctga

SEQ ID NO: 118095 - DNA, 22 bp, Artificial Sequence
  Synthetic oligonucleotide; CTG chr11 5370388 5370409 5370393 5370388 -
taaattgctctgacctgacaac

SEQ ID NO: 118096 - DNA, 22 bp, Artificial Sequence
  Synthetic oligonucleotide; TTG chr11 5370381 5370402 5370386 5370381 -
ctctgacctgacaacccagcta

SEQ ID NO: 118097 - DNA, 22 bp, Artificial Sequence
  Synthetic oligonucleotide; CTC chr11 5370378 5370399 5370383 5370378 -
tgacctgacaacccagctattt

SEQ ID NO: 118098 - DNA, 22 bp, Artificial Sequence
  Synthetic oligonucleotide; CTG chr11 5370376 5370397 5370381 5370376 -
acctgacaacccagctatttta

SEQ ID NO: 118099 - DNA, 22 bp, Artificial Sequence
  Synthetic oligonucleotide; CTG chr11 5370371 5370392 5370376 5370371 -
acaacccagctattttagttta

SEQ ID NO: 118100 - DNA, 22 bp, Artificial Sequence
  Synthetic oligonucleotide; CTA chr11 5370359 5370380 5370364 5370359 -
ttttagtttagtctttgcagat

SEQ ID NO: 118101 - DNA, 22 bp, Artificial Sequence
  Synthetic oligonucleotide; TTT chr11 5370356 5370377 5370361 5370356 -
tagtttagtctttgcagatgat

SEQ ID NO: 118102 - DNA, 22 bp, Artificial Sequence
  Synthetic oligonucleotide; TTT chr11 5370355 5370376 5370360 5370355 -
agtttagtctttgcagatgata

SEQ ID NO: 118103 - DNA, 22 bp, Artificial Sequence
  Synthetic oligonucleotide; TTA chr11 5370354 5370375 5370359 5370354 -
gtttagtctttgcagatgatat

SEQ ID NO: 118104 - DNA, 22 bp, Artificial Sequence
  Synthetic oligonucleotide; TTT chr11 5370350 5370371 5370355 5370350 -
agtctttgcagatgatatacat

SEQ ID NO: 118105 - DNA, 22 bp, Artificial Sequence
  Synthetic oligonucleotide; TTA chr11 5370349 5370370 5370354 5370349 -
gtctttgcagatgatatacata

SEQ ID NO: 118106 - DNA, 22 bp, Artificial Sequence
  Synthetic oligonucleotide; CTT chr11 5370344 5370365 5370349 5370344 -
tgcagatgatatacataaaatg

SEQ ID NO: 118107 - DNA, 22 bp, Artificial Sequence
  Synthetic oligonucleotide; TTT chr11 5370343 5370364 5370348 5370343 -
gcagatgatatacataaaatgc

SEQ ID NO: 118108 - DNA, 22 bp, Artificial Sequence
  Synthetic oligonucleotide; TTG chr11 5370342 5370363 5370347 5370342 -
cagatgatatacataaaatgcc

SEQ ID NO: 118109 - DNA, 22 bp, Artificial Sequence
  Synthetic oligonucleotide; CTA chr11 5370318 5370339 5370323 5370318 -
tctcactttgctgtagcatttc

SEQ ID NO: 118110 - DNA, 22 bp, Artificial Sequence
  Synthetic oligonucleotide; CTC chr11 5370314 5370335 5370319 5370314 -
actttgctgtagcatttccaat

SEQ ID NO: 118111 - DNA, 22 bp, Artificial Sequence
  Synthetic oligonucleotide; CTT chr11 5370310 5370331 5370315 5370310 -
tgctgtagcatttccaatcctg

SEQ ID NO: 118112 - DNA, 22 bp, Artificial Sequence
  Synthetic oligonucleotide; TTT chr11 5370309 5370330 5370314 5370309 -
gctgtagcatttccaatcctgg

SEQ ID NO: 118113 - DNA, 22 bp, Artificial Sequence
  Synthetic oligonucleotide; TTG chr11 5370308 5370329 5370313 5370308 -
ctgtagcatttccaatcctgga

SEQ ID NO: 118114 - DNA, 22 bp, Artificial Sequence
  Synthetic oligonucleotide; CTG chr11 5370305 5370326 5370310 5370305 -
tagcatttccaatcctggacag

SEQ ID NO: 118115 - DNA, 22 bp, Artificial Sequence
  Synthetic oligonucleotide; TTT chr11 5370297 5370318 5370302 5370297 -
ccaatcctggacagtcagcata

SEQ ID NO: 118116 - DNA, 22 bp, Artificial Sequence
  Synthetic oligonucleotide; TTC chr11 5370296 5370317 5370301 5370296 -
caatcctggacagtcagcataa

SEQ ID NO: 118117 - DNA, 22 bp, Artificial Sequence
  Synthetic oligonucleotide; CTG chr11 5370288 5370309 5370293 5370288 -
gacagtcagcataaaagatact

SEQ ID NO: 118118 - DNA, 22 bp, Artificial Sequence
  Synthetic oligonucleotide; CTA chr11 5370265 5370286 5370270 5370265 -
tcgtcacttatttaatatttca

SEQ ID NO: 118119 - DNA, 22 bp, Artificial Sequence
  Synthetic oligonucleotide; CTT chr11 5370256 5370277 5370261 5370256 -
atttaatatttcatagcattaa

SEQ ID NO: 118120 - DNA, 22 bp, Artificial Sequence
  Synthetic oligonucleotide; TTA chr11 5370255 5370276 5370260 5370255 -
tttaatatttcatagcattaaa

SEQ ID NO: 118121 - DNA, 22 bp, Artificial Sequence
  Synthetic oligonucleotide; TTT chr11 5370252 5370273 5370257 5370252 -
aatatttcatagcattaaacat

SEQ ID NO: 118122 - DNA, 22 bp, Artificial Sequence
  Synthetic oligonucleotide; TTA chr11 5370251 5370272 5370256 5370251 -
atatttcatagcattaaacatt

SEQ ID NO: 118123 - DNA, 22 bp, Artificial Sequence
  Synthetic oligonucleotide; TTT chr11 5370245 5370266 5370250 5370245 -
catagcattaaacattcaaacc

SEQ ID NO: 118124 - DNA, 22 bp, Artificial Sequence
  Synthetic oligonucleotide; TTC chr11 5370244 5370265 5370249 5370244 -
atagcattaaacattcaaacct

SEQ ID NO: 118125 - DNA, 22 bp, Artificial Sequence
  Synthetic oligonucleotide; TTA chr11 5370235 5370256 5370240 5370235 -
aacattcaaaccttcaacttta

SEQ ID NO: 118126 - DNA, 22 bp, Artificial Sequence
  Synthetic oligonucleotide; TTC chr11 5370228 5370249 5370233 5370228 -
aaaccttcaactttaggattta

SEQ ID NO: 118127 - DNA, 22 bp, Artificial Sequence
  Synthetic oligonucleotide; CTT chr11 5370221 5370242 5370226 5370221 -
caactttaggatttactataaa

SEQ ID NO: 118128 - DNA, 22 bp, Artificial Sequence
  Synthetic oligonucleotide; TTC chr11 5370220 5370241 5370225 5370220 -
aactttaggatttactataaaa

SEQ ID NO: 118129 - DNA, 22 bp, Artificial Sequence
  Synthetic oligonucleotide; CTT chr11 5370215 5370236 5370220 5370215 -
taggatttactataaaagactg

SEQ ID NO: 118130 - DNA, 22 bp, Artificial Sequence
  Synthetic oligonucleotide; TTT chr11 5370214 5370235 5370219 5370214 -
aggatttactataaaagactgt

SEQ ID NO: 118131 - DNA, 22 bp, Artificial Sequence
  Synthetic oligonucleotide; TTA chr11 5370213 5370234 5370218 5370213 -
ggatttactataaaagactgtg

SEQ ID NO: 118132 - DNA, 22 bp, Artificial Sequence
  Synthetic oligonucleotide; TTT chr11 5370207 5370228 5370212 5370207 -
actataaaagactgtgactgtt

SEQ ID NO: 118133 - DNA, 22 bp, Artificial Sequence
  Synthetic oligonucleotide; TTA chr11 5370206 5370227 5370211 5370206 -
ctataaaagactgtgactgtta

SEQ ID NO: 118134 - DNA, 22 bp, Artificial Sequence
  Synthetic oligonucleotide; CTA chr11 5370203 5370224 5370208 5370203 -
taaaagactgtgactgttaatg

SEQ ID NO: 118135 - DNA, 22 bp, Artificial Sequence
  Synthetic oligonucleotide; CTG chr11 5370193 5370214 5370198 5370193 -
tgactgttaatgataataataa

SEQ ID NO: 118136 - DNA, 22 bp, Artificial Sequence
  Synthetic oligonucleotide; CTG chr11 5370187 5370208 5370192 5370187 -
ttaatgataataataaatacat

SEQ ID NO: 118137 - DNA, 22 bp, Artificial Sequence
  Synthetic oligonucleotide; TTA chr11 5370184 5370205 5370189 5370184 -
atgataataataaatacattga

SEQ ID NO: 118138 - DNA, 22 bp, Artificial Sequence
  Synthetic oligonucleotide; TTG chr11 5370163 5370184 5370168 5370163 -
atgattatgagcattattttta

SEQ ID NO: 118139 - DNA, 22 bp, Artificial Sequence
  Synthetic oligonucleotide; TTA chr11 5370156 5370177 5370161 5370156 -
tgagcattatttttaaattaca

SEQ ID NO: 118140 - DNA, 22 bp, Artificial Sequence
  Synthetic oligonucleotide; TTA chr11 5370147 5370168 5370152 5370147 -
tttttaaattacaacttggtag

SEQ ID NO: 118141 - DNA, 22 bp, Artificial Sequence
  Synthetic oligonucleotide; TTT chr11 5370144 5370165 5370149 5370144 -
ttaaattacaacttggtagcct

SEQ ID NO: 118142 - DNA, 22 bp, Artificial Sequence
  Synthetic oligonucleotide; TTT chr11 5370143 5370164 5370148 5370143 -
taaattacaacttggtagcctc

SEQ ID NO: 118143 - DNA, 22 bp, Artificial Sequence
  Synthetic oligonucleotide; TTT chr11 5370142 5370163 5370147 5370142 -
aaattacaacttggtagcctct

SEQ ID NO: 118144 - DNA, 22 bp, Artificial Sequence
  Synthetic oligonucleotide; TTA chr11 5370141 5370162 5370146 5370141 -
aattacaacttggtagcctcta

SEQ ID NO: 118145 - DNA, 22 bp, Artificial Sequence
  Synthetic oligonucleotide; TTA chr11 5370136 5370157 5370141 5370136 -
caacttggtagcctctagcatt

SEQ ID NO: 118146 - DNA, 22 bp, Artificial Sequence
  Synthetic oligonucleotide; CTT chr11 5370130 5370151 5370135 5370130 -
ggtagcctctagcatttatata

SEQ ID NO: 118147 - DNA, 22 bp, Artificial Sequence
  Synthetic oligonucleotide; TTG chr11 5370129 5370150 5370134 5370129 -
gtagcctctagcatttatatac

SEQ ID NO: 118148 - DNA, 22 bp, Artificial Sequence
  Synthetic oligonucleotide; CTC chr11 5370121 5370142 5370126 5370121 -
tagcatttatatacctgtattt

SEQ ID NO: 118149 - DNA, 22 bp, Artificial Sequence
  Synthetic oligonucleotide; CTA chr11 5370119 5370140 5370124 5370119 -
gcatttatatacctgtattttc

SEQ ID NO: 118150 - DNA, 22 bp, Artificial Sequence
  Synthetic oligonucleotide; TTT chr11 5370113 5370134 5370118 5370113 -
atatacctgtattttctatatg

SEQ ID NO: 118151 - DNA, 22 bp, Artificial Sequence
  Synthetic oligonucleotide; TTA chr11 5370112 5370133 5370117 5370112 -
tatacctgtattttctatatgc

SEQ ID NO: 118152 - DNA, 22 bp, Artificial Sequence
  Synthetic oligonucleotide; CTG chr11 5370104 5370125 5370109 5370104 -
tattttctatatgcatttctat

SEQ ID NO: 118153 - DNA, 22 bp, Artificial Sequence
  Synthetic oligonucleotide; TTT chr11 5370099 5370120 5370104 5370099 -
tctatatgcatttctatagaag

SEQ ID NO: 118154 - DNA, 22 bp, Artificial Sequence
  Synthetic oligonucleotide; TTT chr11 5370098 5370119 5370103 5370098 -
ctatatgcatttctatagaagc

SEQ ID NO: 118155 - DNA, 22 bp, Artificial Sequence
  Synthetic oligonucleotide; TTC chr11 5370097 5370118 5370102 5370097 -
tatatgcatttctatagaagca

SEQ ID NO: 118156 - DNA, 22 bp, Artificial Sequence
  Synthetic oligonucleotide; CTA chr11 5370095 5370116 5370100 5370095 -
tatgcatttctatagaagcagc

SEQ ID NO: 118157 - DNA, 22 bp, Artificial Sequence
  Synthetic oligonucleotide; TTT chr11 5370086 5370107 5370091 5370086 -
ctatagaagcagcttgcacatg

SEQ ID NO: 118158 - DNA, 22 bp, Artificial Sequence
  Synthetic oligonucleotide; TTC chr11 5370085 5370106 5370090 5370085 -
tatagaagcagcttgcacatgc

SEQ ID NO: 118159 - DNA, 22 bp, Artificial Sequence
  Synthetic oligonucleotide; CTA chr11 5370083 5370104 5370088 5370083 -
tagaagcagcttgcacatgctg

SEQ ID NO: 118160 - DNA, 22 bp, Artificial Sequence
  Synthetic oligonucleotide; CTT chr11 5370071 5370092 5370076 5370071 -
gcacatgctgtacaaaccataa

SEQ ID NO: 118161 - DNA, 22 bp, Artificial Sequence
  Synthetic oligonucleotide; TTG chr11 5370070 5370091 5370075 5370070 -
cacatgctgtacaaaccataag

SEQ ID NO: 118162 - DNA, 22 bp, Artificial Sequence
  Synthetic oligonucleotide; CTG chr11 5370061 5370082 5370066 5370061 -
tacaaaccataagatggcagga

SEQ ID NO: 118163 - DNA, 22 bp, Artificial Sequence
  Synthetic oligonucleotide; TTT chr11 5370032 5370053 5370037 5370032 -
gtggaacactgactctcctggg

SEQ ID NO: 118164 - DNA, 22 bp, Artificial Sequence
  Synthetic oligonucleotide; TTG chr11 5370031 5370052 5370036 5370031 -
tggaacactgactctcctgggg

SEQ ID NO: 118165 - DNA, 22 bp, Artificial Sequence
  Synthetic oligonucleotide; CTG chr11 5370021 5370042 5370026 5370021 -
actctcctggggccatgcagag

SEQ ID NO: 118166 - DNA, 22 bp, Artificial Sequence
  Synthetic oligonucleotide; CTC chr11 5370017 5370038 5370022 5370017 -
tcctggggccatgcagagggag

SEQ ID NO: 118167 - DNA, 22 bp, Artificial Sequence
  Synthetic oligonucleotide; CTC chr11 5370015 5370036 5370020 5370015 -
ctggggccatgcagagggaggt

SEQ ID NO: 118168 - DNA, 22 bp, Artificial Sequence
  Synthetic oligonucleotide; CTG chr11 5370012 5370033 5370017 5370012 -
gggccatgcagagggaggtttg

SEQ ID NO: 118169 - DNA, 22 bp, Artificial Sequence
  Synthetic oligonucleotide; TTT chr11 5369991 5370012 5369996 5369991 -
gaagatcttgttgatacagatt

SEQ ID NO: 118170 - DNA, 22 bp, Artificial Sequence
  Synthetic oligonucleotide; TTG chr11 5369990 5370011 5369995 5369990 -
aagatcttgttgatacagattg

SEQ ID NO: 118171 - DNA, 22 bp, Artificial Sequence
  Synthetic oligonucleotide; CTT chr11 5369982 5370003 5369987 5369982 -
gttgatacagattgacacagaa

SEQ ID NO: 118172 - DNA, 22 bp, Artificial Sequence
  Synthetic oligonucleotide; TTG chr11 5369981 5370002 5369986 5369981 -
ttgatacagattgacacagaat

SEQ ID NO: 118173 - DNA, 22 bp, Artificial Sequence
  Synthetic oligonucleotide; TTG chr11 5369978 5369999 5369983 5369978 -
atacagattgacacagaatacc

SEQ ID NO: 118174 - DNA, 22 bp, Artificial Sequence
  Synthetic oligonucleotide; TTG chr11 5369968 5369989 5369973 5369968 -
acacagaataccaaagcctctt

SEQ ID NO: 118175 - DNA, 22 bp, Artificial Sequence
  Synthetic oligonucleotide; CTC chr11 5369948 5369969 5369953 5369948 -
tttccccactgcctttccttga

SEQ ID NO: 118176 - DNA, 22 bp, Artificial Sequence
  Synthetic oligonucleotide; CTT chr11 5369946 5369967 5369951 5369946 -
tccccactgcctttccttgagt

SEQ ID NO: 118177 - DNA, 22 bp, Artificial Sequence
  Synthetic oligonucleotide; TTT chr11 5369945 5369966 5369950 5369945 -
ccccactgcctttccttgagta

SEQ ID NO: 118178 - DNA, 22 bp, Artificial Sequence
  Synthetic oligonucleotide; TTC chr11 5369944 5369965 5369949 5369944 -
cccactgcctttccttgagtaa

SEQ ID NO: 118179 - DNA, 22 bp, Artificial Sequence
  Synthetic oligonucleotide; CTG chr11 5369937 5369958 5369942 5369937 -
cctttccttgagtaaaaatcct

SEQ ID NO: 118180 - DNA, 22 bp, Artificial Sequence
  Synthetic oligonucleotide; CTT chr11 5369933 5369954 5369938 5369933 -
tccttgagtaaaaatcctgaga

SEQ ID NO: 118181 - DNA, 22 bp, Artificial Sequence
  Synthetic oligonucleotide; TTT chr11 5369932 5369953 5369937 5369932 -
ccttgagtaaaaatcctgagaa

SEQ ID NO: 118182 - DNA, 22 bp, Artificial Sequence
  Synthetic oligonucleotide; TTC chr11 5369931 5369952 5369936 5369931 -
cttgagtaaaaatcctgagaaa

SEQ ID NO: 118183 - DNA, 22 bp, Artificial Sequence
  Synthetic oligonucleotide; CTT chr11 5369928 5369949 5369933 5369928 -
gagtaaaaatcctgagaaaatg

SEQ ID NO: 118184 - DNA, 22 bp, Artificial Sequence
  Synthetic oligonucleotide; TTG chr11 5369927 5369948 5369932 5369927 -
agtaaaaatcctgagaaaatgt

SEQ ID NO: 118185 - DNA, 22 bp, Artificial Sequence
  Synthetic oligonucleotide; CTG chr11 5369914 5369935 5369919 5369914 -
agaaaatgtcttccctttcttt

SEQ ID NO: 118186 - DNA, 22 bp, Artificial Sequence
  Synthetic oligonucleotide; CTT chr11 5369902 5369923 5369907 5369902 -
ccctttctttctatgttgatag

SEQ ID NO: 118187 - DNA, 22 bp, Artificial Sequence
  Synthetic oligonucleotide; TTC chr11 5369901 5369922 5369906 5369901 -
cctttctttctatgttgatagc

SEQ ID NO: 118188 - DNA, 22 bp, Artificial Sequence
  Synthetic oligonucleotide; CTT chr11 5369897 5369918 5369902 5369897 -
tctttctatgttgatagcaaaa

SEQ ID NO: 118189 - DNA, 22 bp, Artificial Sequence
  Synthetic oligonucleotide; TTT chr11 5369896 5369917 5369901 5369896 -
ctttctatgttgatagcaaaac

SEQ ID NO: 118190 - DNA, 22 bp, Artificial Sequence
  Synthetic oligonucleotide; TTC chr11 5369895 5369916 5369900 5369895 -
tttctatgttgatagcaaaacc

SEQ ID NO: 118191 - DNA, 22 bp, Artificial Sequence
  Synthetic oligonucleotide; CTT chr11 5369893 5369914 5369898 5369893 -
tctatgttgatagcaaaaccaa

SEQ ID NO: 118192 - DNA, 22 bp, Artificial Sequence
  Synthetic oligonucleotide; TTT chr11 5369892 5369913 5369897 5369892 -
ctatgttgatagcaaaaccaat

SEQ ID NO: 118193 - DNA, 22 bp, Artificial Sequence
  Synthetic oligonucleotide; TTC chr11 5369891 5369912 5369896 5369891 -
tatgttgatagcaaaaccaatg

SEQ ID NO: 118194 - DNA, 22 bp, Artificial Sequence
  Synthetic oligonucleotide; CTA chr11 5369889 5369910 5369894 5369889 -
tgttgatagcaaaaccaatgag

SEQ ID NO: 118195 - DNA, 22 bp, Artificial Sequence
  Synthetic oligonucleotide; TTG chr11 5369884 5369905 5369889 5369884 -
atagcaaaaccaatgaggtcat

SEQ ID NO: 118196 - DNA, 22 bp, Artificial Sequence
  Synthetic oligonucleotide; CTT chr11 5369857 5369878 5369862 5369857 -
ttaacaactgttgacttatttt

SEQ ID NO: 118197 - DNA, 22 bp, Artificial Sequence
  Synthetic oligonucleotide; TTT chr11 5369856 5369877 5369861 5369856 -
taacaactgttgacttattttg

SEQ ID NO: 118198 - DNA, 22 bp, Artificial Sequence
  Synthetic oligonucleotide; TTT chr11 5369855 5369876 5369860 5369855 -
aacaactgttgacttattttgg

SEQ ID NO: 118199 - DNA, 22 bp, Artificial Sequence
  Synthetic oligonucleotide; TTA chr11 5369854 5369875 5369859 5369854 -
acaactgttgacttattttgga

SEQ ID NO: 118200 - DNA, 22 bp, Artificial Sequence
  Synthetic oligonucleotide; CTG chr11 5369847 5369868 5369852 5369847 -
ttgacttattttggattttagt

SEQ ID NO: 118201 - DNA, 22 bp, Artificial Sequence
  Synthetic oligonucleotide; TTG chr11 5369844 5369865 5369849 5369844 -
acttattttggattttagtcta

SEQ ID NO: 118202 - DNA, 22 bp, Artificial Sequence
  Synthetic oligonucleotide; CTT chr11 5369840 5369861 5369845 5369840 -
attttggattttagtctacatt

SEQ ID NO: 118203 - DNA, 22 bp, Artificial Sequence
  Synthetic oligonucleotide; TTA chr11 5369839 5369860 5369844 5369839 -
ttttggattttagtctacattc

SEQ ID NO: 118204 - DNA, 22 bp, Artificial Sequence
  Synthetic oligonucleotide; TTT chr11 5369836 5369857 5369841 5369836 -
tggattttagtctacattcact

SEQ ID NO: 118205 - DNA, 22 bp, Artificial Sequence
  Synthetic oligonucleotide; TTT chr11 5369835 5369856 5369840 5369835 -
ggattttagtctacattcactg

SEQ ID NO: 118206 - DNA, 22 bp, Artificial Sequence
  Synthetic oligonucleotide; TTG chr11 5369834 5369855 5369839 5369834 -
gattttagtctacattcactgt

SEQ ID NO: 118207 - DNA, 22 bp, Artificial Sequence
  Synthetic oligonucleotide; TTT chr11 5369829 5369850 5369834 5369829 -
tagtctacattcactgtaacac

SEQ ID NO: 118208 - DNA, 22 bp, Artificial Sequence
  Synthetic oligonucleotide; TTT chr11 5369828 5369849 5369833 5369828 -
agtctacattcactgtaacaca

SEQ ID NO: 118209 - DNA, 22 bp, Artificial Sequence
  Synthetic oligonucleotide; TTA chr11 5369827 5369848 5369832 5369827 -
gtctacattcactgtaacacaa

SEQ ID NO: 118210 - DNA, 22 bp, Artificial Sequence
  Synthetic oligonucleotide; CTA chr11 5369822 5369843 5369827 5369822 -
cattcactgtaacacaaaaatg

SEQ ID NO: 118211 - DNA, 22 bp, Artificial Sequence
  Synthetic oligonucleotide; TTC chr11 5369817 5369838 5369822 5369817 -
actgtaacacaaaaatgcagac

SEQ ID NO: 118212 - DNA, 22 bp, Artificial Sequence
  Synthetic oligonucleotide; CTG chr11 5369813 5369834 5369818 5369813 -
taacacaaaaatgcagacaagc

SEQ ID NO: 118213 - DNA, 22 bp, Artificial Sequence
  Synthetic oligonucleotide; CTG chr11 5369784 5369805 5369789 5369784 -
attttagtgtggcatcatggaa

SEQ ID NO: 118214 - DNA, 22 bp, Artificial Sequence
  Synthetic oligonucleotide; TTT chr11 5369780 5369801 5369785 5369780 -
tagtgtggcatcatggaaataa

SEQ ID NO: 118215 - DNA, 22 bp, Artificial Sequence
  Synthetic oligonucleotide; TTT chr11 5369779 5369800 5369784 5369779 -
agtgtggcatcatggaaataac

SEQ ID NO: 118216 - DNA, 22 bp, Artificial Sequence
  Synthetic oligonucleotide; TTA chr11 5369778 5369799 5369783 5369778 -
gtgtggcatcatggaaataaca

SEQ ID NO: 118217 - DNA, 22 bp, Artificial Sequence
  Synthetic oligonucleotide; CTA chr11 5369750 5369771 5369755 5369750 -
cacatagcccttgctaccagcc

SEQ ID NO: 118218 - DNA, 22 bp, Artificial Sequence
  Synthetic oligonucleotide; CTT chr11 5369738 5369759 5369743 5369738 -
gctaccagccaataggactatt

SEQ ID NO: 118219 - DNA, 22 bp, Artificial Sequence
  Synthetic oligonucleotide; TTG chr11 5369737 5369758 5369742 5369737 -
ctaccagccaataggactattt

SEQ ID NO: 118220 - DNA, 22 bp, Artificial Sequence
  Synthetic oligonucleotide; CTA chr11 5369734 5369755 5369739 5369734 -
ccagccaataggactatttatt

SEQ ID NO: 118221 - DNA, 22 bp, Artificial Sequence
  Synthetic oligonucleotide; CTA chr11 5369718 5369739 5369723 5369718 -
tttatttgagtatgttcatata

SEQ ID NO: 118222 - DNA, 22 bp, Artificial Sequence
  Synthetic oligonucleotide; TTT chr11 5369715 5369736 5369720 5369715 -
atttgagtatgttcatatatgt

SEQ ID NO: 118223 - DNA, 22 bp, Artificial Sequence
  Synthetic oligonucleotide; TTA chr11 5369714 5369735 5369719 5369714 -
tttgagtatgttcatatatgta

SEQ ID NO: 118224 - DNA, 22 bp, Artificial Sequence
  Synthetic oligonucleotide; TTT chr11 5369711 5369732 5369716 5369711 -
gagtatgttcatatatgtatat

SEQ ID NO: 118225 - DNA, 22 bp, Artificial Sequence
  Synthetic oligonucleotide; TTG chr11 5369710 5369731 5369715 5369710 -
agtatgttcatatatgtatata

SEQ ID NO: 118226 - DNA, 22 bp, Artificial Sequence
  Synthetic oligonucleotide; TTC chr11 5369701 5369722 5369706 5369701 -
atatatgtatatataaatgtgt

SEQ ID NO: 118227 - DNA, 22 bp, Artificial Sequence
  Synthetic oligonucleotide; TTG chr11 5369669 5369690 5369674 5369669 -
cagagaaatgtatggcagatta

SEQ ID NO: 118228 - DNA, 22 bp, Artificial Sequence
  Synthetic oligonucleotide; TTA chr11 5369647 5369668 5369652 5369647 -
taaagggaaattatctccaggg

SEQ ID NO: 118229 - DNA, 22 bp, Artificial Sequence
  Synthetic oligonucleotide; TTA chr11 5369634 5369655 5369639 5369634 -
tctccagggaggatagaaaggt

SEQ ID NO: 118230 - DNA, 22 bp, Artificial Sequence
  Synthetic oligonucleotide; CTC chr11 5369630 5369651 5369635 5369630 -
cagggaggatagaaaggtaagg

SEQ ID NO: 118231 - DNA, 22 bp, Artificial Sequence
  Synthetic oligonucleotide; CTT chr11 5369596 5369617 5369601 5369596 -
tactttatatttaatatacatg

SEQ ID NO: 118232 - DNA, 22 bp, Artificial Sequence
  Synthetic oligonucleotide; TTT chr11 5369595 5369616 5369600 5369595 -
actttatatttaatatacatgg

SEQ ID NO: 118233 - DNA, 22 bp, Artificial Sequence
  Synthetic oligonucleotide; TTA chr11 5369594 5369615 5369599 5369594 -
ctttatatttaatatacatgga

SEQ ID NO: 118234 - DNA, 22 bp, Artificial Sequence
  Synthetic oligonucleotide; CTT chr11 5369591 5369612 5369596 5369591 -
tatatttaatatacatggagta

SEQ ID NO: 118235 - DNA, 22 bp, Artificial Sequence
  Synthetic oligonucleotide; TTT chr11 5369590 5369611 5369595 5369590 -
atatttaatatacatggagtat

SEQ ID NO: 118236 - DNA, 22 bp, Artificial Sequence
  Synthetic oligonucleotide; TTA chr11 5369589 5369610 5369594 5369589 -
tatttaatatacatggagtata

SEQ ID NO: 118237 - DNA, 22 bp, Artificial Sequence
  Synthetic oligonucleotide; TTT chr11 5369584 5369605 5369589 5369584 -
aatatacatggagtatatataa

SEQ ID NO: 118238 - DNA, 22 bp, Artificial Sequence
  Synthetic oligonucleotide; TTA chr11 5369583 5369604 5369588 5369583 -
atatacatggagtatatataat

SEQ ID NO: 118239 - DNA, 22 bp, Artificial Sequence
  Synthetic oligonucleotide; TTT chr11 5369559 5369580 5369564 5369559 -
tttaaattatatcatagacata

SEQ ID NO: 118240 - DNA, 22 bp, Artificial Sequence
  Synthetic oligonucleotide; TTT chr11 5369558 5369579 5369563 5369558 -
ttaaattatatcatagacatat

SEQ ID NO: 118241 - DNA, 22 bp, Artificial Sequence
  Synthetic oligonucleotide; TTT chr11 5369557 5369578 5369562 5369557 -
taaattatatcatagacatatt

SEQ ID NO: 118242 - DNA, 22 bp, Artificial Sequence
  Synthetic oligonucleotide; TTT chr11 5369556 5369577 5369561 5369556 -
aaattatatcatagacatattt

SEQ ID NO: 118243 - DNA, 22 bp, Artificial Sequence
  Synthetic oligonucleotide; TTA chr11 5369555 5369576 5369560 5369555 -
aattatatcatagacatattta

SEQ ID NO: 118244 - DNA, 22 bp, Artificial Sequence
  Synthetic oligonucleotide; TTA chr11 5369550 5369571 5369555 5369550 -
tatcatagacatatttaggata

SEQ ID NO: 118245 - DNA, 22 bp, Artificial Sequence
  Synthetic oligonucleotide; TTT chr11 5369534 5369555 5369539 5369534 -
aggatagtgaatggaaaatttt

SEQ ID NO: 118246 - DNA, 22 bp, Artificial Sequence
  Synthetic oligonucleotide; TTA chr11 5369533 5369554 5369538 5369533 -
ggatagtgaatggaaaatttta

SEQ ID NO: 118247 - DNA, 22 bp, Artificial Sequence
  Synthetic oligonucleotide; TTT chr11 5369513 5369534 5369518 5369513 -
taaaaatacaactacttactag

SEQ ID NO: 118248 - DNA, 22 bp, Artificial Sequence
  Synthetic oligonucleotide; TTT chr11 5369512 5369533 5369517 5369512 -
aaaaatacaactacttactagt

SEQ ID NO: 118249 - DNA, 22 bp, Artificial Sequence
  Synthetic oligonucleotide; TTA chr11 5369511 5369532 5369516 5369511 -
aaaatacaactacttactagtt

SEQ ID NO: 118250 - DNA, 22 bp, Artificial Sequence
  Synthetic oligonucleotide; CTA chr11 5369499 5369520 5369504 5369499 -
cttactagttgtatactttttt

SEQ ID NO: 118251 - DNA, 22 bp, Artificial Sequence
  Synthetic oligonucleotide; CTT chr11 5369496 5369517 5369501 5369496 -
actagttgtatacttttttaaa

SEQ ID NO: 118252 - DNA, 22 bp, Artificial Sequence
  Synthetic oligonucleotide; TTA chr11 5369495 5369516 5369500 5369495 -
ctagttgtatacttttttaaat

SEQ ID NO: 118253 - DNA, 22 bp, Artificial Sequence
  Synthetic oligonucleotide; CTA chr11 5369492 5369513 5369497 5369492 -
gttgtatacttttttaaatgtc

SEQ ID NO: 118254 - DNA, 22 bp, Artificial Sequence
  Synthetic oligonucleotide; TTG chr11 5369488 5369509 5369493 5369488 -
tatacttttttaaatgtctcaa

SEQ ID NO: 118255 - DNA, 22 bp, Artificial Sequence
  Synthetic oligonucleotide; CTT chr11 5369481 5369502 5369486 5369481 -
ttttaaatgtctcaaattatca

SEQ ID NO: 118256 - DNA, 22 bp, Artificial Sequence
  Synthetic oligonucleotide; TTT chr11 5369480 5369501 5369485 5369480 -
tttaaatgtctcaaattatcag

SEQ ID NO: 118257 - DNA, 22 bp, Artificial Sequence
  Synthetic oligonucleotide; TTT chr11 5369479 5369500 5369484 5369479 -
ttaaatgtctcaaattatcaga

SEQ ID NO: 118258 - DNA, 22 bp, Artificial Sequence
  Synthetic oligonucleotide; TTT chr11 5369478 5369499 5369483 5369478 -
taaatgtctcaaattatcagat

SEQ ID NO: 118259 - DNA, 22 bp, Artificial Sequence
  Synthetic oligonucleotide; TTT chr11 5369477 5369498 5369482 5369477 -
aaatgtctcaaattatcagatt

SEQ ID NO: 118260 - DNA, 22 bp, Artificial Sequence
  Synthetic oligonucleotide; TTA chr11 5369476 5369497 5369481 5369476 -
aatgtctcaaattatcagattt

SEQ ID NO: 118261 - DNA, 22 bp, Artificial Sequence
  Synthetic oligonucleotide; CTC chr11 5369468 5369489 5369473 5369468 -
aaattatcagattttatttttt

SEQ ID NO: 118262 - DNA, 22 bp, Artificial Sequence
  Synthetic oligonucleotide; TTA chr11 5369462 5369483 5369467 5369462 -
tcagattttattttttatccag

SEQ ID NO: 118263 - DNA, 22 bp, Artificial Sequence
  Synthetic oligonucleotide; TTT chr11 5369454 5369475 5369459 5369454 -
tattttttatccagaaaaaata

SEQ ID NO: 118264 - DNA, 22 bp, Artificial Sequence
  Synthetic oligonucleotide; TTT chr11 5369453 5369474 5369458 5369453 -
attttttatccagaaaaaatat

SEQ ID NO: 118265 - DNA, 22 bp, Artificial Sequence
  Synthetic oligonucleotide; TTA chr11 5369452 5369473 5369457 5369452 -
ttttttatccagaaaaaatata

SEQ ID NO: 118266 - DNA, 22 bp, Artificial Sequence
  Synthetic oligonucleotide; TTT chr11 5369449 5369470 5369454 5369449 -
tttatccagaaaaaatatataa

SEQ ID NO: 118267 - DNA, 22 bp, Artificial Sequence
  Synthetic oligonucleotide; TTT chr11 5369448 5369469 5369453 5369448 -
ttatccagaaaaaatatataaa

SEQ ID NO: 118268 - DNA, 22 bp, Artificial Sequence
  Synthetic oligonucleotide; TTT chr11 5369447 5369468 5369452 5369447 -
tatccagaaaaaatatataaaa

SEQ ID NO: 118269 - DNA, 22 bp, Artificial Sequence
  Synthetic oligonucleotide; TTT chr11 5369446 5369467 5369451 5369446 -
atccagaaaaaatatataaaaa

SEQ ID NO: 118270 - DNA, 22 bp, Artificial Sequence
  Synthetic oligonucleotide; TTA chr11 5369445 5369466 5369450 5369445 -
tccagaaaaaatatataaaaag

SEQ ID NO: 118271 - DNA, 22 bp, Artificial Sequence
  Synthetic oligonucleotide; CTG chr11 5369419 5369440 5369424 5369419 -
tttcatagagttttactgaggt

SEQ ID NO: 118272 - DNA, 22 bp, Artificial Sequence
  Synthetic oligonucleotide; TTT chr11 5369416 5369437 5369421 5369416 -
catagagttttactgaggtata

SEQ ID NO: 118273 - DNA, 22 bp, Artificial Sequence
  Synthetic oligonucleotide; TTC chr11 5369415 5369436 5369420 5369415 -
atagagttttactgaggtataa

SEQ ID NO: 118274 - DNA, 22 bp, Artificial Sequence
  Synthetic oligonucleotide; TTT chr11 5369406 5369427 5369411 5369406 -
tactgaggtataatagatgtaa

SEQ ID NO: 118275 - DNA, 22 bp, Artificial Sequence
  Synthetic oligonucleotide; TTT chr11 5369405 5369426 5369410 5369405 -
actgaggtataatagatgtaat

SEQ ID NO: 118276 - DNA, 22 bp, Artificial Sequence
  Synthetic oligonucleotide; TTA chr11 5369404 5369425 5369409 5369404 -
ctgaggtataatagatgtaatt

SEQ ID NO: 118277 - DNA, 22 bp, Artificial Sequence
  Synthetic oligonucleotide; CTG chr11 5369401 5369422 5369406 5369401 -
aggtataatagatgtaattctc

SEQ ID NO: 118278 - DNA, 22 bp, Artificial Sequence
  Synthetic oligonucleotide; TTC chr11 5369381 5369402 5369386 5369381 -
tcctaaaagtgttatattttgc

SEQ ID NO: 118279 - DNA, 22 bp, Artificial Sequence
  Synthetic oligonucleotide; CTC chr11 5369379 5369400 5369384 5369379 -
ctaaaagtgttatattttgcaa

SEQ ID NO: 118280 - DNA, 22 bp, Artificial Sequence
  Synthetic oligonucleotide; CTA chr11 5369376 5369397 5369381 5369376 -
aaagtgttatattttgcaaata

SEQ ID NO: 118281 - DNA, 22 bp, Artificial Sequence
  Synthetic oligonucleotide; TTA chr11 5369367 5369388 5369372 5369367 -
tattttgcaaatagtggctgct

SEQ ID NO: 118282 - DNA, 22 bp, Artificial Sequence
  Synthetic oligonucleotide; TTT chr11 5369362 5369383 5369367 5369362 -
tgcaaatagtggctgctaaaat

SEQ ID NO: 118283 - DNA, 22 bp, Artificial Sequence
  Synthetic oligonucleotide; TTT chr11 5369361 5369382 5369366 5369361 -
gcaaatagtggctgctaaaata

SEQ ID NO: 118284 - DNA, 22 bp, Artificial Sequence
  Synthetic oligonucleotide; TTG chr11 5369360 5369381 5369365 5369360 -
caaatagtggctgctaaaatat

SEQ ID NO: 118285 - DNA, 22 bp, Artificial Sequence
  Synthetic oligonucleotide; CTG chr11 5369347 5369368 5369352 5369347 -
ctaaaatattattgttaatagt

SEQ ID NO: 118286 - DNA, 22 bp, Artificial Sequence
  Synthetic oligonucleotide; CTA chr11 5369344 5369365 5369349 5369344 -
aaatattattgttaatagtatt

SEQ ID NO: 118287 - DNA, 22 bp, Artificial Sequence
  Synthetic oligonucleotide; TTA chr11 5369336 5369357 5369341 5369336 -
ttgttaatagtattccactaac

SEQ ID NO: 118288 - DNA, 22 bp, Artificial Sequence
  Synthetic oligonucleotide; TTG chr11 5369333 5369354 5369338 5369333 -
ttaatagtattccactaactag

SEQ ID NO: 118289 - DNA, 22 bp, Artificial Sequence
  Synthetic oligonucleotide; TTA chr11 5369330 5369351 5369335 5369330 -
atagtattccactaactagtaa

SEQ ID NO: 118290 - DNA, 22 bp, Artificial Sequence
  Synthetic oligonucleotide; TTC chr11 5369321 5369342 5369326 5369321 -
cactaactagtaataataactt

SEQ ID NO: 118291 - DNA, 22 bp, Artificial Sequence
  Synthetic oligonucleotide; CTA chr11 5369316 5369337 5369321 5369316 -
actagtaataataactttaatt

SEQ ID NO: 118292 - DNA, 22 bp, Artificial Sequence
  Synthetic oligonucleotide; CTA chr11 5369312 5369333 5369317 5369312 -
gtaataataactttaattaata

SEQ ID NO: 118293 - DNA, 22 bp, Artificial Sequence
  Synthetic oligonucleotide; CTT chr11 5369299 5369320 5369304 5369299 -
taattaatatttgttaagccgt

SEQ ID NO: 118294 - DNA, 22 bp, Artificial Sequence
  Synthetic oligonucleotide; TTT chr11 5369298 5369319 5369303 5369298 -
aattaatatttgttaagccgtg

SEQ ID NO: 118295 - DNA, 22 bp, Artificial Sequence
  Synthetic oligonucleotide; TTA chr11 5369297 5369318 5369302 5369297 -
attaatatttgttaagccgtga

SEQ ID NO: 118296 - DNA, 22 bp, Artificial Sequence
  Synthetic oligonucleotide; TTA chr11 5369293 5369314 5369298 5369293 -
atatttgttaagccgtgacttt

SEQ ID NO: 118297 - DNA, 22 bp, Artificial Sequence
  Synthetic oligonucleotide; TTT chr11 5369287 5369308 5369292 5369287 -
gttaagccgtgactttgtttct

SEQ ID NO: 118298 - DNA, 22 bp, Artificial Sequence
  Synthetic oligonucleotide; TTG chr11 5369286 5369307 5369291 5369286 -
ttaagccgtgactttgtttcta

SEQ ID NO: 118299 - DNA, 22 bp, Artificial Sequence
  Synthetic oligonucleotide; TTA chr11 5369283 5369304 5369288 5369283 -
agccgtgactttgtttctacta

SEQ ID NO: 118300 - DNA, 22 bp, Artificial Sequence
  Synthetic oligonucleotide; CTT chr11 5369272 5369293 5369277 5369272 -
tgtttctactaccccacacaca

SEQ ID NO: 118301 - DNA, 22 bp, Artificial Sequence
  Synthetic oligonucleotide; TTT chr11 5369271 5369292 5369276 5369271 -
gtttctactaccccacacacat

SEQ ID NO: 118302 - DNA, 22 bp, Artificial Sequence
  Synthetic oligonucleotide; TTG chr11 5369270 5369291 5369275 5369270 -
tttctactaccccacacacatg

SEQ ID NO: 118303 - DNA, 22 bp, Artificial Sequence
  Synthetic oligonucleotide; TTT chr11 5369267 5369288 5369272 5369267 -
ctactaccccacacacatgggc

SEQ ID NO: 118304 - DNA, 22 bp, Artificial Sequence
  Synthetic oligonucleotide; TTC chr11 5369266 5369287 5369271 5369266 -
tactaccccacacacatgggca

SEQ ID NO: 118305 - DNA, 22 bp, Artificial Sequence
  Synthetic oligonucleotide; CTA chr11 5369264 5369285 5369269 5369264 -
ctaccccacacacatgggcata

SEQ ID NO: 118306 - DNA, 22 bp, Artificial Sequence
  Synthetic oligonucleotide; CTA chr11 5369261 5369282 5369266 5369261 -
ccccacacacatgggcatacat

SEQ ID NO: 118307 - DNA, 22 bp, Artificial Sequence
  Synthetic oligonucleotide; CTT chr11 5369234 5369255 5369239 5369234 -
cttctatcatgttggcctcatt

SEQ ID NO: 118308 - DNA, 22 bp, Artificial Sequence
  Synthetic oligonucleotide; TTC chr11 5369233 5369254 5369238 5369233 -
ttctatcatgttggcctcattc

SEQ ID NO: 118309 - DNA, 22 bp, Artificial Sequence
  Synthetic oligonucleotide; CTT chr11 5369231 5369252 5369236 5369231 -
ctatcatgttggcctcattcag

SEQ ID NO: 118310 - DNA, 22 bp, Artificial Sequence
  Synthetic oligonucleotide; TTC chr11 5369230 5369251 5369235 5369230 -
tatcatgttggcctcattcagt

SEQ ID NO: 118311 - DNA, 22 bp, Artificial Sequence
  Synthetic oligonucleotide; CTA chr11 5369228 5369249 5369233 5369228 -
tcatgttggcctcattcagtac

SEQ ID NO: 118312 - DNA, 22 bp, Artificial Sequence
  Synthetic oligonucleotide; TTG chr11 5369220 5369241 5369225 5369220 -
gcctcattcagtacagtactag

SEQ ID NO: 118313 - DNA, 22 bp, Artificial Sequence
  Synthetic oligonucleotide; CTC chr11 5369215 5369236 5369220 5369215 -
attcagtacagtactagaaaat

SEQ ID NO: 118314 - DNA, 22 bp, Artificial Sequence
  Synthetic oligonucleotide; TTC chr11 5369211 5369232 5369216 5369211 -
agtacagtactagaaaatcagt

SEQ ID NO: 118315 - DNA, 22 bp, Artificial Sequence
  Synthetic oligonucleotide; CTA chr11 5369199 5369220 5369204 5369199 -
gaaaatcagtagggactcaggt

SEQ ID NO: 118316 - DNA, 22 bp, Artificial Sequence
  Synthetic oligonucleotide; CTC chr11 5369181 5369202 5369186 5369181 -
aggttatatgtgtgaatggatg

SEQ ID NO: 118317 - DNA, 22 bp, Artificial Sequence
  Synthetic oligonucleotide; TTA chr11 5369175 5369196 5369180 5369175 -
tatgtgtgaatggatgaataaa

SEQ ID NO: 118318 - DNA, 22 bp, Artificial Sequence
  Synthetic oligonucleotide; CTA chr11 5369139 5369160 5369144 5369139 -
tttttaaagacttcatcctttc

SEQ ID NO: 118319 - DNA, 22 bp, Artificial Sequence
  Synthetic oligonucleotide; TTT chr11 5369136 5369157 5369141 5369136 -
ttaaagacttcatcctttctgt

SEQ ID NO: 118320 - DNA, 22 bp, Artificial Sequence
  Synthetic oligonucleotide; TTT chr11 5369135 5369156 5369140 5369135 -
taaagacttcatcctttctgta

SEQ ID NO: 118321 - DNA, 22 bp, Artificial Sequence
  Synthetic oligonucleotide; TTT chr11 5369134 5369155 5369139 5369134 -
aaagacttcatcctttctgtat

SEQ ID NO: 118322 - DNA, 22 bp, Artificial Sequence
  Synthetic oligonucleotide; TTA chr11 5369133 5369154 5369138 5369133 -
aagacttcatcctttctgtatg

SEQ ID NO: 118323 - DNA, 22 bp, Artificial Sequence
  Synthetic oligonucleotide; CTT chr11 5369126 5369147 5369131 5369126 -
catcctttctgtatgtctaacc

SEQ ID NO: 118324 - DNA, 22 bp, Artificial Sequence
  Synthetic oligonucleotide; TTC chr11 5369125 5369146 5369130 5369125 -
atcctttctgtatgtctaacct

SEQ ID NO: 118325 - DNA, 22 bp, Artificial Sequence
  Synthetic oligonucleotide; CTT chr11 5369119 5369140 5369124 5369119 -
tctgtatgtctaaccttagatt

SEQ ID NO: 118326 - DNA, 22 bp, Artificial Sequence
  Synthetic oligonucleotide; TTT chr11 5369118 5369139 5369123 5369118 -
ctgtatgtctaaccttagattc

SEQ ID NO: 118327 - DNA, 22 bp, Artificial Sequence
  Synthetic oligonucleotide; TTC chr11 5369117 5369138 5369122 5369117 -
tgtatgtctaaccttagattct

SEQ ID NO: 118328 - DNA, 22 bp, Artificial Sequence
  Synthetic oligonucleotide; CTG chr11 5369115 5369136 5369120 5369115 -
tatgtctaaccttagattctag

SEQ ID NO: 118329 - DNA, 22 bp, Artificial Sequence
  Synthetic oligonucleotide; CTA chr11 5369107 5369128 5369112 5369107 -
accttagattctagtcatggcc

SEQ ID NO: 118330 - DNA, 22 bp, Artificial Sequence
  Synthetic oligonucleotide; CTT chr11 5369102 5369123 5369107 5369102 -
agattctagtcatggccatatg

SEQ ID NO: 118331 - DNA, 22 bp, Artificial Sequence
  Synthetic oligonucleotide; TTA chr11 5369101 5369122 5369106 5369101 -
gattctagtcatggccatatgt

SEQ ID NO: 118332 - DNA, 22 bp, Artificial Sequence
  Synthetic oligonucleotide; TTC chr11 5369096 5369117 5369101 5369096 -
tagtcatggccatatgtctcta

SEQ ID NO: 118333 - DNA, 22 bp, Artificial Sequence
  Synthetic oligonucleotide; CTA chr11 5369094 5369115 5369099 5369094 -
gtcatggccatatgtctctagg

SEQ ID NO: 118334 - DNA, 22 bp, Artificial Sequence
  Synthetic oligonucleotide; CTC chr11 5369076 5369097 5369081 5369076 -
taggtggcccaaccaccctatc

SEQ ID NO: 118335 - DNA, 22 bp, Artificial Sequence
  Synthetic oligonucleotide; CTA chr11 5369074 5369095 5369079 5369074 -
ggtggcccaaccaccctatcac

SEQ ID NO: 118336 - DNA, 22 bp, Artificial Sequence
  Synthetic oligonucleotide; CTA chr11 5369056 5369077 5369061 5369056 -
tcacagattctgcttcaaaggc

SEQ ID NO: 118337 - DNA, 22 bp, Artificial Sequence
  Synthetic oligonucleotide; TTC chr11 5369046 5369067 5369051 5369046 -
tgcttcaaaggcactcatcttg

SEQ ID NO: 118338 - DNA, 22 bp, Artificial Sequence
  Synthetic oligonucleotide; CTG chr11 5369044 5369065 5369049 5369044 -
cttcaaaggcactcatcttggt

SEQ ID NO: 118339 - DNA, 22 bp, Artificial Sequence
  Synthetic oligonucleotide; CTT chr11 5369041 5369062 5369046 5369041 -
caaaggcactcatcttggtgaa

SEQ ID NO: 118340 - DNA, 22 bp, Artificial Sequence
  Synthetic oligonucleotide; TTC chr11 5369040 5369061 5369045 5369040 -
aaaggcactcatcttggtgaat

SEQ ID NO: 118341 - DNA, 22 bp, Artificial Sequence
  Synthetic oligonucleotide; CTC chr11 5369030 5369051 5369035 5369030 -
atcttggtgaatgaatatctag

SEQ ID NO: 118342 - DNA, 22 bp, Artificial Sequence
  Synthetic oligonucleotide; CTT chr11 5369025 5369046 5369030 5369025 -
ggtgaatgaatatctagtccca

SEQ ID NO: 118343 - DNA, 22 bp, Artificial Sequence
  Synthetic oligonucleotide; TTG chr11 5369024 5369045 5369029 5369024 -
gtgaatgaatatctagtcccag

SEQ ID NO: 118344 - DNA, 22 bp, Artificial Sequence
  Synthetic oligonucleotide; CTA chr11 5369009 5369030 5369014 5369009 -
gtcccagaaggaggctaaaaac

SEQ ID NO: 118345 - DNA, 22 bp, Artificial Sequence
  Synthetic oligonucleotide; CTA chr11 5368992 5369013 5368997 5368992 -
aaaactatcttgtccacatcta

SEQ ID NO: 118346 - DNA, 22 bp, Artificial Sequence
  Synthetic oligonucleotide; CTA chr11 5368985 5369006 5368990 5368985 -
tcttgtccacatctagttggct

SEQ ID NO: 118347 - DNA, 22 bp, Artificial Sequence
  Synthetic oligonucleotide; CTT chr11 5368981 5369002 5368986 5368981 -
gtccacatctagttggctgaca

SEQ ID NO: 118348 - DNA, 22 bp, Artificial Sequence
  Synthetic oligonucleotide; TTG chr11 5368980 5369001 5368985 5368980 -
tccacatctagttggctgacac

SEQ ID NO: 118349 - DNA, 22 bp, Artificial Sequence
  Synthetic oligonucleotide; CTA chr11 5368970 5368991 5368975 5368970 -
gttggctgacacacaatttagg

SEQ ID NO: 118350 - DNA, 22 bp, Artificial Sequence
  Synthetic oligonucleotide; TTG chr11 5368966 5368987 5368971 5368966 -
gctgacacacaatttaggcttc

SEQ ID NO: 118351 - DNA, 22 bp, Artificial Sequence
  Synthetic oligonucleotide; CTG chr11 5368962 5368983 5368967 5368962 -
acacacaatttaggcttcttgg

SEQ ID NO: 118352 - DNA, 22 bp, Artificial Sequence
  Synthetic oligonucleotide; TTT chr11 5368951 5368972 5368956 5368951 -
aggcttcttgggtgtaatcaga

SEQ ID NO: 118353 - DNA, 22 bp, Artificial Sequence
  Synthetic oligonucleotide; TTA chr11 5368950 5368971 5368955 5368950 -
ggcttcttgggtgtaatcagat

SEQ ID NO: 118354 - DNA, 22 bp, Artificial Sequence
  Synthetic oligonucleotide; CTT chr11 5368945 5368966 5368950 5368945 -
cttgggtgtaatcagatctgta

SEQ ID NO: 118355 - DNA, 22 bp, Artificial Sequence
  Synthetic oligonucleotide; TTC chr11 5368944 5368965 5368949 5368944 -
ttgggtgtaatcagatctgtaa

SEQ ID NO: 118356 - DNA, 22 bp, Artificial Sequence
  Synthetic oligonucleotide; CTT chr11 5368942 5368963 5368947 5368942 -
gggtgtaatcagatctgtaagc

SEQ ID NO: 118357 - DNA, 22 bp, Artificial Sequence
  Synthetic oligonucleotide; TTG chr11 5368941 5368962 5368946 5368941 -
ggtgtaatcagatctgtaagca

SEQ ID NO: 118358 - DNA, 22 bp, Artificial Sequence
  Synthetic oligonucleotide; CTG chr11 5368925 5368946 5368930 5368925 -
taagcatgatccggaaagaaaa

SEQ ID NO: 118359 - DNA, 22 bp, Artificial Sequence
  Synthetic oligonucleotide; TTC chr11 5368898 5368919 5368903 5368898 -
ctgaacagaggcttccaacatc

SEQ ID NO: 118360 - DNA, 22 bp, Artificial Sequence
  Synthetic oligonucleotide; CTG chr11 5368895 5368916 5368900 5368895 -
aacagaggcttccaacatcctc

SEQ ID NO: 118361 - DNA, 22 bp, Artificial Sequence
  Synthetic oligonucleotide; CTT chr11 5368884 5368905 5368889 5368884 -
ccaacatcctcagaaggaaacc

SEQ ID NO: 118362 - DNA, 22 bp, Artificial Sequence
  Synthetic oligonucleotide; TTC chr11 5368883 5368904 5368888 5368883 -
caacatcctcagaaggaaacct

SEQ ID NO: 118363 - DNA, 22 bp, Artificial Sequence
  Synthetic oligonucleotide; CTC chr11 5368873 5368894 5368878 5368873 -
agaaggaaacctctcttaatcc

SEQ ID NO: 118364 - DNA, 22 bp, Artificial Sequence
  Synthetic oligonucleotide; CTC chr11 5368860 5368881 5368865 5368860 -
tcttaatccacataagaatggt

SEQ ID NO: 118365 - DNA, 22 bp, Artificial Sequence
  Synthetic oligonucleotide; CTC chr11 5368858 5368879 5368863 5368858 -
ttaatccacataagaatggtgt

SEQ ID NO: 118366 - DNA, 22 bp, Artificial Sequence
  Synthetic oligonucleotide; CTT chr11 5368856 5368877 5368861 5368856 -
aatccacataagaatggtgtaa

SEQ ID NO: 118367 - DNA, 22 bp, Artificial Sequence
  Synthetic oligonucleotide; TTA chr11 5368855 5368876 5368860 5368855 -
atccacataagaatggtgtaaa

SEQ ID NO: 118368 - DNA, 22 bp, Artificial Sequence
  Synthetic oligonucleotide; TTC chr11 5368830 5368851 5368835 5368830 -
caacatcttgctcctaagaaca

SEQ ID NO: 118369 - DNA, 22 bp, Artificial Sequence
  Synthetic oligonucleotide; CTT chr11 5368821 5368842 5368826 5368821 -
gctcctaagaacactttgccct

SEQ ID NO: 118370 - DNA, 22 bp, Artificial Sequence
  Synthetic oligonucleotide; TTG chr11 5368820 5368841 5368825 5368820 -
ctcctaagaacactttgccctg

SEQ ID NO: 118371 - DNA, 22 bp, Artificial Sequence
  Synthetic oligonucleotide; CTC chr11 5368817 5368838 5368822 5368817 -
ctaagaacactttgccctgggg

SEQ ID NO: 118372 - DNA, 22 bp, Artificial Sequence
  Synthetic oligonucleotide; CTA chr11 5368814 5368835 5368819 5368814 -
agaacactttgccctgggggaa

SEQ ID NO: 118373 - DNA, 22 bp, Artificial Sequence
  Synthetic oligonucleotide; CTT chr11 5368805 5368826 5368810 5368805 -
tgccctgggggaaaaaaagaaa

SEQ ID NO: 118374 - DNA, 22 bp, Artificial Sequence
  Synthetic oligonucleotide; TTT chr11 5368804 5368825 5368809 5368804 -
gccctgggggaaaaaaagaaaa

SEQ ID NO: 118375 - DNA, 22 bp, Artificial Sequence
  Synthetic oligonucleotide; TTG chr11 5368803 5368824 5368808 5368803 -
ccctgggggaaaaaaagaaaag

SEQ ID NO: 118376 - DNA, 22 bp, Artificial Sequence
  Synthetic oligonucleotide; CTG chr11 5368798 5368819 5368803 5368798 -
ggggaaaaaaagaaaagccatc

SEQ ID NO: 118377 - DNA, 22 bp, Artificial Sequence
  Synthetic oligonucleotide; CTT chr11 5368768 5368789 5368773 5368768 -
tcagaaggcctatgctgaggtt

SEQ ID NO: 118378 - DNA, 22 bp, Artificial Sequence
  Synthetic oligonucleotide; TTT chr11 5368767 5368788 5368772 5368767 -
cagaaggcctatgctgaggttt

SEQ ID NO: 118379 - DNA, 22 bp, Artificial Sequence
  Synthetic oligonucleotide; TTC chr11 5368766 5368787 5368771 5368766 -
agaaggcctatgctgaggtttt

SEQ ID NO: 118380 - DNA, 22 bp, Artificial Sequence
  Synthetic oligonucleotide; CTA chr11 5368756 5368777 5368761 5368756 -
tgctgaggttttgcttccttca

SEQ ID NO: 118381 - DNA, 22 bp, Artificial Sequence
  Synthetic oligonucleotide; CTG chr11 5368751 5368772 5368756 5368751 -
aggttttgcttccttcagtttt

SEQ ID NO: 118382 - DNA, 22 bp, Artificial Sequence
  Synthetic oligonucleotide; TTT chr11 5368745 5368766 5368750 5368745 -
tgcttccttcagttttaaagca

SEQ ID NO: 118383 - DNA, 22 bp, Artificial Sequence
  Synthetic oligonucleotide; TTT chr11 5368744 5368765 5368749 5368744 -
gcttccttcagttttaaagcat

SEQ ID NO: 118384 - DNA, 22 bp, Artificial Sequence
  Synthetic oligonucleotide; TTG chr11 5368743 5368764 5368748 5368743 -
cttccttcagttttaaagcata

SEQ ID NO: 118385 - DNA, 22 bp, Artificial Sequence
  Synthetic oligonucleotide; CTT chr11 5368740 5368761 5368745 5368740 -
ccttcagttttaaagcataata

SEQ ID NO: 118386 - DNA, 22 bp, Artificial Sequence
  Synthetic oligonucleotide; TTC chr11 5368739 5368760 5368744 5368739 -
cttcagttttaaagcataatat

SEQ ID NO: 118387 - DNA, 22 bp, Artificial Sequence
  Synthetic oligonucleotide; CTT chr11 5368736 5368757 5368741 5368736 -
cagttttaaagcataatatttt

SEQ ID NO: 118388 - DNA, 22 bp, Artificial Sequence
  Synthetic oligonucleotide; TTC chr11 5368735 5368756 5368740 5368735 -
agttttaaagcataatattttg

SEQ ID NO: 118389 - DNA, 22 bp, Artificial Sequence
  Synthetic oligonucleotide; TTT chr11 5368730 5368751 5368735 5368730 -
taaagcataatattttgagtaa

SEQ ID NO: 118390 - DNA, 22 bp, Artificial Sequence
  Synthetic oligonucleotide; TTT chr11 5368729 5368750 5368734 5368729 -
aaagcataatattttgagtaac

SEQ ID NO: 118391 - DNA, 22 bp, Artificial Sequence
  Synthetic oligonucleotide; TTA chr11 5368728 5368749 5368733 5368728 -
aagcataatattttgagtaact

SEQ ID NO: 118392 - DNA, 22 bp, Artificial Sequence
  Synthetic oligonucleotide; TTT chr11 5368715 5368736 5368720 5368715 -
tgagtaactcaatgtttagaaa

SEQ ID NO: 118393 - DNA, 22 bp, Artificial Sequence
  Synthetic oligonucleotide; TTT chr11 5368714 5368735 5368719 5368714 -
gagtaactcaatgtttagaaac

SEQ ID NO: 118394 - DNA, 22 bp, Artificial Sequence
  Synthetic oligonucleotide; TTG chr11 5368713 5368734 5368718 5368713 -
agtaactcaatgtttagaaacc

SEQ ID NO: 118395 - DNA, 22 bp, Artificial Sequence
  Synthetic oligonucleotide; CTC chr11 5368705 5368726 5368710 5368705 -
aatgtttagaaacctcaaattt

SEQ ID NO: 118396 - DNA, 22 bp, Artificial Sequence
  Synthetic oligonucleotide; TTT chr11 5368698 5368719 5368703 5368698 -
agaaacctcaaattttgctctt

SEQ ID NO: 118397 - DNA, 22 bp, Artificial Sequence
  Synthetic oligonucleotide; TTA chr11 5368697 5368718 5368702 5368697 -
gaaacctcaaattttgctcttg

SEQ ID NO: 118398 - DNA, 22 bp, Artificial Sequence
  Synthetic oligonucleotide; CTC chr11 5368689 5368710 5368694 5368689 -
aaattttgctcttgacagataa

SEQ ID NO: 118399 - DNA, 22 bp, Artificial Sequence
  Synthetic oligonucleotide; TTT chr11 5368683 5368704 5368688 5368683 -
tgctcttgacagataaaactga

SEQ ID NO: 118400 - DNA, 22 bp, Artificial Sequence
  Synthetic oligonucleotide; TTT chr11 5368682 5368703 5368687 5368682 -
gctcttgacagataaaactgaa

SEQ ID NO: 118401 - DNA, 22 bp, Artificial Sequence
  Synthetic oligonucleotide; TTG chr11 5368681 5368702 5368686 5368681 -
ctcttgacagataaaactgaaa

SEQ ID NO: 118402 - DNA, 22 bp, Artificial Sequence
  Synthetic oligonucleotide; CTC chr11 5368678 5368699 5368683 5368678 -
ttgacagataaaactgaaacct

SEQ ID NO: 118403 - DNA, 22 bp, Artificial Sequence
  Synthetic oligonucleotide; CTT chr11 5368676 5368697 5368681 5368676 -
gacagataaaactgaaacctct

SEQ ID NO: 118404 - DNA, 22 bp, Artificial Sequence
  Synthetic oligonucleotide; TTG chr11 5368675 5368696 5368680 5368675 -
acagataaaactgaaacctcta

SEQ ID NO: 118405 - DNA, 22 bp, Artificial Sequence
  Synthetic oligonucleotide; CTG chr11 5368662 5368683 5368667 5368662 -
aaacctctactatgctctgctt

SEQ ID NO: 118406 - DNA, 22 bp, Artificial Sequence
  Synthetic oligonucleotide; CTC chr11 5368655 5368676 5368660 5368655 -
tactatgctctgctttctcaca

SEQ ID NO: 118407 - DNA, 22 bp, Artificial Sequence
  Synthetic oligonucleotide; CTA chr11 5368653 5368674 5368658 5368653 -
ctatgctctgctttctcacagg

SEQ ID NO: 118408 - DNA, 22 bp, Artificial Sequence
  Synthetic oligonucleotide; CTA chr11 5368650 5368671 5368655 5368650 -
tgctctgctttctcacaggatg

SEQ ID NO: 118409 - DNA, 22 bp, Artificial Sequence
  Synthetic oligonucleotide; CTC chr11 5368645 5368666 5368650 5368645 -
tgctttctcacaggatgcatgt

SEQ ID NO: 118410 - DNA, 22 bp, Artificial Sequence
  Synthetic oligonucleotide; CTG chr11 5368643 5368664 5368648 5368643 -
ctttctcacaggatgcatgtga

SEQ ID NO: 118411 - DNA, 22 bp, Artificial Sequence
  Synthetic oligonucleotide; CTT chr11 5368640 5368661 5368645 5368640 -
tctcacaggatgcatgtgagaa

SEQ ID NO: 118412 - DNA, 22 bp, Artificial Sequence
  Synthetic oligonucleotide; TTT chr11 5368639 5368660 5368644 5368639 -
ctcacaggatgcatgtgagaat

SEQ ID NO: 118413 - DNA, 22 bp, Artificial Sequence
  Synthetic oligonucleotide; TTC chr11 5368638 5368659 5368643 5368638 -
tcacaggatgcatgtgagaata

SEQ ID NO: 118414 - DNA, 22 bp, Artificial Sequence
  Synthetic oligonucleotide; CTC chr11 5368636 5368657 5368641 5368636 -
acaggatgcatgtgagaataaa

SEQ ID NO: 118415 - DNA, 22 bp, Artificial Sequence
  Synthetic oligonucleotide; CTT chr11 5368602 5368623 5368607 5368602 -
tatgttagaatatcttgtgtaa

SEQ ID NO: 118416 - DNA, 22 bp, Artificial Sequence
  Synthetic oligonucleotide; TTT chr11 5368601 5368622 5368606 5368601 -
atgttagaatatcttgtgtaac

SEQ ID NO: 118417 - DNA, 22 bp, Artificial Sequence
  Synthetic oligonucleotide; TTA chr11 5368600 5368621 5368605 5368600 -
tgttagaatatcttgtgtaact

SEQ ID NO: 118418 - DNA, 22 bp, Artificial Sequence
  Synthetic oligonucleotide; TTA chr11 5368595 5368616 5368600 5368595 -
gaatatcttgtgtaacttcaag

SEQ ID NO: 118419 - DNA, 22 bp, Artificial Sequence
  Synthetic oligonucleotide; CTT chr11 5368586 5368607 5368591 5368586 -
gtgtaacttcaagtattacgat

SEQ ID NO: 118420 - DNA, 22 bp, Artificial Sequence
  Synthetic oligonucleotide; TTG chr11 5368585 5368606 5368590 5368585 -
tgtaacttcaagtattacgatt

SEQ ID NO: 118421 - DNA, 22 bp, Artificial Sequence
  Synthetic oligonucleotide; CTT chr11 5368577 5368598 5368582 5368577 -
caagtattacgattgtgagaga

SEQ ID NO: 118422 - DNA, 22 bp, Artificial Sequence
  Synthetic oligonucleotide; TTC chr11 5368576 5368597 5368581 5368576 -
aagtattacgattgtgagagag

SEQ ID NO: 118423 - DNA, 22 bp, Artificial Sequence
  Synthetic oligonucleotide; TTA chr11 5368568 5368589 5368573 5368568 -
cgattgtgagagagctttttaa

SEQ ID NO: 118424 - DNA, 22 bp, Artificial Sequence
  Synthetic oligonucleotide; TTG chr11 5368562 5368583 5368567 5368562 -
tgagagagctttttaaaggttt

SEQ ID NO: 118425 - DNA, 22 bp, Artificial Sequence
  Synthetic oligonucleotide; CTT chr11 5368551 5368572 5368556 5368551 -
tttaaaggtttttattttcttt

SEQ ID NO: 118426 - DNA, 22 bp, Artificial Sequence
  Synthetic oligonucleotide; TTT chr11 5368550 5368571 5368555 5368550 -
ttaaaggtttttattttctttg

SEQ ID NO: 118427 - DNA, 22 bp, Artificial Sequence
  Synthetic oligonucleotide; TTT chr11 5368549 5368570 5368554 5368549 -
taaaggtttttattttctttgt

SEQ ID NO: 118428 - DNA, 22 bp, Artificial Sequence
  Synthetic oligonucleotide; TTT chr11 5368548 5368569 5368553 5368548 -
aaaggtttttattttctttgtc

SEQ ID NO: 118429 - DNA, 22 bp, Artificial Sequence
  Synthetic oligonucleotide; TTA chr11 5368547 5368568 5368552 5368547 -
aaggtttttattttctttgtca

SEQ ID NO: 118430 - DNA, 22 bp, Artificial Sequence
  Synthetic oligonucleotide; TTT chr11 5368540 5368561 5368545 5368540 -
ttattttctttgtcagagctag

SEQ ID NO: 118431 - DNA, 22 bp, Artificial Sequence
  Synthetic oligonucleotide; TTT chr11 5368539 5368560 5368544 5368539 -
tattttctttgtcagagctaga

SEQ ID NO: 118432 - DNA, 22 bp, Artificial Sequence
  Synthetic oligonucleotide; TTT chr11 5368538 5368559 5368543 5368538 -
attttctttgtcagagctagac

SEQ ID NO: 118433 - DNA, 22 bp, Artificial Sequence
  Synthetic oligonucleotide; TTA chr11 5368537 5368558 5368542 5368537 -
ttttctttgtcagagctagaca

SEQ ID NO: 118434 - DNA, 22 bp, Artificial Sequence
  Synthetic oligonucleotide; TTT chr11 5368534 5368555 5368539 5368534 -
tctttgtcagagctagacagag

SEQ ID NO: 118435 - DNA, 22 bp, Artificial Sequence
  Synthetic oligonucleotide; TTT chr11 5368533 5368554 5368538 5368533 -
ctttgtcagagctagacagagt

SEQ ID NO: 118436 - DNA, 22 bp, Artificial Sequence
  Synthetic oligonucleotide; TTC chr11 5368532 5368553 5368537 5368532 -
tttgtcagagctagacagagta

SEQ ID NO: 118437 - DNA, 22 bp, Artificial Sequence
  Synthetic oligonucleotide; CTT chr11 5368530 5368551 5368535 5368530 -
tgtcagagctagacagagtatc

SEQ ID NO: 118438 - DNA, 22 bp, Artificial Sequence
  Synthetic oligonucleotide; TTT chr11 5368529 5368550 5368534 5368529 -
gtcagagctagacagagtatct

SEQ ID NO: 118439 - DNA, 22 bp, Artificial Sequence
  Synthetic oligonucleotide; TTG chr11 5368528 5368549 5368533 5368528 -
tcagagctagacagagtatctt

SEQ ID NO: 118440 - DNA, 22 bp, Artificial Sequence
  Synthetic oligonucleotide; CTA chr11 5368519 5368540 5368524 5368519 -
gacagagtatcttctcagccca

SEQ ID NO: 118441 - DNA, 22 bp, Artificial Sequence
  Synthetic oligonucleotide; CTT chr11 5368506 5368527 5368511 5368506 -
ctcagcccaaaggtcaaattgt

SEQ ID NO: 118442 - DNA, 22 bp, Artificial Sequence
  Synthetic oligonucleotide; TTC chr11 5368505 5368526 5368510 5368505 -
tcagcccaaaggtcaaattgtc

SEQ ID NO: 118443 - DNA, 22 bp, Artificial Sequence
  Synthetic oligonucleotide; CTC chr11 5368503 5368524 5368508 5368503 -
agcccaaaggtcaaattgtctc

SEQ ID NO: 118444 - DNA, 22 bp, Artificial Sequence
  Synthetic oligonucleotide; TTG chr11 5368485 5368506 5368490 5368485 -
tctcattttcacaaaattttca

SEQ ID NO: 118445 - DNA, 22 bp, Artificial Sequence
  Synthetic oligonucleotide; CTC chr11 5368481 5368502 5368486 5368481 -
attttcacaaaattttcaatga

SEQ ID NO: 118446 - DNA, 22 bp, Artificial Sequence
  Synthetic oligonucleotide; TTT chr11 5368477 5368498 5368482 5368477 -
tcacaaaattttcaatgatgat

SEQ ID NO: 118447 - DNA, 22 bp, Artificial Sequence
  Synthetic oligonucleotide; TTT chr11 5368476 5368497 5368481 5368476 -
cacaaaattttcaatgatgatt

SEQ ID NO: 118448 - DNA, 22 bp, Artificial Sequence
  Synthetic oligonucleotide; TTC chr11 5368475 5368496 5368480 5368475 -
acaaaattttcaatgatgatta

SEQ ID NO: 118449 - DNA, 22 bp, Artificial Sequence
  Synthetic oligonucleotide; TTT chr11 5368466 5368487 5368471 5368466 -
tcaatgatgattatagtaataa

SEQ ID NO: 118450 - DNA, 22 bp, Artificial Sequence
  Synthetic oligonucleotide; TTT chr11 5368465 5368486 5368470 5368465 -
caatgatgattatagtaataat

SEQ ID NO: 118451 - DNA, 22 bp, Artificial Sequence
  Synthetic oligonucleotide; TTC chr11 5368464 5368485 5368469 5368464 -
aatgatgattatagtaataata

SEQ ID NO: 118452 - DNA, 22 bp, Artificial Sequence
  Synthetic oligonucleotide; TTA chr11 5368453 5368474 5368458 5368453 -
tagtaataatagcaatgatttc

SEQ ID NO: 118453 - DNA, 22 bp, Artificial Sequence
  Synthetic oligonucleotide; TTT chr11 5368432 5368453 5368437 5368432 -
ctataatacttacaatggacca

SEQ ID NO: 118454 - DNA, 22 bp, Artificial Sequence
  Synthetic oligonucleotide; TTC chr11 5368431 5368452 5368436 5368431 -
tataatacttacaatggaccag

SEQ ID NO: 118455 - DNA, 22 bp, Artificial Sequence
  Synthetic oligonucleotide; CTA chr11 5368429 5368450 5368434 5368429 -
taatacttacaatggaccaggc

SEQ ID NO: 118456 - DNA, 22 bp, Artificial Sequence
  Synthetic oligonucleotide; CTT chr11 5368421 5368442 5368426 5368421 -
acaatggaccaggcactattga

SEQ ID NO: 118457 - DNA, 22 bp, Artificial Sequence
  Synthetic oligonucleotide; TTA chr11 5368420 5368441 5368425 5368420 -
caatggaccaggcactattgaa

SEQ ID NO: 118458 - DNA, 22 bp, Artificial Sequence
  Synthetic oligonucleotide; CTA chr11 5368403 5368424 5368408 5368403 -
ttgaacacgttagacatattaa

SEQ ID NO: 118459 - DNA, 22 bp, Artificial Sequence
  Synthetic oligonucleotide; TTG chr11 5368400 5368421 5368405 5368400 -
aacacgttagacatattaatgt

SEQ ID NO: 118460 - DNA, 22 bp, Artificial Sequence
  Synthetic oligonucleotide; TTA chr11 5368391 5368412 5368396 5368391 -
gacatattaatgtatttaatca

SEQ ID NO: 118461 - DNA, 22 bp, Artificial Sequence
  Synthetic oligonucleotide; TTA chr11 5368382 5368403 5368387 5368382 -
atgtatttaatcattaaaataa

SEQ ID NO: 118462 - DNA, 22 bp, Artificial Sequence
  Synthetic oligonucleotide; TTT chr11 5368374 5368395 5368379 5368374 -
aatcattaaaataattcaacca

SEQ ID NO: 118463 - DNA, 22 bp, Artificial Sequence
  Synthetic oligonucleotide; TTA chr11 5368373 5368394 5368378 5368373 -
atcattaaaataattcaaccat

SEQ ID NO: 118464 - DNA, 22 bp, Artificial Sequence
  Synthetic oligonucleotide; TTA chr11 5368366 5368387 5368371 5368366 -
aaataattcaaccatgtgggta

SEQ ID NO: 118465 - DNA, 22 bp, Artificial Sequence
  Synthetic oligonucleotide; TTC chr11 5368357 5368378 5368362 5368357 -
aaccatgtgggtactattggta

SEQ ID NO: 118466 - DNA, 22 bp, Artificial Sequence
  Synthetic oligonucleotide; CTA chr11 5368341 5368362 5368346 5368341 -
ttggtatccccacttaaagatg

SEQ ID NO: 118467 - DNA, 22 bp, Artificial Sequence
  Synthetic oligonucleotide; TTG chr11 5368338 5368359 5368343 5368338 -
gtatccccacttaaagatgagt

SEQ ID NO: 118468 - DNA, 22 bp, Artificial Sequence
  Synthetic oligonucleotide; CTT chr11 5368326 5368347 5368331 5368326 -
aaagatgagtggaccaaaacac

SEQ ID NO: 118469 - DNA, 22 bp, Artificial Sequence
  Synthetic oligonucleotide; TTA chr11 5368325 5368346 5368330 5368325 -
aagatgagtggaccaaaacaca

SEQ ID NO: 118470 - DNA, 22 bp, Artificial Sequence
  Synthetic oligonucleotide; TTG chr11 5368290 5368311 5368295 5368290 -
ctttgctatagggtacgcagcc

SEQ ID NO: 118471 - DNA, 22 bp, Artificial Sequence
  Synthetic oligonucleotide; CTT chr11 5368287 5368308 5368292 5368287 -
tgctatagggtacgcagccaat

SEQ ID NO: 118472 - DNA, 22 bp, Artificial Sequence
  Synthetic oligonucleotide; TTT chr11 5368286 5368307 5368291 5368286 -
gctatagggtacgcagccaata

SEQ ID NO: 118473 - DNA, 22 bp, Artificial Sequence
  Synthetic oligonucleotide; TTG chr11 5368285 5368306 5368290 5368285 -
ctatagggtacgcagccaataa

SEQ ID NO: 118474 - DNA, 22 bp, Artificial Sequence
  Synthetic oligonucleotide; CTA chr11 5368282 5368303 5368287 5368282 -
tagggtacgcagccaataagtg

SEQ ID NO: 118475 - DNA, 22 bp, Artificial Sequence
  Synthetic oligonucleotide; TTG chr11 5368247 5368268 5368252 5368247 -
taaaccaaactgtttaattccc

SEQ ID NO: 118476 - DNA, 22 bp, Artificial Sequence
  Synthetic oligonucleotide; CTG chr11 5368235 5368256 5368240 5368235 -
tttaattcccaaaactactgca

SEQ ID NO: 118477 - DNA, 22 bp, Artificial Sequence
  Synthetic oligonucleotide; TTT chr11 5368232 5368253 5368237 5368232 -
aattcccaaaactactgcataa

SEQ ID NO: 118478 - DNA, 22 bp, Artificial Sequence
  Synthetic oligonucleotide; TTA chr11 5368231 5368252 5368236 5368231 -
attcccaaaactactgcataag

SEQ ID NO: 118479 - DNA, 22 bp, Artificial Sequence
  Synthetic oligonucleotide; TTC chr11 5368227 5368248 5368232 5368227 -
ccaaaactactgcataagactg

SEQ ID NO: 118480 - DNA, 22 bp, Artificial Sequence
  Synthetic oligonucleotide; CTA chr11 5368218 5368239 5368223 5368218 -
ctgcataagactgtatgaagaa

SEQ ID NO: 118481 - DNA, 22 bp, Artificial Sequence
  Synthetic oligonucleotide; CTG chr11 5368215 5368236 5368220 5368215 -
cataagactgtatgaagaagca

SEQ ID NO: 118482 - DNA, 22 bp, Artificial Sequence
  Synthetic oligonucleotide; CTG chr11 5368205 5368226 5368210 5368205 -
tatgaagaagcatgaaacaata

SEQ ID NO: 118483 - DNA, 22 bp, Artificial Sequence
  Synthetic oligonucleotide; TTT chr11 5368178 5368199 5368183 5368178 -
caagaagcctacagaacactta

SEQ ID NO: 118484 - DNA, 22 bp, Artificial Sequence
  Synthetic oligonucleotide; TTC chr11 5368177 5368198 5368182 5368177 -
aagaagcctacagaacacttaa

SEQ ID NO: 118485 - DNA, 22 bp, Artificial Sequence
  Synthetic oligonucleotide; CTA chr11 5368167 5368188 5368172 5368167 -
cagaacacttaacaggattttt

SEQ ID NO: 118486 - DNA, 22 bp, Artificial Sequence
  Synthetic oligonucleotide; CTT chr11 5368157 5368178 5368162 5368157 -
aacaggatttttcatgctggtt

SEQ ID NO: 118487 - DNA, 22 bp, Artificial Sequence
  Synthetic oligonucleotide; TTA chr11 5368156 5368177 5368161 5368156 -
acaggatttttcatgctggttc

SEQ ID NO: 118488 - DNA, 22 bp, Artificial Sequence
  Synthetic oligonucleotide; TTT chr11 5368147 5368168 5368152 5368147 -
ttcatgctggttcatagttaag

SEQ ID NO: 118489 - DNA, 22 bp, Artificial Sequence
  Synthetic oligonucleotide; TTT chr11 5368146 5368167 5368151 5368146 -
tcatgctggttcatagttaagt

SEQ ID NO: 118490 - DNA, 22 bp, Artificial Sequence
  Synthetic oligonucleotide; TTT chr11 5368145 5368166 5368150 5368145 -
catgctggttcatagttaagtt

SEQ ID NO: 118491 - DNA, 22 bp, Artificial Sequence
  Synthetic oligonucleotide; TTC chr11 5368144 5368165 5368149 5368144 -
atgctggttcatagttaagtta

SEQ ID NO: 118492 - DNA, 22 bp, Artificial Sequence
  Synthetic oligonucleotide; CTG chr11 5368138 5368159 5368143 5368138 -
gttcatagttaagttattggtt

SEQ ID NO: 118493 - DNA, 22 bp, Artificial Sequence
  Synthetic oligonucleotide; TTC chr11 5368134 5368155 5368139 5368134 -
atagttaagttattggttgaag

SEQ ID NO: 118494 - DNA, 22 bp, Artificial Sequence
  Synthetic oligonucleotide; TTA chr11 5368127 5368148 5368132 5368127 -
agttattggttgaagatgcaac

SEQ ID NO: 118495 - DNA, 22 bp, Artificial Sequence
  Synthetic oligonucleotide; TTA chr11 5368122 5368143 5368127 5368122 -
ttggttgaagatgcaacaaatc

SEQ ID NO: 118496 - DNA, 22 bp, Artificial Sequence
  Synthetic oligonucleotide; TTG chr11 5368119 5368140 5368124 5368119 -
gttgaagatgcaacaaatctga

SEQ ID NO: 118497 - DNA, 22 bp, Artificial Sequence
  Synthetic oligonucleotide; TTG chr11 5368115 5368136 5368120 5368115 -
aagatgcaacaaatctgaatgg

SEQ ID NO: 118498 - DNA, 22 bp, Artificial Sequence
  Synthetic oligonucleotide; CTG chr11 5368098 5368119 5368103 5368098 -
aatggcagaggaaaaaacaaag

SEQ ID NO: 118499 - DNA, 22 bp, Artificial Sequence
  Synthetic oligonucleotide; TTC chr11 5368065 5368086 5368070 5368065 -
tgagtgagcctgggtctccata

SEQ ID NO: 118500 - DNA, 22 bp, Artificial Sequence
  Synthetic oligonucleotide; CTG chr11 5368063 5368084 5368068 5368063 -
agtgagcctgggtctccatagg

SEQ ID NO: 118501 - DNA, 22 bp, Artificial Sequence
  Synthetic oligonucleotide; CTG chr11 5368053 5368074 5368058 5368053 -
ggtctccataggagcaaagaac

SEQ ID NO: 118502 - DNA, 22 bp, Artificial Sequence
  Synthetic oligonucleotide; CTC chr11 5368047 5368068 5368052 5368047 -
cataggagcaaagaaccaagtg

SEQ ID NO: 118503 - DNA, 22 bp, Artificial Sequence
  Synthetic oligonucleotide; CTT chr11 5368019 5368040 5368024 5368019 -
gggttagttgtggggtgtaaga

SEQ ID NO: 118504 - DNA, 22 bp, Artificial Sequence
  Synthetic oligonucleotide; TTG chr11 5368018 5368039 5368023 5368018 -
ggttagttgtggggtgtaagat

SEQ ID NO: 118505 - DNA, 22 bp, Artificial Sequence
  Synthetic oligonucleotide; TTA chr11 5368013 5368034 5368018 5368013 -
gttgtggggtgtaagatataat

SEQ ID NO: 118506 - DNA, 22 bp, Artificial Sequence
  Synthetic oligonucleotide; TTG chr11 5368009 5368030 5368014 5368009 -
tggggtgtaagatataattaga

SEQ ID NO: 118507 - DNA, 22 bp, Artificial Sequence
  Synthetic oligonucleotide; TTA chr11 5367989 5368010 5367994 5367989 -
gaagagaagtagctctactctg

SEQ ID NO: 118508 - DNA, 22 bp, Artificial Sequence
  Synthetic oligonucleotide; CTC chr11 5367974 5367995 5367979 5367974 -
tactctggtagaagtgaaactt

SEQ ID NO: 118509 - DNA, 22 bp, Artificial Sequence
  Synthetic oligonucleotide; CTA chr11 5367972 5367993 5367977 5367972 -
ctctggtagaagtgaaactttg

SEQ ID NO: 118510 - DNA, 22 bp, Artificial Sequence
  Synthetic oligonucleotide; CTC chr11 5367969 5367990 5367974 5367969 -
tggtagaagtgaaactttgaag

SEQ ID NO: 118511 - DNA, 22 bp, Artificial Sequence
  Synthetic oligonucleotide; CTG chr11 5367967 5367988 5367972 5367967 -
gtagaagtgaaactttgaagaa

SEQ ID NO: 118512 - DNA, 22 bp, Artificial Sequence
  Synthetic oligonucleotide; CTT chr11 5367952 5367973 5367957 5367952 -
tgaagaatgtctgattcctcac

SEQ ID NO: 118513 - DNA, 22 bp, Artificial Sequence
  Synthetic oligonucleotide; TTT chr11 5367951 5367972 5367956 5367951 -
gaagaatgtctgattcctcaca

SEQ ID NO: 118514 - DNA, 22 bp, Artificial Sequence
  Synthetic oligonucleotide; TTG chr11 5367950 5367971 5367955 5367950 -
aagaatgtctgattcctcacaa

SEQ ID NO: 118515 - DNA, 22 bp, Artificial Sequence
  Synthetic oligonucleotide; CTG chr11 5367939 5367960 5367944 5367939 -
attcctcacaaactgctgagta

SEQ ID NO: 118516 - DNA, 22 bp, Artificial Sequence
  Synthetic oligonucleotide; TTC chr11 5367935 5367956 5367940 5367935 -
ctcacaaactgctgagtaagga

SEQ ID NO: 118517 - DNA, 22 bp, Artificial Sequence
  Synthetic oligonucleotide; CTC chr11 5367932 5367953 5367937 5367932 -
acaaactgctgagtaaggatag

SEQ ID NO: 118518 - DNA, 22 bp, Artificial Sequence
  Synthetic oligonucleotide; CTG chr11 5367924 5367945 5367929 5367924 -
ctgagtaaggataggaaaatgc

SEQ ID NO: 118519 - DNA, 22 bp, Artificial Sequence
  Synthetic oligonucleotide; CTG chr11 5367921 5367942 5367926 5367921 -
agtaaggataggaaaatgcata

SEQ ID NO: 118520 - DNA, 22 bp, Artificial Sequence
  Synthetic oligonucleotide; CTT chr11 5367894 5367915 5367899 5367894 -
ggtcaagatttaagcatgagga

SEQ ID NO: 118521 - DNA, 22 bp, Artificial Sequence
  Synthetic oligonucleotide; TTG chr11 5367893 5367914 5367898 5367893 -
gtcaagatttaagcatgaggac

SEQ ID NO: 118522 - DNA, 22 bp, Artificial Sequence
  Synthetic oligonucleotide; TTT chr11 5367883 5367904 5367888 5367883 -
aagcatgaggacataaaaatag

SEQ ID NO: 118523 - DNA, 22 bp, Artificial Sequence
  Synthetic oligonucleotide; TTA chr11 5367882 5367903 5367887 5367882 -
agcatgaggacataaaaataga

SEQ ID NO: 118524 - DNA, 22 bp, Artificial Sequence
  Synthetic oligonucleotide; TTT chr11 5367824 5367845 5367829 5367824 -
ttgaatgcatatattgtgcaag

SEQ ID NO: 118525 - DNA, 22 bp, Artificial Sequence
  Synthetic oligonucleotide; TTT chr11 5367823 5367844 5367828 5367823 -
tgaatgcatatattgtgcaagt

SEQ ID NO: 118526 - DNA, 22 bp, Artificial Sequence
  Synthetic oligonucleotide; TTT chr11 5367822 5367843 5367827 5367822 -
gaatgcatatattgtgcaagtg

SEQ ID NO: 118527 - DNA, 22 bp, Artificial Sequence
  Synthetic oligonucleotide; TTG chr11 5367821 5367842 5367826 5367821 -
aatgcatatattgtgcaagtgc

SEQ ID NO: 118528 - DNA, 22 bp, Artificial Sequence
  Synthetic oligonucleotide; TTG chr11 5367808 5367829 5367813 5367808 -
tgcaagtgcctctattctgggt

SEQ ID NO: 118529 - DNA, 22 bp, Artificial Sequence
  Synthetic oligonucleotide; CTC chr11 5367796 5367817 5367801 5367796 -
tattctgggtgctagcatacca

SEQ ID NO: 118530 - DNA, 22 bp, Artificial Sequence
  Synthetic oligonucleotide; CTA chr11 5367794 5367815 5367799 5367794 -
ttctgggtgctagcataccaga

SEQ ID NO: 118531 - DNA, 22 bp, Artificial Sequence
  Synthetic oligonucleotide; TTC chr11 5367791 5367812 5367796 5367791 -
tgggtgctagcataccagaaac

SEQ ID NO: 118532 - DNA, 22 bp, Artificial Sequence
  Synthetic oligonucleotide; CTG chr11 5367789 5367810 5367794 5367789 -
ggtgctagcataccagaaacaa

SEQ ID NO: 118533 - DNA, 22 bp, Artificial Sequence
  Synthetic oligonucleotide; CTA chr11 5367782 5367803 5367787 5367782 -
gcataccagaaacaacattttt

SEQ ID NO: 118534 - DNA, 22 bp, Artificial Sequence
  Synthetic oligonucleotide; TTT chr11 5367762 5367783 5367767 5367762 -
ttgttccttttgtcagaggcat

SEQ ID NO: 118535 - DNA, 22 bp, Artificial Sequence
  Synthetic oligonucleotide; TTT chr11 5367761 5367782 5367766 5367761 -
tgttccttttgtcagaggcatt

SEQ ID NO: 118536 - DNA, 22 bp, Artificial Sequence
  Synthetic oligonucleotide; TTT chr11 5367760 5367781 5367765 5367760 -
gttccttttgtcagaggcattt

SEQ ID NO: 118537 - DNA, 22 bp, Artificial Sequence
  Synthetic oligonucleotide; TTG chr11 5367759 5367780 5367764 5367759 -
ttccttttgtcagaggcatttg

SEQ ID NO: 118538 - DNA, 22 bp, Artificial Sequence
  Synthetic oligonucleotide; TTC chr11 5367756 5367777 5367761 5367756 -
cttttgtcagaggcatttgaac

SEQ ID NO: 118539 - DNA, 22 bp, Artificial Sequence
  Synthetic oligonucleotide; CTT chr11 5367753 5367774 5367758 5367753 -
ttgtcagaggcatttgaaccag

SEQ ID NO: 118540 - DNA, 22 bp, Artificial Sequence
  Synthetic oligonucleotide; TTT chr11 5367752 5367773 5367757 5367752 -
tgtcagaggcatttgaaccaga

SEQ ID NO: 118541 - DNA, 22 bp, Artificial Sequence
  Synthetic oligonucleotide; TTT chr11 5367751 5367772 5367756 5367751 -
gtcagaggcatttgaaccagag

SEQ ID NO: 118542 - DNA, 22 bp, Artificial Sequence
  Synthetic oligonucleotide; TTG chr11 5367750 5367771 5367755 5367750 -
tcagaggcatttgaaccagagc

SEQ ID NO: 118543 - DNA, 22 bp, Artificial Sequence
  Synthetic oligonucleotide; TTT chr11 5367738 5367759 5367743 5367738 -
gaaccagagcaactccatctta

SEQ ID NO: 118544 - DNA, 22 bp, Artificial Sequence
  Synthetic oligonucleotide; TTG chr11 5367737 5367758 5367742 5367737 -
aaccagagcaactccatcttaa

SEQ ID NO: 118545 - DNA, 22 bp, Artificial Sequence
  Synthetic oligonucleotide; CTC chr11 5367723 5367744 5367728 5367723 -
catcttaaataggagctgggta

SEQ ID NO: 118546 - DNA, 22 bp, Artificial Sequence
  Synthetic oligonucleotide; CTT chr11 5367717 5367738 5367722 5367717 -
aaataggagctgggtacaataa

SEQ ID NO: 118547 - DNA, 22 bp, Artificial Sequence
  Synthetic oligonucleotide; TTA chr11 5367716 5367737 5367721 5367716 -
aataggagctgggtacaataag

SEQ ID NO: 118548 - DNA, 22 bp, Artificial Sequence
  Synthetic oligonucleotide; CTG chr11 5367705 5367726 5367710 5367705 -
ggtacaataaggctgagaccta

SEQ ID NO: 118549 - DNA, 22 bp, Artificial Sequence
  Synthetic oligonucleotide; CTG chr11 5367690 5367711 5367695 5367690 -
agacctactgggctgtattccc

SEQ ID NO: 118550 - DNA, 22 bp, Artificial Sequence
  Synthetic oligonucleotide; CTA chr11 5367683 5367704 5367688 5367683 -
ctgggctgtattcccagaaagt

SEQ ID NO: 118551 - DNA, 22 bp, Artificial Sequence
  Synthetic oligonucleotide; CTG chr11 5367680 5367701 5367685 5367680 -
ggctgtattcccagaaagttag

SEQ ID NO: 118552 - DNA, 22 bp, Artificial Sequence
  Synthetic oligonucleotide; CTG chr11 5367675 5367696 5367680 5367675 -
tattcccagaaagttaggcatt

SEQ ID NO: 118553 - DNA, 22 bp, Artificial Sequence
  Synthetic oligonucleotide; TTC chr11 5367670 5367691 5367675 5367670 -
ccagaaagttaggcattctcag

SEQ ID NO: 118554 - DNA, 22 bp, Artificial Sequence
  Synthetic oligonucleotide; TTA chr11 5367659 5367680 5367664 5367659 -
ggcattctcagtcacaggatga

SEQ ID NO: 118555 - DNA, 22 bp, Artificial Sequence
  Synthetic oligonucleotide; TTC chr11 5367652 5367673 5367657 5367652 -
tcagtcacaggatgagataaga

SEQ ID NO: 118556 - DNA, 22 bp, Artificial Sequence
  Synthetic oligonucleotide; CTC chr11 5367650 5367671 5367655 5367650 -
agtcacaggatgagataagagg

SEQ ID NO: 118557 - DNA, 22 bp, Artificial Sequence
  Synthetic oligonucleotide; TTG chr11 5367625 5367646 5367630 5367625 -
gcacaagatacaggtcataaag

SEQ ID NO: 118558 - DNA, 22 bp, Artificial Sequence
  Synthetic oligonucleotide; CTT chr11 5367598 5367619 5367603 5367598 -
gctgaaaaaacagtttgcagta

SEQ ID NO: 118559 - DNA, 22 bp, Artificial Sequence
  Synthetic oligonucleotide; TTG chr11 5367597 5367618 5367602 5367597 -
ctgaaaaaacagtttgcagtaa

SEQ ID NO: 118560 - DNA, 22 bp, Artificial Sequence
  Synthetic oligonucleotide; CTG chr11 5367594 5367615 5367599 5367594 -
aaaaaacagtttgcagtaaaga

SEQ ID NO: 118561 - DNA, 22 bp, Artificial Sequence
  Synthetic oligonucleotide; TTT chr11 5367582 5367603 5367587 5367582 -
gcagtaaagaagctggctgaaa

SEQ ID NO: 118562 - DNA, 22 bp, Artificial Sequence
  Synthetic oligonucleotide; TTG chr11 5367581 5367602 5367586 5367581 -
cagtaaagaagctggctgaaac

SEQ ID NO: 118563 - DNA, 22 bp, Artificial Sequence
  Synthetic oligonucleotide; CTG chr11 5367567 5367588 5367572 5367567 -
gctgaaacccaccaaaccaaga

SEQ ID NO: 118564 - DNA, 22 bp, Artificial Sequence
  Synthetic oligonucleotide; CTG chr11 5367563 5367584 5367568 5367563 -
aaacccaccaaaccaagattgt

SEQ ID NO: 118565 - DNA, 22 bp, Artificial Sequence
  Synthetic oligonucleotide; TTG chr11 5367542 5367563 5367547 5367542 -
tgatgagagtgacctctggtag

SEQ ID NO: 118566 - DNA, 22 bp, Artificial Sequence
  Synthetic oligonucleotide; CTC chr11 5367526 5367547 5367531 5367526 -
tggtagtcctcactgctactct

SEQ ID NO: 118567 - DNA, 22 bp, Artificial Sequence
  Synthetic oligonucleotide; CTG chr11 5367524 5367545 5367529 5367524 -
gtagtcctcactgctactctcc

SEQ ID NO: 118568 - DNA, 22 bp, Artificial Sequence
  Synthetic oligonucleotide; CTC chr11 5367515 5367536 5367520 5367515 -
actgctactctcccaccagcac

SEQ ID NO: 118569 - DNA, 22 bp, Artificial Sequence
  Synthetic oligonucleotide; CTG chr11 5367511 5367532 5367516 5367511 -
ctactctcccaccagcactatg

SEQ ID NO: 118570 - DNA, 22 bp, Artificial Sequence
  Synthetic oligonucleotide; CTA chr11 5367508 5367529 5367513 5367508 -
ctctcccaccagcactatgact

SEQ ID NO: 118571 - DNA, 22 bp, Artificial Sequence
  Synthetic oligonucleotide; CTC chr11 5367505 5367526 5367510 5367505 -
tcccaccagcactatgactgtt

SEQ ID NO: 118572 - DNA, 22 bp, Artificial Sequence
  Synthetic oligonucleotide; CTC chr11 5367503 5367524 5367508 5367503 -
ccaccagcactatgactgttta

SEQ ID NO: 118573 - DNA, 22 bp, Artificial Sequence
  Synthetic oligonucleotide; CTA chr11 5367491 5367512 5367496 5367491 -
tgactgtttagaaatgccatgg

SEQ ID NO: 118574 - DNA, 22 bp, Artificial Sequence
  Synthetic oligonucleotide; CTG chr11 5367485 5367506 5367490 5367485 -
tttagaaatgccatggcaacat

SEQ ID NO: 118575 - DNA, 22 bp, Artificial Sequence
  Synthetic oligonucleotide; TTT chr11 5367482 5367503 5367487 5367482 -
agaaatgccatggcaacatcag

SEQ ID NO: 118576 - DNA, 22 bp, Artificial Sequence
  Synthetic oligonucleotide; TTA chr11 5367481 5367502 5367486 5367481 -
gaaatgccatggcaacatcagg

SEQ ID NO: 118577 - DNA, 22 bp, Artificial Sequence
  Synthetic oligonucleotide; TTA chr11 5367453 5367474 5367458 5367453 -
cgctaagcggtctgaaaagggg

SEQ ID NO: 118578 - DNA, 22 bp, Artificial Sequence
  Synthetic oligonucleotide; CTA chr11 5367448 5367469 5367453 5367448 -
agcggtctgaaaaggggaggca

SEQ ID NO: 118579 - DNA, 22 bp, Artificial Sequence
  Synthetic oligonucleotide; CTG chr11 5367439 5367460 5367444 5367439 -
aaaaggggaggcatgaataatc

SEQ ID NO: 118580 - DNA, 22 bp, Artificial Sequence
  Synthetic oligonucleotide; CTT chr11 5367409 5367430 5367414 5367409 -
gtttagcatatcatcaataaat

SEQ ID NO: 118581 - DNA, 22 bp, Artificial Sequence
  Synthetic oligonucleotide; TTG chr11 5367408 5367429 5367413 5367408 -
tttagcatatcatcaataaata

SEQ ID NO: 118582 - DNA, 22 bp, Artificial Sequence
  Synthetic oligonucleotide; TTT chr11 5367405 5367426 5367410 5367405 -
agcatatcatcaataaataacc

SEQ ID NO: 118583 - DNA, 22 bp, Artificial Sequence
  Synthetic oligonucleotide; TTA chr11 5367404 5367425 5367409 5367404 -
gcatatcatcaataaataacca

SEQ ID NO: 118584 - DNA, 22 bp, Artificial Sequence
  Synthetic oligonucleotide; CTC chr11 5367357 5367378 5367362 5367357 -
aggactgttctgcctatagggt

SEQ ID NO: 118585 - DNA, 22 bp, Artificial Sequence
  Synthetic oligonucleotide; CTG chr11 5367350 5367371 5367355 5367350 -
ttctgcctatagggtagccatt

SEQ ID NO: 118586 - DNA, 22 bp, Artificial Sequence
  Synthetic oligonucleotide; TTC chr11 5367347 5367368 5367352 5367347 -
tgcctatagggtagccattatt

SEQ ID NO: 118587 - DNA, 22 bp, Artificial Sequence
  Synthetic oligonucleotide; CTG chr11 5367345 5367366 5367350 5367345 -
cctatagggtagccattatttt

SEQ ID NO: 118588 - DNA, 22 bp, Artificial Sequence
  Synthetic oligonucleotide; CTA chr11 5367341 5367362 5367346 5367341 -
tagggtagccattattttactc

SEQ ID NO: 118589 - DNA, 22 bp, Artificial Sequence
  Synthetic oligonucleotide; TTA chr11 5367327 5367348 5367332 5367327 -
ttttactcctttactttcttaa

SEQ ID NO: 118590 - DNA, 22 bp, Artificial Sequence
  Synthetic oligonucleotide; TTT chr11 5367324 5367345 5367329 5367324 -
tactcctttactttcttaatta

SEQ ID NO: 118591 - DNA, 22 bp, Artificial Sequence
  Synthetic oligonucleotide; TTT chr11 5367323 5367344 5367328 5367323 -
actcctttactttcttaattaa

SEQ ID NO: 118592 - DNA, 22 bp, Artificial Sequence
  Synthetic oligonucleotide; TTA chr11 5367322 5367343 5367327 5367322 -
ctcctttactttcttaattaac

SEQ ID NO: 118593 - DNA, 22 bp, Artificial Sequence
  Synthetic oligonucleotide; CTC chr11 5367319 5367340 5367324 5367319 -
ctttactttcttaattaacttg

SEQ ID NO: 118594 - DNA, 22 bp, Artificial Sequence
  Synthetic oligonucleotide; CTT chr11 5367316 5367337 5367321 5367316 -
tactttcttaattaacttgctt

SEQ ID NO: 118595 - DNA, 22 bp, Artificial Sequence
  Synthetic oligonucleotide; TTT chr11 5367315 5367336 5367320 5367315 -
actttcttaattaacttgcttt

SEQ ID NO: 118596 - DNA, 22 bp, Artificial Sequence
  Synthetic oligonucleotide; TTA chr11 5367314 5367335 5367319 5367314 -
ctttcttaattaacttgctttc

SEQ ID NO: 118597 - DNA, 22 bp, Artificial Sequence
  Synthetic oligonucleotide; CTT chr11 5367311 5367332 5367316 5367311 -
tcttaattaacttgctttcact

SEQ ID NO: 118598 - DNA, 22 bp, Artificial Sequence
  Synthetic oligonucleotide; TTT chr11 5367310 5367331 5367315 5367310 -
cttaattaacttgctttcactt

SEQ ID NO: 118599 - DNA, 22 bp, Artificial Sequence
  Synthetic oligonucleotide; TTC chr11 5367309 5367330 5367314 5367309 -
ttaattaacttgctttcacttt

SEQ ID NO: 118600 - DNA, 22 bp, Artificial Sequence
  Synthetic oligonucleotide; CTT chr11 5367307 5367328 5367312 5367307 -
aattaacttgctttcacttttc

SEQ ID NO: 118601 - DNA, 22 bp, Artificial Sequence
  Synthetic oligonucleotide; TTA chr11 5367306 5367327 5367311 5367306 -
attaacttgctttcacttttct

SEQ ID NO: 118602 - DNA, 22 bp, Artificial Sequence
  Synthetic oligonucleotide; TTA chr11 5367302 5367323 5367307 5367302 -
acttgctttcacttttctgtat

SEQ ID NO: 118603 - DNA, 22 bp, Artificial Sequence
  Synthetic oligonucleotide; CTT chr11 5367298 5367319 5367303 5367298 -
gctttcacttttctgtatggat

SEQ ID NO: 118604 - DNA, 22 bp, Artificial Sequence
  Synthetic oligonucleotide; TTG chr11 5367297 5367318 5367302 5367297 -
ctttcacttttctgtatggatt

SEQ ID NO: 118605 - DNA, 22 bp, Artificial Sequence
  Synthetic oligonucleotide; CTT chr11 5367294 5367315 5367299 5367294 -
tcacttttctgtatggatttgc

SEQ ID NO: 118606 - DNA, 22 bp, Artificial Sequence
  Synthetic oligonucleotide; TTT chr11 5367293 5367314 5367298 5367293 -
cacttttctgtatggatttgcc

SEQ ID NO: 118607 - DNA, 22 bp, Artificial Sequence
  Synthetic oligonucleotide; TTC chr11 5367292 5367313 5367297 5367292 -
acttttctgtatggatttgccc

SEQ ID NO: 118608 - DNA, 22 bp, Artificial Sequence
  Synthetic oligonucleotide; CTT chr11 5367288 5367309 5367293 5367288 -
ttctgtatggatttgccccaaa

SEQ ID NO: 118609 - DNA, 22 bp, Artificial Sequence
  Synthetic oligonucleotide; TTT chr11 5367287 5367308 5367292 5367287 -
tctgtatggatttgccccaaat

SEQ ID NO: 118610 - DNA, 22 bp, Artificial Sequence
  Synthetic oligonucleotide; TTT chr11 5367286 5367307 5367291 5367286 -
ctgtatggatttgccccaaatt

SEQ ID NO: 118611 - DNA, 22 bp, Artificial Sequence
  Synthetic oligonucleotide; TTC chr11 5367285 5367306 5367290 5367285 -
tgtatggatttgccccaaattc

SEQ ID NO: 118612 - DNA, 22 bp, Artificial Sequence
  Synthetic oligonucleotide; CTG chr11 5367283 5367304 5367288 5367283 -
tatggatttgccccaaattctt

SEQ ID NO: 118613 - DNA, 22 bp, Artificial Sequence
  Synthetic oligonucleotide; TTT chr11 5367274 5367295 5367279 5367274 -
gccccaaattctttcttgggca

SEQ ID NO: 118614 - DNA, 22 bp, Artificial Sequence
  Synthetic oligonucleotide; TTG chr11 5367273 5367294 5367278 5367273 -
ccccaaattctttcttgggcac

SEQ ID NO: 118615 - DNA, 22 bp, Artificial Sequence
  Synthetic oligonucleotide; TTC chr11 5367263 5367284 5367268 5367263 -
tttcttgggcacgaaatccaag

SEQ ID NO: 118616 - DNA, 22 bp, Artificial Sequence
  Synthetic oligonucleotide; CTT chr11 5367261 5367282 5367266 5367261 -
tcttgggcacgaaatccaagaa

SEQ ID NO: 118617 - DNA, 22 bp, Artificial Sequence
  Synthetic oligonucleotide; TTT chr11 5367260 5367281 5367265 5367260 -
cttgggcacgaaatccaagaac

SEQ ID NO: 118618 - DNA, 22 bp, Artificial Sequence
  Synthetic oligonucleotide; TTC chr11 5367259 5367280 5367264 5367259 -
ttgggcacgaaatccaagaacc

SEQ ID NO: 118619 - DNA, 22 bp, Artificial Sequence
  Synthetic oligonucleotide; CTT chr11 5367257 5367278 5367262 5367257 -
gggcacgaaatccaagaaccct

SEQ ID NO: 118620 - DNA, 22 bp, Artificial Sequence
  Synthetic oligonucleotide; TTG chr11 5367256 5367277 5367261 5367256 -
ggcacgaaatccaagaaccctc

SEQ ID NO: 118621 - DNA, 22 bp, Artificial Sequence
  Synthetic oligonucleotide; CTC chr11 5367234 5367255 5367239 5367234 -
tcttagggtctggattgtgact

SEQ ID NO: 118622 - DNA, 22 bp, Artificial Sequence
  Synthetic oligonucleotide; CTC chr11 5367232 5367253 5367237 5367232 -
ttagggtctggattgtgactcc

SEQ ID NO: 118623 - DNA, 22 bp, Artificial Sequence
  Synthetic oligonucleotide; CTT chr11 5367230 5367251 5367235 5367230 -
agggtctggattgtgactcctt

SEQ ID NO: 118624 - DNA, 22 bp, Artificial Sequence
  Synthetic oligonucleotide; TTA chr11 5367229 5367250 5367234 5367229 -
gggtctggattgtgactccttt

SEQ ID NO: 118625 - DNA, 22 bp, Artificial Sequence
  Synthetic oligonucleotide; CTG chr11 5367222 5367243 5367227 5367222 -
gattgtgactcctttctggcaa

SEQ ID NO: 118626 - DNA, 22 bp, Artificial Sequence
  Synthetic oligonucleotide; TTG chr11 5367217 5367238 5367222 5367217 -
tgactcctttctggcaatgctt

SEQ ID NO: 118627 - DNA, 22 bp, Artificial Sequence
  Synthetic oligonucleotide; CTC chr11 5367211 5367232 5367216 5367211 -
ctttctggcaatgcttttaact

SEQ ID NO: 118628 - DNA, 22 bp, Artificial Sequence
  Synthetic oligonucleotide; CTT chr11 5367208 5367229 5367213 5367208 -
tctggcaatgcttttaacttca

SEQ ID NO: 118629 - DNA, 22 bp, Artificial Sequence
  Synthetic oligonucleotide; TTT chr11 5367207 5367228 5367212 5367207 -
ctggcaatgcttttaacttcaa

SEQ ID NO: 118630 - DNA, 22 bp, Artificial Sequence
  Synthetic oligonucleotide; TTC chr11 5367206 5367227 5367211 5367206 -
tggcaatgcttttaacttcaaa

SEQ ID NO: 118631 - DNA, 22 bp, Artificial Sequence
  Synthetic oligonucleotide; CTG chr11 5367204 5367225 5367209 5367204 -
gcaatgcttttaacttcaaaaa

SEQ ID NO: 118632 - DNA, 22 bp, Artificial Sequence
  Synthetic oligonucleotide; CTT chr11 5367195 5367216 5367200 5367195 -
ttaacttcaaaaatctcctttc

SEQ ID NO: 118633 - DNA, 22 bp, Artificial Sequence
  Synthetic oligonucleotide; TTT chr11 5367194 5367215 5367199 5367194 -
taacttcaaaaatctcctttca

SEQ ID NO: 118634 - DNA, 22 bp, Artificial Sequence
  Synthetic oligonucleotide; TTT chr11 5367193 5367214 5367198 5367193 -
aacttcaaaaatctcctttcaa

SEQ ID NO: 118635 - DNA, 22 bp, Artificial Sequence
  Synthetic oligonucleotide; TTA chr11 5367192 5367213 5367197 5367192 -
acttcaaaaatctcctttcaaa

SEQ ID NO: 118636 - DNA, 22 bp, Artificial Sequence
  Synthetic oligonucleotide; CTT chr11 5367188 5367209 5367193 5367188 -
caaaaatctcctttcaaaatga

SEQ ID NO: 118637 - DNA, 22 bp, Artificial Sequence
  Synthetic oligonucleotide; TTC chr11 5367187 5367208 5367192 5367187 -
aaaaatctcctttcaaaatgat

SEQ ID NO: 118638 - DNA, 22 bp, Artificial Sequence
  Synthetic oligonucleotide; CTC chr11 5367178 5367199 5367183 5367178 -
ctttcaaaatgattttattcca

SEQ ID NO: 118639 - DNA, 22 bp, Artificial Sequence
  Synthetic oligonucleotide; CTT chr11 5367175 5367196 5367180 5367175 -
tcaaaatgattttattccagtt

SEQ ID NO: 118640 - DNA, 22 bp, Artificial Sequence
  Synthetic oligonucleotide; TTT chr11 5367174 5367195 5367179 5367174 -
caaaatgattttattccagttc

SEQ ID NO: 118641 - DNA, 22 bp, Artificial Sequence
  Synthetic oligonucleotide; TTC chr11 5367173 5367194 5367178 5367173 -
aaaatgattttattccagttca

SEQ ID NO: 118642 - DNA, 22 bp, Artificial Sequence
  Synthetic oligonucleotide; TTT chr11 5367163 5367184 5367168 5367163 -
tattccagttcacaatgaaata

SEQ ID NO: 118643 - DNA, 22 bp, Artificial Sequence
  Synthetic oligonucleotide; TTT chr11 5367162 5367183 5367167 5367162 -
attccagttcacaatgaaataa

SEQ ID NO: 118644 - DNA, 22 bp, Artificial Sequence
  Synthetic oligonucleotide; TTA chr11 5367161 5367182 5367166 5367161 -
ttccagttcacaatgaaataac

SEQ ID NO: 118645 - DNA, 22 bp, Artificial Sequence
  Synthetic oligonucleotide; TTC chr11 5367158 5367179 5367163 5367158 -
cagttcacaatgaaataactaa

SEQ ID NO: 118646 - DNA, 22 bp, Artificial Sequence
  Synthetic oligonucleotide; TTC chr11 5367152 5367173 5367157 5367152 -
acaatgaaataactaaaactct

SEQ ID NO: 118647 - DNA, 22 bp, Artificial Sequence
  Synthetic oligonucleotide; CTA chr11 5367137 5367158 5367142 5367137 -
aaactctgtgtcactaagtggc

SEQ ID NO: 118648 - DNA, 22 bp, Artificial Sequence
  Synthetic oligonucleotide; CTC chr11 5367131 5367152 5367136 5367131 -
tgtgtcactaagtggctttgca

SEQ ID NO: 118649 - DNA, 22 bp, Artificial Sequence
  Synthetic oligonucleotide; CTG chr11 5367129 5367150 5367134 5367129 -
tgtcactaagtggctttgcaag

SEQ ID NO: 118650 - DNA, 22 bp, Artificial Sequence
  Synthetic oligonucleotide; CTA chr11 5367121 5367142 5367126 5367121 -
agtggctttgcaaggtggcatg

SEQ ID NO: 118651 - DNA, 22 bp, Artificial Sequence
  Synthetic oligonucleotide; CTT chr11 5367113 5367134 5367118 5367113 -
tgcaaggtggcatgtgtatgtg

SEQ ID NO: 118652 - DNA, 22 bp, Artificial Sequence
  Synthetic oligonucleotide; TTT chr11 5367112 5367133 5367117 5367112 -
gcaaggtggcatgtgtatgtgt

SEQ ID NO: 118653 - DNA, 22 bp, Artificial Sequence
  Synthetic oligonucleotide; TTG chr11 5367111 5367132 5367116 5367111 -
caaggtggcatgtgtatgtgtg

SEQ ID NO: 118654 - DNA, 22 bp, Artificial Sequence
  Synthetic oligonucleotide; CTT chr11 5367080 5367101 5367085 5367080 -
ctcttccttcagaaccacattc

SEQ ID NO: 118655 - DNA, 22 bp, Artificial Sequence
  Synthetic oligonucleotide; TTC chr11 5367079 5367100 5367084 5367079 -
tcttccttcagaaccacattcc

SEQ ID NO: 118656 - DNA, 22 bp, Artificial Sequence
  Synthetic oligonucleotide; CTC chr11 5367077 5367098 5367082 5367077 -
ttccttcagaaccacattcctg

SEQ ID NO: 118657 - DNA, 22 bp, Artificial Sequence
  Synthetic oligonucleotide; CTT chr11 5367075 5367096 5367080 5367075 -
ccttcagaaccacattcctgag

SEQ ID NO: 118658 - DNA, 22 bp, Artificial Sequence
  Synthetic oligonucleotide; TTC chr11 5367074 5367095 5367079 5367074 -
cttcagaaccacattcctgaga

SEQ ID NO: 118659 - DNA, 22 bp, Artificial Sequence
  Synthetic oligonucleotide; CTT chr11 5367071 5367092 5367076 5367071 -
cagaaccacattcctgagactt

SEQ ID NO: 118660 - DNA, 22 bp, Artificial Sequence
  Synthetic oligonucleotide; TTC chr11 5367070 5367091 5367075 5367070 -
agaaccacattcctgagacttg

SEQ ID NO: 118661 - DNA, 22 bp, Artificial Sequence
  Synthetic oligonucleotide; TTC chr11 5367058 5367079 5367063 5367058 -
ctgagacttgagagaatgtctt

SEQ ID NO: 118662 - DNA, 22 bp, Artificial Sequence
  Synthetic oligonucleotide; CTG chr11 5367055 5367076 5367060 5367055 -
agacttgagagaatgtctttgg

SEQ ID NO: 118663 - DNA, 22 bp, Artificial Sequence
  Synthetic oligonucleotide; CTT chr11 5367049 5367070 5367054 5367049 -
gagagaatgtctttggtctctg

SEQ ID NO: 118664 - DNA, 22 bp, Artificial Sequence
  Synthetic oligonucleotide; TTG chr11 5367048 5367069 5367053 5367048 -
agagaatgtctttggtctctgc

SEQ ID NO: 118665 - DNA, 22 bp, Artificial Sequence
  Synthetic oligonucleotide; CTT chr11 5367036 5367057 5367041 5367036 -
tggtctctgctgctagagaatt

SEQ ID NO: 118666 - DNA, 22 bp, Artificial Sequence
  Synthetic oligonucleotide; TTT chr11 5367035 5367056 5367040 5367035 -
ggtctctgctgctagagaattt

SEQ ID NO: 118667 - DNA, 22 bp, Artificial Sequence
  Synthetic oligonucleotide; TTG chr11 5367034 5367055 5367039 5367034 -
gtctctgctgctagagaatttt

SEQ ID NO: 118668 - DNA, 22 bp, Artificial Sequence
  Synthetic oligonucleotide; CTC chr11 5367029 5367050 5367034 5367029 -
tgctgctagagaattttatcct

SEQ ID NO: 118669 - DNA, 22 bp, Artificial Sequence
  Synthetic oligonucleotide; CTG chr11 5367027 5367048 5367032 5367027 -
ctgctagagaattttatcctgg

SEQ ID NO: 118670 - DNA, 22 bp, Artificial Sequence
  Synthetic oligonucleotide; CTG chr11 5367024 5367045 5367029 5367024 -
ctagagaattttatcctggttc

SEQ ID NO: 118671 - DNA, 22 bp, Artificial Sequence
  Synthetic oligonucleotide; CTA chr11 5367021 5367042 5367026 5367021 -
gagaattttatcctggttcatg

SEQ ID NO: 118672 - DNA, 22 bp, Artificial Sequence
  Synthetic oligonucleotide; TTT chr11 5367013 5367034 5367018 5367013 -
tatcctggttcatggactgcag

SEQ ID NO: 118673 - DNA, 22 bp, Artificial Sequence
  Synthetic oligonucleotide; TTT chr11 5367012 5367033 5367017 5367012 -
atcctggttcatggactgcagc

SEQ ID NO: 118674 - DNA, 22 bp, Artificial Sequence
  Synthetic oligonucleotide; TTA chr11 5367011 5367032 5367016 5367011 -
tcctggttcatggactgcagcg

SEQ ID NO: 118675 - DNA, 22 bp, Artificial Sequence
  Synthetic oligonucleotide; CTG chr11 5367006 5367027 5367011 5367006 -
gttcatggactgcagcgggagg

SEQ ID NO: 118676 - DNA, 22 bp, Artificial Sequence
  Synthetic oligonucleotide; TTC chr11 5367002 5367023 5367007 5367002 -
atggactgcagcgggaggtgga

SEQ ID NO: 118677 - DNA, 22 bp, Artificial Sequence
  Synthetic oligonucleotide; CTG chr11 5366994 5367015 5366999 5366994 -
cagcgggaggtggaagcatttt

SEQ ID NO: 118678 - DNA, 22 bp, Artificial Sequence
  Synthetic oligonucleotide; TTT chr11 5366973 5366994 5366978 5366973 -
tcaaactttgggaggggaatgt

SEQ ID NO: 118679 - DNA, 22 bp, Artificial Sequence
  Synthetic oligonucleotide; TTT chr11 5366972 5366993 5366977 5366972 -
caaactttgggaggggaatgtt

SEQ ID NO: 118680 - DNA, 22 bp, Artificial Sequence
  Synthetic oligonucleotide; TTC chr11 5366971 5366992 5366976 5366971 -
aaactttgggaggggaatgtta

SEQ ID NO: 118681 - DNA, 22 bp, Artificial Sequence
  Synthetic oligonucleotide; CTT chr11 5366965 5366986 5366970 5366965 -
tgggaggggaatgttaggagac

SEQ ID NO: 118682 - DNA, 22 bp, Artificial Sequence
  Synthetic oligonucleotide; TTT chr11 5366964 5366985 5366969 5366964 -
gggaggggaatgttaggagacc

SEQ ID NO: 118683 - DNA, 22 bp, Artificial Sequence
  Synthetic oligonucleotide; TTG chr11 5366963 5366984 5366968 5366963 -
ggaggggaatgttaggagacca

SEQ ID NO: 118684 - DNA, 22 bp, Artificial Sequence
  Synthetic oligonucleotide; TTA chr11 5366949 5366970 5366954 5366949 -
ggagaccattaggcatgtgctc

SEQ ID NO: 118685 - DNA, 22 bp, Artificial Sequence
  Synthetic oligonucleotide; TTA chr11 5366938 5366959 5366943 5366938 -
ggcatgtgctcaagagatgaca

SEQ ID NO: 118686 - DNA, 22 bp, Artificial Sequence
  Synthetic oligonucleotide; CTC chr11 5366927 5366948 5366932 5366927 -
aagagatgacaccaagtccagg

SEQ ID NO: 118687 - DNA, 22 bp, Artificial Sequence
  Synthetic oligonucleotide; CTA chr11 5366896 5366917 5366901 5366896 -
aaactttgtgcctgttgtctca

SEQ ID NO: 118688 - DNA, 22 bp, Artificial Sequence
  Synthetic oligonucleotide; CTT chr11 5366890 5366911 5366895 5366890 -
tgtgcctgttgtctcatgaatc

SEQ ID NO: 118689 - DNA, 22 bp, Artificial Sequence
  Synthetic oligonucleotide; TTT chr11 5366889 5366910 5366894 5366889 -
gtgcctgttgtctcatgaatca

SEQ ID NO: 118690 - DNA, 22 bp, Artificial Sequence
  Synthetic oligonucleotide; TTG chr11 5366888 5366909 5366893 5366888 -
tgcctgttgtctcatgaatcag

SEQ ID NO: 118691 - DNA, 22 bp, Artificial Sequence
  Synthetic oligonucleotide; CTG chr11 5366882 5366903 5366887 5366882 -
ttgtctcatgaatcagatagca

SEQ ID NO: 118692 - DNA, 22 bp, Artificial Sequence
  Synthetic oligonucleotide; TTG chr11 5366879 5366900 5366884 5366879 -
tctcatgaatcagatagcaccc

SEQ ID NO: 118693 - DNA, 22 bp, Artificial Sequence
  Synthetic oligonucleotide; CTC chr11 5366875 5366896 5366880 5366875 -
atgaatcagatagcacccctgc

SEQ ID NO: 118694 - DNA, 22 bp, Artificial Sequence
  Synthetic oligonucleotide; CTG chr11 5366854 5366875 5366859 5366854 -
cctaaaccttcccagtcctgca

SEQ ID NO: 118695 - DNA, 22 bp, Artificial Sequence
  Synthetic oligonucleotide; CTA chr11 5366850 5366871 5366855 5366850 -
aaccttcccagtcctgcattgc

SEQ ID NO: 118696 - DNA, 22 bp, Artificial Sequence
  Synthetic oligonucleotide; CTT chr11 5366844 5366865 5366849 5366844 -
cccagtcctgcattgcacagag

SEQ ID NO: 118697 - DNA, 22 bp, Artificial Sequence
  Synthetic oligonucleotide; TTC chr11 5366843 5366864 5366848 5366843 -
ccagtcctgcattgcacagaga

SEQ ID NO: 118698 - DNA, 22 bp, Artificial Sequence
  Synthetic oligonucleotide; CTG chr11 5366834 5366855 5366839 5366834 -
cattgcacagagacccgtgctt

SEQ ID NO: 118699 - DNA, 22 bp, Artificial Sequence
  Synthetic oligonucleotide; TTG chr11 5366829 5366850 5366834 5366829 -
cacagagacccgtgcttgggat

SEQ ID NO: 118700 - DNA, 22 bp, Artificial Sequence
  Synthetic oligonucleotide; CTT chr11 5366812 5366833 5366817 5366812 -
gggattggaattagtcatcaat

SEQ ID NO: 118701 - DNA, 22 bp, Artificial Sequence
  Synthetic oligonucleotide; TTG chr11 5366811 5366832 5366816 5366811 -
ggattggaattagtcatcaata

SEQ ID NO: 118702 - DNA, 22 bp, Artificial Sequence
  Synthetic oligonucleotide; TTG chr11 5366805 5366826 5366810 5366805 -
gaattagtcatcaatacaaact

SEQ ID NO: 118703 - DNA, 22 bp, Artificial Sequence
  Synthetic oligonucleotide; TTA chr11 5366799 5366820 5366804 5366799 -
gtcatcaatacaaacttatttt

SEQ ID NO: 118704 - DNA, 22 bp, Artificial Sequence
  Synthetic oligonucleotide; CTT chr11 5366782 5366803 5366787 5366782 -
attttcccaaattttaattttt

SEQ ID NO: 118705 - DNA, 22 bp, Artificial Sequence
  Synthetic oligonucleotide; TTA chr11 5366781 5366802 5366786 5366781 -
ttttcccaaattttaattttta

SEQ ID NO: 118706 - DNA, 22 bp, Artificial Sequence
  Synthetic oligonucleotide; TTT chr11 5366778 5366799 5366783 5366778 -
tcccaaattttaatttttattc

SEQ ID NO: 118707 - DNA, 22 bp, Artificial Sequence
  Synthetic oligonucleotide; TTT chr11 5366777 5366798 5366782 5366777 -
cccaaattttaatttttattct

SEQ ID NO: 118708 - DNA, 22 bp, Artificial Sequence
  Synthetic oligonucleotide; TTC chr11 5366776 5366797 5366781 5366776 -
ccaaattttaatttttattcta

SEQ ID NO: 118709 - DNA, 22 bp, Artificial Sequence
  Synthetic oligonucleotide; TTT chr11 5366768 5366789 5366773 5366768 -
taatttttattctaaagacttt

SEQ ID NO: 118710 - DNA, 22 bp, Artificial Sequence
  Synthetic oligonucleotide; TTT chr11 5366767 5366788 5366772 5366767 -
aatttttattctaaagactttg

SEQ ID NO: 118711 - DNA, 22 bp, Artificial Sequence
  Synthetic oligonucleotide; TTA chr11 5366766 5366787 5366771 5366766 -
atttttattctaaagactttga

SEQ ID NO: 118712 - DNA, 22 bp, Artificial Sequence
  Synthetic oligonucleotide; TTT chr11 5366762 5366783 5366767 5366762 -
ttattctaaagactttgaatct

SEQ ID NO: 118713 - DNA, 22 bp, Artificial Sequence
  Synthetic oligonucleotide; TTT chr11 5366761 5366782 5366766 5366761 -
tattctaaagactttgaatctc

SEQ ID NO: 118714 - DNA, 22 bp, Artificial Sequence
  Synthetic oligonucleotide; TTT chr11 5366760 5366781 5366765 5366760 -
attctaaagactttgaatctca

SEQ ID NO: 118715 - DNA, 22 bp, Artificial Sequence
  Synthetic oligonucleotide; TTA chr11 5366759 5366780 5366764 5366759 -
ttctaaagactttgaatctcaa

SEQ ID NO: 118716 - DNA, 22 bp, Artificial Sequence
  Synthetic oligonucleotide; TTC chr11 5366756 5366777 5366761 5366756 -
taaagactttgaatctcaagtg

SEQ ID NO: 118717 - DNA, 22 bp, Artificial Sequence
  Synthetic oligonucleotide; CTA chr11 5366754 5366775 5366759 5366754 -
aagactttgaatctcaagtgaa

SEQ ID NO: 118718 - DNA, 22 bp, Artificial Sequence
  Synthetic oligonucleotide; CTT chr11 5366747 5366768 5366752 5366747 -
tgaatctcaagtgaataccctg

SEQ ID NO: 118719 - DNA, 22 bp, Artificial Sequence
  Synthetic oligonucleotide; TTT chr11 5366746 5366767 5366751 5366746 -
gaatctcaagtgaataccctga

SEQ ID NO: 118720 - DNA, 22 bp, Artificial Sequence
  Synthetic oligonucleotide; TTG chr11 5366745 5366766 5366750 5366745 -
aatctcaagtgaataccctgat

SEQ ID NO: 118721 - DNA, 22 bp, Artificial Sequence
  Synthetic oligonucleotide; CTC chr11 5366739 5366760 5366744 5366739 -
aagtgaataccctgatttcctt

SEQ ID NO: 118722 - DNA, 22 bp, Artificial Sequence
  Synthetic oligonucleotide; CTG chr11 5366725 5366746 5366730 5366725 -
atttccttccttccttctttcc

SEQ ID NO: 118723 - DNA, 22 bp, Artificial Sequence
  Synthetic oligonucleotide; TTT chr11 5366721 5366742 5366726 5366721 -
ccttccttccttctttcctttc

SEQ ID NO: 118724 - DNA, 22 bp, Artificial Sequence
  Synthetic oligonucleotide; TTC chr11 5366720 5366741 5366725 5366720 -
cttccttccttctttcctttcc

SEQ ID NO: 118725 - DNA, 22 bp, Artificial Sequence
  Synthetic oligonucleotide; CTT chr11 5366717 5366738 5366722 5366717 -
ccttccttctttcctttccttt

SEQ ID NO: 118726 - DNA, 22 bp, Artificial Sequence
  Synthetic oligonucleotide; TTC chr11 5366716 5366737 5366721 5366716 -
cttccttctttcctttcctttc

SEQ ID NO: 118727 - DNA, 22 bp, Artificial Sequence
  Synthetic oligonucleotide; CTT chr11 5366713 5366734 5366718 5366713 -
ccttctttcctttcctttcctc

SEQ ID NO: 118728 - DNA, 22 bp, Artificial Sequence
  Synthetic oligonucleotide; TTC chr11 5366712 5366733 5366717 5366712 -
cttctttcctttcctttcctcc

SEQ ID NO: 118729 - DNA, 22 bp, Artificial Sequence
  Synthetic oligonucleotide; CTT chr11 5366709 5366730 5366714 5366709 -
ctttcctttcctttcctcctcc

SEQ ID NO: 118730 - DNA, 22 bp, Artificial Sequence
  Synthetic oligonucleotide; TTC chr11 5366708 5366729 5366713 5366708 -
tttcctttcctttcctcctcct

SEQ ID NO: 118731 - DNA, 22 bp, Artificial Sequence
  Synthetic oligonucleotide; CTT chr11 5366706 5366727 5366711 5366706 -
tcctttcctttcctcctcctct

SEQ ID NO: 118732 - DNA, 22 bp, Artificial Sequence
  Synthetic oligonucleotide; TTT chr11 5366705 5366726 5366710 5366705 -
cctttcctttcctcctcctcta

SEQ ID NO: 118733 - DNA, 22 bp, Artificial Sequence
  Synthetic oligonucleotide; TTC chr11 5366704 5366725 5366709 5366704 -
ctttcctttcctcctcctctac

SEQ ID NO: 118734 - DNA, 22 bp, Artificial Sequence
  Synthetic oligonucleotide; CTT chr11 5366701 5366722 5366706 5366701 -
tcctttcctcctcctctacttt

SEQ ID NO: 118735 - DNA, 22 bp, Artificial Sequence
  Synthetic oligonucleotide; TTT chr11 5366700 5366721 5366705 5366700 -
cctttcctcctcctctactttt

SEQ ID NO: 118736 - DNA, 22 bp, Artificial Sequence
  Synthetic oligonucleotide; TTC chr11 5366699 5366720 5366704 5366699 -
ctttcctcctcctctacttttt

SEQ ID NO: 118737 - DNA, 22 bp, Artificial Sequence
  Synthetic oligonucleotide; CTT chr11 5366696 5366717 5366701 5366696 -
tcctcctcctctactttttctt

SEQ ID NO: 118738 - DNA, 22 bp, Artificial Sequence
  Synthetic oligonucleotide; TTT chr11 5366695 5366716 5366700 5366695 -
cctcctcctctactttttcttc

SEQ ID NO: 118739 - DNA, 22 bp, Artificial Sequence
  Synthetic oligonucleotide; TTC chr11 5366694 5366715 5366699 5366694 -
ctcctcctctactttttcttct

SEQ ID NO: 118740 - DNA, 22 bp, Artificial Sequence
  Synthetic oligonucleotide; CTC chr11 5366691 5366712 5366696 5366691 -
ctcctctactttttcttctcct

SEQ ID NO: 118741 - DNA, 22 bp, Artificial Sequence
  Synthetic oligonucleotide; CTC chr11 5366688 5366709 5366693 5366688 -
ctctactttttcttctccttct

SEQ ID NO: 118742 - DNA, 22 bp, Artificial Sequence
  Synthetic oligonucleotide; CTC chr11 5366685 5366706 5366690 5366685 -
tactttttcttctccttctcct

SEQ ID NO: 118743 - DNA, 22 bp, Artificial Sequence
  Synthetic oligonucleotide; CTA chr11 5366683 5366704 5366688 5366683 -
ctttttcttctccttctccttc

SEQ ID NO: 118744 - DNA, 22 bp, Artificial Sequence
  Synthetic oligonucleotide; CTT chr11 5366680 5366701 5366685 5366680 -
tttcttctccttctccttcttc

SEQ ID NO: 118745 - DNA, 22 bp, Artificial Sequence
  Synthetic oligonucleotide; TTT chr11 5366679 5366700 5366684 5366679 -
ttcttctccttctccttcttct

SEQ ID NO: 118746 - DNA, 22 bp, Artificial Sequence
  Synthetic oligonucleotide; TTT chr11 5366678 5366699 5366683 5366678 -
tcttctccttctccttcttctt

SEQ ID NO: 118747 - DNA, 22 bp, Artificial Sequence
  Synthetic oligonucleotide; TTT chr11 5366677 5366698 5366682 5366677 -
cttctccttctccttcttcttc

SEQ ID NO: 118748 - DNA, 22 bp, Artificial Sequence
  Synthetic oligonucleotide; TTC chr11 5366676 5366697 5366681 5366676 -
ttctccttctccttcttcttct

SEQ ID NO: 118749 - DNA, 22 bp, Artificial Sequence
  Synthetic oligonucleotide; CTT chr11 5366674 5366695 5366679 5366674 -
ctccttctccttcttcttcttc

SEQ ID NO: 118750 - DNA, 22 bp, Artificial Sequence
  Synthetic oligonucleotide; TTC chr11 5366673 5366694 5366678 5366673 -
tccttctccttcttcttcttct

SEQ ID NO: 118751 - DNA, 22 bp, Artificial Sequence
  Synthetic oligonucleotide; CTC chr11 5366671 5366692 5366676 5366671 -
cttctccttcttcttcttcttc

SEQ ID NO: 118752 - DNA, 22 bp, Artificial Sequence
  Synthetic oligonucleotide; CTT chr11 5366668 5366689 5366673 5366668 -
ctccttcttcttcttcttctct

SEQ ID NO: 118753 - DNA, 22 bp, Artificial Sequence
  Synthetic oligonucleotide; TTC chr11 5366667 5366688 5366672 5366667 -
tccttcttcttcttcttctctt

SEQ ID NO: 118754 - DNA, 22 bp, Artificial Sequence
  Synthetic oligonucleotide; CTC chr11 5366665 5366686 5366670 5366665 -
cttcttcttcttcttctcttcc

SEQ ID NO: 118755 - DNA, 22 bp, Artificial Sequence
  Synthetic oligonucleotide; CTT chr11 5366662 5366683 5366667 5366662 -
cttcttcttcttctcttccttc

SEQ ID NO: 118756 - DNA, 22 bp, Artificial Sequence
  Synthetic oligonucleotide; TTC chr11 5366661 5366682 5366666 5366661 -
ttcttcttcttctcttccttcc

SEQ ID NO: 118757 - DNA, 22 bp, Artificial Sequence
  Synthetic oligonucleotide; CTT chr11 5366659 5366680 5366664 5366659 -
cttcttcttctcttccttcctt

SEQ ID NO: 118758 - DNA, 22 bp, Artificial Sequence
  Synthetic oligonucleotide; TTC chr11 5366658 5366679 5366663 5366658 -
ttcttcttctcttccttccttt

SEQ ID NO: 118759 - DNA, 22 bp, Artificial Sequence
  Synthetic oligonucleotide; CTT chr11 5366656 5366677 5366661 5366656 -
cttcttctcttccttcctttcc

SEQ ID NO: 118760 - DNA, 22 bp, Artificial Sequence
  Synthetic oligonucleotide; TTC chr11 5366655 5366676 5366660 5366655 -
ttcttctcttccttcctttcct

SEQ ID NO: 118761 - DNA, 22 bp, Artificial Sequence
  Synthetic oligonucleotide; CTT chr11 5366653 5366674 5366658 5366653 -
cttctcttccttcctttccttc

SEQ ID NO: 118762 - DNA, 22 bp, Artificial Sequence
  Synthetic oligonucleotide; TTC chr11 5366652 5366673 5366657 5366652 -
ttctcttccttcctttccttcc

SEQ ID NO: 118763 - DNA, 22 bp, Artificial Sequence
  Synthetic oligonucleotide; CTT chr11 5366650 5366671 5366655 5366650 -
ctcttccttcctttccttccct

SEQ ID NO: 118764 - DNA, 22 bp, Artificial Sequence
  Synthetic oligonucleotide; TTC chr11 5366649 5366670 5366654 5366649 -
tcttccttcctttccttccctt

SEQ ID NO: 118765 - DNA, 22 bp, Artificial Sequence
  Synthetic oligonucleotide; CTC chr11 5366647 5366668 5366652 5366647 -
ttccttcctttccttcccttcc

SEQ ID NO: 118766 - DNA, 22 bp, Artificial Sequence
  Synthetic oligonucleotide; CTT chr11 5366645 5366666 5366650 5366645 -
ccttcctttccttcccttcctt

SEQ ID NO: 118767 - DNA, 22 bp, Artificial Sequence
  Synthetic oligonucleotide; TTC chr11 5366644 5366665 5366649 5366644 -
cttcctttccttcccttccttc

SEQ ID NO: 118768 - DNA, 22 bp, Artificial Sequence
  Synthetic oligonucleotide; CTT chr11 5366641 5366662 5366646 5366641 -
cctttccttcccttccttcctc

SEQ ID NO: 118769 - DNA, 22 bp, Artificial Sequence
  Synthetic oligonucleotide; TTC chr11 5366640 5366661 5366645 5366640 -
ctttccttcccttccttcctcc

SEQ ID NO: 118770 - DNA, 22 bp, Artificial Sequence
  Synthetic oligonucleotide; CTT chr11 5366637 5366658 5366642 5366637 -
tccttcccttccttcctccctc

SEQ ID NO: 118771 - DNA, 22 bp, Artificial Sequence
  Synthetic oligonucleotide; TTT chr11 5366636 5366657 5366641 5366636 -
ccttcccttccttcctccctcc

SEQ ID NO: 118772 - DNA, 22 bp, Artificial Sequence
  Synthetic oligonucleotide; TTC chr11 5366635 5366656 5366640 5366635 -
cttcccttccttcctccctccc

SEQ ID NO: 118773 - DNA, 22 bp, Artificial Sequence
  Synthetic oligonucleotide; CTT chr11 5366632 5366653 5366637 5366632 -
cccttccttcctccctccctac

SEQ ID NO: 118774 - DNA, 22 bp, Artificial Sequence
  Synthetic oligonucleotide; TTC chr11 5366631 5366652 5366636 5366631 -
ccttccttcctccctccctacc

SEQ ID NO: 118775 - DNA, 22 bp, Artificial Sequence
  Synthetic oligonucleotide; CTT chr11 5366627 5366648 5366632 5366627 -
ccttcctccctccctacctctc

SEQ ID NO: 118776 - DNA, 22 bp, Artificial Sequence
  Synthetic oligonucleotide; TTC chr11 5366626 5366647 5366631 5366626 -
cttcctccctccctacctctct

SEQ ID NO: 118777 - DNA, 22 bp, Artificial Sequence
  Synthetic oligonucleotide; CTT chr11 5366623 5366644 5366628 5366623 -
cctccctccctacctctctctc

SEQ ID NO: 118778 - DNA, 22 bp, Artificial Sequence
  Synthetic oligonucleotide; TTC chr11 5366622 5366643 5366627 5366622 -
ctccctccctacctctctctct

SEQ ID NO: 118779 - DNA, 22 bp, Artificial Sequence
  Synthetic oligonucleotide; CTC chr11 5366619 5366640 5366624 5366619 -
cctccctacctctctctctttc

SEQ ID NO: 118780 - DNA, 22 bp, Artificial Sequence
  Synthetic oligonucleotide; CTC chr11 5366615 5366636 5366620 5366615 -
cctacctctctctctttctcta

SEQ ID NO: 118781 - DNA, 22 bp, Artificial Sequence
  Synthetic oligonucleotide; CTA chr11 5366611 5366632 5366616 5366611 -
cctctctctctttctctatttc

SEQ ID NO: 118782 - DNA, 22 bp, Artificial Sequence
  Synthetic oligonucleotide; CTC chr11 5366607 5366628 5366612 5366607 -
tctctctttctctatttctttc

SEQ ID NO: 118783 - DNA, 22 bp, Artificial Sequence
  Synthetic oligonucleotide; CTC chr11 5366605 5366626 5366610 5366605 -
tctctttctctatttctttctc

SEQ ID NO: 118784 - DNA, 22 bp, Artificial Sequence
  Synthetic oligonucleotide; CTC chr11 5366603 5366624 5366608 5366603 -
tctttctctatttctttctcat

SEQ ID NO: 118785 - DNA, 22 bp, Artificial Sequence
  Synthetic oligonucleotide; CTC chr11 5366601 5366622 5366606 5366601 -
tttctctatttctttctcatct

SEQ ID NO: 118786 - DNA, 22 bp, Artificial Sequence
  Synthetic oligonucleotide; CTT chr11 5366599 5366620 5366604 5366599 -
tctctatttctttctcatcttg

SEQ ID NO: 118787 - DNA, 22 bp, Artificial Sequence
  Synthetic oligonucleotide; TTT chr11 5366598 5366619 5366603 5366598 -
ctctatttctttctcatcttgc

SEQ ID NO: 118788 - DNA, 22 bp, Artificial Sequence
  Synthetic oligonucleotide; TTC chr11 5366597 5366618 5366602 5366597 -
tctatttctttctcatcttgct

SEQ ID NO: 118789 - DNA, 22 bp, Artificial Sequence
  Synthetic oligonucleotide; CTC chr11 5366595 5366616 5366600 5366595 -
tatttctttctcatcttgcttt

SEQ ID NO: 118790 - DNA, 22 bp, Artificial Sequence
  Synthetic oligonucleotide; CTA chr11 5366593 5366614 5366598 5366593 -
tttctttctcatcttgcttttg

SEQ ID NO: 118791 - DNA, 22 bp, Artificial Sequence
  Synthetic oligonucleotide; TTT chr11 5366590 5366611 5366595 5366590 -
ctttctcatcttgcttttgcct

SEQ ID NO: 118792 - DNA, 22 bp, Artificial Sequence
  Synthetic oligonucleotide; TTC chr11 5366589 5366610 5366594 5366589 -
tttctcatcttgcttttgcctt

SEQ ID NO: 118793 - DNA, 22 bp, Artificial Sequence
  Synthetic oligonucleotide; CTT chr11 5366587 5366608 5366592 5366587 -
tctcatcttgcttttgccttcc

SEQ ID NO: 118794 - DNA, 22 bp, Artificial Sequence
  Synthetic oligonucleotide; TTT chr11 5366586 5366607 5366591 5366586 -
ctcatcttgcttttgccttcca

SEQ ID NO: 118795 - DNA, 22 bp, Artificial Sequence
  Synthetic oligonucleotide; TTC chr11 5366585 5366606 5366590 5366585 -
tcatcttgcttttgccttccag

SEQ ID NO: 118796 - DNA, 22 bp, Artificial Sequence
  Synthetic oligonucleotide; CTC chr11 5366583 5366604 5366588 5366583 -
atcttgcttttgccttccaggc

SEQ ID NO: 118797 - DNA, 22 bp, Artificial Sequence
  Synthetic oligonucleotide; CTT chr11 5366578 5366599 5366583 5366578 -
gcttttgccttccaggctgctg

SEQ ID NO: 118798 - DNA, 22 bp, Artificial Sequence
  Synthetic oligonucleotide; TTG chr11 5366577 5366598 5366582 5366577 -
cttttgccttccaggctgctgg

SEQ ID NO: 118799 - DNA, 22 bp, Artificial Sequence
  Synthetic oligonucleotide; CTT chr11 5366574 5366595 5366579 5366574 -
ttgccttccaggctgctggagt

SEQ ID NO: 118800 - DNA, 22 bp, Artificial Sequence
  Synthetic oligonucleotide; TTT chr11 5366573 5366594 5366578 5366573 -
tgccttccaggctgctggagtg

SEQ ID NO: 118801 - DNA, 22 bp, Artificial Sequence
  Synthetic oligonucleotide; TTT chr11 5366572 5366593 5366577 5366572 -
gccttccaggctgctggagtgc

SEQ ID NO: 118802 - DNA, 22 bp, Artificial Sequence
  Synthetic oligonucleotide; TTG chr11 5366571 5366592 5366576 5366571 -
ccttccaggctgctggagtgca

SEQ ID NO: 118803 - DNA, 22 bp, Artificial Sequence
  Synthetic oligonucleotide; CTT chr11 5366567 5366588 5366572 5366567 -
ccaggctgctggagtgcaatgg

SEQ ID NO: 118804 - DNA, 22 bp, Artificial Sequence
  Synthetic oligonucleotide; TTC chr11 5366566 5366587 5366571 5366566 -
caggctgctggagtgcaatggc

SEQ ID NO: 118805 - DNA, 22 bp, Artificial Sequence
  Synthetic oligonucleotide; CTG chr11 5366559 5366580 5366564 5366559 -
ctggagtgcaatggcgcgatct

SEQ ID NO: 118806 - DNA, 22 bp, Artificial Sequence
  Synthetic oligonucleotide; CTG chr11 5366556 5366577 5366561 5366556 -
gagtgcaatggcgcgatctcgg

SEQ ID NO: 118807 - DNA, 22 bp, Artificial Sequence
  Synthetic oligonucleotide; CTC chr11 5366536 5366557 5366541 5366536 -
ggctcactgcaacctccgcctc

SEQ ID NO: 118808 - DNA, 22 bp, Artificial Sequence
  Synthetic oligonucleotide; CTC chr11 5366531 5366552 5366536 5366531 -
actgcaacctccgcctcccagg

SEQ ID NO: 118809 - DNA, 22 bp, Artificial Sequence
  Synthetic oligonucleotide; CTG chr11 5366527 5366548 5366532 5366527 -
caacctccgcctcccaggttca

SEQ ID NO: 118810 - DNA, 22 bp, Artificial Sequence
  Synthetic oligonucleotide; CTC chr11 5366520 5366541 5366525 5366520 -
cgcctcccaggttcaagcgatt

SEQ ID NO: 118811 - DNA, 22 bp, Artificial Sequence
  Synthetic oligonucleotide; CTC chr11 5366514 5366535 5366519 5366514 -
ccaggttcaagcgattctccta

SEQ ID NO: 118812 - DNA, 22 bp, Artificial Sequence
  Synthetic oligonucleotide; TTC chr11 5366506 5366527 5366511 5366506 -
aagcgattctcctacctcagcc

SEQ ID NO: 118813 - DNA, 22 bp, Artificial Sequence
  Synthetic oligonucleotide; TTC chr11 5366497 5366518 5366502 5366497 -
tcctacctcagcctcctgtgta

SEQ ID NO: 118814 - DNA, 22 bp, Artificial Sequence
  Synthetic oligonucleotide; CTC chr11 5366495 5366516 5366500 5366495 -
ctacctcagcctcctgtgtagc

SEQ ID NO: 118815 - DNA, 22 bp, Artificial Sequence
  Synthetic oligonucleotide; CTA chr11 5366492 5366513 5366497 5366492 -
cctcagcctcctgtgtagctgc

SEQ ID NO: 118816 - DNA, 22 bp, Artificial Sequence
  Synthetic oligonucleotide; CTC chr11 5366488 5366509 5366493 5366488 -
agcctcctgtgtagctgcaatt

SEQ ID NO: 118817 - DNA, 22 bp, Artificial Sequence
  Synthetic oligonucleotide; CTC chr11 5366482 5366503 5366487 5366482 -
ctgtgtagctgcaattacaggc

SEQ ID NO: 118818 - DNA, 22 bp, Artificial Sequence
  Synthetic oligonucleotide; CTG chr11 5366479 5366500 5366484 5366479 -
tgtagctgcaattacaggcatc

SEQ ID NO: 118819 - DNA, 22 bp, Artificial Sequence
  Synthetic oligonucleotide; CTG chr11 5366471 5366492 5366476 5366471 -
caattacaggcatctgccacca

SEQ ID NO: 118820 - DNA, 22 bp, Artificial Sequence
  Synthetic oligonucleotide; TTA chr11 5366465 5366486 5366470 5366465 -
caggcatctgccaccaggccct

SEQ ID NO: 118821 - DNA, 22 bp, Artificial Sequence
  Synthetic oligonucleotide; CTG chr11 5366455 5366476 5366460 5366455 -
ccaccaggccctgctaattttt

SEQ ID NO: 118822 - DNA, 22 bp, Artificial Sequence
  Synthetic oligonucleotide; CTG chr11 5366442 5366463 5366447 5366442 -
ctaatttttttgtatttttatt

SEQ ID NO: 118823 - DNA, 22 bp, Artificial Sequence
  Synthetic oligonucleotide; CTA chr11 5366439 5366460 5366444 5366439 -
atttttttgtatttttattaga

SEQ ID NO: 118824 - DNA, 22 bp, Artificial Sequence
  Synthetic oligonucleotide; TTT chr11 5366435 5366456 5366440 5366435 -
ttttgtatttttattagagaca

SEQ ID NO: 118825 - DNA, 22 bp, Artificial Sequence
  Synthetic oligonucleotide; TTT chr11 5366434 5366455 5366439 5366434 -
tttgtatttttattagagacag

SEQ ID NO: 118826 - DNA, 22 bp, Artificial Sequence
  Synthetic oligonucleotide; TTT chr11 5366433 5366454 5366438 5366433 -
ttgtatttttattagagacagg

SEQ ID NO: 118827 - DNA, 22 bp, Artificial Sequence
  Synthetic oligonucleotide; TTT chr11 5366432 5366453 5366437 5366432 -
tgtatttttattagagacaggg

SEQ ID NO: 118828 - DNA, 22 bp, Artificial Sequence
  Synthetic oligonucleotide; TTT chr11 5366431 5366452 5366436 5366431 -
gtatttttattagagacagggt

SEQ ID NO: 118829 - DNA, 22 bp, Artificial Sequence
  Synthetic oligonucleotide; TTG chr11 5366430 5366451 5366435 5366430 -
tatttttattagagacagggtt

SEQ ID NO: 118830 - DNA, 22 bp, Artificial Sequence
  Synthetic oligonucleotide; TTT chr11 5366425 5366446 5366430 5366425 -
ttattagagacagggtttcacc

SEQ ID NO: 118831 - DNA, 22 bp, Artificial Sequence
  Synthetic oligonucleotide; TTT chr11 5366424 5366445 5366429 5366424 -
tattagagacagggtttcacca

SEQ ID NO: 118832 - DNA, 22 bp, Artificial Sequence
  Synthetic oligonucleotide; TTT chr11 5366423 5366444 5366428 5366423 -
attagagacagggtttcaccat

SEQ ID NO: 118833 - DNA, 22 bp, Artificial Sequence
  Synthetic oligonucleotide; TTA chr11 5366422 5366443 5366427 5366422 -
ttagagacagggtttcaccatg

SEQ ID NO: 118834 - DNA, 22 bp, Artificial Sequence
  Synthetic oligonucleotide; TTA chr11 5366419 5366440 5366424 5366419 -
gagacagggtttcaccatgttg

SEQ ID NO: 118835 - DNA, 22 bp, Artificial Sequence
  Synthetic oligonucleotide; TTT chr11 5366407 5366428 5366412 5366407 -
caccatgttggtcaggctggtc

SEQ ID NO: 118836 - DNA, 22 bp, Artificial Sequence
  Synthetic oligonucleotide; TTC chr11 5366406 5366427 5366411 5366406 -
accatgttggtcaggctggtct

SEQ ID NO: 118837 - DNA, 22 bp, Artificial Sequence
  Synthetic oligonucleotide; TTG chr11 5366397 5366418 5366402 5366397 -
gtcaggctggtctcgaactctt

SEQ ID NO: 118838 - DNA, 22 bp, Artificial Sequence
  Synthetic oligonucleotide; CTG chr11 5366388 5366409 5366393 5366388 -
gtctcgaactcttgccctcagg

SEQ ID NO: 118839 - DNA, 22 bp, Artificial Sequence
  Synthetic oligonucleotide; CTC chr11 5366383 5366404 5366388 5366383 -
gaactcttgccctcaggtgatc

SEQ ID NO: 118840 - DNA, 22 bp, Artificial Sequence
  Synthetic oligonucleotide; CTC chr11 5366377 5366398 5366382 5366377 -
ttgccctcaggtgatcctcctg

SEQ ID NO: 118841 - DNA, 22 bp, Artificial Sequence
  Synthetic oligonucleotide; CTT chr11 5366375 5366396 5366380 5366375 -
gccctcaggtgatcctcctgcc

SEQ ID NO: 118842 - DNA, 22 bp, Artificial Sequence
  Synthetic oligonucleotide; TTG chr11 5366374 5366395 5366379 5366374 -
ccctcaggtgatcctcctgcct

SEQ ID NO: 118843 - DNA, 22 bp, Artificial Sequence
  Synthetic oligonucleotide; CTC chr11 5366369 5366390 5366374 5366369 -
aggtgatcctcctgcctcagcc

SEQ ID NO: 118844 - DNA, 22 bp, Artificial Sequence
  Synthetic oligonucleotide; CTC chr11 5366358 5366379 5366363 5366358 -
ctgcctcagccacccaaagtgc

SEQ ID NO: 118845 - DNA, 22 bp, Artificial Sequence
  Synthetic oligonucleotide; CTG chr11 5366355 5366376 5366360 5366355 -
cctcagccacccaaagtgctgg

SEQ ID NO: 118846 - DNA, 22 bp, Artificial Sequence
  Synthetic oligonucleotide; CTC chr11 5366351 5366372 5366356 5366351 -
agccacccaaagtgctgggatt

SEQ ID NO: 118847 - DNA, 22 bp, Artificial Sequence
  Synthetic oligonucleotide; CTG chr11 5366334 5366355 5366339 5366334 -
ggattacaggcatgagtctgta

SEQ ID NO: 118848 - DNA, 22 bp, Artificial Sequence
  Synthetic oligonucleotide; TTA chr11 5366328 5366349 5366333 5366328 -
caggcatgagtctgtaatgtag

SEQ ID NO: 118849 - DNA, 22 bp, Artificial Sequence
  Synthetic oligonucleotide; CTG chr11 5366314 5366335 5366319 5366314 -
taatgtagccttttctttaaca

SEQ ID NO: 118850 - DNA, 22 bp, Artificial Sequence
  Synthetic oligonucleotide; CTT chr11 5366302 5366323 5366307 5366302 -
ttctttaacaggctacccacag

SEQ ID NO: 118851 - DNA, 22 bp, Artificial Sequence
  Synthetic oligonucleotide; TTT chr11 5366301 5366322 5366306 5366301 -
tctttaacaggctacccacaga

SEQ ID NO: 118852 - DNA, 22 bp, Artificial Sequence
  Synthetic oligonucleotide; TTT chr11 5366300 5366321 5366305 5366300 -
ctttaacaggctacccacagag

SEQ ID NO: 118853 - DNA, 22 bp, Artificial Sequence
  Synthetic oligonucleotide; TTC chr11 5366299 5366320 5366304 5366299 -
tttaacaggctacccacagagg

SEQ ID NO: 118854 - DNA, 22 bp, Artificial Sequence
  Synthetic oligonucleotide; CTT chr11 5366297 5366318 5366302 5366297 -
taacaggctacccacagaggaa

SEQ ID NO: 118855 - DNA, 22 bp, Artificial Sequence
  Synthetic oligonucleotide; TTT chr11 5366296 5366317 5366301 5366296 -
aacaggctacccacagaggaac

SEQ ID NO: 118856 - DNA, 22 bp, Artificial Sequence
  Synthetic oligonucleotide; TTA chr11 5366295 5366316 5366300 5366295 -
acaggctacccacagaggaacc

SEQ ID NO: 118857 - DNA, 22 bp, Artificial Sequence
  Synthetic oligonucleotide; CTA chr11 5366287 5366308 5366292 5366287 -
cccacagaggaaccttcccttg

SEQ ID NO: 118858 - DNA, 22 bp, Artificial Sequence
  Synthetic oligonucleotide; CTT chr11 5366271 5366292 5366276 5366271 -
cccttgagctccttttcagatt

SEQ ID NO: 118859 - DNA, 22 bp, Artificial Sequence
  Synthetic oligonucleotide; TTC chr11 5366270 5366291 5366275 5366270 -
ccttgagctccttttcagattc

SEQ ID NO: 118860 - DNA, 22 bp, Artificial Sequence
  Synthetic oligonucleotide; CTT chr11 5366266 5366287 5366271 5366266 -
gagctccttttcagattcttcc

SEQ ID NO: 118861 - DNA, 22 bp, Artificial Sequence
  Synthetic oligonucleotide; TTG chr11 5366265 5366286 5366270 5366265 -
agctccttttcagattcttcct

SEQ ID NO: 118862 - DNA, 22 bp, Artificial Sequence
  Synthetic oligonucleotide; CTC chr11 5366260 5366281 5366265 5366260 -
cttttcagattcttccttctgt

SEQ ID NO: 118863 - DNA, 22 bp, Artificial Sequence
  Synthetic oligonucleotide; CTT chr11 5366257 5366278 5366262 5366257 -
ttcagattcttccttctgtttc

SEQ ID NO: 118864 - DNA, 22 bp, Artificial Sequence
  Synthetic oligonucleotide; TTT chr11 5366256 5366277 5366261 5366256 -
tcagattcttccttctgtttct

SEQ ID NO: 118865 - DNA, 22 bp, Artificial Sequence
  Synthetic oligonucleotide; TTT chr11 5366255 5366276 5366260 5366255 -
cagattcttccttctgtttctc

SEQ ID NO: 118866 - DNA, 22 bp, Artificial Sequence
  Synthetic oligonucleotide; TTC chr11 5366254 5366275 5366259 5366254 -
agattcttccttctgtttctct

SEQ ID NO: 118867 - DNA, 22 bp, Artificial Sequence
  Synthetic oligonucleotide; TTC chr11 5366248 5366269 5366253 5366248 -
ttccttctgtttctctggccct

SEQ ID NO: 118868 - DNA, 22 bp, Artificial Sequence
  Synthetic oligonucleotide; CTT chr11 5366246 5366267 5366251 5366246 -
ccttctgtttctctggcccttt

SEQ ID NO: 118869 - DNA, 22 bp, Artificial Sequence
  Synthetic oligonucleotide; TTC chr11 5366245 5366266 5366250 5366245 -
cttctgtttctctggccctttc

SEQ ID NO: 118870 - DNA, 22 bp, Artificial Sequence
  Synthetic oligonucleotide; CTT chr11 5366242 5366263 5366247 5366242 -
ctgtttctctggccctttctcc

SEQ ID NO: 118871 - DNA, 22 bp, Artificial Sequence
  Synthetic oligonucleotide; TTC chr11 5366241 5366262 5366246 5366241 -
tgtttctctggccctttctcct

SEQ ID NO: 118872 - DNA, 22 bp, Artificial Sequence
  Synthetic oligonucleotide; CTG chr11 5366239 5366260 5366244 5366239 -
tttctctggccctttctccttt

SEQ ID NO: 118873 - DNA, 22 bp, Artificial Sequence
  Synthetic oligonucleotide; TTT chr11 5366236 5366257 5366241 5366236 -
ctctggccctttctcctttgtc

SEQ ID NO: 118874 - DNA, 22 bp, Artificial Sequence
  Synthetic oligonucleotide; TTC chr11 5366235 5366256 5366240 5366235 -
tctggccctttctcctttgtct

SEQ ID NO: 118875 - DNA, 22 bp, Artificial Sequence
  Synthetic oligonucleotide; CTC chr11 5366233 5366254 5366238 5366233 -
tggccctttctcctttgtcttc

SEQ ID NO: 118876 - DNA, 22 bp, Artificial Sequence
  Synthetic oligonucleotide; CTG chr11 5366231 5366252 5366236 5366231 -
gccctttctcctttgtcttcta

SEQ ID NO: 118877 - DNA, 22 bp, Artificial Sequence
  Synthetic oligonucleotide; CTT chr11 5366225 5366246 5366230 5366225 -
tctcctttgtcttctatacttt

SEQ ID NO: 118878 - DNA, 22 bp, Artificial Sequence
  Synthetic oligonucleotide; TTT chr11 5366224 5366245 5366229 5366224 -
ctcctttgtcttctatactttc

SEQ ID NO: 118879 - DNA, 22 bp, Artificial Sequence
  Synthetic oligonucleotide; TTC chr11 5366223 5366244 5366228 5366223 -
tcctttgtcttctatactttcc

SEQ ID NO: 118880 - DNA, 22 bp, Artificial Sequence
  Synthetic oligonucleotide; CTC chr11 5366221 5366242 5366226 5366221 -
ctttgtcttctatactttccta

SEQ ID NO: 118881 - DNA, 22 bp, Artificial Sequence
  Synthetic oligonucleotide; CTT chr11 5366218 5366239 5366223 5366218 -
tgtcttctatactttcctactg

SEQ ID NO: 118882 - DNA, 22 bp, Artificial Sequence
  Synthetic oligonucleotide; TTT chr11 5366217 5366238 5366222 5366217 -
gtcttctatactttcctactga

SEQ ID NO: 118883 - DNA, 22 bp, Artificial Sequence
  Synthetic oligonucleotide; TTG chr11 5366216 5366237 5366221 5366216 -
tcttctatactttcctactgat

SEQ ID NO: 118884 - DNA, 22 bp, Artificial Sequence
  Synthetic oligonucleotide; CTT chr11 5366212 5366233 5366217 5366212 -
ctatactttcctactgattttc

SEQ ID NO: 118885 - DNA, 22 bp, Artificial Sequence
  Synthetic oligonucleotide; TTC chr11 5366211 5366232 5366216 5366211 -
tatactttcctactgattttcc

SEQ ID NO: 118886 - DNA, 22 bp, Artificial Sequence
  Synthetic oligonucleotide; CTA chr11 5366209 5366230 5366214 5366209 -
tactttcctactgattttcctt

SEQ ID NO: 118887 - DNA, 22 bp, Artificial Sequence
  Synthetic oligonucleotide; CTT chr11 5366204 5366225 5366209 5366204 -
tcctactgattttccttcctgt

SEQ ID NO: 118888 - DNA, 22 bp, Artificial Sequence
  Synthetic oligonucleotide; TTT chr11 5366203 5366224 5366208 5366203 -
cctactgattttccttcctgtt

SEQ ID NO: 118889 - DNA, 22 bp, Artificial Sequence
  Synthetic oligonucleotide; TTC chr11 5366202 5366223 5366207 5366202 -
ctactgattttccttcctgttt

SEQ ID NO: 118890 - DNA, 22 bp, Artificial Sequence
  Synthetic oligonucleotide; CTA chr11 5366199 5366220 5366204 5366199 -
ctgattttccttcctgtttccc

SEQ ID NO: 118891 - DNA, 22 bp, Artificial Sequence
  Synthetic oligonucleotide; CTG chr11 5366196 5366217 5366201 5366196 -
attttccttcctgtttccctca

SEQ ID NO: 118892 - DNA, 22 bp, Artificial Sequence
  Synthetic oligonucleotide; TTT chr11 5366192 5366213 5366197 5366192 -
tccttcctgtttccctcatcct

SEQ ID NO: 118893 - DNA, 22 bp, Artificial Sequence
  Synthetic oligonucleotide; TTT chr11 5366191 5366212 5366196 5366191 -
ccttcctgtttccctcatcctt

SEQ ID NO: 118894 - DNA, 22 bp, Artificial Sequence
  Synthetic oligonucleotide; TTC chr11 5366190 5366211 5366195 5366190 -
cttcctgtttccctcatcctta

SEQ ID NO: 118895 - DNA, 22 bp, Artificial Sequence
  Synthetic oligonucleotide; CTT chr11 5366187 5366208 5366192 5366187 -
cctgtttccctcatccttaact

SEQ ID NO: 118896 - DNA, 22 bp, Artificial Sequence
  Synthetic oligonucleotide; TTC chr11 5366186 5366207 5366191 5366186 -
ctgtttccctcatccttaactt

SEQ ID NO: 118897 - DNA, 22 bp, Artificial Sequence
  Synthetic oligonucleotide; CTG chr11 5366183 5366204 5366188 5366183 -
tttccctcatccttaacttcct

SEQ ID NO: 118898 - DNA, 22 bp, Artificial Sequence
  Synthetic oligonucleotide; TTT chr11 5366180 5366201 5366185 5366180 -
ccctcatccttaacttcctact

SEQ ID NO: 118899 - DNA, 22 bp, Artificial Sequence
  Synthetic oligonucleotide; TTC chr11 5366179 5366200 5366184 5366179 -
cctcatccttaacttcctactt

SEQ ID NO: 118900 - DNA, 22 bp, Artificial Sequence
  Synthetic oligonucleotide; CTC chr11 5366175 5366196 5366180 5366175 -
atccttaacttcctacttaagg

SEQ ID NO: 118901 - DNA, 22 bp, Artificial Sequence
  Synthetic oligonucleotide; CTT chr11 5366169 5366190 5366174 5366169 -
aacttcctacttaaggcttgct

SEQ ID NO: 118902 - DNA, 22 bp, Artificial Sequence
  Synthetic oligonucleotide; TTA chr11 5366168 5366189 5366173 5366168 -
acttcctacttaaggcttgctc

SEQ ID NO: 118903 - DNA, 22 bp, Artificial Sequence
  Synthetic oligonucleotide; CTT chr11 5366164 5366185 5366169 5366164 -
cctacttaaggcttgctctatc

SEQ ID NO: 118904 - DNA, 22 bp, Artificial Sequence
  Synthetic oligonucleotide; TTC chr11 5366163 5366184 5366168 5366163 -
ctacttaaggcttgctctatcc

SEQ ID NO: 118905 - DNA, 22 bp, Artificial Sequence
  Synthetic oligonucleotide; CTA chr11 5366160 5366181 5366165 5366160 -
cttaaggcttgctctatcctct

SEQ ID NO: 118906 - DNA, 22 bp, Artificial Sequence
  Synthetic oligonucleotide; CTT chr11 5366157 5366178 5366162 5366157 -
aaggcttgctctatcctcttca

SEQ ID NO: 118907 - DNA, 22 bp, Artificial Sequence
  Synthetic oligonucleotide; TTA chr11 5366156 5366177 5366161 5366156 -
aggcttgctctatcctcttcac

SEQ ID NO: 118908 - DNA, 22 bp, Artificial Sequence
  Synthetic oligonucleotide; CTT chr11 5366150 5366171 5366155 5366150 -
gctctatcctcttcacatactg

SEQ ID NO: 118909 - DNA, 22 bp, Artificial Sequence
  Synthetic oligonucleotide; TTG chr11 5366149 5366170 5366154 5366149 -
ctctatcctcttcacatactgt

SEQ ID NO: 118910 - DNA, 22 bp, Artificial Sequence
  Synthetic oligonucleotide; CTC chr11 5366146 5366167 5366151 5366146 -
tatcctcttcacatactgtttc

SEQ ID NO: 118911 - DNA, 22 bp, Artificial Sequence
  Synthetic oligonucleotide; CTA chr11 5366144 5366165 5366149 5366144 -
tcctcttcacatactgtttctt

SEQ ID NO: 118912 - DNA, 22 bp, Artificial Sequence
  Synthetic oligonucleotide; CTC chr11 5366139 5366160 5366144 5366139 -
ttcacatactgtttcttatttt

SEQ ID NO: 118913 - DNA, 22 bp, Artificial Sequence
  Synthetic oligonucleotide; CTT chr11 5366137 5366158 5366142 5366137 -
cacatactgtttcttattttgc

SEQ ID NO: 118914 - DNA, 22 bp, Artificial Sequence
  Synthetic oligonucleotide; TTC chr11 5366136 5366157 5366141 5366136 -
acatactgtttcttattttgcc

SEQ ID NO: 118915 - DNA, 22 bp, Artificial Sequence
  Synthetic oligonucleotide; CTG chr11 5366128 5366149 5366133 5366128 -
tttcttattttgcccactgggt

SEQ ID NO: 118916 - DNA, 22 bp, Artificial Sequence
  Synthetic oligonucleotide; TTT chr11 5366125 5366146 5366130 5366125 -
cttattttgcccactgggttca

SEQ ID NO: 118917 - DNA, 22 bp, Artificial Sequence
  Synthetic oligonucleotide; TTC chr11 5366124 5366145 5366129 5366124 -
ttattttgcccactgggttcac

SEQ ID NO: 118918 - DNA, 22 bp, Artificial Sequence
  Synthetic oligonucleotide; CTT chr11 5366122 5366143 5366127 5366122 -
attttgcccactgggttcacct

SEQ ID NO: 118919 - DNA, 22 bp, Artificial Sequence
  Synthetic oligonucleotide; TTA chr11 5366121 5366142 5366126 5366121 -
ttttgcccactgggttcacctc

SEQ ID NO: 118920 - DNA, 22 bp, Artificial Sequence
  Synthetic oligonucleotide; TTT chr11 5366118 5366139 5366123 5366118 -
tgcccactgggttcacctctaa

SEQ ID NO: 118921 - DNA, 22 bp, Artificial Sequence
  Synthetic oligonucleotide; TTT chr11 5366117 5366138 5366122 5366117 -
gcccactgggttcacctctaag

SEQ ID NO: 118922 - DNA, 22 bp, Artificial Sequence
  Synthetic oligonucleotide; TTG chr11 5366116 5366137 5366121 5366116 -
cccactgggttcacctctaagt

SEQ ID NO: 118923 - DNA, 22 bp, Artificial Sequence
  Synthetic oligonucleotide; CTG chr11 5366109 5366130 5366114 5366109 -
ggttcacctctaagtcacacac

SEQ ID NO: 118924 - DNA, 22 bp, Artificial Sequence
  Synthetic oligonucleotide; TTC chr11 5366104 5366125 5366109 5366104 -
acctctaagtcacacacaactg

SEQ ID NO: 118925 - DNA, 22 bp, Artificial Sequence
  Synthetic oligonucleotide; CTC chr11 5366099 5366120 5366104 5366099 -
taagtcacacacaactggacaa

SEQ ID NO: 118926 - DNA, 22 bp, Artificial Sequence
  Synthetic oligonucleotide; CTA chr11 5366097 5366118 5366102 5366097 -
agtcacacacaactggacaagt

SEQ ID NO: 118927 - DNA, 22 bp, Artificial Sequence
  Synthetic oligonucleotide; CTG chr11 5366082 5366103 5366087 5366082 -
gacaagtaagcatacccctcag

SEQ ID NO: 118928 - DNA, 22 bp, Artificial Sequence
  Synthetic oligonucleotide; CTC chr11 5366062 5366083 5366067 5366062 -
agcaactcttccattaacagcc

SEQ ID NO: 118929 - DNA, 22 bp, Artificial Sequence
  Synthetic oligonucleotide; CTC chr11 5366054 5366075 5366059 5366054 -
ttccattaacagcccccaaaca

SEQ ID NO: 118930 - DNA, 22 bp, Artificial Sequence
  Synthetic oligonucleotide; CTT chr11 5366052 5366073 5366057 5366052 -
ccattaacagcccccaaacatg

SEQ ID NO: 118931 - DNA, 22 bp, Artificial Sequence
  Synthetic oligonucleotide; TTC chr11 5366051 5366072 5366056 5366051 -
cattaacagcccccaaacatgc

SEQ ID NO: 118932 - DNA, 22 bp, Artificial Sequence
  Synthetic oligonucleotide; TTA chr11 5366046 5366067 5366051 5366046 -
acagcccccaaacatgctgatt

SEQ ID NO: 118933 - DNA, 22 bp, Artificial Sequence
  Synthetic oligonucleotide; CTG chr11 5366027 5366048 5366032 5366027 -
attacctggctgctccataggg

SEQ ID NO: 118934 - DNA, 22 bp, Artificial Sequence
  Synthetic oligonucleotide; TTA chr11 5366023 5366044 5366028 5366023 -
cctggctgctccatagggtggt

SEQ ID NO: 118935 - DNA, 22 bp, Artificial Sequence
  Synthetic oligonucleotide; CTG chr11 5366019 5366040 5366024 5366019 -
gctgctccatagggtggttggt

SEQ ID NO: 118936 - DNA, 22 bp, Artificial Sequence
  Synthetic oligonucleotide; CTG chr11 5366015 5366036 5366020 5366015 -
ctccatagggtggttggttggt

SEQ ID NO: 118937 - DNA, 22 bp, Artificial Sequence
  Synthetic oligonucleotide; CTC chr11 5366012 5366033 5366017 5366012 -
catagggtggttggttggtctt

SEQ ID NO: 118938 - DNA, 22 bp, Artificial Sequence
  Synthetic oligonucleotide; TTG chr11 5365999 5366020 5366004 5365999 -
gttggtcttaagtctcccacta

SEQ ID NO: 118939 - DNA, 22 bp, Artificial Sequence
  Synthetic oligonucleotide; TTG chr11 5365995 5366016 5366000 5365995 -
gtcttaagtctcccactagcca

SEQ ID NO: 118940 - DNA, 22 bp, Artificial Sequence
  Synthetic oligonucleotide; CTT chr11 5365990 5366011 5365995 5365990 -
aagtctcccactagccagcacc

SEQ ID NO: 118941 - DNA, 22 bp, Artificial Sequence
  Synthetic oligonucleotide; TTA chr11 5365989 5366010 5365994 5365989 -
agtctcccactagccagcacct

SEQ ID NO: 118942 - DNA, 22 bp, Artificial Sequence
  Synthetic oligonucleotide; CTC chr11 5365983 5366004 5365988 5365983 -
ccactagccagcacctagcagt

SEQ ID NO: 118943 - DNA, 22 bp, Artificial Sequence
  Synthetic oligonucleotide; CTA chr11 5365977 5365998 5365982 5365977 -
gccagcacctagcagttcttca

SEQ ID NO: 118944 - DNA, 22 bp, Artificial Sequence
  Synthetic oligonucleotide; CTA chr11 5365966 5365987 5365971 5365966 -
gcagttcttcagtttgtgtggt

SEQ ID NO: 118945 - DNA, 22 bp, Artificial Sequence
  Synthetic oligonucleotide; TTC chr11 5365959 5365980 5365964 5365959 -
ttcagtttgtgtggttctcagt

SEQ ID NO: 118946 - DNA, 22 bp, Artificial Sequence
  Synthetic oligonucleotide; CTT chr11 5365957 5365978 5365962 5365957 -
cagtttgtgtggttctcagtgc

SEQ ID NO: 118947 - DNA, 22 bp, Artificial Sequence
  Synthetic oligonucleotide; TTC chr11 5365956 5365977 5365961 5365956 -
agtttgtgtggttctcagtgct

SEQ ID NO: 118948 - DNA, 22 bp, Artificial Sequence
  Synthetic oligonucleotide; TTT chr11 5365951 5365972 5365956 5365951 -
gtgtggttctcagtgctggtga

SEQ ID NO: 118949 - DNA, 22 bp, Artificial Sequence
  Synthetic oligonucleotide; TTG chr11 5365950 5365971 5365955 5365950 -
tgtggttctcagtgctggtgat

SEQ ID NO: 118950 - DNA, 22 bp, Artificial Sequence
  Synthetic oligonucleotide; TTC chr11 5365942 5365963 5365947 5365942 -
tcagtgctggtgatcatgctga

SEQ ID NO: 118951 - DNA, 22 bp, Artificial Sequence
  Synthetic oligonucleotide; CTC chr11 5365940 5365961 5365945 5365940 -
agtgctggtgatcatgctgagc

SEQ ID NO: 118952 - DNA, 22 bp, Artificial Sequence
  Synthetic oligonucleotide; CTG chr11 5365933 5365954 5365938 5365933 -
gtgatcatgctgagcctgcccc

SEQ ID NO: 118953 - DNA, 22 bp, Artificial Sequence
  Synthetic oligonucleotide; CTG chr11 5365921 5365942 5365926 5365921 -
agcctgcccccttcatgcctct

SEQ ID NO: 118954 - DNA, 22 bp, Artificial Sequence
  Synthetic oligonucleotide; CTG chr11 5365915 5365936 5365920 5365915 -
cccccttcatgcctctctggtc

SEQ ID NO: 118955 - DNA, 22 bp, Artificial Sequence
  Synthetic oligonucleotide; CTT chr11 5365908 5365929 5365913 5365908 -
catgcctctctggtcagtcaga

SEQ ID NO: 118956 - DNA, 22 bp, Artificial Sequence
  Synthetic oligonucleotide; TTC chr11 5365907 5365928 5365912 5365907 -
atgcctctctggtcagtcagac

SEQ ID NO: 118957 - DNA, 22 bp, Artificial Sequence
  Synthetic oligonucleotide; CTC chr11 5365900 5365921 5365905 5365900 -
tctggtcagtcagacccttcag

SEQ ID NO: 118958 - DNA, 22 bp, Artificial Sequence
  Synthetic oligonucleotide; CTC chr11 5365898 5365919 5365903 5365898 -
tggtcagtcagacccttcagaa

SEQ ID NO: 118959 - DNA, 22 bp, Artificial Sequence
  Synthetic oligonucleotide; CTG chr11 5365896 5365917 5365901 5365896 -
gtcagtcagacccttcagaacc

SEQ ID NO: 118960 - DNA, 22 bp, Artificial Sequence
  Synthetic oligonucleotide; CTT chr11 5365881 5365902 5365886 5365881 -
cagaacccaagaggtaagcaga

SEQ ID NO: 118961 - DNA, 22 bp, Artificial Sequence
  Synthetic oligonucleotide; TTC chr11 5365880 5365901 5365885 5365880 -
agaacccaagaggtaagcagag

SEQ ID NO: 118962 - DNA, 22 bp, Artificial Sequence
  Synthetic oligonucleotide; TTC chr11 5365855 5365876 5365860 5365855 -
ctctaagaatggttagcaactt

SEQ ID NO: 118963 - DNA, 22 bp, Artificial Sequence
  Synthetic oligonucleotide; CTC chr11 5365852 5365873 5365857 5365852 -
taagaatggttagcaacttaaa

SEQ ID NO: 118964 - DNA, 22 bp, Artificial Sequence
  Synthetic oligonucleotide; CTA chr11 5365850 5365871 5365855 5365850 -
agaatggttagcaacttaaact

SEQ ID NO: 118965 - DNA, 22 bp, Artificial Sequence
  Synthetic oligonucleotide; TTA chr11 5365840 5365861 5365845 5365840 -
gcaacttaaacttcatcctgtc

SEQ ID NO: 118966 - DNA, 22 bp, Artificial Sequence
  Synthetic oligonucleotide; CTT chr11 5365833 5365854 5365838 5365833 -
aaacttcatcctgtcatcaagc

SEQ ID NO: 118967 - DNA, 22 bp, Artificial Sequence
  Synthetic oligonucleotide; TTA chr11 5365832 5365853 5365837 5365832 -
aacttcatcctgtcatcaagcc

SEQ ID NO: 118968 - DNA, 22 bp, Artificial Sequence
  Synthetic oligonucleotide; CTT chr11 5365827 5365848 5365832 5365827 -
catcctgtcatcaagccagcac

SEQ ID NO: 118969 - DNA, 22 bp, Artificial Sequence
  Synthetic oligonucleotide; TTC chr11 5365826 5365847 5365831 5365826 -
atcctgtcatcaagccagcaca

SEQ ID NO: 118970 - DNA, 22 bp, Artificial Sequence
  Synthetic oligonucleotide; CTG chr11 5365820 5365841 5365825 5365820 -
tcatcaagccagcacatactaa

SEQ ID NO: 118971 - DNA, 22 bp, Artificial Sequence
  Synthetic oligonucleotide; CTA chr11 5365799 5365820 5365804 5365799 -
agcatctataatgtgctagaca

SEQ ID NO: 118972 - DNA, 22 bp, Artificial Sequence
  Synthetic oligonucleotide; CTA chr11 5365791 5365812 5365796 5365791 -
taatgtgctagacaatgtgggt

SEQ ID NO: 118973 - DNA, 22 bp, Artificial Sequence
  Synthetic oligonucleotide; CTA chr11 5365781 5365802 5365786 5365781 -
gacaatgtgggtaatggaggtg

SEQ ID NO: 118974 - DNA, 22 bp, Artificial Sequence
  Synthetic oligonucleotide; CTG chr11 5365752 5365773 5365757 5365752 -
gattataatatctgccctcaaa

SEQ ID NO: 118975 - DNA, 22 bp, Artificial Sequence
  Synthetic oligonucleotide; TTA chr11 5365747 5365768 5365752 5365747 -
taatatctgccctcaaaagctt

SEQ ID NO: 118976 - DNA, 22 bp, Artificial Sequence
  Synthetic oligonucleotide; CTG chr11 5365738 5365759 5365743 5365738 -
ccctcaaaagcttatatctatt

SEQ ID NO: 118977 - DNA, 22 bp, Artificial Sequence
  Synthetic oligonucleotide; CTC chr11 5365733 5365754 5365738 5365733 -
aaaagcttatatctatttttta

SEQ ID NO: 118978 - DNA, 22 bp, Artificial Sequence
  Synthetic oligonucleotide; CTT chr11 5365725 5365746 5365730 5365725 -
atatctattttttaaataatta

SEQ ID NO: 118979 - DNA, 22 bp, Artificial Sequence
  Synthetic oligonucleotide; TTA chr11 5365724 5365745 5365729 5365724 -
tatctattttttaaataattac

SEQ ID NO: 118980 - DNA, 22 bp, Artificial Sequence
  Synthetic oligonucleotide; CTA chr11 5365718 5365739 5365723 5365718 -
ttttttaaataattacaggaca

SEQ ID NO: 118981 - DNA, 22 bp, Artificial Sequence
  Synthetic oligonucleotide; TTT chr11 5365715 5365736 5365720 5365715 -
tttaaataattacaggacaatt

SEQ ID NO: 118982 - DNA, 22 bp, Artificial Sequence
  Synthetic oligonucleotide; TTT chr11 5365714 5365735 5365719 5365714 -
ttaaataattacaggacaattt

SEQ ID NO: 118983 - DNA, 22 bp, Artificial Sequence
  Synthetic oligonucleotide; TTT chr11 5365713 5365734 5365718 5365713 -
taaataattacaggacaattta

SEQ ID NO: 118984 - DNA, 22 bp, Artificial Sequence
  Synthetic oligonucleotide; TTT chr11 5365712 5365733 5365717 5365712 -
aaataattacaggacaatttaa

SEQ ID NO: 118985 - DNA, 22 bp, Artificial Sequence
  Synthetic oligonucleotide; TTA chr11 5365711 5365732 5365716 5365711 -
aataattacaggacaatttaaa

SEQ ID NO: 118986 - DNA, 22 bp, Artificial Sequence
  Synthetic oligonucleotide; TTA chr11 5365703 5365724 5365708 5365703 -
caggacaatttaaatgtatcag

SEQ ID NO: 118987 - DNA, 22 bp, Artificial Sequence
  Synthetic oligonucleotide; TTT chr11 5365692 5365713 5365697 5365692 -
aaatgtatcagtttgggttgaa

SEQ ID NO: 118988 - DNA, 22 bp, Artificial Sequence
  Synthetic oligonucleotide; TTA chr11 5365691 5365712 5365696 5365691 -
aatgtatcagtttgggttgaat

SEQ ID NO: 118989 - DNA, 22 bp, Artificial Sequence
  Synthetic oligonucleotide; TTT chr11 5365678 5365699 5365683 5365678 -
gggttgaataaaatcagggatg

SEQ ID NO: 118990 - DNA, 22 bp, Artificial Sequence
  Synthetic oligonucleotide; TTG chr11 5365677 5365698 5365682 5365677 -
ggttgaataaaatcagggatgt

SEQ ID NO: 118991 - DNA, 22 bp, Artificial Sequence
  Synthetic oligonucleotide; TTG chr11 5365672 5365693 5365677 5365672 -
aataaaatcagggatgtttctc

SEQ ID NO: 118992 - DNA, 22 bp, Artificial Sequence
  Synthetic oligonucleotide; TTT chr11 5365653 5365674 5365658 5365653 -
ctcattagggcctcaacacatt

SEQ ID NO: 118993 - DNA, 22 bp, Artificial Sequence
  Synthetic oligonucleotide; TTC chr11 5365652 5365673 5365657 5365652 -
tcattagggcctcaacacattt

SEQ ID NO: 118994 - DNA, 22 bp, Artificial Sequence
  Synthetic oligonucleotide; CTC chr11 5365650 5365671 5365655 5365650 -
attagggcctcaacacatttgg

SEQ ID NO: 118995 - DNA, 22 bp, Artificial Sequence
  Synthetic oligonucleotide; TTA chr11 5365646 5365667 5365651 5365646 -
gggcctcaacacatttggaggt

SEQ ID NO: 118996 - DNA, 22 bp, Artificial Sequence
  Synthetic oligonucleotide; CTC chr11 5365639 5365660 5365644 5365639 -
aacacatttggaggtgtgttaa

SEQ ID NO: 118997 - DNA, 22 bp, Artificial Sequence
  Synthetic oligonucleotide; TTT chr11 5365630 5365651 5365635 5365630 -
ggaggtgtgttaagacagtagt

SEQ ID NO: 118998 - DNA, 22 bp, Artificial Sequence
  Synthetic oligonucleotide; TTG chr11 5365629 5365650 5365634 5365629 -
gaggtgtgttaagacagtagtc

SEQ ID NO: 118999 - DNA, 22 bp, Artificial Sequence
  Synthetic oligonucleotide; TTA chr11 5365618 5365639 5365623 5365618 -
agacagtagtcagattcacacc

SEQ ID NO: 119000 - DNA, 22 bp, Artificial Sequence
  Synthetic oligonucleotide; TTC chr11 5365601 5365622 5365606 5365601 -
acaccaagagccctgtcatggc

SEQ ID NO: 119001 - DNA, 22 bp, Artificial Sequence
  Synthetic oligonucleotide; CTG chr11 5365586 5365607 5365591 5365586 -
tcatggcaaaccgatgtcatgt

SEQ ID NO: 119002 - DNA, 22 bp, Artificial Sequence
  Synthetic oligonucleotide; CTC chr11 5365557 5365578 5365562 5365557 -
gataatgtttttgtgtatcaat

SEQ ID NO: 119003 - DNA, 22 bp, Artificial Sequence
  Synthetic oligonucleotide; TTT chr11 5365547 5365568 5365552 5365547 -
ttgtgtatcaatatgctttgtg

SEQ ID NO: 119004 - DNA, 22 bp, Artificial Sequence
  Synthetic oligonucleotide; TTT chr11 5365546 5365567 5365551 5365546 -
tgtgtatcaatatgctttgtga

SEQ ID NO: 119005 - DNA, 22 bp, Artificial Sequence
  Synthetic oligonucleotide; TTT chr11 5365545 5365566 5365550 5365545 -
gtgtatcaatatgctttgtgaa

SEQ ID NO: 119006 - DNA, 22 bp, Artificial Sequence
  Synthetic oligonucleotide; TTG chr11 5365544 5365565 5365549 5365544 -
tgtatcaatatgctttgtgaaa

SEQ ID NO: 119007 - DNA, 22 bp, Artificial Sequence
  Synthetic oligonucleotide; CTT chr11 5365529 5365550 5365534 5365529 -
tgtgaaaaaacttcgaggtagt

SEQ ID NO: 119008 - DNA, 22 bp, Artificial Sequence
  Synthetic oligonucleotide; TTT chr11 5365528 5365549 5365533 5365528 -
gtgaaaaaacttcgaggtagta

SEQ ID NO: 119009 - DNA, 22 bp, Artificial Sequence
  Synthetic oligonucleotide; TTG chr11 5365527 5365548 5365532 5365527 -
tgaaaaaacttcgaggtagtac

SEQ ID NO: 119010 - DNA, 22 bp, Artificial Sequence
  Synthetic oligonucleotide; CTT chr11 5365516 5365537 5365521 5365516 -
cgaggtagtacagccatatcct

SEQ ID NO: 119011 - DNA, 22 bp, Artificial Sequence
  Synthetic oligonucleotide; TTC chr11 5365515 5365536 5365520 5365515 -
gaggtagtacagccatatccta

SEQ ID NO: 119012 - DNA, 22 bp, Artificial Sequence
  Synthetic oligonucleotide; CTA chr11 5365493 5365514 5365498 5365493 -
tcctgtgcatagacaggaaaat

SEQ ID NO: 119013 - DNA, 22 bp, Artificial Sequence
  Synthetic oligonucleotide; CTG chr11 5365488 5365509 5365493 5365488 -
tgcatagacaggaaaatggttg

SEQ ID NO: 119014 - DNA, 22 bp, Artificial Sequence
  Synthetic oligonucleotide; TTG chr11 5365466 5365487 5365471 5365466 -
ctgactggcagaccagaattgg

SEQ ID NO: 119015 - DNA, 22 bp, Artificial Sequence
  Synthetic oligonucleotide; CTG chr11 5365463 5365484 5365468 5365463 -
actggcagaccagaattgggtt

SEQ ID NO: 119016 - DNA, 22 bp, Artificial Sequence
  Synthetic oligonucleotide; CTG chr11 5365459 5365480 5365464 5365459 -
gcagaccagaattgggttacct

SEQ ID NO: 119017 - DNA, 22 bp, Artificial Sequence
  Synthetic oligonucleotide; TTG chr11 5365445 5365466 5365450 5365445 -
ggttaccttttcatctaaatgc

SEQ ID NO: 119018 - DNA, 22 bp, Artificial Sequence
  Synthetic oligonucleotide; TTA chr11 5365440 5365461 5365445 5365440 -
ccttttcatctaaatgcatctc

SEQ ID NO: 119019 - DNA, 22 bp, Artificial Sequence
  Synthetic oligonucleotide; CTT chr11 5365436 5365457 5365441 5365436 -
ttcatctaaatgcatctctcca

SEQ ID NO: 119020 - DNA, 22 bp, Artificial Sequence
  Synthetic oligonucleotide; TTT chr11 5365435 5365456 5365440 5365435 -
tcatctaaatgcatctctccac

SEQ ID NO: 119021 - DNA, 22 bp, Artificial Sequence
  Synthetic oligonucleotide; TTT chr11 5365434 5365455 5365439 5365434 -
catctaaatgcatctctccaca

SEQ ID NO: 119022 - DNA, 22 bp, Artificial Sequence
  Synthetic oligonucleotide; TTC chr11 5365433 5365454 5365438 5365433 -
atctaaatgcatctctccacag

SEQ ID NO: 119023 - DNA, 22 bp, Artificial Sequence
  Synthetic oligonucleotide; CTA chr11 5365428 5365449 5365433 5365428 -
aatgcatctctccacagcgatt

SEQ ID NO: 119024 - DNA, 22 bp, Artificial Sequence
  Synthetic oligonucleotide; CTC chr11 5365418 5365439 5365423 5365418 -
tccacagcgatttctacagtat

SEQ ID NO: 119025 - DNA, 22 bp, Artificial Sequence
  Synthetic oligonucleotide; CTC chr11 5365416 5365437 5365421 5365416 -
cacagcgatttctacagtatgc

SEQ ID NO: 119026 - DNA, 22 bp, Artificial Sequence
  Synthetic oligonucleotide; TTT chr11 5365405 5365426 5365410 5365405 -
ctacagtatgcttgatcttgtc

SEQ ID NO: 119027 - DNA, 22 bp, Artificial Sequence
  Synthetic oligonucleotide; TTC chr11 5365404 5365425 5365409 5365404 -
tacagtatgcttgatcttgtct

SEQ ID NO: 119028 - DNA, 22 bp, Artificial Sequence
  Synthetic oligonucleotide; CTA chr11 5365402 5365423 5365407 5365402 -
cagtatgcttgatcttgtctct

SEQ ID NO: 119029 - DNA, 22 bp, Artificial Sequence
  Synthetic oligonucleotide; CTT chr11 5365392 5365413 5365397 5365392 -
gatcttgtctctcatcccatat

SEQ ID NO: 119030 - DNA, 22 bp, Artificial Sequence
  Synthetic oligonucleotide; TTG chr11 5365391 5365412 5365396 5365391 -
atcttgtctctcatcccatatt

SEQ ID NO: 119031 - DNA, 22 bp, Artificial Sequence
  Synthetic oligonucleotide; CTT chr11 5365386 5365407 5365391 5365386 -
gtctctcatcccatatttggtt

SEQ ID NO: 119032 - DNA, 22 bp, Artificial Sequence
  Synthetic oligonucleotide; TTG chr11 5365385 5365406 5365390 5365385 -
tctctcatcccatatttggtta

SEQ ID NO: 119033 - DNA, 22 bp, Artificial Sequence
  Synthetic oligonucleotide; CTC chr11 5365381 5365402 5365386 5365381 -
tcatcccatatttggttacttg

SEQ ID NO: 119034 - DNA, 22 bp, Artificial Sequence
  Synthetic oligonucleotide; CTC chr11 5365379 5365400 5365384 5365379 -
atcccatatttggttacttgtt

SEQ ID NO: 119035 - DNA, 22 bp, Artificial Sequence
  Synthetic oligonucleotide; TTT chr11 5365368 5365389 5365373 5365368 -
ggttacttgttgccatgccggg

SEQ ID NO: 119036 - DNA, 22 bp, Artificial Sequence
  Synthetic oligonucleotide; TTG chr11 5365367 5365388 5365372 5365367 -
gttacttgttgccatgccggga

SEQ ID NO: 119037 - DNA, 22 bp, Artificial Sequence
  Synthetic oligonucleotide; TTA chr11 5365363 5365384 5365368 5365363 -
cttgttgccatgccgggaccag

SEQ ID NO: 119038 - DNA, 22 bp, Artificial Sequence
  Synthetic oligonucleotide; CTT chr11 5365360 5365381 5365365 5365360 -
gttgccatgccgggaccagcca

SEQ ID NO: 119039 - DNA, 22 bp, Artificial Sequence
  Synthetic oligonucleotide; TTG chr11 5365359 5365380 5365364 5365359 -
ttgccatgccgggaccagccat

SEQ ID NO: 119040 - DNA, 22 bp, Artificial Sequence
  Synthetic oligonucleotide; TTG chr11 5365356 5365377 5365361 5365356 -
ccatgccgggaccagccatgca

SEQ ID NO: 119041 - DNA, 22 bp, Artificial Sequence
  Synthetic oligonucleotide; TTG chr11 5365331 5365352 5365336 5365331 -
gtttgcctttggcatcagtgta

SEQ ID NO: 119042 - DNA, 22 bp, Artificial Sequence
  Synthetic oligonucleotide; TTT chr11 5365327 5365348 5365332 5365327 -
gcctttggcatcagtgtatgct

SEQ ID NO: 119043 - DNA, 22 bp, Artificial Sequence
  Synthetic oligonucleotide; TTG chr11 5365326 5365347 5365331 5365326 -
cctttggcatcagtgtatgctc

SEQ ID NO: 119044 - DNA, 22 bp, Artificial Sequence
  Synthetic oligonucleotide; CTT chr11 5365322 5365343 5365327 5365322 -
tggcatcagtgtatgctctata

SEQ ID NO: 119045 - DNA, 22 bp, Artificial Sequence
  Synthetic oligonucleotide; TTT chr11 5365321 5365342 5365326 5365321 -
ggcatcagtgtatgctctatac

SEQ ID NO: 119046 - DNA, 22 bp, Artificial Sequence
  Synthetic oligonucleotide; TTG chr11 5365320 5365341 5365325 5365320 -
gcatcagtgtatgctctatacc

SEQ ID NO: 119047 - DNA, 22 bp, Artificial Sequence
  Synthetic oligonucleotide; CTC chr11 5365304 5365325 5365309 5365304 -
tatacccatgttttccacagct

SEQ ID NO: 119048 - DNA, 22 bp, Artificial Sequence
  Synthetic oligonucleotide; CTA chr11 5365302 5365323 5365307 5365302 -
tacccatgttttccacagctgg

SEQ ID NO: 119049 - DNA, 22 bp, Artificial Sequence
  Synthetic oligonucleotide; TTT chr11 5365291 5365312 5365296 5365291 -
tccacagctggcaaacaccagt

SEQ ID NO: 119050 - DNA, 22 bp, Artificial Sequence
  Synthetic oligonucleotide; TTT chr11 5365290 5365311 5365295 5365290 -
ccacagctggcaaacaccagtg

SEQ ID NO: 119051 - DNA, 22 bp, Artificial Sequence
  Synthetic oligonucleotide; TTC chr11 5365289 5365310 5365294 5365289 -
cacagctggcaaacaccagtgg

SEQ ID NO: 119052 - DNA, 22 bp, Artificial Sequence
  Synthetic oligonucleotide; CTG chr11 5365281 5365302 5365286 5365281 -
gcaaacaccagtggtattctaa

SEQ ID NO: 119053 - DNA, 22 bp, Artificial Sequence
  Synthetic oligonucleotide; TTC chr11 5365262 5365283 5365267 5365262 -
taataacactgttctcaccacc

SEQ ID NO: 119054 - DNA, 22 bp, Artificial Sequence
  Synthetic oligonucleotide; CTA chr11 5365260 5365281 5365265 5365260 -
ataacactgttctcaccaccag

SEQ ID NO: 119055 - DNA, 22 bp, Artificial Sequence
  Synthetic oligonucleotide; CTG chr11 5365251 5365272 5365256 5365251 -
ttctcaccaccagcccttctgg

SEQ ID NO: 119056 - DNA, 22 bp, Artificial Sequence
  Synthetic oligonucleotide; TTC chr11 5365248 5365269 5365253 5365248 -
tcaccaccagcccttctggttc

SEQ ID NO: 119057 - DNA, 22 bp, Artificial Sequence
  Synthetic oligonucleotide; CTC chr11 5365246 5365267 5365251 5365246 -
accaccagcccttctggttcac

SEQ ID NO: 119058 - DNA, 22 bp, Artificial Sequence
  Synthetic oligonucleotide; CTT chr11 5365233 5365254 5365238 5365233 -
ctggttcactagatgtttccat

SEQ ID NO: 119059 - DNA, 22 bp, Artificial Sequence
  Synthetic oligonucleotide; TTC chr11 5365232 5365253 5365237 5365232 -
tggttcactagatgtttccatg

SEQ ID NO: 119060 - DNA, 22 bp, Artificial Sequence
  Synthetic oligonucleotide; CTG chr11 5365230 5365251 5365235 5365230 -
gttcactagatgtttccatgga

SEQ ID NO: 119061 - DNA, 22 bp, Artificial Sequence
  Synthetic oligonucleotide; TTC chr11 5365226 5365247 5365231 5365226 -
actagatgtttccatggagtcc

SEQ ID NO: 119062 - DNA, 22 bp, Artificial Sequence
  Synthetic oligonucleotide; CTA chr11 5365222 5365243 5365227 5365222 -
gatgtttccatggagtcctgat

SEQ ID NO: 119063 - DNA, 22 bp, Artificial Sequence
  Synthetic oligonucleotide; TTT chr11 5365215 5365236 5365220 5365215 -
ccatggagtcctgatataatag

SEQ ID NO: 119064 - DNA, 22 bp, Artificial Sequence
  Synthetic oligonucleotide; TTC chr11 5365214 5365235 5365219 5365214 -
catggagtcctgatataataga

SEQ ID NO: 119065 - DNA, 22 bp, Artificial Sequence
  Synthetic oligonucleotide; CTG chr11 5365202 5365223 5365207 5365202 -
atataatagacaacttatttta

SEQ ID NO: 119066 - DNA, 22 bp, Artificial Sequence
  Synthetic oligonucleotide; CTT chr11 5365186 5365207 5365191 5365186 -
attttaaacacagttgccagcc

SEQ ID NO: 119067 - DNA, 22 bp, Artificial Sequence
  Synthetic oligonucleotide; TTA chr11 5365185 5365206 5365190 5365185 -
ttttaaacacagttgccagccc

SEQ ID NO: 119068 - DNA, 22 bp, Artificial Sequence
  Synthetic oligonucleotide; TTT chr11 5365182 5365203 5365187 5365182 -
taaacacagttgccagccctac

SEQ ID NO: 119069 - DNA, 22 bp, Artificial Sequence
  Synthetic oligonucleotide; TTT chr11 5365181 5365202 5365186 5365181 -
aaacacagttgccagccctaca

SEQ ID NO: 119070 - DNA, 22 bp, Artificial Sequence
  Synthetic oligonucleotide; TTA chr11 5365180 5365201 5365185 5365180 -
aacacagttgccagccctacac

SEQ ID NO: 119071 - DNA, 22 bp, Artificial Sequence
  Synthetic oligonucleotide; TTG chr11 5365170 5365191 5365175 5365170 -
ccagccctacactctaaatgtc

SEQ ID NO: 119072 - DNA, 22 bp, Artificial Sequence
  Synthetic oligonucleotide; CTA chr11 5365161 5365182 5365166 5365161 -
cactctaaatgtctacagaact

SEQ ID NO: 119073 - DNA, 22 bp, Artificial Sequence
  Synthetic oligonucleotide; CTC chr11 5365156 5365177 5365161 5365156 -
taaatgtctacagaactcacca

SEQ ID NO: 119074 - DNA, 22 bp, Artificial Sequence
  Synthetic oligonucleotide; CTA chr11 5365154 5365175 5365159 5365154 -
aatgtctacagaactcaccaga

SEQ ID NO: 119075 - DNA, 22 bp, Artificial Sequence
  Synthetic oligonucleotide; CTA chr11 5365146 5365167 5365151 5365146 -
cagaactcaccagacaaagaag

SEQ ID NO: 119076 - DNA, 22 bp, Artificial Sequence
  Synthetic oligonucleotide; CTC chr11 5365138 5365159 5365143 5365138 -
accagacaaagaagaaaagtta

SEQ ID NO: 119077 - DNA, 22 bp, Artificial Sequence
  Synthetic oligonucleotide; TTA chr11 5365116 5365137 5365121 5365116 -
tttagcagttgtgataagctac

SEQ ID NO: 119078 - DNA, 22 bp, Artificial Sequence
  Synthetic oligonucleotide; TTT chr11 5365113 5365134 5365118 5365113 -
agcagttgtgataagctaccac

SEQ ID NO: 119079 - DNA, 22 bp, Artificial Sequence
  Synthetic oligonucleotide; TTA chr11 5365112 5365133 5365117 5365112 -
gcagttgtgataagctaccact

SEQ ID NO: 119080 - DNA, 22 bp, Artificial Sequence
  Synthetic oligonucleotide; TTG chr11 5365105 5365126 5365110 5365105 -
tgataagctaccacttgaattc

SEQ ID NO: 119081 - DNA, 22 bp, Artificial Sequence
  Synthetic oligonucleotide; CTA chr11 5365095 5365116 5365100 5365095 -
ccacttgaattcaaggttatta

SEQ ID NO: 119082 - DNA, 22 bp, Artificial Sequence
  Synthetic oligonucleotide; CTT chr11 5365089 5365110 5365094 5365089 -
gaattcaaggttattacaagca

SEQ ID NO: 119083 - DNA, 22 bp, Artificial Sequence
  Synthetic oligonucleotide; TTG chr11 5365088 5365109 5365093 5365088 -
aattcaaggttattacaagcat

SEQ ID NO: 119084 - DNA, 22 bp, Artificial Sequence
  Synthetic oligonucleotide; TTC chr11 5365083 5365104 5365088 5365083 -
aaggttattacaagcatgatta

SEQ ID NO: 119085 - DNA, 22 bp, Artificial Sequence
  Synthetic oligonucleotide; TTA chr11 5365076 5365097 5365081 5365076 -
ttacaagcatgattattgacac

SEQ ID NO: 119086 - DNA, 22 bp, Artificial Sequence
  Synthetic oligonucleotide; TTA chr11 5365073 5365094 5365078 5365073 -
caagcatgattattgacacatt

SEQ ID NO: 119087 - DNA, 22 bp, Artificial Sequence
  Synthetic oligonucleotide; TTA chr11 5365061 5365082 5365066 5365061 -
ttgacacatttggttttattga

SEQ ID NO: 119088 - DNA, 22 bp, Artificial Sequence
  Synthetic oligonucleotide; TTG chr11 5365058 5365079 5365063 5365058 -
acacatttggttttattgagtg

SEQ ID NO: 119089 - DNA, 22 bp, Artificial Sequence
  Synthetic oligonucleotide; TTT chr11 5365050 5365071 5365055 5365050 -
ggttttattgagtgtcccttat

SEQ ID NO: 119090 - DNA, 22 bp, Artificial Sequence
  Synthetic oligonucleotide; TTG chr11 5365049 5365070 5365054 5365049 -
gttttattgagtgtcccttatt

SEQ ID NO: 119091 - DNA, 22 bp, Artificial Sequence
  Synthetic oligonucleotide; TTT chr11 5365045 5365066 5365050 5365045 -
tattgagtgtcccttatttgcc

SEQ ID NO: 119092 - DNA, 22 bp, Artificial Sequence
  Synthetic oligonucleotide; TTT chr11 5365044 5365065 5365049 5365044 -
attgagtgtcccttatttgccc

SEQ ID NO: 119093 - DNA, 22 bp, Artificial Sequence
  Synthetic oligonucleotide; TTA chr11 5365043 5365064 5365048 5365043 -
ttgagtgtcccttatttgccca

SEQ ID NO: 119094 - DNA, 22 bp, Artificial Sequence
  Synthetic oligonucleotide; TTG chr11 5365040 5365061 5365045 5365040 -
agtgtcccttatttgcccaaga

SEQ ID NO: 119095 - DNA, 22 bp, Artificial Sequence
  Synthetic oligonucleotide; CTT chr11 5365030 5365051 5365035 5365030 -
atttgcccaagattcattgctg

SEQ ID NO: 119096 - DNA, 22 bp, Artificial Sequence
  Synthetic oligonucleotide; TTA chr11 5365029 5365050 5365034 5365029 -
tttgcccaagattcattgctgt

SEQ ID NO: 119097 - DNA, 22 bp, Artificial Sequence
  Synthetic oligonucleotide; TTT chr11 5365026 5365047 5365031 5365026 -
gcccaagattcattgctgtgac

SEQ ID NO: 119098 - DNA, 22 bp, Artificial Sequence
  Synthetic oligonucleotide; TTG chr11 5365025 5365046 5365030 5365025 -
cccaagattcattgctgtgaca

SEQ ID NO: 119099 - DNA, 22 bp, Artificial Sequence
  Synthetic oligonucleotide; TTC chr11 5365015 5365036 5365020 5365015 -
attgctgtgacaagaatgacaa

SEQ ID NO: 119100 - DNA, 22 bp, Artificial Sequence
  Synthetic oligonucleotide; TTG chr11 5365011 5365032 5365016 5365011 -
ctgtgacaagaatgacaagaag

SEQ ID NO: 119101 - DNA, 22 bp, Artificial Sequence
  Synthetic oligonucleotide; CTG chr11 5365008 5365029 5365013 5365008 -
tgacaagaatgacaagaagaag

SEQ ID NO: 119102 - DNA, 22 bp, Artificial Sequence
  Synthetic oligonucleotide; TTA chr11 5364980 5365001 5364985 5364980 -
cttgagaaatccccttgtagcc

SEQ ID NO: 119103 - DNA, 22 bp, Artificial Sequence
  Synthetic oligonucleotide; CTT chr11 5364977 5364998 5364982 5364977 -
gagaaatccccttgtagccttc

SEQ ID NO: 119104 - DNA, 22 bp, Artificial Sequence
  Synthetic oligonucleotide; TTG chr11 5364976 5364997 5364981 5364976 -
agaaatccccttgtagccttct

SEQ ID NO: 119105 - DNA, 22 bp, Artificial Sequence
  Synthetic oligonucleotide; CTT chr11 5364964 5364985 5364969 5364964 -
gtagccttctgttacttcattt

SEQ ID NO: 119106 - DNA, 22 bp, Artificial Sequence
  Synthetic oligonucleotide; TTG chr11 5364963 5364984 5364968 5364963 -
tagccttctgttacttcatttt

SEQ ID NO: 119107 - DNA, 22 bp, Artificial Sequence
  Synthetic oligonucleotide; CTT chr11 5364956 5364977 5364961 5364956 -
ctgttacttcatttttttccct

SEQ ID NO: 119108 - DNA, 22 bp, Artificial Sequence
  Synthetic oligonucleotide; TTC chr11 5364955 5364976 5364960 5364955 -
tgttacttcatttttttccctc

SEQ ID NO: 119109 - DNA, 22 bp, Artificial Sequence
  Synthetic oligonucleotide; CTG chr11 5364953 5364974 5364958 5364953 -
ttacttcatttttttccctctc

SEQ ID NO: 119110 - DNA, 22 bp, Artificial Sequence
  Synthetic oligonucleotide; TTA chr11 5364950 5364971 5364955 5364950 -
cttcatttttttccctctctct

SEQ ID NO: 119111 - DNA, 22 bp, Artificial Sequence
  Synthetic oligonucleotide; CTT chr11 5364947 5364968 5364952 5364947 -
catttttttccctctctctctg

SEQ ID NO: 119112 - DNA, 22 bp, Artificial Sequence
  Synthetic oligonucleotide; TTC chr11 5364946 5364967 5364951 5364946 -
atttttttccctctctctctgc

SEQ ID NO: 119113 - DNA, 22 bp, Artificial Sequence
  Synthetic oligonucleotide; TTT chr11 5364942 5364963 5364947 5364942 -
ttttccctctctctctgcttct

SEQ ID NO: 119114 - DNA, 22 bp, Artificial Sequence
  Synthetic oligonucleotide; TTT chr11 5364941 5364962 5364946 5364941 -
tttccctctctctctgcttctc

SEQ ID NO: 119115 - DNA, 22 bp, Artificial Sequence
  Synthetic oligonucleotide; TTT chr11 5364940 5364961 5364945 5364940 -
ttccctctctctctgcttctcc

SEQ ID NO: 119116 - DNA, 22 bp, Artificial Sequence
  Synthetic oligonucleotide; TTT chr11 5364939 5364960 5364944 5364939 -
tccctctctctctgcttctcct

SEQ ID NO: 119117 - DNA, 22 bp, Artificial Sequence
  Synthetic oligonucleotide; TTT chr11 5364938 5364959 5364943 5364938 -
ccctctctctctgcttctcctt

SEQ ID NO: 119118 - DNA, 22 bp, Artificial Sequence
  Synthetic oligonucleotide; TTC chr11 5364937 5364958 5364942 5364937 -
cctctctctctgcttctccttg

SEQ ID NO: 119119 - DNA, 22 bp, Artificial Sequence
  Synthetic oligonucleotide; CTC chr11 5364933 5364954 5364938 5364933 -
tctctctgcttctccttgtgta

SEQ ID NO: 119120 - DNA, 22 bp, Artificial Sequence
  Synthetic oligonucleotide; CTC chr11 5364931 5364952 5364936 5364931 -
tctctgcttctccttgtgtatc

SEQ ID NO: 119121 - DNA, 22 bp, Artificial Sequence
  Synthetic oligonucleotide; CTC chr11 5364929 5364950 5364934 5364929 -
tctgcttctccttgtgtatcca

SEQ ID NO: 119122 - DNA, 22 bp, Artificial Sequence
  Synthetic oligonucleotide; CTC chr11 5364927 5364948 5364932 5364927 -
tgcttctccttgtgtatccacc

SEQ ID NO: 119123 - DNA, 22 bp, Artificial Sequence
  Synthetic oligonucleotide; CTG chr11 5364925 5364946 5364930 5364925 -
cttctccttgtgtatccaccat

SEQ ID NO: 119124 - DNA, 22 bp, Artificial Sequence
  Synthetic oligonucleotide; CTT chr11 5364922 5364943 5364927 5364922 -
ctccttgtgtatccaccataga

SEQ ID NO: 119125 - DNA, 22 bp, Artificial Sequence
  Synthetic oligonucleotide; TTC chr11 5364921 5364942 5364926 5364921 -
tccttgtgtatccaccatagaa

SEQ ID NO: 119126 - DNA, 22 bp, Artificial Sequence
  Synthetic oligonucleotide; CTC chr11 5364919 5364940 5364924 5364919 -
cttgtgtatccaccatagaagc

SEQ ID NO: 119127 - DNA, 22 bp, Artificial Sequence
  Synthetic oligonucleotide; CTT chr11 5364916 5364937 5364921 5364916 -
gtgtatccaccatagaagctac

SEQ ID NO: 119128 - DNA, 22 bp, Artificial Sequence
  Synthetic oligonucleotide; TTG chr11 5364915 5364936 5364920 5364915 -
tgtatccaccatagaagctaca

SEQ ID NO: 119129 - DNA, 22 bp, Artificial Sequence
  Synthetic oligonucleotide; CTA chr11 5364895 5364916 5364900 5364895 -
caatgattaaaaattatttact

SEQ ID NO: 119130 - DNA, 22 bp, Artificial Sequence
  Synthetic oligonucleotide; TTA chr11 5364886 5364907 5364891 5364886 -
aaaattatttactaaaatcatt

SEQ ID NO: 119131 - DNA, 22 bp, Artificial Sequence
  Synthetic oligonucleotide; TTA chr11 5364879 5364900 5364884 5364879 -
tttactaaaatcatttaataaa

SEQ ID NO: 119132 - DNA, 22 bp, Artificial Sequence
  Synthetic oligonucleotide; TTT chr11 5364876 5364897 5364881 5364876 -
actaaaatcatttaataaaact

SEQ ID NO: 119133 - DNA, 22 bp, Artificial Sequence
  Synthetic oligonucleotide; TTA chr11 5364875 5364896 5364880 5364875 -
ctaaaatcatttaataaaacta

SEQ ID NO: 119134 - DNA, 22 bp, Artificial Sequence
  Synthetic oligonucleotide; CTA chr11 5364872 5364893 5364877 5364872 -
aaatcatttaataaaactatat

SEQ ID NO: 119135 - DNA, 22 bp, Artificial Sequence
  Synthetic oligonucleotide; TTT chr11 5364863 5364884 5364868 5364863 -
aataaaactatattaaatggaa

SEQ ID NO: 119136 - DNA, 22 bp, Artificial Sequence
  Synthetic oligonucleotide; TTA chr11 5364862 5364883 5364867 5364862 -
ataaaactatattaaatggaaa

SEQ ID NO: 119137 - DNA, 22 bp, Artificial Sequence
  Synthetic oligonucleotide; CTA chr11 5364853 5364874 5364858 5364853 -
tattaaatggaaattcaccaat

SEQ ID NO: 119138 - DNA, 22 bp, Artificial Sequence
  Synthetic oligonucleotide; TTA chr11 5364848 5364869 5364853 5364848 -
aatggaaattcaccaatagaaa

SEQ ID NO: 119139 - DNA, 22 bp, Artificial Sequence
  Synthetic oligonucleotide; TTC chr11 5364837 5364858 5364842 5364837 -
accaatagaaacttaggaaagg

SEQ ID NO: 119140 - DNA, 22 bp, Artificial Sequence
  Synthetic oligonucleotide; CTT chr11 5364823 5364844 5364828 5364823 -
aggaaaggtaacaaagtcctgt

SEQ ID NO: 119141 - DNA, 22 bp, Artificial Sequence
  Synthetic oligonucleotide; TTA chr11 5364822 5364843 5364827 5364822 -
ggaaaggtaacaaagtcctgtg

SEQ ID NO: 119142 - DNA, 22 bp, Artificial Sequence
  Synthetic oligonucleotide; CTG chr11 5364802 5364823 5364807 5364802 -
tgaggttggcttcagcatatcc

SEQ ID NO: 119143 - DNA, 22 bp, Artificial Sequence
  Synthetic oligonucleotide; TTG chr11 5364794 5364815 5364799 5364794 -
gcttcagcatatccagaacaca

SEQ ID NO: 119144 - DNA, 22 bp, Artificial Sequence
  Synthetic oligonucleotide; CTT chr11 5364790 5364811 5364795 5364790 -
cagcatatccagaacacatgct

SEQ ID NO: 119145 - DNA, 22 bp, Artificial Sequence
  Synthetic oligonucleotide; TTC chr11 5364789 5364810 5364794 5364789 -
agcatatccagaacacatgctc

SEQ ID NO: 119146 - DNA, 22 bp, Artificial Sequence
  Synthetic oligonucleotide; CTC chr11 5364767 5364788 5364772 5364767 -
aggaaggaagagggtgggggga

SEQ ID NO: 119147 - DNA, 22 bp, Artificial Sequence
  Synthetic oligonucleotide; CTG chr11 5364740 5364761 5364745 5364740 -
taaacaagggactttgatcatt

SEQ ID NO: 119148 - DNA, 22 bp, Artificial Sequence
  Synthetic oligonucleotide; CTT chr11 5364726 5364747 5364731 5364726 -
tgatcattcactttgaagagtc

SEQ ID NO: 119149 - DNA, 22 bp, Artificial Sequence
  Synthetic oligonucleotide; TTT chr11 5364725 5364746 5364730 5364725 -
gatcattcactttgaagagtct

SEQ ID NO: 119150 - DNA, 22 bp, Artificial Sequence
  Synthetic oligonucleotide; TTG chr11 5364724 5364745 5364729 5364724 -
atcattcactttgaagagtctt

SEQ ID NO: 119151 - DNA, 22 bp, Artificial Sequence
  Synthetic oligonucleotide; TTC chr11 5364717 5364738 5364722 5364717 -
actttgaagagtcttctgtcat

SEQ ID NO: 119152 - DNA, 22 bp, Artificial Sequence
  Synthetic oligonucleotide; CTT chr11 5364713 5364734 5364718 5364713 -
tgaagagtcttctgtcatatgc

SEQ ID NO: 119153 - DNA, 22 bp, Artificial Sequence
  Synthetic oligonucleotide; TTT chr11 5364712 5364733 5364717 5364712 -
gaagagtcttctgtcatatgct

SEQ ID NO: 119154 - DNA, 22 bp, Artificial Sequence
  Synthetic oligonucleotide; TTG chr11 5364711 5364732 5364716 5364711 -
aagagtcttctgtcatatgctg

SEQ ID NO: 119155 - DNA, 22 bp, Artificial Sequence
  Synthetic oligonucleotide; CTT chr11 5364702 5364723 5364707 5364702 -
ctgtcatatgctggatgggcaa

SEQ ID NO: 119156 - DNA, 22 bp, Artificial Sequence
  Synthetic oligonucleotide; TTC chr11 5364701 5364722 5364706 5364701 -
tgtcatatgctggatgggcaaa

SEQ ID NO: 119157 - DNA, 22 bp, Artificial Sequence
  Synthetic oligonucleotide; CTG chr11 5364699 5364720 5364704 5364699 -
tcatatgctggatgggcaaaca

SEQ ID NO: 119158 - DNA, 22 bp, Artificial Sequence
  Synthetic oligonucleotide; CTG chr11 5364689 5364710 5364694 5364689 -
gatgggcaaacagcttagaggg

SEQ ID NO: 119159 - DNA, 22 bp, Artificial Sequence
  Synthetic oligonucleotide; CTT chr11 5364673 5364694 5364678 5364673 -
agagggctgccttagagtgcac

SEQ ID NO: 119160 - DNA, 22 bp, Artificial Sequence
  Synthetic oligonucleotide; TTA chr11 5364672 5364693 5364677 5364672 -
gagggctgccttagagtgcaca

SEQ ID NO: 119161 - DNA, 22 bp, Artificial Sequence
  Synthetic oligonucleotide; CTG chr11 5364664 5364685 5364669 5364664 -
ccttagagtgcacaaaatcaga

SEQ ID NO: 119162 - DNA, 22 bp, Artificial Sequence
  Synthetic oligonucleotide; CTT chr11 5364660 5364681 5364665 5364660 -
agagtgcacaaaatcagagata

SEQ ID NO: 119163 - DNA, 22 bp, Artificial Sequence
  Synthetic oligonucleotide; TTA chr11 5364659 5364680 5364664 5364659 -
gagtgcacaaaatcagagatat

SEQ ID NO: 119164 - DNA, 22 bp, Artificial Sequence
  Synthetic oligonucleotide; TTC chr11 5364635 5364656 5364640 5364635 -
agagatgcacatgaggatggag

SEQ ID NO: 119165 - DNA, 22 bp, Artificial Sequence
  Synthetic oligonucleotide; CTC chr11 5364579 5364600 5364584 5364579 -
tcacgcttagtttattttttca

SEQ ID NO: 119166 - DNA, 22 bp, Artificial Sequence
  Synthetic oligonucleotide; CTC chr11 5364577 5364598 5364582 5364577 -
acgcttagtttattttttcatt

SEQ ID NO: 119167 - DNA, 22 bp, Artificial Sequence
  Synthetic oligonucleotide; CTT chr11 5364571 5364592 5364576 5364571 -
agtttattttttcatttaatac

SEQ ID NO: 119168 - DNA, 22 bp, Artificial Sequence
  Synthetic oligonucleotide; TTA chr11 5364570 5364591 5364575 5364570 -
gtttattttttcatttaataca

SEQ ID NO: 119169 - DNA, 22 bp, Artificial Sequence
  Synthetic oligonucleotide; TTT chr11 5364566 5364587 5364571 5364566 -
attttttcatttaatacagaat

SEQ ID NO: 119170 - DNA, 22 bp, Artificial Sequence
  Synthetic oligonucleotide; TTA chr11 5364565 5364586 5364570 5364565 -
ttttttcatttaatacagaata

SEQ ID NO: 119171 - DNA, 22 bp, Artificial Sequence
  Synthetic oligonucleotide; TTT chr11 5364562 5364583 5364567 5364562 -
tttcatttaatacagaatattt

SEQ ID NO: 119172 - DNA, 22 bp, Artificial Sequence
  Synthetic oligonucleotide; TTT chr11 5364561 5364582 5364566 5364561 -
ttcatttaatacagaatatttt

SEQ ID NO: 119173 - DNA, 22 bp, Artificial Sequence
  Synthetic oligonucleotide; TTT chr11 5364560 5364581 5364565 5364560 -
tcatttaatacagaatattttt

SEQ ID NO: 119174 - DNA, 22 bp, Artificial Sequence
  Synthetic oligonucleotide; TTT chr11 5364559 5364580 5364564 5364559 -
catttaatacagaatatttttt

SEQ ID NO: 119175 - DNA, 22 bp, Artificial Sequence
  Synthetic oligonucleotide; TTC chr11 5364558 5364579 5364563 5364558 -
atttaatacagaatatttttta

SEQ ID NO: 119176 - DNA, 22 bp, Artificial Sequence
  Synthetic oligonucleotide; TTT chr11 5364554 5364575 5364559 5364554 -
aatacagaatattttttaagct

SEQ ID NO: 119177 - DNA, 22 bp, Artificial Sequence
  Synthetic oligonucleotide; TTA chr11 5364553 5364574 5364558 5364553 -
atacagaatattttttaagctc

SEQ ID NO: 119178 - DNA, 22 bp, Artificial Sequence
  Synthetic oligonucleotide; TTT chr11 5364540 5364561 5364545 5364540 -
tttaagctcctactctcttcaa

SEQ ID NO: 119179 - DNA, 22 bp, Artificial Sequence
  Synthetic oligonucleotide; TTT chr11 5364539 5364560 5364544 5364539 -
ttaagctcctactctcttcaaa

SEQ ID NO: 119180 - DNA, 22 bp, Artificial Sequence
  Synthetic oligonucleotide; TTT chr11 5364538 5364559 5364543 5364538 -
taagctcctactctcttcaaag

SEQ ID NO: 119181 - DNA, 22 bp, Artificial Sequence
  Synthetic oligonucleotide; TTT chr11 5364537 5364558 5364542 5364537 -
aagctcctactctcttcaaagc

SEQ ID NO: 119182 - DNA, 22 bp, Artificial Sequence
  Synthetic oligonucleotide; TTA chr11 5364536 5364557 5364541 5364536 -
agctcctactctcttcaaagca

SEQ ID NO: 119183 - DNA, 22 bp, Artificial Sequence
  Synthetic oligonucleotide; CTC chr11 5364531 5364552 5364536 5364531 -
ctactctcttcaaagcactgtg

SEQ ID NO: 119184 - DNA, 22 bp, Artificial Sequence
  Synthetic oligonucleotide; CTA chr11 5364528 5364549 5364533 5364528 -
ctctcttcaaagcactgtgctt

SEQ ID NO: 119185 - DNA, 22 bp, Artificial Sequence
  Synthetic oligonucleotide; CTC chr11 5364525 5364546 5364530 5364525 -
tcttcaaagcactgtgcttaaa

SEQ ID NO: 119186 - DNA, 22 bp, Artificial Sequence
  Synthetic oligonucleotide; CTC chr11 5364523 5364544 5364528 5364523 -
ttcaaagcactgtgcttaaagc

SEQ ID NO: 119187 - DNA, 22 bp, Artificial Sequence
  Synthetic oligonucleotide; CTT chr11 5364521 5364542 5364526 5364521 -
caaagcactgtgcttaaagctg

SEQ ID NO: 119188 - DNA, 22 bp, Artificial Sequence
  Synthetic oligonucleotide; TTC chr11 5364520 5364541 5364525 5364520 -
aaagcactgtgcttaaagctgg

SEQ ID NO: 119189 - DNA, 22 bp, Artificial Sequence
  Synthetic oligonucleotide; CTG chr11 5364511 5364532 5364516 5364511 -
tgcttaaagctggcatgtagtt

SEQ ID NO: 119190 - DNA, 22 bp, Artificial Sequence
  Synthetic oligonucleotide; CTT chr11 5364506 5364527 5364511 5364506 -
aaagctggcatgtagttgaatt

SEQ ID NO: 119191 - DNA, 22 bp, Artificial Sequence
  Synthetic oligonucleotide; TTA chr11 5364505 5364526 5364510 5364505 -
aagctggcatgtagttgaattt

SEQ ID NO: 119192 - DNA, 22 bp, Artificial Sequence
  Synthetic oligonucleotide; CTG chr11 5364499 5364520 5364504 5364499 -
gcatgtagttgaatttatagtc

SEQ ID NO: 119193 - DNA, 22 bp, Artificial Sequence
  Synthetic oligonucleotide; TTG chr11 5364488 5364509 5364493 5364488 -
aatttatagtccagcaaggaga

SEQ ID NO: 119194 - DNA, 22 bp, Artificial Sequence
  Synthetic oligonucleotide; TTT chr11 5364483 5364504 5364488 5364483 -
atagtccagcaaggagactgac

SEQ ID NO: 119195 - DNA, 22 bp, Artificial Sequence
  Synthetic oligonucleotide; TTA chr11 5364482 5364503 5364487 5364482 -
tagtccagcaaggagactgacc

SEQ ID NO: 119196 - DNA, 22 bp, Artificial Sequence
  Synthetic oligonucleotide; CTG chr11 5364463 5364484 5364468 5364463 -
accattgagaattacaaatatg

SEQ ID NO: 119197 - DNA, 22 bp, Artificial Sequence
  Synthetic oligonucleotide; TTG chr11 5364456 5364477 5364461 5364456 -
agaattacaaatatggcaggaa

SEQ ID NO: 119198 - DNA, 22 bp, Artificial Sequence
  Synthetic oligonucleotide; TTA chr11 5364449 5364470 5364454 5364449 -
caaatatggcaggaatttctaa

SEQ ID NO: 119199 - DNA, 22 bp, Artificial Sequence
  Synthetic oligonucleotide; TTT chr11 5364431 5364452 5364436 5364431 -
ctaaacagaaagatgtgcagct

SEQ ID NO: 119200 - DNA, 22 bp, Artificial Sequence
  Synthetic oligonucleotide; TTC chr11 5364430 5364451 5364435 5364430 -
taaacagaaagatgtgcagctc

SEQ ID NO: 119201 - DNA, 22 bp, Artificial Sequence
  Synthetic oligonucleotide; CTA chr11 5364428 5364449 5364433 5364428 -
aacagaaagatgtgcagctctc

SEQ ID NO: 119202 - DNA, 22 bp, Artificial Sequence
  Synthetic oligonucleotide; CTC chr11 5364408 5364429 5364413 5364408 -
tcatatcctgtcacagaaatga

SEQ ID NO: 119203 - DNA, 22 bp, Artificial Sequence
  Synthetic oligonucleotide; CTC chr11 5364406 5364427 5364411 5364406 -
atatcctgtcacagaaatgaca

SEQ ID NO: 119204 - DNA, 22 bp, Artificial Sequence
  Synthetic oligonucleotide; CTG chr11 5364398 5364419 5364403 5364398 -
tcacagaaatgacacatcacat

SEQ ID NO: 119205 - DNA, 22 bp, Artificial Sequence
  Synthetic oligonucleotide; CTC chr11 5364371 5364392 5364376 5364371 -
ctaaactgcatcatagccttac

SEQ ID NO: 119206 - DNA, 22 bp, Artificial Sequence
  Synthetic oligonucleotide; CTA chr11 5364368 5364389 5364373 5364368 -
aactgcatcatagccttaccat

SEQ ID NO: 119207 - DNA, 22 bp, Artificial Sequence
  Synthetic oligonucleotide; CTG chr11 5364363 5364384 5364368 5364363 -
catcatagccttaccatgacct

SEQ ID NO: 119208 - DNA, 22 bp, Artificial Sequence
  Synthetic oligonucleotide; CTT chr11 5364351 5364372 5364356 5364351 -
accatgacctcctgtttctgca

SEQ ID NO: 119209 - DNA, 22 bp, Artificial Sequence
  Synthetic oligonucleotide; TTA chr11 5364350 5364371 5364355 5364350 -
ccatgacctcctgtttctgcat

SEQ ID NO: 119210 - DNA, 22 bp, Artificial Sequence
  Synthetic oligonucleotide; CTC chr11 5364340 5364361 5364345 5364340 -
ctgtttctgcatttggcttgcc

SEQ ID NO: 119211 - DNA, 22 bp, Artificial Sequence
  Synthetic oligonucleotide; CTG chr11 5364337 5364358 5364342 5364337 -
tttctgcatttggcttgcctcc

SEQ ID NO: 119212 - DNA, 22 bp, Artificial Sequence
  Synthetic oligonucleotide; TTT chr11 5364334 5364355 5364339 5364334 -
ctgcatttggcttgcctccata

SEQ ID NO: 119213 - DNA, 22 bp, Artificial Sequence
  Synthetic oligonucleotide; TTC chr11 5364333 5364354 5364338 5364333 -
tgcatttggcttgcctccatat

SEQ ID NO: 119214 - DNA, 22 bp, Artificial Sequence
  Synthetic oligonucleotide; CTG chr11 5364331 5364352 5364336 5364331 -
catttggcttgcctccatatca

SEQ ID NO: 119215 - DNA, 22 bp, Artificial Sequence
  Synthetic oligonucleotide; TTT chr11 5364326 5364347 5364331 5364326 -
ggcttgcctccatatcacccca

SEQ ID NO: 119216 - DNA, 22 bp, Artificial Sequence
  Synthetic oligonucleotide; TTG chr11 5364325 5364346 5364330 5364325 -
gcttgcctccatatcaccccaa

SEQ ID NO: 119217 - DNA, 22 bp, Artificial Sequence
  Synthetic oligonucleotide; CTT chr11 5364321 5364342 5364326 5364321 -
gcctccatatcaccccaaattc

SEQ ID NO: 119218 - DNA, 22 bp, Artificial Sequence
  Synthetic oligonucleotide; TTG chr11 5364320 5364341 5364325 5364320 -
cctccatatcaccccaaattcc

SEQ ID NO: 119219 - DNA, 22 bp, Artificial Sequence
  Synthetic oligonucleotide; CTC chr11 5364316 5364337 5364321 5364316 -
catatcaccccaaattccaatg

SEQ ID NO: 119220 - DNA, 22 bp, Artificial Sequence
  Synthetic oligonucleotide; TTC chr11 5364299 5364320 5364304 5364299 -
caatggttttgtgaagtcaaga

SEQ ID NO: 119221 - DNA, 22 bp, Artificial Sequence
  Synthetic oligonucleotide; TTT chr11 5364290 5364311 5364295 5364290 -
tgtgaagtcaagattggtggtc

SEQ ID NO: 119222 - DNA, 22 bp, Artificial Sequence
  Synthetic oligonucleotide; TTT chr11 5364289 5364310 5364294 5364289 -
gtgaagtcaagattggtggtca

SEQ ID NO: 119223 - DNA, 22 bp, Artificial Sequence
  Synthetic oligonucleotide; TTG chr11 5364288 5364309 5364293 5364288 -
tgaagtcaagattggtggtcaa

SEQ ID NO: 119224 - DNA, 22 bp, Artificial Sequence
  Synthetic oligonucleotide; TTG chr11 5364274 5364295 5364279 5364274 -
gtggtcaaggtcgagggaaagt

SEQ ID NO: 119225 - DNA, 22 bp, Artificial Sequence
  Synthetic oligonucleotide; CTC chr11 5364235 5364256 5364240 5364235 -
atctaactatgtcaaactttgt

SEQ ID NO: 119226 - DNA, 22 bp, Artificial Sequence
  Synthetic oligonucleotide; CTA chr11 5364230 5364251 5364235 5364230 -
actatgtcaaactttgtcatag

SEQ ID NO: 119227 - DNA, 22 bp, Artificial Sequence
  Synthetic oligonucleotide; CTA chr11 5364226 5364247 5364231 5364226 -
tgtcaaactttgtcatagctag

SEQ ID NO: 119228 - DNA, 22 bp, Artificial Sequence
  Synthetic oligonucleotide; CTT chr11 5364216 5364237 5364221 5364216 -
tgtcatagctagatgagctttt

SEQ ID NO: 119229 - DNA, 22 bp, Artificial Sequence
  Synthetic oligonucleotide; TTT chr11 5364215 5364236 5364220 5364215 -
gtcatagctagatgagcttttt

SEQ ID NO: 119230 - DNA, 22 bp, Artificial Sequence
  Synthetic oligonucleotide; TTG chr11 5364214 5364235 5364219 5364214 -
tcatagctagatgagctttttg

SEQ ID NO: 119231 - DNA, 22 bp, Artificial Sequence
  Synthetic oligonucleotide; CTA chr11 5364205 5364226 5364210 5364205 -
gatgagctttttgaacttaaag

SEQ ID NO: 119232 - DNA, 22 bp, Artificial Sequence
  Synthetic oligonucleotide; CTT chr11 5364196 5364217 5364201 5364196 -
tttgaacttaaagtttgtcaaa

SEQ ID NO: 119233 - DNA, 22 bp, Artificial Sequence
  Synthetic oligonucleotide; TTT chr11 5364195 5364216 5364200 5364195 -
ttgaacttaaagtttgtcaaaa

SEQ ID NO: 119234 - DNA, 22 bp, Artificial Sequence
  Synthetic oligonucleotide; TTT chr11 5364194 5364215 5364199 5364194 -
tgaacttaaagtttgtcaaaat

SEQ ID NO: 119235 - DNA, 22 bp, Artificial Sequence
  Synthetic oligonucleotide; TTT chr11 5364193 5364214 5364198 5364193 -
gaacttaaagtttgtcaaaatt

SEQ ID NO: 119236 - DNA, 22 bp, Artificial Sequence
  Synthetic oligonucleotide; TTG chr11 5364192 5364213 5364197 5364192 -
aacttaaagtttgtcaaaattt

SEQ ID NO: 119237 - DNA, 22 bp, Artificial Sequence
  Synthetic oligonucleotide; CTT chr11 5364187 5364208 5364192 5364187 -
aaagtttgtcaaaatttaggaa

SEQ ID NO: 119238 - DNA, 22 bp, Artificial Sequence
  Synthetic oligonucleotide; TTA chr11 5364186 5364207 5364191 5364186 -
aagtttgtcaaaatttaggaaa

SEQ ID NO: 119239 - DNA, 22 bp, Artificial Sequence
  Synthetic oligonucleotide; TTT chr11 5364180 5364201 5364185 5364180 -
gtcaaaatttaggaaaatattt

SEQ ID NO: 119240 - DNA, 22 bp, Artificial Sequence
  Synthetic oligonucleotide; TTG chr11 5364179 5364200 5364184 5364179 -
tcaaaatttaggaaaatatttt

SEQ ID NO: 119241 - DNA, 22 bp, Artificial Sequence
  Synthetic oligonucleotide; TTT chr11 5364170 5364191 5364175 5364170 -
aggaaaatattttgcccttagg

SEQ ID NO: 119242 - DNA, 22 bp, Artificial Sequence
  Synthetic oligonucleotide; TTA chr11 5364169 5364190 5364174 5364169 -
ggaaaatattttgcccttaggt

SEQ ID NO: 119243 - DNA, 22 bp, Artificial Sequence
  Synthetic oligonucleotide; TTT chr11 5364158 5364179 5364163 5364158 -
tgcccttaggtggtcgcttgtt

SEQ ID NO: 119244 - DNA, 22 bp, Artificial Sequence
  Synthetic oligonucleotide; TTT chr11 5364157 5364178 5364162 5364157 -
gcccttaggtggtcgcttgttg

SEQ ID NO: 119245 - DNA, 22 bp, Artificial Sequence
  Synthetic oligonucleotide; TTG chr11 5364156 5364177 5364161 5364156 -
cccttaggtggtcgcttgttga

SEQ ID NO: 119246 - DNA, 22 bp, Artificial Sequence
  Synthetic oligonucleotide; CTT chr11 5364151 5364172 5364156 5364151 -
aggtggtcgcttgttgaaccct

SEQ ID NO: 119247 - DNA, 22 bp, Artificial Sequence
  Synthetic oligonucleotide; TTA chr11 5364150 5364171 5364155 5364150 -
ggtggtcgcttgttgaaccctg

SEQ ID NO: 119248 - DNA, 22 bp, Artificial Sequence
  Synthetic oligonucleotide; CTT chr11 5364139 5364160 5364144 5364139 -
gttgaaccctgaaaattttact

SEQ ID NO: 119249 - DNA, 22 bp, Artificial Sequence
  Synthetic oligonucleotide; TTG chr11 5364138 5364159 5364143 5364138 -
ttgaaccctgaaaattttactc

SEQ ID NO: 119250 - DNA, 22 bp, Artificial Sequence
  Synthetic oligonucleotide; TTG chr11 5364135 5364156 5364140 5364135 -
aaccctgaaaattttactcttt

SEQ ID NO: 119251 - DNA, 22 bp, Artificial Sequence
  Synthetic oligonucleotide; CTG chr11 5364128 5364149 5364133 5364128 -
aaaattttactctttctttagt

SEQ ID NO: 119252 - DNA, 22 bp, Artificial Sequence
  Synthetic oligonucleotide; TTT chr11 5364121 5364142 5364126 5364121 -
tactctttctttagtgttgaga

SEQ ID NO: 119253 - DNA, 22 bp, Artificial Sequence
  Synthetic oligonucleotide; TTT chr11 5364120 5364141 5364125 5364120 -
actctttctttagtgttgagat

SEQ ID NO: 119254 - DNA, 22 bp, Artificial Sequence
  Synthetic oligonucleotide; TTA chr11 5364119 5364140 5364124 5364119 -
ctctttctttagtgttgagata

SEQ ID NO: 119255 - DNA, 22 bp, Artificial Sequence
  Synthetic oligonucleotide; CTC chr11 5364116 5364137 5364121 5364116 -
tttctttagtgttgagatacct

SEQ ID NO: 119256 - DNA, 22 bp, Artificial Sequence
  Synthetic oligonucleotide; CTT chr11 5364114 5364135 5364119 5364114 -
tctttagtgttgagatacctct

SEQ ID NO: 119257 - DNA, 22 bp, Artificial Sequence
  Synthetic oligonucleotide; TTT chr11 5364113 5364134 5364118 5364113 -
ctttagtgttgagatacctctt

SEQ ID NO: 119258 - DNA, 22 bp, Artificial Sequence
  Synthetic oligonucleotide; TTC chr11 5364112 5364133 5364117 5364112 -
tttagtgttgagatacctcttc

SEQ ID NO: 119259 - DNA, 22 bp, Artificial Sequence
  Synthetic oligonucleotide; CTT chr11 5364110 5364131 5364115 5364110 -
tagtgttgagatacctcttcct

SEQ ID NO: 119260 - DNA, 22 bp, Artificial Sequence
  Synthetic oligonucleotide; TTT chr11 5364109 5364130 5364114 5364109 -
agtgttgagatacctcttcctt

SEQ ID NO: 119261 - DNA, 22 bp, Artificial Sequence
  Synthetic oligonucleotide; TTA chr11 5364108 5364129 5364113 5364108 -
gtgttgagatacctcttccttt

SEQ ID NO: 119262 - DNA, 22 bp, Artificial Sequence
  Synthetic oligonucleotide; TTG chr11 5364102 5364123 5364107 5364102 -
agatacctcttcctttattgaa

SEQ ID NO: 119263 - DNA, 22 bp, Artificial Sequence
  Synthetic oligonucleotide; CTC chr11 5364093 5364114 5364098 5364093 -
ttcctttattgaatctataatc

SEQ ID NO: 119264 - DNA, 22 bp, Artificial Sequence
  Synthetic oligonucleotide; CTT chr11 5364091 5364112 5364096 5364091 -
cctttattgaatctataatcga

SEQ ID NO: 119265 - DNA, 22 bp, Artificial Sequence
  Synthetic oligonucleotide; TTC chr11 5364090 5364111 5364095 5364090 -
ctttattgaatctataatcgac

SEQ ID NO: 119266 - DNA, 22 bp, Artificial Sequence
  Synthetic oligonucleotide; CTT chr11 5364087 5364108 5364092 5364087 -
tattgaatctataatcgacctt

SEQ ID NO: 119267 - DNA, 22 bp, Artificial Sequence
  Synthetic oligonucleotide; TTT chr11 5364086 5364107 5364091 5364086 -
attgaatctataatcgacctta

SEQ ID NO: 119268 - DNA, 22 bp, Artificial Sequence
  Synthetic oligonucleotide; TTA chr11 5364085 5364106 5364090 5364085 -
ttgaatctataatcgaccttat

SEQ ID NO: 119269 - DNA, 22 bp, Artificial Sequence
  Synthetic oligonucleotide; TTG chr11 5364082 5364103 5364087 5364082 -
aatctataatcgaccttattgc

SEQ ID NO: 119270 - DNA, 22 bp, Artificial Sequence
  Synthetic oligonucleotide; CTA chr11 5364076 5364097 5364081 5364076 -
taatcgaccttattgcaaccat

SEQ ID NO: 119271 - DNA, 22 bp, Artificial Sequence
  Synthetic oligonucleotide; CTT chr11 5364065 5364086 5364070 5364065 -
attgcaaccatggagaatgaga

SEQ ID NO: 119272 - DNA, 22 bp, Artificial Sequence
  Synthetic oligonucleotide; TTA chr11 5364064 5364085 5364069 5364064 -
ttgcaaccatggagaatgagat

SEQ ID NO: 119273 - DNA, 22 bp, Artificial Sequence
  Synthetic oligonucleotide; TTG chr11 5364061 5364082 5364066 5364061 -
caaccatggagaatgagatagt

SEQ ID NO: 119274 - DNA, 22 bp, Artificial Sequence
  Synthetic oligonucleotide; CTG chr11 5364034 5364055 5364039 5364034 -
gctcagaggtccacatcacata

SEQ ID NO: 119275 - DNA, 22 bp, Artificial Sequence
  Synthetic oligonucleotide; CTC chr11 5364030 5364051 5364035 5364030 -
agaggtccacatcacataatat

SEQ ID NO: 119276 - DNA, 22 bp, Artificial Sequence
  Synthetic oligonucleotide; CTA chr11 5363995 5364016 5364000 5363995 -
tcactacactgttgtgaagccc

SEQ ID NO: 119277 - DNA, 22 bp, Artificial Sequence
  Synthetic oligonucleotide; CTA chr11 5363989 5364010 5363994 5363989 -
cactgttgtgaagccctgttct

SEQ ID NO: 119278 - DNA, 22 bp, Artificial Sequence
  Synthetic oligonucleotide; CTG chr11 5363984 5364005 5363989 5363984 -
ttgtgaagccctgttctccagc

SEQ ID NO: 119279 - DNA, 22 bp, Artificial Sequence
  Synthetic oligonucleotide; TTG chr11 5363981 5364002 5363986 5363981 -
tgaagccctgttctccagccca

SEQ ID NO: 119280 - DNA, 22 bp, Artificial Sequence
  Synthetic oligonucleotide; CTG chr11 5363971 5363992 5363976 5363971 -
ttctccagcccaggcattcttc

SEQ ID NO: 119281 - DNA, 22 bp, Artificial Sequence
  Synthetic oligonucleotide; TTC chr11 5363968 5363989 5363973 5363968 -
tccagcccaggcattcttccat

SEQ ID NO: 119282 - DNA, 22 bp, Artificial Sequence
  Synthetic oligonucleotide; CTC chr11 5363966 5363987 5363971 5363966 -
cagcccaggcattcttccattc

SEQ ID NO: 119283 - DNA, 22 bp, Artificial Sequence
  Synthetic oligonucleotide; TTC chr11 5363952 5363973 5363957 5363952 -
ttccattcctaacacaagcttc

SEQ ID NO: 119284 - DNA, 22 bp, Artificial Sequence
  Synthetic oligonucleotide; CTT chr11 5363950 5363971 5363955 5363950 -
ccattcctaacacaagcttctc

SEQ ID NO: 119285 - DNA, 22 bp, Artificial Sequence
  Synthetic oligonucleotide; TTC chr11 5363949 5363970 5363954 5363949 -
cattcctaacacaagcttctcc

SEQ ID NO: 119286 - DNA, 22 bp, Artificial Sequence
  Synthetic oligonucleotide; TTC chr11 5363944 5363965 5363949 5363944 -
ctaacacaagcttctcctcctt

SEQ ID NO: 119287 - DNA, 22 bp, Artificial Sequence
  Synthetic oligonucleotide; CTA chr11 5363941 5363962 5363946 5363941 -
acacaagcttctcctcctttac

SEQ ID NO: 119288 - DNA, 22 bp, Artificial Sequence
  Synthetic oligonucleotide; CTT chr11 5363931 5363952 5363936 5363931 -
ctcctcctttacagaaatgggt

SEQ ID NO: 119289 - DNA, 22 bp, Artificial Sequence
  Synthetic oligonucleotide; TTC chr11 5363930 5363951 5363935 5363930 -
tcctcctttacagaaatgggtc

SEQ ID NO: 119290 - DNA, 22 bp, Artificial Sequence
  Synthetic oligonucleotide; CTC chr11 5363928 5363949 5363933 5363928 -
ctcctttacagaaatgggtctg

SEQ ID NO: 119291 - DNA, 22 bp, Artificial Sequence
  Synthetic oligonucleotide; CTC chr11 5363925 5363946 5363930 5363925 -
ctttacagaaatgggtctgagt

SEQ ID NO: 119292 - DNA, 22 bp, Artificial Sequence
  Synthetic oligonucleotide; CTT chr11 5363922 5363943 5363927 5363922 -
tacagaaatgggtctgagttgc

SEQ ID NO: 119293 - DNA, 22 bp, Artificial Sequence
  Synthetic oligonucleotide; TTT chr11 5363921 5363942 5363926 5363921 -
acagaaatgggtctgagttgcc

SEQ ID NO: 119294 - DNA, 22 bp, Artificial Sequence
  Synthetic oligonucleotide; TTA chr11 5363920 5363941 5363925 5363920 -
cagaaatgggtctgagttgcct

SEQ ID NO: 119295 - DNA, 22 bp, Artificial Sequence
  Synthetic oligonucleotide; CTG chr11 5363906 5363927 5363911 5363906 -
agttgcctatttttatacctgc

SEQ ID NO: 119296 - DNA, 22 bp, Artificial Sequence
  Synthetic oligonucleotide; TTG chr11 5363901 5363922 5363906 5363901 -
cctatttttatacctgccatgt

SEQ ID NO: 119297 - DNA, 22 bp, Artificial Sequence
  Synthetic oligonucleotide; CTA chr11 5363897 5363918 5363902 5363897 -
tttttatacctgccatgtcatg

SEQ ID NO: 119298 - DNA, 22 bp, Artificial Sequence
  Synthetic oligonucleotide; TTT chr11 5363894 5363915 5363899 5363894 -
ttatacctgccatgtcatgctg

SEQ ID NO: 119299 - DNA, 22 bp, Artificial Sequence
  Synthetic oligonucleotide; TTT chr11 5363893 5363914 5363898 5363893 -
tatacctgccatgtcatgctga

SEQ ID NO: 119300 - DNA, 22 bp, Artificial Sequence
  Synthetic oligonucleotide; TTT chr11 5363892 5363913 5363897 5363892 -
atacctgccatgtcatgctgag

SEQ ID NO: 119301 - DNA, 22 bp, Artificial Sequence
  Synthetic oligonucleotide; TTA chr11 5363891 5363912 5363896 5363891 -
tacctgccatgtcatgctgagt

SEQ ID NO: 119302 - DNA, 22 bp, Artificial Sequence
  Synthetic oligonucleotide; CTG chr11 5363885 5363906 5363890 5363885 -
ccatgtcatgctgagtgggggc

SEQ ID NO: 119303 - DNA, 22 bp, Artificial Sequence
  Synthetic oligonucleotide; CTG chr11 5363872 5363893 5363877 5363872 -
agtgggggctggggtttgcaaa

SEQ ID NO: 119304 - DNA, 22 bp, Artificial Sequence
  Synthetic oligonucleotide; CTG chr11 5363861 5363882 5363866 5363861 -
gggtttgcaaagagagaagaca

SEQ ID NO: 119305 - DNA, 22 bp, Artificial Sequence
  Synthetic oligonucleotide; TTT chr11 5363855 5363876 5363860 5363855 -
gcaaagagagaagacagctagg

SEQ ID NO: 119306 - DNA, 22 bp, Artificial Sequence
  Synthetic oligonucleotide; TTG chr11 5363854 5363875 5363859 5363854 -
caaagagagaagacagctaggg

SEQ ID NO: 119307 - DNA, 22 bp, Artificial Sequence
  Synthetic oligonucleotide; CTA chr11 5363835 5363856 5363840 5363835 -
gggaacataattgctatggtaa

SEQ ID NO: 119308 - DNA, 22 bp, Artificial Sequence
  Synthetic oligonucleotide; TTG chr11 5363822 5363843 5363827 5363822 -
ctatggtaattgctttctattg

SEQ ID NO: 119309 - DNA, 22 bp, Artificial Sequence
  Synthetic oligonucleotide; CTA chr11 5363819 5363840 5363824 5363819 -
tggtaattgctttctattgtac

SEQ ID NO: 119310 - DNA, 22 bp, Artificial Sequence
  Synthetic oligonucleotide; TTG chr11 5363810 5363831 5363815 5363810 -
ctttctattgtacactaaatat

SEQ ID NO: 119311 - DNA, 22 bp, Artificial Sequence
  Synthetic oligonucleotide; CTT chr11 5363807 5363828 5363812 5363807 -
tctattgtacactaaatatagt

SEQ ID NO: 119312 - DNA, 22 bp, Artificial Sequence
  Synthetic oligonucleotide; TTT chr11 5363806 5363827 5363811 5363806 -
ctattgtacactaaatatagtc

SEQ ID NO: 119313 - DNA, 22 bp, Artificial Sequence
  Synthetic oligonucleotide; TTC chr11 5363805 5363826 5363810 5363805 -
tattgtacactaaatatagtct

SEQ ID NO: 119314 - DNA, 22 bp, Artificial Sequence
  Synthetic oligonucleotide; CTA chr11 5363803 5363824 5363808 5363803 -
ttgtacactaaatatagtctgg

SEQ ID NO: 119315 - DNA, 22 bp, Artificial Sequence
  Synthetic oligonucleotide; TTG chr11 5363800 5363821 5363805 5363800 -
tacactaaatatagtctggatg

SEQ ID NO: 119316 - DNA, 22 bp, Artificial Sequence
  Synthetic oligonucleotide; CTA chr11 5363793 5363814 5363798 5363793 -
aatatagtctggatgtattgca

SEQ ID NO: 119317 - DNA, 22 bp, Artificial Sequence
  Synthetic oligonucleotide; CTG chr11 5363782 5363803 5363787 5363782 -
gatgtattgcatatggtcccta

SEQ ID NO: 119318 - DNA, 22 bp, Artificial Sequence
  Synthetic oligonucleotide; TTG chr11 5363773 5363794 5363778 5363773 -
catatggtccctagtttttaat

SEQ ID NO: 119319 - DNA, 22 bp, Artificial Sequence
  Synthetic oligonucleotide; CTA chr11 5363760 5363781 5363765 5363760 -
gtttttaatagaatcctcatga

SEQ ID NO: 119320 - DNA, 22 bp, Artificial Sequence
  Synthetic oligonucleotide; TTT chr11 5363756 5363777 5363761 5363756 -
ttaatagaatcctcatgaaaat

SEQ ID NO: 119321 - DNA, 22 bp, Artificial Sequence
  Synthetic oligonucleotide; TTT chr11 5363755 5363776 5363760 5363755 -
taatagaatcctcatgaaaatg

SEQ ID NO: 119322 - DNA, 22 bp, Artificial Sequence
  Synthetic oligonucleotide; TTT chr11 5363754 5363775 5363759 5363754 -
aatagaatcctcatgaaaatgc

SEQ ID NO: 119323 - DNA, 22 bp, Artificial Sequence
  Synthetic oligonucleotide; TTA chr11 5363753 5363774 5363758 5363753 -
atagaatcctcatgaaaatgct

SEQ ID NO: 119324 - DNA, 22 bp, Artificial Sequence
  Synthetic oligonucleotide; CTC chr11 5363742 5363763 5363747 5363742 -
atgaaaatgctactttcccgct

SEQ ID NO: 119325 - DNA, 22 bp, Artificial Sequence
  Synthetic oligonucleotide; CTA chr11 5363730 5363751 5363735 5363730 -
ctttcccgctttccaataacag

SEQ ID NO: 119326 - DNA, 22 bp, Artificial Sequence
  Synthetic oligonucleotide; CTT chr11 5363727 5363748 5363732 5363727 -
tcccgctttccaataacagaat

SEQ ID NO: 119327 - DNA, 22 bp, Artificial Sequence
  Synthetic oligonucleotide; TTT chr11 5363726 5363747 5363731 5363726 -
cccgctttccaataacagaatg

SEQ ID NO: 119328 - DNA, 22 bp, Artificial Sequence
  Synthetic oligonucleotide; TTC chr11 5363725 5363746 5363730 5363725 -
ccgctttccaataacagaatga

SEQ ID NO: 119329 - DNA, 22 bp, Artificial Sequence
  Synthetic oligonucleotide; CTT chr11 5363719 5363740 5363724 5363719 -
tccaataacagaatgatggaaa

SEQ ID NO: 119330 - DNA, 22 bp, Artificial Sequence
  Synthetic oligonucleotide; TTT chr11 5363718 5363739 5363723 5363718 -
ccaataacagaatgatggaaag

SEQ ID NO: 119331 - DNA, 22 bp, Artificial Sequence
  Synthetic oligonucleotide; TTC chr11 5363717 5363738 5363722 5363717 -
caataacagaatgatggaaaga

SEQ ID NO: 119332 - DNA, 22 bp, Artificial Sequence
  Synthetic oligonucleotide; CTT chr11 5363691 5363712 5363696 5363691 -
cacaagtccaaacacaagcaaa

SEQ ID NO: 119333 - DNA, 22 bp, Artificial Sequence
  Synthetic oligonucleotide; TTC chr11 5363690 5363711 5363695 5363690 -
acaagtccaaacacaagcaaat

SEQ ID NO: 119334 - DNA, 22 bp, Artificial Sequence
  Synthetic oligonucleotide; TTG chr11 5363650 5363671 5363655 5363650 -
ttctttttctgtgtcacataag

SEQ ID NO: 119335 - DNA, 22 bp, Artificial Sequence
  Synthetic oligonucleotide; TTC chr11 5363647 5363668 5363652 5363647 -
tttttctgtgtcacataagatt

SEQ ID NO: 119336 - DNA, 22 bp, Artificial Sequence
  Synthetic oligonucleotide; CTT chr11 5363645 5363666 5363650 5363645 -
tttctgtgtcacataagattcc

SEQ ID NO: 119337 - DNA, 22 bp, Artificial Sequence
  Synthetic oligonucleotide; TTT chr11 5363644 5363665 5363649 5363644 -
ttctgtgtcacataagattcca

SEQ ID NO: 119338 - DNA, 22 bp, Artificial Sequence
  Synthetic oligonucleotide; TTT chr11 5363643 5363664 5363648 5363643 -
tctgtgtcacataagattccag

SEQ ID NO: 119339 - DNA, 22 bp, Artificial Sequence
  Synthetic oligonucleotide; TTT chr11 5363642 5363663 5363647 5363642 -
ctgtgtcacataagattccaga

SEQ ID NO: 119340 - DNA, 22 bp, Artificial Sequence
  Synthetic oligonucleotide; TTC chr11 5363641 5363662 5363646 5363641 -
tgtgtcacataagattccagac

SEQ ID NO: 119341 - DNA, 22 bp, Artificial Sequence
  Synthetic oligonucleotide; CTG chr11 5363639 5363660 5363644 5363639 -
tgtcacataagattccagacaa

SEQ ID NO: 119342 - DNA, 22 bp, Artificial Sequence
  Synthetic oligonucleotide; TTC chr11 5363624 5363645 5363629 5363624 -
cagacaatataatcttagtagt

SEQ ID NO: 119343 - DNA, 22 bp, Artificial Sequence
  Synthetic oligonucleotide; CTT chr11 5363608 5363629 5363613 5363608 -
agtagtatctatgagaaaaatc

SEQ ID NO: 119344 - DNA, 22 bp, Artificial Sequence
  Synthetic oligonucleotide; TTA chr11 5363607 5363628 5363612 5363607 -
gtagtatctatgagaaaaatct

SEQ ID NO: 119345 - DNA, 22 bp, Artificial Sequence
  Synthetic oligonucleotide; CTA chr11 5363597 5363618 5363602 5363597 -
tgagaaaaatctacctcaatat

SEQ ID NO: 119346 - DNA, 22 bp, Artificial Sequence
  Synthetic oligonucleotide; CTA chr11 5363584 5363605 5363589 5363584 -
cctcaatatatcttctttctgc

SEQ ID NO: 119347 - DNA, 22 bp, Artificial Sequence
  Synthetic oligonucleotide; CTC chr11 5363580 5363601 5363585 5363580 -
aatatatcttctttctgcattc

SEQ ID NO: 119348 - DNA, 22 bp, Artificial Sequence
  Synthetic oligonucleotide; CTT chr11 5363570 5363591 5363575 5363570 -
ctttctgcattcacactcaaaa

SEQ ID NO: 119349 - DNA, 22 bp, Artificial Sequence
  Synthetic oligonucleotide; TTC chr11 5363569 5363590 5363574 5363569 -
tttctgcattcacactcaaaaa

SEQ ID NO: 119350 - DNA, 22 bp, Artificial Sequence
  Synthetic oligonucleotide; CTT chr11 5363567 5363588 5363572 5363567 -
tctgcattcacactcaaaaact

SEQ ID NO: 119351 - DNA, 22 bp, Artificial Sequence
  Synthetic oligonucleotide; TTT chr11 5363566 5363587 5363571 5363566 -
ctgcattcacactcaaaaactt

SEQ ID NO: 119352 - DNA, 22 bp, Artificial Sequence
  Synthetic oligonucleotide; TTC chr11 5363565 5363586 5363570 5363565 -
tgcattcacactcaaaaacttg

SEQ ID NO: 119353 - DNA, 22 bp, Artificial Sequence
  Synthetic oligonucleotide; CTG chr11 5363563 5363584 5363568 5363563 -
cattcacactcaaaaacttggt

SEQ ID NO: 119354 - DNA, 22 bp, Artificial Sequence
  Synthetic oligonucleotide; TTC chr11 5363558 5363579 5363563 5363558 -
acactcaaaaacttggtatctg

SEQ ID NO: 119355 - DNA, 22 bp, Artificial Sequence
  Synthetic oligonucleotide; CTC chr11 5363552 5363573 5363557 5363552 -
aaaaacttggtatctgtgcttg

SEQ ID NO: 119356 - DNA, 22 bp, Artificial Sequence
  Synthetic oligonucleotide; CTT chr11 5363544 5363565 5363549 5363544 -
ggtatctgtgcttggtttaata

SEQ ID NO: 119357 - DNA, 22 bp, Artificial Sequence
  Synthetic oligonucleotide; TTG chr11 5363543 5363564 5363548 5363543 -
gtatctgtgcttggtttaataa

SEQ ID NO: 119358 - DNA, 22 bp, Artificial Sequence
  Synthetic oligonucleotide; CTG chr11 5363536 5363557 5363541 5363536 -
tgcttggtttaataaaagtagt

SEQ ID NO: 119359 - DNA, 22 bp, Artificial Sequence
  Synthetic oligonucleotide; CTT chr11 5363531 5363552 5363536 5363531 -
ggtttaataaaagtagtgagtg

SEQ ID NO: 119360 - DNA, 22 bp, Artificial Sequence
  Synthetic oligonucleotide; TTG chr11 5363530 5363551 5363535 5363530 -
gtttaataaaagtagtgagtgt

SEQ ID NO: 119361 - DNA, 22 bp, Artificial Sequence
  Synthetic oligonucleotide; TTT chr11 5363526 5363547 5363531 5363526 -
aataaaagtagtgagtgtacct

SEQ ID NO: 119362 - DNA, 22 bp, Artificial Sequence
  Synthetic oligonucleotide; TTA chr11 5363525 5363546 5363530 5363525 -
ataaaagtagtgagtgtacctc

SEQ ID NO: 119363 - DNA, 22 bp, Artificial Sequence
  Synthetic oligonucleotide; CTC chr11 5363503 5363524 5363508 5363503 -
atggagctgagtggtggtgatg

SEQ ID NO: 119364 - DNA, 22 bp, Artificial Sequence
  Synthetic oligonucleotide; CTG chr11 5363494 5363515 5363499 5363494 -
agtggtggtgatgtgtgtttat

SEQ ID NO: 119365 - DNA, 22 bp, Artificial Sequence
  Synthetic oligonucleotide; TTT chr11 5363474 5363495 5363479 5363474 -
atgattgtgtgtgtggcgcttt

SEQ ID NO: 119366 - DNA, 22 bp, Artificial Sequence
  Synthetic oligonucleotide; TTA chr11 5363473 5363494 5363478 5363473 -
tgattgtgtgtgtggcgctttt

SEQ ID NO: 119367 - DNA, 22 bp, Artificial Sequence
  Synthetic oligonucleotide; TTG chr11 5363467 5363488 5363472 5363467 -
tgtgtgtggcgcttttgtgtga

SEQ ID NO: 119368 - DNA, 22 bp, Artificial Sequence
  Synthetic oligonucleotide; CTT chr11 5363453 5363474 5363458 5363453 -
ttgtgtgagagagagagtgtgt

SEQ ID NO: 119369 - DNA, 22 bp, Artificial Sequence
  Synthetic oligonucleotide; TTT chr11 5363452 5363473 5363457 5363452 -
tgtgtgagagagagagtgtgtg

SEQ ID NO: 119370 - DNA, 22 bp, Artificial Sequence
  Synthetic oligonucleotide; TTT chr11 5363451 5363472 5363456 5363451 -
gtgtgagagagagagtgtgtgt

SEQ ID NO: 119371 - DNA, 22 bp, Artificial Sequence
  Synthetic oligonucleotide; TTG chr11 5363450 5363471 5363455 5363450 -
tgtgagagagagagtgtgtgtg

SEQ ID NO: 119372 - DNA, 22 bp, Artificial Sequence
  Synthetic oligonucleotide; TTA chr11 5363409 5363430 5363414 5363409 -
agggcttaaaggaacaattaat

SEQ ID NO: 119373 - DNA, 22 bp, Artificial Sequence
  Synthetic oligonucleotide; CTT chr11 5363402 5363423 5363407 5363402 -
aaaggaacaattaattggtgat

SEQ ID NO: 119374 - DNA, 22 bp, Artificial Sequence
  Synthetic oligonucleotide; TTA chr11 5363401 5363422 5363406 5363401 -
aaggaacaattaattggtgatt

SEQ ID NO: 119375 - DNA, 22 bp, Artificial Sequence
  Synthetic oligonucleotide; TTA chr11 5363389 5363410 5363394 5363389 -
attggtgattaggatcatgtac

SEQ ID NO: 119376 - DNA, 22 bp, Artificial Sequence
  Synthetic oligonucleotide; TTG chr11 5363385 5363406 5363390 5363385 -
gtgattaggatcatgtactcaa

SEQ ID NO: 119377 - DNA, 22 bp, Artificial Sequence
  Synthetic oligonucleotide; TTA chr11 5363378 5363399 5363383 5363378 -
ggatcatgtactcaacaccata

SEQ ID NO: 119378 - DNA, 22 bp, Artificial Sequence
  Synthetic oligonucleotide; CTC chr11 5363365 5363386 5363370 5363365 -
aacaccatagcttgaagtaaaa

SEQ ID NO: 119379 - DNA, 22 bp, Artificial Sequence
  Synthetic oligonucleotide; CTT chr11 5363352 5363373 5363357 5363352 -
gaagtaaaaaaaaacaaaaacc

SEQ ID NO: 119380 - DNA, 22 bp, Artificial Sequence
  Synthetic oligonucleotide; TTG chr11 5363351 5363372 5363356 5363351 -
aagtaaaaaaaaacaaaaacca

SEQ ID NO: 119381 - DNA, 22 bp, Artificial Sequence
  Synthetic oligonucleotide; CTG chr11 5363319 5363340 5363324 5363319 -
taattccaatactgctgcatca

SEQ ID NO: 119382 - DNA, 22 bp, Artificial Sequence
  Synthetic oligonucleotide; TTC chr11 5363313 5363334 5363318 5363313 -
caatactgctgcatcatgactt

SEQ ID NO: 119383 - DNA, 22 bp, Artificial Sequence
  Synthetic oligonucleotide; CTG chr11 5363305 5363326 5363310 5363305 -
ctgcatcatgacttgaaaaacg

SEQ ID NO: 119384 - DNA, 22 bp, Artificial Sequence
  Synthetic oligonucleotide; CTG chr11 5363302 5363323 5363307 5363302 -
catcatgacttgaaaaacgatg

SEQ ID NO: 119385 - DNA, 22 bp, Artificial Sequence
  Synthetic oligonucleotide; CTT chr11 5363291 5363312 5363296 5363291 -
gaaaaacgatgtctgtccactc

SEQ ID NO: 119386 - DNA, 22 bp, Artificial Sequence
  Synthetic oligonucleotide; TTG chr11 5363290 5363311 5363295 5363290 -
aaaaacgatgtctgtccactca

SEQ ID NO: 119387 - DNA, 22 bp, Artificial Sequence
  Synthetic oligonucleotide; CTG chr11 5363276 5363297 5363281 5363276 -
tccactcaccggtgtgtgtgtg

SEQ ID NO: 119388 - DNA, 22 bp, Artificial Sequence
  Synthetic oligonucleotide; CTC chr11 5363269 5363290 5363274 5363269 -
accggtgtgtgtgtgtgtgtgt

SEQ ID NO: 119389 - DNA, 22 bp, Artificial Sequence
  Synthetic oligonucleotide; TTG chr11 5363208 5363229 5363213 5363208 -
ggttcgttgtggggaaacactt

SEQ ID NO: 119390 - DNA, 22 bp, Artificial Sequence
  Synthetic oligonucleotide; TTC chr11 5363203 5363224 5363208 5363203 -
gttgtggggaaacacttgagat

SEQ ID NO: 119391 - DNA, 22 bp, Artificial Sequence
  Synthetic oligonucleotide; TTG chr11 5363199 5363220 5363204 5363199 -
tggggaaacacttgagatcctg

SEQ ID NO: 119392 - DNA, 22 bp, Artificial Sequence
  Synthetic oligonucleotide; CTT chr11 5363186 5363207 5363191 5363186 -
gagatcctgtattgatgaaaaa

SEQ ID NO: 119393 - DNA, 22 bp, Artificial Sequence
  Synthetic oligonucleotide; TTG chr11 5363185 5363206 5363190 5363185 -
agatcctgtattgatgaaaaat

SEQ ID NO: 119394 - DNA, 22 bp, Artificial Sequence
  Synthetic oligonucleotide; CTG chr11 5363177 5363198 5363182 5363177 -
tattgatgaaaaatgatttctc

SEQ ID NO: 119395 - DNA, 22 bp, Artificial Sequence
  Synthetic oligonucleotide; TTG chr11 5363172 5363193 5363177 5363172 -
atgaaaaatgatttctccagac

SEQ ID NO: 119396 - DNA, 22 bp, Artificial Sequence
  Synthetic oligonucleotide; TTT chr11 5363158 5363179 5363163 5363158 -
ctccagactaatcattctgttc

SEQ ID NO: 119397 - DNA, 22 bp, Artificial Sequence
  Synthetic oligonucleotide; TTC chr11 5363157 5363178 5363162 5363157 -
tccagactaatcattctgttcg

SEQ ID NO: 119398 - DNA, 22 bp, Artificial Sequence
  Synthetic oligonucleotide; CTC chr11 5363155 5363176 5363160 5363155 -
cagactaatcattctgttcgta

SEQ ID NO: 119399 - DNA, 22 bp, Artificial Sequence
  Synthetic oligonucleotide; CTA chr11 5363148 5363169 5363153 5363148 -
atcattctgttcgtaaaacttt

SEQ ID NO: 119400 - DNA, 22 bp, Artificial Sequence
  Synthetic oligonucleotide; TTC chr11 5363141 5363162 5363146 5363141 -
tgttcgtaaaactttgagtttt

SEQ ID NO: 119401 - DNA, 22 bp, Artificial Sequence
  Synthetic oligonucleotide; CTG chr11 5363139 5363160 5363144 5363139 -
ttcgtaaaactttgagttttga

SEQ ID NO: 119402 - DNA, 22 bp, Artificial Sequence
  Synthetic oligonucleotide; TTC chr11 5363136 5363157 5363141 5363136 -
gtaaaactttgagttttgaaga

SEQ ID NO: 119403 - DNA, 22 bp, Artificial Sequence
  Synthetic oligonucleotide; CTT chr11 5363127 5363148 5363132 5363127 -
tgagttttgaagacactcaggg

SEQ ID NO: 119404 - DNA, 22 bp, Artificial Sequence
  Synthetic oligonucleotide; TTT chr11 5363126 5363147 5363131 5363126 -
gagttttgaagacactcagggt

SEQ ID NO: 119405 - DNA, 22 bp, Artificial Sequence
  Synthetic oligonucleotide; TTG chr11 5363125 5363146 5363130 5363125 -
agttttgaagacactcagggtc

SEQ ID NO: 119406 - DNA, 22 bp, Artificial Sequence
  Synthetic oligonucleotide; TTT chr11 5363120 5363141 5363125 5363120 -
tgaagacactcagggtctcttt

SEQ ID NO: 119407 - DNA, 22 bp, Artificial Sequence
  Synthetic oligonucleotide; TTT chr11 5363119 5363140 5363124 5363119 -
gaagacactcagggtctctttc

SEQ ID NO: 119408 - DNA, 22 bp, Artificial Sequence
  Synthetic oligonucleotide; TTG chr11 5363118 5363139 5363123 5363118 -
aagacactcagggtctctttct

SEQ ID NO: 119409 - DNA, 22 bp, Artificial Sequence
  Synthetic oligonucleotide; CTC chr11 5363109 5363130 5363114 5363109 -
agggtctctttcttcccttaag

SEQ ID NO: 119410 - DNA, 22 bp, Artificial Sequence
  Synthetic oligonucleotide; CTC chr11 5363101 5363122 5363106 5363101 -
tttcttcccttaagctttctct

SEQ ID NO: 119411 - DNA, 22 bp, Artificial Sequence
  Synthetic oligonucleotide; CTT chr11 5363099 5363120 5363104 5363099 -
tcttcccttaagctttctctca

SEQ ID NO: 119412 - DNA, 22 bp, Artificial Sequence
  Synthetic oligonucleotide; TTT chr11 5363098 5363119 5363103 5363098 -
cttcccttaagctttctctcat

SEQ ID NO: 119413 - DNA, 22 bp, Artificial Sequence
  Synthetic oligonucleotide; TTC chr11 5363097 5363118 5363102 5363097 -
ttcccttaagctttctctcatg

SEQ ID NO: 119414 - DNA, 22 bp, Artificial Sequence
  Synthetic oligonucleotide; CTT chr11 5363095 5363116 5363100 5363095 -
cccttaagctttctctcatgga

SEQ ID NO: 119415 - DNA, 22 bp, Artificial Sequence
  Synthetic oligonucleotide; TTC chr11 5363094 5363115 5363099 5363094 -
ccttaagctttctctcatggag

SEQ ID NO: 119416 - DNA, 22 bp, Artificial Sequence
  Synthetic oligonucleotide; CTT chr11 5363090 5363111 5363095 5363090 -
aagctttctctcatggaggaat

SEQ ID NO: 119417 - DNA, 22 bp, Artificial Sequence
  Synthetic oligonucleotide; TTA chr11 5363089 5363110 5363094 5363089 -
agctttctctcatggaggaatg

SEQ ID NO: 119418 - DNA, 22 bp, Artificial Sequence
  Synthetic oligonucleotide; CTT chr11 5363084 5363105 5363089 5363084 -
tctctcatggaggaatgccact

SEQ ID NO: 119419 - DNA, 22 bp, Artificial Sequence
  Synthetic oligonucleotide; TTT chr11 5363083 5363104 5363088 5363083 -
ctctcatggaggaatgccactc

SEQ ID NO: 119420 - DNA, 22 bp, Artificial Sequence
  Synthetic oligonucleotide; TTC chr11 5363082 5363103 5363087 5363082 -
tctcatggaggaatgccactca

SEQ ID NO: 119421 - DNA, 22 bp, Artificial Sequence
  Synthetic oligonucleotide; CTC chr11 5363080 5363101 5363085 5363080 -
tcatggaggaatgccactcaga

SEQ ID NO: 119422 - DNA, 22 bp, Artificial Sequence
  Synthetic oligonucleotide; CTC chr11 5363078 5363099 5363083 5363078 -
atggaggaatgccactcagaca

SEQ ID NO: 119423 - DNA, 22 bp, Artificial Sequence
  Synthetic oligonucleotide; CTC chr11 5363061 5363082 5363066 5363061 -
agacatctacttagcacatttt

SEQ ID NO: 119424 - DNA, 22 bp, Artificial Sequence
  Synthetic oligonucleotide; CTA chr11 5363052 5363073 5363057 5363052 -
cttagcacattttacaacactt

SEQ ID NO: 119425 - DNA, 22 bp, Artificial Sequence
  Synthetic oligonucleotide; CTT chr11 5363049 5363070 5363054 5363049 -
agcacattttacaacacttgca

SEQ ID NO: 119426 - DNA, 22 bp, Artificial Sequence
  Synthetic oligonucleotide; TTA chr11 5363048 5363069 5363053 5363048 -
gcacattttacaacacttgcat

SEQ ID NO: 119427 - DNA, 22 bp, Artificial Sequence
  Synthetic oligonucleotide; TTT chr11 5363040 5363061 5363045 5363040 -
tacaacacttgcatttccttgg

SEQ ID NO: 119428 - DNA, 22 bp, Artificial Sequence
  Synthetic oligonucleotide; TTT chr11 5363039 5363060 5363044 5363039 -
acaacacttgcatttccttggg

SEQ ID NO: 119429 - DNA, 22 bp, Artificial Sequence
  Synthetic oligonucleotide; TTA chr11 5363038 5363059 5363043 5363038 -
caacacttgcatttccttgggc

SEQ ID NO: 119430 - DNA, 22 bp, Artificial Sequence
  Synthetic oligonucleotide; CTT chr11 5363030 5363051 5363035 5363030 -
gcatttccttgggctccttttc

SEQ ID NO: 119431 - DNA, 22 bp, Artificial Sequence
  Synthetic oligonucleotide; TTG chr11 5363029 5363050 5363034 5363029 -
catttccttgggctccttttcc

SEQ ID NO: 119432 - DNA, 22 bp, Artificial Sequence
  Synthetic oligonucleotide; TTT chr11 5363024 5363045 5363029 5363024 -
ccttgggctccttttccttgtt

SEQ ID NO: 119433 - DNA, 22 bp, Artificial Sequence
  Synthetic oligonucleotide; TTC chr11 5363023 5363044 5363028 5363023 -
cttgggctccttttccttgttt

SEQ ID NO: 119434 - DNA, 22 bp, Artificial Sequence
  Synthetic oligonucleotide; CTT chr11 5363020 5363041 5363025 5363020 -
gggctccttttccttgttttca

SEQ ID NO: 119435 - DNA, 22 bp, Artificial Sequence
  Synthetic oligonucleotide; TTG chr11 5363019 5363040 5363024 5363019 -
ggctccttttccttgttttcaa

SEQ ID NO: 119436 - DNA, 22 bp, Artificial Sequence
  Synthetic oligonucleotide; CTC chr11 5363014 5363035 5363019 5363014 -
cttttccttgttttcaaccttc

SEQ ID NO: 119437 - DNA, 22 bp, Artificial Sequence
  Synthetic oligonucleotide; CTT chr11 5363011 5363032 5363016 5363011 -
ttccttgttttcaaccttcatg

SEQ ID NO: 119438 - DNA, 22 bp, Artificial Sequence
  Synthetic oligonucleotide; TTT chr11 5363010 5363031 5363015 5363010 -
tccttgttttcaaccttcatgc

SEQ ID NO: 119439 - DNA, 22 bp, Artificial Sequence
  Synthetic oligonucleotide; TTT chr11 5363009 5363030 5363014 5363009 -
ccttgttttcaaccttcatgcc

SEQ ID NO: 119440 - DNA, 22 bp, Artificial Sequence
  Synthetic oligonucleotide; TTC chr11 5363008 5363029 5363013 5363008 -
cttgttttcaaccttcatgccc

SEQ ID NO: 119441 - DNA, 22 bp, Artificial Sequence
  Synthetic oligonucleotide; CTT chr11 5363005 5363026 5363010 5363005 -
gttttcaaccttcatgccccaa

SEQ ID NO: 119442 - DNA, 22 bp, Artificial Sequence
  Synthetic oligonucleotide; TTG chr11 5363004 5363025 5363009 5363004 -
ttttcaaccttcatgccccaat

SEQ ID NO: 119443 - DNA, 22 bp, Artificial Sequence
  Synthetic oligonucleotide; TTT chr11 5363001 5363022 5363006 5363001 -
tcaaccttcatgccccaatccc

SEQ ID NO: 119444 - DNA, 22 bp, Artificial Sequence
  Synthetic oligonucleotide; TTT chr11 5363000 5363021 5363005 5363000 -
caaccttcatgccccaatccct

SEQ ID NO: 119445 - DNA, 22 bp, Artificial Sequence
  Synthetic oligonucleotide; TTC chr11 5362999 5363020 5363004 5362999 -
aaccttcatgccccaatccctg

SEQ ID NO: 119446 - DNA, 22 bp, Artificial Sequence
  Synthetic oligonucleotide; CTT chr11 5362993 5363014 5362998 5362993 -
catgccccaatccctgcctaac

SEQ ID NO: 119447 - DNA, 22 bp, Artificial Sequence
  Synthetic oligonucleotide; TTC chr11 5362992 5363013 5362997 5362992 -
atgccccaatccctgcctaact

SEQ ID NO: 119448 - DNA, 22 bp, Artificial Sequence
  Synthetic oligonucleotide; CTG chr11 5362977 5362998 5362982 5362977 -
cctaacttctattatttctttt

SEQ ID NO: 119449 - DNA, 22 bp, Artificial Sequence
  Synthetic oligonucleotide; CTA chr11 5362973 5362994 5362978 5362973 -
acttctattatttctttttttt

SEQ ID NO: 119450 - DNA, 22 bp, Artificial Sequence
  Synthetic oligonucleotide; CTT chr11 5362969 5362990 5362974 5362969 -
ctattatttctttttttttttt

SEQ ID NO: 119451 - DNA, 22 bp, Artificial Sequence
  Synthetic oligonucleotide; TTC chr11 5362968 5362989 5362973 5362968 -
tattatttctttttttttttta

SEQ ID NO: 119452 - DNA, 22 bp, Artificial Sequence
  Synthetic oligonucleotide; CTA chr11 5362966 5362987 5362971 5362966 -
ttatttcttttttttttttaat

SEQ ID NO: 119453 - DNA, 22 bp, Artificial Sequence
  Synthetic oligonucleotide; TTA chr11 5362963 5362984 5362968 5362963 -
tttcttttttttttttaatgcc

SEQ ID NO: 119454 - DNA, 22 bp, Artificial Sequence
  Synthetic oligonucleotide; TTT chr11 5362960 5362981 5362965 5362960 -
cttttttttttttaatgccata

SEQ ID NO: 119455 - DNA, 22 bp, Artificial Sequence
  Synthetic oligonucleotide; TTC chr11 5362959 5362980 5362964 5362959 -
ttttttttttttaatgccatac

SEQ ID NO: 119456 - DNA, 22 bp, Artificial Sequence
  Synthetic oligonucleotide; CTT chr11 5362957 5362978 5362962 5362957 -
ttttttttttaatgccatacat

SEQ ID NO: 119457 - DNA, 22 bp, Artificial Sequence
  Synthetic oligonucleotide; TTT chr11 5362956 5362977 5362961 5362956 -
tttttttttaatgccatacatc

SEQ ID NO: 119458 - DNA, 22 bp, Artificial Sequence
  Synthetic oligonucleotide; TTT chr11 5362955 5362976 5362960 5362955 -
ttttttttaatgccatacatct

SEQ ID NO: 119459 - DNA, 22 bp, Artificial Sequence
  Synthetic oligonucleotide; TTT chr11 5362954 5362975 5362959 5362954 -
tttttttaatgccatacatctg

SEQ ID NO: 119460 - DNA, 22 bp, Artificial Sequence
  Synthetic oligonucleotide; TTT chr11 5362953 5362974 5362958 5362953 -
ttttttaatgccatacatctgc

SEQ ID NO: 119461 - DNA, 22 bp, Artificial Sequence
  Synthetic oligonucleotide; TTT chr11 5362952 5362973 5362957 5362952 -
tttttaatgccatacatctgca

SEQ ID NO: 119462 - DNA, 22 bp, Artificial Sequence
  Synthetic oligonucleotide; TTT chr11 5362951 5362972 5362956 5362951 -
ttttaatgccatacatctgcat

SEQ ID NO: 119463 - DNA, 22 bp, Artificial Sequence
  Synthetic oligonucleotide; TTT chr11 5362950 5362971 5362955 5362950 -
tttaatgccatacatctgcatt

SEQ ID NO: 119464 - DNA, 22 bp, Artificial Sequence
  Synthetic oligonucleotide; TTT chr11 5362949 5362970 5362954 5362949 -
ttaatgccatacatctgcattt

SEQ ID NO: 119465 - DNA, 22 bp, Artificial Sequence
  Synthetic oligonucleotide; TTT chr11 5362948 5362969 5362953 5362948 -
taatgccatacatctgcattta

SEQ ID NO: 119466 - DNA, 22 bp, Artificial Sequence
  Synthetic oligonucleotide; TTT chr11 5362947 5362968 5362952 5362947 -
aatgccatacatctgcatttat

SEQ ID NO: 119467 - DNA, 22 bp, Artificial Sequence
  Synthetic oligonucleotide; TTA chr11 5362946 5362967 5362951 5362946 -
atgccatacatctgcatttatt

SEQ ID NO: 119468 - DNA, 22 bp, Artificial Sequence
  Synthetic oligonucleotide; CTG chr11 5362932 5362953 5362937 5362932 -
catttattataagcaacaggcg

SEQ ID NO: 119469 - DNA, 22 bp, Artificial Sequence
  Synthetic oligonucleotide; TTT chr11 5362927 5362948 5362932 5362927 -
attataagcaacaggcgggaca

SEQ ID NO: 119470 - DNA, 22 bp, Artificial Sequence
  Synthetic oligonucleotide; TTA chr11 5362926 5362947 5362931 5362926 -
ttataagcaacaggcgggacac

SEQ ID NO: 119471 - DNA, 22 bp, Artificial Sequence
  Synthetic oligonucleotide; TTA chr11 5362923 5362944 5362928 5362923 -
taagcaacaggcgggacacttc

SEQ ID NO: 119472 - DNA, 22 bp, Artificial Sequence
  Synthetic oligonucleotide; CTT chr11 5362902 5362923 5362907 5362902 -
ccagcaatagaaagaaaactta

SEQ ID NO: 119473 - DNA, 22 bp, Artificial Sequence
  Synthetic oligonucleotide; TTC chr11 5362901 5362922 5362906 5362901 -
cagcaatagaaagaaaacttaa

SEQ ID NO: 119474 - DNA, 22 bp, Artificial Sequence
  Synthetic oligonucleotide; CTT chr11 5362881 5362902 5362886 5362881 -
aatttacaaaagcagggattca

SEQ ID NO: 119475 - DNA, 22 bp, Artificial Sequence
  Synthetic oligonucleotide; TTA chr11 5362880 5362901 5362885 5362880 -
atttacaaaagcagggattcag

SEQ ID NO: 119476 - DNA, 22 bp, Artificial Sequence
  Synthetic oligonucleotide; TTT chr11 5362876 5362897 5362881 5362876 -
acaaaagcagggattcagtgaa

SEQ ID NO: 119477 - DNA, 22 bp, Artificial Sequence
  Synthetic oligonucleotide; TTA chr11 5362875 5362896 5362880 5362875 -
caaaagcagggattcagtgaag

SEQ ID NO: 119478 - DNA, 22 bp, Artificial Sequence
  Synthetic oligonucleotide; TTC chr11 5362860 5362881 5362865 5362860 -
agtgaagccacctggttgttac

SEQ ID NO: 119479 - DNA, 22 bp, Artificial Sequence
  Synthetic oligonucleotide; CTG chr11 5362846 5362867 5362851 5362846 -
gttgttactcttgggcactcac

SEQ ID NO: 119480 - DNA, 22 bp, Artificial Sequence
  Synthetic oligonucleotide; TTG chr11 5362842 5362863 5362847 5362842 -
ttactcttgggcactcacatgt

SEQ ID NO: 119481 - DNA, 22 bp, Artificial Sequence
  Synthetic oligonucleotide; TTA chr11 5362839 5362860 5362844 5362839 -
ctcttgggcactcacatgtaga

SEQ ID NO: 119482 - DNA, 22 bp, Artificial Sequence
  Synthetic oligonucleotide; CTC chr11 5362836 5362857 5362841 5362836 -
ttgggcactcacatgtagatgc

SEQ ID NO: 119483 - DNA, 22 bp, Artificial Sequence
  Synthetic oligonucleotide; CTT chr11 5362834 5362855 5362839 5362834 -
gggcactcacatgtagatgcca

SEQ ID NO: 119484 - DNA, 22 bp, Artificial Sequence
  Synthetic oligonucleotide; TTG chr11 5362833 5362854 5362838 5362833 -
ggcactcacatgtagatgccaa

SEQ ID NO: 119485 - DNA, 22 bp, Artificial Sequence
  Synthetic oligonucleotide; CTC chr11 5362826 5362847 5362831 5362826 -
acatgtagatgccaacccagag

SEQ ID NO: 119486 - DNA, 22 bp, Artificial Sequence
  Synthetic oligonucleotide; CTT chr11 5362787 5362808 5362792 5362787 -
caaagcccatgaagagtgaggc

SEQ ID NO: 119487 - DNA, 22 bp, Artificial Sequence
  Synthetic oligonucleotide; TTC chr11 5362786 5362807 5362791 5362786 -
aaagcccatgaagagtgaggcc

SEQ ID NO: 119488 - DNA, 22 bp, Artificial Sequence
  Synthetic oligonucleotide; CTC chr11 5362749 5362770 5362754 5362749 -
tttatagatatcacaagtgtac

SEQ ID NO: 119489 - DNA, 22 bp, Artificial Sequence
  Synthetic oligonucleotide; CTT chr11 5362747 5362768 5362752 5362747 -
tatagatatcacaagtgtactt

SEQ ID NO: 119490 - DNA, 22 bp, Artificial Sequence
  Synthetic oligonucleotide; TTT chr11 5362746 5362767 5362751 5362746 -
atagatatcacaagtgtacttg

SEQ ID NO: 119491 - DNA, 22 bp, Artificial Sequence
  Synthetic oligonucleotide; TTA chr11 5362745 5362766 5362750 5362745 -
tagatatcacaagtgtacttgg

SEQ ID NO: 119492 - DNA, 22 bp, Artificial Sequence
  Synthetic oligonucleotide; CTT chr11 5362725 5362746 5362730 5362725 -
ggtagaggtgacctcgtaaaca

SEQ ID NO: 119493 - DNA, 22 bp, Artificial Sequence
  Synthetic oligonucleotide; TTG chr11 5362724 5362745 5362729 5362724 -
gtagaggtgacctcgtaaacaa

SEQ ID NO: 119494 - DNA, 22 bp, Artificial Sequence
  Synthetic oligonucleotide; CTC chr11 5362710 5362731 5362715 5362710 -
gtaaacaaagaaccaggtggtg

SEQ ID NO: 119495 - DNA, 22 bp, Artificial Sequence
  Synthetic oligonucleotide; CTC chr11 5362662 5362683 5362667 5362662 -
tacaatcagatgggggaagaca

SEQ ID NO: 119496 - DNA, 22 bp, Artificial Sequence
  Synthetic oligonucleotide; CTA chr11 5362660 5362681 5362665 5362660 -
caatcagatgggggaagacagc

SEQ ID NO: 119497 - DNA, 22 bp, Artificial Sequence
  Synthetic oligonucleotide; CTG chr11 5362636 5362657 5362641 5362636 -
ggttgaccgggctgttgtatct

SEQ ID NO: 119498 - DNA, 22 bp, Artificial Sequence
  Synthetic oligonucleotide; TTG chr11 5362631 5362652 5362636 5362631 -
accgggctgttgtatctgctca

SEQ ID NO: 119499 - DNA, 22 bp, Artificial Sequence
  Synthetic oligonucleotide; CTG chr11 5362622 5362643 5362627 5362622 -
ttgtatctgctcatggccttga

SEQ ID NO: 119500 - DNA, 22 bp, Artificial Sequence
  Synthetic oligonucleotide; TTG chr11 5362619 5362640 5362624 5362619 -
tatctgctcatggccttgagct

SEQ ID NO: 119501 - DNA, 22 bp, Artificial Sequence
  Synthetic oligonucleotide; CTG chr11 5362613 5362634 5362618 5362613 -
ctcatggccttgagctccattt

SEQ ID NO: 119502 - DNA, 22 bp, Artificial Sequence
  Synthetic oligonucleotide; CTC chr11 5362610 5362631 5362615 5362610 -
atggccttgagctccattttgc

SEQ ID NO: 119503 - DNA, 22 bp, Artificial Sequence
  Synthetic oligonucleotide; CTT chr11 5362602 5362623 5362607 5362602 -
gagctccattttgccccagcag

SEQ ID NO: 119504 - DNA, 22 bp, Artificial Sequence
  Synthetic oligonucleotide; TTG chr11 5362601 5362622 5362606 5362601 -
agctccattttgccccagcagg

SEQ ID NO: 119505 - DNA, 22 bp, Artificial Sequence
  Synthetic oligonucleotide; CTC chr11 5362596 5362617 5362601 5362596 -
cattttgccccagcaggctaag

SEQ ID NO: 119506 - DNA, 22 bp, Artificial Sequence
  Synthetic oligonucleotide; TTT chr11 5362591 5362612 5362596 5362591 -
tgccccagcaggctaagccacc

SEQ ID NO: 119507 - DNA, 22 bp, Artificial Sequence
  Synthetic oligonucleotide; TTT chr11 5362590 5362611 5362595 5362590 -
gccccagcaggctaagccacca

SEQ ID NO: 119508 - DNA, 22 bp, Artificial Sequence
  Synthetic oligonucleotide; TTG chr11 5362589 5362610 5362594 5362589 -
ccccagcaggctaagccaccac

SEQ ID NO: 119509 - DNA, 22 bp, Artificial Sequence
  Synthetic oligonucleotide; CTA chr11 5362576 5362597 5362581 5362576 -
agccaccactctgccaccagaa

SEQ ID NO: 119510 - DNA, 22 bp, Artificial Sequence
  Synthetic oligonucleotide; CTC chr11 5362565 5362586 5362570 5362565 -
tgccaccagaagacttctgtta

SEQ ID NO: 119511 - DNA, 22 bp, Artificial Sequence
  Synthetic oligonucleotide; CTG chr11 5362563 5362584 5362568 5362563 -
ccaccagaagacttctgttatt

SEQ ID NO: 119512 - DNA, 22 bp, Artificial Sequence
  Synthetic oligonucleotide; CTT chr11 5362549 5362570 5362554 5362549 -
ctgttatttcttatcttttgct

SEQ ID NO: 119513 - DNA, 22 bp, Artificial Sequence
  Synthetic oligonucleotide; TTC chr11 5362548 5362569 5362553 5362548 -
tgttatttcttatcttttgctt

SEQ ID NO: 119514 - DNA, 22 bp, Artificial Sequence
  Synthetic oligonucleotide; CTG chr11 5362546 5362567 5362551 5362546 -
ttatttcttatcttttgctttc

SEQ ID NO: 119515 - DNA, 22 bp, Artificial Sequence
  Synthetic oligonucleotide; TTA chr11 5362543 5362564 5362548 5362543 -
tttcttatcttttgctttcctg

SEQ ID NO: 119516 - DNA, 22 bp, Artificial Sequence
  Synthetic oligonucleotide; TTT chr11 5362540 5362561 5362545 5362540 -
cttatcttttgctttcctgact

SEQ ID NO: 119517 - DNA, 22 bp, Artificial Sequence
  Synthetic oligonucleotide; TTC chr11 5362539 5362560 5362544 5362539 -
ttatcttttgctttcctgactt

SEQ ID NO: 119518 - DNA, 22 bp, Artificial Sequence
  Synthetic oligonucleotide; CTT chr11 5362537 5362558 5362542 5362537 -
atcttttgctttcctgacttca

SEQ ID NO: 119519 - DNA, 22 bp, Artificial Sequence
  Synthetic oligonucleotide; TTA chr11 5362536 5362557 5362541 5362536 -
tcttttgctttcctgacttcat

SEQ ID NO: 119520 - DNA, 22 bp, Artificial Sequence
  Synthetic oligonucleotide; CTT chr11 5362532 5362553 5362537 5362532 -
ttgctttcctgacttcatctct

SEQ ID NO: 119521 - DNA, 22 bp, Artificial Sequence
  Synthetic oligonucleotide; TTT chr11 5362531 5362552 5362536 5362531 -
tgctttcctgacttcatctctg

SEQ ID NO: 119522 - DNA, 22 bp, Artificial Sequence
  Synthetic oligonucleotide; TTT chr11 5362530 5362551 5362535 5362530 -
gctttcctgacttcatctctgc

SEQ ID NO: 119523 - DNA, 22 bp, Artificial Sequence
  Synthetic oligonucleotide; TTG chr11 5362529 5362550 5362534 5362529 -
ctttcctgacttcatctctgct

SEQ ID NO: 119524 - DNA, 22 bp, Artificial Sequence
  Synthetic oligonucleotide; CTT chr11 5362526 5362547 5362531 5362526 -
tcctgacttcatctctgctctc

SEQ ID NO: 119525 - DNA, 22 bp, Artificial Sequence
  Synthetic oligonucleotide; TTT chr11 5362525 5362546 5362530 5362525 -
cctgacttcatctctgctctct

SEQ ID NO: 119526 - DNA, 22 bp, Artificial Sequence
  Synthetic oligonucleotide; TTC chr11 5362524 5362545 5362529 5362524 -
ctgacttcatctctgctctctg

SEQ ID NO: 119527 - DNA, 22 bp, Artificial Sequence
  Synthetic oligonucleotide; CTG chr11 5362521 5362542 5362526 5362521 -
acttcatctctgctctctgact

SEQ ID NO: 119528 - DNA, 22 bp, Artificial Sequence
  Synthetic oligonucleotide; CTT chr11 5362517 5362538 5362522 5362517 -
catctctgctctctgactaggt

SEQ ID NO: 119529 - DNA, 22 bp, Artificial Sequence
  Synthetic oligonucleotide; TTC chr11 5362516 5362537 5362521 5362516 -
atctctgctctctgactaggta

SEQ ID NO: 119530 - DNA, 22 bp, Artificial Sequence
  Synthetic oligonucleotide; CTC chr11 5362511 5362532 5362516 5362511 -
tgctctctgactaggtaattat

SEQ ID NO: 119531 - DNA, 22 bp, Artificial Sequence
  Synthetic oligonucleotide; CTG chr11 5362509 5362530 5362514 5362509 -
ctctctgactaggtaattatat

SEQ ID NO: 119532 - DNA, 22 bp, Artificial Sequence
  Synthetic oligonucleotide; CTC chr11 5362506 5362527 5362511 5362506 -
tctgactaggtaattatatcta

SEQ ID NO: 119533 - DNA, 22 bp, Artificial Sequence
  Synthetic oligonucleotide; CTC chr11 5362504 5362525 5362509 5362504 -
tgactaggtaattatatctaac

SEQ ID NO: 119534 - DNA, 22 bp, Artificial Sequence
  Synthetic oligonucleotide; CTG chr11 5362502 5362523 5362507 5362502 -
actaggtaattatatctaacaa

SEQ ID NO: 119535 - DNA, 22 bp, Artificial Sequence
  Synthetic oligonucleotide; CTA chr11 5362498 5362519 5362503 5362498 -
ggtaattatatctaacaatgtt

SEQ ID NO: 119536 - DNA, 22 bp, Artificial Sequence
  Synthetic oligonucleotide; TTA chr11 5362490 5362511 5362495 5362490 -
tatctaacaatgttatctattc

SEQ ID NO: 119537 - DNA, 22 bp, Artificial Sequence
  Synthetic oligonucleotide; CTA chr11 5362484 5362505 5362489 5362484 -
acaatgttatctattctgattc

SEQ ID NO: 119538 - DNA, 22 bp, Artificial Sequence
  Synthetic oligonucleotide; TTA chr11 5362475 5362496 5362480 5362475 -
tctattctgattcatagtatcc

SEQ ID NO: 119539 - DNA, 22 bp, Artificial Sequence
  Synthetic oligonucleotide; CTA chr11 5362471 5362492 5362476 5362471 -
ttctgattcatagtatccagta

SEQ ID NO: 119540 - DNA, 22 bp, Artificial Sequence
  Synthetic oligonucleotide; TTC chr11 5362468 5362489 5362473 5362468 -
tgattcatagtatccagtagac

SEQ ID NO: 119541 - DNA, 22 bp, Artificial Sequence
  Synthetic oligonucleotide; CTG chr11 5362466 5362487 5362471 5362466 -
attcatagtatccagtagacct

SEQ ID NO: 119542 - DNA, 22 bp, Artificial Sequence
  Synthetic oligonucleotide; TTC chr11 5362462 5362483 5362467 5362462 -
atagtatccagtagacctgatt

SEQ ID NO: 119543 - DNA, 22 bp, Artificial Sequence
  Synthetic oligonucleotide; CTG chr11 5362443 5362464 5362448 5362443 -
atttaatcatcacattctcatt

SEQ ID NO: 119544 - DNA, 22 bp, Artificial Sequence
  Synthetic oligonucleotide; TTT chr11 5362439 5362460 5362444 5362439 -
aatcatcacattctcattataa

SEQ ID NO: 119545 - DNA, 22 bp, Artificial Sequence
  Synthetic oligonucleotide; TTA chr11 5362438 5362459 5362443 5362438 -
atcatcacattctcattataag

SEQ ID NO: 119546 - DNA, 22 bp, Artificial Sequence
  Synthetic oligonucleotide; TTC chr11 5362426 5362447 5362431 5362426 -
tcattataaggctcaacaacta

SEQ ID NO: 119547 - DNA, 22 bp, Artificial Sequence
  Synthetic oligonucleotide; CTC chr11 5362424 5362445 5362429 5362424 -
attataaggctcaacaactaat

SEQ ID NO: 119548 - DNA, 22 bp, Artificial Sequence
  Synthetic oligonucleotide; TTA chr11 5362420 5362441 5362425 5362420 -
taaggctcaacaactaatgttc

SEQ ID NO: 119549 - DNA, 22 bp, Artificial Sequence
  Synthetic oligonucleotide; CTC chr11 5362412 5362433 5362417 5362412 -
aacaactaatgttcacaatttt

SEQ ID NO: 119550 - DNA, 22 bp, Artificial Sequence
  Synthetic oligonucleotide; CTA chr11 5362404 5362425 5362409 5362404 -
atgttcacaattttccaaagcc

SEQ ID NO: 119551 - DNA, 22 bp, Artificial Sequence
  Synthetic oligonucleotide; TTC chr11 5362398 5362419 5362403 5362398 -
acaattttccaaagccatagac

SEQ ID NO: 119552 - DNA, 22 bp, Artificial Sequence
  Synthetic oligonucleotide; TTT chr11 5362391 5362412 5362396 5362391 -
tccaaagccatagactgatcat

SEQ ID NO: 119553 - DNA, 22 bp, Artificial Sequence
  Synthetic oligonucleotide; TTT chr11 5362390 5362411 5362395 5362390 -
ccaaagccatagactgatcatc

SEQ ID NO: 119554 - DNA, 22 bp, Artificial Sequence
  Synthetic oligonucleotide; TTC chr11 5362389 5362410 5362394 5362389 -
caaagccatagactgatcatct

SEQ ID NO: 119555 - DNA, 22 bp, Artificial Sequence
  Synthetic oligonucleotide; CTG chr11 5362374 5362395 5362379 5362374 -
atcatctgatctacaaatacac

SEQ ID NO: 119556 - DNA, 22 bp, Artificial Sequence
  Synthetic oligonucleotide; CTG chr11 5362366 5362387 5362371 5362366 -
atctacaaatacactaaattcc

SEQ ID NO: 119557 - DNA, 22 bp, Artificial Sequence
  Synthetic oligonucleotide; CTA chr11 5362361 5362382 5362366 5362361 -
caaatacactaaattcctgacc

SEQ ID NO: 119558 - DNA, 22 bp, Artificial Sequence
  Synthetic oligonucleotide; CTA chr11 5362350 5362371 5362355 5362350 -
aattcctgaccatcttcgtagt

SEQ ID NO: 119559 - DNA, 22 bp, Artificial Sequence
  Synthetic oligonucleotide; TTC chr11 5362345 5362366 5362350 5362345 -
ctgaccatcttcgtagttgatt

SEQ ID NO: 119560 - DNA, 22 bp, Artificial Sequence
  Synthetic oligonucleotide; CTG chr11 5362342 5362363 5362347 5362342 -
accatcttcgtagttgattatg

SEQ ID NO: 119561 - DNA, 22 bp, Artificial Sequence
  Synthetic oligonucleotide; CTT chr11 5362334 5362355 5362339 5362334 -
cgtagttgattatggctctgaa

SEQ ID NO: 119562 - DNA, 22 bp, Artificial Sequence
  Synthetic oligonucleotide; TTC chr11 5362333 5362354 5362338 5362333 -
gtagttgattatggctctgaat

SEQ ID NO: 119563 - DNA, 22 bp, Artificial Sequence
  Synthetic oligonucleotide; TTG chr11 5362326 5362347 5362331 5362326 -
attatggctctgaatggctttt

SEQ ID NO: 119564 - DNA, 22 bp, Artificial Sequence
  Synthetic oligonucleotide; TTA chr11 5362322 5362343 5362327 5362322 -
tggctctgaatggctttttgcc

SEQ ID NO: 119565 - DNA, 22 bp, Artificial Sequence
  Synthetic oligonucleotide; CTC chr11 5362316 5362337 5362321 5362316 -
tgaatggctttttgcccaaagc

SEQ ID NO: 119566 - DNA, 22 bp, Artificial Sequence
  Synthetic oligonucleotide; CTG chr11 5362314 5362335 5362319 5362314 -
aatggctttttgcccaaagcat

SEQ ID NO: 119567 - DNA, 22 bp, Artificial Sequence
  Synthetic oligonucleotide; CTT chr11 5362306 5362327 5362311 5362306 -
tttgcccaaagcatccagcacc

SEQ ID NO: 119568 - DNA, 22 bp, Artificial Sequence
  Synthetic oligonucleotide; TTT chr11 5362305 5362326 5362310 5362305 -
ttgcccaaagcatccagcacca

SEQ ID NO: 119569 - DNA, 22 bp, Artificial Sequence
  Synthetic oligonucleotide; TTT chr11 5362304 5362325 5362309 5362304 -
tgcccaaagcatccagcaccat

SEQ ID NO: 119570 - DNA, 22 bp, Artificial Sequence
  Synthetic oligonucleotide; TTT chr11 5362303 5362324 5362308 5362303 -
gcccaaagcatccagcaccatt

SEQ ID NO: 119571 - DNA, 22 bp, Artificial Sequence
  Synthetic oligonucleotide; TTG chr11 5362302 5362323 5362307 5362302 -
cccaaagcatccagcaccattt

SEQ ID NO: 119572 - DNA, 22 bp, Artificial Sequence
  Synthetic oligonucleotide; TTT chr11 5362280 5362301 5362285 5362280 -
tcatctgggtagtttcccctgc

SEQ ID NO: 119573 - DNA, 22 bp, Artificial Sequence
  Synthetic oligonucleotide; TTT chr11 5362279 5362300 5362284 5362279 -
catctgggtagtttcccctgct

SEQ ID NO: 119574 - DNA, 22 bp, Artificial Sequence
  Synthetic oligonucleotide; TTC chr11 5362278 5362299 5362283 5362278 -
atctgggtagtttcccctgctg

SEQ ID NO: 119575 - DNA, 22 bp, Artificial Sequence
  Synthetic oligonucleotide; CTG chr11 5362273 5362294 5362278 5362273 -
ggtagtttcccctgctggtaaa

SEQ ID NO: 119576 - DNA, 22 bp, Artificial Sequence
  Synthetic oligonucleotide; TTT chr11 5362265 5362286 5362270 5362265 -
cccctgctggtaaaaatagtaa

SEQ ID NO: 119577 - DNA, 22 bp, Artificial Sequence
  Synthetic oligonucleotide; TTC chr11 5362264 5362285 5362269 5362264 -
ccctgctggtaaaaatagtaaa

SEQ ID NO: 119578 - DNA, 22 bp, Artificial Sequence
  Synthetic oligonucleotide; CTG chr11 5362259 5362280 5362264 5362259 -
ctggtaaaaatagtaaacactt

SEQ ID NO: 119579 - DNA, 22 bp, Artificial Sequence
  Synthetic oligonucleotide; CTG chr11 5362256 5362277 5362261 5362256 -
gtaaaaatagtaaacacttttc

SEQ ID NO: 119580 - DNA, 22 bp, Artificial Sequence
  Synthetic oligonucleotide; CTT chr11 5362237 5362258 5362242 5362237 -
ttccttatctactcccatcccc

SEQ ID NO: 119581 - DNA, 22 bp, Artificial Sequence
  Synthetic oligonucleotide; TTT chr11 5362236 5362257 5362241 5362236 -
tccttatctactcccatccccc

SEQ ID NO: 119582 - DNA, 22 bp, Artificial Sequence
  Synthetic oligonucleotide; TTT chr11 5362235 5362256 5362240 5362235 -
ccttatctactcccatcccccg

SEQ ID NO: 119583 - DNA, 22 bp, Artificial Sequence
  Synthetic oligonucleotide; TTC chr11 5362234 5362255 5362239 5362234 -
cttatctactcccatcccccga

SEQ ID NO: 119584 - DNA, 22 bp, Artificial Sequence
  Synthetic oligonucleotide; CTT chr11 5362231 5362252 5362236 5362231 -
atctactcccatcccccgacag

SEQ ID NO: 119585 - DNA, 22 bp, Artificial Sequence
  Synthetic oligonucleotide; TTA chr11 5362230 5362251 5362235 5362230 -
tctactcccatcccccgacaga

SEQ ID NO: 119586 - DNA, 22 bp, Artificial Sequence
  Synthetic oligonucleotide; CTA chr11 5362226 5362247 5362231 5362226 -
ctcccatcccccgacagaaaca

SEQ ID NO: 119587 - DNA, 22 bp, Artificial Sequence
  Synthetic oligonucleotide; CTC chr11 5362223 5362244 5362228 5362223 -
ccatcccccgacagaaacacgg

SEQ ID NO: 119588 - DNA, 22 bp, Artificial Sequence
  Synthetic oligonucleotide; CTA chr11 5362192 5362213 5362197 5362192 -
tcactctctatctgggtgtggt

SEQ ID NO: 119589 - DNA, 22 bp, Artificial Sequence
  Synthetic oligonucleotide; CTC chr11 5362186 5362207 5362191 5362186 -
tctatctgggtgtggttgagat

SEQ ID NO: 119590 - DNA, 22 bp, Artificial Sequence
  Synthetic oligonucleotide; CTC chr11 5362184 5362205 5362189 5362184 -
tatctgggtgtggttgagatct

SEQ ID NO: 119591 - DNA, 22 bp, Artificial Sequence
  Synthetic oligonucleotide; CTA chr11 5362182 5362203 5362187 5362182 -
tctgggtgtggttgagatcttc

SEQ ID NO: 119592 - DNA, 22 bp, Artificial Sequence
  Synthetic oligonucleotide; CTG chr11 5362178 5362199 5362183 5362178 -
ggtgtggttgagatcttcaaaa

SEQ ID NO: 119593 - DNA, 22 bp, Artificial Sequence
  Synthetic oligonucleotide; TTG chr11 5362168 5362189 5362173 5362168 -
agatcttcaaaatctgcagtgc

SEQ ID NO: 119594 - DNA, 22 bp, Artificial Sequence
  Synthetic oligonucleotide; CTT chr11 5362161 5362182 5362166 5362161 -
caaaatctgcagtgctgatagc

SEQ ID NO: 119595 - DNA, 22 bp, Artificial Sequence
  Synthetic oligonucleotide; TTC chr11 5362160 5362181 5362165 5362160 -
aaaatctgcagtgctgatagct

SEQ ID NO: 119596 - DNA, 22 bp, Artificial Sequence
  Synthetic oligonucleotide; CTG chr11 5362152 5362173 5362157 5362152 -
cagtgctgatagctcagcatgg

SEQ ID NO: 119597 - DNA, 22 bp, Artificial Sequence
  Synthetic oligonucleotide; CTG chr11 5362144 5362165 5362149 5362144 -
atagctcagcatggaatgaagt

SEQ ID NO: 119598 - DNA, 22 bp, Artificial Sequence
  Synthetic oligonucleotide; CTC chr11 5362137 5362158 5362142 5362137 -
agcatggaatgaagtgaaccaa

SEQ ID NO: 119599 - DNA, 22 bp, Artificial Sequence
  Synthetic oligonucleotide; CTC chr11 5362108 5362129 5362113 5362108 -
tctctgactttggtttataagg

SEQ ID NO: 119600 - DNA, 22 bp, Artificial Sequence
  Synthetic oligonucleotide; CTC chr11 5362106 5362127 5362111 5362106 -
tctgactttggtttataaggat

SEQ ID NO: 119601 - DNA, 22 bp, Artificial Sequence
  Synthetic oligonucleotide; CTC chr11 5362104 5362125 5362109 5362104 -
tgactttggtttataaggattt

SEQ ID NO: 119602 - DNA, 22 bp, Artificial Sequence
  Synthetic oligonucleotide; CTG chr11 5362102 5362123 5362107 5362102 -
actttggtttataaggatttgc

SEQ ID NO: 119603 - DNA, 22 bp, Artificial Sequence
  Synthetic oligonucleotide; CTT chr11 5362098 5362119 5362103 5362098 -
tggtttataaggatttgcatac

SEQ ID NO: 119604 - DNA, 22 bp, Artificial Sequence
  Synthetic oligonucleotide; TTT chr11 5362097 5362118 5362102 5362097 -
ggtttataaggatttgcataca

SEQ ID NO: 119605 - DNA, 22 bp, Artificial Sequence
  Synthetic oligonucleotide; TTG chr11 5362096 5362117 5362101 5362096 -
gtttataaggatttgcatacat

SEQ ID NO: 119606 - DNA, 22 bp, Artificial Sequence
  Synthetic oligonucleotide; TTT chr11 5362092 5362113 5362097 5362092 -
ataaggatttgcatacattttc

SEQ ID NO: 119607 - DNA, 22 bp, Artificial Sequence
  Synthetic oligonucleotide; TTA chr11 5362091 5362112 5362096 5362091 -
taaggatttgcatacattttct

SEQ ID NO: 119608 - DNA, 22 bp, Artificial Sequence
  Synthetic oligonucleotide; TTT chr11 5362082 5362103 5362087 5362082 -
gcatacattttctgatggatac

SEQ ID NO: 119609 - DNA, 22 bp, Artificial Sequence
  Synthetic oligonucleotide; TTG chr11 5362081 5362102 5362086 5362081 -
catacattttctgatggatact

SEQ ID NO: 119610 - DNA, 22 bp, Artificial Sequence
  Synthetic oligonucleotide; TTT chr11 5362072 5362093 5362077 5362072 -
tctgatggatactaggctcatt

SEQ ID NO: 119611 - DNA, 22 bp, Artificial Sequence
  Synthetic oligonucleotide; TTT chr11 5362071 5362092 5362076 5362071 -
ctgatggatactaggctcattt

SEQ ID NO: 119612 - DNA, 22 bp, Artificial Sequence
  Synthetic oligonucleotide; TTC chr11 5362070 5362091 5362075 5362070 -
tgatggatactaggctcatttc

SEQ ID NO: 119613 - DNA, 22 bp, Artificial Sequence
  Synthetic oligonucleotide; CTG chr11 5362068 5362089 5362073 5362068 -
atggatactaggctcatttctg

SEQ ID NO: 119614 - DNA, 22 bp, Artificial Sequence
  Synthetic oligonucleotide; CTA chr11 5362058 5362079 5362063 5362058 -
ggctcatttctgggaatatgca

SEQ ID NO: 119615 - DNA, 22 bp, Artificial Sequence
  Synthetic oligonucleotide; CTC chr11 5362053 5362074 5362058 5362053 -
atttctgggaatatgcagcaat

SEQ ID NO: 119616 - DNA, 22 bp, Artificial Sequence
  Synthetic oligonucleotide; TTT chr11 5362049 5362070 5362054 5362049 -
ctgggaatatgcagcaatttaa

SEQ ID NO: 119617 - DNA, 22 bp, Artificial Sequence
  Synthetic oligonucleotide; TTC chr11 5362048 5362069 5362053 5362048 -
tgggaatatgcagcaatttaaa

SEQ ID NO: 119618 - DNA, 22 bp, Artificial Sequence
  Synthetic oligonucleotide; CTG chr11 5362046 5362067 5362051 5362046 -
ggaatatgcagcaatttaaagc

SEQ ID NO: 119619 - DNA, 22 bp, Artificial Sequence
  Synthetic oligonucleotide; TTT chr11 5362029 5362050 5362034 5362029 -
aaagcattgtgcctcatgtcaa

SEQ ID NO: 119620 - DNA, 22 bp, Artificial Sequence
  Synthetic oligonucleotide; TTA chr11 5362028 5362049 5362033 5362028 -
aagcattgtgcctcatgtcaaa

SEQ ID NO: 119621 - DNA, 22 bp, Artificial Sequence
  Synthetic oligonucleotide; TTG chr11 5362020 5362041 5362025 5362020 -
tgcctcatgtcaaagtttgctt

SEQ ID NO: 119622 - DNA, 22 bp, Artificial Sequence
  Synthetic oligonucleotide; CTC chr11 5362014 5362035 5362019 5362014 -
atgtcaaagtttgctttactca

SEQ ID NO: 119623 - DNA, 22 bp, Artificial Sequence
  Synthetic oligonucleotide; TTT chr11 5362002 5362023 5362007 5362002 -
gctttactcaatctgacactaa

SEQ ID NO: 119624 - DNA, 22 bp, Artificial Sequence
  Synthetic oligonucleotide; TTG chr11 5362001 5362022 5362006 5362001 -
ctttactcaatctgacactaat

SEQ ID NO: 119625 - DNA, 22 bp, Artificial Sequence
  Synthetic oligonucleotide; CTT chr11 5361998 5362019 5362003 5361998 -
tactcaatctgacactaatcta

SEQ ID NO: 119626 - DNA, 22 bp, Artificial Sequence
  Synthetic oligonucleotide; TTT chr11 5361997 5362018 5362002 5361997 -
actcaatctgacactaatctat

SEQ ID NO: 119627 - DNA, 22 bp, Artificial Sequence
  Synthetic oligonucleotide; TTA chr11 5361996 5362017 5362001 5361996 -
ctcaatctgacactaatctatt

SEQ ID NO: 119628 - DNA, 22 bp, Artificial Sequence
  Synthetic oligonucleotide; CTC chr11 5361993 5362014 5361998 5361993 -
aatctgacactaatctatttgg

SEQ ID NO: 119629 - DNA, 22 bp, Artificial Sequence
  Synthetic oligonucleotide; CTG chr11 5361987 5362008 5361992 5361987 -
acactaatctatttggtaagtt

SEQ ID NO: 119630 - DNA, 22 bp, Artificial Sequence
  Synthetic oligonucleotide; CTA chr11 5361981 5362002 5361986 5361981 -
atctatttggtaagtttttctt

SEQ ID NO: 119631 - DNA, 22 bp, Artificial Sequence
  Synthetic oligonucleotide; CTA chr11 5361976 5361997 5361981 5361976 -
tttggtaagtttttctttctgt

SEQ ID NO: 119632 - DNA, 22 bp, Artificial Sequence
  Synthetic oligonucleotide; TTT chr11 5361973 5361994 5361978 5361973 -
ggtaagtttttctttctgttag

SEQ ID NO: 119633 - DNA, 22 bp, Artificial Sequence
  Synthetic oligonucleotide; TTG chr11 5361972 5361993 5361977 5361972 -
gtaagtttttctttctgttagt

SEQ ID NO: 119634 - DNA, 22 bp, Artificial Sequence
  Synthetic oligonucleotide; TTT chr11 5361964 5361985 5361969 5361964 -
ttctttctgttagtctataccc

SEQ ID NO: 119635 - DNA, 22 bp, Artificial Sequence
  Synthetic oligonucleotide; TTT chr11 5361963 5361984 5361968 5361963 -
tctttctgttagtctataccct

SEQ ID NO: 119636 - DNA, 22 bp, Artificial Sequence
  Synthetic oligonucleotide; TTT chr11 5361962 5361983 5361967 5361962 -
ctttctgttagtctataccctt

SEQ ID NO: 119637 - DNA, 22 bp, Artificial Sequence
  Synthetic oligonucleotide; TTC chr11 5361961 5361982 5361966 5361961 -
tttctgttagtctatacccttg

SEQ ID NO: 119638 - DNA, 22 bp, Artificial Sequence
  Synthetic oligonucleotide; CTT chr11 5361959 5361980 5361964 5361959 -
tctgttagtctatacccttgtc

SEQ ID NO: 119639 - DNA, 22 bp, Artificial Sequence
  Synthetic oligonucleotide; TTT chr11 5361958 5361979 5361963 5361958 -
ctgttagtctatacccttgtca

SEQ ID NO: 119640 - DNA, 22 bp, Artificial Sequence
  Synthetic oligonucleotide; TTC chr11 5361957 5361978 5361962 5361957 -
tgttagtctatacccttgtcat

SEQ ID NO: 119641 - DNA, 22 bp, Artificial Sequence
  Synthetic oligonucleotide; CTG chr11 5361955 5361976 5361960 5361955 -
ttagtctatacccttgtcatta

SEQ ID NO: 119642 - DNA, 22 bp, Artificial Sequence
  Synthetic oligonucleotide; TTA chr11 5361952 5361973 5361957 5361952 -
gtctatacccttgtcattacag

SEQ ID NO: 119643 - DNA, 22 bp, Artificial Sequence
  Synthetic oligonucleotide; CTA chr11 5361947 5361968 5361952 5361947 -
tacccttgtcattacagtgtcc

SEQ ID NO: 119644 - DNA, 22 bp, Artificial Sequence
  Synthetic oligonucleotide; CTT chr11 5361940 5361961 5361945 5361940 -
gtcattacagtgtcccctatcc

SEQ ID NO: 119645 - DNA, 22 bp, Artificial Sequence
  Synthetic oligonucleotide; TTG chr11 5361939 5361960 5361944 5361939 -
tcattacagtgtcccctatcct

SEQ ID NO: 119646 - DNA, 22 bp, Artificial Sequence
  Synthetic oligonucleotide; TTA chr11 5361933 5361954 5361938 5361933 -
cagtgtcccctatcctcactct

SEQ ID NO: 119647 - DNA, 22 bp, Artificial Sequence
  Synthetic oligonucleotide; CTA chr11 5361921 5361942 5361926 5361921 -
tcctcactctaacttcatcttt

SEQ ID NO: 119648 - DNA, 22 bp, Artificial Sequence
  Synthetic oligonucleotide; CTC chr11 5361916 5361937 5361921 5361916 -
actctaacttcatcttttttgg

SEQ ID NO: 119649 - DNA, 22 bp, Artificial Sequence
  Synthetic oligonucleotide; CTC chr11 5361912 5361933 5361917 5361912 -
taacttcatcttttttgggagt

SEQ ID NO: 119650 - DNA, 22 bp, Artificial Sequence
  Synthetic oligonucleotide; CTA chr11 5361910 5361931 5361915 5361910 -
acttcatcttttttgggagtaa

SEQ ID NO: 119651 - DNA, 22 bp, Artificial Sequence
  Synthetic oligonucleotide; CTT chr11 5361906 5361927 5361911 5361906 -
catcttttttgggagtaagtac

SEQ ID NO: 119652 - DNA, 22 bp, Artificial Sequence
  Synthetic oligonucleotide; TTC chr11 5361905 5361926 5361910 5361905 -
atcttttttgggagtaagtact

SEQ ID NO: 119653 - DNA, 22 bp, Artificial Sequence
  Synthetic oligonucleotide; CTT chr11 5361900 5361921 5361905 5361900 -
ttttgggagtaagtacttggta

SEQ ID NO: 119654 - DNA, 22 bp, Artificial Sequence
  Synthetic oligonucleotide; TTT chr11 5361899 5361920 5361904 5361899 -
tttgggagtaagtacttggtag

SEQ ID NO: 119655 - DNA, 22 bp, Artificial Sequence
  Synthetic oligonucleotide; TTT chr11 5361898 5361919 5361903 5361898 -
ttgggagtaagtacttggtaga

SEQ ID NO: 119656 - DNA, 22 bp, Artificial Sequence
  Synthetic oligonucleotide; TTT chr11 5361897 5361918 5361902 5361897 -
tgggagtaagtacttggtagaa

SEQ ID NO: 119657 - DNA, 22 bp, Artificial Sequence
  Synthetic oligonucleotide; TTT chr11 5361896 5361917 5361901 5361896 -
gggagtaagtacttggtagaac

SEQ ID NO: 119658 - DNA, 22 bp, Artificial Sequence
  Synthetic oligonucleotide; TTG chr11 5361895 5361916 5361900 5361895 -
ggagtaagtacttggtagaaca

SEQ ID NO: 119659 - DNA, 22 bp, Artificial Sequence
  Synthetic oligonucleotide; CTT chr11 5361882 5361903 5361887 5361882 -
ggtagaacacatagaggcaaag

SEQ ID NO: 119660 - DNA, 22 bp, Artificial Sequence
  Synthetic oligonucleotide; TTG chr11 5361881 5361902 5361886 5361881 -
gtagaacacatagaggcaaaga

SEQ ID NO: 119661 - DNA, 22 bp, Artificial Sequence
  Synthetic oligonucleotide; CTG chr11 5361851 5361872 5361856 5361851 -
gtttatgcagcccgaagagagc

SEQ ID NO: 119662 - DNA, 22 bp, Artificial Sequence
  Synthetic oligonucleotide; TTT chr11 5361847 5361868 5361852 5361847 -
atgcagcccgaagagagcaaca

SEQ ID NO: 119663 - DNA, 22 bp, Artificial Sequence
  Synthetic oligonucleotide; TTA chr11 5361846 5361867 5361851 5361846 -
tgcagcccgaagagagcaacaa

SEQ ID NO: 119664 - DNA, 22 bp, Artificial Sequence
  Synthetic oligonucleotide; CTG chr11 5361795 5361816 5361800 5361795 -
gaactacaccagagatatcatt

SEQ ID NO: 119665 - DNA, 22 bp, Artificial Sequence
  Synthetic oligonucleotide; CTA chr11 5361789 5361810 5361794 5361789 -
caccagagatatcattctgtat

SEQ ID NO: 119666 - DNA, 22 bp, Artificial Sequence
  Synthetic oligonucleotide; TTC chr11 5361772 5361793 5361777 5361772 -
tgtattcccgtggattttcaac

SEQ ID NO: 119667 - DNA, 22 bp, Artificial Sequence
  Synthetic oligonucleotide; CTG chr11 5361770 5361791 5361775 5361770 -
tattcccgtggattttcaactt

SEQ ID NO: 119668 - DNA, 22 bp, Artificial Sequence
  Synthetic oligonucleotide; TTC chr11 5361765 5361786 5361770 5361765 -
ccgtggattttcaacttgattt

SEQ ID NO: 119669 - DNA, 22 bp, Artificial Sequence
  Synthetic oligonucleotide; TTT chr11 5361755 5361776 5361760 5361755 -
tcaacttgattttttcctaact

SEQ ID NO: 119670 - DNA, 22 bp, Artificial Sequence
  Synthetic oligonucleotide; TTT chr11 5361754 5361775 5361759 5361754 -
caacttgattttttcctaacta

SEQ ID NO: 119671 - DNA, 22 bp, Artificial Sequence
  Synthetic oligonucleotide; TTC chr11 5361753 5361774 5361758 5361753 -
aacttgattttttcctaactag

SEQ ID NO: 119672 - DNA, 22 bp, Artificial Sequence
  Synthetic oligonucleotide; CTT chr11 5361748 5361769 5361753 5361748 -
gattttttcctaactagatcac

SEQ ID NO: 119673 - DNA, 22 bp, Artificial Sequence
  Synthetic oligonucleotide; TTG chr11 5361747 5361768 5361752 5361747 -
attttttcctaactagatcact

SEQ ID NO: 119674 - DNA, 22 bp, Artificial Sequence
  Synthetic oligonucleotide; TTT chr11 5361743 5361764 5361748 5361743 -
tttcctaactagatcactctgc

SEQ ID NO: 119675 - DNA, 22 bp, Artificial Sequence
  Synthetic oligonucleotide; TTT chr11 5361742 5361763 5361747 5361742 -
ttcctaactagatcactctgct

SEQ ID NO: 119676 - DNA, 22 bp, Artificial Sequence
  Synthetic oligonucleotide; TTT chr11 5361741 5361762 5361746 5361741 -
tcctaactagatcactctgcta

SEQ ID NO: 119677 - DNA, 22 bp, Artificial Sequence
  Synthetic oligonucleotide; TTT chr11 5361740 5361761 5361745 5361740 -
cctaactagatcactctgctag

SEQ ID NO: 119678 - DNA, 22 bp, Artificial Sequence
  Synthetic oligonucleotide; TTC chr11 5361739 5361760 5361744 5361739 -
ctaactagatcactctgctagg

SEQ ID NO: 119679 - DNA, 22 bp, Artificial Sequence
  Synthetic oligonucleotide; CTA chr11 5361736 5361757 5361741 5361736 -
actagatcactctgctagggaa

SEQ ID NO: 119680 - DNA, 22 bp, Artificial Sequence
  Synthetic oligonucleotide; CTA chr11 5361732 5361753 5361737 5361732 -
gatcactctgctagggaatgaa

SEQ ID NO: 119681 - DNA, 22 bp, Artificial Sequence
  Synthetic oligonucleotide; CTC chr11 5361724 5361745 5361729 5361724 -
tgctagggaatgaaaaaggaga

SEQ ID NO: 119682 - DNA, 22 bp, Artificial Sequence
  Synthetic oligonucleotide; CTG chr11 5361722 5361743 5361727 5361722 -
ctagggaatgaaaaaggagatc

SEQ ID NO: 119683 - DNA, 22 bp, Artificial Sequence
  Synthetic oligonucleotide; CTA chr11 5361719 5361740 5361724 5361719 -
gggaatgaaaaaggagatctag

SEQ ID NO: 119684 - DNA, 22 bp, Artificial Sequence
  Synthetic oligonucleotide; CTA chr11 5361698 5361719 5361703 5361698 -
ggattttccctcttctaggaat

SEQ ID NO: 119685 - DNA, 22 bp, Artificial Sequence
  Synthetic oligonucleotide; TTT chr11 5361692 5361713 5361697 5361692 -
tccctcttctaggaatttgcaa

SEQ ID NO: 119686 - DNA, 22 bp, Artificial Sequence
  Synthetic oligonucleotide; TTT chr11 5361691 5361712 5361696 5361691 -
ccctcttctaggaatttgcaaa

SEQ ID NO: 119687 - DNA, 22 bp, Artificial Sequence
  Synthetic oligonucleotide; TTC chr11 5361690 5361711 5361695 5361690 -
cctcttctaggaatttgcaaaa

SEQ ID NO: 119688 - DNA, 22 bp, Artificial Sequence
  Synthetic oligonucleotide; CTC chr11 5361686 5361707 5361691 5361686 -
ttctaggaatttgcaaaagaga

SEQ ID NO: 119689 - DNA, 22 bp, Artificial Sequence
  Synthetic oligonucleotide; CTT chr11 5361684 5361705 5361689 5361684 -
ctaggaatttgcaaaagagatt

SEQ ID NO: 119690 - DNA, 22 bp, Artificial Sequence
  Synthetic oligonucleotide; TTC chr11 5361683 5361704 5361688 5361683 -
taggaatttgcaaaagagatta

SEQ ID NO: 119691 - DNA, 22 bp, Artificial Sequence
  Synthetic oligonucleotide; CTA chr11 5361681 5361702 5361686 5361681 -
ggaatttgcaaaagagattatt

SEQ ID NO: 119692 - DNA, 22 bp, Artificial Sequence
  Synthetic oligonucleotide; TTT chr11 5361674 5361695 5361679 5361674 -
gcaaaagagattattcagaagc

SEQ ID NO: 119693 - DNA, 22 bp, Artificial Sequence
  Synthetic oligonucleotide; TTG chr11 5361673 5361694 5361678 5361673 -
caaaagagattattcagaagcc

SEQ ID NO: 119694 - DNA, 22 bp, Artificial Sequence
  Synthetic oligonucleotide; TTA chr11 5361661 5361682 5361666 5361661 -
ttcagaagccaagttctaaaga

SEQ ID NO: 119695 - DNA, 22 bp, Artificial Sequence
  Synthetic oligonucleotide; TTC chr11 5361658 5361679 5361663 5361658 -
agaagccaagttctaaagattt

SEQ ID NO: 119696 - DNA, 22 bp, Artificial Sequence
  Synthetic oligonucleotide; TTC chr11 5361645 5361666 5361650 5361645 -
taaagattttagggagtctttg

SEQ ID NO: 119697 - DNA, 22 bp, Artificial Sequence
  Synthetic oligonucleotide; CTA chr11 5361643 5361664 5361648 5361643 -
aagattttagggagtctttggg

SEQ ID NO: 119698 - DNA, 22 bp, Artificial Sequence
  Synthetic oligonucleotide; TTT chr11 5361636 5361657 5361641 5361636 -
tagggagtctttgggatgatag

SEQ ID NO: 119699 - DNA, 22 bp, Artificial Sequence
  Synthetic oligonucleotide; TTT chr11 5361635 5361656 5361640 5361635 -
agggagtctttgggatgataga

SEQ ID NO: 119700 - DNA, 22 bp, Artificial Sequence
  Synthetic oligonucleotide; TTA chr11 5361634 5361655 5361639 5361634 -
gggagtctttgggatgatagat

SEQ ID NO: 119701 - DNA, 22 bp, Artificial Sequence
  Synthetic oligonucleotide; CTT chr11 5361625 5361646 5361630 5361625 -
tgggatgatagattcttatacc

SEQ ID NO: 119702 - DNA, 22 bp, Artificial Sequence
  Synthetic oligonucleotide; TTT chr11 5361624 5361645 5361629 5361624 -
gggatgatagattcttataccc

SEQ ID NO: 119703 - DNA, 22 bp, Artificial Sequence
  Synthetic oligonucleotide; TTG chr11 5361623 5361644 5361628 5361623 -
ggatgatagattcttatacccc

SEQ ID NO: 119704 - DNA, 22 bp, Artificial Sequence
  Synthetic oligonucleotide; TTC chr11 5361610 5361631 5361615 5361610 -
ttataccccatcacatcttgac

SEQ ID NO: 119705 - DNA, 22 bp, Artificial Sequence
  Synthetic oligonucleotide; CTT chr11 5361608 5361629 5361613 5361608 -
ataccccatcacatcttgactg

SEQ ID NO: 119706 - DNA, 22 bp, Artificial Sequence
  Synthetic oligonucleotide; TTA chr11 5361607 5361628 5361612 5361607 -
taccccatcacatcttgactga

SEQ ID NO: 119707 - DNA, 22 bp, Artificial Sequence
  Synthetic oligonucleotide; CTT chr11 5361591 5361612 5361596 5361591 -
gactgatacattactgcatttc

SEQ ID NO: 119708 - DNA, 22 bp, Artificial Sequence
  Synthetic oligonucleotide; TTG chr11 5361590 5361611 5361595 5361590 -
actgatacattactgcatttcc

SEQ ID NO: 119709 - DNA, 22 bp, Artificial Sequence
  Synthetic oligonucleotide; CTG chr11 5361586 5361607 5361591 5361586 -
atacattactgcatttccctct

SEQ ID NO: 119710 - DNA, 22 bp, Artificial Sequence
  Synthetic oligonucleotide; TTA chr11 5361578 5361599 5361583 5361578 -
ctgcatttccctctctgcaatc

SEQ ID NO: 119711 - DNA, 22 bp, Artificial Sequence
  Synthetic oligonucleotide; CTG chr11 5361575 5361596 5361580 5361575 -
catttccctctctgcaatctct

SEQ ID NO: 119712 - DNA, 22 bp, Artificial Sequence
  Synthetic oligonucleotide; TTT chr11 5361570 5361591 5361575 5361570 -
ccctctctgcaatctctgataa

SEQ ID NO: 119713 - DNA, 22 bp, Artificial Sequence
  Synthetic oligonucleotide; TTC chr11 5361569 5361590 5361574 5361569 -
cctctctgcaatctctgataag

SEQ ID NO: 119714 - DNA, 22 bp, Artificial Sequence
  Synthetic oligonucleotide; CTC chr11 5361565 5361586 5361570 5361565 -
tctgcaatctctgataagccaa

SEQ ID NO: 119715 - DNA, 22 bp, Artificial Sequence
  Synthetic oligonucleotide; CTC chr11 5361563 5361584 5361568 5361563 -
tgcaatctctgataagccaacc

SEQ ID NO: 119716 - DNA, 22 bp, Artificial Sequence
  Synthetic oligonucleotide; CTG chr11 5361561 5361582 5361566 5361561 -
caatctctgataagccaaccgt

SEQ ID NO: 119717 - DNA, 22 bp, Artificial Sequence
  Synthetic oligonucleotide; CTC chr11 5361554 5361575 5361559 5361554 -
tgataagccaaccgtctactgc

SEQ ID NO: 119718 - DNA, 22 bp, Artificial Sequence
  Synthetic oligonucleotide; CTG chr11 5361552 5361573 5361557 5361552 -
ataagccaaccgtctactgctc

SEQ ID NO: 119719 - DNA, 22 bp, Artificial Sequence
  Synthetic oligonucleotide; CTA chr11 5361536 5361557 5361541 5361536 -
ctgctcattcctatgcggagcc

SEQ ID NO: 119720 - DNA, 22 bp, Artificial Sequence
  Synthetic oligonucleotide; CTG chr11 5361533 5361554 5361538 5361533 -
ctcattcctatgcggagcctct

SEQ ID NO: 119721 - DNA, 22 bp, Artificial Sequence
  Synthetic oligonucleotide; CTC chr11 5361530 5361551 5361535 5361530 -
attcctatgcggagcctctagg

SEQ ID NO: 119722 - DNA, 22 bp, Artificial Sequence
  Synthetic oligonucleotide; TTC chr11 5361526 5361547 5361531 5361526 -
ctatgcggagcctctaggccaa

SEQ ID NO: 119723 - DNA, 22 bp, Artificial Sequence
  Synthetic oligonucleotide; CTA chr11 5361523 5361544 5361528 5361523 -
tgcggagcctctaggccaagac

SEQ ID NO: 119724 - DNA, 22 bp, Artificial Sequence
  Synthetic oligonucleotide; CTC chr11 5361512 5361533 5361517 5361512 -
taggccaagacacactggagtt

SEQ ID NO: 119725 - DNA, 22 bp, Artificial Sequence
  Synthetic oligonucleotide; CTA chr11 5361510 5361531 5361515 5361510 -
ggccaagacacactggagttct

SEQ ID NO: 119726 - DNA, 22 bp, Artificial Sequence
  Synthetic oligonucleotide; CTG chr11 5361495 5361516 5361500 5361495 -
gagttctttaccgacctgttca

SEQ ID NO: 119727 - DNA, 22 bp, Artificial Sequence
  Synthetic oligonucleotide; TTC chr11 5361489 5361510 5361494 5361489 -
tttaccgacctgttcataagtc

SEQ ID NO: 119728 - DNA, 22 bp, Artificial Sequence
  Synthetic oligonucleotide; CTT chr11 5361487 5361508 5361492 5361487 -
taccgacctgttcataagtctg

SEQ ID NO: 119729 - DNA, 22 bp, Artificial Sequence
  Synthetic oligonucleotide; TTT chr11 5361486 5361507 5361491 5361486 -
accgacctgttcataagtctgt

SEQ ID NO: 119730 - DNA, 22 bp, Artificial Sequence
  Synthetic oligonucleotide; TTA chr11 5361485 5361506 5361490 5361485 -
ccgacctgttcataagtctgtt

SEQ ID NO: 119731 - DNA, 22 bp, Artificial Sequence
  Synthetic oligonucleotide; CTG chr11 5361477 5361498 5361482 5361477 -
ttcataagtctgttcattgttg

SEQ ID NO: 119732 - DNA, 22 bp, Artificial Sequence
  Synthetic oligonucleotide; TTC chr11 5361474 5361495 5361479 5361474 -
ataagtctgttcattgttgcca

SEQ ID NO: 119733 - DNA, 22 bp, Artificial Sequence
  Synthetic oligonucleotide; CTG chr11 5361465 5361486 5361470 5361465 -
ttcattgttgccacagatgtga

SEQ ID NO: 119734 - DNA, 22 bp, Artificial Sequence
  Synthetic oligonucleotide; TTC chr11 5361462 5361483 5361467 5361462 -
attgttgccacagatgtgacta

SEQ ID NO: 119735 - DNA, 22 bp, Artificial Sequence
  Synthetic oligonucleotide; TTG chr11 5361458 5361479 5361463 5361458 -
ttgccacagatgtgactatgaa

SEQ ID NO: 119736 - DNA, 22 bp, Artificial Sequence
  Synthetic oligonucleotide; TTG chr11 5361455 5361476 5361460 5361455 -
ccacagatgtgactatgaaccc

SEQ ID NO: 119737 - DNA, 22 bp, Artificial Sequence
  Synthetic oligonucleotide; CTA chr11 5361440 5361461 5361445 5361440 -
tgaacccctaagcctggtcaag

SEQ ID NO: 119738 - DNA, 22 bp, Artificial Sequence
  Synthetic oligonucleotide; CTA chr11 5361430 5361451 5361435 5361430 -
agcctggtcaagatattggatc

SEQ ID NO: 119739 - DNA, 22 bp, Artificial Sequence
  Synthetic oligonucleotide; CTG chr11 5361424 5361445 5361429 5361424 -
gtcaagatattggatccaacac

SEQ ID NO: 119740 - DNA, 22 bp, Artificial Sequence
  Synthetic oligonucleotide; TTG chr11 5361412 5361433 5361417 5361412 -
gatccaacaccaactttttaga

SEQ ID NO: 119741 - DNA, 22 bp, Artificial Sequence
  Synthetic oligonucleotide; CTT chr11 5361396 5361417 5361401 5361396 -
tttagactatactcagaagcca

SEQ ID NO: 119742 - DNA, 22 bp, Artificial Sequence
  Synthetic oligonucleotide; TTT chr11 5361395 5361416 5361400 5361395 -
ttagactatactcagaagccaa

SEQ ID NO: 119743 - DNA, 22 bp, Artificial Sequence
  Synthetic oligonucleotide; TTT chr11 5361394 5361415 5361399 5361394 -
tagactatactcagaagccaag

SEQ ID NO: 119744 - DNA, 22 bp, Artificial Sequence
  Synthetic oligonucleotide; TTT chr11 5361393 5361414 5361398 5361393 -
agactatactcagaagccaagc

SEQ ID NO: 119745 - DNA, 22 bp, Artificial Sequence
  Synthetic oligonucleotide; TTA chr11 5361392 5361413 5361397 5361392 -
gactatactcagaagccaagct

SEQ ID NO: 119746 - DNA, 22 bp, Artificial Sequence
  Synthetic oligonucleotide; CTA chr11 5361387 5361408 5361392 5361387 -
tactcagaagccaagctgcaaa

SEQ ID NO: 119747 - DNA, 22 bp, Artificial Sequence
  Synthetic oligonucleotide; CTC chr11 5361382 5361403 5361387 5361382 -
agaagccaagctgcaaagaaaa

SEQ ID NO: 119748 - DNA, 22 bp, Artificial Sequence
  Synthetic oligonucleotide; CTG chr11 5361369 5361390 5361374 5361369 -
caaagaaaattagtttcagaaa

SEQ ID NO: 119749 - DNA, 22 bp, Artificial Sequence
  Synthetic oligonucleotide; TTA chr11 5361357 5361378 5361362 5361357 -
gtttcagaaactcctccctacg

SEQ ID NO: 119750 - DNA, 22 bp, Artificial Sequence
  Synthetic oligonucleotide; TTT chr11 5361353 5361374 5361358 5361353 -
cagaaactcctccctacggccc

SEQ ID NO: 119751 - DNA, 22 bp, Artificial Sequence
  Synthetic oligonucleotide; TTC chr11 5361352 5361373 5361357 5361352 -
agaaactcctccctacggccca

SEQ ID NO: 119752 - DNA, 22 bp, Artificial Sequence
  Synthetic oligonucleotide; CTC chr11 5361344 5361365 5361349 5361344 -
ctccctacggcccactcctctc

SEQ ID NO: 119753 - DNA, 22 bp, Artificial Sequence
  Synthetic oligonucleotide; CTC chr11 5361341 5361362 5361346 5361341 -
cctacggcccactcctctctcc

SEQ ID NO: 119754 - DNA, 22 bp, Artificial Sequence
  Synthetic oligonucleotide; CTA chr11 5361337 5361358 5361342 5361337 -
cggcccactcctctctcctccc

SEQ ID NO: 119755 - DNA, 22 bp, Artificial Sequence
  Synthetic oligonucleotide; CTC chr11 5361327 5361348 5361332 5361327 -
ctctctcctccctccttcttta

SEQ ID NO: 119756 - DNA, 22 bp, Artificial Sequence
  Synthetic oligonucleotide; CTC chr11 5361324 5361345 5361329 5361324 -
tctcctccctccttctttattc

SEQ ID NO: 119757 - DNA, 22 bp, Artificial Sequence
  Synthetic oligonucleotide; CTC chr11 5361322 5361343 5361327 5361322 -
tcctccctccttctttattctc

SEQ ID NO: 119758 - DNA, 22 bp, Artificial Sequence
  Synthetic oligonucleotide; CTC chr11 5361320 5361341 5361325 5361320 -
ctccctccttctttattctccc

SEQ ID NO: 119759 - DNA, 22 bp, Artificial Sequence
  Synthetic oligonucleotide; CTC chr11 5361317 5361338 5361322 5361317 -
cctccttctttattctcccagc

SEQ ID NO: 119760 - DNA, 22 bp, Artificial Sequence
  Synthetic oligonucleotide; CTC chr11 5361313 5361334 5361318 5361313 -
cttctttattctcccagcctga

SEQ ID NO: 119761 - DNA, 22 bp, Artificial Sequence
  Synthetic oligonucleotide; CTT chr11 5361310 5361331 5361315 5361310 -
ctttattctcccagcctgaggg

SEQ ID NO: 119762 - DNA, 22 bp, Artificial Sequence
  Synthetic oligonucleotide; TTC chr11 5361309 5361330 5361314 5361309 -
tttattctcccagcctgaggga

SEQ ID NO: 119763 - DNA, 22 bp, Artificial Sequence
  Synthetic oligonucleotide; CTT chr11 5361307 5361328 5361312 5361307 -
tattctcccagcctgagggatt

SEQ ID NO: 119764 - DNA, 22 bp, Artificial Sequence
  Synthetic oligonucleotide; TTT chr11 5361306 5361327 5361311 5361306 -
attctcccagcctgagggattt

SEQ ID NO: 119765 - DNA, 22 bp, Artificial Sequence
  Synthetic oligonucleotide; TTA chr11 5361305 5361326 5361310 5361305 -
ttctcccagcctgagggattta

SEQ ID NO: 119766 - DNA, 22 bp, Artificial Sequence
  Synthetic oligonucleotide; TTC chr11 5361302 5361323 5361307 5361302 -
tcccagcctgagggatttagaa

SEQ ID NO: 119767 - DNA, 22 bp, Artificial Sequence
  Synthetic oligonucleotide; CTC chr11 5361300 5361321 5361305 5361300 -
ccagcctgagggatttagaact

SEQ ID NO: 119768 - DNA, 22 bp, Artificial Sequence
  Synthetic oligonucleotide; CTG chr11 5361292 5361313 5361297 5361292 -
agggatttagaactttggaaca

SEQ ID NO: 119769 - DNA, 22 bp, Artificial Sequence
  Synthetic oligonucleotide; TTT chr11 5361284 5361305 5361289 5361284 -
agaactttggaacaggagtcgc

SEQ ID NO: 119770 - DNA, 22 bp, Artificial Sequence
  Synthetic oligonucleotide; TTA chr11 5361283 5361304 5361288 5361283 -
gaactttggaacaggagtcgct

SEQ ID NO: 119771 - DNA, 22 bp, Artificial Sequence
  Synthetic oligonucleotide; CTT chr11 5361277 5361298 5361282 5361277 -
tggaacaggagtcgctaaggtt

SEQ ID NO: 119772 - DNA, 22 bp, Artificial Sequence
  Synthetic oligonucleotide; TTT chr11 5361276 5361297 5361281 5361276 -
ggaacaggagtcgctaaggttt

SEQ ID NO: 119773 - DNA, 22 bp, Artificial Sequence
  Synthetic oligonucleotide; TTG chr11 5361275 5361296 5361280 5361275 -
gaacaggagtcgctaaggtttc

SEQ ID NO: 119774 - DNA, 22 bp, Artificial Sequence
  Synthetic oligonucleotide; CTA chr11 5361260 5361281 5361265 5361260 -
aggtttcttcctgcatctaggt

SEQ ID NO: 119775 - DNA, 22 bp, Artificial Sequence
  Synthetic oligonucleotide; TTT chr11 5361254 5361275 5361259 5361254 -
cttcctgcatctaggttaggga

SEQ ID NO: 119776 - DNA, 22 bp, Artificial Sequence
  Synthetic oligonucleotide; TTC chr11 5361253 5361274 5361258 5361253 -
ttcctgcatctaggttagggaa

SEQ ID NO: 119777 - DNA, 22 bp, Artificial Sequence
  Synthetic oligonucleotide; CTT chr11 5361251 5361272 5361256 5361251 -
cctgcatctaggttagggaatt

SEQ ID NO: 119778 - DNA, 22 bp, Artificial Sequence
  Synthetic oligonucleotide; TTC chr11 5361250 5361271 5361255 5361250 -
ctgcatctaggttagggaatta

SEQ ID NO: 119779 - DNA, 22 bp, Artificial Sequence
  Synthetic oligonucleotide; CTG chr11 5361247 5361268 5361252 5361247 -
catctaggttagggaattagcc

SEQ ID NO: 119780 - DNA, 22 bp, Artificial Sequence
  Synthetic oligonucleotide; CTA chr11 5361241 5361262 5361246 5361241 -
ggttagggaattagccacatct

SEQ ID NO: 119781 - DNA, 22 bp, Artificial Sequence
  Synthetic oligonucleotide; TTA chr11 5361236 5361257 5361241 5361236 -
gggaattagccacatctccaga

SEQ ID NO: 119782 - DNA, 22 bp, Artificial Sequence
  Synthetic oligonucleotide; TTA chr11 5361228 5361249 5361233 5361228 -
gccacatctccagaaataagat

SEQ ID NO: 119783 - DNA, 22 bp, Artificial Sequence
  Synthetic oligonucleotide; CTC chr11 5361218 5361239 5361223 5361218 -
cagaaataagatttattttaag

SEQ ID NO: 119784 - DNA, 22 bp, Artificial Sequence
  Synthetic oligonucleotide; TTT chr11 5361204 5361225 5361209 5361204 -
attttaagcatcacataggggt

SEQ ID NO: 119785 - DNA, 22 bp, Artificial Sequence
  Synthetic oligonucleotide; TTA chr11 5361203 5361224 5361208 5361203 -
ttttaagcatcacataggggta

SEQ ID NO: 119786 - DNA, 22 bp, Artificial Sequence
  Synthetic oligonucleotide; TTT chr11 5361200 5361221 5361205 5361200 -
taagcatcacataggggtagaa

SEQ ID NO: 119787 - DNA, 22 bp, Artificial Sequence
  Synthetic oligonucleotide; TTT chr11 5361199 5361220 5361204 5361199 -
aagcatcacataggggtagaaa

SEQ ID NO: 119788 - DNA, 22 bp, Artificial Sequence
  Synthetic oligonucleotide; TTA chr11 5361198 5361219 5361203 5361198 -
agcatcacataggggtagaaaa

SEQ ID NO: 119789 - DNA, 22 bp, Artificial Sequence
  Synthetic oligonucleotide; CTT chr11 5361153 5361174 5361158 5361153 -
tttgcagcagatttctttcttt

SEQ ID NO: 119790 - DNA, 22 bp, Artificial Sequence
  Synthetic oligonucleotide; TTT chr11 5361152 5361173 5361157 5361152 -
ttgcagcagatttctttctttc

SEQ ID NO: 119791 - DNA, 22 bp, Artificial Sequence
  Synthetic oligonucleotide; TTT chr11 5361151 5361172 5361156 5361151 -
tgcagcagatttctttctttct

SEQ ID NO: 119792 - DNA, 22 bp, Artificial Sequence
  Synthetic oligonucleotide; TTT chr11 5361150 5361171 5361155 5361150 -
gcagcagatttctttctttctt

SEQ ID NO: 119793 - DNA, 22 bp, Artificial Sequence
  Synthetic oligonucleotide; TTG chr11 5361149 5361170 5361154 5361149 -
cagcagatttctttctttcttt

SEQ ID NO: 119794 - DNA, 22 bp, Artificial Sequence
  Synthetic oligonucleotide; TTT chr11 5361139 5361160 5361144 5361139 -
ctttctttctttcttttattat

SEQ ID NO: 119795 - DNA, 22 bp, Artificial Sequence
  Synthetic oligonucleotide; TTC chr11 5361138 5361159 5361143 5361138 -
tttctttctttcttttattatt

SEQ ID NO: 119796 - DNA, 22 bp, Artificial Sequence
  Synthetic oligonucleotide; CTT chr11 5361136 5361157 5361141 5361136 -
tctttctttcttttattattat

SEQ ID NO: 119797 - DNA, 22 bp, Artificial Sequence
  Synthetic oligonucleotide; TTT chr11 5361135 5361156 5361140 5361135 -
ctttctttcttttattattata

SEQ ID NO: 119798 - DNA, 22 bp, Artificial Sequence
  Synthetic oligonucleotide; TTC chr11 5361134 5361155 5361139 5361134 -
tttctttcttttattattatac

SEQ ID NO: 119799 - DNA, 22 bp, Artificial Sequence
  Synthetic oligonucleotide; CTT chr11 5361132 5361153 5361137 5361132 -
tctttcttttattattatactt

SEQ ID NO: 119800 - DNA, 22 bp, Artificial Sequence
  Synthetic oligonucleotide; TTT chr11 5361131 5361152 5361136 5361131 -
ctttcttttattattatacttt

SEQ ID NO: 119801 - DNA, 22 bp, Artificial Sequence
  Synthetic oligonucleotide; TTC chr11 5361130 5361151 5361135 5361130 -
tttcttttattattatacttta

SEQ ID NO: 119802 - DNA, 22 bp, Artificial Sequence
  Synthetic oligonucleotide; CTT chr11 5361128 5361149 5361133 5361128 -
tcttttattattatactttaag

SEQ ID NO: 119803 - DNA, 22 bp, Artificial Sequence
  Synthetic oligonucleotide; TTT chr11 5361127 5361148 5361132 5361127 -
cttttattattatactttaagt

SEQ ID NO: 119804 - DNA, 22 bp, Artificial Sequence
  Synthetic oligonucleotide; TTC chr11 5361126 5361147 5361131 5361126 -
ttttattattatactttaagtt

SEQ ID NO: 119805 - DNA, 22 bp, Artificial Sequence
  Synthetic oligonucleotide; CTT chr11 5361124 5361145 5361129 5361124 -
ttattattatactttaagtttt

SEQ ID NO: 119806 - DNA, 22 bp, Artificial Sequence
  Synthetic oligonucleotide; TTT chr11 5361123 5361144 5361128 5361123 -
tattattatactttaagtttta

SEQ ID NO: 119807 - DNA, 22 bp, Artificial Sequence
  Synthetic oligonucleotide; TTT chr11 5361122 5361143 5361127 5361122 -
attattatactttaagttttag

SEQ ID NO: 119808 - DNA, 22 bp, Artificial Sequence
  Synthetic oligonucleotide; TTA chr11 5361121 5361142 5361126 5361121 -
ttattatactttaagttttagg

SEQ ID NO: 119809 - DNA, 22 bp, Artificial Sequence
  Synthetic oligonucleotide; TTA chr11 5361118 5361139 5361123 5361118 -
ttatactttaagttttagggta

SEQ ID NO: 119810 - DNA, 22 bp, Artificial Sequence
  Synthetic oligonucleotide; TTA chr11 5361115 5361136 5361120 5361115 -
tactttaagttttagggtacat

SEQ ID NO: 119811 - DNA, 22 bp, Artificial Sequence
  Synthetic oligonucleotide; CTT chr11 5361110 5361131 5361115 5361110 -
taagttttagggtacatttgca

SEQ ID NO: 119812 - DNA, 22 bp, Artificial Sequence
  Synthetic oligonucleotide; TTT chr11 5361109 5361130 5361114 5361109 -
aagttttagggtacatttgcac

SEQ ID NO: 119813 - DNA, 22 bp, Artificial Sequence
  Synthetic oligonucleotide; TTA chr11 5361108 5361129 5361113 5361108 -
agttttagggtacatttgcaca

SEQ ID NO: 119814 - DNA, 22 bp, Artificial Sequence
  Synthetic oligonucleotide; TTT chr11 5361103 5361124 5361108 5361103 -
tagggtacatttgcacaacgtg

SEQ ID NO: 119815 - DNA, 22 bp, Artificial Sequence
  Synthetic oligonucleotide; TTT chr11 5361102 5361123 5361107 5361102 -
agggtacatttgcacaacgtgc

SEQ ID NO: 119816 - DNA, 22 bp, Artificial Sequence
  Synthetic oligonucleotide; TTA chr11 5361101 5361122 5361106 5361101 -
gggtacatttgcacaacgtgca

SEQ ID NO: 119817 - DNA, 22 bp, Artificial Sequence
  Synthetic oligonucleotide; TTT chr11 5361091 5361112 5361096 5361091 -
gcacaacgtgcaggtttgttac

SEQ ID NO: 119818 - DNA, 22 bp, Artificial Sequence
  Synthetic oligonucleotide; TTG chr11 5361090 5361111 5361095 5361090 -
cacaacgtgcaggtttgttaca

SEQ ID NO: 119819 - DNA, 22 bp, Artificial Sequence
  Synthetic oligonucleotide; TTT chr11 5361074 5361095 5361079 5361074 -
gttacatatgtatacatgtgcc

SEQ ID NO: 119820 - DNA, 22 bp, Artificial Sequence
  Synthetic oligonucleotide; TTG chr11 5361073 5361094 5361078 5361073 -
ttacatatgtatacatgtgcca

SEQ ID NO: 119821 - DNA, 22 bp, Artificial Sequence
  Synthetic oligonucleotide; TTA chr11 5361070 5361091 5361075 5361070 -
catatgtatacatgtgccatgt

SEQ ID NO: 119822 - DNA, 22 bp, Artificial Sequence
  Synthetic oligonucleotide; TTG chr11 5361046 5361067 5361051 5361046 -
gtgtgctgcacccattaactcg

SEQ ID NO: 119823 - DNA, 22 bp, Artificial Sequence
  Synthetic oligonucleotide; CTG chr11 5361038 5361059 5361043 5361038 -
cacccattaactcgtcacttag

SEQ ID NO: 119824 - DNA, 22 bp, Artificial Sequence
  Synthetic oligonucleotide; TTA chr11 5361029 5361050 5361034 5361029 -
actcgtcacttagcattaggta

SEQ ID NO: 119825 - DNA, 22 bp, Artificial Sequence
  Synthetic oligonucleotide; CTC chr11 5361025 5361046 5361030 5361025 -
gtcacttagcattaggtatatc

SEQ ID NO: 119826 - DNA, 22 bp, Artificial Sequence
  Synthetic oligonucleotide; CTT chr11 5361018 5361039 5361023 5361018 -
agcattaggtatatctcctaat

SEQ ID NO: 119827 - DNA, 22 bp, Artificial Sequence
  Synthetic oligonucleotide; TTA chr11 5361017 5361038 5361022 5361017 -
gcattaggtatatctcctaatg

SEQ ID NO: 119828 - DNA, 22 bp, Artificial Sequence
  Synthetic oligonucleotide; TTA chr11 5361011 5361032 5361016 5361011 -
ggtatatctcctaatgctatcc

SEQ ID NO: 119829 - DNA, 22 bp, Artificial Sequence
  Synthetic oligonucleotide; CTC chr11 5361001 5361022 5361006 5361001 -
ctaatgctatccctccccccga

SEQ ID NO: 119830 - DNA, 22 bp, Artificial Sequence
  Synthetic oligonucleotide; CTA chr11 5360998 5361019 5361003 5360998 -
atgctatccctccccccgaccc

SEQ ID NO: 119831 - DNA, 22 bp, Artificial Sequence
  Synthetic oligonucleotide; CTA chr11 5360992 5361013 5360997 5360992 -
tccctccccccgacccccaccc

SEQ ID NO: 119832 - DNA, 22 bp, Artificial Sequence
  Synthetic oligonucleotide; CTC chr11 5360986 5361007 5360991 5360986 -
cccccgacccccaccccactgc

SEQ ID NO: 119833 - DNA, 22 bp, Artificial Sequence
  Synthetic oligonucleotide; CTG chr11 5360965 5360986 5360970 5360965 -
caggccctggtgtgtgatgttc

SEQ ID NO: 119834 - DNA, 22 bp, Artificial Sequence
  Synthetic oligonucleotide; CTG chr11 5360956 5360977 5360961 5360956 -
gtgtgtgatgttccccttcctg

SEQ ID NO: 119835 - DNA, 22 bp, Artificial Sequence
  Synthetic oligonucleotide; TTC chr11 5360943 5360964 5360948 5360943 -
cccttcctgtgtccatgtgttc

SEQ ID NO: 119836 - DNA, 22 bp, Artificial Sequence
  Synthetic oligonucleotide; CTT chr11 5360938 5360959 5360943 5360938 -
cctgtgtccatgtgttctcatt

SEQ ID NO: 119837 - DNA, 22 bp, Artificial Sequence
  Synthetic oligonucleotide; TTC chr11 5360937 5360958 5360942 5360937 -
ctgtgtccatgtgttctcattg

SEQ ID NO: 119838 - DNA, 22 bp, Artificial Sequence
  Synthetic oligonucleotide; CTG chr11 5360934 5360955 5360939 5360934 -
tgtccatgtgttctcattgttc

SEQ ID NO: 119839 - DNA, 22 bp, Artificial Sequence
  Synthetic oligonucleotide; TTC chr11 5360921 5360942 5360926 5360921 -
tcattgttcaattcccacctat

SEQ ID NO: 119840 - DNA, 22 bp, Artificial Sequence
  Synthetic oligonucleotide; CTC chr11 5360919 5360940 5360924 5360919 -
attgttcaattcccacctatga

SEQ ID NO: 119841 - DNA, 22 bp, Artificial Sequence
  Synthetic oligonucleotide; TTG chr11 5360915 5360936 5360920 5360915 -
ttcaattcccacctatgagtga

SEQ ID NO: 119842 - DNA, 22 bp, Artificial Sequence
  Synthetic oligonucleotide; TTC chr11 5360912 5360933 5360917 5360912 -
aattcccacctatgagtgagaa

SEQ ID NO: 119843 - DNA, 22 bp, Artificial Sequence
  Synthetic oligonucleotide; TTC chr11 5360907 5360928 5360912 5360907 -
ccacctatgagtgagaacatgc

SEQ ID NO: 119844 - DNA, 22 bp, Artificial Sequence
  Synthetic oligonucleotide; CTA chr11 5360900 5360921 5360905 5360900 -
tgagtgagaacatgcagtgttt

SEQ ID NO: 119845 - DNA, 22 bp, Artificial Sequence
  Synthetic oligonucleotide; TTT chr11 5360878 5360899 5360883 5360878 -
ggtttttgtccttgcgatagtt

SEQ ID NO: 119846 - DNA, 22 bp, Artificial Sequence
  Synthetic oligonucleotide; TTG chr11 5360877 5360898 5360882 5360877 -
gtttttgtccttgcgatagttt

SEQ ID NO: 119847 - DNA, 22 bp, Artificial Sequence
  Synthetic oligonucleotide; TTT chr11 5360873 5360894 5360878 5360873 -
ttgtccttgcgatagtttgctg

SEQ ID NO: 119848 - DNA, 22 bp, Artificial Sequence
  Synthetic oligonucleotide; TTT chr11 5360872 5360893 5360877 5360872 -
tgtccttgcgatagtttgctga

SEQ ID NO: 119849 - DNA, 22 bp, Artificial Sequence
  Synthetic oligonucleotide; TTT chr11 5360871 5360892 5360876 5360871 -
gtccttgcgatagtttgctgag

SEQ ID NO: 119850 - DNA, 22 bp, Artificial Sequence
  Synthetic oligonucleotide; TTG chr11 5360870 5360891 5360875 5360870 -
tccttgcgatagtttgctgaga

SEQ ID NO: 119851 - DNA, 22 bp, Artificial Sequence
  Synthetic oligonucleotide; CTT chr11 5360865 5360886 5360870 5360865 -
gcgatagtttgctgagaatgat

SEQ ID NO: 119852 - DNA, 22 bp, Artificial Sequence
  Synthetic oligonucleotide; TTG chr11 5360864 5360885 5360869 5360864 -
cgatagtttgctgagaatgatg

SEQ ID NO: 119853 - DNA, 22 bp, Artificial Sequence
  Synthetic oligonucleotide; TTT chr11 5360855 5360876 5360860 5360855 -
gctgagaatgatggtttccagc

SEQ ID NO: 119854 - DNA, 22 bp, Artificial Sequence
  Synthetic oligonucleotide; TTG chr11 5360854 5360875 5360859 5360854 -
ctgagaatgatggtttccagct

SEQ ID NO: 119855 - DNA, 22 bp, Artificial Sequence
  Synthetic oligonucleotide; CTG chr11 5360851 5360872 5360856 5360851 -
agaatgatggtttccagcttca

SEQ ID NO: 119856 - DNA, 22 bp, Artificial Sequence
  Synthetic oligonucleotide; TTT chr11 5360838 5360859 5360843 5360838 -
ccagcttcatccatgtccctac

SEQ ID NO: 119857 - DNA, 22 bp, Artificial Sequence
  Synthetic oligonucleotide; TTC chr11 5360837 5360858 5360842 5360837 -
cagcttcatccatgtccctaca

SEQ ID NO: 119858 - DNA, 22 bp, Artificial Sequence
  Synthetic oligonucleotide; CTT chr11 5360831 5360852 5360836 5360831 -
catccatgtccctacaaaggac

SEQ ID NO: 119859 - DNA, 22 bp, Artificial Sequence
  Synthetic oligonucleotide; TTC chr11 5360830 5360851 5360835 5360830 -
atccatgtccctacaaaggaca

SEQ ID NO: 119860 - DNA, 22 bp, Artificial Sequence
  Synthetic oligonucleotide; CTA chr11 5360817 5360838 5360822 5360817 -
caaaggacatgaactcttcatt

SEQ ID NO: 119861 - DNA, 22 bp, Artificial Sequence
  Synthetic oligonucleotide; CTC chr11 5360801 5360822 5360806 5360801 -
ttcattttttatggctgcatag

SEQ ID NO: 119862 - DNA, 22 bp, Artificial Sequence
  Synthetic oligonucleotide; CTT chr11 5360799 5360820 5360804 5360799 -
cattttttatggctgcatagta

SEQ ID NO: 119863 - DNA, 22 bp, Artificial Sequence
  Synthetic oligonucleotide; TTC chr11 5360798 5360819 5360803 5360798 -
attttttatggctgcatagtat

SEQ ID NO: 119864 - DNA, 22 bp, Artificial Sequence
  Synthetic oligonucleotide; TTT chr11 5360794 5360815 5360799 5360794 -
tttatggctgcatagtattcca

SEQ ID NO: 119865 - DNA, 22 bp, Artificial Sequence
  Synthetic oligonucleotide; TTT chr11 5360793 5360814 5360798 5360793 -
ttatggctgcatagtattccat

SEQ ID NO: 119866 - DNA, 22 bp, Artificial Sequence
  Synthetic oligonucleotide; TTT chr11 5360792 5360813 5360797 5360792 -
tatggctgcatagtattccatg

SEQ ID NO: 119867 - DNA, 22 bp, Artificial Sequence
  Synthetic oligonucleotide; TTT chr11 5360791 5360812 5360796 5360791 -
atggctgcatagtattccatgg

SEQ ID NO: 119868 - DNA, 22 bp, Artificial Sequence
  Synthetic oligonucleotide; TTA chr11 5360790 5360811 5360795 5360790 -
tggctgcatagtattccatggt

SEQ ID NO: 119869 - DNA, 22 bp, Artificial Sequence
  Synthetic oligonucleotide; CTG chr11 5360784 5360805 5360789 5360784 -
catagtattccatggtgtatat

SEQ ID NO: 119870 - DNA, 22 bp, Artificial Sequence
  Synthetic oligonucleotide; TTC chr11 5360774 5360795 5360779 5360774 -
catggtgtatatgtgccacgtt

SEQ ID NO: 119871 - DNA, 22 bp, Artificial Sequence
  Synthetic oligonucleotide; TTT chr11 5360751 5360772 5360756 5360751 -
tcttaatccagtctatcattgt

SEQ ID NO: 119872 - DNA, 22 bp, Artificial Sequence
  Synthetic oligonucleotide; TTT chr11 5360750 5360771 5360755 5360750 -
cttaatccagtctatcattgtt

SEQ ID NO: 119873 - DNA, 22 bp, Artificial Sequence
  Synthetic oligonucleotide; TTC chr11 5360749 5360770 5360754 5360749 -
ttaatccagtctatcattgttg

SEQ ID NO: 119874 - DNA, 22 bp, Artificial Sequence
  Synthetic oligonucleotide; CTT chr11 5360747 5360768 5360752 5360747 -
aatccagtctatcattgttgga

SEQ ID NO: 119875 - DNA, 22 bp, Artificial Sequence
  Synthetic oligonucleotide; TTA chr11 5360746 5360767 5360751 5360746 -
atccagtctatcattgttggac

SEQ ID NO: 119876 - DNA, 22 bp, Artificial Sequence
  Synthetic oligonucleotide; CTA chr11 5360736 5360757 5360741 5360736 -
tcattgttggacatttgggttg

SEQ ID NO: 119877 - DNA, 22 bp, Artificial Sequence
  Synthetic oligonucleotide; TTG chr11 5360730 5360751 5360735 5360730 -
ttggacatttgggttggttcca

SEQ ID NO: 119878 - DNA, 22 bp, Artificial Sequence
  Synthetic oligonucleotide; TTG chr11 5360727 5360748 5360732 5360727 -
gacatttgggttggttccaagt

SEQ ID NO: 119879 - DNA, 22 bp, Artificial Sequence
  Synthetic oligonucleotide; TTT chr11 5360720 5360741 5360725 5360720 -
gggttggttccaagtctttgct

SEQ ID NO: 119880 - DNA, 22 bp, Artificial Sequence
  Synthetic oligonucleotide; TTG chr11 5360719 5360740 5360724 5360719 -
ggttggttccaagtctttgcta

SEQ ID NO: 119881 - DNA, 22 bp, Artificial Sequence
  Synthetic oligonucleotide; TTG chr11 5360714 5360735 5360719 5360714 -
gttccaagtctttgctattgtg

SEQ ID NO: 119882 - DNA, 22 bp, Artificial Sequence
  Synthetic oligonucleotide; TTC chr11 5360710 5360731 5360715 5360710 -
caagtctttgctattgtgaata

SEQ ID NO: 119883 - DNA, 22 bp, Artificial Sequence
  Synthetic oligonucleotide; CTT chr11 5360702 5360723 5360707 5360702 -
tgctattgtgaatagtgccaca

SEQ ID NO: 119884 - DNA, 22 bp, Artificial Sequence
  Synthetic oligonucleotide; TTT chr11 5360701 5360722 5360706 5360701 -
gctattgtgaatagtgccacaa

SEQ ID NO: 119885 - DNA, 22 bp, Artificial Sequence
  Synthetic oligonucleotide; TTG chr11 5360700 5360721 5360705 5360700 -
ctattgtgaatagtgccacaat

SEQ ID NO: 119886 - DNA, 22 bp, Artificial Sequence
  Synthetic oligonucleotide; CTA chr11 5360697 5360718 5360702 5360697 -
ttgtgaatagtgccacaataaa

SEQ ID NO: 119887 - DNA, 22 bp, Artificial Sequence
  Synthetic oligonucleotide; TTG chr11 5360694 5360715 5360699 5360694 -
tgaatagtgccacaataaacat

SEQ ID NO: 119888 - DNA, 22 bp, Artificial Sequence
  Synthetic oligonucleotide; CTT chr11 5360655 5360676 5360660 5360655 -
tatagcagcatgatttataatc

SEQ ID NO: 119889 - DNA, 22 bp, Artificial Sequence
  Synthetic oligonucleotide; TTT chr11 5360654 5360675 5360659 5360654 -
atagcagcatgatttataatcc

SEQ ID NO: 119890 - DNA, 22 bp, Artificial Sequence
  Synthetic oligonucleotide; TTA chr11 5360653 5360674 5360658 5360653 -
tagcagcatgatttataatcct

SEQ ID NO: 119891 - DNA, 22 bp, Artificial Sequence
  Synthetic oligonucleotide; TTT chr11 5360639 5360660 5360644 5360639 -
ataatcctttgagtatgtaccc

SEQ ID NO: 119892 - DNA, 22 bp, Artificial Sequence
  Synthetic oligonucleotide; TTA chr11 5360638 5360659 5360643 5360638 -
taatcctttgagtatgtaccca

SEQ ID NO: 119893 - DNA, 22 bp, Artificial Sequence
  Synthetic oligonucleotide; CTT chr11 5360630 5360651 5360635 5360630 -
tgagtatgtacccagtaatggg

SEQ ID NO: 119894 - DNA, 22 bp, Artificial Sequence
  Synthetic oligonucleotide; TTT chr11 5360629 5360650 5360634 5360629 -
gagtatgtacccagtaatggga

SEQ ID NO: 119895 - DNA, 22 bp, Artificial Sequence
  Synthetic oligonucleotide; TTG chr11 5360628 5360649 5360633 5360628 -
agtatgtacccagtaatgggat

SEQ ID NO: 119896 - DNA, 22 bp, Artificial Sequence
  Synthetic oligonucleotide; CTG chr11 5360601 5360622 5360606 5360601 -
ggtcaaatggtatttctagttc

SEQ ID NO: 119897 - DNA, 22 bp, Artificial Sequence
  Synthetic oligonucleotide; TTT chr11 5360586 5360607 5360591 5360586 -
ctagttctagatccctgaggaa

SEQ ID NO: 119898 - DNA, 22 bp, Artificial Sequence
  Synthetic oligonucleotide; TTC chr11 5360585 5360606 5360590 5360585 -
tagttctagatccctgaggaat

SEQ ID NO: 119899 - DNA, 22 bp, Artificial Sequence
  Synthetic oligonucleotide; CTA chr11 5360583 5360604 5360588 5360583 -
gttctagatccctgaggaatcg

SEQ ID NO: 119900 - DNA, 22 bp, Artificial Sequence
  Synthetic oligonucleotide; TTC chr11 5360579 5360600 5360584 5360579 -
tagatccctgaggaatcgccac

SEQ ID NO: 119901 - DNA, 22 bp, Artificial Sequence
  Synthetic oligonucleotide; CTA chr11 5360577 5360598 5360582 5360577 -
gatccctgaggaatcgccacac

SEQ ID NO: 119902 - DNA, 22 bp, Artificial Sequence
  Synthetic oligonucleotide; CTG chr11 5360569 5360590 5360574 5360569 -
aggaatcgccacactgacttcc

SEQ ID NO: 119903 - DNA, 22 bp, Artificial Sequence
  Synthetic oligonucleotide; CTG chr11 5360553 5360574 5360558 5360553 -
acttccacaatggttgaactag

SEQ ID NO: 119904 - DNA, 22 bp, Artificial Sequence
  Synthetic oligonucleotide; CTT chr11 5360549 5360570 5360554 5360549 -
ccacaatggttgaactagttta

SEQ ID NO: 119905 - DNA, 22 bp, Artificial Sequence
  Synthetic oligonucleotide; TTC chr11 5360548 5360569 5360553 5360548 -
cacaatggttgaactagtttac

SEQ ID NO: 119906 - DNA, 22 bp, Artificial Sequence
  Synthetic oligonucleotide; TTG chr11 5360537 5360558 5360542 5360537 -
aactagtttacagtctcaccaa

SEQ ID NO: 119907 - DNA, 22 bp, Artificial Sequence
  Synthetic oligonucleotide; CTA chr11 5360532 5360553 5360537 5360532 -
gtttacagtctcaccaacagtg

SEQ ID NO: 119908 - DNA, 22 bp, Artificial Sequence
  Synthetic oligonucleotide; TTT chr11 5360528 5360549 5360533 5360528 -
acagtctcaccaacagtgtaaa

SEQ ID NO: 119909 - DNA, 22 bp, Artificial Sequence
  Synthetic oligonucleotide; TTA chr11 5360527 5360548 5360532 5360527 -
cagtctcaccaacagtgtaaaa

SEQ ID NO: 119910 - DNA, 22 bp, Artificial Sequence
  Synthetic oligonucleotide; CTC chr11 5360520 5360541 5360525 5360520 -
accaacagtgtaaaagtgttcc

SEQ ID NO: 119911 - DNA, 22 bp, Artificial Sequence
  Synthetic oligonucleotide; TTC chr11 5360499 5360520 5360504 5360499 -
ctacttcttcacatcctctcca

SEQ ID NO: 119912 - DNA, 22 bp, Artificial Sequence
  Synthetic oligonucleotide; CTA chr11 5360496 5360517 5360501 5360496 -
cttcttcacatcctctccagca

SEQ ID NO: 119913 - DNA, 22 bp, Artificial Sequence
  Synthetic oligonucleotide; CTT chr11 5360493 5360514 5360498 5360493 -
cttcacatcctctccagcacct

SEQ ID NO: 119914 - DNA, 22 bp, Artificial Sequence
  Synthetic oligonucleotide; TTC chr11 5360492 5360513 5360497 5360492 -
ttcacatcctctccagcacctg

SEQ ID NO: 119915 - DNA, 22 bp, Artificial Sequence
  Synthetic oligonucleotide; CTT chr11 5360490 5360511 5360495 5360490 -
cacatcctctccagcacctgtt

SEQ ID NO: 119916 - DNA, 22 bp, Artificial Sequence
  Synthetic oligonucleotide; TTC chr11 5360489 5360510 5360494 5360489 -
acatcctctccagcacctgttg

SEQ ID NO: 119917 - DNA, 22 bp, Artificial Sequence
  Synthetic oligonucleotide; CTC chr11 5360481 5360502 5360486 5360481 -
tccagcacctgttgtttcctga

SEQ ID NO: 119918 - DNA, 22 bp, Artificial Sequence
  Synthetic oligonucleotide; CTC chr11 5360479 5360500 5360484 5360479 -
cagcacctgttgtttcctgact

SEQ ID NO: 119919 - DNA, 22 bp, Artificial Sequence
  Synthetic oligonucleotide; CTG chr11 5360470 5360491 5360475 5360470 -
ttgtttcctgactttttaatga

SEQ ID NO: 119920 - DNA, 22 bp, Artificial Sequence
  Synthetic oligonucleotide; TTG chr11 5360467 5360488 5360472 5360467 -
tttcctgactttttaatgatcg

SEQ ID NO: 119921 - DNA, 22 bp, Artificial Sequence
  Synthetic oligonucleotide; TTT chr11 5360464 5360485 5360469 5360464 -
cctgactttttaatgatcgcca

SEQ ID NO: 119922 - DNA, 22 bp, Artificial Sequence
  Synthetic oligonucleotide; TTC chr11 5360463 5360484 5360468 5360463 -
ctgactttttaatgatcgccat

SEQ ID NO: 119923 - DNA, 22 bp, Artificial Sequence
  Synthetic oligonucleotide; CTG chr11 5360460 5360481 5360465 5360460 -
actttttaatgatcgccattct

SEQ ID NO: 119924 - DNA, 22 bp, Artificial Sequence
  Synthetic oligonucleotide; CTT chr11 5360456 5360477 5360461 5360456 -
tttaatgatcgccattctaact

SEQ ID NO: 119925 - DNA, 22 bp, Artificial Sequence
  Synthetic oligonucleotide; TTT chr11 5360455 5360476 5360460 5360455 -
ttaatgatcgccattctaactg

SEQ ID NO: 119926 - DNA, 22 bp, Artificial Sequence
  Synthetic oligonucleotide; TTT chr11 5360454 5360475 5360459 5360454 -
taatgatcgccattctaactgg

SEQ ID NO: 119927 - DNA, 22 bp, Artificial Sequence
  Synthetic oligonucleotide; TTT chr11 5360453 5360474 5360458 5360453 -
aatgatcgccattctaactggt

SEQ ID NO: 119928 - DNA, 22 bp, Artificial Sequence
  Synthetic oligonucleotide; TTA chr11 5360452 5360473 5360457 5360452 -
atgatcgccattctaactggtg

SEQ ID NO: 119929 - DNA, 22 bp, Artificial Sequence
  Synthetic oligonucleotide; TTC chr11 5360439 5360460 5360444 5360439 -
taactggtgtgagatggtatct

SEQ ID NO: 119930 - DNA, 22 bp, Artificial Sequence
  Synthetic oligonucleotide; CTA chr11 5360437 5360458 5360442 5360437 -
actggtgtgagatggtatctca

SEQ ID NO: 119931 - DNA, 22 bp, Artificial Sequence
  Synthetic oligonucleotide; CTG chr11 5360433 5360454 5360438 5360433 -
gtgtgagatggtatctcactgt

SEQ ID NO: 119932 - DNA, 22 bp, Artificial Sequence
  Synthetic oligonucleotide; CTC chr11 5360416 5360437 5360421 5360416 -
actgtggttttgatttgtattt

SEQ ID NO: 119933 - DNA, 22 bp, Artificial Sequence
  Synthetic oligonucleotide; CTG chr11 5360412 5360433 5360417 5360412 -
tggttttgatttgtatttctct

SEQ ID NO: 119934 - DNA, 22 bp, Artificial Sequence
  Synthetic oligonucleotide; TTT chr11 5360406 5360427 5360411 5360406 -
tgatttgtatttctctgatggc

SEQ ID NO: 119935 - DNA, 22 bp, Artificial Sequence
  Synthetic oligonucleotide; TTT chr11 5360405 5360426 5360410 5360405 -
gatttgtatttctctgatggcc

SEQ ID NO: 119936 - DNA, 22 bp, Artificial Sequence
  Synthetic oligonucleotide; TTG chr11 5360404 5360425 5360409 5360404 -
atttgtatttctctgatggcca

SEQ ID NO: 119937 - DNA, 22 bp, Artificial Sequence
  Synthetic oligonucleotide; TTT chr11 5360400 5360421 5360405 5360400 -
gtatttctctgatggccagtga

SEQ ID NO: 119938 - DNA, 22 bp, Artificial Sequence
  Synthetic oligonucleotide; TTG chr11 5360399 5360420 5360404 5360399 -
tatttctctgatggccagtgat

SEQ ID NO: 119939 - DNA, 22 bp, Artificial Sequence
  Synthetic oligonucleotide; TTT chr11 5360394 5360415 5360399 5360394 -
ctctgatggccagtgatgatga

SEQ ID NO: 119940 - DNA, 22 bp, Artificial Sequence
  Synthetic oligonucleotide; TTC chr11 5360393 5360414 5360398 5360393 -
tctgatggccagtgatgatgag

SEQ ID NO: 119941 - DNA, 22 bp, Artificial Sequence
  Synthetic oligonucleotide; CTC chr11 5360391 5360412 5360396 5360391 -
tgatggccagtgatgatgagca

SEQ ID NO: 119942 - DNA, 22 bp, Artificial Sequence
  Synthetic oligonucleotide; CTG chr11 5360389 5360410 5360394 5360389 -
atggccagtgatgatgagcatt

SEQ ID NO: 119943 - DNA, 22 bp, Artificial Sequence
  Synthetic oligonucleotide; TTT chr11 5360366 5360387 5360371 5360366 -
tttcatgtgtctgttgactgca

SEQ ID NO: 119944 - DNA, 22 bp, Artificial Sequence
  Synthetic oligonucleotide; TTT chr11 5360365 5360386 5360370 5360365 -
ttcatgtgtctgttgactgcat

SEQ ID NO: 119945 - DNA, 22 bp, Artificial Sequence
  Synthetic oligonucleotide; TTT chr11 5360364 5360385 5360369 5360364 -
tcatgtgtctgttgactgcata

SEQ ID NO: 119946 - DNA, 22 bp, Artificial Sequence
  Synthetic oligonucleotide; TTT chr11 5360363 5360384 5360368 5360363 -
catgtgtctgttgactgcataa

SEQ ID NO: 119947 - DNA, 22 bp, Artificial Sequence
  Synthetic oligonucleotide; TTC chr11 5360362 5360383 5360367 5360362 -
atgtgtctgttgactgcataaa

SEQ ID NO: 119948 - DNA, 22 bp, Artificial Sequence
  Synthetic oligonucleotide; CTG chr11 5360353 5360374 5360358 5360353 -
ttgactgcataaatgtcttctt

SEQ ID NO: 119949 - DNA, 22 bp, Artificial Sequence
  Synthetic oligonucleotide; TTG chr11 5360350 5360371 5360355 5360350 -
actgcataaatgtcttcttttg

SEQ ID NO: 119950 - DNA, 22 bp, Artificial Sequence
  Synthetic oligonucleotide; CTG chr11 5360346 5360367 5360351 5360346 -
cataaatgtcttcttttgagaa

SEQ ID NO: 119951 - DNA, 22 bp, Artificial Sequence
  Synthetic oligonucleotide; CTT chr11 5360334 5360355 5360339 5360334 -
cttttgagaagtgtctgttcat

SEQ ID NO: 119952 - DNA, 22 bp, Artificial Sequence
  Synthetic oligonucleotide; TTC chr11 5360333 5360354 5360338 5360333 -
ttttgagaagtgtctgttcata

SEQ ID NO: 119953 - DNA, 22 bp, Artificial Sequence
  Synthetic oligonucleotide; CTT chr11 5360331 5360352 5360336 5360331 -
ttgagaagtgtctgttcatatc

SEQ ID NO: 119954 - DNA, 22 bp, Artificial Sequence
  Synthetic oligonucleotide; TTT chr11 5360330 5360351 5360335 5360330 -
tgagaagtgtctgttcatatcc

SEQ ID NO: 119955 - DNA, 22 bp, Artificial Sequence
  Synthetic oligonucleotide; TTT chr11 5360329 5360350 5360334 5360329 -
gagaagtgtctgttcatatcct

SEQ ID NO: 119956 - DNA, 22 bp, Artificial Sequence
  Synthetic oligonucleotide; TTG chr11 5360328 5360349 5360333 5360328 -
agaagtgtctgttcatatcctt

SEQ ID NO: 119957 - DNA, 22 bp, Artificial Sequence
  Synthetic oligonucleotide; CTG chr11 5360317 5360338 5360322 5360317 -
ttcatatcctttgcccactttt

SEQ ID NO: 119958 - DNA, 22 bp, Artificial Sequence
  Synthetic oligonucleotide; TTC chr11 5360314 5360335 5360319 5360314 -
atatcctttgcccactttttga

SEQ ID NO: 119959 - DNA, 22 bp, Artificial Sequence
  Synthetic oligonucleotide; CTT chr11 5360306 5360327 5360311 5360306 -
tgcccactttttgatggggttg

SEQ ID NO: 119960 - DNA, 22 bp, Artificial Sequence
  Synthetic oligonucleotide; TTT chr11 5360305 5360326 5360310 5360305 -
gcccactttttgatggggttgt

SEQ ID NO: 119961 - DNA, 22 bp, Artificial Sequence
  Synthetic oligonucleotide; TTG chr11 5360304 5360325 5360309 5360304 -
cccactttttgatggggttgtt

SEQ ID NO: 119962 - DNA, 22 bp, Artificial Sequence
  Synthetic oligonucleotide; CTT chr11 5360297 5360318 5360302 5360297 -
tttgatggggttgtttttttct

SEQ ID NO: 119963 - DNA, 22 bp, Artificial Sequence
  Synthetic oligonucleotide; TTT chr11 5360296 5360317 5360301 5360296 -
ttgatggggttgtttttttctt

SEQ ID NO: 119964 - DNA, 22 bp, Artificial Sequence
  Synthetic oligonucleotide; TTT chr11 5360295 5360316 5360300 5360295 -
tgatggggttgtttttttcttg

SEQ ID NO: 119965 - DNA, 22 bp, Artificial Sequence
  Synthetic oligonucleotide; TTT chr11 5360294 5360315 5360299 5360294 -
gatggggttgtttttttcttgt

SEQ ID NO: 119966 - DNA, 22 bp, Artificial Sequence
  Synthetic oligonucleotide; TTG chr11 5360293 5360314 5360298 5360293 -
atggggttgtttttttcttgta

SEQ ID NO: 119967 - DNA, 22 bp, Artificial Sequence
  Synthetic oligonucleotide; TTG chr11 5360284 5360305 5360289 5360284 -
tttttttcttgtaaatttgttt

SEQ ID NO: 119968 - DNA, 22 bp, Artificial Sequence
  Synthetic oligonucleotide; TTT chr11 5360281 5360302 5360286 5360281 -
ttttcttgtaaatttgtttgag

SEQ ID NO: 119969 - DNA, 22 bp, Artificial Sequence
  Synthetic oligonucleotide; TTT chr11 5360280 5360301 5360285 5360280 -
tttcttgtaaatttgtttgagt

SEQ ID NO: 119970 - DNA, 22 bp, Artificial Sequence
  Synthetic oligonucleotide; TTT chr11 5360279 5360300 5360284 5360279 -
ttcttgtaaatttgtttgagtt

SEQ ID NO: 119971 - DNA, 22 bp, Artificial Sequence
  Synthetic oligonucleotide; TTT chr11 5360278 5360299 5360283 5360278 -
tcttgtaaatttgtttgagttc

SEQ ID NO: 119972 - DNA, 22 bp, Artificial Sequence
  Synthetic oligonucleotide; TTT chr11 5360277 5360298 5360282 5360277 -
cttgtaaatttgtttgagttca

SEQ ID NO: 119973 - DNA, 22 bp, Artificial Sequence
  Synthetic oligonucleotide; TTC chr11 5360276 5360297 5360281 5360276 -
ttgtaaatttgtttgagttcat

SEQ ID NO: 119974 - DNA, 22 bp, Artificial Sequence
  Synthetic oligonucleotide; CTT chr11 5360274 5360295 5360279 5360274 -
gtaaatttgtttgagttcatca

SEQ ID NO: 119975 - DNA, 22 bp, Artificial Sequence
  Synthetic oligonucleotide; TTG chr11 5360273 5360294 5360278 5360273 -
taaatttgtttgagttcatcat

SEQ ID NO: 119976 - DNA, 22 bp, Artificial Sequence
  Synthetic oligonucleotide; TTT chr11 5360266 5360287 5360271 5360266 -
gtttgagttcatcatagattct

SEQ ID NO: 119977 - DNA, 22 bp, Artificial Sequence
  Synthetic oligonucleotide; TTG chr11 5360265 5360286 5360270 5360265 -
tttgagttcatcatagattctg

SEQ ID NO: 119978 - DNA, 22 bp, Artificial Sequence
  Synthetic oligonucleotide; TTT chr11 5360262 5360283 5360267 5360262 -
gagttcatcatagattctggat

SEQ ID NO: 119979 - DNA, 22 bp, Artificial Sequence
  Synthetic oligonucleotide; TTG chr11 5360261 5360282 5360266 5360261 -
agttcatcatagattctggata

SEQ ID NO: 119980 - DNA, 22 bp, Artificial Sequence
  Synthetic oligonucleotide; TTC chr11 5360256 5360277 5360261 5360256 -
atcatagattctggatattagc

SEQ ID NO: 119981 - DNA, 22 bp, Artificial Sequence
  Synthetic oligonucleotide; TTC chr11 5360245 5360266 5360250 5360245 -
tggatattagccctttgtcgga

SEQ ID NO: 119982 - DNA, 22 bp, Artificial Sequence
  Synthetic oligonucleotide; CTG chr11 5360243 5360264 5360248 5360243 -
gatattagccctttgtcggatg

SEQ ID NO: 119983 - DNA, 22 bp, Artificial Sequence
  Synthetic oligonucleotide; TTA chr11 5360236 5360257 5360241 5360236 -
gccctttgtcggatgagtagat

SEQ ID NO: 119984 - DNA, 22 bp, Artificial Sequence
  Synthetic oligonucleotide; CTT chr11 5360230 5360251 5360235 5360230 -
tgtcggatgagtagattgcaaa

SEQ ID NO: 119985 - DNA, 22 bp, Artificial Sequence
  Synthetic oligonucleotide; TTT chr11 5360229 5360250 5360234 5360229 -
gtcggatgagtagattgcaaaa

SEQ ID NO: 119986 - DNA, 22 bp, Artificial Sequence
  Synthetic oligonucleotide; TTG chr11 5360228 5360249 5360233 5360228 -
tcggatgagtagattgcaaaaa

SEQ ID NO: 119987 - DNA, 22 bp, Artificial Sequence
  Synthetic oligonucleotide; TTG chr11 5360212 5360233 5360217 5360212 -
caaaaattttctcccattctgt

SEQ ID NO: 119988 - DNA, 22 bp, Artificial Sequence
  Synthetic oligonucleotide; TTT chr11 5360203 5360224 5360208 5360203 -
tctcccattctgtatgttgcct

SEQ ID NO: 119989 - DNA, 22 bp, Artificial Sequence
  Synthetic oligonucleotide; TTT chr11 5360202 5360223 5360207 5360202 -
ctcccattctgtatgttgcctg

SEQ ID NO: 119990 - DNA, 22 bp, Artificial Sequence
  Synthetic oligonucleotide; TTC chr11 5360201 5360222 5360206 5360201 -
tcccattctgtatgttgcctgt

SEQ ID NO: 119991 - DNA, 22 bp, Artificial Sequence
  Synthetic oligonucleotide; CTC chr11 5360199 5360220 5360204 5360199 -
ccattctgtatgttgcctgttc

SEQ ID NO: 119992 - DNA, 22 bp, Artificial Sequence
  Synthetic oligonucleotide; TTC chr11 5360193 5360214 5360198 5360193 -
tgtatgttgcctgttcactctg

SEQ ID NO: 119993 - DNA, 22 bp, Artificial Sequence
  Synthetic oligonucleotide; CTG chr11 5360191 5360212 5360196 5360191 -
tatgttgcctgttcactctgat

SEQ ID NO: 119994 - DNA, 22 bp, Artificial Sequence
  Synthetic oligonucleotide; TTG chr11 5360184 5360205 5360189 5360184 -
cctgttcactctgatggtagtt

SEQ ID NO: 119995 - DNA, 22 bp, Artificial Sequence
  Synthetic oligonucleotide; CTG chr11 5360180 5360201 5360185 5360180 -
ttcactctgatggtagtttctt

SEQ ID NO: 119996 - DNA, 22 bp, Artificial Sequence
  Synthetic oligonucleotide; TTC chr11 5360177 5360198 5360182 5360177 -
actctgatggtagtttcttttg

SEQ ID NO: 119997 - DNA, 22 bp, Artificial Sequence
  Synthetic oligonucleotide; CTC chr11 5360173 5360194 5360178 5360173 -
tgatggtagtttcttttgctgt

SEQ ID NO: 119998 - DNA, 22 bp, Artificial Sequence
  Synthetic oligonucleotide; CTG chr11 5360171 5360192 5360176 5360171 -
atggtagtttcttttgctgtgc

SEQ ID NO: 119999 - DNA, 22 bp, Artificial Sequence
  Synthetic oligonucleotide; TTT chr11 5360161 5360182 5360166 5360161 -
cttttgctgtgcagaagctctt

SEQ ID NO: 120000 - DNA, 22 bp, Artificial Sequence
  Synthetic oligonucleotide; TTC chr11 5360160 5360181 5360165 5360160 -
ttttgctgtgcagaagctcttt

SEQ ID NO: 120001 - DNA, 22 bp, Artificial Sequence
  Synthetic oligonucleotide; CTT chr11 5360158 5360179 5360163 5360158 -
ttgctgtgcagaagctctttag

SEQ ID NO: 120002 - DNA, 22 bp, Artificial Sequence
  Synthetic oligonucleotide; TTT chr11 5360157 5360178 5360162 5360157 -
tgctgtgcagaagctctttagt

SEQ ID NO: 120003 - DNA, 22 bp, Artificial Sequence
  Synthetic oligonucleotide; TTT chr11 5360156 5360177 5360161 5360156 -
gctgtgcagaagctctttagtt

SEQ ID NO: 120004 - DNA, 22 bp, Artificial Sequence
  Synthetic oligonucleotide; TTG chr11 5360155 5360176 5360160 5360155 -
ctgtgcagaagctctttagttt

SEQ ID NO: 120005 - DNA, 22 bp, Artificial Sequence
  Synthetic oligonucleotide; CTG chr11 5360152 5360173 5360157 5360152 -
tgcagaagctctttagtttaat

SEQ ID NO: 120006 - DNA, 22 bp, Artificial Sequence
  Synthetic oligonucleotide; CTC chr11 5360141 5360162 5360146 5360141 -
tttagtttaattagatcccatt

SEQ ID NO: 120007 - DNA, 22 bp, Artificial Sequence
  Synthetic oligonucleotide; CTT chr11 5360139 5360160 5360144 5360139 -
tagtttaattagatcccatttg

SEQ ID NO: 120008 - DNA, 22 bp, Artificial Sequence
  Synthetic oligonucleotide; TTT chr11 5360138 5360159 5360143 5360138 -
agtttaattagatcccatttgt

SEQ ID NO: 120009 - DNA, 22 bp, Artificial Sequence
  Synthetic oligonucleotide; TTA chr11 5360137 5360158 5360142 5360137 -
gtttaattagatcccatttgtc

SEQ ID NO: 120010 - DNA, 22 bp, Artificial Sequence
  Synthetic oligonucleotide; TTT chr11 5360133 5360154 5360138 5360133 -
aattagatcccatttgtccatt

SEQ ID NO: 120011 - DNA, 22 bp, Artificial Sequence
  Synthetic oligonucleotide; TTA chr11 5360132 5360153 5360137 5360132 -
attagatcccatttgtccattt

SEQ ID NO: 120012 - DNA, 22 bp, Artificial Sequence
  Synthetic oligonucleotide; TTA chr11 5360128 5360149 5360133 5360128 -
gatcccatttgtccattttggc

SEQ ID NO: 120013 - DNA, 22 bp, Artificial Sequence
  Synthetic oligonucleotide; TTT chr11 5360118 5360139 5360123 5360118 -
gtccattttggcttttgttgcc

SEQ ID NO: 120014 - DNA, 22 bp, Artificial Sequence
  Synthetic oligonucleotide; TTG chr11 5360117 5360138 5360122 5360117 -
tccattttggcttttgttgcca

SEQ ID NO: 120015 - DNA, 22 bp, Artificial Sequence
  Synthetic oligonucleotide; TTT chr11 5360110 5360131 5360115 5360110 -
tggcttttgttgccattgcttt

SEQ ID NO: 120016 - DNA, 22 bp, Artificial Sequence
  Synthetic oligonucleotide; TTT chr11 5360109 5360130 5360114 5360109 -
ggcttttgttgccattgctttt

SEQ ID NO: 120017 - DNA, 22 bp, Artificial Sequence
  Synthetic oligonucleotide; TTG chr11 5360108 5360129 5360113 5360108 -
gcttttgttgccattgcttttg

SEQ ID NO: 120018 - DNA, 22 bp, Artificial Sequence
  Synthetic oligonucleotide; CTT chr11 5360104 5360125 5360109 5360104 -
ttgttgccattgcttttggtgt

SEQ ID NO: 120019 - DNA, 22 bp, Artificial Sequence
  Synthetic oligonucleotide; TTT chr11 5360103 5360124 5360108 5360103 -
tgttgccattgcttttggtgtt

SEQ ID NO: 120020 - DNA, 22 bp, Artificial Sequence
  Synthetic oligonucleotide; TTT chr11 5360102 5360123 5360107 5360102 -
gttgccattgcttttggtgttt

SEQ ID NO: 120021 - DNA, 22 bp, Artificial Sequence
  Synthetic oligonucleotide; TTG chr11 5360101 5360122 5360106 5360101 -
ttgccattgcttttggtgtttt

SEQ ID NO: 120022 - DNA, 22 bp, Artificial Sequence
  Synthetic oligonucleotide; TTG chr11 5360098 5360119 5360103 5360098 -
ccattgcttttggtgttttaga

SEQ ID NO: 120023 - DNA, 22 bp, Artificial Sequence
  Synthetic oligonucleotide; TTG chr11 5360092 5360113 5360097 5360092 -
cttttggtgttttagacatgaa

SEQ ID NO: 120024 - DNA, 22 bp, Artificial Sequence
  Synthetic oligonucleotide; CTT chr11 5360089 5360110 5360094 5360089 -
ttggtgttttagacatgaagtc

SEQ ID NO: 120025 - DNA, 22 bp, Artificial Sequence
  Synthetic oligonucleotide; TTT chr11 5360088 5360109 5360093 5360088 -
tggtgttttagacatgaagtcc

SEQ ID NO: 120026 - DNA, 22 bp, Artificial Sequence
  Synthetic oligonucleotide; TTT chr11 5360087 5360108 5360092 5360087 -
ggtgttttagacatgaagtcct

SEQ ID NO: 120027 - DNA, 22 bp, Artificial Sequence
  Synthetic oligonucleotide; TTG chr11 5360086 5360107 5360091 5360086 -
gtgttttagacatgaagtcctt

SEQ ID NO: 120028 - DNA, 22 bp, Artificial Sequence
  Synthetic oligonucleotide; TTT chr11 5360080 5360101 5360085 5360080 -
tagacatgaagtccttgcccat

SEQ ID NO: 120029 - DNA, 22 bp, Artificial Sequence
  Synthetic oligonucleotide; TTT chr11 5360079 5360100 5360084 5360079 -
agacatgaagtccttgcccatg

SEQ ID NO: 120030 - DNA, 22 bp, Artificial Sequence
  Synthetic oligonucleotide; TTA chr11 5360078 5360099 5360083 5360078 -
gacatgaagtccttgcccatgc

SEQ ID NO: 120031 - DNA, 22 bp, Artificial Sequence
  Synthetic oligonucleotide; CTT chr11 5360064 5360085 5360069 5360064 -
gcccatgcctatgtcctgaatg

SEQ ID NO: 120032 - DNA, 22 bp, Artificial Sequence
  Synthetic oligonucleotide; TTG chr11 5360063 5360084 5360068 5360063 -
cccatgcctatgtcctgaatgg

SEQ ID NO: 120033 - DNA, 22 bp, Artificial Sequence
  Synthetic oligonucleotide; CTA chr11 5360053 5360074 5360058 5360053 -
tgtcctgaatggtattgcctag

SEQ ID NO: 120034 - DNA, 22 bp, Artificial Sequence
  Synthetic oligonucleotide; CTG chr11 5360046 5360067 5360051 5360046 -
aatggtattgcctaggttttct

SEQ ID NO: 120035 - DNA, 22 bp, Artificial Sequence
  Synthetic oligonucleotide; TTG chr11 5360036 5360057 5360041 5360036 -
cctaggttttcttccagagttt

SEQ ID NO: 120036 - DNA, 22 bp, Artificial Sequence
  Synthetic oligonucleotide; CTA chr11 5360032 5360053 5360037 5360032 -
ggttttcttccagagtttttat

SEQ ID NO: 120037 - DNA, 22 bp, Artificial Sequence
  Synthetic oligonucleotide; TTT chr11 5360027 5360048 5360032 5360027 -
tcttccagagtttttatggttt

SEQ ID NO: 120038 - DNA, 22 bp, Artificial Sequence
  Synthetic oligonucleotide; TTT chr11 5360026 5360047 5360031 5360026 -
cttccagagtttttatggtttt

SEQ ID NO: 120039 - DNA, 22 bp, Artificial Sequence
  Synthetic oligonucleotide; TTC chr11 5360025 5360046 5360030 5360025 -
ttccagagtttttatggttttc

SEQ ID NO: 120040 - DNA, 22 bp, Artificial Sequence
  Synthetic oligonucleotide; CTT chr11 5360023 5360044 5360028 5360023 -
ccagagtttttatggttttcag

SEQ ID NO: 120041 - DNA, 22 bp, Artificial Sequence
  Synthetic oligonucleotide; TTC chr11 5360022 5360043 5360027 5360022 -
cagagtttttatggttttcagt

SEQ ID NO: 120042 - DNA, 22 bp, Artificial Sequence
  Synthetic oligonucleotide; TTT chr11 5360014 5360035 5360019 5360014 -
ttatggttttcagtctaacatt

SEQ ID NO: 120043 - DNA, 22 bp, Artificial Sequence
  Synthetic oligonucleotide; TTT chr11 5360013 5360034 5360018 5360013 -
tatggttttcagtctaacattt

SEQ ID NO: 120044 - DNA, 22 bp, Artificial Sequence
  Synthetic oligonucleotide; TTT chr11 5360012 5360033 5360017 5360012 -
atggttttcagtctaacattta

SEQ ID NO: 120045 - DNA, 22 bp, Artificial Sequence
  Synthetic oligonucleotide; TTA chr11 5360011 5360032 5360016 5360011 -
tggttttcagtctaacatttaa

SEQ ID NO: 120046 - DNA, 22 bp, Artificial Sequence
  Synthetic oligonucleotide; TTT chr11 5360005 5360026 5360010 5360005 -
tcagtctaacatttaagtctgt

SEQ ID NO: 120047 - DNA, 22 bp, Artificial Sequence
  Synthetic oligonucleotide; TTT chr11 5360004 5360025 5360009 5360004 -
cagtctaacatttaagtctgta

SEQ ID NO: 120048 - DNA, 22 bp, Artificial Sequence
  Synthetic oligonucleotide; TTC chr11 5360003 5360024 5360008 5360003 -
agtctaacatttaagtctgtaa

SEQ ID NO: 120049 - DNA, 22 bp, Artificial Sequence
  Synthetic oligonucleotide; CTA chr11 5359997 5360018 5360002 5359997 -
acatttaagtctgtaatccatc

SEQ ID NO: 120050 - DNA, 22 bp, Artificial Sequence
  Synthetic oligonucleotide; TTT chr11 5359991 5360012 5359996 5359991 -
aagtctgtaatccatcttgaat

SEQ ID NO: 120051 - DNA, 22 bp, Artificial Sequence
  Synthetic oligonucleotide; TTA chr11 5359990 5360011 5359995 5359990 -
agtctgtaatccatcttgaatt

SEQ ID NO: 120052 - DNA, 22 bp, Artificial Sequence
  Synthetic oligonucleotide; CTG chr11 5359984 5360005 5359989 5359984 -
taatccatcttgaattaatttt

SEQ ID NO: 120053 - DNA, 22 bp, Artificial Sequence
  Synthetic oligonucleotide; CTT chr11 5359973 5359994 5359978 5359973 -
gaattaatttttgtataaggtg

SEQ ID NO: 120054 - DNA, 22 bp, Artificial Sequence
  Synthetic oligonucleotide; TTG chr11 5359972 5359993 5359977 5359972 -
aattaatttttgtataaggtgt

SEQ ID NO: 120055 - DNA, 22 bp, Artificial Sequence
  Synthetic oligonucleotide; TTA chr11 5359967 5359988 5359972 5359967 -
atttttgtataaggtgtaagaa

SEQ ID NO: 120056 - DNA, 22 bp, Artificial Sequence
  Synthetic oligonucleotide; TTT chr11 5359963 5359984 5359968 5359963 -
ttgtataaggtgtaagaaaggg

SEQ ID NO: 120057 - DNA, 22 bp, Artificial Sequence
  Synthetic oligonucleotide; TTT chr11 5359962 5359983 5359967 5359962 -
tgtataaggtgtaagaaaggga

SEQ ID NO: 120058 - DNA, 22 bp, Artificial Sequence
  Synthetic oligonucleotide; TTT chr11 5359961 5359982 5359966 5359961 -
gtataaggtgtaagaaagggat

SEQ ID NO: 120059 - DNA, 22 bp, Artificial Sequence
  Synthetic oligonucleotide; TTG chr11 5359960 5359981 5359965 5359960 -
tataaggtgtaagaaagggatc

SEQ ID NO: 120060 - DNA, 22 bp, Artificial Sequence
  Synthetic oligonucleotide; TTT chr11 5359932 5359953 5359937 5359932 -
cagctttctgcgtatggttagc

SEQ ID NO: 120061 - DNA, 22 bp, Artificial Sequence
  Synthetic oligonucleotide; TTC chr11 5359931 5359952 5359936 5359931 -
agctttctgcgtatggttagcc

SEQ ID NO: 120062 - DNA, 22 bp, Artificial Sequence
  Synthetic oligonucleotide; CTT chr11 5359926 5359947 5359931 5359926 -
tctgcgtatggttagccagttt

SEQ ID NO: 120063 - DNA, 22 bp, Artificial Sequence
  Synthetic oligonucleotide; TTT chr11 5359925 5359946 5359930 5359925 -
ctgcgtatggttagccagtttt

SEQ ID NO: 120064 - DNA, 22 bp, Artificial Sequence
  Synthetic oligonucleotide; TTC chr11 5359924 5359945 5359929 5359924 -
tgcgtatggttagccagttttc

SEQ ID NO: 120065 - DNA, 22 bp, Artificial Sequence
  Synthetic oligonucleotide; CTG chr11 5359922 5359943 5359927 5359922 -
cgtatggttagccagttttccc

SEQ ID NO: 120066 - DNA, 22 bp, Artificial Sequence
  Synthetic oligonucleotide; TTA chr11 5359912 5359933 5359917 5359912 -
gccagttttcccagcaccattt

SEQ ID NO: 120067 - DNA, 22 bp, Artificial Sequence
  Synthetic oligonucleotide; TTT chr11 5359904 5359925 5359909 5359904 -
tcccagcaccatttattaaata

SEQ ID NO: 120068 - DNA, 22 bp, Artificial Sequence
  Synthetic oligonucleotide; TTT chr11 5359903 5359924 5359908 5359903 -
cccagcaccatttattaaatag

SEQ ID NO: 120069 - DNA, 22 bp, Artificial Sequence
  Synthetic oligonucleotide; TTC chr11 5359902 5359923 5359907 5359902 -
ccagcaccatttattaaatagg

SEQ ID NO: 120070 - DNA, 22 bp, Artificial Sequence
  Synthetic oligonucleotide; TTT chr11 5359890 5359911 5359895 5359890 -
attaaatagggaatcctttccc

SEQ ID NO: 120071 - DNA, 22 bp, Artificial Sequence
  Synthetic oligonucleotide; TTA chr11 5359889 5359910 5359894 5359889 -
ttaaatagggaatcctttcccc

SEQ ID NO: 120072 - DNA, 22 bp, Artificial Sequence
  Synthetic oligonucleotide; TTA chr11 5359886 5359907 5359891 5359886 -
aatagggaatcctttccccatt

SEQ ID NO: 120073 - DNA, 22 bp, Artificial Sequence
  Synthetic oligonucleotide; CTT chr11 5359872 5359893 5359877 5359872 -
tccccatttgttttttttgtca

SEQ ID NO: 120074 - DNA, 22 bp, Artificial Sequence
  Synthetic oligonucleotide; TTT chr11 5359871 5359892 5359876 5359871 -
ccccatttgttttttttgtcag

SEQ ID NO: 120075 - DNA, 22 bp, Artificial Sequence
  Synthetic oligonucleotide; TTC chr11 5359870 5359891 5359875 5359870 -
cccatttgttttttttgtcagg

SEQ ID NO: 120076 - DNA, 22 bp, Artificial Sequence
  Synthetic oligonucleotide; TTT chr11 5359863 5359884 5359868 5359863 -
gttttttttgtcaggtttgtca

SEQ ID NO: 120077 - DNA, 22 bp, Artificial Sequence
  Synthetic oligonucleotide; TTG chr11 5359862 5359883 5359867 5359862 -
ttttttttgtcaggtttgtcaa

SEQ ID NO: 120078 - DNA, 22 bp, Artificial Sequence
  Synthetic oligonucleotide; TTT chr11 5359859 5359880 5359864 5359859 -
tttttgtcaggtttgtcaaaga

SEQ ID NO: 120079 - DNA, 22 bp, Artificial Sequence
  Synthetic oligonucleotide; TTT chr11 5359858 5359879 5359863 5359858 -
ttttgtcaggtttgtcaaagat

SEQ ID NO: 120080 - DNA, 22 bp, Artificial Sequence
  Synthetic oligonucleotide; TTT chr11 5359857 5359878 5359862 5359857 -
tttgtcaggtttgtcaaagatc

SEQ ID NO: 120081 - DNA, 22 bp, Artificial Sequence
  Synthetic oligonucleotide; TTT chr11 5359856 5359877 5359861 5359856 -
ttgtcaggtttgtcaaagatca

SEQ ID NO: 120082 - DNA, 22 bp, Artificial Sequence
  Synthetic oligonucleotide; TTT chr11 5359855 5359876 5359860 5359855 -
tgtcaggtttgtcaaagatcag

SEQ ID NO: 120083 - DNA, 22 bp, Artificial Sequence
  Synthetic oligonucleotide; TTT chr11 5359854 5359875 5359859 5359854 -
gtcaggtttgtcaaagatcaga

SEQ ID NO: 120084 - DNA, 22 bp, Artificial Sequence
  Synthetic oligonucleotide; TTG chr11 5359853 5359874 5359858 5359853 -
tcaggtttgtcaaagatcagat

SEQ ID NO: 120085 - DNA, 22 bp, Artificial Sequence
  Synthetic oligonucleotide; TTT chr11 5359845 5359866 5359850 5359845 -
gtcaaagatcagatggttgtag

SEQ ID NO: 120086 - DNA, 22 bp, Artificial Sequence
  Synthetic oligonucleotide; TTG chr11 5359844 5359865 5359849 5359844 -
tcaaagatcagatggttgtaga

SEQ ID NO: 120087 - DNA, 22 bp, Artificial Sequence
  Synthetic oligonucleotide; TTG chr11 5359826 5359847 5359831 5359826 -
tagacatgcggcattatttctg

SEQ ID NO: 120088 - DNA, 22 bp, Artificial Sequence
  Synthetic oligonucleotide; TTA chr11 5359810 5359831 5359815 5359810 -
tttctgaggcctctgttctgtt

SEQ ID NO: 120089 - DNA, 22 bp, Artificial Sequence
  Synthetic oligonucleotide; TTT chr11 5359807 5359828 5359812 5359807 -
ctgaggcctctgttctgttcca

SEQ ID NO: 120090 - DNA, 22 bp, Artificial Sequence
  Synthetic oligonucleotide; TTC chr11 5359806 5359827 5359811 5359806 -
tgaggcctctgttctgttccat

SEQ ID NO: 120091 - DNA, 22 bp, Artificial Sequence
  Synthetic oligonucleotide; CTG chr11 5359804 5359825 5359809 5359804 -
aggcctctgttctgttccattg

SEQ ID NO: 120092 - DNA, 22 bp, Artificial Sequence
  Synthetic oligonucleotide; CTC chr11 5359797 5359818 5359802 5359797 -
tgttctgttccattggtctata

SEQ ID NO: 120093 - DNA, 22 bp, Artificial Sequence
  Synthetic oligonucleotide; CTG chr11 5359795 5359816 5359800 5359795 -
ttctgttccattggtctatatc

SEQ ID NO: 120094 - DNA, 22 bp, Artificial Sequence
  Synthetic oligonucleotide; TTC chr11 5359792 5359813 5359797 5359792 -
tgttccattggtctatatctct

SEQ ID NO: 120095 - DNA, 22 bp, Artificial Sequence
  Synthetic oligonucleotide; CTG chr11 5359790 5359811 5359795 5359790 -
ttccattggtctatatctctgt

SEQ ID NO: 120096 - DNA, 22 bp, Artificial Sequence
  Synthetic oligonucleotide; TTC chr11 5359787 5359808 5359792 5359787 -
cattggtctatatctctgtttt

SEQ ID NO: 120097 - DNA, 22 bp, Artificial Sequence
  Synthetic oligonucleotide; TTG chr11 5359782 5359803 5359787 5359782 -
gtctatatctctgttttggtac

SEQ ID NO: 120098 - DNA, 22 bp, Artificial Sequence
  Synthetic oligonucleotide; CTA chr11 5359777 5359798 5359782 5359777 -
tatctctgttttggtaccagta

SEQ ID NO: 120099 - DNA, 22 bp, Artificial Sequence
  Synthetic oligonucleotide; CTC chr11 5359771 5359792 5359776 5359771 -
tgttttggtaccagtaccatgc

SEQ ID NO: 120100 - DNA, 22 bp, Artificial Sequence
  Synthetic oligonucleotide; CTG chr11 5359769 5359790 5359774 5359769 -
ttttggtaccagtaccatgctg

SEQ ID NO: 120101 - DNA, 22 bp, Artificial Sequence
  Synthetic oligonucleotide; TTT chr11 5359766 5359787 5359771 5359766 -
tggtaccagtaccatgctgttt

SEQ ID NO: 120102 - DNA, 22 bp, Artificial Sequence
  Synthetic oligonucleotide; TTT chr11 5359765 5359786 5359770 5359765 -
ggtaccagtaccatgctgtttt

SEQ ID NO: 120103 - DNA, 22 bp, Artificial Sequence
  Synthetic oligonucleotide; TTG chr11 5359764 5359785 5359769 5359764 -
gtaccagtaccatgctgttttg

SEQ ID NO: 120104 - DNA, 22 bp, Artificial Sequence
  Synthetic oligonucleotide; CTG chr11 5359747 5359768 5359752 5359747 -
ttttggttactgtagccttgta

SEQ ID NO: 120105 - DNA, 22 bp, Artificial Sequence
  Synthetic oligonucleotide; TTT chr11 5359744 5359765 5359749 5359744 -
tggttactgtagccttgtagta

SEQ ID NO: 120106 - DNA, 22 bp, Artificial Sequence
  Synthetic oligonucleotide; TTT chr11 5359743 5359764 5359748 5359743 -
ggttactgtagccttgtagtat

SEQ ID NO: 120107 - DNA, 22 bp, Artificial Sequence
  Synthetic oligonucleotide; TTG chr11 5359742 5359763 5359747 5359742 -
gttactgtagccttgtagtata

SEQ ID NO: 120108 - DNA, 22 bp, Artificial Sequence
  Synthetic oligonucleotide; TTA chr11 5359738 5359759 5359743 5359738 -
ctgtagccttgtagtatagttt

SEQ ID NO: 120109 - DNA, 22 bp, Artificial Sequence
  Synthetic oligonucleotide; CTG chr11 5359735 5359756 5359740 5359735 -
tagccttgtagtatagtttgaa

SEQ ID NO: 120110 - DNA, 22 bp, Artificial Sequence
  Synthetic oligonucleotide; CTT chr11 5359728 5359749 5359733 5359728 -
gtagtatagtttgaagtcaggt

SEQ ID NO: 120111 - DNA, 22 bp, Artificial Sequence
  Synthetic oligonucleotide; TTG chr11 5359727 5359748 5359732 5359727 -
tagtatagtttgaagtcaggta

SEQ ID NO: 120112 - DNA, 22 bp, Artificial Sequence
  Synthetic oligonucleotide; TTT chr11 5359716 5359737 5359721 5359716 -
gaagtcaggtagcgtgatgcct

SEQ ID NO: 120113 - DNA, 22 bp, Artificial Sequence
  Synthetic oligonucleotide; TTG chr11 5359715 5359736 5359720 5359715 -
aagtcaggtagcgtgatgcctc

SEQ ID NO: 120114 - DNA, 22 bp, Artificial Sequence
  Synthetic oligonucleotide; CTC chr11 5359693 5359714 5359698 5359693 -
cagctttgttcttttggcttag

SEQ ID NO: 120115 - DNA, 22 bp, Artificial Sequence
  Synthetic oligonucleotide; CTT chr11 5359687 5359708 5359692 5359687 -
tgttcttttggcttaggattgg

SEQ ID NO: 120116 - DNA, 22 bp, Artificial Sequence
  Synthetic oligonucleotide; TTT chr11 5359686 5359707 5359691 5359686 -
gttcttttggcttaggattggc

SEQ ID NO: 120117 - DNA, 22 bp, Artificial Sequence
  Synthetic oligonucleotide; TTG chr11 5359685 5359706 5359690 5359685 -
ttcttttggcttaggattggca

SEQ ID NO: 120118 - DNA, 22 bp, Artificial Sequence
  Synthetic oligonucleotide; TTC chr11 5359682 5359703 5359687 5359682 -
ttttggcttaggattggcatgt

SEQ ID NO: 120119 - DNA, 22 bp, Artificial Sequence
  Synthetic oligonucleotide; CTT chr11 5359680 5359701 5359685 5359680 -
ttggcttaggattggcatgtca

SEQ ID NO: 120120 - DNA, 22 bp, Artificial Sequence
  Synthetic oligonucleotide; TTT chr11 5359679 5359700 5359684 5359679 -
tggcttaggattggcatgtcaa

SEQ ID NO: 120121 - DNA, 22 bp, Artificial Sequence
  Synthetic oligonucleotide; TTT chr11 5359678 5359699 5359683 5359678 -
ggcttaggattggcatgtcaat

SEQ ID NO: 120122 - DNA, 22 bp, Artificial Sequence
  Synthetic oligonucleotide; TTG chr11 5359677 5359698 5359682 5359677 -
gcttaggattggcatgtcaatg

SEQ ID NO: 120123 - DNA, 22 bp, Artificial Sequence
  Synthetic oligonucleotide; CTT chr11 5359673 5359694 5359678 5359673 -
aggattggcatgtcaatgtggg

SEQ ID NO: 120124 - DNA, 22 bp, Artificial Sequence
  Synthetic oligonucleotide; TTA chr11 5359672 5359693 5359677 5359672 -
ggattggcatgtcaatgtgggc

SEQ ID NO: 120125 - DNA, 22 bp, Artificial Sequence
  Synthetic oligonucleotide; TTG chr11 5359666 5359687 5359671 5359666 -
gcatgtcaatgtgggctctttt

SEQ ID NO: 120126 - DNA, 22 bp, Artificial Sequence
  Synthetic oligonucleotide; CTC chr11 5359648 5359669 5359653 5359648 -
ttttttggttccatatgaactt

SEQ ID NO: 120127 - DNA, 22 bp, Artificial Sequence
  Synthetic oligonucleotide; CTT chr11 5359646 5359667 5359651 5359646 -
ttttggttccatatgaacttta

SEQ ID NO: 120128 - DNA, 22 bp, Artificial Sequence
  Synthetic oligonucleotide; TTT chr11 5359645 5359666 5359650 5359645 -
tttggttccatatgaactttaa

SEQ ID NO: 120129 - DNA, 22 bp, Artificial Sequence
  Synthetic oligonucleotide; TTT chr11 5359644 5359665 5359649 5359644 -
ttggttccatatgaactttaaa

SEQ ID NO: 120130 - DNA, 22 bp, Artificial Sequence
  Synthetic oligonucleotide; TTT chr11 5359643 5359664 5359648 5359643 -
tggttccatatgaactttaaag

SEQ ID NO: 120131 - DNA, 22 bp, Artificial Sequence
  Synthetic oligonucleotide; TTT chr11 5359642 5359663 5359647 5359642 -
ggttccatatgaactttaaagt

SEQ ID NO: 120132 - DNA, 22 bp, Artificial Sequence
  Synthetic oligonucleotide; TTG chr11 5359641 5359662 5359646 5359641 -
gttccatatgaactttaaagta

SEQ ID NO: 120133 - DNA, 22 bp, Artificial Sequence
  Synthetic oligonucleotide; TTC chr11 5359637 5359658 5359642 5359637 -
catatgaactttaaagtagttt

SEQ ID NO: 120134 - DNA, 22 bp, Artificial Sequence
  Synthetic oligonucleotide; CTT chr11 5359626 5359647 5359631 5359626 -
taaagtagttttttccaattct

SEQ ID NO: 120135 - DNA, 22 bp, Artificial Sequence
  Synthetic oligonucleotide; TTT chr11 5359625 5359646 5359630 5359625 -
aaagtagttttttccaattctg

SEQ ID NO: 120136 - DNA, 22 bp, Artificial Sequence
  Synthetic oligonucleotide; TTA chr11 5359624 5359645 5359629 5359624 -
aagtagttttttccaattctgt

SEQ ID NO: 120137 - DNA, 22 bp, Artificial Sequence
  Synthetic oligonucleotide; TTT chr11 5359615 5359636 5359620 5359615 -
tttccaattctgtgaagaaagt

SEQ ID NO: 120138 - DNA, 22 bp, Artificial Sequence
  Synthetic oligonucleotide; TTT chr11 5359614 5359635 5359619 5359614 -
ttccaattctgtgaagaaagtc

SEQ ID NO: 120139 - DNA, 22 bp, Artificial Sequence
  Synthetic oligonucleotide; TTT chr11 5359613 5359634 5359618 5359613 -
tccaattctgtgaagaaagtca

SEQ ID NO: 120140 - DNA, 22 bp, Artificial Sequence
  Synthetic oligonucleotide; TTT chr11 5359612 5359633 5359617 5359612 -
ccaattctgtgaagaaagtcat

SEQ ID NO: 120141 - DNA, 22 bp, Artificial Sequence
  Synthetic oligonucleotide; TTC chr11 5359611 5359632 5359616 5359611 -
caattctgtgaagaaagtcatt

SEQ ID NO: 120142 - DNA, 22 bp, Artificial Sequence
  Synthetic oligonucleotide; TTC chr11 5359605 5359626 5359610 5359605 -
tgtgaagaaagtcattggtagc

SEQ ID NO: 120143 - DNA, 22 bp, Artificial Sequence
  Synthetic oligonucleotide; CTG chr11 5359603 5359624 5359608 5359603 -
tgaagaaagtcattggtagctt

SEQ ID NO: 120144 - DNA, 22 bp, Artificial Sequence
  Synthetic oligonucleotide; TTG chr11 5359588 5359609 5359593 5359588 -
gtagcttgatggggatggcatt

SEQ ID NO: 120145 - DNA, 22 bp, Artificial Sequence
  Synthetic oligonucleotide; CTT chr11 5359581 5359602 5359586 5359581 -
gatggggatggcattgaatcta

SEQ ID NO: 120146 - DNA, 22 bp, Artificial Sequence
  Synthetic oligonucleotide; TTG chr11 5359580 5359601 5359585 5359580 -
atggggatggcattgaatctat

SEQ ID NO: 120147 - DNA, 22 bp, Artificial Sequence
  Synthetic oligonucleotide; TTG chr11 5359565 5359586 5359570 5359565 -
aatctataaattaccttgggct

SEQ ID NO: 120148 - DNA, 22 bp, Artificial Sequence
  Synthetic oligonucleotide; CTA chr11 5359559 5359580 5359564 5359559 -
taaattaccttgggctgtatgg

SEQ ID NO: 120149 - DNA, 22 bp, Artificial Sequence
  Synthetic oligonucleotide; TTA chr11 5359552 5359573 5359557 5359552 -
ccttgggctgtatggccatttt

SEQ ID NO: 120150 - DNA, 22 bp, Artificial Sequence
  Synthetic oligonucleotide; CTT chr11 5359548 5359569 5359553 5359548 -
gggctgtatggccattttcatg

SEQ ID NO: 120151 - DNA, 22 bp, Artificial Sequence
  Synthetic oligonucleotide; TTG chr11 5359547 5359568 5359552 5359547 -
ggctgtatggccattttcatga

SEQ ID NO: 120152 - DNA, 22 bp, Artificial Sequence
  Synthetic oligonucleotide; CTG chr11 5359542 5359563 5359547 5359542 -
tatggccattttcatgatattg

SEQ ID NO: 120153 - DNA, 22 bp, Artificial Sequence
  Synthetic oligonucleotide; TTT chr11 5359531 5359552 5359536 5359531 -
tcatgatattgattcttcctac

SEQ ID NO: 120154 - DNA, 22 bp, Artificial Sequence
  Synthetic oligonucleotide; TTT chr11 5359530 5359551 5359535 5359530 -
catgatattgattcttcctacc

SEQ ID NO: 120155 - DNA, 22 bp, Artificial Sequence
  Synthetic oligonucleotide; TTC chr11 5359529 5359550 5359534 5359529 -
atgatattgattcttcctaccc

SEQ ID NO: 120156 - DNA, 22 bp, Artificial Sequence
  Synthetic oligonucleotide; TTG chr11 5359520 5359541 5359525 5359520 -
attcttcctacccatgagcatg

SEQ ID NO: 120157 - DNA, 22 bp, Artificial Sequence
  Synthetic oligonucleotide; TTC chr11 5359516 5359537 5359521 5359516 -
ttcctacccatgagcatggaat

SEQ ID NO: 120158 - DNA, 22 bp, Artificial Sequence
  Synthetic oligonucleotide; CTT chr11 5359514 5359535 5359519 5359514 -
cctacccatgagcatggaatgt

SEQ ID NO: 120159 - DNA, 22 bp, Artificial Sequence
  Synthetic oligonucleotide; TTC chr11 5359513 5359534 5359518 5359513 -
ctacccatgagcatggaatgtt

SEQ ID NO: 120160 - DNA, 22 bp, Artificial Sequence
  Synthetic oligonucleotide; CTA chr11 5359510 5359531 5359515 5359510 -
cccatgagcatggaatgttctt

SEQ ID NO: 120161 - DNA, 22 bp, Artificial Sequence
  Synthetic oligonucleotide; TTC chr11 5359490 5359511 5359495 5359490 -
ttccatttgtttgtatcttctt

SEQ ID NO: 120162 - DNA, 22 bp, Artificial Sequence
  Synthetic oligonucleotide; CTT chr11 5359488 5359509 5359493 5359488 -
ccatttgtttgtatcttctttt

SEQ ID NO: 120163 - DNA, 22 bp, Artificial Sequence
  Synthetic oligonucleotide; TTC chr11 5359487 5359508 5359492 5359487 -
catttgtttgtatcttctttta

SEQ ID NO: 120164 - DNA, 22 bp, Artificial Sequence
  Synthetic oligonucleotide; TTT chr11 5359482 5359503 5359487 5359482 -
gtttgtatcttcttttatttca

SEQ ID NO: 120165 - DNA, 22 bp, Artificial Sequence
  Synthetic oligonucleotide; TTG chr11 5359481 5359502 5359486 5359481 -
tttgtatcttcttttatttcat

SEQ ID NO: 120166 - DNA, 22 bp, Artificial Sequence
  Synthetic oligonucleotide; TTT chr11 5359478 5359499 5359483 5359478 -
gtatcttcttttatttcattca

SEQ ID NO: 120167 - DNA, 22 bp, Artificial Sequence
  Synthetic oligonucleotide; TTG chr11 5359477 5359498 5359482 5359477 -
tatcttcttttatttcattcag

SEQ ID NO: 120168 - DNA, 22 bp, Artificial Sequence
  Synthetic oligonucleotide; CTT chr11 5359471 5359492 5359476 5359471 -
cttttatttcattcagcagtgg

SEQ ID NO: 120169 - DNA, 22 bp, Artificial Sequence
  Synthetic oligonucleotide; TTC chr11 5359470 5359491 5359475 5359470 -
ttttatttcattcagcagtggt

SEQ ID NO: 120170 - DNA, 22 bp, Artificial Sequence
  Synthetic oligonucleotide; CTT chr11 5359468 5359489 5359473 5359468 -
ttatttcattcagcagtggttt

SEQ ID NO: 120171 - DNA, 22 bp, Artificial Sequence
  Synthetic oligonucleotide; TTT chr11 5359467 5359488 5359472 5359467 -
tatttcattcagcagtggtttg

SEQ ID NO: 120172 - DNA, 22 bp, Artificial Sequence
  Synthetic oligonucleotide; TTT chr11 5359466 5359487 5359471 5359466 -
atttcattcagcagtggtttgt

SEQ ID NO: 120173 - DNA, 22 bp, Artificial Sequence
  Synthetic oligonucleotide; TTA chr11 5359465 5359486 5359470 5359465 -
tttcattcagcagtggtttgta

SEQ ID NO: 120174 - DNA, 22 bp, Artificial Sequence
  Synthetic oligonucleotide; TTT chr11 5359462 5359483 5359467 5359462 -
cattcagcagtggtttgtagtt

SEQ ID NO: 120175 - DNA, 22 bp, Artificial Sequence
  Synthetic oligonucleotide; TTC chr11 5359461 5359482 5359466 5359461 -
attcagcagtggtttgtagttc

SEQ ID NO: 120176 - DNA, 22 bp, Artificial Sequence
  Synthetic oligonucleotide; TTC chr11 5359457 5359478 5359462 5359457 -
agcagtggtttgtagttctcct

SEQ ID NO: 120177 - DNA, 22 bp, Artificial Sequence
  Synthetic oligonucleotide; TTT chr11 5359446 5359467 5359451 5359446 -
gtagttctccttgaagaggtcc

SEQ ID NO: 120178 - DNA, 22 bp, Artificial Sequence
  Synthetic oligonucleotide; TTG chr11 5359445 5359466 5359450 5359445 -
tagttctccttgaagaggtcct

SEQ ID NO: 120179 - DNA, 22 bp, Artificial Sequence
  Synthetic oligonucleotide; TTC chr11 5359439 5359460 5359444 5359439 -
tccttgaagaggtccttcacct

SEQ ID NO: 120180 - DNA, 22 bp, Artificial Sequence
  Synthetic oligonucleotide; CTC chr11 5359437 5359458 5359442 5359437 -
cttgaagaggtccttcacctct

SEQ ID NO: 120181 - DNA, 22 bp, Artificial Sequence
  Synthetic oligonucleotide; CTT chr11 5359434 5359455 5359439 5359434 -
gaagaggtccttcacctctctt

SEQ ID NO: 120182 - DNA, 22 bp, Artificial Sequence
  Synthetic oligonucleotide; TTG chr11 5359433 5359454 5359438 5359433 -
aagaggtccttcacctctcttg

SEQ ID NO: 120183 - DNA, 22 bp, Artificial Sequence
  Synthetic oligonucleotide; CTT chr11 5359422 5359443 5359427 5359422 -
cacctctcttgtaagttggatt

SEQ ID NO: 120184 - DNA, 22 bp, Artificial Sequence
  Synthetic oligonucleotide; TTC chr11 5359421 5359442 5359426 5359421 -
acctctcttgtaagttggattc

SEQ ID NO: 120185 - DNA, 22 bp, Artificial Sequence
  Synthetic oligonucleotide; CTC chr11 5359416 5359437 5359421 5359416 -
tcttgtaagttggattcctagg

SEQ ID NO: 120186 - DNA, 22 bp, Artificial Sequence
  Synthetic oligonucleotide; CTC chr11 5359414 5359435 5359419 5359414 -
ttgtaagttggattcctaggta

SEQ ID NO: 120187 - DNA, 22 bp, Artificial Sequence
  Synthetic oligonucleotide; CTT chr11 5359412 5359433 5359417 5359412 -
gtaagttggattcctaggtatt

SEQ ID NO: 120188 - DNA, 22 bp, Artificial Sequence
  Synthetic oligonucleotide; TTG chr11 5359411 5359432 5359416 5359411 -
taagttggattcctaggtattt

SEQ ID NO: 120189 - DNA, 22 bp, Artificial Sequence
  Synthetic oligonucleotide; TTG chr11 5359404 5359425 5359409 5359404 -
gattcctaggtattttattctc

SEQ ID NO: 120190 - DNA, 22 bp, Artificial Sequence
  Synthetic oligonucleotide; TTC chr11 5359399 5359420 5359404 5359399 -
ctaggtattttattctctttga

SEQ ID NO: 120191 - DNA, 22 bp, Artificial Sequence
  Synthetic oligonucleotide; CTA chr11 5359396 5359417 5359401 5359396 -
ggtattttattctctttgaagc

SEQ ID NO: 120192 - DNA, 22 bp, Artificial Sequence
  Synthetic oligonucleotide; TTT chr11 5359389 5359410 5359394 5359389 -
tattctctttgaagcaattgtg

SEQ ID NO: 120193 - DNA, 22 bp, Artificial Sequence
  Synthetic oligonucleotide; TTT chr11 5359388 5359409 5359393 5359388 -
attctctttgaagcaattgtga

SEQ ID NO: 120194 - DNA, 22 bp, Artificial Sequence
  Synthetic oligonucleotide; TTA chr11 5359387 5359408 5359392 5359387 -
ttctctttgaagcaattgtgaa

SEQ ID NO: 120195 - DNA, 22 bp, Artificial Sequence
  Synthetic oligonucleotide; TTC chr11 5359384 5359405 5359389 5359384 -
tctttgaagcaattgtgaatgg

SEQ ID NO: 120196 - DNA, 22 bp, Artificial Sequence
  Synthetic oligonucleotide; CTC chr11 5359382 5359403 5359387 5359382 -
tttgaagcaattgtgaatggga

SEQ ID NO: 120197 - DNA, 22 bp, Artificial Sequence
  Synthetic oligonucleotide; CTT chr11 5359380 5359401 5359385 5359380 -
tgaagcaattgtgaatgggagt

SEQ ID NO: 120198 - DNA, 22 bp, Artificial Sequence
  Synthetic oligonucleotide; TTT chr11 5359379 5359400 5359384 5359379 -
gaagcaattgtgaatgggagtt

SEQ ID NO: 120199 - DNA, 22 bp, Artificial Sequence
  Synthetic oligonucleotide; TTG chr11 5359378 5359399 5359383 5359378 -
aagcaattgtgaatgggagttc

SEQ ID NO: 120200 - DNA, 22 bp, Artificial Sequence
  Synthetic oligonucleotide; TTG chr11 5359369 5359390 5359374 5359369 -
tgaatgggagttccctcatgat

SEQ ID NO: 120201 - DNA, 22 bp, Artificial Sequence
  Synthetic oligonucleotide; TTC chr11 5359356 5359377 5359361 5359356 -
cctcatgatttggctctctgtt

SEQ ID NO: 120202 - DNA, 22 bp, Artificial Sequence
  Synthetic oligonucleotide; CTC chr11 5359352 5359373 5359357 5359352 -
atgatttggctctctgtttgtc

SEQ ID NO: 120203 - DNA, 22 bp, Artificial Sequence
  Synthetic oligonucleotide; TTT chr11 5359345 5359366 5359350 5359345 -
ggctctctgtttgtctgttatt

SEQ ID NO: 120204 - DNA, 22 bp, Artificial Sequence
  Synthetic oligonucleotide; TTG chr11 5359344 5359365 5359349 5359344 -
gctctctgtttgtctgttattg

SEQ ID NO: 120205 - DNA, 22 bp, Artificial Sequence
  Synthetic oligonucleotide; CTC chr11 5359340 5359361 5359345 5359340 -
tctgtttgtctgttattggtgt

SEQ ID NO: 120206 - DNA, 22 bp, Artificial Sequence
  Synthetic oligonucleotide; CTC chr11 5359338 5359359 5359343 5359338 -
tgtttgtctgttattggtgtat

SEQ ID NO: 120207 - DNA, 22 bp, Artificial Sequence
  Synthetic oligonucleotide; CTG chr11 5359336 5359357 5359341 5359336 -
tttgtctgttattggtgtataa

SEQ ID NO: 120208 - DNA, 22 bp, Artificial Sequence
  Synthetic oligonucleotide; TTT chr11 5359333 5359354 5359338 5359333 -
gtctgttattggtgtataagaa

SEQ ID NO: 120209 - DNA, 22 bp, Artificial Sequence
  Synthetic oligonucleotide; TTG chr11 5359332 5359353 5359337 5359332 -
tctgttattggtgtataagaat

SEQ ID NO: 120210 - DNA, 22 bp, Artificial Sequence
  Synthetic oligonucleotide; CTG chr11 5359328 5359349 5359333 5359328 -
ttattggtgtataagaatgctt

SEQ ID NO: 120211 - DNA, 22 bp, Artificial Sequence
  Synthetic oligonucleotide; TTA chr11 5359325 5359346 5359330 5359325 -
ttggtgtataagaatgcttgtg

SEQ ID NO: 120212 - DNA, 22 bp, Artificial Sequence
  Synthetic oligonucleotide; TTG chr11 5359322 5359343 5359327 5359322 -
gtgtataagaatgcttgtgatt

SEQ ID NO: 120213 - DNA, 22 bp, Artificial Sequence
  Synthetic oligonucleotide; CTT chr11 5359306 5359327 5359311 5359306 -
gtgatttttgcacattgatttt

SEQ ID NO: 120214 - DNA, 22 bp, Artificial Sequence
  Synthetic oligonucleotide; TTG chr11 5359305 5359326 5359310 5359305 -
tgatttttgcacattgattttg

SEQ ID NO: 120215 - DNA, 22 bp, Artificial Sequence
  Synthetic oligonucleotide; TTT chr11 5359299 5359320 5359304 5359299 -
ttgcacattgattttgtatcct

SEQ ID NO: 120216 - DNA, 22 bp, Artificial Sequence
  Synthetic oligonucleotide; TTT chr11 5359298 5359319 5359303 5359298 -
tgcacattgattttgtatcctg

SEQ ID NO: 120217 - DNA, 22 bp, Artificial Sequence
  Synthetic oligonucleotide; TTT chr11 5359297 5359318 5359302 5359297 -
gcacattgattttgtatcctga

SEQ ID NO: 120218 - DNA, 22 bp, Artificial Sequence
  Synthetic oligonucleotide; TTG chr11 5359296 5359317 5359301 5359296 -
cacattgattttgtatcctgag

SEQ ID NO: 120219 - DNA, 22 bp, Artificial Sequence
  Synthetic oligonucleotide; TTG chr11 5359289 5359310 5359294 5359289 -
attttgtatcctgagactttgc

SEQ ID NO: 120220 - DNA, 22 bp, Artificial Sequence
  Synthetic oligonucleotide; TTT chr11 5359285 5359306 5359290 5359285 -
tgtatcctgagactttgctgaa

SEQ ID NO: 120221 - DNA, 22 bp, Artificial Sequence
  Synthetic oligonucleotide; TTT chr11 5359284 5359305 5359289 5359284 -
gtatcctgagactttgctgaag

SEQ ID NO: 120222 - DNA, 22 bp, Artificial Sequence
  Synthetic oligonucleotide; TTG chr11 5359283 5359304 5359288 5359283 -
tatcctgagactttgctgaagt

SEQ ID NO: 120223 - DNA, 22 bp, Artificial Sequence
  Synthetic oligonucleotide; CTG chr11 5359276 5359297 5359281 5359276 -
agactttgctgaagttgcctat

SEQ ID NO: 120224 - DNA, 22 bp, Artificial Sequence
  Synthetic oligonucleotide; CTT chr11 5359270 5359291 5359275 5359270 -
tgctgaagttgcctatcagttt

SEQ ID NO: 120225 - DNA, 22 bp, Artificial Sequence
  Synthetic oligonucleotide; TTT chr11 5359269 5359290 5359274 5359269 -
gctgaagttgcctatcagttta

SEQ ID NO: 120226 - DNA, 22 bp, Artificial Sequence
  Synthetic oligonucleotide; TTG chr11 5359268 5359289 5359273 5359268 -
ctgaagttgcctatcagtttaa

SEQ ID NO: 120227 - DNA, 22 bp, Artificial Sequence
  Synthetic oligonucleotide; CTG chr11 5359265 5359286 5359270 5359265 -
aagttgcctatcagtttaagga

SEQ ID NO: 120228 - DNA, 22 bp, Artificial Sequence
  Synthetic oligonucleotide; TTG chr11 5359259 5359280 5359264 5359259 -
cctatcagtttaaggacatttt

SEQ ID NO: 120229 - DNA, 22 bp, Artificial Sequence
  Synthetic oligonucleotide; CTA chr11 5359255 5359276 5359260 5359255 -
tcagtttaaggacattttgggc

SEQ ID NO: 120230 - DNA, 22 bp, Artificial Sequence
  Synthetic oligonucleotide; TTT chr11 5359248 5359269 5359253 5359248 -
aaggacattttgggctgagaca

SEQ ID NO: 120231 - DNA, 22 bp, Artificial Sequence
  Synthetic oligonucleotide; TTA chr11 5359247 5359268 5359252 5359247 -
aggacattttgggctgagacag

SEQ ID NO: 120232 - DNA, 22 bp, Artificial Sequence
  Synthetic oligonucleotide; TTT chr11 5359238 5359259 5359243 5359238 -
tgggctgagacagtggggtttt

SEQ ID NO: 120233 - DNA, 22 bp, Artificial Sequence
  Synthetic oligonucleotide; TTT chr11 5359237 5359258 5359242 5359237 -
gggctgagacagtggggttttc

SEQ ID NO: 120234 - DNA, 22 bp, Artificial Sequence
  Synthetic oligonucleotide; TTG chr11 5359236 5359257 5359241 5359236 -
ggctgagacagtggggttttct

SEQ ID NO: 120235 - DNA, 22 bp, Artificial Sequence
  Synthetic oligonucleotide; CTG chr11 5359231 5359252 5359236 5359231 -
agacagtggggttttctagata

SEQ ID NO: 120236 - DNA, 22 bp, Artificial Sequence
  Synthetic oligonucleotide; TTT chr11 5359217 5359238 5359222 5359217 -
tctagatatacaatcgtgtcat

SEQ ID NO: 120237 - DNA, 22 bp, Artificial Sequence
  Synthetic oligonucleotide; TTT chr11 5359216 5359237 5359221 5359216 -
ctagatatacaatcgtgtcatc

SEQ ID NO: 120238 - DNA, 22 bp, Artificial Sequence
  Synthetic oligonucleotide; TTC chr11 5359215 5359236 5359220 5359215 -
tagatatacaatcgtgtcatct

SEQ ID NO: 120239 - DNA, 22 bp, Artificial Sequence
  Synthetic oligonucleotide; CTA chr11 5359213 5359234 5359218 5359213 -
gatatacaatcgtgtcatctgc

SEQ ID NO: 120240 - DNA, 22 bp, Artificial Sequence
  Synthetic oligonucleotide; CTG chr11 5359192 5359213 5359197 5359192 -
caaacagggacaatttgacttc

SEQ ID NO: 120241 - DNA, 22 bp, Artificial Sequence
  Synthetic oligonucleotide; TTT chr11 5359176 5359197 5359181 5359176 -
gacttcctcttttcctaattga

SEQ ID NO: 120242 - DNA, 22 bp, Artificial Sequence
  Synthetic oligonucleotide; TTG chr11 5359175 5359196 5359180 5359175 -
acttcctcttttcctaattgaa

SEQ ID NO: 120243 - DNA, 22 bp, Artificial Sequence
  Synthetic oligonucleotide; CTT chr11 5359171 5359192 5359176 5359171 -
cctcttttcctaattgaatacc

SEQ ID NO: 120244 - DNA, 22 bp, Artificial Sequence
  Synthetic oligonucleotide; TTC chr11 5359170 5359191 5359175 5359170 -
ctcttttcctaattgaatacct

SEQ ID NO: 120245 - DNA, 22 bp, Artificial Sequence
  Synthetic oligonucleotide; CTC chr11 5359167 5359188 5359172 5359167 -
ttttcctaattgaatacctttt

SEQ ID NO: 120246 - DNA, 22 bp, Artificial Sequence
  Synthetic oligonucleotide; CTT chr11 5359165 5359186 5359170 5359165 -
ttcctaattgaatacctttttt

SEQ ID NO: 120247 - DNA, 22 bp, Artificial Sequence
  Synthetic oligonucleotide; TTT chr11 5359164 5359185 5359169 5359164 -
tcctaattgaataccttttttt

SEQ ID NO: 120248 - DNA, 22 bp, Artificial Sequence
  Synthetic oligonucleotide; TTT chr11 5359163 5359184 5359168 5359163 -
cctaattgaatacctttttttc

SEQ ID NO: 120249 - DNA, 22 bp, Artificial Sequence
  Synthetic oligonucleotide; TTC chr11 5359162 5359183 5359167 5359162 -
ctaattgaatacctttttttcc

SEQ ID NO: 120250 - DNA, 22 bp, Artificial Sequence
  Synthetic oligonucleotide; CTA chr11 5359159 5359180 5359164 5359159 -
attgaatacctttttttccttc

SEQ ID NO: 120251 - DNA, 22 bp, Artificial Sequence
  Synthetic oligonucleotide; TTG chr11 5359155 5359176 5359160 5359155 -
aatacctttttttccttctcct

SEQ ID NO: 120252 - DNA, 22 bp, Artificial Sequence
  Synthetic oligonucleotide; CTT chr11 5359147 5359168 5359152 5359147 -
tttttccttctcctgcctaatt

SEQ ID NO: 120253 - DNA, 22 bp, Artificial Sequence
  Synthetic oligonucleotide; TTT chr11 5359146 5359167 5359151 5359146 -
ttttccttctcctgcctaattg

SEQ ID NO: 120254 - DNA, 22 bp, Artificial Sequence
  Synthetic oligonucleotide; TTT chr11 5359145 5359166 5359150 5359145 -
tttccttctcctgcctaattgc

SEQ ID NO: 120255 - DNA, 22 bp, Artificial Sequence
  Synthetic oligonucleotide; TTT chr11 5359144 5359165 5359149 5359144 -
ttccttctcctgcctaattgcc

SEQ ID NO: 120256 - DNA, 22 bp, Artificial Sequence
  Synthetic oligonucleotide; TTT chr11 5359143 5359164 5359148 5359143 -
tccttctcctgcctaattgccc

SEQ ID NO: 120257 - DNA, 22 bp, Artificial Sequence
  Synthetic oligonucleotide; TTT chr11 5359142 5359163 5359147 5359142 -
ccttctcctgcctaattgccct

SEQ ID NO: 120258 - DNA, 22 bp, Artificial Sequence
  Synthetic oligonucleotide; TTC chr11 5359141 5359162 5359146 5359141 -
cttctcctgcctaattgccctg

SEQ ID NO: 120259 - DNA, 22 bp, Artificial Sequence
  Synthetic oligonucleotide; CTT chr11 5359138 5359159 5359143 5359138 -
ctcctgcctaattgccctggcc

SEQ ID NO: 120260 - DNA, 22 bp, Artificial Sequence
  Synthetic oligonucleotide; TTC chr11 5359137 5359158 5359142 5359137 -
tcctgcctaattgccctggcca

SEQ ID NO: 120261 - DNA, 22 bp, Artificial Sequence
  Synthetic oligonucleotide; CTC chr11 5359135 5359156 5359140 5359135 -
ctgcctaattgccctggccaga

SEQ ID NO: 120262 - DNA, 22 bp, Artificial Sequence
  Synthetic oligonucleotide; CTG chr11 5359132 5359153 5359137 5359132 -
cctaattgccctggccagaaat

SEQ ID NO: 120263 - DNA, 22 bp, Artificial Sequence
  Synthetic oligonucleotide; CTA chr11 5359128 5359149 5359133 5359128 -
attgccctggccagaaattcca

SEQ ID NO: 120264 - DNA, 22 bp, Artificial Sequence
  Synthetic oligonucleotide; TTG chr11 5359124 5359145 5359129 5359124 -
ccctggccagaaattccaacac

SEQ ID NO: 120265 - DNA, 22 bp, Artificial Sequence
  Synthetic oligonucleotide; CTG chr11 5359119 5359140 5359124 5359119 -
gccagaaattccaacactatgt

SEQ ID NO: 120266 - DNA, 22 bp, Artificial Sequence
  Synthetic oligonucleotide; TTC chr11 5359108 5359129 5359113 5359108 -
caacactatgttgaataggagt

SEQ ID NO: 120267 - DNA, 22 bp, Artificial Sequence
  Synthetic oligonucleotide; CTA chr11 5359100 5359121 5359105 5359100 -
tgttgaataggagtagtgagag

SEQ ID NO: 120268 - DNA, 22 bp, Artificial Sequence
  Synthetic oligonucleotide; TTG chr11 5359095 5359116 5359100 5359095 -
aataggagtagtgagagagggc

SEQ ID NO: 120269 - DNA, 22 bp, Artificial Sequence
  Synthetic oligonucleotide; CTG chr11 5359066 5359087 5359071 5359066 -
tcttgtgccagttttcaaaggg

SEQ ID NO: 120270 - DNA, 22 bp, Artificial Sequence
  Synthetic oligonucleotide; CTT chr11 5359062 5359083 5359067 5359062 -
gtgccagttttcaaagggaatg

SEQ ID NO: 120271 - DNA, 22 bp, Artificial Sequence
  Synthetic oligonucleotide; TTG chr11 5359061 5359082 5359066 5359061 -
tgccagttttcaaagggaatgc

SEQ ID NO: 120272 - DNA, 22 bp, Artificial Sequence
  Synthetic oligonucleotide; TTT chr11 5359052 5359073 5359057 5359052 -
tcaaagggaatgcttccagttt

SEQ ID NO: 120273 - DNA, 22 bp, Artificial Sequence
  Synthetic oligonucleotide; TTT chr11 5359051 5359072 5359056 5359051 -
caaagggaatgcttccagtttt

SEQ ID NO: 120274 - DNA, 22 bp, Artificial Sequence
  Synthetic oligonucleotide; TTC chr11 5359050 5359071 5359055 5359050 -
aaagggaatgcttccagttttt

SEQ ID NO: 120275 - DNA, 22 bp, Artificial Sequence
  Synthetic oligonucleotide; CTT chr11 5359037 5359058 5359042 5359037 -
ccagtttttgtccattcagtat

SEQ ID NO: 120276 - DNA, 22 bp, Artificial Sequence
  Synthetic oligonucleotide; TTC chr11 5359036 5359057 5359041 5359036 -
cagtttttgtccattcagtatg

SEQ ID NO: 120277 - DNA, 22 bp, Artificial Sequence
  Synthetic oligonucleotide; TTT chr11 5359030 5359051 5359035 5359030 -
ttgtccattcagtatgatattg

SEQ ID NO: 120278 - DNA, 22 bp, Artificial Sequence
  Synthetic oligonucleotide; TTT chr11 5359029 5359050 5359034 5359029 -
tgtccattcagtatgatattgg

SEQ ID NO: 120279 - DNA, 22 bp, Artificial Sequence
  Synthetic oligonucleotide; TTT chr11 5359028 5359049 5359033 5359028 -
gtccattcagtatgatattggc

SEQ ID NO: 120280 - DNA, 22 bp, Artificial Sequence
  Synthetic oligonucleotide; TTG chr11 5359027 5359048 5359032 5359027 -
tccattcagtatgatattggct

SEQ ID NO: 120281 - DNA, 22 bp, Artificial Sequence
  Synthetic oligonucleotide; TTC chr11 5359020 5359041 5359025 5359020 -
agtatgatattggctgtgggtt

SEQ ID NO: 120282 - DNA, 22 bp, Artificial Sequence
  Synthetic oligonucleotide; TTG chr11 5359008 5359029 5359013 5359008 -
gctgtgggtttgtcatagatgg

SEQ ID NO: 120283 - DNA, 22 bp, Artificial Sequence
  Synthetic oligonucleotide; CTG chr11 5359004 5359025 5359009 5359004 -
tgggtttgtcatagatggctct

SEQ ID NO: 120284 - DNA, 22 bp, Artificial Sequence
  Synthetic oligonucleotide; TTT chr11 5358997 5359018 5359002 5358997 -
gtcatagatggctcttattatt

SEQ ID NO: 120285 - DNA, 22 bp, Artificial Sequence
  Synthetic oligonucleotide; TTG chr11 5358996 5359017 5359001 5358996 -
tcatagatggctcttattattt

SEQ ID NO: 120286 - DNA, 22 bp, Artificial Sequence
  Synthetic oligonucleotide; CTC chr11 5358983 5359004 5358988 5358983 -
ttattattttgagatacgtccc

SEQ ID NO: 120287 - DNA, 22 bp, Artificial Sequence
  Synthetic oligonucleotide; CTT chr11 5358981 5359002 5358986 5358981 -
attattttgagatacgtcccat

SEQ ID NO: 120288 - DNA, 22 bp, Artificial Sequence
  Synthetic oligonucleotide; TTA chr11 5358980 5359001 5358985 5358980 -
ttattttgagatacgtcccatc

SEQ ID NO: 120289 - DNA, 22 bp, Artificial Sequence
  Synthetic oligonucleotide; TTA chr11 5358977 5358998 5358982 5358977 -
ttttgagatacgtcccatcaat

SEQ ID NO: 120290 - DNA, 22 bp, Artificial Sequence
  Synthetic oligonucleotide; TTT chr11 5358974 5358995 5358979 5358974 -
tgagatacgtcccatcaatacc

SEQ ID NO: 120291 - DNA, 22 bp, Artificial Sequence
  Synthetic oligonucleotide; TTT chr11 5358973 5358994 5358978 5358973 -
gagatacgtcccatcaatacct

SEQ ID NO: 120292 - DNA, 22 bp, Artificial Sequence
  Synthetic oligonucleotide; TTG chr11 5358972 5358993 5358977 5358972 -
agatacgtcccatcaataccta

SEQ ID NO: 120293 - DNA, 22 bp, Artificial Sequence
  Synthetic oligonucleotide; CTA chr11 5358950 5358971 5358955 5358950 -
atttattgagagtttttagcat

SEQ ID NO: 120294 - DNA, 22 bp, Artificial Sequence
  Synthetic oligonucleotide; TTT chr11 5358946 5358967 5358951 5358946 -
attgagagtttttagcatgaag

SEQ ID NO: 120295 - DNA, 22 bp, Artificial Sequence
  Synthetic oligonucleotide; TTA chr11 5358945 5358966 5358950 5358945 -
ttgagagtttttagcatgaagg

SEQ ID NO: 120296 - DNA, 22 bp, Artificial Sequence
  Synthetic oligonucleotide; TTG chr11 5358942 5358963 5358947 5358942 -
agagtttttagcatgaagggtt

SEQ ID NO: 120297 - DNA, 22 bp, Artificial Sequence
  Synthetic oligonucleotide; TTT chr11 5358935 5358956 5358940 5358935 -
ttagcatgaagggttgttgaat

SEQ ID NO: 120298 - DNA, 22 bp, Artificial Sequence
  Synthetic oligonucleotide; TTT chr11 5358934 5358955 5358939 5358934 -
tagcatgaagggttgttgaatt

SEQ ID NO: 120299 - DNA, 22 bp, Artificial Sequence
  Synthetic oligonucleotide; TTT chr11 5358933 5358954 5358938 5358933 -
agcatgaagggttgttgaattt

SEQ ID NO: 120300 - DNA, 22 bp, Artificial Sequence
  Synthetic oligonucleotide; TTA chr11 5358932 5358953 5358937 5358932 -
gcatgaagggttgttgaatttt

SEQ ID NO: 120301 - DNA, 22 bp, Artificial Sequence
  Synthetic oligonucleotide; TTG chr11 5358919 5358940 5358924 5358919 -
ttgaattttgtcaaaggccttt

SEQ ID NO: 120302 - DNA, 22 bp, Artificial Sequence
  Synthetic oligonucleotide; TTG chr11 5358916 5358937 5358921 5358916 -
aattttgtcaaaggccttttct

SEQ ID NO: 120303 - DNA, 22 bp, Artificial Sequence
  Synthetic oligonucleotide; TTT chr11 5358911 5358932 5358916 5358911 -
tgtcaaaggccttttctgcatc

SEQ ID NO: 120304 - DNA, 22 bp, Artificial Sequence
  Synthetic oligonucleotide; TTT chr11 5358910 5358931 5358915 5358910 -
gtcaaaggccttttctgcatct

SEQ ID NO: 120305 - DNA, 22 bp, Artificial Sequence
  Synthetic oligonucleotide; TTG chr11 5358909 5358930 5358914 5358909 -
tcaaaggccttttctgcatcta

SEQ ID NO: 120306 - DNA, 22 bp, Artificial Sequence
  Synthetic oligonucleotide; CTT chr11 5358898 5358919 5358903 5358898 -
ttctgcatctattgagataatc

SEQ ID NO: 120307 - DNA, 22 bp, Artificial Sequence
  Synthetic oligonucleotide; TTT chr11 5358897 5358918 5358902 5358897 -
tctgcatctattgagataatca

SEQ ID NO: 120308 - DNA, 22 bp, Artificial Sequence
  Synthetic oligonucleotide; TTT chr11 5358896 5358917 5358901 5358896 -
ctgcatctattgagataatcat

SEQ ID NO: 120309 - DNA, 22 bp, Artificial Sequence
  Synthetic oligonucleotide; TTC chr11 5358895 5358916 5358900 5358895 -
tgcatctattgagataatcatg

SEQ ID NO: 120310 - DNA, 22 bp, Artificial Sequence
  Synthetic oligonucleotide; CTG chr11 5358893 5358914 5358898 5358893 -
catctattgagataatcatgtg

SEQ ID NO: 120311 - DNA, 22 bp, Artificial Sequence
  Synthetic oligonucleotide; CTA chr11 5358887 5358908 5358892 5358887 -
ttgagataatcatgtggttttt

SEQ ID NO: 120312 - DNA, 22 bp, Artificial Sequence
  Synthetic oligonucleotide; TTG chr11 5358884 5358905 5358889 5358884 -
agataatcatgtggtttttgtc

SEQ ID NO: 120313 - DNA, 22 bp, Artificial Sequence
  Synthetic oligonucleotide; TTT chr11 5358867 5358888 5358872 5358867 -
ttgtctttggttctgtttatat

SEQ ID NO: 120314 - DNA, 22 bp, Artificial Sequence
  Synthetic oligonucleotide; TTT chr11 5358866 5358887 5358871 5358866 -
tgtctttggttctgtttatatg

SEQ ID NO: 120315 - DNA, 22 bp, Artificial Sequence
  Synthetic oligonucleotide; TTT chr11 5358865 5358886 5358870 5358865 -
gtctttggttctgtttatatgc

SEQ ID NO: 120316 - DNA, 22 bp, Artificial Sequence
  Synthetic oligonucleotide; TTG chr11 5358864 5358885 5358869 5358864 -
tctttggttctgtttatatgct

SEQ ID NO: 120317 - DNA, 22 bp, Artificial Sequence
  Synthetic oligonucleotide; CTT chr11 5358860 5358881 5358865 5358860 -
tggttctgtttatatgctggat

SEQ ID NO: 120318 - DNA, 22 bp, Artificial Sequence
  Synthetic oligonucleotide; TTT chr11 5358859 5358880 5358864 5358859 -
ggttctgtttatatgctggatt

SEQ ID NO: 120319 - DNA, 22 bp, Artificial Sequence
  Synthetic oligonucleotide; TTG chr11 5358858 5358879 5358863 5358858 -
gttctgtttatatgctggatta

SEQ ID NO: 120320 - DNA, 22 bp, Artificial Sequence
  Synthetic oligonucleotide; TTC chr11 5358854 5358875 5358859 5358854 -
tgtttatatgctggattacatt

SEQ ID NO: 120321 - DNA, 22 bp, Artificial Sequence
  Synthetic oligonucleotide; CTG chr11 5358852 5358873 5358857 5358852 -
tttatatgctggattacattta

SEQ ID NO: 120322 - DNA, 22 bp, Artificial Sequence
  Synthetic oligonucleotide; TTT chr11 5358849 5358870 5358854 5358849 -
atatgctggattacatttattg

SEQ ID NO: 120323 - DNA, 22 bp, Artificial Sequence
  Synthetic oligonucleotide; TTA chr11 5358848 5358869 5358853 5358848 -
tatgctggattacatttattga

SEQ ID NO: 120324 - DNA, 22 bp, Artificial Sequence
  Synthetic oligonucleotide; CTG chr11 5358841 5358862 5358846 5358841 -
gattacatttattgatttgcat

SEQ ID NO: 120325 - DNA, 22 bp, Artificial Sequence
  Synthetic oligonucleotide; TTA chr11 5358836 5358857 5358841 5358836 -
catttattgatttgcatatgtt

SEQ ID NO: 120326 - DNA, 22 bp, Artificial Sequence
  Synthetic oligonucleotide; TTT chr11 5358831 5358852 5358836 5358831 -
attgatttgcatatgttgaacc

SEQ ID NO: 120327 - DNA, 22 bp, Artificial Sequence
  Synthetic oligonucleotide; TTA chr11 5358830 5358851 5358835 5358830 -
ttgatttgcatatgttgaacca

SEQ ID NO: 120328 - DNA, 22 bp, Artificial Sequence
  Synthetic oligonucleotide; TTG chr11 5358827 5358848 5358832 5358827 -
atttgcatatgttgaaccagcc

SEQ ID NO: 120329 - DNA, 22 bp, Artificial Sequence
  Synthetic oligonucleotide; TTT chr11 5358823 5358844 5358828 5358823 -
gcatatgttgaaccagccttgc

SEQ ID NO: 120330 - DNA, 22 bp, Artificial Sequence
  Synthetic oligonucleotide; TTG chr11 5358822 5358843 5358827 5358822 -
catatgttgaaccagccttgca

SEQ ID NO: 120331 - DNA, 22 bp, Artificial Sequence
  Synthetic oligonucleotide; TTG chr11 5358813 5358834 5358818 5358813 -
aaccagccttgcatcccaggga

SEQ ID NO: 120332 - DNA, 22 bp, Artificial Sequence
  Synthetic oligonucleotide; CTT chr11 5358803 5358824 5358808 5358803 -
gcatcccagggatgaagcccac

SEQ ID NO: 120333 - DNA, 22 bp, Artificial Sequence
  Synthetic oligonucleotide; TTG chr11 5358802 5358823 5358807 5358802 -
catcccagggatgaagcccact

SEQ ID NO: 120334 - DNA, 22 bp, Artificial Sequence
  Synthetic oligonucleotide; CTT chr11 5358779 5358800 5358784 5358779 -
gatcatggtggataagcttttg

SEQ ID NO: 120335 - DNA, 22 bp, Artificial Sequence
  Synthetic oligonucleotide; TTG chr11 5358778 5358799 5358783 5358778 -
atcatggtggataagcttttgg

SEQ ID NO: 120336 - DNA, 22 bp, Artificial Sequence
  Synthetic oligonucleotide; CTT chr11 5358760 5358781 5358765 5358760 -
ttggatgtgctgctggatttgc

SEQ ID NO: 120337 - DNA, 22 bp, Artificial Sequence
  Synthetic oligonucleotide; TTT chr11 5358759 5358780 5358764 5358759 -
tggatgtgctgctggatttgct

SEQ ID NO: 120338 - DNA, 22 bp, Artificial Sequence
  Synthetic oligonucleotide; TTT chr11 5358758 5358779 5358763 5358758 -
ggatgtgctgctggatttgctt

SEQ ID NO: 120339 - DNA, 22 bp, Artificial Sequence
  Synthetic oligonucleotide; TTG chr11 5358757 5358778 5358762 5358757 -
gatgtgctgctggatttgcttt

SEQ ID NO: 120340 - DNA, 22 bp, Artificial Sequence
  Synthetic oligonucleotide; CTG chr11 5358748 5358769 5358753 5358748 -
ctggatttgctttgccagtatt

SEQ ID NO: 120341 - DNA, 22 bp, Artificial Sequence
  Synthetic oligonucleotide; CTG chr11 5358745 5358766 5358750 5358745 -
gatttgctttgccagtatttta

SEQ ID NO: 120342 - DNA, 22 bp, Artificial Sequence
  Synthetic oligonucleotide; TTT chr11 5358740 5358761 5358745 5358740 -
gctttgccagtattttattgag

SEQ ID NO: 120343 - DNA, 22 bp, Artificial Sequence
  Synthetic oligonucleotide; TTG chr11 5358739 5358760 5358744 5358739 -
ctttgccagtattttattgagg

SEQ ID NO: 120344 - DNA, 22 bp, Artificial Sequence
  Synthetic oligonucleotide; CTT chr11 5358736 5358757 5358741 5358736 -
tgccagtattttattgaggttt

SEQ ID NO: 120345 - DNA, 22 bp, Artificial Sequence
  Synthetic oligonucleotide; TTT chr11 5358735 5358756 5358740 5358735 -
gccagtattttattgaggtttt

SEQ ID NO: 120346 - DNA, 22 bp, Artificial Sequence
  Synthetic oligonucleotide; TTG chr11 5358734 5358755 5358739 5358734 -
ccagtattttattgaggttttt

SEQ ID NO: 120347 - DNA, 22 bp, Artificial Sequence
  Synthetic oligonucleotide; TTT chr11 5358725 5358746 5358730 5358725 -
tattgaggttttttgcatcgat

SEQ ID NO: 120348 - DNA, 22 bp, Artificial Sequence
  Synthetic oligonucleotide; TTT chr11 5358724 5358745 5358729 5358724 -
attgaggttttttgcatcgatg

SEQ ID NO: 120349 - DNA, 22 bp, Artificial Sequence
  Synthetic oligonucleotide; TTA chr11 5358723 5358744 5358728 5358723 -
ttgaggttttttgcatcgatgt

SEQ ID NO: 120350 - DNA, 22 bp, Artificial Sequence
  Synthetic oligonucleotide; TTG chr11 5358720 5358741 5358725 5358720 -
aggttttttgcatcgatgtcca

SEQ ID NO: 120351 - DNA, 22 bp, Artificial Sequence
  Synthetic oligonucleotide; TTT chr11 5358714 5358735 5358719 5358714 -
tttgcatcgatgtccatcaggg

SEQ ID NO: 120352 - DNA, 22 bp, Artificial Sequence
  Synthetic oligonucleotide; TTT chr11 5358713 5358734 5358718 5358713 -
ttgcatcgatgtccatcaggga

SEQ ID NO: 120353 - DNA, 22 bp, Artificial Sequence
  Synthetic oligonucleotide; TTT chr11 5358712 5358733 5358717 5358712 -
tgcatcgatgtccatcagggat

SEQ ID NO: 120354 - DNA, 22 bp, Artificial Sequence
  Synthetic oligonucleotide; TTT chr11 5358711 5358732 5358716 5358711 -
gcatcgatgtccatcagggata

SEQ ID NO: 120355 - DNA, 22 bp, Artificial Sequence
  Synthetic oligonucleotide; TTG chr11 5358710 5358731 5358715 5358710 -
catcgatgtccatcagggatat

SEQ ID NO: 120356 - DNA, 22 bp, Artificial Sequence
  Synthetic oligonucleotide; TTG chr11 5358686 5358707 5358691 5358686 -
gtctaaaattctctttttttgt

SEQ ID NO: 120357 - DNA, 22 bp, Artificial Sequence
  Synthetic oligonucleotide; CTA chr11 5358681 5358702 5358686 5358681 -
aaattctctttttttgttgtgt

SEQ ID NO: 120358 - DNA, 22 bp, Artificial Sequence
  Synthetic oligonucleotide; TTC chr11 5358675 5358696 5358680 5358675 -
tctttttttgttgtgtctctgc

SEQ ID NO: 120359 - DNA, 22 bp, Artificial Sequence
  Synthetic oligonucleotide; CTC chr11 5358673 5358694 5358678 5358673 -
tttttttgttgtgtctctgccc

SEQ ID NO: 120360 - DNA, 22 bp, Artificial Sequence
  Synthetic oligonucleotide; CTT chr11 5358671 5358692 5358676 5358671 -
tttttgttgtgtctctgcccgg

SEQ ID NO: 120361 - DNA, 22 bp, Artificial Sequence
  Synthetic oligonucleotide; TTT chr11 5358670 5358691 5358675 5358670 -
ttttgttgtgtctctgcccggc

SEQ ID NO: 120362 - DNA, 22 bp, Artificial Sequence
  Synthetic oligonucleotide; TTT chr11 5358669 5358690 5358674 5358669 -
tttgttgtgtctctgcccggct

SEQ ID NO: 120363 - DNA, 22 bp, Artificial Sequence
  Synthetic oligonucleotide; TTT chr11 5358668 5358689 5358673 5358668 -
ttgttgtgtctctgcccggctt

SEQ ID NO: 120364 - DNA, 22 bp, Artificial Sequence
  Synthetic oligonucleotide; TTT chr11 5358667 5358688 5358672 5358667 -
tgttgtgtctctgcccggcttt

SEQ ID NO: 120365 - DNA, 22 bp, Artificial Sequence
  Synthetic oligonucleotide; TTT chr11 5358666 5358687 5358671 5358666 -
gttgtgtctctgcccggctttg

SEQ ID NO: 120366 - DNA, 22 bp, Artificial Sequence
  Synthetic oligonucleotide; TTG chr11 5358665 5358686 5358670 5358665 -
ttgtgtctctgcccggctttgg

SEQ ID NO: 120367 - DNA, 22 bp, Artificial Sequence
  Synthetic oligonucleotide; TTG chr11 5358662 5358683 5358667 5358662 -
tgtctctgcccggctttggtat

SEQ ID NO: 120368 - DNA, 22 bp, Artificial Sequence
  Synthetic oligonucleotide; CTC chr11 5358656 5358677 5358661 5358656 -
tgcccggctttggtatcaggat

SEQ ID NO: 120369 - DNA, 22 bp, Artificial Sequence
  Synthetic oligonucleotide; CTG chr11 5358654 5358675 5358659 5358654 -
cccggctttggtatcaggatga

SEQ ID NO: 120370 - DNA, 22 bp, Artificial Sequence
  Synthetic oligonucleotide; CTT chr11 5358646 5358667 5358651 5358646 -
tggtatcaggatgatgctggcc

SEQ ID NO: 120371 - DNA, 22 bp, Artificial Sequence
  Synthetic oligonucleotide; TTT chr11 5358645 5358666 5358650 5358645 -
ggtatcaggatgatgctggcct

SEQ ID NO: 120372 - DNA, 22 bp, Artificial Sequence
  Synthetic oligonucleotide; TTG chr11 5358644 5358665 5358649 5358644 -
gtatcaggatgatgctggcctc

SEQ ID NO: 120373 - DNA, 22 bp, Artificial Sequence
  Synthetic oligonucleotide; CTG chr11 5358627 5358648 5358632 5358627 -
gcctcataaaatgagttaggga

SEQ ID NO: 120374 - DNA, 22 bp, Artificial Sequence
  Synthetic oligonucleotide; CTC chr11 5358622 5358643 5358627 5358622 -
ataaaatgagttagggaggatt

SEQ ID NO: 120375 - DNA, 22 bp, Artificial Sequence
  Synthetic oligonucleotide; TTA chr11 5358609 5358630 5358614 5358609 -
gggaggattccctcttttacta

SEQ ID NO: 120376 - DNA, 22 bp, Artificial Sequence
  Synthetic oligonucleotide; TTC chr11 5358599 5358620 5358604 5358599 -
cctcttttactattgattcgaa

SEQ ID NO: 120377 - DNA, 22 bp, Artificial Sequence
  Synthetic oligonucleotide; CTC chr11 5358595 5358616 5358600 5358595 -
ttttactattgattcgaatagt

SEQ ID NO: 120378 - DNA, 22 bp, Artificial Sequence
  Synthetic oligonucleotide; CTT chr11 5358593 5358614 5358598 5358593 -
ttactattgattcgaatagttt

SEQ ID NO: 120379 - DNA, 22 bp, Artificial Sequence
  Synthetic oligonucleotide; TTT chr11 5358592 5358613 5358597 5358592 -
tactattgattcgaatagtttc

SEQ ID NO: 120380 - DNA, 22 bp, Artificial Sequence
  Synthetic oligonucleotide; TTT chr11 5358591 5358612 5358596 5358591 -
actattgattcgaatagtttca

SEQ ID NO: 120381 - DNA, 22 bp, Artificial Sequence
  Synthetic oligonucleotide; TTA chr11 5358590 5358611 5358595 5358590 -
ctattgattcgaatagtttcag

SEQ ID NO: 120382 - DNA, 22 bp, Artificial Sequence
  Synthetic oligonucleotide; CTA chr11 5358587 5358608 5358592 5358587 -
ttgattcgaatagtttcagagg

SEQ ID NO: 120383 - DNA, 22 bp, Artificial Sequence
  Synthetic oligonucleotide; TTG chr11 5358584 5358605 5358589 5358584 -
attcgaatagtttcagagggaa

SEQ ID NO: 120384 - DNA, 22 bp, Artificial Sequence
  Synthetic oligonucleotide; TTC chr11 5358580 5358601 5358585 5358580 -
gaatagtttcagagggaatggt

SEQ ID NO: 120385 - DNA, 22 bp, Artificial Sequence
  Synthetic oligonucleotide; TTT chr11 5358571 5358592 5358576 5358571 -
cagagggaatggtaccagctcc

SEQ ID NO: 120386 - DNA, 22 bp, Artificial Sequence
  Synthetic oligonucleotide; TTC chr11 5358570 5358591 5358575 5358570 -
agagggaatggtaccagctcct

SEQ ID NO: 120387 - DNA, 22 bp, Artificial Sequence
  Synthetic oligonucleotide; CTC chr11 5358550 5358571 5358555 5358550 -
ctccttgtacctctggtagaat

SEQ ID NO: 120388 - DNA, 22 bp, Artificial Sequence
  Synthetic oligonucleotide; CTC chr11 5358547 5358568 5358552 5358547 -
cttgtacctctggtagaatttg

SEQ ID NO: 120389 - DNA, 22 bp, Artificial Sequence
  Synthetic oligonucleotide; CTT chr11 5358544 5358565 5358549 5358544 -
gtacctctggtagaatttggct

SEQ ID NO: 120390 - DNA, 22 bp, Artificial Sequence
  Synthetic oligonucleotide; TTG chr11 5358543 5358564 5358548 5358543 -
tacctctggtagaatttggctg

SEQ ID NO: 120391 - DNA, 22 bp, Artificial Sequence
  Synthetic oligonucleotide; CTC chr11 5358537 5358558 5358542 5358537 -
tggtagaatttggctgtgactc

SEQ ID NO: 120392 - DNA, 22 bp, Artificial Sequence
  Synthetic oligonucleotide; CTG chr11 5358535 5358556 5358540 5358535 -
gtagaatttggctgtgactcca

SEQ ID NO: 120393 - DNA, 22 bp, Artificial Sequence
  Synthetic oligonucleotide; TTT chr11 5358526 5358547 5358531 5358526 -
ggctgtgactccatctggtcct

SEQ ID NO: 120394 - DNA, 22 bp, Artificial Sequence
  Synthetic oligonucleotide; TTG chr11 5358525 5358546 5358530 5358525 -
gctgtgactccatctggtcctg

SEQ ID NO: 120395 - DNA, 22 bp, Artificial Sequence
  Synthetic oligonucleotide; CTG chr11 5358521 5358542 5358526 5358521 -
tgactccatctggtcctggact

SEQ ID NO: 120396 - DNA, 22 bp, Artificial Sequence
  Synthetic oligonucleotide; CTC chr11 5358515 5358536 5358520 5358515 -
catctggtcctggactgttttt

SEQ ID NO: 120397 - DNA, 22 bp, Artificial Sequence
  Synthetic oligonucleotide; CTG chr11 5358509 5358530 5358514 5358509 -
gtcctggactgtttttggttgg

SEQ ID NO: 120398 - DNA, 22 bp, Artificial Sequence
  Synthetic oligonucleotide; CTG chr11 5358503 5358524 5358508 5358503 -
gactgtttttggttggtaagct

SEQ ID NO: 120399 - DNA, 22 bp, Artificial Sequence
  Synthetic oligonucleotide; CTG chr11 5358498 5358519 5358503 5358498 -
tttttggttggtaagctattaa

SEQ ID NO: 120400 - DNA, 22 bp, Artificial Sequence
  Synthetic oligonucleotide; TTT chr11 5358495 5358516 5358500 5358495 -
ttggttggtaagctattaatta

SEQ ID NO: 120401 - DNA, 22 bp, Artificial Sequence
  Synthetic oligonucleotide; TTT chr11 5358494 5358515 5358499 5358494 -
tggttggtaagctattaattat

SEQ ID NO: 120402 - DNA, 22 bp, Artificial Sequence
  Synthetic oligonucleotide; TTT chr11 5358493 5358514 5358498 5358493 -
ggttggtaagctattaattatt

SEQ ID NO: 120403 - DNA, 22 bp, Artificial Sequence
  Synthetic oligonucleotide; TTG chr11 5358492 5358513 5358497 5358492 -
gttggtaagctattaattattg

SEQ ID NO: 120404 - DNA, 22 bp, Artificial Sequence
  Synthetic oligonucleotide; TTG chr11 5358488 5358509 5358493 5358488 -
gtaagctattaattattgcctc

SEQ ID NO: 120405 - DNA, 22 bp, Artificial Sequence
  Synthetic oligonucleotide; CTA chr11 5358480 5358501 5358485 5358480 -
ttaattattgcctcaatttcag

SEQ ID NO: 120406 - DNA, 22 bp, Artificial Sequence
  Synthetic oligonucleotide; TTA chr11 5358477 5358498 5358482 5358477 -
attattgcctcaatttcagatc

SEQ ID NO: 120407 - DNA, 22 bp, Artificial Sequence
  Synthetic oligonucleotide; TTA chr11 5358473 5358494 5358478 5358473 -
ttgcctcaatttcagatcctgt

SEQ ID NO: 120408 - DNA, 22 bp, Artificial Sequence
  Synthetic oligonucleotide; TTG chr11 5358470 5358491 5358475 5358470 -
cctcaatttcagatcctgttat

SEQ ID NO: 120409 - DNA, 22 bp, Artificial Sequence
  Synthetic oligonucleotide; CTC chr11 5358466 5358487 5358471 5358466 -
aatttcagatcctgttattggt

SEQ ID NO: 120410 - DNA, 22 bp, Artificial Sequence
  Synthetic oligonucleotide; TTT chr11 5358461 5358482 5358466 5358461 -
cagatcctgttattggtctatt

SEQ ID NO: 120411 - DNA, 22 bp, Artificial Sequence
  Synthetic oligonucleotide; TTC chr11 5358460 5358481 5358465 5358460 -
agatcctgttattggtctattc

SEQ ID NO: 120412 - DNA, 22 bp, Artificial Sequence
  Synthetic oligonucleotide; CTG chr11 5358452 5358473 5358457 5358452 -
ttattggtctattcagagattc

SEQ ID NO: 120413 - DNA, 22 bp, Artificial Sequence
  Synthetic oligonucleotide; TTA chr11 5358449 5358470 5358454 5358449 -
ttggtctattcagagattcaac

SEQ ID NO: 120414 - DNA, 22 bp, Artificial Sequence
  Synthetic oligonucleotide; TTG chr11 5358446 5358467 5358451 5358446 -
gtctattcagagattcaacttc

SEQ ID NO: 120415 - DNA, 22 bp, Artificial Sequence
  Synthetic oligonucleotide; CTA chr11 5358441 5358462 5358446 5358441 -
ttcagagattcaacttcttcct

SEQ ID NO: 120416 - DNA, 22 bp, Artificial Sequence
  Synthetic oligonucleotide; TTC chr11 5358438 5358459 5358443 5358438 -
agagattcaacttcttcctggt

SEQ ID NO: 120417 - DNA, 22 bp, Artificial Sequence
  Synthetic oligonucleotide; TTC chr11 5358430 5358451 5358435 5358430 -
aacttcttcctggtttagtctt

SEQ ID NO: 120418 - DNA, 22 bp, Artificial Sequence
  Synthetic oligonucleotide; CTT chr11 5358425 5358446 5358430 5358425 -
cttcctggtttagtcttgggag

SEQ ID NO: 120419 - DNA, 22 bp, Artificial Sequence
  Synthetic oligonucleotide; TTC chr11 5358424 5358445 5358429 5358424 -
ttcctggtttagtcttgggagg

SEQ ID NO: 120420 - DNA, 22 bp, Artificial Sequence
  Synthetic oligonucleotide; CTT chr11 5358422 5358443 5358427 5358422 -
cctggtttagtcttgggagggt

SEQ ID NO: 120421 - DNA, 22 bp, Artificial Sequence
  Synthetic oligonucleotide; TTC chr11 5358421 5358442 5358426 5358421 -
ctggtttagtcttgggagggtg

SEQ ID NO: 120422 - DNA, 22 bp, Artificial Sequence
  Synthetic oligonucleotide; CTG chr11 5358418 5358439 5358423 5358418 -
gtttagtcttgggagggtgtat

SEQ ID NO: 120423 - DNA, 22 bp, Artificial Sequence
  Synthetic oligonucleotide; TTT chr11 5358414 5358435 5358419 5358414 -
agtcttgggagggtgtatgtgt

SEQ ID NO: 120424 - DNA, 22 bp, Artificial Sequence
  Synthetic oligonucleotide; TTA chr11 5358413 5358434 5358418 5358413 -
gtcttgggagggtgtatgtgtc

SEQ ID NO: 120425 - DNA, 22 bp, Artificial Sequence
  Synthetic oligonucleotide; CTT chr11 5358408 5358429 5358413 5358408 -
gggagggtgtatgtgtcaagga

SEQ ID NO: 120426 - DNA, 22 bp, Artificial Sequence
  Synthetic oligonucleotide; TTG chr11 5358407 5358428 5358412 5358407 -
ggagggtgtatgtgtcaaggaa

SEQ ID NO: 120427 - DNA, 22 bp, Artificial Sequence
  Synthetic oligonucleotide; TTT chr11 5358382 5358403 5358387 5358382 -
atccatttcttctagattttct

SEQ ID NO: 120428 - DNA, 22 bp, Artificial Sequence
  Synthetic oligonucleotide; TTA chr11 5358381 5358402 5358386 5358381 -
tccatttcttctagattttcta

SEQ ID NO: 120429 - DNA, 22 bp, Artificial Sequence
  Synthetic oligonucleotide; TTT chr11 5358374 5358395 5358379 5358374 -
cttctagattttctagtttatt

SEQ ID NO: 120430 - DNA, 22 bp, Artificial Sequence
  Synthetic oligonucleotide; TTC chr11 5358373 5358394 5358378 5358373 -
ttctagattttctagtttattt

SEQ ID NO: 120431 - DNA, 22 bp, Artificial Sequence
  Synthetic oligonucleotide; CTT chr11 5358371 5358392 5358376 5358371 -
ctagattttctagtttatttgt

SEQ ID NO: 120432 - DNA, 22 bp, Artificial Sequence
  Synthetic oligonucleotide; TTC chr11 5358370 5358391 5358375 5358370 -
tagattttctagtttatttgtg

SEQ ID NO: 120433 - DNA, 22 bp, Artificial Sequence
  Synthetic oligonucleotide; CTA chr11 5358368 5358389 5358373 5358368 -
gattttctagtttatttgtgta

SEQ ID NO: 120434 - DNA, 22 bp, Artificial Sequence
  Synthetic oligonucleotide; TTT chr11 5358363 5358384 5358368 5358363 -
tctagtttatttgtgtagaggt

SEQ ID NO: 120435 - DNA, 22 bp, Artificial Sequence
  Synthetic oligonucleotide; TTT chr11 5358362 5358383 5358367 5358362 -
ctagtttatttgtgtagaggtg

SEQ ID NO: 120436 - DNA, 22 bp, Artificial Sequence
  Synthetic oligonucleotide; TTC chr11 5358361 5358382 5358366 5358361 -
tagtttatttgtgtagaggtgt

SEQ ID NO: 120437 - DNA, 22 bp, Artificial Sequence
  Synthetic oligonucleotide; CTA chr11 5358359 5358380 5358364 5358359 -
gtttatttgtgtagaggtgttt

SEQ ID NO: 120438 - DNA, 22 bp, Artificial Sequence
  Synthetic oligonucleotide; TTT chr11 5358355 5358376 5358360 5358355 -
atttgtgtagaggtgtttatag

SEQ ID NO: 120439 - DNA, 22 bp, Artificial Sequence
  Synthetic oligonucleotide; TTA chr11 5358354 5358375 5358359 5358354 -
tttgtgtagaggtgtttatagt

SEQ ID NO: 120440 - DNA, 22 bp, Artificial Sequence
  Synthetic oligonucleotide; TTT chr11 5358351 5358372 5358356 5358351 -
gtgtagaggtgtttatagtatt

SEQ ID NO: 120441 - DNA, 22 bp, Artificial Sequence
  Synthetic oligonucleotide; TTG chr11 5358350 5358371 5358355 5358350 -
tgtagaggtgtttatagtattc

SEQ ID NO: 120442 - DNA, 22 bp, Artificial Sequence
  Synthetic oligonucleotide; TTT chr11 5358337 5358358 5358342 5358337 -
atagtattctctgatggtggtt

SEQ ID NO: 120443 - DNA, 22 bp, Artificial Sequence
  Synthetic oligonucleotide; TTA chr11 5358336 5358357 5358341 5358336 -
tagtattctctgatggtggttt

SEQ ID NO: 120444 - DNA, 22 bp, Artificial Sequence
  Synthetic oligonucleotide; TTC chr11 5358328 5358349 5358333 5358328 -
tctgatggtggtttgtatttct

SEQ ID NO: 120445 - DNA, 22 bp, Artificial Sequence
  Synthetic oligonucleotide; CTC chr11 5358326 5358347 5358331 5358326 -
tgatggtggtttgtatttctgt

SEQ ID NO: 120446 - DNA, 22 bp, Artificial Sequence
  Synthetic oligonucleotide; CTG chr11 5358324 5358345 5358329 5358324 -
atggtggtttgtatttctgtgg

SEQ ID NO: 120447 - DNA, 22 bp, Artificial Sequence
  Synthetic oligonucleotide; TTT chr11 5358314 5358335 5358319 5358314 -
gtatttctgtgggatcggtggt

SEQ ID NO: 120448 - DNA, 22 bp, Artificial Sequence
  Synthetic oligonucleotide; TTG chr11 5358313 5358334 5358318 5358313 -
tatttctgtgggatcggtggtg

SEQ ID NO: 120449 - DNA, 22 bp, Artificial Sequence
  Synthetic oligonucleotide; TTT chr11 5358308 5358329 5358313 5358308 -
ctgtgggatcggtggtgatata

SEQ ID NO: 120450 - DNA, 22 bp, Artificial Sequence
  Synthetic oligonucleotide; TTC chr11 5358307 5358328 5358312 5358307 -
tgtgggatcggtggtgatatac

SEQ ID NO: 120451 - DNA, 22 bp, Artificial Sequence
  Synthetic oligonucleotide; CTG chr11 5358305 5358326 5358310 5358305 -
tgggatcggtggtgatataccc

SEQ ID NO: 120452 - DNA, 22 bp, Artificial Sequence
  Synthetic oligonucleotide; CTT chr11 5358281 5358302 5358286 5358281 -
tatcattttttattgcatctat

SEQ ID NO: 120453 - DNA, 22 bp, Artificial Sequence
  Synthetic oligonucleotide; TTT chr11 5358280 5358301 5358285 5358280 -
atcattttttattgcatctatt

SEQ ID NO: 120454 - DNA, 22 bp, Artificial Sequence
  Synthetic oligonucleotide; TTA chr11 5358279 5358300 5358284 5358279 -
tcattttttattgcatctattt

SEQ ID NO: 120455 - DNA, 22 bp, Artificial Sequence
  Synthetic oligonucleotide; TTT chr11 5358273 5358294 5358278 5358273 -
tttattgcatctatttgattct

SEQ ID NO: 120456 - DNA, 22 bp, Artificial Sequence
  Synthetic oligonucleotide; TTT chr11 5358272 5358293 5358277 5358272 -
ttattgcatctatttgattctt

SEQ ID NO: 120457 - DNA, 22 bp, Artificial Sequence
  Synthetic oligonucleotide; TTT chr11 5358271 5358292 5358276 5358271 -
tattgcatctatttgattcttc

SEQ ID NO: 120458 - DNA, 22 bp, Artificial Sequence
  Synthetic oligonucleotide; TTT chr11 5358270 5358291 5358275 5358270 -
attgcatctatttgattcttct

SEQ ID NO: 120459 - DNA, 22 bp, Artificial Sequence
  Synthetic oligonucleotide; TTA chr11 5358269 5358290 5358274 5358269 -
ttgcatctatttgattcttctc

SEQ ID NO: 120460 - DNA, 22 bp, Artificial Sequence
  Synthetic oligonucleotide; TTG chr11 5358266 5358287 5358271 5358266 -
catctatttgattcttctctct

SEQ ID NO: 120461 - DNA, 22 bp, Artificial Sequence
  Synthetic oligonucleotide; CTA chr11 5358260 5358281 5358265 5358260 -
tttgattcttctctcttttctt

SEQ ID NO: 120462 - DNA, 22 bp, Artificial Sequence
  Synthetic oligonucleotide; TTT chr11 5358257 5358278 5358262 5358257 -
gattcttctctcttttcttctt

SEQ ID NO: 120463 - DNA, 22 bp, Artificial Sequence
  Synthetic oligonucleotide; TTG chr11 5358256 5358277 5358261 5358256 -
attcttctctcttttcttcttt

SEQ ID NO: 120464 - DNA, 22 bp, Artificial Sequence
  Synthetic oligonucleotide; TTC chr11 5358252 5358273 5358257 5358252 -
ttctctcttttcttctttatta

SEQ ID NO: 120465 - DNA, 22 bp, Artificial Sequence
  Synthetic oligonucleotide; CTT chr11 5358250 5358271 5358255 5358250 -
ctctcttttcttctttattagt

SEQ ID NO: 120466 - DNA, 22 bp, Artificial Sequence
  Synthetic oligonucleotide; TTC chr11 5358249 5358270 5358254 5358249 -
tctcttttcttctttattagtc

SEQ ID NO: 120467 - DNA, 22 bp, Artificial Sequence
  Synthetic oligonucleotide; CTC chr11 5358247 5358268 5358252 5358247 -
tcttttcttctttattagtctt

SEQ ID NO: 120468 - DNA, 22 bp, Artificial Sequence
  Synthetic oligonucleotide; CTC chr11 5358245 5358266 5358250 5358245 -
ttttcttctttattagtcttgc

SEQ ID NO: 120469 - DNA, 22 bp, Artificial Sequence
  Synthetic oligonucleotide; CTT chr11 5358243 5358264 5358248 5358243 -
ttcttctttattagtcttgcta

SEQ ID NO: 120470 - DNA, 22 bp, Artificial Sequence
  Synthetic oligonucleotide; TTT chr11 5358242 5358263 5358247 5358242 -
tcttctttattagtcttgctag

SEQ ID NO: 120471 - DNA, 22 bp, Artificial Sequence
  Synthetic oligonucleotide; TTT chr11 5358241 5358262 5358246 5358241 -
cttctttattagtcttgctagc

SEQ ID NO: 120472 - DNA, 22 bp, Artificial Sequence
  Synthetic oligonucleotide; TTC chr11 5358240 5358261 5358245 5358240 -
ttctttattagtcttgctagca

SEQ ID NO: 120473 - DNA, 22 bp, Artificial Sequence
  Synthetic oligonucleotide; CTT chr11 5358238 5358259 5358243 5358238 -
ctttattagtcttgctagcagt

SEQ ID NO: 120474 - DNA, 22 bp, Artificial Sequence
  Synthetic oligonucleotide; TTC chr11 5358237 5358258 5358242 5358237 -
tttattagtcttgctagcagtc

SEQ ID NO: 120475 - DNA, 22 bp, Artificial Sequence
  Synthetic oligonucleotide; CTT chr11 5358235 5358256 5358240 5358235 -
tattagtcttgctagcagtcta

SEQ ID NO: 120476 - DNA, 22 bp, Artificial Sequence
  Synthetic oligonucleotide; TTT chr11 5358234 5358255 5358239 5358234 -
attagtcttgctagcagtctat

SEQ ID NO: 120477 - DNA, 22 bp, Artificial Sequence
  Synthetic oligonucleotide; TTA chr11 5358233 5358254 5358238 5358233 -
ttagtcttgctagcagtctatc

SEQ ID NO: 120478 - DNA, 22 bp, Artificial Sequence
  Synthetic oligonucleotide; TTA chr11 5358230 5358251 5358235 5358230 -
gtcttgctagcagtctatcaat

SEQ ID NO: 120479 - DNA, 22 bp, Artificial Sequence
  Synthetic oligonucleotide; CTT chr11 5358225 5358246 5358230 5358225 -
gctagcagtctatcaattttgt

SEQ ID NO: 120480 - DNA, 22 bp, Artificial Sequence
  Synthetic oligonucleotide; TTG chr11 5358224 5358245 5358229 5358224 -
ctagcagtctatcaattttgtt

SEQ ID NO: 120481 - DNA, 22 bp, Artificial Sequence
  Synthetic oligonucleotide; CTA chr11 5358221 5358242 5358226 5358221 -
gcagtctatcaattttgttgat

SEQ ID NO: 120482 - DNA, 22 bp, Artificial Sequence
  Synthetic oligonucleotide; CTA chr11 5358213 5358234 5358218 5358213 -
tcaattttgttgatctttttga

SEQ ID NO: 120483 - DNA, 22 bp, Artificial Sequence
  Synthetic oligonucleotide; TTT chr11 5358206 5358227 5358211 5358206 -
tgttgatctttttgaaaaacca

SEQ ID NO: 120484 - DNA, 22 bp, Artificial Sequence
  Synthetic oligonucleotide; TTT chr11 5358205 5358226 5358210 5358205 -
gttgatctttttgaaaaaccag

SEQ ID NO: 120485 - DNA, 22 bp, Artificial Sequence
  Synthetic oligonucleotide; TTG chr11 5358204 5358225 5358209 5358204 -
ttgatctttttgaaaaaccagc

SEQ ID NO: 120486 - DNA, 22 bp, Artificial Sequence
  Synthetic oligonucleotide; TTG chr11 5358201 5358222 5358206 5358201 -
atctttttgaaaaaccagcttc

SEQ ID NO: 120487 - DNA, 22 bp, Artificial Sequence
  Synthetic oligonucleotide; CTT chr11 5358196 5358217 5358201 5358196 -
tttgaaaaaccagcttctggat

SEQ ID NO: 120488 - DNA, 22 bp, Artificial Sequence
  Synthetic oligonucleotide; TTT chr11 5358195 5358216 5358200 5358195 -
ttgaaaaaccagcttctggatt

SEQ ID NO: 120489 - DNA, 22 bp, Artificial Sequence
  Synthetic oligonucleotide; TTT chr11 5358194 5358215 5358199 5358194 -
tgaaaaaccagcttctggattc

SEQ ID NO: 120490 - DNA, 22 bp, Artificial Sequence
  Synthetic oligonucleotide; TTT chr11 5358193 5358214 5358198 5358193 -
gaaaaaccagcttctggattca

SEQ ID NO: 120491 - DNA, 22 bp, Artificial Sequence
  Synthetic oligonucleotide; TTG chr11 5358192 5358213 5358197 5358192 -
aaaaaccagcttctggattcat

SEQ ID NO: 120492 - DNA, 22 bp, Artificial Sequence
  Synthetic oligonucleotide; CTT chr11 5358180 5358201 5358185 5358180 -
ctggattcattgattttttgaa

SEQ ID NO: 120493 - DNA, 22 bp, Artificial Sequence
  Synthetic oligonucleotide; TTC chr11 5358179 5358200 5358184 5358179 -
tggattcattgattttttgaag

SEQ ID NO: 120494 - DNA, 22 bp, Artificial Sequence
  Synthetic oligonucleotide; CTG chr11 5358177 5358198 5358182 5358177 -
gattcattgattttttgaaggg

SEQ ID NO: 120495 - DNA, 22 bp, Artificial Sequence
  Synthetic oligonucleotide; TTC chr11 5358172 5358193 5358177 5358172 -
attgattttttgaagggttttt

SEQ ID NO: 120496 - DNA, 22 bp, Artificial Sequence
  Synthetic oligonucleotide; TTG chr11 5358168 5358189 5358173 5358168 -
attttttgaagggtttttttgt

SEQ ID NO: 120497 - DNA, 22 bp, Artificial Sequence
  Synthetic oligonucleotide; TTT chr11 5358164 5358185 5358169 5358164 -
tttgaagggtttttttgtgtct

SEQ ID NO: 120498 - DNA, 22 bp, Artificial Sequence
  Synthetic oligonucleotide; TTT chr11 5358163 5358184 5358168 5358163 -
ttgaagggtttttttgtgtctc

SEQ ID NO: 120499 - DNA, 22 bp, Artificial Sequence
  Synthetic oligonucleotide; TTT chr11 5358162 5358183 5358167 5358162 -
tgaagggtttttttgtgtctct

SEQ ID NO: 120500 - DNA, 22 bp, Artificial Sequence
  Synthetic oligonucleotide; TTT chr11 5358161 5358182 5358166 5358161 -
gaagggtttttttgtgtctcta

SEQ ID NO: 120501 - DNA, 22 bp, Artificial Sequence
  Synthetic oligonucleotide; TTG chr11 5358160 5358181 5358165 5358160 -
aagggtttttttgtgtctctat

SEQ ID NO: 120502 - DNA, 22 bp, Artificial Sequence
  Synthetic oligonucleotide; TTT chr11 5358152 5358173 5358157 5358152 -
ttttgtgtctctatttccttca

SEQ ID NO: 120503 - DNA, 22 bp, Artificial Sequence
  Synthetic oligonucleotide; TTT chr11 5358151 5358172 5358156 5358151 -
tttgtgtctctatttccttcag

SEQ ID NO: 120504 - DNA, 22 bp, Artificial Sequence
  Synthetic oligonucleotide; TTT chr11 5358150 5358171 5358155 5358150 -
ttgtgtctctatttccttcagt

SEQ ID NO: 120505 - DNA, 22 bp, Artificial Sequence
  Synthetic oligonucleotide; TTT chr11 5358149 5358170 5358154 5358149 -
tgtgtctctatttccttcagtt

SEQ ID NO: 120506 - DNA, 22 bp, Artificial Sequence
  Synthetic oligonucleotide; TTT chr11 5358148 5358169 5358153 5358148 -
gtgtctctatttccttcagttc

SEQ ID NO: 120507 - DNA, 22 bp, Artificial Sequence
  Synthetic oligonucleotide; TTG chr11 5358147 5358168 5358152 5358147 -
tgtctctatttccttcagttct

SEQ ID NO: 120508 - DNA, 22 bp, Artificial Sequence
  Synthetic oligonucleotide; CTC chr11 5358141 5358162 5358146 5358141 -
tatttccttcagttctgctctg

SEQ ID NO: 120509 - DNA, 22 bp, Artificial Sequence
  Synthetic oligonucleotide; CTA chr11 5358139 5358160 5358144 5358139 -
tttccttcagttctgctctgat

SEQ ID NO: 120510 - DNA, 22 bp, Artificial Sequence
  Synthetic oligonucleotide; TTT chr11 5358136 5358157 5358141 5358136 -
ccttcagttctgctctgatttt

SEQ ID NO: 120511 - DNA, 22 bp, Artificial Sequence
  Synthetic oligonucleotide; TTC chr11 5358135 5358156 5358140 5358135 -
cttcagttctgctctgatttta

SEQ ID NO: 120512 - DNA, 22 bp, Artificial Sequence
  Synthetic oligonucleotide; CTT chr11 5358132 5358153 5358137 5358132 -
cagttctgctctgattttagtt

SEQ ID NO: 120513 - DNA, 22 bp, Artificial Sequence
  Synthetic oligonucleotide; TTC chr11 5358131 5358152 5358136 5358131 -
agttctgctctgattttagtta

SEQ ID NO: 120514 - DNA, 22 bp, Artificial Sequence
  Synthetic oligonucleotide; TTC chr11 5358126 5358147 5358131 5358126 -
tgctctgattttagttatttct

SEQ ID NO: 120515 - DNA, 22 bp, Artificial Sequence
  Synthetic oligonucleotide; CTG chr11 5358124 5358145 5358129 5358124 -
ctctgattttagttatttcttg

SEQ ID NO: 120516 - DNA, 22 bp, Artificial Sequence
  Synthetic oligonucleotide; CTC chr11 5358121 5358142 5358126 5358121 -
tgattttagttatttcttgcct

SEQ ID NO: 120517 - DNA, 22 bp, Artificial Sequence
  Synthetic oligonucleotide; CTG chr11 5358119 5358140 5358124 5358119 -
attttagttatttcttgccttc

SEQ ID NO: 120518 - DNA, 22 bp, Artificial Sequence
  Synthetic oligonucleotide; TTT chr11 5358115 5358136 5358120 5358115 -
tagttatttcttgccttctgct

SEQ ID NO: 120519 - DNA, 22 bp, Artificial Sequence
  Synthetic oligonucleotide; TTT chr11 5358114 5358135 5358119 5358114 -
agttatttcttgccttctgcta

SEQ ID NO: 120520 - DNA, 22 bp, Artificial Sequence
  Synthetic oligonucleotide; TTA chr11 5358113 5358134 5358118 5358113 -
gttatttcttgccttctgctag

SEQ ID NO: 120521 - DNA, 22 bp, Artificial Sequence
  Synthetic oligonucleotide; TTA chr11 5358109 5358130 5358114 5358109 -
tttcttgccttctgctagcatt

SEQ ID NO: 120522 - DNA, 22 bp, Artificial Sequence
  Synthetic oligonucleotide; TTT chr11 5358106 5358127 5358111 5358106 -
cttgccttctgctagcatttga

SEQ ID NO: 120523 - DNA, 22 bp, Artificial Sequence
  Synthetic oligonucleotide; TTC chr11 5358105 5358126 5358110 5358105 -
ttgccttctgctagcatttgaa

SEQ ID NO: 120524 - DNA, 22 bp, Artificial Sequence
  Synthetic oligonucleotide; CTT chr11 5358103 5358124 5358108 5358103 -
gccttctgctagcatttgaatg

SEQ ID NO: 120525 - DNA, 22 bp, Artificial Sequence
  Synthetic oligonucleotide; TTG chr11 5358102 5358123 5358107 5358102 -
ccttctgctagcatttgaatgt

SEQ ID NO: 120526 - DNA, 22 bp, Artificial Sequence
  Synthetic oligonucleotide; CTT chr11 5358098 5358119 5358103 5358098 -
ctgctagcatttgaatgtgttt

SEQ ID NO: 120527 - DNA, 22 bp, Artificial Sequence
  Synthetic oligonucleotide; TTC chr11 5358097 5358118 5358102 5358097 -
tgctagcatttgaatgtgtttg

SEQ ID NO: 120528 - DNA, 22 bp, Artificial Sequence
  Synthetic oligonucleotide; CTG chr11 5358095 5358116 5358100 5358095 -
ctagcatttgaatgtgtttgct

SEQ ID NO: 120529 - DNA, 22 bp, Artificial Sequence
  Synthetic oligonucleotide; CTA chr11 5358092 5358113 5358097 5358092 -
gcatttgaatgtgtttgctctt

SEQ ID NO: 120530 - DNA, 22 bp, Artificial Sequence
  Synthetic oligonucleotide; TTT chr11 5358086 5358107 5358091 5358086 -
gaatgtgtttgctcttgcttct

SEQ ID NO: 120531 - DNA, 22 bp, Artificial Sequence
  Synthetic oligonucleotide; TTG chr11 5358085 5358106 5358090 5358085 -
aatgtgtttgctcttgcttctc

SEQ ID NO: 120532 - DNA, 22 bp, Artificial Sequence
  Synthetic oligonucleotide; TTT chr11 5358076 5358097 5358081 5358076 -
gctcttgcttctctagttcttt

SEQ ID NO: 120533 - DNA, 22 bp, Artificial Sequence
  Synthetic oligonucleotide; TTG chr11 5358075 5358096 5358080 5358075 -
ctcttgcttctctagttctttt

SEQ ID NO: 120534 - DNA, 22 bp, Artificial Sequence
  Synthetic oligonucleotide; CTC chr11 5358072 5358093 5358077 5358072 -
ttgcttctctagttcttttaat

SEQ ID NO: 120535 - DNA, 22 bp, Artificial Sequence
  Synthetic oligonucleotide; CTT chr11 5358070 5358091 5358075 5358070 -
gcttctctagttcttttaattg

SEQ ID NO: 120536 - DNA, 22 bp, Artificial Sequence
  Synthetic oligonucleotide; TTG chr11 5358069 5358090 5358074 5358069 -
cttctctagttcttttaattgt

SEQ ID NO: 120537 - DNA, 22 bp, Artificial Sequence
  Synthetic oligonucleotide; CTT chr11 5358066 5358087 5358071 5358066 -
ctctagttcttttaattgtgat

SEQ ID NO: 120538 - DNA, 22 bp, Artificial Sequence
  Synthetic oligonucleotide; TTC chr11 5358065 5358086 5358070 5358065 -
tctagttcttttaattgtgatg

SEQ ID NO: 120539 - DNA, 22 bp, Artificial Sequence
  Synthetic oligonucleotide; CTC chr11 5358063 5358084 5358068 5358063 -
tagttcttttaattgtgatgtt

SEQ ID NO: 120540 - DNA, 22 bp, Artificial Sequence
  Synthetic oligonucleotide; CTA chr11 5358061 5358082 5358066 5358061 -
gttcttttaattgtgatgttag

SEQ ID NO: 120541 - DNA, 22 bp, Artificial Sequence
  Synthetic oligonucleotide; TTC chr11 5358057 5358078 5358062 5358057 -
ttttaattgtgatgttagggtg

SEQ ID NO: 120542 - DNA, 22 bp, Artificial Sequence
  Synthetic oligonucleotide; CTT chr11 5358055 5358076 5358060 5358055 -
ttaattgtgatgttagggtgtc

SEQ ID NO: 120543 - DNA, 22 bp, Artificial Sequence
  Synthetic oligonucleotide; TTT chr11 5358054 5358075 5358059 5358054 -
taattgtgatgttagggtgtca

SEQ ID NO: 120544 - DNA, 22 bp, Artificial Sequence
  Synthetic oligonucleotide; TTT chr11 5358053 5358074 5358058 5358053 -
aattgtgatgttagggtgtcaa

SEQ ID NO: 120545 - DNA, 22 bp, Artificial Sequence
  Synthetic oligonucleotide; TTA chr11 5358052 5358073 5358057 5358052 -
attgtgatgttagggtgtcaat

SEQ ID NO: 120546 - DNA, 22 bp, Artificial Sequence
  Synthetic oligonucleotide; TTG chr11 5358048 5358069 5358053 5358048 -
tgatgttagggtgtcaatttta

SEQ ID NO: 120547 - DNA, 22 bp, Artificial Sequence
  Synthetic oligonucleotide; TTA chr11 5358040 5358061 5358045 5358040 -
gggtgtcaattttagatctttc

SEQ ID NO: 120548 - DNA, 22 bp, Artificial Sequence
  Synthetic oligonucleotide; TTT chr11 5358028 5358049 5358033 5358028 -
tagatctttcctgctttctctt

SEQ ID NO: 120549 - DNA, 22 bp, Artificial Sequence
  Synthetic oligonucleotide; TTT chr11 5358027 5358048 5358032 5358027 -
agatctttcctgctttctcttc

SEQ ID NO: 120550 - DNA, 22 bp, Artificial Sequence
  Synthetic oligonucleotide; TTA chr11 5358026 5358047 5358031 5358026 -
gatctttcctgctttctcttct

SEQ ID NO: 120551 - DNA, 22 bp, Artificial Sequence
  Synthetic oligonucleotide; CTT chr11 5358020 5358041 5358025 5358020 -
tcctgctttctcttctgggcgt

SEQ ID NO: 120552 - DNA, 22 bp, Artificial Sequence
  Synthetic oligonucleotide; TTT chr11 5358019 5358040 5358024 5358019 -
cctgctttctcttctgggcgtt

SEQ ID NO: 120553 - DNA, 22 bp, Artificial Sequence
  Synthetic oligonucleotide; TTC chr11 5358018 5358039 5358023 5358018 -
ctgctttctcttctgggcgttt

SEQ ID NO: 120554 - DNA, 22 bp, Artificial Sequence
  Synthetic oligonucleotide; CTG chr11 5358015 5358036 5358020 5358015 -
ctttctcttctgggcgtttagt

SEQ ID NO: 120555 - DNA, 22 bp, Artificial Sequence
  Synthetic oligonucleotide; CTT chr11 5358012 5358033 5358017 5358012 -
tctcttctgggcgtttagtgct

SEQ ID NO: 120556 - DNA, 22 bp, Artificial Sequence
  Synthetic oligonucleotide; TTT chr11 5358011 5358032 5358016 5358011 -
ctcttctgggcgtttagtgcta

SEQ ID NO: 120557 - DNA, 22 bp, Artificial Sequence
  Synthetic oligonucleotide; TTC chr11 5358010 5358031 5358015 5358010 -
tcttctgggcgtttagtgctat

SEQ ID NO: 120558 - DNA, 22 bp, Artificial Sequence
  Synthetic oligonucleotide; CTC chr11 5358008 5358029 5358013 5358008 -
ttctgggcgtttagtgctataa

SEQ ID NO: 120559 - DNA, 22 bp, Artificial Sequence
  Synthetic oligonucleotide; CTT chr11 5358006 5358027 5358011 5358006 -
ctgggcgtttagtgctataaat

SEQ ID NO: 120560 - DNA, 22 bp, Artificial Sequence
  Synthetic oligonucleotide; TTC chr11 5358005 5358026 5358010 5358005 -
tgggcgtttagtgctataaatt

SEQ ID NO: 120561 - DNA, 22 bp, Artificial Sequence
  Synthetic oligonucleotide; CTG chr11 5358003 5358024 5358008 5358003 -
ggcgtttagtgctataaatttc

SEQ ID NO: 120562 - DNA, 22 bp, Artificial Sequence
  Synthetic oligonucleotide; TTT chr11 5357996 5358017 5358001 5357996 -
agtgctataaatttccctctac

SEQ ID NO: 120563 - DNA, 22 bp, Artificial Sequence
  Synthetic oligonucleotide; TTA chr11 5357995 5358016 5358000 5357995 -
gtgctataaatttccctctaca

SEQ ID NO: 120564 - DNA, 22 bp, Artificial Sequence
  Synthetic oligonucleotide; CTA chr11 5357989 5358010 5357994 5357989 -
taaatttccctctacacactgc

SEQ ID NO: 120565 - DNA, 22 bp, Artificial Sequence
  Synthetic oligonucleotide; TTT chr11 5357982 5358003 5357987 5357982 -
ccctctacacactgctttgaat

SEQ ID NO: 120566 - DNA, 22 bp, Artificial Sequence
  Synthetic oligonucleotide; TTC chr11 5357981 5358002 5357986 5357981 -
cctctacacactgctttgaatg

SEQ ID NO: 120567 - DNA, 22 bp, Artificial Sequence
  Synthetic oligonucleotide; CTC chr11 5357977 5357998 5357982 5357977 -
tacacactgctttgaatgtgtc

SEQ ID NO: 120568 - DNA, 22 bp, Artificial Sequence
  Synthetic oligonucleotide; CTA chr11 5357975 5357996 5357980 5357975 -
cacactgctttgaatgtgtccc

SEQ ID NO: 120569 - DNA, 22 bp, Artificial Sequence
  Synthetic oligonucleotide; CTG chr11 5357968 5357989 5357973 5357968 -
ctttgaatgtgtcccagagatt

SEQ ID NO: 120570 - DNA, 22 bp, Artificial Sequence
  Synthetic oligonucleotide; CTT chr11 5357965 5357986 5357970 5357965 -
tgaatgtgtcccagagattctg

SEQ ID NO: 120571 - DNA, 22 bp, Artificial Sequence
  Synthetic oligonucleotide; TTT chr11 5357964 5357985 5357969 5357964 -
gaatgtgtcccagagattctgg

SEQ ID NO: 120572 - DNA, 22 bp, Artificial Sequence
  Synthetic oligonucleotide; TTG chr11 5357963 5357984 5357968 5357963 -
aatgtgtcccagagattctggt

SEQ ID NO: 120573 - DNA, 22 bp, Artificial Sequence
  Synthetic oligonucleotide; TTC chr11 5357945 5357966 5357950 5357945 -
tggtatgttgtgtctttgttct

SEQ ID NO: 120574 - DNA, 22 bp, Artificial Sequence
  Synthetic oligonucleotide; CTG chr11 5357943 5357964 5357948 5357943 -
gtatgttgtgtctttgttctct

SEQ ID NO: 120575 - DNA, 22 bp, Artificial Sequence
  Synthetic oligonucleotide; TTG chr11 5357935 5357956 5357940 5357935 -
tgtctttgttctctttggttcc

SEQ ID NO: 120576 - DNA, 22 bp, Artificial Sequence
  Synthetic oligonucleotide; CTT chr11 5357929 5357950 5357934 5357929 -
tgttctctttggttccaaagaa

SEQ ID NO: 120577 - DNA, 22 bp, Artificial Sequence
  Synthetic oligonucleotide; TTT chr11 5357928 5357949 5357933 5357928 -
gttctctttggttccaaagaac

SEQ ID NO: 120578 - DNA, 22 bp, Artificial Sequence
  Synthetic oligonucleotide; TTG chr11 5357927 5357948 5357932 5357927 -
ttctctttggttccaaagaaca

SEQ ID NO: 120579 - DNA, 22 bp, Artificial Sequence
  Synthetic oligonucleotide; TTC chr11 5357924 5357945 5357929 5357924 -
tctttggttccaaagaacattt

SEQ ID NO: 120580 - DNA, 22 bp, Artificial Sequence
  Synthetic oligonucleotide; CTC chr11 5357922 5357943 5357927 5357922 -
tttggttccaaagaacattttt

SEQ ID NO: 120581 - DNA, 22 bp, Artificial Sequence
  Synthetic oligonucleotide; CTT chr11 5357920 5357941 5357925 5357920 -
tggttccaaagaacatttttat

SEQ ID NO: 120582 - DNA, 22 bp, Artificial Sequence
  Synthetic oligonucleotide; TTT chr11 5357919 5357940 5357924 5357919 -
ggttccaaagaacatttttatt

SEQ ID NO: 120583 - DNA, 22 bp, Artificial Sequence
  Synthetic oligonucleotide; TTG chr11 5357918 5357939 5357923 5357918 -
gttccaaagaacatttttattt

SEQ ID NO: 120584 - DNA, 22 bp, Artificial Sequence
  Synthetic oligonucleotide; TTC chr11 5357914 5357935 5357919 5357914 -
caaagaacatttttatttctgc

SEQ ID NO: 120585 - DNA, 22 bp, Artificial Sequence
  Synthetic oligonucleotide; TTT chr11 5357902 5357923 5357907 5357902 -
ttatttctgccttcattttgtt

SEQ ID NO: 120586 - DNA, 22 bp, Artificial Sequence
  Synthetic oligonucleotide; TTT chr11 5357901 5357922 5357906 5357901 -
tatttctgccttcattttgtta

SEQ ID NO: 120587 - DNA, 22 bp, Artificial Sequence
  Synthetic oligonucleotide; TTT chr11 5357900 5357921 5357905 5357900 -
atttctgccttcattttgttat

SEQ ID NO: 120588 - DNA, 22 bp, Artificial Sequence
  Synthetic oligonucleotide; TTA chr11 5357899 5357920 5357904 5357899 -
tttctgccttcattttgttatg

SEQ ID NO: 120589 - DNA, 22 bp, Artificial Sequence
  Synthetic oligonucleotide; TTT chr11 5357896 5357917 5357901 5357896 -
ctgccttcattttgttatgaac

SEQ ID NO: 120590 - DNA, 22 bp, Artificial Sequence
  Synthetic oligonucleotide; TTC chr11 5357895 5357916 5357900 5357895 -
tgccttcattttgttatgaacc

SEQ ID NO: 120591 - DNA, 22 bp, Artificial Sequence
  Synthetic oligonucleotide; CTG chr11 5357893 5357914 5357898 5357893 -
ccttcattttgttatgaaccca

SEQ ID NO: 120592 - DNA, 22 bp, Artificial Sequence
  Synthetic oligonucleotide; CTT chr11 5357889 5357910 5357894 5357889 -
cattttgttatgaacccagtag

SEQ ID NO: 120593 - DNA, 22 bp, Artificial Sequence
  Synthetic oligonucleotide; TTC chr11 5357888 5357909 5357893 5357888 -
attttgttatgaacccagtagt

SEQ ID NO: 120594 - DNA, 22 bp, Artificial Sequence
  Synthetic oligonucleotide; TTT chr11 5357884 5357905 5357889 5357884 -
tgttatgaacccagtagtcatt

SEQ ID NO: 120595 - DNA, 22 bp, Artificial Sequence
  Synthetic oligonucleotide; TTT chr11 5357883 5357904 5357888 5357883 -
gttatgaacccagtagtcattc

SEQ ID NO: 120596 - DNA, 22 bp, Artificial Sequence
  Synthetic oligonucleotide; TTG chr11 5357882 5357903 5357887 5357882 -
ttatgaacccagtagtcattca

SEQ ID NO: 120597 - DNA, 22 bp, Artificial Sequence
  Synthetic oligonucleotide; TTA chr11 5357879 5357900 5357884 5357879 -
tgaacccagtagtcattcagga

SEQ ID NO: 120598 - DNA, 22 bp, Artificial Sequence
  Synthetic oligonucleotide; TTC chr11 5357861 5357882 5357866 5357861 -
aggagcaatttgttcggtttcc

SEQ ID NO: 120599 - DNA, 22 bp, Artificial Sequence
  Synthetic oligonucleotide; TTT chr11 5357850 5357871 5357855 5357850 -
gttcggtttccatgtagttgag

SEQ ID NO: 120600 - DNA, 22 bp, Artificial Sequence
  Synthetic oligonucleotide; TTG chr11 5357849 5357870 5357854 5357849 -
ttcggtttccatgtagttgagc

SEQ ID NO: 120601 - DNA, 22 bp, Artificial Sequence
  Synthetic oligonucleotide; TTC chr11 5357846 5357867 5357851 5357846 -
ggtttccatgtagttgagcggt

SEQ ID NO: 120602 - DNA, 22 bp, Artificial Sequence
  Synthetic oligonucleotide; TTT chr11 5357841 5357862 5357846 5357841 -
ccatgtagttgagcggttttga

SEQ ID NO: 120603 - DNA, 22 bp, Artificial Sequence
  Synthetic oligonucleotide; TTC chr11 5357840 5357861 5357845 5357840 -
catgtagttgagcggttttgag

SEQ ID NO: 120604 - DNA, 22 bp, Artificial Sequence
  Synthetic oligonucleotide; TTG chr11 5357830 5357851 5357835 5357830 -
agcggttttgagtgagtttctt

SEQ ID NO: 120605 - DNA, 22 bp, Artificial Sequence
  Synthetic oligonucleotide; TTT chr11 5357822 5357843 5357827 5357822 -
tgagtgagtttcttaatcctga

SEQ ID NO: 120606 - DNA, 22 bp, Artificial Sequence
  Synthetic oligonucleotide; TTT chr11 5357821 5357842 5357826 5357821 -
gagtgagtttcttaatcctgag

SEQ ID NO: 120607 - DNA, 22 bp, Artificial Sequence
  Synthetic oligonucleotide; TTG chr11 5357820 5357841 5357825 5357820 -
agtgagtttcttaatcctgagt

SEQ ID NO: 120608 - DNA, 22 bp, Artificial Sequence
  Synthetic oligonucleotide; TTT chr11 5357811 5357832 5357816 5357811 -
cttaatcctgagttctagtttg

SEQ ID NO: 120609 - DNA, 22 bp, Artificial Sequence
  Synthetic oligonucleotide; TTC chr11 5357810 5357831 5357815 5357810 -
ttaatcctgagttctagtttga

SEQ ID NO: 120610 - DNA, 22 bp, Artificial Sequence
  Synthetic oligonucleotide; CTT chr11 5357808 5357829 5357813 5357808 -
aatcctgagttctagtttgatt

SEQ ID NO: 120611 - DNA, 22 bp, Artificial Sequence
  Synthetic oligonucleotide; TTA chr11 5357807 5357828 5357812 5357807 -
atcctgagttctagtttgattg

SEQ ID NO: 120612 - DNA, 22 bp, Artificial Sequence
  Synthetic oligonucleotide; CTG chr11 5357801 5357822 5357806 5357801 -
agttctagtttgattgcactgt

SEQ ID NO: 120613 - DNA, 22 bp, Artificial Sequence
  Synthetic oligonucleotide; TTC chr11 5357796 5357817 5357801 5357796 -
tagtttgattgcactgtggtct

SEQ ID NO: 120614 - DNA, 22 bp, Artificial Sequence
  Synthetic oligonucleotide; CTA chr11 5357794 5357815 5357799 5357794 -
gtttgattgcactgtggtctga

SEQ ID NO: 120615 - DNA, 22 bp, Artificial Sequence
  Synthetic oligonucleotide; TTT chr11 5357790 5357811 5357795 5357790 -
gattgcactgtggtctgagaga

SEQ ID NO: 120616 - DNA, 22 bp, Artificial Sequence
  Synthetic oligonucleotide; TTG chr11 5357789 5357810 5357794 5357789 -
attgcactgtggtctgagagac

SEQ ID NO: 120617 - DNA, 22 bp, Artificial Sequence
  Synthetic oligonucleotide; TTG chr11 5357785 5357806 5357790 5357785 -
cactgtggtctgagagacagtt

SEQ ID NO: 120618 - DNA, 22 bp, Artificial Sequence
  Synthetic oligonucleotide; CTG chr11 5357780 5357801 5357785 5357780 -
tggtctgagagacagtttgtta

SEQ ID NO: 120619 - DNA, 22 bp, Artificial Sequence
  Synthetic oligonucleotide; CTG chr11 5357773 5357794 5357778 5357773 -
agagacagtttgttataatttc

SEQ ID NO: 120620 - DNA, 22 bp, Artificial Sequence
  Synthetic oligonucleotide; TTT chr11 5357762 5357783 5357767 5357762 -
gttataatttctgttcttttac

SEQ ID NO: 120621 - DNA, 22 bp, Artificial Sequence
  Synthetic oligonucleotide; TTG chr11 5357761 5357782 5357766 5357761 -
ttataatttctgttcttttaca

SEQ ID NO: 120622 - DNA, 22 bp, Artificial Sequence
  Synthetic oligonucleotide; TTA chr11 5357758 5357779 5357763 5357758 -
taatttctgttcttttacattt

SEQ ID NO: 120623 - DNA, 22 bp, Artificial Sequence
  Synthetic oligonucleotide; TTT chr11 5357752 5357773 5357757 5357752 -
ctgttcttttacatttgctgag

SEQ ID NO: 120624 - DNA, 22 bp, Artificial Sequence
  Synthetic oligonucleotide; TTC chr11 5357751 5357772 5357756 5357751 -
tgttcttttacatttgctgagg

SEQ ID NO: 120625 - DNA, 22 bp, Artificial Sequence
  Synthetic oligonucleotide; CTG chr11 5357749 5357770 5357754 5357749 -
ttcttttacatttgctgaggag

SEQ ID NO: 120626 - DNA, 22 bp, Artificial Sequence
  Synthetic oligonucleotide; TTC chr11 5357746 5357767 5357751 5357746 -
ttttacatttgctgaggagtgc

SEQ ID NO: 120627 - DNA, 22 bp, Artificial Sequence
  Synthetic oligonucleotide; CTT chr11 5357744 5357765 5357749 5357744 -
ttacatttgctgaggagtgctt

SEQ ID NO: 120628 - DNA, 22 bp, Artificial Sequence
  Synthetic oligonucleotide; TTT chr11 5357743 5357764 5357748 5357743 -
tacatttgctgaggagtgcttt

SEQ ID NO: 120629 - DNA, 22 bp, Artificial Sequence
  Synthetic oligonucleotide; TTT chr11 5357742 5357763 5357747 5357742 -
acatttgctgaggagtgcttta

SEQ ID NO: 120630 - DNA, 22 bp, Artificial Sequence
  Synthetic oligonucleotide; TTA chr11 5357741 5357762 5357746 5357741 -
catttgctgaggagtgctttac

SEQ ID NO: 120631 - DNA, 22 bp, Artificial Sequence
  Synthetic oligonucleotide; TTT chr11 5357736 5357757 5357741 5357736 -
gctgaggagtgctttacttcca

SEQ ID NO: 120632 - DNA, 22 bp, Artificial Sequence
  Synthetic oligonucleotide; TTG chr11 5357735 5357756 5357740 5357735 -
ctgaggagtgctttacttccaa

SEQ ID NO: 120633 - DNA, 22 bp, Artificial Sequence
  Synthetic oligonucleotide; CTG chr11 5357732 5357753 5357737 5357732 -
aggagtgctttacttccaacta

SEQ ID NO: 120634 - DNA, 22 bp, Artificial Sequence
  Synthetic oligonucleotide; CTT chr11 5357722 5357743 5357727 5357722 -
tacttccaactatgtggtcaat

SEQ ID NO: 120635 - DNA, 22 bp, Artificial Sequence
  Synthetic oligonucleotide; TTT chr11 5357721 5357742 5357726 5357721 -
acttccaactatgtggtcaatt

SEQ ID NO: 120636 - DNA, 22 bp, Artificial Sequence
  Synthetic oligonucleotide; TTA chr11 5357720 5357741 5357725 5357720 -
cttccaactatgtggtcaattt

SEQ ID NO: 120637 - DNA, 22 bp, Artificial Sequence
  Synthetic oligonucleotide; CTT chr11 5357717 5357738 5357722 5357717 -
ccaactatgtggtcaattttgg

SEQ ID NO: 120638 - DNA, 22 bp, Artificial Sequence
  Synthetic oligonucleotide; TTC chr11 5357716 5357737 5357721 5357716 -
caactatgtggtcaattttgga

SEQ ID NO: 120639 - DNA, 22 bp, Artificial Sequence
  Synthetic oligonucleotide; CTA chr11 5357710 5357731 5357715 5357710 -
tgtggtcaattttggaataggt

SEQ ID NO: 120640 - DNA, 22 bp, Artificial Sequence
  Synthetic oligonucleotide; TTT chr11 5357698 5357719 5357703 5357698 -
tggaataggtgtggtgtggtgc

SEQ ID NO: 120641 - DNA, 22 bp, Artificial Sequence
  Synthetic oligonucleotide; TTT chr11 5357697 5357718 5357702 5357697 -
ggaataggtgtggtgtggtgct

SEQ ID NO: 120642 - DNA, 22 bp, Artificial Sequence
  Synthetic oligonucleotide; TTG chr11 5357696 5357717 5357701 5357696 -
gaataggtgtggtgtggtgctg

SEQ ID NO: 120643 - DNA, 22 bp, Artificial Sequence
  Synthetic oligonucleotide; CTG chr11 5357674 5357695 5357679 5357674 -
aaaagaatgtatattctgttga

SEQ ID NO: 120644 - DNA, 22 bp, Artificial Sequence
  Synthetic oligonucleotide; TTC chr11 5357658 5357679 5357663 5357658 -
tgttgatttggggtggagagtt

SEQ ID NO: 120645 - DNA, 22 bp, Artificial Sequence
  Synthetic oligonucleotide; CTG chr11 5357656 5357677 5357661 5357656 -
ttgatttggggtggagagttct

SEQ ID NO: 120646 - DNA, 22 bp, Artificial Sequence
  Synthetic oligonucleotide; TTG chr11 5357653 5357674 5357658 5357653 -
atttggggtggagagttctgta

SEQ ID NO: 120647 - DNA, 22 bp, Artificial Sequence
  Synthetic oligonucleotide; TTT chr11 5357649 5357670 5357654 5357649 -
ggggtggagagttctgtagatg

SEQ ID NO: 120648 - DNA, 22 bp, Artificial Sequence
  Synthetic oligonucleotide; TTG chr11 5357648 5357669 5357653 5357648 -
gggtggagagttctgtagatgt

SEQ ID NO: 120649 - DNA, 22 bp, Artificial Sequence
  Synthetic oligonucleotide; TTC chr11 5357635 5357656 5357640 5357635 -
tgtagatgtctattaggtccgc

SEQ ID NO: 120650 - DNA, 22 bp, Artificial Sequence
  Synthetic oligonucleotide; CTG chr11 5357633 5357654 5357638 5357633 -
tagatgtctattaggtccgctt

SEQ ID NO: 120651 - DNA, 22 bp, Artificial Sequence
  Synthetic oligonucleotide; CTA chr11 5357623 5357644 5357628 5357623 -
ttaggtccgcttggtgcagagc

SEQ ID NO: 120652 - DNA, 22 bp, Artificial Sequence
  Synthetic oligonucleotide; TTA chr11 5357620 5357641 5357625 5357620 -
ggtccgcttggtgcagagctga

SEQ ID NO: 120653 - DNA, 22 bp, Artificial Sequence
  Synthetic oligonucleotide; CTT chr11 5357611 5357632 5357616 5357611 -
ggtgcagagctgagttcaattc

SEQ ID NO: 120654 - DNA, 22 bp, Artificial Sequence
  Synthetic oligonucleotide; TTG chr11 5357610 5357631 5357615 5357610 -
gtgcagagctgagttcaattcc

SEQ ID NO: 120655 - DNA, 22 bp, Artificial Sequence
  Synthetic oligonucleotide; CTG chr11 5357599 5357620 5357604 5357599 -
agttcaattcctggatatcctt

SEQ ID NO: 120656 - DNA, 22 bp, Artificial Sequence
  Synthetic oligonucleotide; TTC chr11 5357594 5357615 5357599 5357594 -
aattcctggatatccttgttaa

SEQ ID NO: 120657 - DNA, 22 bp, Artificial Sequence
  Synthetic oligonucleotide; TTC chr11 5357589 5357610 5357594 5357589 -
ctggatatccttgttaactttc

SEQ ID NO: 120658 - DNA, 22 bp, Artificial Sequence
  Synthetic oligonucleotide; CTG chr11 5357586 5357607 5357591 5357586 -
gatatccttgttaactttctgt

SEQ ID NO: 120659 - DNA, 22 bp, Artificial Sequence
  Synthetic oligonucleotide; CTT chr11 5357577 5357598 5357582 5357577 -
gttaactttctgtctcgttgat

SEQ ID NO: 120660 - DNA, 22 bp, Artificial Sequence
  Synthetic oligonucleotide; TTG chr11 5357576 5357597 5357581 5357576 -
ttaactttctgtctcgttgatc

SEQ ID NO: 120661 - DNA, 22 bp, Artificial Sequence
  Synthetic oligonucleotide; TTA chr11 5357573 5357594 5357578 5357573 -
actttctgtctcgttgatctgt

SEQ ID NO: 120662 - DNA, 22 bp, Artificial Sequence
  Synthetic oligonucleotide; CTT chr11 5357569 5357590 5357574 5357569 -
tctgtctcgttgatctgtctaa

SEQ ID NO: 120663 - DNA, 22 bp, Artificial Sequence
  Synthetic oligonucleotide; TTT chr11 5357568 5357589 5357573 5357568 -
ctgtctcgttgatctgtctaat

SEQ ID NO: 120664 - DNA, 22 bp, Artificial Sequence
  Synthetic oligonucleotide; TTC chr11 5357567 5357588 5357572 5357567 -
tgtctcgttgatctgtctaatg

SEQ ID NO: 120665 - DNA, 22 bp, Artificial Sequence
  Synthetic oligonucleotide; CTG chr11 5357565 5357586 5357570 5357565 -
tctcgttgatctgtctaatgtt

SEQ ID NO: 120666 - DNA, 22 bp, Artificial Sequence
  Synthetic oligonucleotide; CTC chr11 5357561 5357582 5357566 5357561 -
gttgatctgtctaatgttgatc

SEQ ID NO: 120667 - DNA, 22 bp, Artificial Sequence
  Synthetic oligonucleotide; TTG chr11 5357557 5357578 5357562 5357557 -
atctgtctaatgttgatctgtc

SEQ ID NO: 120668 - DNA, 22 bp, Artificial Sequence
  Synthetic oligonucleotide; CTG chr11 5357552 5357573 5357557 5357552 -
tctaatgttgatctgtctaatg

SEQ ID NO: 120669 - DNA, 22 bp, Artificial Sequence
  Synthetic oligonucleotide; CTA chr11 5357548 5357569 5357553 5357548 -
atgttgatctgtctaatgttga

SEQ ID NO: 120670 - DNA, 22 bp, Artificial Sequence
  Synthetic oligonucleotide; TTG chr11 5357542 5357563 5357547 5357542 -
atctgtctaatgttgacagtgg

SEQ ID NO: 120671 - DNA, 22 bp, Artificial Sequence
  Synthetic oligonucleotide; CTG chr11 5357537 5357558 5357542 5357537 -
tctaatgttgacagtggggtgt

SEQ ID NO: 120672 - DNA, 22 bp, Artificial Sequence
  Synthetic oligonucleotide; CTA chr11 5357533 5357554 5357538 5357533 -
atgttgacagtggggtgttaaa

SEQ ID NO: 120673 - DNA, 22 bp, Artificial Sequence
  Synthetic oligonucleotide; TTG chr11 5357527 5357548 5357532 5357527 -
acagtggggtgttaaagtctcc

SEQ ID NO: 120674 - DNA, 22 bp, Artificial Sequence
  Synthetic oligonucleotide; TTA chr11 5357513 5357534 5357518 5357513 -
aagtctcccattgttattgtgt

SEQ ID NO: 120675 - DNA, 22 bp, Artificial Sequence
  Synthetic oligonucleotide; CTC chr11 5357506 5357527 5357511 5357506 -
ccattgttattgtgtgagagtc

SEQ ID NO: 120676 - DNA, 22 bp, Artificial Sequence
  Synthetic oligonucleotide; TTG chr11 5357500 5357521 5357505 5357500 -
ttattgtgtgagagtctaagtc

SEQ ID NO: 120677 - DNA, 22 bp, Artificial Sequence
  Synthetic oligonucleotide; TTA chr11 5357497 5357518 5357502 5357497 -
ttgtgtgagagtctaagtctct

SEQ ID NO: 120678 - DNA, 22 bp, Artificial Sequence
  Synthetic oligonucleotide; TTG chr11 5357494 5357515 5357499 5357494 -
tgtgagagtctaagtctctttg

SEQ ID NO: 120679 - DNA, 22 bp, Artificial Sequence
  Synthetic oligonucleotide; CTA chr11 5357482 5357503 5357487 5357482 -
agtctctttgtaggtctctaag

SEQ ID NO: 120680 - DNA, 22 bp, Artificial Sequence
  Synthetic oligonucleotide; CTC chr11 5357476 5357497 5357481 5357476 -
tttgtaggtctctaaggacttg

SEQ ID NO: 120681 - DNA, 22 bp, Artificial Sequence
  Synthetic oligonucleotide; CTT chr11 5357474 5357495 5357479 5357474 -
tgtaggtctctaaggacttgct

SEQ ID NO: 120682 - DNA, 22 bp, Artificial Sequence
  Synthetic oligonucleotide; TTT chr11 5357473 5357494 5357478 5357473 -
gtaggtctctaaggacttgctt

SEQ ID NO: 120683 - DNA, 22 bp, Artificial Sequence
  Synthetic oligonucleotide; TTG chr11 5357472 5357493 5357477 5357472 -
taggtctctaaggacttgcttt

SEQ ID NO: 120684 - DNA, 22 bp, Artificial Sequence
  Synthetic oligonucleotide; CTC chr11 5357464 5357485 5357469 5357464 -
taaggacttgctttatgaacct

SEQ ID NO: 120685 - DNA, 22 bp, Artificial Sequence
  Synthetic oligonucleotide; CTA chr11 5357462 5357483 5357467 5357462 -
aggacttgctttatgaacctgg

SEQ ID NO: 120686 - DNA, 22 bp, Artificial Sequence
  Synthetic oligonucleotide; CTT chr11 5357455 5357476 5357460 5357455 -
gctttatgaacctgggtgttcc

SEQ ID NO: 120687 - DNA, 22 bp, Artificial Sequence
  Synthetic oligonucleotide; TTG chr11 5357454 5357475 5357459 5357454 -
ctttatgaacctgggtgttcct

SEQ ID NO: 120688 - DNA, 22 bp, Artificial Sequence
  Synthetic oligonucleotide; CTT chr11 5357451 5357472 5357456 5357451 -
tatgaacctgggtgttcctgta

SEQ ID NO: 120689 - DNA, 22 bp, Artificial Sequence
  Synthetic oligonucleotide; TTT chr11 5357450 5357471 5357455 5357450 -
atgaacctgggtgttcctgtat

SEQ ID NO: 120690 - DNA, 22 bp, Artificial Sequence
  Synthetic oligonucleotide; TTA chr11 5357449 5357470 5357454 5357449 -
tgaacctgggtgttcctgtatt

SEQ ID NO: 120691 - DNA, 22 bp, Artificial Sequence
  Synthetic oligonucleotide; CTG chr11 5357441 5357462 5357446 5357441 -
ggtgttcctgtattgggtgcat

SEQ ID NO: 120692 - DNA, 22 bp, Artificial Sequence
  Synthetic oligonucleotide; TTC chr11 5357434 5357455 5357439 5357434 -
ctgtattgggtgcatatatgtt

SEQ ID NO: 120693 - DNA, 22 bp, Artificial Sequence
  Synthetic oligonucleotide; CTG chr11 5357431 5357452 5357436 5357431 -
tattgggtgcatatatgtttag

SEQ ID NO: 120694 - DNA, 22 bp, Artificial Sequence
  Synthetic oligonucleotide; TTG chr11 5357426 5357447 5357431 5357426 -
ggtgcatatatgtttaggatag

SEQ ID NO: 120695 - DNA, 22 bp, Artificial Sequence
  Synthetic oligonucleotide; TTT chr11 5357411 5357432 5357416 5357411 -
aggatagttagctcttcttgtt

SEQ ID NO: 120696 - DNA, 22 bp, Artificial Sequence
  Synthetic oligonucleotide; TTA chr11 5357410 5357431 5357415 5357410 -
ggatagttagctcttcttgttg

SEQ ID NO: 120697 - DNA, 22 bp, Artificial Sequence
  Synthetic oligonucleotide; TTA chr11 5357401 5357422 5357406 5357401 -
gctcttcttgttgaattgatcc

SEQ ID NO: 120698 - DNA, 22 bp, Artificial Sequence
  Synthetic oligonucleotide; CTC chr11 5357397 5357418 5357402 5357397 -
ttcttgttgaattgatcccttt

SEQ ID NO: 120699 - DNA, 22 bp, Artificial Sequence
  Synthetic oligonucleotide; CTT chr11 5357395 5357416 5357400 5357395 -
cttgttgaattgatccctttac

SEQ ID NO: 120700 - DNA, 22 bp, Artificial Sequence
  Synthetic oligonucleotide; TTC chr11 5357394 5357415 5357399 5357394 -
ttgttgaattgatccctttacc

SEQ ID NO: 120701 - DNA, 22 bp, Artificial Sequence
  Synthetic oligonucleotide; CTT chr11 5357392 5357413 5357397 5357392 -
gttgaattgatccctttaccat

SEQ ID NO: 120702 - DNA, 22 bp, Artificial Sequence
  Synthetic oligonucleotide; TTG chr11 5357391 5357412 5357396 5357391 -
ttgaattgatccctttaccatt

SEQ ID NO: 120703 - DNA, 22 bp, Artificial Sequence
  Synthetic oligonucleotide; TTG chr11 5357388 5357409 5357393 5357388 -
aattgatccctttaccattatg

SEQ ID NO: 120704 - DNA, 22 bp, Artificial Sequence
  Synthetic oligonucleotide; TTG chr11 5357383 5357404 5357388 5357383 -
atccctttaccattatgtaatg

SEQ ID NO: 120705 - DNA, 22 bp, Artificial Sequence
  Synthetic oligonucleotide; CTT chr11 5357376 5357397 5357381 5357376 -
taccattatgtaatggccttct

SEQ ID NO: 120706 - DNA, 22 bp, Artificial Sequence
  Synthetic oligonucleotide; TTT chr11 5357375 5357396 5357380 5357375 -
accattatgtaatggccttctt

SEQ ID NO: 120707 - DNA, 22 bp, Artificial Sequence
  Synthetic oligonucleotide; TTA chr11 5357374 5357395 5357379 5357374 -
ccattatgtaatggccttcttt

SEQ ID NO: 120708 - DNA, 22 bp, Artificial Sequence
  Synthetic oligonucleotide; TTA chr11 5357368 5357389 5357373 5357368 -
tgtaatggccttctttgtctct

SEQ ID NO: 120709 - DNA, 22 bp, Artificial Sequence
  Synthetic oligonucleotide; CTT chr11 5357356 5357377 5357361 5357356 -
ctttgtctcttttgatctttgt

SEQ ID NO: 120710 - DNA, 22 bp, Artificial Sequence
  Synthetic oligonucleotide; TTC chr11 5357355 5357376 5357360 5357355 -
tttgtctcttttgatctttgtt

SEQ ID NO: 120711 - DNA, 22 bp, Artificial Sequence
  Synthetic oligonucleotide; CTT chr11 5357353 5357374 5357358 5357353 -
tgtctcttttgatctttgttgg

SEQ ID NO: 120712 - DNA, 22 bp, Artificial Sequence
  Synthetic oligonucleotide; TTT chr11 5357352 5357373 5357357 5357352 -
gtctcttttgatctttgttggt

SEQ ID NO: 120713 - DNA, 22 bp, Artificial Sequence
  Synthetic oligonucleotide; TTG chr11 5357351 5357372 5357356 5357351 -
tctcttttgatctttgttggtt

SEQ ID NO: 120714 - DNA, 22 bp, Artificial Sequence
  Synthetic oligonucleotide; CTC chr11 5357347 5357368 5357352 5357347 -
ttttgatctttgttggtttaaa

SEQ ID NO: 120715 - DNA, 22 bp, Artificial Sequence
  Synthetic oligonucleotide; CTT chr11 5357345 5357366 5357350 5357345 -
ttgatctttgttggtttaaagc

SEQ ID NO: 120716 - DNA, 22 bp, Artificial Sequence
  Synthetic oligonucleotide; TTT chr11 5357344 5357365 5357349 5357344 -
tgatctttgttggtttaaagcc

SEQ ID NO: 120717 - DNA, 22 bp, Artificial Sequence
  Synthetic oligonucleotide; TTT chr11 5357343 5357364 5357348 5357343 -
gatctttgttggtttaaagcct

SEQ ID NO: 120718 - DNA, 22 bp, Artificial Sequence
  Synthetic oligonucleotide; TTG chr11 5357342 5357363 5357347 5357342 -
atctttgttggtttaaagcctg

SEQ ID NO: 120719 - DNA, 22 bp, Artificial Sequence
  Synthetic oligonucleotide; CTT chr11 5357337 5357358 5357342 5357337 -
tgttggtttaaagcctgtttta

SEQ ID NO: 120720 - DNA, 22 bp, Artificial Sequence
  Synthetic oligonucleotide; TTT chr11 5357336 5357357 5357341 5357336 -
gttggtttaaagcctgttttat

SEQ ID NO: 120721 - DNA, 22 bp, Artificial Sequence
  Synthetic oligonucleotide; TTG chr11 5357335 5357356 5357340 5357335 -
ttggtttaaagcctgttttatc

SEQ ID NO: 120722 - DNA, 22 bp, Artificial Sequence
  Synthetic oligonucleotide; TTG chr11 5357332 5357353 5357337 5357332 -
gtttaaagcctgttttatcaga

SEQ ID NO: 120723 - DNA, 22 bp, Artificial Sequence
  Synthetic oligonucleotide; TTT chr11 5357328 5357349 5357333 5357328 -
aaagcctgttttatcagagatg

SEQ ID NO: 120724 - DNA, 22 bp, Artificial Sequence
  Synthetic oligonucleotide; TTA chr11 5357327 5357348 5357332 5357327 -
aagcctgttttatcagagatga

SEQ ID NO: 120725 - DNA, 22 bp, Artificial Sequence
  Synthetic oligonucleotide; CTG chr11 5357320 5357341 5357325 5357320 -
ttttatcagagatgaggattgc

SEQ ID NO: 120726 - DNA, 22 bp, Artificial Sequence
  Synthetic oligonucleotide; TTT chr11 5357317 5357338 5357322 5357317 -
tatcagagatgaggattgcaac

SEQ ID NO: 120727 - DNA, 22 bp, Artificial Sequence
  Synthetic oligonucleotide; TTT chr11 5357316 5357337 5357321 5357316 -
atcagagatgaggattgcaacc

SEQ ID NO: 120728 - DNA, 22 bp, Artificial Sequence
  Synthetic oligonucleotide; TTA chr11 5357315 5357336 5357320 5357315 -
tcagagatgaggattgcaaccc

SEQ ID NO: 120729 - DNA, 22 bp, Artificial Sequence
  Synthetic oligonucleotide; TTG chr11 5357299 5357320 5357304 5357299 -
caacccctgcctttttttgttt

SEQ ID NO: 120730 - DNA, 22 bp, Artificial Sequence
  Synthetic oligonucleotide; CTG chr11 5357290 5357311 5357295 5357290 -
cctttttttgttttccattttc

SEQ ID NO: 120731 - DNA, 22 bp, Artificial Sequence
  Synthetic oligonucleotide; CTT chr11 5357286 5357307 5357291 5357286 -
tttttgttttccattttcttgg

SEQ ID NO: 120732 - DNA, 22 bp, Artificial Sequence
  Synthetic oligonucleotide; TTT chr11 5357285 5357306 5357290 5357285 -
ttttgttttccattttcttggt

SEQ ID NO: 120733 - DNA, 22 bp, Artificial Sequence
  Synthetic oligonucleotide; TTT chr11 5357284 5357305 5357289 5357284 -
tttgttttccattttcttggta

SEQ ID NO: 120734 - DNA, 22 bp, Artificial Sequence
  Synthetic oligonucleotide; TTT chr11 5357283 5357304 5357288 5357283 -
ttgttttccattttcttggtag

SEQ ID NO: 120735 - DNA, 22 bp, Artificial Sequence
  Synthetic oligonucleotide; TTT chr11 5357282 5357303 5357287 5357282 -
tgttttccattttcttggtaga

SEQ ID NO: 120736 - DNA, 22 bp, Artificial Sequence
  Synthetic oligonucleotide; TTT chr11 5357281 5357302 5357286 5357281 -
gttttccattttcttggtagat

SEQ ID NO: 120737 - DNA, 22 bp, Artificial Sequence
  Synthetic oligonucleotide; TTG chr11 5357280 5357301 5357285 5357280 -
ttttccattttcttggtagatc

SEQ ID NO: 120738 - DNA, 22 bp, Artificial Sequence
  Synthetic oligonucleotide; TTT chr11 5357277 5357298 5357282 5357277 -
tccattttcttggtagatcttc

SEQ ID NO: 120739 - DNA, 22 bp, Artificial Sequence
  Synthetic oligonucleotide; TTT chr11 5357276 5357297 5357281 5357276 -
ccattttcttggtagatcttcc

SEQ ID NO: 120740 - DNA, 22 bp, Artificial Sequence
  Synthetic oligonucleotide; TTC chr11 5357275 5357296 5357280 5357275 -
cattttcttggtagatcttcct

SEQ ID NO: 120741 - DNA, 22 bp, Artificial Sequence
  Synthetic oligonucleotide; TTT chr11 5357270 5357291 5357275 5357270 -
tcttggtagatcttcctccatc

SEQ ID NO: 120742 - DNA, 22 bp, Artificial Sequence
  Synthetic oligonucleotide; TTT chr11 5357269 5357290 5357274 5357269 -
cttggtagatcttcctccatcc

SEQ ID NO: 120743 - DNA, 22 bp, Artificial Sequence
  Synthetic oligonucleotide; TTC chr11 5357268 5357289 5357273 5357268 -
ttggtagatcttcctccatccc

SEQ ID NO: 120744 - DNA, 22 bp, Artificial Sequence
  Synthetic oligonucleotide; CTT chr11 5357266 5357287 5357271 5357266 -
ggtagatcttcctccatccctt

SEQ ID NO: 120745 - DNA, 22 bp, Artificial Sequence
  Synthetic oligonucleotide; TTG chr11 5357265 5357286 5357270 5357265 -
gtagatcttcctccatcccttt

SEQ ID NO: 120746 - DNA, 22 bp, Artificial Sequence
  Synthetic oligonucleotide; CTT chr11 5357256 5357277 5357261 5357256 -
cctccatccctttattttgagc

SEQ ID NO: 120747 - DNA, 22 bp, Artificial Sequence
  Synthetic oligonucleotide; TTC chr11 5357255 5357276 5357260 5357255 -
ctccatccctttattttgagcc

SEQ ID NO: 120748 - DNA, 22 bp, Artificial Sequence
  Synthetic oligonucleotide; CTC chr11 5357252 5357273 5357257 5357252 -
catccctttattttgagcctat

SEQ ID NO: 120749 - DNA, 22 bp, Artificial Sequence
  Synthetic oligonucleotide; CTT chr11 5357244 5357265 5357249 5357244 -
tattttgagcctatgtgtgtgt

SEQ ID NO: 120750 - DNA, 22 bp, Artificial Sequence
  Synthetic oligonucleotide; TTT chr11 5357243 5357264 5357248 5357243 -
attttgagcctatgtgtgtgtg

SEQ ID NO: 120751 - DNA, 22 bp, Artificial Sequence
  Synthetic oligonucleotide; TTA chr11 5357242 5357263 5357247 5357242 -
ttttgagcctatgtgtgtgtgt

SEQ ID NO: 120752 - DNA, 22 bp, Artificial Sequence
  Synthetic oligonucleotide; TTT chr11 5357239 5357260 5357244 5357239 -
tgagcctatgtgtgtgtgtgca

SEQ ID NO: 120753 - DNA, 22 bp, Artificial Sequence
  Synthetic oligonucleotide; TTT chr11 5357238 5357259 5357243 5357238 -
gagcctatgtgtgtgtgtgcac

SEQ ID NO: 120754 - DNA, 22 bp, Artificial Sequence
  Synthetic oligonucleotide; TTG chr11 5357237 5357258 5357242 5357237 -
agcctatgtgtgtgtgtgcaca

SEQ ID NO: 120755 - DNA, 22 bp, Artificial Sequence
  Synthetic oligonucleotide; CTA chr11 5357231 5357252 5357236 5357231 -
tgtgtgtgtgtgcacatgagat

SEQ ID NO: 120756 - DNA, 22 bp, Artificial Sequence
  Synthetic oligonucleotide; TTT chr11 5357203 5357224 5357208 5357203 -
cctgaatacagcacactgatgg

SEQ ID NO: 120757 - DNA, 22 bp, Artificial Sequence
  Synthetic oligonucleotide; TTC chr11 5357202 5357223 5357207 5357202 -
ctgaatacagcacactgatggg

SEQ ID NO: 120758 - DNA, 22 bp, Artificial Sequence
  Synthetic oligonucleotide; CTG chr11 5357199 5357220 5357204 5357199 -
aatacagcacactgatgggtct

SEQ ID NO: 120759 - DNA, 22 bp, Artificial Sequence
  Synthetic oligonucleotide; CTG chr11 5357185 5357206 5357190 5357185 -
atgggtcttgactctttatcta

SEQ ID NO: 120760 - DNA, 22 bp, Artificial Sequence
  Synthetic oligonucleotide; CTT chr11 5357176 5357197 5357181 5357176 -
gactctttatctaatttgcccg

SEQ ID NO: 120761 - DNA, 22 bp, Artificial Sequence
  Synthetic oligonucleotide; TTG chr11 5357175 5357196 5357180 5357175 -
actctttatctaatttgcccgt

SEQ ID NO: 120762 - DNA, 22 bp, Artificial Sequence
  Synthetic oligonucleotide; CTC chr11 5357171 5357192 5357176 5357171 -
tttatctaatttgcccgtctgt

SEQ ID NO: 120763 - DNA, 22 bp, Artificial Sequence
  Synthetic oligonucleotide; CTT chr11 5357169 5357190 5357174 5357169 -
tatctaatttgcccgtctgtgt

SEQ ID NO: 120764 - DNA, 22 bp, Artificial Sequence
  Synthetic oligonucleotide; TTT chr11 5357168 5357189 5357173 5357168 -
atctaatttgcccgtctgtgtc

SEQ ID NO: 120765 - DNA, 22 bp, Artificial Sequence
  Synthetic oligonucleotide; TTA chr11 5357167 5357188 5357172 5357167 -
tctaatttgcccgtctgtgtct

SEQ ID NO: 120766 - DNA, 22 bp, Artificial Sequence
  Synthetic oligonucleotide; CTA chr11 5357163 5357184 5357168 5357163 -
atttgcccgtctgtgtcttttt

SEQ ID NO: 120767 - DNA, 22 bp, Artificial Sequence
  Synthetic oligonucleotide; TTT chr11 5357159 5357180 5357164 5357159 -
gcccgtctgtgtctttttactg

SEQ ID NO: 120768 - DNA, 22 bp, Artificial Sequence
  Synthetic oligonucleotide; TTG chr11 5357158 5357179 5357163 5357158 -
cccgtctgtgtctttttactgg

SEQ ID NO: 120769 - DNA, 22 bp, Artificial Sequence
  Synthetic oligonucleotide; CTG chr11 5357150 5357171 5357155 5357150 -
tgtctttttactggagcattta

SEQ ID NO: 120770 - DNA, 22 bp, Artificial Sequence
  Synthetic oligonucleotide; CTT chr11 5357144 5357165 5357149 5357144 -
tttactggagcatttagcccat

SEQ ID NO: 120771 - DNA, 22 bp, Artificial Sequence
  Synthetic oligonucleotide; TTT chr11 5357143 5357164 5357148 5357143 -
ttactggagcatttagcccatt

SEQ ID NO: 120772 - DNA, 22 bp, Artificial Sequence
  Synthetic oligonucleotide; TTT chr11 5357142 5357163 5357147 5357142 -
tactggagcatttagcccattt

SEQ ID NO: 120773 - DNA, 22 bp, Artificial Sequence
  Synthetic oligonucleotide; TTT chr11 5357141 5357162 5357146 5357141 -
actggagcatttagcccattta

SEQ ID NO: 120774 - DNA, 22 bp, Artificial Sequence
  Synthetic oligonucleotide; TTA chr11 5357140 5357161 5357145 5357140 -
ctggagcatttagcccatttac

SEQ ID NO: 120775 - DNA, 22 bp, Artificial Sequence
  Synthetic oligonucleotide; CTG chr11 5357137 5357158 5357142 5357137 -
gagcatttagcccatttacatt

SEQ ID NO: 120776 - DNA, 22 bp, Artificial Sequence
  Synthetic oligonucleotide; TTT chr11 5357129 5357150 5357134 5357129 -
agcccatttacattaaggttaa

SEQ ID NO: 120777 - DNA, 22 bp, Artificial Sequence
  Synthetic oligonucleotide; TTA chr11 5357128 5357149 5357133 5357128 -
gcccatttacattaaggttaat

SEQ ID NO: 120778 - DNA, 22 bp, Artificial Sequence
  Synthetic oligonucleotide; TTT chr11 5357120 5357141 5357125 5357120 -
acattaaggttaatattgttat

SEQ ID NO: 120779 - DNA, 22 bp, Artificial Sequence
  Synthetic oligonucleotide; TTA chr11 5357119 5357140 5357124 5357119 -
cattaaggttaatattgttatg

SEQ ID NO: 120780 - DNA, 22 bp, Artificial Sequence
  Synthetic oligonucleotide; TTA chr11 5357114 5357135 5357119 5357114 -
aggttaatattgttatgtgtga

SEQ ID NO: 120781 - DNA, 22 bp, Artificial Sequence
  Synthetic oligonucleotide; TTA chr11 5357108 5357129 5357113 5357108 -
atattgttatgtgtgaatttga

SEQ ID NO: 120782 - DNA, 22 bp, Artificial Sequence
  Synthetic oligonucleotide; TTG chr11 5357102 5357123 5357107 5357102 -
ttatgtgtgaatttgatcctgt

SEQ ID NO: 120783 - DNA, 22 bp, Artificial Sequence
  Synthetic oligonucleotide; TTA chr11 5357099 5357120 5357104 5357099 -
tgtgtgaatttgatcctgtcat

SEQ ID NO: 120784 - DNA, 22 bp, Artificial Sequence
  Synthetic oligonucleotide; TTT chr11 5357088 5357109 5357093 5357088 -
gatcctgtcattatgatgttag

SEQ ID NO: 120785 - DNA, 22 bp, Artificial Sequence
  Synthetic oligonucleotide; TTG chr11 5357087 5357108 5357092 5357087 -
atcctgtcattatgatgttagc

SEQ ID NO: 120786 - DNA, 22 bp, Artificial Sequence
  Synthetic oligonucleotide; CTG chr11 5357081 5357102 5357086 5357081 -
tcattatgatgttagctggtta

SEQ ID NO: 120787 - DNA, 22 bp, Artificial Sequence
  Synthetic oligonucleotide; TTA chr11 5357075 5357096 5357080 5357075 -
tgatgttagctggttattttgc

SEQ ID NO: 120788 - DNA, 22 bp, Artificial Sequence
  Synthetic oligonucleotide; TTA chr11 5357067 5357088 5357072 5357067 -
gctggttattttgctcattagt

SEQ ID NO: 120789 - DNA, 22 bp, Artificial Sequence
  Synthetic oligonucleotide; CTG chr11 5357063 5357084 5357068 5357063 -
gttattttgctcattagttgat

SEQ ID NO: 120790 - DNA, 22 bp, Artificial Sequence
  Synthetic oligonucleotide; TTA chr11 5357059 5357080 5357064 5357059 -
ttttgctcattagttgatgcag

SEQ ID NO: 120791 - DNA, 22 bp, Artificial Sequence
  Synthetic oligonucleotide; TTT chr11 5357056 5357077 5357061 5357056 -
tgctcattagttgatgcagttt

SEQ ID NO: 120792 - DNA, 22 bp, Artificial Sequence
  Synthetic oligonucleotide; TTT chr11 5357055 5357076 5357060 5357055 -
gctcattagttgatgcagtttc

SEQ ID NO: 120793 - DNA, 22 bp, Artificial Sequence
  Synthetic oligonucleotide; TTG chr11 5357054 5357075 5357059 5357054 -
ctcattagttgatgcagtttct

SEQ ID NO: 120794 - DNA, 22 bp, Artificial Sequence
  Synthetic oligonucleotide; CTC chr11 5357051 5357072 5357056 5357051 -
attagttgatgcagtttcttcc

SEQ ID NO: 120795 - DNA, 22 bp, Artificial Sequence
  Synthetic oligonucleotide; TTA chr11 5357047 5357068 5357052 5357047 -
gttgatgcagtttcttcctagc

SEQ ID NO: 120796 - DNA, 22 bp, Artificial Sequence
  Synthetic oligonucleotide; TTG chr11 5357043 5357064 5357048 5357043 -
atgcagtttcttcctagcctca

SEQ ID NO: 120797 - DNA, 22 bp, Artificial Sequence
  Synthetic oligonucleotide; TTT chr11 5357034 5357055 5357039 5357034 -
cttcctagcctcaatggtcttt

SEQ ID NO: 120798 - DNA, 22 bp, Artificial Sequence
  Synthetic oligonucleotide; TTC chr11 5357033 5357054 5357038 5357033 -
ttcctagcctcaatggtcttta

SEQ ID NO: 120799 - DNA, 22 bp, Artificial Sequence
  Synthetic oligonucleotide; CTT chr11 5357031 5357052 5357036 5357031 -
cctagcctcaatggtctttaca

SEQ ID NO: 120800 - DNA, 22 bp, Artificial Sequence
  Synthetic oligonucleotide; TTC chr11 5357030 5357051 5357035 5357030 -
ctagcctcaatggtctttacaa

SEQ ID NO: 120801 - DNA, 22 bp, Artificial Sequence
  Synthetic oligonucleotide; CTA chr11 5357027 5357048 5357032 5357027 -
gcctcaatggtctttacaattt

SEQ ID NO: 120802 - DNA, 22 bp, Artificial Sequence
  Synthetic oligonucleotide; CTC chr11 5357022 5357043 5357027 5357022 -
aatggtctttacaatttggcat

SEQ ID NO: 120803 - DNA, 22 bp, Artificial Sequence
  Synthetic oligonucleotide; CTT chr11 5357013 5357034 5357018 5357013 -
tacaatttggcatgtttttgca

SEQ ID NO: 120804 - DNA, 22 bp, Artificial Sequence
  Synthetic oligonucleotide; TTT chr11 5357012 5357033 5357017 5357012 -
acaatttggcatgtttttgcag

SEQ ID NO: 120805 - DNA, 22 bp, Artificial Sequence
  Synthetic oligonucleotide; TTA chr11 5357011 5357032 5357016 5357011 -
caatttggcatgtttttgcagt

SEQ ID NO: 120806 - DNA, 22 bp, Artificial Sequence
  Synthetic oligonucleotide; TTT chr11 5357005 5357026 5357010 5357005 -
ggcatgtttttgcagtggctgg

SEQ ID NO: 120807 - DNA, 22 bp, Artificial Sequence
  Synthetic oligonucleotide; TTG chr11 5357004 5357025 5357009 5357004 -
gcatgtttttgcagtggctggt

SEQ ID NO: 120808 - DNA, 22 bp, Artificial Sequence
  Synthetic oligonucleotide; TTT chr11 5356996 5357017 5357001 5356996 -
ttgcagtggctggtaccggttg

SEQ ID NO: 120809 - DNA, 22 bp, Artificial Sequence
  Synthetic oligonucleotide; TTT chr11 5356995 5357016 5357000 5356995 -
tgcagtggctggtaccggttgt

SEQ ID NO: 120810 - DNA, 22 bp, Artificial Sequence
  Synthetic oligonucleotide; TTT chr11 5356994 5357015 5356999 5356994 -
gcagtggctggtaccggttgtg

SEQ ID NO: 120811 - DNA, 22 bp, Artificial Sequence
  Synthetic oligonucleotide; TTG chr11 5356993 5357014 5356998 5356993 -
cagtggctggtaccggttgtgc

SEQ ID NO: 120812 - DNA, 22 bp, Artificial Sequence
  Synthetic oligonucleotide; CTG chr11 5356984 5357005 5356989 5356984 -
gtaccggttgtgcctttccata

SEQ ID NO: 120813 - DNA, 22 bp, Artificial Sequence
  Synthetic oligonucleotide; TTG chr11 5356974 5356995 5356979 5356974 -
tgcctttccatatttagtgctt

SEQ ID NO: 120814 - DNA, 22 bp, Artificial Sequence
  Synthetic oligonucleotide; CTT chr11 5356968 5356989 5356973 5356968 -
tccatatttagtgcttccttca

SEQ ID NO: 120815 - DNA, 22 bp, Artificial Sequence
  Synthetic oligonucleotide; TTT chr11 5356967 5356988 5356972 5356967 -
ccatatttagtgcttccttcag

SEQ ID NO: 120816 - DNA, 22 bp, Artificial Sequence
  Synthetic oligonucleotide; TTC chr11 5356966 5356987 5356971 5356966 -
catatttagtgcttccttcagg

SEQ ID NO: 120817 - DNA, 22 bp, Artificial Sequence
  Synthetic oligonucleotide; TTT chr11 5356959 5356980 5356964 5356959 -
agtgcttccttcaggagctctt

SEQ ID NO: 120818 - DNA, 22 bp, Artificial Sequence
  Synthetic oligonucleotide; TTA chr11 5356958 5356979 5356963 5356958 -
gtgcttccttcaggagctcttt

SEQ ID NO: 120819 - DNA, 22 bp, Artificial Sequence
  Synthetic oligonucleotide; CTT chr11 5356952 5356973 5356957 5356952 -
ccttcaggagctcttttaggtc

SEQ ID NO: 120820 - DNA, 22 bp, Artificial Sequence
  Synthetic oligonucleotide; TTC chr11 5356951 5356972 5356956 5356951 -
cttcaggagctcttttaggtca

SEQ ID NO: 120821 - DNA, 22 bp, Artificial Sequence
  Synthetic oligonucleotide; CTT chr11 5356948 5356969 5356953 5356948 -
caggagctcttttaggtcaggc

SEQ ID NO: 120822 - DNA, 22 bp, Artificial Sequence
  Synthetic oligonucleotide; TTC chr11 5356947 5356968 5356952 5356947 -
aggagctcttttaggtcaggcc

SEQ ID NO: 120823 - DNA, 22 bp, Artificial Sequence
  Synthetic oligonucleotide; CTC chr11 5356939 5356960 5356944 5356939 -
ttttaggtcaggcctggtgatg

SEQ ID NO: 120824 - DNA, 22 bp, Artificial Sequence
  Synthetic oligonucleotide; CTT chr11 5356937 5356958 5356942 5356937 -
ttaggtcaggcctggtgatgac

SEQ ID NO: 120825 - DNA, 22 bp, Artificial Sequence
  Synthetic oligonucleotide; TTT chr11 5356936 5356957 5356941 5356936 -
taggtcaggcctggtgatgaca

SEQ ID NO: 120826 - DNA, 22 bp, Artificial Sequence
  Synthetic oligonucleotide; TTT chr11 5356935 5356956 5356940 5356935 -
aggtcaggcctggtgatgacaa

SEQ ID NO: 120827 - DNA, 22 bp, Artificial Sequence
  Synthetic oligonucleotide; TTA chr11 5356934 5356955 5356939 5356934 -
ggtcaggcctggtgatgacaaa

SEQ ID NO: 120828 - DNA, 22 bp, Artificial Sequence
  Synthetic oligonucleotide; CTG chr11 5356923 5356944 5356928 5356923 -
gtgatgacaaaatctctcagca

SEQ ID NO: 120829 - DNA, 22 bp, Artificial Sequence
  Synthetic oligonucleotide; CTC chr11 5356907 5356928 5356912 5356907 -
tcagcatttgcttgtctgtaaa

SEQ ID NO: 120830 - DNA, 22 bp, Artificial Sequence
  Synthetic oligonucleotide; CTC chr11 5356905 5356926 5356910 5356905 -
agcatttgcttgtctgtaaagt

SEQ ID NO: 120831 - DNA, 22 bp, Artificial Sequence
  Synthetic oligonucleotide; TTT chr11 5356898 5356919 5356903 5356898 -
gcttgtctgtaaagtattttat

SEQ ID NO: 120832 - DNA, 22 bp, Artificial Sequence
  Synthetic oligonucleotide; TTG chr11 5356897 5356918 5356902 5356897 -
cttgtctgtaaagtattttatt

SEQ ID NO: 120833 - DNA, 22 bp, Artificial Sequence
  Synthetic oligonucleotide; CTT chr11 5356894 5356915 5356899 5356894 -
gtctgtaaagtattttatttct

SEQ ID NO: 120834 - DNA, 22 bp, Artificial Sequence
  Synthetic oligonucleotide; TTG chr11 5356893 5356914 5356898 5356893 -
tctgtaaagtattttatttctc

SEQ ID NO: 120835 - DNA, 22 bp, Artificial Sequence
  Synthetic oligonucleotide; CTG chr11 5356889 5356910 5356894 5356889 -
taaagtattttatttctccttc

SEQ ID NO: 120836 - DNA, 22 bp, Artificial Sequence
  Synthetic oligonucleotide; TTT chr11 5356879 5356900 5356884 5356879 -
tatttctccttcacttatgaag

SEQ ID NO: 120837 - DNA, 22 bp, Artificial Sequence
  Synthetic oligonucleotide; TTT chr11 5356878 5356899 5356883 5356878 -
atttctccttcacttatgaagc

SEQ ID NO: 120838 - DNA, 22 bp, Artificial Sequence
  Synthetic oligonucleotide; TTA chr11 5356877 5356898 5356882 5356877 -
tttctccttcacttatgaagct

SEQ ID NO: 120839 - DNA, 22 bp, Artificial Sequence
  Synthetic oligonucleotide; TTT chr11 5356874 5356895 5356879 5356874 -
ctccttcacttatgaagcttag

SEQ ID NO: 120840 - DNA, 22 bp, Artificial Sequence
  Synthetic oligonucleotide; TTC chr11 5356873 5356894 5356878 5356873 -
tccttcacttatgaagcttagt

SEQ ID NO: 120841 - DNA, 22 bp, Artificial Sequence
  Synthetic oligonucleotide; CTC chr11 5356871 5356892 5356876 5356871 -
cttcacttatgaagcttagttt

SEQ ID NO: 120842 - DNA, 22 bp, Artificial Sequence
  Synthetic oligonucleotide; CTT chr11 5356868 5356889 5356873 5356868 -
cacttatgaagcttagtttggc

SEQ ID NO: 120843 - DNA, 22 bp, Artificial Sequence
  Synthetic oligonucleotide; TTC chr11 5356867 5356888 5356872 5356867 -
acttatgaagcttagtttggct

SEQ ID NO: 120844 - DNA, 22 bp, Artificial Sequence
  Synthetic oligonucleotide; CTT chr11 5356863 5356884 5356868 5356863 -
atgaagcttagtttggctggat

SEQ ID NO: 120845 - DNA, 22 bp, Artificial Sequence
  Synthetic oligonucleotide; TTA chr11 5356862 5356883 5356867 5356862 -
tgaagcttagtttggctggata

SEQ ID NO: 120846 - DNA, 22 bp, Artificial Sequence
  Synthetic oligonucleotide; CTT chr11 5356854 5356875 5356859 5356854 -
agtttggctggatatgaaattc

SEQ ID NO: 120847 - DNA, 22 bp, Artificial Sequence
  Synthetic oligonucleotide; TTA chr11 5356853 5356874 5356858 5356853 -
gtttggctggatatgaaattct

SEQ ID NO: 120848 - DNA, 22 bp, Artificial Sequence
  Synthetic oligonucleotide; TTT chr11 5356849 5356870 5356854 5356849 -
ggctggatatgaaattctgtgt

SEQ ID NO: 120849 - DNA, 22 bp, Artificial Sequence
  Synthetic oligonucleotide; TTG chr11 5356848 5356869 5356853 5356848 -
gctggatatgaaattctgtgtt

SEQ ID NO: 120850 - DNA, 22 bp, Artificial Sequence
  Synthetic oligonucleotide; CTG chr11 5356844 5356865 5356849 5356844 -
gatatgaaattctgtgttgaaa

SEQ ID NO: 120851 - DNA, 22 bp, Artificial Sequence
  Synthetic oligonucleotide; TTC chr11 5356832 5356853 5356837 5356832 -
tgtgttgaaaattctttccttt

SEQ ID NO: 120852 - DNA, 22 bp, Artificial Sequence
  Synthetic oligonucleotide; CTG chr11 5356830 5356851 5356835 5356830 -
tgttgaaaattctttcctttaa

SEQ ID NO: 120853 - DNA, 22 bp, Artificial Sequence
  Synthetic oligonucleotide; TTG chr11 5356825 5356846 5356830 5356825 -
aaaattctttcctttaaggatg

SEQ ID NO: 120854 - DNA, 22 bp, Artificial Sequence
  Synthetic oligonucleotide; TTC chr11 5356818 5356839 5356823 5356818 -
tttcctttaaggatgttgaata

SEQ ID NO: 120855 - DNA, 22 bp, Artificial Sequence
  Synthetic oligonucleotide; CTT chr11 5356816 5356837 5356821 5356816 -
tcctttaaggatgttgaatatt

SEQ ID NO: 120856 - DNA, 22 bp, Artificial Sequence
  Synthetic oligonucleotide; TTT chr11 5356815 5356836 5356820 5356815 -
cctttaaggatgttgaatattg

SEQ ID NO: 120857 - DNA, 22 bp, Artificial Sequence
  Synthetic oligonucleotide; TTC chr11 5356814 5356835 5356819 5356814 -
ctttaaggatgttgaatattgg

SEQ ID NO: 120858 - DNA, 22 bp, Artificial Sequence
  Synthetic oligonucleotide; CTT chr11 5356811 5356832 5356816 5356811 -
taaggatgttgaatattggccc

SEQ ID NO: 120859 - DNA, 22 bp, Artificial Sequence
  Synthetic oligonucleotide; TTT chr11 5356810 5356831 5356815 5356810 -
aaggatgttgaatattggcccc

SEQ ID NO: 120860 - DNA, 22 bp, Artificial Sequence
  Synthetic oligonucleotide; TTA chr11 5356809 5356830 5356814 5356809 -
aggatgttgaatattggccccc

SEQ ID NO: 120861 - DNA, 22 bp, Artificial Sequence
  Synthetic oligonucleotide; TTG chr11 5356800 5356821 5356805 5356800 -
aatattggcccccactctcttc

SEQ ID NO: 120862 - DNA, 22 bp, Artificial Sequence
  Synthetic oligonucleotide; TTG chr11 5356793 5356814 5356798 5356793 -
gcccccactctcttctggcttg

SEQ ID NO: 120863 - DNA, 22 bp, Artificial Sequence
  Synthetic oligonucleotide; CTC chr11 5356783 5356804 5356788 5356783 -
tcttctggcttgtagagtttct

SEQ ID NO: 120864 - DNA, 22 bp, Artificial Sequence
  Synthetic oligonucleotide; CTC chr11 5356781 5356802 5356786 5356781 -
ttctggcttgtagagtttctgc

SEQ ID NO: 120865 - DNA, 22 bp, Artificial Sequence
  Synthetic oligonucleotide; CTT chr11 5356779 5356800 5356784 5356779 -
ctggcttgtagagtttctgctg

SEQ ID NO: 120866 - DNA, 22 bp, Artificial Sequence
  Synthetic oligonucleotide; TTC chr11 5356778 5356799 5356783 5356778 -
tggcttgtagagtttctgctga

SEQ ID NO: 120867 - DNA, 22 bp, Artificial Sequence
  Synthetic oligonucleotide; CTG chr11 5356776 5356797 5356781 5356776 -
gcttgtagagtttctgctgaga

SEQ ID NO: 120868 - DNA, 22 bp, Artificial Sequence
  Synthetic oligonucleotide; CTT chr11 5356772 5356793 5356777 5356772 -
gtagagtttctgctgagagatc

SEQ ID NO: 120869 - DNA, 22 bp, Artificial Sequence
  Synthetic oligonucleotide; TTG chr11 5356771 5356792 5356776 5356771 -
tagagtttctgctgagagatct

SEQ ID NO: 120870 - DNA, 22 bp, Artificial Sequence
  Synthetic oligonucleotide; TTT chr11 5356763 5356784 5356768 5356763 -
ctgctgagagatctgctgttat

SEQ ID NO: 120871 - DNA, 22 bp, Artificial Sequence
  Synthetic oligonucleotide; TTC chr11 5356762 5356783 5356767 5356762 -
tgctgagagatctgctgttatt

SEQ ID NO: 120872 - DNA, 22 bp, Artificial Sequence
  Synthetic oligonucleotide; CTG chr11 5356760 5356781 5356765 5356760 -
ctgagagatctgctgttattct

SEQ ID NO: 120873 - DNA, 22 bp, Artificial Sequence
  Synthetic oligonucleotide; CTG chr11 5356757 5356778 5356762 5356757 -
agagatctgctgttattctgat

SEQ ID NO: 120874 - DNA, 22 bp, Artificial Sequence
  Synthetic oligonucleotide; CTG chr11 5356748 5356769 5356753 5356748 -
ctgttattctgatgggcttccc

SEQ ID NO: 120875 - DNA, 22 bp, Artificial Sequence
  Synthetic oligonucleotide; CTG chr11 5356745 5356766 5356750 5356745 -
ttattctgatgggcttcccttt

SEQ ID NO: 120876 - DNA, 22 bp, Artificial Sequence
  Synthetic oligonucleotide; TTA chr11 5356742 5356763 5356747 5356742 -
ttctgatgggcttccctttgtg

SEQ ID NO: 120877 - DNA, 22 bp, Artificial Sequence
  Synthetic oligonucleotide; TTC chr11 5356739 5356760 5356744 5356739 -
tgatgggcttccctttgtgggt

SEQ ID NO: 120878 - DNA, 22 bp, Artificial Sequence
  Synthetic oligonucleotide; CTG chr11 5356737 5356758 5356742 5356737 -
atgggcttccctttgtgggtaa

SEQ ID NO: 120879 - DNA, 22 bp, Artificial Sequence
  Synthetic oligonucleotide; CTT chr11 5356729 5356750 5356734 5356729 -
ccctttgtgggtaacccgacct

SEQ ID NO: 120880 - DNA, 22 bp, Artificial Sequence
  Synthetic oligonucleotide; TTC chr11 5356728 5356749 5356733 5356728 -
cctttgtgggtaacccgacctt

SEQ ID NO: 120881 - DNA, 22 bp, Artificial Sequence
  Synthetic oligonucleotide; CTT chr11 5356724 5356745 5356729 5356724 -
tgtgggtaacccgacctttctc

SEQ ID NO: 120882 - DNA, 22 bp, Artificial Sequence
  Synthetic oligonucleotide; TTT chr11 5356723 5356744 5356728 5356723 -
gtgggtaacccgacctttctct

SEQ ID NO: 120883 - DNA, 22 bp, Artificial Sequence
  Synthetic oligonucleotide; TTG chr11 5356722 5356743 5356727 5356722 -
tgggtaacccgacctttctctc

SEQ ID NO: 120884 - DNA, 22 bp, Artificial Sequence
  Synthetic oligonucleotide; CTT chr11 5356706 5356727 5356711 5356706 -
tctctctggctacccttaacat

SEQ ID NO: 120885 - DNA, 22 bp, Artificial Sequence
  Synthetic oligonucleotide; TTT chr11 5356705 5356726 5356710 5356705 -
ctctctggctacccttaacatt

SEQ ID NO: 120886 - DNA, 22 bp, Artificial Sequence
  Synthetic oligonucleotide; TTC chr11 5356704 5356725 5356709 5356704 -
tctctggctacccttaacattt

SEQ ID NO: 120887 - DNA, 22 bp, Artificial Sequence
  Synthetic oligonucleotide; CTC chr11 5356702 5356723 5356707 5356702 -
tctggctacccttaacattttt

SEQ ID NO: 120888 - DNA, 22 bp, Artificial Sequence
  Synthetic oligonucleotide; CTC chr11 5356700 5356721 5356705 5356700 -
tggctacccttaacatttttcc

SEQ ID NO: 120889 - DNA, 22 bp, Artificial Sequence
  Synthetic oligonucleotide; CTG chr11 5356698 5356719 5356703 5356698 -
gctacccttaacatttttccct

SEQ ID NO: 120890 - DNA, 22 bp, Artificial Sequence
  Synthetic oligonucleotide; CTA chr11 5356694 5356715 5356699 5356694 -
cccttaacatttttcccttcat

SEQ ID NO: 120891 - DNA, 22 bp, Artificial Sequence
  Synthetic oligonucleotide; CTT chr11 5356689 5356710 5356694 5356689 -
aacatttttcccttcatttcaa

SEQ ID NO: 120892 - DNA, 22 bp, Artificial Sequence
  Synthetic oligonucleotide; TTA chr11 5356688 5356709 5356693 5356688 -
acatttttcccttcatttcaac

SEQ ID NO: 120893 - DNA, 22 bp, Artificial Sequence
  Synthetic oligonucleotide; TTT chr11 5356682 5356703 5356687 5356682 -
ttcccttcatttcaactttggt

SEQ ID NO: 120894 - DNA, 22 bp, Artificial Sequence
  Synthetic oligonucleotide; TTT chr11 5356681 5356702 5356686 5356681 -
tcccttcatttcaactttggtg

SEQ ID NO: 120895 - DNA, 22 bp, Artificial Sequence
  Synthetic oligonucleotide; TTT chr11 5356680 5356701 5356685 5356680 -
cccttcatttcaactttggtga

SEQ ID NO: 120896 - DNA, 22 bp, Artificial Sequence
  Synthetic oligonucleotide; TTC chr11 5356679 5356700 5356684 5356679 -
ccttcatttcaactttggtgaa

SEQ ID NO: 120897 - DNA, 22 bp, Artificial Sequence
  Synthetic oligonucleotide; CTT chr11 5356675 5356696 5356680 5356675 -
catttcaactttggtgaatctg

SEQ ID NO: 120898 - DNA, 22 bp, Artificial Sequence
  Synthetic oligonucleotide; TTC chr11 5356674 5356695 5356679 5356674 -
atttcaactttggtgaatctga

SEQ ID NO: 120899 - DNA, 22 bp, Artificial Sequence
  Synthetic oligonucleotide; TTT chr11 5356670 5356691 5356675 5356670 -
caactttggtgaatctgacaat

SEQ ID NO: 120900 - DNA, 22 bp, Artificial Sequence
  Synthetic oligonucleotide; TTC chr11 5356669 5356690 5356674 5356669 -
aactttggtgaatctgacaatt

SEQ ID NO: 120901 - DNA, 22 bp, Artificial Sequence
  Synthetic oligonucleotide; CTT chr11 5356664 5356685 5356669 5356664 -
tggtgaatctgacaattatgtg

SEQ ID NO: 120902 - DNA, 22 bp, Artificial Sequence
  Synthetic oligonucleotide; TTT chr11 5356663 5356684 5356668 5356663 -
ggtgaatctgacaattatgtgc

SEQ ID NO: 120903 - DNA, 22 bp, Artificial Sequence
  Synthetic oligonucleotide; TTG chr11 5356662 5356683 5356667 5356662 -
gtgaatctgacaattatgtgcc

SEQ ID NO: 120904 - DNA, 22 bp, Artificial Sequence
  Synthetic oligonucleotide; CTG chr11 5356653 5356674 5356658 5356653 -
acaattatgtgccttgtagttg

SEQ ID NO: 120905 - DNA, 22 bp, Artificial Sequence
  Synthetic oligonucleotide; TTA chr11 5356646 5356667 5356651 5356646 -
tgtgccttgtagttgctcttct

SEQ ID NO: 120906 - DNA, 22 bp, Artificial Sequence
  Synthetic oligonucleotide; CTT chr11 5356638 5356659 5356643 5356638 -
gtagttgctcttctcaaggagt

SEQ ID NO: 120907 - DNA, 22 bp, Artificial Sequence
  Synthetic oligonucleotide; TTG chr11 5356637 5356658 5356642 5356637 -
tagttgctcttctcaaggagta

SEQ ID NO: 120908 - DNA, 22 bp, Artificial Sequence
  Synthetic oligonucleotide; TTG chr11 5356631 5356652 5356636 5356631 -
ctcttctcaaggagtatctttg

SEQ ID NO: 120909 - DNA, 22 bp, Artificial Sequence
  Synthetic oligonucleotide; CTC chr11 5356628 5356649 5356633 5356628 -
ttctcaaggagtatctttgtgg

SEQ ID NO: 120910 - DNA, 22 bp, Artificial Sequence
  Synthetic oligonucleotide; CTT chr11 5356626 5356647 5356631 5356626 -
ctcaaggagtatctttgtggcg

SEQ ID NO: 120911 - DNA, 22 bp, Artificial Sequence
  Synthetic oligonucleotide; TTC chr11 5356625 5356646 5356630 5356625 -
tcaaggagtatctttgtggcgt

SEQ ID NO: 120912 - DNA, 22 bp, Artificial Sequence
  Synthetic oligonucleotide; CTC chr11 5356623 5356644 5356628 5356623 -
aaggagtatctttgtggcgttc

SEQ ID NO: 120913 - DNA, 22 bp, Artificial Sequence
  Synthetic oligonucleotide; CTT chr11 5356611 5356632 5356616 5356611 -
tgtggcgttctctgtatttcct

SEQ ID NO: 120914 - DNA, 22 bp, Artificial Sequence
  Synthetic oligonucleotide; TTT chr11 5356610 5356631 5356615 5356610 -
gtggcgttctctgtatttcctg

SEQ ID NO: 120915 - DNA, 22 bp, Artificial Sequence
  Synthetic oligonucleotide; TTG chr11 5356609 5356630 5356614 5356609 -
tggcgttctctgtatttcctga

SEQ ID NO: 120916 - DNA, 22 bp, Artificial Sequence
  Synthetic oligonucleotide; TTC chr11 5356601 5356622 5356606 5356601 -
tctgtatttcctgaatttgaat

SEQ ID NO: 120917 - DNA, 22 bp, Artificial Sequence
  Synthetic oligonucleotide; CTC chr11 5356599 5356620 5356604 5356599 -
tgtatttcctgaatttgaatgt

SEQ ID NO: 120918 - DNA, 22 bp, Artificial Sequence
  Synthetic oligonucleotide; CTG chr11 5356597 5356618 5356602 5356597 -
tatttcctgaatttgaatgttg

SEQ ID NO: 120919 - DNA, 22 bp, Artificial Sequence
  Synthetic oligonucleotide; TTT chr11 5356592 5356613 5356597 5356592 -
cctgaatttgaatgttgacctg

SEQ ID NO: 120920 - DNA, 22 bp, Artificial Sequence
  Synthetic oligonucleotide; TTC chr11 5356591 5356612 5356596 5356591 -
ctgaatttgaatgttgacctgc

SEQ ID NO: 120921 - DNA, 22 bp, Artificial Sequence
  Synthetic oligonucleotide; CTG chr11 5356588 5356609 5356593 5356588 -
aatttgaatgttgacctgcctt

SEQ ID NO: 120922 - DNA, 22 bp, Artificial Sequence
  Synthetic oligonucleotide; TTT chr11 5356583 5356604 5356588 5356583 -
gaatgttgacctgccttgctag

SEQ ID NO: 120923 - DNA, 22 bp, Artificial Sequence
  Synthetic oligonucleotide; TTG chr11 5356582 5356603 5356587 5356582 -
aatgttgacctgccttgctaga

SEQ ID NO: 120924 - DNA, 22 bp, Artificial Sequence
  Synthetic oligonucleotide; TTG chr11 5356575 5356596 5356580 5356575 -
acctgccttgctagattgggga

SEQ ID NO: 120925 - DNA, 22 bp, Artificial Sequence
  Synthetic oligonucleotide; CTG chr11 5356570 5356591 5356575 5356570 -
ccttgctagattggggaagttc

SEQ ID NO: 120926 - DNA, 22 bp, Artificial Sequence
  Synthetic oligonucleotide; CTT chr11 5356566 5356587 5356571 5356566 -
gctagattggggaagttctcct

SEQ ID NO: 120927 - DNA, 22 bp, Artificial Sequence
  Synthetic oligonucleotide; TTG chr11 5356565 5356586 5356570 5356565 -
ctagattggggaagttctcctg

SEQ ID NO: 120928 - DNA, 22 bp, Artificial Sequence
  Synthetic oligonucleotide; CTA chr11 5356562 5356583 5356567 5356562 -
gattggggaagttctcctggat

SEQ ID NO: 120929 - DNA, 22 bp, Artificial Sequence
  Synthetic oligonucleotide; TTG chr11 5356557 5356578 5356562 5356557 -
gggaagttctcctggataatat

SEQ ID NO: 120930 - DNA, 22 bp, Artificial Sequence
  Synthetic oligonucleotide; TTC chr11 5356548 5356569 5356553 5356548 -
tcctggataatatcctgcagag

SEQ ID NO: 120931 - DNA, 22 bp, Artificial Sequence
  Synthetic oligonucleotide; CTC chr11 5356546 5356567 5356551 5356546 -
ctggataatatcctgcagagtg

SEQ ID NO: 120932 - DNA, 22 bp, Artificial Sequence
  Synthetic oligonucleotide; CTG chr11 5356543 5356564 5356548 5356543 -
gataatatcctgcagagtgttt

SEQ ID NO: 120933 - DNA, 22 bp, Artificial Sequence
  Synthetic oligonucleotide; CTG chr11 5356531 5356552 5356536 5356531 -
cagagtgttttccaacttggtt

SEQ ID NO: 120934 - DNA, 22 bp, Artificial Sequence
  Synthetic oligonucleotide; TTT chr11 5356521 5356542 5356526 5356521 -
tccaacttggttccattctgcc

SEQ ID NO: 120935 - DNA, 22 bp, Artificial Sequence
  Synthetic oligonucleotide; TTT chr11 5356520 5356541 5356525 5356520 -
ccaacttggttccattctgccc

SEQ ID NO: 120936 - DNA, 22 bp, Artificial Sequence
  Synthetic oligonucleotide; TTC chr11 5356519 5356540 5356524 5356519 -
caacttggttccattctgcccg

SEQ ID NO: 120937 - DNA, 22 bp, Artificial Sequence
  Synthetic oligonucleotide; CTT chr11 5356513 5356534 5356518 5356513 -
ggttccattctgcccgtcactt

SEQ ID NO: 120938 - DNA, 22 bp, Artificial Sequence
  Synthetic oligonucleotide; TTG chr11 5356512 5356533 5356517 5356512 -
gttccattctgcccgtcacttt

SEQ ID NO: 120939 - DNA, 22 bp, Artificial Sequence
  Synthetic oligonucleotide; TTC chr11 5356508 5356529 5356513 5356508 -
cattctgcccgtcactttcagg

SEQ ID NO: 120940 - DNA, 22 bp, Artificial Sequence
  Synthetic oligonucleotide; TTC chr11 5356503 5356524 5356508 5356503 -
tgcccgtcactttcaggtacac

SEQ ID NO: 120941 - DNA, 22 bp, Artificial Sequence
  Synthetic oligonucleotide; CTG chr11 5356501 5356522 5356506 5356501 -
cccgtcactttcaggtacacca

SEQ ID NO: 120942 - DNA, 22 bp, Artificial Sequence
  Synthetic oligonucleotide; CTT chr11 5356491 5356512 5356496 5356491 -
tcaggtacaccaatcagatata

SEQ ID NO: 120943 - DNA, 22 bp, Artificial Sequence
  Synthetic oligonucleotide; TTT chr11 5356490 5356511 5356495 5356490 -
caggtacaccaatcagatatag

SEQ ID NO: 120944 - DNA, 22 bp, Artificial Sequence
  Synthetic oligonucleotide; TTC chr11 5356489 5356510 5356494 5356489 -
aggtacaccaatcagatataga

SEQ ID NO: 120945 - DNA, 22 bp, Artificial Sequence
  Synthetic oligonucleotide; TTT chr11 5356464 5356485 5356469 5356464 -
ggtcttttcacatagtcccata

SEQ ID NO: 120946 - DNA, 22 bp, Artificial Sequence
  Synthetic oligonucleotide; TTG chr11 5356463 5356484 5356468 5356463 -
gtcttttcacatagtcccatat

SEQ ID NO: 120947 - DNA, 22 bp, Artificial Sequence
  Synthetic oligonucleotide; CTT chr11 5356458 5356479 5356463 5356458 -
ttcacatagtcccatatttctt

SEQ ID NO: 120948 - DNA, 22 bp, Artificial Sequence
  Synthetic oligonucleotide; TTT chr11 5356457 5356478 5356462 5356457 -
tcacatagtcccatatttcttg

SEQ ID NO: 120949 - DNA, 22 bp, Artificial Sequence
  Synthetic oligonucleotide; TTT chr11 5356456 5356477 5356461 5356456 -
cacatagtcccatatttcttgg

SEQ ID NO: 120950 - DNA, 22 bp, Artificial Sequence
  Synthetic oligonucleotide; TTC chr11 5356455 5356476 5356460 5356455 -
acatagtcccatatttcttgga

SEQ ID NO: 120951 - DNA, 22 bp, Artificial Sequence
  Synthetic oligonucleotide; TTT chr11 5356439 5356460 5356444 5356439 -
cttggaggctttgttcatttct

SEQ ID NO: 120952 - DNA, 22 bp, Artificial Sequence
  Synthetic oligonucleotide; TTC chr11 5356438 5356459 5356443 5356438 -
ttggaggctttgttcatttctt

SEQ ID NO: 120953 - DNA, 22 bp, Artificial Sequence
  Synthetic oligonucleotide; CTT chr11 5356436 5356457 5356441 5356436 -
ggaggctttgttcatttctttt

SEQ ID NO: 120954 - DNA, 22 bp, Artificial Sequence
  Synthetic oligonucleotide; TTG chr11 5356435 5356456 5356440 5356435 -
gaggctttgttcatttcttttt

SEQ ID NO: 120955 - DNA, 22 bp, Artificial Sequence
  Synthetic oligonucleotide; CTT chr11 5356428 5356449 5356433 5356428 -
tgttcatttctttttattcttt

SEQ ID NO: 120956 - DNA, 22 bp, Artificial Sequence
  Synthetic oligonucleotide; TTT chr11 5356427 5356448 5356432 5356427 -
gttcatttctttttattctttt

SEQ ID NO: 120957 - DNA, 22 bp, Artificial Sequence
  Synthetic oligonucleotide; TTG chr11 5356426 5356447 5356431 5356426 -
ttcatttctttttattcttttt

SEQ ID NO: 120958 - DNA, 22 bp, Artificial Sequence
  Synthetic oligonucleotide; TTC chr11 5356423 5356444 5356428 5356423 -
atttctttttattcttttttct

SEQ ID NO: 120959 - DNA, 22 bp, Artificial Sequence
  Synthetic oligonucleotide; TTT chr11 5356419 5356440 5356424 5356419 -
ctttttattcttttttctctaa

SEQ ID NO: 120960 - DNA, 22 bp, Artificial Sequence
  Synthetic oligonucleotide; TTC chr11 5356418 5356439 5356423 5356418 -
tttttattcttttttctctaaa

SEQ ID NO: 120961 - DNA, 22 bp, Artificial Sequence
  Synthetic oligonucleotide; CTT chr11 5356416 5356437 5356421 5356416 -
tttattcttttttctctaaact

SEQ ID NO: 120962 - DNA, 22 bp, Artificial Sequence
  Synthetic oligonucleotide; TTT chr11 5356415 5356436 5356420 5356415 -
ttattcttttttctctaaactt

SEQ ID NO: 120963 - DNA, 22 bp, Artificial Sequence
  Synthetic oligonucleotide; TTT chr11 5356414 5356435 5356419 5356414 -
tattcttttttctctaaacttc

SEQ ID NO: 120964 - DNA, 22 bp, Artificial Sequence
  Synthetic oligonucleotide; TTT chr11 5356413 5356434 5356418 5356413 -
attcttttttctctaaacttct

SEQ ID NO: 120965 - DNA, 22 bp, Artificial Sequence
  Synthetic oligonucleotide; TTA chr11 5356412 5356433 5356417 5356412 -
ttcttttttctctaaacttctc

SEQ ID NO: 120966 - DNA, 22 bp, Artificial Sequence
  Synthetic oligonucleotide; TTC chr11 5356409 5356430 5356414 5356409 -
ttttttctctaaacttctcttc

SEQ ID NO: 120967 - DNA, 22 bp, Artificial Sequence
  Synthetic oligonucleotide; CTT chr11 5356407 5356428 5356412 5356407 -
ttttctctaaacttctcttctt

SEQ ID NO: 120968 - DNA, 22 bp, Artificial Sequence
  Synthetic oligonucleotide; TTT chr11 5356406 5356427 5356411 5356406 -
tttctctaaacttctcttcttg

SEQ ID NO: 120969 - DNA, 22 bp, Artificial Sequence
  Synthetic oligonucleotide; TTT chr11 5356405 5356426 5356410 5356405 -
ttctctaaacttctcttcttgc

SEQ ID NO: 120970 - DNA, 22 bp, Artificial Sequence
  Synthetic oligonucleotide; TTT chr11 5356404 5356425 5356409 5356404 -
tctctaaacttctcttcttgct

SEQ ID NO: 120971 - DNA, 22 bp, Artificial Sequence
  Synthetic oligonucleotide; TTT chr11 5356403 5356424 5356408 5356403 -
ctctaaacttctcttcttgctt

SEQ ID NO: 120972 - DNA, 22 bp, Artificial Sequence
  Synthetic oligonucleotide; TTC chr11 5356402 5356423 5356407 5356402 -
tctaaacttctcttcttgcttc

SEQ ID NO: 120973 - DNA, 22 bp, Artificial Sequence
  Synthetic oligonucleotide; CTC chr11 5356400 5356421 5356405 5356400 -
taaacttctcttcttgcttcat

SEQ ID NO: 120974 - DNA, 22 bp, Artificial Sequence
  Synthetic oligonucleotide; CTA chr11 5356398 5356419 5356403 5356398 -
aacttctcttcttgcttcattt

SEQ ID NO: 120975 - DNA, 22 bp, Artificial Sequence
  Synthetic oligonucleotide; CTT chr11 5356393 5356414 5356398 5356393 -
ctcttcttgcttcatttcattc

SEQ ID NO: 120976 - DNA, 22 bp, Artificial Sequence
  Synthetic oligonucleotide; TTC chr11 5356392 5356413 5356397 5356392 -
tcttcttgcttcatttcattca

SEQ ID NO: 120977 - DNA, 22 bp, Artificial Sequence
  Synthetic oligonucleotide; CTC chr11 5356390 5356411 5356395 5356390 -
ttcttgcttcatttcattcatt

SEQ ID NO: 120978 - DNA, 22 bp, Artificial Sequence
  Synthetic oligonucleotide; CTT chr11 5356388 5356409 5356393 5356388 -
cttgcttcatttcattcatttg

SEQ ID NO: 120979 - DNA, 22 bp, Artificial Sequence
  Synthetic oligonucleotide; TTC chr11 5356387 5356408 5356392 5356387 -
ttgcttcatttcattcatttga

SEQ ID NO: 120980 - DNA, 22 bp, Artificial Sequence
  Synthetic oligonucleotide; CTT chr11 5356385 5356406 5356390 5356385 -
gcttcatttcattcatttgatc

SEQ ID NO: 120981 - DNA, 22 bp, Artificial Sequence
  Synthetic oligonucleotide; TTG chr11 5356384 5356405 5356389 5356384 -
cttcatttcattcatttgatct

SEQ ID NO: 120982 - DNA, 22 bp, Artificial Sequence
  Synthetic oligonucleotide; CTT chr11 5356381 5356402 5356386 5356381 -
catttcattcatttgatcttcc

SEQ ID NO: 120983 - DNA, 22 bp, Artificial Sequence
  Synthetic oligonucleotide; TTC chr11 5356380 5356401 5356385 5356380 -
atttcattcatttgatcttcca

SEQ ID NO: 120984 - DNA, 22 bp, Artificial Sequence
  Synthetic oligonucleotide; TTT chr11 5356376 5356397 5356381 5356376 -
cattcatttgatcttccatcac

SEQ ID NO: 120985 - DNA, 22 bp, Artificial Sequence
  Synthetic oligonucleotide; TTC chr11 5356375 5356396 5356380 5356375 -
attcatttgatcttccatcact

SEQ ID NO: 120986 - DNA, 22 bp, Artificial Sequence
  Synthetic oligonucleotide; TTC chr11 5356371 5356392 5356376 5356371 -
atttgatcttccatcactgata

SEQ ID NO: 120987 - DNA, 22 bp, Artificial Sequence
  Synthetic oligonucleotide; TTT chr11 5356367 5356388 5356372 5356367 -
gatcttccatcactgataccct

SEQ ID NO: 120988 - DNA, 22 bp, Artificial Sequence
  Synthetic oligonucleotide; TTG chr11 5356366 5356387 5356371 5356366 -
atcttccatcactgataccctt

SEQ ID NO: 120989 - DNA, 22 bp, Artificial Sequence
  Synthetic oligonucleotide; CTT chr11 5356361 5356382 5356366 5356361 -
ccatcactgataccctttcttc

SEQ ID NO: 120990 - DNA, 22 bp, Artificial Sequence
  Synthetic oligonucleotide; TTC chr11 5356360 5356381 5356365 5356360 -
catcactgataccctttcttcc

SEQ ID NO: 120991 - DNA, 22 bp, Artificial Sequence
  Synthetic oligonucleotide; CTG chr11 5356352 5356373 5356357 5356352 -
ataccctttcttccagttgatc

SEQ ID NO: 120992 - DNA, 22 bp, Artificial Sequence
  Synthetic oligonucleotide; CTT chr11 5356344 5356365 5356349 5356344 -
tcttccagttgatcgaatcagc

SEQ ID NO: 120993 - DNA, 22 bp, Artificial Sequence
  Synthetic oligonucleotide; TTT chr11 5356343 5356364 5356348 5356343 -
cttccagttgatcgaatcagct

SEQ ID NO: 120994 - DNA, 22 bp, Artificial Sequence
  Synthetic oligonucleotide; TTC chr11 5356342 5356363 5356347 5356342 -
ttccagttgatcgaatcagcta

SEQ ID NO: 120995 - DNA, 22 bp, Artificial Sequence
  Synthetic oligonucleotide; CTT chr11 5356340 5356361 5356345 5356340 -
ccagttgatcgaatcagctact

SEQ ID NO: 120996 - DNA, 22 bp, Artificial Sequence
  Synthetic oligonucleotide; TTC chr11 5356339 5356360 5356344 5356339 -
cagttgatcgaatcagctactg

SEQ ID NO: 120997 - DNA, 22 bp, Artificial Sequence
  Synthetic oligonucleotide; TTG chr11 5356333 5356354 5356338 5356333 -
atcgaatcagctactgagtctt

SEQ ID NO: 120998 - DNA, 22 bp, Artificial Sequence
  Synthetic oligonucleotide; CTA chr11 5356320 5356341 5356325 5356320 -
ctgagtcttgtgcattcatcat

SEQ ID NO: 120999 - DNA, 22 bp, Artificial Sequence
  Synthetic oligonucleotide; CTG chr11 5356317 5356338 5356322 5356317 -
agtcttgtgcattcatcatgta

SEQ ID NO: 121000 - DNA, 22 bp, Artificial Sequence
  Synthetic oligonucleotide; CTT chr11 5356311 5356332 5356316 5356311 -
gtgcattcatcatgtagttctc

SEQ ID NO: 121001 - DNA, 22 bp, Artificial Sequence
  Synthetic oligonucleotide; TTG chr11 5356310 5356331 5356315 5356310 -
tgcattcatcatgtagttctca

SEQ ID NO: 121002 - DNA, 22 bp, Artificial Sequence
  Synthetic oligonucleotide; TTC chr11 5356303 5356324 5356308 5356303 -
atcatgtagttctcatgccttg

SEQ ID NO: 121003 - DNA, 22 bp, Artificial Sequence
  Synthetic oligonucleotide; TTC chr11 5356291 5356312 5356296 5356291 -
tcatgccttggttttcagctcc

SEQ ID NO: 121004 - DNA, 22 bp, Artificial Sequence
  Synthetic oligonucleotide; CTC chr11 5356289 5356310 5356294 5356289 -
atgccttggttttcagctccat

SEQ ID NO: 121005 - DNA, 22 bp, Artificial Sequence
  Synthetic oligonucleotide; CTT chr11 5356282 5356303 5356287 5356282 -
ggttttcagctccatcaggtcc

SEQ ID NO: 121006 - DNA, 22 bp, Artificial Sequence
  Synthetic oligonucleotide; TTG chr11 5356281 5356302 5356286 5356281 -
gttttcagctccatcaggtcct

SEQ ID NO: 121007 - DNA, 22 bp, Artificial Sequence
  Synthetic oligonucleotide; TTT chr11 5356277 5356298 5356282 5356277 -
tcagctccatcaggtcctttaa

SEQ ID NO: 121008 - DNA, 22 bp, Artificial Sequence
  Synthetic oligonucleotide; TTT chr11 5356276 5356297 5356281 5356276 -
cagctccatcaggtcctttaag

SEQ ID NO: 121009 - DNA, 22 bp, Artificial Sequence
  Synthetic oligonucleotide; TTC chr11 5356275 5356296 5356280 5356275 -
agctccatcaggtcctttaagg

SEQ ID NO: 121010 - DNA, 22 bp, Artificial Sequence
  Synthetic oligonucleotide; CTC chr11 5356270 5356291 5356275 5356270 -
catcaggtcctttaaggacttc

SEQ ID NO: 121011 - DNA, 22 bp, Artificial Sequence
  Synthetic oligonucleotide; CTT chr11 5356258 5356279 5356263 5356258 -
taaggacttctctgtattggtt

SEQ ID NO: 121012 - DNA, 22 bp, Artificial Sequence
  Synthetic oligonucleotide; TTT chr11 5356257 5356278 5356262 5356257 -
aaggacttctctgtattggtta

SEQ ID NO: 121013 - DNA, 22 bp, Artificial Sequence
  Synthetic oligonucleotide; TTA chr11 5356256 5356277 5356261 5356256 -
aggacttctctgtattggttat

SEQ ID NO: 121014 - DNA, 22 bp, Artificial Sequence
  Synthetic oligonucleotide; CTT chr11 5356249 5356270 5356254 5356249 -
ctctgtattggttattctagtt

SEQ ID NO: 121015 - DNA, 22 bp, Artificial Sequence
  Synthetic oligonucleotide; TTC chr11 5356248 5356269 5356253 5356248 -
tctgtattggttattctagtta

SEQ ID NO: 121016 - DNA, 22 bp, Artificial Sequence
  Synthetic oligonucleotide; CTC chr11 5356246 5356267 5356251 5356246 -
tgtattggttattctagttagc

SEQ ID NO: 121017 - DNA, 22 bp, Artificial Sequence
  Synthetic oligonucleotide; CTG chr11 5356244 5356265 5356249 5356244 -
tattggttattctagttagcca

SEQ ID NO: 121018 - DNA, 22 bp, Artificial Sequence
  Synthetic oligonucleotide; TTG chr11 5356239 5356260 5356244 5356239 -
gttattctagttagccattagt

SEQ ID NO: 121019 - DNA, 22 bp, Artificial Sequence
  Synthetic oligonucleotide; TTA chr11 5356235 5356256 5356240 5356235 -
ttctagttagccattagtctaa

SEQ ID NO: 121020 - DNA, 22 bp, Artificial Sequence
  Synthetic oligonucleotide; TTC chr11 5356232 5356253 5356237 5356232 -
tagttagccattagtctaattt

SEQ ID NO: 121021 - DNA, 22 bp, Artificial Sequence
  Synthetic oligonucleotide; CTA chr11 5356230 5356251 5356235 5356230 -
gttagccattagtctaatttat

SEQ ID NO: 121022 - DNA, 22 bp, Artificial Sequence
  Synthetic oligonucleotide; TTA chr11 5356226 5356247 5356231 5356226 -
gccattagtctaatttattttc

SEQ ID NO: 121023 - DNA, 22 bp, Artificial Sequence
  Synthetic oligonucleotide; TTA chr11 5356219 5356240 5356224 5356219 -
gtctaatttattttcaaggttt

SEQ ID NO: 121024 - DNA, 22 bp, Artificial Sequence
  Synthetic oligonucleotide; CTA chr11 5356214 5356235 5356219 5356214 -
atttattttcaaggtttttaac

SEQ ID NO: 121025 - DNA, 22 bp, Artificial Sequence
  Synthetic oligonucleotide; TTT chr11 5356210 5356231 5356215 5356210 -
attttcaaggtttttaactttt

SEQ ID NO: 121026 - DNA, 22 bp, Artificial Sequence
  Synthetic oligonucleotide; TTA chr11 5356209 5356230 5356214 5356209 -
ttttcaaggtttttaacttttt

SEQ ID NO: 121027 - DNA, 22 bp, Artificial Sequence
  Synthetic oligonucleotide; TTT chr11 5356206 5356227 5356211 5356206 -
tcaaggtttttaacttttttgc

SEQ ID NO: 121028 - DNA, 22 bp, Artificial Sequence
  Synthetic oligonucleotide; TTT chr11 5356205 5356226 5356210 5356205 -
caaggtttttaacttttttgcc

SEQ ID NO: 121029 - DNA, 22 bp, Artificial Sequence
  Synthetic oligonucleotide; TTC chr11 5356204 5356225 5356209 5356204 -
aaggtttttaacttttttgcca

SEQ ID NO: 121030 - DNA, 22 bp, Artificial Sequence
  Synthetic oligonucleotide; TTT chr11 5356197 5356218 5356202 5356197 -
ttaacttttttgccatgggttc

SEQ ID NO: 121031 - DNA, 22 bp, Artificial Sequence
  Synthetic oligonucleotide; TTT chr11 5356196 5356217 5356201 5356196 -
taacttttttgccatgggttcg

SEQ ID NO: 121032 - DNA, 22 bp, Artificial Sequence
  Synthetic oligonucleotide; TTT chr11 5356195 5356216 5356200 5356195 -
aacttttttgccatgggttcga

SEQ ID NO: 121033 - DNA, 22 bp, Artificial Sequence
  Synthetic oligonucleotide; TTA chr11 5356194 5356215 5356199 5356194 -
acttttttgccatgggttcgag

SEQ ID NO: 121034 - DNA, 22 bp, Artificial Sequence
  Synthetic oligonucleotide; CTT chr11 5356190 5356211 5356195 5356190 -
ttttgccatgggttcgagcttc

SEQ ID NO: 121035 - DNA, 22 bp, Artificial Sequence
  Synthetic oligonucleotide; TTT chr11 5356189 5356210 5356194 5356189 -
tttgccatgggttcgagcttcc

SEQ ID NO: 121036 - DNA, 22 bp, Artificial Sequence
  Synthetic oligonucleotide; TTT chr11 5356188 5356209 5356193 5356188 -
ttgccatgggttcgagcttcct

SEQ ID NO: 121037 - DNA, 22 bp, Artificial Sequence
  Synthetic oligonucleotide; TTT chr11 5356187 5356208 5356192 5356187 -
tgccatgggttcgagcttcctc

SEQ ID NO: 121038 - DNA, 22 bp, Artificial Sequence
  Synthetic oligonucleotide; TTT chr11 5356186 5356207 5356191 5356186 -
gccatgggttcgagcttcctcc

SEQ ID NO: 121039 - DNA, 22 bp, Artificial Sequence
  Synthetic oligonucleotide; TTG chr11 5356185 5356206 5356190 5356185 -
ccatgggttcgagcttcctcct

SEQ ID NO: 121040 - DNA, 22 bp, Artificial Sequence
  Synthetic oligonucleotide; TTC chr11 5356175 5356196 5356180 5356175 -
gagcttcctcctttagctcgga

SEQ ID NO: 121041 - DNA, 22 bp, Artificial Sequence
  Synthetic oligonucleotide; CTT chr11 5356169 5356190 5356174 5356169 -
cctcctttagctcggagtagtt

SEQ ID NO: 121042 - DNA, 22 bp, Artificial Sequence
  Synthetic oligonucleotide; TTC chr11 5356168 5356189 5356173 5356168 -
ctcctttagctcggagtagttt

SEQ ID NO: 121043 - DNA, 22 bp, Artificial Sequence
  Synthetic oligonucleotide; CTC chr11 5356165 5356186 5356170 5356165 -
ctttagctcggagtagtttgat

SEQ ID NO: 121044 - DNA, 22 bp, Artificial Sequence
  Synthetic oligonucleotide; CTT chr11 5356162 5356183 5356167 5356162 -
tagctcggagtagtttgatcgt

SEQ ID NO: 121045 - DNA, 22 bp, Artificial Sequence
  Synthetic oligonucleotide; TTT chr11 5356161 5356182 5356166 5356161 -
agctcggagtagtttgatcgtc

SEQ ID NO: 121046 - DNA, 22 bp, Artificial Sequence
  Synthetic oligonucleotide; TTA chr11 5356160 5356181 5356165 5356160 -
gctcggagtagtttgatcgtct

SEQ ID NO: 121047 - DNA, 22 bp, Artificial Sequence
  Synthetic oligonucleotide; CTC chr11 5356156 5356177 5356161 5356156 -
ggagtagtttgatcgtctgaag

SEQ ID NO: 121048 - DNA, 22 bp, Artificial Sequence
  Synthetic oligonucleotide; TTT chr11 5356146 5356167 5356151 5356146 -
gatcgtctgaagccttcttctc

SEQ ID NO: 121049 - DNA, 22 bp, Artificial Sequence
  Synthetic oligonucleotide; TTG chr11 5356145 5356166 5356150 5356145 -
atcgtctgaagccttcttctct

SEQ ID NO: 121050 - DNA, 22 bp, Artificial Sequence
  Synthetic oligonucleotide; CTG chr11 5356137 5356158 5356142 5356137 -
aagccttcttctctcaacttgt

SEQ ID NO: 121051 - DNA, 22 bp, Artificial Sequence
  Synthetic oligonucleotide; CTT chr11 5356130 5356151 5356135 5356130 -
cttctctcaacttgtcaaagtc

SEQ ID NO: 121052 - DNA, 22 bp, Artificial Sequence
  Synthetic oligonucleotide; TTC chr11 5356129 5356150 5356134 5356129 -
ttctctcaacttgtcaaagtca

SEQ ID NO: 121053 - DNA, 22 bp, Artificial Sequence
  Synthetic oligonucleotide; CTT chr11 5356127 5356148 5356132 5356127 -
ctctcaacttgtcaaagtcatt

SEQ ID NO: 121054 - DNA, 22 bp, Artificial Sequence
  Synthetic oligonucleotide; TTC chr11 5356126 5356147 5356131 5356126 -
tctcaacttgtcaaagtcattc

SEQ ID NO: 121055 - DNA, 22 bp, Artificial Sequence
  Synthetic oligonucleotide; CTC chr11 5356124 5356145 5356129 5356124 -
tcaacttgtcaaagtcattctc

SEQ ID NO: 121056 - DNA, 22 bp, Artificial Sequence
  Synthetic oligonucleotide; CTC chr11 5356122 5356143 5356127 5356122 -
aacttgtcaaagtcattctctg

SEQ ID NO: 121057 - DNA, 22 bp, Artificial Sequence
  Synthetic oligonucleotide; CTT chr11 5356117 5356138 5356122 5356117 -
gtcaaagtcattctctgtccag

SEQ ID NO: 121058 - DNA, 22 bp, Artificial Sequence
  Synthetic oligonucleotide; TTG chr11 5356116 5356137 5356121 5356116 -
tcaaagtcattctctgtccagc

SEQ ID NO: 121059 - DNA, 22 bp, Artificial Sequence
  Synthetic oligonucleotide; TTC chr11 5356104 5356125 5356109 5356104 -
tctgtccagctttgtaccgttg

SEQ ID NO: 121060 - DNA, 22 bp, Artificial Sequence
  Synthetic oligonucleotide; CTC chr11 5356102 5356123 5356107 5356102 -
tgtccagctttgtaccgttgct

SEQ ID NO: 121061 - DNA, 22 bp, Artificial Sequence
  Synthetic oligonucleotide; CTG chr11 5356100 5356121 5356105 5356100 -
tccagctttgtaccgttgctgg

SEQ ID NO: 121062 - DNA, 22 bp, Artificial Sequence
  Synthetic oligonucleotide; CTT chr11 5356092 5356113 5356097 5356092 -
tgtaccgttgctggtgaggagc

SEQ ID NO: 121063 - DNA, 22 bp, Artificial Sequence
  Synthetic oligonucleotide; TTT chr11 5356091 5356112 5356096 5356091 -
gtaccgttgctggtgaggagct

SEQ ID NO: 121064 - DNA, 22 bp, Artificial Sequence
  Synthetic oligonucleotide; TTG chr11 5356090 5356111 5356095 5356090 -
taccgttgctggtgaggagctg

SEQ ID NO: 121065 - DNA, 22 bp, Artificial Sequence
  Synthetic oligonucleotide; TTG chr11 5356082 5356103 5356087 5356082 -
ctggtgaggagctgcattcctt

SEQ ID NO: 121066 - DNA, 22 bp, Artificial Sequence
  Synthetic oligonucleotide; CTG chr11 5356079 5356100 5356084 5356079 -
gtgaggagctgcattcctttgg

SEQ ID NO: 121067 - DNA, 22 bp, Artificial Sequence
  Synthetic oligonucleotide; CTG chr11 5356068 5356089 5356073 5356068 -
cattcctttggaggaggagagg

SEQ ID NO: 121068 - DNA, 22 bp, Artificial Sequence
  Synthetic oligonucleotide; TTC chr11 5356063 5356084 5356068 5356063 -
ctttggaggaggagaggcactc

SEQ ID NO: 121069 - DNA, 22 bp, Artificial Sequence
  Synthetic oligonucleotide; CTT chr11 5356060 5356081 5356065 5356060 -
tggaggaggagaggcactctga

SEQ ID NO: 121070 - DNA, 22 bp, Artificial Sequence
  Synthetic oligonucleotide; TTT chr11 5356059 5356080 5356064 5356059 -
ggaggaggagaggcactctgat

SEQ ID NO: 121071 - DNA, 22 bp, Artificial Sequence
  Synthetic oligonucleotide; TTG chr11 5356058 5356079 5356063 5356058 -
gaggaggagaggcactctgatt

SEQ ID NO: 121072 - DNA, 22 bp, Artificial Sequence
  Synthetic oligonucleotide; CTC chr11 5356041 5356062 5356046 5356041 -
tgatttttagagtttccagttt

SEQ ID NO: 121073 - DNA, 22 bp, Artificial Sequence
  Synthetic oligonucleotide; CTG chr11 5356039 5356060 5356044 5356039 -
atttttagagtttccagttttt

SEQ ID NO: 121074 - DNA, 22 bp, Artificial Sequence
  Synthetic oligonucleotide; TTT chr11 5356035 5356056 5356040 5356035 -
ttagagtttccagtttttctgc

SEQ ID NO: 121075 - DNA, 22 bp, Artificial Sequence
  Synthetic oligonucleotide; TTT chr11 5356034 5356055 5356039 5356034 -
tagagtttccagtttttctgct

SEQ ID NO: 121076 - DNA, 22 bp, Artificial Sequence
  Synthetic oligonucleotide; TTT chr11 5356033 5356054 5356038 5356033 -
agagtttccagtttttctgctc

SEQ ID NO: 121077 - DNA, 22 bp, Artificial Sequence
  Synthetic oligonucleotide; TTA chr11 5356032 5356053 5356037 5356032 -
gagtttccagtttttctgctct

SEQ ID NO: 121078 - DNA, 22 bp, Artificial Sequence
  Synthetic oligonucleotide; TTT chr11 5356026 5356047 5356031 5356026 -
ccagtttttctgctctgttttt

SEQ ID NO: 121079 - DNA, 22 bp, Artificial Sequence
  Synthetic oligonucleotide; TTC chr11 5356025 5356046 5356030 5356025 -
cagtttttctgctctgtttttc

SEQ ID NO: 121080 - DNA, 22 bp, Artificial Sequence
  Synthetic oligonucleotide; TTT chr11 5356019 5356040 5356024 5356019 -
ttctgctctgtttttccccatc

SEQ ID NO: 121081 - DNA, 22 bp, Artificial Sequence
  Synthetic oligonucleotide; TTT chr11 5356018 5356039 5356023 5356018 -
tctgctctgtttttccccatct

SEQ ID NO: 121082 - DNA, 22 bp, Artificial Sequence
  Synthetic oligonucleotide; TTT chr11 5356017 5356038 5356022 5356017 -
ctgctctgtttttccccatctt

SEQ ID NO: 121083 - DNA, 22 bp, Artificial Sequence
  Synthetic oligonucleotide; TTC chr11 5356016 5356037 5356021 5356016 -
tgctctgtttttccccatcttt

SEQ ID NO: 121084 - DNA, 22 bp, Artificial Sequence
  Synthetic oligonucleotide; CTG chr11 5356014 5356035 5356019 5356014 -
ctctgtttttccccatctttgt

SEQ ID NO: 121085 - DNA, 22 bp, Artificial Sequence
  Synthetic oligonucleotide; CTC chr11 5356011 5356032 5356016 5356011 -
tgtttttccccatctttgtggt

SEQ ID NO: 121086 - DNA, 22 bp, Artificial Sequence
  Synthetic oligonucleotide; CTG chr11 5356009 5356030 5356014 5356009 -
tttttccccatctttgtggttt

SEQ ID NO: 121087 - DNA, 22 bp, Artificial Sequence
  Synthetic oligonucleotide; TTT chr11 5356006 5356027 5356011 5356006 -
ttccccatctttgtggttttat

SEQ ID NO: 121088 - DNA, 22 bp, Artificial Sequence
  Synthetic oligonucleotide; TTT chr11 5356005 5356026 5356010 5356005 -
tccccatctttgtggttttatc

SEQ ID NO: 121089 - DNA, 22 bp, Artificial Sequence
  Synthetic oligonucleotide; TTT chr11 5356004 5356025 5356009 5356004 -
ccccatctttgtggttttatct

SEQ ID NO: 121090 - DNA, 22 bp, Artificial Sequence
  Synthetic oligonucleotide; TTC chr11 5356003 5356024 5356008 5356003 -
cccatctttgtggttttatcta

SEQ ID NO: 121091 - DNA, 22 bp, Artificial Sequence
  Synthetic oligonucleotide; CTT chr11 5355995 5356016 5356000 5355995 -
tgtggttttatctacctttggt

SEQ ID NO: 121092 - DNA, 22 bp, Artificial Sequence
  Synthetic oligonucleotide; TTT chr11 5355994 5356015 5355999 5355994 -
gtggttttatctacctttggtc

SEQ ID NO: 121093 - DNA, 22 bp, Artificial Sequence
  Synthetic oligonucleotide; TTG chr11 5355993 5356014 5355998 5355993 -
tggttttatctacctttggtct

SEQ ID NO: 121094 - DNA, 22 bp, Artificial Sequence
  Synthetic oligonucleotide; TTT chr11 5355987 5356008 5355992 5355987 -
tatctacctttggtctttgatg

SEQ ID NO: 121095 - DNA, 22 bp, Artificial Sequence
  Synthetic oligonucleotide; TTT chr11 5355986 5356007 5355991 5355986 -
atctacctttggtctttgatga

SEQ ID NO: 121096 - DNA, 22 bp, Artificial Sequence
  Synthetic oligonucleotide; TTA chr11 5355985 5356006 5355990 5355985 -
tctacctttggtctttgatgat

SEQ ID NO: 121097 - DNA, 22 bp, Artificial Sequence
  Synthetic oligonucleotide; CTA chr11 5355981 5356002 5355986 5355981 -
cctttggtctttgatgatggtg

SEQ ID NO: 121098 - DNA, 22 bp, Artificial Sequence
  Synthetic oligonucleotide; CTT chr11 5355977 5355998 5355982 5355977 -
tggtctttgatgatggtgacgt

SEQ ID NO: 121099 - DNA, 22 bp, Artificial Sequence
  Synthetic oligonucleotide; TTT chr11 5355976 5355997 5355981 5355976 -
ggtctttgatgatggtgacgta

SEQ ID NO: 121100 - DNA, 22 bp, Artificial Sequence
  Synthetic oligonucleotide; TTG chr11 5355975 5355996 5355980 5355975 -
gtctttgatgatggtgacgtac

SEQ ID NO: 121101 - DNA, 22 bp, Artificial Sequence
  Synthetic oligonucleotide; CTT chr11 5355970 5355991 5355975 5355970 -
tgatgatggtgacgtacagatg

SEQ ID NO: 121102 - DNA, 22 bp, Artificial Sequence
  Synthetic oligonucleotide; TTT chr11 5355969 5355990 5355974 5355969 -
gatgatggtgacgtacagatgg

SEQ ID NO: 121103 - DNA, 22 bp, Artificial Sequence
  Synthetic oligonucleotide; TTG chr11 5355968 5355989 5355973 5355968 -
atgatggtgacgtacagatggg

SEQ ID NO: 121104 - DNA, 22 bp, Artificial Sequence
  Synthetic oligonucleotide; TTT chr11 5355943 5355964 5355948 5355943 -
ttggtgtggatgtcctttctgt

SEQ ID NO: 121105 - DNA, 22 bp, Artificial Sequence
  Synthetic oligonucleotide; TTT chr11 5355942 5355963 5355947 5355942 -
tggtgtggatgtcctttctgtt

SEQ ID NO: 121106 - DNA, 22 bp, Artificial Sequence
  Synthetic oligonucleotide; TTT chr11 5355941 5355962 5355946 5355941 -
ggtgtggatgtcctttctgttt

SEQ ID NO: 121107 - DNA, 22 bp, Artificial Sequence
  Synthetic oligonucleotide; TTG chr11 5355940 5355961 5355945 5355940 -
gtgtggatgtcctttctgtttg

SEQ ID NO: 121108 - DNA, 22 bp, Artificial Sequence
  Synthetic oligonucleotide; CTT chr11 5355926 5355947 5355931 5355926 -
tctgtttgttagttttccttct

SEQ ID NO: 121109 - DNA, 22 bp, Artificial Sequence
  Synthetic oligonucleotide; TTT chr11 5355925 5355946 5355930 5355925 -
ctgtttgttagttttccttcta

SEQ ID NO: 121110 - DNA, 22 bp, Artificial Sequence
  Synthetic oligonucleotide; TTC chr11 5355924 5355945 5355929 5355924 -
tgtttgttagttttccttctaa

SEQ ID NO: 121111 - DNA, 22 bp, Artificial Sequence
  Synthetic oligonucleotide; CTG chr11 5355922 5355943 5355927 5355922 -
tttgttagttttccttctaaca

SEQ ID NO: 121112 - DNA, 22 bp, Artificial Sequence
  Synthetic oligonucleotide; TTT chr11 5355919 5355940 5355924 5355919 -
gttagttttccttctaacagga

SEQ ID NO: 121113 - DNA, 22 bp, Artificial Sequence
  Synthetic oligonucleotide; TTG chr11 5355918 5355939 5355923 5355918 -
ttagttttccttctaacaggac

SEQ ID NO: 121114 - DNA, 22 bp, Artificial Sequence
  Synthetic oligonucleotide; TTA chr11 5355915 5355936 5355920 5355915 -
gttttccttctaacaggaccct

SEQ ID NO: 121115 - DNA, 22 bp, Artificial Sequence
  Synthetic oligonucleotide; TTT chr11 5355911 5355932 5355916 5355911 -
tccttctaacaggaccctcagc

SEQ ID NO: 121116 - DNA, 22 bp, Artificial Sequence
  Synthetic oligonucleotide; TTT chr11 5355910 5355931 5355915 5355910 -
ccttctaacaggaccctcagct

SEQ ID NO: 121117 - DNA, 22 bp, Artificial Sequence
  Synthetic oligonucleotide; TTC chr11 5355909 5355930 5355914 5355909 -
cttctaacaggaccctcagctt

SEQ ID NO: 121118 - DNA, 22 bp, Artificial Sequence
  Synthetic oligonucleotide; CTT chr11 5355906 5355927 5355911 5355906 -
ctaacaggaccctcagcttgca

SEQ ID NO: 121119 - DNA, 22 bp, Artificial Sequence
  Synthetic oligonucleotide; TTC chr11 5355905 5355926 5355910 5355905 -
taacaggaccctcagcttgcag

SEQ ID NO: 121120 - DNA, 22 bp, Artificial Sequence
  Synthetic oligonucleotide; CTA chr11 5355903 5355924 5355908 5355903 -
acaggaccctcagcttgcagca

SEQ ID NO: 121121 - DNA, 22 bp, Artificial Sequence
  Synthetic oligonucleotide; CTC chr11 5355892 5355913 5355897 5355892 -
agcttgcagcagatttttaaaa

SEQ ID NO: 121122 - DNA, 22 bp, Artificial Sequence
  Synthetic oligonucleotide; CTT chr11 5355887 5355908 5355892 5355887 -
gcagcagatttttaaaagaact

SEQ ID NO: 121123 - DNA, 22 bp, Artificial Sequence
  Synthetic oligonucleotide; TTG chr11 5355886 5355907 5355891 5355886 -
cagcagatttttaaaagaactt

SEQ ID NO: 121124 - DNA, 22 bp, Artificial Sequence
  Synthetic oligonucleotide; TTT chr11 5355876 5355897 5355881 5355876 -
ttaaaagaacttccaggacctt

SEQ ID NO: 121125 - DNA, 22 bp, Artificial Sequence
  Synthetic oligonucleotide; TTT chr11 5355875 5355896 5355880 5355875 -
taaaagaacttccaggaccttg

SEQ ID NO: 121126 - DNA, 22 bp, Artificial Sequence
  Synthetic oligonucleotide; TTT chr11 5355874 5355895 5355879 5355874 -
aaaagaacttccaggaccttgt

SEQ ID NO: 121127 - DNA, 22 bp, Artificial Sequence
  Synthetic oligonucleotide; TTA chr11 5355873 5355894 5355878 5355873 -
aaagaacttccaggaccttgtc

SEQ ID NO: 121128 - DNA, 22 bp, Artificial Sequence
  Synthetic oligonucleotide; CTT chr11 5355864 5355885 5355869 5355864 -
ccaggaccttgtctgtatattg

SEQ ID NO: 121129 - DNA, 22 bp, Artificial Sequence
  Synthetic oligonucleotide; TTC chr11 5355863 5355884 5355868 5355863 -
caggaccttgtctgtatattga

SEQ ID NO: 121130 - DNA, 22 bp, Artificial Sequence
  Synthetic oligonucleotide; CTT chr11 5355854 5355875 5355859 5355854 -
gtctgtatattgacgcctatgt

SEQ ID NO: 121131 - DNA, 22 bp, Artificial Sequence
  Synthetic oligonucleotide; TTG chr11 5355853 5355874 5355858 5355853 -
tctgtatattgacgcctatgtc

SEQ ID NO: 121132 - DNA, 22 bp, Artificial Sequence
  Synthetic oligonucleotide; CTG chr11 5355849 5355870 5355854 5355849 -
tatattgacgcctatgtcacta

SEQ ID NO: 121133 - DNA, 22 bp, Artificial Sequence
  Synthetic oligonucleotide; TTG chr11 5355842 5355863 5355847 5355842 -
acgcctatgtcactacaggaat

SEQ ID NO: 121134 - DNA, 22 bp, Artificial Sequence
  Synthetic oligonucleotide; CTA chr11 5355835 5355856 5355840 5355835 -
tgtcactacaggaatcagagca

SEQ ID NO: 121135 - DNA, 22 bp, Artificial Sequence
  Synthetic oligonucleotide; CTA chr11 5355827 5355848 5355832 5355827 -
caggaatcagagcagggcatta

SEQ ID NO: 121136 - DNA, 22 bp, Artificial Sequence
  Synthetic oligonucleotide; TTA chr11 5355805 5355826 5355810 5355805 -
cattgatcctttaagaaaattt

SEQ ID NO: 121137 - DNA, 22 bp, Artificial Sequence
  Synthetic oligonucleotide; TTG chr11 5355800 5355821 5355805 5355800 -
atcctttaagaaaattttgcta

SEQ ID NO: 121138 - DNA, 22 bp, Artificial Sequence
  Synthetic oligonucleotide; CTT chr11 5355794 5355815 5355799 5355794 -
taagaaaattttgctaccctat

SEQ ID NO: 121139 - DNA, 22 bp, Artificial Sequence
  Synthetic oligonucleotide; TTT chr11 5355793 5355814 5355798 5355793 -
aagaaaattttgctaccctata

SEQ ID NO: 121140 - DNA, 22 bp, Artificial Sequence
  Synthetic oligonucleotide; TTA chr11 5355792 5355813 5355797 5355792 -
agaaaattttgctaccctatac

SEQ ID NO: 121141 - DNA, 22 bp, Artificial Sequence
  Synthetic oligonucleotide; TTT chr11 5355783 5355804 5355788 5355783 -
tgctaccctataccccttgacc

SEQ ID NO: 121142 - DNA, 22 bp, Artificial Sequence
  Synthetic oligonucleotide; TTT chr11 5355782 5355803 5355787 5355782 -
gctaccctataccccttgaccc

SEQ ID NO: 121143 - DNA, 22 bp, Artificial Sequence
  Synthetic oligonucleotide; TTG chr11 5355781 5355802 5355786 5355781 -
ctaccctataccccttgaccct

SEQ ID NO: 121144 - DNA, 22 bp, Artificial Sequence
  Synthetic oligonucleotide; CTA chr11 5355778 5355799 5355783 5355778 -
ccctataccccttgaccctact

SEQ ID NO: 121145 - DNA, 22 bp, Artificial Sequence
  Synthetic oligonucleotide; CTA chr11 5355773 5355794 5355778 5355773 -
taccccttgaccctactctttt

SEQ ID NO: 121146 - DNA, 22 bp, Artificial Sequence
  Synthetic oligonucleotide; CTT chr11 5355765 5355786 5355770 5355765 -
gaccctactctttttttttttt

SEQ ID NO: 121147 - DNA, 22 bp, Artificial Sequence
  Synthetic oligonucleotide; TTG chr11 5355764 5355785 5355769 5355764 -
accctactcttttttttttttt

SEQ ID NO: 121148 - DNA, 22 bp, Artificial Sequence
  Synthetic oligonucleotide; CTA chr11 5355758 5355779 5355763 5355758 -
ctcttttttttttttttaattt

SEQ ID NO: 121149 - DNA, 22 bp, Artificial Sequence
  Synthetic oligonucleotide; CTC chr11 5355755 5355776 5355760 5355755 -
ttttttttttttttaattttta

SEQ ID NO: 121150 - DNA, 22 bp, Artificial Sequence
  Synthetic oligonucleotide; CTT chr11 5355753 5355774 5355758 5355753 -
ttttttttttttaatttttaaa

SEQ ID NO: 121151 - DNA, 22 bp, Artificial Sequence
  Synthetic oligonucleotide; TTT chr11 5355752 5355773 5355757 5355752 -
tttttttttttaatttttaaag

SEQ ID NO: 121152 - DNA, 22 bp, Artificial Sequence
  Synthetic oligonucleotide; TTT chr11 5355751 5355772 5355756 5355751 -
ttttttttttaatttttaaagg

SEQ ID NO: 121153 - DNA, 22 bp, Artificial Sequence
  Synthetic oligonucleotide; TTT chr11 5355750 5355771 5355755 5355750 -
tttttttttaatttttaaaggt

SEQ ID NO: 121154 - DNA, 22 bp, Artificial Sequence
  Synthetic oligonucleotide; TTT chr11 5355749 5355770 5355754 5355749 -
ttttttttaatttttaaaggta

SEQ ID NO: 121155 - DNA, 22 bp, Artificial Sequence
  Synthetic oligonucleotide; TTT chr11 5355748 5355769 5355753 5355748 -
tttttttaatttttaaaggtaa

SEQ ID NO: 121156 - DNA, 22 bp, Artificial Sequence
  Synthetic oligonucleotide; TTT chr11 5355747 5355768 5355752 5355747 -
ttttttaatttttaaaggtaat

SEQ ID NO: 121157 - DNA, 22 bp, Artificial Sequence
  Synthetic oligonucleotide; TTT chr11 5355746 5355767 5355751 5355746 -
tttttaatttttaaaggtaatt

SEQ ID NO: 121158 - DNA, 22 bp, Artificial Sequence
  Synthetic oligonucleotide; TTT chr11 5355745 5355766 5355750 5355745 -
ttttaatttttaaaggtaattg

SEQ ID NO: 121159 - DNA, 22 bp, Artificial Sequence
  Synthetic oligonucleotide; TTT chr11 5355744 5355765 5355749 5355744 -
tttaatttttaaaggtaattgt

SEQ ID NO: 121160 - DNA, 22 bp, Artificial Sequence
  Synthetic oligonucleotide; TTT chr11 5355743 5355764 5355748 5355743 -
ttaatttttaaaggtaattgtt

SEQ ID NO: 121161 - DNA, 22 bp, Artificial Sequence
  Synthetic oligonucleotide; TTT chr11 5355742 5355763 5355747 5355742 -
taatttttaaaggtaattgtta

SEQ ID NO: 121162 - DNA, 22 bp, Artificial Sequence
  Synthetic oligonucleotide; TTT chr11 5355741 5355762 5355746 5355741 -
aatttttaaaggtaattgttag

SEQ ID NO: 121163 - DNA, 22 bp, Artificial Sequence
  Synthetic oligonucleotide; TTA chr11 5355740 5355761 5355745 5355740 -
atttttaaaggtaattgttaga

SEQ ID NO: 121164 - DNA, 22 bp, Artificial Sequence
  Synthetic oligonucleotide; TTT chr11 5355736 5355757 5355741 5355736 -
ttaaaggtaattgttagaaatt

SEQ ID NO: 121165 - DNA, 22 bp, Artificial Sequence
  Synthetic oligonucleotide; TTT chr11 5355735 5355756 5355740 5355735 -
taaaggtaattgttagaaattt

SEQ ID NO: 121166 - DNA, 22 bp, Artificial Sequence
  Synthetic oligonucleotide; TTT chr11 5355734 5355755 5355739 5355734 -
aaaggtaattgttagaaatttc

SEQ ID NO: 121167 - DNA, 22 bp, Artificial Sequence
  Synthetic oligonucleotide; TTA chr11 5355733 5355754 5355738 5355733 -
aaggtaattgttagaaatttcc

SEQ ID NO: 121168 - DNA, 22 bp, Artificial Sequence
  Synthetic oligonucleotide; TTG chr11 5355723 5355744 5355728 5355723 -
ttagaaatttcccaaggtttat

SEQ ID NO: 121169 - DNA, 22 bp, Artificial Sequence
  Synthetic oligonucleotide; TTA chr11 5355720 5355741 5355725 5355720 -
gaaatttcccaaggtttatttg

SEQ ID NO: 121170 - DNA, 22 bp, Artificial Sequence
  Synthetic oligonucleotide; TTT chr11 5355713 5355734 5355718 5355713 -
cccaaggtttatttgaaatgac

SEQ ID NO: 121171 - DNA, 22 bp, Artificial Sequence
  Synthetic oligonucleotide; TTC chr11 5355712 5355733 5355717 5355712 -
ccaaggtttatttgaaatgaca

SEQ ID NO: 121172 - DNA, 22 bp, Artificial Sequence
  Synthetic oligonucleotide; TTT chr11 5355703 5355724 5355708 5355703 -
atttgaaatgacacaccactga

SEQ ID NO: 121173 - DNA, 22 bp, Artificial Sequence
  Synthetic oligonucleotide; TTA chr11 5355702 5355723 5355707 5355702 -
tttgaaatgacacaccactgaa

SEQ ID NO: 121174 - DNA, 22 bp, Artificial Sequence
  Synthetic oligonucleotide; TTT chr11 5355699 5355720 5355704 5355699 -
gaaatgacacaccactgaaaac

SEQ ID NO: 121175 - DNA, 22 bp, Artificial Sequence
  Synthetic oligonucleotide; TTG chr11 5355698 5355719 5355703 5355698 -
aaatgacacaccactgaaaaca

SEQ ID NO: 121176 - DNA, 22 bp, Artificial Sequence
  Synthetic oligonucleotide; CTG chr11 5355682 5355703 5355687 5355682 -
aaaacataacttttacagatga

SEQ ID NO: 121177 - DNA, 22 bp, Artificial Sequence
  Synthetic oligonucleotide; CTT chr11 5355670 5355691 5355675 5355670 -
ttacagatgatttgtggataca

SEQ ID NO: 121178 - DNA, 22 bp, Artificial Sequence
  Synthetic oligonucleotide; TTT chr11 5355669 5355690 5355674 5355669 -
tacagatgatttgtggatacag

SEQ ID NO: 121179 - DNA, 22 bp, Artificial Sequence
  Synthetic oligonucleotide; TTT chr11 5355668 5355689 5355673 5355668 -
acagatgatttgtggatacagt

SEQ ID NO: 121180 - DNA, 22 bp, Artificial Sequence
  Synthetic oligonucleotide; TTA chr11 5355667 5355688 5355672 5355667 -
cagatgatttgtggatacagta

SEQ ID NO: 121181 - DNA, 22 bp, Artificial Sequence
  Synthetic oligonucleotide; TTT chr11 5355657 5355678 5355662 5355657 -
gtggatacagtacacatcacct

SEQ ID NO: 121182 - DNA, 22 bp, Artificial Sequence
  Synthetic oligonucleotide; TTG chr11 5355656 5355677 5355661 5355656 -
tggatacagtacacatcaccta

SEQ ID NO: 121183 - DNA, 22 bp, Artificial Sequence
  Synthetic oligonucleotide; CTA chr11 5355634 5355655 5355639 5355634 -
tcttactttaggacagtctgtg

SEQ ID NO: 121184 - DNA, 22 bp, Artificial Sequence
  Synthetic oligonucleotide; CTT chr11 5355630 5355651 5355635 5355630 -
actttaggacagtctgtgaaga

SEQ ID NO: 121185 - DNA, 22 bp, Artificial Sequence
  Synthetic oligonucleotide; TTA chr11 5355629 5355650 5355634 5355629 -
ctttaggacagtctgtgaagat

SEQ ID NO: 121186 - DNA, 22 bp, Artificial Sequence
  Synthetic oligonucleotide; CTT chr11 5355626 5355647 5355631 5355626 -
taggacagtctgtgaagatgat

SEQ ID NO: 121187 - DNA, 22 bp, Artificial Sequence
  Synthetic oligonucleotide; TTT chr11 5355625 5355646 5355630 5355625 -
aggacagtctgtgaagatgata

SEQ ID NO: 121188 - DNA, 22 bp, Artificial Sequence
  Synthetic oligonucleotide; TTA chr11 5355624 5355645 5355629 5355624 -
ggacagtctgtgaagatgatat

SEQ ID NO: 121189 - DNA, 22 bp, Artificial Sequence
  Synthetic oligonucleotide; CTG chr11 5355614 5355635 5355619 5355614 -
tgaagatgatatttttcctgct

SEQ ID NO: 121190 - DNA, 22 bp, Artificial Sequence
  Synthetic oligonucleotide; TTT chr11 5355600 5355621 5355605 5355600 -
ttcctgctgcagttcctttgtc

SEQ ID NO: 121191 - DNA, 22 bp, Artificial Sequence
  Synthetic oligonucleotide; TTT chr11 5355599 5355620 5355604 5355599 -
tcctgctgcagttcctttgtca

SEQ ID NO: 121192 - DNA, 22 bp, Artificial Sequence
  Synthetic oligonucleotide; TTT chr11 5355598 5355619 5355603 5355598 -
cctgctgcagttcctttgtcaa

SEQ ID NO: 121193 - DNA, 22 bp, Artificial Sequence
  Synthetic oligonucleotide; TTC chr11 5355597 5355618 5355602 5355597 -
ctgctgcagttcctttgtcaag

SEQ ID NO: 121194 - DNA, 22 bp, Artificial Sequence
  Synthetic oligonucleotide; CTG chr11 5355594 5355615 5355599 5355594 -
ctgcagttcctttgtcaagtga

SEQ ID NO: 121195 - DNA, 22 bp, Artificial Sequence
  Synthetic oligonucleotide; CTG chr11 5355591 5355612 5355596 5355591 -
cagttcctttgtcaagtgactt

SEQ ID NO: 121196 - DNA, 22 bp, Artificial Sequence
  Synthetic oligonucleotide; TTC chr11 5355585 5355606 5355590 5355585 -
ctttgtcaagtgactttagaca

SEQ ID NO: 121197 - DNA, 22 bp, Artificial Sequence
  Synthetic oligonucleotide; CTT chr11 5355582 5355603 5355587 5355582 -
tgtcaagtgactttagacagat

SEQ ID NO: 121198 - DNA, 22 bp, Artificial Sequence
  Synthetic oligonucleotide; TTT chr11 5355581 5355602 5355586 5355581 -
gtcaagtgactttagacagata

SEQ ID NO: 121199 - DNA, 22 bp, Artificial Sequence
  Synthetic oligonucleotide; TTG chr11 5355580 5355601 5355585 5355580 -
tcaagtgactttagacagatac

SEQ ID NO: 121200 - DNA, 22 bp, Artificial Sequence
  Synthetic oligonucleotide; CTT chr11 5355569 5355590 5355574 5355569 -
tagacagatacaggactgcaag

SEQ ID NO: 121201 - DNA, 22 bp, Artificial Sequence
  Synthetic oligonucleotide; TTT chr11 5355568 5355589 5355573 5355568 -
agacagatacaggactgcaaga

SEQ ID NO: 121202 - DNA, 22 bp, Artificial Sequence
  Synthetic oligonucleotide; TTA chr11 5355567 5355588 5355572 5355567 -
gacagatacaggactgcaagag

SEQ ID NO: 121203 - DNA, 22 bp, Artificial Sequence
  Synthetic oligonucleotide; CTG chr11 5355551 5355572 5355556 5355551 -
caagagtgactcaggtcatgct

SEQ ID NO: 121204 - DNA, 22 bp, Artificial Sequence
  Synthetic oligonucleotide; CTC chr11 5355539 5355560 5355544 5355539 -
aggtcatgctggcataggagaa

SEQ ID NO: 121205 - DNA, 22 bp, Artificial Sequence
  Synthetic oligonucleotide; CTG chr11 5355528 5355549 5355533 5355528 -
gcataggagaagcaggtgctag

SEQ ID NO: 121206 - DNA, 22 bp, Artificial Sequence
  Synthetic oligonucleotide; CTA chr11 5355507 5355528 5355512 5355507 -
gtgtttcacttgaactagttgt

SEQ ID NO: 121207 - DNA, 22 bp, Artificial Sequence
  Synthetic oligonucleotide; TTT chr11 5355501 5355522 5355506 5355501 -
cacttgaactagttgttgggct

SEQ ID NO: 121208 - DNA, 22 bp, Artificial Sequence
  Synthetic oligonucleotide; TTC chr11 5355500 5355521 5355505 5355500 -
acttgaactagttgttgggctg

SEQ ID NO: 121209 - DNA, 22 bp, Artificial Sequence
  Synthetic oligonucleotide; CTT chr11 5355496 5355517 5355501 5355496 -
gaactagttgttgggctggggt

SEQ ID NO: 121210 - DNA, 22 bp, Artificial Sequence
  Synthetic oligonucleotide; TTG chr11 5355495 5355516 5355500 5355495 -
aactagttgttgggctggggtg

SEQ ID NO: 121211 - DNA, 22 bp, Artificial Sequence
  Synthetic oligonucleotide; CTA chr11 5355490 5355511 5355495 5355490 -
gttgttgggctggggtggaatg

SEQ ID NO: 121212 - DNA, 22 bp, Artificial Sequence
  Synthetic oligonucleotide; TTG chr11 5355486 5355507 5355491 5355486 -
ttgggctggggtggaatgaaag

SEQ ID NO: 121213 - DNA, 22 bp, Artificial Sequence
  Synthetic oligonucleotide; TTG chr11 5355483 5355504 5355488 5355483 -
ggctggggtggaatgaaagctc

SEQ ID NO: 121214 - DNA, 22 bp, Artificial Sequence
  Synthetic oligonucleotide; CTG chr11 5355478 5355499 5355483 5355478 -
gggtggaatgaaagctccctag

SEQ ID NO: 121215 - DNA, 22 bp, Artificial Sequence
  Synthetic oligonucleotide; CTC chr11 5355461 5355482 5355466 5355461 -
cctaggccatgaggacatcttt

SEQ ID NO: 121216 - DNA, 22 bp, Artificial Sequence
  Synthetic oligonucleotide; CTA chr11 5355457 5355478 5355462 5355457 -
ggccatgaggacatctttgcaa

SEQ ID NO: 121217 - DNA, 22 bp, Artificial Sequence
  Synthetic oligonucleotide; CTT chr11 5355440 5355461 5355445 5355440 -
tgcaatgtggagaggacccaaa

SEQ ID NO: 121218 - DNA, 22 bp, Artificial Sequence
  Synthetic oligonucleotide; TTT chr11 5355439 5355460 5355444 5355439 -
gcaatgtggagaggacccaaat

SEQ ID NO: 121219 - DNA, 22 bp, Artificial Sequence
  Synthetic oligonucleotide; TTG chr11 5355438 5355459 5355443 5355438 -
caatgtggagaggacccaaatc

SEQ ID NO: 121220 - DNA, 22 bp, Artificial Sequence
  Synthetic oligonucleotide; TTG chr11 5355405 5355426 5355410 5355405 -
ctctttgaatgttgaaggcctt

SEQ ID NO: 121221 - DNA, 22 bp, Artificial Sequence
  Synthetic oligonucleotide; CTC chr11 5355402 5355423 5355407 5355402 -
tttgaatgttgaaggccttgtc

SEQ ID NO: 121222 - DNA, 22 bp, Artificial Sequence
  Synthetic oligonucleotide; CTT chr11 5355400 5355421 5355405 5355400 -
tgaatgttgaaggccttgtcag

SEQ ID NO: 121223 - DNA, 22 bp, Artificial Sequence
  Synthetic oligonucleotide; TTT chr11 5355399 5355420 5355404 5355399 -
gaatgttgaaggccttgtcagc

SEQ ID NO: 121224 - DNA, 22 bp, Artificial Sequence
  Synthetic oligonucleotide; TTG chr11 5355398 5355419 5355403 5355398 -
aatgttgaaggccttgtcagca

SEQ ID NO: 121225 - DNA, 22 bp, Artificial Sequence
  Synthetic oligonucleotide; TTG chr11 5355391 5355412 5355396 5355391 -
aaggccttgtcagcatactggt

SEQ ID NO: 121226 - DNA, 22 bp, Artificial Sequence
  Synthetic oligonucleotide; CTT chr11 5355383 5355404 5355388 5355383 -
gtcagcatactggtcacccagt

SEQ ID NO: 121227 - DNA, 22 bp, Artificial Sequence
  Synthetic oligonucleotide; TTG chr11 5355382 5355403 5355387 5355382 -
tcagcatactggtcacccagtt

SEQ ID NO: 121228 - DNA, 22 bp, Artificial Sequence
  Synthetic oligonucleotide; CTG chr11 5355371 5355392 5355376 5355371 -
gtcacccagtttcatcatcact

SEQ ID NO: 121229 - DNA, 22 bp, Artificial Sequence
  Synthetic oligonucleotide; TTT chr11 5355359 5355380 5355364 5355359 -
catcatcacttcatactgtttg

SEQ ID NO: 121230 - DNA, 22 bp, Artificial Sequence
  Synthetic oligonucleotide; TTC chr11 5355358 5355379 5355363 5355358 -
atcatcacttcatactgtttgt

SEQ ID NO: 121231 - DNA, 22 bp, Artificial Sequence
  Synthetic oligonucleotide; CTT chr11 5355348 5355369 5355353 5355348 -
catactgtttgtaccaaagcac

SEQ ID NO: 121232 - DNA, 22 bp, Artificial Sequence
  Synthetic oligonucleotide; TTC chr11 5355347 5355368 5355352 5355347 -
atactgtttgtaccaaagcacc

SEQ ID NO: 121233 - DNA, 22 bp, Artificial Sequence
  Synthetic oligonucleotide; CTG chr11 5355341 5355362 5355346 5355341 -
tttgtaccaaagcaccacagtt

SEQ ID NO: 121234 - DNA, 22 bp, Artificial Sequence
  Synthetic oligonucleotide; TTT chr11 5355338 5355359 5355343 5355338 -
gtaccaaagcaccacagtttcc

SEQ ID NO: 121235 - DNA, 22 bp, Artificial Sequence
  Synthetic oligonucleotide; TTG chr11 5355337 5355358 5355342 5355337 -
taccaaagcaccacagtttcct

SEQ ID NO: 121236 - DNA, 22 bp, Artificial Sequence
  Synthetic oligonucleotide; TTT chr11 5355318 5355339 5355323 5355318 -
ccttatgaaacttagcttcaag

SEQ ID NO: 121237 - DNA, 22 bp, Artificial Sequence
  Synthetic oligonucleotide; TTC chr11 5355317 5355338 5355322 5355317 -
cttatgaaacttagcttcaagg

SEQ ID NO: 121238 - DNA, 22 bp, Artificial Sequence
  Synthetic oligonucleotide; CTT chr11 5355314 5355335 5355319 5355314 -
atgaaacttagcttcaaggctg

SEQ ID NO: 121239 - DNA, 22 bp, Artificial Sequence
  Synthetic oligonucleotide; TTA chr11 5355313 5355334 5355318 5355313 -
tgaaacttagcttcaaggctgg

SEQ ID NO: 121240 - DNA, 22 bp, Artificial Sequence
  Synthetic oligonucleotide; CTT chr11 5355305 5355326 5355310 5355305 -
agcttcaaggctggagatgttt

SEQ ID NO: 121241 - DNA, 22 bp, Artificial Sequence
  Synthetic oligonucleotide; TTA chr11 5355304 5355325 5355309 5355304 -
gcttcaaggctggagatgtttt

SEQ ID NO: 121242 - DNA, 22 bp, Artificial Sequence
  Synthetic oligonucleotide; CTT chr11 5355300 5355321 5355305 5355300 -
caaggctggagatgtttttgaa

SEQ ID NO: 121243 - DNA, 22 bp, Artificial Sequence
  Synthetic oligonucleotide; TTC chr11 5355299 5355320 5355304 5355299 -
aaggctggagatgtttttgaaa

SEQ ID NO: 121244 - DNA, 22 bp, Artificial Sequence
  Synthetic oligonucleotide; CTG chr11 5355292 5355313 5355297 5355292 -
gagatgtttttgaaagtattaa

SEQ ID NO: 121245 - DNA, 22 bp, Artificial Sequence
  Synthetic oligonucleotide; TTT chr11 5355283 5355304 5355288 5355283 -
ttgaaagtattaatataaaatc

SEQ ID NO: 121246 - DNA, 22 bp, Artificial Sequence
  Synthetic oligonucleotide; TTT chr11 5355282 5355303 5355287 5355282 -
tgaaagtattaatataaaatcc

SEQ ID NO: 121247 - DNA, 22 bp, Artificial Sequence
  Synthetic oligonucleotide; TTT chr11 5355281 5355302 5355286 5355281 -
gaaagtattaatataaaatcca

SEQ ID NO: 121248 - DNA, 22 bp, Artificial Sequence
  Synthetic oligonucleotide; TTG chr11 5355280 5355301 5355285 5355280 -
aaagtattaatataaaatccaa

SEQ ID NO: 121249 - DNA, 22 bp, Artificial Sequence
  Synthetic oligonucleotide; TTA chr11 5355271 5355292 5355276 5355271 -
atataaaatccaattcgtcttg

SEQ ID NO: 121250 - DNA, 22 bp, Artificial Sequence
  Synthetic oligonucleotide; TTC chr11 5355255 5355276 5355260 5355255 -
gtcttgactataataatggtaa

SEQ ID NO: 121251 - DNA, 22 bp, Artificial Sequence
  Synthetic oligonucleotide; CTT chr11 5355250 5355271 5355255 5355250 -
gactataataatggtaactttt

SEQ ID NO: 121252 - DNA, 22 bp, Artificial Sequence
  Synthetic oligonucleotide; TTG chr11 5355249 5355270 5355254 5355249 -
actataataatggtaacttttc

SEQ ID NO: 121253 - DNA, 22 bp, Artificial Sequence
  Synthetic oligonucleotide; CTA chr11 5355245 5355266 5355250 5355245 -
taataatggtaacttttcttgt

SEQ ID NO: 121254 - DNA, 22 bp, Artificial Sequence
  Synthetic oligonucleotide; CTT chr11 5355230 5355251 5355235 5355230 -
ttcttgtaagtcaccattaaac

SEQ ID NO: 121255 - DNA, 22 bp, Artificial Sequence
  Synthetic oligonucleotide; TTT chr11 5355229 5355250 5355234 5355229 -
tcttgtaagtcaccattaaact

SEQ ID NO: 121256 - DNA, 22 bp, Artificial Sequence
  Synthetic oligonucleotide; TTT chr11 5355228 5355249 5355233 5355228 -
cttgtaagtcaccattaaactc

SEQ ID NO: 121257 - DNA, 22 bp, Artificial Sequence
  Synthetic oligonucleotide; TTC chr11 5355227 5355248 5355232 5355227 -
ttgtaagtcaccattaaactct

SEQ ID NO: 121258 - DNA, 22 bp, Artificial Sequence
  Synthetic oligonucleotide; CTT chr11 5355225 5355246 5355230 5355225 -
gtaagtcaccattaaactcttc

SEQ ID NO: 121259 - DNA, 22 bp, Artificial Sequence
  Synthetic oligonucleotide; TTG chr11 5355224 5355245 5355229 5355224 -
taagtcaccattaaactcttca

SEQ ID NO: 121260 - DNA, 22 bp, Artificial Sequence
  Synthetic oligonucleotide; TTA chr11 5355211 5355232 5355216 5355211 -
aactcttcaaactttctctatg

SEQ ID NO: 121261 - DNA, 22 bp, Artificial Sequence
  Synthetic oligonucleotide; CTC chr11 5355206 5355227 5355211 5355206 -
ttcaaactttctctatgctttc

SEQ ID NO: 121262 - DNA, 22 bp, Artificial Sequence
  Synthetic oligonucleotide; CTT chr11 5355204 5355225 5355209 5355204 -
caaactttctctatgctttctg

SEQ ID NO: 121263 - DNA, 22 bp, Artificial Sequence
  Synthetic oligonucleotide; TTC chr11 5355203 5355224 5355208 5355203 -
aaactttctctatgctttctga

SEQ ID NO: 121264 - DNA, 22 bp, Artificial Sequence
  Synthetic oligonucleotide; CTT chr11 5355197 5355218 5355202 5355197 -
tctctatgctttctgaaattct

SEQ ID NO: 121265 - DNA, 22 bp, Artificial Sequence
  Synthetic oligonucleotide; TTT chr11 5355196 5355217 5355201 5355196 -
ctctatgctttctgaaattcta

SEQ ID NO: 121266 - DNA, 22 bp, Artificial Sequence
  Synthetic oligonucleotide; TTC chr11 5355195 5355216 5355200 5355195 -
tctatgctttctgaaattctac

SEQ ID NO: 121267 - DNA, 22 bp, Artificial Sequence
  Synthetic oligonucleotide; CTC chr11 5355193 5355214 5355198 5355193 -
tatgctttctgaaattctactt

SEQ ID NO: 121268 - DNA, 22 bp, Artificial Sequence
  Synthetic oligonucleotide; CTA chr11 5355191 5355212 5355196 5355191 -
tgctttctgaaattctacttct

SEQ ID NO: 121269 - DNA, 22 bp, Artificial Sequence
  Synthetic oligonucleotide; CTT chr11 5355186 5355207 5355191 5355186 -
tctgaaattctacttctgcctt

SEQ ID NO: 121270 - DNA, 22 bp, Artificial Sequence
  Synthetic oligonucleotide; TTT chr11 5355185 5355206 5355190 5355185 -
ctgaaattctacttctgcctta

SEQ ID NO: 121271 - DNA, 22 bp, Artificial Sequence
  Synthetic oligonucleotide; TTC chr11 5355184 5355205 5355189 5355184 -
tgaaattctacttctgccttag

SEQ ID NO: 121272 - DNA, 22 bp, Artificial Sequence
  Synthetic oligonucleotide; CTG chr11 5355182 5355203 5355187 5355182 -
aaattctacttctgccttagac

SEQ ID NO: 121273 - DNA, 22 bp, Artificial Sequence
  Synthetic oligonucleotide; TTC chr11 5355176 5355197 5355181 5355176 -
tacttctgccttagacagaggc

SEQ ID NO: 121274 - DNA, 22 bp, Artificial Sequence
  Synthetic oligonucleotide; CTA chr11 5355174 5355195 5355179 5355174 -
cttctgccttagacagaggctc

SEQ ID NO: 121275 - DNA, 22 bp, Artificial Sequence
  Synthetic oligonucleotide; CTT chr11 5355171 5355192 5355176 5355171 -
ctgccttagacagaggctccta

SEQ ID NO: 121276 - DNA, 22 bp, Artificial Sequence
  Synthetic oligonucleotide; TTC chr11 5355170 5355191 5355175 5355170 -
tgccttagacagaggctcctat

SEQ ID NO: 121277 - DNA, 22 bp, Artificial Sequence
  Synthetic oligonucleotide; CTG chr11 5355168 5355189 5355173 5355168 -
ccttagacagaggctcctatcc

SEQ ID NO: 121278 - DNA, 22 bp, Artificial Sequence
  Synthetic oligonucleotide; CTT chr11 5355164 5355185 5355169 5355164 -
agacagaggctcctatccttcc

SEQ ID NO: 121279 - DNA, 22 bp, Artificial Sequence
  Synthetic oligonucleotide; TTA chr11 5355163 5355184 5355168 5355163 -
gacagaggctcctatccttcct

SEQ ID NO: 121280 - DNA, 22 bp, Artificial Sequence
  Synthetic oligonucleotide; CTC chr11 5355152 5355173 5355157 5355152 -
ctatccttcctcctgaagctct

SEQ ID NO: 121281 - DNA, 22 bp, Artificial Sequence
  Synthetic oligonucleotide; CTA chr11 5355149 5355170 5355154 5355149 -
tccttcctcctgaagctctgtt

SEQ ID NO: 121282 - DNA, 22 bp, Artificial Sequence
  Synthetic oligonucleotide; CTT chr11 5355144 5355165 5355149 5355144 -
cctcctgaagctctgttgagcc

SEQ ID NO: 121283 - DNA, 22 bp, Artificial Sequence
  Synthetic oligonucleotide; TTC chr11 5355143 5355164 5355148 5355143 -
ctcctgaagctctgttgagccc

SEQ ID NO: 121284 - DNA, 22 bp, Artificial Sequence
  Synthetic oligonucleotide; CTC chr11 5355140 5355161 5355145 5355140 -
ctgaagctctgttgagcccgat

SEQ ID NO: 121285 - DNA, 22 bp, Artificial Sequence
  Synthetic oligonucleotide; CTG chr11 5355137 5355158 5355142 5355137 -
aagctctgttgagcccgatgga

SEQ ID NO: 121286 - DNA, 22 bp, Artificial Sequence
  Synthetic oligonucleotide; CTC chr11 5355131 5355152 5355136 5355131 -
tgttgagcccgatggaggtggg

SEQ ID NO: 121287 - DNA, 22 bp, Artificial Sequence
  Synthetic oligonucleotide; CTG chr11 5355129 5355150 5355134 5355129 -
ttgagcccgatggaggtgggca

SEQ ID NO: 121288 - DNA, 22 bp, Artificial Sequence
  Synthetic oligonucleotide; TTG chr11 5355126 5355147 5355131 5355126 -
agcccgatggaggtgggcaggc

SEQ ID NO: 121289 - DNA, 22 bp, Artificial Sequence
  Synthetic oligonucleotide; CTG chr11 5355100 5355121 5355105 5355100 -
tcatagtccgtaagcttcctgc

SEQ ID NO: 121290 - DNA, 22 bp, Artificial Sequence
  Synthetic oligonucleotide; CTT chr11 5355083 5355104 5355088 5355083 -
cctgctgcacttggtgatgtga

SEQ ID NO: 121291 - DNA, 22 bp, Artificial Sequence
  Synthetic oligonucleotide; TTC chr11 5355082 5355103 5355087 5355082 -
ctgctgcacttggtgatgtgat

SEQ ID NO: 121292 - DNA, 22 bp, Artificial Sequence
  Synthetic oligonucleotide; CTG chr11 5355079 5355100 5355084 5355079 -
ctgcacttggtgatgtgattct

SEQ ID NO: 121293 - DNA, 22 bp, Artificial Sequence
  Synthetic oligonucleotide; CTG chr11 5355076 5355097 5355081 5355076 -
cacttggtgatgtgattcttca

SEQ ID NO: 121294 - DNA, 22 bp, Artificial Sequence
  Synthetic oligonucleotide; CTT chr11 5355071 5355092 5355076 5355071 -
ggtgatgtgattcttcaagtca

SEQ ID NO: 121295 - DNA, 22 bp, Artificial Sequence
  Synthetic oligonucleotide; TTG chr11 5355070 5355091 5355075 5355070 -
gtgatgtgattcttcaagtcag

SEQ ID NO: 121296 - DNA, 22 bp, Artificial Sequence
  Synthetic oligonucleotide; TTC chr11 5355058 5355079 5355063 5355058 -
ttcaagtcaggaaattggtcca

SEQ ID NO: 121297 - DNA, 22 bp, Artificial Sequence
  Synthetic oligonucleotide; CTT chr11 5355056 5355077 5355061 5355056 -
caagtcaggaaattggtccagg

SEQ ID NO: 121298 - DNA, 22 bp, Artificial Sequence
  Synthetic oligonucleotide; TTC chr11 5355055 5355076 5355060 5355055 -
aagtcaggaaattggtccaggt

SEQ ID NO: 121299 - DNA, 22 bp, Artificial Sequence
  Synthetic oligonucleotide; TTG chr11 5355041 5355062 5355046 5355041 -
gtccaggtagttttccagtgtt

SEQ ID NO: 121300 - DNA, 22 bp, Artificial Sequence
  Synthetic oligonucleotide; TTT chr11 5355028 5355049 5355033 5355028 -
tccagtgttagcaaggatgcat

SEQ ID NO: 121301 - DNA, 22 bp, Artificial Sequence
  Synthetic oligonucleotide; TTT chr11 5355027 5355048 5355032 5355027 -
ccagtgttagcaaggatgcatc

SEQ ID NO: 121302 - DNA, 22 bp, Artificial Sequence
  Synthetic oligonucleotide; TTC chr11 5355026 5355047 5355031 5355026 -
cagtgttagcaaggatgcatcc

SEQ ID NO: 121303 - DNA, 22 bp, Artificial Sequence
  Synthetic oligonucleotide; TTA chr11 5355018 5355039 5355023 5355018 -
gcaaggatgcatccatgagttt

SEQ ID NO: 121304 - DNA, 22 bp, Artificial Sequence
  Synthetic oligonucleotide; TTT chr11 5354996 5355017 5355001 5354996 -
tttgtggatatcctcccagagc

SEQ ID NO: 121305 - DNA, 22 bp, Artificial Sequence
  Synthetic oligonucleotide; TTT chr11 5354995 5355016 5355000 5354995 -
ttgtggatatcctcccagagca

SEQ ID NO: 121306 - DNA, 22 bp, Artificial Sequence
  Synthetic oligonucleotide; TTT chr11 5354994 5355015 5354999 5354994 -
tgtggatatcctcccagagcac

SEQ ID NO: 121307 - DNA, 22 bp, Artificial Sequence
  Synthetic oligonucleotide; TTT chr11 5354993 5355014 5354998 5354993 -
gtggatatcctcccagagcaca

SEQ ID NO: 121308 - DNA, 22 bp, Artificial Sequence
  Synthetic oligonucleotide; TTG chr11 5354992 5355013 5354997 5354992 -
tggatatcctcccagagcacat

SEQ ID NO: 121309 - DNA, 22 bp, Artificial Sequence
  Synthetic oligonucleotide; CTC chr11 5354981 5355002 5354986 5354981 -
ccagagcacatcacctttctca

SEQ ID NO: 121310 - DNA, 22 bp, Artificial Sequence
  Synthetic oligonucleotide; CTT chr11 5354964 5354985 5354969 5354964 -
tctcaccaaccattttcacacc

SEQ ID NO: 121311 - DNA, 22 bp, Artificial Sequence
  Synthetic oligonucleotide; TTT chr11 5354963 5354984 5354968 5354963 -
ctcaccaaccattttcacacct

SEQ ID NO: 121312 - DNA, 22 bp, Artificial Sequence
  Synthetic oligonucleotide; TTC chr11 5354962 5354983 5354967 5354962 -
tcaccaaccattttcacacctt

SEQ ID NO: 121313 - DNA, 22 bp, Artificial Sequence
  Synthetic oligonucleotide; CTC chr11 5354960 5354981 5354965 5354960 -
accaaccattttcacaccttcc

SEQ ID NO: 121314 - DNA, 22 bp, Artificial Sequence
  Synthetic oligonucleotide; TTT chr11 5354949 5354970 5354954 5354949 -
tcacaccttcctgcccagacca

SEQ ID NO: 121315 - DNA, 22 bp, Artificial Sequence
  Synthetic oligonucleotide; TTT chr11 5354948 5354969 5354953 5354948 -
cacaccttcctgcccagaccaa

SEQ ID NO: 121316 - DNA, 22 bp, Artificial Sequence
  Synthetic oligonucleotide; TTC chr11 5354947 5354968 5354952 5354947 -
acaccttcctgcccagaccaat

SEQ ID NO: 121317 - DNA, 22 bp, Artificial Sequence
  Synthetic oligonucleotide; CTT chr11 5354940 5354961 5354945 5354940 -
cctgcccagaccaatccagcgc

SEQ ID NO: 121318 - DNA, 22 bp, Artificial Sequence
  Synthetic oligonucleotide; TTC chr11 5354939 5354960 5354944 5354939 -
ctgcccagaccaatccagcgca

SEQ ID NO: 121319 - DNA, 22 bp, Artificial Sequence
  Synthetic oligonucleotide; CTG chr11 5354936 5354957 5354941 5354936 -
cccagaccaatccagcgcacag

SEQ ID NO: 121320 - DNA, 22 bp, Artificial Sequence
  Synthetic oligonucleotide; CTT chr11 5354910 5354931 5354915 5354910 -
cacacagtgactcagcttcgtc

SEQ ID NO: 121321 - DNA, 22 bp, Artificial Sequence
  Synthetic oligonucleotide; TTC chr11 5354909 5354930 5354914 5354909 -
acacagtgactcagcttcgtca

SEQ ID NO: 121322 - DNA, 22 bp, Artificial Sequence
  Synthetic oligonucleotide; CTC chr11 5354897 5354918 5354902 5354897 -
agcttcgtcaaggtctcttgaa

SEQ ID NO: 121323 - DNA, 22 bp, Artificial Sequence
  Synthetic oligonucleotide; CTT chr11 5354892 5354913 5354897 5354892 -
cgtcaaggtctcttgaatgcct

SEQ ID NO: 121324 - DNA, 22 bp, Artificial Sequence
  Synthetic oligonucleotide; TTC chr11 5354891 5354912 5354896 5354891 -
gtcaaggtctcttgaatgcctt

SEQ ID NO: 121325 - DNA, 22 bp, Artificial Sequence
  Synthetic oligonucleotide; CTC chr11 5354880 5354901 5354885 5354880 -
ttgaatgcctttgattgcttct

SEQ ID NO: 121326 - DNA, 22 bp, Artificial Sequence
  Synthetic oligonucleotide; CTT chr11 5354878 5354899 5354883 5354878 -
gaatgcctttgattgcttctaa

SEQ ID NO: 121327 - DNA, 22 bp, Artificial Sequence
  Synthetic oligonucleotide; TTG chr11 5354877 5354898 5354882 5354877 -
aatgcctttgattgcttctaaa

SEQ ID NO: 121328 - DNA, 22 bp, Artificial Sequence
  Synthetic oligonucleotide; CTT chr11 5354869 5354890 5354874 5354869 -
tgattgcttctaaacatcctca

SEQ ID NO: 121329 - DNA, 22 bp, Artificial Sequence
  Synthetic oligonucleotide; TTT chr11 5354868 5354889 5354873 5354868 -
gattgcttctaaacatcctcag

SEQ ID NO: 121330 - DNA, 22 bp, Artificial Sequence
  Synthetic oligonucleotide; TTG chr11 5354867 5354888 5354872 5354867 -
attgcttctaaacatcctcaga

SEQ ID NO: 121331 - DNA, 22 bp, Artificial Sequence
  Synthetic oligonucleotide; TTG chr11 5354863 5354884 5354868 5354863 -
cttctaaacatcctcagagttc

SEQ ID NO: 121332 - DNA, 22 bp, Artificial Sequence
  Synthetic oligonucleotide; CTT chr11 5354860 5354881 5354865 5354860 -
ctaaacatcctcagagttctct

SEQ ID NO: 121333 - DNA, 22 bp, Artificial Sequence
  Synthetic oligonucleotide; TTC chr11 5354859 5354880 5354864 5354859 -
taaacatcctcagagttctctc

SEQ ID NO: 121334 - DNA, 22 bp, Artificial Sequence
  Synthetic oligonucleotide; CTA chr11 5354857 5354878 5354862 5354857 -
aacatcctcagagttctctcag

SEQ ID NO: 121335 - DNA, 22 bp, Artificial Sequence
  Synthetic oligonucleotide; CTC chr11 5354848 5354869 5354853 5354848 -
agagttctctcaggtctggtac

SEQ ID NO: 121336 - DNA, 22 bp, Artificial Sequence
  Synthetic oligonucleotide; TTC chr11 5354841 5354862 5354846 5354841 -
tctcaggtctggtaccctctgc

SEQ ID NO: 121337 - DNA, 22 bp, Artificial Sequence
  Synthetic oligonucleotide; CTC chr11 5354839 5354860 5354844 5354839 -
tcaggtctggtaccctctgctt

SEQ ID NO: 121338 - DNA, 22 bp, Artificial Sequence
  Synthetic oligonucleotide; CTC chr11 5354837 5354858 5354842 5354837 -
aggtctggtaccctctgcttct

SEQ ID NO: 121339 - DNA, 22 bp, Artificial Sequence
  Synthetic oligonucleotide; CTG chr11 5354830 5354851 5354835 5354830 -
gtaccctctgcttcttgtggct

SEQ ID NO: 121340 - DNA, 22 bp, Artificial Sequence
  Synthetic oligonucleotide; CTC chr11 5354822 5354843 5354827 5354822 -
tgcttcttgtggcttgaagttc

SEQ ID NO: 121341 - DNA, 22 bp, Artificial Sequence
  Synthetic oligonucleotide; CTG chr11 5354820 5354841 5354825 5354820 -
cttcttgtggcttgaagttctg

SEQ ID NO: 121342 - DNA, 22 bp, Artificial Sequence
  Synthetic oligonucleotide; CTT chr11 5354817 5354838 5354822 5354817 -
cttgtggcttgaagttctggac

SEQ ID NO: 121343 - DNA, 22 bp, Artificial Sequence
  Synthetic oligonucleotide; TTC chr11 5354816 5354837 5354821 5354816 -
ttgtggcttgaagttctggaca

SEQ ID NO: 121344 - DNA, 22 bp, Artificial Sequence
  Synthetic oligonucleotide; CTT chr11 5354814 5354835 5354819 5354814 -
gtggcttgaagttctggacata

SEQ ID NO: 121345 - DNA, 22 bp, Artificial Sequence
  Synthetic oligonucleotide; TTG chr11 5354813 5354834 5354818 5354813 -
tggcttgaagttctggacatat

SEQ ID NO: 121346 - DNA, 22 bp, Artificial Sequence
  Synthetic oligonucleotide; CTT chr11 5354807 5354828 5354812 5354807 -
gaagttctggacatattcttca

SEQ ID NO: 121347 - DNA, 22 bp, Artificial Sequence
  Synthetic oligonucleotide; TTG chr11 5354806 5354827 5354811 5354806 -
aagttctggacatattcttcaa

SEQ ID NO: 121348 - DNA, 22 bp, Artificial Sequence
  Synthetic oligonucleotide; TTC chr11 5354800 5354821 5354805 5354800 -
tggacatattcttcaaactgtt

SEQ ID NO: 121349 - DNA, 22 bp, Artificial Sequence
  Synthetic oligonucleotide; CTG chr11 5354798 5354819 5354803 5354798 -
gacatattcttcaaactgtttg

SEQ ID NO: 121350 - DNA, 22 bp, Artificial Sequence
  Synthetic oligonucleotide; TTC chr11 5354789 5354810 5354794 5354789 -
ttcaaactgtttgtcttttgtc

SEQ ID NO: 121351 - DNA, 22 bp, Artificial Sequence
  Synthetic oligonucleotide; CTT chr11 5354787 5354808 5354792 5354787 -
caaactgtttgtcttttgtctc

SEQ ID NO: 121352 - DNA, 22 bp, Artificial Sequence
  Synthetic oligonucleotide; TTC chr11 5354786 5354807 5354791 5354786 -
aaactgtttgtcttttgtctca

SEQ ID NO: 121353 - DNA, 22 bp, Artificial Sequence
  Synthetic oligonucleotide; CTG chr11 5354780 5354801 5354785 5354780 -
tttgtcttttgtctcagcagct

SEQ ID NO: 121354 - DNA, 22 bp, Artificial Sequence
  Synthetic oligonucleotide; TTT chr11 5354777 5354798 5354782 5354777 -
gtcttttgtctcagcagctttc

SEQ ID NO: 121355 - DNA, 22 bp, Artificial Sequence
  Synthetic oligonucleotide; TTG chr11 5354776 5354797 5354781 5354776 -
tcttttgtctcagcagctttcc

SEQ ID NO: 121356 - DNA, 22 bp, Artificial Sequence
  Synthetic oligonucleotide; CTT chr11 5354772 5354793 5354777 5354772 -
ttgtctcagcagctttccctgg

SEQ ID NO: 121357 - DNA, 22 bp, Artificial Sequence
  Synthetic oligonucleotide; TTT chr11 5354771 5354792 5354776 5354771 -
tgtctcagcagctttccctggc

SEQ ID NO: 121358 - DNA, 22 bp, Artificial Sequence
  Synthetic oligonucleotide; TTT chr11 5354770 5354791 5354775 5354770 -
gtctcagcagctttccctggct

SEQ ID NO: 121359 - DNA, 22 bp, Artificial Sequence
  Synthetic oligonucleotide; TTG chr11 5354769 5354790 5354774 5354769 -
tctcagcagctttccctggctt

SEQ ID NO: 121360 - DNA, 22 bp, Artificial Sequence
  Synthetic oligonucleotide; CTC chr11 5354765 5354786 5354770 5354765 -
agcagctttccctggcttctgg

SEQ ID NO: 121361 - DNA, 22 bp, Artificial Sequence
  Synthetic oligonucleotide; CTT chr11 5354757 5354778 5354762 5354757 -
tccctggcttctggaggacgtt

SEQ ID NO: 121362 - DNA, 22 bp, Artificial Sequence
  Synthetic oligonucleotide; TTT chr11 5354756 5354777 5354761 5354756 -
ccctggcttctggaggacgttt

SEQ ID NO: 121363 - DNA, 22 bp, Artificial Sequence
  Synthetic oligonucleotide; TTC chr11 5354755 5354776 5354760 5354755 -
cctggcttctggaggacgtttt

SEQ ID NO: 121364 - DNA, 22 bp, Artificial Sequence
  Synthetic oligonucleotide; CTG chr11 5354751 5354772 5354756 5354751 -
gcttctggaggacgttttcctg

SEQ ID NO: 121365 - DNA, 22 bp, Artificial Sequence
  Synthetic oligonucleotide; CTT chr11 5354747 5354768 5354752 5354747 -
ctggaggacgttttcctgtgag

SEQ ID NO: 121366 - DNA, 22 bp, Artificial Sequence
  Synthetic oligonucleotide; TTC chr11 5354746 5354767 5354751 5354746 -
tggaggacgttttcctgtgagt

SEQ ID NO: 121367 - DNA, 22 bp, Artificial Sequence
  Synthetic oligonucleotide; CTG chr11 5354744 5354765 5354749 5354744 -
gaggacgttttcctgtgagtgg

SEQ ID NO: 121368 - DNA, 22 bp, Artificial Sequence
  Synthetic oligonucleotide; TTT chr11 5354734 5354755 5354739 5354734 -
tcctgtgagtggctgagtctct

SEQ ID NO: 121369 - DNA, 22 bp, Artificial Sequence
  Synthetic oligonucleotide; TTT chr11 5354733 5354754 5354738 5354733 -
cctgtgagtggctgagtctctt

SEQ ID NO: 121370 - DNA, 22 bp, Artificial Sequence
  Synthetic oligonucleotide; TTC chr11 5354732 5354753 5354737 5354732 -
ctgtgagtggctgagtctcttc

SEQ ID NO: 121371 - DNA, 22 bp, Artificial Sequence
  Synthetic oligonucleotide; CTG chr11 5354729 5354750 5354734 5354729 -
tgagtggctgagtctcttccag

SEQ ID NO: 121372 - DNA, 22 bp, Artificial Sequence
  Synthetic oligonucleotide; CTG chr11 5354719 5354740 5354724 5354719 -
agtctcttccaggcattcttgg

SEQ ID NO: 121373 - DNA, 22 bp, Artificial Sequence
  Synthetic oligonucleotide; CTC chr11 5354713 5354734 5354718 5354713 -
ttccaggcattcttggcaaaga

SEQ ID NO: 121374 - DNA, 22 bp, Artificial Sequence
  Synthetic oligonucleotide; CTT chr11 5354711 5354732 5354716 5354711 -
ccaggcattcttggcaaagatg

SEQ ID NO: 121375 - DNA, 22 bp, Artificial Sequence
  Synthetic oligonucleotide; TTC chr11 5354710 5354731 5354715 5354710 -
caggcattcttggcaaagatgc

SEQ ID NO: 121376 - DNA, 22 bp, Artificial Sequence
  Synthetic oligonucleotide; TTC chr11 5354701 5354722 5354706 5354701 -
ttggcaaagatgccctcttgat

SEQ ID NO: 121377 - DNA, 22 bp, Artificial Sequence
  Synthetic oligonucleotide; CTT chr11 5354699 5354720 5354704 5354699 -
ggcaaagatgccctcttgatgt

SEQ ID NO: 121378 - DNA, 22 bp, Artificial Sequence
  Synthetic oligonucleotide; TTG chr11 5354698 5354719 5354703 5354698 -
gcaaagatgccctcttgatgtt

SEQ ID NO: 121379 - DNA, 22 bp, Artificial Sequence
  Synthetic oligonucleotide; CTC chr11 5354684 5354705 5354689 5354684 -
ttgatgttggccagggctgcag

SEQ ID NO: 121380 - DNA, 22 bp, Artificial Sequence
  Synthetic oligonucleotide; CTT chr11 5354682 5354703 5354687 5354682 -
gatgttggccagggctgcaggt

SEQ ID NO: 121381 - DNA, 22 bp, Artificial Sequence
  Synthetic oligonucleotide; TTG chr11 5354681 5354702 5354686 5354681 -
atgttggccagggctgcaggtc

SEQ ID NO: 121382 - DNA, 22 bp, Artificial Sequence
  Synthetic oligonucleotide; TTG chr11 5354675 5354696 5354680 5354675 -
gccagggctgcaggtccaggac

SEQ ID NO: 121383 - DNA, 22 bp, Artificial Sequence
  Synthetic oligonucleotide; CTG chr11 5354665 5354686 5354670 5354665 -
caggtccaggacctgggaggag

SEQ ID NO: 121384 - DNA, 22 bp, Artificial Sequence
  Synthetic oligonucleotide; CTG chr11 5354650 5354671 5354655 5354650 -
ggaggagctgagcgctcagtgt

SEQ ID NO: 121385 - DNA, 22 bp, Artificial Sequence
  Synthetic oligonucleotide; CTG chr11 5354640 5354661 5354645 5354640 -
agcgctcagtgtggctggtggc

SEQ ID NO: 121386 - DNA, 22 bp, Artificial Sequence
  Synthetic oligonucleotide; CTC chr11 5354633 5354654 5354638 5354633 -
agtgtggctggtggcgtggagg

SEQ ID NO: 121387 - DNA, 22 bp, Artificial Sequence
  Synthetic oligonucleotide; CTG chr11 5354623 5354644 5354628 5354623 -
gtggcgtggaggggcgggagga

SEQ ID NO: 121388 - DNA, 22 bp, Artificial Sequence
  Synthetic oligonucleotide; CTT chr11 5354568 5354589 5354573 5354568 -
cgaccctactgttgatatgttg

SEQ ID NO: 121389 - DNA, 22 bp, Artificial Sequence
  Synthetic oligonucleotide; TTC chr11 5354567 5354588 5354572 5354567 -
gaccctactgttgatatgttgt

SEQ ID NO: 121390 - DNA, 22 bp, Artificial Sequence
  Synthetic oligonucleotide; CTA chr11 5354560 5354581 5354565 5354560 -
ctgttgatatgttgttcaggga

SEQ ID NO: 121391 - DNA, 22 bp, Artificial Sequence
  Synthetic oligonucleotide; CTG chr11 5354557 5354578 5354562 5354557 -
ttgatatgttgttcagggacca

SEQ ID NO: 121392 - DNA, 22 bp, Artificial Sequence
  Synthetic oligonucleotide; TTG chr11 5354554 5354575 5354559 5354554 -
atatgttgttcagggaccatcg

SEQ ID NO: 121393 - DNA, 22 bp, Artificial Sequence
  Synthetic oligonucleotide; TTG chr11 5354546 5354567 5354551 5354546 -
ttcagggaccatcgggagccca

SEQ ID NO: 121394 - DNA, 22 bp, Artificial Sequence
  Synthetic oligonucleotide; TTC chr11 5354543 5354564 5354548 5354543 -
agggaccatcgggagcccagag

SEQ ID NO: 121395 - DNA, 22 bp, Artificial Sequence
  Synthetic oligonucleotide; CTC chr11 5354518 5354539 5354523 5354518 -
tgctctgtttcacgggactcca

SEQ ID NO: 121396 - DNA, 22 bp, Artificial Sequence
  Synthetic oligonucleotide; CTG chr11 5354516 5354537 5354521 5354516 -
ctctgtttcacgggactccaca

SEQ ID NO: 121397 - DNA, 22 bp, Artificial Sequence
  Synthetic oligonucleotide; CTC chr11 5354513 5354534 5354518 5354513 -
tgtttcacgggactccacaaag

SEQ ID NO: 121398 - DNA, 22 bp, Artificial Sequence
  Synthetic oligonucleotide; CTG chr11 5354511 5354532 5354516 5354511 -
tttcacgggactccacaaagag

SEQ ID NO: 121399 - DNA, 22 bp, Artificial Sequence
  Synthetic oligonucleotide; TTT chr11 5354508 5354529 5354513 5354508 -
cacgggactccacaaagagaac

SEQ ID NO: 121400 - DNA, 22 bp, Artificial Sequence
  Synthetic oligonucleotide; TTC chr11 5354507 5354528 5354512 5354507 -
acgggactccacaaagagaact

SEQ ID NO: 121401 - DNA, 22 bp, Artificial Sequence
  Synthetic oligonucleotide; CTC chr11 5354498 5354519 5354503 5354498 -
cacaaagagaactgcaagtccc

SEQ ID NO: 121402 - DNA, 22 bp, Artificial Sequence
  Synthetic oligonucleotide; CTG chr11 5354484 5354505 5354489 5354484 -
caagtcccagtctttcacctct

SEQ ID NO: 121403 - DNA, 22 bp, Artificial Sequence
  Synthetic oligonucleotide; CTT chr11 5354470 5354491 5354475 5354470 -
tcacctctcttggactttttat

SEQ ID NO: 121404 - DNA, 22 bp, Artificial Sequence
  Synthetic oligonucleotide; TTT chr11 5354469 5354490 5354474 5354469 -
cacctctcttggactttttatc

SEQ ID NO: 121405 - DNA, 22 bp, Artificial Sequence
  Synthetic oligonucleotide; TTC chr11 5354468 5354489 5354473 5354468 -
acctctcttggactttttatct

SEQ ID NO: 121406 - DNA, 22 bp, Artificial Sequence
  Synthetic oligonucleotide; CTC chr11 5354463 5354484 5354468 5354463 -
tcttggactttttatcttgtct

SEQ ID NO: 121407 - DNA, 22 bp, Artificial Sequence
  Synthetic oligonucleotide; CTC chr11 5354461 5354482 5354466 5354461 -
ttggactttttatcttgtctct

SEQ ID NO: 121408 - DNA, 22 bp, Artificial Sequence
  Synthetic oligonucleotide; CTT chr11 5354459 5354480 5354464 5354459 -
ggactttttatcttgtctcttc

SEQ ID NO: 121409 - DNA, 22 bp, Artificial Sequence
  Synthetic oligonucleotide; TTG chr11 5354458 5354479 5354463 5354458 -
gactttttatcttgtctcttca

SEQ ID NO: 121410 - DNA, 22 bp, Artificial Sequence
  Synthetic oligonucleotide; CTT chr11 5354453 5354474 5354458 5354453 -
tttatcttgtctcttcatcaca

SEQ ID NO: 121411 - DNA, 22 bp, Artificial Sequence
  Synthetic oligonucleotide; TTT chr11 5354452 5354473 5354457 5354452 -
ttatcttgtctcttcatcacat

SEQ ID NO: 121412 - DNA, 22 bp, Artificial Sequence
  Synthetic oligonucleotide; TTT chr11 5354451 5354472 5354456 5354451 -
tatcttgtctcttcatcacatc

SEQ ID NO: 121413 - DNA, 22 bp, Artificial Sequence
  Synthetic oligonucleotide; TTT chr11 5354450 5354471 5354455 5354450 -
atcttgtctcttcatcacatct

SEQ ID NO: 121414 - DNA, 22 bp, Artificial Sequence
  Synthetic oligonucleotide; TTA chr11 5354449 5354470 5354454 5354449 -
tcttgtctcttcatcacatctc

SEQ ID NO: 121415 - DNA, 22 bp, Artificial Sequence
  Synthetic oligonucleotide; CTT chr11 5354445 5354466 5354450 5354445 -
gtctcttcatcacatctcttca

SEQ ID NO: 121416 - DNA, 22 bp, Artificial Sequence
  Synthetic oligonucleotide; TTG chr11 5354444 5354465 5354449 5354444 -
tctcttcatcacatctcttcag

SEQ ID NO: 121417 - DNA, 22 bp, Artificial Sequence
  Synthetic oligonucleotide; CTC chr11 5354440 5354461 5354445 5354440 -
ttcatcacatctcttcagtata

SEQ ID NO: 121418 - DNA, 22 bp, Artificial Sequence
  Synthetic oligonucleotide; CTT chr11 5354438 5354459 5354443 5354438 -
catcacatctcttcagtataag

SEQ ID NO: 121419 - DNA, 22 bp, Artificial Sequence
  Synthetic oligonucleotide; TTC chr11 5354437 5354458 5354442 5354437 -
atcacatctcttcagtataagg

SEQ ID NO: 121420 - DNA, 22 bp, Artificial Sequence
  Synthetic oligonucleotide; CTC chr11 5354427 5354448 5354432 5354427 -
ttcagtataaggaagaacagaa

SEQ ID NO: 121421 - DNA, 22 bp, Artificial Sequence
  Synthetic oligonucleotide; CTT chr11 5354425 5354446 5354430 5354425 -
cagtataaggaagaacagaaag

SEQ ID NO: 121422 - DNA, 22 bp, Artificial Sequence
  Synthetic oligonucleotide; TTC chr11 5354424 5354445 5354429 5354424 -
agtataaggaagaacagaaagg

SEQ ID NO: 121423 - DNA, 22 bp, Artificial Sequence
  Synthetic oligonucleotide; CTC chr11 5354388 5354409 5354393 5354388 -
agggttgtcagtcaaatgtgtc

SEQ ID NO: 121424 - DNA, 22 bp, Artificial Sequence
  Synthetic oligonucleotide; TTG chr11 5354381 5354402 5354386 5354381 -
tcagtcaaatgtgtccatttac

SEQ ID NO: 121425 - DNA, 22 bp, Artificial Sequence
  Synthetic oligonucleotide; TTT chr11 5354361 5354382 5354366 5354361 -
acagaatttataaaatgtattg

SEQ ID NO: 121426 - DNA, 22 bp, Artificial Sequence
  Synthetic oligonucleotide; TTA chr11 5354360 5354381 5354365 5354360 -
cagaatttataaaatgtattgt

SEQ ID NO: 121427 - DNA, 22 bp, Artificial Sequence
  Synthetic oligonucleotide; TTT chr11 5354352 5354373 5354357 5354352 -
ataaaatgtattgttatcctag

SEQ ID NO: 121428 - DNA, 22 bp, Artificial Sequence
  Synthetic oligonucleotide; TTA chr11 5354351 5354372 5354356 5354351 -
taaaatgtattgttatcctagt

SEQ ID NO: 121429 - DNA, 22 bp, Artificial Sequence
  Synthetic oligonucleotide; TTG chr11 5354339 5354360 5354344 5354339 -
ttatcctagttatctttatact

SEQ ID NO: 121430 - DNA, 22 bp, Artificial Sequence
  Synthetic oligonucleotide; TTA chr11 5354336 5354357 5354341 5354336 -
tcctagttatctttatactagc

SEQ ID NO: 121431 - DNA, 22 bp, Artificial Sequence
  Synthetic oligonucleotide; CTA chr11 5354331 5354352 5354336 5354331 -
gttatctttatactagcctgct

SEQ ID NO: 121432 - DNA, 22 bp, Artificial Sequence
  Synthetic oligonucleotide; TTA chr11 5354327 5354348 5354332 5354327 -
tctttatactagcctgctatgg

SEQ ID NO: 121433 - DNA, 22 bp, Artificial Sequence
  Synthetic oligonucleotide; CTT chr11 5354323 5354344 5354328 5354323 -
tatactagcctgctatggcagg

SEQ ID NO: 121434 - DNA, 22 bp, Artificial Sequence
  Synthetic oligonucleotide; TTT chr11 5354322 5354343 5354327 5354322 -
atactagcctgctatggcaggt

SEQ ID NO: 121435 - DNA, 22 bp, Artificial Sequence
  Synthetic oligonucleotide; TTA chr11 5354321 5354342 5354326 5354321 -
tactagcctgctatggcaggtt

SEQ ID NO: 121436 - DNA, 22 bp, Artificial Sequence
  Synthetic oligonucleotide; CTA chr11 5354316 5354337 5354321 5354316 -
gcctgctatggcaggtttcagg

SEQ ID NO: 121437 - DNA, 22 bp, Artificial Sequence
  Synthetic oligonucleotide; CTG chr11 5354311 5354332 5354316 5354311 -
ctatggcaggtttcaggatcac

SEQ ID NO: 121438 - DNA, 22 bp, Artificial Sequence
  Synthetic oligonucleotide; CTA chr11 5354308 5354329 5354313 5354308 -
tggcaggtttcaggatcactgg

SEQ ID NO: 121439 - DNA, 22 bp, Artificial Sequence
  Synthetic oligonucleotide; TTT chr11 5354298 5354319 5354303 5354298 -
caggatcactggacctagaggg

SEQ ID NO: 121440 - DNA, 22 bp, Artificial Sequence
  Synthetic oligonucleotide; TTC chr11 5354297 5354318 5354302 5354297 -
aggatcactggacctagagggt

SEQ ID NO: 121441 - DNA, 22 bp, Artificial Sequence
  Synthetic oligonucleotide; CTG chr11 5354287 5354308 5354292 5354287 -
gacctagagggtgagtcaagaa

SEQ ID NO: 121442 - DNA, 22 bp, Artificial Sequence
  Synthetic oligonucleotide; CTA chr11 5354281 5354302 5354286 5354281 -
gagggtgagtcaagaaagattt

SEQ ID NO: 121443 - DNA, 22 bp, Artificial Sequence
  Synthetic oligonucleotide; TTT chr11 5354259 5354280 5354264 5354259 -
tctttgatgtggcttagatccc

SEQ ID NO: 121444 - DNA, 22 bp, Artificial Sequence
  Synthetic oligonucleotide; TTT chr11 5354258 5354279 5354263 5354258 -
ctttgatgtggcttagatcccc

SEQ ID NO: 121445 - DNA, 22 bp, Artificial Sequence
  Synthetic oligonucleotide; TTC chr11 5354257 5354278 5354262 5354257 -
tttgatgtggcttagatccccc

SEQ ID NO: 121446 - DNA, 22 bp, Artificial Sequence
  Synthetic oligonucleotide; CTT chr11 5354255 5354276 5354260 5354255 -
tgatgtggcttagatccccctg

SEQ ID NO: 121447 - DNA, 22 bp, Artificial Sequence
  Synthetic oligonucleotide; TTT chr11 5354254 5354275 5354259 5354254 -
gatgtggcttagatccccctga

SEQ ID NO: 121448 - DNA, 22 bp, Artificial Sequence
  Synthetic oligonucleotide; TTG chr11 5354253 5354274 5354258 5354253 -
atgtggcttagatccccctgaa

SEQ ID NO: 121449 - DNA, 22 bp, Artificial Sequence
  Synthetic oligonucleotide; CTT chr11 5354244 5354265 5354249 5354244 -
agatccccctgaattcattccc

SEQ ID NO: 121450 - DNA, 22 bp, Artificial Sequence
  Synthetic oligonucleotide; TTA chr11 5354243 5354264 5354248 5354243 -
gatccccctgaattcattccca

SEQ ID NO: 121451 - DNA, 22 bp, Artificial Sequence
  Synthetic oligonucleotide; CTG chr11 5354233 5354254 5354238 5354233 -
aattcattcccaaaagcccaag

SEQ ID NO: 121452 - DNA, 22 bp, Artificial Sequence
  Synthetic oligonucleotide; TTC chr11 5354228 5354249 5354233 5354228 -
attcccaaaagcccaagggaag

SEQ ID NO: 121453 - DNA, 22 bp, Artificial Sequence
  Synthetic oligonucleotide; TTC chr11 5354224 5354245 5354229 5354224 -
ccaaaagcccaagggaagaaag

SEQ ID NO: 121454 - DNA, 22 bp, Artificial Sequence
  Synthetic oligonucleotide; TTA chr11 5354192 5354213 5354197 5354192 -
agtatacattgcccatatcttg

SEQ ID NO: 121455 - DNA, 22 bp, Artificial Sequence
  Synthetic oligonucleotide; TTG chr11 5354181 5354202 5354186 5354181 -
cccatatcttggaagacaatac

SEQ ID NO: 121456 - DNA, 22 bp, Artificial Sequence
  Synthetic oligonucleotide; CTT chr11 5354171 5354192 5354176 5354171 -
ggaagacaatacagagagcagt

SEQ ID NO: 121457 - DNA, 22 bp, Artificial Sequence
  Synthetic oligonucleotide; TTG chr11 5354170 5354191 5354175 5354170 -
gaagacaatacagagagcagta

SEQ ID NO: 121458 - DNA, 22 bp, Artificial Sequence
  Synthetic oligonucleotide; CTA chr11 5354132 5354153 5354137 5354132 -
gcagacacacagaaagacatgg

SEQ ID NO: 121459 - DNA, 22 bp, Artificial Sequence
  Synthetic oligonucleotide; CTT chr11 5354103 5354124 5354108 5354103 -
taaattttatttattcatttta

SEQ ID NO: 121460 - DNA, 22 bp, Artificial Sequence
  Synthetic oligonucleotide; TTT chr11 5354102 5354123 5354107 5354102 -
aaattttatttattcattttaa

SEQ ID NO: 121461 - DNA, 22 bp, Artificial Sequence
  Synthetic oligonucleotide; TTA chr11 5354101 5354122 5354106 5354101 -
aattttatttattcattttaat

SEQ ID NO: 121462 - DNA, 22 bp, Artificial Sequence
  Synthetic oligonucleotide; TTT chr11 5354096 5354117 5354101 5354096 -
tatttattcattttaatgaaaa

SEQ ID NO: 121463 - DNA, 22 bp, Artificial Sequence
  Synthetic oligonucleotide; TTT chr11 5354095 5354116 5354100 5354095 -
atttattcattttaatgaaaaa

SEQ ID NO: 121464 - DNA, 22 bp, Artificial Sequence
  Synthetic oligonucleotide; TTA chr11 5354094 5354115 5354099 5354094 -
tttattcattttaatgaaaaat

SEQ ID NO: 121465 - DNA, 22 bp, Artificial Sequence
  Synthetic oligonucleotide; TTT chr11 5354091 5354112 5354096 5354091 -
attcattttaatgaaaaattat

SEQ ID NO: 121466 - DNA, 22 bp, Artificial Sequence
  Synthetic oligonucleotide; TTA chr11 5354090 5354111 5354095 5354090 -
ttcattttaatgaaaaattata

SEQ ID NO: 121467 - DNA, 22 bp, Artificial Sequence
  Synthetic oligonucleotide; TTC chr11 5354087 5354108 5354092 5354087 -
attttaatgaaaaattatattt

SEQ ID NO: 121468 - DNA, 22 bp, Artificial Sequence
  Synthetic oligonucleotide; TTT chr11 5354083 5354104 5354088 5354083 -
taatgaaaaattatattttgtt

SEQ ID NO: 121469 - DNA, 22 bp, Artificial Sequence
  Synthetic oligonucleotide; TTT chr11 5354082 5354103 5354087 5354082 -
aatgaaaaattatattttgtta

SEQ ID NO: 121470 - DNA, 22 bp, Artificial Sequence
  Synthetic oligonucleotide; TTA chr11 5354081 5354102 5354086 5354081 -
atgaaaaattatattttgttaa

SEQ ID NO: 121471 - DNA, 22 bp, Artificial Sequence
  Synthetic oligonucleotide; TTA chr11 5354070 5354091 5354075 5354070 -
tattttgttaaaaatggtctat

SEQ ID NO: 121472 - DNA, 22 bp, Artificial Sequence
  Synthetic oligonucleotide; TTT chr11 5354065 5354086 5354070 5354065 -
tgttaaaaatggtctatgtgag

SEQ ID NO: 121473 - DNA, 22 bp, Artificial Sequence
  Synthetic oligonucleotide; TTT chr11 5354064 5354085 5354069 5354064 -
gttaaaaatggtctatgtgaga

SEQ ID NO: 121474 - DNA, 22 bp, Artificial Sequence
  Synthetic oligonucleotide; TTG chr11 5354063 5354084 5354068 5354063 -
ttaaaaatggtctatgtgagaa

SEQ ID NO: 121475 - DNA, 22 bp, Artificial Sequence
  Synthetic oligonucleotide; TTA chr11 5354060 5354081 5354065 5354060 -
aaaatggtctatgtgagaagtt

SEQ ID NO: 121476 - DNA, 22 bp, Artificial Sequence
  Synthetic oligonucleotide; CTA chr11 5354049 5354070 5354054 5354049 -
tgtgagaagttctgtaatacag

SEQ ID NO: 121477 - DNA, 22 bp, Artificial Sequence
  Synthetic oligonucleotide; TTC chr11 5354037 5354058 5354042 5354037 -
tgtaatacagtagggaataaga

SEQ ID NO: 121478 - DNA, 22 bp, Artificial Sequence
  Synthetic oligonucleotide; CTG chr11 5354035 5354056 5354040 5354035 -
taatacagtagggaataagaac

SEQ ID NO: 121479 - DNA, 22 bp, Artificial Sequence
  Synthetic oligonucleotide; CTA chr11 5354011 5354032 5354016 5354011 -
tgttatatttaccatcctcgag

SEQ ID NO: 121480 - DNA, 22 bp, Artificial Sequence
  Synthetic oligonucleotide; TTA chr11 5354006 5354027 5354011 5354006 -
tatttaccatcctcgagcacac

SEQ ID NO: 121481 - DNA, 22 bp, Artificial Sequence
  Synthetic oligonucleotide; TTT chr11 5354001 5354022 5354006 5354001 -
accatcctcgagcacacagtca

SEQ ID NO: 121482 - DNA, 22 bp, Artificial Sequence
  Synthetic oligonucleotide; TTA chr11 5354000 5354021 5354005 5354000 -
ccatcctcgagcacacagtcaa

SEQ ID NO: 121483 - DNA, 22 bp, Artificial Sequence
  Synthetic oligonucleotide; CTC chr11 5353992 5354013 5353997 5353992 -
gagcacacagtcaagaagctac

SEQ ID NO: 121484 - DNA, 22 bp, Artificial Sequence
  Synthetic oligonucleotide; CTA chr11 5353971 5353992 5353976 5353971 -
caaaagagaaaggcaaatttca

SEQ ID NO: 121485 - DNA, 22 bp, Artificial Sequence
  Synthetic oligonucleotide; TTT chr11 5353951 5353972 5353956 5353951 -
cacacacagccaagttgagtaa

SEQ ID NO: 121486 - DNA, 22 bp, Artificial Sequence
  Synthetic oligonucleotide; TTC chr11 5353950 5353971 5353955 5353950 -
acacacagccaagttgagtaaa

SEQ ID NO: 121487 - DNA, 22 bp, Artificial Sequence
  Synthetic oligonucleotide; TTG chr11 5353934 5353955 5353939 5353934 -
agtaaaacaaacaaaatctttt

SEQ ID NO: 121488 - DNA, 22 bp, Artificial Sequence
  Synthetic oligonucleotide; CTT chr11 5353914 5353935 5353919 5353914 -
ttggtctaatcagataaagatc

SEQ ID NO: 121489 - DNA, 22 bp, Artificial Sequence
  Synthetic oligonucleotide; TTT chr11 5353913 5353934 5353918 5353913 -
tggtctaatcagataaagatca

SEQ ID NO: 121490 - DNA, 22 bp, Artificial Sequence
  Synthetic oligonucleotide; TTT chr11 5353912 5353933 5353917 5353912 -
ggtctaatcagataaagatcat

SEQ ID NO: 121491 - DNA, 22 bp, Artificial Sequence
  Synthetic oligonucleotide; TTG chr11 5353911 5353932 5353916 5353911 -
gtctaatcagataaagatcatt

SEQ ID NO: 121492 - DNA, 22 bp, Artificial Sequence
  Synthetic oligonucleotide; CTA chr11 5353906 5353927 5353911 5353906 -
atcagataaagatcatttacta

SEQ ID NO: 121493 - DNA, 22 bp, Artificial Sequence
  Synthetic oligonucleotide; TTT chr11 5353888 5353909 5353893 5353888 -
actagcctggaaactattgtga

SEQ ID NO: 121494 - DNA, 22 bp, Artificial Sequence
  Synthetic oligonucleotide; TTA chr11 5353887 5353908 5353892 5353887 -
ctagcctggaaactattgtgaa

SEQ ID NO: 121495 - DNA, 22 bp, Artificial Sequence
  Synthetic oligonucleotide; CTA chr11 5353884 5353905 5353889 5353884 -
gcctggaaactattgtgaaggt

SEQ ID NO: 121496 - DNA, 22 bp, Artificial Sequence
  Synthetic oligonucleotide; CTG chr11 5353879 5353900 5353884 5353879 -
gaaactattgtgaaggtattat

SEQ ID NO: 121497 - DNA, 22 bp, Artificial Sequence
  Synthetic oligonucleotide; CTA chr11 5353872 5353893 5353877 5353872 -
ttgtgaaggtattattttattt

SEQ ID NO: 121498 - DNA, 22 bp, Artificial Sequence
  Synthetic oligonucleotide; TTG chr11 5353869 5353890 5353874 5353869 -
tgaaggtattattttatttttg

SEQ ID NO: 121499 - DNA, 22 bp, Artificial Sequence
  Synthetic oligonucleotide; TTA chr11 5353858 5353879 5353863 5353858 -
ttttatttttgttttctctgtg

SEQ ID NO: 121500 - DNA, 22 bp, Artificial Sequence
  Synthetic oligonucleotide; TTT chr11 5353855 5353876 5353860 5353855 -
tatttttgttttctctgtgtta

SEQ ID NO: 121501 - DNA, 22 bp, Artificial Sequence
  Synthetic oligonucleotide; TTT chr11 5353854 5353875 5353859 5353854 -
atttttgttttctctgtgttat

SEQ ID NO: 121502 - DNA, 22 bp, Artificial Sequence
  Synthetic oligonucleotide; TTA chr11 5353853 5353874 5353858 5353853 -
tttttgttttctctgtgttatt

SEQ ID NO: 121503 - DNA, 22 bp, Artificial Sequence
  Synthetic oligonucleotide; TTT chr11 5353850 5353871 5353855 5353850 -
ttgttttctctgtgttatttat

SEQ ID NO: 121504 - DNA, 22 bp, Artificial Sequence
  Synthetic oligonucleotide; TTT chr11 5353849 5353870 5353854 5353849 -
tgttttctctgtgttatttata

SEQ ID NO: 121505 - DNA, 22 bp, Artificial Sequence
  Synthetic oligonucleotide; TTT chr11 5353848 5353869 5353853 5353848 -
gttttctctgtgttatttatac

SEQ ID NO: 121506 - DNA, 22 bp, Artificial Sequence
  Synthetic oligonucleotide; TTG chr11 5353847 5353868 5353852 5353847 -
ttttctctgtgttatttataca

SEQ ID NO: 121507 - DNA, 22 bp, Artificial Sequence
  Synthetic oligonucleotide; TTT chr11 5353844 5353865 5353849 5353844 -
tctctgtgttatttatacatcc

SEQ ID NO: 121508 - DNA, 22 bp, Artificial Sequence
  Synthetic oligonucleotide; TTT chr11 5353843 5353864 5353848 5353843 -
ctctgtgttatttatacatccc

SEQ ID NO: 121509 - DNA, 22 bp, Artificial Sequence
  Synthetic oligonucleotide; TTC chr11 5353842 5353863 5353847 5353842 -
tctgtgttatttatacatccca

SEQ ID NO: 121510 - DNA, 22 bp, Artificial Sequence
  Synthetic oligonucleotide; CTC chr11 5353840 5353861 5353845 5353840 -
tgtgttatttatacatcccaag

SEQ ID NO: 121511 - DNA, 22 bp, Artificial Sequence
  Synthetic oligonucleotide; CTG chr11 5353838 5353859 5353843 5353838 -
tgttatttatacatcccaagaa

SEQ ID NO: 121512 - DNA, 22 bp, Artificial Sequence
  Synthetic oligonucleotide; TTA chr11 5353833 5353854 5353838 5353833 -
tttatacatcccaagaatccta

SEQ ID NO: 121513 - DNA, 22 bp, Artificial Sequence
  Synthetic oligonucleotide; TTT chr11 5353830 5353851 5353835 5353830 -
atacatcccaagaatcctaaaa

SEQ ID NO: 121514 - DNA, 22 bp, Artificial Sequence
  Synthetic oligonucleotide; TTA chr11 5353829 5353850 5353834 5353829 -
tacatcccaagaatcctaaaaa

SEQ ID NO: 121515 - DNA, 22 bp, Artificial Sequence
  Synthetic oligonucleotide; CTA chr11 5353811 5353832 5353816 5353811 -
aaaaatccccacctttctgtga

SEQ ID NO: 121516 - DNA, 22 bp, Artificial Sequence
  Synthetic oligonucleotide; CTT chr11 5353796 5353817 5353801 5353796 -
tctgtgatgaagagtaggtggg

SEQ ID NO: 121517 - DNA, 22 bp, Artificial Sequence
  Synthetic oligonucleotide; TTT chr11 5353795 5353816 5353800 5353795 -
ctgtgatgaagagtaggtgggc

SEQ ID NO: 121518 - DNA, 22 bp, Artificial Sequence
  Synthetic oligonucleotide; TTC chr11 5353794 5353815 5353799 5353794 -
tgtgatgaagagtaggtgggca

SEQ ID NO: 121519 - DNA, 22 bp, Artificial Sequence
  Synthetic oligonucleotide; CTG chr11 5353792 5353813 5353797 5353792 -
tgatgaagagtaggtgggcagc

SEQ ID NO: 121520 - DNA, 22 bp, Artificial Sequence
  Synthetic oligonucleotide; CTG chr11 5353758 5353779 5353763 5353758 -
agtgtcagtatgacagaggcca

SEQ ID NO: 121521 - DNA, 22 bp, Artificial Sequence
  Synthetic oligonucleotide; CTG chr11 5353715 5353736 5353720 5353715 -
actggtcactgggtggcccctt

SEQ ID NO: 121522 - DNA, 22 bp, Artificial Sequence
  Synthetic oligonucleotide; CTG chr11 5353711 5353732 5353716 5353711 -
gtcactgggtggccccttgtgt

SEQ ID NO: 121523 - DNA, 22 bp, Artificial Sequence
  Synthetic oligonucleotide; CTG chr11 5353704 5353725 5353709 5353704 -
ggtggccccttgtgtagtccaa

SEQ ID NO: 121524 - DNA, 22 bp, Artificial Sequence
  Synthetic oligonucleotide; CTT chr11 5353693 5353714 5353698 5353693 -
gtgtagtccaagcacatcatac

SEQ ID NO: 121525 - DNA, 22 bp, Artificial Sequence
  Synthetic oligonucleotide; TTG chr11 5353692 5353713 5353697 5353692 -
tgtagtccaagcacatcatacc

SEQ ID NO: 121526 - DNA, 22 bp, Artificial Sequence
  Synthetic oligonucleotide; CTG chr11 5353667 5353688 5353672 5353667 -
tattttggtcaaaagaatatct

SEQ ID NO: 121527 - DNA, 22 bp, Artificial Sequence
  Synthetic oligonucleotide; TTT chr11 5353662 5353683 5353667 5353662 -
tggtcaaaagaatatctttctt

SEQ ID NO: 121528 - DNA, 22 bp, Artificial Sequence
  Synthetic oligonucleotide; TTT chr11 5353661 5353682 5353666 5353661 -
ggtcaaaagaatatctttcttt

SEQ ID NO: 121529 - DNA, 22 bp, Artificial Sequence
  Synthetic oligonucleotide; TTG chr11 5353660 5353681 5353665 5353660 -
gtcaaaagaatatctttctttt

SEQ ID NO: 121530 - DNA, 22 bp, Artificial Sequence
  Synthetic oligonucleotide; CTT chr11 5353644 5353665 5353649 5353644 -
tcttttaaaattaatttaaaac

SEQ ID NO: 121531 - DNA, 22 bp, Artificial Sequence
  Synthetic oligonucleotide; TTT chr11 5353643 5353664 5353648 5353643 -
cttttaaaattaatttaaaact

SEQ ID NO: 121532 - DNA, 22 bp, Artificial Sequence
  Synthetic oligonucleotide; TTC chr11 5353642 5353663 5353647 5353642 -
ttttaaaattaatttaaaactt

SEQ ID NO: 121533 - DNA, 22 bp, Artificial Sequence
  Synthetic oligonucleotide; CTT chr11 5353640 5353661 5353645 5353640 -
ttaaaattaatttaaaacttat

SEQ ID NO: 121534 - DNA, 22 bp, Artificial Sequence
  Synthetic oligonucleotide; TTT chr11 5353639 5353660 5353644 5353639 -
taaaattaatttaaaacttatc

SEQ ID NO: 121535 - DNA, 22 bp, Artificial Sequence
  Synthetic oligonucleotide; TTT chr11 5353638 5353659 5353643 5353638 -
aaaattaatttaaaacttatca

SEQ ID NO: 121536 - DNA, 22 bp, Artificial Sequence
  Synthetic oligonucleotide; TTA chr11 5353637 5353658 5353642 5353637 -
aaattaatttaaaacttatcat

SEQ ID NO: 121537 - DNA, 22 bp, Artificial Sequence
  Synthetic oligonucleotide; TTA chr11 5353631 5353652 5353636 5353631 -
atttaaaacttatcatttgagt

SEQ ID NO: 121538 - DNA, 22 bp, Artificial Sequence
  Synthetic oligonucleotide; TTT chr11 5353627 5353648 5353632 5353627 -
aaaacttatcatttgagtcatg

SEQ ID NO: 121539 - DNA, 22 bp, Artificial Sequence
  Synthetic oligonucleotide; TTA chr11 5353626 5353647 5353631 5353626 -
aaacttatcatttgagtcatgg

SEQ ID NO: 121540 - DNA, 22 bp, Artificial Sequence
  Synthetic oligonucleotide; CTT chr11 5353620 5353641 5353625 5353620 -
atcatttgagtcatggatactg

SEQ ID NO: 121541 - DNA, 22 bp, Artificial Sequence
  Synthetic oligonucleotide; TTA chr11 5353619 5353640 5353624 5353619 -
tcatttgagtcatggatactgg

SEQ ID NO: 121542 - DNA, 22 bp, Artificial Sequence
  Synthetic oligonucleotide; TTT chr11 5353613 5353634 5353618 5353613 -
gagtcatggatactggctcttc

SEQ ID NO: 121543 - DNA, 22 bp, Artificial Sequence
  Synthetic oligonucleotide; TTG chr11 5353612 5353633 5353617 5353612 -
agtcatggatactggctcttca

SEQ ID NO: 121544 - DNA, 22 bp, Artificial Sequence
  Synthetic oligonucleotide; CTG chr11 5353598 5353619 5353603 5353598 -
gctcttcacctggccataggac

SEQ ID NO: 121545 - DNA, 22 bp, Artificial Sequence
  Synthetic oligonucleotide; CTC chr11 5353594 5353615 5353599 5353594 -
ttcacctggccataggaccaca

SEQ ID NO: 121546 - DNA, 22 bp, Artificial Sequence
  Synthetic oligonucleotide; CTT chr11 5353592 5353613 5353597 5353592 -
cacctggccataggaccacaaa

SEQ ID NO: 121547 - DNA, 22 bp, Artificial Sequence
  Synthetic oligonucleotide; TTC chr11 5353591 5353612 5353596 5353591 -
acctggccataggaccacaaac

SEQ ID NO: 121548 - DNA, 22 bp, Artificial Sequence
  Synthetic oligonucleotide; CTG chr11 5353586 5353607 5353591 5353586 -
gccataggaccacaaaccccct

SEQ ID NO: 121549 - DNA, 22 bp, Artificial Sequence
  Synthetic oligonucleotide; CTC chr11 5353563 5353584 5353568 5353563 -
ttctcatgcctagactctgaaa

SEQ ID NO: 121550 - DNA, 22 bp, Artificial Sequence
  Synthetic oligonucleotide; CTT chr11 5353561 5353582 5353566 5353561 -
ctcatgcctagactctgaaaag

SEQ ID NO: 121551 - DNA, 22 bp, Artificial Sequence
  Synthetic oligonucleotide; TTC chr11 5353560 5353581 5353565 5353560 -
tcatgcctagactctgaaaaga

SEQ ID NO: 121552 - DNA, 22 bp, Artificial Sequence
  Synthetic oligonucleotide; CTC chr11 5353558 5353579 5353563 5353558 -
atgcctagactctgaaaagaat

SEQ ID NO: 121553 - DNA, 22 bp, Artificial Sequence
  Synthetic oligonucleotide; CTA chr11 5353551 5353572 5353556 5353551 -
gactctgaaaagaatcaaaagt

SEQ ID NO: 121554 - DNA, 22 bp, Artificial Sequence
  Synthetic oligonucleotide; CTC chr11 5353546 5353567 5353551 5353546 -
tgaaaagaatcaaaagtatttg

SEQ ID NO: 121555 - DNA, 22 bp, Artificial Sequence
  Synthetic oligonucleotide; CTG chr11 5353544 5353565 5353549 5353544 -
aaaagaatcaaaagtatttgga

SEQ ID NO: 121556 - DNA, 22 bp, Artificial Sequence
  Synthetic oligonucleotide; TTT chr11 5353525 5353546 5353530 5353525 -
ggagccagaaaaggccatttta

SEQ ID NO: 121557 - DNA, 22 bp, Artificial Sequence
  Synthetic oligonucleotide; TTG chr11 5353524 5353545 5353529 5353524 -
gagccagaaaaggccattttat

SEQ ID NO: 121558 - DNA, 22 bp, Artificial Sequence
  Synthetic oligonucleotide; TTT chr11 5353505 5353526 5353510 5353505 -
tatcttctagttatgagcattg

SEQ ID NO: 121559 - DNA, 22 bp, Artificial Sequence
  Synthetic oligonucleotide; TTT chr11 5353504 5353525 5353509 5353504 -
atcttctagttatgagcattgc

SEQ ID NO: 121560 - DNA, 22 bp, Artificial Sequence
  Synthetic oligonucleotide; TTA chr11 5353503 5353524 5353508 5353503 -
tcttctagttatgagcattgcc

SEQ ID NO: 121561 - DNA, 22 bp, Artificial Sequence
  Synthetic oligonucleotide; CTT chr11 5353499 5353520 5353504 5353499 -
ctagttatgagcattgcctcca

SEQ ID NO: 121562 - DNA, 22 bp, Artificial Sequence
  Synthetic oligonucleotide; TTC chr11 5353498 5353519 5353503 5353498 -
tagttatgagcattgcctccat

SEQ ID NO: 121563 - DNA, 22 bp, Artificial Sequence
  Synthetic oligonucleotide; CTA chr11 5353496 5353517 5353501 5353496 -
gttatgagcattgcctccatcc

SEQ ID NO: 121564 - DNA, 22 bp, Artificial Sequence
  Synthetic oligonucleotide; TTA chr11 5353492 5353513 5353497 5353492 -
tgagcattgcctccatcctctc

SEQ ID NO: 121565 - DNA, 22 bp, Artificial Sequence
  Synthetic oligonucleotide; TTG chr11 5353483 5353504 5353488 5353483 -
cctccatcctctcccttcctcc

SEQ ID NO: 121566 - DNA, 22 bp, Artificial Sequence
  Synthetic oligonucleotide; CTC chr11 5353479 5353500 5353484 5353479 -
catcctctcccttcctccccac

SEQ ID NO: 121567 - DNA, 22 bp, Artificial Sequence
  Synthetic oligonucleotide; CTC chr11 5353472 5353493 5353477 5353472 -
tcccttcctccccactctccac

SEQ ID NO: 121568 - DNA, 22 bp, Artificial Sequence
  Synthetic oligonucleotide; CTC chr11 5353470 5353491 5353475 5353470 -
ccttcctccccactctccacat

SEQ ID NO: 121569 - DNA, 22 bp, Artificial Sequence
  Synthetic oligonucleotide; CTT chr11 5353466 5353487 5353471 5353466 -
cctccccactctccacatatga

SEQ ID NO: 121570 - DNA, 22 bp, Artificial Sequence
  Synthetic oligonucleotide; TTC chr11 5353465 5353486 5353470 5353465 -
ctccccactctccacatatgac

SEQ ID NO: 121571 - DNA, 22 bp, Artificial Sequence
  Synthetic oligonucleotide; CTC chr11 5353462 5353483 5353467 5353462 -
cccactctccacatatgaccaa

SEQ ID NO: 121572 - DNA, 22 bp, Artificial Sequence
  Synthetic oligonucleotide; CTC chr11 5353455 5353476 5353460 5353455 -
tccacatatgaccaactgtttg

SEQ ID NO: 121573 - DNA, 22 bp, Artificial Sequence
  Synthetic oligonucleotide; CTC chr11 5353453 5353474 5353458 5353453 -
cacatatgaccaactgtttgtt

SEQ ID NO: 121574 - DNA, 22 bp, Artificial Sequence
  Synthetic oligonucleotide; CTG chr11 5353437 5353458 5353442 5353437 -
tttgtttttcaactctgctatt

SEQ ID NO: 121575 - DNA, 22 bp, Artificial Sequence
  Synthetic oligonucleotide; TTT chr11 5353434 5353455 5353439 5353434 -
gtttttcaactctgctattttg

SEQ ID NO: 121576 - DNA, 22 bp, Artificial Sequence
  Synthetic oligonucleotide; TTG chr11 5353433 5353454 5353438 5353433 -
tttttcaactctgctattttgc

SEQ ID NO: 121577 - DNA, 22 bp, Artificial Sequence
  Synthetic oligonucleotide; TTT chr11 5353430 5353451 5353435 5353430 -
ttcaactctgctattttgcaca

SEQ ID NO: 121578 - DNA, 22 bp, Artificial Sequence
  Synthetic oligonucleotide; TTT chr11 5353429 5353450 5353434 5353429 -
tcaactctgctattttgcacat

SEQ ID NO: 121579 - DNA, 22 bp, Artificial Sequence
  Synthetic oligonucleotide; TTT chr11 5353428 5353449 5353433 5353428 -
caactctgctattttgcacatg

SEQ ID NO: 121580 - DNA, 22 bp, Artificial Sequence
  Synthetic oligonucleotide; TTC chr11 5353427 5353448 5353432 5353427 -
aactctgctattttgcacatgc

SEQ ID NO: 121581 - DNA, 22 bp, Artificial Sequence
  Synthetic oligonucleotide; CTC chr11 5353422 5353443 5353427 5353422 -
tgctattttgcacatgccagac

SEQ ID NO: 121582 - DNA, 22 bp, Artificial Sequence
  Synthetic oligonucleotide; CTG chr11 5353420 5353441 5353425 5353420 -
ctattttgcacatgccagacac

SEQ ID NO: 121583 - DNA, 22 bp, Artificial Sequence
  Synthetic oligonucleotide; CTA chr11 5353417 5353438 5353422 5353417 -
ttttgcacatgccagacacccc

SEQ ID NO: 121584 - DNA, 22 bp, Artificial Sequence
  Synthetic oligonucleotide; TTT chr11 5353414 5353435 5353419 5353414 -
tgcacatgccagacacccctat

SEQ ID NO: 121585 - DNA, 22 bp, Artificial Sequence
  Synthetic oligonucleotide; TTT chr11 5353413 5353434 5353418 5353413 -
gcacatgccagacacccctatc

SEQ ID NO: 121586 - DNA, 22 bp, Artificial Sequence
  Synthetic oligonucleotide; TTG chr11 5353412 5353433 5353417 5353412 -
cacatgccagacacccctatct

SEQ ID NO: 121587 - DNA, 22 bp, Artificial Sequence
  Synthetic oligonucleotide; CTA chr11 5353393 5353414 5353398 5353393 -
tctagtcttatctctgatgttc

SEQ ID NO: 121588 - DNA, 22 bp, Artificial Sequence
  Synthetic oligonucleotide; CTA chr11 5353389 5353410 5353394 5353389 -
gtcttatctctgatgttcccct

SEQ ID NO: 121589 - DNA, 22 bp, Artificial Sequence
  Synthetic oligonucleotide; CTT chr11 5353384 5353405 5353389 5353384 -
atctctgatgttcccctaaacc

SEQ ID NO: 121590 - DNA, 22 bp, Artificial Sequence
  Synthetic oligonucleotide; TTA chr11 5353383 5353404 5353388 5353383 -
tctctgatgttcccctaaacca

SEQ ID NO: 121591 - DNA, 22 bp, Artificial Sequence
  Synthetic oligonucleotide; CTC chr11 5353379 5353400 5353384 5353379 -
tgatgttcccctaaaccagacc

SEQ ID NO: 121592 - DNA, 22 bp, Artificial Sequence
  Synthetic oligonucleotide; CTG chr11 5353377 5353398 5353382 5353377 -
atgttcccctaaaccagacctc

SEQ ID NO: 121593 - DNA, 22 bp, Artificial Sequence
  Synthetic oligonucleotide; TTC chr11 5353371 5353392 5353376 5353371 -
ccctaaaccagacctctcatac

SEQ ID NO: 121594 - DNA, 22 bp, Artificial Sequence
  Synthetic oligonucleotide; CTA chr11 5353366 5353387 5353371 5353366 -
aaccagacctctcataccactt

SEQ ID NO: 121595 - DNA, 22 bp, Artificial Sequence
  Synthetic oligonucleotide; CTC chr11 5353355 5353376 5353360 5353355 -
tcataccactttatgaaaatgc

SEQ ID NO: 121596 - DNA, 22 bp, Artificial Sequence
  Synthetic oligonucleotide; CTC chr11 5353353 5353374 5353358 5353353 -
ataccactttatgaaaatgcat

SEQ ID NO: 121597 - DNA, 22 bp, Artificial Sequence
  Synthetic oligonucleotide; CTT chr11 5353344 5353365 5353349 5353344 -
tatgaaaatgcatctctctgtt

SEQ ID NO: 121598 - DNA, 22 bp, Artificial Sequence
  Synthetic oligonucleotide; TTT chr11 5353343 5353364 5353348 5353343 -
atgaaaatgcatctctctgttc

SEQ ID NO: 121599 - DNA, 22 bp, Artificial Sequence
  Synthetic oligonucleotide; TTA chr11 5353342 5353363 5353347 5353342 -
tgaaaatgcatctctctgttca

SEQ ID NO: 121600 - DNA, 22 bp, Artificial Sequence
  Synthetic oligonucleotide; CTC chr11 5353328 5353349 5353333 5353328 -
tctgttcagtagtaactggaat

SEQ ID NO: 121601 - DNA, 22 bp, Artificial Sequence
  Synthetic oligonucleotide; CTC chr11 5353326 5353347 5353331 5353326 -
tgttcagtagtaactggaatta

SEQ ID NO: 121602 - DNA, 22 bp, Artificial Sequence
  Synthetic oligonucleotide; CTG chr11 5353324 5353345 5353329 5353324 -
ttcagtagtaactggaattaac

SEQ ID NO: 121603 - DNA, 22 bp, Artificial Sequence
  Synthetic oligonucleotide; TTC chr11 5353321 5353342 5353326 5353321 -
agtagtaactggaattaactat

SEQ ID NO: 121604 - DNA, 22 bp, Artificial Sequence
  Synthetic oligonucleotide; CTG chr11 5353310 5353331 5353315 5353310 -
gaattaactatcaagacaatgg

SEQ ID NO: 121605 - DNA, 22 bp, Artificial Sequence
  Synthetic oligonucleotide; TTA chr11 5353304 5353325 5353309 5353304 -
actatcaagacaatggtcatct

SEQ ID NO: 121606 - DNA, 22 bp, Artificial Sequence
  Synthetic oligonucleotide; CTA chr11 5353300 5353321 5353305 5353300 -
tcaagacaatggtcatctgaat

SEQ ID NO: 121607 - DNA, 22 bp, Artificial Sequence
  Synthetic oligonucleotide; CTG chr11 5353281 5353302 5353286 5353281 -
aattagaaattatatctctgtt

SEQ ID NO: 121608 - DNA, 22 bp, Artificial Sequence
  Synthetic oligonucleotide; TTA chr11 5353276 5353297 5353281 5353276 -
gaaattatatctctgttttcaa

SEQ ID NO: 121609 - DNA, 22 bp, Artificial Sequence
  Synthetic oligonucleotide; TTA chr11 5353269 5353290 5353274 5353269 -
tatctctgttttcaaattatta

SEQ ID NO: 121610 - DNA, 22 bp, Artificial Sequence
  Synthetic oligonucleotide; CTC chr11 5353263 5353284 5353268 5353263 -
tgttttcaaattattatcaata

SEQ ID NO: 121611 - DNA, 22 bp, Artificial Sequence
  Synthetic oligonucleotide; CTG chr11 5353261 5353282 5353266 5353261 -
ttttcaaattattatcaatatt

SEQ ID NO: 121612 - DNA, 22 bp, Artificial Sequence
  Synthetic oligonucleotide; TTT chr11 5353258 5353279 5353263 5353258 -
tcaaattattatcaatattatt

SEQ ID NO: 121613 - DNA, 22 bp, Artificial Sequence
  Synthetic oligonucleotide; TTT chr11 5353257 5353278 5353262 5353257 -
caaattattatcaatattattt

SEQ ID NO: 121614 - DNA, 22 bp, Artificial Sequence
  Synthetic oligonucleotide; TTC chr11 5353256 5353277 5353261 5353256 -
aaattattatcaatattatttg

SEQ ID NO: 121615 - DNA, 22 bp, Artificial Sequence
  Synthetic oligonucleotide; TTA chr11 5353250 5353271 5353255 5353250 -
ttatcaatattatttgataaat

SEQ ID NO: 121616 - DNA, 22 bp, Artificial Sequence
  Synthetic oligonucleotide; TTA chr11 5353247 5353268 5353252 5353247 -
tcaatattatttgataaatgtt

SEQ ID NO: 121617 - DNA, 22 bp, Artificial Sequence
  Synthetic oligonucleotide; TTA chr11 5353238 5353259 5353243 5353238 -
tttgataaatgttaaccaaagt

SEQ ID NO: 121618 - DNA, 22 bp, Artificial Sequence
  Synthetic oligonucleotide; TTT chr11 5353235 5353256 5353240 5353235 -
gataaatgttaaccaaagtttt

SEQ ID NO: 121619 - DNA, 22 bp, Artificial Sequence
  Synthetic oligonucleotide; TTG chr11 5353234 5353255 5353239 5353234 -
ataaatgttaaccaaagtttta

SEQ ID NO: 121620 - DNA, 22 bp, Artificial Sequence
  Synthetic oligonucleotide; TTA chr11 5353224 5353245 5353229 5353224 -
accaaagttttaactgaacaca

SEQ ID NO: 121621 - DNA, 22 bp, Artificial Sequence
  Synthetic oligonucleotide; TTT chr11 5353214 5353235 5353219 5353214 -
taactgaacacatttctcatag

SEQ ID NO: 121622 - DNA, 22 bp, Artificial Sequence
  Synthetic oligonucleotide; TTT chr11 5353213 5353234 5353218 5353213 -
aactgaacacatttctcataga

SEQ ID NO: 121623 - DNA, 22 bp, Artificial Sequence
  Synthetic oligonucleotide; TTA chr11 5353212 5353233 5353217 5353212 -
actgaacacatttctcatagag

SEQ ID NO: 121624 - DNA, 22 bp, Artificial Sequence
  Synthetic oligonucleotide; CTG chr11 5353208 5353229 5353213 5353208 -
aacacatttctcatagagatac

SEQ ID NO: 121625 - DNA, 22 bp, Artificial Sequence
  Synthetic oligonucleotide; TTT chr11 5353199 5353220 5353204 5353199 -
ctcatagagatactttccctag

SEQ ID NO: 121626 - DNA, 22 bp, Artificial Sequence
  Synthetic oligonucleotide; TTC chr11 5353198 5353219 5353203 5353198 -
tcatagagatactttccctaga

SEQ ID NO: 121627 - DNA, 22 bp, Artificial Sequence
  Synthetic oligonucleotide; CTC chr11 5353196 5353217 5353201 5353196 -
atagagatactttccctagact

SEQ ID NO: 121628 - DNA, 22 bp, Artificial Sequence
  Synthetic oligonucleotide; CTT chr11 5353184 5353205 5353189 5353184 -
tccctagactcatcattttgaa

SEQ ID NO: 121629 - DNA, 22 bp, Artificial Sequence
  Synthetic oligonucleotide; TTT chr11 5353183 5353204 5353188 5353183 -
ccctagactcatcattttgaat

SEQ ID NO: 121630 - DNA, 22 bp, Artificial Sequence
  Synthetic oligonucleotide; TTC chr11 5353182 5353203 5353187 5353182 -
cctagactcatcattttgaatt

SEQ ID NO: 121631 - DNA, 22 bp, Artificial Sequence
  Synthetic oligonucleotide; CTA chr11 5353178 5353199 5353183 5353178 -
gactcatcattttgaattgagg

SEQ ID NO: 121632 - DNA, 22 bp, Artificial Sequence
  Synthetic oligonucleotide; CTC chr11 5353173 5353194 5353178 5353173 -
atcattttgaattgagggaaat

SEQ ID NO: 121633 - DNA, 22 bp, Artificial Sequence
  Synthetic oligonucleotide; TTT chr11 5353166 5353187 5353171 5353166 -
tgaattgagggaaatggtttac

SEQ ID NO: 121634 - DNA, 22 bp, Artificial Sequence
  Synthetic oligonucleotide; TTT chr11 5353165 5353186 5353170 5353165 -
gaattgagggaaatggtttacc

SEQ ID NO: 121635 - DNA, 22 bp, Artificial Sequence
  Synthetic oligonucleotide; TTG chr11 5353164 5353185 5353169 5353164 -
aattgagggaaatggtttaccc

SEQ ID NO: 121636 - DNA, 22 bp, Artificial Sequence
  Synthetic oligonucleotide; TTG chr11 5353159 5353180 5353164 5353159 -
agggaaatggtttaccctcatt

SEQ ID NO: 121637 - DNA, 22 bp, Artificial Sequence
  Synthetic oligonucleotide; TTT chr11 5353146 5353167 5353151 5353146 -
accctcattgaagaaagtaatt

SEQ ID NO: 121638 - DNA, 22 bp, Artificial Sequence
  Synthetic oligonucleotide; TTA chr11 5353145 5353166 5353150 5353145 -
ccctcattgaagaaagtaattg

SEQ ID NO: 121639 - DNA, 22 bp, Artificial Sequence
  Synthetic oligonucleotide; CTC chr11 5353140 5353161 5353145 5353140 -
attgaagaaagtaattgaggga

SEQ ID NO: 121640 - DNA, 22 bp, Artificial Sequence
  Synthetic oligonucleotide; TTG chr11 5353136 5353157 5353141 5353136 -
aagaaagtaattgagggaaatg

SEQ ID NO: 121641 - DNA, 22 bp, Artificial Sequence
  Synthetic oligonucleotide; TTG chr11 5353123 5353144 5353128 5353123 -
agggaaatggcttactctcatt

SEQ ID NO: 121642 - DNA, 22 bp, Artificial Sequence
  Synthetic oligonucleotide; CTT chr11 5353110 5353131 5353115 5353110 -
actctcattgaagaaagtctca

SEQ ID NO: 121643 - DNA, 22 bp, Artificial Sequence
  Synthetic oligonucleotide; TTA chr11 5353109 5353130 5353114 5353109 -
ctctcattgaagaaagtctcat

SEQ ID NO: 121644 - DNA, 22 bp, Artificial Sequence
  Synthetic oligonucleotide; CTC chr11 5353106 5353127 5353111 5353106 -
tcattgaagaaagtctcatttc

SEQ ID NO: 121645 - DNA, 22 bp, Artificial Sequence
  Synthetic oligonucleotide; CTC chr11 5353104 5353125 5353109 5353104 -
attgaagaaagtctcatttctt

SEQ ID NO: 121646 - DNA, 22 bp, Artificial Sequence
  Synthetic oligonucleotide; TTG chr11 5353100 5353121 5353105 5353100 -
aagaaagtctcatttcttcacg

SEQ ID NO: 121647 - DNA, 22 bp, Artificial Sequence
  Synthetic oligonucleotide; CTC chr11 5353089 5353110 5353094 5353089 -
atttcttcacgtgcaattttct

SEQ ID NO: 121648 - DNA, 22 bp, Artificial Sequence
  Synthetic oligonucleotide; TTT chr11 5353085 5353106 5353090 5353085 -
cttcacgtgcaattttctagaa

SEQ ID NO: 121649 - DNA, 22 bp, Artificial Sequence
  Synthetic oligonucleotide; TTC chr11 5353084 5353105 5353089 5353084 -
ttcacgtgcaattttctagaaa

SEQ ID NO: 121650 - DNA, 22 bp, Artificial Sequence
  Synthetic oligonucleotide; CTT chr11 5353082 5353103 5353087 5353082 -
cacgtgcaattttctagaaaca

SEQ ID NO: 121651 - DNA, 22 bp, Artificial Sequence
  Synthetic oligonucleotide; TTC chr11 5353081 5353102 5353086 5353081 -
acgtgcaattttctagaaacag

SEQ ID NO: 121652 - DNA, 22 bp, Artificial Sequence
  Synthetic oligonucleotide; TTT chr11 5353070 5353091 5353075 5353070 -
tctagaaacagcagccagctcc

SEQ ID NO: 121653 - DNA, 22 bp, Artificial Sequence
  Synthetic oligonucleotide; TTT chr11 5353069 5353090 5353074 5353069 -
ctagaaacagcagccagctcca

SEQ ID NO: 121654 - DNA, 22 bp, Artificial Sequence
  Synthetic oligonucleotide; TTC chr11 5353068 5353089 5353073 5353068 -
tagaaacagcagccagctccat

SEQ ID NO: 121655 - DNA, 22 bp, Artificial Sequence
  Synthetic oligonucleotide; CTA chr11 5353066 5353087 5353071 5353066 -
gaaacagcagccagctccatat

SEQ ID NO: 121656 - DNA, 22 bp, Artificial Sequence
  Synthetic oligonucleotide; CTC chr11 5353049 5353070 5353054 5353049 -
catatatgcaagagaactggat

SEQ ID NO: 121657 - DNA, 22 bp, Artificial Sequence
  Synthetic oligonucleotide; CTG chr11 5353030 5353051 5353035 5353030 -
gatgtatgtctgaagccaaaaa

SEQ ID NO: 121658 - DNA, 22 bp, Artificial Sequence
  Synthetic oligonucleotide; CTG chr11 5353018 5353039 5353023 5353018 -
aagccaaaaatgccttattcct

SEQ ID NO: 121659 - DNA, 22 bp, Artificial Sequence
  Synthetic oligonucleotide; CTT chr11 5353002 5353023 5353007 5353002 -
attcctatgtataacaggacta

SEQ ID NO: 121660 - DNA, 22 bp, Artificial Sequence
  Synthetic oligonucleotide; TTA chr11 5353001 5353022 5353006 5353001 -
ttcctatgtataacaggactaa

SEQ ID NO: 121661 - DNA, 22 bp, Artificial Sequence
  Synthetic oligonucleotide; TTC chr11 5352998 5353019 5353003 5352998 -
ctatgtataacaggactaatat

SEQ ID NO: 121662 - DNA, 22 bp, Artificial Sequence
  Synthetic oligonucleotide; CTA chr11 5352995 5353016 5353000 5352995 -
tgtataacaggactaatatatg

SEQ ID NO: 121663 - DNA, 22 bp, Artificial Sequence
  Synthetic oligonucleotide; CTA chr11 5352980 5353001 5352985 5352980 -
atatatgcaagccatatggaga

SEQ ID NO: 121664 - DNA, 22 bp, Artificial Sequence
  Synthetic oligonucleotide; TTG chr11 5352945 5352966 5352950 5352945 -
actgaaatgccggtgacccaaa

SEQ ID NO: 121665 - DNA, 22 bp, Artificial Sequence
  Synthetic oligonucleotide; CTG chr11 5352941 5352962 5352946 5352941 -
aaatgccggtgacccaaatcat

SEQ ID NO: 121666 - DNA, 22 bp, Artificial Sequence
  Synthetic oligonucleotide; TTA chr11 5352905 5352926 5352910 5352905 -
tatatataattggttcatatat

SEQ ID NO: 121667 - DNA, 22 bp, Artificial Sequence
  Synthetic oligonucleotide; TTG chr11 5352893 5352914 5352898 5352893 -
gttcatatatatatattattta

SEQ ID NO: 121668 - DNA, 22 bp, Artificial Sequence
  Synthetic oligonucleotide; TTC chr11 5352889 5352910 5352894 5352889 -
atatatatatattatttatata

SEQ ID NO: 121669 - DNA, 22 bp, Artificial Sequence
  Synthetic oligonucleotide; TTA chr11 5352875 5352896 5352880 5352875 -
tttatataatatatataaacac

SEQ ID NO: 121670 - DNA, 22 bp, Artificial Sequence
  Synthetic oligonucleotide; TTT chr11 5352872 5352893 5352877 5352872 -
atataatatatataaacacaca

SEQ ID NO: 121671 - DNA, 22 bp, Artificial Sequence
  Synthetic oligonucleotide; TTA chr11 5352871 5352892 5352876 5352871 -
tataatatatataaacacacac

SEQ ID NO: 121672 - DNA, 22 bp, Artificial Sequence
  Synthetic oligonucleotide; CTA chr11 5352831 5352852 5352836 5352831 -
ttatatattaagtatatataat

SEQ ID NO: 121673 - DNA, 22 bp, Artificial Sequence
  Synthetic oligonucleotide; TTA chr11 5352828 5352849 5352833 5352828 -
tatattaagtatatataatagt

SEQ ID NO: 121674 - DNA, 22 bp, Artificial Sequence
  Synthetic oligonucleotide; TTA chr11 5352821 5352842 5352826 5352821 -
agtatatataatagtgtgtatt

SEQ ID NO: 121675 - DNA, 22 bp, Artificial Sequence
  Synthetic oligonucleotide; TTA chr11 5352798 5352819 5352803 5352798 -
tatatattaaatatatataata

SEQ ID NO: 121676 - DNA, 22 bp, Artificial Sequence
  Synthetic oligonucleotide; TTA chr11 5352789 5352810 5352794 5352789 -
aatatatataatagtgtatggg

SEQ ID NO: 121677 - DNA, 22 bp, Artificial Sequence
  Synthetic oligonucleotide; CTG chr11 5352757 5352778 5352762 5352757 -
tgtgtgtatatgtatgtgtgta

SEQ ID NO: 121678 - DNA, 22 bp, Artificial Sequence
  Synthetic oligonucleotide; CTA chr11 5352698 5352719 5352703 5352698 -
atcaaacaatgtgagttaaatt

SEQ ID NO: 121679 - DNA, 22 bp, Artificial Sequence
  Synthetic oligonucleotide; TTA chr11 5352680 5352701 5352685 5352680 -
aattacctgagaaaacaatatc

SEQ ID NO: 121680 - DNA, 22 bp, Artificial Sequence
  Synthetic oligonucleotide; TTA chr11 5352675 5352696 5352680 5352675 -
cctgagaaaacaatatcagttg

SEQ ID NO: 121681 - DNA, 22 bp, Artificial Sequence
  Synthetic oligonucleotide; CTG chr11 5352671 5352692 5352676 5352671 -
agaaaacaatatcagttgagca

SEQ ID NO: 121682 - DNA, 22 bp, Artificial Sequence
  Synthetic oligonucleotide; TTG chr11 5352653 5352674 5352658 5352653 -
agcactgagatatgtacttagt

SEQ ID NO: 121683 - DNA, 22 bp, Artificial Sequence
  Synthetic oligonucleotide; CTG chr11 5352646 5352667 5352651 5352646 -
agatatgtacttagtgttgtac

SEQ ID NO: 121684 - DNA, 22 bp, Artificial Sequence
  Synthetic oligonucleotide; CTT chr11 5352634 5352655 5352639 5352634 -
agtgttgtacatatatcttata

SEQ ID NO: 121685 - DNA, 22 bp, Artificial Sequence
  Synthetic oligonucleotide; TTA chr11 5352633 5352654 5352638 5352633 -
gtgttgtacatatatcttatac

SEQ ID NO: 121686 - DNA, 22 bp, Artificial Sequence
  Synthetic oligonucleotide; TTG chr11 5352627 5352648 5352632 5352627 -
tacatatatcttatacaaatca

SEQ ID NO: 121687 - DNA, 22 bp, Artificial Sequence
  Synthetic oligonucleotide; CTT chr11 5352615 5352636 5352620 5352615 -
atacaaatcagcaatagacagg

SEQ ID NO: 121688 - DNA, 22 bp, Artificial Sequence
  Synthetic oligonucleotide; TTA chr11 5352614 5352635 5352619 5352614 -
tacaaatcagcaatagacaggc

SEQ ID NO: 121689 - DNA, 22 bp, Artificial Sequence
  Synthetic oligonucleotide; TTC chr11 5352575 5352596 5352580 5352575 -
taagtagcagagggattgactg

SEQ ID NO: 121690 - DNA, 22 bp, Artificial Sequence
  Synthetic oligonucleotide; CTA chr11 5352573 5352594 5352578 5352573 -
agtagcagagggattgactgat

SEQ ID NO: 121691 - DNA, 22 bp, Artificial Sequence
  Synthetic oligonucleotide; TTG chr11 5352557 5352578 5352562 5352557 -
actgatttccactgaaatgctc

SEQ ID NO: 121692 - DNA, 22 bp, Artificial Sequence
  Synthetic oligonucleotide; CTG chr11 5352553 5352574 5352558 5352553 -
atttccactgaaatgctcaggg

SEQ ID NO: 121693 - DNA, 22 bp, Artificial Sequence
  Synthetic oligonucleotide; TTT chr11 5352549 5352570 5352554 5352549 -
ccactgaaatgctcagggattg

SEQ ID NO: 121694 - DNA, 22 bp, Artificial Sequence
  Synthetic oligonucleotide; TTC chr11 5352548 5352569 5352553 5352548 -
cactgaaatgctcagggattga

SEQ ID NO: 121695 - DNA, 22 bp, Artificial Sequence
  Synthetic oligonucleotide; CTG chr11 5352543 5352564 5352548 5352543 -
aaatgctcagggattgattagt

SEQ ID NO: 121696 - DNA, 22 bp, Artificial Sequence
  Synthetic oligonucleotide; CTC chr11 5352535 5352556 5352540 5352535 -
agggattgattagttctcattg

SEQ ID NO: 121697 - DNA, 22 bp, Artificial Sequence
  Synthetic oligonucleotide; TTG chr11 5352527 5352548 5352532 5352527 -
attagttctcattgaaatgact

SEQ ID NO: 121698 - DNA, 22 bp, Artificial Sequence
  Synthetic oligonucleotide; TTA chr11 5352523 5352544 5352528 5352523 -
gttctcattgaaatgactttcc

SEQ ID NO: 121699 - DNA, 22 bp, Artificial Sequence
  Synthetic oligonucleotide; TTC chr11 5352519 5352540 5352524 5352519 -
tcattgaaatgactttccctag

SEQ ID NO: 121700 - DNA, 22 bp, Artificial Sequence
  Synthetic oligonucleotide; CTC chr11 5352517 5352538 5352522 5352517 -
attgaaatgactttccctagtt

SEQ ID NO: 121701 - DNA, 22 bp, Artificial Sequence
  Synthetic oligonucleotide; TTG chr11 5352513 5352534 5352518 5352513 -
aaatgactttccctagttactt

SEQ ID NO: 121702 - DNA, 22 bp, Artificial Sequence
  Synthetic oligonucleotide; CTT chr11 5352504 5352525 5352509 5352504 -
tccctagttacttatgctggca

SEQ ID NO: 121703 - DNA, 22 bp, Artificial Sequence
  Synthetic oligonucleotide; TTT chr11 5352503 5352524 5352508 5352503 -
ccctagttacttatgctggcaa

SEQ ID NO: 121704 - DNA, 22 bp, Artificial Sequence
  Synthetic oligonucleotide; TTC chr11 5352502 5352523 5352507 5352502 -
cctagttacttatgctggcaac

SEQ ID NO: 121705 - DNA, 22 bp, Artificial Sequence
  Synthetic oligonucleotide; CTA chr11 5352498 5352519 5352503 5352498 -
gttacttatgctggcaacattg

SEQ ID NO: 121706 - DNA, 22 bp, Artificial Sequence
  Synthetic oligonucleotide; TTA chr11 5352494 5352515 5352499 5352494 -
cttatgctggcaacattgtcat

SEQ ID NO: 121707 - DNA, 22 bp, Artificial Sequence
  Synthetic oligonucleotide; CTT chr11 5352491 5352512 5352496 5352491 -
atgctggcaacattgtcatcct

SEQ ID NO: 121708 - DNA, 22 bp, Artificial Sequence
  Synthetic oligonucleotide; TTA chr11 5352490 5352511 5352495 5352490 -
tgctggcaacattgtcatcctg

SEQ ID NO: 121709 - DNA, 22 bp, Artificial Sequence
  Synthetic oligonucleotide; CTG chr11 5352485 5352506 5352490 5352485 -
gcaacattgtcatcctgtccag

SEQ ID NO: 121710 - DNA, 22 bp, Artificial Sequence
  Synthetic oligonucleotide; TTG chr11 5352476 5352497 5352481 5352476 -
tcatcctgtccaggtcccctga

SEQ ID NO: 121711 - DNA, 22 bp, Artificial Sequence
  Synthetic oligonucleotide; CTG chr11 5352468 5352489 5352473 5352468 -
tccaggtcccctgaattattcc

SEQ ID NO: 121712 - DNA, 22 bp, Artificial Sequence
  Synthetic oligonucleotide; CTG chr11 5352455 5352476 5352460 5352455 -
aattattcctcagagaccagtg

SEQ ID NO: 121713 - DNA, 22 bp, Artificial Sequence
  Synthetic oligonucleotide; TTA chr11 5352450 5352471 5352455 5352450 -
ttcctcagagaccagtgaaaca

SEQ ID NO: 121714 - DNA, 22 bp, Artificial Sequence
  Synthetic oligonucleotide; TTC chr11 5352447 5352468 5352452 5352447 -
ctcagagaccagtgaaacaatg

SEQ ID NO: 121715 - DNA, 22 bp, Artificial Sequence
  Synthetic oligonucleotide; CTC chr11 5352444 5352465 5352449 5352444 -
agagaccagtgaaacaatgtca

SEQ ID NO: 121716 - DNA, 22 bp, Artificial Sequence
  Synthetic oligonucleotide; CTC chr11 5352417 5352438 5352422 5352417 -
tagagtgaggcagagagaataa

SEQ ID NO: 121717 - DNA, 22 bp, Artificial Sequence
  Synthetic oligonucleotide; CTA chr11 5352415 5352436 5352420 5352415 -
gagtgaggcagagagaataaac

SEQ ID NO: 121718 - DNA, 22 bp, Artificial Sequence
  Synthetic oligonucleotide; CTC chr11 5352379 5352400 5352384 5352379 -
tgaatctgcttagttttaatgc

SEQ ID NO: 121719 - DNA, 22 bp, Artificial Sequence
  Synthetic oligonucleotide; CTG chr11 5352377 5352398 5352382 5352377 -
aatctgcttagttttaatgcta

SEQ ID NO: 121720 - DNA, 22 bp, Artificial Sequence
  Synthetic oligonucleotide; CTG chr11 5352371 5352392 5352376 5352371 -
cttagttttaatgctatagata

SEQ ID NO: 121721 - DNA, 22 bp, Artificial Sequence
  Synthetic oligonucleotide; CTT chr11 5352368 5352389 5352373 5352368 -
agttttaatgctatagataaat

SEQ ID NO: 121722 - DNA, 22 bp, Artificial Sequence
  Synthetic oligonucleotide; TTA chr11 5352367 5352388 5352372 5352367 -
gttttaatgctatagataaatg

SEQ ID NO: 121723 - DNA, 22 bp, Artificial Sequence
  Synthetic oligonucleotide; TTT chr11 5352363 5352384 5352368 5352363 -
taatgctatagataaatgggtt

SEQ ID NO: 121724 - DNA, 22 bp, Artificial Sequence
  Synthetic oligonucleotide; TTT chr11 5352362 5352383 5352367 5352362 -
aatgctatagataaatgggttc

SEQ ID NO: 121725 - DNA, 22 bp, Artificial Sequence
  Synthetic oligonucleotide; TTA chr11 5352361 5352382 5352366 5352361 -
atgctatagataaatgggttca

SEQ ID NO: 121726 - DNA, 22 bp, Artificial Sequence
  Synthetic oligonucleotide; CTA chr11 5352355 5352376 5352360 5352355 -
tagataaatgggttcataaaag

SEQ ID NO: 121727 - DNA, 22 bp, Artificial Sequence
  Synthetic oligonucleotide; TTC chr11 5352340 5352361 5352345 5352340 -
ataaaaggtgggaaaaggaagt

SEQ ID NO: 121728 - DNA, 22 bp, Artificial Sequence
  Synthetic oligonucleotide; CTC chr11 5352307 5352328 5352312 5352307 -
attgtgatgtgaacgacatgag

SEQ ID NO: 121729 - DNA, 22 bp, Artificial Sequence
  Synthetic oligonucleotide; TTG chr11 5352303 5352324 5352308 5352303 -
tgatgtgaacgacatgaggaac

SEQ ID NO: 121730 - DNA, 22 bp, Artificial Sequence
  Synthetic oligonucleotide; CTT chr11 5352275 5352296 5352280 5352275 -
tccaaacctatgaataaatgtc

SEQ ID NO: 121731 - DNA, 22 bp, Artificial Sequence
  Synthetic oligonucleotide; TTT chr11 5352274 5352295 5352279 5352274 -
ccaaacctatgaataaatgtca

SEQ ID NO: 121732 - DNA, 22 bp, Artificial Sequence
  Synthetic oligonucleotide; TTC chr11 5352273 5352294 5352278 5352273 -
caaacctatgaataaatgtcag

SEQ ID NO: 121733 - DNA, 22 bp, Artificial Sequence
  Synthetic oligonucleotide; CTA chr11 5352265 5352286 5352270 5352265 -
tgaataaatgtcagacaaacta

SEQ ID NO: 121734 - DNA, 22 bp, Artificial Sequence
  Synthetic oligonucleotide; CTA chr11 5352243 5352264 5352248 5352243 -
cagtgacatagaagaccaggat

SEQ ID NO: 121735 - DNA, 22 bp, Artificial Sequence
  Synthetic oligonucleotide; TTG chr11 5352193 5352214 5352198 5352193 -
agggccttggccctttctcctc

SEQ ID NO: 121736 - DNA, 22 bp, Artificial Sequence
  Synthetic oligonucleotide; CTT chr11 5352185 5352206 5352190 5352185 -
ggccctttctcctccagaacca

SEQ ID NO: 121737 - DNA, 22 bp, Artificial Sequence
  Synthetic oligonucleotide; TTG chr11 5352184 5352205 5352189 5352184 -
gccctttctcctccagaaccaa

SEQ ID NO: 121738 - DNA, 22 bp, Artificial Sequence
  Synthetic oligonucleotide; CTT chr11 5352178 5352199 5352183 5352178 -
tctcctccagaaccaatgccca

SEQ ID NO: 121739 - DNA, 22 bp, Artificial Sequence
  Synthetic oligonucleotide; TTT chr11 5352177 5352198 5352182 5352177 -
ctcctccagaaccaatgcccat

SEQ ID NO: 121740 - DNA, 22 bp, Artificial Sequence
  Synthetic oligonucleotide; TTC chr11 5352176 5352197 5352181 5352176 -
tcctccagaaccaatgcccatg

SEQ ID NO: 121741 - DNA, 22 bp, Artificial Sequence
  Synthetic oligonucleotide; CTC chr11 5352174 5352195 5352179 5352174 -
ctccagaaccaatgcccatgac

SEQ ID NO: 121742 - DNA, 22 bp, Artificial Sequence
  Synthetic oligonucleotide; CTC chr11 5352171 5352192 5352176 5352171 -
cagaaccaatgcccatgacagt

SEQ ID NO: 121743 - DNA, 22 bp, Artificial Sequence
  Synthetic oligonucleotide; CTT chr11 5352146 5352167 5352151 5352146 -
gagaatcaaaatgtaggagaaa

SEQ ID NO: 121744 - DNA, 22 bp, Artificial Sequence
  Synthetic oligonucleotide; TTG chr11 5352145 5352166 5352150 5352145 -
agaatcaaaatgtaggagaaaa

SEQ ID NO: 121745 - DNA, 22 bp, Artificial Sequence
  Synthetic oligonucleotide; TTG chr11 5352093 5352114 5352098 5352093 -
caaataaaactacaactggata

SEQ ID NO: 121746 - DNA, 22 bp, Artificial Sequence
  Synthetic oligonucleotide; CTA chr11 5352081 5352102 5352086 5352081 -
caactggatagagacggttgaa

SEQ ID NO: 121747 - DNA, 22 bp, Artificial Sequence
  Synthetic oligonucleotide; CTG chr11 5352075 5352096 5352080 5352075 -
gatagagacggttgaaggtgat

SEQ ID NO: 121748 - DNA, 22 bp, Artificial Sequence
  Synthetic oligonucleotide; TTG chr11 5352061 5352082 5352066 5352061 -
aaggtgatgtcagcacaggcta

SEQ ID NO: 121749 - DNA, 22 bp, Artificial Sequence
  Synthetic oligonucleotide; CTA chr11 5352039 5352060 5352044 5352039 -
gcttgatgacatcttggtgtag

SEQ ID NO: 121750 - DNA, 22 bp, Artificial Sequence
  Synthetic oligonucleotide; CTT chr11 5352035 5352056 5352040 5352035 -
gatgacatcttggtgtagacag

SEQ ID NO: 121751 - DNA, 22 bp, Artificial Sequence
  Synthetic oligonucleotide; TTG chr11 5352034 5352055 5352039 5352034 -
atgacatcttggtgtagacaga

SEQ ID NO: 121752 - DNA, 22 bp, Artificial Sequence
  Synthetic oligonucleotide; CTT chr11 5352024 5352045 5352029 5352024 -
ggtgtagacagaaagcatggga

SEQ ID NO: 121753 - DNA, 22 bp, Artificial Sequence
  Synthetic oligonucleotide; TTG chr11 5352023 5352044 5352028 5352023 -
gtgtagacagaaagcatgggag

SEQ ID NO: 121754 - DNA, 22 bp, Artificial Sequence
  Synthetic oligonucleotide; CTA chr11 5351955 5351976 5351960 5351955 -
ttggcataatggacagaccagc

SEQ ID NO: 121755 - DNA, 22 bp, Artificial Sequence
  Synthetic oligonucleotide; TTG chr11 5351952 5351973 5351957 5351952 -
gcataatggacagaccagccct

SEQ ID NO: 121756 - DNA, 22 bp, Artificial Sequence
  Synthetic oligonucleotide; CTT chr11 5351929 5351950 5351934 5351929 -
gtcaatacccgcacaccaatct

SEQ ID NO: 121757 - DNA, 22 bp, Artificial Sequence
  Synthetic oligonucleotide; TTG chr11 5351928 5351949 5351933 5351928 -
tcaatacccgcacaccaatctt

SEQ ID NO: 121758 - DNA, 22 bp, Artificial Sequence
  Synthetic oligonucleotide; CTT chr11 5351906 5351927 5351911 5351906 -
cattacctgggtgttggtcagg

SEQ ID NO: 121759 - DNA, 22 bp, Artificial Sequence
  Synthetic oligonucleotide; TTC chr11 5351905 5351926 5351910 5351905 -
attacctgggtgttggtcagga

SEQ ID NO: 121760 - DNA, 22 bp, Artificial Sequence
  Synthetic oligonucleotide; TTA chr11 5351901 5351922 5351906 5351901 -
cctgggtgttggtcaggataga

SEQ ID NO: 121761 - DNA, 22 bp, Artificial Sequence
  Synthetic oligonucleotide; CTG chr11 5351897 5351918 5351902 5351897 -
ggtgttggtcaggatagaggta

SEQ ID NO: 121762 - DNA, 22 bp, Artificial Sequence
  Synthetic oligonucleotide; TTG chr11 5351890 5351911 5351895 5351890 -
gtcaggatagaggtatatctta

SEQ ID NO: 121763 - DNA, 22 bp, Artificial Sequence
  Synthetic oligonucleotide; CTT chr11 5351869 5351890 5351874 5351869 -
aaggggctgcggatggtaatga

SEQ ID NO: 121764 - DNA, 22 bp, Artificial Sequence
  Synthetic oligonucleotide; TTA chr11 5351868 5351889 5351873 5351868 -
aggggctgcggatggtaatgaa

SEQ ID NO: 121765 - DNA, 22 bp, Artificial Sequence
  Synthetic oligonucleotide; CTG chr11 5351860 5351881 5351865 5351860 -
cggatggtaatgaaacagtcat

SEQ ID NO: 121766 - DNA, 22 bp, Artificial Sequence
  Synthetic oligonucleotide; CTG chr11 5351814 5351835 5351819 5351814 -
actccatgacagaaagagtatg

SEQ ID NO: 121767 - DNA, 22 bp, Artificial Sequence
  Synthetic oligonucleotide; CTC chr11 5351810 5351831 5351815 5351810 -
catgacagaaagagtatggata

SEQ ID NO: 121768 - DNA, 22 bp, Artificial Sequence
  Synthetic oligonucleotide; CTG chr11 5351777 5351798 5351782 5351777 -
agagaagcaggctccatggcca

SEQ ID NO: 121769 - DNA, 22 bp, Artificial Sequence
  Synthetic oligonucleotide; CTC chr11 5351763 5351784 5351768 5351763 -
catggccaatctccctgtgatc

SEQ ID NO: 121770 - DNA, 22 bp, Artificial Sequence
  Synthetic oligonucleotide; CTC chr11 5351750 5351771 5351755 5351750 -
cctgtgatctaaccacagaaca

SEQ ID NO: 121771 - DNA, 22 bp, Artificial Sequence
  Synthetic oligonucleotide; CTG chr11 5351746 5351767 5351751 5351746 -
tgatctaaccacagaacaccta

SEQ ID NO: 121772 - DNA, 22 bp, Artificial Sequence
  Synthetic oligonucleotide; CTA chr11 5351739 5351760 5351744 5351739 -
accacagaacacctagcactgt

SEQ ID NO: 121773 - DNA, 22 bp, Artificial Sequence
  Synthetic oligonucleotide; CTA chr11 5351724 5351745 5351729 5351724 -
gcactgtgggcattgtggtcaa

SEQ ID NO: 121774 - DNA, 22 bp, Artificial Sequence
  Synthetic oligonucleotide; CTG chr11 5351718 5351739 5351723 5351718 -
tgggcattgtggtcaatgtcac

SEQ ID NO: 121775 - DNA, 22 bp, Artificial Sequence
  Synthetic oligonucleotide; TTG chr11 5351709 5351730 5351714 5351709 -
tggtcaatgtcactccgaggtc

SEQ ID NO: 121776 - DNA, 22 bp, Artificial Sequence
  Synthetic oligonucleotide; CTC chr11 5351694 5351715 5351699 5351694 -
cgaggtctgtagctgccaacat

SEQ ID NO: 121777 - DNA, 22 bp, Artificial Sequence
  Synthetic oligonucleotide; CTG chr11 5351685 5351706 5351690 5351685 -
tagctgccaacatagctaagaa

SEQ ID NO: 121778 - DNA, 22 bp, Artificial Sequence
  Synthetic oligonucleotide; CTG chr11 5351679 5351700 5351684 5351679 -
ccaacatagctaagaaatagta

SEQ ID NO: 121779 - DNA, 22 bp, Artificial Sequence
  Synthetic oligonucleotide; CTA chr11 5351667 5351688 5351672 5351667 -
agaaatagtacatgggctcatg

SEQ ID NO: 121780 - DNA, 22 bp, Artificial Sequence
  Synthetic oligonucleotide; CTC chr11 5351648 5351669 5351653 5351648 -
atggaggttatgatcattcctg

SEQ ID NO: 121781 - DNA, 22 bp, Artificial Sequence
  Synthetic oligonucleotide; TTA chr11 5351638 5351659 5351643 5351638 -
tgatcattcctgatgagaaaga

SEQ ID NO: 121782 - DNA, 22 bp, Artificial Sequence
  Synthetic oligonucleotide; TTC chr11 5351629 5351650 5351634 5351629 -
ctgatgagaaagagaagagtgc

SEQ ID NO: 121783 - DNA, 22 bp, Artificial Sequence
  Synthetic oligonucleotide; CTG chr11 5351626 5351647 5351631 5351626 -
atgagaaagagaagagtgccat

SEQ ID NO: 121784 - DNA, 22 bp, Artificial Sequence
  Synthetic oligonucleotide; TTG chr11 5351602 5351623 5351607 5351602 -
ccaagaagtatggagatgtagg

SEQ ID NO: 121785 - DNA, 22 bp, Artificial Sequence
  Synthetic oligonucleotide; CTG chr11 5351577 5351598 5351582 5351577 -
ccaataatgggatgaatatcca

SEQ ID NO: 121786 - DNA, 22 bp, Artificial Sequence
  Synthetic oligonucleotide; CTT chr11 5351543 5351564 5351548 5351543 -
ctccatgcctgggaagccagta

SEQ ID NO: 121787 - DNA, 22 bp, Artificial Sequence
  Synthetic oligonucleotide; TTC chr11 5351542 5351563 5351547 5351542 -
tccatgcctgggaagccagtaa

SEQ ID NO: 121788 - DNA, 22 bp, Artificial Sequence
  Synthetic oligonucleotide; CTC chr11 5351540 5351561 5351545 5351540 -
catgcctgggaagccagtaagc

SEQ ID NO: 121789 - DNA, 22 bp, Artificial Sequence
  Synthetic oligonucleotide; CTG chr11 5351532 5351553 5351537 5351532 -
ggaagccagtaagctggaaggt

SEQ ID NO: 121790 - DNA, 22 bp, Artificial Sequence
  Synthetic oligonucleotide; CTG chr11 5351516 5351537 5351521 5351516 -
gaaggtggaagcagacttattg

SEQ ID NO: 121791 - DNA, 22 bp, Artificial Sequence
  Synthetic oligonucleotide; CTT chr11 5351498 5351519 5351503 5351498 -
attgagccccattgccagcttt

SEQ ID NO: 121792 - DNA, 22 bp, Artificial Sequence
  Synthetic oligonucleotide; TTA chr11 5351497 5351518 5351502 5351497 -
ttgagccccattgccagctttg

SEQ ID NO: 121793 - DNA, 22 bp, Artificial Sequence
  Synthetic oligonucleotide; TTG chr11 5351494 5351515 5351499 5351494 -
agccccattgccagctttgcaa

SEQ ID NO: 121794 - DNA, 22 bp, Artificial Sequence
  Synthetic oligonucleotide; TTG chr11 5351484 5351505 5351489 5351484 -
ccagctttgcaaagaggcaaat

SEQ ID NO: 121795 - DNA, 22 bp, Artificial Sequence
  Synthetic oligonucleotide; CTT chr11 5351477 5351498 5351482 5351477 -
tgcaaagaggcaaatatttact

SEQ ID NO: 121796 - DNA, 22 bp, Artificial Sequence
  Synthetic oligonucleotide; TTT chr11 5351476 5351497 5351481 5351476 -
gcaaagaggcaaatatttactc

SEQ ID NO: 121797 - DNA, 22 bp, Artificial Sequence
  Synthetic oligonucleotide; TTG chr11 5351475 5351496 5351480 5351475 -
caaagaggcaaatatttactcc

SEQ ID NO: 121798 - DNA, 22 bp, Artificial Sequence
  Synthetic oligonucleotide; TTT chr11 5351458 5351479 5351463 5351458 -
actccaggtaaagcaatagtaa

SEQ ID NO: 121799 - DNA, 22 bp, Artificial Sequence
  Synthetic oligonucleotide; TTA chr11 5351457 5351478 5351462 5351457 -
ctccaggtaaagcaatagtaat

SEQ ID NO: 121800 - DNA, 22 bp, Artificial Sequence
  Synthetic oligonucleotide; CTC chr11 5351454 5351475 5351459 5351454 -
caggtaaagcaatagtaatcag

SEQ ID NO: 121801 - DNA, 22 bp, Artificial Sequence
  Synthetic oligonucleotide; TTG chr11 5351429 5351450 5351434 5351429 -
tataaaagttgctccttgagaa

SEQ ID NO: 121802 - DNA, 22 bp, Artificial Sequence
  Synthetic oligonucleotide; TTG chr11 5351418 5351439 5351423 5351418 -
ctccttgagaattctacctgtt

SEQ ID NO: 121803 - DNA, 22 bp, Artificial Sequence
  Synthetic oligonucleotide; CTC chr11 5351415 5351436 5351420 5351415 -
cttgagaattctacctgttcat

SEQ ID NO: 121804 - DNA, 22 bp, Artificial Sequence
  Synthetic oligonucleotide; CTT chr11 5351412 5351433 5351417 5351412 -
gagaattctacctgttcataag

SEQ ID NO: 121805 - DNA, 22 bp, Artificial Sequence
  Synthetic oligonucleotide; TTG chr11 5351411 5351432 5351416 5351411 -
agaattctacctgttcataaga

SEQ ID NO: 121806 - DNA, 22 bp, Artificial Sequence
  Synthetic oligonucleotide; TTC chr11 5351404 5351425 5351409 5351404 -
tacctgttcataagatgttcac

SEQ ID NO: 121807 - DNA, 22 bp, Artificial Sequence
  Synthetic oligonucleotide; CTA chr11 5351402 5351423 5351407 5351402 -
cctgttcataagatgttcacca

SEQ ID NO: 121808 - DNA, 22 bp, Artificial Sequence
  Synthetic oligonucleotide; CTG chr11 5351398 5351419 5351403 5351398 -
ttcataagatgttcaccagtcc

SEQ ID NO: 121809 - DNA, 22 bp, Artificial Sequence
  Synthetic oligonucleotide; TTC chr11 5351395 5351416 5351400 5351395 -
ataagatgttcaccagtcctga

SEQ ID NO: 121810 - DNA, 22 bp, Artificial Sequence
  Synthetic oligonucleotide; TTC chr11 5351384 5351405 5351389 5351384 -
accagtcctgactttcagtgac

SEQ ID NO: 121811 - DNA, 22 bp, Artificial Sequence
  Synthetic oligonucleotide; CTG chr11 5351374 5351395 5351379 5351374 -
actttcagtgacagcaaggatg

SEQ ID NO: 121812 - DNA, 22 bp, Artificial Sequence
  Synthetic oligonucleotide; CTT chr11 5351370 5351391 5351375 5351370 -
tcagtgacagcaaggatgataa

SEQ ID NO: 121813 - DNA, 22 bp, Artificial Sequence
  Synthetic oligonucleotide; TTT chr11 5351369 5351390 5351374 5351369 -
cagtgacagcaaggatgataat

SEQ ID NO: 121814 - DNA, 22 bp, Artificial Sequence
  Synthetic oligonucleotide; TTC chr11 5351368 5351389 5351373 5351368 -
agtgacagcaaggatgataatt

SEQ ID NO: 121815 - DNA, 22 bp, Artificial Sequence
  Synthetic oligonucleotide; TTT chr11 5351345 5351366 5351350 5351345 -
agtcattcctgggagatcctag

SEQ ID NO: 121816 - DNA, 22 bp, Artificial Sequence
  Synthetic oligonucleotide; TTA chr11 5351344 5351365 5351349 5351344 -
gtcattcctgggagatcctagg

SEQ ID NO: 121817 - DNA, 22 bp, Artificial Sequence
  Synthetic oligonucleotide; TTC chr11 5351337 5351358 5351342 5351337 -
ctgggagatcctaggtatggga

SEQ ID NO: 121818 - DNA, 22 bp, Artificial Sequence
  Synthetic oligonucleotide; CTG chr11 5351334 5351355 5351339 5351334 -
ggagatcctaggtatgggaaaa

SEQ ID NO: 121819 - DNA, 22 bp, Artificial Sequence
  Synthetic oligonucleotide; CTA chr11 5351324 5351345 5351329 5351324 -
ggtatgggaaaatagaatgtat

SEQ ID NO: 121820 - DNA, 22 bp, Artificial Sequence
  Synthetic oligonucleotide; TTA chr11 5351289 5351310 5351294 5351289 -
tttagggtttactctatgtaag

SEQ ID NO: 121821 - DNA, 22 bp, Artificial Sequence
  Synthetic oligonucleotide; TTT chr11 5351286 5351307 5351291 5351286 -
agggtttactctatgtaagatt

SEQ ID NO: 121822 - DNA, 22 bp, Artificial Sequence
  Synthetic oligonucleotide; TTA chr11 5351285 5351306 5351290 5351285 -
gggtttactctatgtaagatta

SEQ ID NO: 121823 - DNA, 22 bp, Artificial Sequence
  Synthetic oligonucleotide; TTT chr11 5351279 5351300 5351284 5351279 -
actctatgtaagattattggat

SEQ ID NO: 121824 - DNA, 22 bp, Artificial Sequence
  Synthetic oligonucleotide; TTA chr11 5351278 5351299 5351283 5351278 -
ctctatgtaagattattggata

SEQ ID NO: 121825 - DNA, 22 bp, Artificial Sequence
  Synthetic oligonucleotide; CTC chr11 5351275 5351296 5351280 5351275 -
tatgtaagattattggatacta

SEQ ID NO: 121826 - DNA, 22 bp, Artificial Sequence
  Synthetic oligonucleotide; CTA chr11 5351273 5351294 5351278 5351273 -
tgtaagattattggatactacg

SEQ ID NO: 121827 - DNA, 22 bp, Artificial Sequence
  Synthetic oligonucleotide; TTA chr11 5351263 5351284 5351268 5351263 -
ttggatactacgttggggatac

SEQ ID NO: 121828 - DNA, 22 bp, Artificial Sequence
  Synthetic oligonucleotide; TTG chr11 5351260 5351281 5351265 5351260 -
gatactacgttggggatacagc

SEQ ID NO: 121829 - DNA, 22 bp, Artificial Sequence
  Synthetic oligonucleotide; CTA chr11 5351253 5351274 5351258 5351253 -
cgttggggatacagctattcat

SEQ ID NO: 121830 - DNA, 22 bp, Artificial Sequence
  Synthetic oligonucleotide; TTG chr11 5351248 5351269 5351253 5351248 -
gggatacagctattcatgcaga

SEQ ID NO: 121831 - DNA, 22 bp, Artificial Sequence
  Synthetic oligonucleotide; CTA chr11 5351236 5351257 5351241 5351236 -
ttcatgcagaataaacattgtt

SEQ ID NO: 121832 - DNA, 22 bp, Artificial Sequence
  Synthetic oligonucleotide; TTC chr11 5351233 5351254 5351238 5351233 -
atgcagaataaacattgttgaa

SEQ ID NO: 121833 - DNA, 22 bp, Artificial Sequence
  Synthetic oligonucleotide; TTG chr11 5351216 5351237 5351221 5351216 -
ttgaattcattgtaaatcatat

SEQ ID NO: 121834 - DNA, 22 bp, Artificial Sequence
  Synthetic oligonucleotide; TTG chr11 5351213 5351234 5351218 5351213 -
aattcattgtaaatcatataac

SEQ ID NO: 121835 - DNA, 22 bp, Artificial Sequence
  Synthetic oligonucleotide; TTC chr11 5351208 5351229 5351213 5351208 -
attgtaaatcatataacccaga

SEQ ID NO: 121836 - DNA, 22 bp, Artificial Sequence
  Synthetic oligonucleotide; TTG chr11 5351204 5351225 5351209 5351204 -
taaatcatataacccagaaaat

SEQ ID NO: 121837 - DNA, 22 bp, Artificial Sequence
  Synthetic oligonucleotide; CTA chr11 5351154 5351175 5351159 5351154 -
tatttgaatagtgctgtaatgg

SEQ ID NO: 121838 - DNA, 22 bp, Artificial Sequence
  Synthetic oligonucleotide; TTT chr11 5351149 5351170 5351154 5351149 -
gaatagtgctgtaatggcctga

SEQ ID NO: 121839 - DNA, 22 bp, Artificial Sequence
  Synthetic oligonucleotide; TTG chr11 5351148 5351169 5351153 5351148 -
aatagtgctgtaatggcctgaa

SEQ ID NO: 121840 - DNA, 22 bp, Artificial Sequence
  Synthetic oligonucleotide; CTG chr11 5351138 5351159 5351143 5351138 -
taatggcctgaaacttataggt

SEQ ID NO: 121841 - DNA, 22 bp, Artificial Sequence
  Synthetic oligonucleotide; CTG chr11 5351128 5351149 5351133 5351128 -
aaacttataggtcacttttcat

SEQ ID NO: 121842 - DNA, 22 bp, Artificial Sequence
  Synthetic oligonucleotide; CTT chr11 5351122 5351143 5351127 5351122 -
ataggtcacttttcatggtgct

SEQ ID NO: 121843 - DNA, 22 bp, Artificial Sequence
  Synthetic oligonucleotide; TTA chr11 5351121 5351142 5351126 5351121 -
taggtcacttttcatggtgctc

SEQ ID NO: 121844 - DNA, 22 bp, Artificial Sequence
  Synthetic oligonucleotide; CTT chr11 5351111 5351132 5351116 5351111 -
ttcatggtgctcttcatcctga

SEQ ID NO: 121845 - DNA, 22 bp, Artificial Sequence
  Synthetic oligonucleotide; TTT chr11 5351110 5351131 5351115 5351110 -
tcatggtgctcttcatcctgac

SEQ ID NO: 121846 - DNA, 22 bp, Artificial Sequence
  Synthetic oligonucleotide; TTT chr11 5351109 5351130 5351114 5351109 -
catggtgctcttcatcctgact

SEQ ID NO: 121847 - DNA, 22 bp, Artificial Sequence
  Synthetic oligonucleotide; TTC chr11 5351108 5351129 5351113 5351108 -
atggtgctcttcatcctgactg

SEQ ID NO: 121848 - DNA, 22 bp, Artificial Sequence
  Synthetic oligonucleotide; CTC chr11 5351099 5351120 5351104 5351099 -
ttcatcctgactggtggtatta

SEQ ID NO: 121849 - DNA, 22 bp, Artificial Sequence
  Synthetic oligonucleotide; CTT chr11 5351097 5351118 5351102 5351097 -
catcctgactggtggtattata

SEQ ID NO: 121850 - DNA, 22 bp, Artificial Sequence
  Synthetic oligonucleotide; TTC chr11 5351096 5351117 5351101 5351096 -
atcctgactggtggtattatag

SEQ ID NO: 121851 - DNA, 22 bp, Artificial Sequence
  Synthetic oligonucleotide; CTG chr11 5351090 5351111 5351095 5351090 -
actggtggtattatagggtgga

SEQ ID NO: 121852 - DNA, 22 bp, Artificial Sequence
  Synthetic oligonucleotide; CTG chr11 5351086 5351107 5351091 5351086 -
gtggtattatagggtggatgta

SEQ ID NO: 121853 - DNA, 22 bp, Artificial Sequence
  Synthetic oligonucleotide; TTA chr11 5351077 5351098 5351082 5351077 -
tagggtggatgtaaaggtttcc

SEQ ID NO: 121854 - DNA, 22 bp, Artificial Sequence
  Synthetic oligonucleotide; TTT chr11 5351057 5351078 5351062 5351057 -
cccaggctatgtgagacctaaa

SEQ ID NO: 121855 - DNA, 22 bp, Artificial Sequence
  Synthetic oligonucleotide; TTC chr11 5351056 5351077 5351061 5351056 -
ccaggctatgtgagacctaaaa

SEQ ID NO: 121856 - DNA, 22 bp, Artificial Sequence
  Synthetic oligonucleotide; CTA chr11 5351048 5351069 5351053 5351048 -
tgtgagacctaaaagatcagta

SEQ ID NO: 121857 - DNA, 22 bp, Artificial Sequence
  Synthetic oligonucleotide; CTA chr11 5351037 5351058 5351042 5351037 -
aaagatcagtagaaaaatggtt

SEQ ID NO: 121858 - DNA, 22 bp, Artificial Sequence
  Synthetic oligonucleotide; TTC chr11 5351014 5351035 5351019 5351014 -
taagcactattggaaaagcaga

SEQ ID NO: 121859 - DNA, 22 bp, Artificial Sequence
  Synthetic oligonucleotide; CTA chr11 5351012 5351033 5351017 5351012 -
agcactattggaaaagcagata

SEQ ID NO: 121860 - DNA, 22 bp, Artificial Sequence
  Synthetic oligonucleotide; CTA chr11 5351005 5351026 5351010 5351005 -
ttggaaaagcagatataaagat

SEQ ID NO: 121861 - DNA, 22 bp, Artificial Sequence
  Synthetic oligonucleotide; TTG chr11 5351002 5351023 5351007 5351002 -
gaaaagcagatataaagattat

SEQ ID NO: 121862 - DNA, 22 bp, Artificial Sequence
  Synthetic oligonucleotide; TTA chr11 5350981 5351002 5350986 5350981 -
tatggaaaaacaaatacacaag

SEQ ID NO: 121863 - DNA, 22 bp, Artificial Sequence
  Synthetic oligonucleotide; TTT chr11 5350920 5350941 5350925 5350920 -
cagagattgacttttcttcaat

SEQ ID NO: 121864 - DNA, 22 bp, Artificial Sequence
  Synthetic oligonucleotide; TTC chr11 5350919 5350940 5350924 5350919 -
agagattgacttttcttcaata

SEQ ID NO: 121865 - DNA, 22 bp, Artificial Sequence
  Synthetic oligonucleotide; TTG chr11 5350911 5350932 5350916 5350911 -
acttttcttcaatattcctgga

SEQ ID NO: 121866 - DNA, 22 bp, Artificial Sequence
  Synthetic oligonucleotide; CTT chr11 5350907 5350928 5350912 5350907 -
ttcttcaatattcctggaggga

SEQ ID NO: 121867 - DNA, 22 bp, Artificial Sequence
  Synthetic oligonucleotide; TTT chr11 5350906 5350927 5350911 5350906 -
tcttcaatattcctggagggaa

SEQ ID NO: 121868 - DNA, 22 bp, Artificial Sequence
  Synthetic oligonucleotide; TTT chr11 5350905 5350926 5350910 5350905 -
cttcaatattcctggagggaaa

SEQ ID NO: 121869 - DNA, 22 bp, Artificial Sequence
  Synthetic oligonucleotide; TTC chr11 5350904 5350925 5350909 5350904 -
ttcaatattcctggagggaaaa

SEQ ID NO: 121870 - DNA, 22 bp, Artificial Sequence
  Synthetic oligonucleotide; CTT chr11 5350902 5350923 5350907 5350902 -
caatattcctggagggaaaatt

SEQ ID NO: 121871 - DNA, 22 bp, Artificial Sequence
  Synthetic oligonucleotide; TTC chr11 5350901 5350922 5350906 5350901 -
aatattcctggagggaaaattc

SEQ ID NO: 121872 - DNA, 22 bp, Artificial Sequence
  Synthetic oligonucleotide; TTC chr11 5350894 5350915 5350899 5350894 -
ctggagggaaaattcaattgat

SEQ ID NO: 121873 - DNA, 22 bp, Artificial Sequence
  Synthetic oligonucleotide; CTG chr11 5350891 5350912 5350896 5350891 -
gagggaaaattcaattgatgaa

SEQ ID NO: 121874 - DNA, 22 bp, Artificial Sequence
  Synthetic oligonucleotide; TTC chr11 5350879 5350900 5350884 5350879 -
aattgatgaagctccagagact

SEQ ID NO: 121875 - DNA, 22 bp, Artificial Sequence
  Synthetic oligonucleotide; TTG chr11 5350874 5350895 5350879 5350874 -
atgaagctccagagacttttgg

SEQ ID NO: 121876 - DNA, 22 bp, Artificial Sequence
  Synthetic oligonucleotide; CTC chr11 5350865 5350886 5350870 5350865 -
cagagacttttgggtagttaga

SEQ ID NO: 121877 - DNA, 22 bp, Artificial Sequence
  Synthetic oligonucleotide; CTT chr11 5350856 5350877 5350861 5350856 -
ttgggtagttagaaaatgacgt

SEQ ID NO: 121878 - DNA, 22 bp, Artificial Sequence
  Synthetic oligonucleotide; TTT chr11 5350855 5350876 5350860 5350855 -
tgggtagttagaaaatgacgta

SEQ ID NO: 121879 - DNA, 22 bp, Artificial Sequence
  Synthetic oligonucleotide; TTT chr11 5350854 5350875 5350859 5350854 -
gggtagttagaaaatgacgtaa

SEQ ID NO: 121880 - DNA, 22 bp, Artificial Sequence
  Synthetic oligonucleotide; TTG chr11 5350853 5350874 5350858 5350853 -
ggtagttagaaaatgacgtaag

SEQ ID NO: 121881 - DNA, 22 bp, Artificial Sequence
  Synthetic oligonucleotide; TTA chr11 5350845 5350866 5350850 5350845 -
gaaaatgacgtaagagtgactt

SEQ ID NO: 121882 - DNA, 22 bp, Artificial Sequence
  Synthetic oligonucleotide; CTT chr11 5350823 5350844 5350828 5350823 -
acctgtgtgtgtttccaaagca

SEQ ID NO: 121883 - DNA, 22 bp, Artificial Sequence
  Synthetic oligonucleotide; TTA chr11 5350822 5350843 5350827 5350822 -
cctgtgtgtgtttccaaagcac

SEQ ID NO: 121884 - DNA, 22 bp, Artificial Sequence
  Synthetic oligonucleotide; CTG chr11 5350818 5350839 5350823 5350818 -
tgtgtgtttccaaagcacatag

SEQ ID NO: 121885 - DNA, 22 bp, Artificial Sequence
  Synthetic oligonucleotide; TTT chr11 5350809 5350830 5350814 5350809 -
ccaaagcacatagaactctaag

SEQ ID NO: 121886 - DNA, 22 bp, Artificial Sequence
  Synthetic oligonucleotide; TTC chr11 5350808 5350829 5350813 5350808 -
caaagcacatagaactctaagt

SEQ ID NO: 121887 - DNA, 22 bp, Artificial Sequence
  Synthetic oligonucleotide; CTC chr11 5350791 5350812 5350796 5350791 -
taagttgcccagctttataacc

SEQ ID NO: 121888 - DNA, 22 bp, Artificial Sequence
  Synthetic oligonucleotide; CTA chr11 5350789 5350810 5350794 5350789 -
agttgcccagctttataaccct

SEQ ID NO: 121889 - DNA, 22 bp, Artificial Sequence
  Synthetic oligonucleotide; TTG chr11 5350784 5350805 5350789 5350784 -
cccagctttataaccctagtta

SEQ ID NO: 121890 - DNA, 22 bp, Artificial Sequence
  Synthetic oligonucleotide; CTT chr11 5350776 5350797 5350781 5350776 -
tataaccctagttattgataca

SEQ ID NO: 121891 - DNA, 22 bp, Artificial Sequence
  Synthetic oligonucleotide; TTT chr11 5350775 5350796 5350780 5350775 -
ataaccctagttattgatacac

SEQ ID NO: 121892 - DNA, 22 bp, Artificial Sequence
  Synthetic oligonucleotide; TTA chr11 5350774 5350795 5350779 5350774 -
taaccctagttattgatacact

SEQ ID NO: 121893 - DNA, 22 bp, Artificial Sequence
  Synthetic oligonucleotide; CTA chr11 5350766 5350787 5350771 5350766 -
gttattgatacactgcttcaaa

SEQ ID NO: 121894 - DNA, 22 bp, Artificial Sequence
  Synthetic oligonucleotide; TTA chr11 5350762 5350783 5350767 5350762 -
ttgatacactgcttcaaagaat

SEQ ID NO: 121895 - DNA, 22 bp, Artificial Sequence
  Synthetic oligonucleotide; TTG chr11 5350759 5350780 5350764 5350759 -
atacactgcttcaaagaattca

SEQ ID NO: 121896 - DNA, 22 bp, Artificial Sequence
  Synthetic oligonucleotide; CTG chr11 5350751 5350772 5350756 5350751 -
cttcaaagaattcaaattttca

SEQ ID NO: 121897 - DNA, 22 bp, Artificial Sequence
  Synthetic oligonucleotide; CTT chr11 5350748 5350769 5350753 5350748 -
caaagaattcaaattttcataa

SEQ ID NO: 121898 - DNA, 22 bp, Artificial Sequence
  Synthetic oligonucleotide; TTC chr11 5350747 5350768 5350752 5350747 -
aaagaattcaaattttcataat

SEQ ID NO: 121899 - DNA, 22 bp, Artificial Sequence
  Synthetic oligonucleotide; TTC chr11 5350738 5350759 5350743 5350738 -
aaattttcataatataaattga

SEQ ID NO: 121900 - DNA, 22 bp, Artificial Sequence
  Synthetic oligonucleotide; TTT chr11 5350732 5350753 5350737 5350732 -
tcataatataaattgaagaata

SEQ ID NO: 121901 - DNA, 22 bp, Artificial Sequence
  Synthetic oligonucleotide; TTT chr11 5350731 5350752 5350736 5350731 -
cataatataaattgaagaataa

SEQ ID NO: 121902 - DNA, 22 bp, Artificial Sequence
  Synthetic oligonucleotide; TTC chr11 5350730 5350751 5350735 5350730 -
ataatataaattgaagaataaa

SEQ ID NO: 121903 - DNA, 22 bp, Artificial Sequence
  Synthetic oligonucleotide; TTG chr11 5350717 5350738 5350722 5350717 -
aagaataaacagtaaaatgtgg

SEQ ID NO: 121904 - DNA, 22 bp, Artificial Sequence
  Synthetic oligonucleotide; TTT chr11 5350691 5350712 5350696 5350691 -
gatgataagcttttgaaggcac

SEQ ID NO: 121905 - DNA, 22 bp, Artificial Sequence
  Synthetic oligonucleotide; TTG chr11 5350690 5350711 5350695 5350690 -
atgataagcttttgaaggcact

SEQ ID NO: 121906 - DNA, 22 bp, Artificial Sequence
  Synthetic oligonucleotide; CTT chr11 5350679 5350700 5350684 5350679 -
ttgaaggcactaattgataata

SEQ ID NO: 121907 - DNA, 22 bp, Artificial Sequence
  Synthetic oligonucleotide; TTT chr11 5350678 5350699 5350683 5350678 -
tgaaggcactaattgataatag

SEQ ID NO: 121908 - DNA, 22 bp, Artificial Sequence
  Synthetic oligonucleotide; TTT chr11 5350677 5350698 5350682 5350677 -
gaaggcactaattgataatagc

SEQ ID NO: 121909 - DNA, 22 bp, Artificial Sequence
  Synthetic oligonucleotide; TTG chr11 5350676 5350697 5350681 5350676 -
aaggcactaattgataatagca

SEQ ID NO: 121910 - DNA, 22 bp, Artificial Sequence
  Synthetic oligonucleotide; CTA chr11 5350667 5350688 5350672 5350667 -
attgataatagcaccaaactac

SEQ ID NO: 121911 - DNA, 22 bp, Artificial Sequence
  Synthetic oligonucleotide; TTG chr11 5350663 5350684 5350668 5350663 -
ataatagcaccaaactactgtt

SEQ ID NO: 121912 - DNA, 22 bp, Artificial Sequence
  Synthetic oligonucleotide; CTA chr11 5350646 5350667 5350651 5350646 -
ctgttgcatatcacctacttgg

SEQ ID NO: 121913 - DNA, 22 bp, Artificial Sequence
  Synthetic oligonucleotide; CTG chr11 5350643 5350664 5350648 5350643 -
ttgcatatcacctacttggtga

SEQ ID NO: 121914 - DNA, 22 bp, Artificial Sequence
  Synthetic oligonucleotide; TTG chr11 5350640 5350661 5350645 5350640 -
catatcacctacttggtgatgc

SEQ ID NO: 121915 - DNA, 22 bp, Artificial Sequence
  Synthetic oligonucleotide; CTA chr11 5350629 5350650 5350634 5350629 -
cttggtgatgcaaaaataaaaa

SEQ ID NO: 121916 - DNA, 22 bp, Artificial Sequence
  Synthetic oligonucleotide; CTT chr11 5350626 5350647 5350631 5350626 -
ggtgatgcaaaaataaaaattg

SEQ ID NO: 121917 - DNA, 22 bp, Artificial Sequence
  Synthetic oligonucleotide; TTG chr11 5350625 5350646 5350630 5350625 -
gtgatgcaaaaataaaaattgg

SEQ ID NO: 121918 - DNA, 22 bp, Artificial Sequence
  Synthetic oligonucleotide; TTG chr11 5350604 5350625 5350609 5350604 -
gtaatttaggcaagatcaagga

SEQ ID NO: 121919 - DNA, 22 bp, Artificial Sequence
  Synthetic oligonucleotide; TTT chr11 5350597 5350618 5350602 5350597 -
aggcaagatcaaggagaatttt

SEQ ID NO: 121920 - DNA, 22 bp, Artificial Sequence
  Synthetic oligonucleotide; TTA chr11 5350596 5350617 5350601 5350596 -
ggcaagatcaaggagaattttt

SEQ ID NO: 121921 - DNA, 22 bp, Artificial Sequence
  Synthetic oligonucleotide; TTT chr11 5350576 5350597 5350581 5350576 -
tttttttaaaactatggaatct

SEQ ID NO: 121922 - DNA, 22 bp, Artificial Sequence
  Synthetic oligonucleotide; TTT chr11 5350575 5350596 5350580 5350575 -
ttttttaaaactatggaatctg

SEQ ID NO: 121923 - DNA, 22 bp, Artificial Sequence
  Synthetic oligonucleotide; TTT chr11 5350574 5350595 5350579 5350574 -
tttttaaaactatggaatctga

SEQ ID NO: 121924 - DNA, 22 bp, Artificial Sequence
  Synthetic oligonucleotide; TTT chr11 5350573 5350594 5350578 5350573 -
ttttaaaactatggaatctgat

SEQ ID NO: 121925 - DNA, 22 bp, Artificial Sequence
  Synthetic oligonucleotide; TTT chr11 5350572 5350593 5350577 5350572 -
tttaaaactatggaatctgatg

SEQ ID NO: 121926 - DNA, 22 bp, Artificial Sequence
  Synthetic oligonucleotide; TTT chr11 5350571 5350592 5350576 5350571 -
ttaaaactatggaatctgatgg

SEQ ID NO: 121927 - DNA, 22 bp, Artificial Sequence
  Synthetic oligonucleotide; TTT chr11 5350570 5350591 5350575 5350570 -
taaaactatggaatctgatggg

SEQ ID NO: 121928 - DNA, 22 bp, Artificial Sequence
  Synthetic oligonucleotide; TTT chr11 5350569 5350590 5350574 5350569 -
aaaactatggaatctgatggga

SEQ ID NO: 121929 - DNA, 22 bp, Artificial Sequence
  Synthetic oligonucleotide; TTA chr11 5350568 5350589 5350573 5350568 -
aaactatggaatctgatgggat

SEQ ID NO: 121930 - DNA, 22 bp, Artificial Sequence
  Synthetic oligonucleotide; CTA chr11 5350562 5350583 5350567 5350562 -
tggaatctgatgggatttgaca

SEQ ID NO: 121931 - DNA, 22 bp, Artificial Sequence
  Synthetic oligonucleotide; CTG chr11 5350553 5350574 5350558 5350553 -
atgggatttgacaaaagtgaga

SEQ ID NO: 121932 - DNA, 22 bp, Artificial Sequence
  Synthetic oligonucleotide; TTT chr11 5350544 5350565 5350549 5350544 -
gacaaaagtgagaaggctctgt

SEQ ID NO: 121933 - DNA, 22 bp, Artificial Sequence
  Synthetic oligonucleotide; TTG chr11 5350543 5350564 5350548 5350543 -
acaaaagtgagaaggctctgtg

SEQ ID NO: 121934 - DNA, 22 bp, Artificial Sequence
  Synthetic oligonucleotide; CTC chr11 5350525 5350546 5350530 5350525 -
tgtgactcattagaattctaag

SEQ ID NO: 121935 - DNA, 22 bp, Artificial Sequence
  Synthetic oligonucleotide; CTG chr11 5350523 5350544 5350528 5350523 -
tgactcattagaattctaagat

SEQ ID NO: 121936 - DNA, 22 bp, Artificial Sequence
  Synthetic oligonucleotide; CTC chr11 5350517 5350538 5350522 5350517 -
attagaattctaagatttcagc

SEQ ID NO: 121937 - DNA, 22 bp, Artificial Sequence
  Synthetic oligonucleotide; TTA chr11 5350513 5350534 5350518 5350513 -
gaattctaagatttcagctggt

SEQ ID NO: 121938 - DNA, 22 bp, Artificial Sequence
  Synthetic oligonucleotide; TTC chr11 5350507 5350528 5350512 5350507 -
taagatttcagctggtgcaggc

SEQ ID NO: 121939 - DNA, 22 bp, Artificial Sequence
  Synthetic oligonucleotide; CTA chr11 5350505 5350526 5350510 5350505 -
agatttcagctggtgcaggcag

SEQ ID NO: 121940 - DNA, 22 bp, Artificial Sequence
  Synthetic oligonucleotide; TTT chr11 5350499 5350520 5350504 5350499 -
cagctggtgcaggcagccaacc

SEQ ID NO: 121941 - DNA, 22 bp, Artificial Sequence
  Synthetic oligonucleotide; TTC chr11 5350498 5350519 5350503 5350498 -
agctggtgcaggcagccaacct

SEQ ID NO: 121942 - DNA, 22 bp, Artificial Sequence
  Synthetic oligonucleotide; CTG chr11 5350493 5350514 5350498 5350493 -
gtgcaggcagccaacctctgag

SEQ ID NO: 121943 - DNA, 22 bp, Artificial Sequence
  Synthetic oligonucleotide; CTC chr11 5350475 5350496 5350480 5350475 -
tgagaatacataaattgtgtgt

SEQ ID NO: 121944 - DNA, 22 bp, Artificial Sequence
  Synthetic oligonucleotide; CTG chr11 5350473 5350494 5350478 5350473 -
agaatacataaattgtgtgttg

SEQ ID NO: 121945 - DNA, 22 bp, Artificial Sequence
  Synthetic oligonucleotide; TTG chr11 5350458 5350479 5350463 5350458 -
tgtgttggtggcatgagccaga

SEQ ID NO: 121946 - DNA, 22 bp, Artificial Sequence
  Synthetic oligonucleotide; TTG chr11 5350451 5350472 5350456 5350451 -
gtggcatgagccagagaaaata

SEQ ID NO: 121947 - DNA, 22 bp, Artificial Sequence
  Synthetic oligonucleotide; CTT chr11 5350419 5350440 5350424 5350419 -
ctcttatggttggtttggacta

SEQ ID NO: 121948 - DNA, 22 bp, Artificial Sequence
  Synthetic oligonucleotide; TTC chr11 5350418 5350439 5350423 5350418 -
tcttatggttggtttggactat

SEQ ID NO: 121949 - DNA, 22 bp, Artificial Sequence
  Synthetic oligonucleotide; CTC chr11 5350416 5350437 5350421 5350416 -
ttatggttggtttggactatac

SEQ ID NO: 121950 - DNA, 22 bp, Artificial Sequence
  Synthetic oligonucleotide; CTT chr11 5350414 5350435 5350419 5350414 -
atggttggtttggactatacat

SEQ ID NO: 121951 - DNA, 22 bp, Artificial Sequence
  Synthetic oligonucleotide; TTA chr11 5350413 5350434 5350418 5350413 -
tggttggtttggactatacatc

SEQ ID NO: 121952 - DNA, 22 bp, Artificial Sequence
  Synthetic oligonucleotide; TTG chr11 5350407 5350428 5350412 5350407 -
gtttggactatacatctcatat

SEQ ID NO: 121953 - DNA, 22 bp, Artificial Sequence
  Synthetic oligonucleotide; TTT chr11 5350403 5350424 5350408 5350403 -
ggactatacatctcatatacta

SEQ ID NO: 121954 - DNA, 22 bp, Artificial Sequence
  Synthetic oligonucleotide; TTG chr11 5350402 5350423 5350407 5350402 -
gactatacatctcatatactat

SEQ ID NO: 121955 - DNA, 22 bp, Artificial Sequence
  Synthetic oligonucleotide; CTA chr11 5350397 5350418 5350402 5350397 -
tacatctcatatactattgaaa

SEQ ID NO: 121956 - DNA, 22 bp, Artificial Sequence
  Synthetic oligonucleotide; CTC chr11 5350389 5350410 5350394 5350389 -
atatactattgaaagagcatat

SEQ ID NO: 121957 - DNA, 22 bp, Artificial Sequence
  Synthetic oligonucleotide; CTA chr11 5350381 5350402 5350386 5350381 -
ttgaaagagcatattgatgtaa

SEQ ID NO: 121958 - DNA, 22 bp, Artificial Sequence
  Synthetic oligonucleotide; TTG chr11 5350378 5350399 5350383 5350378 -
aaagagcatattgatgtaaatt

SEQ ID NO: 121959 - DNA, 22 bp, Artificial Sequence
  Synthetic oligonucleotide; TTG chr11 5350365 5350386 5350370 5350365 -
atgtaaatttatgcacgattta

SEQ ID NO: 121960 - DNA, 22 bp, Artificial Sequence
  Synthetic oligonucleotide; TTT chr11 5350355 5350376 5350360 5350355 -
atgcacgatttacaagacctct

SEQ ID NO: 121961 - DNA, 22 bp, Artificial Sequence
  Synthetic oligonucleotide; TTA chr11 5350354 5350375 5350359 5350354 -
tgcacgatttacaagacctctt

SEQ ID NO: 121962 - DNA, 22 bp, Artificial Sequence
  Synthetic oligonucleotide; TTT chr11 5350344 5350365 5350349 5350344 -
acaagacctctttctgtccatg

SEQ ID NO: 121963 - DNA, 22 bp, Artificial Sequence
  Synthetic oligonucleotide; TTA chr11 5350343 5350364 5350348 5350343 -
caagacctctttctgtccatga

SEQ ID NO: 121964 - DNA, 22 bp, Artificial Sequence
  Synthetic oligonucleotide; CTC chr11 5350334 5350355 5350339 5350334 -
tttctgtccatgaaaagaatgc

SEQ ID NO: 121965 - DNA, 22 bp, Artificial Sequence
  Synthetic oligonucleotide; CTT chr11 5350332 5350353 5350337 5350332 -
tctgtccatgaaaagaatgcat

SEQ ID NO: 121966 - DNA, 22 bp, Artificial Sequence
  Synthetic oligonucleotide; TTT chr11 5350331 5350352 5350336 5350331 -
ctgtccatgaaaagaatgcatc

SEQ ID NO: 121967 - DNA, 22 bp, Artificial Sequence
  Synthetic oligonucleotide; TTC chr11 5350330 5350351 5350335 5350330 -
tgtccatgaaaagaatgcatcc

SEQ ID NO: 121968 - DNA, 22 bp, Artificial Sequence
  Synthetic oligonucleotide; CTG chr11 5350328 5350349 5350333 5350328 -
tccatgaaaagaatgcatccaa

SEQ ID NO: 121969 - DNA, 22 bp, Artificial Sequence
  Synthetic oligonucleotide; TTA chr11 5350301 5350322 5350306 5350301 -
ctggactttcattttcagaaga

SEQ ID NO: 121970 - DNA, 22 bp, Artificial Sequence
  Synthetic oligonucleotide; CTG chr11 5350298 5350319 5350303 5350298 -
gactttcattttcagaagaatt

SEQ ID NO: 121971 - DNA, 22 bp, Artificial Sequence
  Synthetic oligonucleotide; CTT chr11 5350293 5350314 5350298 5350293 -
tcattttcagaagaatttgttg

SEQ ID NO: 121972 - DNA, 22 bp, Artificial Sequence
  Synthetic oligonucleotide; TTT chr11 5350292 5350313 5350297 5350292 -
cattttcagaagaatttgttga

SEQ ID NO: 121973 - DNA, 22 bp, Artificial Sequence
  Synthetic oligonucleotide; TTC chr11 5350291 5350312 5350296 5350291 -
attttcagaagaatttgttgaa

SEQ ID NO: 121974 - DNA, 22 bp, Artificial Sequence
  Synthetic oligonucleotide; TTT chr11 5350287 5350308 5350292 5350287 -
tcagaagaatttgttgaagttt

SEQ ID NO: 121975 - DNA, 22 bp, Artificial Sequence
  Synthetic oligonucleotide; TTT chr11 5350286 5350307 5350291 5350286 -
cagaagaatttgttgaagtttc

SEQ ID NO: 121976 - DNA, 22 bp, Artificial Sequence
  Synthetic oligonucleotide; TTC chr11 5350285 5350306 5350290 5350285 -
agaagaatttgttgaagtttca

SEQ ID NO: 121977 - DNA, 22 bp, Artificial Sequence
  Synthetic oligonucleotide; TTT chr11 5350275 5350296 5350280 5350275 -
gttgaagtttcagctctgctct

SEQ ID NO: 121978 - DNA, 22 bp, Artificial Sequence
  Synthetic oligonucleotide; TTG chr11 5350274 5350295 5350279 5350274 -
ttgaagtttcagctctgctctt

SEQ ID NO: 121979 - DNA, 22 bp, Artificial Sequence
  Synthetic oligonucleotide; TTG chr11 5350271 5350292 5350276 5350271 -
aagtttcagctctgctctttct

SEQ ID NO: 121980 - DNA, 22 bp, Artificial Sequence
  Synthetic oligonucleotide; TTT chr11 5350265 5350286 5350270 5350265 -
cagctctgctctttctaacaat

SEQ ID NO: 121981 - DNA, 22 bp, Artificial Sequence
  Synthetic oligonucleotide; TTC chr11 5350264 5350285 5350269 5350264 -
agctctgctctttctaacaata

SEQ ID NO: 121982 - DNA, 22 bp, Artificial Sequence
  Synthetic oligonucleotide; CTC chr11 5350259 5350280 5350264 5350259 -
tgctctttctaacaataatgat

SEQ ID NO: 121983 - DNA, 22 bp, Artificial Sequence
  Synthetic oligonucleotide; CTG chr11 5350257 5350278 5350262 5350257 -
ctctttctaacaataatgatct

SEQ ID NO: 121984 - DNA, 22 bp, Artificial Sequence
  Synthetic oligonucleotide; CTC chr11 5350254 5350275 5350259 5350254 -
tttctaacaataatgatcttgg

SEQ ID NO: 121985 - DNA, 22 bp, Artificial Sequence
  Synthetic oligonucleotide; CTT chr11 5350252 5350273 5350257 5350252 -
tctaacaataatgatcttggga

SEQ ID NO: 121986 - DNA, 22 bp, Artificial Sequence
  Synthetic oligonucleotide; TTT chr11 5350251 5350272 5350256 5350251 -
ctaacaataatgatcttgggaa

SEQ ID NO: 121987 - DNA, 22 bp, Artificial Sequence
  Synthetic oligonucleotide; TTC chr11 5350250 5350271 5350255 5350250 -
taacaataatgatcttgggaaa

SEQ ID NO: 121988 - DNA, 22 bp, Artificial Sequence
  Synthetic oligonucleotide; CTA chr11 5350248 5350269 5350253 5350248 -
acaataatgatcttgggaaagt

SEQ ID NO: 121989 - DNA, 22 bp, Artificial Sequence
  Synthetic oligonucleotide; CTT chr11 5350234 5350255 5350239 5350234 -
gggaaagtaatttaatcttgag

SEQ ID NO: 121990 - DNA, 22 bp, Artificial Sequence
  Synthetic oligonucleotide; TTG chr11 5350233 5350254 5350238 5350233 -
ggaaagtaatttaatcttgaga

SEQ ID NO: 121991 - DNA, 22 bp, Artificial Sequence
  Synthetic oligonucleotide; TTT chr11 5350221 5350242 5350226 5350221 -
aatcttgagatttggttacata

SEQ ID NO: 121992 - DNA, 22 bp, Artificial Sequence
  Synthetic oligonucleotide; TTA chr11 5350220 5350241 5350225 5350220 -
atcttgagatttggttacataa

SEQ ID NO: 121993 - DNA, 22 bp, Artificial Sequence
  Synthetic oligonucleotide; CTT chr11 5350215 5350236 5350220 5350215 -
gagatttggttacataacctgt

SEQ ID NO: 121994 - DNA, 22 bp, Artificial Sequence
  Synthetic oligonucleotide; TTG chr11 5350214 5350235 5350219 5350214 -
agatttggttacataacctgta

SEQ ID NO: 121995 - DNA, 22 bp, Artificial Sequence
  Synthetic oligonucleotide; TTT chr11 5350208 5350229 5350213 5350208 -
ggttacataacctgtaaagact

SEQ ID NO: 121996 - DNA, 22 bp, Artificial Sequence
  Synthetic oligonucleotide; TTG chr11 5350207 5350228 5350212 5350207 -
gttacataacctgtaaagacta

SEQ ID NO: 121997 - DNA, 22 bp, Artificial Sequence
  Synthetic oligonucleotide; TTA chr11 5350203 5350224 5350208 5350203 -
cataacctgtaaagactactag

SEQ ID NO: 121998 - DNA, 22 bp, Artificial Sequence
  Synthetic oligonucleotide; CTG chr11 5350194 5350215 5350199 5350194 -
taaagactactagtgatttctg

SEQ ID NO: 121999 - DNA, 22 bp, Artificial Sequence
  Synthetic oligonucleotide; CTA chr11 5350185 5350206 5350190 5350185 -
ctagtgatttctgtcttctcag

SEQ ID NO: 122000 - DNA, 22 bp, Artificial Sequence
  Synthetic oligonucleotide; CTA chr11 5350182 5350203 5350187 5350182 -
gtgatttctgtcttctcagtca

SEQ ID NO: 122001 - DNA, 22 bp, Artificial Sequence
  Synthetic oligonucleotide; TTT chr11 5350175 5350196 5350180 5350175 -
ctgtcttctcagtcattctctt

SEQ ID NO: 122002 - DNA, 22 bp, Artificial Sequence
  Synthetic oligonucleotide; TTC chr11 5350174 5350195 5350179 5350174 -
tgtcttctcagtcattctcttg

SEQ ID NO: 122003 - DNA, 22 bp, Artificial Sequence
  Synthetic oligonucleotide; CTG chr11 5350172 5350193 5350177 5350172 -
tcttctcagtcattctcttgac

SEQ ID NO: 122004 - DNA, 22 bp, Artificial Sequence
  Synthetic oligonucleotide; CTT chr11 5350168 5350189 5350173 5350168 -
ctcagtcattctcttgacacaa

SEQ ID NO: 122005 - DNA, 22 bp, Artificial Sequence
  Synthetic oligonucleotide; TTC chr11 5350167 5350188 5350172 5350167 -
tcagtcattctcttgacacaaa

SEQ ID NO: 122006 - DNA, 22 bp, Artificial Sequence
  Synthetic oligonucleotide; CTC chr11 5350165 5350186 5350170 5350165 -
agtcattctcttgacacaaagt

SEQ ID NO: 122007 - DNA, 22 bp, Artificial Sequence
  Synthetic oligonucleotide; TTC chr11 5350157 5350178 5350162 5350157 -
tcttgacacaaagtaaggggaa

SEQ ID NO: 122008 - DNA, 22 bp, Artificial Sequence
  Synthetic oligonucleotide; CTC chr11 5350155 5350176 5350160 5350155 -
ttgacacaaagtaaggggaaat

SEQ ID NO: 122009 - DNA, 22 bp, Artificial Sequence
  Synthetic oligonucleotide; CTT chr11 5350153 5350174 5350158 5350153 -
gacacaaagtaaggggaaatgt

SEQ ID NO: 122010 - DNA, 22 bp, Artificial Sequence
  Synthetic oligonucleotide; TTG chr11 5350152 5350173 5350157 5350152 -
acacaaagtaaggggaaatgtt

SEQ ID NO: 122011 - DNA, 22 bp, Artificial Sequence
  Synthetic oligonucleotide; TTT chr11 5350129 5350150 5350134 5350129 -
tgtaaagagtggataatttttt

SEQ ID NO: 122012 - DNA, 22 bp, Artificial Sequence
  Synthetic oligonucleotide; TTT chr11 5350128 5350149 5350133 5350128 -
gtaaagagtggataattttttt

SEQ ID NO: 122013 - DNA, 22 bp, Artificial Sequence
  Synthetic oligonucleotide; TTG chr11 5350127 5350148 5350132 5350127 -
taaagagtggataattttttta

SEQ ID NO: 122014 - DNA, 22 bp, Artificial Sequence
  Synthetic oligonucleotide; TTT chr11 5350110 5350131 5350115 5350110 -
ttttatttttgtgtttttgtta

SEQ ID NO: 122015 - DNA, 22 bp, Artificial Sequence
  Synthetic oligonucleotide; TTT chr11 5350109 5350130 5350114 5350109 -
tttatttttgtgtttttgttat

SEQ ID NO: 122016 - DNA, 22 bp, Artificial Sequence
  Synthetic oligonucleotide; TTT chr11 5350108 5350129 5350113 5350108 -
ttatttttgtgtttttgttatt

SEQ ID NO: 122017 - DNA, 22 bp, Artificial Sequence
  Synthetic oligonucleotide; TTT chr11 5350107 5350128 5350112 5350107 -
tatttttgtgtttttgttattg

SEQ ID NO: 122018 - DNA, 22 bp, Artificial Sequence
  Synthetic oligonucleotide; TTT chr11 5350106 5350127 5350111 5350106 -
atttttgtgtttttgttattgt

SEQ ID NO: 122019 - DNA, 22 bp, Artificial Sequence
  Synthetic oligonucleotide; TTA chr11 5350105 5350126 5350110 5350105 -
tttttgtgtttttgttattgtt

SEQ ID NO: 122020 - DNA, 22 bp, Artificial Sequence
  Synthetic oligonucleotide; TTT chr11 5350102 5350123 5350107 5350102 -
ttgtgtttttgttattgtttca

SEQ ID NO: 122021 - DNA, 22 bp, Artificial Sequence
  Synthetic oligonucleotide; TTT chr11 5350101 5350122 5350106 5350101 -
tgtgtttttgttattgtttcag

SEQ ID NO: 122022 - DNA, 22 bp, Artificial Sequence
  Synthetic oligonucleotide; TTT chr11 5350100 5350121 5350105 5350100 -
gtgtttttgttattgtttcaga

SEQ ID NO: 122023 - DNA, 22 bp, Artificial Sequence
  Synthetic oligonucleotide; TTG chr11 5350099 5350120 5350104 5350099 -
tgtttttgttattgtttcagag

SEQ ID NO: 122024 - DNA, 22 bp, Artificial Sequence
  Synthetic oligonucleotide; TTT chr11 5350094 5350115 5350099 5350094 -
ttgttattgtttcagagaagta

SEQ ID NO: 122025 - DNA, 22 bp, Artificial Sequence
  Synthetic oligonucleotide; TTT chr11 5350093 5350114 5350098 5350093 -
tgttattgtttcagagaagtac

SEQ ID NO: 122026 - DNA, 22 bp, Artificial Sequence
  Synthetic oligonucleotide; TTT chr11 5350092 5350113 5350097 5350092 -
gttattgtttcagagaagtacc

SEQ ID NO: 122027 - DNA, 22 bp, Artificial Sequence
  Synthetic oligonucleotide; TTG chr11 5350091 5350112 5350096 5350091 -
ttattgtttcagagaagtacct

SEQ ID NO: 122028 - DNA, 22 bp, Artificial Sequence
  Synthetic oligonucleotide; TTA chr11 5350088 5350109 5350093 5350088 -
ttgtttcagagaagtacctcct

SEQ ID NO: 122029 - DNA, 22 bp, Artificial Sequence
  Synthetic oligonucleotide; TTG chr11 5350085 5350106 5350090 5350085 -
tttcagagaagtacctcctttc

SEQ ID NO: 122030 - DNA, 22 bp, Artificial Sequence
  Synthetic oligonucleotide; TTT chr11 5350082 5350103 5350087 5350082 -
cagagaagtacctcctttctct

SEQ ID NO: 122031 - DNA, 22 bp, Artificial Sequence
  Synthetic oligonucleotide; TTC chr11 5350081 5350102 5350086 5350081 -
agagaagtacctcctttctctt

SEQ ID NO: 122032 - DNA, 22 bp, Artificial Sequence
  Synthetic oligonucleotide; CTC chr11 5350068 5350089 5350073 5350068 -
ctttctctttctctagtgagta

SEQ ID NO: 122033 - DNA, 22 bp, Artificial Sequence
  Synthetic oligonucleotide; CTT chr11 5350065 5350086 5350070 5350065 -
tctctttctctagtgagtacat

SEQ ID NO: 122034 - DNA, 22 bp, Artificial Sequence
  Synthetic oligonucleotide; TTT chr11 5350064 5350085 5350069 5350064 -
ctctttctctagtgagtacatg

SEQ ID NO: 122035 - DNA, 22 bp, Artificial Sequence
  Synthetic oligonucleotide; TTC chr11 5350063 5350084 5350068 5350063 -
tctttctctagtgagtacatgt

SEQ ID NO: 122036 - DNA, 22 bp, Artificial Sequence
  Synthetic oligonucleotide; CTC chr11 5350061 5350082 5350066 5350061 -
tttctctagtgagtacatgtca

SEQ ID NO: 122037 - DNA, 22 bp, Artificial Sequence
  Synthetic oligonucleotide; CTT chr11 5350059 5350080 5350064 5350059 -
tctctagtgagtacatgtcagg

SEQ ID NO: 122038 - DNA, 22 bp, Artificial Sequence
  Synthetic oligonucleotide; TTT chr11 5350058 5350079 5350063 5350058 -
ctctagtgagtacatgtcagga

SEQ ID NO: 122039 - DNA, 22 bp, Artificial Sequence
  Synthetic oligonucleotide; TTC chr11 5350057 5350078 5350062 5350057 -
tctagtgagtacatgtcaggat

SEQ ID NO: 122040 - DNA, 22 bp, Artificial Sequence
  Synthetic oligonucleotide; CTC chr11 5350055 5350076 5350060 5350055 -
tagtgagtacatgtcaggatta

SEQ ID NO: 122041 - DNA, 22 bp, Artificial Sequence
  Synthetic oligonucleotide; CTA chr11 5350053 5350074 5350058 5350053 -
gtgagtacatgtcaggattatt

SEQ ID NO: 122042 - DNA, 22 bp, Artificial Sequence
  Synthetic oligonucleotide; TTA chr11 5350033 5350054 5350038 5350033 -
ttcacccagaggtgtgtcaaat

SEQ ID NO: 122043 - DNA, 22 bp, Artificial Sequence
  Synthetic oligonucleotide; TTC chr11 5350030 5350051 5350035 5350030 -
acccagaggtgtgtcaaatgat

SEQ ID NO: 122044 - DNA, 22 bp, Artificial Sequence
  Synthetic oligonucleotide; TTT chr11 5350006 5350027 5350011 5350006 -
cctttttttctgtggaagcctt

SEQ ID NO: 122045 - DNA, 22 bp, Artificial Sequence
  Synthetic oligonucleotide; TTC chr11 5350005 5350026 5350010 5350005 -
ctttttttctgtggaagccttg

SEQ ID NO: 122046 - DNA, 22 bp, Artificial Sequence
  Synthetic oligonucleotide; CTT chr11 5350002 5350023 5350007 5350002 -
tttttctgtggaagccttggga

SEQ ID NO: 122047 - DNA, 22 bp, Artificial Sequence
  Synthetic oligonucleotide; TTT chr11 5350001 5350022 5350006 5350001 -
ttttctgtggaagccttgggaa

SEQ ID NO: 122048 - DNA, 22 bp, Artificial Sequence
  Synthetic oligonucleotide; TTT chr11 5350000 5350021 5350005 5350000 -
tttctgtggaagccttgggaac

SEQ ID NO: 122049 - DNA, 22 bp, Artificial Sequence
  Synthetic oligonucleotide; TTT chr11 5349999 5350020 5350004 5349999 -
ttctgtggaagccttgggaaca

SEQ ID NO: 122050 - DNA, 22 bp, Artificial Sequence
  Synthetic oligonucleotide; TTT chr11 5349998 5350019 5350003 5349998 -
tctgtggaagccttgggaacag

SEQ ID NO: 122051 - DNA, 22 bp, Artificial Sequence
  Synthetic oligonucleotide; TTT chr11 5349997 5350018 5350002 5349997 -
ctgtggaagccttgggaacaga

SEQ ID NO: 122052 - DNA, 22 bp, Artificial Sequence
  Synthetic oligonucleotide; TTC chr11 5349996 5350017 5350001 5349996 -
tgtggaagccttgggaacagat

SEQ ID NO: 122053 - DNA, 22 bp, Artificial Sequence
  Synthetic oligonucleotide; CTG chr11 5349994 5350015 5349999 5349994 -
tggaagccttgggaacagatat

SEQ ID NO: 122054 - DNA, 22 bp, Artificial Sequence
  Synthetic oligonucleotide; CTT chr11 5349984 5350005 5349989 5349984 -
gggaacagatataagatgatga

SEQ ID NO: 122055 - DNA, 22 bp, Artificial Sequence
  Synthetic oligonucleotide; TTG chr11 5349983 5350004 5349988 5349983 -
ggaacagatataagatgatgat

SEQ ID NO: 122056 - DNA, 22 bp, Artificial Sequence
  Synthetic oligonucleotide; TTT chr11 5349954 5349975 5349959 5349954 -
ttaggagcctgtgtttgacttt

SEQ ID NO: 122057 - DNA, 22 bp, Artificial Sequence
  Synthetic oligonucleotide; TTT chr11 5349953 5349974 5349958 5349953 -
taggagcctgtgtttgacttta

SEQ ID NO: 122058 - DNA, 22 bp, Artificial Sequence
  Synthetic oligonucleotide; TTT chr11 5349952 5349973 5349957 5349952 -
aggagcctgtgtttgactttaa

SEQ ID NO: 122059 - DNA, 22 bp, Artificial Sequence
  Synthetic oligonucleotide; TTA chr11 5349951 5349972 5349956 5349951 -
ggagcctgtgtttgactttaaa

SEQ ID NO: 122060 - DNA, 22 bp, Artificial Sequence
  Synthetic oligonucleotide; CTG chr11 5349943 5349964 5349948 5349943 -
tgtttgactttaaataaagata

SEQ ID NO: 122061 - DNA, 22 bp, Artificial Sequence
  Synthetic oligonucleotide; TTT chr11 5349938 5349959 5349943 5349938 -
gactttaaataaagatattaaa

SEQ ID NO: 122062 - DNA, 22 bp, Artificial Sequence
  Synthetic oligonucleotide; TTG chr11 5349937 5349958 5349942 5349937 -
actttaaataaagatattaaac

SEQ ID NO: 122063 - DNA, 22 bp, Artificial Sequence
  Synthetic oligonucleotide; CTT chr11 5349933 5349954 5349938 5349933 -
taaataaagatattaaactata

SEQ ID NO: 122064 - DNA, 22 bp, Artificial Sequence
  Synthetic oligonucleotide; TTT chr11 5349932 5349953 5349937 5349932 -
aaataaagatattaaactatag

SEQ ID NO: 122065 - DNA, 22 bp, Artificial Sequence
  Synthetic oligonucleotide; TTA chr11 5349931 5349952 5349936 5349931 -
aataaagatattaaactatagt

SEQ ID NO: 122066 - DNA, 22 bp, Artificial Sequence
  Synthetic oligonucleotide; TTA chr11 5349918 5349939 5349923 5349918 -
aactatagtttctctaatcagc

SEQ ID NO: 122067 - DNA, 22 bp, Artificial Sequence
  Synthetic oligonucleotide; CTA chr11 5349913 5349934 5349918 5349913 -
tagtttctctaatcagcagata

SEQ ID NO: 122068 - DNA, 22 bp, Artificial Sequence
  Synthetic oligonucleotide; TTT chr11 5349907 5349928 5349912 5349907 -
ctctaatcagcagataaaatgt

SEQ ID NO: 122069 - DNA, 22 bp, Artificial Sequence
  Synthetic oligonucleotide; TTC chr11 5349906 5349927 5349911 5349906 -
tctaatcagcagataaaatgtg

SEQ ID NO: 122070 - DNA, 22 bp, Artificial Sequence
  Synthetic oligonucleotide; CTC chr11 5349904 5349925 5349909 5349904 -
taatcagcagataaaatgtgat

SEQ ID NO: 122071 - DNA, 22 bp, Artificial Sequence
  Synthetic oligonucleotide; CTA chr11 5349902 5349923 5349907 5349902 -
atcagcagataaaatgtgatat

SEQ ID NO: 122072 - DNA, 22 bp, Artificial Sequence
  Synthetic oligonucleotide; CTG chr11 5349875 5349896 5349880 5349875 -
ggtgggaaagggaaaggagaaa

SEQ ID NO: 122073 - DNA, 22 bp, Artificial Sequence
  Synthetic oligonucleotide; TTG chr11 5349847 5349868 5349852 5349847 -
atgagccaatgtgggaacttct

SEQ ID NO: 122074 - DNA, 22 bp, Artificial Sequence
  Synthetic oligonucleotide; CTT chr11 5349827 5349848 5349832 5349827 -
ctgacatagctaaaagtaacgt

SEQ ID NO: 122075 - DNA, 22 bp, Artificial Sequence
  Synthetic oligonucleotide; TTC chr11 5349826 5349847 5349831 5349826 -
tgacatagctaaaagtaacgtt

SEQ ID NO: 122076 - DNA, 22 bp, Artificial Sequence
  Synthetic oligonucleotide; CTG chr11 5349824 5349845 5349829 5349824 -
acatagctaaaagtaacgttga

SEQ ID NO: 122077 - DNA, 22 bp, Artificial Sequence
  Synthetic oligonucleotide; CTA chr11 5349815 5349836 5349820 5349815 -
aaagtaacgttgagcctggggc

SEQ ID NO: 122078 - DNA, 22 bp, Artificial Sequence
  Synthetic oligonucleotide; TTG chr11 5349803 5349824 5349808 5349803 -
agcctggggcattgggactgag

SEQ ID NO: 122079 - DNA, 22 bp, Artificial Sequence
  Synthetic oligonucleotide; CTG chr11 5349797 5349818 5349802 5349797 -
gggcattgggactgagggaagt

SEQ ID NO: 122080 - DNA, 22 bp, Artificial Sequence
  Synthetic oligonucleotide; TTG chr11 5349789 5349810 5349794 5349789 -
ggactgagggaagtagagggga

SEQ ID NO: 122081 - DNA, 22 bp, Artificial Sequence
  Synthetic oligonucleotide; CTG chr11 5349783 5349804 5349788 5349783 -
agggaagtagaggggaaagcaa

SEQ ID NO: 122082 - DNA, 22 bp, Artificial Sequence
  Synthetic oligonucleotide; CTC chr11 5349758 5349779 5349763 5349758 -
tgtcctcaaaaagtgagaaaag

SEQ ID NO: 122083 - DNA, 22 bp, Artificial Sequence
  Synthetic oligonucleotide; CTG chr11 5349756 5349777 5349761 5349756 -
tcctcaaaaagtgagaaaagga

SEQ ID NO: 122084 - DNA, 22 bp, Artificial Sequence
  Synthetic oligonucleotide; CTC chr11 5349751 5349772 5349756 5349751 -
aaaaagtgagaaaaggaggtat

SEQ ID NO: 122085 - DNA, 22 bp, Artificial Sequence
  Synthetic oligonucleotide; TTA chr11 5349727 5349748 5349732 5349727 -
ttgctcaatctgcctgccagtg

SEQ ID NO: 122086 - DNA, 22 bp, Artificial Sequence
  Synthetic oligonucleotide; TTG chr11 5349724 5349745 5349729 5349724 -
ctcaatctgcctgccagtgaga

SEQ ID NO: 122087 - DNA, 22 bp, Artificial Sequence
  Synthetic oligonucleotide; CTC chr11 5349721 5349742 5349726 5349721 -
aatctgcctgccagtgagaggt

SEQ ID NO: 122088 - DNA, 22 bp, Artificial Sequence
  Synthetic oligonucleotide; CTG chr11 5349715 5349736 5349720 5349715 -
cctgccagtgagaggttcagac

SEQ ID NO: 122089 - DNA, 22 bp, Artificial Sequence
  Synthetic oligonucleotide; CTG chr11 5349711 5349732 5349716 5349711 -
ccagtgagaggttcagacaata

SEQ ID NO: 122090 - DNA, 22 bp, Artificial Sequence
  Synthetic oligonucleotide; TTC chr11 5349697 5349718 5349702 5349697 -
agacaatactcagcttatgcag

SEQ ID NO: 122091 - DNA, 22 bp, Artificial Sequence
  Synthetic oligonucleotide; CTC chr11 5349686 5349707 5349691 5349686 -
agcttatgcaggattaaagaag

SEQ ID NO: 122092 - DNA, 22 bp, Artificial Sequence
  Synthetic oligonucleotide; CTT chr11 5349681 5349702 5349686 5349681 -
atgcaggattaaagaagcagta

SEQ ID NO: 122093 - DNA, 22 bp, Artificial Sequence
  Synthetic oligonucleotide; TTA chr11 5349680 5349701 5349685 5349680 -
tgcaggattaaagaagcagtat

SEQ ID NO: 122094 - DNA, 22 bp, Artificial Sequence
  Synthetic oligonucleotide; TTA chr11 5349670 5349691 5349675 5349670 -
aagaagcagtatggcaaataaa

SEQ ID NO: 122095 - DNA, 22 bp, Artificial Sequence
  Synthetic oligonucleotide; TTG chr11 5349643 5349664 5349648 5349643 -
tacataggtatataacttattg

SEQ ID NO: 122096 - DNA, 22 bp, Artificial Sequence
  Synthetic oligonucleotide; CTT chr11 5349625 5349646 5349630 5349625 -
attgttttattataggtattca

SEQ ID NO: 122097 - DNA, 22 bp, Artificial Sequence
  Synthetic oligonucleotide; TTA chr11 5349624 5349645 5349629 5349624 -
ttgttttattataggtattcat

SEQ ID NO: 122098 - DNA, 22 bp, Artificial Sequence
  Synthetic oligonucleotide; TTG chr11 5349621 5349642 5349626 5349621 -
ttttattataggtattcattgt

SEQ ID NO: 122099 - DNA, 22 bp, Artificial Sequence
  Synthetic oligonucleotide; TTT chr11 5349618 5349639 5349623 5349618 -
tattataggtattcattgttaa

SEQ ID NO: 122100 - DNA, 22 bp, Artificial Sequence
  Synthetic oligonucleotide; TTT chr11 5349617 5349638 5349622 5349617 -
attataggtattcattgttaaa

SEQ ID NO: 122101 - DNA, 22 bp, Artificial Sequence
  Synthetic oligonucleotide; TTA chr11 5349616 5349637 5349621 5349616 -
ttataggtattcattgttaaat

SEQ ID NO: 122102 - DNA, 22 bp, Artificial Sequence
  Synthetic oligonucleotide; TTA chr11 5349613 5349634 5349618 5349613 -
taggtattcattgttaaatgat

SEQ ID NO: 122103 - DNA, 22 bp, Artificial Sequence
  Synthetic oligonucleotide; TTC chr11 5349604 5349625 5349609 5349604 -
attgttaaatgattaccataat

SEQ ID NO: 122104 - DNA, 22 bp, Artificial Sequence
  Synthetic oligonucleotide; TTG chr11 5349600 5349621 5349605 5349600 -
ttaaatgattaccataatcaaa

SEQ ID NO: 122105 - DNA, 22 bp, Artificial Sequence
  Synthetic oligonucleotide; TTA chr11 5349597 5349618 5349602 5349597 -
aatgattaccataatcaaacta

SEQ ID NO: 122106 - DNA, 22 bp, Artificial Sequence
  Synthetic oligonucleotide; TTA chr11 5349589 5349610 5349594 5349589 -
ccataatcaaactaattaatat

SEQ ID NO: 122107 - DNA, 22 bp, Artificial Sequence
  Synthetic oligonucleotide; CTA chr11 5349575 5349596 5349580 5349575 -
attaatatatctatcacctcac

SEQ ID NO: 122108 - DNA, 22 bp, Artificial Sequence
  Synthetic oligonucleotide; TTA chr11 5349571 5349592 5349576 5349571 -
atatatctatcacctcacataa

SEQ ID NO: 122109 - DNA, 22 bp, Artificial Sequence
  Synthetic oligonucleotide; CTA chr11 5349562 5349583 5349567 5349562 -
tcacctcacataataactttaa

SEQ ID NO: 122110 - DNA, 22 bp, Artificial Sequence
  Synthetic oligonucleotide; CTC chr11 5349555 5349576 5349560 5349555 -
acataataactttaattttttt

SEQ ID NO: 122111 - DNA, 22 bp, Artificial Sequence
  Synthetic oligonucleotide; CTT chr11 5349543 5349564 5349548 5349543 -
taatttttttggtagtaaaaat

SEQ ID NO: 122112 - DNA, 22 bp, Artificial Sequence
  Synthetic oligonucleotide; TTT chr11 5349542 5349563 5349547 5349542 -
aatttttttggtagtaaaaata

SEQ ID NO: 122113 - DNA, 22 bp, Artificial Sequence
  Synthetic oligonucleotide; TTA chr11 5349541 5349562 5349546 5349541 -
atttttttggtagtaaaaatat

SEQ ID NO: 122114 - DNA, 22 bp, Artificial Sequence
  Synthetic oligonucleotide; TTT chr11 5349537 5349558 5349542 5349537 -
ttttggtagtaaaaatatgtga

SEQ ID NO: 122115 - DNA, 22 bp, Artificial Sequence
  Synthetic oligonucleotide; TTT chr11 5349536 5349557 5349541 5349536 -
tttggtagtaaaaatatgtgag

SEQ ID NO: 122116 - DNA, 22 bp, Artificial Sequence
  Synthetic oligonucleotide; TTT chr11 5349535 5349556 5349540 5349535 -
ttggtagtaaaaatatgtgagg

SEQ ID NO: 122117 - DNA, 22 bp, Artificial Sequence
  Synthetic oligonucleotide; TTT chr11 5349534 5349555 5349539 5349534 -
tggtagtaaaaatatgtgaggt

SEQ ID NO: 122118 - DNA, 22 bp, Artificial Sequence
  Synthetic oligonucleotide; TTT chr11 5349533 5349554 5349538 5349533 -
ggtagtaaaaatatgtgaggtc

SEQ ID NO: 122119 - DNA, 22 bp, Artificial Sequence
  Synthetic oligonucleotide; TTG chr11 5349532 5349553 5349537 5349532 -
gtagtaaaaatatgtgaggtct

SEQ ID NO: 122120 - DNA, 22 bp, Artificial Sequence
  Synthetic oligonucleotide; CTG chr11 5349509 5349530 5349514 5349509 -
ctttcttagcaaattttaaata

SEQ ID NO: 122121 - DNA, 22 bp, Artificial Sequence
  Synthetic oligonucleotide; CTT chr11 5349506 5349527 5349511 5349506 -
tcttagcaaattttaaatatac

SEQ ID NO: 122122 - DNA, 22 bp, Artificial Sequence
  Synthetic oligonucleotide; TTT chr11 5349505 5349526 5349510 5349505 -
cttagcaaattttaaatatacc

SEQ ID NO: 122123 - DNA, 22 bp, Artificial Sequence
  Synthetic oligonucleotide; TTC chr11 5349504 5349525 5349509 5349504 -
ttagcaaattttaaatatacct

SEQ ID NO: 122124 - DNA, 22 bp, Artificial Sequence
  Synthetic oligonucleotide; CTT chr11 5349502 5349523 5349507 5349502 -
agcaaattttaaatatacctaa

SEQ ID NO: 122125 - DNA, 22 bp, Artificial Sequence
  Synthetic oligonucleotide; TTA chr11 5349501 5349522 5349506 5349501 -
gcaaattttaaatatacctaaa

SEQ ID NO: 122126 - DNA, 22 bp, Artificial Sequence
  Synthetic oligonucleotide; TTT chr11 5349493 5349514 5349498 5349493 -
taaatatacctaaataaagctg

SEQ ID NO: 122127 - DNA, 22 bp, Artificial Sequence
  Synthetic oligonucleotide; TTT chr11 5349492 5349513 5349497 5349492 -
aaatatacctaaataaagctgg

SEQ ID NO: 122128 - DNA, 22 bp, Artificial Sequence
  Synthetic oligonucleotide; TTA chr11 5349491 5349512 5349496 5349491 -
aatatacctaaataaagctggg

SEQ ID NO: 122129 - DNA, 22 bp, Artificial Sequence
  Synthetic oligonucleotide; CTA chr11 5349481 5349502 5349486 5349481 -
aataaagctgggagggaaaaga

SEQ ID NO: 122130 - DNA, 22 bp, Artificial Sequence
  Synthetic oligonucleotide; CTG chr11 5349471 5349492 5349476 5349471 -
ggagggaaaagataatacagaa

SEQ ID NO: 122131 - DNA, 22 bp, Artificial Sequence
  Synthetic oligonucleotide; TTA chr11 5349444 5349465 5349449 5349444 -
atctagttaattgtgttatatt

SEQ ID NO: 122132 - DNA, 22 bp, Artificial Sequence
  Synthetic oligonucleotide; CTA chr11 5349439 5349460 5349444 5349439 -
gttaattgtgttatattactac

SEQ ID NO: 122133 - DNA, 22 bp, Artificial Sequence
  Synthetic oligonucleotide; TTA chr11 5349435 5349456 5349440 5349435 -
attgtgttatattactactaaa

SEQ ID NO: 122134 - DNA, 22 bp, Artificial Sequence
  Synthetic oligonucleotide; TTG chr11 5349431 5349452 5349436 5349431 -
tgttatattactactaaataaa

SEQ ID NO: 122135 - DNA, 22 bp, Artificial Sequence
  Synthetic oligonucleotide; TTA chr11 5349426 5349447 5349431 5349426 -
tattactactaaataaacatat

SEQ ID NO: 122136 - DNA, 22 bp, Artificial Sequence
  Synthetic oligonucleotide; TTA chr11 5349421 5349442 5349426 5349421 -
ctactaaataaacatataattg

SEQ ID NO: 122137 - DNA, 22 bp, Artificial Sequence
  Synthetic oligonucleotide; CTA chr11 5349418 5349439 5349423 5349418 -
ctaaataaacatataattgata

SEQ ID NO: 122138 - DNA, 22 bp, Artificial Sequence
  Synthetic oligonucleotide; CTA chr11 5349415 5349436 5349420 5349415 -
aataaacatataattgataaat

SEQ ID NO: 122139 - DNA, 22 bp, Artificial Sequence
  Synthetic oligonucleotide; TTG chr11 5349399 5349420 5349404 5349399 -
ataaattaaaaaaaaacaggag

SEQ ID NO: 122140 - DNA, 22 bp, Artificial Sequence
  Synthetic oligonucleotide; TTA chr11 5349391 5349412 5349396 5349391 -
aaaaaaaacaggagtaggaata

SEQ ID NO: 122141 - DNA, 22 bp, Artificial Sequence
  Synthetic oligonucleotide; CTG chr11 5349347 5349368 5349352 5349347 -
agaaacaaatgtatggaacaaa

SEQ ID NO: 122142 - DNA, 22 bp, Artificial Sequence
  Synthetic oligonucleotide; TTG chr11 5349319 5349340 5349324 5349319 -
ttgaatttctaccgtgtgtcaa

SEQ ID NO: 122143 - DNA, 22 bp, Artificial Sequence
  Synthetic oligonucleotide; TTG chr11 5349316 5349337 5349321 5349316 -
aatttctaccgtgtgtcaagta

SEQ ID NO: 122144 - DNA, 22 bp, Artificial Sequence
  Synthetic oligonucleotide; TTT chr11 5349311 5349332 5349316 5349311 -
ctaccgtgtgtcaagtattgga

SEQ ID NO: 122145 - DNA, 22 bp, Artificial Sequence
  Synthetic oligonucleotide; TTC chr11 5349310 5349331 5349315 5349310 -
taccgtgtgtcaagtattggac

SEQ ID NO: 122146 - DNA, 22 bp, Artificial Sequence
  Synthetic oligonucleotide; CTA chr11 5349308 5349329 5349313 5349308 -
ccgtgtgtcaagtattggactg

SEQ ID NO: 122147 - DNA, 22 bp, Artificial Sequence
  Synthetic oligonucleotide; TTG chr11 5349291 5349312 5349296 5349291 -
gactggggcattatatacacct

SEQ ID NO: 122148 - DNA, 22 bp, Artificial Sequence
  Synthetic oligonucleotide; CTG chr11 5349286 5349307 5349291 5349286 -
gggcattatatacacctcattt

SEQ ID NO: 122149 - DNA, 22 bp, Artificial Sequence
  Synthetic oligonucleotide; TTA chr11 5349278 5349299 5349283 5349278 -
tatacacctcattttttgggaa

SEQ ID NO: 122150 - DNA, 22 bp, Artificial Sequence
  Synthetic oligonucleotide; CTC chr11 5349268 5349289 5349273 5349268 -
attttttgggaagaatccttaa

SEQ ID NO: 122151 - DNA, 22 bp, Artificial Sequence
  Synthetic oligonucleotide; TTT chr11 5349264 5349285 5349269 5349264 -
tttgggaagaatccttaaaata

SEQ ID NO: 122152 - DNA, 22 bp, Artificial Sequence
  Synthetic oligonucleotide; TTT chr11 5349263 5349284 5349268 5349263 -
ttgggaagaatccttaaaatag

SEQ ID NO: 122153 - DNA, 22 bp, Artificial Sequence
  Synthetic oligonucleotide; TTT chr11 5349262 5349283 5349267 5349262 -
tgggaagaatccttaaaatagc

SEQ ID NO: 122154 - DNA, 22 bp, Artificial Sequence
  Synthetic oligonucleotide; TTT chr11 5349261 5349282 5349266 5349261 -
gggaagaatccttaaaatagct

SEQ ID NO: 122155 - DNA, 22 bp, Artificial Sequence
  Synthetic oligonucleotide; TTG chr11 5349260 5349281 5349265 5349260 -
ggaagaatccttaaaatagctg

SEQ ID NO: 122156 - DNA, 22 bp, Artificial Sequence
  Synthetic oligonucleotide; CTT chr11 5349248 5349269 5349253 5349248 -
aaaatagctgtttgtcttgtct

SEQ ID NO: 122157 - DNA, 22 bp, Artificial Sequence
  Synthetic oligonucleotide; TTA chr11 5349247 5349268 5349252 5349247 -
aaatagctgtttgtcttgtctg

SEQ ID NO: 122158 - DNA, 22 bp, Artificial Sequence
  Synthetic oligonucleotide; CTG chr11 5349238 5349259 5349243 5349238 -
tttgtcttgtctgttttcatat

SEQ ID NO: 122159 - DNA, 22 bp, Artificial Sequence
  Synthetic oligonucleotide; TTT chr11 5349235 5349256 5349240 5349235 -
gtcttgtctgttttcatattga

SEQ ID NO: 122160 - DNA, 22 bp, Artificial Sequence
  Synthetic oligonucleotide; TTG chr11 5349234 5349255 5349239 5349234 -
tcttgtctgttttcatattgaa

SEQ ID NO: 122161 - DNA, 22 bp, Artificial Sequence
  Synthetic oligonucleotide; CTT chr11 5349230 5349251 5349235 5349230 -
gtctgttttcatattgaaaact

SEQ ID NO: 122162 - DNA, 22 bp, Artificial Sequence
  Synthetic oligonucleotide; TTG chr11 5349229 5349250 5349234 5349229 -
tctgttttcatattgaaaactg

SEQ ID NO: 122163 - DNA, 22 bp, Artificial Sequence
  Synthetic oligonucleotide; CTG chr11 5349225 5349246 5349230 5349225 -
ttttcatattgaaaactgagtg

SEQ ID NO: 122164 - DNA, 22 bp, Artificial Sequence
  Synthetic oligonucleotide; TTT chr11 5349222 5349243 5349227 5349222 -
tcatattgaaaactgagtgctt

SEQ ID NO: 122165 - DNA, 22 bp, Artificial Sequence
  Synthetic oligonucleotide; TTT chr11 5349221 5349242 5349226 5349221 -
catattgaaaactgagtgcttt

SEQ ID NO: 122166 - DNA, 22 bp, Artificial Sequence
  Synthetic oligonucleotide; TTC chr11 5349220 5349241 5349225 5349220 -
atattgaaaactgagtgctttc

SEQ ID NO: 122167 - DNA, 22 bp, Artificial Sequence
  Synthetic oligonucleotide; TTG chr11 5349214 5349235 5349219 5349214 -
aaaactgagtgctttcacttga

SEQ ID NO: 122168 - DNA, 22 bp, Artificial Sequence
  Synthetic oligonucleotide; CTG chr11 5349207 5349228 5349212 5349207 -
agtgctttcacttgattcactc

SEQ ID NO: 122169 - DNA, 22 bp, Artificial Sequence
  Synthetic oligonucleotide; CTT chr11 5349200 5349221 5349205 5349200 -
tcacttgattcactcagttgct

SEQ ID NO: 122170 - DNA, 22 bp, Artificial Sequence
  Synthetic oligonucleotide; TTT chr11 5349199 5349220 5349204 5349199 -
cacttgattcactcagttgctt

SEQ ID NO: 122171 - DNA, 22 bp, Artificial Sequence
  Synthetic oligonucleotide; TTC chr11 5349198 5349219 5349203 5349198 -
acttgattcactcagttgcttt

SEQ ID NO: 122172 - DNA, 22 bp, Artificial Sequence
  Synthetic oligonucleotide; CTT chr11 5349194 5349215 5349199 5349194 -
gattcactcagttgcttttgtg

SEQ ID NO: 122173 - DNA, 22 bp, Artificial Sequence
  Synthetic oligonucleotide; TTG chr11 5349193 5349214 5349198 5349193 -
attcactcagttgcttttgtgg

SEQ ID NO: 122174 - DNA, 22 bp, Artificial Sequence
  Synthetic oligonucleotide; TTC chr11 5349189 5349210 5349194 5349189 -
actcagttgcttttgtggtata

SEQ ID NO: 122175 - DNA, 22 bp, Artificial Sequence
  Synthetic oligonucleotide; CTC chr11 5349185 5349206 5349190 5349185 -
agttgcttttgtggtatatgag

SEQ ID NO: 122176 - DNA, 22 bp, Artificial Sequence
  Synthetic oligonucleotide; TTG chr11 5349180 5349201 5349185 5349180 -
cttttgtggtatatgagatgat

SEQ ID NO: 122177 - DNA, 22 bp, Artificial Sequence
  Synthetic oligonucleotide; CTT chr11 5349177 5349198 5349182 5349177 -
ttgtggtatatgagatgatctg

SEQ ID NO: 122178 - DNA, 22 bp, Artificial Sequence
  Synthetic oligonucleotide; TTT chr11 5349176 5349197 5349181 5349176 -
tgtggtatatgagatgatctgt

SEQ ID NO: 122179 - DNA, 22 bp, Artificial Sequence
  Synthetic oligonucleotide; TTT chr11 5349175 5349196 5349180 5349175 -
gtggtatatgagatgatctgtg

SEQ ID NO: 122180 - DNA, 22 bp, Artificial Sequence
  Synthetic oligonucleotide; TTG chr11 5349174 5349195 5349179 5349174 -
tggtatatgagatgatctgtga

SEQ ID NO: 122181 - DNA, 22 bp, Artificial Sequence
  Synthetic oligonucleotide; CTG chr11 5349155 5349176 5349160 5349155 -
tgagtttcagaggggataaaaa

SEQ ID NO: 122182 - DNA, 22 bp, Artificial Sequence
  Synthetic oligonucleotide; TTT chr11 5349148 5349169 5349153 5349148 -
cagaggggataaaaatctaaaa

SEQ ID NO: 122183 - DNA, 22 bp, Artificial Sequence
  Synthetic oligonucleotide; TTC chr11 5349147 5349168 5349152 5349147 -
agaggggataaaaatctaaaac

SEQ ID NO: 122184 - DNA, 22 bp, Artificial Sequence
  Synthetic oligonucleotide; CTA chr11 5349129 5349150 5349134 5349129 -
aaacctttgcctcatccctgca

SEQ ID NO: 122185 - DNA, 22 bp, Artificial Sequence
  Synthetic oligonucleotide; CTT chr11 5349122 5349143 5349127 5349122 -
tgcctcatccctgcagccattc

SEQ ID NO: 122186 - DNA, 22 bp, Artificial Sequence
  Synthetic oligonucleotide; TTT chr11 5349121 5349142 5349126 5349121 -
gcctcatccctgcagccattca

SEQ ID NO: 122187 - DNA, 22 bp, Artificial Sequence
  Synthetic oligonucleotide; TTG chr11 5349120 5349141 5349125 5349120 -
cctcatccctgcagccattcac

SEQ ID NO: 122188 - DNA, 22 bp, Artificial Sequence
  Synthetic oligonucleotide; CTC chr11 5349116 5349137 5349121 5349116 -
atccctgcagccattcaccctc

SEQ ID NO: 122189 - DNA, 22 bp, Artificial Sequence
  Synthetic oligonucleotide; CTG chr11 5349109 5349130 5349114 5349109 -
cagccattcaccctcttccagg

SEQ ID NO: 122190 - DNA, 22 bp, Artificial Sequence
  Synthetic oligonucleotide; TTC chr11 5349100 5349121 5349105 5349100 -
accctcttccagggtctctgtc

SEQ ID NO: 122191 - DNA, 22 bp, Artificial Sequence
  Synthetic oligonucleotide; CTC chr11 5349094 5349115 5349099 5349094 -
ttccagggtctctgtcatagaa

SEQ ID NO: 122192 - DNA, 22 bp, Artificial Sequence
  Synthetic oligonucleotide; CTT chr11 5349092 5349113 5349097 5349092 -
ccagggtctctgtcatagaata

SEQ ID NO: 122193 - DNA, 22 bp, Artificial Sequence
  Synthetic oligonucleotide; TTC chr11 5349091 5349112 5349096 5349091 -
cagggtctctgtcatagaatag

SEQ ID NO: 122194 - DNA, 22 bp, Artificial Sequence
  Synthetic oligonucleotide; CTC chr11 5349082 5349103 5349087 5349082 -
tgtcatagaatagacttgagtt

SEQ ID NO: 122195 - DNA, 22 bp, Artificial Sequence
  Synthetic oligonucleotide; CTG chr11 5349080 5349101 5349085 5349080 -
tcatagaatagacttgagtttt

SEQ ID NO: 122196 - DNA, 22 bp, Artificial Sequence
  Synthetic oligonucleotide; CTT chr11 5349065 5349086 5349070 5349065 -
gagtttttattaatgagaaact

SEQ ID NO: 122197 - DNA, 22 bp, Artificial Sequence
  Synthetic oligonucleotide; TTG chr11 5349064 5349085 5349069 5349064 -
agtttttattaatgagaaacta

SEQ ID NO: 122198 - DNA, 22 bp, Artificial Sequence
  Synthetic oligonucleotide; TTT chr11 5349059 5349080 5349064 5349059 -
ttattaatgagaaactaattct

SEQ ID NO: 122199 - DNA, 22 bp, Artificial Sequence
  Synthetic oligonucleotide; TTT chr11 5349058 5349079 5349063 5349058 -
tattaatgagaaactaattctc

SEQ ID NO: 122200 - DNA, 22 bp, Artificial Sequence
  Synthetic oligonucleotide; TTT chr11 5349057 5349078 5349062 5349057 -
attaatgagaaactaattctca

SEQ ID NO: 122201 - DNA, 22 bp, Artificial Sequence
  Synthetic oligonucleotide; TTA chr11 5349056 5349077 5349061 5349056 -
ttaatgagaaactaattctcaa

SEQ ID NO: 122202 - DNA, 22 bp, Artificial Sequence
  Synthetic oligonucleotide; TTA chr11 5349053 5349074 5349058 5349053 -
atgagaaactaattctcaaagt

SEQ ID NO: 122203 - DNA, 22 bp, Artificial Sequence
  Synthetic oligonucleotide; CTA chr11 5349042 5349063 5349047 5349042 -
attctcaaagtctcaaactctg

SEQ ID NO: 122204 - DNA, 22 bp, Artificial Sequence
  Synthetic oligonucleotide; TTC chr11 5349038 5349059 5349043 5349038 -
tcaaagtctcaaactctgccgc

SEQ ID NO: 122205 - DNA, 22 bp, Artificial Sequence
  Synthetic oligonucleotide; CTC chr11 5349036 5349057 5349041 5349036 -
aaagtctcaaactctgccgcat

SEQ ID NO: 122206 - DNA, 22 bp, Artificial Sequence
  Synthetic oligonucleotide; CTC chr11 5349028 5349049 5349033 5349028 -
aaactctgccgcataaactgat

SEQ ID NO: 122207 - DNA, 22 bp, Artificial Sequence
  Synthetic oligonucleotide; CTC chr11 5349022 5349043 5349027 5349022 -
tgccgcataaactgatggctct

SEQ ID NO: 122208 - DNA, 22 bp, Artificial Sequence
  Synthetic oligonucleotide; CTG chr11 5349020 5349041 5349025 5349020 -
ccgcataaactgatggctctat

SEQ ID NO: 122209 - DNA, 22 bp, Artificial Sequence
  Synthetic oligonucleotide; CTG chr11 5349008 5349029 5349013 5349008 -
atggctctatgcagacacctca

SEQ ID NO: 122210 - DNA, 22 bp, Artificial Sequence
  Synthetic oligonucleotide; CTC chr11 5349001 5349022 5349006 5349001 -
tatgcagacacctcagcaggag

SEQ ID NO: 122211 - DNA, 22 bp, Artificial Sequence
  Synthetic oligonucleotide; CTA chr11 5348999 5349020 5349004 5348999 -
tgcagacacctcagcaggagcc

SEQ ID NO: 122212 - DNA, 22 bp, Artificial Sequence
  Synthetic oligonucleotide; CTC chr11 5348987 5349008 5348992 5348987 -
agcaggagcccattcagatgtt

SEQ ID NO: 122213 - DNA, 22 bp, Artificial Sequence
  Synthetic oligonucleotide; TTC chr11 5348972 5348993 5348977 5348972 -
agatgttaactttcatatattc

SEQ ID NO: 122214 - DNA, 22 bp, Artificial Sequence
  Synthetic oligonucleotide; TTA chr11 5348964 5348985 5348969 5348964 -
actttcatatattctctcacct

SEQ ID NO: 122215 - DNA, 22 bp, Artificial Sequence
  Synthetic oligonucleotide; CTT chr11 5348960 5348981 5348965 5348960 -
tcatatattctctcaccttccc

SEQ ID NO: 122216 - DNA, 22 bp, Artificial Sequence
  Synthetic oligonucleotide; TTT chr11 5348959 5348980 5348964 5348959 -
catatattctctcaccttccct

SEQ ID NO: 122217 - DNA, 22 bp, Artificial Sequence
  Synthetic oligonucleotide; TTC chr11 5348958 5348979 5348963 5348958 -
atatattctctcaccttccctt

SEQ ID NO: 122218 - DNA, 22 bp, Artificial Sequence
  Synthetic oligonucleotide; TTC chr11 5348950 5348971 5348955 5348950 -
tctcaccttccctttggctttt

SEQ ID NO: 122219 - DNA, 22 bp, Artificial Sequence
  Synthetic oligonucleotide; CTC chr11 5348948 5348969 5348953 5348948 -
tcaccttccctttggctttttt

SEQ ID NO: 122220 - DNA, 22 bp, Artificial Sequence
  Synthetic oligonucleotide; CTC chr11 5348946 5348967 5348951 5348946 -
accttccctttggcttttttcc

SEQ ID NO: 122221 - DNA, 22 bp, Artificial Sequence
  Synthetic oligonucleotide; CTT chr11 5348941 5348962 5348946 5348941 -
ccctttggcttttttccttcac

SEQ ID NO: 122222 - DNA, 22 bp, Artificial Sequence
  Synthetic oligonucleotide; TTC chr11 5348940 5348961 5348945 5348940 -
cctttggcttttttccttcact

SEQ ID NO: 122223 - DNA, 22 bp, Artificial Sequence
  Synthetic oligonucleotide; CTT chr11 5348936 5348957 5348941 5348936 -
tggcttttttccttcacttttc

SEQ ID NO: 122224 - DNA, 22 bp, Artificial Sequence
  Synthetic oligonucleotide; TTT chr11 5348935 5348956 5348940 5348935 -
ggcttttttccttcacttttcc

SEQ ID NO: 122225 - DNA, 22 bp, Artificial Sequence
  Synthetic oligonucleotide; TTG chr11 5348934 5348955 5348939 5348934 -
gcttttttccttcacttttcct

SEQ ID NO: 122226 - DNA, 22 bp, Artificial Sequence
  Synthetic oligonucleotide; CTT chr11 5348930 5348951 5348935 5348930 -
ttttccttcacttttcctgaca

SEQ ID NO: 122227 - DNA, 22 bp, Artificial Sequence
  Synthetic oligonucleotide; TTT chr11 5348929 5348950 5348934 5348929 -
tttccttcacttttcctgacac

SEQ ID NO: 122228 - DNA, 22 bp, Artificial Sequence
  Synthetic oligonucleotide; TTT chr11 5348928 5348949 5348933 5348928 -
ttccttcacttttcctgacact

SEQ ID NO: 122229 - DNA, 22 bp, Artificial Sequence
  Synthetic oligonucleotide; TTT chr11 5348927 5348948 5348932 5348927 -
tccttcacttttcctgacactc

SEQ ID NO: 122230 - DNA, 22 bp, Artificial Sequence
  Synthetic oligonucleotide; TTT chr11 5348926 5348947 5348931 5348926 -
ccttcacttttcctgacactct

SEQ ID NO: 122231 - DNA, 22 bp, Artificial Sequence
  Synthetic oligonucleotide; TTC chr11 5348925 5348946 5348930 5348925 -
cttcacttttcctgacactctt

SEQ ID NO: 122232 - DNA, 22 bp, Artificial Sequence
  Synthetic oligonucleotide; CTT chr11 5348922 5348943 5348927 5348922 -
cacttttcctgacactcttttc

SEQ ID NO: 122233 - DNA, 22 bp, Artificial Sequence
  Synthetic oligonucleotide; TTC chr11 5348921 5348942 5348926 5348921 -
acttttcctgacactcttttct

SEQ ID NO: 122234 - DNA, 22 bp, Artificial Sequence
  Synthetic oligonucleotide; CTT chr11 5348917 5348938 5348922 5348917 -
ttcctgacactcttttctgtct

SEQ ID NO: 122235 - DNA, 22 bp, Artificial Sequence
  Synthetic oligonucleotide; TTT chr11 5348916 5348937 5348921 5348916 -
tcctgacactcttttctgtctc

SEQ ID NO: 122236 - DNA, 22 bp, Artificial Sequence
  Synthetic oligonucleotide; TTT chr11 5348915 5348936 5348920 5348915 -
cctgacactcttttctgtctca

SEQ ID NO: 122237 - DNA, 22 bp, Artificial Sequence
  Synthetic oligonucleotide; TTC chr11 5348914 5348935 5348919 5348914 -
ctgacactcttttctgtctcaa

SEQ ID NO: 122238 - DNA, 22 bp, Artificial Sequence
  Synthetic oligonucleotide; CTG chr11 5348911 5348932 5348916 5348911 -
acactcttttctgtctcaagca

SEQ ID NO: 122239 - DNA, 22 bp, Artificial Sequence
  Synthetic oligonucleotide; CTC chr11 5348905 5348926 5348910 5348905 -
ttttctgtctcaagcacttagt

SEQ ID NO: 122240 - DNA, 22 bp, Artificial Sequence
  Synthetic oligonucleotide; CTT chr11 5348903 5348924 5348908 5348903 -
ttctgtctcaagcacttagtat

SEQ ID NO: 122241 - DNA, 22 bp, Artificial Sequence
  Synthetic oligonucleotide; TTT chr11 5348902 5348923 5348907 5348902 -
tctgtctcaagcacttagtatc

SEQ ID NO: 122242 - DNA, 22 bp, Artificial Sequence
  Synthetic oligonucleotide; TTT chr11 5348901 5348922 5348906 5348901 -
ctgtctcaagcacttagtatct

SEQ ID NO: 122243 - DNA, 22 bp, Artificial Sequence
  Synthetic oligonucleotide; TTC chr11 5348900 5348921 5348905 5348900 -
tgtctcaagcacttagtatctc

SEQ ID NO: 122244 - DNA, 22 bp, Artificial Sequence
  Synthetic oligonucleotide; CTG chr11 5348898 5348919 5348903 5348898 -
tctcaagcacttagtatctcca

SEQ ID NO: 122245 - DNA, 22 bp, Artificial Sequence
  Synthetic oligonucleotide; CTC chr11 5348894 5348915 5348899 5348894 -
aagcacttagtatctccatcct

SEQ ID NO: 122246 - DNA, 22 bp, Artificial Sequence
  Synthetic oligonucleotide; CTT chr11 5348886 5348907 5348891 5348886 -
agtatctccatcctttttttac

SEQ ID NO: 122247 - DNA, 22 bp, Artificial Sequence
  Synthetic oligonucleotide; TTA chr11 5348885 5348906 5348890 5348885 -
gtatctccatcctttttttacc

SEQ ID NO: 122248 - DNA, 22 bp, Artificial Sequence
  Synthetic oligonucleotide; CTC chr11 5348878 5348899 5348883 5348878 -
catcctttttttacccccttac

SEQ ID NO: 122249 - DNA, 22 bp, Artificial Sequence
  Synthetic oligonucleotide; CTT chr11 5348871 5348892 5348876 5348871 -
tttttacccccttacctttggc

SEQ ID NO: 122250 - DNA, 22 bp, Artificial Sequence
  Synthetic oligonucleotide; TTT chr11 5348870 5348891 5348875 5348870 -
ttttacccccttacctttggct

SEQ ID NO: 122251 - DNA, 22 bp, Artificial Sequence
  Synthetic oligonucleotide; TTT chr11 5348869 5348890 5348874 5348869 -
tttacccccttacctttggcta

SEQ ID NO: 122252 - DNA, 22 bp, Artificial Sequence
  Synthetic oligonucleotide; TTT chr11 5348868 5348889 5348873 5348868 -
ttacccccttacctttggctat

SEQ ID NO: 122253 - DNA, 22 bp, Artificial Sequence
  Synthetic oligonucleotide; TTT chr11 5348867 5348888 5348872 5348867 -
tacccccttacctttggctatt

SEQ ID NO: 122254 - DNA, 22 bp, Artificial Sequence
  Synthetic oligonucleotide; TTT chr11 5348866 5348887 5348871 5348866 -
acccccttacctttggctatta

SEQ ID NO: 122255 - DNA, 22 bp, Artificial Sequence
  Synthetic oligonucleotide; TTA chr11 5348865 5348886 5348870 5348865 -
cccccttacctttggctattat

SEQ ID NO: 122256 - DNA, 22 bp, Artificial Sequence
  Synthetic oligonucleotide; CTT chr11 5348858 5348879 5348863 5348858 -
acctttggctattatcctttct

SEQ ID NO: 122257 - DNA, 22 bp, Artificial Sequence
  Synthetic oligonucleotide; TTA chr11 5348857 5348878 5348862 5348857 -
cctttggctattatcctttctg

SEQ ID NO: 122258 - DNA, 22 bp, Artificial Sequence
  Synthetic oligonucleotide; CTT chr11 5348853 5348874 5348858 5348853 -
tggctattatcctttctgtgat

SEQ ID NO: 122259 - DNA, 22 bp, Artificial Sequence
  Synthetic oligonucleotide; TTT chr11 5348852 5348873 5348857 5348852 -
ggctattatcctttctgtgatg

SEQ ID NO: 122260 - DNA, 22 bp, Artificial Sequence
  Synthetic oligonucleotide; TTG chr11 5348851 5348872 5348856 5348851 -
gctattatcctttctgtgatgg

SEQ ID NO: 122261 - DNA, 22 bp, Artificial Sequence
  Synthetic oligonucleotide; CTA chr11 5348847 5348868 5348852 5348847 -
ttatcctttctgtgatggttaa

SEQ ID NO: 122262 - DNA, 22 bp, Artificial Sequence
  Synthetic oligonucleotide; TTA chr11 5348844 5348865 5348849 5348844 -
tcctttctgtgatggttaatat

SEQ ID NO: 122263 - DNA, 22 bp, Artificial Sequence
  Synthetic oligonucleotide; CTT chr11 5348839 5348860 5348844 5348839 -
tctgtgatggttaatattgagt

SEQ ID NO: 122264 - DNA, 22 bp, Artificial Sequence
  Synthetic oligonucleotide; TTT chr11 5348838 5348859 5348843 5348838 -
ctgtgatggttaatattgagtg

SEQ ID NO: 122265 - DNA, 22 bp, Artificial Sequence
  Synthetic oligonucleotide; TTC chr11 5348837 5348858 5348842 5348837 -
tgtgatggttaatattgagtgc

SEQ ID NO: 122266 - DNA, 22 bp, Artificial Sequence
  Synthetic oligonucleotide; CTG chr11 5348835 5348856 5348840 5348835 -
tgatggttaatattgagtgcaa

SEQ ID NO: 122267 - DNA, 22 bp, Artificial Sequence
  Synthetic oligonucleotide; TTA chr11 5348826 5348847 5348831 5348826 -
atattgagtgcaaacttgattg

SEQ ID NO: 122268 - DNA, 22 bp, Artificial Sequence
  Synthetic oligonucleotide; TTG chr11 5348820 5348841 5348825 5348820 -
agtgcaaacttgattggattga

SEQ ID NO: 122269 - DNA, 22 bp, Artificial Sequence
  Synthetic oligonucleotide; CTT chr11 5348809 5348830 5348814 5348809 -
gattggattgaaggatgcaaag

SEQ ID NO: 122270 - DNA, 22 bp, Artificial Sequence
  Synthetic oligonucleotide; TTG chr11 5348808 5348829 5348813 5348808 -
attggattgaaggatgcaaagt

SEQ ID NO: 122271 - DNA, 22 bp, Artificial Sequence
  Synthetic oligonucleotide; TTG chr11 5348804 5348825 5348809 5348804 -
gattgaaggatgcaaagtattg

SEQ ID NO: 122272 - DNA, 22 bp, Artificial Sequence
  Synthetic oligonucleotide; TTG chr11 5348799 5348820 5348804 5348799 -
aaggatgcaaagtattgttcct

SEQ ID NO: 122273 - DNA, 22 bp, Artificial Sequence
  Synthetic oligonucleotide; TTG chr11 5348782 5348803 5348787 5348782 -
ttcctgggtgtgctgtaagggt

SEQ ID NO: 122274 - DNA, 22 bp, Artificial Sequence
  Synthetic oligonucleotide; TTC chr11 5348779 5348800 5348784 5348779 -
ctgggtgtgctgtaagggtgtt

SEQ ID NO: 122275 - DNA, 22 bp, Artificial Sequence
  Synthetic oligonucleotide; CTG chr11 5348776 5348797 5348781 5348776 -
ggtgtgctgtaagggtgttgcc

SEQ ID NO: 122276 - DNA, 22 bp, Artificial Sequence
  Synthetic oligonucleotide; CTG chr11 5348767 5348788 5348772 5348767 -
taagggtgttgccaaaggagat

SEQ ID NO: 122277 - DNA, 22 bp, Artificial Sequence
  Synthetic oligonucleotide; TTG chr11 5348756 5348777 5348761 5348756 -
ccaaaggagattaacatttgag

SEQ ID NO: 122278 - DNA, 22 bp, Artificial Sequence
  Synthetic oligonucleotide; TTA chr11 5348743 5348764 5348748 5348743 -
acatttgagtcagtagactggg

SEQ ID NO: 122279 - DNA, 22 bp, Artificial Sequence
  Synthetic oligonucleotide; TTT chr11 5348737 5348758 5348742 5348737 -
gagtcagtagactgggagaggc

SEQ ID NO: 122280 - DNA, 22 bp, Artificial Sequence
  Synthetic oligonucleotide; TTG chr11 5348736 5348757 5348741 5348736 -
agtcagtagactgggagaggca

SEQ ID NO: 122281 - DNA, 22 bp, Artificial Sequence
  Synthetic oligonucleotide; CTG chr11 5348723 5348744 5348728 5348723 -
ggagaggcagacccacccaccc

SEQ ID NO: 122282 - DNA, 22 bp, Artificial Sequence
  Synthetic oligonucleotide; CTC chr11 5348699 5348720 5348704 5348699 -
cgtctgggtgggtactatctaa

SEQ ID NO: 122283 - DNA, 22 bp, Artificial Sequence
  Synthetic oligonucleotide; CTG chr11 5348693 5348714 5348698 5348693 -
ggtgggtactatctaatcagct

SEQ ID NO: 122284 - DNA, 22 bp, Artificial Sequence
  Synthetic oligonucleotide; CTA chr11 5348682 5348703 5348687 5348682 -
tctaatcagctgccagggcggc

SEQ ID NO: 122285 - DNA, 22 bp, Artificial Sequence
  Synthetic oligonucleotide; CTA chr11 5348678 5348699 5348683 5348678 -
atcagctgccagggcggctaga

SEQ ID NO: 122286 - DNA, 22 bp, Artificial Sequence
  Synthetic oligonucleotide; CTG chr11 5348670 5348691 5348675 5348670 -
ccagggcggctagaagaaagca

SEQ ID NO: 122287 - DNA, 22 bp, Artificial Sequence
  Synthetic oligonucleotide; CTA chr11 5348658 5348679 5348663 5348658 -
gaagaaagcaggcaaaagaaga

SEQ ID NO: 122288 - DNA, 22 bp, Artificial Sequence
  Synthetic oligonucleotide; CTG chr11 5348615 5348636 5348620 5348615 -
ttacacaatataaacctttcca

SEQ ID NO: 122289 - DNA, 22 bp, Artificial Sequence
  Synthetic oligonucleotide; TTA chr11 5348612 5348633 5348617 5348612 -
cacaatataaacctttccaggt

SEQ ID NO: 122290 - DNA, 22 bp, Artificial Sequence
  Synthetic oligonucleotide; CTT chr11 5348597 5348618 5348602 5348597 -
tccaggtgctaaagtcacacag

SEQ ID NO: 122291 - DNA, 22 bp, Artificial Sequence
  Synthetic oligonucleotide; TTT chr11 5348596 5348617 5348601 5348596 -
ccaggtgctaaagtcacacagg

SEQ ID NO: 122292 - DNA, 22 bp, Artificial Sequence
  Synthetic oligonucleotide; TTC chr11 5348595 5348616 5348600 5348595 -
caggtgctaaagtcacacaggc

SEQ ID NO: 122293 - DNA, 22 bp, Artificial Sequence
  Synthetic oligonucleotide; CTA chr11 5348586 5348607 5348591 5348586 -
aagtcacacaggctatgtgaat

SEQ ID NO: 122294 - DNA, 22 bp, Artificial Sequence
  Synthetic oligonucleotide; CTA chr11 5348571 5348592 5348576 5348571 -
tgtgaatctgtacccctgatcc

SEQ ID NO: 122295 - DNA, 22 bp, Artificial Sequence
  Synthetic oligonucleotide; CTG chr11 5348561 5348582 5348566 5348561 -
tacccctgatccagaggcacac

SEQ ID NO: 122296 - DNA, 22 bp, Artificial Sequence
  Synthetic oligonucleotide; CTG chr11 5348553 5348574 5348558 5348553 -
atccagaggcacacataaccca

SEQ ID NO: 122297 - DNA, 22 bp, Artificial Sequence
  Synthetic oligonucleotide; CTC chr11 5348526 5348547 5348531 5348526 -
cgtccaagcttaattttgaatt

SEQ ID NO: 122298 - DNA, 22 bp, Artificial Sequence
  Synthetic oligonucleotide; CTT chr11 5348515 5348536 5348520 5348515 -
aattttgaattggtttattagt

SEQ ID NO: 122299 - DNA, 22 bp, Artificial Sequence
  Synthetic oligonucleotide; TTA chr11 5348514 5348535 5348519 5348514 -
attttgaattggtttattagtc

SEQ ID NO: 122300 - DNA, 22 bp, Artificial Sequence
  Synthetic oligonucleotide; TTT chr11 5348510 5348531 5348515 5348510 -
tgaattggtttattagtcatat

SEQ ID NO: 122301 - DNA, 22 bp, Artificial Sequence
  Synthetic oligonucleotide; TTT chr11 5348509 5348530 5348514 5348509 -
gaattggtttattagtcatatg

SEQ ID NO: 122302 - DNA, 22 bp, Artificial Sequence
  Synthetic oligonucleotide; TTG chr11 5348508 5348529 5348513 5348508 -
aattggtttattagtcatatgg

SEQ ID NO: 122303 - DNA, 22 bp, Artificial Sequence
  Synthetic oligonucleotide; TTG chr11 5348503 5348524 5348508 5348503 -
gtttattagtcatatggtcaga

SEQ ID NO: 122304 - DNA, 22 bp, Artificial Sequence
  Synthetic oligonucleotide; TTT chr11 5348499 5348520 5348504 5348499 -
attagtcatatggtcagatagt

SEQ ID NO: 122305 - DNA, 22 bp, Artificial Sequence
  Synthetic oligonucleotide; TTA chr11 5348498 5348519 5348503 5348498 -
ttagtcatatggtcagatagtg

SEQ ID NO: 122306 - DNA, 22 bp, Artificial Sequence
  Synthetic oligonucleotide; TTA chr11 5348495 5348516 5348500 5348495 -
gtcatatggtcagatagtgact

SEQ ID NO: 122307 - DNA, 22 bp, Artificial Sequence
  Synthetic oligonucleotide; CTT chr11 5348472 5348493 5348477 5348472 -
tttttctagaaagtatttgaac

SEQ ID NO: 122308 - DNA, 22 bp, Artificial Sequence
  Synthetic oligonucleotide; TTT chr11 5348471 5348492 5348476 5348471 -
ttttctagaaagtatttgaacc

SEQ ID NO: 122309 - DNA, 22 bp, Artificial Sequence
  Synthetic oligonucleotide; TTT chr11 5348470 5348491 5348475 5348470 -
tttctagaaagtatttgaacct

SEQ ID NO: 122310 - DNA, 22 bp, Artificial Sequence
  Synthetic oligonucleotide; TTT chr11 5348469 5348490 5348474 5348469 -
ttctagaaagtatttgaacctc

SEQ ID NO: 122311 - DNA, 22 bp, Artificial Sequence
  Synthetic oligonucleotide; TTT chr11 5348468 5348489 5348473 5348468 -
tctagaaagtatttgaacctct

SEQ ID NO: 122312 - DNA, 22 bp, Artificial Sequence
  Synthetic oligonucleotide; TTT chr11 5348467 5348488 5348472 5348467 -
ctagaaagtatttgaacctctg

SEQ ID NO: 122313 - DNA, 22 bp, Artificial Sequence
  Synthetic oligonucleotide; TTC chr11 5348466 5348487 5348471 5348466 -
tagaaagtatttgaacctctga

SEQ ID NO: 122314 - DNA, 22 bp, Artificial Sequence
  Synthetic oligonucleotide; CTA chr11 5348464 5348485 5348469 5348464 -
gaaagtatttgaacctctgatg

SEQ ID NO: 122315 - DNA, 22 bp, Artificial Sequence
  Synthetic oligonucleotide; TTT chr11 5348454 5348475 5348459 5348454 -
gaacctctgatgattacagagg

SEQ ID NO: 122316 - DNA, 22 bp, Artificial Sequence
  Synthetic oligonucleotide; TTG chr11 5348453 5348474 5348458 5348453 -
aacctctgatgattacagaggt

SEQ ID NO: 122317 - DNA, 22 bp, Artificial Sequence
  Synthetic oligonucleotide; CTC chr11 5348447 5348468 5348452 5348447 -
tgatgattacagaggtatacct

SEQ ID NO: 122318 - DNA, 22 bp, Artificial Sequence
  Synthetic oligonucleotide; CTG chr11 5348445 5348466 5348450 5348445 -
atgattacagaggtatacctcc

SEQ ID NO: 122319 - DNA, 22 bp, Artificial Sequence
  Synthetic oligonucleotide; TTA chr11 5348438 5348459 5348443 5348438 -
cagaggtatacctcctcaagaa

SEQ ID NO: 122320 - DNA, 22 bp, Artificial Sequence
  Synthetic oligonucleotide; CTC chr11 5348424 5348445 5348429 5348424 -
ctcaagaatttggaagagttga

SEQ ID NO: 122321 - DNA, 22 bp, Artificial Sequence
  Synthetic oligonucleotide; CTC chr11 5348421 5348442 5348426 5348421 -
aagaatttggaagagttgattc

SEQ ID NO: 122322 - DNA, 22 bp, Artificial Sequence
  Synthetic oligonucleotide; TTT chr11 5348413 5348434 5348418 5348413 -
ggaagagttgattctatatttg

SEQ ID NO: 122323 - DNA, 22 bp, Artificial Sequence
  Synthetic oligonucleotide; TTG chr11 5348412 5348433 5348417 5348412 -
gaagagttgattctatatttgg

SEQ ID NO: 122324 - DNA, 22 bp, Artificial Sequence
  Synthetic oligonucleotide; TTG chr11 5348403 5348424 5348408 5348403 -
attctatatttggcacttatct

SEQ ID NO: 122325 - DNA, 22 bp, Artificial Sequence
  Synthetic oligonucleotide; TTC chr11 5348399 5348420 5348404 5348399 -
tatatttggcacttatctggac

SEQ ID NO: 122326 - DNA, 22 bp, Artificial Sequence
  Synthetic oligonucleotide; CTA chr11 5348397 5348418 5348402 5348397 -
tatttggcacttatctggactt

SEQ ID NO: 122327 - DNA, 22 bp, Artificial Sequence
  Synthetic oligonucleotide; TTT chr11 5348392 5348413 5348397 5348392 -
ggcacttatctggacttctaag

SEQ ID NO: 122328 - DNA, 22 bp, Artificial Sequence
  Synthetic oligonucleotide; TTG chr11 5348391 5348412 5348396 5348391 -
gcacttatctggacttctaagg

SEQ ID NO: 122329 - DNA, 22 bp, Artificial Sequence
  Synthetic oligonucleotide; CTT chr11 5348385 5348406 5348390 5348385 -
atctggacttctaaggtaaaag

SEQ ID NO: 122330 - DNA, 22 bp, Artificial Sequence
  Synthetic oligonucleotide; TTA chr11 5348384 5348405 5348389 5348384 -
tctggacttctaaggtaaaaga

SEQ ID NO: 122331 - DNA, 22 bp, Artificial Sequence
  Synthetic oligonucleotide; CTG chr11 5348380 5348401 5348385 5348380 -
gacttctaaggtaaaagacatg

SEQ ID NO: 122332 - DNA, 22 bp, Artificial Sequence
  Synthetic oligonucleotide; CTT chr11 5348375 5348396 5348380 5348375 -
ctaaggtaaaagacatggggtt

SEQ ID NO: 122333 - DNA, 22 bp, Artificial Sequence
  Synthetic oligonucleotide; TTC chr11 5348374 5348395 5348379 5348374 -
taaggtaaaagacatggggttg

SEQ ID NO: 122334 - DNA, 22 bp, Artificial Sequence
  Synthetic oligonucleotide; CTA chr11 5348372 5348393 5348377 5348372 -
aggtaaaagacatggggttggg

SEQ ID NO: 122335 - DNA, 22 bp, Artificial Sequence
  Synthetic oligonucleotide; TTG chr11 5348352 5348373 5348357 5348352 -
ggggcagggggactctcagggt

SEQ ID NO: 122336 - DNA, 22 bp, Artificial Sequence
  Synthetic oligonucleotide; CTC chr11 5348337 5348358 5348342 5348337 -
tcagggttagaatggaagccag

SEQ ID NO: 122337 - DNA, 22 bp, Artificial Sequence
  Synthetic oligonucleotide; CTC chr11 5348335 5348356 5348340 5348335 -
agggttagaatggaagccagag

SEQ ID NO: 122338 - DNA, 22 bp, Artificial Sequence
  Synthetic oligonucleotide; TTA chr11 5348328 5348349 5348333 5348328 -
gaatggaagccagagagattaa

SEQ ID NO: 122339 - DNA, 22 bp, Artificial Sequence
  Synthetic oligonucleotide; TTA chr11 5348307 5348328 5348312 5348307 -
aagaatcagtcaggtggagaga

SEQ ID NO: 122340 - DNA, 22 bp, Artificial Sequence
  Synthetic oligonucleotide; TTA chr11 5348280 5348301 5348285 5348280 -
ctacaaccccataattcatgcc

SEQ ID NO: 122341 - DNA, 22 bp, Artificial Sequence
  Synthetic oligonucleotide; CTA chr11 5348277 5348298 5348282 5348277 -
caaccccataattcatgcctga

SEQ ID NO: 122342 - DNA, 22 bp, Artificial Sequence
  Synthetic oligonucleotide; TTC chr11 5348263 5348284 5348268 5348263 -
atgcctgagtcaacacccatgc

SEQ ID NO: 122343 - DNA, 22 bp, Artificial Sequence
  Synthetic oligonucleotide; CTG chr11 5348256 5348277 5348261 5348256 -
agtcaacacccatgctctggtt

SEQ ID NO: 122344 - DNA, 22 bp, Artificial Sequence
  Synthetic oligonucleotide; CTC chr11 5348239 5348260 5348244 5348239 -
tggtttgttcgtagaattgttt

SEQ ID NO: 122345 - DNA, 22 bp, Artificial Sequence
  Synthetic oligonucleotide; CTG chr11 5348237 5348258 5348242 5348237 -
gtttgttcgtagaattgtttgc

SEQ ID NO: 122346 - DNA, 22 bp, Artificial Sequence
  Synthetic oligonucleotide; TTT chr11 5348233 5348254 5348238 5348233 -
gttcgtagaattgtttgcctta

SEQ ID NO: 122347 - DNA, 22 bp, Artificial Sequence
  Synthetic oligonucleotide; TTG chr11 5348232 5348253 5348237 5348232 -
ttcgtagaattgtttgccttat

SEQ ID NO: 122348 - DNA, 22 bp, Artificial Sequence
  Synthetic oligonucleotide; TTC chr11 5348229 5348250 5348234 5348229 -
gtagaattgtttgccttatgtg

SEQ ID NO: 122349 - DNA, 22 bp, Artificial Sequence
  Synthetic oligonucleotide; TTG chr11 5348220 5348241 5348225 5348220 -
tttgccttatgtgttccagaat

SEQ ID NO: 122350 - DNA, 22 bp, Artificial Sequence
  Synthetic oligonucleotide; TTT chr11 5348217 5348238 5348222 5348217 -
gccttatgtgttccagaatcta

SEQ ID NO: 122351 - DNA, 22 bp, Artificial Sequence
  Synthetic oligonucleotide; TTG chr11 5348216 5348237 5348221 5348216 -
ccttatgtgttccagaatctat

SEQ ID NO: 122352 - DNA, 22 bp, Artificial Sequence
  Synthetic oligonucleotide; CTT chr11 5348212 5348233 5348217 5348212 -
atgtgttccagaatctatcctt

SEQ ID NO: 122353 - DNA, 22 bp, Artificial Sequence
  Synthetic oligonucleotide; TTA chr11 5348211 5348232 5348216 5348211 -
tgtgttccagaatctatccttc

SEQ ID NO: 122354 - DNA, 22 bp, Artificial Sequence
  Synthetic oligonucleotide; TTC chr11 5348204 5348225 5348209 5348204 -
cagaatctatccttcacttttt

SEQ ID NO: 122355 - DNA, 22 bp, Artificial Sequence
  Synthetic oligonucleotide; CTA chr11 5348195 5348216 5348200 5348195 -
tccttcacttttttatatttga

SEQ ID NO: 122356 - DNA, 22 bp, Artificial Sequence
  Synthetic oligonucleotide; CTT chr11 5348190 5348211 5348195 5348190 -
cacttttttatatttgaagagg

SEQ ID NO: 122357 - DNA, 22 bp, Artificial Sequence
  Synthetic oligonucleotide; TTC chr11 5348189 5348210 5348194 5348189 -
acttttttatatttgaagaggt

SEQ ID NO: 122358 - DNA, 22 bp, Artificial Sequence
  Synthetic oligonucleotide; CTT chr11 5348185 5348206 5348190 5348185 -
ttttatatttgaagaggtaact

SEQ ID NO: 122359 - DNA, 22 bp, Artificial Sequence
  Synthetic oligonucleotide; TTT chr11 5348184 5348205 5348189 5348184 -
tttatatttgaagaggtaactc

SEQ ID NO: 122360 - DNA, 22 bp, Artificial Sequence
  Synthetic oligonucleotide; TTT chr11 5348183 5348204 5348188 5348183 -
ttatatttgaagaggtaactct

SEQ ID NO: 122361 - DNA, 22 bp, Artificial Sequence
  Synthetic oligonucleotide; TTT chr11 5348182 5348203 5348187 5348182 -
tatatttgaagaggtaactctc

SEQ ID NO: 122362 - DNA, 22 bp, Artificial Sequence
  Synthetic oligonucleotide; TTT chr11 5348181 5348202 5348186 5348181 -
atatttgaagaggtaactctca

SEQ ID NO: 122363 - DNA, 22 bp, Artificial Sequence
  Synthetic oligonucleotide; TTA chr11 5348180 5348201 5348185 5348180 -
tatttgaagaggtaactctcaa

SEQ ID NO: 122364 - DNA, 22 bp, Artificial Sequence
  Synthetic oligonucleotide; TTT chr11 5348175 5348196 5348180 5348175 -
gaagaggtaactctcaaagaaa

SEQ ID NO: 122365 - DNA, 22 bp, Artificial Sequence
  Synthetic oligonucleotide; TTG chr11 5348174 5348195 5348179 5348174 -
aagaggtaactctcaaagaaac

SEQ ID NO: 122366 - DNA, 22 bp, Artificial Sequence
  Synthetic oligonucleotide; CTC chr11 5348162 5348183 5348167 5348162 -
tcaaagaaaccaagttttagag

SEQ ID NO: 122367 - DNA, 22 bp, Artificial Sequence
  Synthetic oligonucleotide; CTC chr11 5348160 5348181 5348165 5348160 -
aaagaaaccaagttttagagat

SEQ ID NO: 122368 - DNA, 22 bp, Artificial Sequence
  Synthetic oligonucleotide; TTT chr11 5348145 5348166 5348150 5348145 -
tagagatgtcagggagtcttta

SEQ ID NO: 122369 - DNA, 22 bp, Artificial Sequence
  Synthetic oligonucleotide; TTT chr11 5348144 5348165 5348149 5348144 -
agagatgtcagggagtctttag

SEQ ID NO: 122370 - DNA, 22 bp, Artificial Sequence
  Synthetic oligonucleotide; TTA chr11 5348143 5348164 5348148 5348143 -
gagatgtcagggagtctttagg

SEQ ID NO: 122371 - DNA, 22 bp, Artificial Sequence
  Synthetic oligonucleotide; CTT chr11 5348125 5348146 5348130 5348125 -
taggacccatgcctactacata

SEQ ID NO: 122372 - DNA, 22 bp, Artificial Sequence
  Synthetic oligonucleotide; TTT chr11 5348124 5348145 5348129 5348124 -
aggacccatgcctactacatat

SEQ ID NO: 122373 - DNA, 22 bp, Artificial Sequence
  Synthetic oligonucleotide; TTA chr11 5348123 5348144 5348128 5348123 -
ggacccatgcctactacatata

SEQ ID NO: 122374 - DNA, 22 bp, Artificial Sequence
  Synthetic oligonucleotide; CTA chr11 5348110 5348131 5348115 5348110 -
ctacatatatctactcttagca

SEQ ID NO: 122375 - DNA, 22 bp, Artificial Sequence
  Synthetic oligonucleotide; CTA chr11 5348107 5348128 5348112 5348107 -
catatatctactcttagcagac

SEQ ID NO: 122376 - DNA, 22 bp, Artificial Sequence
  Synthetic oligonucleotide; CTA chr11 5348097 5348118 5348102 5348097 -
ctcttagcagacaacactatta

SEQ ID NO: 122377 - DNA, 22 bp, Artificial Sequence
  Synthetic oligonucleotide; CTC chr11 5348094 5348115 5348099 5348094 -
ttagcagacaacactattactt

SEQ ID NO: 122378 - DNA, 22 bp, Artificial Sequence
  Synthetic oligonucleotide; CTT chr11 5348092 5348113 5348097 5348092 -
agcagacaacactattactttt

SEQ ID NO: 122379 - DNA, 22 bp, Artificial Sequence
  Synthetic oligonucleotide; TTA chr11 5348091 5348112 5348096 5348091 -
gcagacaacactattacttttc

SEQ ID NO: 122380 - DNA, 22 bp, Artificial Sequence
  Synthetic oligonucleotide; CTA chr11 5348078 5348099 5348083 5348078 -
ttacttttctcttgctaagaaa

SEQ ID NO: 122381 - DNA, 22 bp, Artificial Sequence
  Synthetic oligonucleotide; TTA chr11 5348075 5348096 5348080 5348075 -
cttttctcttgctaagaaatca

SEQ ID NO: 122382 - DNA, 22 bp, Artificial Sequence
  Synthetic oligonucleotide; CTT chr11 5348072 5348093 5348077 5348072 -
ttctcttgctaagaaatcagct

SEQ ID NO: 122383 - DNA, 22 bp, Artificial Sequence
  Synthetic oligonucleotide; TTT chr11 5348071 5348092 5348076 5348071 -
tctcttgctaagaaatcagctt

SEQ ID NO: 122384 - DNA, 22 bp, Artificial Sequence
  Synthetic oligonucleotide; TTT chr11 5348070 5348091 5348075 5348070 -
ctcttgctaagaaatcagcttc

SEQ ID NO: 122385 - DNA, 22 bp, Artificial Sequence
  Synthetic oligonucleotide; TTC chr11 5348069 5348090 5348074 5348069 -
tcttgctaagaaatcagcttcg

SEQ ID NO: 122386 - DNA, 22 bp, Artificial Sequence
  Synthetic oligonucleotide; CTC chr11 5348067 5348088 5348072 5348067 -
ttgctaagaaatcagcttcgat

SEQ ID NO: 122387 - DNA, 22 bp, Artificial Sequence
  Synthetic oligonucleotide; CTT chr11 5348065 5348086 5348070 5348065 -
gctaagaaatcagcttcgatct

SEQ ID NO: 122388 - DNA, 22 bp, Artificial Sequence
  Synthetic oligonucleotide; TTG chr11 5348064 5348085 5348069 5348064 -
ctaagaaatcagcttcgatctc

SEQ ID NO: 122389 - DNA, 22 bp, Artificial Sequence
  Synthetic oligonucleotide; CTA chr11 5348061 5348082 5348066 5348061 -
agaaatcagcttcgatctctct

SEQ ID NO: 122390 - DNA, 22 bp, Artificial Sequence
  Synthetic oligonucleotide; CTT chr11 5348049 5348070 5348054 5348049 -
cgatctctctgttttttttttg

SEQ ID NO: 122391 - DNA, 22 bp, Artificial Sequence
  Synthetic oligonucleotide; TTC chr11 5348048 5348069 5348053 5348048 -
gatctctctgttttttttttgc

SEQ ID NO: 122392 - DNA, 22 bp, Artificial Sequence
  Synthetic oligonucleotide; CTC chr11 5348042 5348063 5348047 5348042 -
tctgttttttttttgccttggt

SEQ ID NO: 122393 - DNA, 22 bp, Artificial Sequence
  Synthetic oligonucleotide; CTC chr11 5348040 5348061 5348045 5348040 -
tgttttttttttgccttggttc

SEQ ID NO: 122394 - DNA, 22 bp, Artificial Sequence
  Synthetic oligonucleotide; CTG chr11 5348038 5348059 5348043 5348038 -
ttttttttttgccttggttcct

SEQ ID NO: 122395 - DNA, 22 bp, Artificial Sequence
  Synthetic oligonucleotide; TTT chr11 5348035 5348056 5348040 5348035 -
tttttttgccttggttcctgca

SEQ ID NO: 122396 - DNA, 22 bp, Artificial Sequence
  Synthetic oligonucleotide; TTT chr11 5348034 5348055 5348039 5348034 -
ttttttgccttggttcctgcaa

SEQ ID NO: 122397 - DNA, 22 bp, Artificial Sequence
  Synthetic oligonucleotide; TTT chr11 5348033 5348054 5348038 5348033 -
tttttgccttggttcctgcaat

SEQ ID NO: 122398 - DNA, 22 bp, Artificial Sequence
  Synthetic oligonucleotide; TTT chr11 5348032 5348053 5348037 5348032 -
ttttgccttggttcctgcaatg

SEQ ID NO: 122399 - DNA, 22 bp, Artificial Sequence
  Synthetic oligonucleotide; TTT chr11 5348031 5348052 5348036 5348031 -
tttgccttggttcctgcaatga

SEQ ID NO: 122400 - DNA, 22 bp, Artificial Sequence
  Synthetic oligonucleotide; TTT chr11 5348030 5348051 5348035 5348030 -
ttgccttggttcctgcaatgag

SEQ ID NO: 122401 - DNA, 22 bp, Artificial Sequence
  Synthetic oligonucleotide; TTT chr11 5348029 5348050 5348034 5348029 -
tgccttggttcctgcaatgaga

SEQ ID NO: 122402 - DNA, 22 bp, Artificial Sequence
  Synthetic oligonucleotide; TTT chr11 5348028 5348049 5348033 5348028 -
gccttggttcctgcaatgagat

SEQ ID NO: 122403 - DNA, 22 bp, Artificial Sequence
  Synthetic oligonucleotide; TTG chr11 5348027 5348048 5348032 5348027 -
ccttggttcctgcaatgagatc

SEQ ID NO: 122404 - DNA, 22 bp, Artificial Sequence
  Synthetic oligonucleotide; CTT chr11 5348023 5348044 5348028 5348023 -
ggttcctgcaatgagatcttac

SEQ ID NO: 122405 - DNA, 22 bp, Artificial Sequence
  Synthetic oligonucleotide; TTG chr11 5348022 5348043 5348027 5348022 -
gttcctgcaatgagatcttaca

SEQ ID NO: 122406 - DNA, 22 bp, Artificial Sequence
  Synthetic oligonucleotide; TTC chr11 5348018 5348039 5348023 5348018 -
ctgcaatgagatcttacagagg

SEQ ID NO: 122407 - DNA, 22 bp, Artificial Sequence
  Synthetic oligonucleotide; CTG chr11 5348015 5348036 5348020 5348015 -
caatgagatcttacagaggaga

SEQ ID NO: 122408 - DNA, 22 bp, Artificial Sequence
  Synthetic oligonucleotide; CTT chr11 5348003 5348024 5348008 5348003 -
acagaggagattcattaaatac

SEQ ID NO: 122409 - DNA, 22 bp, Artificial Sequence
  Synthetic oligonucleotide; TTA chr11 5348002 5348023 5348007 5348002 -
cagaggagattcattaaatacc

SEQ ID NO: 122410 - DNA, 22 bp, Artificial Sequence
  Synthetic oligonucleotide; TTC chr11 5347990 5348011 5347995 5347990 -
attaaataccctcactgacctg

SEQ ID NO: 122411 - DNA, 22 bp, Artificial Sequence
  Synthetic oligonucleotide; TTA chr11 5347986 5348007 5347991 5347986 -
aataccctcactgacctgaaac

SEQ ID NO: 122412 - DNA, 22 bp, Artificial Sequence
  Synthetic oligonucleotide; CTC chr11 5347977 5347998 5347982 5347977 -
actgacctgaaactttgttccc

SEQ ID NO: 122413 - DNA, 22 bp, Artificial Sequence
  Synthetic oligonucleotide; CTG chr11 5347973 5347994 5347978 5347973 -
acctgaaactttgttcccttcc

SEQ ID NO: 122414 - DNA, 22 bp, Artificial Sequence
  Synthetic oligonucleotide; CTG chr11 5347968 5347989 5347973 5347968 -
aaactttgttcccttccattct

SEQ ID NO: 122415 - DNA, 22 bp, Artificial Sequence
  Synthetic oligonucleotide; CTT chr11 5347962 5347983 5347967 5347962 -
tgttcccttccattcttcagtt

SEQ ID NO: 122416 - DNA, 22 bp, Artificial Sequence
  Synthetic oligonucleotide; TTT chr11 5347961 5347982 5347966 5347961 -
gttcccttccattcttcagttc

SEQ ID NO: 122417 - DNA, 22 bp, Artificial Sequence
  Synthetic oligonucleotide; TTG chr11 5347960 5347981 5347965 5347960 -
ttcccttccattcttcagttcc

SEQ ID NO: 122418 - DNA, 22 bp, Artificial Sequence
  Synthetic oligonucleotide; TTC chr11 5347957 5347978 5347962 5347957 -
ccttccattcttcagttccata

SEQ ID NO: 122419 - DNA, 22 bp, Artificial Sequence
  Synthetic oligonucleotide; CTT chr11 5347953 5347974 5347958 5347953 -
ccattcttcagttccatagtca

SEQ ID NO: 122420 - DNA, 22 bp, Artificial Sequence
  Synthetic oligonucleotide; TTC chr11 5347952 5347973 5347957 5347952 -
cattcttcagttccatagtcat

SEQ ID NO: 122421 - DNA, 22 bp, Artificial Sequence
  Synthetic oligonucleotide; TTC chr11 5347947 5347968 5347952 5347947 -
ttcagttccatagtcatgtatc

SEQ ID NO: 122422 - DNA, 22 bp, Artificial Sequence
  Synthetic oligonucleotide; CTT chr11 5347945 5347966 5347950 5347945 -
cagttccatagtcatgtatctc

SEQ ID NO: 122423 - DNA, 22 bp, Artificial Sequence
  Synthetic oligonucleotide; TTC chr11 5347944 5347965 5347949 5347944 -
agttccatagtcatgtatctca

SEQ ID NO: 122424 - DNA, 22 bp, Artificial Sequence
  Synthetic oligonucleotide; TTC chr11 5347939 5347960 5347944 5347939 -
catagtcatgtatctcacatct

SEQ ID NO: 122425 - DNA, 22 bp, Artificial Sequence
  Synthetic oligonucleotide; CTC chr11 5347923 5347944 5347928 5347923 -
acatctttagccgtatgaaaga

SEQ ID NO: 122426 - DNA, 22 bp, Artificial Sequence
  Synthetic oligonucleotide; CTT chr11 5347916 5347937 5347921 5347916 -
tagccgtatgaaagatttgggc

SEQ ID NO: 122427 - DNA, 22 bp, Artificial Sequence
  Synthetic oligonucleotide; TTT chr11 5347915 5347936 5347920 5347915 -
agccgtatgaaagatttgggca

SEQ ID NO: 122428 - DNA, 22 bp, Artificial Sequence
  Synthetic oligonucleotide; TTA chr11 5347914 5347935 5347919 5347914 -
gccgtatgaaagatttgggcat

SEQ ID NO: 122429 - DNA, 22 bp, Artificial Sequence
  Synthetic oligonucleotide; TTT chr11 5347898 5347919 5347903 5347898 -
gggcatcatcttttcagaatct

SEQ ID NO: 122430 - DNA, 22 bp, Artificial Sequence
  Synthetic oligonucleotide; TTG chr11 5347897 5347918 5347902 5347897 -
ggcatcatcttttcagaatctg

SEQ ID NO: 122431 - DNA, 22 bp, Artificial Sequence
  Synthetic oligonucleotide; CTT chr11 5347886 5347907 5347891 5347886 -
ttcagaatctgcacatgagcct

SEQ ID NO: 122432 - DNA, 22 bp, Artificial Sequence
  Synthetic oligonucleotide; TTT chr11 5347885 5347906 5347890 5347885 -
tcagaatctgcacatgagcctg

SEQ ID NO: 122433 - DNA, 22 bp, Artificial Sequence
  Synthetic oligonucleotide; TTT chr11 5347884 5347905 5347889 5347884 -
cagaatctgcacatgagcctgg

SEQ ID NO: 122434 - DNA, 22 bp, Artificial Sequence
  Synthetic oligonucleotide; TTC chr11 5347883 5347904 5347888 5347883 -
agaatctgcacatgagcctggc

SEQ ID NO: 122435 - DNA, 22 bp, Artificial Sequence
  Synthetic oligonucleotide; CTG chr11 5347875 5347896 5347880 5347875 -
cacatgagcctggctggtagga

SEQ ID NO: 122436 - DNA, 22 bp, Artificial Sequence
  Synthetic oligonucleotide; CTG chr11 5347863 5347884 5347868 5347863 -
gctggtaggaacatttatttta

SEQ ID NO: 122437 - DNA, 22 bp, Artificial Sequence
  Synthetic oligonucleotide; CTG chr11 5347859 5347880 5347864 5347859 -
gtaggaacatttattttagaag

SEQ ID NO: 122438 - DNA, 22 bp, Artificial Sequence
  Synthetic oligonucleotide; TTT chr11 5347847 5347868 5347852 5347847 -
attttagaagctcctccccaga

SEQ ID NO: 122439 - DNA, 22 bp, Artificial Sequence
  Synthetic oligonucleotide; TTA chr11 5347846 5347867 5347851 5347846 -
ttttagaagctcctccccagag

SEQ ID NO: 122440 - DNA, 22 bp, Artificial Sequence
  Synthetic oligonucleotide; TTT chr11 5347843 5347864 5347848 5347843 -
tagaagctcctccccagagacc

SEQ ID NO: 122441 - DNA, 22 bp, Artificial Sequence
  Synthetic oligonucleotide; TTT chr11 5347842 5347863 5347847 5347842 -
agaagctcctccccagagacca

SEQ ID NO: 122442 - DNA, 22 bp, Artificial Sequence
  Synthetic oligonucleotide; TTA chr11 5347841 5347862 5347846 5347841 -
gaagctcctccccagagaccat

SEQ ID NO: 122443 - DNA, 22 bp, Artificial Sequence
  Synthetic oligonucleotide; CTC chr11 5347834 5347855 5347839 5347834 -
ctccccagagaccattcctgat

SEQ ID NO: 122444 - DNA, 22 bp, Artificial Sequence
  Synthetic oligonucleotide; CTC chr11 5347831 5347852 5347836 5347831 -
cccagagaccattcctgattta

SEQ ID NO: 122445 - DNA, 22 bp, Artificial Sequence
  Synthetic oligonucleotide; TTC chr11 5347817 5347838 5347822 5347817 -
ctgatttagataattattgttc

SEQ ID NO: 122446 - DNA, 22 bp, Artificial Sequence
  Synthetic oligonucleotide; CTG chr11 5347814 5347835 5347819 5347814 -
atttagataattattgttcttc

SEQ ID NO: 122447 - DNA, 22 bp, Artificial Sequence
  Synthetic oligonucleotide; TTT chr11 5347810 5347831 5347815 5347810 -
agataattattgttcttccctc

SEQ ID NO: 122448 - DNA, 22 bp, Artificial Sequence
  Synthetic oligonucleotide; TTA chr11 5347809 5347830 5347814 5347809 -
gataattattgttcttccctcc

SEQ ID NO: 122449 - DNA, 22 bp, Artificial Sequence
  Synthetic oligonucleotide; TTA chr11 5347801 5347822 5347806 5347801 -
ttgttcttccctccctccctct

SEQ ID NO: 122450 - DNA, 22 bp, Artificial Sequence
  Synthetic oligonucleotide; TTG chr11 5347798 5347819 5347803 5347798 -
ttcttccctccctccctcttct

SEQ ID NO: 122451 - DNA, 22 bp, Artificial Sequence
  Synthetic oligonucleotide; TTC chr11 5347795 5347816 5347800 5347795 -
ttccctccctccctcttctgct

SEQ ID NO: 122452 - DNA, 22 bp, Artificial Sequence
  Synthetic oligonucleotide; CTT chr11 5347793 5347814 5347798 5347793 -
ccctccctccctcttctgctcc

SEQ ID NO: 122453 - DNA, 22 bp, Artificial Sequence
  Synthetic oligonucleotide; TTC chr11 5347792 5347813 5347797 5347792 -
cctccctccctcttctgctccc

SEQ ID NO: 122454 - DNA, 22 bp, Artificial Sequence
  Synthetic oligonucleotide; CTC chr11 5347788 5347809 5347793 5347788 -
cctccctcttctgctccctcct

SEQ ID NO: 122455 - DNA, 22 bp, Artificial Sequence
  Synthetic oligonucleotide; CTC chr11 5347784 5347805 5347789 5347784 -
cctcttctgctccctcctctct

SEQ ID NO: 122456 - DNA, 22 bp, Artificial Sequence
  Synthetic oligonucleotide; CTC chr11 5347780 5347801 5347785 5347780 -
ttctgctccctcctctcttccc

SEQ ID NO: 122457 - DNA, 22 bp, Artificial Sequence
  Synthetic oligonucleotide; CTT chr11 5347778 5347799 5347783 5347778 -
ctgctccctcctctcttccctc

SEQ ID NO: 122458 - DNA, 22 bp, Artificial Sequence
  Synthetic oligonucleotide; TTC chr11 5347777 5347798 5347782 5347777 -
tgctccctcctctcttccctct

SEQ ID NO: 122459 - DNA, 22 bp, Artificial Sequence
  Synthetic oligonucleotide; CTG chr11 5347775 5347796 5347780 5347775 -
ctccctcctctcttccctctct

SEQ ID NO: 122460 - DNA, 22 bp, Artificial Sequence
  Synthetic oligonucleotide; CTC chr11 5347772 5347793 5347777 5347772 -
cctcctctcttccctctctccc

SEQ ID NO: 122461 - DNA, 22 bp, Artificial Sequence
  Synthetic oligonucleotide; CTC chr11 5347768 5347789 5347773 5347768 -
ctctcttccctctctccctacc

SEQ ID NO: 122462 - DNA, 22 bp, Artificial Sequence
  Synthetic oligonucleotide; CTC chr11 5347765 5347786 5347770 5347765 -
tcttccctctctccctacctcc

SEQ ID NO: 122463 - DNA, 22 bp, Artificial Sequence
  Synthetic oligonucleotide; CTC chr11 5347763 5347784 5347768 5347763 -
ttccctctctccctacctcctt

SEQ ID NO: 122464 - DNA, 22 bp, Artificial Sequence
  Synthetic oligonucleotide; CTT chr11 5347761 5347782 5347766 5347761 -
ccctctctccctacctccttcc

SEQ ID NO: 122465 - DNA, 22 bp, Artificial Sequence
  Synthetic oligonucleotide; TTC chr11 5347760 5347781 5347765 5347760 -
cctctctccctacctccttcct

SEQ ID NO: 122466 - DNA, 22 bp, Artificial Sequence
  Synthetic oligonucleotide; CTC chr11 5347756 5347777 5347761 5347756 -
tctccctacctccttccttcca

SEQ ID NO: 122467 - DNA, 22 bp, Artificial Sequence
  Synthetic oligonucleotide; CTC chr11 5347754 5347775 5347759 5347754 -
tccctacctccttccttccatc

SEQ ID NO: 122468 - DNA, 22 bp, Artificial Sequence
  Synthetic oligonucleotide; CTC chr11 5347752 5347773 5347757 5347752 -
cctacctccttccttccatctt

SEQ ID NO: 122469 - DNA, 22 bp, Artificial Sequence
  Synthetic oligonucleotide; CTA chr11 5347748 5347769 5347753 5347748 -
cctccttccttccatctttttc

SEQ ID NO: 122470 - DNA, 22 bp, Artificial Sequence
  Synthetic oligonucleotide; CTC chr11 5347744 5347765 5347749 5347744 -
cttccttccatctttttctcta

SEQ ID NO: 122471 - DNA, 22 bp, Artificial Sequence
  Synthetic oligonucleotide; CTT chr11 5347741 5347762 5347746 5347741 -
ccttccatctttttctctatta

SEQ ID NO: 122472 - DNA, 22 bp, Artificial Sequence
  Synthetic oligonucleotide; TTC chr11 5347740 5347761 5347745 5347740 -
cttccatctttttctctattat

SEQ ID NO: 122473 - DNA, 22 bp, Artificial Sequence
  Synthetic oligonucleotide; CTT chr11 5347737 5347758 5347742 5347737 -
ccatctttttctctattatttg

SEQ ID NO: 122474 - DNA, 22 bp, Artificial Sequence
  Synthetic oligonucleotide; TTC chr11 5347736 5347757 5347741 5347736 -
catctttttctctattatttgt

SEQ ID NO: 122475 - DNA, 22 bp, Artificial Sequence
  Synthetic oligonucleotide; CTT chr11 5347730 5347751 5347735 5347730 -
tttctctattatttgtgccctc

SEQ ID NO: 122476 - DNA, 22 bp, Artificial Sequence
  Synthetic oligonucleotide; TTT chr11 5347729 5347750 5347734 5347729 -
ttctctattatttgtgccctca

SEQ ID NO: 122477 - DNA, 22 bp, Artificial Sequence
  Synthetic oligonucleotide; TTT chr11 5347728 5347749 5347733 5347728 -
tctctattatttgtgccctcag

SEQ ID NO: 122478 - DNA, 22 bp, Artificial Sequence
  Synthetic oligonucleotide; TTT chr11 5347727 5347748 5347732 5347727 -
ctctattatttgtgccctcagc

SEQ ID NO: 122479 - DNA, 22 bp, Artificial Sequence
  Synthetic oligonucleotide; TTC chr11 5347726 5347747 5347731 5347726 -
tctattatttgtgccctcagcc

SEQ ID NO: 122480 - DNA, 22 bp, Artificial Sequence
  Synthetic oligonucleotide; CTC chr11 5347724 5347745 5347729 5347724 -
tattatttgtgccctcagcctt

SEQ ID NO: 122481 - DNA, 22 bp, Artificial Sequence
  Synthetic oligonucleotide; CTA chr11 5347722 5347743 5347727 5347722 -
ttatttgtgccctcagccttgt

SEQ ID NO: 122482 - DNA, 22 bp, Artificial Sequence
  Synthetic oligonucleotide; TTA chr11 5347719 5347740 5347724 5347719 -
tttgtgccctcagccttgtggg

SEQ ID NO: 122483 - DNA, 22 bp, Artificial Sequence
  Synthetic oligonucleotide; TTT chr11 5347716 5347737 5347721 5347716 -
gtgccctcagccttgtgggtat

SEQ ID NO: 122484 - DNA, 22 bp, Artificial Sequence
  Synthetic oligonucleotide; TTG chr11 5347715 5347736 5347720 5347715 -
tgccctcagccttgtgggtatt

SEQ ID NO: 122485 - DNA, 22 bp, Artificial Sequence
  Synthetic oligonucleotide; CTC chr11 5347708 5347729 5347713 5347708 -
agccttgtgggtattgggcttt

SEQ ID NO: 122486 - DNA, 22 bp, Artificial Sequence
  Synthetic oligonucleotide; CTT chr11 5347702 5347723 5347707 5347702 -
gtgggtattgggctttgaacag

SEQ ID NO: 122487 - DNA, 22 bp, Artificial Sequence
  Synthetic oligonucleotide; TTG chr11 5347701 5347722 5347706 5347701 -
tgggtattgggctttgaacagc

SEQ ID NO: 122488 - DNA, 22 bp, Artificial Sequence
  Synthetic oligonucleotide; TTG chr11 5347692 5347713 5347697 5347692 -
ggctttgaacagcacaactcaa

SEQ ID NO: 122489 - DNA, 22 bp, Artificial Sequence
  Synthetic oligonucleotide; CTT chr11 5347687 5347708 5347692 5347687 -
tgaacagcacaactcaagatct

SEQ ID NO: 122490 - DNA, 22 bp, Artificial Sequence
  Synthetic oligonucleotide; TTT chr11 5347686 5347707 5347691 5347686 -
gaacagcacaactcaagatctc

SEQ ID NO: 122491 - DNA, 22 bp, Artificial Sequence
  Synthetic oligonucleotide; TTG chr11 5347685 5347706 5347690 5347685 -
aacagcacaactcaagatctct

SEQ ID NO: 122492 - DNA, 22 bp, Artificial Sequence
  Synthetic oligonucleotide; CTC chr11 5347672 5347693 5347677 5347672 -
aagatctctgtctctgtcctgg

SEQ ID NO: 122493 - DNA, 22 bp, Artificial Sequence
  Synthetic oligonucleotide; CTC chr11 5347664 5347685 5347669 5347664 -
tgtctctgtcctggcttttact

SEQ ID NO: 122494 - DNA, 22 bp, Artificial Sequence
  Synthetic oligonucleotide; CTG chr11 5347662 5347683 5347667 5347662 -
tctctgtcctggcttttactgg

SEQ ID NO: 122495 - DNA, 22 bp, Artificial Sequence
  Synthetic oligonucleotide; CTC chr11 5347658 5347679 5347663 5347658 -
tgtcctggcttttactggaggt

SEQ ID NO: 122496 - DNA, 22 bp, Artificial Sequence
  Synthetic oligonucleotide; CTG chr11 5347656 5347677 5347661 5347656 -
tcctggcttttactggaggttt

SEQ ID NO: 122497 - DNA, 22 bp, Artificial Sequence
  Synthetic oligonucleotide; CTG chr11 5347651 5347672 5347656 5347651 -
gcttttactggaggttttcctc

SEQ ID NO: 122498 - DNA, 22 bp, Artificial Sequence
  Synthetic oligonucleotide; CTT chr11 5347647 5347668 5347652 5347647 -
ttactggaggttttcctctgtt

SEQ ID NO: 122499 - DNA, 22 bp, Artificial Sequence
  Synthetic oligonucleotide; TTT chr11 5347646 5347667 5347651 5347646 -
tactggaggttttcctctgttg

SEQ ID NO: 122500 - DNA, 22 bp, Artificial Sequence
  Synthetic oligonucleotide; TTT chr11 5347645 5347666 5347650 5347645 -
actggaggttttcctctgttgg

SEQ ID NO: 122501 - DNA, 22 bp, Artificial Sequence
  Synthetic oligonucleotide; TTA chr11 5347644 5347665 5347649 5347644 -
ctggaggttttcctctgttgga

SEQ ID NO: 122502 - DNA, 22 bp, Artificial Sequence
  Synthetic oligonucleotide; CTG chr11 5347641 5347662 5347646 5347641 -
gaggttttcctctgttggaggt

SEQ ID NO: 122503 - DNA, 22 bp, Artificial Sequence
  Synthetic oligonucleotide; TTT chr11 5347634 5347655 5347639 5347634 -
tcctctgttggaggttgaatat

SEQ ID NO: 122504 - DNA, 22 bp, Artificial Sequence
  Synthetic oligonucleotide; TTT chr11 5347633 5347654 5347638 5347633 -
cctctgttggaggttgaatatt

SEQ ID NO: 122505 - DNA, 22 bp, Artificial Sequence
  Synthetic oligonucleotide; TTC chr11 5347632 5347653 5347637 5347632 -
ctctgttggaggttgaatattt

SEQ ID NO: 122506 - DNA, 22 bp, Artificial Sequence
  Synthetic oligonucleotide; CTC chr11 5347629 5347650 5347634 5347629 -
tgttggaggttgaatattttgt

SEQ ID NO: 122507 - DNA, 22 bp, Artificial Sequence
  Synthetic oligonucleotide; CTG chr11 5347627 5347648 5347632 5347627 -
ttggaggttgaatattttgtct

SEQ ID NO: 122508 - DNA, 22 bp, Artificial Sequence
  Synthetic oligonucleotide; TTG chr11 5347624 5347645 5347629 5347624 -
gaggttgaatattttgtctaca

SEQ ID NO: 122509 - DNA, 22 bp, Artificial Sequence
  Synthetic oligonucleotide; TTG chr11 5347617 5347638 5347622 5347617 -
aatattttgtctacattgtggc

SEQ ID NO: 122510 - DNA, 22 bp, Artificial Sequence
  Synthetic oligonucleotide; TTT chr11 5347610 5347631 5347615 5347610 -
tgtctacattgtggctttggct

SEQ ID NO: 122511 - DNA, 22 bp, Artificial Sequence
  Synthetic oligonucleotide; TTT chr11 5347609 5347630 5347614 5347609 -
gtctacattgtggctttggctc

SEQ ID NO: 122512 - DNA, 22 bp, Artificial Sequence
  Synthetic oligonucleotide; TTG chr11 5347608 5347629 5347613 5347608 -
tctacattgtggctttggctct

SEQ ID NO: 122513 - DNA, 22 bp, Artificial Sequence
  Synthetic oligonucleotide; CTA chr11 5347604 5347625 5347609 5347604 -
cattgtggctttggctcttgct

SEQ ID NO: 122514 - DNA, 22 bp, Artificial Sequence
  Synthetic oligonucleotide; TTG chr11 5347599 5347620 5347604 5347599 -
tggctttggctcttgctgtgct

SEQ ID NO: 122515 - DNA, 22 bp, Artificial Sequence
  Synthetic oligonucleotide; CTT chr11 5347593 5347614 5347598 5347593 -
tggctcttgctgtgctactttg

SEQ ID NO: 122516 - DNA, 22 bp, Artificial Sequence
  Synthetic oligonucleotide; TTT chr11 5347592 5347613 5347597 5347592 -
ggctcttgctgtgctactttgg

SEQ ID NO: 122517 - DNA, 22 bp, Artificial Sequence
  Synthetic oligonucleotide; TTG chr11 5347591 5347612 5347596 5347591 -
gctcttgctgtgctactttgga

SEQ ID NO: 122518 - DNA, 22 bp, Artificial Sequence
  Synthetic oligonucleotide; CTC chr11 5347587 5347608 5347592 5347587 -
ttgctgtgctactttggaatta

SEQ ID NO: 122519 - DNA, 22 bp, Artificial Sequence
  Synthetic oligonucleotide; CTT chr11 5347585 5347606 5347590 5347585 -
gctgtgctactttggaattatt

SEQ ID NO: 122520 - DNA, 22 bp, Artificial Sequence
  Synthetic oligonucleotide; TTG chr11 5347584 5347605 5347589 5347584 -
ctgtgctactttggaattattt

SEQ ID NO: 122521 - DNA, 22 bp, Artificial Sequence
  Synthetic oligonucleotide; CTG chr11 5347581 5347602 5347586 5347581 -
tgctactttggaattattttat

SEQ ID NO: 122522 - DNA, 22 bp, Artificial Sequence
  Synthetic oligonucleotide; CTA chr11 5347576 5347597 5347581 5347576 -
ctttggaattattttatctcat

SEQ ID NO: 122523 - DNA, 22 bp, Artificial Sequence
  Synthetic oligonucleotide; CTT chr11 5347573 5347594 5347578 5347573 -
tggaattattttatctcattgc

SEQ ID NO: 122524 - DNA, 22 bp, Artificial Sequence
  Synthetic oligonucleotide; TTT chr11 5347572 5347593 5347577 5347572 -
ggaattattttatctcattgca

SEQ ID NO: 122525 - DNA, 22 bp, Artificial Sequence
  Synthetic oligonucleotide; TTG chr11 5347571 5347592 5347576 5347571 -
gaattattttatctcattgcat

SEQ ID NO: 122526 - DNA, 22 bp, Artificial Sequence
  Synthetic oligonucleotide; TTA chr11 5347565 5347586 5347570 5347565 -
ttttatctcattgcatttcata

SEQ ID NO: 122527 - DNA, 22 bp, Artificial Sequence
  Synthetic oligonucleotide; TTT chr11 5347562 5347583 5347567 5347562 -
tatctcattgcatttcatagtc

SEQ ID NO: 122528 - DNA, 22 bp, Artificial Sequence
  Synthetic oligonucleotide; TTT chr11 5347561 5347582 5347566 5347561 -
atctcattgcatttcatagtcc

SEQ ID NO: 122529 - DNA, 22 bp, Artificial Sequence
  Synthetic oligonucleotide; TTA chr11 5347560 5347581 5347565 5347560 -
tctcattgcatttcatagtcct

SEQ ID NO: 122530 - DNA, 22 bp, Artificial Sequence
  Synthetic oligonucleotide; CTC chr11 5347556 5347577 5347561 5347556 -
attgcatttcatagtccttact

SEQ ID NO: 122531 - DNA, 22 bp, Artificial Sequence
  Synthetic oligonucleotide; TTG chr11 5347552 5347573 5347557 5347552 -
catttcatagtccttactgtaa

SEQ ID NO: 122532 - DNA, 22 bp, Artificial Sequence
  Synthetic oligonucleotide; TTT chr11 5347547 5347568 5347552 5347547 -
catagtccttactgtaaaacgc

SEQ ID NO: 122533 - DNA, 22 bp, Artificial Sequence
  Synthetic oligonucleotide; TTC chr11 5347546 5347567 5347551 5347546 -
atagtccttactgtaaaacgca

SEQ ID NO: 122534 - DNA, 22 bp, Artificial Sequence
  Synthetic oligonucleotide; CTT chr11 5347537 5347558 5347542 5347537 -
actgtaaaacgcatataataat

SEQ ID NO: 122535 - DNA, 22 bp, Artificial Sequence
  Synthetic oligonucleotide; TTA chr11 5347536 5347557 5347541 5347536 -
ctgtaaaacgcatataataatt

SEQ ID NO: 122536 - DNA, 22 bp, Artificial Sequence
  Synthetic oligonucleotide; CTG chr11 5347533 5347554 5347538 5347533 -
taaaacgcatataataattgcc

SEQ ID NO: 122537 - DNA, 22 bp, Artificial Sequence
  Synthetic oligonucleotide; TTG chr11 5347513 5347534 5347518 5347513 -
ccatcacaaagtgatgtggtgt

SEQ ID NO: 122538 - DNA, 22 bp, Artificial Sequence
  Synthetic oligonucleotide; CTT chr11 5347487 5347508 5347492 5347487 -
ggctgaagcaccatgtgatgag

SEQ ID NO: 122539 - DNA, 22 bp, Artificial Sequence
  Synthetic oligonucleotide; TTG chr11 5347486 5347507 5347491 5347486 -
gctgaagcaccatgtgatgagt

SEQ ID NO: 122540 - DNA, 22 bp, Artificial Sequence
  Synthetic oligonucleotide; CTG chr11 5347482 5347503 5347487 5347482 -
aagcaccatgtgatgagtatgc

SEQ ID NO: 122541 - DNA, 22 bp, Artificial Sequence
  Synthetic oligonucleotide; CTG chr11 5347457 5347478 5347462 5347457 -
ctgcatcccctggaaaagagaa

SEQ ID NO: 122542 - DNA, 22 bp, Artificial Sequence
  Synthetic oligonucleotide; CTG chr11 5347454 5347475 5347459 5347454 -
catcccctggaaaagagaaaac

SEQ ID NO: 122543 - DNA, 22 bp, Artificial Sequence
  Synthetic oligonucleotide; CTG chr11 5347445 5347466 5347450 5347445 -
gaaaagagaaaacttctggtag

SEQ ID NO: 122544 - DNA, 22 bp, Artificial Sequence
  Synthetic oligonucleotide; CTT chr11 5347430 5347451 5347435 5347430 -
ctggtaggctaaactcaagaag

SEQ ID NO: 122545 - DNA, 22 bp, Artificial Sequence
  Synthetic oligonucleotide; TTC chr11 5347429 5347450 5347434 5347429 -
tggtaggctaaactcaagaagg

SEQ ID NO: 122546 - DNA, 22 bp, Artificial Sequence
  Synthetic oligonucleotide; CTG chr11 5347427 5347448 5347432 5347427 -
gtaggctaaactcaagaaggga

SEQ ID NO: 122547 - DNA, 22 bp, Artificial Sequence
  Synthetic oligonucleotide; CTA chr11 5347419 5347440 5347424 5347419 -
aactcaagaagggaatagttag

SEQ ID NO: 122548 - DNA, 22 bp, Artificial Sequence
  Synthetic oligonucleotide; CTC chr11 5347414 5347435 5347419 5347414 -
aagaagggaatagttagtgata

SEQ ID NO: 122549 - DNA, 22 bp, Artificial Sequence
  Synthetic oligonucleotide; TTA chr11 5347398 5347419 5347403 5347398 -
gtgataactgcagaatgtgcgt

SEQ ID NO: 122550 - DNA, 22 bp, Artificial Sequence
  Synthetic oligonucleotide; CTG chr11 5347388 5347409 5347393 5347388 -
cagaatgtgcgttcacgttggg

SEQ ID NO: 122551 - DNA, 22 bp, Artificial Sequence
  Synthetic oligonucleotide; TTC chr11 5347374 5347395 5347379 5347374 -
acgttgggtactagagaaggct

SEQ ID NO: 122552 - DNA, 22 bp, Artificial Sequence
  Synthetic oligonucleotide; TTG chr11 5347368 5347389 5347373 5347368 -
ggtactagagaaggctgcctga

SEQ ID NO: 122553 - DNA, 22 bp, Artificial Sequence
  Synthetic oligonucleotide; CTA chr11 5347361 5347382 5347366 5347361 -
gagaaggctgcctgaattttat

SEQ ID NO: 122554 - DNA, 22 bp, Artificial Sequence
  Synthetic oligonucleotide; CTG chr11 5347351 5347372 5347356 5347351 -
cctgaattttattatattgact

SEQ ID NO: 122555 - DNA, 22 bp, Artificial Sequence
  Synthetic oligonucleotide; CTG chr11 5347347 5347368 5347352 5347347 -
aattttattatattgactctag

SEQ ID NO: 122556 - DNA, 22 bp, Artificial Sequence
  Synthetic oligonucleotide; TTT chr11 5347342 5347363 5347347 5347342 -
tattatattgactctagtctat

SEQ ID NO: 122557 - DNA, 22 bp, Artificial Sequence
  Synthetic oligonucleotide; TTT chr11 5347341 5347362 5347346 5347341 -
attatattgactctagtctatc

SEQ ID NO: 122558 - DNA, 22 bp, Artificial Sequence
  Synthetic oligonucleotide; TTA chr11 5347340 5347361 5347345 5347340 -
ttatattgactctagtctatct

SEQ ID NO: 122559 - DNA, 22 bp, Artificial Sequence
  Synthetic oligonucleotide; TTA chr11 5347337 5347358 5347342 5347337 -
tattgactctagtctatctagc

SEQ ID NO: 122560 - DNA, 22 bp, Artificial Sequence
  Synthetic oligonucleotide; TTG chr11 5347332 5347353 5347337 5347332 -
actctagtctatctagctctct

SEQ ID NO: 122561 - DNA, 22 bp, Artificial Sequence
  Synthetic oligonucleotide; CTC chr11 5347328 5347349 5347333 5347328 -
tagtctatctagctctctgctt

SEQ ID NO: 122562 - DNA, 22 bp, Artificial Sequence
  Synthetic oligonucleotide; CTA chr11 5347326 5347347 5347331 5347326 -
gtctatctagctctctgctttc

SEQ ID NO: 122563 - DNA, 22 bp, Artificial Sequence
  Synthetic oligonucleotide; CTA chr11 5347321 5347342 5347326 5347321 -
tctagctctctgctttcaagct

SEQ ID NO: 122564 - DNA, 22 bp, Artificial Sequence
  Synthetic oligonucleotide; CTA chr11 5347317 5347338 5347322 5347317 -
gctctctgctttcaagctttct

SEQ ID NO: 122565 - DNA, 22 bp, Artificial Sequence
  Synthetic oligonucleotide; CTC chr11 5347313 5347334 5347318 5347313 -
tctgctttcaagctttctctga

SEQ ID NO: 122566 - DNA, 22 bp, Artificial Sequence
  Synthetic oligonucleotide; CTC chr11 5347311 5347332 5347316 5347311 -
tgctttcaagctttctctgatc

SEQ ID NO: 122567 - DNA, 22 bp, Artificial Sequence
  Synthetic oligonucleotide; CTG chr11 5347309 5347330 5347314 5347309 -
ctttcaagctttctctgatcta

SEQ ID NO: 122568 - DNA, 22 bp, Artificial Sequence
  Synthetic oligonucleotide; CTT chr11 5347306 5347327 5347311 5347306 -
tcaagctttctctgatctaaac

SEQ ID NO: 122569 - DNA, 22 bp, Artificial Sequence
  Synthetic oligonucleotide; TTT chr11 5347305 5347326 5347310 5347305 -
caagctttctctgatctaaacc

SEQ ID NO: 122570 - DNA, 22 bp, Artificial Sequence
  Synthetic oligonucleotide; TTC chr11 5347304 5347325 5347309 5347304 -
aagctttctctgatctaaacca

SEQ ID NO: 122571 - DNA, 22 bp, Artificial Sequence
  Synthetic oligonucleotide; CTT chr11 5347298 5347319 5347303 5347298 -
tctctgatctaaaccaagcagg

SEQ ID NO: 122572 - DNA, 22 bp, Artificial Sequence
  Synthetic oligonucleotide; TTT chr11 5347297 5347318 5347302 5347297 -
ctctgatctaaaccaagcagga

SEQ ID NO: 122573 - DNA, 22 bp, Artificial Sequence
  Synthetic oligonucleotide; TTC chr11 5347296 5347317 5347301 5347296 -
tctgatctaaaccaagcaggaa

SEQ ID NO: 122574 - DNA, 22 bp, Artificial Sequence
  Synthetic oligonucleotide; CTC chr11 5347294 5347315 5347299 5347294 -
tgatctaaaccaagcaggaaat

SEQ ID NO: 122575 - DNA, 22 bp, Artificial Sequence
  Synthetic oligonucleotide; CTG chr11 5347292 5347313 5347297 5347292 -
atctaaaccaagcaggaaatat

SEQ ID NO: 122576 - DNA, 22 bp, Artificial Sequence
  Synthetic oligonucleotide; CTA chr11 5347287 5347308 5347292 5347287 -
aaccaagcaggaaatatagtag

SEQ ID NO: 122577 - DNA, 22 bp, Artificial Sequence
  Synthetic oligonucleotide; TTC chr11 5347259 5347280 5347264 5347259 -
aggttacataggccaagaagat

SEQ ID NO: 122578 - DNA, 22 bp, Artificial Sequence
  Synthetic oligonucleotide; TTA chr11 5347253 5347274 5347258 5347253 -
cataggccaagaagatatatag

SEQ ID NO: 122579 - DNA, 22 bp, Artificial Sequence
  Synthetic oligonucleotide; CTT chr11 5347227 5347248 5347232 5347227 -
tctcttgagataaactgggaaa

SEQ ID NO: 122580 - DNA, 22 bp, Artificial Sequence
  Synthetic oligonucleotide; TTT chr11 5347226 5347247 5347231 5347226 -
ctcttgagataaactgggaaag

SEQ ID NO: 122581 - DNA, 22 bp, Artificial Sequence
  Synthetic oligonucleotide; TTC chr11 5347225 5347246 5347230 5347225 -
tcttgagataaactgggaaaga

SEQ ID NO: 122582 - DNA, 22 bp, Artificial Sequence
  Synthetic oligonucleotide; CTC chr11 5347223 5347244 5347228 5347223 -
ttgagataaactgggaaagatt

SEQ ID NO: 122583 - DNA, 22 bp, Artificial Sequence
  Synthetic oligonucleotide; CTT chr11 5347221 5347242 5347226 5347221 -
gagataaactgggaaagatttg

SEQ ID NO: 122584 - DNA, 22 bp, Artificial Sequence
  Synthetic oligonucleotide; TTG chr11 5347220 5347241 5347225 5347220 -
agataaactgggaaagatttga

SEQ ID NO: 122585 - DNA, 22 bp, Artificial Sequence
  Synthetic oligonucleotide; CTG chr11 5347210 5347231 5347215 5347210 -
ggaaagatttgactgttgaagt

SEQ ID NO: 122586 - DNA, 22 bp, Artificial Sequence
  Synthetic oligonucleotide; TTT chr11 5347200 5347221 5347205 5347200 -
gactgttgaagtaaatgtaggg

SEQ ID NO: 122587 - DNA, 22 bp, Artificial Sequence
  Synthetic oligonucleotide; TTG chr11 5347199 5347220 5347204 5347199 -
actgttgaagtaaatgtaggga

SEQ ID NO: 122588 - DNA, 22 bp, Artificial Sequence
  Synthetic oligonucleotide; CTG chr11 5347195 5347216 5347200 5347195 -
ttgaagtaaatgtagggaataa

SEQ ID NO: 122589 - DNA, 22 bp, Artificial Sequence
  Synthetic oligonucleotide; TTG chr11 5347192 5347213 5347197 5347192 -
aagtaaatgtagggaataaatt

SEQ ID NO: 122590 - DNA, 22 bp, Artificial Sequence
  Synthetic oligonucleotide; TTA chr11 5347169 5347190 5347174 5347169 -
cctcccagaggtgataccagag

SEQ ID NO: 122591 - DNA, 22 bp, Artificial Sequence
  Synthetic oligonucleotide; CTC chr11 5347165 5347186 5347170 5347165 -
ccagaggtgataccagagtctg

SEQ ID NO: 122592 - DNA, 22 bp, Artificial Sequence
  Synthetic oligonucleotide; CTG chr11 5347143 5347164 5347148 5347143 -
ctggggctatgaagacaggctg

SEQ ID NO: 122593 - DNA, 22 bp, Artificial Sequence
  Synthetic oligonucleotide; CTG chr11 5347140 5347161 5347145 5347140 -
gggctatgaagacaggctgtct

SEQ ID NO: 122594 - DNA, 22 bp, Artificial Sequence
  Synthetic oligonucleotide; CTA chr11 5347134 5347155 5347139 5347134 -
tgaagacaggctgtctgattcc

SEQ ID NO: 122595 - DNA, 22 bp, Artificial Sequence
  Synthetic oligonucleotide; CTG chr11 5347121 5347142 5347126 5347121 -
tctgattccccacacataaagg

SEQ ID NO: 122596 - DNA, 22 bp, Artificial Sequence
  Synthetic oligonucleotide; CTG chr11 5347117 5347138 5347122 5347117 -
attccccacacataaaggtcct

SEQ ID NO: 122597 - DNA, 22 bp, Artificial Sequence
  Synthetic oligonucleotide; TTC chr11 5347113 5347134 5347118 5347113 -
cccacacataaaggtcctacca

SEQ ID NO: 122598 - DNA, 22 bp, Artificial Sequence
  Synthetic oligonucleotide; CTA chr11 5347094 5347115 5347099 5347094 -
ccagtggcttgattcagccagt

SEQ ID NO: 122599 - DNA, 22 bp, Artificial Sequence
  Synthetic oligonucleotide; CTT chr11 5347084 5347105 5347089 5347084 -
gattcagccagtaacttatttg

SEQ ID NO: 122600 - DNA, 22 bp, Artificial Sequence
  Synthetic oligonucleotide; TTG chr11 5347083 5347104 5347088 5347083 -
attcagccagtaacttatttga

SEQ ID NO: 122601 - DNA, 22 bp, Artificial Sequence
  Synthetic oligonucleotide; TTC chr11 5347079 5347100 5347084 5347079 -
agccagtaacttatttgaaaaa

SEQ ID NO: 122602 - DNA, 22 bp, Artificial Sequence
  Synthetic oligonucleotide; CTT chr11 5347067 5347088 5347072 5347067 -
atttgaaaaaagaaagattatt

SEQ ID NO: 122603 - DNA, 22 bp, Artificial Sequence
  Synthetic oligonucleotide; TTA chr11 5347066 5347087 5347071 5347066 -
tttgaaaaaagaaagattattt

SEQ ID NO: 122604 - DNA, 22 bp, Artificial Sequence
  Synthetic oligonucleotide; TTT chr11 5347063 5347084 5347068 5347063 -
gaaaaaagaaagattatttaaa

SEQ ID NO: 122605 - DNA, 22 bp, Artificial Sequence
  Synthetic oligonucleotide; TTG chr11 5347062 5347083 5347067 5347062 -
aaaaaagaaagattatttaaaa

SEQ ID NO: 122606 - DNA, 22 bp, Artificial Sequence
  Synthetic oligonucleotide; TTA chr11 5347047 5347068 5347052 5347047 -
tttaaaagcttggggggactaa

SEQ ID NO: 122607 - DNA, 22 bp, Artificial Sequence
  Synthetic oligonucleotide; TTT chr11 5347044 5347065 5347049 5347044 -
aaaagcttggggggactaatta

SEQ ID NO: 122608 - DNA, 22 bp, Artificial Sequence
  Synthetic oligonucleotide; TTA chr11 5347043 5347064 5347048 5347043 -
aaagcttggggggactaattaa

SEQ ID NO: 122609 - DNA, 22 bp, Artificial Sequence
  Synthetic oligonucleotide; CTT chr11 5347036 5347057 5347041 5347036 -
ggggggactaattaagtgttcc

SEQ ID NO: 122610 - DNA, 22 bp, Artificial Sequence
  Synthetic oligonucleotide; TTG chr11 5347035 5347056 5347040 5347035 -
gggggactaattaagtgttcca

SEQ ID NO: 122611 - DNA, 22 bp, Artificial Sequence
  Synthetic oligonucleotide; CTA chr11 5347026 5347047 5347031 5347026 -
attaagtgttccagctccctct

SEQ ID NO: 122612 - DNA, 22 bp, Artificial Sequence
  Synthetic oligonucleotide; TTA chr11 5347022 5347043 5347027 5347022 -
agtgttccagctccctctaagg

SEQ ID NO: 122613 - DNA, 22 bp, Artificial Sequence
  Synthetic oligonucleotide; TTC chr11 5347015 5347036 5347020 5347015 -
cagctccctctaaggaggagtt

SEQ ID NO: 122614 - DNA, 22 bp, Artificial Sequence
  Synthetic oligonucleotide; CTC chr11 5347009 5347030 5347014 5347009 -
cctctaaggaggagttaataca

SEQ ID NO: 122615 - DNA, 22 bp, Artificial Sequence
  Synthetic oligonucleotide; CTC chr11 5347005 5347026 5347010 5347005 -
taaggaggagttaatacagagt

SEQ ID NO: 122616 - DNA, 22 bp, Artificial Sequence
  Synthetic oligonucleotide; CTA chr11 5347003 5347024 5347008 5347003 -
aggaggagttaatacagagtaa

SEQ ID NO: 122617 - DNA, 22 bp, Artificial Sequence
  Synthetic oligonucleotide; TTA chr11 5346992 5347013 5346997 5346992 -
atacagagtaaatatttcttaa

SEQ ID NO: 122618 - DNA, 22 bp, Artificial Sequence
  Synthetic oligonucleotide; TTT chr11 5346975 5346996 5346980 5346975 -
cttaagatccaagttggctata

SEQ ID NO: 122619 - DNA, 22 bp, Artificial Sequence
  Synthetic oligonucleotide; TTC chr11 5346974 5346995 5346979 5346974 -
ttaagatccaagttggctataa

SEQ ID NO: 122620 - DNA, 22 bp, Artificial Sequence
  Synthetic oligonucleotide; CTT chr11 5346972 5346993 5346977 5346972 -
aagatccaagttggctataaaa

SEQ ID NO: 122621 - DNA, 22 bp, Artificial Sequence
  Synthetic oligonucleotide; TTA chr11 5346971 5346992 5346976 5346971 -
agatccaagttggctataaaag

SEQ ID NO: 122622 - DNA, 22 bp, Artificial Sequence
  Synthetic oligonucleotide; TTG chr11 5346959 5346980 5346964 5346959 -
gctataaaagggagacatctgg

SEQ ID NO: 122623 - DNA, 22 bp, Artificial Sequence
  Synthetic oligonucleotide; CTA chr11 5346955 5346976 5346960 5346955 -
taaaagggagacatctgggaag

SEQ ID NO: 122624 - DNA, 22 bp, Artificial Sequence
  Synthetic oligonucleotide; CTG chr11 5346938 5346959 5346943 5346938 -
ggaaggtgctatctttattaat

SEQ ID NO: 122625 - DNA, 22 bp, Artificial Sequence
  Synthetic oligonucleotide; CTA chr11 5346927 5346948 5346932 5346927 -
tctttattaataaccacagtga

SEQ ID NO: 122626 - DNA, 22 bp, Artificial Sequence
  Synthetic oligonucleotide; CTT chr11 5346923 5346944 5346928 5346923 -
tattaataaccacagtgactgc

SEQ ID NO: 122627 - DNA, 22 bp, Artificial Sequence
  Synthetic oligonucleotide; TTT chr11 5346922 5346943 5346927 5346922 -
attaataaccacagtgactgct

SEQ ID NO: 122628 - DNA, 22 bp, Artificial Sequence
  Synthetic oligonucleotide; TTA chr11 5346921 5346942 5346926 5346921 -
ttaataaccacagtgactgctt

SEQ ID NO: 122629 - DNA, 22 bp, Artificial Sequence
  Synthetic oligonucleotide; TTA chr11 5346918 5346939 5346923 5346918 -
ataaccacagtgactgcttctc

SEQ ID NO: 122630 - DNA, 22 bp, Artificial Sequence
  Synthetic oligonucleotide; CTG chr11 5346902 5346923 5346907 5346902 -
cttctcttcacagatgttgaga

SEQ ID NO: 122631 - DNA, 22 bp, Artificial Sequence
  Synthetic oligonucleotide; CTT chr11 5346899 5346920 5346904 5346899 -
ctcttcacagatgttgagaagg

SEQ ID NO: 122632 - DNA, 22 bp, Artificial Sequence
  Synthetic oligonucleotide; TTC chr11 5346898 5346919 5346903 5346898 -
tcttcacagatgttgagaagga

SEQ ID NO: 122633 - DNA, 22 bp, Artificial Sequence
  Synthetic oligonucleotide; CTC chr11 5346896 5346917 5346901 5346896 -
ttcacagatgttgagaaggaac

SEQ ID NO: 122634 - DNA, 22 bp, Artificial Sequence
  Synthetic oligonucleotide; CTT chr11 5346894 5346915 5346899 5346894 -
cacagatgttgagaaggaacaa

SEQ ID NO: 122635 - DNA, 22 bp, Artificial Sequence
  Synthetic oligonucleotide; TTC chr11 5346893 5346914 5346898 5346893 -
acagatgttgagaaggaacaac

SEQ ID NO: 122636 - DNA, 22 bp, Artificial Sequence
  Synthetic oligonucleotide; TTG chr11 5346883 5346904 5346888 5346883 -
agaaggaacaacatgatctaag

SEQ ID NO: 122637 - DNA, 22 bp, Artificial Sequence
  Synthetic oligonucleotide; CTA chr11 5346863 5346884 5346868 5346863 -
agtctttaggtaagacacaaga

SEQ ID NO: 122638 - DNA, 22 bp, Artificial Sequence
  Synthetic oligonucleotide; CTT chr11 5346857 5346878 5346862 5346857 -
taggtaagacacaagaaccctg

SEQ ID NO: 122639 - DNA, 22 bp, Artificial Sequence
  Synthetic oligonucleotide; TTT chr11 5346856 5346877 5346861 5346856 -
aggtaagacacaagaaccctgc

SEQ ID NO: 122640 - DNA, 22 bp, Artificial Sequence
  Synthetic oligonucleotide; TTA chr11 5346855 5346876 5346860 5346855 -
ggtaagacacaagaaccctgct

SEQ ID NO: 122641 - DNA, 22 bp, Artificial Sequence
  Synthetic oligonucleotide; CTG chr11 5346835 5346856 5346840 5346835 -
ctcttcctcaccatcaaacaag

SEQ ID NO: 122642 - DNA, 22 bp, Artificial Sequence
  Synthetic oligonucleotide; CTC chr11 5346832 5346853 5346837 5346832 -
ttcctcaccatcaaacaagtta

SEQ ID NO: 122643 - DNA, 22 bp, Artificial Sequence
  Synthetic oligonucleotide; CTT chr11 5346830 5346851 5346835 5346830 -
cctcaccatcaaacaagttatg

SEQ ID NO: 122644 - DNA, 22 bp, Artificial Sequence
  Synthetic oligonucleotide; TTC chr11 5346829 5346850 5346834 5346829 -
ctcaccatcaaacaagttatgg

SEQ ID NO: 122645 - DNA, 22 bp, Artificial Sequence
  Synthetic oligonucleotide; CTC chr11 5346826 5346847 5346831 5346826 -
accatcaaacaagttatggtac

SEQ ID NO: 122646 - DNA, 22 bp, Artificial Sequence
  Synthetic oligonucleotide; TTA chr11 5346810 5346831 5346815 5346810 -
tggtacctgggagtatggtgaa

SEQ ID NO: 122647 - DNA, 22 bp, Artificial Sequence
  Synthetic oligonucleotide; CTG chr11 5346801 5346822 5346806 5346801 -
ggagtatggtgaaatactccta

SEQ ID NO: 122648 - DNA, 22 bp, Artificial Sequence
  Synthetic oligonucleotide; CTC chr11 5346782 5346803 5346787 5346782 -
ctagatatataaagagtgtact

SEQ ID NO: 122649 - DNA, 22 bp, Artificial Sequence
  Synthetic oligonucleotide; CTA chr11 5346779 5346800 5346784 5346779 -
gatatataaagagtgtactagg

SEQ ID NO: 122650 - DNA, 22 bp, Artificial Sequence
  Synthetic oligonucleotide; CTA chr11 5346759 5346780 5346764 5346759 -
ggagactcctctataagctctc

SEQ ID NO: 122651 - DNA, 22 bp, Artificial Sequence
  Synthetic oligonucleotide; CTC chr11 5346751 5346772 5346756 5346751 -
ctctataagctctccagagaaa

SEQ ID NO: 122652 - DNA, 22 bp, Artificial Sequence
  Synthetic oligonucleotide; CTC chr11 5346748 5346769 5346753 5346748 -
tataagctctccagagaaagat

SEQ ID NO: 122653 - DNA, 22 bp, Artificial Sequence
  Synthetic oligonucleotide; CTA chr11 5346746 5346767 5346751 5346746 -
taagctctccagagaaagatac

SEQ ID NO: 122654 - DNA, 22 bp, Artificial Sequence
  Synthetic oligonucleotide; CTC chr11 5346739 5346760 5346744 5346739 -
tccagagaaagatacggagaag

SEQ ID NO: 122655 - DNA, 22 bp, Artificial Sequence
  Synthetic oligonucleotide; CTC chr11 5346737 5346758 5346742 5346737 -
cagagaaagatacggagaagaa

SEQ ID NO: 122656 - DNA, 22 bp, Artificial Sequence
  Synthetic oligonucleotide; CTC chr11 5346703 5346724 5346708 5346703 -
aatagtccacagctttggatgt

SEQ ID NO: 122657 - DNA, 22 bp, Artificial Sequence
  Synthetic oligonucleotide; CTT chr11 5346688 5346709 5346693 5346688 -
tggatgtgtgcacagatttcag

SEQ ID NO: 122658 - DNA, 22 bp, Artificial Sequence
  Synthetic oligonucleotide; TTT chr11 5346687 5346708 5346692 5346687 -
ggatgtgtgcacagatttcagt

SEQ ID NO: 122659 - DNA, 22 bp, Artificial Sequence
  Synthetic oligonucleotide; TTG chr11 5346686 5346707 5346691 5346686 -
gatgtgtgcacagatttcagtc

SEQ ID NO: 122660 - DNA, 22 bp, Artificial Sequence
  Synthetic oligonucleotide; TTT chr11 5346669 5346690 5346674 5346669 -
cagtctgaagttgatagaactt

SEQ ID NO: 122661 - DNA, 22 bp, Artificial Sequence
  Synthetic oligonucleotide; TTC chr11 5346668 5346689 5346673 5346668 -
agtctgaagttgatagaacttc

SEQ ID NO: 122662 - DNA, 22 bp, Artificial Sequence
  Synthetic oligonucleotide; CTG chr11 5346662 5346683 5346667 5346662 -
aagttgatagaacttcaaaagc

SEQ ID NO: 122663 - DNA, 22 bp, Artificial Sequence
  Synthetic oligonucleotide; TTG chr11 5346656 5346677 5346661 5346656 -
atagaacttcaaaagcaattcc

SEQ ID NO: 122664 - DNA, 22 bp, Artificial Sequence
  Synthetic oligonucleotide; CTT chr11 5346647 5346668 5346652 5346647 -
caaaagcaattccaagtgctac

SEQ ID NO: 122665 - DNA, 22 bp, Artificial Sequence
  Synthetic oligonucleotide; TTC chr11 5346646 5346667 5346651 5346646 -
aaaagcaattccaagtgctacc

SEQ ID NO: 122666 - DNA, 22 bp, Artificial Sequence
  Synthetic oligonucleotide; TTC chr11 5346635 5346656 5346640 5346635 -
caagtgctaccaaccaactacc

SEQ ID NO: 122667 - DNA, 22 bp, Artificial Sequence
  Synthetic oligonucleotide; CTA chr11 5346626 5346647 5346631 5346626 -
ccaaccaactacctaagacctt

SEQ ID NO: 122668 - DNA, 22 bp, Artificial Sequence
  Synthetic oligonucleotide; CTA chr11 5346615 5346636 5346620 5346615 -
cctaagaccttctgtactcagt

SEQ ID NO: 122669 - DNA, 22 bp, Artificial Sequence
  Synthetic oligonucleotide; CTA chr11 5346611 5346632 5346616 5346611 -
agaccttctgtactcagtgatg

SEQ ID NO: 122670 - DNA, 22 bp, Artificial Sequence
  Synthetic oligonucleotide; CTT chr11 5346604 5346625 5346609 5346604 -
ctgtactcagtgatgtgaatat

SEQ ID NO: 122671 - DNA, 22 bp, Artificial Sequence
  Synthetic oligonucleotide; TTC chr11 5346603 5346624 5346608 5346603 -
tgtactcagtgatgtgaatatg

SEQ ID NO: 122672 - DNA, 22 bp, Artificial Sequence
  Synthetic oligonucleotide; CTG chr11 5346601 5346622 5346606 5346601 -
tactcagtgatgtgaatatgat

SEQ ID NO: 122673 - DNA, 22 bp, Artificial Sequence
  Synthetic oligonucleotide; CTC chr11 5346596 5346617 5346601 5346596 -
agtgatgtgaatatgattgacc

SEQ ID NO: 122674 - DNA, 22 bp, Artificial Sequence
  Synthetic oligonucleotide; TTG chr11 5346577 5346598 5346582 5346577 -
accctctcatatgtcttctttc

SEQ ID NO: 122675 - DNA, 22 bp, Artificial Sequence
  Synthetic oligonucleotide; CTC chr11 5346571 5346592 5346576 5346571 -
tcatatgtcttctttcctttct

SEQ ID NO: 122676 - DNA, 22 bp, Artificial Sequence
  Synthetic oligonucleotide; CTC chr11 5346569 5346590 5346574 5346569 -
atatgtcttctttcctttctaa

SEQ ID NO: 122677 - DNA, 22 bp, Artificial Sequence
  Synthetic oligonucleotide; CTT chr11 5346560 5346581 5346565 5346560 -
ctttcctttctaaaagatgaac

SEQ ID NO: 122678 - DNA, 22 bp, Artificial Sequence
  Synthetic oligonucleotide; TTC chr11 5346559 5346580 5346564 5346559 -
tttcctttctaaaagatgaaca

SEQ ID NO: 122679 - DNA, 22 bp, Artificial Sequence
  Synthetic oligonucleotide; CTT chr11 5346557 5346578 5346562 5346557 -
tcctttctaaaagatgaacagg

SEQ ID NO: 122680 - DNA, 22 bp, Artificial Sequence
  Synthetic oligonucleotide; TTT chr11 5346556 5346577 5346561 5346556 -
cctttctaaaagatgaacagga

SEQ ID NO: 122681 - DNA, 22 bp, Artificial Sequence
  Synthetic oligonucleotide; TTC chr11 5346555 5346576 5346560 5346555 -
ctttctaaaagatgaacaggaa

SEQ ID NO: 122682 - DNA, 22 bp, Artificial Sequence
  Synthetic oligonucleotide; CTT chr11 5346552 5346573 5346557 5346552 -
tctaaaagatgaacaggaaggc

SEQ ID NO: 122683 - DNA, 22 bp, Artificial Sequence
  Synthetic oligonucleotide; TTT chr11 5346551 5346572 5346556 5346551 -
ctaaaagatgaacaggaaggca

SEQ ID NO: 122684 - DNA, 22 bp, Artificial Sequence
  Synthetic oligonucleotide; TTC chr11 5346550 5346571 5346555 5346550 -
taaaagatgaacaggaaggcac

SEQ ID NO: 122685 - DNA, 22 bp, Artificial Sequence
  Synthetic oligonucleotide; CTA chr11 5346548 5346569 5346553 5346548 -
aaagatgaacaggaaggcacct

SEQ ID NO: 122686 - DNA, 22 bp, Artificial Sequence
  Synthetic oligonucleotide; CTC chr11 5346525 5346546 5346530 5346525 -
ttattctactacattttacttt

SEQ ID NO: 122687 - DNA, 22 bp, Artificial Sequence
  Synthetic oligonucleotide; CTT chr11 5346523 5346544 5346528 5346523 -
attctactacattttacttttt

SEQ ID NO: 122688 - DNA, 22 bp, Artificial Sequence
  Synthetic oligonucleotide; TTA chr11 5346522 5346543 5346527 5346522 -
ttctactacattttacttttta

SEQ ID NO: 122689 - DNA, 22 bp, Artificial Sequence
  Synthetic oligonucleotide; TTC chr11 5346519 5346540 5346524 5346519 -
tactacattttactttttaaac

SEQ ID NO: 122690 - DNA, 22 bp, Artificial Sequence
  Synthetic oligonucleotide; CTA chr11 5346517 5346538 5346522 5346517 -
ctacattttactttttaaacaa

SEQ ID NO: 122691 - DNA, 22 bp, Artificial Sequence
  Synthetic oligonucleotide; CTA chr11 5346514 5346535 5346519 5346514 -
cattttactttttaaacaaagc

SEQ ID NO: 122692 - DNA, 22 bp, Artificial Sequence
  Synthetic oligonucleotide; TTT chr11 5346509 5346530 5346514 5346509 -
tactttttaaacaaagcagaga

SEQ ID NO: 122693 - DNA, 22 bp, Artificial Sequence
  Synthetic oligonucleotide; TTT chr11 5346508 5346529 5346513 5346508 -
actttttaaacaaagcagagaa

SEQ ID NO: 122694 - DNA, 22 bp, Artificial Sequence
  Synthetic oligonucleotide; TTA chr11 5346507 5346528 5346512 5346507 -
ctttttaaacaaagcagagaaa

SEQ ID NO: 122695 - DNA, 22 bp, Artificial Sequence
  Synthetic oligonucleotide; CTT chr11 5346504 5346525 5346509 5346504 -
tttaaacaaagcagagaaaaat

SEQ ID NO: 122696 - DNA, 22 bp, Artificial Sequence
  Synthetic oligonucleotide; TTT chr11 5346503 5346524 5346508 5346503 -
ttaaacaaagcagagaaaaatt

SEQ ID NO: 122697 - DNA, 22 bp, Artificial Sequence
  Synthetic oligonucleotide; TTT chr11 5346502 5346523 5346507 5346502 -
taaacaaagcagagaaaaatta

SEQ ID NO: 122698 - DNA, 22 bp, Artificial Sequence
  Synthetic oligonucleotide; TTT chr11 5346501 5346522 5346506 5346501 -
aaacaaagcagagaaaaattat

SEQ ID NO: 122699 - DNA, 22 bp, Artificial Sequence
  Synthetic oligonucleotide; TTA chr11 5346500 5346521 5346505 5346500 -
aacaaagcagagaaaaattatg

SEQ ID NO: 122700 - DNA, 22 bp, Artificial Sequence
  Synthetic oligonucleotide; TTA chr11 5346480 5346501 5346485 5346480 -
tggctgtaaatgttagaagttt

SEQ ID NO: 122701 - DNA, 22 bp, Artificial Sequence
  Synthetic oligonucleotide; CTG chr11 5346474 5346495 5346479 5346474 -
taaatgttagaagtttatctga

SEQ ID NO: 122702 - DNA, 22 bp, Artificial Sequence
  Synthetic oligonucleotide; TTA chr11 5346465 5346486 5346470 5346465 -
gaagtttatctgattttctagg

SEQ ID NO: 122703 - DNA, 22 bp, Artificial Sequence
  Synthetic oligonucleotide; TTT chr11 5346458 5346479 5346463 5346458 -
atctgattttctaggtgttcca

SEQ ID NO: 122704 - DNA, 22 bp, Artificial Sequence
  Synthetic oligonucleotide; TTA chr11 5346457 5346478 5346462 5346457 -
tctgattttctaggtgttccat

SEQ ID NO: 122705 - DNA, 22 bp, Artificial Sequence
  Synthetic oligonucleotide; CTG chr11 5346453 5346474 5346458 5346453 -
attttctaggtgttccattata

SEQ ID NO: 122706 - DNA, 22 bp, Artificial Sequence
  Synthetic oligonucleotide; TTT chr11 5346449 5346470 5346454 5346449 -
tctaggtgttccattatagaat

SEQ ID NO: 122707 - DNA, 22 bp, Artificial Sequence
  Synthetic oligonucleotide; TTT chr11 5346448 5346469 5346453 5346448 -
ctaggtgttccattatagaatc

SEQ ID NO: 122708 - DNA, 22 bp, Artificial Sequence
  Synthetic oligonucleotide; TTC chr11 5346447 5346468 5346452 5346447 -
taggtgttccattatagaatct

SEQ ID NO: 122709 - DNA, 22 bp, Artificial Sequence
  Synthetic oligonucleotide; CTA chr11 5346445 5346466 5346450 5346445 -
ggtgttccattatagaatcttc

SEQ ID NO: 122710 - DNA, 22 bp, Artificial Sequence
  Synthetic oligonucleotide; TTC chr11 5346438 5346459 5346443 5346438 -
cattatagaatcttcttgcttc

SEQ ID NO: 122711 - DNA, 22 bp, Artificial Sequence
  Synthetic oligonucleotide; TTA chr11 5346433 5346454 5346438 5346433 -
tagaatcttcttgcttctatcc

SEQ ID NO: 122712 - DNA, 22 bp, Artificial Sequence
  Synthetic oligonucleotide; CTT chr11 5346424 5346445 5346429 5346424 -
cttgcttctatcctcagtcttt

SEQ ID NO: 122713 - DNA, 22 bp, Artificial Sequence
  Synthetic oligonucleotide; TTC chr11 5346423 5346444 5346428 5346423 -
ttgcttctatcctcagtcttta

SEQ ID NO: 122714 - DNA, 22 bp, Artificial Sequence
  Synthetic oligonucleotide; CTT chr11 5346421 5346442 5346426 5346421 -
gcttctatcctcagtctttatg

SEQ ID NO: 122715 - DNA, 22 bp, Artificial Sequence
  Synthetic oligonucleotide; TTG chr11 5346420 5346441 5346425 5346420 -
cttctatcctcagtctttatga

SEQ ID NO: 122716 - DNA, 22 bp, Artificial Sequence
  Synthetic oligonucleotide; CTT chr11 5346417 5346438 5346422 5346417 -
ctatcctcagtctttatgatct

SEQ ID NO: 122717 - DNA, 22 bp, Artificial Sequence
  Synthetic oligonucleotide; TTC chr11 5346416 5346437 5346421 5346416 -
tatcctcagtctttatgatctc

SEQ ID NO: 122718 - DNA, 22 bp, Artificial Sequence
  Synthetic oligonucleotide; CTA chr11 5346414 5346435 5346419 5346414 -
tcctcagtctttatgatctctt

SEQ ID NO: 122719 - DNA, 22 bp, Artificial Sequence
  Synthetic oligonucleotide; CTC chr11 5346409 5346430 5346414 5346409 -
agtctttatgatctctttcctt

SEQ ID NO: 122720 - DNA, 22 bp, Artificial Sequence
  Synthetic oligonucleotide; CTT chr11 5346403 5346424 5346408 5346403 -
tatgatctctttccttccctat

SEQ ID NO: 122721 - DNA, 22 bp, Artificial Sequence
  Synthetic oligonucleotide; TTT chr11 5346402 5346423 5346407 5346402 -
atgatctctttccttccctata

SEQ ID NO: 122722 - DNA, 22 bp, Artificial Sequence
  Synthetic oligonucleotide; TTA chr11 5346401 5346422 5346406 5346401 -
tgatctctttccttccctatat

SEQ ID NO: 122723 - DNA, 22 bp, Artificial Sequence
  Synthetic oligonucleotide; CTC chr11 5346394 5346415 5346399 5346394 -
tttccttccctatatttttttt

SEQ ID NO: 122724 - DNA, 22 bp, Artificial Sequence
  Synthetic oligonucleotide; CTT chr11 5346392 5346413 5346397 5346392 -
tccttccctatattttttttcc

SEQ ID NO: 122725 - DNA, 22 bp, Artificial Sequence
  Synthetic oligonucleotide; TTT chr11 5346391 5346412 5346396 5346391 -
ccttccctatattttttttcct

SEQ ID NO: 122726 - DNA, 22 bp, Artificial Sequence
  Synthetic oligonucleotide; TTC chr11 5346390 5346411 5346395 5346390 -
cttccctatattttttttcctc

SEQ ID NO: 122727 - DNA, 22 bp, Artificial Sequence
  Synthetic oligonucleotide; CTT chr11 5346387 5346408 5346392 5346387 -
ccctatattttttttcctcagc

SEQ ID NO: 122728 - DNA, 22 bp, Artificial Sequence
  Synthetic oligonucleotide; TTC chr11 5346386 5346407 5346391 5346386 -
cctatattttttttcctcagct

SEQ ID NO: 122729 - DNA, 22 bp, Artificial Sequence
  Synthetic oligonucleotide; CTA chr11 5346382 5346403 5346387 5346382 -
tattttttttcctcagctttta

SEQ ID NO: 122730 - DNA, 22 bp, Artificial Sequence
  Synthetic oligonucleotide; TTT chr11 5346377 5346398 5346382 5346377 -
tttttcctcagcttttatctct

SEQ ID NO: 122731 - DNA, 22 bp, Artificial Sequence
  Synthetic oligonucleotide; TTT chr11 5346376 5346397 5346381 5346376 -
ttttcctcagcttttatctctt

SEQ ID NO: 122732 - DNA, 22 bp, Artificial Sequence
  Synthetic oligonucleotide; TTT chr11 5346375 5346396 5346380 5346375 -
tttcctcagcttttatctcttc

SEQ ID NO: 122733 - DNA, 22 bp, Artificial Sequence
  Synthetic oligonucleotide; TTT chr11 5346374 5346395 5346379 5346374 -
ttcctcagcttttatctcttct

SEQ ID NO: 122734 - DNA, 22 bp, Artificial Sequence
  Synthetic oligonucleotide; TTT chr11 5346373 5346394 5346378 5346373 -
tcctcagcttttatctcttctc

SEQ ID NO: 122735 - DNA, 22 bp, Artificial Sequence
  Synthetic oligonucleotide; TTT chr11 5346372 5346393 5346377 5346372 -
cctcagcttttatctcttctct

SEQ ID NO: 122736 - DNA, 22 bp, Artificial Sequence
  Synthetic oligonucleotide; TTC chr11 5346371 5346392 5346376 5346371 -
ctcagcttttatctcttctctc

SEQ ID NO: 122737 - DNA, 22 bp, Artificial Sequence
  Synthetic oligonucleotide; CTC chr11 5346368 5346389 5346373 5346368 -
agcttttatctcttctctcatt

SEQ ID NO: 122738 - DNA, 22 bp, Artificial Sequence
  Synthetic oligonucleotide; CTT chr11 5346363 5346384 5346368 5346363 -
ttatctcttctctcattgtctt

SEQ ID NO: 122739 - DNA, 22 bp, Artificial Sequence
  Synthetic oligonucleotide; TTT chr11 5346362 5346383 5346367 5346362 -
tatctcttctctcattgtcttt

SEQ ID NO: 122740 - DNA, 22 bp, Artificial Sequence
  Synthetic oligonucleotide; TTT chr11 5346361 5346382 5346366 5346361 -
atctcttctctcattgtctttc

SEQ ID NO: 122741 - DNA, 22 bp, Artificial Sequence
  Synthetic oligonucleotide; TTA chr11 5346360 5346381 5346365 5346360 -
tctcttctctcattgtctttct

SEQ ID NO: 122742 - DNA, 22 bp, Artificial Sequence
  Synthetic oligonucleotide; CTC chr11 5346356 5346377 5346361 5346356 -
ttctctcattgtctttcttctc

SEQ ID NO: 122743 - DNA, 22 bp, Artificial Sequence
  Synthetic oligonucleotide; CTT chr11 5346354 5346375 5346359 5346354 -
ctctcattgtctttcttctcag

SEQ ID NO: 122744 - DNA, 22 bp, Artificial Sequence
  Synthetic oligonucleotide; TTC chr11 5346353 5346374 5346358 5346353 -
tctcattgtctttcttctcaga

SEQ ID NO: 122745 - DNA, 22 bp, Artificial Sequence
  Synthetic oligonucleotide; CTC chr11 5346351 5346372 5346356 5346351 -
tcattgtctttcttctcagaaa

SEQ ID NO: 122746 - DNA, 22 bp, Artificial Sequence
  Synthetic oligonucleotide; CTC chr11 5346349 5346370 5346354 5346349 -
attgtctttcttctcagaaacc

SEQ ID NO: 122747 - DNA, 22 bp, Artificial Sequence
  Synthetic oligonucleotide; TTG chr11 5346345 5346366 5346350 5346345 -
tctttcttctcagaaaccaaga

SEQ ID NO: 122748 - DNA, 22 bp, Artificial Sequence
  Synthetic oligonucleotide; CTT chr11 5346341 5346362 5346346 5346341 -
tcttctcagaaaccaagagcca

SEQ ID NO: 122749 - DNA, 22 bp, Artificial Sequence
  Synthetic oligonucleotide; TTT chr11 5346340 5346361 5346345 5346340 -
cttctcagaaaccaagagccac

SEQ ID NO: 122750 - DNA, 22 bp, Artificial Sequence
  Synthetic oligonucleotide; TTC chr11 5346339 5346360 5346344 5346339 -
ttctcagaaaccaagagccacg

SEQ ID NO: 122751 - DNA, 22 bp, Artificial Sequence
  Synthetic oligonucleotide; CTT chr11 5346337 5346358 5346342 5346337 -
ctcagaaaccaagagccacgac

SEQ ID NO: 122752 - DNA, 22 bp, Artificial Sequence
  Synthetic oligonucleotide; TTC chr11 5346336 5346357 5346341 5346336 -
tcagaaaccaagagccacgact

SEQ ID NO: 122753 - DNA, 22 bp, Artificial Sequence
  Synthetic oligonucleotide; CTC chr11 5346334 5346355 5346339 5346334 -
agaaaccaagagccacgactag

SEQ ID NO: 122754 - DNA, 22 bp, Artificial Sequence
  Synthetic oligonucleotide; CTA chr11 5346313 5346334 5346318 5346313 -
gctgaggacacaagaattttca

SEQ ID NO: 122755 - DNA, 22 bp, Artificial Sequence
  Synthetic oligonucleotide; CTG chr11 5346309 5346330 5346314 5346309 -
aggacacaagaattttcacaaa

SEQ ID NO: 122756 - DNA, 22 bp, Artificial Sequence
  Synthetic oligonucleotide; TTT chr11 5346294 5346315 5346299 5346294 -
tcacaaaacaaagtagagtgat

SEQ ID NO: 122757 - DNA, 22 bp, Artificial Sequence
  Synthetic oligonucleotide; TTT chr11 5346293 5346314 5346298 5346293 -
cacaaaacaaagtagagtgatt

SEQ ID NO: 122758 - DNA, 22 bp, Artificial Sequence
  Synthetic oligonucleotide; TTC chr11 5346292 5346313 5346297 5346292 -
acaaaacaaagtagagtgattc

SEQ ID NO: 122759 - DNA, 22 bp, Artificial Sequence
  Synthetic oligonucleotide; TTC chr11 5346270 5346291 5346275 5346270 -
catagatcactattatagctgc

SEQ ID NO: 122760 - DNA, 22 bp, Artificial Sequence
  Synthetic oligonucleotide; CTA chr11 5346258 5346279 5346263 5346258 -
ttatagctgcattaccaggtat

SEQ ID NO: 122761 - DNA, 22 bp, Artificial Sequence
  Synthetic oligonucleotide; TTA chr11 5346255 5346276 5346260 5346255 -
tagctgcattaccaggtatgtc

SEQ ID NO: 122762 - DNA, 22 bp, Artificial Sequence
  Synthetic oligonucleotide; CTG chr11 5346249 5346270 5346254 5346249 -
cattaccaggtatgtctgcatg

SEQ ID NO: 122763 - DNA, 22 bp, Artificial Sequence
  Synthetic oligonucleotide; TTA chr11 5346244 5346265 5346249 5346244 -
ccaggtatgtctgcatggaatt

SEQ ID NO: 122764 - DNA, 22 bp, Artificial Sequence
  Synthetic oligonucleotide; CTG chr11 5346231 5346252 5346236 5346231 -
catggaattcttgggaatggag

SEQ ID NO: 122765 - DNA, 22 bp, Artificial Sequence
  Synthetic oligonucleotide; TTC chr11 5346221 5346242 5346226 5346221 -
ttgggaatggagaaggaggaaa

SEQ ID NO: 122766 - DNA, 22 bp, Artificial Sequence
  Synthetic oligonucleotide; CTT chr11 5346219 5346240 5346224 5346219 -
gggaatggagaaggaggaaact

SEQ ID NO: 122767 - DNA, 22 bp, Artificial Sequence
  Synthetic oligonucleotide; TTG chr11 5346218 5346239 5346223 5346218 -
ggaatggagaaggaggaaactt

SEQ ID NO: 122768 - DNA, 22 bp, Artificial Sequence
  Synthetic oligonucleotide; CTT chr11 5346196 5346217 5346201 5346196 -
taagttgcaggttattattggc

SEQ ID NO: 122769 - DNA, 22 bp, Artificial Sequence
  Synthetic oligonucleotide; TTT chr11 5346195 5346216 5346200 5346195 -
aagttgcaggttattattggca

SEQ ID NO: 122770 - DNA, 22 bp, Artificial Sequence
  Synthetic oligonucleotide; TTA chr11 5346194 5346215 5346199 5346194 -
agttgcaggttattattggcaa

SEQ ID NO: 122771 - DNA, 22 bp, Artificial Sequence
  Synthetic oligonucleotide; TTG chr11 5346189 5346210 5346194 5346189 -
caggttattattggcaaaatac

SEQ ID NO: 122772 - DNA, 22 bp, Artificial Sequence
  Synthetic oligonucleotide; TTA chr11 5346182 5346203 5346187 5346182 -
ttattggcaaaatacaatcatt

SEQ ID NO: 122773 - DNA, 22 bp, Artificial Sequence
  Synthetic oligonucleotide; TTA chr11 5346179 5346200 5346184 5346179 -
ttggcaaaatacaatcattgcc

SEQ ID NO: 122774 - DNA, 22 bp, Artificial Sequence
  Synthetic oligonucleotide; TTG chr11 5346176 5346197 5346181 5346176 -
gcaaaatacaatcattgcctta

SEQ ID NO: 122775 - DNA, 22 bp, Artificial Sequence
  Synthetic oligonucleotide; TTG chr11 5346159 5346180 5346164 5346159 -
ccttacagtttggttagctttc

SEQ ID NO: 122776 - DNA, 22 bp, Artificial Sequence
  Synthetic oligonucleotide; CTT chr11 5346155 5346176 5346160 5346155 -
acagtttggttagctttccctg

SEQ ID NO: 122777 - DNA, 22 bp, Artificial Sequence
  Synthetic oligonucleotide; TTA chr11 5346154 5346175 5346159 5346154 -
cagtttggttagctttccctgt

SEQ ID NO: 122778 - DNA, 22 bp, Artificial Sequence
  Synthetic oligonucleotide; TTT chr11 5346148 5346169 5346153 5346148 -
ggttagctttccctgtagtgat

SEQ ID NO: 122779 - DNA, 22 bp, Artificial Sequence
  Synthetic oligonucleotide; TTG chr11 5346147 5346168 5346152 5346147 -
gttagctttccctgtagtgatt

SEQ ID NO: 122780 - DNA, 22 bp, Artificial Sequence
  Synthetic oligonucleotide; TTA chr11 5346143 5346164 5346148 5346143 -
gctttccctgtagtgattcatc

SEQ ID NO: 122781 - DNA, 22 bp, Artificial Sequence
  Synthetic oligonucleotide; CTT chr11 5346139 5346160 5346144 5346139 -
tccctgtagtgattcatcactt

SEQ ID NO: 122782 - DNA, 22 bp, Artificial Sequence
  Synthetic oligonucleotide; TTT chr11 5346138 5346159 5346143 5346138 -
ccctgtagtgattcatcacttg

SEQ ID NO: 122783 - DNA, 22 bp, Artificial Sequence
  Synthetic oligonucleotide; TTC chr11 5346137 5346158 5346142 5346137 -
cctgtagtgattcatcacttgt

SEQ ID NO: 122784 - DNA, 22 bp, Artificial Sequence
  Synthetic oligonucleotide; CTG chr11 5346133 5346154 5346138 5346133 -
tagtgattcatcacttgtgctg

SEQ ID NO: 122785 - DNA, 22 bp, Artificial Sequence
  Synthetic oligonucleotide; TTC chr11 5346124 5346145 5346129 5346124 -
atcacttgtgctgcatattctc

SEQ ID NO: 122786 - DNA, 22 bp, Artificial Sequence
  Synthetic oligonucleotide; CTT chr11 5346117 5346138 5346122 5346117 -
gtgctgcatattctctgataag

SEQ ID NO: 122787 - DNA, 22 bp, Artificial Sequence
  Synthetic oligonucleotide; TTG chr11 5346116 5346137 5346121 5346116 -
tgctgcatattctctgataaga

SEQ ID NO: 122788 - DNA, 22 bp, Artificial Sequence
  Synthetic oligonucleotide; CTG chr11 5346111 5346132 5346116 5346111 -
catattctctgataagaaggaa

SEQ ID NO: 122789 - DNA, 22 bp, Artificial Sequence
  Synthetic oligonucleotide; TTC chr11 5346104 5346125 5346109 5346104 -
tctgataagaaggaatttttca

SEQ ID NO: 122790 - DNA, 22 bp, Artificial Sequence
  Synthetic oligonucleotide; CTC chr11 5346102 5346123 5346107 5346102 -
tgataagaaggaatttttcaca

SEQ ID NO: 122791 - DNA, 22 bp, Artificial Sequence
  Synthetic oligonucleotide; CTG chr11 5346100 5346121 5346105 5346100 -
ataagaaggaatttttcacaaa

SEQ ID NO: 122792 - DNA, 22 bp, Artificial Sequence
  Synthetic oligonucleotide; TTT chr11 5346086 5346107 5346091 5346086 -
ttcacaaagttgagatacagtg

SEQ ID NO: 122793 - DNA, 22 bp, Artificial Sequence
  Synthetic oligonucleotide; TTT chr11 5346085 5346106 5346090 5346085 -
tcacaaagttgagatacagtga

SEQ ID NO: 122794 - DNA, 22 bp, Artificial Sequence
  Synthetic oligonucleotide; TTT chr11 5346084 5346105 5346089 5346084 -
cacaaagttgagatacagtgaa

SEQ ID NO: 122795 - DNA, 22 bp, Artificial Sequence
  Synthetic oligonucleotide; TTC chr11 5346083 5346104 5346088 5346083 -
acaaagttgagatacagtgaaa

SEQ ID NO: 122796 - DNA, 22 bp, Artificial Sequence
  Synthetic oligonucleotide; TTG chr11 5346074 5346095 5346079 5346074 -
agatacagtgaaagattaggtt

SEQ ID NO: 122797 - DNA, 22 bp, Artificial Sequence
  Synthetic oligonucleotide; TTA chr11 5346056 5346077 5346061 5346056 -
ggttaaaggagattattgctga

SEQ ID NO: 122798 - DNA, 22 bp, Artificial Sequence
  Synthetic oligonucleotide; TTA chr11 5346051 5346072 5346056 5346051 -
aaggagattattgctgaaacgt

SEQ ID NO: 122799 - DNA, 22 bp, Artificial Sequence
  Synthetic oligonucleotide; TTA chr11 5346041 5346062 5346046 5346041 -
ttgctgaaacgtcagagaagta

SEQ ID NO: 122800 - DNA, 22 bp, Artificial Sequence
  Synthetic oligonucleotide; TTG chr11 5346038 5346059 5346043 5346038 -
ctgaaacgtcagagaagtaaga

SEQ ID NO: 122801 - DNA, 22 bp, Artificial Sequence
  Synthetic oligonucleotide; CTG chr11 5346035 5346056 5346040 5346035 -
aaacgtcagagaagtaagagtg

SEQ ID NO: 122802 - DNA, 22 bp, Artificial Sequence
  Synthetic oligonucleotide; TTG chr11 5346010 5346031 5346015 5346010 -
acagagaaatgaagtacataga

SEQ ID NO: 122803 - DNA, 22 bp, Artificial Sequence
  Synthetic oligonucleotide; CTA chr11 5345968 5345989 5345973 5345968 -
agctggattatctttgcgtcta

SEQ ID NO: 122804 - DNA, 22 bp, Artificial Sequence
  Synthetic oligonucleotide; CTG chr11 5345963 5345984 5345968 5345963 -
gattatctttgcgtctagtaac

SEQ ID NO: 122805 - DNA, 22 bp, Artificial Sequence
  Synthetic oligonucleotide; TTA chr11 5345958 5345979 5345963 5345958 -
tctttgcgtctagtaactgaag

SEQ ID NO: 122806 - DNA, 22 bp, Artificial Sequence
  Synthetic oligonucleotide; CTT chr11 5345954 5345975 5345959 5345954 -
tgcgtctagtaactgaagaata

SEQ ID NO: 122807 - DNA, 22 bp, Artificial Sequence
  Synthetic oligonucleotide; TTT chr11 5345953 5345974 5345958 5345953 -
gcgtctagtaactgaagaatat

SEQ ID NO: 122808 - DNA, 22 bp, Artificial Sequence
  Synthetic oligonucleotide; TTG chr11 5345952 5345973 5345957 5345952 -
cgtctagtaactgaagaatata

SEQ ID NO: 122809 - DNA, 22 bp, Artificial Sequence
  Synthetic oligonucleotide; CTA chr11 5345946 5345967 5345951 5345946 -
gtaactgaagaatatacatcac

SEQ ID NO: 122810 - DNA, 22 bp, Artificial Sequence
  Synthetic oligonucleotide; CTG chr11 5345939 5345960 5345944 5345939 -
aagaatatacatcactcattgt

SEQ ID NO: 122811 - DNA, 22 bp, Artificial Sequence
  Synthetic oligonucleotide; CTC chr11 5345922 5345943 5345927 5345922 -
attgtatgttcagtaggcactg

SEQ ID NO: 122812 - DNA, 22 bp, Artificial Sequence
  Synthetic oligonucleotide; TTG chr11 5345918 5345939 5345923 5345918 -
tatgttcagtaggcactgaatt

SEQ ID NO: 122813 - DNA, 22 bp, Artificial Sequence
  Synthetic oligonucleotide; TTC chr11 5345911 5345932 5345916 5345911 -
agtaggcactgaattctggttt

SEQ ID NO: 122814 - DNA, 22 bp, Artificial Sequence
  Synthetic oligonucleotide; CTG chr11 5345900 5345921 5345905 5345900 -
aattctggtttatgtctctcag

SEQ ID NO: 122815 - DNA, 22 bp, Artificial Sequence
  Synthetic oligonucleotide; TTC chr11 5345895 5345916 5345900 5345895 -
tggtttatgtctctcagtccta

SEQ ID NO: 122816 - DNA, 22 bp, Artificial Sequence
  Synthetic oligonucleotide; CTG chr11 5345893 5345914 5345898 5345893 -
gtttatgtctctcagtcctagg

SEQ ID NO: 122817 - DNA, 22 bp, Artificial Sequence
  Synthetic oligonucleotide; TTT chr11 5345889 5345910 5345894 5345889 -
atgtctctcagtcctaggacag

SEQ ID NO: 122818 - DNA, 22 bp, Artificial Sequence
  Synthetic oligonucleotide; TTA chr11 5345888 5345909 5345893 5345888 -
tgtctctcagtcctaggacaga

SEQ ID NO: 122819 - DNA, 22 bp, Artificial Sequence
  Synthetic oligonucleotide; CTC chr11 5345882 5345903 5345887 5345882 -
tcagtcctaggacagaatatgg

SEQ ID NO: 122820 - DNA, 22 bp, Artificial Sequence
  Synthetic oligonucleotide; CTC chr11 5345880 5345901 5345885 5345880 -
agtcctaggacagaatatggat

SEQ ID NO: 122821 - DNA, 22 bp, Artificial Sequence
  Synthetic oligonucleotide; CTA chr11 5345873 5345894 5345878 5345873 -
ggacagaatatggatgctgaaa

SEQ ID NO: 122822 - DNA, 22 bp, Artificial Sequence
  Synthetic oligonucleotide; CTG chr11 5345854 5345875 5345859 5345854 -
aaaaatgattctttcaaagtgc

SEQ ID NO: 122823 - DNA, 22 bp, Artificial Sequence
  Synthetic oligonucleotide; TTC chr11 5345843 5345864 5345848 5345843 -
tttcaaagtgctgagttgttgc

SEQ ID NO: 122824 - DNA, 22 bp, Artificial Sequence
  Synthetic oligonucleotide; CTT chr11 5345841 5345862 5345846 5345841 -
tcaaagtgctgagttgttgcct

SEQ ID NO: 122825 - DNA, 22 bp, Artificial Sequence
  Synthetic oligonucleotide; TTT chr11 5345840 5345861 5345845 5345840 -
caaagtgctgagttgttgcctc

SEQ ID NO: 122826 - DNA, 22 bp, Artificial Sequence
  Synthetic oligonucleotide; TTC chr11 5345839 5345860 5345844 5345839 -
aaagtgctgagttgttgcctca

SEQ ID NO: 122827 - DNA, 22 bp, Artificial Sequence
  Synthetic oligonucleotide; CTG chr11 5345830 5345851 5345835 5345830 -
agttgttgcctcacgcccagtt

SEQ ID NO: 122828 - DNA, 22 bp, Artificial Sequence
  Synthetic oligonucleotide; TTG chr11 5345825 5345846 5345830 5345825 -
ttgcctcacgcccagttgtctg

SEQ ID NO: 122829 - DNA, 22 bp, Artificial Sequence
  Synthetic oligonucleotide; TTG chr11 5345822 5345843 5345827 5345822 -
cctcacgcccagttgtctggca

SEQ ID NO: 122830 - DNA, 22 bp, Artificial Sequence
  Synthetic oligonucleotide; CTC chr11 5345818 5345839 5345823 5345818 -
acgcccagttgtctggcatctc

SEQ ID NO: 122831 - DNA, 22 bp, Artificial Sequence
  Synthetic oligonucleotide; TTG chr11 5345807 5345828 5345812 5345807 -
tctggcatctcttcactgaaac

SEQ ID NO: 122832 - DNA, 22 bp, Artificial Sequence
  Synthetic oligonucleotide; CTG chr11 5345803 5345824 5345808 5345803 -
gcatctcttcactgaaactatt

SEQ ID NO: 122833 - DNA, 22 bp, Artificial Sequence
  Synthetic oligonucleotide; CTC chr11 5345796 5345817 5345801 5345796 -
ttcactgaaactattacagtta

SEQ ID NO: 122834 - DNA, 22 bp, Artificial Sequence
  Synthetic oligonucleotide; CTT chr11 5345794 5345815 5345799 5345794 -
cactgaaactattacagttaga

SEQ ID NO: 122835 - DNA, 22 bp, Artificial Sequence
  Synthetic oligonucleotide; TTC chr11 5345793 5345814 5345798 5345793 -
actgaaactattacagttagat

SEQ ID NO: 122836 - DNA, 22 bp, Artificial Sequence
  Synthetic oligonucleotide; CTG chr11 5345789 5345810 5345794 5345789 -
aaactattacagttagatctca

SEQ ID NO: 122837 - DNA, 22 bp, Artificial Sequence
  Synthetic oligonucleotide; CTA chr11 5345783 5345804 5345788 5345783 -
ttacagttagatctcatctcta

SEQ ID NO: 122838 - DNA, 22 bp, Artificial Sequence
  Synthetic oligonucleotide; TTA chr11 5345780 5345801 5345785 5345780 -
cagttagatctcatctctatgg

SEQ ID NO: 122839 - DNA, 22 bp, Artificial Sequence
  Synthetic oligonucleotide; TTA chr11 5345774 5345795 5345779 5345774 -
gatctcatctctatgggtggaa

SEQ ID NO: 122840 - DNA, 22 bp, Artificial Sequence
  Synthetic oligonucleotide; CTC chr11 5345768 5345789 5345773 5345768 -
atctctatgggtggaaggtaag

SEQ ID NO: 122841 - DNA, 22 bp, Artificial Sequence
  Synthetic oligonucleotide; CTC chr11 5345763 5345784 5345768 5345763 -
tatgggtggaaggtaagaggat

SEQ ID NO: 122842 - DNA, 22 bp, Artificial Sequence
  Synthetic oligonucleotide; CTA chr11 5345761 5345782 5345766 5345761 -
tgggtggaaggtaagaggatcg

SEQ ID NO: 122843 - DNA, 22 bp, Artificial Sequence
  Synthetic oligonucleotide; TTT chr11 5345736 5345757 5345741 5345736 -
cctttggtggcatctttagggt

SEQ ID NO: 122844 - DNA, 22 bp, Artificial Sequence
  Synthetic oligonucleotide; TTC chr11 5345735 5345756 5345740 5345735 -
ctttggtggcatctttagggta

SEQ ID NO: 122845 - DNA, 22 bp, Artificial Sequence
  Synthetic oligonucleotide; CTT chr11 5345732 5345753 5345737 5345732 -
tggtggcatctttagggtagtg

SEQ ID NO: 122846 - DNA, 22 bp, Artificial Sequence
  Synthetic oligonucleotide; TTT chr11 5345731 5345752 5345736 5345731 -
ggtggcatctttagggtagtgc

SEQ ID NO: 122847 - DNA, 22 bp, Artificial Sequence
  Synthetic oligonucleotide; TTG chr11 5345730 5345751 5345735 5345730 -
gtggcatctttagggtagtgcc

SEQ ID NO: 122848 - DNA, 22 bp, Artificial Sequence
  Synthetic oligonucleotide; CTT chr11 5345720 5345741 5345725 5345720 -
tagggtagtgccttacactgac

SEQ ID NO: 122849 - DNA, 22 bp, Artificial Sequence
  Synthetic oligonucleotide; TTT chr11 5345719 5345740 5345724 5345719 -
agggtagtgccttacactgaca

SEQ ID NO: 122850 - DNA, 22 bp, Artificial Sequence
  Synthetic oligonucleotide; TTA chr11 5345718 5345739 5345723 5345718 -
gggtagtgccttacactgacaa

SEQ ID NO: 122851 - DNA, 22 bp, Artificial Sequence
  Synthetic oligonucleotide; CTT chr11 5345706 5345727 5345711 5345706 -
acactgacaaagtaactctgaa

SEQ ID NO: 122852 - DNA, 22 bp, Artificial Sequence
  Synthetic oligonucleotide; TTA chr11 5345705 5345726 5345710 5345705 -
cactgacaaagtaactctgaag

SEQ ID NO: 122853 - DNA, 22 bp, Artificial Sequence
  Synthetic oligonucleotide; CTG chr11 5345700 5345721 5345705 5345700 -
acaaagtaactctgaaggggta

SEQ ID NO: 122854 - DNA, 22 bp, Artificial Sequence
  Synthetic oligonucleotide; CTC chr11 5345688 5345709 5345693 5345688 -
tgaaggggtatatttggatacg

SEQ ID NO: 122855 - DNA, 22 bp, Artificial Sequence
  Synthetic oligonucleotide; CTG chr11 5345686 5345707 5345691 5345686 -
aaggggtatatttggatacgac

SEQ ID NO: 122856 - DNA, 22 bp, Artificial Sequence
  Synthetic oligonucleotide; TTT chr11 5345673 5345694 5345678 5345673 -
ggatacgaccatctttttaact

SEQ ID NO: 122857 - DNA, 22 bp, Artificial Sequence
  Synthetic oligonucleotide; TTG chr11 5345672 5345693 5345677 5345672 -
gatacgaccatctttttaactt

SEQ ID NO: 122858 - DNA, 22 bp, Artificial Sequence
  Synthetic oligonucleotide; CTT chr11 5345658 5345679 5345663 5345658 -
tttaacttaggataaaaacaac

SEQ ID NO: 122859 - DNA, 22 bp, Artificial Sequence
  Synthetic oligonucleotide; TTT chr11 5345657 5345678 5345662 5345657 -
ttaacttaggataaaaacaact

SEQ ID NO: 122860 - DNA, 22 bp, Artificial Sequence
  Synthetic oligonucleotide; TTT chr11 5345656 5345677 5345661 5345656 -
taacttaggataaaaacaactt

SEQ ID NO: 122861 - DNA, 22 bp, Artificial Sequence
  Synthetic oligonucleotide; TTT chr11 5345655 5345676 5345660 5345655 -
aacttaggataaaaacaacttc

SEQ ID NO: 122862 - DNA, 22 bp, Artificial Sequence
  Synthetic oligonucleotide; TTA chr11 5345654 5345675 5345659 5345654 -
acttaggataaaaacaacttca

SEQ ID NO: 122863 - DNA, 22 bp, Artificial Sequence
  Synthetic oligonucleotide; CTT chr11 5345650 5345671 5345655 5345650 -
aggataaaaacaacttcaagaa

SEQ ID NO: 122864 - DNA, 22 bp, Artificial Sequence
  Synthetic oligonucleotide; TTA chr11 5345649 5345670 5345654 5345649 -
ggataaaaacaacttcaagaag

SEQ ID NO: 122865 - DNA, 22 bp, Artificial Sequence
  Synthetic oligonucleotide; CTT chr11 5345634 5345655 5345639 5345634 -
caagaagttgttctggcatgtg

SEQ ID NO: 122866 - DNA, 22 bp, Artificial Sequence
  Synthetic oligonucleotide; TTC chr11 5345633 5345654 5345638 5345633 -
aagaagttgttctggcatgtga

SEQ ID NO: 122867 - DNA, 22 bp, Artificial Sequence
  Synthetic oligonucleotide; TTG chr11 5345624 5345645 5345629 5345624 -
ttctggcatgtgacaagaaaaa

SEQ ID NO: 122868 - DNA, 22 bp, Artificial Sequence
  Synthetic oligonucleotide; TTC chr11 5345621 5345642 5345626 5345621 -
tggcatgtgacaagaaaaaaaa

SEQ ID NO: 122869 - DNA, 22 bp, Artificial Sequence
  Synthetic oligonucleotide; CTG chr11 5345619 5345640 5345624 5345619 -
gcatgtgacaagaaaaaaaagc

SEQ ID NO: 122870 - DNA, 22 bp, Artificial Sequence
  Synthetic oligonucleotide; TTT chr11 5345584 5345605 5345589 5345584 -
gctctaattcagctatatttac

SEQ ID NO: 122871 - DNA, 22 bp, Artificial Sequence
  Synthetic oligonucleotide; TTG chr11 5345583 5345604 5345588 5345583 -
ctctaattcagctatatttact

SEQ ID NO: 122872 - DNA, 22 bp, Artificial Sequence
  Synthetic oligonucleotide; CTC chr11 5345580 5345601 5345585 5345580 -
taattcagctatatttactaat

SEQ ID NO: 122873 - DNA, 22 bp, Artificial Sequence
  Synthetic oligonucleotide; CTA chr11 5345578 5345599 5345583 5345578 -
attcagctatatttactaatga

SEQ ID NO: 122874 - DNA, 22 bp, Artificial Sequence
  Synthetic oligonucleotide; TTC chr11 5345574 5345595 5345579 5345574 -
agctatatttactaatgactct

SEQ ID NO: 122875 - DNA, 22 bp, Artificial Sequence
  Synthetic oligonucleotide; CTA chr11 5345569 5345590 5345574 5345569 -
tatttactaatgactcttgatt

SEQ ID NO: 122876 - DNA, 22 bp, Artificial Sequence
  Synthetic oligonucleotide; TTT chr11 5345564 5345585 5345569 5345564 -
actaatgactcttgatttcctc

SEQ ID NO: 122877 - DNA, 22 bp, Artificial Sequence
  Synthetic oligonucleotide; TTA chr11 5345563 5345584 5345568 5345563 -
ctaatgactcttgatttcctca

SEQ ID NO: 122878 - DNA, 22 bp, Artificial Sequence
  Synthetic oligonucleotide; CTA chr11 5345560 5345581 5345565 5345560 -
atgactcttgatttcctcacaa

SEQ ID NO: 122879 - DNA, 22 bp, Artificial Sequence
  Synthetic oligonucleotide; CTC chr11 5345553 5345574 5345558 5345553 -
ttgatttcctcacaagtgaata

SEQ ID NO: 122880 - DNA, 22 bp, Artificial Sequence
  Synthetic oligonucleotide; CTT chr11 5345551 5345572 5345556 5345551 -
gatttcctcacaagtgaatatg

SEQ ID NO: 122881 - DNA, 22 bp, Artificial Sequence
  Synthetic oligonucleotide; TTG chr11 5345550 5345571 5345555 5345550 -
atttcctcacaagtgaatatgt

SEQ ID NO: 122882 - DNA, 22 bp, Artificial Sequence
  Synthetic oligonucleotide; TTT chr11 5345546 5345567 5345551 5345546 -
cctcacaagtgaatatgtatcc

SEQ ID NO: 122883 - DNA, 22 bp, Artificial Sequence
  Synthetic oligonucleotide; TTC chr11 5345545 5345566 5345550 5345545 -
ctcacaagtgaatatgtatccc

SEQ ID NO: 122884 - DNA, 22 bp, Artificial Sequence
  Synthetic oligonucleotide; CTC chr11 5345542 5345563 5345547 5345542 -
acaagtgaatatgtatccccct

SEQ ID NO: 122885 - DNA, 22 bp, Artificial Sequence
  Synthetic oligonucleotide; CTC chr11 5345519 5345540 5345524 5345519 -
agacttccattttgagtaaatg

SEQ ID NO: 122886 - DNA, 22 bp, Artificial Sequence
  Synthetic oligonucleotide; CTT chr11 5345513 5345534 5345518 5345513 -
ccattttgagtaaatggcttca

SEQ ID NO: 122887 - DNA, 22 bp, Artificial Sequence
  Synthetic oligonucleotide; TTC chr11 5345512 5345533 5345517 5345512 -
cattttgagtaaatggcttcac

SEQ ID NO: 122888 - DNA, 22 bp, Artificial Sequence
  Synthetic oligonucleotide; TTT chr11 5345507 5345528 5345512 5345507 -
tgagtaaatggcttcaccattc

SEQ ID NO: 122889 - DNA, 22 bp, Artificial Sequence
  Synthetic oligonucleotide; TTT chr11 5345506 5345527 5345511 5345506 -
gagtaaatggcttcaccattct

SEQ ID NO: 122890 - DNA, 22 bp, Artificial Sequence
  Synthetic oligonucleotide; TTG chr11 5345505 5345526 5345510 5345505 -
agtaaatggcttcaccattctt

SEQ ID NO: 122891 - DNA, 22 bp, Artificial Sequence
  Synthetic oligonucleotide; CTT chr11 5345493 5345514 5345498 5345493 -
caccattctttcatttgttcaa

SEQ ID NO: 122892 - DNA, 22 bp, Artificial Sequence
  Synthetic oligonucleotide; TTC chr11 5345492 5345513 5345497 5345492 -
accattctttcatttgttcaaa

SEQ ID NO: 122893 - DNA, 22 bp, Artificial Sequence
  Synthetic oligonucleotide; TTC chr11 5345485 5345506 5345490 5345485 -
tttcatttgttcaaacagaaat

SEQ ID NO: 122894 - DNA, 22 bp, Artificial Sequence
  Synthetic oligonucleotide; CTT chr11 5345483 5345504 5345488 5345483 -
tcatttgttcaaacagaaatct

SEQ ID NO: 122895 - DNA, 22 bp, Artificial Sequence
  Synthetic oligonucleotide; TTT chr11 5345482 5345503 5345487 5345482 -
catttgttcaaacagaaatcta

SEQ ID NO: 122896 - DNA, 22 bp, Artificial Sequence
  Synthetic oligonucleotide; TTC chr11 5345481 5345502 5345486 5345481 -
atttgttcaaacagaaatctag

SEQ ID NO: 122897 - DNA, 22 bp, Artificial Sequence
  Synthetic oligonucleotide; TTT chr11 5345477 5345498 5345482 5345477 -
gttcaaacagaaatctagggga

SEQ ID NO: 122898 - DNA, 22 bp, Artificial Sequence
  Synthetic oligonucleotide; TTG chr11 5345476 5345497 5345481 5345476 -
ttcaaacagaaatctaggggaa

SEQ ID NO: 122899 - DNA, 22 bp, Artificial Sequence
  Synthetic oligonucleotide; TTC chr11 5345473 5345494 5345478 5345473 -
aaacagaaatctaggggaaacc

SEQ ID NO: 122900 - DNA, 22 bp, Artificial Sequence
  Synthetic oligonucleotide; CTA chr11 5345460 5345481 5345465 5345460 -
ggggaaacctcatttgattttt

SEQ ID NO: 122901 - DNA, 22 bp, Artificial Sequence
  Synthetic oligonucleotide; CTC chr11 5345449 5345470 5345454 5345449 -
atttgatttttccctcactccc

SEQ ID NO: 122902 - DNA, 22 bp, Artificial Sequence
  Synthetic oligonucleotide; TTT chr11 5345445 5345466 5345450 5345445 -
gatttttccctcactcccattt

SEQ ID NO: 122903 - DNA, 22 bp, Artificial Sequence
  Synthetic oligonucleotide; TTG chr11 5345444 5345465 5345449 5345444 -
atttttccctcactcccatttt

SEQ ID NO: 122904 - DNA, 22 bp, Artificial Sequence
  Synthetic oligonucleotide; TTT chr11 5345440 5345461 5345445 5345440 -
ttccctcactcccatttttaat

SEQ ID NO: 122905 - DNA, 22 bp, Artificial Sequence
  Synthetic oligonucleotide; TTT chr11 5345439 5345460 5345444 5345439 -
tccctcactcccatttttaata

SEQ ID NO: 122906 - DNA, 22 bp, Artificial Sequence
  Synthetic oligonucleotide; TTT chr11 5345438 5345459 5345443 5345438 -
ccctcactcccatttttaatat

SEQ ID NO: 122907 - DNA, 22 bp, Artificial Sequence
  Synthetic oligonucleotide; TTC chr11 5345437 5345458 5345442 5345437 -
cctcactcccatttttaatata

SEQ ID NO: 122908 - DNA, 22 bp, Artificial Sequence
  Synthetic oligonucleotide; CTC chr11 5345433 5345454 5345438 5345433 -
actcccatttttaatatatcag

SEQ ID NO: 122909 - DNA, 22 bp, Artificial Sequence
  Synthetic oligonucleotide; CTC chr11 5345429 5345450 5345434 5345429 -
ccatttttaatatatcagcaaa

SEQ ID NO: 122910 - DNA, 22 bp, Artificial Sequence
  Synthetic oligonucleotide; TTT chr11 5345423 5345444 5345428 5345423 -
ttaatatatcagcaaatcttgg

SEQ ID NO: 122911 - DNA, 22 bp, Artificial Sequence
  Synthetic oligonucleotide; TTT chr11 5345422 5345443 5345427 5345422 -
taatatatcagcaaatcttggc

SEQ ID NO: 122912 - DNA, 22 bp, Artificial Sequence
  Synthetic oligonucleotide; TTT chr11 5345421 5345442 5345426 5345421 -
aatatatcagcaaatcttggca

SEQ ID NO: 122913 - DNA, 22 bp, Artificial Sequence
  Synthetic oligonucleotide; TTA chr11 5345420 5345441 5345425 5345420 -
atatatcagcaaatcttggcac

SEQ ID NO: 122914 - DNA, 22 bp, Artificial Sequence
  Synthetic oligonucleotide; CTT chr11 5345403 5345424 5345408 5345403 -
ggcactacttcaaaaatgcatc

SEQ ID NO: 122915 - DNA, 22 bp, Artificial Sequence
  Synthetic oligonucleotide; TTG chr11 5345402 5345423 5345407 5345402 -
gcactacttcaaaaatgcatct

SEQ ID NO: 122916 - DNA, 22 bp, Artificial Sequence
  Synthetic oligonucleotide; CTA chr11 5345396 5345417 5345401 5345396 -
cttcaaaaatgcatctgtctct

SEQ ID NO: 122917 - DNA, 22 bp, Artificial Sequence
  Synthetic oligonucleotide; CTT chr11 5345393 5345414 5345398 5345393 -
caaaaatgcatctgtctctgtt

SEQ ID NO: 122918 - DNA, 22 bp, Artificial Sequence
  Synthetic oligonucleotide; TTC chr11 5345392 5345413 5345397 5345392 -
aaaaatgcatctgtctctgttt

SEQ ID NO: 122919 - DNA, 22 bp, Artificial Sequence
  Synthetic oligonucleotide; CTG chr11 5345379 5345400 5345384 5345379 -
tctctgtttaagtttttctatt

SEQ ID NO: 122920 - DNA, 22 bp, Artificial Sequence
  Synthetic oligonucleotide; CTC chr11 5345375 5345396 5345380 5345375 -
tgtttaagtttttctatttttc

SEQ ID NO: 122921 - DNA, 22 bp, Artificial Sequence
  Synthetic oligonucleotide; CTG chr11 5345373 5345394 5345378 5345373 -
tttaagtttttctatttttctc

SEQ ID NO: 122922 - DNA, 22 bp, Artificial Sequence
  Synthetic oligonucleotide; TTT chr11 5345370 5345391 5345375 5345370 -
aagtttttctatttttctcttt

SEQ ID NO: 122923 - DNA, 22 bp, Artificial Sequence
  Synthetic oligonucleotide; TTA chr11 5345369 5345390 5345374 5345369 -
agtttttctatttttctctttt

SEQ ID NO: 122924 - DNA, 22 bp, Artificial Sequence
  Synthetic oligonucleotide; TTT chr11 5345364 5345385 5345369 5345364 -
ttctatttttctctttttttca

SEQ ID NO: 122925 - DNA, 22 bp, Artificial Sequence
  Synthetic oligonucleotide; TTT chr11 5345363 5345384 5345368 5345363 -
tctatttttctctttttttcat

SEQ ID NO: 122926 - DNA, 22 bp, Artificial Sequence
  Synthetic oligonucleotide; TTT chr11 5345362 5345383 5345367 5345362 -
ctatttttctctttttttcatt

SEQ ID NO: 122927 - DNA, 22 bp, Artificial Sequence
  Synthetic oligonucleotide; TTC chr11 5345361 5345382 5345366 5345361 -
tatttttctctttttttcattt

SEQ ID NO: 122928 - DNA, 22 bp, Artificial Sequence
  Synthetic oligonucleotide; CTA chr11 5345359 5345380 5345364 5345359 -
tttttctctttttttcatttcc

SEQ ID NO: 122929 - DNA, 22 bp, Artificial Sequence
  Synthetic oligonucleotide; TTT chr11 5345356 5345377 5345361 5345356 -
ttctctttttttcatttcccct

SEQ ID NO: 122930 - DNA, 22 bp, Artificial Sequence
  Synthetic oligonucleotide; TTT chr11 5345355 5345376 5345360 5345355 -
tctctttttttcatttcccctg

SEQ ID NO: 122931 - DNA, 22 bp, Artificial Sequence
  Synthetic oligonucleotide; TTT chr11 5345354 5345375 5345359 5345354 -
ctctttttttcatttcccctgc

SEQ ID NO: 122932 - DNA, 22 bp, Artificial Sequence
  Synthetic oligonucleotide; TTC chr11 5345353 5345374 5345358 5345353 -
tctttttttcatttcccctgct

SEQ ID NO: 122933 - DNA, 22 bp, Artificial Sequence
  Synthetic oligonucleotide; CTC chr11 5345351 5345372 5345356 5345351 -
tttttttcatttcccctgcttc

SEQ ID NO: 122934 - DNA, 22 bp, Artificial Sequence
  Synthetic oligonucleotide; CTT chr11 5345349 5345370 5345354 5345349 -
tttttcatttcccctgcttctc

SEQ ID NO: 122935 - DNA, 22 bp, Artificial Sequence
  Synthetic oligonucleotide; TTT chr11 5345348 5345369 5345353 5345348 -
ttttcatttcccctgcttctct

SEQ ID NO: 122936 - DNA, 22 bp, Artificial Sequence
  Synthetic oligonucleotide; TTT chr11 5345347 5345368 5345352 5345347 -
tttcatttcccctgcttctctc

SEQ ID NO: 122937 - DNA, 22 bp, Artificial Sequence
  Synthetic oligonucleotide; TTT chr11 5345346 5345367 5345351 5345346 -
ttcatttcccctgcttctctcc

SEQ ID NO: 122938 - DNA, 22 bp, Artificial Sequence
  Synthetic oligonucleotide; TTT chr11 5345345 5345366 5345350 5345345 -
tcatttcccctgcttctctcct

SEQ ID NO: 122939 - DNA, 22 bp, Artificial Sequence
  Synthetic oligonucleotide; TTT chr11 5345344 5345365 5345349 5345344 -
catttcccctgcttctctccta

SEQ ID NO: 122940 - DNA, 22 bp, Artificial Sequence
  Synthetic oligonucleotide; TTC chr11 5345343 5345364 5345348 5345343 -
atttcccctgcttctctcctag

SEQ ID NO: 122941 - DNA, 22 bp, Artificial Sequence
  Synthetic oligonucleotide; TTT chr11 5345339 5345360 5345344 5345339 -
cccctgcttctctcctagtcaa

SEQ ID NO: 122942 - DNA, 22 bp, Artificial Sequence
  Synthetic oligonucleotide; TTC chr11 5345338 5345359 5345343 5345338 -
ccctgcttctctcctagtcaag

SEQ ID NO: 122943 - DNA, 22 bp, Artificial Sequence
  Synthetic oligonucleotide; CTG chr11 5345333 5345354 5345338 5345333 -
cttctctcctagtcaaggtcac

SEQ ID NO: 122944 - DNA, 22 bp, Artificial Sequence
  Synthetic oligonucleotide; CTT chr11 5345330 5345351 5345335 5345330 -
ctctcctagtcaaggtcaccat

SEQ ID NO: 122945 - DNA, 22 bp, Artificial Sequence
  Synthetic oligonucleotide; TTC chr11 5345329 5345350 5345334 5345329 -
tctcctagtcaaggtcaccatg

SEQ ID NO: 122946 - DNA, 22 bp, Artificial Sequence
  Synthetic oligonucleotide; CTC chr11 5345327 5345348 5345332 5345327 -
tcctagtcaaggtcaccatgac

SEQ ID NO: 122947 - DNA, 22 bp, Artificial Sequence
  Synthetic oligonucleotide; CTC chr11 5345325 5345346 5345330 5345325 -
ctagtcaaggtcaccatgactc

SEQ ID NO: 122948 - DNA, 22 bp, Artificial Sequence
  Synthetic oligonucleotide; CTA chr11 5345322 5345343 5345327 5345322 -
gtcaaggtcaccatgactcttc

SEQ ID NO: 122949 - DNA, 22 bp, Artificial Sequence
  Synthetic oligonucleotide; CTC chr11 5345303 5345324 5345308 5345303 -
ttcatatggatttttaaaatag

SEQ ID NO: 122950 - DNA, 22 bp, Artificial Sequence
  Synthetic oligonucleotide; CTT chr11 5345301 5345322 5345306 5345301 -
catatggatttttaaaatagct

SEQ ID NO: 122951 - DNA, 22 bp, Artificial Sequence
  Synthetic oligonucleotide; TTC chr11 5345300 5345321 5345305 5345300 -
atatggatttttaaaatagctt

SEQ ID NO: 122952 - DNA, 22 bp, Artificial Sequence
  Synthetic oligonucleotide; TTT chr11 5345290 5345311 5345295 5345290 -
ttaaaatagctttctaactcat

SEQ ID NO: 122953 - DNA, 22 bp, Artificial Sequence
  Synthetic oligonucleotide; TTT chr11 5345289 5345310 5345294 5345289 -
taaaatagctttctaactcatc

SEQ ID NO: 122954 - DNA, 22 bp, Artificial Sequence
  Synthetic oligonucleotide; TTT chr11 5345288 5345309 5345293 5345288 -
aaaatagctttctaactcatct

SEQ ID NO: 122955 - DNA, 22 bp, Artificial Sequence
  Synthetic oligonucleotide; TTA chr11 5345287 5345308 5345292 5345287 -
aaatagctttctaactcatctc

SEQ ID NO: 122956 - DNA, 22 bp, Artificial Sequence
  Synthetic oligonucleotide; CTT chr11 5345278 5345299 5345283 5345278 -
tctaactcatctcttttcttgt

SEQ ID NO: 122957 - DNA, 22 bp, Artificial Sequence
  Synthetic oligonucleotide; TTT chr11 5345277 5345298 5345282 5345277 -
ctaactcatctcttttcttgtc

SEQ ID NO: 122958 - DNA, 22 bp, Artificial Sequence
  Synthetic oligonucleotide; TTC chr11 5345276 5345297 5345281 5345276 -
taactcatctcttttcttgtct

SEQ ID NO: 122959 - DNA, 22 bp, Artificial Sequence
  Synthetic oligonucleotide; CTA chr11 5345274 5345295 5345279 5345274 -
actcatctcttttcttgtctct

SEQ ID NO: 122960 - DNA, 22 bp, Artificial Sequence
  Synthetic oligonucleotide; CTC chr11 5345270 5345291 5345275 5345270 -
atctcttttcttgtctcttgct

SEQ ID NO: 122961 - DNA, 22 bp, Artificial Sequence
  Synthetic oligonucleotide; CTC chr11 5345265 5345286 5345270 5345265 -
ttttcttgtctcttgcttagtc

SEQ ID NO: 122962 - DNA, 22 bp, Artificial Sequence
  Synthetic oligonucleotide; CTT chr11 5345263 5345284 5345268 5345263 -
ttcttgtctcttgcttagtctt

SEQ ID NO: 122963 - DNA, 22 bp, Artificial Sequence
  Synthetic oligonucleotide; TTT chr11 5345262 5345283 5345267 5345262 -
tcttgtctcttgcttagtcttc

SEQ ID NO: 122964 - DNA, 22 bp, Artificial Sequence
  Synthetic oligonucleotide; TTT chr11 5345261 5345282 5345266 5345261 -
cttgtctcttgcttagtcttct

SEQ ID NO: 122965 - DNA, 22 bp, Artificial Sequence
  Synthetic oligonucleotide; TTC chr11 5345260 5345281 5345265 5345260 -
ttgtctcttgcttagtcttctt

SEQ ID NO: 122966 - DNA, 22 bp, Artificial Sequence
  Synthetic oligonucleotide; CTT chr11 5345258 5345279 5345263 5345258 -
gtctcttgcttagtcttcttca

SEQ ID NO: 122967 - DNA, 22 bp, Artificial Sequence
  Synthetic oligonucleotide; TTG chr11 5345257 5345278 5345262 5345257 -
tctcttgcttagtcttcttcac

SEQ ID NO: 122968 - DNA, 22 bp, Artificial Sequence
  Synthetic oligonucleotide; CTC chr11 5345253 5345274 5345258 5345253 -
ttgcttagtcttcttcacatag

SEQ ID NO: 122969 - DNA, 22 bp, Artificial Sequence
  Synthetic oligonucleotide; CTT chr11 5345251 5345272 5345256 5345251 -
gcttagtcttcttcacatagca

SEQ ID NO: 122970 - DNA, 22 bp, Artificial Sequence
  Synthetic oligonucleotide; TTG chr11 5345250 5345271 5345255 5345250 -
cttagtcttcttcacatagcag

SEQ ID NO: 122971 - DNA, 22 bp, Artificial Sequence
  Synthetic oligonucleotide; CTT chr11 5345247 5345268 5345252 5345247 -
agtcttcttcacatagcagtct

SEQ ID NO: 122972 - DNA, 22 bp, Artificial Sequence
  Synthetic oligonucleotide; TTA chr11 5345246 5345267 5345251 5345246 -
gtcttcttcacatagcagtcta

SEQ ID NO: 122973 - DNA, 22 bp, Artificial Sequence
  Synthetic oligonucleotide; CTT chr11 5345241 5345262 5345246 5345241 -
cttcacatagcagtctaagtga

SEQ ID NO: 122974 - DNA, 22 bp, Artificial Sequence
  Synthetic oligonucleotide; TTC chr11 5345240 5345261 5345245 5345240 -
ttcacatagcagtctaagtgag

SEQ ID NO: 122975 - DNA, 22 bp, Artificial Sequence
  Synthetic oligonucleotide; CTT chr11 5345238 5345259 5345243 5345238 -
cacatagcagtctaagtgagta

SEQ ID NO: 122976 - DNA, 22 bp, Artificial Sequence
  Synthetic oligonucleotide; TTC chr11 5345237 5345258 5345242 5345237 -
acatagcagtctaagtgagtaa

SEQ ID NO: 122977 - DNA, 22 bp, Artificial Sequence
  Synthetic oligonucleotide; CTA chr11 5345224 5345245 5345229 5345224 -
agtgagtaatttaaaaatacaa

SEQ ID NO: 122978 - DNA, 22 bp, Artificial Sequence
  Synthetic oligonucleotide; TTT chr11 5345212 5345233 5345217 5345212 -
aaaaatacaaatcagaatatat

SEQ ID NO: 122979 - DNA, 22 bp, Artificial Sequence
  Synthetic oligonucleotide; TTA chr11 5345211 5345232 5345216 5345211 -
aaaatacaaatcagaatatatc

SEQ ID NO: 122980 - DNA, 22 bp, Artificial Sequence
  Synthetic oligonucleotide; CTA chr11 5345180 5345201 5345185 5345180 -
ttttccattgtgattttcaaag

SEQ ID NO: 122981 - DNA, 22 bp, Artificial Sequence
  Synthetic oligonucleotide; TTT chr11 5345177 5345198 5345182 5345177 -
tccattgtgattttcaaagtgt

SEQ ID NO: 122982 - DNA, 22 bp, Artificial Sequence
  Synthetic oligonucleotide; TTT chr11 5345176 5345197 5345181 5345176 -
ccattgtgattttcaaagtgtc

SEQ ID NO: 122983 - DNA, 22 bp, Artificial Sequence
  Synthetic oligonucleotide; TTC chr11 5345175 5345196 5345180 5345175 -
cattgtgattttcaaagtgtcc

SEQ ID NO: 122984 - DNA, 22 bp, Artificial Sequence
  Synthetic oligonucleotide; TTG chr11 5345170 5345191 5345175 5345170 -
tgattttcaaagtgtcctaatg

SEQ ID NO: 122985 - DNA, 22 bp, Artificial Sequence
  Synthetic oligonucleotide; TTT chr11 5345164 5345185 5345169 5345164 -
tcaaagtgtcctaatgtcttta

SEQ ID NO: 122986 - DNA, 22 bp, Artificial Sequence
  Synthetic oligonucleotide; TTT chr11 5345163 5345184 5345168 5345163 -
caaagtgtcctaatgtctttac

SEQ ID NO: 122987 - DNA, 22 bp, Artificial Sequence
  Synthetic oligonucleotide; TTC chr11 5345162 5345183 5345167 5345162 -
aaagtgtcctaatgtctttact

SEQ ID NO: 122988 - DNA, 22 bp, Artificial Sequence
  Synthetic oligonucleotide; CTA chr11 5345151 5345172 5345156 5345151 -
atgtctttactacatttatagt

SEQ ID NO: 122989 - DNA, 22 bp, Artificial Sequence
  Synthetic oligonucleotide; CTT chr11 5345144 5345165 5345149 5345144 -
tactacatttatagtaagaaga

SEQ ID NO: 122990 - DNA, 22 bp, Artificial Sequence
  Synthetic oligonucleotide; TTT chr11 5345143 5345164 5345148 5345143 -
actacatttatagtaagaagaa

SEQ ID NO: 122991 - DNA, 22 bp, Artificial Sequence
  Synthetic oligonucleotide; TTA chr11 5345142 5345163 5345147 5345142 -
ctacatttatagtaagaagaaa

SEQ ID NO: 122992 - DNA, 22 bp, Artificial Sequence
  Synthetic oligonucleotide; CTA chr11 5345139 5345160 5345144 5345139 -
catttatagtaagaagaaaaca

SEQ ID NO: 122993 - DNA, 22 bp, Artificial Sequence
  Synthetic oligonucleotide; TTT chr11 5345134 5345155 5345139 5345134 -
atagtaagaagaaaacaaaaca

SEQ ID NO: 122994 - DNA, 22 bp, Artificial Sequence
  Synthetic oligonucleotide; TTA chr11 5345133 5345154 5345138 5345133 -
tagtaagaagaaaacaaaacaa

SEQ ID NO: 122995 - DNA, 22 bp, Artificial Sequence
  Synthetic oligonucleotide; TTC chr11 5345100 5345121 5345105 5345100 -
cgtggtggtctgtaaggcccta

SEQ ID NO: 122996 - DNA, 22 bp, Artificial Sequence
  Synthetic oligonucleotide; CTG chr11 5345088 5345109 5345093 5345088 -
taaggccctatgacacttgatt

SEQ ID NO: 122997 - DNA, 22 bp, Artificial Sequence
  Synthetic oligonucleotide; CTA chr11 5345078 5345099 5345083 5345078 -
tgacacttgattactacctgct

SEQ ID NO: 122998 - DNA, 22 bp, Artificial Sequence
  Synthetic oligonucleotide; CTT chr11 5345070 5345091 5345075 5345070 -
gattactacctgcttctttgac

SEQ ID NO: 122999 - DNA, 22 bp, Artificial Sequence
  Synthetic oligonucleotide; TTG chr11 5345069 5345090 5345074 5345069 -
attactacctgcttctttgaca

SEQ ID NO: 123000 - DNA, 22 bp, Artificial Sequence
  Synthetic oligonucleotide; TTA chr11 5345065 5345086 5345070 5345065 -
ctacctgcttctttgacatcat

SEQ ID NO: 123001 - DNA, 22 bp, Artificial Sequence
  Synthetic oligonucleotide; CTA chr11 5345062 5345083 5345067 5345062 -
cctgcttctttgacatcatcta

SEQ ID NO: 123002 - DNA, 22 bp, Artificial Sequence
  Synthetic oligonucleotide; CTG chr11 5345058 5345079 5345063 5345058 -
cttctttgacatcatctattgt

SEQ ID NO: 123003 - DNA, 22 bp, Artificial Sequence
  Synthetic oligonucleotide; CTT chr11 5345055 5345076 5345060 5345055 -
ctttgacatcatctattgtccc

SEQ ID NO: 123004 - DNA, 22 bp, Artificial Sequence
  Synthetic oligonucleotide; TTC chr11 5345054 5345075 5345059 5345054 -
tttgacatcatctattgtccct

SEQ ID NO: 123005 - DNA, 22 bp, Artificial Sequence
  Synthetic oligonucleotide; CTT chr11 5345052 5345073 5345057 5345052 -
tgacatcatctattgtccctct

SEQ ID NO: 123006 - DNA, 22 bp, Artificial Sequence
  Synthetic oligonucleotide; TTT chr11 5345051 5345072 5345056 5345051 -
gacatcatctattgtccctctc

SEQ ID NO: 123007 - DNA, 22 bp, Artificial Sequence
  Synthetic oligonucleotide; TTG chr11 5345050 5345071 5345055 5345050 -
acatcatctattgtccctctcc

SEQ ID NO: 123008 - DNA, 22 bp, Artificial Sequence
  Synthetic oligonucleotide; CTA chr11 5345040 5345061 5345045 5345040 -
ttgtccctctcctgttttctta

SEQ ID NO: 123009 - DNA, 22 bp, Artificial Sequence
  Synthetic oligonucleotide; TTG chr11 5345037 5345058 5345042 5345037 -
tccctctcctgttttcttatca

SEQ ID NO: 123010 - DNA, 22 bp, Artificial Sequence
  Synthetic oligonucleotide; CTC chr11 5345031 5345052 5345036 5345031 -
tcctgttttcttatcaaatgcc

SEQ ID NO: 123011 - DNA, 22 bp, Artificial Sequence
  Synthetic oligonucleotide; CTC chr11 5345029 5345050 5345034 5345029 -
ctgttttcttatcaaatgccag

SEQ ID NO: 123012 - DNA, 22 bp, Artificial Sequence
  Synthetic oligonucleotide; CTG chr11 5345026 5345047 5345031 5345026 -
ttttcttatcaaatgccagtca

SEQ ID NO: 123013 - DNA, 22 bp, Artificial Sequence
  Synthetic oligonucleotide; TTT chr11 5345023 5345044 5345028 5345023 -
tcttatcaaatgccagtcatgc

SEQ ID NO: 123014 - DNA, 22 bp, Artificial Sequence
  Synthetic oligonucleotide; TTT chr11 5345022 5345043 5345027 5345022 -
cttatcaaatgccagtcatgct

SEQ ID NO: 123015 - DNA, 22 bp, Artificial Sequence
  Synthetic oligonucleotide; TTC chr11 5345021 5345042 5345026 5345021 -
ttatcaaatgccagtcatgctg

SEQ ID NO: 123016 - DNA, 22 bp, Artificial Sequence
  Synthetic oligonucleotide; CTT chr11 5345019 5345040 5345024 5345019 -
atcaaatgccagtcatgctgat

SEQ ID NO: 123017 - DNA, 22 bp, Artificial Sequence
  Synthetic oligonucleotide; TTA chr11 5345018 5345039 5345023 5345018 -
tcaaatgccagtcatgctgatt

SEQ ID NO: 123018 - DNA, 22 bp, Artificial Sequence
  Synthetic oligonucleotide; CTG chr11 5344999 5345020 5345004 5344999 -
attttccctctggaacagtttt

SEQ ID NO: 123019 - DNA, 22 bp, Artificial Sequence
  Synthetic oligonucleotide; TTT chr11 5344995 5345016 5345000 5344995 -
tccctctggaacagttttcctc

SEQ ID NO: 123020 - DNA, 22 bp, Artificial Sequence
  Synthetic oligonucleotide; TTT chr11 5344994 5345015 5344999 5344994 -
ccctctggaacagttttcctct

SEQ ID NO: 123021 - DNA, 22 bp, Artificial Sequence
  Synthetic oligonucleotide; TTC chr11 5344993 5345014 5344998 5344993 -
cctctggaacagttttcctcta

SEQ ID NO: 123022 - DNA, 22 bp, Artificial Sequence
  Synthetic oligonucleotide; CTC chr11 5344989 5345010 5344994 5344989 -
tggaacagttttcctctaggtc

SEQ ID NO: 123023 - DNA, 22 bp, Artificial Sequence
  Synthetic oligonucleotide; CTG chr11 5344987 5345008 5344992 5344987 -
gaacagttttcctctaggtctg

SEQ ID NO: 123024 - DNA, 22 bp, Artificial Sequence
  Synthetic oligonucleotide; TTT chr11 5344978 5344999 5344983 5344978 -
tcctctaggtctgtatacggtc

SEQ ID NO: 123025 - DNA, 22 bp, Artificial Sequence
  Synthetic oligonucleotide; TTT chr11 5344977 5344998 5344982 5344977 -
cctctaggtctgtatacggtca

SEQ ID NO: 123026 - DNA, 22 bp, Artificial Sequence
  Synthetic oligonucleotide; TTC chr11 5344976 5344997 5344981 5344976 -
ctctaggtctgtatacggtcag

SEQ ID NO: 123027 - DNA, 22 bp, Artificial Sequence
  Synthetic oligonucleotide; CTC chr11 5344973 5344994 5344978 5344973 -
taggtctgtatacggtcaggtt

SEQ ID NO: 123028 - DNA, 22 bp, Artificial Sequence
  Synthetic oligonucleotide; CTA chr11 5344971 5344992 5344976 5344971 -
ggtctgtatacggtcaggtttt

SEQ ID NO: 123029 - DNA, 22 bp, Artificial Sequence
  Synthetic oligonucleotide; CTG chr11 5344965 5344986 5344970 5344965 -
tatacggtcaggttttcttttg

SEQ ID NO: 123030 - DNA, 22 bp, Artificial Sequence
  Synthetic oligonucleotide; TTT chr11 5344950 5344971 5344955 5344950 -
tcttttgtattgaggtctcagt

SEQ ID NO: 123031 - DNA, 22 bp, Artificial Sequence
  Synthetic oligonucleotide; TTT chr11 5344949 5344970 5344954 5344949 -
cttttgtattgaggtctcagtt

SEQ ID NO: 123032 - DNA, 22 bp, Artificial Sequence
  Synthetic oligonucleotide; TTC chr11 5344948 5344969 5344953 5344948 -
ttttgtattgaggtctcagttc

SEQ ID NO: 123033 - DNA, 22 bp, Artificial Sequence
  Synthetic oligonucleotide; CTT chr11 5344946 5344967 5344951 5344946 -
ttgtattgaggtctcagttcaa

SEQ ID NO: 123034 - DNA, 22 bp, Artificial Sequence
  Synthetic oligonucleotide; TTT chr11 5344945 5344966 5344950 5344945 -
tgtattgaggtctcagttcaaa

SEQ ID NO: 123035 - DNA, 22 bp, Artificial Sequence
  Synthetic oligonucleotide; TTT chr11 5344944 5344965 5344949 5344944 -
gtattgaggtctcagttcaaat

SEQ ID NO: 123036 - DNA, 22 bp, Artificial Sequence
  Synthetic oligonucleotide; TTG chr11 5344943 5344964 5344948 5344943 -
tattgaggtctcagttcaaatg

SEQ ID NO: 123037 - DNA, 22 bp, Artificial Sequence
  Synthetic oligonucleotide; TTG chr11 5344938 5344959 5344943 5344938 -
aggtctcagttcaaatgggacc

SEQ ID NO: 123038 - DNA, 22 bp, Artificial Sequence
  Synthetic oligonucleotide; CTC chr11 5344931 5344952 5344936 5344931 -
agttcaaatgggacctcctcat

SEQ ID NO: 123039 - DNA, 22 bp, Artificial Sequence
  Synthetic oligonucleotide; TTC chr11 5344926 5344947 5344931 5344926 -
aaatgggacctcctcataggtg

SEQ ID NO: 123040 - DNA, 22 bp, Artificial Sequence
  Synthetic oligonucleotide; CTC chr11 5344914 5344935 5344919 5344914 -
ctcataggtgcagttctaggcc

SEQ ID NO: 123041 - DNA, 22 bp, Artificial Sequence
  Synthetic oligonucleotide; CTC chr11 5344911 5344932 5344916 5344911 -
ataggtgcagttctaggcccct

SEQ ID NO: 123042 - DNA, 22 bp, Artificial Sequence
  Synthetic oligonucleotide; TTC chr11 5344898 5344919 5344903 5344898 -
taggcccctcaaactgctatac

SEQ ID NO: 123043 - DNA, 22 bp, Artificial Sequence
  Synthetic oligonucleotide; CTA chr11 5344896 5344917 5344901 5344896 -
ggcccctcaaactgctatacta

SEQ ID NO: 123044 - DNA, 22 bp, Artificial Sequence
  Synthetic oligonucleotide; CTC chr11 5344888 5344909 5344893 5344888 -
aaactgctatactatcttgtat

SEQ ID NO: 123045 - DNA, 22 bp, Artificial Sequence
  Synthetic oligonucleotide; CTG chr11 5344882 5344903 5344887 5344882 -
ctatactatcttgtatacaata

SEQ ID NO: 123046 - DNA, 22 bp, Artificial Sequence
  Synthetic oligonucleotide; CTA chr11 5344879 5344900 5344884 5344879 -
tactatcttgtatacaatacca

SEQ ID NO: 123047 - DNA, 22 bp, Artificial Sequence
  Synthetic oligonucleotide; CTA chr11 5344874 5344895 5344879 5344874 -
tcttgtatacaataccatccaa

SEQ ID NO: 123048 - DNA, 22 bp, Artificial Sequence
  Synthetic oligonucleotide; CTT chr11 5344870 5344891 5344875 5344870 -
gtatacaataccatccaattaa

SEQ ID NO: 123049 - DNA, 22 bp, Artificial Sequence
  Synthetic oligonucleotide; TTG chr11 5344869 5344890 5344874 5344869 -
tatacaataccatccaattaat

SEQ ID NO: 123050 - DNA, 22 bp, Artificial Sequence
  Synthetic oligonucleotide; TTA chr11 5344849 5344870 5344854 5344849 -
atctacatcaagtagtactgtt

SEQ ID NO: 123051 - DNA, 22 bp, Artificial Sequence
  Synthetic oligonucleotide; CTA chr11 5344844 5344865 5344849 5344844 -
catcaagtagtactgttttatg

SEQ ID NO: 123052 - DNA, 22 bp, Artificial Sequence
  Synthetic oligonucleotide; CTG chr11 5344829 5344850 5344834 5344829 -
ttttatgttaaacttgcattta

SEQ ID NO: 123053 - DNA, 22 bp, Artificial Sequence
  Synthetic oligonucleotide; TTT chr11 5344826 5344847 5344831 5344826 -
tatgttaaacttgcatttatat

SEQ ID NO: 123054 - DNA, 22 bp, Artificial Sequence
  Synthetic oligonucleotide; TTT chr11 5344825 5344846 5344830 5344825 -
atgttaaacttgcatttatatt

SEQ ID NO: 123055 - DNA, 22 bp, Artificial Sequence
  Synthetic oligonucleotide; TTA chr11 5344824 5344845 5344829 5344824 -
tgttaaacttgcatttatattt

SEQ ID NO: 123056 - DNA, 22 bp, Artificial Sequence
  Synthetic oligonucleotide; TTA chr11 5344819 5344840 5344824 5344819 -
aacttgcatttatatttgttta

SEQ ID NO: 123057 - DNA, 22 bp, Artificial Sequence
  Synthetic oligonucleotide; CTT chr11 5344814 5344835 5344819 5344814 -
gcatttatatttgtttaaaatt

SEQ ID NO: 123058 - DNA, 22 bp, Artificial Sequence
  Synthetic oligonucleotide; TTG chr11 5344813 5344834 5344818 5344813 -
catttatatttgtttaaaattg

SEQ ID NO: 123059 - DNA, 22 bp, Artificial Sequence
  Synthetic oligonucleotide; TTT chr11 5344808 5344829 5344813 5344808 -
atatttgtttaaaattgtctta

SEQ ID NO: 123060 - DNA, 22 bp, Artificial Sequence
  Synthetic oligonucleotide; TTA chr11 5344807 5344828 5344812 5344807 -
tatttgtttaaaattgtcttat

SEQ ID NO: 123061 - DNA, 22 bp, Artificial Sequence
  Synthetic oligonucleotide; TTT chr11 5344802 5344823 5344807 5344802 -
gtttaaaattgtcttatttatt

SEQ ID NO: 123062 - DNA, 22 bp, Artificial Sequence
  Synthetic oligonucleotide; TTG chr11 5344801 5344822 5344806 5344801 -
tttaaaattgtcttatttattt

SEQ ID NO: 123063 - DNA, 22 bp, Artificial Sequence
  Synthetic oligonucleotide; TTT chr11 5344798 5344819 5344803 5344798 -
aaaattgtcttatttatttttc

SEQ ID NO: 123064 - DNA, 22 bp, Artificial Sequence
  Synthetic oligonucleotide; TTA chr11 5344797 5344818 5344802 5344797 -
aaattgtcttatttatttttca

SEQ ID NO: 123065 - DNA, 22 bp, Artificial Sequence
  Synthetic oligonucleotide; TTG chr11 5344791 5344812 5344796 5344791 -
tcttatttatttttcaacttaa

SEQ ID NO: 123066 - DNA, 22 bp, Artificial Sequence
  Synthetic oligonucleotide; CTT chr11 5344787 5344808 5344792 5344787 -
atttatttttcaacttaattta

SEQ ID NO: 123067 - DNA, 22 bp, Artificial Sequence
  Synthetic oligonucleotide; TTA chr11 5344786 5344807 5344791 5344786 -
tttatttttcaacttaatttat

SEQ ID NO: 123068 - DNA, 22 bp, Artificial Sequence
  Synthetic oligonucleotide; TTT chr11 5344783 5344804 5344788 5344783 -
atttttcaacttaatttatggt

SEQ ID NO: 123069 - DNA, 22 bp, Artificial Sequence
  Synthetic oligonucleotide; TTA chr11 5344782 5344803 5344787 5344782 -
tttttcaacttaatttatggtt

SEQ ID NO: 123070 - DNA, 22 bp, Artificial Sequence
  Synthetic oligonucleotide; TTT chr11 5344779 5344800 5344784 5344779 -
ttcaacttaatttatggtttat

SEQ ID NO: 123071 - DNA, 22 bp, Artificial Sequence
  Synthetic oligonucleotide; TTT chr11 5344778 5344799 5344783 5344778 -
tcaacttaatttatggtttata

SEQ ID NO: 123072 - DNA, 22 bp, Artificial Sequence
  Synthetic oligonucleotide; TTT chr11 5344777 5344798 5344782 5344777 -
caacttaatttatggtttataa

SEQ ID NO: 123073 - DNA, 22 bp, Artificial Sequence
  Synthetic oligonucleotide; TTC chr11 5344776 5344797 5344781 5344776 -
aacttaatttatggtttataag

SEQ ID NO: 123074 - DNA, 22 bp, Artificial Sequence
  Synthetic oligonucleotide; CTT chr11 5344771 5344792 5344776 5344771 -
aatttatggtttataagattag

SEQ ID NO: 123075 - DNA, 22 bp, Artificial Sequence
  Synthetic oligonucleotide; TTA chr11 5344770 5344791 5344775 5344770 -
atttatggtttataagattagg

SEQ ID NO: 123076 - DNA, 22 bp, Artificial Sequence
  Synthetic oligonucleotide; TTT chr11 5344766 5344787 5344771 5344766 -
atggtttataagattagggact

SEQ ID NO: 123077 - DNA, 22 bp, Artificial Sequence
  Synthetic oligonucleotide; TTA chr11 5344765 5344786 5344770 5344765 -
tggtttataagattagggactt

SEQ ID NO: 123078 - DNA, 22 bp, Artificial Sequence
  Synthetic oligonucleotide; TTT chr11 5344759 5344780 5344764 5344759 -
ataagattagggactttgtctt

SEQ ID NO: 123079 - DNA, 22 bp, Artificial Sequence
  Synthetic oligonucleotide; TTA chr11 5344758 5344779 5344763 5344758 -
taagattagggactttgtctta

SEQ ID NO: 123080 - DNA, 22 bp, Artificial Sequence
  Synthetic oligonucleotide; TTA chr11 5344750 5344771 5344755 5344750 -
gggactttgtcttattaccatt

SEQ ID NO: 123081 - DNA, 22 bp, Artificial Sequence
  Synthetic oligonucleotide; CTT chr11 5344743 5344764 5344748 5344743 -
tgtcttattaccatttaattcc

SEQ ID NO: 123082 - DNA, 22 bp, Artificial Sequence
  Synthetic oligonucleotide; TTT chr11 5344742 5344763 5344747 5344742 -
gtcttattaccatttaattcca

SEQ ID NO: 123083 - DNA, 22 bp, Artificial Sequence
  Synthetic oligonucleotide; TTG chr11 5344741 5344762 5344746 5344741 -
tcttattaccatttaattccag

SEQ ID NO: 123084 - DNA, 22 bp, Artificial Sequence
  Synthetic oligonucleotide; CTT chr11 5344737 5344758 5344742 5344737 -
attaccatttaattccagagag

SEQ ID NO: 123085 - DNA, 22 bp, Artificial Sequence
  Synthetic oligonucleotide; TTA chr11 5344736 5344757 5344741 5344736 -
ttaccatttaattccagagagc

SEQ ID NO: 123086 - DNA, 22 bp, Artificial Sequence
  Synthetic oligonucleotide; TTA chr11 5344733 5344754 5344738 5344733 -
ccatttaattccagagagcttt

SEQ ID NO: 123087 - DNA, 22 bp, Artificial Sequence
  Synthetic oligonucleotide; TTT chr11 5344727 5344748 5344732 5344727 -
aattccagagagctttaaatat

SEQ ID NO: 123088 - DNA, 22 bp, Artificial Sequence
  Synthetic oligonucleotide; TTA chr11 5344726 5344747 5344731 5344726 -
attccagagagctttaaatatc

SEQ ID NO: 123089 - DNA, 22 bp, Artificial Sequence
  Synthetic oligonucleotide; TTC chr11 5344722 5344743 5344727 5344722 -
cagagagctttaaatatcatgg

SEQ ID NO: 123090 - DNA, 22 bp, Artificial Sequence
  Synthetic oligonucleotide; CTT chr11 5344712 5344733 5344717 5344712 -
taaatatcatggctgtcacatg

SEQ ID NO: 123091 - DNA, 22 bp, Artificial Sequence
  Synthetic oligonucleotide; TTT chr11 5344711 5344732 5344716 5344711 -
aaatatcatggctgtcacatga

SEQ ID NO: 123092 - DNA, 22 bp, Artificial Sequence
  Synthetic oligonucleotide; TTA chr11 5344710 5344731 5344715 5344710 -
aatatcatggctgtcacatgat

SEQ ID NO: 123093 - DNA, 22 bp, Artificial Sequence
  Synthetic oligonucleotide; CTG chr11 5344697 5344718 5344702 5344697 -
tcacatgatgcgtgttcacaaa

SEQ ID NO: 123094 - DNA, 22 bp, Artificial Sequence
  Synthetic oligonucleotide; TTC chr11 5344680 5344701 5344685 5344680 -
acaaatattaggtgaactaaga

SEQ ID NO: 123095 - DNA, 22 bp, Artificial Sequence
  Synthetic oligonucleotide; TTA chr11 5344670 5344691 5344675 5344670 -
ggtgaactaagaaatgtttatc

SEQ ID NO: 123096 - DNA, 22 bp, Artificial Sequence
  Synthetic oligonucleotide; CTA chr11 5344661 5344682 5344666 5344661 -
agaaatgtttatcagtcacatg

SEQ ID NO: 123097 - DNA, 22 bp, Artificial Sequence
  Synthetic oligonucleotide; TTT chr11 5344651 5344672 5344656 5344651 -
atcagtcacatgttagatactt

SEQ ID NO: 123098 - DNA, 22 bp, Artificial Sequence
  Synthetic oligonucleotide; TTA chr11 5344650 5344671 5344655 5344650 -
tcagtcacatgttagatacttt

SEQ ID NO: 123099 - DNA, 22 bp, Artificial Sequence
  Synthetic oligonucleotide; TTA chr11 5344636 5344657 5344641 5344636 -
gatactttgcaaggtgttgagc

SEQ ID NO: 123100 - DNA, 22 bp, Artificial Sequence
  Synthetic oligonucleotide; CTT chr11 5344629 5344650 5344634 5344629 -
tgcaaggtgttgagcaaagcaa

SEQ ID NO: 123101 - DNA, 22 bp, Artificial Sequence
  Synthetic oligonucleotide; TTT chr11 5344628 5344649 5344633 5344628 -
gcaaggtgttgagcaaagcaaa

SEQ ID NO: 123102 - DNA, 22 bp, Artificial Sequence
  Synthetic oligonucleotide; TTG chr11 5344627 5344648 5344632 5344627 -
caaggtgttgagcaaagcaaat

SEQ ID NO: 123103 - DNA, 22 bp, Artificial Sequence
  Synthetic oligonucleotide; TTG chr11 5344617 5344638 5344622 5344617 -
agcaaagcaaataaacaccatg

SEQ ID NO: 123104 - DNA, 22 bp, Artificial Sequence
  Synthetic oligonucleotide; CTA chr11 5344591 5344612 5344596 5344591 -
tatgcaagaagcccctagtcta

SEQ ID NO: 123105 - DNA, 22 bp, Artificial Sequence
  Synthetic oligonucleotide; CTA chr11 5344574 5344595 5344579 5344574 -
gtctagtggcagaaggaatatt

SEQ ID NO: 123106 - DNA, 22 bp, Artificial Sequence
  Synthetic oligonucleotide; CTA chr11 5344569 5344590 5344574 5344569 -
gtggcagaaggaatattaaaac

SEQ ID NO: 123107 - DNA, 22 bp, Artificial Sequence
  Synthetic oligonucleotide; TTA chr11 5344551 5344572 5344556 5344551 -
aaaccttctcaaaggactaatc

SEQ ID NO: 123108 - DNA, 22 bp, Artificial Sequence
  Synthetic oligonucleotide; CTT chr11 5344544 5344565 5344549 5344544 -
ctcaaaggactaatctcttctc

SEQ ID NO: 123109 - DNA, 22 bp, Artificial Sequence
  Synthetic oligonucleotide; TTC chr11 5344543 5344564 5344548 5344543 -
tcaaaggactaatctcttctct

SEQ ID NO: 123110 - DNA, 22 bp, Artificial Sequence
  Synthetic oligonucleotide; CTC chr11 5344541 5344562 5344546 5344541 -
aaaggactaatctcttctcttc

SEQ ID NO: 123111 - DNA, 22 bp, Artificial Sequence
  Synthetic oligonucleotide; CTA chr11 5344532 5344553 5344537 5344532 -
atctcttctcttcagtaaaaga

SEQ ID NO: 123112 - DNA, 22 bp, Artificial Sequence
  Synthetic oligonucleotide; CTC chr11 5344527 5344548 5344532 5344527 -
ttctcttcagtaaaagacagca

SEQ ID NO: 123113 - DNA, 22 bp, Artificial Sequence
  Synthetic oligonucleotide; CTT chr11 5344525 5344546 5344530 5344525 -
ctcttcagtaaaagacagcacc

SEQ ID NO: 123114 - DNA, 22 bp, Artificial Sequence
  Synthetic oligonucleotide; TTC chr11 5344524 5344545 5344529 5344524 -
tcttcagtaaaagacagcacca

SEQ ID NO: 123115 - DNA, 22 bp, Artificial Sequence
  Synthetic oligonucleotide; CTC chr11 5344522 5344543 5344527 5344522 -
ttcagtaaaagacagcaccacg

SEQ ID NO: 123116 - DNA, 22 bp, Artificial Sequence
  Synthetic oligonucleotide; CTT chr11 5344520 5344541 5344525 5344520 -
cagtaaaagacagcaccacgtt

SEQ ID NO: 123117 - DNA, 22 bp, Artificial Sequence
  Synthetic oligonucleotide; TTC chr11 5344519 5344540 5344524 5344519 -
agtaaaagacagcaccacgttt

SEQ ID NO: 123118 - DNA, 22 bp, Artificial Sequence
  Synthetic oligonucleotide; TTT chr11 5344497 5344518 5344502 5344497 -
aagcagggaaatagctctcact

SEQ ID NO: 123119 - DNA, 22 bp, Artificial Sequence
  Synthetic oligonucleotide; TTA chr11 5344496 5344517 5344501 5344496 -
agcagggaaatagctctcactc

SEQ ID NO: 123120 - DNA, 22 bp, Artificial Sequence
  Synthetic oligonucleotide; CTC chr11 5344480 5344501 5344485 5344480 -
tcactcagtattggggagaaca

SEQ ID NO: 123121 - DNA, 22 bp, Artificial Sequence
  Synthetic oligonucleotide; CTC chr11 5344478 5344499 5344483 5344478 -
actcagtattggggagaacaga

SEQ ID NO: 123122 - DNA, 22 bp, Artificial Sequence
  Synthetic oligonucleotide; CTC chr11 5344474 5344495 5344479 5344474 -
agtattggggagaacagattca

SEQ ID NO: 123123 - DNA, 22 bp, Artificial Sequence
  Synthetic oligonucleotide; TTG chr11 5344467 5344488 5344472 5344467 -
gggagaacagattcagaagcct

SEQ ID NO: 123124 - DNA, 22 bp, Artificial Sequence
  Synthetic oligonucleotide; TTC chr11 5344453 5344474 5344458 5344453 -
agaagcctatggctggggataa

SEQ ID NO: 123125 - DNA, 22 bp, Artificial Sequence
  Synthetic oligonucleotide; CTA chr11 5344444 5344465 5344449 5344444 -
tggctggggataaagggaagga

SEQ ID NO: 123126 - DNA, 22 bp, Artificial Sequence
  Synthetic oligonucleotide; CTG chr11 5344438 5344459 5344443 5344438 -
gggataaagggaaggaaaccag

SEQ ID NO: 123127 - DNA, 22 bp, Artificial Sequence
  Synthetic oligonucleotide; TTT chr11 5344402 5344423 5344407 5344402 -
aaatataaatggagaacttgaa

SEQ ID NO: 123128 - DNA, 22 bp, Artificial Sequence
  Synthetic oligonucleotide; TTA chr11 5344401 5344422 5344406 5344401 -
aatataaatggagaacttgaaa

SEQ ID NO: 123129 - DNA, 22 bp, Artificial Sequence
  Synthetic oligonucleotide; CTT chr11 5344383 5344404 5344388 5344383 -
gaaatgagagaggtcagattct

SEQ ID NO: 123130 - DNA, 22 bp, Artificial Sequence
  Synthetic oligonucleotide; TTG chr11 5344382 5344403 5344387 5344382 -
aaatgagagaggtcagattcta

SEQ ID NO: 123131 - DNA, 22 bp, Artificial Sequence
  Synthetic oligonucleotide; TTC chr11 5344362 5344383 5344367 5344362 -
tagggaattacttcagtaggcc

SEQ ID NO: 123132 - DNA, 22 bp, Artificial Sequence
  Synthetic oligonucleotide; CTA chr11 5344360 5344381 5344365 5344360 -
gggaattacttcagtaggccta

SEQ ID NO: 123133 - DNA, 22 bp, Artificial Sequence
  Synthetic oligonucleotide; TTA chr11 5344352 5344373 5344357 5344352 -
cttcagtaggcctatagaaaaa

SEQ ID NO: 123134 - DNA, 22 bp, Artificial Sequence
  Synthetic oligonucleotide; CTT chr11 5344349 5344370 5344354 5344349 -
cagtaggcctatagaaaaataa

SEQ ID NO: 123135 - DNA, 22 bp, Artificial Sequence
  Synthetic oligonucleotide; TTC chr11 5344348 5344369 5344353 5344348 -
agtaggcctatagaaaaataat

SEQ ID NO: 123136 - DNA, 22 bp, Artificial Sequence
  Synthetic oligonucleotide; CTA chr11 5344338 5344359 5344343 5344338 -
tagaaaaataatttaaaaagaa

SEQ ID NO: 123137 - DNA, 22 bp, Artificial Sequence
  Synthetic oligonucleotide; TTT chr11 5344324 5344345 5344329 5344324 -
aaaaagaaaaagacactacttg

SEQ ID NO: 123138 - DNA, 22 bp, Artificial Sequence
  Synthetic oligonucleotide; TTA chr11 5344323 5344344 5344328 5344323 -
aaaagaaaaagacactacttgt

SEQ ID NO: 123139 - DNA, 22 bp, Artificial Sequence
  Synthetic oligonucleotide; CTA chr11 5344306 5344327 5344311 5344306 -
cttgtaaataagaaacagtaag

SEQ ID NO: 123140 - DNA, 22 bp, Artificial Sequence
  Synthetic oligonucleotide; CTT chr11 5344303 5344324 5344308 5344303 -
gtaaataagaaacagtaagatg

SEQ ID NO: 123141 - DNA, 22 bp, Artificial Sequence
  Synthetic oligonucleotide; TTG chr11 5344302 5344323 5344307 5344302 -
taaataagaaacagtaagatgt

SEQ ID NO: 123142 - DNA, 22 bp, Artificial Sequence
  Synthetic oligonucleotide; TTT chr11 5344278 5344299 5344283 5344278 -
aaactgaaggagatacactatt

SEQ ID NO: 123143 - DNA, 22 bp, Artificial Sequence
  Synthetic oligonucleotide; TTA chr11 5344277 5344298 5344282 5344277 -
aactgaaggagatacactatta

SEQ ID NO: 123144 - DNA, 22 bp, Artificial Sequence
  Synthetic oligonucleotide; CTG chr11 5344272 5344293 5344277 5344272 -
aaggagatacactattataagt

SEQ ID NO: 123145 - DNA, 22 bp, Artificial Sequence
  Synthetic oligonucleotide; CTA chr11 5344258 5344279 5344263 5344258 -
ttataagtgatgtctttggctg

SEQ ID NO: 123146 - DNA, 22 bp, Artificial Sequence
  Synthetic oligonucleotide; TTA chr11 5344255 5344276 5344260 5344255 -
taagtgatgtctttggctggcc

SEQ ID NO: 123147 - DNA, 22 bp, Artificial Sequence
  Synthetic oligonucleotide; CTT chr11 5344242 5344263 5344247 5344242 -
tggctggcctaatcatttattc

SEQ ID NO: 123148 - DNA, 22 bp, Artificial Sequence
  Synthetic oligonucleotide; TTT chr11 5344241 5344262 5344246 5344241 -
ggctggcctaatcatttattcc

SEQ ID NO: 123149 - DNA, 22 bp, Artificial Sequence
  Synthetic oligonucleotide; TTG chr11 5344240 5344261 5344245 5344240 -
gctggcctaatcatttattcca

SEQ ID NO: 123150 - DNA, 22 bp, Artificial Sequence
  Synthetic oligonucleotide; CTG chr11 5344236 5344257 5344241 5344236 -
gcctaatcatttattccagccc

SEQ ID NO: 123151 - DNA, 22 bp, Artificial Sequence
  Synthetic oligonucleotide; CTA chr11 5344231 5344252 5344236 5344231 -
atcatttattccagccccaaag

SEQ ID NO: 123152 - DNA, 22 bp, Artificial Sequence
  Synthetic oligonucleotide; TTT chr11 5344224 5344245 5344229 5344224 -
attccagccccaaagtctaact

SEQ ID NO: 123153 - DNA, 22 bp, Artificial Sequence
  Synthetic oligonucleotide; TTA chr11 5344223 5344244 5344228 5344223 -
ttccagccccaaagtctaactt

SEQ ID NO: 123154 - DNA, 22 bp, Artificial Sequence
  Synthetic oligonucleotide; TTC chr11 5344220 5344241 5344225 5344220 -
cagccccaaagtctaacttata

SEQ ID NO: 123155 - DNA, 22 bp, Artificial Sequence
  Synthetic oligonucleotide; CTA chr11 5344205 5344226 5344210 5344205 -
acttataattagactgagctat

SEQ ID NO: 123156 - DNA, 22 bp, Artificial Sequence
  Synthetic oligonucleotide; CTT chr11 5344201 5344222 5344206 5344201 -
ataattagactgagctattgtc

SEQ ID NO: 123157 - DNA, 22 bp, Artificial Sequence
  Synthetic oligonucleotide; TTA chr11 5344200 5344221 5344205 5344200 -
taattagactgagctattgtca

SEQ ID NO: 123158 - DNA, 22 bp, Artificial Sequence
  Synthetic oligonucleotide; TTA chr11 5344194 5344215 5344199 5344194 -
gactgagctattgtcacaagta

SEQ ID NO: 123159 - DNA, 22 bp, Artificial Sequence
  Synthetic oligonucleotide; CTG chr11 5344189 5344210 5344194 5344189 -
agctattgtcacaagtagtgag

SEQ ID NO: 123160 - DNA, 22 bp, Artificial Sequence
  Synthetic oligonucleotide; CTA chr11 5344184 5344205 5344189 5344184 -
ttgtcacaagtagtgagtagta

SEQ ID NO: 123161 - DNA, 22 bp, Artificial Sequence
  Synthetic oligonucleotide; TTG chr11 5344181 5344202 5344186 5344181 -
tcacaagtagtgagtagtactg

SEQ ID NO: 123162 - DNA, 22 bp, Artificial Sequence
  Synthetic oligonucleotide; CTG chr11 5344159 5344180 5344164 5344159 -
aaggattctacaagagggtaat

SEQ ID NO: 123163 - DNA, 22 bp, Artificial Sequence
  Synthetic oligonucleotide; TTC chr11 5344151 5344172 5344156 5344151 -
tacaagagggtaattcacacta

SEQ ID NO: 123164 - DNA, 22 bp, Artificial Sequence
  Synthetic oligonucleotide; CTA chr11 5344149 5344170 5344154 5344149 -
caagagggtaattcacactaat

SEQ ID NO: 123165 - DNA, 22 bp, Artificial Sequence
  Synthetic oligonucleotide; TTC chr11 5344135 5344156 5344140 5344135 -
acactaatcgtgaatgtctgtt

SEQ ID NO: 123166 - DNA, 22 bp, Artificial Sequence
  Synthetic oligonucleotide; CTA chr11 5344129 5344150 5344134 5344129 -
atcgtgaatgtctgttccccat

SEQ ID NO: 123167 - DNA, 22 bp, Artificial Sequence
  Synthetic oligonucleotide; CTG chr11 5344115 5344136 5344120 5344115 -
ttccccatcactagtccatgaa

SEQ ID NO: 123168 - DNA, 22 bp, Artificial Sequence
  Synthetic oligonucleotide; TTC chr11 5344112 5344133 5344117 5344112 -
cccatcactagtccatgaaatc

SEQ ID NO: 123169 - DNA, 22 bp, Artificial Sequence
  Synthetic oligonucleotide; CTA chr11 5344102 5344123 5344107 5344102 -
gtccatgaaatctggaggccaa

SEQ ID NO: 123170 - DNA, 22 bp, Artificial Sequence
  Synthetic oligonucleotide; CTG chr11 5344088 5344109 5344093 5344088 -
gaggccaagtgtctctttctca

SEQ ID NO: 123171 - DNA, 22 bp, Artificial Sequence
  Synthetic oligonucleotide; CTC chr11 5344073 5344094 5344078 5344073 -
tttctcaatctgactgctcctt

SEQ ID NO: 123172 - DNA, 22 bp, Artificial Sequence
  Synthetic oligonucleotide; CTT chr11 5344071 5344092 5344076 5344071 -
tctcaatctgactgctccttag

SEQ ID NO: 123173 - DNA, 22 bp, Artificial Sequence
  Synthetic oligonucleotide; TTT chr11 5344070 5344091 5344075 5344070 -
ctcaatctgactgctccttagc

SEQ ID NO: 123174 - DNA, 22 bp, Artificial Sequence
  Synthetic oligonucleotide; TTC chr11 5344069 5344090 5344074 5344069 -
tcaatctgactgctccttagct

SEQ ID NO: 123175 - DNA, 22 bp, Artificial Sequence
  Synthetic oligonucleotide; CTC chr11 5344067 5344088 5344072 5344067 -
aatctgactgctccttagctac

SEQ ID NO: 123176 - DNA, 22 bp, Artificial Sequence
  Synthetic oligonucleotide; CTG chr11 5344061 5344082 5344066 5344061 -
actgctccttagctacagtggt

SEQ ID NO: 123177 - DNA, 22 bp, Artificial Sequence
  Synthetic oligonucleotide; CTG chr11 5344057 5344078 5344062 5344057 -
ctccttagctacagtggtagtg

SEQ ID NO: 123178 - DNA, 22 bp, Artificial Sequence
  Synthetic oligonucleotide; CTC chr11 5344054 5344075 5344059 5344054 -
cttagctacagtggtagtggca

SEQ ID NO: 123179 - DNA, 22 bp, Artificial Sequence
  Synthetic oligonucleotide; CTT chr11 5344051 5344072 5344056 5344051 -
agctacagtggtagtggcagag

SEQ ID NO: 123180 - DNA, 22 bp, Artificial Sequence
  Synthetic oligonucleotide; TTA chr11 5344050 5344071 5344055 5344050 -
gctacagtggtagtggcagagt

SEQ ID NO: 123181 - DNA, 22 bp, Artificial Sequence
  Synthetic oligonucleotide; CTA chr11 5344046 5344067 5344051 5344046 -
cagtggtagtggcagagtttct

SEQ ID NO: 123182 - DNA, 22 bp, Artificial Sequence
  Synthetic oligonucleotide; TTT chr11 5344026 5344047 5344031 5344026 -
ctcttcccacacttttctttct

SEQ ID NO: 123183 - DNA, 22 bp, Artificial Sequence
  Synthetic oligonucleotide; TTC chr11 5344025 5344046 5344030 5344025 -
tcttcccacacttttctttctt

SEQ ID NO: 123184 - DNA, 22 bp, Artificial Sequence
  Synthetic oligonucleotide; CTC chr11 5344023 5344044 5344028 5344023 -
ttcccacacttttctttcttag

SEQ ID NO: 123185 - DNA, 22 bp, Artificial Sequence
  Synthetic oligonucleotide; CTT chr11 5344021 5344042 5344026 5344021 -
cccacacttttctttcttaggc

SEQ ID NO: 123186 - DNA, 22 bp, Artificial Sequence
  Synthetic oligonucleotide; TTC chr11 5344020 5344041 5344025 5344020 -
ccacacttttctttcttaggct

SEQ ID NO: 123187 - DNA, 22 bp, Artificial Sequence
  Synthetic oligonucleotide; CTT chr11 5344012 5344033 5344017 5344012 -
ttctttcttaggctgttgagac

SEQ ID NO: 123188 - DNA, 22 bp, Artificial Sequence
  Synthetic oligonucleotide; TTT chr11 5344011 5344032 5344016 5344011 -
tctttcttaggctgttgagact

SEQ ID NO: 123189 - DNA, 22 bp, Artificial Sequence
  Synthetic oligonucleotide; TTT chr11 5344010 5344031 5344015 5344010 -
ctttcttaggctgttgagactt

SEQ ID NO: 123190 - DNA, 22 bp, Artificial Sequence
  Synthetic oligonucleotide; TTC chr11 5344009 5344030 5344014 5344009 -
tttcttaggctgttgagacttt

SEQ ID NO: 123191 - DNA, 22 bp, Artificial Sequence
  Synthetic oligonucleotide; CTT chr11 5344007 5344028 5344012 5344007 -
tcttaggctgttgagactttag

SEQ ID NO: 123192 - DNA, 22 bp, Artificial Sequence
  Synthetic oligonucleotide; TTT chr11 5344006 5344027 5344011 5344006 -
cttaggctgttgagactttagc

SEQ ID NO: 123193 - DNA, 22 bp, Artificial Sequence
  Synthetic oligonucleotide; TTC chr11 5344005 5344026 5344010 5344005 -
ttaggctgttgagactttagct

SEQ ID NO: 123194 - DNA, 22 bp, Artificial Sequence
  Synthetic oligonucleotide; CTT chr11 5344003 5344024 5344008 5344003 -
aggctgttgagactttagctga

SEQ ID NO: 123195 - DNA, 22 bp, Artificial Sequence
  Synthetic oligonucleotide; TTA chr11 5344002 5344023 5344007 5344002 -
ggctgttgagactttagctgat

SEQ ID NO: 123196 - DNA, 22 bp, Artificial Sequence
  Synthetic oligonucleotide; CTG chr11 5343997 5344018 5344002 5343997 -
ttgagactttagctgataattc

SEQ ID NO: 123197 - DNA, 22 bp, Artificial Sequence
  Synthetic oligonucleotide; TTG chr11 5343994 5344015 5343999 5343994 -
agactttagctgataattcagg

SEQ ID NO: 123198 - DNA, 22 bp, Artificial Sequence
  Synthetic oligonucleotide; CTT chr11 5343988 5344009 5343993 5343988 -
tagctgataattcaggtaagtc

SEQ ID NO: 123199 - DNA, 22 bp, Artificial Sequence
  Synthetic oligonucleotide; TTT chr11 5343987 5344008 5343992 5343987 -
agctgataattcaggtaagtct

SEQ ID NO: 123200 - DNA, 22 bp, Artificial Sequence
  Synthetic oligonucleotide; TTA chr11 5343986 5344007 5343991 5343986 -
gctgataattcaggtaagtctt

SEQ ID NO: 123201 - DNA, 22 bp, Artificial Sequence
  Synthetic oligonucleotide; CTG chr11 5343982 5344003 5343987 5343982 -
ataattcaggtaagtctttaca

SEQ ID NO: 123202 - DNA, 22 bp, Artificial Sequence
  Synthetic oligonucleotide; TTC chr11 5343975 5343996 5343980 5343975 -
aggtaagtctttacatgcagga

SEQ ID NO: 123203 - DNA, 22 bp, Artificial Sequence
  Synthetic oligonucleotide; CTT chr11 5343964 5343985 5343969 5343964 -
tacatgcaggaaaatgtggatt

SEQ ID NO: 123204 - DNA, 22 bp, Artificial Sequence
  Synthetic oligonucleotide; TTT chr11 5343963 5343984 5343968 5343963 -
acatgcaggaaaatgtggatta

SEQ ID NO: 123205 - DNA, 22 bp, Artificial Sequence
  Synthetic oligonucleotide; TTA chr11 5343962 5343983 5343967 5343962 -
catgcaggaaaatgtggattag

SEQ ID NO: 123206 - DNA, 22 bp, Artificial Sequence
  Synthetic oligonucleotide; TTA chr11 5343941 5343962 5343946 5343941 -
gggatcactactgtgaaggcaa

SEQ ID NO: 123207 - DNA, 22 bp, Artificial Sequence
  Synthetic oligonucleotide; CTA chr11 5343931 5343952 5343936 5343931 -
ctgtgaaggcaattacaggttt

SEQ ID NO: 123208 - DNA, 22 bp, Artificial Sequence
  Synthetic oligonucleotide; CTG chr11 5343928 5343949 5343933 5343928 -
tgaaggcaattacaggtttagg

SEQ ID NO: 123209 - DNA, 22 bp, Artificial Sequence
  Synthetic oligonucleotide; TTA chr11 5343916 5343937 5343921 5343916 -
caggtttaggtggtagaccaga

SEQ ID NO: 123210 - DNA, 22 bp, Artificial Sequence
  Synthetic oligonucleotide; TTT chr11 5343909 5343930 5343914 5343909 -
aggtggtagaccagaaaaaaat

SEQ ID NO: 123211 - DNA, 22 bp, Artificial Sequence
  Synthetic oligonucleotide; TTA chr11 5343908 5343929 5343913 5343908 -
ggtggtagaccagaaaaaaatt

SEQ ID NO: 123212 - DNA, 22 bp, Artificial Sequence
  Synthetic oligonucleotide; TTA chr11 5343885 5343906 5343890 5343885 -
gtgttagctttctggaaatccc

SEQ ID NO: 123213 - DNA, 22 bp, Artificial Sequence
  Synthetic oligonucleotide; TTA chr11 5343879 5343900 5343884 5343879 -
gctttctggaaatccccttgaa

SEQ ID NO: 123214 - DNA, 22 bp, Artificial Sequence
  Synthetic oligonucleotide; CTT chr11 5343875 5343896 5343880 5343875 -
tctggaaatccccttgaatgcc

SEQ ID NO: 123215 - DNA, 22 bp, Artificial Sequence
  Synthetic oligonucleotide; TTT chr11 5343874 5343895 5343879 5343874 -
ctggaaatccccttgaatgccc

SEQ ID NO: 123216 - DNA, 22 bp, Artificial Sequence
  Synthetic oligonucleotide; TTC chr11 5343873 5343894 5343878 5343873 -
tggaaatccccttgaatgcccc

SEQ ID NO: 123217 - DNA, 22 bp, Artificial Sequence
  Synthetic oligonucleotide; CTG chr11 5343871 5343892 5343876 5343871 -
gaaatccccttgaatgccccat

SEQ ID NO: 123218 - DNA, 22 bp, Artificial Sequence
  Synthetic oligonucleotide; CTT chr11 5343860 5343881 5343865 5343860 -
gaatgccccatagaatacgaat

SEQ ID NO: 123219 - DNA, 22 bp, Artificial Sequence
  Synthetic oligonucleotide; TTG chr11 5343859 5343880 5343864 5343859 -
aatgccccatagaatacgaatt

SEQ ID NO: 123220 - DNA, 22 bp, Artificial Sequence
  Synthetic oligonucleotide; TTC chr11 5343836 5343857 5343841 5343836 -
tttaaaatctgcatagttaagg

SEQ ID NO: 123221 - DNA, 22 bp, Artificial Sequence
  Synthetic oligonucleotide; CTT chr11 5343834 5343855 5343839 5343834 -
taaaatctgcatagttaagggt

SEQ ID NO: 123222 - DNA, 22 bp, Artificial Sequence
  Synthetic oligonucleotide; TTT chr11 5343833 5343854 5343838 5343833 -
aaaatctgcatagttaagggta

SEQ ID NO: 123223 - DNA, 22 bp, Artificial Sequence
  Synthetic oligonucleotide; TTA chr11 5343832 5343853 5343837 5343832 -
aaatctgcatagttaagggtaa

SEQ ID NO: 123224 - DNA, 22 bp, Artificial Sequence
  Synthetic oligonucleotide; CTG chr11 5343825 5343846 5343830 5343825 -
catagttaagggtaacagttta

SEQ ID NO: 123225 - DNA, 22 bp, Artificial Sequence
  Synthetic oligonucleotide; TTA chr11 5343817 5343838 5343822 5343817 -
agggtaacagtttagaagttgt

SEQ ID NO: 123226 - DNA, 22 bp, Artificial Sequence
  Synthetic oligonucleotide; TTT chr11 5343804 5343825 5343809 5343804 -
agaagttgtagtttacataatt

SEQ ID NO: 123227 - DNA, 22 bp, Artificial Sequence
  Synthetic oligonucleotide; TTA chr11 5343803 5343824 5343808 5343803 -
gaagttgtagtttacataattt

SEQ ID NO: 123228 - DNA, 22 bp, Artificial Sequence
  Synthetic oligonucleotide; TTG chr11 5343796 5343817 5343801 5343796 -
tagtttacataattttttttct

SEQ ID NO: 123229 - DNA, 22 bp, Artificial Sequence
  Synthetic oligonucleotide; TTT chr11 5343790 5343811 5343795 5343790 -
acataattttttttctgaagag

SEQ ID NO: 123230 - DNA, 22 bp, Artificial Sequence
  Synthetic oligonucleotide; TTA chr11 5343789 5343810 5343794 5343789 -
cataattttttttctgaagaga

SEQ ID NO: 123231 - DNA, 22 bp, Artificial Sequence
  Synthetic oligonucleotide; TTT chr11 5343781 5343802 5343786 5343781 -
tttttctgaagagaatgcttaa

SEQ ID NO: 123232 - DNA, 22 bp, Artificial Sequence
  Synthetic oligonucleotide; TTT chr11 5343780 5343801 5343785 5343780 -
ttttctgaagagaatgcttaaa

SEQ ID NO: 123233 - DNA, 22 bp, Artificial Sequence
  Synthetic oligonucleotide; TTT chr11 5343779 5343800 5343784 5343779 -
tttctgaagagaatgcttaaat

SEQ ID NO: 123234 - DNA, 22 bp, Artificial Sequence
  Synthetic oligonucleotide; TTT chr11 5343778 5343799 5343783 5343778 -
ttctgaagagaatgcttaaatg

SEQ ID NO: 123235 - DNA, 22 bp, Artificial Sequence
  Synthetic oligonucleotide; TTT chr11 5343777 5343798 5343782 5343777 -
tctgaagagaatgcttaaatgc

SEQ ID NO: 123236 - DNA, 22 bp, Artificial Sequence
  Synthetic oligonucleotide; TTT chr11 5343776 5343797 5343781 5343776 -
ctgaagagaatgcttaaatgca

SEQ ID NO: 123237 - DNA, 22 bp, Artificial Sequence
  Synthetic oligonucleotide; TTC chr11 5343775 5343796 5343780 5343775 -
tgaagagaatgcttaaatgcat

SEQ ID NO: 123238 - DNA, 22 bp, Artificial Sequence
  Synthetic oligonucleotide; CTG chr11 5343773 5343794 5343778 5343773 -
aagagaatgcttaaatgcatat

SEQ ID NO: 123239 - DNA, 22 bp, Artificial Sequence
  Synthetic oligonucleotide; CTT chr11 5343761 5343782 5343766 5343761 -
aaatgcatataaacagttgaaa

SEQ ID NO: 123240 - DNA, 22 bp, Artificial Sequence
  Synthetic oligonucleotide; TTA chr11 5343760 5343781 5343765 5343760 -
aatgcatataaacagttgaaac

SEQ ID NO: 123241 - DNA, 22 bp, Artificial Sequence
  Synthetic oligonucleotide; TTG chr11 5343742 5343763 5343747 5343742 -
aaactccaagaatttgattacg

SEQ ID NO: 123242 - DNA, 22 bp, Artificial Sequence
  Synthetic oligonucleotide; CTC chr11 5343736 5343757 5343741 5343736 -
caagaatttgattacgtaggta

SEQ ID NO: 123243 - DNA, 22 bp, Artificial Sequence
  Synthetic oligonucleotide; TTT chr11 5343727 5343748 5343732 5343727 -
gattacgtaggtaggagataga

SEQ ID NO: 123244 - DNA, 22 bp, Artificial Sequence
  Synthetic oligonucleotide; TTG chr11 5343726 5343747 5343731 5343726 -
attacgtaggtaggagatagat

SEQ ID NO: 123245 - DNA, 22 bp, Artificial Sequence
  Synthetic oligonucleotide; TTA chr11 5343722 5343743 5343727 5343722 -
cgtaggtaggagatagatcctg

SEQ ID NO: 123246 - DNA, 22 bp, Artificial Sequence
  Synthetic oligonucleotide; CTG chr11 5343700 5343721 5343705 5343700 -
gaatgtgcagttaagaatacaa

SEQ ID NO: 123247 - DNA, 22 bp, Artificial Sequence
  Synthetic oligonucleotide; TTA chr11 5343687 5343708 5343692 5343687 -
agaatacaaatagtatgagtaa

SEQ ID NO: 123248 - DNA, 22 bp, Artificial Sequence
  Synthetic oligonucleotide; CTG chr11 5343660 5343681 5343665 5343660 -
agaatgtattttgagaaacaat

SEQ ID NO: 123249 - DNA, 22 bp, Artificial Sequence
  Synthetic oligonucleotide; TTT chr11 5343649 5343670 5343654 5343649 -
tgagaaacaatcacttatattg

SEQ ID NO: 123250 - DNA, 22 bp, Artificial Sequence
  Synthetic oligonucleotide; TTT chr11 5343648 5343669 5343653 5343648 -
gagaaacaatcacttatattga

SEQ ID NO: 123251 - DNA, 22 bp, Artificial Sequence
  Synthetic oligonucleotide; TTG chr11 5343647 5343668 5343652 5343647 -
agaaacaatcacttatattgat

SEQ ID NO: 123252 - DNA, 22 bp, Artificial Sequence
  Synthetic oligonucleotide; CTT chr11 5343633 5343654 5343638 5343633 -
atattgatgtcattattatctt

SEQ ID NO: 123253 - DNA, 22 bp, Artificial Sequence
  Synthetic oligonucleotide; TTA chr11 5343632 5343653 5343637 5343632 -
tattgatgtcattattatcttt

SEQ ID NO: 123254 - DNA, 22 bp, Artificial Sequence
  Synthetic oligonucleotide; TTG chr11 5343627 5343648 5343632 5343627 -
atgtcattattatctttaggaa

SEQ ID NO: 123255 - DNA, 22 bp, Artificial Sequence
  Synthetic oligonucleotide; TTA chr11 5343618 5343639 5343623 5343618 -
ttatctttaggaaaaaattctg

SEQ ID NO: 123256 - DNA, 22 bp, Artificial Sequence
  Synthetic oligonucleotide; TTA chr11 5343615 5343636 5343620 5343615 -
tctttaggaaaaaattctgaga

SEQ ID NO: 123257 - DNA, 22 bp, Artificial Sequence
  Synthetic oligonucleotide; CTT chr11 5343611 5343632 5343616 5343611 -
taggaaaaaattctgagaatga

SEQ ID NO: 123258 - DNA, 22 bp, Artificial Sequence
  Synthetic oligonucleotide; TTT chr11 5343610 5343631 5343615 5343610 -
aggaaaaaattctgagaatgat

SEQ ID NO: 123259 - DNA, 22 bp, Artificial Sequence
  Synthetic oligonucleotide; TTA chr11 5343609 5343630 5343614 5343609 -
ggaaaaaattctgagaatgata

SEQ ID NO: 123260 - DNA, 22 bp, Artificial Sequence
  Synthetic oligonucleotide; TTC chr11 5343598 5343619 5343603 5343598 -
tgagaatgatatagtcgaagtg

SEQ ID NO: 123261 - DNA, 22 bp, Artificial Sequence
  Synthetic oligonucleotide; CTG chr11 5343596 5343617 5343601 5343596 -
agaatgatatagtcgaagtgat

SEQ ID NO: 123262 - DNA, 22 bp, Artificial Sequence
  Synthetic oligonucleotide; CTT chr11 5343569 5343590 5343574 5343569 -
gaaggtagaactgtgcactgtg

SEQ ID NO: 123263 - DNA, 22 bp, Artificial Sequence
  Synthetic oligonucleotide; TTG chr11 5343568 5343589 5343573 5343568 -
aaggtagaactgtgcactgtgg

SEQ ID NO: 123264 - DNA, 22 bp, Artificial Sequence
  Synthetic oligonucleotide; CTG chr11 5343556 5343577 5343561 5343556 -
tgcactgtggtaataacagaaa

SEQ ID NO: 123265 - DNA, 22 bp, Artificial Sequence
  Synthetic oligonucleotide; CTG chr11 5343549 5343570 5343554 5343549 -
tggtaataacagaaacagaaag

SEQ ID NO: 123266 - DNA, 22 bp, Artificial Sequence
  Synthetic oligonucleotide; TTT chr11 5343521 5343542 5343526 5343521 -
cttctatataaacccaggatgt

SEQ ID NO: 123267 - DNA, 22 bp, Artificial Sequence
  Synthetic oligonucleotide; TTC chr11 5343520 5343541 5343525 5343520 -
ttctatataaacccaggatgtc

SEQ ID NO: 123268 - DNA, 22 bp, Artificial Sequence
  Synthetic oligonucleotide; CTT chr11 5343518 5343539 5343523 5343518 -
ctatataaacccaggatgtcgt

SEQ ID NO: 123269 - DNA, 22 bp, Artificial Sequence
  Synthetic oligonucleotide; TTC chr11 5343517 5343538 5343522 5343517 -
tatataaacccaggatgtcgtc

SEQ ID NO: 123270 - DNA, 22 bp, Artificial Sequence
  Synthetic oligonucleotide; CTA chr11 5343515 5343536 5343520 5343515 -
tataaacccaggatgtcgtcca

SEQ ID NO: 123271 - DNA, 22 bp, Artificial Sequence
  Synthetic oligonucleotide; CTC chr11 5343483 5343504 5343488 5343483 -
ccatcccttcctattgactggt

SEQ ID NO: 123272 - DNA, 22 bp, Artificial Sequence
  Synthetic oligonucleotide; CTT chr11 5343474 5343495 5343479 5343474 -
cctattgactggttttccaggc

SEQ ID NO: 123273 - DNA, 22 bp, Artificial Sequence
  Synthetic oligonucleotide; TTC chr11 5343473 5343494 5343478 5343473 -
ctattgactggttttccaggct

SEQ ID NO: 123274 - DNA, 22 bp, Artificial Sequence
  Synthetic oligonucleotide; CTA chr11 5343470 5343491 5343475 5343470 -
ttgactggttttccaggcttgg

SEQ ID NO: 123275 - DNA, 22 bp, Artificial Sequence
  Synthetic oligonucleotide; TTG chr11 5343467 5343488 5343472 5343467 -
actggttttccaggcttggagg

SEQ ID NO: 123276 - DNA, 22 bp, Artificial Sequence
  Synthetic oligonucleotide; CTG chr11 5343463 5343484 5343468 5343463 -
gttttccaggcttggaggaagc

SEQ ID NO: 123277 - DNA, 22 bp, Artificial Sequence
  Synthetic oligonucleotide; TTT chr11 5343459 5343480 5343464 5343459 -
tccaggcttggaggaagctcat

SEQ ID NO: 123278 - DNA, 22 bp, Artificial Sequence
  Synthetic oligonucleotide; TTT chr11 5343458 5343479 5343463 5343458 -
ccaggcttggaggaagctcatc

SEQ ID NO: 123279 - DNA, 22 bp, Artificial Sequence
  Synthetic oligonucleotide; TTC chr11 5343457 5343478 5343462 5343457 -
caggcttggaggaagctcatca

SEQ ID NO: 123280 - DNA, 22 bp, Artificial Sequence
  Synthetic oligonucleotide; CTT chr11 5343450 5343471 5343455 5343450 -
ggaggaagctcatcactggatt

SEQ ID NO: 123281 - DNA, 22 bp, Artificial Sequence
  Synthetic oligonucleotide; TTG chr11 5343449 5343470 5343454 5343449 -
gaggaagctcatcactggattt

SEQ ID NO: 123282 - DNA, 22 bp, Artificial Sequence
  Synthetic oligonucleotide; CTC chr11 5343439 5343460 5343444 5343439 -
atcactggatttccgtattttt

SEQ ID NO: 123283 - DNA, 22 bp, Artificial Sequence
  Synthetic oligonucleotide; CTG chr11 5343432 5343453 5343437 5343432 -
gatttccgtatttttcttgttc

SEQ ID NO: 123284 - DNA, 22 bp, Artificial Sequence
  Synthetic oligonucleotide; TTT chr11 5343427 5343448 5343432 5343427 -
ccgtatttttcttgttcatgta

SEQ ID NO: 123285 - DNA, 22 bp, Artificial Sequence
  Synthetic oligonucleotide; TTC chr11 5343426 5343447 5343431 5343426 -
cgtatttttcttgttcatgtat

SEQ ID NO: 123286 - DNA, 22 bp, Artificial Sequence
  Synthetic oligonucleotide; TTT chr11 5343419 5343440 5343424 5343419 -
ttcttgttcatgtatatatcca

SEQ ID NO: 123287 - DNA, 22 bp, Artificial Sequence
  Synthetic oligonucleotide; TTT chr11 5343418 5343439 5343423 5343418 -
tcttgttcatgtatatatccat

SEQ ID NO: 123288 - DNA, 22 bp, Artificial Sequence
  Synthetic oligonucleotide; TTT chr11 5343417 5343438 5343422 5343417 -
cttgttcatgtatatatccatc

SEQ ID NO: 123289 - DNA, 22 bp, Artificial Sequence
  Synthetic oligonucleotide; TTC chr11 5343416 5343437 5343421 5343416 -
ttgttcatgtatatatccatcc

SEQ ID NO: 123290 - DNA, 22 bp, Artificial Sequence
  Synthetic oligonucleotide; CTT chr11 5343414 5343435 5343419 5343414 -
gttcatgtatatatccatcctt

SEQ ID NO: 123291 - DNA, 22 bp, Artificial Sequence
  Synthetic oligonucleotide; TTG chr11 5343413 5343434 5343418 5343413 -
ttcatgtatatatccatccttt

SEQ ID NO: 123292 - DNA, 22 bp, Artificial Sequence
  Synthetic oligonucleotide; TTC chr11 5343410 5343431 5343415 5343410 -
atgtatatatccatcctttttg

SEQ ID NO: 123293 - DNA, 22 bp, Artificial Sequence
  Synthetic oligonucleotide; CTT chr11 5343392 5343413 5343397 5343392 -
tttggcaatggcaccctccttc

SEQ ID NO: 123294 - DNA, 22 bp, Artificial Sequence
  Synthetic oligonucleotide; TTT chr11 5343391 5343412 5343396 5343391 -
ttggcaatggcaccctccttct

SEQ ID NO: 123295 - DNA, 22 bp, Artificial Sequence
  Synthetic oligonucleotide; TTT chr11 5343390 5343411 5343395 5343390 -
tggcaatggcaccctccttctt

SEQ ID NO: 123296 - DNA, 22 bp, Artificial Sequence
  Synthetic oligonucleotide; TTT chr11 5343389 5343410 5343394 5343389 -
ggcaatggcaccctccttcttc

SEQ ID NO: 123297 - DNA, 22 bp, Artificial Sequence
  Synthetic oligonucleotide; TTG chr11 5343388 5343409 5343393 5343388 -
gcaatggcaccctccttcttct

SEQ ID NO: 123298 - DNA, 22 bp, Artificial Sequence
  Synthetic oligonucleotide; CTC chr11 5343374 5343395 5343379 5343374 -
cttcttctcattaaggaagatc

SEQ ID NO: 123299 - DNA, 22 bp, Artificial Sequence
  Synthetic oligonucleotide; CTT chr11 5343371 5343392 5343376 5343371 -
cttctcattaaggaagatcaca

SEQ ID NO: 123300 - DNA, 22 bp, Artificial Sequence
  Synthetic oligonucleotide; TTC chr11 5343370 5343391 5343375 5343370 -
ttctcattaaggaagatcacaa

SEQ ID NO: 123301 - DNA, 22 bp, Artificial Sequence
  Synthetic oligonucleotide; CTT chr11 5343368 5343389 5343373 5343368 -
ctcattaaggaagatcacaatc

SEQ ID NO: 123302 - DNA, 22 bp, Artificial Sequence
  Synthetic oligonucleotide; TTC chr11 5343367 5343388 5343372 5343367 -
tcattaaggaagatcacaatct

SEQ ID NO: 123303 - DNA, 22 bp, Artificial Sequence
  Synthetic oligonucleotide; CTC chr11 5343365 5343386 5343370 5343365 -
attaaggaagatcacaatcttc

SEQ ID NO: 123304 - DNA, 22 bp, Artificial Sequence
  Synthetic oligonucleotide; TTA chr11 5343361 5343382 5343366 5343361 -
aggaagatcacaatcttcatga

SEQ ID NO: 123305 - DNA, 22 bp, Artificial Sequence
  Synthetic oligonucleotide; CTT chr11 5343344 5343365 5343349 5343344 -
catgagcccatgtacttctttc

SEQ ID NO: 123306 - DNA, 22 bp, Artificial Sequence
  Synthetic oligonucleotide; TTC chr11 5343343 5343364 5343348 5343343 -
atgagcccatgtacttctttct

SEQ ID NO: 123307 - DNA, 22 bp, Artificial Sequence
  Synthetic oligonucleotide; CTT chr11 5343327 5343348 5343332 5343327 -
ctttctggccatgctggctgcc

SEQ ID NO: 123308 - DNA, 22 bp, Artificial Sequence
  Synthetic oligonucleotide; TTC chr11 5343326 5343347 5343331 5343326 -
tttctggccatgctggctgcca

SEQ ID NO: 123309 - DNA, 22 bp, Artificial Sequence
  Synthetic oligonucleotide; CTT chr11 5343324 5343345 5343329 5343324 -
tctggccatgctggctgccaca

SEQ ID NO: 123310 - DNA, 22 bp, Artificial Sequence
  Synthetic oligonucleotide; TTT chr11 5343323 5343344 5343328 5343323 -
ctggccatgctggctgccacag

SEQ ID NO: 123311 - DNA, 22 bp, Artificial Sequence
  Synthetic oligonucleotide; TTC chr11 5343322 5343343 5343327 5343322 -
tggccatgctggctgccacaga

SEQ ID NO: 123312 - DNA, 22 bp, Artificial Sequence
  Synthetic oligonucleotide; CTG chr11 5343320 5343341 5343325 5343320 -
gccatgctggctgccacagacc

SEQ ID NO: 123313 - DNA, 22 bp, Artificial Sequence
  Synthetic oligonucleotide; CTG chr11 5343311 5343332 5343316 5343311 -
gctgccacagacctggggctgg

SEQ ID NO: 123314 - DNA, 22 bp, Artificial Sequence
  Synthetic oligonucleotide; CTG chr11 5343307 5343328 5343312 5343307 -
ccacagacctggggctggccct

SEQ ID NO: 123315 - DNA, 22 bp, Artificial Sequence
  Synthetic oligonucleotide; CTG chr11 5343296 5343317 5343301 5343296 -
gggctggccctgaccacaatgc

SEQ ID NO: 123316 - DNA, 22 bp, Artificial Sequence
  Synthetic oligonucleotide; CTG chr11 5343290 5343311 5343295 5343290 -
gccctgaccacaatgcccacgg

SEQ ID NO: 123317 - DNA, 22 bp, Artificial Sequence
  Synthetic oligonucleotide; CTG chr11 5343284 5343305 5343289 5343284 -
accacaatgcccacggtgctgg

SEQ ID NO: 123318 - DNA, 22 bp, Artificial Sequence
  Synthetic oligonucleotide; CTG chr11 5343263 5343284 5343268 5343263 -
ggagtcctctggctggatcaca

SEQ ID NO: 123319 - DNA, 22 bp, Artificial Sequence
  Synthetic oligonucleotide; CTC chr11 5343254 5343275 5343259 5343254 -
tggctggatcacagggagattg

SEQ ID NO: 123320 - DNA, 22 bp, Artificial Sequence
  Synthetic oligonucleotide; CTG chr11 5343252 5343273 5343257 5343252 -
gctggatcacagggagattgga

SEQ ID NO: 123321 - DNA, 22 bp, Artificial Sequence
  Synthetic oligonucleotide; CTG chr11 5343248 5343269 5343253 5343248 -
gatcacagggagattggaagtg

SEQ ID NO: 123322 - DNA, 22 bp, Artificial Sequence
  Synthetic oligonucleotide; TTG chr11 5343232 5343253 5343237 5343232 -
gaagtgcggcctgcttttccca

SEQ ID NO: 123323 - DNA, 22 bp, Artificial Sequence
  Synthetic oligonucleotide; CTG chr11 5343219 5343240 5343224 5343219 -
cttttcccaggcctactttata

SEQ ID NO: 123324 - DNA, 22 bp, Artificial Sequence
  Synthetic oligonucleotide; CTT chr11 5343216 5343237 5343221 5343216 -
ttcccaggcctactttatacac

SEQ ID NO: 123325 - DNA, 22 bp, Artificial Sequence
  Synthetic oligonucleotide; TTT chr11 5343215 5343236 5343220 5343215 -
tcccaggcctactttatacact

SEQ ID NO: 123326 - DNA, 22 bp, Artificial Sequence
  Synthetic oligonucleotide; TTT chr11 5343214 5343235 5343219 5343214 -
cccaggcctactttatacactc

SEQ ID NO: 123327 - DNA, 22 bp, Artificial Sequence
  Synthetic oligonucleotide; TTC chr11 5343213 5343234 5343218 5343213 -
ccaggcctactttatacactca

SEQ ID NO: 123328 - DNA, 22 bp, Artificial Sequence
  Synthetic oligonucleotide; CTA chr11 5343204 5343225 5343209 5343204 -
ctttatacactcactttccttt

SEQ ID NO: 123329 - DNA, 22 bp, Artificial Sequence
  Synthetic oligonucleotide; CTT chr11 5343201 5343222 5343206 5343201 -
tatacactcactttcctttctc

SEQ ID NO: 123330 - DNA, 22 bp, Artificial Sequence
  Synthetic oligonucleotide; TTT chr11 5343200 5343221 5343205 5343200 -
atacactcactttcctttctcg

SEQ ID NO: 123331 - DNA, 22 bp, Artificial Sequence
  Synthetic oligonucleotide; TTA chr11 5343199 5343220 5343204 5343199 -
tacactcactttcctttctcga

SEQ ID NO: 123332 - DNA, 22 bp, Artificial Sequence
  Synthetic oligonucleotide; CTC chr11 5343192 5343213 5343197 5343192 -
actttcctttctcgagtctggc

SEQ ID NO: 123333 - DNA, 22 bp, Artificial Sequence
  Synthetic oligonucleotide; CTT chr11 5343188 5343209 5343193 5343188 -
tcctttctcgagtctggcattc

SEQ ID NO: 123334 - DNA, 22 bp, Artificial Sequence
  Synthetic oligonucleotide; TTT chr11 5343187 5343208 5343192 5343187 -
cctttctcgagtctggcattct

SEQ ID NO: 123335 - DNA, 22 bp, Artificial Sequence
  Synthetic oligonucleotide; TTC chr11 5343186 5343207 5343191 5343186 -
ctttctcgagtctggcattctg

SEQ ID NO: 123336 - DNA, 22 bp, Artificial Sequence
  Synthetic oligonucleotide; CTT chr11 5343183 5343204 5343188 5343183 -
tctcgagtctggcattctgctt

SEQ ID NO: 123337 - DNA, 22 bp, Artificial Sequence
  Synthetic oligonucleotide; TTT chr11 5343182 5343203 5343187 5343182 -
ctcgagtctggcattctgcttg

SEQ ID NO: 123338 - DNA, 22 bp, Artificial Sequence
  Synthetic oligonucleotide; TTC chr11 5343181 5343202 5343186 5343181 -
tcgagtctggcattctgcttgc

SEQ ID NO: 123339 - DNA, 22 bp, Artificial Sequence
  Synthetic oligonucleotide; CTC chr11 5343179 5343200 5343184 5343179 -
gagtctggcattctgcttgcca

SEQ ID NO: 123340 - DNA, 22 bp, Artificial Sequence
  Synthetic oligonucleotide; CTG chr11 5343172 5343193 5343177 5343172 -
gcattctgcttgccatggccta

SEQ ID NO: 123341 - DNA, 22 bp, Artificial Sequence
  Synthetic oligonucleotide; TTC chr11 5343166 5343187 5343171 5343166 -
tgcttgccatggcctatgaccg

SEQ ID NO: 123342 - DNA, 22 bp, Artificial Sequence
  Synthetic oligonucleotide; CTG chr11 5343164 5343185 5343169 5343164 -
cttgccatggcctatgaccgtt

SEQ ID NO: 123343 - DNA, 22 bp, Artificial Sequence
  Synthetic oligonucleotide; CTT chr11 5343161 5343182 5343166 5343161 -
gccatggcctatgaccgtttta

SEQ ID NO: 123344 - DNA, 22 bp, Artificial Sequence
  Synthetic oligonucleotide; TTG chr11 5343160 5343181 5343165 5343160 -
ccatggcctatgaccgttttat

SEQ ID NO: 123345 - DNA, 22 bp, Artificial Sequence
  Synthetic oligonucleotide; CTA chr11 5343150 5343171 5343155 5343150 -
tgaccgttttattgccatctgc

SEQ ID NO: 123346 - DNA, 22 bp, Artificial Sequence
  Synthetic oligonucleotide; TTT chr11 5343141 5343162 5343146 5343141 -
tattgccatctgcaaccctctt

SEQ ID NO: 123347 - DNA, 22 bp, Artificial Sequence
  Synthetic oligonucleotide; TTT chr11 5343140 5343161 5343145 5343140 -
attgccatctgcaaccctctta

SEQ ID NO: 123348 - DNA, 22 bp, Artificial Sequence
  Synthetic oligonucleotide; TTA chr11 5343139 5343160 5343144 5343139 -
ttgccatctgcaaccctcttag

SEQ ID NO: 123349 - DNA, 22 bp, Artificial Sequence
  Synthetic oligonucleotide; TTG chr11 5343136 5343157 5343141 5343136 -
ccatctgcaaccctcttagata

SEQ ID NO: 123350 - DNA, 22 bp, Artificial Sequence
  Synthetic oligonucleotide; CTG chr11 5343129 5343150 5343134 5343129 -
caaccctcttagatatacctct

SEQ ID NO: 123351 - DNA, 22 bp, Artificial Sequence
  Synthetic oligonucleotide; CTC chr11 5343121 5343142 5343126 5343121 -
ttagatatacctctgtacttac

SEQ ID NO: 123352 - DNA, 22 bp, Artificial Sequence
  Synthetic oligonucleotide; CTT chr11 5343119 5343140 5343124 5343119 -
agatatacctctgtacttacta

SEQ ID NO: 123353 - DNA, 22 bp, Artificial Sequence
  Synthetic oligonucleotide; TTA chr11 5343118 5343139 5343123 5343118 -
gatatacctctgtacttactaa

SEQ ID NO: 123354 - DNA, 22 bp, Artificial Sequence
  Synthetic oligonucleotide; CTC chr11 5343108 5343129 5343113 5343108 -
tgtacttactaatactcgagta

SEQ ID NO: 123355 - DNA, 22 bp, Artificial Sequence
  Synthetic oligonucleotide; CTG chr11 5343106 5343127 5343111 5343106 -
tacttactaatactcgagtagt

SEQ ID NO: 123356 - DNA, 22 bp, Artificial Sequence
  Synthetic oligonucleotide; CTT chr11 5343101 5343122 5343106 5343101 -
actaatactcgagtagtgaaga

SEQ ID NO: 123357 - DNA, 22 bp, Artificial Sequence
  Synthetic oligonucleotide; TTA chr11 5343100 5343121 5343105 5343100 -
ctaatactcgagtagtgaagat

SEQ ID NO: 123358 - DNA, 22 bp, Artificial Sequence
  Synthetic oligonucleotide; CTA chr11 5343097 5343118 5343102 5343097 -
atactcgagtagtgaagattgg

SEQ ID NO: 123359 - DNA, 22 bp, Artificial Sequence
  Synthetic oligonucleotide; CTC chr11 5343091 5343112 5343096 5343091 -
gagtagtgaagattgggctggg

SEQ ID NO: 123360 - DNA, 22 bp, Artificial Sequence
  Synthetic oligonucleotide; TTG chr11 5343076 5343097 5343081 5343076 -
ggctgggagttctgatgagggg

SEQ ID NO: 123361 - DNA, 22 bp, Artificial Sequence
  Synthetic oligonucleotide; CTG chr11 5343071 5343092 5343076 5343071 -
ggagttctgatgaggggatttg

SEQ ID NO: 123362 - DNA, 22 bp, Artificial Sequence
  Synthetic oligonucleotide; TTC chr11 5343064 5343085 5343069 5343064 -
tgatgaggggatttgtatccgt

SEQ ID NO: 123363 - DNA, 22 bp, Artificial Sequence
  Synthetic oligonucleotide; CTG chr11 5343062 5343083 5343067 5343062 -
atgaggggatttgtatccgttg

SEQ ID NO: 123364 - DNA, 22 bp, Artificial Sequence
  Synthetic oligonucleotide; TTT chr11 5343050 5343071 5343055 5343050 -
gtatccgttgttcccccaatca

SEQ ID NO: 123365 - DNA, 22 bp, Artificial Sequence
  Synthetic oligonucleotide; TTG chr11 5343049 5343070 5343054 5343049 -
tatccgttgttcccccaatcag

SEQ ID NO: 123366 - DNA, 22 bp, Artificial Sequence
  Synthetic oligonucleotide; TTG chr11 5343040 5343061 5343045 5343040 -
ttcccccaatcaggcccctcta

SEQ ID NO: 123367 - DNA, 22 bp, Artificial Sequence
  Synthetic oligonucleotide; TTC chr11 5343037 5343058 5343042 5343037 -
ccccaatcaggcccctctattt

SEQ ID NO: 123368 - DNA, 22 bp, Artificial Sequence
  Synthetic oligonucleotide; CTC chr11 5343020 5343041 5343025 5343020 -
tatttttttctgtattgtcact

SEQ ID NO: 123369 - DNA, 22 bp, Artificial Sequence
  Synthetic oligonucleotide; CTA chr11 5343018 5343039 5343023 5343018 -
tttttttctgtattgtcactcc

SEQ ID NO: 123370 - DNA, 22 bp, Artificial Sequence
  Synthetic oligonucleotide; TTT chr11 5343015 5343036 5343020 5343015 -
ttttctgtattgtcactcccat

SEQ ID NO: 123371 - DNA, 22 bp, Artificial Sequence
  Synthetic oligonucleotide; TTT chr11 5343014 5343035 5343019 5343014 -
tttctgtattgtcactcccatg

SEQ ID NO: 123372 - DNA, 22 bp, Artificial Sequence
  Synthetic oligonucleotide; TTT chr11 5343013 5343034 5343018 5343013 -
ttctgtattgtcactcccatgt

SEQ ID NO: 123373 - DNA, 22 bp, Artificial Sequence
  Synthetic oligonucleotide; TTT chr11 5343012 5343033 5343017 5343012 -
tctgtattgtcactcccatgtt

SEQ ID NO: 123374 - DNA, 22 bp, Artificial Sequence
  Synthetic oligonucleotide; TTT chr11 5343011 5343032 5343016 5343011 -
ctgtattgtcactcccatgttc

SEQ ID NO: 123375 - DNA, 22 bp, Artificial Sequence
  Synthetic oligonucleotide; TTC chr11 5343010 5343031 5343015 5343010 -
tgtattgtcactcccatgttct

SEQ ID NO: 123376 - DNA, 22 bp, Artificial Sequence
  Synthetic oligonucleotide; CTG chr11 5343008 5343029 5343013 5343008 -
tattgtcactcccatgttcttt

SEQ ID NO: 123377 - DNA, 22 bp, Artificial Sequence
  Synthetic oligonucleotide; TTG chr11 5343003 5343024 5343008 5343003 -
tcactcccatgttctttcacat

SEQ ID NO: 123378 - DNA, 22 bp, Artificial Sequence
  Synthetic oligonucleotide; CTC chr11 5342997 5343018 5343002 5342997 -
ccatgttctttcacatgcattc

SEQ ID NO: 123379 - DNA, 22 bp, Artificial Sequence
  Synthetic oligonucleotide; TTC chr11 5342989 5343010 5342994 5342989 -
tttcacatgcattctgccttca

SEQ ID NO: 123380 - DNA, 22 bp, Artificial Sequence
  Synthetic oligonucleotide; CTT chr11 5342987 5343008 5342992 5342987 -
tcacatgcattctgccttcacc

SEQ ID NO: 123381 - DNA, 22 bp, Artificial Sequence
  Synthetic oligonucleotide; TTT chr11 5342986 5343007 5342991 5342986 -
cacatgcattctgccttcacca

SEQ ID NO: 123382 - DNA, 22 bp, Artificial Sequence
  Synthetic oligonucleotide; TTC chr11 5342985 5343006 5342990 5342985 -
acatgcattctgccttcaccag

SEQ ID NO: 123383 - DNA, 22 bp, Artificial Sequence
  Synthetic oligonucleotide; TTC chr11 5342975 5342996 5342980 5342975 -
tgccttcaccaggatgtcatta

SEQ ID NO: 123384 - DNA, 22 bp, Artificial Sequence
  Synthetic oligonucleotide; CTG chr11 5342973 5342994 5342978 5342973 -
ccttcaccaggatgtcattaaa

SEQ ID NO: 123385 - DNA, 22 bp, Artificial Sequence
  Synthetic oligonucleotide; CTT chr11 5342969 5342990 5342974 5342969 -
caccaggatgtcattaaactcg

SEQ ID NO: 123386 - DNA, 22 bp, Artificial Sequence
  Synthetic oligonucleotide; TTC chr11 5342968 5342989 5342973 5342968 -
accaggatgtcattaaactcgc

SEQ ID NO: 123387 - DNA, 22 bp, Artificial Sequence
  Synthetic oligonucleotide; TTA chr11 5342953 5342974 5342958 5342953 -
aactcgcctgtgctgataccac

SEQ ID NO: 123388 - DNA, 22 bp, Artificial Sequence
  Synthetic oligonucleotide; CTC chr11 5342948 5342969 5342953 5342948 -
gcctgtgctgataccaccttca

SEQ ID NO: 123389 - DNA, 22 bp, Artificial Sequence
  Synthetic oligonucleotide; CTG chr11 5342943 5342964 5342948 5342943 -
tgctgataccaccttcaaccga

SEQ ID NO: 123390 - DNA, 22 bp, Artificial Sequence
  Synthetic oligonucleotide; CTG chr11 5342938 5342959 5342943 5342938 -
ataccaccttcaaccgactgta

SEQ ID NO: 123391 - DNA, 22 bp, Artificial Sequence
  Synthetic oligonucleotide; CTT chr11 5342928 5342949 5342933 5342928 -
caaccgactgtacccagctgtg

SEQ ID NO: 123392 - DNA, 22 bp, Artificial Sequence
  Synthetic oligonucleotide; TTC chr11 5342927 5342948 5342932 5342927 -
aaccgactgtacccagctgtgc

SEQ ID NO: 123393 - DNA, 22 bp, Artificial Sequence
  Synthetic oligonucleotide; CTG chr11 5342918 5342939 5342923 5342918 -
tacccagctgtgcttgtagtct

SEQ ID NO: 123394 - DNA, 22 bp, Artificial Sequence
  Synthetic oligonucleotide; CTG chr11 5342908 5342929 5342913 5342908 -
tgcttgtagtctttatatttgt

SEQ ID NO: 123395 - DNA, 22 bp, Artificial Sequence
  Synthetic oligonucleotide; CTT chr11 5342903 5342924 5342908 5342903 -
gtagtctttatatttgtgctgg

SEQ ID NO: 123396 - DNA, 22 bp, Artificial Sequence
  Synthetic oligonucleotide; TTG chr11 5342902 5342923 5342907 5342902 -
tagtctttatatttgtgctgga

SEQ ID NO: 123397 - DNA, 22 bp, Artificial Sequence
  Synthetic oligonucleotide; CTT chr11 5342895 5342916 5342900 5342895 -
tatatttgtgctggattatctg

SEQ ID NO: 123398 - DNA, 22 bp, Artificial Sequence
  Synthetic oligonucleotide; TTT chr11 5342894 5342915 5342899 5342894 -
atatttgtgctggattatctga

SEQ ID NO: 123399 - DNA, 22 bp, Artificial Sequence
  Synthetic oligonucleotide; TTA chr11 5342893 5342914 5342898 5342893 -
tatttgtgctggattatctgat

SEQ ID NO: 123400 - DNA, 22 bp, Artificial Sequence
  Synthetic oligonucleotide; TTT chr11 5342888 5342909 5342893 5342888 -
gtgctggattatctgattatct

SEQ ID NO: 123401 - DNA, 22 bp, Artificial Sequence
  Synthetic oligonucleotide; TTG chr11 5342887 5342908 5342892 5342887 -
tgctggattatctgattatctt

SEQ ID NO: 123402 - DNA, 22 bp, Artificial Sequence
  Synthetic oligonucleotide; CTG chr11 5342882 5342903 5342887 5342882 -
gattatctgattatcttcatct

SEQ ID NO: 123403 - DNA, 22 bp, Artificial Sequence
  Synthetic oligonucleotide; TTA chr11 5342877 5342898 5342882 5342877 -
tctgattatcttcatctcctat

SEQ ID NO: 123404 - DNA, 22 bp, Artificial Sequence
  Synthetic oligonucleotide; CTG chr11 5342873 5342894 5342878 5342873 -
attatcttcatctcctatgtgt

SEQ ID NO: 123405 - DNA, 22 bp, Artificial Sequence
  Synthetic oligonucleotide; TTA chr11 5342869 5342890 5342874 5342869 -
tcttcatctcctatgtgttgat

SEQ ID NO: 123406 - DNA, 22 bp, Artificial Sequence
  Synthetic oligonucleotide; CTT chr11 5342865 5342886 5342870 5342865 -
catctcctatgtgttgatactc

SEQ ID NO: 123407 - DNA, 22 bp, Artificial Sequence
  Synthetic oligonucleotide; TTC chr11 5342864 5342885 5342869 5342864 -
atctcctatgtgttgatactca

SEQ ID NO: 123408 - DNA, 22 bp, Artificial Sequence
  Synthetic oligonucleotide; CTC chr11 5342859 5342880 5342864 5342859 -
ctatgtgttgatactcaagact

SEQ ID NO: 123409 - DNA, 22 bp, Artificial Sequence
  Synthetic oligonucleotide; CTA chr11 5342856 5342877 5342861 5342856 -
tgtgttgatactcaagactgtc

SEQ ID NO: 123410 - DNA, 22 bp, Artificial Sequence
  Synthetic oligonucleotide; TTG chr11 5342849 5342870 5342854 5342849 -
atactcaagactgtcctgagca

SEQ ID NO: 123411 - DNA, 22 bp, Artificial Sequence
  Synthetic oligonucleotide; CTC chr11 5342843 5342864 5342848 5342843 -
aagactgtcctgagcattgcct

SEQ ID NO: 123412 - DNA, 22 bp, Artificial Sequence
  Synthetic oligonucleotide; CTG chr11 5342836 5342857 5342841 5342836 -
tcctgagcattgcctccagaga

SEQ ID NO: 123413 - DNA, 22 bp, Artificial Sequence
  Synthetic oligonucleotide; CTG chr11 5342831 5342852 5342836 5342831 -
agcattgcctccagagaggaga

SEQ ID NO: 123414 - DNA, 22 bp, Artificial Sequence
  Synthetic oligonucleotide; TTG chr11 5342824 5342845 5342829 5342824 -
cctccagagaggagagggccaa

SEQ ID NO: 123415 - DNA, 22 bp, Artificial Sequence
  Synthetic oligonucleotide; CTC chr11 5342820 5342841 5342825 5342820 -
cagagaggagagggccaaggct

SEQ ID NO: 123416 - DNA, 22 bp, Artificial Sequence
  Synthetic oligonucleotide; CTC chr11 5342797 5342818 5342802 5342797 -
tcattacctgtgtctcccatat

SEQ ID NO: 123417 - DNA, 22 bp, Artificial Sequence
  Synthetic oligonucleotide; CTC chr11 5342795 5342816 5342800 5342795 -
attacctgtgtctcccatatct

SEQ ID NO: 123418 - DNA, 22 bp, Artificial Sequence
  Synthetic oligonucleotide; TTA chr11 5342791 5342812 5342796 5342791 -
cctgtgtctcccatatctgctg

SEQ ID NO: 123419 - DNA, 22 bp, Artificial Sequence
  Synthetic oligonucleotide; CTG chr11 5342787 5342808 5342792 5342787 -
tgtctcccatatctgctgtgtc

SEQ ID NO: 123420 - DNA, 22 bp, Artificial Sequence
  Synthetic oligonucleotide; CTC chr11 5342781 5342802 5342786 5342781 -
ccatatctgctgtgtcctggtt

SEQ ID NO: 123421 - DNA, 22 bp, Artificial Sequence
  Synthetic oligonucleotide; CTG chr11 5342772 5342793 5342777 5342772 -
ctgtgtcctggttttttatgtc

SEQ ID NO: 123422 - DNA, 22 bp, Artificial Sequence
  Synthetic oligonucleotide; CTG chr11 5342769 5342790 5342774 5342769 -
tgtcctggttttttatgtcaca

SEQ ID NO: 123423 - DNA, 22 bp, Artificial Sequence
  Synthetic oligonucleotide; CTG chr11 5342762 5342783 5342767 5342762 -
gttttttatgtcacagtgattg

SEQ ID NO: 123424 - DNA, 22 bp, Artificial Sequence
  Synthetic oligonucleotide; TTT chr11 5342758 5342779 5342763 5342758 -
tttatgtcacagtgattggatt

SEQ ID NO: 123425 - DNA, 22 bp, Artificial Sequence
  Synthetic oligonucleotide; TTT chr11 5342757 5342778 5342762 5342757 -
ttatgtcacagtgattggattg

SEQ ID NO: 123426 - DNA, 22 bp, Artificial Sequence
  Synthetic oligonucleotide; TTT chr11 5342756 5342777 5342761 5342756 -
tatgtcacagtgattggattgt

SEQ ID NO: 123427 - DNA, 22 bp, Artificial Sequence
  Synthetic oligonucleotide; TTT chr11 5342755 5342776 5342760 5342755 -
atgtcacagtgattggattgtc

SEQ ID NO: 123428 - DNA, 22 bp, Artificial Sequence
  Synthetic oligonucleotide; TTA chr11 5342754 5342775 5342759 5342754 -
tgtcacagtgattggattgtct

SEQ ID NO: 123429 - DNA, 22 bp, Artificial Sequence
  Synthetic oligonucleotide; TTG chr11 5342740 5342761 5342745 5342740 -
gattgtctctgattcatcgttt

SEQ ID NO: 123430 - DNA, 22 bp, Artificial Sequence
  Synthetic oligonucleotide; TTG chr11 5342735 5342756 5342740 5342735 -
tctctgattcatcgttttggaa

SEQ ID NO: 123431 - DNA, 22 bp, Artificial Sequence
  Synthetic oligonucleotide; CTC chr11 5342731 5342752 5342736 5342731 -
tgattcatcgttttggaaagca

SEQ ID NO: 123432 - DNA, 22 bp, Artificial Sequence
  Synthetic oligonucleotide; CTG chr11 5342729 5342750 5342734 5342729 -
attcatcgttttggaaagcagg

SEQ ID NO: 123433 - DNA, 22 bp, Artificial Sequence
  Synthetic oligonucleotide; TTC chr11 5342725 5342746 5342730 5342725 -
atcgttttggaaagcaggttcc

SEQ ID NO: 123434 - DNA, 22 bp, Artificial Sequence
  Synthetic oligonucleotide; TTT chr11 5342718 5342739 5342723 5342718 -
tggaaagcaggttccacatatt

SEQ ID NO: 123435 - DNA, 22 bp, Artificial Sequence
  Synthetic oligonucleotide; TTT chr11 5342717 5342738 5342722 5342717 -
ggaaagcaggttccacatattg

SEQ ID NO: 123436 - DNA, 22 bp, Artificial Sequence
  Synthetic oligonucleotide; TTG chr11 5342716 5342737 5342721 5342716 -
gaaagcaggttccacatattgt

SEQ ID NO: 123437 - DNA, 22 bp, Artificial Sequence
  Synthetic oligonucleotide; TTC chr11 5342704 5342725 5342709 5342704 -
cacatattgttcacctcattat

SEQ ID NO: 123438 - DNA, 22 bp, Artificial Sequence
  Synthetic oligonucleotide; TTG chr11 5342695 5342716 5342700 5342695 -
ttcacctcattatgagctatgc

SEQ ID NO: 123439 - DNA, 22 bp, Artificial Sequence
  Synthetic oligonucleotide; TTC chr11 5342692 5342713 5342697 5342692 -
acctcattatgagctatgccta

SEQ ID NO: 123440 - DNA, 22 bp, Artificial Sequence
  Synthetic oligonucleotide; CTC chr11 5342687 5342708 5342692 5342687 -
attatgagctatgcctattttc

SEQ ID NO: 123441 - DNA, 22 bp, Artificial Sequence
  Synthetic oligonucleotide; TTA chr11 5342683 5342704 5342688 5342683 -
tgagctatgcctattttctgtt

SEQ ID NO: 123442 - DNA, 22 bp, Artificial Sequence
  Synthetic oligonucleotide; CTA chr11 5342676 5342697 5342681 5342676 -
tgcctattttctgttccctcca

SEQ ID NO: 123443 - DNA, 22 bp, Artificial Sequence
  Synthetic oligonucleotide; CTA chr11 5342670 5342691 5342675 5342670 -
ttttctgttccctccactaatg

SEQ ID NO: 123444 - DNA, 22 bp, Artificial Sequence
  Synthetic oligonucleotide; TTT chr11 5342667 5342688 5342672 5342667 -
tctgttccctccactaatgaat

SEQ ID NO: 123445 - DNA, 22 bp, Artificial Sequence
  Synthetic oligonucleotide; TTT chr11 5342666 5342687 5342671 5342666 -
ctgttccctccactaatgaatc

SEQ ID NO: 123446 - DNA, 22 bp, Artificial Sequence
  Synthetic oligonucleotide; TTC chr11 5342665 5342686 5342670 5342665 -
tgttccctccactaatgaatcc

SEQ ID NO: 123447 - DNA, 22 bp, Artificial Sequence
  Synthetic oligonucleotide; CTG chr11 5342663 5342684 5342668 5342663 -
ttccctccactaatgaatccta

SEQ ID NO: 123448 - DNA, 22 bp, Artificial Sequence
  Synthetic oligonucleotide; TTC chr11 5342660 5342681 5342665 5342660 -
cctccactaatgaatcctataa

SEQ ID NO: 123449 - DNA, 22 bp, Artificial Sequence
  Synthetic oligonucleotide; CTC chr11 5342656 5342677 5342661 5342656 -
cactaatgaatcctataacata

SEQ ID NO: 123450 - DNA, 22 bp, Artificial Sequence
  Synthetic oligonucleotide; CTA chr11 5342651 5342672 5342656 5342651 -
atgaatcctataacatatagtg

SEQ ID NO: 123451 - DNA, 22 bp, Artificial Sequence
  Synthetic oligonucleotide; CTA chr11 5342641 5342662 5342646 5342641 -
taacatatagtgtcaagaccaa

SEQ ID NO: 123452 - DNA, 22 bp, Artificial Sequence
  Synthetic oligonucleotide; TTC chr11 5342611 5342632 5342616 5342611 -
agaatgccattcttcacctttt

SEQ ID NO: 123453 - DNA, 22 bp, Artificial Sequence
  Synthetic oligonucleotide; TTC chr11 5342599 5342620 5342604 5342599 -
ttcacctttttactacccatag

SEQ ID NO: 123454 - DNA, 22 bp, Artificial Sequence
  Synthetic oligonucleotide; CTT chr11 5342597 5342618 5342602 5342597 -
cacctttttactacccatagaa

SEQ ID NO: 123455 - DNA, 22 bp, Artificial Sequence
  Synthetic oligonucleotide; TTC chr11 5342596 5342617 5342601 5342596 -
acctttttactacccatagaat

SEQ ID NO: 123456 - DNA, 22 bp, Artificial Sequence
  Synthetic oligonucleotide; CTT chr11 5342591 5342612 5342596 5342591 -
tttactacccatagaattggaa

SEQ ID NO: 123457 - DNA, 22 bp, Artificial Sequence
  Synthetic oligonucleotide; TTT chr11 5342590 5342611 5342595 5342590 -
ttactacccatagaattggaac

SEQ ID NO: 123458 - DNA, 22 bp, Artificial Sequence
  Synthetic oligonucleotide; TTT chr11 5342589 5342610 5342594 5342589 -
tactacccatagaattggaacc

SEQ ID NO: 123459 - DNA, 22 bp, Artificial Sequence
  Synthetic oligonucleotide; TTT chr11 5342588 5342609 5342593 5342588 -
actacccatagaattggaacct

SEQ ID NO: 123460 - DNA, 22 bp, Artificial Sequence
  Synthetic oligonucleotide; TTA chr11 5342587 5342608 5342592 5342587 -
ctacccatagaattggaacctg

SEQ ID NO: 123461 - DNA, 22 bp, Artificial Sequence
  Synthetic oligonucleotide; CTA chr11 5342584 5342605 5342589 5342584 -
cccatagaattggaacctgatc

SEQ ID NO: 123462 - DNA, 22 bp, Artificial Sequence
  Synthetic oligonucleotide; TTG chr11 5342572 5342593 5342577 5342572 -
gaacctgatctccaatcatcac

SEQ ID NO: 123463 - DNA, 22 bp, Artificial Sequence
  Synthetic oligonucleotide; CTG chr11 5342565 5342586 5342570 5342565 -
atctccaatcatcacagtcact

SEQ ID NO: 123464 - DNA, 22 bp, Artificial Sequence
  Synthetic oligonucleotide; CTC chr11 5342560 5342581 5342565 5342560 -
caatcatcacagtcactctcac

SEQ ID NO: 123465 - DNA, 22 bp, Artificial Sequence
  Synthetic oligonucleotide; CTC chr11 5342542 5342563 5342547 5342542 -
tcacagaatgtaaaaactctaa

SEQ ID NO: 123466 - DNA, 22 bp, Artificial Sequence
  Synthetic oligonucleotide; CTC chr11 5342540 5342561 5342545 5342540 -
acagaatgtaaaaactctaata

SEQ ID NO: 123467 - DNA, 22 bp, Artificial Sequence
  Synthetic oligonucleotide; CTC chr11 5342523 5342544 5342528 5342523 -
taatatttagcaggagagcaaa

SEQ ID NO: 123468 - DNA, 22 bp, Artificial Sequence
  Synthetic oligonucleotide; CTA chr11 5342521 5342542 5342526 5342521 -
atatttagcaggagagcaaaga

SEQ ID NO: 123469 - DNA, 22 bp, Artificial Sequence
  Synthetic oligonucleotide; TTT chr11 5342515 5342536 5342520 5342515 -
agcaggagagcaaagaagtctc

SEQ ID NO: 123470 - DNA, 22 bp, Artificial Sequence
  Synthetic oligonucleotide; TTA chr11 5342514 5342535 5342519 5342514 -
gcaggagagcaaagaagtctca

SEQ ID NO: 123471 - DNA, 22 bp, Artificial Sequence
  Synthetic oligonucleotide; CTC chr11 5342493 5342514 5342498 5342493 -
atatctagcatgcatgctcata

SEQ ID NO: 123472 - DNA, 22 bp, Artificial Sequence
  Synthetic oligonucleotide; CTA chr11 5342486 5342507 5342491 5342486 -
gcatgcatgctcatatgacttg

SEQ ID NO: 123473 - DNA, 22 bp, Artificial Sequence
  Synthetic oligonucleotide; CTC chr11 5342474 5342495 5342479 5342474 -
atatgacttggtaaaataggtg

SEQ ID NO: 123474 - DNA, 22 bp, Artificial Sequence
  Synthetic oligonucleotide; CTT chr11 5342465 5342486 5342470 5342465 -
ggtaaaataggtgttaaaatac

SEQ ID NO: 123475 - DNA, 22 bp, Artificial Sequence
  Synthetic oligonucleotide; TTG chr11 5342464 5342485 5342469 5342464 -
gtaaaataggtgttaaaataca

SEQ ID NO: 123476 - DNA, 22 bp, Artificial Sequence
  Synthetic oligonucleotide; TTA chr11 5342449 5342470 5342454 5342449 -
aaatacagcttcaagtttccct

SEQ ID NO: 123477 - DNA, 22 bp, Artificial Sequence
  Synthetic oligonucleotide; CTT chr11 5342438 5342459 5342443 5342438 -
caagtttccctaaggtatctct

SEQ ID NO: 123478 - DNA, 22 bp, Artificial Sequence
  Synthetic oligonucleotide; TTC chr11 5342437 5342458 5342442 5342437 -
aagtttccctaaggtatctctt

SEQ ID NO: 123479 - DNA, 22 bp, Artificial Sequence
  Synthetic oligonucleotide; TTT chr11 5342431 5342452 5342436 5342431 -
ccctaaggtatctctttaagcc

SEQ ID NO: 123480 - DNA, 22 bp, Artificial Sequence
  Synthetic oligonucleotide; TTC chr11 5342430 5342451 5342435 5342430 -
cctaaggtatctctttaagccc

SEQ ID NO: 123481 - DNA, 22 bp, Artificial Sequence
  Synthetic oligonucleotide; CTA chr11 5342426 5342447 5342431 5342426 -
aggtatctctttaagcccaact

SEQ ID NO: 123482 - DNA, 22 bp, Artificial Sequence
  Synthetic oligonucleotide; CTC chr11 5342417 5342438 5342422 5342417 -
tttaagcccaactctttagcta

SEQ ID NO: 123483 - DNA, 22 bp, Artificial Sequence
  Synthetic oligonucleotide; CTT chr11 5342415 5342436 5342420 5342415 -
taagcccaactctttagctaaa

SEQ ID NO: 123484 - DNA, 22 bp, Artificial Sequence
  Synthetic oligonucleotide; TTT chr11 5342414 5342435 5342419 5342414 -
aagcccaactctttagctaaat

SEQ ID NO: 123485 - DNA, 22 bp, Artificial Sequence
  Synthetic oligonucleotide; TTA chr11 5342413 5342434 5342418 5342413 -
agcccaactctttagctaaatg

SEQ ID NO: 123486 - DNA, 22 bp, Artificial Sequence
  Synthetic oligonucleotide; CTC chr11 5342403 5342424 5342408 5342403 -
tttagctaaatgtagtttgtac

SEQ ID NO: 123487 - DNA, 22 bp, Artificial Sequence
  Synthetic oligonucleotide; CTT chr11 5342401 5342422 5342406 5342401 -
tagctaaatgtagtttgtacaa

SEQ ID NO: 123488 - DNA, 22 bp, Artificial Sequence
  Synthetic oligonucleotide; TTT chr11 5342400 5342421 5342405 5342400 -
agctaaatgtagtttgtacaaa

SEQ ID NO: 123489 - DNA, 22 bp, Artificial Sequence
  Synthetic oligonucleotide; TTA chr11 5342399 5342420 5342404 5342399 -
gctaaatgtagtttgtacaaat

SEQ ID NO: 123490 - DNA, 22 bp, Artificial Sequence
  Synthetic oligonucleotide; CTA chr11 5342395 5342416 5342400 5342395 -
aatgtagtttgtacaaattttt

SEQ ID NO: 123491 - DNA, 22 bp, Artificial Sequence
  Synthetic oligonucleotide; TTT chr11 5342385 5342406 5342390 5342385 -
gtacaaatttttgttgcattcc

SEQ ID NO: 123492 - DNA, 22 bp, Artificial Sequence
  Synthetic oligonucleotide; TTG chr11 5342384 5342405 5342389 5342384 -
tacaaatttttgttgcattcct

SEQ ID NO: 123493 - DNA, 22 bp, Artificial Sequence
  Synthetic oligonucleotide; TTT chr11 5342375 5342396 5342380 5342375 -
ttgttgcattcctgtaaacgga

SEQ ID NO: 123494 - DNA, 22 bp, Artificial Sequence
  Synthetic oligonucleotide; TTT chr11 5342374 5342395 5342379 5342374 -
tgttgcattcctgtaaacggaa

SEQ ID NO: 123495 - DNA, 22 bp, Artificial Sequence
  Synthetic oligonucleotide; TTT chr11 5342373 5342394 5342378 5342373 -
gttgcattcctgtaaacggaat

SEQ ID NO: 123496 - DNA, 22 bp, Artificial Sequence
  Synthetic oligonucleotide; TTG chr11 5342372 5342393 5342377 5342372 -
ttgcattcctgtaaacggaata

SEQ ID NO: 123497 - DNA, 22 bp, Artificial Sequence
  Synthetic oligonucleotide; TTG chr11 5342369 5342390 5342374 5342369 -
cattcctgtaaacggaatattt

SEQ ID NO: 123498 - DNA, 22 bp, Artificial Sequence
  Synthetic oligonucleotide; TTC chr11 5342364 5342385 5342369 5342364 -
ctgtaaacggaatatttctcta

SEQ ID NO: 123499 - DNA, 22 bp, Artificial Sequence
  Synthetic oligonucleotide; CTG chr11 5342361 5342382 5342366 5342361 -
taaacggaatatttctctaagc

SEQ ID NO: 123500 - DNA, 22 bp, Artificial Sequence
  Synthetic oligonucleotide; TTT chr11 5342347 5342368 5342352 5342347 -
ctctaagctttccactaaatta

SEQ ID NO: 123501 - DNA, 22 bp, Artificial Sequence
  Synthetic oligonucleotide; TTC chr11 5342346 5342367 5342351 5342346 -
tctaagctttccactaaattat

SEQ ID NO: 123502 - DNA, 22 bp, Artificial Sequence
  Synthetic oligonucleotide; CTC chr11 5342344 5342365 5342349 5342344 -
taagctttccactaaattattg

SEQ ID NO: 123503 - DNA, 22 bp, Artificial Sequence
  Synthetic oligonucleotide; CTA chr11 5342342 5342363 5342347 5342342 -
agctttccactaaattattgtg

SEQ ID NO: 123504 - DNA, 22 bp, Artificial Sequence
  Synthetic oligonucleotide; CTT chr11 5342337 5342358 5342342 5342337 -
tccactaaattattgtgataac

SEQ ID NO: 123505 - DNA, 22 bp, Artificial Sequence
  Synthetic oligonucleotide; TTT chr11 5342336 5342357 5342341 5342336 -
ccactaaattattgtgataaca

SEQ ID NO: 123506 - DNA, 22 bp, Artificial Sequence
  Synthetic oligonucleotide; TTC chr11 5342335 5342356 5342340 5342335 -
cactaaattattgtgataacaa

SEQ ID NO: 123507 - DNA, 22 bp, Artificial Sequence
  Synthetic oligonucleotide; CTA chr11 5342330 5342351 5342335 5342330 -
aattattgtgataacaatacct

SEQ ID NO: 123508 - DNA, 22 bp, Artificial Sequence
  Synthetic oligonucleotide; TTA chr11 5342325 5342346 5342330 5342325 -
ttgtgataacaataccttaggc

SEQ ID NO: 123509 - DNA, 22 bp, Artificial Sequence
  Synthetic oligonucleotide; TTG chr11 5342322 5342343 5342327 5342322 -
tgataacaataccttaggcatc

SEQ ID NO: 123510 - DNA, 22 bp, Artificial Sequence
  Synthetic oligonucleotide; CTT chr11 5342307 5342328 5342312 5342307 -
aggcatctattggtatgtctat

SEQ ID NO: 123511 - DNA, 22 bp, Artificial Sequence
  Synthetic oligonucleotide; TTA chr11 5342306 5342327 5342311 5342306 -
ggcatctattggtatgtctata

SEQ ID NO: 123512 - DNA, 22 bp, Artificial Sequence
  Synthetic oligonucleotide; CTA chr11 5342298 5342319 5342303 5342298 -
ttggtatgtctataatgtaact

SEQ ID NO: 123513 - DNA, 22 bp, Artificial Sequence
  Synthetic oligonucleotide; TTG chr11 5342295 5342316 5342300 5342295 -
gtatgtctataatgtaactaac

SEQ ID NO: 123514 - DNA, 22 bp, Artificial Sequence
  Synthetic oligonucleotide; CTA chr11 5342286 5342307 5342291 5342286 -
taatgtaactaacatatgttta

SEQ ID NO: 123515 - DNA, 22 bp, Artificial Sequence
  Synthetic oligonucleotide; CTA chr11 5342275 5342296 5342280 5342275 -
acatatgtttatttcatggtat

SEQ ID NO: 123516 - DNA, 22 bp, Artificial Sequence
  Synthetic oligonucleotide; TTT chr11 5342265 5342286 5342270 5342265 -
atttcatggtataaagttagca

SEQ ID NO: 123517 - DNA, 22 bp, Artificial Sequence
  Synthetic oligonucleotide; TTA chr11 5342264 5342285 5342269 5342264 -
tttcatggtataaagttagcag

SEQ ID NO: 123518 - DNA, 22 bp, Artificial Sequence
  Synthetic oligonucleotide; TTT chr11 5342261 5342282 5342266 5342261 -
catggtataaagttagcagata

SEQ ID NO: 123519 - DNA, 22 bp, Artificial Sequence
  Synthetic oligonucleotide; TTC chr11 5342260 5342281 5342265 5342260 -
atggtataaagttagcagatag

SEQ ID NO: 123520 - DNA, 22 bp, Artificial Sequence
  Synthetic oligonucleotide; TTA chr11 5342246 5342267 5342251 5342246 -
gcagataggaacagaatcataa

SEQ ID NO: 123521 - DNA, 22 bp, Artificial Sequence
  Synthetic oligonucleotide; TTA chr11 5342211 5342232 5342216 5342211 -
ttagttggttcgagtgaaatgg

SEQ ID NO: 123522 - DNA, 22 bp, Artificial Sequence
  Synthetic oligonucleotide; TTA chr11 5342208 5342229 5342213 5342208 -
gttggttcgagtgaaatggaat

SEQ ID NO: 123523 - DNA, 22 bp, Artificial Sequence
  Synthetic oligonucleotide; TTG chr11 5342204 5342225 5342209 5342204 -
gttcgagtgaaatggaatagag

SEQ ID NO: 123524 - DNA, 22 bp, Artificial Sequence
  Synthetic oligonucleotide; TTC chr11 5342200 5342221 5342205 5342200 -
gagtgaaatggaatagagtttg

SEQ ID NO: 123525 - DNA, 22 bp, Artificial Sequence
  Synthetic oligonucleotide; TTT chr11 5342179 5342200 5342184 5342179 -
ggtttactatgtcaaatctaat

SEQ ID NO: 123526 - DNA, 22 bp, Artificial Sequence
  Synthetic oligonucleotide; TTG chr11 5342178 5342199 5342183 5342178 -
gtttactatgtcaaatctaatt

SEQ ID NO: 123527 - DNA, 22 bp, Artificial Sequence
  Synthetic oligonucleotide; TTT chr11 5342174 5342195 5342179 5342174 -
actatgtcaaatctaatttcca

SEQ ID NO: 123528 - DNA, 22 bp, Artificial Sequence
  Synthetic oligonucleotide; TTA chr11 5342173 5342194 5342178 5342173 -
ctatgtcaaatctaatttccaa

SEQ ID NO: 123529 - DNA, 22 bp, Artificial Sequence
  Synthetic oligonucleotide; CTA chr11 5342170 5342191 5342175 5342170 -
tgtcaaatctaatttccaactc

SEQ ID NO: 123530 - DNA, 22 bp, Artificial Sequence
  Synthetic oligonucleotide; CTA chr11 5342159 5342180 5342164 5342159 -
atttccaactcttatgaatttc

SEQ ID NO: 123531 - DNA, 22 bp, Artificial Sequence
  Synthetic oligonucleotide; TTT chr11 5342155 5342176 5342160 5342155 -
ccaactcttatgaatttctctg

SEQ ID NO: 123532 - DNA, 22 bp, Artificial Sequence
  Synthetic oligonucleotide; TTC chr11 5342154 5342175 5342159 5342154 -
caactcttatgaatttctctgc

SEQ ID NO: 123533 - DNA, 22 bp, Artificial Sequence
  Synthetic oligonucleotide; CTC chr11 5342148 5342169 5342153 5342148 -
ttatgaatttctctgcaggtgt

SEQ ID NO: 123534 - DNA, 22 bp, Artificial Sequence
  Synthetic oligonucleotide; CTT chr11 5342146 5342167 5342151 5342146 -
atgaatttctctgcaggtgtcc

SEQ ID NO: 123535 - DNA, 22 bp, Artificial Sequence
  Synthetic oligonucleotide; TTA chr11 5342145 5342166 5342150 5342145 -
tgaatttctctgcaggtgtcca

SEQ ID NO: 123536 - DNA, 22 bp, Artificial Sequence
  Synthetic oligonucleotide; TTT chr11 5342138 5342159 5342143 5342138 -
ctctgcaggtgtccatacaaac

SEQ ID NO: 123537 - DNA, 22 bp, Artificial Sequence
  Synthetic oligonucleotide; TTC chr11 5342137 5342158 5342142 5342137 -
tctgcaggtgtccatacaaaca

SEQ ID NO: 123538 - DNA, 22 bp, Artificial Sequence
  Synthetic oligonucleotide; CTC chr11 5342135 5342156 5342140 5342135 -
tgcaggtgtccatacaaacaat

SEQ ID NO: 123539 - DNA, 22 bp, Artificial Sequence
  Synthetic oligonucleotide; CTG chr11 5342133 5342154 5342138 5342133 -
caggtgtccatacaaacaatgg

SEQ ID NO: 123540 - DNA, 22 bp, Artificial Sequence
  Synthetic oligonucleotide; CTA chr11 5342104 5342125 5342109 5342104 -
taaatttggtcactgaagtcca

SEQ ID NO: 123541 - DNA, 22 bp, Artificial Sequence
  Synthetic oligonucleotide; TTT chr11 5342097 5342118 5342102 5342097 -
ggtcactgaagtccaggaattt

SEQ ID NO: 123542 - DNA, 22 bp, Artificial Sequence
  Synthetic oligonucleotide; TTG chr11 5342096 5342117 5342101 5342096 -
gtcactgaagtccaggaatttt

SEQ ID NO: 123543 - DNA, 22 bp, Artificial Sequence
  Synthetic oligonucleotide; CTG chr11 5342089 5342110 5342094 5342089 -
aagtccaggaattttcctgcaa

SEQ ID NO: 123544 - DNA, 22 bp, Artificial Sequence
  Synthetic oligonucleotide; TTT chr11 5342075 5342096 5342080 5342075 -
tcctgcaaaaaagaatataatc

SEQ ID NO: 123545 - DNA, 22 bp, Artificial Sequence
  Synthetic oligonucleotide; TTT chr11 5342074 5342095 5342079 5342074 -
cctgcaaaaaagaatataatct

SEQ ID NO: 123546 - DNA, 22 bp, Artificial Sequence
  Synthetic oligonucleotide; TTC chr11 5342073 5342094 5342078 5342073 -
ctgcaaaaaagaatataatctt

SEQ ID NO: 123547 - DNA, 22 bp, Artificial Sequence
  Synthetic oligonucleotide; CTG chr11 5342070 5342091 5342075 5342070 -
caaaaaagaatataatcttctt

SEQ ID NO: 123548 - DNA, 22 bp, Artificial Sequence
  Synthetic oligonucleotide; CTT chr11 5342051 5342072 5342056 5342051 -
ctttgatcagtgacctaattac

SEQ ID NO: 123549 - DNA, 22 bp, Artificial Sequence
  Synthetic oligonucleotide; TTC chr11 5342050 5342071 5342055 5342050 -
tttgatcagtgacctaattact

SEQ ID NO: 123550 - DNA, 22 bp, Artificial Sequence
  Synthetic oligonucleotide; CTT chr11 5342048 5342069 5342053 5342048 -
tgatcagtgacctaattactta

SEQ ID NO: 123551 - DNA, 22 bp, Artificial Sequence
  Synthetic oligonucleotide; TTT chr11 5342047 5342068 5342052 5342047 -
gatcagtgacctaattacttat

SEQ ID NO: 123552 - DNA, 22 bp, Artificial Sequence
  Synthetic oligonucleotide; TTG chr11 5342046 5342067 5342051 5342046 -
atcagtgacctaattacttatc

SEQ ID NO: 123553 - DNA, 22 bp, Artificial Sequence
  Synthetic oligonucleotide; CTA chr11 5342034 5342055 5342039 5342034 -
attacttatcatctcaacagtc

SEQ ID NO: 123554 - DNA, 22 bp, Artificial Sequence
  Synthetic oligonucleotide; TTA chr11 5342030 5342051 5342035 5342030 -
cttatcatctcaacagtctagt

SEQ ID NO: 123555 - DNA, 22 bp, Artificial Sequence
  Synthetic oligonucleotide; CTT chr11 5342027 5342048 5342032 5342027 -
atcatctcaacagtctagttgg

SEQ ID NO: 123556 - DNA, 22 bp, Artificial Sequence
  Synthetic oligonucleotide; TTA chr11 5342026 5342047 5342031 5342026 -
tcatctcaacagtctagttggt

SEQ ID NO: 123557 - DNA, 22 bp, Artificial Sequence
  Synthetic oligonucleotide; CTC chr11 5342019 5342040 5342024 5342019 -
aacagtctagttggttcctcct

SEQ ID NO: 123558 - DNA, 22 bp, Artificial Sequence
  Synthetic oligonucleotide; CTA chr11 5342010 5342031 5342015 5342010 -
gttggttcctcctccctccatc

SEQ ID NO: 123559 - DNA, 22 bp, Artificial Sequence
  Synthetic oligonucleotide; TTG chr11 5342006 5342027 5342011 5342006 -
gttcctcctccctccatcaaat

SEQ ID NO: 123560 - DNA, 22 bp, Artificial Sequence
  Synthetic oligonucleotide; TTC chr11 5342002 5342023 5342007 5342002 -
ctcctccctccatcaaattata

SEQ ID NO: 123561 - DNA, 22 bp, Artificial Sequence
  Synthetic oligonucleotide; CTC chr11 5341999 5342020 5342004 5341999 -
ctccctccatcaaattataatg

SEQ ID NO: 123562 - DNA, 22 bp, Artificial Sequence
  Synthetic oligonucleotide; CTC chr11 5341996 5342017 5342001 5341996 -
cctccatcaaattataatgaat

SEQ ID NO: 123563 - DNA, 22 bp, Artificial Sequence
  Synthetic oligonucleotide; CTC chr11 5341992 5342013 5341997 5341992 -
catcaaattataatgaatttgt

SEQ ID NO: 123564 - DNA, 22 bp, Artificial Sequence
  Synthetic oligonucleotide; TTA chr11 5341982 5342003 5341987 5341982 -
taatgaatttgtctcaaaaacc

SEQ ID NO: 123565 - DNA, 22 bp, Artificial Sequence
  Synthetic oligonucleotide; TTT chr11 5341972 5341993 5341977 5341972 -
gtctcaaaaaccataaactcat

SEQ ID NO: 123566 - DNA, 22 bp, Artificial Sequence
  Synthetic oligonucleotide; TTG chr11 5341971 5341992 5341976 5341971 -
tctcaaaaaccataaactcata

SEQ ID NO: 123567 - DNA, 22 bp, Artificial Sequence
  Synthetic oligonucleotide; CTC chr11 5341967 5341988 5341972 5341967 -
aaaaaccataaactcatattta

SEQ ID NO: 123568 - DNA, 22 bp, Artificial Sequence
  Synthetic oligonucleotide; CTC chr11 5341952 5341973 5341957 5341952 -
atatttattccccaaggcagta

SEQ ID NO: 123569 - DNA, 22 bp, Artificial Sequence
  Synthetic oligonucleotide; TTT chr11 5341946 5341967 5341951 5341946 -
attccccaaggcagtaccttct

SEQ ID NO: 123570 - DNA, 22 bp, Artificial Sequence
  Synthetic oligonucleotide; TTA chr11 5341945 5341966 5341950 5341945 -
ttccccaaggcagtaccttctg

SEQ ID NO: 123571 - DNA, 22 bp, Artificial Sequence
  Synthetic oligonucleotide; TTC chr11 5341942 5341963 5341947 5341942 -
cccaaggcagtaccttctgaca

SEQ ID NO: 123572 - DNA, 22 bp, Artificial Sequence
  Synthetic oligonucleotide; CTT chr11 5341926 5341947 5341931 5341926 -
ctgacaaacttgtaacaaaaaa

SEQ ID NO: 123573 - DNA, 22 bp, Artificial Sequence
  Synthetic oligonucleotide; TTC chr11 5341925 5341946 5341930 5341925 -
tgacaaacttgtaacaaaaaaa

SEQ ID NO: 123574 - DNA, 22 bp, Artificial Sequence
  Synthetic oligonucleotide; CTG chr11 5341923 5341944 5341928 5341923 -
acaaacttgtaacaaaaaaatg

SEQ ID NO: 123575 - DNA, 22 bp, Artificial Sequence
  Synthetic oligonucleotide; CTT chr11 5341915 5341936 5341920 5341915 -
gtaacaaaaaaatgtgagaaga

SEQ ID NO: 123576 - DNA, 22 bp, Artificial Sequence
  Synthetic oligonucleotide; TTG chr11 5341914 5341935 5341919 5341914 -
taacaaaaaaatgtgagaagag

SEQ ID NO: 123577 - DNA, 22 bp, Artificial Sequence
  Synthetic oligonucleotide; CTC chr11 5341849 5341870 5341854 5341849 -
cttctatcttgctctcattctt

SEQ ID NO: 123578 - DNA, 22 bp, Artificial Sequence
  Synthetic oligonucleotide; CTT chr11 5341846 5341867 5341851 5341846 -
ctatcttgctctcattcttatt

SEQ ID NO: 123579 - DNA, 22 bp, Artificial Sequence
  Synthetic oligonucleotide; TTC chr11 5341845 5341866 5341850 5341845 -
tatcttgctctcattcttattc

SEQ ID NO: 123580 - DNA, 22 bp, Artificial Sequence
  Synthetic oligonucleotide; CTA chr11 5341843 5341864 5341848 5341843 -
tcttgctctcattcttattcta

SEQ ID NO: 123581 - DNA, 22 bp, Artificial Sequence
  Synthetic oligonucleotide; CTT chr11 5341839 5341860 5341844 5341839 -
gctctcattcttattctactac

SEQ ID NO: 123582 - DNA, 22 bp, Artificial Sequence
  Synthetic oligonucleotide; TTG chr11 5341838 5341859 5341843 5341838 -
ctctcattcttattctactacc

SEQ ID NO: 123583 - DNA, 22 bp, Artificial Sequence
  Synthetic oligonucleotide; CTC chr11 5341835 5341856 5341840 5341835 -
tcattcttattctactacccta

SEQ ID NO: 123584 - DNA, 22 bp, Artificial Sequence
  Synthetic oligonucleotide; CTC chr11 5341833 5341854 5341838 5341833 -
attcttattctactaccctagt

SEQ ID NO: 123585 - DNA, 22 bp, Artificial Sequence
  Synthetic oligonucleotide; TTC chr11 5341829 5341850 5341834 5341829 -
ttattctactaccctagttgct

SEQ ID NO: 123586 - DNA, 22 bp, Artificial Sequence
  Synthetic oligonucleotide; CTT chr11 5341827 5341848 5341832 5341827 -
attctactaccctagttgctag

SEQ ID NO: 123587 - DNA, 22 bp, Artificial Sequence
  Synthetic oligonucleotide; TTA chr11 5341826 5341847 5341831 5341826 -
ttctactaccctagttgctagc

SEQ ID NO: 123588 - DNA, 22 bp, Artificial Sequence
  Synthetic oligonucleotide; TTC chr11 5341823 5341844 5341828 5341823 -
tactaccctagttgctagctcc

SEQ ID NO: 123589 - DNA, 22 bp, Artificial Sequence
  Synthetic oligonucleotide; CTA chr11 5341821 5341842 5341826 5341821 -
ctaccctagttgctagctccaa

SEQ ID NO: 123590 - DNA, 22 bp, Artificial Sequence
  Synthetic oligonucleotide; CTA chr11 5341818 5341839 5341823 5341818 -
ccctagttgctagctccaatgt

SEQ ID NO: 123591 - DNA, 22 bp, Artificial Sequence
  Synthetic oligonucleotide; CTA chr11 5341813 5341834 5341818 5341813 -
gttgctagctccaatgttgagg

SEQ ID NO: 123592 - DNA, 22 bp, Artificial Sequence
  Synthetic oligonucleotide; TTG chr11 5341809 5341830 5341814 5341809 -
ctagctccaatgttgaggccat

SEQ ID NO: 123593 - DNA, 22 bp, Artificial Sequence
  Synthetic oligonucleotide; CTA chr11 5341806 5341827 5341811 5341806 -
gctccaatgttgaggccatcct

SEQ ID NO: 123594 - DNA, 22 bp, Artificial Sequence
  Synthetic oligonucleotide; CTC chr11 5341802 5341823 5341807 5341802 -
caatgttgaggccatcctcaga

SEQ ID NO: 123595 - DNA, 22 bp, Artificial Sequence
  Synthetic oligonucleotide; TTG chr11 5341794 5341815 5341799 5341794 -
aggccatcctcagatatctacg

SEQ ID NO: 123596 - DNA, 22 bp, Artificial Sequence
  Synthetic oligonucleotide; CTC chr11 5341783 5341804 5341788 5341783 -
agatatctacgctggctgacta

SEQ ID NO: 123597 - DNA, 22 bp, Artificial Sequence
  Synthetic oligonucleotide; CTA chr11 5341774 5341795 5341779 5341774 -
cgctggctgactagtccaaatt

SEQ ID NO: 123598 - DNA, 22 bp, Artificial Sequence
  Synthetic oligonucleotide; CTG chr11 5341769 5341790 5341774 5341769 -
gctgactagtccaaattagtgg

SEQ ID NO: 123599 - DNA, 22 bp, Artificial Sequence
  Synthetic oligonucleotide; CTG chr11 5341765 5341786 5341770 5341765 -
actagtccaaattagtggaaga

SEQ ID NO: 123600 - DNA, 22 bp, Artificial Sequence
  Synthetic oligonucleotide; CTA chr11 5341761 5341782 5341766 5341761 -
gtccaaattagtggaagagaca

SEQ ID NO: 123601 - DNA, 22 bp, Artificial Sequence
  Synthetic oligonucleotide; TTA chr11 5341751 5341772 5341756 5341751 -
gtggaagagacagttccttcac

SEQ ID NO: 123602 - DNA, 22 bp, Artificial Sequence
  Synthetic oligonucleotide; TTC chr11 5341735 5341756 5341740 5341735 -
cttcaccctccttttgctatga

SEQ ID NO: 123603 - DNA, 22 bp, Artificial Sequence
  Synthetic oligonucleotide; CTT chr11 5341732 5341753 5341737 5341732 -
caccctccttttgctatgaaaa

SEQ ID NO: 123604 - DNA, 22 bp, Artificial Sequence
  Synthetic oligonucleotide; TTC chr11 5341731 5341752 5341736 5341731 -
accctccttttgctatgaaaaa

SEQ ID NO: 123605 - DNA, 22 bp, Artificial Sequence
  Synthetic oligonucleotide; CTC chr11 5341725 5341746 5341730 5341725 -
cttttgctatgaaaaaggtctg

SEQ ID NO: 123606 - DNA, 22 bp, Artificial Sequence
  Synthetic oligonucleotide; CTT chr11 5341722 5341743 5341727 5341722 -
ttgctatgaaaaaggtctgaag

SEQ ID NO: 123607 - DNA, 22 bp, Artificial Sequence
  Synthetic oligonucleotide; TTT chr11 5341721 5341742 5341726 5341721 -
tgctatgaaaaaggtctgaagg

SEQ ID NO: 123608 - DNA, 22 bp, Artificial Sequence
  Synthetic oligonucleotide; TTT chr11 5341720 5341741 5341725 5341720 -
gctatgaaaaaggtctgaagga

SEQ ID NO: 123609 - DNA, 22 bp, Artificial Sequence
  Synthetic oligonucleotide; TTG chr11 5341719 5341740 5341724 5341719 -
ctatgaaaaaggtctgaaggaa

SEQ ID NO: 123610 - DNA, 22 bp, Artificial Sequence
  Synthetic oligonucleotide; CTA chr11 5341716 5341737 5341721 5341716 -
tgaaaaaggtctgaaggaacaa

SEQ ID NO: 123611 - DNA, 22 bp, Artificial Sequence
  Synthetic oligonucleotide; CTG chr11 5341703 5341724 5341708 5341703 -
aaggaacaaaaaaaaataggtt

SEQ ID NO: 123612 - DNA, 22 bp, Artificial Sequence
  Synthetic oligonucleotide; TTT chr11 5341680 5341701 5341685 5341680 -
ctgcatttttttgaagaatgat

SEQ ID NO: 123613 - DNA, 22 bp, Artificial Sequence
  Synthetic oligonucleotide; TTC chr11 5341679 5341700 5341684 5341679 -
tgcatttttttgaagaatgatt

SEQ ID NO: 123614 - DNA, 22 bp, Artificial Sequence
  Synthetic oligonucleotide; CTG chr11 5341677 5341698 5341682 5341677 -
catttttttgaagaatgattgc

SEQ ID NO: 123615 - DNA, 22 bp, Artificial Sequence
  Synthetic oligonucleotide; TTT chr11 5341672 5341693 5341677 5341672 -
ttttgaagaatgattgctttct

SEQ ID NO: 123616 - DNA, 22 bp, Artificial Sequence
  Synthetic oligonucleotide; TTT chr11 5341671 5341692 5341676 5341671 -
tttgaagaatgattgctttctg

SEQ ID NO: 123617 - DNA, 22 bp, Artificial Sequence
  Synthetic oligonucleotide; TTT chr11 5341670 5341691 5341675 5341670 -
ttgaagaatgattgctttctgt

SEQ ID NO: 123618 - DNA, 22 bp, Artificial Sequence
  Synthetic oligonucleotide; TTT chr11 5341669 5341690 5341674 5341669 -
tgaagaatgattgctttctgta

SEQ ID NO: 123619 - DNA, 22 bp, Artificial Sequence
  Synthetic oligonucleotide; TTT chr11 5341668 5341689 5341673 5341668 -
gaagaatgattgctttctgtac

SEQ ID NO: 123620 - DNA, 22 bp, Artificial Sequence
  Synthetic oligonucleotide; TTG chr11 5341667 5341688 5341672 5341667 -
aagaatgattgctttctgtaca

SEQ ID NO: 123621 - DNA, 22 bp, Artificial Sequence
  Synthetic oligonucleotide; TTG chr11 5341656 5341677 5341661 5341656 -
ctttctgtacatacattctgat

SEQ ID NO: 123622 - DNA, 22 bp, Artificial Sequence
  Synthetic oligonucleotide; CTT chr11 5341653 5341674 5341658 5341653 -
tctgtacatacattctgattcc

SEQ ID NO: 123623 - DNA, 22 bp, Artificial Sequence
  Synthetic oligonucleotide; TTT chr11 5341652 5341673 5341657 5341652 -
ctgtacatacattctgattcca

SEQ ID NO: 123624 - DNA, 22 bp, Artificial Sequence
  Synthetic oligonucleotide; TTC chr11 5341651 5341672 5341656 5341651 -
tgtacatacattctgattccat

SEQ ID NO: 123625 - DNA, 22 bp, Artificial Sequence
  Synthetic oligonucleotide; CTG chr11 5341649 5341670 5341654 5341649 -
tacatacattctgattccatgt

SEQ ID NO: 123626 - DNA, 22 bp, Artificial Sequence
  Synthetic oligonucleotide; TTC chr11 5341638 5341659 5341643 5341638 -
tgattccatgtaataagtgtaa

SEQ ID NO: 123627 - DNA, 22 bp, Artificial Sequence
  Synthetic oligonucleotide; CTG chr11 5341636 5341657 5341641 5341636 -
attccatgtaataagtgtaaat

SEQ ID NO: 123628 - DNA, 22 bp, Artificial Sequence
  Synthetic oligonucleotide; TTC chr11 5341632 5341653 5341637 5341632 -
catgtaataagtgtaaatttcc

SEQ ID NO: 123629 - DNA, 22 bp, Artificial Sequence
  Synthetic oligonucleotide; TTT chr11 5341612 5341633 5341617 5341612 -
cccaaagaatacaacaatgtca

SEQ ID NO: 123630 - DNA, 22 bp, Artificial Sequence
  Synthetic oligonucleotide; TTC chr11 5341611 5341632 5341616 5341611 -
ccaaagaatacaacaatgtcat

SEQ ID NO: 123631 - DNA, 22 bp, Artificial Sequence
  Synthetic oligonucleotide; TTC chr11 5341587 5341608 5341592 5341587 -
tcatttgattaaaattgtctga

SEQ ID NO: 123632 - DNA, 22 bp, Artificial Sequence
  Synthetic oligonucleotide; CTC chr11 5341585 5341606 5341590 5341585 -
atttgattaaaattgtctgatg

SEQ ID NO: 123633 - DNA, 22 bp, Artificial Sequence
  Synthetic oligonucleotide; TTT chr11 5341581 5341602 5341586 5341581 -
gattaaaattgtctgatgagtt

SEQ ID NO: 123634 - DNA, 22 bp, Artificial Sequence
  Synthetic oligonucleotide; TTG chr11 5341580 5341601 5341585 5341580 -
attaaaattgtctgatgagtta

SEQ ID NO: 123635 - DNA, 22 bp, Artificial Sequence
  Synthetic oligonucleotide; TTA chr11 5341576 5341597 5341581 5341576 -
aaattgtctgatgagttaggaa

SEQ ID NO: 123636 - DNA, 22 bp, Artificial Sequence
  Synthetic oligonucleotide; TTG chr11 5341570 5341591 5341575 5341570 -
tctgatgagttaggaagggacc

SEQ ID NO: 123637 - DNA, 22 bp, Artificial Sequence
  Synthetic oligonucleotide; CTG chr11 5341566 5341587 5341571 5341566 -
atgagttaggaagggacccata

SEQ ID NO: 123638 - DNA, 22 bp, Artificial Sequence
  Synthetic oligonucleotide; TTA chr11 5341558 5341579 5341563 5341558 -
ggaagggacccataactcaatt

SEQ ID NO: 123639 - DNA, 22 bp, Artificial Sequence
  Synthetic oligonucleotide; CTC chr11 5341540 5341561 5341545 5341540 -
aatttaaaatatcctaaaaaga

SEQ ID NO: 123640 - DNA, 22 bp, Artificial Sequence
  Synthetic oligonucleotide; TTT chr11 5341535 5341556 5341540 5341535 -
aaaatatcctaaaaagagggag

SEQ ID NO: 123641 - DNA, 22 bp, Artificial Sequence
  Synthetic oligonucleotide; TTA chr11 5341534 5341555 5341539 5341534 -
aaatatcctaaaaagagggagg

SEQ ID NO: 123642 - DNA, 22 bp, Artificial Sequence
  Synthetic oligonucleotide; CTA chr11 5341524 5341545 5341529 5341524 -
aaaagagggaggttatgtctta

SEQ ID NO: 123643 - DNA, 22 bp, Artificial Sequence
  Synthetic oligonucleotide; TTA chr11 5341509 5341530 5341514 5341509 -
tgtcttaattatactttaatca

SEQ ID NO: 123644 - DNA, 22 bp, Artificial Sequence
  Synthetic oligonucleotide; CTT chr11 5341503 5341524 5341508 5341503 -
aattatactttaatcagagcaa

SEQ ID NO: 123645 - DNA, 22 bp, Artificial Sequence
  Synthetic oligonucleotide; TTA chr11 5341502 5341523 5341507 5341502 -
attatactttaatcagagcaaa

SEQ ID NO: 123646 - DNA, 22 bp, Artificial Sequence
  Synthetic oligonucleotide; TTA chr11 5341498 5341519 5341503 5341498 -
tactttaatcagagcaaaaata

SEQ ID NO: 123647 - DNA, 22 bp, Artificial Sequence
  Synthetic oligonucleotide; CTT chr11 5341493 5341514 5341498 5341493 -
taatcagagcaaaaataatact

SEQ ID NO: 123648 - DNA, 22 bp, Artificial Sequence
  Synthetic oligonucleotide; TTT chr11 5341492 5341513 5341497 5341492 -
aatcagagcaaaaataatactt

SEQ ID NO: 123649 - DNA, 22 bp, Artificial Sequence
  Synthetic oligonucleotide; TTA chr11 5341491 5341512 5341496 5341491 -
atcagagcaaaaataatacttc

SEQ ID NO: 123650 - DNA, 22 bp, Artificial Sequence
  Synthetic oligonucleotide; CTT chr11 5341470 5341491 5341475 5341470 -
cagtgagacaagagaggggact

SEQ ID NO: 123651 - DNA, 22 bp, Artificial Sequence
  Synthetic oligonucleotide; TTC chr11 5341469 5341490 5341474 5341469 -
agtgagacaagagaggggacta

SEQ ID NO: 123652 - DNA, 22 bp, Artificial Sequence
  Synthetic oligonucleotide; CTA chr11 5341447 5341468 5341452 5341447 -
tatagaagatattgtttatgtc

SEQ ID NO: 123653 - DNA, 22 bp, Artificial Sequence
  Synthetic oligonucleotide; TTG chr11 5341433 5341454 5341438 5341433 -
tttatgtctttggtgttttacc

SEQ ID NO: 123654 - DNA, 22 bp, Artificial Sequence
  Synthetic oligonucleotide; TTT chr11 5341430 5341451 5341435 5341430 -
atgtctttggtgttttaccccg

SEQ ID NO: 123655 - DNA, 22 bp, Artificial Sequence
  Synthetic oligonucleotide; TTA chr11 5341429 5341450 5341434 5341429 -
tgtctttggtgttttaccccga

SEQ ID NO: 123656 - DNA, 22 bp, Artificial Sequence
  Synthetic oligonucleotide; CTT chr11 5341423 5341444 5341428 5341423 -
tggtgttttaccccgatcattt

SEQ ID NO: 123657 - DNA, 22 bp, Artificial Sequence
  Synthetic oligonucleotide; TTT chr11 5341422 5341443 5341427 5341422 -
ggtgttttaccccgatcatttt

SEQ ID NO: 123658 - DNA, 22 bp, Artificial Sequence
  Synthetic oligonucleotide; TTG chr11 5341421 5341442 5341426 5341421 -
gtgttttaccccgatcatttta

SEQ ID NO: 123659 - DNA, 22 bp, Artificial Sequence
  Synthetic oligonucleotide; TTT chr11 5341415 5341436 5341420 5341415 -
taccccgatcattttacagaat

SEQ ID NO: 123660 - DNA, 22 bp, Artificial Sequence
  Synthetic oligonucleotide; TTT chr11 5341414 5341435 5341419 5341414 -
accccgatcattttacagaatt

SEQ ID NO: 123661 - DNA, 22 bp, Artificial Sequence
  Synthetic oligonucleotide; TTA chr11 5341413 5341434 5341418 5341413 -
ccccgatcattttacagaattg

SEQ ID NO: 123662 - DNA, 22 bp, Artificial Sequence
  Synthetic oligonucleotide; TTT chr11 5341401 5341422 5341406 5341401 -
tacagaattgtgcacctgtgaa

SEQ ID NO: 123663 - DNA, 22 bp, Artificial Sequence
  Synthetic oligonucleotide; TTT chr11 5341400 5341421 5341405 5341400 -
acagaattgtgcacctgtgaat

SEQ ID NO: 123664 - DNA, 22 bp, Artificial Sequence
  Synthetic oligonucleotide; TTA chr11 5341399 5341420 5341404 5341399 -
cagaattgtgcacctgtgaatg

SEQ ID NO: 123665 - DNA, 22 bp, Artificial Sequence
  Synthetic oligonucleotide; TTG chr11 5341391 5341412 5341396 5341391 -
tgcacctgtgaatgttggctgc

SEQ ID NO: 123666 - DNA, 22 bp, Artificial Sequence
  Synthetic oligonucleotide; CTG chr11 5341383 5341404 5341388 5341383 -
tgaatgttggctgctcattgtt

SEQ ID NO: 123667 - DNA, 22 bp, Artificial Sequence
  Synthetic oligonucleotide; TTG chr11 5341374 5341395 5341379 5341374 -
gctgctcattgttcatgtttct

SEQ ID NO: 123668 - DNA, 22 bp, Artificial Sequence
  Synthetic oligonucleotide; CTG chr11 5341370 5341391 5341375 5341370 -
ctcattgttcatgtttctgctt

SEQ ID NO: 123669 - DNA, 22 bp, Artificial Sequence
  Synthetic oligonucleotide; CTC chr11 5341367 5341388 5341372 5341367 -
attgttcatgtttctgctttct

SEQ ID NO: 123670 - DNA, 22 bp, Artificial Sequence
  Synthetic oligonucleotide; TTG chr11 5341363 5341384 5341368 5341363 -
ttcatgtttctgctttctgcag

SEQ ID NO: 123671 - DNA, 22 bp, Artificial Sequence
  Synthetic oligonucleotide; TTC chr11 5341360 5341381 5341365 5341360 -
atgtttctgctttctgcaggtt

SEQ ID NO: 123672 - DNA, 22 bp, Artificial Sequence
  Synthetic oligonucleotide; TTT chr11 5341354 5341375 5341359 5341354 -
ctgctttctgcaggttgttgtt

SEQ ID NO: 123673 - DNA, 22 bp, Artificial Sequence
  Synthetic oligonucleotide; TTC chr11 5341353 5341374 5341358 5341353 -
tgctttctgcaggttgttgttc

SEQ ID NO: 123674 - DNA, 22 bp, Artificial Sequence
  Synthetic oligonucleotide; CTG chr11 5341351 5341372 5341356 5341351 -
ctttctgcaggttgttgttctc

SEQ ID NO: 123675 - DNA, 22 bp, Artificial Sequence
  Synthetic oligonucleotide; CTT chr11 5341348 5341369 5341353 5341348 -
tctgcaggttgttgttctcaac

SEQ ID NO: 123676 - DNA, 22 bp, Artificial Sequence
  Synthetic oligonucleotide; TTT chr11 5341347 5341368 5341352 5341347 -
ctgcaggttgttgttctcaact

SEQ ID NO: 123677 - DNA, 22 bp, Artificial Sequence
  Synthetic oligonucleotide; TTC chr11 5341346 5341367 5341351 5341346 -
tgcaggttgttgttctcaactc

SEQ ID NO: 123678 - DNA, 22 bp, Artificial Sequence
  Synthetic oligonucleotide; CTG chr11 5341344 5341365 5341349 5341344 -
caggttgttgttctcaactcag

SEQ ID NO: 123679 - DNA, 22 bp, Artificial Sequence
  Synthetic oligonucleotide; TTG chr11 5341337 5341358 5341342 5341337 -
ttgttctcaactcagcaggaaa

SEQ ID NO: 123680 - DNA, 22 bp, Artificial Sequence
  Synthetic oligonucleotide; TTG chr11 5341334 5341355 5341339 5341334 -
ttctcaactcagcaggaaatgt

SEQ ID NO: 123681 - DNA, 22 bp, Artificial Sequence
  Synthetic oligonucleotide; TTC chr11 5341331 5341352 5341336 5341331 -
tcaactcagcaggaaatgtctt

SEQ ID NO: 123682 - DNA, 22 bp, Artificial Sequence
  Synthetic oligonucleotide; CTC chr11 5341329 5341350 5341334 5341329 -
aactcagcaggaaatgtcttat

SEQ ID NO: 123683 - DNA, 22 bp, Artificial Sequence
  Synthetic oligonucleotide; CTC chr11 5341324 5341345 5341329 5341324 -
agcaggaaatgtcttatgaaga

SEQ ID NO: 123684 - DNA, 22 bp, Artificial Sequence
  Synthetic oligonucleotide; CTT chr11 5341309 5341330 5341314 5341309 -
atgaagaaaatggcccctgctc

SEQ ID NO: 123685 - DNA, 22 bp, Artificial Sequence
  Synthetic oligonucleotide; TTA chr11 5341308 5341329 5341313 5341308 -
tgaagaaaatggcccctgctcc

SEQ ID NO: 123686 - DNA, 22 bp, Artificial Sequence
  Synthetic oligonucleotide; CTG chr11 5341290 5341311 5341295 5341290 -
ctccttaggtagcaggccatag

SEQ ID NO: 123687 - DNA, 22 bp, Artificial Sequence
  Synthetic oligonucleotide; CTC chr11 5341287 5341308 5341292 5341287 -
cttaggtagcaggccataggca

SEQ ID NO: 123688 - DNA, 22 bp, Artificial Sequence
  Synthetic oligonucleotide; CTT chr11 5341284 5341305 5341289 5341284 -
aggtagcaggccataggcaaat

SEQ ID NO: 123689 - DNA, 22 bp, Artificial Sequence
  Synthetic oligonucleotide; TTA chr11 5341283 5341304 5341288 5341283 -
ggtagcaggccataggcaaata

SEQ ID NO: 123690 - DNA, 22 bp, Artificial Sequence
  Synthetic oligonucleotide; CTG chr11 5341258 5341279 5341263 5341258 -
accctcttgccttctgaagcta

SEQ ID NO: 123691 - DNA, 22 bp, Artificial Sequence
  Synthetic oligonucleotide; CTC chr11 5341252 5341273 5341257 5341252 -
ttgccttctgaagctaagctcc

SEQ ID NO: 123692 - DNA, 22 bp, Artificial Sequence
  Synthetic oligonucleotide; CTT chr11 5341250 5341271 5341255 5341250 -
gccttctgaagctaagctccag

SEQ ID NO: 123693 - DNA, 22 bp, Artificial Sequence
  Synthetic oligonucleotide; TTG chr11 5341249 5341270 5341254 5341249 -
ccttctgaagctaagctccagc

SEQ ID NO: 123694 - DNA, 22 bp, Artificial Sequence
  Synthetic oligonucleotide; CTT chr11 5341245 5341266 5341250 5341245 -
ctgaagctaagctccagcttca

SEQ ID NO: 123695 - DNA, 22 bp, Artificial Sequence
  Synthetic oligonucleotide; TTC chr11 5341244 5341265 5341249 5341244 -
tgaagctaagctccagcttcag

SEQ ID NO: 123696 - DNA, 22 bp, Artificial Sequence
  Synthetic oligonucleotide; CTG chr11 5341242 5341263 5341247 5341242 -
aagctaagctccagcttcagta

SEQ ID NO: 123697 - DNA, 22 bp, Artificial Sequence
  Synthetic oligonucleotide; CTA chr11 5341236 5341257 5341241 5341236 -
agctccagcttcagtatgcact

SEQ ID NO: 123698 - DNA, 22 bp, Artificial Sequence
  Synthetic oligonucleotide; CTC chr11 5341231 5341252 5341236 5341231 -
cagcttcagtatgcacttgctt

SEQ ID NO: 123699 - DNA, 22 bp, Artificial Sequence
  Synthetic oligonucleotide; CTT chr11 5341225 5341246 5341230 5341225 -
cagtatgcacttgcttacctcc

SEQ ID NO: 123700 - DNA, 22 bp, Artificial Sequence
  Synthetic oligonucleotide; TTC chr11 5341224 5341245 5341229 5341224 -
agtatgcacttgcttacctcct

SEQ ID NO: 123701 - DNA, 22 bp, Artificial Sequence
  Synthetic oligonucleotide; CTT chr11 5341213 5341234 5341218 5341213 -
gcttacctccttcccctgtcca

SEQ ID NO: 123702 - DNA, 22 bp, Artificial Sequence
  Synthetic oligonucleotide; TTG chr11 5341212 5341233 5341217 5341212 -
cttacctccttcccctgtccac

SEQ ID NO: 123703 - DNA, 22 bp, Artificial Sequence
  Synthetic oligonucleotide; CTT chr11 5341209 5341230 5341214 5341209 -
acctccttcccctgtccacact

SEQ ID NO: 123704 - DNA, 22 bp, Artificial Sequence
  Synthetic oligonucleotide; TTA chr11 5341208 5341229 5341213 5341208 -
cctccttcccctgtccacactg

SEQ ID NO: 123705 - DNA, 22 bp, Artificial Sequence
  Synthetic oligonucleotide; CTC chr11 5341204 5341225 5341209 5341204 -
cttcccctgtccacactgcttt

SEQ ID NO: 123706 - DNA, 22 bp, Artificial Sequence
  Synthetic oligonucleotide; CTT chr11 5341201 5341222 5341206 5341201 -
cccctgtccacactgcttttac

SEQ ID NO: 123707 - DNA, 22 bp, Artificial Sequence
  Synthetic oligonucleotide; TTC chr11 5341200 5341221 5341205 5341200 -
ccctgtccacactgcttttact

SEQ ID NO: 123708 - DNA, 22 bp, Artificial Sequence
  Synthetic oligonucleotide; CTG chr11 5341195 5341216 5341200 5341195 -
tccacactgcttttacttgctc

SEQ ID NO: 123709 - DNA, 22 bp, Artificial Sequence
  Synthetic oligonucleotide; CTG chr11 5341186 5341207 5341191 5341186 -
cttttacttgctccctgtctcc

SEQ ID NO: 123710 - DNA, 22 bp, Artificial Sequence
  Synthetic oligonucleotide; CTT chr11 5341183 5341204 5341188 5341183 -
ttacttgctccctgtctcctga

SEQ ID NO: 123711 - DNA, 22 bp, Artificial Sequence
  Synthetic oligonucleotide; TTT chr11 5341182 5341203 5341187 5341182 -
tacttgctccctgtctcctgag

SEQ ID NO: 123712 - DNA, 22 bp, Artificial Sequence
  Synthetic oligonucleotide; TTT chr11 5341181 5341202 5341186 5341181 -
acttgctccctgtctcctgaga

SEQ ID NO: 123713 - DNA, 22 bp, Artificial Sequence
  Synthetic oligonucleotide; TTA chr11 5341180 5341201 5341185 5341180 -
cttgctccctgtctcctgagag

SEQ ID NO: 123714 - DNA, 22 bp, Artificial Sequence
  Synthetic oligonucleotide; CTT chr11 5341177 5341198 5341182 5341177 -
gctccctgtctcctgagagcat

SEQ ID NO: 123715 - DNA, 22 bp, Artificial Sequence
  Synthetic oligonucleotide; TTG chr11 5341176 5341197 5341181 5341176 -
ctccctgtctcctgagagcatt

SEQ ID NO: 123716 - DNA, 22 bp, Artificial Sequence
  Synthetic oligonucleotide; CTC chr11 5341173 5341194 5341178 5341173 -
cctgtctcctgagagcattcat

SEQ ID NO: 123717 - DNA, 22 bp, Artificial Sequence
  Synthetic oligonucleotide; CTG chr11 5341169 5341190 5341174 5341169 -
tctcctgagagcattcattaat

SEQ ID NO: 123718 - DNA, 22 bp, Artificial Sequence
  Synthetic oligonucleotide; CTC chr11 5341165 5341186 5341170 5341165 -
ctgagagcattcattaataaat

SEQ ID NO: 123719 - DNA, 22 bp, Artificial Sequence
  Synthetic oligonucleotide; CTG chr11 5341162 5341183 5341167 5341162 -
agagcattcattaataaattgc

SEQ ID NO: 123720 - DNA, 22 bp, Artificial Sequence
  Synthetic oligonucleotide; TTC chr11 5341153 5341174 5341158 5341153 -
attaataaattgcacacatttg

SEQ ID NO: 123721 - DNA, 22 bp, Artificial Sequence
  Synthetic oligonucleotide; TTA chr11 5341149 5341170 5341154 5341149 -
ataaattgcacacatttgaatc

SEQ ID NO: 123722 - DNA, 22 bp, Artificial Sequence
  Synthetic oligonucleotide; TTG chr11 5341141 5341162 5341146 5341141 -
cacacatttgaatccctatctc

SEQ ID NO: 123723 - DNA, 22 bp, Artificial Sequence
  Synthetic oligonucleotide; TTT chr11 5341132 5341153 5341137 5341132 -
gaatccctatctcaggtattgc

SEQ ID NO: 123724 - DNA, 22 bp, Artificial Sequence
  Synthetic oligonucleotide; TTG chr11 5341131 5341152 5341136 5341131 -
aatccctatctcaggtattgct

SEQ ID NO: 123725 - DNA, 22 bp, Artificial Sequence
  Synthetic oligonucleotide; CTA chr11 5341123 5341144 5341128 5341123 -
tctcaggtattgctcatagaga

SEQ ID NO: 123726 - DNA, 22 bp, Artificial Sequence
  Synthetic oligonucleotide; CTC chr11 5341119 5341140 5341124 5341119 -
aggtattgctcatagagagtcc

SEQ ID NO: 123727 - DNA, 22 bp, Artificial Sequence
  Synthetic oligonucleotide; TTG chr11 5341111 5341132 5341116 5341111 -
ctcatagagagtccaacttaag

SEQ ID NO: 123728 - DNA, 22 bp, Artificial Sequence
  Synthetic oligonucleotide; CTC chr11 5341108 5341129 5341113 5341108 -
atagagagtccaacttaagaaa

SEQ ID NO: 123729 - DNA, 22 bp, Artificial Sequence
  Synthetic oligonucleotide; CTT chr11 5341092 5341113 5341097 5341092 -
aagaaaaactgcaatccttatt

SEQ ID NO: 123730 - DNA, 22 bp, Artificial Sequence
  Synthetic oligonucleotide; TTA chr11 5341091 5341112 5341096 5341091 -
agaaaaactgcaatccttattt

SEQ ID NO: 123731 - DNA, 22 bp, Artificial Sequence
  Synthetic oligonucleotide; CTG chr11 5341081 5341102 5341086 5341081 -
caatccttatttatattctgtt

SEQ ID NO: 123732 - DNA, 22 bp, Artificial Sequence
  Synthetic oligonucleotide; CTT chr11 5341073 5341094 5341078 5341073 -
atttatattctgtttcattaag

SEQ ID NO: 123733 - DNA, 22 bp, Artificial Sequence
  Synthetic oligonucleotide; TTA chr11 5341072 5341093 5341077 5341072 -
tttatattctgtttcattaaga

SEQ ID NO: 123734 - DNA, 22 bp, Artificial Sequence
  Synthetic oligonucleotide; TTT chr11 5341069 5341090 5341074 5341069 -
atattctgtttcattaagagat

SEQ ID NO: 123735 - DNA, 22 bp, Artificial Sequence
  Synthetic oligonucleotide; TTA chr11 5341068 5341089 5341073 5341068 -
tattctgtttcattaagagatg

SEQ ID NO: 123736 - DNA, 22 bp, Artificial Sequence
  Synthetic oligonucleotide; TTC chr11 5341063 5341084 5341068 5341063 -
tgtttcattaagagatgtaatt

SEQ ID NO: 123737 - DNA, 22 bp, Artificial Sequence
  Synthetic oligonucleotide; CTG chr11 5341061 5341082 5341066 5341061 -
tttcattaagagatgtaattgt

SEQ ID NO: 123738 - DNA, 22 bp, Artificial Sequence
  Synthetic oligonucleotide; TTT chr11 5341058 5341079 5341063 5341058 -
cattaagagatgtaattgtgaa

SEQ ID NO: 123739 - DNA, 22 bp, Artificial Sequence
  Synthetic oligonucleotide; TTC chr11 5341057 5341078 5341062 5341057 -
attaagagatgtaattgtgaaa

SEQ ID NO: 123740 - DNA, 22 bp, Artificial Sequence
  Synthetic oligonucleotide; TTA chr11 5341053 5341074 5341058 5341053 -
agagatgtaattgtgaaagaac

SEQ ID NO: 123741 - DNA, 22 bp, Artificial Sequence
  Synthetic oligonucleotide; TTG chr11 5341040 5341061 5341045 5341040 -
tgaaagaactgaacatataaaa

SEQ ID NO: 123742 - DNA, 22 bp, Artificial Sequence
  Synthetic oligonucleotide; CTG chr11 5341029 5341050 5341034 5341029 -
aacatataaaaaaatcagcttt

SEQ ID NO: 123743 - DNA, 22 bp, Artificial Sequence
  Synthetic oligonucleotide; CTT chr11 5341008 5341029 5341013 5341008 -
tatcatgttttttatccttgtc

SEQ ID NO: 123744 - DNA, 22 bp, Artificial Sequence
  Synthetic oligonucleotide; TTT chr11 5341007 5341028 5341012 5341007 -
atcatgttttttatccttgtca

SEQ ID NO: 123745 - DNA, 22 bp, Artificial Sequence
  Synthetic oligonucleotide; TTA chr11 5341006 5341027 5341011 5341006 -
tcatgttttttatccttgtcac

SEQ ID NO: 123746 - DNA, 22 bp, Artificial Sequence
  Synthetic oligonucleotide; TTT chr11 5340998 5341019 5341003 5340998 -
tttatccttgtcacgccatgtc

SEQ ID NO: 123747 - DNA, 22 bp, Artificial Sequence
  Synthetic oligonucleotide; TTT chr11 5340997 5341018 5341002 5340997 -
ttatccttgtcacgccatgtca

SEQ ID NO: 123748 - DNA, 22 bp, Artificial Sequence
  Synthetic oligonucleotide; TTT chr11 5340996 5341017 5341001 5340996 -
tatccttgtcacgccatgtcac

SEQ ID NO: 123749 - DNA, 22 bp, Artificial Sequence
  Synthetic oligonucleotide; TTT chr11 5340995 5341016 5341000 5340995 -
atccttgtcacgccatgtcacc

SEQ ID NO: 123750 - DNA, 22 bp, Artificial Sequence
  Synthetic oligonucleotide; TTA chr11 5340994 5341015 5340999 5340994 -
tccttgtcacgccatgtcacct

SEQ ID NO: 123751 - DNA, 22 bp, Artificial Sequence
  Synthetic oligonucleotide; CTT chr11 5340989 5341010 5340994 5340989 -
gtcacgccatgtcacctgagca

SEQ ID NO: 123752 - DNA, 22 bp, Artificial Sequence
  Synthetic oligonucleotide; TTG chr11 5340988 5341009 5340993 5340988 -
tcacgccatgtcacctgagcaa

SEQ ID NO: 123753 - DNA, 22 bp, Artificial Sequence
  Synthetic oligonucleotide; CTG chr11 5340971 5340992 5340976 5340971 -
agcaacacagtctgaatactaa

SEQ ID NO: 123754 - DNA, 22 bp, Artificial Sequence
  Synthetic oligonucleotide; CTG chr11 5340957 5340978 5340962 5340957 -
aatactaaattgtgagtgtgag

SEQ ID NO: 123755 - DNA, 22 bp, Artificial Sequence
  Synthetic oligonucleotide; CTA chr11 5340950 5340971 5340955 5340950 -
aattgtgagtgtgagtgcatat

SEQ ID NO: 123756 - DNA, 22 bp, Artificial Sequence
  Synthetic oligonucleotide; TTG chr11 5340945 5340966 5340950 5340945 -
tgagtgtgagtgcatatatgtg

SEQ ID NO: 123757 - DNA, 22 bp, Artificial Sequence
  Synthetic oligonucleotide; TTT chr11 5340912 5340933 5340917 5340912 -
ttgtcctgttttcaatcattca

SEQ ID NO: 123758 - DNA, 22 bp, Artificial Sequence
  Synthetic oligonucleotide; TTT chr11 5340911 5340932 5340916 5340911 -
tgtcctgttttcaatcattcat

SEQ ID NO: 123759 - DNA, 22 bp, Artificial Sequence
  Synthetic oligonucleotide; TTT chr11 5340910 5340931 5340915 5340910 -
gtcctgttttcaatcattcata

SEQ ID NO: 123760 - DNA, 22 bp, Artificial Sequence
  Synthetic oligonucleotide; TTG chr11 5340909 5340930 5340914 5340909 -
tcctgttttcaatcattcataa

SEQ ID NO: 123761 - DNA, 22 bp, Artificial Sequence
  Synthetic oligonucleotide; CTG chr11 5340904 5340925 5340909 5340904 -
ttttcaatcattcataaaacca

SEQ ID NO: 123762 - DNA, 22 bp, Artificial Sequence
  Synthetic oligonucleotide; TTT chr11 5340901 5340922 5340906 5340901 -
tcaatcattcataaaaccaaac

SEQ ID NO: 123763 - DNA, 22 bp, Artificial Sequence
  Synthetic oligonucleotide; TTT chr11 5340900 5340921 5340905 5340900 -
caatcattcataaaaccaaaca

SEQ ID NO: 123764 - DNA, 22 bp, Artificial Sequence
  Synthetic oligonucleotide; TTC chr11 5340899 5340920 5340904 5340899 -
aatcattcataaaaccaaacat

SEQ ID NO: 123765 - DNA, 22 bp, Artificial Sequence
  Synthetic oligonucleotide; TTC chr11 5340891 5340912 5340896 5340891 -
ataaaaccaaacatgtgtccct

SEQ ID NO: 123766 - DNA, 22 bp, Artificial Sequence
  Synthetic oligonucleotide; CTT chr11 5340868 5340889 5340873 5340868 -
aattatgctctactacatccac

SEQ ID NO: 123767 - DNA, 22 bp, Artificial Sequence
  Synthetic oligonucleotide; TTA chr11 5340867 5340888 5340872 5340867 -
attatgctctactacatccaca

SEQ ID NO: 123768 - DNA, 22 bp, Artificial Sequence
  Synthetic oligonucleotide; TTA chr11 5340863 5340884 5340868 5340863 -
tgctctactacatccacaactt

SEQ ID NO: 123769 - DNA, 22 bp, Artificial Sequence
  Synthetic oligonucleotide; CTC chr11 5340858 5340879 5340863 5340858 -
tactacatccacaacttatttt

SEQ ID NO: 123770 - DNA, 22 bp, Artificial Sequence
  Synthetic oligonucleotide; CTA chr11 5340856 5340877 5340861 5340856 -
ctacatccacaacttattttat

SEQ ID NO: 123771 - DNA, 22 bp, Artificial Sequence
  Synthetic oligonucleotide; CTA chr11 5340853 5340874 5340858 5340853 -
catccacaacttattttattca

SEQ ID NO: 123772 - DNA, 22 bp, Artificial Sequence
  Synthetic oligonucleotide; CTT chr11 5340841 5340862 5340846 5340841 -
attttattcataaaaatattgt

SEQ ID NO: 123773 - DNA, 22 bp, Artificial Sequence
  Synthetic oligonucleotide; TTA chr11 5340840 5340861 5340845 5340840 -
ttttattcataaaaatattgtg

SEQ ID NO: 123774 - DNA, 22 bp, Artificial Sequence
  Synthetic oligonucleotide; TTT chr11 5340837 5340858 5340842 5340837 -
tattcataaaaatattgtgggg

SEQ ID NO: 123775 - DNA, 22 bp, Artificial Sequence
  Synthetic oligonucleotide; TTT chr11 5340836 5340857 5340841 5340836 -
attcataaaaatattgtggggt

SEQ ID NO: 123776 - DNA, 22 bp, Artificial Sequence
  Synthetic oligonucleotide; TTA chr11 5340835 5340856 5340840 5340835 -
ttcataaaaatattgtggggta

SEQ ID NO: 123777 - DNA, 22 bp, Artificial Sequence
  Synthetic oligonucleotide; TTC chr11 5340832 5340853 5340837 5340832 -
ataaaaatattgtggggtagat

SEQ ID NO: 123778 - DNA, 22 bp, Artificial Sequence
  Synthetic oligonucleotide; TTG chr11 5340820 5340841 5340825 5340820 -
tggggtagatattatcactgtt

SEQ ID NO: 123779 - DNA, 22 bp, Artificial Sequence
  Synthetic oligonucleotide; TTA chr11 5340806 5340827 5340811 5340806 -
tcactgttttcttgatggggaa

SEQ ID NO: 123780 - DNA, 22 bp, Artificial Sequence
  Synthetic oligonucleotide; CTG chr11 5340800 5340821 5340805 5340800 -
ttttcttgatggggaaatttaa

SEQ ID NO: 123781 - DNA, 22 bp, Artificial Sequence
  Synthetic oligonucleotide; TTT chr11 5340797 5340818 5340802 5340797 -
tcttgatggggaaatttaatat

SEQ ID NO: 123782 - DNA, 22 bp, Artificial Sequence
  Synthetic oligonucleotide; TTT chr11 5340796 5340817 5340801 5340796 -
cttgatggggaaatttaatata

SEQ ID NO: 123783 - DNA, 22 bp, Artificial Sequence
  Synthetic oligonucleotide; TTC chr11 5340795 5340816 5340800 5340795 -
ttgatggggaaatttaatataa

SEQ ID NO: 123784 - DNA, 22 bp, Artificial Sequence
  Synthetic oligonucleotide; CTT chr11 5340793 5340814 5340798 5340793 -
gatggggaaatttaatataaaa

SEQ ID NO: 123785 - DNA, 22 bp, Artificial Sequence
  Synthetic oligonucleotide; TTG chr11 5340792 5340813 5340797 5340792 -
atggggaaatttaatataaaaa

SEQ ID NO: 123786 - DNA, 22 bp, Artificial Sequence
  Synthetic oligonucleotide; TTT chr11 5340780 5340801 5340785 5340780 -
aatataaaaaagttaaatattc

SEQ ID NO: 123787 - DNA, 22 bp, Artificial Sequence
  Synthetic oligonucleotide; TTA chr11 5340779 5340800 5340784 5340779 -
atataaaaaagttaaatattcc

SEQ ID NO: 123788 - DNA, 22 bp, Artificial Sequence
  Synthetic oligonucleotide; TTA chr11 5340765 5340786 5340770 5340765 -
aatattccctccaagggcataa

SEQ ID NO: 123789 - DNA, 22 bp, Artificial Sequence
  Synthetic oligonucleotide; TTC chr11 5340758 5340779 5340763 5340758 -
cctccaagggcataacattttt

SEQ ID NO: 123790 - DNA, 22 bp, Artificial Sequence
  Synthetic oligonucleotide; CTC chr11 5340754 5340775 5340759 5340754 -
caagggcataacatttttaatt

SEQ ID NO: 123791 - DNA, 22 bp, Artificial Sequence
  Synthetic oligonucleotide; TTT chr11 5340738 5340759 5340743 5340738 -
ttaattggtatagtcatgattc

SEQ ID NO: 123792 - DNA, 22 bp, Artificial Sequence
  Synthetic oligonucleotide; TTT chr11 5340737 5340758 5340742 5340737 -
taattggtatagtcatgattca

SEQ ID NO: 123793 - DNA, 22 bp, Artificial Sequence
  Synthetic oligonucleotide; TTT chr11 5340736 5340757 5340741 5340736 -
aattggtatagtcatgattcaa

SEQ ID NO: 123794 - DNA, 22 bp, Artificial Sequence
  Synthetic oligonucleotide; TTA chr11 5340735 5340756 5340740 5340735 -
attggtatagtcatgattcaaa

SEQ ID NO: 123795 - DNA, 22 bp, Artificial Sequence
  Synthetic oligonucleotide; TTG chr11 5340731 5340752 5340736 5340731 -
gtatagtcatgattcaaattta

SEQ ID NO: 123796 - DNA, 22 bp, Artificial Sequence
  Synthetic oligonucleotide; TTC chr11 5340716 5340737 5340721 5340716 -
aaatttatatcttctaactata

SEQ ID NO: 123797 - DNA, 22 bp, Artificial Sequence
  Synthetic oligonucleotide; TTT chr11 5340710 5340731 5340715 5340710 -
atatcttctaactataaggcca

SEQ ID NO: 123798 - DNA, 22 bp, Artificial Sequence
  Synthetic oligonucleotide; TTA chr11 5340709 5340730 5340714 5340709 -
tatcttctaactataaggccag

SEQ ID NO: 123799 - DNA, 22 bp, Artificial Sequence
  Synthetic oligonucleotide; CTT chr11 5340703 5340724 5340708 5340703 -
ctaactataaggccagtgtgaa

SEQ ID NO: 123800 - DNA, 22 bp, Artificial Sequence
  Synthetic oligonucleotide; TTC chr11 5340702 5340723 5340707 5340702 -
taactataaggccagtgtgaat

SEQ ID NO: 123801 - DNA, 22 bp, Artificial Sequence
  Synthetic oligonucleotide; CTA chr11 5340700 5340721 5340705 5340700 -
actataaggccagtgtgaatgg

SEQ ID NO: 123802 - DNA, 22 bp, Artificial Sequence
  Synthetic oligonucleotide; CTA chr11 5340696 5340717 5340701 5340696 -
taaggccagtgtgaatggtact

SEQ ID NO: 123803 - DNA, 22 bp, Artificial Sequence
  Synthetic oligonucleotide; CTC chr11 5340673 5340694 5340678 5340673 -
cactacagtagactatccttag

SEQ ID NO: 123804 - DNA, 22 bp, Artificial Sequence
  Synthetic oligonucleotide; CTA chr11 5340668 5340689 5340673 5340668 -
cagtagactatccttagtggct

SEQ ID NO: 123805 - DNA, 22 bp, Artificial Sequence
  Synthetic oligonucleotide; CTA chr11 5340658 5340679 5340663 5340658 -
tccttagtggcttctacttttt

SEQ ID NO: 123806 - DNA, 22 bp, Artificial Sequence
  Synthetic oligonucleotide; CTT chr11 5340653 5340674 5340658 5340653 -
agtggcttctactttttgcctt

SEQ ID NO: 123807 - DNA, 22 bp, Artificial Sequence
  Synthetic oligonucleotide; TTA chr11 5340652 5340673 5340657 5340652 -
gtggcttctactttttgccttg

SEQ ID NO: 123808 - DNA, 22 bp, Artificial Sequence
  Synthetic oligonucleotide; CTT chr11 5340645 5340666 5340650 5340645 -
ctactttttgccttgtattccg

SEQ ID NO: 123809 - DNA, 22 bp, Artificial Sequence
  Synthetic oligonucleotide; TTC chr11 5340644 5340665 5340649 5340644 -
tactttttgccttgtattccgt

SEQ ID NO: 123810 - DNA, 22 bp, Artificial Sequence
  Synthetic oligonucleotide; CTA chr11 5340642 5340663 5340647 5340642 -
ctttttgccttgtattccgtca

SEQ ID NO: 123811 - DNA, 22 bp, Artificial Sequence
  Synthetic oligonucleotide; CTT chr11 5340639 5340660 5340644 5340639 -
tttgccttgtattccgtcatgc

SEQ ID NO: 123812 - DNA, 22 bp, Artificial Sequence
  Synthetic oligonucleotide; TTT chr11 5340638 5340659 5340643 5340638 -
ttgccttgtattccgtcatgct

SEQ ID NO: 123813 - DNA, 22 bp, Artificial Sequence
  Synthetic oligonucleotide; TTT chr11 5340637 5340658 5340642 5340637 -
tgccttgtattccgtcatgctt

SEQ ID NO: 123814 - DNA, 22 bp, Artificial Sequence
  Synthetic oligonucleotide; TTT chr11 5340636 5340657 5340641 5340636 -
gccttgtattccgtcatgcttg

SEQ ID NO: 123815 - DNA, 22 bp, Artificial Sequence
  Synthetic oligonucleotide; TTG chr11 5340635 5340656 5340640 5340635 -
ccttgtattccgtcatgcttgt

SEQ ID NO: 123816 - DNA, 22 bp, Artificial Sequence
  Synthetic oligonucleotide; CTT chr11 5340631 5340652 5340636 5340631 -
gtattccgtcatgcttgtagta

SEQ ID NO: 123817 - DNA, 22 bp, Artificial Sequence
  Synthetic oligonucleotide; TTG chr11 5340630 5340651 5340635 5340630 -
tattccgtcatgcttgtagtac

SEQ ID NO: 123818 - DNA, 22 bp, Artificial Sequence
  Synthetic oligonucleotide; TTC chr11 5340625 5340646 5340630 5340625 -
cgtcatgcttgtagtacctact

SEQ ID NO: 123819 - DNA, 22 bp, Artificial Sequence
  Synthetic oligonucleotide; CTT chr11 5340615 5340636 5340620 5340615 -
gtagtacctactttctttttct

SEQ ID NO: 123820 - DNA, 22 bp, Artificial Sequence
  Synthetic oligonucleotide; TTG chr11 5340614 5340635 5340619 5340614 -
tagtacctactttctttttctg

SEQ ID NO: 123821 - DNA, 22 bp, Artificial Sequence
  Synthetic oligonucleotide; CTA chr11 5340605 5340626 5340610 5340605 -
ctttctttttctgaaaatttct

SEQ ID NO: 123822 - DNA, 22 bp, Artificial Sequence
  Synthetic oligonucleotide; CTT chr11 5340602 5340623 5340607 5340602 -
tctttttctgaaaatttctcct

SEQ ID NO: 123823 - DNA, 22 bp, Artificial Sequence
  Synthetic oligonucleotide; TTT chr11 5340601 5340622 5340606 5340601 -
ctttttctgaaaatttctcctc

SEQ ID NO: 123824 - DNA, 22 bp, Artificial Sequence
  Synthetic oligonucleotide; TTC chr11 5340600 5340621 5340605 5340600 -
tttttctgaaaatttctcctcc

SEQ ID NO: 123825 - DNA, 22 bp, Artificial Sequence
  Synthetic oligonucleotide; CTT chr11 5340598 5340619 5340603 5340598 -
tttctgaaaatttctcctcctt

SEQ ID NO: 123826 - DNA, 22 bp, Artificial Sequence
  Synthetic oligonucleotide; TTT chr11 5340597 5340618 5340602 5340597 -
ttctgaaaatttctcctccttc

SEQ ID NO: 123827 - DNA, 22 bp, Artificial Sequence
  Synthetic oligonucleotide; TTT chr11 5340596 5340617 5340601 5340596 -
tctgaaaatttctcctccttct

SEQ ID NO: 123828 - DNA, 22 bp, Artificial Sequence
  Synthetic oligonucleotide; TTT chr11 5340595 5340616 5340600 5340595 -
ctgaaaatttctcctccttcta

SEQ ID NO: 123829 - DNA, 22 bp, Artificial Sequence
  Synthetic oligonucleotide; TTC chr11 5340594 5340615 5340599 5340594 -
tgaaaatttctcctccttctac

SEQ ID NO: 123830 - DNA, 22 bp, Artificial Sequence
  Synthetic oligonucleotide; CTG chr11 5340592 5340613 5340597 5340592 -
aaaatttctcctccttctactc

SEQ ID NO: 123831 - DNA, 22 bp, Artificial Sequence
  Synthetic oligonucleotide; TTT chr11 5340585 5340606 5340590 5340585 -
ctcctccttctactccaaaaat

SEQ ID NO: 123832 - DNA, 22 bp, Artificial Sequence
  Synthetic oligonucleotide; TTC chr11 5340584 5340605 5340589 5340584 -
tcctccttctactccaaaaata

SEQ ID NO: 123833 - DNA, 22 bp, Artificial Sequence
  Synthetic oligonucleotide; CTC chr11 5340582 5340603 5340587 5340582 -
ctccttctactccaaaaatatt

SEQ ID NO: 123834 - DNA, 22 bp, Artificial Sequence
  Synthetic oligonucleotide; CTC chr11 5340579 5340600 5340584 5340579 -
cttctactccaaaaatattgtt

SEQ ID NO: 123835 - DNA, 22 bp, Artificial Sequence
  Synthetic oligonucleotide; CTT chr11 5340576 5340597 5340581 5340576 -
ctactccaaaaatattgttccc

SEQ ID NO: 123836 - DNA, 22 bp, Artificial Sequence
  Synthetic oligonucleotide; TTC chr11 5340575 5340596 5340580 5340575 -
tactccaaaaatattgttccct

SEQ ID NO: 123837 - DNA, 22 bp, Artificial Sequence
  Synthetic oligonucleotide; CTA chr11 5340573 5340594 5340578 5340573 -
ctccaaaaatattgttccctat

SEQ ID NO: 123838 - DNA, 22 bp, Artificial Sequence
  Synthetic oligonucleotide; CTC chr11 5340570 5340591 5340575 5340570 -
caaaaatattgttccctatgaa

SEQ ID NO: 123839 - DNA, 22 bp, Artificial Sequence
  Synthetic oligonucleotide; TTG chr11 5340559 5340580 5340564 5340559 -
ttccctatgaaaactgatattt

SEQ ID NO: 123840 - DNA, 22 bp, Artificial Sequence
  Synthetic oligonucleotide; TTC chr11 5340556 5340577 5340561 5340556 -
cctatgaaaactgatattttgc

SEQ ID NO: 123841 - DNA, 22 bp, Artificial Sequence
  Synthetic oligonucleotide; CTA chr11 5340552 5340573 5340557 5340552 -
tgaaaactgatattttgcattg

SEQ ID NO: 123842 - DNA, 22 bp, Artificial Sequence
  Synthetic oligonucleotide; CTG chr11 5340543 5340564 5340548 5340543 -
atattttgcattgtatctccaa

SEQ ID NO: 123843 - DNA, 22 bp, Artificial Sequence
  Synthetic oligonucleotide; TTT chr11 5340537 5340558 5340542 5340537 -
tgcattgtatctccaaactcct

SEQ ID NO: 123844 - DNA, 22 bp, Artificial Sequence
  Synthetic oligonucleotide; TTT chr11 5340536 5340557 5340541 5340536 -
gcattgtatctccaaactccta

SEQ ID NO: 123845 - DNA, 22 bp, Artificial Sequence
  Synthetic oligonucleotide; TTG chr11 5340535 5340556 5340540 5340535 -
cattgtatctccaaactcctaa

SEQ ID NO: 123846 - DNA, 22 bp, Artificial Sequence
  Synthetic oligonucleotide; TTG chr11 5340530 5340551 5340535 5340530 -
tatctccaaactcctaaccgca

SEQ ID NO: 123847 - DNA, 22 bp, Artificial Sequence
  Synthetic oligonucleotide; CTC chr11 5340524 5340545 5340529 5340524 -
caaactcctaaccgcagtagaa

SEQ ID NO: 123848 - DNA, 22 bp, Artificial Sequence
  Synthetic oligonucleotide; CTC chr11 5340517 5340538 5340522 5340517 -
ctaaccgcagtagaagaacttt

SEQ ID NO: 123849 - DNA, 22 bp, Artificial Sequence
  Synthetic oligonucleotide; CTA chr11 5340514 5340535 5340519 5340514 -
accgcagtagaagaactttttt

SEQ ID NO: 123850 - DNA, 22 bp, Artificial Sequence
  Synthetic oligonucleotide; CTT chr11 5340496 5340517 5340501 5340496 -
ttttaaaaagaatttttcaata

SEQ ID NO: 123851 - DNA, 22 bp, Artificial Sequence
  Synthetic oligonucleotide; TTT chr11 5340495 5340516 5340500 5340495 -
tttaaaaagaatttttcaatat

SEQ ID NO: 123852 - DNA, 22 bp, Artificial Sequence
  Synthetic oligonucleotide; TTT chr11 5340494 5340515 5340499 5340494 -
ttaaaaagaatttttcaatatg

SEQ ID NO: 123853 - DNA, 22 bp, Artificial Sequence
  Synthetic oligonucleotide; TTT chr11 5340493 5340514 5340498 5340493 -
taaaaagaatttttcaatatga

SEQ ID NO: 123854 - DNA, 22 bp, Artificial Sequence
  Synthetic oligonucleotide; TTT chr11 5340492 5340513 5340497 5340492 -
aaaaagaatttttcaatatgac

SEQ ID NO: 123855 - DNA, 22 bp, Artificial Sequence
  Synthetic oligonucleotide; TTA chr11 5340491 5340512 5340496 5340491 -
aaaagaatttttcaatatgaca

SEQ ID NO: 123856 - DNA, 22 bp, Artificial Sequence
  Synthetic oligonucleotide; TTT chr11 5340481 5340502 5340486 5340481 -
ttcaatatgacattgcaaaaaa

SEQ ID NO: 123857 - DNA, 22 bp, Artificial Sequence
  Synthetic oligonucleotide; TTT chr11 5340480 5340501 5340485 5340480 -
tcaatatgacattgcaaaaaaa

SEQ ID NO: 123858 - DNA, 22 bp, Artificial Sequence
  Synthetic oligonucleotide; TTT chr11 5340479 5340500 5340484 5340479 -
caatatgacattgcaaaaaaaa

SEQ ID NO: 123859 - DNA, 22 bp, Artificial Sequence
  Synthetic oligonucleotide; TTC chr11 5340478 5340499 5340483 5340478 -
aatatgacattgcaaaaaaaaa

SEQ ID NO: 123860 - DNA, 22 bp, Artificial Sequence
  Synthetic oligonucleotide; TTG chr11 5340466 5340487 5340471 5340466 -
caaaaaaaaaaagagtaatgct

SEQ ID NO: 123861 - DNA, 22 bp, Artificial Sequence
  Synthetic oligonucleotide; CTT chr11 5340443 5340464 5340448 5340443 -
ttgttgtagaattactaaaatg

SEQ ID NO: 123862 - DNA, 22 bp, Artificial Sequence
  Synthetic oligonucleotide; TTT chr11 5340442 5340463 5340447 5340442 -
tgttgtagaattactaaaatgc

SEQ ID NO: 123863 - DNA, 22 bp, Artificial Sequence
  Synthetic oligonucleotide; TTT chr11 5340441 5340462 5340446 5340441 -
gttgtagaattactaaaatgca

SEQ ID NO: 123864 - DNA, 22 bp, Artificial Sequence
  Synthetic oligonucleotide; TTG chr11 5340440 5340461 5340445 5340440 -
ttgtagaattactaaaatgcaa

SEQ ID NO: 123865 - DNA, 22 bp, Artificial Sequence
  Synthetic oligonucleotide; TTG chr11 5340437 5340458 5340442 5340437 -
tagaattactaaaatgcaatgc

SEQ ID NO: 123866 - DNA, 22 bp, Artificial Sequence
  Synthetic oligonucleotide; TTA chr11 5340429 5340450 5340434 5340429 -
ctaaaatgcaatgcttagaatt

SEQ ID NO: 123867 - DNA, 22 bp, Artificial Sequence
  Synthetic oligonucleotide; CTA chr11 5340426 5340447 5340431 5340426 -
aaatgcaatgcttagaattgtt

SEQ ID NO: 123868 - DNA, 22 bp, Artificial Sequence
  Synthetic oligonucleotide; CTT chr11 5340413 5340434 5340418 5340413 -
agaattgttaatgacaatgttt

SEQ ID NO: 123869 - DNA, 22 bp, Artificial Sequence
  Synthetic oligonucleotide; TTA chr11 5340412 5340433 5340417 5340412 -
gaattgttaatgacaatgtttt

SEQ ID NO: 123870 - DNA, 22 bp, Artificial Sequence
  Synthetic oligonucleotide; TTG chr11 5340406 5340427 5340411 5340406 -
ttaatgacaatgtttttcatca

SEQ ID NO: 123871 - DNA, 22 bp, Artificial Sequence
  Synthetic oligonucleotide; TTA chr11 5340403 5340424 5340408 5340403 -
atgacaatgtttttcatcaggc

SEQ ID NO: 123872 - DNA, 22 bp, Artificial Sequence
  Synthetic oligonucleotide; TTT chr11 5340391 5340412 5340396 5340391 -
ttcatcaggcaagtgacttcaa

SEQ ID NO: 123873 - DNA, 22 bp, Artificial Sequence
  Synthetic oligonucleotide; TTT chr11 5340390 5340411 5340395 5340390 -
tcatcaggcaagtgacttcaaa

SEQ ID NO: 123874 - DNA, 22 bp, Artificial Sequence
  Synthetic oligonucleotide; TTT chr11 5340389 5340410 5340394 5340389 -
catcaggcaagtgacttcaaac

SEQ ID NO: 123875 - DNA, 22 bp, Artificial Sequence
  Synthetic oligonucleotide; TTC chr11 5340388 5340409 5340393 5340388 -
atcaggcaagtgacttcaaact

SEQ ID NO: 123876 - DNA, 22 bp, Artificial Sequence
  Synthetic oligonucleotide; CTT chr11 5340372 5340393 5340377 5340372 -
caaactataataaatatttaga

SEQ ID NO: 123877 - DNA, 22 bp, Artificial Sequence
  Synthetic oligonucleotide; TTC chr11 5340371 5340392 5340376 5340371 -
aaactataataaatatttagag

SEQ ID NO: 123878 - DNA, 22 bp, Artificial Sequence
  Synthetic oligonucleotide; CTA chr11 5340365 5340386 5340370 5340365 -
taataaatatttagagtaaatt

SEQ ID NO: 123879 - DNA, 22 bp, Artificial Sequence
  Synthetic oligonucleotide; TTT chr11 5340353 5340374 5340358 5340353 -
agagtaaattatagataaagaa

SEQ ID NO: 123880 - DNA, 22 bp, Artificial Sequence
  Synthetic oligonucleotide; TTA chr11 5340352 5340373 5340357 5340352 -
gagtaaattatagataaagaaa

SEQ ID NO: 123881 - DNA, 22 bp, Artificial Sequence
  Synthetic oligonucleotide; TTA chr11 5340342 5340363 5340347 5340342 -
tagataaagaaatgataataaa

SEQ ID NO: 123882 - DNA, 22 bp, Artificial Sequence
  Synthetic oligonucleotide; CTT chr11 5340307 5340328 5340312 5340307 -
caaatctctgattccatgtttt

SEQ ID NO: 123883 - DNA, 22 bp, Artificial Sequence
  Synthetic oligonucleotide; TTC chr11 5340306 5340327 5340311 5340306 -
aaatctctgattccatgttttc

SEQ ID NO: 123884 - DNA, 22 bp, Artificial Sequence
  Synthetic oligonucleotide; CTC chr11 5340299 5340320 5340304 5340299 -
tgattccatgttttcctgagac

SEQ ID NO: 123885 - DNA, 22 bp, Artificial Sequence
  Synthetic oligonucleotide; CTG chr11 5340297 5340318 5340302 5340297 -
attccatgttttcctgagactc

SEQ ID NO: 123886 - DNA, 22 bp, Artificial Sequence
  Synthetic oligonucleotide; TTC chr11 5340293 5340314 5340298 5340293 -
catgttttcctgagactcagtg

SEQ ID NO: 123887 - DNA, 22 bp, Artificial Sequence
  Synthetic oligonucleotide; TTT chr11 5340286 5340307 5340291 5340286 -
tcctgagactcagtgacaagga

SEQ ID NO: 123888 - DNA, 22 bp, Artificial Sequence
  Synthetic oligonucleotide; TTT chr11 5340285 5340306 5340290 5340285 -
cctgagactcagtgacaaggag

SEQ ID NO: 123889 - DNA, 22 bp, Artificial Sequence
  Synthetic oligonucleotide; TTC chr11 5340284 5340305 5340289 5340284 -
ctgagactcagtgacaaggagg

SEQ ID NO: 123890 - DNA, 22 bp, Artificial Sequence
  Synthetic oligonucleotide; CTG chr11 5340281 5340302 5340286 5340281 -
agactcagtgacaaggaggaca

SEQ ID NO: 123891 - DNA, 22 bp, Artificial Sequence
  Synthetic oligonucleotide; CTC chr11 5340275 5340296 5340280 5340275 -
agtgacaaggaggacagtttga

SEQ ID NO: 123892 - DNA, 22 bp, Artificial Sequence
  Synthetic oligonucleotide; TTT chr11 5340255 5340276 5340260 5340255 -
gaatcttttttttgattccaca

SEQ ID NO: 123893 - DNA, 22 bp, Artificial Sequence
  Synthetic oligonucleotide; TTG chr11 5340254 5340275 5340259 5340254 -
aatcttttttttgattccacag

SEQ ID NO: 123894 - DNA, 22 bp, Artificial Sequence
  Synthetic oligonucleotide; CTT chr11 5340248 5340269 5340253 5340248 -
ttttttgattccacagcctaat

SEQ ID NO: 123895 - DNA, 22 bp, Artificial Sequence
  Synthetic oligonucleotide; TTT chr11 5340247 5340268 5340252 5340247 -
tttttgattccacagcctaata

SEQ ID NO: 123896 - DNA, 22 bp, Artificial Sequence
  Synthetic oligonucleotide; TTT chr11 5340246 5340267 5340251 5340246 -
ttttgattccacagcctaataa

SEQ ID NO: 123897 - DNA, 22 bp, Artificial Sequence
  Synthetic oligonucleotide; TTT chr11 5340245 5340266 5340250 5340245 -
tttgattccacagcctaataaa

SEQ ID NO: 123898 - DNA, 22 bp, Artificial Sequence
  Synthetic oligonucleotide; TTT chr11 5340244 5340265 5340249 5340244 -
ttgattccacagcctaataaac

SEQ ID NO: 123899 - DNA, 22 bp, Artificial Sequence
  Synthetic oligonucleotide; TTT chr11 5340243 5340264 5340248 5340243 -
tgattccacagcctaataaact

SEQ ID NO: 123900 - DNA, 22 bp, Artificial Sequence
  Synthetic oligonucleotide; TTT chr11 5340242 5340263 5340247 5340242 -
gattccacagcctaataaactc

SEQ ID NO: 123901 - DNA, 22 bp, Artificial Sequence
  Synthetic oligonucleotide; TTG chr11 5340241 5340262 5340246 5340241 -
attccacagcctaataaactcc

SEQ ID NO: 123902 - DNA, 22 bp, Artificial Sequence
  Synthetic oligonucleotide; TTC chr11 5340237 5340258 5340242 5340237 -
cacagcctaataaactcctctt

SEQ ID NO: 123903 - DNA, 22 bp, Artificial Sequence
  Synthetic oligonucleotide; CTA chr11 5340228 5340249 5340233 5340228 -
ataaactcctcttcttgtaatt

SEQ ID NO: 123904 - DNA, 22 bp, Artificial Sequence
  Synthetic oligonucleotide; CTC chr11 5340220 5340241 5340225 5340220 -
ctcttcttgtaatttgttttgt

SEQ ID NO: 123905 - DNA, 22 bp, Artificial Sequence
  Synthetic oligonucleotide; CTC chr11 5340217 5340238 5340222 5340217 -
ttcttgtaatttgttttgttca

SEQ ID NO: 123906 - DNA, 22 bp, Artificial Sequence
  Synthetic oligonucleotide; CTT chr11 5340215 5340236 5340220 5340215 -
cttgtaatttgttttgttcagc

SEQ ID NO: 123907 - DNA, 22 bp, Artificial Sequence
  Synthetic oligonucleotide; TTC chr11 5340214 5340235 5340219 5340214 -
ttgtaatttgttttgttcagcc

SEQ ID NO: 123908 - DNA, 22 bp, Artificial Sequence
  Synthetic oligonucleotide; CTT chr11 5340212 5340233 5340217 5340212 -
gtaatttgttttgttcagccta

SEQ ID NO: 123909 - DNA, 22 bp, Artificial Sequence
  Synthetic oligonucleotide; TTG chr11 5340211 5340232 5340216 5340211 -
taatttgttttgttcagcctag

SEQ ID NO: 123910 - DNA, 22 bp, Artificial Sequence
  Synthetic oligonucleotide; TTT chr11 5340205 5340226 5340210 5340205 -
gttttgttcagcctagtttcag

SEQ ID NO: 123911 - DNA, 22 bp, Artificial Sequence
  Synthetic oligonucleotide; TTG chr11 5340204 5340225 5340209 5340204 -
ttttgttcagcctagtttcagt

SEQ ID NO: 123912 - DNA, 22 bp, Artificial Sequence
  Synthetic oligonucleotide; TTT chr11 5340201 5340222 5340206 5340201 -
tgttcagcctagtttcagttga

SEQ ID NO: 123913 - DNA, 22 bp, Artificial Sequence
  Synthetic oligonucleotide; TTT chr11 5340200 5340221 5340205 5340200 -
gttcagcctagtttcagttgag

SEQ ID NO: 123914 - DNA, 22 bp, Artificial Sequence
  Synthetic oligonucleotide; TTG chr11 5340199 5340220 5340204 5340199 -
ttcagcctagtttcagttgagt

SEQ ID NO: 123915 - DNA, 22 bp, Artificial Sequence
  Synthetic oligonucleotide; TTC chr11 5340196 5340217 5340201 5340196 -
agcctagtttcagttgagtttc

SEQ ID NO: 123916 - DNA, 22 bp, Artificial Sequence
  Synthetic oligonucleotide; CTA chr11 5340190 5340211 5340195 5340190 -
gtttcagttgagtttcacttat

SEQ ID NO: 123917 - DNA, 22 bp, Artificial Sequence
  Synthetic oligonucleotide; TTT chr11 5340186 5340207 5340191 5340186 -
cagttgagtttcacttataacc

SEQ ID NO: 123918 - DNA, 22 bp, Artificial Sequence
  Synthetic oligonucleotide; TTC chr11 5340185 5340206 5340190 5340185 -
agttgagtttcacttataacca

SEQ ID NO: 123919 - DNA, 22 bp, Artificial Sequence
  Synthetic oligonucleotide; TTG chr11 5340180 5340201 5340185 5340180 -
agtttcacttataaccaaaggc

SEQ ID NO: 123920 - DNA, 22 bp, Artificial Sequence
  Synthetic oligonucleotide; TTT chr11 5340175 5340196 5340180 5340175 -
cacttataaccaaaggctatta

SEQ ID NO: 123921 - DNA, 22 bp, Artificial Sequence
  Synthetic oligonucleotide; TTC chr11 5340174 5340195 5340179 5340174 -
acttataaccaaaggctattaa

SEQ ID NO: 123922 - DNA, 22 bp, Artificial Sequence
  Synthetic oligonucleotide; CTT chr11 5340170 5340191 5340175 5340170 -
ataaccaaaggctattaataat

SEQ ID NO: 123923 - DNA, 22 bp, Artificial Sequence
  Synthetic oligonucleotide; TTA chr11 5340169 5340190 5340174 5340169 -
taaccaaaggctattaataatt

SEQ ID NO: 123924 - DNA, 22 bp, Artificial Sequence
  Synthetic oligonucleotide; CTA chr11 5340156 5340177 5340161 5340156 -
ttaataattatatcatctcagt

SEQ ID NO: 123925 - DNA, 22 bp, Artificial Sequence
  Synthetic oligonucleotide; TTA chr11 5340153 5340174 5340158 5340153 -
ataattatatcatctcagttat

SEQ ID NO: 123926 - DNA, 22 bp, Artificial Sequence
  Synthetic oligonucleotide; TTA chr11 5340146 5340167 5340151 5340146 -
tatcatctcagttatagatatg

SEQ ID NO: 123927 - DNA, 22 bp, Artificial Sequence
  Synthetic oligonucleotide; CTC chr11 5340137 5340158 5340142 5340137 -
agttatagatatgtgaatcttc

SEQ ID NO: 123928 - DNA, 22 bp, Artificial Sequence
  Synthetic oligonucleotide; TTA chr11 5340132 5340153 5340137 5340132 -
tagatatgtgaatcttctctaa

SEQ ID NO: 123929 - DNA, 22 bp, Artificial Sequence
  Synthetic oligonucleotide; CTT chr11 5340116 5340137 5340121 5340116 -
ctctaactaatatttaaaactg

SEQ ID NO: 123930 - DNA, 22 bp, Artificial Sequence
  Synthetic oligonucleotide; TTC chr11 5340115 5340136 5340120 5340115 -
tctaactaatatttaaaactgg

SEQ ID NO: 123931 - DNA, 22 bp, Artificial Sequence
  Synthetic oligonucleotide; CTC chr11 5340113 5340134 5340118 5340113 -
taactaatatttaaaactggaa

SEQ ID NO: 123932 - DNA, 22 bp, Artificial Sequence
  Synthetic oligonucleotide; CTA chr11 5340111 5340132 5340116 5340111 -
actaatatttaaaactggaaaa

SEQ ID NO: 123933 - DNA, 22 bp, Artificial Sequence
  Synthetic oligonucleotide; CTA chr11 5340107 5340128 5340112 5340107 -
atatttaaaactggaaaatact

SEQ ID NO: 123934 - DNA, 22 bp, Artificial Sequence
  Synthetic oligonucleotide; TTT chr11 5340101 5340122 5340106 5340101 -
aaaactggaaaatactgttagg

SEQ ID NO: 123935 - DNA, 22 bp, Artificial Sequence
  Synthetic oligonucleotide; TTA chr11 5340100 5340121 5340105 5340100 -
aaactggaaaatactgttaggt

SEQ ID NO: 123936 - DNA, 22 bp, Artificial Sequence
  Synthetic oligonucleotide; CTG chr11 5340094 5340115 5340099 5340094 -
gaaaatactgttaggtagaaga

SEQ ID NO: 123937 - DNA, 22 bp, Artificial Sequence
  Synthetic oligonucleotide; CTG chr11 5340084 5340105 5340089 5340084 -
ttaggtagaagagctgcctctt

SEQ ID NO: 123938 - DNA, 22 bp, Artificial Sequence
  Synthetic oligonucleotide; TTA chr11 5340081 5340102 5340086 5340081 -
ggtagaagagctgcctcttttt

SEQ ID NO: 123939 - DNA, 22 bp, Artificial Sequence
  Synthetic oligonucleotide; CTG chr11 5340068 5340089 5340073 5340068 -
cctctttttctaaaatacagga

SEQ ID NO: 123940 - DNA, 22 bp, Artificial Sequence
  Synthetic oligonucleotide; CTC chr11 5340064 5340085 5340069 5340064 -
tttttctaaaatacaggaaatg

SEQ ID NO: 123941 - DNA, 22 bp, Artificial Sequence
  Synthetic oligonucleotide; CTT chr11 5340062 5340083 5340067 5340062 -
tttctaaaatacaggaaatgga

SEQ ID NO: 123942 - DNA, 22 bp, Artificial Sequence
  Synthetic oligonucleotide; TTT chr11 5340061 5340082 5340066 5340061 -
ttctaaaatacaggaaatggaa

SEQ ID NO: 123943 - DNA, 22 bp, Artificial Sequence
  Synthetic oligonucleotide; TTT chr11 5340060 5340081 5340065 5340060 -
tctaaaatacaggaaatggaac

SEQ ID NO: 123944 - DNA, 22 bp, Artificial Sequence
  Synthetic oligonucleotide; TTT chr11 5340059 5340080 5340064 5340059 -
ctaaaatacaggaaatggaacc

SEQ ID NO: 123945 - DNA, 22 bp, Artificial Sequence
  Synthetic oligonucleotide; TTC chr11 5340058 5340079 5340063 5340058 -
taaaatacaggaaatggaacct

SEQ ID NO: 123946 - DNA, 22 bp, Artificial Sequence
  Synthetic oligonucleotide; CTA chr11 5340056 5340077 5340061 5340056 -
aaatacaggaaatggaacctaa

SEQ ID NO: 123947 - DNA, 22 bp, Artificial Sequence
  Synthetic oligonucleotide; CTA chr11 5340035 5340056 5340040 5340035 -
aaaatggcaggaaagttgacca

SEQ ID NO: 123948 - DNA, 22 bp, Artificial Sequence
  Synthetic oligonucleotide; TTG chr11 5340017 5340038 5340022 5340017 -
accatttggtgaatgatttatg

SEQ ID NO: 123949 - DNA, 22 bp, Artificial Sequence
  Synthetic oligonucleotide; TTT chr11 5340010 5340031 5340015 5340010 -
ggtgaatgatttatgaagttat

SEQ ID NO: 123950 - DNA, 22 bp, Artificial Sequence
  Synthetic oligonucleotide; TTG chr11 5340009 5340030 5340014 5340009 -
gtgaatgatttatgaagttatt

SEQ ID NO: 123951 - DNA, 22 bp, Artificial Sequence
  Synthetic oligonucleotide; TTT chr11 5339998 5340019 5340003 5339998 -
atgaagttatttcccttgttta

SEQ ID NO: 123952 - DNA, 22 bp, Artificial Sequence
  Synthetic oligonucleotide; TTA chr11 5339997 5340018 5340002 5339997 -
tgaagttatttcccttgtttaa

SEQ ID NO: 123953 - DNA, 22 bp, Artificial Sequence
  Synthetic oligonucleotide; TTA chr11 5339989 5340010 5339994 5339989 -
tttcccttgtttaagaagttca

SEQ ID NO: 123954 - DNA, 22 bp, Artificial Sequence
  Synthetic oligonucleotide; TTT chr11 5339986 5340007 5339991 5339986 -
cccttgtttaagaagttcattt

SEQ ID NO: 123955 - DNA, 22 bp, Artificial Sequence
  Synthetic oligonucleotide; TTC chr11 5339985 5340006 5339990 5339985 -
ccttgtttaagaagttcatttc

SEQ ID NO: 123956 - DNA, 22 bp, Artificial Sequence
  Synthetic oligonucleotide; CTT chr11 5339981 5340002 5339986 5339981 -
gtttaagaagttcatttctgac

SEQ ID NO: 123957 - DNA, 22 bp, Artificial Sequence
  Synthetic oligonucleotide; TTG chr11 5339980 5340001 5339985 5339980 -
tttaagaagttcatttctgact

SEQ ID NO: 123958 - DNA, 22 bp, Artificial Sequence
  Synthetic oligonucleotide; TTT chr11 5339977 5339998 5339982 5339977 -
aagaagttcatttctgacttga

SEQ ID NO: 123959 - DNA, 22 bp, Artificial Sequence
  Synthetic oligonucleotide; TTA chr11 5339976 5339997 5339981 5339976 -
agaagttcatttctgacttgaa

SEQ ID NO: 123960 - DNA, 22 bp, Artificial Sequence
  Synthetic oligonucleotide; TTC chr11 5339968 5339989 5339973 5339968 -
atttctgacttgaaagtaagtg

SEQ ID NO: 123961 - DNA, 22 bp, Artificial Sequence
  Synthetic oligonucleotide; TTT chr11 5339964 5339985 5339969 5339964 -
ctgacttgaaagtaagtgtgaa

SEQ ID NO: 123962 - DNA, 22 bp, Artificial Sequence
  Synthetic oligonucleotide; TTC chr11 5339963 5339984 5339968 5339963 -
tgacttgaaagtaagtgtgaaa

SEQ ID NO: 123963 - DNA, 22 bp, Artificial Sequence
  Synthetic oligonucleotide; CTG chr11 5339961 5339982 5339966 5339961 -
acttgaaagtaagtgtgaaact

SEQ ID NO: 123964 - DNA, 22 bp, Artificial Sequence
  Synthetic oligonucleotide; CTT chr11 5339957 5339978 5339962 5339957 -
gaaagtaagtgtgaaactaaat

SEQ ID NO: 123965 - DNA, 22 bp, Artificial Sequence
  Synthetic oligonucleotide; TTG chr11 5339956 5339977 5339961 5339956 -
aaagtaagtgtgaaactaaatt

SEQ ID NO: 123966 - DNA, 22 bp, Artificial Sequence
  Synthetic oligonucleotide; CTA chr11 5339938 5339959 5339943 5339938 -
aattcactgagaagatgctgta

SEQ ID NO: 123967 - DNA, 22 bp, Artificial Sequence
  Synthetic oligonucleotide; TTC chr11 5339933 5339954 5339938 5339933 -
actgagaagatgctgtaggatg

SEQ ID NO: 123968 - DNA, 22 bp, Artificial Sequence
  Synthetic oligonucleotide; CTG chr11 5339929 5339950 5339934 5339929 -
agaagatgctgtaggatgaata

SEQ ID NO: 123969 - DNA, 22 bp, Artificial Sequence
  Synthetic oligonucleotide; CTG chr11 5339918 5339939 5339923 5339918 -
taggatgaatacagacacagga

SEQ ID NO: 123970 - DNA, 22 bp, Artificial Sequence
  Synthetic oligonucleotide; CTA chr11 5339873 5339894 5339878 5339873 -
aataattatctcaaacttagtt

SEQ ID NO: 123971 - DNA, 22 bp, Artificial Sequence
  Synthetic oligonucleotide; TTA chr11 5339865 5339886 5339870 5339865 -
tctcaaacttagttatacagaa

SEQ ID NO: 123972 - DNA, 22 bp, Artificial Sequence
  Synthetic oligonucleotide; CTC chr11 5339861 5339882 5339866 5339861 -
aaacttagttatacagaaggct

SEQ ID NO: 123973 - DNA, 22 bp, Artificial Sequence
  Synthetic oligonucleotide; CTT chr11 5339855 5339876 5339860 5339855 -
agttatacagaaggctacatgg

SEQ ID NO: 123974 - DNA, 22 bp, Artificial Sequence
  Synthetic oligonucleotide; TTA chr11 5339854 5339875 5339859 5339854 -
gttatacagaaggctacatggt

SEQ ID NO: 123975 - DNA, 22 bp, Artificial Sequence
  Synthetic oligonucleotide; TTA chr11 5339850 5339871 5339855 5339850 -
tacagaaggctacatggtggaa

SEQ ID NO: 123976 - DNA, 22 bp, Artificial Sequence
  Synthetic oligonucleotide; CTA chr11 5339838 5339859 5339843 5339838 -
catggtggaaatccactcagac

SEQ ID NO: 123977 - DNA, 22 bp, Artificial Sequence
  Synthetic oligonucleotide; CTC chr11 5339820 5339841 5339825 5339820 -
agacatgtttttctattcaaaa

SEQ ID NO: 123978 - DNA, 22 bp, Artificial Sequence
  Synthetic oligonucleotide; TTT chr11 5339810 5339831 5339815 5339810 -
ttctattcaaaacccattgtaa

SEQ ID NO: 123979 - DNA, 22 bp, Artificial Sequence
  Synthetic oligonucleotide; TTT chr11 5339809 5339830 5339814 5339809 -
tctattcaaaacccattgtaac

SEQ ID NO: 123980 - DNA, 22 bp, Artificial Sequence
  Synthetic oligonucleotide; TTT chr11 5339808 5339829 5339813 5339808 -
ctattcaaaacccattgtaaca

SEQ ID NO: 123981 - DNA, 22 bp, Artificial Sequence
  Synthetic oligonucleotide; TTC chr11 5339807 5339828 5339812 5339807 -
tattcaaaacccattgtaacaa

SEQ ID NO: 123982 - DNA, 22 bp, Artificial Sequence
  Synthetic oligonucleotide; CTA chr11 5339805 5339826 5339810 5339805 -
ttcaaaacccattgtaacaatc

SEQ ID NO: 123983 - DNA, 22 bp, Artificial Sequence
  Synthetic oligonucleotide; TTC chr11 5339802 5339823 5339807 5339802 -
aaaacccattgtaacaatcaac

SEQ ID NO: 123984 - DNA, 22 bp, Artificial Sequence
  Synthetic oligonucleotide; TTG chr11 5339791 5339812 5339796 5339791 -
taacaatcaacataaacacagt

SEQ ID NO: 123985 - DNA, 22 bp, Artificial Sequence
  Synthetic oligonucleotide; TTA chr11 5339763 5339784 5339768 5339763 -
gtattatcataaaatttagaac

SEQ ID NO: 123986 - DNA, 22 bp, Artificial Sequence
  Synthetic oligonucleotide; TTA chr11 5339757 5339778 5339762 5339757 -
tcataaaatttagaactttctg

SEQ ID NO: 123987 - DNA, 22 bp, Artificial Sequence
  Synthetic oligonucleotide; TTT chr11 5339746 5339767 5339751 5339746 -
agaactttctgtgatctcctac

SEQ ID NO: 123988 - DNA, 22 bp, Artificial Sequence
  Synthetic oligonucleotide; TTA chr11 5339745 5339766 5339750 5339745 -
gaactttctgtgatctcctaca

SEQ ID NO: 123989 - DNA, 22 bp, Artificial Sequence
  Synthetic oligonucleotide; CTT chr11 5339739 5339760 5339744 5339739 -
tctgtgatctcctacaagtctt

SEQ ID NO: 123990 - DNA, 22 bp, Artificial Sequence
  Synthetic oligonucleotide; TTT chr11 5339738 5339759 5339743 5339738 -
ctgtgatctcctacaagtcttc

SEQ ID NO: 123991 - DNA, 22 bp, Artificial Sequence
  Synthetic oligonucleotide; TTC chr11 5339737 5339758 5339742 5339737 -
tgtgatctcctacaagtcttcc

SEQ ID NO: 123992 - DNA, 22 bp, Artificial Sequence
  Synthetic oligonucleotide; CTG chr11 5339735 5339756 5339740 5339735 -
tgatctcctacaagtcttcctg

SEQ ID NO: 123993 - DNA, 22 bp, Artificial Sequence
  Synthetic oligonucleotide; CTC chr11 5339728 5339749 5339733 5339728 -
ctacaagtcttcctgtggtaaa

SEQ ID NO: 123994 - DNA, 22 bp, Artificial Sequence
  Synthetic oligonucleotide; CTA chr11 5339725 5339746 5339730 5339725 -
caagtcttcctgtggtaaaatg

SEQ ID NO: 123995 - DNA, 22 bp, Artificial Sequence
  Synthetic oligonucleotide; CTT chr11 5339717 5339738 5339722 5339717 -
cctgtggtaaaatgctatgtac

SEQ ID NO: 123996 - DNA, 22 bp, Artificial Sequence
  Synthetic oligonucleotide; TTC chr11 5339716 5339737 5339721 5339716 -
ctgtggtaaaatgctatgtact

SEQ ID NO: 123997 - DNA, 22 bp, Artificial Sequence
  Synthetic oligonucleotide; CTG chr11 5339713 5339734 5339718 5339713 -
tggtaaaatgctatgtactatt

SEQ ID NO: 123998 - DNA, 22 bp, Artificial Sequence
  Synthetic oligonucleotide; CTA chr11 5339700 5339721 5339705 5339700 -
tgtactattagaagccttagca

SEQ ID NO: 123999 - DNA, 22 bp, Artificial Sequence
  Synthetic oligonucleotide; CTA chr11 5339693 5339714 5339698 5339693 -
ttagaagccttagcaaattaat

SEQ ID NO: 124000 - DNA, 22 bp, Artificial Sequence
  Synthetic oligonucleotide; TTA chr11 5339690 5339711 5339695 5339690 -
gaagccttagcaaattaataca

SEQ ID NO: 124001 - DNA, 22 bp, Artificial Sequence
  Synthetic oligonucleotide; CTT chr11 5339682 5339703 5339687 5339682 -
agcaaattaatacaggaacaga

SEQ ID NO: 124002 - DNA, 22 bp, Artificial Sequence
  Synthetic oligonucleotide; TTA chr11 5339681 5339702 5339686 5339681 -
gcaaattaatacaggaacagaa

SEQ ID NO: 124003 - DNA, 22 bp, Artificial Sequence
  Synthetic oligonucleotide; TTA chr11 5339673 5339694 5339678 5339673 -
atacaggaacagaaaaccaaat

SEQ ID NO: 124004 - DNA, 22 bp, Artificial Sequence
  Synthetic oligonucleotide; TTC chr11 5339640 5339661 5339645 5339640 -
tcacttatgagtgggagctaaa

SEQ ID NO: 124005 - DNA, 22 bp, Artificial Sequence
  Synthetic oligonucleotide; CTC chr11 5339638 5339659 5339643 5339638 -
acttatgagtgggagctaaatg

SEQ ID NO: 124006 - DNA, 22 bp, Artificial Sequence
  Synthetic oligonucleotide; CTT chr11 5339634 5339655 5339639 5339634 -
atgagtgggagctaaatgatga

SEQ ID NO: 124007 - DNA, 22 bp, Artificial Sequence
  Synthetic oligonucleotide; TTA chr11 5339633 5339654 5339638 5339633 -
tgagtgggagctaaatgatgag

SEQ ID NO: 124008 - DNA, 22 bp, Artificial Sequence
  Synthetic oligonucleotide; CTA chr11 5339620 5339641 5339625 5339620 -
aatgatgagaacacatggacac

SEQ ID NO: 124009 - DNA, 22 bp, Artificial Sequence
  Synthetic oligonucleotide; CTG chr11 5339575 5339596 5339580 5339575 -
gggcctattggaggatggaggg

SEQ ID NO: 124010 - DNA, 22 bp, Artificial Sequence
  Synthetic oligonucleotide; CTA chr11 5339568 5339589 5339573 5339568 -
ttggaggatggagggtgaaagg

SEQ ID NO: 124011 - DNA, 22 bp, Artificial Sequence
  Synthetic oligonucleotide; TTG chr11 5339565 5339586 5339570 5339565 -
gaggatggagggtgaaaggagg

SEQ ID NO: 124012 - DNA, 22 bp, Artificial Sequence
  Synthetic oligonucleotide; CTA chr11 5339510 5339531 5339515 5339510 -
ggcttaatacctgagtgagtga

SEQ ID NO: 124013 - DNA, 22 bp, Artificial Sequence
  Synthetic oligonucleotide; CTT chr11 5339505 5339526 5339510 5339505 -
aatacctgagtgagtgatgaca

SEQ ID NO: 124014 - DNA, 22 bp, Artificial Sequence
  Synthetic oligonucleotide; TTA chr11 5339504 5339525 5339509 5339504 -
atacctgagtgagtgatgacat

SEQ ID NO: 124015 - DNA, 22 bp, Artificial Sequence
  Synthetic oligonucleotide; CTG chr11 5339497 5339518 5339502 5339497 -
agtgagtgatgacataatctgt

SEQ ID NO: 124016 - DNA, 22 bp, Artificial Sequence
  Synthetic oligonucleotide; CTG chr11 5339476 5339497 5339481 5339476 -
tacaacaaaccctcgtgacaca

SEQ ID NO: 124017 - DNA, 22 bp, Artificial Sequence
  Synthetic oligonucleotide; CTC chr11 5339462 5339483 5339467 5339462 -
gtgacacaagtttaaatatgta

SEQ ID NO: 124018 - DNA, 22 bp, Artificial Sequence
  Synthetic oligonucleotide; TTT chr11 5339449 5339470 5339454 5339449 -
aaatatgtaacagacctgctct

SEQ ID NO: 124019 - DNA, 22 bp, Artificial Sequence
  Synthetic oligonucleotide; TTA chr11 5339448 5339469 5339453 5339448 -
aatatgtaacagacctgctctt

SEQ ID NO: 124020 - DNA, 22 bp, Artificial Sequence
  Synthetic oligonucleotide; CTG chr11 5339431 5339452 5339436 5339431 -
ctcttgtactcctgaacctaaa

SEQ ID NO: 124021 - DNA, 22 bp, Artificial Sequence
  Synthetic oligonucleotide; CTC chr11 5339428 5339449 5339433 5339428 -
ttgtactcctgaacctaaaata

SEQ ID NO: 124022 - DNA, 22 bp, Artificial Sequence
  Synthetic oligonucleotide; CTT chr11 5339426 5339447 5339431 5339426 -
gtactcctgaacctaaaataaa

SEQ ID NO: 124023 - DNA, 22 bp, Artificial Sequence
  Synthetic oligonucleotide; TTG chr11 5339425 5339446 5339430 5339425 -
tactcctgaacctaaaataaaa

SEQ ID NO: 124024 - DNA, 22 bp, Artificial Sequence
  Synthetic oligonucleotide; CTC chr11 5339420 5339441 5339425 5339420 -
ctgaacctaaaataaaagttag

SEQ ID NO: 124025 - DNA, 22 bp, Artificial Sequence
  Synthetic oligonucleotide; CTG chr11 5339417 5339438 5339422 5339417 -
aacctaaaataaaagttagtta

SEQ ID NO: 124026 - DNA, 22 bp, Artificial Sequence
  Synthetic oligonucleotide; CTA chr11 5339411 5339432 5339416 5339411 -
aaataaaagttagttaggaaaa

SEQ ID NO: 124027 - DNA, 22 bp, Artificial Sequence
  Synthetic oligonucleotide; TTA chr11 5339399 5339420 5339404 5339399 -
gttaggaaaagaagcctattta

SEQ ID NO: 124028 - DNA, 22 bp, Artificial Sequence
  Synthetic oligonucleotide; TTA chr11 5339395 5339416 5339400 5339395 -
ggaaaagaagcctatttataac

SEQ ID NO: 124029 - DNA, 22 bp, Artificial Sequence
  Synthetic oligonucleotide; CTA chr11 5339381 5339402 5339386 5339381 -
tttataacactatctcctagga

SEQ ID NO: 124030 - DNA, 22 bp, Artificial Sequence
  Synthetic oligonucleotide; TTT chr11 5339378 5339399 5339383 5339378 -
ataacactatctcctaggaaac

SEQ ID NO: 124031 - DNA, 22 bp, Artificial Sequence
  Synthetic oligonucleotide; TTA chr11 5339377 5339398 5339382 5339377 -
taacactatctcctaggaaaca

SEQ ID NO: 124032 - DNA, 22 bp, Artificial Sequence
  Synthetic oligonucleotide; CTA chr11 5339369 5339390 5339374 5339369 -
tctcctaggaaacactgcacat

SEQ ID NO: 124033 - DNA, 22 bp, Artificial Sequence
  Synthetic oligonucleotide; CTC chr11 5339365 5339386 5339370 5339365 -
ctaggaaacactgcacatgaat

SEQ ID NO: 124034 - DNA, 22 bp, Artificial Sequence
  Synthetic oligonucleotide; CTA chr11 5339362 5339383 5339367 5339362 -
ggaaacactgcacatgaatttg

SEQ ID NO: 124035 - DNA, 22 bp, Artificial Sequence
  Synthetic oligonucleotide; CTG chr11 5339352 5339373 5339357 5339352 -
cacatgaatttgtattcataag

SEQ ID NO: 124036 - DNA, 22 bp, Artificial Sequence
  Synthetic oligonucleotide; TTT chr11 5339341 5339362 5339346 5339341 -
gtattcataagaagagtagaat

SEQ ID NO: 124037 - DNA, 22 bp, Artificial Sequence
  Synthetic oligonucleotide; TTG chr11 5339340 5339361 5339345 5339340 -
tattcataagaagagtagaatt

SEQ ID NO: 124038 - DNA, 22 bp, Artificial Sequence
  Synthetic oligonucleotide; TTC chr11 5339335 5339356 5339340 5339335 -
ataagaagagtagaattcagag

SEQ ID NO: 124039 - DNA, 22 bp, Artificial Sequence
  Synthetic oligonucleotide; TTC chr11 5339317 5339338 5339322 5339317 -
agagtggtccagtggactaaca

SEQ ID NO: 124040 - DNA, 22 bp, Artificial Sequence
  Synthetic oligonucleotide; CTA chr11 5339298 5339319 5339303 5339298 -
acaaactggtgaaccaccttct

SEQ ID NO: 124041 - DNA, 22 bp, Artificial Sequence
  Synthetic oligonucleotide; CTG chr11 5339290 5339311 5339295 5339290 -
gtgaaccaccttcttacagcag

SEQ ID NO: 124042 - DNA, 22 bp, Artificial Sequence
  Synthetic oligonucleotide; CTT chr11 5339278 5339299 5339283 5339278 -
cttacagcaggtgaagcctgta

SEQ ID NO: 124043 - DNA, 22 bp, Artificial Sequence
  Synthetic oligonucleotide; TTC chr11 5339277 5339298 5339282 5339277 -
ttacagcaggtgaagcctgtaa

SEQ ID NO: 124044 - DNA, 22 bp, Artificial Sequence
  Synthetic oligonucleotide; CTT chr11 5339275 5339296 5339280 5339275 -
acagcaggtgaagcctgtaatt

SEQ ID NO: 124045 - DNA, 22 bp, Artificial Sequence
  Synthetic oligonucleotide; TTA chr11 5339274 5339295 5339279 5339274 -
cagcaggtgaagcctgtaattc

SEQ ID NO: 124046 - DNA, 22 bp, Artificial Sequence
  Synthetic oligonucleotide; CTG chr11 5339258 5339279 5339263 5339258 -
taattcagcttttcatcattca

SEQ ID NO: 124047 - DNA, 22 bp, Artificial Sequence
  Synthetic oligonucleotide; TTC chr11 5339252 5339273 5339257 5339252 -
agcttttcatcattcaagactg

SEQ ID NO: 124048 - DNA, 22 bp, Artificial Sequence
  Synthetic oligonucleotide; CTT chr11 5339247 5339268 5339252 5339247 -
ttcatcattcaagactgaaaga

SEQ ID NO: 124049 - DNA, 22 bp, Artificial Sequence
  Synthetic oligonucleotide; TTT chr11 5339246 5339267 5339251 5339246 -
tcatcattcaagactgaaagaa

SEQ ID NO: 124050 - DNA, 22 bp, Artificial Sequence
  Synthetic oligonucleotide; TTT chr11 5339245 5339266 5339250 5339245 -
catcattcaagactgaaagaag

SEQ ID NO: 124051 - DNA, 22 bp, Artificial Sequence
  Synthetic oligonucleotide; TTC chr11 5339244 5339265 5339249 5339244 -
atcattcaagactgaaagaaga

SEQ ID NO: 124052 - DNA, 22 bp, Artificial Sequence
  Synthetic oligonucleotide; TTC chr11 5339237 5339258 5339242 5339237 -
aagactgaaagaagaatataac

SEQ ID NO: 124053 - DNA, 22 bp, Artificial Sequence
  Synthetic oligonucleotide; CTG chr11 5339230 5339251 5339235 5339230 -
aaagaagaatataacttatata

SEQ ID NO: 124054 - DNA, 22 bp, Artificial Sequence
  Synthetic oligonucleotide; CTT chr11 5339213 5339234 5339218 5339213 -
atatagagaaggacctcatgag

SEQ ID NO: 124055 - DNA, 22 bp, Artificial Sequence
  Synthetic oligonucleotide; TTA chr11 5339212 5339233 5339217 5339212 -
tatagagaaggacctcatgagg

SEQ ID NO: 124056 - DNA, 22 bp, Artificial Sequence
  Synthetic oligonucleotide; CTC chr11 5339196 5339217 5339201 5339196 -
atgaggaataaatttcatggtg

SEQ ID NO: 124057 - DNA, 22 bp, Artificial Sequence
  Synthetic oligonucleotide; TTT chr11 5339181 5339202 5339186 5339181 -
catggtgcctattaagataaat

SEQ ID NO: 124058 - DNA, 22 bp, Artificial Sequence
  Synthetic oligonucleotide; TTC chr11 5339180 5339201 5339185 5339180 -
atggtgcctattaagataaata

SEQ ID NO: 124059 - DNA, 22 bp, Artificial Sequence
  Synthetic oligonucleotide; CTA chr11 5339170 5339191 5339175 5339170 -
ttaagataaataagtaccatgt

SEQ ID NO: 124060 - DNA, 22 bp, Artificial Sequence
  Synthetic oligonucleotide; TTA chr11 5339167 5339188 5339172 5339167 -
agataaataagtaccatgtagt

SEQ ID NO: 124061 - DNA, 22 bp, Artificial Sequence
  Synthetic oligonucleotide; TTA chr11 5339143 5339164 5339148 5339143 -
tgggaaatctaaggtgtaaaag

SEQ ID NO: 124062 - DNA, 22 bp, Artificial Sequence
  Synthetic oligonucleotide; CTA chr11 5339132 5339153 5339137 5339132 -
aggtgtaaaagaatatacatta

SEQ ID NO: 124063 - DNA, 22 bp, Artificial Sequence
  Synthetic oligonucleotide; TTA chr11 5339110 5339131 5339115 5339110 -
aaaaaagcccttgccaaatacc

SEQ ID NO: 124064 - DNA, 22 bp, Artificial Sequence
  Synthetic oligonucleotide; CTT chr11 5339098 5339119 5339103 5339098 -
gccaaataccatcctttctttt

SEQ ID NO: 124065 - DNA, 22 bp, Artificial Sequence
  Synthetic oligonucleotide; TTG chr11 5339097 5339118 5339102 5339097 -
ccaaataccatcctttcttttt

SEQ ID NO: 124066 - DNA, 22 bp, Artificial Sequence
  Synthetic oligonucleotide; CTT chr11 5339082 5339103 5339087 5339082 -
tctttttcaaataataatatac

SEQ ID NO: 124067 - DNA, 22 bp, Artificial Sequence
  Synthetic oligonucleotide; TTT chr11 5339081 5339102 5339086 5339081 -
ctttttcaaataataatatact

SEQ ID NO: 124068 - DNA, 22 bp, Artificial Sequence
  Synthetic oligonucleotide; TTC chr11 5339080 5339101 5339085 5339080 -
tttttcaaataataatatactt

SEQ ID NO: 124069 - DNA, 22 bp, Artificial Sequence
  Synthetic oligonucleotide; CTT chr11 5339078 5339099 5339083 5339078 -
tttcaaataataatatacttgt

SEQ ID NO: 124070 - DNA, 22 bp, Artificial Sequence
  Synthetic oligonucleotide; TTT chr11 5339077 5339098 5339082 5339077 -
ttcaaataataatatacttgtg

SEQ ID NO: 124071 - DNA, 22 bp, Artificial Sequence
  Synthetic oligonucleotide; TTT chr11 5339076 5339097 5339081 5339076 -
tcaaataataatatacttgtgt

SEQ ID NO: 124072 - DNA, 22 bp, Artificial Sequence
  Synthetic oligonucleotide; TTT chr11 5339075 5339096 5339080 5339075 -
caaataataatatacttgtgta

SEQ ID NO: 124073 - DNA, 22 bp, Artificial Sequence
  Synthetic oligonucleotide; TTC chr11 5339074 5339095 5339079 5339074 -
aaataataatatacttgtgtag

SEQ ID NO: 124074 - DNA, 22 bp, Artificial Sequence
  Synthetic oligonucleotide; CTT chr11 5339058 5339079 5339063 5339058 -
gtgtagtatgggcttgaaggga

SEQ ID NO: 124075 - DNA, 22 bp, Artificial Sequence
  Synthetic oligonucleotide; TTG chr11 5339057 5339078 5339062 5339057 -
tgtagtatgggcttgaagggat

SEQ ID NO: 124076 - DNA, 22 bp, Artificial Sequence
  Synthetic oligonucleotide; CTT chr11 5339043 5339064 5339048 5339043 -
gaagggataacataccataaga

SEQ ID NO: 124077 - DNA, 22 bp, Artificial Sequence
  Synthetic oligonucleotide; TTG chr11 5339042 5339063 5339047 5339042 -
aagggataacataccataagaa

SEQ ID NO: 124078 - DNA, 22 bp, Artificial Sequence
  Synthetic oligonucleotide; TTT chr11 5339015 5339036 5339020 5339015 -
aatttgagtcaggaaatgaaag

SEQ ID NO: 124079 - DNA, 22 bp, Artificial Sequence
  Synthetic oligonucleotide; TTA chr11 5339014 5339035 5339019 5339014 -
atttgagtcaggaaatgaaagg

SEQ ID NO: 124080 - DNA, 22 bp, Artificial Sequence
  Synthetic oligonucleotide; TTT chr11 5339010 5339031 5339015 5339010 -
gagtcaggaaatgaaaggctaa

SEQ ID NO: 124081 - DNA, 22 bp, Artificial Sequence
  Synthetic oligonucleotide; TTG chr11 5339009 5339030 5339014 5339009 -
agtcaggaaatgaaaggctaag

SEQ ID NO: 124082 - DNA, 22 bp, Artificial Sequence
  Synthetic oligonucleotide; CTA chr11 5338989 5339010 5338994 5338989 -
agtgtgcatttctgtagactaa

SEQ ID NO: 124083 - DNA, 22 bp, Artificial Sequence
  Synthetic oligonucleotide; TTT chr11 5338978 5338999 5338983 5338978 -
ctgtagactaagccaatcttag

SEQ ID NO: 124084 - DNA, 22 bp, Artificial Sequence
  Synthetic oligonucleotide; TTC chr11 5338977 5338998 5338982 5338977 -
tgtagactaagccaatcttaga

SEQ ID NO: 124085 - DNA, 22 bp, Artificial Sequence
  Synthetic oligonucleotide; CTG chr11 5338975 5338996 5338980 5338975 -
tagactaagccaatcttagaaa

SEQ ID NO: 124086 - DNA, 22 bp, Artificial Sequence
  Synthetic oligonucleotide; CTA chr11 5338968 5338989 5338973 5338968 -
agccaatcttagaaatgattaa

SEQ ID NO: 124087 - DNA, 22 bp, Artificial Sequence
  Synthetic oligonucleotide; CTT chr11 5338958 5338979 5338963 5338958 -
agaaatgattaagaagacgtgg

SEQ ID NO: 124088 - DNA, 22 bp, Artificial Sequence
  Synthetic oligonucleotide; TTA chr11 5338957 5338978 5338962 5338957 -
gaaatgattaagaagacgtgga

SEQ ID NO: 124089 - DNA, 22 bp, Artificial Sequence
  Synthetic oligonucleotide; TTA chr11 5338947 5338968 5338952 5338947 -
agaagacgtggaagaatcttag

SEQ ID NO: 124090 - DNA, 22 bp, Artificial Sequence
  Synthetic oligonucleotide; CTT chr11 5338927 5338948 5338932 5338927 -
agagacacactgaaaaaatatg

SEQ ID NO: 124091 - DNA, 22 bp, Artificial Sequence
  Synthetic oligonucleotide; TTA chr11 5338926 5338947 5338931 5338926 -
gagacacactgaaaaaatatgt

SEQ ID NO: 124092 - DNA, 22 bp, Artificial Sequence
  Synthetic oligonucleotide; CTG chr11 5338915 5338936 5338920 5338915 -
aaaaaatatgtatggtctaatg

SEQ ID NO: 124093 - DNA, 22 bp, Artificial Sequence
  Synthetic oligonucleotide; CTA chr11 5338896 5338917 5338901 5338896 -
atgagtttacagatcacttttc

SEQ ID NO: 124094 - DNA, 22 bp, Artificial Sequence
  Synthetic oligonucleotide; TTT chr11 5338888 5338909 5338893 5338888 -
acagatcacttttcctcccata

SEQ ID NO: 124095 - DNA, 22 bp, Artificial Sequence
  Synthetic oligonucleotide; TTA chr11 5338887 5338908 5338892 5338887 -
cagatcacttttcctcccatat

SEQ ID NO: 124096 - DNA, 22 bp, Artificial Sequence
  Synthetic oligonucleotide; CTT chr11 5338877 5338898 5338882 5338877 -
ttcctcccatataaaatgaatt

SEQ ID NO: 124097 - DNA, 22 bp, Artificial Sequence
  Synthetic oligonucleotide; TTT chr11 5338876 5338897 5338881 5338876 -
tcctcccatataaaatgaattt

SEQ ID NO: 124098 - DNA, 22 bp, Artificial Sequence
  Synthetic oligonucleotide; TTT chr11 5338875 5338896 5338880 5338875 -
cctcccatataaaatgaattta

SEQ ID NO: 124099 - DNA, 22 bp, Artificial Sequence
  Synthetic oligonucleotide; TTC chr11 5338874 5338895 5338879 5338874 -
ctcccatataaaatgaatttat

SEQ ID NO: 124100 - DNA, 22 bp, Artificial Sequence
  Synthetic oligonucleotide; CTC chr11 5338871 5338892 5338876 5338871 -
ccatataaaatgaatttatact

SEQ ID NO: 124101 - DNA, 22 bp, Artificial Sequence
  Synthetic oligonucleotide; TTT chr11 5338854 5338875 5338859 5338854 -
atactagataaggggaagatga

SEQ ID NO: 124102 - DNA, 22 bp, Artificial Sequence
  Synthetic oligonucleotide; TTA chr11 5338853 5338874 5338858 5338853 -
tactagataaggggaagatgaa

SEQ ID NO: 124103 - DNA, 22 bp, Artificial Sequence
  Synthetic oligonucleotide; CTA chr11 5338848 5338869 5338853 5338848 -
gataaggggaagatgaacttta

SEQ ID NO: 124104 - DNA, 22 bp, Artificial Sequence
  Synthetic oligonucleotide; CTT chr11 5338828 5338849 5338833 5338828 -
tattcctctcattaacaaataa

SEQ ID NO: 124105 - DNA, 22 bp, Artificial Sequence
  Synthetic oligonucleotide; TTT chr11 5338827 5338848 5338832 5338827 -
attcctctcattaacaaataat

SEQ ID NO: 124106 - DNA, 22 bp, Artificial Sequence
  Synthetic oligonucleotide; TTA chr11 5338826 5338847 5338831 5338826 -
ttcctctcattaacaaataatt

SEQ ID NO: 124107 - DNA, 22 bp, Artificial Sequence
  Synthetic oligonucleotide; TTC chr11 5338823 5338844 5338828 5338823 -
ctctcattaacaaataattgct

SEQ ID NO: 124108 - DNA, 22 bp, Artificial Sequence
  Synthetic oligonucleotide; CTC chr11 5338820 5338841 5338825 5338820 -
tcattaacaaataattgctggg

SEQ ID NO: 124109 - DNA, 22 bp, Artificial Sequence
  Synthetic oligonucleotide; CTC chr11 5338818 5338839 5338823 5338818 -
attaacaaataattgctgggtt

SEQ ID NO: 124110 - DNA, 22 bp, Artificial Sequence
  Synthetic oligonucleotide; TTA chr11 5338814 5338835 5338819 5338814 -
acaaataattgctgggttcctt

SEQ ID NO: 124111 - DNA, 22 bp, Artificial Sequence
  Synthetic oligonucleotide; TTG chr11 5338803 5338824 5338808 5338803 -
ctgggttccttcaccagagatg

SEQ ID NO: 124112 - DNA, 22 bp, Artificial Sequence
  Synthetic oligonucleotide; CTG chr11 5338800 5338821 5338805 5338800 -
ggttccttcaccagagatgcag

SEQ ID NO: 124113 - DNA, 22 bp, Artificial Sequence
  Synthetic oligonucleotide; TTC chr11 5338795 5338816 5338800 5338795 -
cttcaccagagatgcagatttt

SEQ ID NO: 124114 - DNA, 22 bp, Artificial Sequence
  Synthetic oligonucleotide; CTT chr11 5338792 5338813 5338797 5338792 -
caccagagatgcagatttttat

SEQ ID NO: 124115 - DNA, 22 bp, Artificial Sequence
  Synthetic oligonucleotide; TTC chr11 5338791 5338812 5338796 5338791 -
accagagatgcagatttttata

SEQ ID NO: 124116 - DNA, 22 bp, Artificial Sequence
  Synthetic oligonucleotide; TTT chr11 5338774 5338795 5338779 5338774 -
ttatagggtaaatgaaaggtga

SEQ ID NO: 124117 - DNA, 22 bp, Artificial Sequence
  Synthetic oligonucleotide; TTT chr11 5338773 5338794 5338778 5338773 -
tatagggtaaatgaaaggtgat

SEQ ID NO: 124118 - DNA, 22 bp, Artificial Sequence
  Synthetic oligonucleotide; TTT chr11 5338772 5338793 5338777 5338772 -
atagggtaaatgaaaggtgata

SEQ ID NO: 124119 - DNA, 22 bp, Artificial Sequence
  Synthetic oligonucleotide; TTA chr11 5338771 5338792 5338776 5338771 -
tagggtaaatgaaaggtgatat

SEQ ID NO: 124120 - DNA, 22 bp, Artificial Sequence
  Synthetic oligonucleotide; TTT chr11 5338745 5338766 5338750 5338745 -
aaagatacttactagattatat

SEQ ID NO: 124121 - DNA, 22 bp, Artificial Sequence
  Synthetic oligonucleotide; TTA chr11 5338744 5338765 5338749 5338744 -
aagatacttactagattatatg

SEQ ID NO: 124122 - DNA, 22 bp, Artificial Sequence
  Synthetic oligonucleotide; CTT chr11 5338735 5338756 5338740 5338735 -
actagattatatgagtattaaa

SEQ ID NO: 124123 - DNA, 22 bp, Artificial Sequence
  Synthetic oligonucleotide; TTA chr11 5338734 5338755 5338739 5338734 -
ctagattatatgagtattaaat

SEQ ID NO: 124124 - DNA, 22 bp, Artificial Sequence
  Synthetic oligonucleotide; CTA chr11 5338731 5338752 5338736 5338731 -
gattatatgagtattaaattgg

SEQ ID NO: 124125 - DNA, 22 bp, Artificial Sequence
  Synthetic oligonucleotide; TTA chr11 5338726 5338747 5338731 5338726 -
tatgagtattaaattgggcagc

SEQ ID NO: 124126 - DNA, 22 bp, Artificial Sequence
  Synthetic oligonucleotide; TTA chr11 5338715 5338736 5338720 5338715 -
aattgggcagcaaggatgatta

SEQ ID NO: 124127 - DNA, 22 bp, Artificial Sequence
  Synthetic oligonucleotide; TTG chr11 5338710 5338731 5338715 5338710 -
ggcagcaaggatgattagaaat

SEQ ID NO: 124128 - DNA, 22 bp, Artificial Sequence
  Synthetic oligonucleotide; TTA chr11 5338693 5338714 5338698 5338693 -
gaaatgattaaggacccagagg

SEQ ID NO: 124129 - DNA, 22 bp, Artificial Sequence
  Synthetic oligonucleotide; TTA chr11 5338683 5338704 5338688 5338683 -
aggacccagaggtctccatgtc

SEQ ID NO: 124130 - DNA, 22 bp, Artificial Sequence
  Synthetic oligonucleotide; CTC chr11 5338667 5338688 5338672 5338667 -
catgtccaattaaagaatgtaa

SEQ ID NO: 124131 - DNA, 22 bp, Artificial Sequence
  Synthetic oligonucleotide; TTA chr11 5338655 5338676 5338660 5338655 -
aagaatgtaaatctgtttttga

SEQ ID NO: 124132 - DNA, 22 bp, Artificial Sequence
  Synthetic oligonucleotide; CTG chr11 5338640 5338661 5338645 5338640 -
tttttgattttatagcctaaat

SEQ ID NO: 124133 - DNA, 22 bp, Artificial Sequence
  Synthetic oligonucleotide; TTT chr11 5338637 5338658 5338642 5338637 -
ttgattttatagcctaaatcct

SEQ ID NO: 124134 - DNA, 22 bp, Artificial Sequence
  Synthetic oligonucleotide; TTT chr11 5338636 5338657 5338641 5338636 -
tgattttatagcctaaatcctt

SEQ ID NO: 124135 - DNA, 22 bp, Artificial Sequence
  Synthetic oligonucleotide; TTT chr11 5338635 5338656 5338640 5338635 -
gattttatagcctaaatcctta

SEQ ID NO: 124136 - DNA, 22 bp, Artificial Sequence
  Synthetic oligonucleotide; TTG chr11 5338634 5338655 5338639 5338634 -
attttatagcctaaatccttag

SEQ ID NO: 124137 - DNA, 22 bp, Artificial Sequence
  Synthetic oligonucleotide; TTT chr11 5338630 5338651 5338635 5338630 -
tatagcctaaatccttagacac

SEQ ID NO: 124138 - DNA, 22 bp, Artificial Sequence
  Synthetic oligonucleotide; TTT chr11 5338629 5338650 5338634 5338629 -
atagcctaaatccttagacaca

SEQ ID NO: 124139 - DNA, 22 bp, Artificial Sequence
  Synthetic oligonucleotide; TTA chr11 5338628 5338649 5338633 5338628 -
tagcctaaatccttagacacag

SEQ ID NO: 124140 - DNA, 22 bp, Artificial Sequence
  Synthetic oligonucleotide; CTA chr11 5338621 5338642 5338626 5338621 -
aatccttagacacagtcattgt

SEQ ID NO: 124141 - DNA, 22 bp, Artificial Sequence
  Synthetic oligonucleotide; CTT chr11 5338614 5338635 5338619 5338614 -
agacacagtcattgttattaat

SEQ ID NO: 124142 - DNA, 22 bp, Artificial Sequence
  Synthetic oligonucleotide; TTA chr11 5338613 5338634 5338618 5338613 -
gacacagtcattgttattaata

SEQ ID NO: 124143 - DNA, 22 bp, Artificial Sequence
  Synthetic oligonucleotide; TTG chr11 5338600 5338621 5338605 5338600 -
ttattaataaactcatagacaa

SEQ ID NO: 124144 - DNA, 22 bp, Artificial Sequence
  Synthetic oligonucleotide; TTA chr11 5338597 5338618 5338602 5338597 -
ttaataaactcatagacaaaat

SEQ ID NO: 124145 - DNA, 22 bp, Artificial Sequence
  Synthetic oligonucleotide; TTA chr11 5338594 5338615 5338599 5338594 -
ataaactcatagacaaaattta

SEQ ID NO: 124146 - DNA, 22 bp, Artificial Sequence
  Synthetic oligonucleotide; CTC chr11 5338586 5338607 5338591 5338586 -
atagacaaaatttattttatgg

SEQ ID NO: 124147 - DNA, 22 bp, Artificial Sequence
  Synthetic oligonucleotide; TTT chr11 5338573 5338594 5338578 5338573 -
attttatgggaaatttaggagt

SEQ ID NO: 124148 - DNA, 22 bp, Artificial Sequence
  Synthetic oligonucleotide; TTA chr11 5338572 5338593 5338577 5338572 -
ttttatgggaaatttaggagtt

SEQ ID NO: 124149 - DNA, 22 bp, Artificial Sequence
  Synthetic oligonucleotide; TTT chr11 5338569 5338590 5338574 5338569 -
tatgggaaatttaggagtttat

SEQ ID NO: 124150 - DNA, 22 bp, Artificial Sequence
  Synthetic oligonucleotide; TTT chr11 5338568 5338589 5338573 5338568 -
atgggaaatttaggagtttatg

SEQ ID NO: 124151 - DNA, 22 bp, Artificial Sequence
  Synthetic oligonucleotide; TTA chr11 5338567 5338588 5338572 5338567 -
tgggaaatttaggagtttatgt

SEQ ID NO: 124152 - DNA, 22 bp, Artificial Sequence
  Synthetic oligonucleotide; TTT chr11 5338557 5338578 5338562 5338557 -
aggagtttatgtccctagattt

SEQ ID NO: 124153 - DNA, 22 bp, Artificial Sequence
  Synthetic oligonucleotide; TTA chr11 5338556 5338577 5338561 5338556 -
ggagtttatgtccctagatttc

SEQ ID NO: 124154 - DNA, 22 bp, Artificial Sequence
  Synthetic oligonucleotide; TTT chr11 5338549 5338570 5338554 5338549 -
atgtccctagatttcaagtaca

SEQ ID NO: 124155 - DNA, 22 bp, Artificial Sequence
  Synthetic oligonucleotide; TTA chr11 5338548 5338569 5338553 5338548 -
tgtccctagatttcaagtacat

SEQ ID NO: 124156 - DNA, 22 bp, Artificial Sequence
  Synthetic oligonucleotide; CTA chr11 5338540 5338561 5338545 5338540 -
gatttcaagtacatgccaccaa

SEQ ID NO: 124157 - DNA, 22 bp, Artificial Sequence
  Synthetic oligonucleotide; TTT chr11 5338535 5338556 5338540 5338535 -
caagtacatgccaccaaactga

SEQ ID NO: 124158 - DNA, 22 bp, Artificial Sequence
  Synthetic oligonucleotide; TTC chr11 5338534 5338555 5338539 5338534 -
aagtacatgccaccaaactgac

SEQ ID NO: 124159 - DNA, 22 bp, Artificial Sequence
  Synthetic oligonucleotide; CTG chr11 5338514 5338535 5338519 5338514 -
acagatgacagtgattagtcac

SEQ ID NO: 124160 - DNA, 22 bp, Artificial Sequence
  Synthetic oligonucleotide; TTA chr11 5338497 5338518 5338502 5338497 -
gtcacaaagtgcctcaaaaata

SEQ ID NO: 124161 - DNA, 22 bp, Artificial Sequence
  Synthetic oligonucleotide; CTC chr11 5338482 5338503 5338487 5338482 -
aaaaatagatggccctatgtta

SEQ ID NO: 124162 - DNA, 22 bp, Artificial Sequence
  Synthetic oligonucleotide; CTA chr11 5338465 5338486 5338470 5338465 -
tgttagtcatggttctccagaa

SEQ ID NO: 124163 - DNA, 22 bp, Artificial Sequence
  Synthetic oligonucleotide; TTA chr11 5338460 5338481 5338465 5338460 -
gtcatggttctccagaaaaata

SEQ ID NO: 124164 - DNA, 22 bp, Artificial Sequence
  Synthetic oligonucleotide; TTC chr11 5338450 5338471 5338455 5338450 -
tccagaaaaatagaatcaacag

SEQ ID NO: 124165 - DNA, 22 bp, Artificial Sequence
  Synthetic oligonucleotide; CTC chr11 5338448 5338469 5338453 5338448 -
cagaaaaatagaatcaacagga

SEQ ID NO: 124166 - DNA, 22 bp, Artificial Sequence
  Synthetic oligonucleotide; TTT chr11 5338423 5338444 5338428 5338423 -
acccaacttcaaattatactac

SEQ ID NO: 124167 - DNA, 22 bp, Artificial Sequence
  Synthetic oligonucleotide; TTA chr11 5338422 5338443 5338427 5338422 -
cccaacttcaaattatactaca

SEQ ID NO: 124168 - DNA, 22 bp, Artificial Sequence
  Synthetic oligonucleotide; CTT chr11 5338414 5338435 5338419 5338414 -
caaattatactacaaggtgaca

SEQ ID NO: 124169 - DNA, 22 bp, Artificial Sequence
  Synthetic oligonucleotide; TTC chr11 5338413 5338434 5338418 5338413 -
aaattatactacaaggtgacag

SEQ ID NO: 124170 - DNA, 22 bp, Artificial Sequence
  Synthetic oligonucleotide; TTA chr11 5338407 5338428 5338412 5338407 -
tactacaaggtgacagtaacta

SEQ ID NO: 124171 - DNA, 22 bp, Artificial Sequence
  Synthetic oligonucleotide; CTA chr11 5338402 5338423 5338407 5338402 -
caaggtgacagtaactaactga

SEQ ID NO: 124172 - DNA, 22 bp, Artificial Sequence
  Synthetic oligonucleotide; CTA chr11 5338385 5338406 5338390 5338385 -
actgaaacagcatggtactgat

SEQ ID NO: 124173 - DNA, 22 bp, Artificial Sequence
  Synthetic oligonucleotide; CTG chr11 5338381 5338402 5338386 5338381 -
aaacagcatggtactgatacca

SEQ ID NO: 124174 - DNA, 22 bp, Artificial Sequence
  Synthetic oligonucleotide; CTG chr11 5338365 5338386 5338370 5338365 -
ataccaaacagacacactgact

SEQ ID NO: 124175 - DNA, 22 bp, Artificial Sequence
  Synthetic oligonucleotide; CTG chr11 5338346 5338367 5338351 5338346 -
actaatggaacagaatggagaa

SEQ ID NO: 124176 - DNA, 22 bp, Artificial Sequence
  Synthetic oligonucleotide; CTA chr11 5338342 5338363 5338347 5338342 -
atggaacagaatggagaactca

SEQ ID NO: 124177 - DNA, 22 bp, Artificial Sequence
  Synthetic oligonucleotide; CTC chr11 5338321 5338342 5338326 5338321 -
agaagtaagaccgcgcatctga

SEQ ID NO: 124178 - DNA, 22 bp, Artificial Sequence
  Synthetic oligonucleotide; CTG chr11 5338300 5338321 5338305 5338300 -
aaacaatctgatcttcaacaaa

SEQ ID NO: 124179 - DNA, 22 bp, Artificial Sequence
  Synthetic oligonucleotide; CTG chr11 5338290 5338311 5338295 5338290 -
atcttcaacaaacctggtaaaa

SEQ ID NO: 124180 - DNA, 22 bp, Artificial Sequence
  Synthetic oligonucleotide; CTT chr11 5338285 5338306 5338290 5338285 -
caacaaacctggtaaaaacaag

SEQ ID NO: 124181 - DNA, 22 bp, Artificial Sequence
  Synthetic oligonucleotide; TTC chr11 5338284 5338305 5338289 5338284 -
aacaaacctggtaaaaacaagt

SEQ ID NO: 124182 - DNA, 22 bp, Artificial Sequence
  Synthetic oligonucleotide; CTG chr11 5338274 5338295 5338279 5338274 -
gtaaaaacaagtaatggggaag

SEQ ID NO: 124183 - DNA, 22 bp, Artificial Sequence
  Synthetic oligonucleotide; TTC chr11 5338246 5338267 5338251 5338246 -
cctattttataaattgtgctgg

SEQ ID NO: 124184 - DNA, 22 bp, Artificial Sequence
  Synthetic oligonucleotide; CTA chr11 5338242 5338263 5338247 5338242 -
ttttataaattgtgctgggaga

SEQ ID NO: 124185 - DNA, 22 bp, Artificial Sequence
  Synthetic oligonucleotide; TTT chr11 5338239 5338260 5338244 5338239 -
tataaattgtgctgggagaact

SEQ ID NO: 124186 - DNA, 22 bp, Artificial Sequence
  Synthetic oligonucleotide; TTT chr11 5338238 5338259 5338243 5338238 -
ataaattgtgctgggagaactg

SEQ ID NO: 124187 - DNA, 22 bp, Artificial Sequence
  Synthetic oligonucleotide; TTA chr11 5338237 5338258 5338242 5338237 -
taaattgtgctgggagaactgg

SEQ ID NO: 124188 - DNA, 22 bp, Artificial Sequence
  Synthetic oligonucleotide; TTG chr11 5338230 5338251 5338235 5338230 -
tgctgggagaactggctagcca

SEQ ID NO: 124189 - DNA, 22 bp, Artificial Sequence
  Synthetic oligonucleotide; CTG chr11 5338225 5338246 5338230 5338225 -
ggagaactggctagccatatgc

SEQ ID NO: 124190 - DNA, 22 bp, Artificial Sequence
  Synthetic oligonucleotide; CTG chr11 5338216 5338237 5338221 5338216 -
gctagccatatgcagaaaattg

SEQ ID NO: 124191 - DNA, 22 bp, Artificial Sequence
  Synthetic oligonucleotide; CTA chr11 5338212 5338233 5338217 5338212 -
gccatatgcagaaaattgaaac

SEQ ID NO: 124192 - DNA, 22 bp, Artificial Sequence
  Synthetic oligonucleotide; TTG chr11 5338194 5338215 5338199 5338194 -
aaactggaccccttccttacat

SEQ ID NO: 124193 - DNA, 22 bp, Artificial Sequence
  Synthetic oligonucleotide; CTG chr11 5338188 5338209 5338193 5338188 -
gaccccttccttacatcttata

SEQ ID NO: 124194 - DNA, 22 bp, Artificial Sequence
  Synthetic oligonucleotide; CTT chr11 5338180 5338201 5338185 5338180 -
ccttacatcttatacataaatt

SEQ ID NO: 124195 - DNA, 22 bp, Artificial Sequence
  Synthetic oligonucleotide; TTC chr11 5338179 5338200 5338184 5338179 -
cttacatcttatacataaatta

SEQ ID NO: 124196 - DNA, 22 bp, Artificial Sequence
  Synthetic oligonucleotide; CTT chr11 5338176 5338197 5338181 5338176 -
acatcttatacataaattaact

SEQ ID NO: 124197 - DNA, 22 bp, Artificial Sequence
  Synthetic oligonucleotide; TTA chr11 5338175 5338196 5338180 5338175 -
catcttatacataaattaactc

SEQ ID NO: 124198 - DNA, 22 bp, Artificial Sequence
  Synthetic oligonucleotide; CTT chr11 5338169 5338190 5338174 5338169 -
atacataaattaactcaagatg

SEQ ID NO: 124199 - DNA, 22 bp, Artificial Sequence
  Synthetic oligonucleotide; TTA chr11 5338168 5338189 5338173 5338168 -
tacataaattaactcaagatgc

SEQ ID NO: 124200 - DNA, 22 bp, Artificial Sequence
  Synthetic oligonucleotide; TTA chr11 5338157 5338178 5338162 5338157 -
actcaagatgcattaaagactt

SEQ ID NO: 124201 - DNA, 22 bp, Artificial Sequence
  Synthetic oligonucleotide; CTC chr11 5338153 5338174 5338158 5338153 -
aagatgcattaaagacttaagt

SEQ ID NO: 124202 - DNA, 22 bp, Artificial Sequence
  Synthetic oligonucleotide; TTA chr11 5338142 5338163 5338147 5338142 -
aagacttaagtgtaaaacccaa

SEQ ID NO: 124203 - DNA, 22 bp, Artificial Sequence
  Synthetic oligonucleotide; CTT chr11 5338135 5338156 5338140 5338135 -
aagtgtaaaacccaaaactata

SEQ ID NO: 124204 - DNA, 22 bp, Artificial Sequence
  Synthetic oligonucleotide; TTA chr11 5338134 5338155 5338139 5338134 -
agtgtaaaacccaaaactataa

SEQ ID NO: 124205 - DNA, 22 bp, Artificial Sequence
  Synthetic oligonucleotide; CTA chr11 5338115 5338136 5338120 5338115 -
taaaaactttagaagaaaacct

SEQ ID NO: 124206 - DNA, 22 bp, Artificial Sequence
  Synthetic oligonucleotide; CTT chr11 5338106 5338127 5338111 5338106 -
tagaagaaaacctaggcaatac

SEQ ID NO: 124207 - DNA, 22 bp, Artificial Sequence
  Synthetic oligonucleotide; TTT chr11 5338105 5338126 5338110 5338105 -
agaagaaaacctaggcaatacc

SEQ ID NO: 124208 - DNA, 22 bp, Artificial Sequence
  Synthetic oligonucleotide; TTA chr11 5338104 5338125 5338109 5338104 -
gaagaaaacctaggcaatacca

SEQ ID NO: 124209 - DNA, 22 bp, Artificial Sequence
  Synthetic oligonucleotide; CTA chr11 5338092 5338113 5338097 5338092 -
ggcaataccattccggacatag

SEQ ID NO: 124210 - DNA, 22 bp, Artificial Sequence
  Synthetic oligonucleotide; TTC chr11 5338079 5338100 5338084 5338079 -
cggacatagacacaggcaaaga

SEQ ID NO: 124211 - DNA, 22 bp, Artificial Sequence
  Synthetic oligonucleotide; TTT chr11 5338054 5338075 5338059 5338054 -
catgatgaaaatgtcaaaaaca

SEQ ID NO: 124212 - DNA, 22 bp, Artificial Sequence
  Synthetic oligonucleotide; TTC chr11 5338053 5338074 5338058 5338053 -
atgatgaaaatgtcaaaaacaa

SEQ ID NO: 124213 - DNA, 22 bp, Artificial Sequence
  Synthetic oligonucleotide; TTG chr11 5338028 5338049 5338033 5338028 -
caacaaaagcaaacactgtcaa

SEQ ID NO: 124214 - DNA, 22 bp, Artificial Sequence
  Synthetic oligonucleotide; CTG chr11 5338010 5338031 5338015 5338010 -
tcaaatgagatctaattaaact

SEQ ID NO: 124215 - DNA, 22 bp, Artificial Sequence
  Synthetic oligonucleotide; CTA chr11 5337996 5338017 5338001 5337996 -
attaaactaaagagatcgggca

SEQ ID NO: 124216 - DNA, 22 bp, Artificial Sequence
  Synthetic oligonucleotide; TTA chr11 5337992 5338013 5337997 5337992 -
aactaaagagatcgggcatggt

SEQ ID NO: 124217 - DNA, 22 bp, Artificial Sequence
  Synthetic oligonucleotide; CTA chr11 5337987 5338008 5337992 5337987 -
aagagatcgggcatggtggctc

SEQ ID NO: 124218 - DNA, 22 bp, Artificial Sequence
  Synthetic oligonucleotide; CTC chr11 5337965 5337986 5337970 5337965 -
acgcctgtaatcccagcacttt

SEQ ID NO: 124219 - DNA, 22 bp, Artificial Sequence
  Synthetic oligonucleotide; CTG chr11 5337958 5337979 5337963 5337958 -
taatcccagcactttgggaggc

SEQ ID NO: 124220 - DNA, 22 bp, Artificial Sequence
  Synthetic oligonucleotide; CTT chr11 5337944 5337965 5337949 5337944 -
tgggaggccaaggtgggtggat

SEQ ID NO: 124221 - DNA, 22 bp, Artificial Sequence
  Synthetic oligonucleotide; TTT chr11 5337943 5337964 5337948 5337943 -
gggaggccaaggtgggtggatc

SEQ ID NO: 124222 - DNA, 22 bp, Artificial Sequence
  Synthetic oligonucleotide; TTG chr11 5337942 5337963 5337947 5337942 -
ggaggccaaggtgggtggatca

SEQ ID NO: 124223 - DNA, 22 bp, Artificial Sequence
  Synthetic oligonucleotide; CTT chr11 5337917 5337938 5337922 5337917 -
gaggtggggagtataagagcag

SEQ ID NO: 124224 - DNA, 22 bp, Artificial Sequence
  Synthetic oligonucleotide; TTG chr11 5337916 5337937 5337921 5337916 -
aggtggggagtataagagcagc

SEQ ID NO: 124225 - DNA, 22 bp, Artificial Sequence
  Synthetic oligonucleotide; CTG chr11 5337891 5337912 5337896 5337891 -
gccaacatggtgaaactccatc

SEQ ID NO: 124226 - DNA, 22 bp, Artificial Sequence
  Synthetic oligonucleotide; CTC chr11 5337873 5337894 5337878 5337873 -
catctctactaaaaatacaaaa

SEQ ID NO: 124227 - DNA, 22 bp, Artificial Sequence
  Synthetic oligonucleotide; CTC chr11 5337867 5337888 5337872 5337867 -
tactaaaaatacaaaaaatgtg

SEQ ID NO: 124228 - DNA, 22 bp, Artificial Sequence
  Synthetic oligonucleotide; CTA chr11 5337865 5337886 5337870 5337865 -
ctaaaaatacaaaaaatgtgct

SEQ ID NO: 124229 - DNA, 22 bp, Artificial Sequence
  Synthetic oligonucleotide; CTA chr11 5337862 5337883 5337867 5337862 -
aaaatacaaaaaatgtgctggg

SEQ ID NO: 124230 - DNA, 22 bp, Artificial Sequence
  Synthetic oligonucleotide; CTG chr11 5337842 5337863 5337847 5337842 -
ggtatggtggtgcgtacctgta

SEQ ID NO: 124231 - DNA, 22 bp, Artificial Sequence
  Synthetic oligonucleotide; CTG chr11 5337822 5337843 5337827 5337822 -
taatctcagctactcaggaggc

SEQ ID NO: 124232 - DNA, 22 bp, Artificial Sequence
  Synthetic oligonucleotide; CTC chr11 5337815 5337836 5337820 5337815 -
agctactcaggaggctgaggca

SEQ ID NO: 124233 - DNA, 22 bp, Artificial Sequence
  Synthetic oligonucleotide; CTA chr11 5337810 5337831 5337815 5337810 -
ctcaggaggctgaggcaggaga

SEQ ID NO: 124234 - DNA, 22 bp, Artificial Sequence
  Synthetic oligonucleotide; CTC chr11 5337807 5337828 5337812 5337807 -
aggaggctgaggcaggagaatt

SEQ ID NO: 124235 - DNA, 22 bp, Artificial Sequence
  Synthetic oligonucleotide; CTG chr11 5337798 5337819 5337803 5337798 -
aggcaggagaattgcttgaacc

SEQ ID NO: 124236 - DNA, 22 bp, Artificial Sequence
  Synthetic oligonucleotide; TTG chr11 5337784 5337805 5337789 5337784 -
cttgaacccaggaggcagaggt

SEQ ID NO: 124237 - DNA, 22 bp, Artificial Sequence
  Synthetic oligonucleotide; CTT chr11 5337781 5337802 5337786 5337781 -
gaacccaggaggcagaggttgc

SEQ ID NO: 124238 - DNA, 22 bp, Artificial Sequence
  Synthetic oligonucleotide; TTG chr11 5337780 5337801 5337785 5337780 -
aacccaggaggcagaggttgca

SEQ ID NO: 124239 - DNA, 22 bp, Artificial Sequence
  Synthetic oligonucleotide; TTG chr11 5337760 5337781 5337765 5337760 -
cagtgagctgagatcgcaccac

SEQ ID NO: 124240 - DNA, 22 bp, Artificial Sequence
  Synthetic oligonucleotide; CTG chr11 5337750 5337771 5337755 5337750 -
agatcgcaccactgcactctag

SEQ ID NO: 124241 - DNA, 22 bp, Artificial Sequence
  Synthetic oligonucleotide; CTG chr11 5337736 5337757 5337741 5337736 -
cactctagcatgggtgaaagag

SEQ ID NO: 124242 - DNA, 22 bp, Artificial Sequence
  Synthetic oligonucleotide; CTC chr11 5337731 5337752 5337736 5337731 -
tagcatgggtgaaagagtgaga

SEQ ID NO: 124243 - DNA, 22 bp, Artificial Sequence
  Synthetic oligonucleotide; CTA chr11 5337729 5337750 5337734 5337729 -
gcatgggtgaaagagtgagact

SEQ ID NO: 124244 - DNA, 22 bp, Artificial Sequence
  Synthetic oligonucleotide; CTT chr11 5337706 5337727 5337711 5337706 -
catctcaaaataaagaaaaata

SEQ ID NO: 124245 - DNA, 22 bp, Artificial Sequence
  Synthetic oligonucleotide; TTC chr11 5337705 5337726 5337710 5337705 -
atctcaaaataaagaaaaatac

SEQ ID NO: 124246 - DNA, 22 bp, Artificial Sequence
  Synthetic oligonucleotide; CTC chr11 5337700 5337721 5337705 5337700 -
aaaataaagaaaaatacaatta

SEQ ID NO: 124247 - DNA, 22 bp, Artificial Sequence
  Synthetic oligonucleotide; TTA chr11 5337678 5337699 5337683 5337678 -
aatacagagcttctaaacagca

SEQ ID NO: 124248 - DNA, 22 bp, Artificial Sequence
  Synthetic oligonucleotide; CTT chr11 5337666 5337687 5337671 5337666 -
ctaaacagcaaaataaactatc

SEQ ID NO: 124249 - DNA, 22 bp, Artificial Sequence
  Synthetic oligonucleotide; TTC chr11 5337665 5337686 5337670 5337665 -
taaacagcaaaataaactatca

SEQ ID NO: 124250 - DNA, 22 bp, Artificial Sequence
  Synthetic oligonucleotide; CTA chr11 5337663 5337684 5337668 5337663 -
aacagcaaaataaactatcatc

SEQ ID NO: 124251 - DNA, 22 bp, Artificial Sequence
  Synthetic oligonucleotide; CTA chr11 5337646 5337667 5337651 5337646 -
tcatcagagcgaacaggcaacc

SEQ ID NO: 124252 - DNA, 22 bp, Artificial Sequence
  Synthetic oligonucleotide; CTA chr11 5337622 5337643 5337627 5337622 -
cagaatgggagaaaatttctgc

SEQ ID NO: 124253 - DNA, 22 bp, Artificial Sequence
  Synthetic oligonucleotide; TTT chr11 5337604 5337625 5337609 5337604 -
ctgcaatctacccatctgacaa

SEQ ID NO: 124254 - DNA, 22 bp, Artificial Sequence
  Synthetic oligonucleotide; TTC chr11 5337603 5337624 5337608 5337603 -
tgcaatctacccatctgacaaa

SEQ ID NO: 124255 - DNA, 22 bp, Artificial Sequence
  Synthetic oligonucleotide; CTG chr11 5337601 5337622 5337606 5337601 -
caatctacccatctgacaaagg

SEQ ID NO: 124256 - DNA, 22 bp, Artificial Sequence
  Synthetic oligonucleotide; CTA chr11 5337594 5337615 5337599 5337594 -
cccatctgacaaaggtctaata

SEQ ID NO: 124257 - DNA, 22 bp, Artificial Sequence
  Synthetic oligonucleotide; CTG chr11 5337586 5337607 5337591 5337586 -
acaaaggtctaatatccagaat

SEQ ID NO: 124258 - DNA, 22 bp, Artificial Sequence
  Synthetic oligonucleotide; CTA chr11 5337575 5337596 5337580 5337575 -
atatccagaatctatgaggaac

SEQ ID NO: 124259 - DNA, 22 bp, Artificial Sequence
  Synthetic oligonucleotide; CTA chr11 5337561 5337582 5337566 5337561 -
tgaggaacttagacatatttac

SEQ ID NO: 124260 - DNA, 22 bp, Artificial Sequence
  Synthetic oligonucleotide; CTT chr11 5337551 5337572 5337556 5337551 -
agacatatttacaaaagaaaca

SEQ ID NO: 124261 - DNA, 22 bp, Artificial Sequence
  Synthetic oligonucleotide; TTA chr11 5337550 5337571 5337555 5337550 -
gacatatttacaaaagaaacac

SEQ ID NO: 124262 - DNA, 22 bp, Artificial Sequence
  Synthetic oligonucleotide; TTT chr11 5337541 5337562 5337546 5337541 -
acaaaagaaacacacaaacaac

SEQ ID NO: 124263 - DNA, 22 bp, Artificial Sequence
  Synthetic oligonucleotide; TTA chr11 5337540 5337561 5337545 5337540 -
caaaagaaacacacaaacaacc

SEQ ID NO: 124264 - DNA, 22 bp, Artificial Sequence
  Synthetic oligonucleotide; TTA chr11 5337512 5337533 5337517 5337512 -
aaaagtgggcaaaggacatgaa

SEQ ID NO: 124265 - DNA, 22 bp, Artificial Sequence
  Synthetic oligonucleotide; CTT chr11 5337481 5337502 5337486 5337481 -
ctcaaaagaagacatttatgtg

SEQ ID NO: 124266 - DNA, 22 bp, Artificial Sequence
  Synthetic oligonucleotide; TTC chr11 5337480 5337501 5337485 5337480 -
tcaaaagaagacatttatgtgg

SEQ ID NO: 124267 - DNA, 22 bp, Artificial Sequence
  Synthetic oligonucleotide; CTC chr11 5337478 5337499 5337483 5337478 -
aaaagaagacatttatgtggct

SEQ ID NO: 124268 - DNA, 22 bp, Artificial Sequence
  Synthetic oligonucleotide; TTT chr11 5337464 5337485 5337469 5337464 -
atgtggctaagaaacatacgaa

SEQ ID NO: 124269 - DNA, 22 bp, Artificial Sequence
  Synthetic oligonucleotide; TTA chr11 5337463 5337484 5337468 5337463 -
tgtggctaagaaacatacgaaa

SEQ ID NO: 124270 - DNA, 22 bp, Artificial Sequence
  Synthetic oligonucleotide; CTA chr11 5337455 5337476 5337460 5337455 -
agaaacatacgaaaaaagtctc

SEQ ID NO: 124271 - DNA, 22 bp, Artificial Sequence
  Synthetic oligonucleotide; CTC chr11 5337433 5337454 5337438 5337433 -
aatgtcactgatcattagagaa

SEQ ID NO: 124272 - DNA, 22 bp, Artificial Sequence
  Synthetic oligonucleotide; CTG chr11 5337423 5337444 5337428 5337423 -
atcattagagaaatgcaaatca

SEQ ID NO: 124273 - DNA, 22 bp, Artificial Sequence
  Synthetic oligonucleotide; TTA chr11 5337416 5337437 5337421 5337416 -
gagaaatgcaaatcaaaaccac

SEQ ID NO: 124274 - DNA, 22 bp, Artificial Sequence
  Synthetic oligonucleotide; CTG chr11 5337378 5337399 5337383 5337378 -
acaccagtcagaatggtggttt

SEQ ID NO: 124275 - DNA, 22 bp, Artificial Sequence
  Synthetic oligonucleotide; TTT chr11 5337356 5337377 5337361 5337356 -
ttaaagtcaagaaacaacagat

SEQ ID NO: 124276 - DNA, 22 bp, Artificial Sequence
  Synthetic oligonucleotide; TTT chr11 5337355 5337376 5337360 5337355 -
taaagtcaagaaacaacagatg

SEQ ID NO: 124277 - DNA, 22 bp, Artificial Sequence
  Synthetic oligonucleotide; TTT chr11 5337354 5337375 5337359 5337354 -
aaagtcaagaaacaacagatgc

SEQ ID NO: 124278 - DNA, 22 bp, Artificial Sequence
  Synthetic oligonucleotide; TTA chr11 5337353 5337374 5337358 5337353 -
aagtcaagaaacaacagatgct

SEQ ID NO: 124279 - DNA, 22 bp, Artificial Sequence
  Synthetic oligonucleotide; CTA chr11 5337330 5337351 5337335 5337330 -
gcaaggttgcagagaaatagga

SEQ ID NO: 124280 - DNA, 22 bp, Artificial Sequence
  Synthetic oligonucleotide; TTG chr11 5337321 5337342 5337326 5337321 -
cagagaaataggaacactttta

SEQ ID NO: 124281 - DNA, 22 bp, Artificial Sequence
  Synthetic oligonucleotide; CTT chr11 5337302 5337323 5337307 5337302 -
ttacactgttggtgggactgta

SEQ ID NO: 124282 - DNA, 22 bp, Artificial Sequence
  Synthetic oligonucleotide; TTT chr11 5337301 5337322 5337306 5337301 -
tacactgttggtgggactgtaa

SEQ ID NO: 124283 - DNA, 22 bp, Artificial Sequence
  Synthetic oligonucleotide; TTT chr11 5337300 5337321 5337305 5337300 -
acactgttggtgggactgtaaa

SEQ ID NO: 124284 - DNA, 22 bp, Artificial Sequence
  Synthetic oligonucleotide; TTA chr11 5337299 5337320 5337304 5337299 -
cactgttggtgggactgtaaac

SEQ ID NO: 124285 - DNA, 22 bp, Artificial Sequence
  Synthetic oligonucleotide; CTG chr11 5337294 5337315 5337299 5337294 -
ttggtgggactgtaaactaatt

SEQ ID NO: 124286 - DNA, 22 bp, Artificial Sequence
  Synthetic oligonucleotide; TTG chr11 5337291 5337312 5337296 5337291 -
gtgggactgtaaactaattcaa

SEQ ID NO: 124287 - DNA, 22 bp, Artificial Sequence
  Synthetic oligonucleotide; CTG chr11 5337282 5337303 5337287 5337282 -
taaactaattcaaccattgtgg

SEQ ID NO: 124288 - DNA, 22 bp, Artificial Sequence
  Synthetic oligonucleotide; CTA chr11 5337275 5337296 5337280 5337275 -
attcaaccattgtggaagacag

SEQ ID NO: 124289 - DNA, 22 bp, Artificial Sequence
  Synthetic oligonucleotide; TTC chr11 5337271 5337292 5337276 5337271 -
aaccattgtggaagacagtgtg

SEQ ID NO: 124290 - DNA, 22 bp, Artificial Sequence
  Synthetic oligonucleotide; TTG chr11 5337263 5337284 5337268 5337263 -
tggaagacagtgtggcaattcc

SEQ ID NO: 124291 - DNA, 22 bp, Artificial Sequence
  Synthetic oligonucleotide; TTC chr11 5337242 5337263 5337247 5337242 -
ctcaaagatttagaaccagaaa

SEQ ID NO: 124292 - DNA, 22 bp, Artificial Sequence
  Synthetic oligonucleotide; CTC chr11 5337239 5337260 5337244 5337239 -
aaagatttagaaccagaaatac

SEQ ID NO: 124293 - DNA, 22 bp, Artificial Sequence
  Synthetic oligonucleotide; TTT chr11 5337231 5337252 5337236 5337231 -
agaaccagaaataccatttgac

SEQ ID NO: 124294 - DNA, 22 bp, Artificial Sequence
  Synthetic oligonucleotide; TTA chr11 5337230 5337251 5337235 5337230 -
gaaccagaaataccatttgacc

SEQ ID NO: 124295 - DNA, 22 bp, Artificial Sequence
  Synthetic oligonucleotide; TTT chr11 5337212 5337233 5337217 5337212 -
gacctcacaatcccattactgg

SEQ ID NO: 124296 - DNA, 22 bp, Artificial Sequence
  Synthetic oligonucleotide; TTG chr11 5337211 5337232 5337216 5337211 -
acctcacaatcccattactggg

SEQ ID NO: 124297 - DNA, 22 bp, Artificial Sequence
  Synthetic oligonucleotide; CTC chr11 5337206 5337227 5337211 5337206 -
acaatcccattactgggtatat

SEQ ID NO: 124298 - DNA, 22 bp, Artificial Sequence
  Synthetic oligonucleotide; TTA chr11 5337194 5337215 5337199 5337194 -
ctgggtatatacctaaaggagt

SEQ ID NO: 124299 - DNA, 22 bp, Artificial Sequence
  Synthetic oligonucleotide; CTG chr11 5337191 5337212 5337196 5337191 -
ggtatatacctaaaggagtata

SEQ ID NO: 124300 - DNA, 22 bp, Artificial Sequence
  Synthetic oligonucleotide; CTA chr11 5337179 5337200 5337184 5337179 -
aaggagtataaatcattctatt

SEQ ID NO: 124301 - DNA, 22 bp, Artificial Sequence
  Synthetic oligonucleotide; TTC chr11 5337161 5337182 5337166 5337161 -
tattactaagatacatgcacat

SEQ ID NO: 124302 - DNA, 22 bp, Artificial Sequence
  Synthetic oligonucleotide; CTA chr11 5337159 5337180 5337164 5337159 -
ttactaagatacatgcacatgt

SEQ ID NO: 124303 - DNA, 22 bp, Artificial Sequence
  Synthetic oligonucleotide; TTA chr11 5337156 5337177 5337161 5337156 -
ctaagatacatgcacatgtatg

SEQ ID NO: 124304 - DNA, 22 bp, Artificial Sequence
  Synthetic oligonucleotide; CTA chr11 5337153 5337174 5337158 5337153 -
agatacatgcacatgtatgttc

SEQ ID NO: 124305 - DNA, 22 bp, Artificial Sequence
  Synthetic oligonucleotide; TTC chr11 5337131 5337152 5337136 5337131 -
attgtagcactattcacaatag

SEQ ID NO: 124306 - DNA, 22 bp, Artificial Sequence
  Synthetic oligonucleotide; TTG chr11 5337127 5337148 5337132 5337127 -
tagcactattcacaatagcaaa

SEQ ID NO: 124307 - DNA, 22 bp, Artificial Sequence
  Synthetic oligonucleotide; CTA chr11 5337119 5337140 5337124 5337119 -
ttcacaatagcaaagacataga

SEQ ID NO: 124308 - DNA, 22 bp, Artificial Sequence
  Synthetic oligonucleotide; TTC chr11 5337116 5337137 5337121 5337116 -
acaatagcaaagacatagaatc

SEQ ID NO: 124309 - DNA, 22 bp, Artificial Sequence
  Synthetic oligonucleotide; TTT chr11 5337063 5337084 5337068 5337063 -
aaaaaatgtggtacatataaac

SEQ ID NO: 124310 - DNA, 22 bp, Artificial Sequence
  Synthetic oligonucleotide; TTA chr11 5337062 5337083 5337067 5337062 -
aaaaatgtggtacatataaacc

SEQ ID NO: 124311 - DNA, 22 bp, Artificial Sequence
  Synthetic oligonucleotide; CTA chr11 5337029 5337050 5337034 5337029 -
tctaaccataaaaagggatgag

SEQ ID NO: 124312 - DNA, 22 bp, Artificial Sequence
  Synthetic oligonucleotide; CTA chr11 5337025 5337046 5337030 5337025 -
accataaaaagggatgagatca

SEQ ID NO: 124313 - DNA, 22 bp, Artificial Sequence
  Synthetic oligonucleotide; CTT chr11 5336996 5337017 5337001 5336996 -
tgctgggacatggatggagccg

SEQ ID NO: 124314 - DNA, 22 bp, Artificial Sequence
  Synthetic oligonucleotide; TTT chr11 5336995 5337016 5337000 5336995 -
gctgggacatggatggagccga

SEQ ID NO: 124315 - DNA, 22 bp, Artificial Sequence
  Synthetic oligonucleotide; TTG chr11 5336994 5337015 5336999 5336994 -
ctgggacatggatggagccgaa

SEQ ID NO: 124316 - DNA, 22 bp, Artificial Sequence
  Synthetic oligonucleotide; CTG chr11 5336991 5337012 5336996 5336991 -
ggacatggatggagccgaaagc

SEQ ID NO: 124317 - DNA, 22 bp, Artificial Sequence
  Synthetic oligonucleotide; TTA chr11 5336964 5336985 5336969 5336964 -
tcttcagtaaactaatgcagga

SEQ ID NO: 124318 - DNA, 22 bp, Artificial Sequence
  Synthetic oligonucleotide; CTT chr11 5336960 5336981 5336965 5336960 -
cagtaaactaatgcaggaacag

SEQ ID NO: 124319 - DNA, 22 bp, Artificial Sequence
  Synthetic oligonucleotide; TTC chr11 5336959 5336980 5336964 5336959 -
agtaaactaatgcaggaacaga

SEQ ID NO: 124320 - DNA, 22 bp, Artificial Sequence
  Synthetic oligonucleotide; CTA chr11 5336950 5336971 5336955 5336950 -
atgcaggaacagaaaaccaaac

SEQ ID NO: 124321 - DNA, 22 bp, Artificial Sequence
  Synthetic oligonucleotide; TTC chr11 5336917 5336938 5336922 5336917 -
tcacttagaagtgggagctgaa

SEQ ID NO: 124322 - DNA, 22 bp, Artificial Sequence
  Synthetic oligonucleotide; CTC chr11 5336915 5336936 5336920 5336915 -
acttagaagtgggagctgaaca

SEQ ID NO: 124323 - DNA, 22 bp, Artificial Sequence
  Synthetic oligonucleotide; CTT chr11 5336911 5336932 5336916 5336911 -
agaagtgggagctgaacaatga

SEQ ID NO: 124324 - DNA, 22 bp, Artificial Sequence
  Synthetic oligonucleotide; TTA chr11 5336910 5336931 5336915 5336910 -
gaagtgggagctgaacaatgag

SEQ ID NO: 124325 - DNA, 22 bp, Artificial Sequence
  Synthetic oligonucleotide; CTG chr11 5336897 5336918 5336902 5336897 -
aacaatgagaatgagaacacat

SEQ ID NO: 124326 - DNA, 22 bp, Artificial Sequence
  Synthetic oligonucleotide; CTG chr11 5336846 5336867 5336851 5336846 -
gagcctgtcagggcatggggtg

SEQ ID NO: 124327 - DNA, 22 bp, Artificial Sequence
  Synthetic oligonucleotide; CTG chr11 5336839 5336860 5336844 5336839 -
tcagggcatggggtgtggtgaa

SEQ ID NO: 124328 - DNA, 22 bp, Artificial Sequence
  Synthetic oligonucleotide; TTA chr11 5336806 5336827 5336811 5336806 -
gaaaaaatagctaatgcatgct

SEQ ID NO: 124329 - DNA, 22 bp, Artificial Sequence
  Synthetic oligonucleotide; CTA chr11 5336793 5336814 5336798 5336793 -
atgcatgctgggcttaacacct

SEQ ID NO: 124330 - DNA, 22 bp, Artificial Sequence
  Synthetic oligonucleotide; CTG chr11 5336783 5336804 5336788 5336783 -
ggcttaacacctaggtgatggg

SEQ ID NO: 124331 - DNA, 22 bp, Artificial Sequence
  Synthetic oligonucleotide; CTT chr11 5336778 5336799 5336783 5336778 -
aacacctaggtgatgggttgat

SEQ ID NO: 124332 - DNA, 22 bp, Artificial Sequence
  Synthetic oligonucleotide; TTA chr11 5336777 5336798 5336782 5336777 -
acacctaggtgatgggttgata

SEQ ID NO: 124333 - DNA, 22 bp, Artificial Sequence
  Synthetic oligonucleotide; CTA chr11 5336770 5336791 5336775 5336770 -
ggtgatgggttgataggtacag

SEQ ID NO: 124334 - DNA, 22 bp, Artificial Sequence
  Synthetic oligonucleotide; TTG chr11 5336758 5336779 5336763 5336758 -
ataggtacagcaaaccaccatt

SEQ ID NO: 124335 - DNA, 22 bp, Artificial Sequence
  Synthetic oligonucleotide; TTG chr11 5336735 5336756 5336740 5336735 -
cacacatttacgtatgtaataa

SEQ ID NO: 124336 - DNA, 22 bp, Artificial Sequence
  Synthetic oligonucleotide; TTT chr11 5336726 5336747 5336731 5336726 -
acgtatgtaataaacctgcaca

SEQ ID NO: 124337 - DNA, 22 bp, Artificial Sequence
  Synthetic oligonucleotide; TTA chr11 5336725 5336746 5336730 5336725 -
cgtatgtaataaacctgcacat

SEQ ID NO: 124338 - DNA, 22 bp, Artificial Sequence
  Synthetic oligonucleotide; CTG chr11 5336708 5336729 5336713 5336708 -
cacatcctgcacatgtacctca

SEQ ID NO: 124339 - DNA, 22 bp, Artificial Sequence
  Synthetic oligonucleotide; CTG chr11 5336699 5336720 5336704 5336699 -
cacatgtacctcagaacttaaa

SEQ ID NO: 124340 - DNA, 22 bp, Artificial Sequence
  Synthetic oligonucleotide; CTC chr11 5336687 5336708 5336692 5336687 -
agaacttaaaaattaaaaaaat

SEQ ID NO: 124341 - DNA, 22 bp, Artificial Sequence
  Synthetic oligonucleotide; CTT chr11 5336680 5336701 5336685 5336680 -
aaaaattaaaaaaattgaatgt

SEQ ID NO: 124342 - DNA, 22 bp, Artificial Sequence
  Synthetic oligonucleotide; TTA chr11 5336679 5336700 5336684 5336679 -
aaaattaaaaaaattgaatgta

SEQ ID NO: 124343 - DNA, 22 bp, Artificial Sequence
  Synthetic oligonucleotide; TTA chr11 5336672 5336693 5336677 5336672 -
aaaaaattgaatgtacataaaa

SEQ ID NO: 124344 - DNA, 22 bp, Artificial Sequence
  Synthetic oligonucleotide; TTG chr11 5336663 5336684 5336668 5336663 -
aatgtacataaaaatatggaaa

SEQ ID NO: 124345 - DNA, 22 bp, Artificial Sequence
  Synthetic oligonucleotide; TTA chr11 5336638 5336659 5336643 5336638 -
ataaatgtaattcactgcatta

SEQ ID NO: 124346 - DNA, 22 bp, Artificial Sequence
  Synthetic oligonucleotide; TTC chr11 5336625 5336646 5336630 5336625 -
actgcattaaaaaaaaataatg

SEQ ID NO: 124347 - DNA, 22 bp, Artificial Sequence
  Synthetic oligonucleotide; CTG chr11 5336621 5336642 5336626 5336621 -
cattaaaaaaaaataatggcaa

SEQ ID NO: 124348 - DNA, 22 bp, Artificial Sequence
  Synthetic oligonucleotide; TTA chr11 5336616 5336637 5336621 5336616 -
aaaaaaaataatggcaaaaact

SEQ ID NO: 124349 - DNA, 22 bp, Artificial Sequence
  Synthetic oligonucleotide; CTG chr11 5336593 5336614 5336598 5336593 -
caattactgttgcaccaaccta

SEQ ID NO: 124350 - DNA, 22 bp, Artificial Sequence
  Synthetic oligonucleotide; TTA chr11 5336587 5336608 5336592 5336587 -
ctgttgcaccaacctaatataa

SEQ ID NO: 124351 - DNA, 22 bp, Artificial Sequence
  Synthetic oligonucleotide; CTG chr11 5336584 5336605 5336589 5336584 -
ttgcaccaacctaatataagga

SEQ ID NO: 124352 - DNA, 22 bp, Artificial Sequence
  Synthetic oligonucleotide; TTG chr11 5336581 5336602 5336586 5336581 -
caccaacctaatataaggaaat

SEQ ID NO: 124353 - DNA, 22 bp, Artificial Sequence
  Synthetic oligonucleotide; CTA chr11 5336571 5336592 5336576 5336571 -
atataaggaaatagcagatgtg

SEQ ID NO: 124354 - DNA, 22 bp, Artificial Sequence
  Synthetic oligonucleotide; TTA chr11 5336545 5336566 5336550 5336545 -
tggaggaaggcaagtcccaaga

SEQ ID NO: 124355 - DNA, 22 bp, Artificial Sequence
  Synthetic oligonucleotide; TTG chr11 5336499 5336520 5336504 5336499 -
aaaactcaagagagcctggtag

SEQ ID NO: 124356 - DNA, 22 bp, Artificial Sequence
  Synthetic oligonucleotide; CTC chr11 5336492 5336513 5336497 5336492 -
aagagagcctggtagtttagtc

SEQ ID NO: 124357 - DNA, 22 bp, Artificial Sequence
  Synthetic oligonucleotide; CTG chr11 5336481 5336502 5336486 5336481 -
gtagtttagtcccagtccaagt

SEQ ID NO: 124358 - DNA, 22 bp, Artificial Sequence
  Synthetic oligonucleotide; TTT chr11 5336474 5336495 5336479 5336474 -
agtcccagtccaagtctgaagg

SEQ ID NO: 124359 - DNA, 22 bp, Artificial Sequence
  Synthetic oligonucleotide; TTA chr11 5336473 5336494 5336478 5336473 -
gtcccagtccaagtctgaaggc

SEQ ID NO: 124360 - DNA, 22 bp, Artificial Sequence
  Synthetic oligonucleotide; CTG chr11 5336456 5336477 5336461 5336456 -
aaggcctgggaaacaggaggat

SEQ ID NO: 124361 - DNA, 22 bp, Artificial Sequence
  Synthetic oligonucleotide; CTG chr11 5336448 5336469 5336453 5336448 -
ggaaacaggaggattgatggtg

SEQ ID NO: 124362 - DNA, 22 bp, Artificial Sequence
  Synthetic oligonucleotide; TTG chr11 5336432 5336453 5336437 5336432 -
atggtgtacttgcaacccaaaa

SEQ ID NO: 124363 - DNA, 22 bp, Artificial Sequence
  Synthetic oligonucleotide; CTT chr11 5336421 5336442 5336426 5336421 -
gcaacccaaaagccatcaggct

SEQ ID NO: 124364 - DNA, 22 bp, Artificial Sequence
  Synthetic oligonucleotide; TTG chr11 5336420 5336441 5336425 5336420 -
caacccaaaagccatcaggctt

SEQ ID NO: 124365 - DNA, 22 bp, Artificial Sequence
  Synthetic oligonucleotide; CTT chr11 5336398 5336419 5336403 5336398 -
cagacccaggaagttttgatgt

SEQ ID NO: 124366 - DNA, 22 bp, Artificial Sequence
  Synthetic oligonucleotide; TTC chr11 5336397 5336418 5336402 5336397 -
agacccaggaagttttgatgtt

SEQ ID NO: 124367 - DNA, 22 bp, Artificial Sequence
  Synthetic oligonucleotide; TTT chr11 5336382 5336403 5336387 5336382 -
tgatgtttcagttcaatctaaa

SEQ ID NO: 124368 - DNA, 22 bp, Artificial Sequence
  Synthetic oligonucleotide; TTT chr11 5336381 5336402 5336386 5336381 -
gatgtttcagttcaatctaaag

SEQ ID NO: 124369 - DNA, 22 bp, Artificial Sequence
  Synthetic oligonucleotide; TTG chr11 5336380 5336401 5336385 5336380 -
atgtttcagttcaatctaaagg

SEQ ID NO: 124370 - DNA, 22 bp, Artificial Sequence
  Synthetic oligonucleotide; TTT chr11 5336374 5336395 5336379 5336374 -
cagttcaatctaaaggcagaaa

SEQ ID NO: 124371 - DNA, 22 bp, Artificial Sequence
  Synthetic oligonucleotide; TTC chr11 5336373 5336394 5336378 5336373 -
agttcaatctaaaggcagaaaa

SEQ ID NO: 124372 - DNA, 22 bp, Artificial Sequence
  Synthetic oligonucleotide; TTC chr11 5336368 5336389 5336373 5336368 -
aatctaaaggcagaaaaaaagg

SEQ ID NO: 124373 - DNA, 22 bp, Artificial Sequence
  Synthetic oligonucleotide; CTA chr11 5336362 5336383 5336367 5336362 -
aaggcagaaaaaaaggtctaga

SEQ ID NO: 124374 - DNA, 22 bp, Artificial Sequence
  Synthetic oligonucleotide; CTA chr11 5336342 5336363 5336347 5336342 -
gattccagtttgaaggccatca

SEQ ID NO: 124375 - DNA, 22 bp, Artificial Sequence
  Synthetic oligonucleotide; TTC chr11 5336337 5336358 5336342 5336337 -
cagtttgaaggccatcaataag

SEQ ID NO: 124376 - DNA, 22 bp, Artificial Sequence
  Synthetic oligonucleotide; TTT chr11 5336331 5336352 5336336 5336331 -
gaaggccatcaataaggaataa

SEQ ID NO: 124377 - DNA, 22 bp, Artificial Sequence
  Synthetic oligonucleotide; TTG chr11 5336330 5336351 5336335 5336330 -
aaggccatcaataaggaataat

SEQ ID NO: 124378 - DNA, 22 bp, Artificial Sequence
  Synthetic oligonucleotide; TTC chr11 5336306 5336327 5336311 5336306 -
tctctgatttggggaagggtca

SEQ ID NO: 124379 - DNA, 22 bp, Artificial Sequence
  Synthetic oligonucleotide; CTC chr11 5336304 5336325 5336309 5336304 -
tctgatttggggaagggtcaga

SEQ ID NO: 124380 - DNA, 22 bp, Artificial Sequence
  Synthetic oligonucleotide; CTC chr11 5336302 5336323 5336307 5336302 -
tgatttggggaagggtcagact

SEQ ID NO: 124381 - DNA, 22 bp, Artificial Sequence
  Synthetic oligonucleotide; CTG chr11 5336300 5336321 5336305 5336300 -
atttggggaagggtcagacttt

SEQ ID NO: 124382 - DNA, 22 bp, Artificial Sequence
  Synthetic oligonucleotide; TTT chr11 5336296 5336317 5336301 5336296 -
ggggaagggtcagactttttgt

SEQ ID NO: 124383 - DNA, 22 bp, Artificial Sequence
  Synthetic oligonucleotide; TTG chr11 5336295 5336316 5336300 5336295 -
gggaagggtcagactttttgtt

SEQ ID NO: 124384 - DNA, 22 bp, Artificial Sequence
  Synthetic oligonucleotide; CTT chr11 5336279 5336300 5336284 5336279 -
tttgttctattcaggttttcaa

SEQ ID NO: 124385 - DNA, 22 bp, Artificial Sequence
  Synthetic oligonucleotide; TTT chr11 5336278 5336299 5336283 5336278 -
ttgttctattcaggttttcaac

SEQ ID NO: 124386 - DNA, 22 bp, Artificial Sequence
  Synthetic oligonucleotide; TTT chr11 5336277 5336298 5336282 5336277 -
tgttctattcaggttttcaact

SEQ ID NO: 124387 - DNA, 22 bp, Artificial Sequence
  Synthetic oligonucleotide; TTT chr11 5336276 5336297 5336281 5336276 -
gttctattcaggttttcaactg

SEQ ID NO: 124388 - DNA, 22 bp, Artificial Sequence
  Synthetic oligonucleotide; TTG chr11 5336275 5336296 5336280 5336275 -
ttctattcaggttttcaactga

SEQ ID NO: 124389 - DNA, 22 bp, Artificial Sequence
  Synthetic oligonucleotide; TTC chr11 5336272 5336293 5336277 5336272 -
tattcaggttttcaactgattg

SEQ ID NO: 124390 - DNA, 22 bp, Artificial Sequence
  Synthetic oligonucleotide; CTA chr11 5336270 5336291 5336275 5336270 -
ttcaggttttcaactgattgga

SEQ ID NO: 124391 - DNA, 22 bp, Artificial Sequence
  Synthetic oligonucleotide; TTC chr11 5336267 5336288 5336272 5336267 -
aggttttcaactgattggagga

SEQ ID NO: 124392 - DNA, 22 bp, Artificial Sequence
  Synthetic oligonucleotide; TTT chr11 5336261 5336282 5336266 5336261 -
tcaactgattggaggaagccgc

SEQ ID NO: 124393 - DNA, 22 bp, Artificial Sequence
  Synthetic oligonucleotide; TTT chr11 5336260 5336281 5336265 5336260 -
caactgattggaggaagccgcc

SEQ ID NO: 124394 - DNA, 22 bp, Artificial Sequence
  Synthetic oligonucleotide; TTC chr11 5336259 5336280 5336264 5336259 -
aactgattggaggaagccgcct

SEQ ID NO: 124395 - DNA, 22 bp, Artificial Sequence
  Synthetic oligonucleotide; CTG chr11 5336254 5336275 5336259 5336254 -
attggaggaagccgcctgcaat

SEQ ID NO: 124396 - DNA, 22 bp, Artificial Sequence
  Synthetic oligonucleotide; TTG chr11 5336250 5336271 5336255 5336250 -
gaggaagccgcctgcaatagga

SEQ ID NO: 124397 - DNA, 22 bp, Artificial Sequence
  Synthetic oligonucleotide; CTG chr11 5336236 5336257 5336241 5336236 -
caataggaaggaccatctgctc

SEQ ID NO: 124398 - DNA, 22 bp, Artificial Sequence
  Synthetic oligonucleotide; CTG chr11 5336217 5336238 5336222 5336217 -
ctctacttggtctaccgattta

SEQ ID NO: 124399 - DNA, 22 bp, Artificial Sequence
  Synthetic oligonucleotide; CTC chr11 5336214 5336235 5336219 5336214 -
tacttggtctaccgatttaaat

SEQ ID NO: 124400 - DNA, 22 bp, Artificial Sequence
  Synthetic oligonucleotide; CTA chr11 5336212 5336233 5336217 5336212 -
cttggtctaccgatttaaatgt

SEQ ID NO: 124401 - DNA, 22 bp, Artificial Sequence
  Synthetic oligonucleotide; CTT chr11 5336209 5336230 5336214 5336209 -
ggtctaccgatttaaatgttaa

SEQ ID NO: 124402 - DNA, 22 bp, Artificial Sequence
  Synthetic oligonucleotide; TTG chr11 5336208 5336229 5336213 5336208 -
gtctaccgatttaaatgttaat

SEQ ID NO: 124403 - DNA, 22 bp, Artificial Sequence
  Synthetic oligonucleotide; CTA chr11 5336203 5336224 5336208 5336203 -
ccgatttaaatgttaatcttgc

SEQ ID NO: 124404 - DNA, 22 bp, Artificial Sequence
  Synthetic oligonucleotide; TTT chr11 5336196 5336217 5336201 5336196 -
aaatgttaatcttgcctaaaaa

SEQ ID NO: 124405 - DNA, 22 bp, Artificial Sequence
  Synthetic oligonucleotide; TTA chr11 5336195 5336216 5336200 5336195 -
aatgttaatcttgcctaaaaac

SEQ ID NO: 124406 - DNA, 22 bp, Artificial Sequence
  Synthetic oligonucleotide; TTA chr11 5336188 5336209 5336193 5336188 -
atcttgcctaaaaacaccctca

SEQ ID NO: 124407 - DNA, 22 bp, Artificial Sequence
  Synthetic oligonucleotide; CTT chr11 5336183 5336204 5336188 5336183 -
gcctaaaaacaccctcacaaaa

SEQ ID NO: 124408 - DNA, 22 bp, Artificial Sequence
  Synthetic oligonucleotide; TTG chr11 5336182 5336203 5336187 5336182 -
cctaaaaacaccctcacaaaaa

SEQ ID NO: 124409 - DNA, 22 bp, Artificial Sequence
  Synthetic oligonucleotide; CTA chr11 5336178 5336199 5336183 5336178 -
aaaacaccctcacaaaaacatc

SEQ ID NO: 124410 - DNA, 22 bp, Artificial Sequence
  Synthetic oligonucleotide; CTC chr11 5336167 5336188 5336172 5336167 -
acaaaaacatctagaataatgt

SEQ ID NO: 124411 - DNA, 22 bp, Artificial Sequence
  Synthetic oligonucleotide; CTA chr11 5336154 5336175 5336159 5336154 -
gaataatgtttgacaaatattt

SEQ ID NO: 124412 - DNA, 22 bp, Artificial Sequence
  Synthetic oligonucleotide; TTT chr11 5336143 5336164 5336148 5336143 -
gacaaatatttgggcaccccat

SEQ ID NO: 124413 - DNA, 22 bp, Artificial Sequence
  Synthetic oligonucleotide; TTG chr11 5336142 5336163 5336147 5336142 -
acaaatatttgggcaccccatg

SEQ ID NO: 124414 - DNA, 22 bp, Artificial Sequence
  Synthetic oligonucleotide; TTT chr11 5336132 5336153 5336137 5336132 -
gggcaccccatggcccagtcaa

SEQ ID NO: 124415 - DNA, 22 bp, Artificial Sequence
  Synthetic oligonucleotide; TTG chr11 5336131 5336152 5336136 5336131 -
ggcaccccatggcccagtcaaa

SEQ ID NO: 124416 - DNA, 22 bp, Artificial Sequence
  Synthetic oligonucleotide; TTG chr11 5336106 5336127 5336111 5336106 -
gcatataaaattaaccatcaga

SEQ ID NO: 124417 - DNA, 22 bp, Artificial Sequence
  Synthetic oligonucleotide; TTA chr11 5336093 5336114 5336098 5336093 -
accatcagagcctgtagaggat

SEQ ID NO: 124418 - DNA, 22 bp, Artificial Sequence
  Synthetic oligonucleotide; CTG chr11 5336079 5336100 5336084 5336079 -
tagaggatgagttaaaggatgg

SEQ ID NO: 124419 - DNA, 22 bp, Artificial Sequence
  Synthetic oligonucleotide; TTA chr11 5336065 5336086 5336070 5336065 -
aaggatggaatcttcggagata

SEQ ID NO: 124420 - DNA, 22 bp, Artificial Sequence
  Synthetic oligonucleotide; CTT chr11 5336051 5336072 5336056 5336051 -
cggagataattgtggaatccag

SEQ ID NO: 124421 - DNA, 22 bp, Artificial Sequence
  Synthetic oligonucleotide; TTC chr11 5336050 5336071 5336055 5336050 -
ggagataattgtggaatccaga

SEQ ID NO: 124422 - DNA, 22 bp, Artificial Sequence
  Synthetic oligonucleotide; TTG chr11 5336039 5336060 5336044 5336039 -
tggaatccagaaggctgacaga

SEQ ID NO: 124423 - DNA, 22 bp, Artificial Sequence
  Synthetic oligonucleotide; CTG chr11 5336022 5336043 5336027 5336022 -
acagataatagaatcaaactac

SEQ ID NO: 124424 - DNA, 22 bp, Artificial Sequence
  Synthetic oligonucleotide; CTA chr11 5336001 5336022 5336006 5336001 -
cacagaaaaaaaaaaaaaagaa

SEQ ID NO: 124425 - DNA, 22 bp, Artificial Sequence
  Synthetic oligonucleotide; CTG chr11 5335975 5335996 5335980 5335975 -
gtattgtcagcacagacttact

SEQ ID NO: 124426 - DNA, 22 bp, Artificial Sequence
  Synthetic oligonucleotide; TTG chr11 5335969 5335990 5335974 5335969 -
tcagcacagacttactcaacaa

SEQ ID NO: 124427 - DNA, 22 bp, Artificial Sequence
  Synthetic oligonucleotide; CTT chr11 5335956 5335977 5335961 5335956 -
actcaacaaacagcaaaaatcc

SEQ ID NO: 124428 - DNA, 22 bp, Artificial Sequence
  Synthetic oligonucleotide; TTA chr11 5335955 5335976 5335960 5335955 -
ctcaacaaacagcaaaaatcct

SEQ ID NO: 124429 - DNA, 22 bp, Artificial Sequence
  Synthetic oligonucleotide; CTC chr11 5335952 5335973 5335957 5335952 -
aacaaacagcaaaaatcctagg

SEQ ID NO: 124430 - DNA, 22 bp, Artificial Sequence
  Synthetic oligonucleotide; CTA chr11 5335932 5335953 5335937 5335932 -
ggatagagaccttcctgaatcg

SEQ ID NO: 124431 - DNA, 22 bp, Artificial Sequence
  Synthetic oligonucleotide; CTT chr11 5335919 5335940 5335924 5335919 -
cctgaatcgttagcgatataag

SEQ ID NO: 124432 - DNA, 22 bp, Artificial Sequence
  Synthetic oligonucleotide; TTC chr11 5335918 5335939 5335923 5335918 -
ctgaatcgttagcgatataagc

SEQ ID NO: 124433 - DNA, 22 bp, Artificial Sequence
  Synthetic oligonucleotide; CTG chr11 5335915 5335936 5335920 5335915 -
aatcgttagcgatataagctta

SEQ ID NO: 124434 - DNA, 22 bp, Artificial Sequence
  Synthetic oligonucleotide; TTA chr11 5335907 5335928 5335912 5335907 -
gcgatataagcttattatactt

SEQ ID NO: 124435 - DNA, 22 bp, Artificial Sequence
  Synthetic oligonucleotide; CTT chr11 5335894 5335915 5335899 5335894 -
attatacttgaatgttgccttc

SEQ ID NO: 124436 - DNA, 22 bp, Artificial Sequence
  Synthetic oligonucleotide; TTA chr11 5335893 5335914 5335898 5335893 -
ttatacttgaatgttgccttcc

SEQ ID NO: 124437 - DNA, 22 bp, Artificial Sequence
  Synthetic oligonucleotide; TTA chr11 5335890 5335911 5335895 5335890 -
tacttgaatgttgccttcctat

SEQ ID NO: 124438 - DNA, 22 bp, Artificial Sequence
  Synthetic oligonucleotide; CTT chr11 5335885 5335906 5335890 5335885 -
gaatgttgccttcctatatgcc

SEQ ID NO: 124439 - DNA, 22 bp, Artificial Sequence
  Synthetic oligonucleotide; TTG chr11 5335884 5335905 5335889 5335884 -
aatgttgccttcctatatgcca

SEQ ID NO: 124440 - DNA, 22 bp, Artificial Sequence
  Synthetic oligonucleotide; TTG chr11 5335877 5335898 5335882 5335877 -
ccttcctatatgccatatgtaa

SEQ ID NO: 124441 - DNA, 22 bp, Artificial Sequence
  Synthetic oligonucleotide; CTT chr11 5335873 5335894 5335878 5335873 -
cctatatgccatatgtaatata

SEQ ID NO: 124442 - DNA, 22 bp, Artificial Sequence
  Synthetic oligonucleotide; TTC chr11 5335872 5335893 5335877 5335872 -
ctatatgccatatgtaatataa

SEQ ID NO: 124443 - DNA, 22 bp, Artificial Sequence
  Synthetic oligonucleotide; CTA chr11 5335869 5335890 5335874 5335869 -
tatgccatatgtaatataaggc

SEQ ID NO: 124444 - DNA, 22 bp, Artificial Sequence
  Synthetic oligonucleotide; TTA chr11 5335839 5335860 5335844 5335839 -
gatatagactgtgatgccagag

SEQ ID NO: 124445 - DNA, 22 bp, Artificial Sequence
  Synthetic oligonucleotide; CTG chr11 5335828 5335849 5335833 5335828 -
tgatgccagagctcagaccaag

SEQ ID NO: 124446 - DNA, 22 bp, Artificial Sequence
  Synthetic oligonucleotide; CTC chr11 5335814 5335835 5335819 5335814 -
agaccaagagccaaggaatagg

SEQ ID NO: 124447 - DNA, 22 bp, Artificial Sequence
  Synthetic oligonucleotide; TTT chr11 5335774 5335795 5335779 5335774 -
tcattttaaaaagttaggtaat

SEQ ID NO: 124448 - DNA, 22 bp, Artificial Sequence
  Synthetic oligonucleotide; TTT chr11 5335773 5335794 5335778 5335773 -
cattttaaaaagttaggtaatt

SEQ ID NO: 124449 - DNA, 22 bp, Artificial Sequence
  Synthetic oligonucleotide; TTC chr11 5335772 5335793 5335777 5335772 -
attttaaaaagttaggtaattt

SEQ ID NO: 124450 - DNA, 22 bp, Artificial Sequence
  Synthetic oligonucleotide; TTT chr11 5335768 5335789 5335773 5335768 -
taaaaagttaggtaatttctaa

SEQ ID NO: 124451 - DNA, 22 bp, Artificial Sequence
  Synthetic oligonucleotide; TTT chr11 5335767 5335788 5335772 5335767 -
aaaaagttaggtaatttctaat

SEQ ID NO: 124452 - DNA, 22 bp, Artificial Sequence
  Synthetic oligonucleotide; TTA chr11 5335766 5335787 5335771 5335766 -
aaaagttaggtaatttctaata

SEQ ID NO: 124453 - DNA, 22 bp, Artificial Sequence
  Synthetic oligonucleotide; TTA chr11 5335758 5335779 5335763 5335758 -
ggtaatttctaataatgtggct

SEQ ID NO: 124454 - DNA, 22 bp, Artificial Sequence
  Synthetic oligonucleotide; TTT chr11 5335750 5335771 5335755 5335750 -
ctaataatgtggctgcctgagt

SEQ ID NO: 124455 - DNA, 22 bp, Artificial Sequence
  Synthetic oligonucleotide; TTC chr11 5335749 5335770 5335754 5335749 -
taataatgtggctgcctgagta

SEQ ID NO: 124456 - DNA, 22 bp, Artificial Sequence
  Synthetic oligonucleotide; CTA chr11 5335747 5335768 5335752 5335747 -
ataatgtggctgcctgagtatt

SEQ ID NO: 124457 - DNA, 22 bp, Artificial Sequence
  Synthetic oligonucleotide; CTG chr11 5335735 5335756 5335740 5335735 -
cctgagtattttcagcacagat

SEQ ID NO: 124458 - DNA, 22 bp, Artificial Sequence
  Synthetic oligonucleotide; CTG chr11 5335731 5335752 5335736 5335731 -
agtattttcagcacagatattc

SEQ ID NO: 124459 - DNA, 22 bp, Artificial Sequence
  Synthetic oligonucleotide; TTT chr11 5335724 5335745 5335729 5335724 -
tcagcacagatattctaataaa

SEQ ID NO: 124460 - DNA, 22 bp, Artificial Sequence
  Synthetic oligonucleotide; TTT chr11 5335723 5335744 5335728 5335723 -
cagcacagatattctaataaat

SEQ ID NO: 124461 - DNA, 22 bp, Artificial Sequence
  Synthetic oligonucleotide; TTC chr11 5335722 5335743 5335727 5335722 -
agcacagatattctaataaata

SEQ ID NO: 124462 - DNA, 22 bp, Artificial Sequence
  Synthetic oligonucleotide; TTC chr11 5335709 5335730 5335714 5335709 -
taataaatattgtgttatgtga

SEQ ID NO: 124463 - DNA, 22 bp, Artificial Sequence
  Synthetic oligonucleotide; CTA chr11 5335707 5335728 5335712 5335707 -
ataaatattgtgttatgtgatt

SEQ ID NO: 124464 - DNA, 22 bp, Artificial Sequence
  Synthetic oligonucleotide; TTG chr11 5335697 5335718 5335702 5335697 -
tgttatgtgatttagaaagaga

SEQ ID NO: 124465 - DNA, 22 bp, Artificial Sequence
  Synthetic oligonucleotide; TTA chr11 5335692 5335713 5335697 5335692 -
tgtgatttagaaagagacaggc

SEQ ID NO: 124466 - DNA, 22 bp, Artificial Sequence
  Synthetic oligonucleotide; TTT chr11 5335684 5335705 5335689 5335684 -
agaaagagacaggcactcagcg

SEQ ID NO: 124467 - DNA, 22 bp, Artificial Sequence
  Synthetic oligonucleotide; TTA chr11 5335683 5335704 5335688 5335683 -
gaaagagacaggcactcagcgg

SEQ ID NO: 124468 - DNA, 22 bp, Artificial Sequence
  Synthetic oligonucleotide; CTC chr11 5335666 5335687 5335671 5335666 -
agcggatgacccttgtcaggaa

SEQ ID NO: 124469 - DNA, 22 bp, Artificial Sequence
  Synthetic oligonucleotide; CTT chr11 5335652 5335673 5335657 5335652 -
gtcaggaaacactgcatcaaag

SEQ ID NO: 124470 - DNA, 22 bp, Artificial Sequence
  Synthetic oligonucleotide; TTG chr11 5335651 5335672 5335656 5335651 -
tcaggaaacactgcatcaaaga

SEQ ID NO: 124471 - DNA, 22 bp, Artificial Sequence
  Synthetic oligonucleotide; CTG chr11 5335638 5335659 5335643 5335638 -
catcaaagaaggcttttattac

SEQ ID NO: 124472 - DNA, 22 bp, Artificial Sequence
  Synthetic oligonucleotide; CTT chr11 5335623 5335644 5335628 5335623 -
ttattacaggagatggaggtcc

SEQ ID NO: 124473 - DNA, 22 bp, Artificial Sequence
  Synthetic oligonucleotide; TTT chr11 5335622 5335643 5335627 5335622 -
tattacaggagatggaggtcct

SEQ ID NO: 124474 - DNA, 22 bp, Artificial Sequence
  Synthetic oligonucleotide; TTT chr11 5335621 5335642 5335626 5335621 -
attacaggagatggaggtcctt

SEQ ID NO: 124475 - DNA, 22 bp, Artificial Sequence
  Synthetic oligonucleotide; TTA chr11 5335620 5335641 5335625 5335620 -
ttacaggagatggaggtccttc

SEQ ID NO: 124476 - DNA, 22 bp, Artificial Sequence
  Synthetic oligonucleotide; TTA chr11 5335617 5335638 5335622 5335617 -
caggagatggaggtccttccca

SEQ ID NO: 124477 - DNA, 22 bp, Artificial Sequence
  Synthetic oligonucleotide; CTT chr11 5335599 5335620 5335604 5335599 -
cccaatctgagattatgctgct

SEQ ID NO: 124478 - DNA, 22 bp, Artificial Sequence
  Synthetic oligonucleotide; TTC chr11 5335598 5335619 5335603 5335598 -
ccaatctgagattatgctgctg

SEQ ID NO: 124479 - DNA, 22 bp, Artificial Sequence
  Synthetic oligonucleotide; CTG chr11 5335590 5335611 5335595 5335590 -
agattatgctgctgtgacatga

SEQ ID NO: 124480 - DNA, 22 bp, Artificial Sequence
  Synthetic oligonucleotide; TTA chr11 5335584 5335605 5335589 5335584 -
tgctgctgtgacatgatacttt

SEQ ID NO: 124481 - DNA, 22 bp, Artificial Sequence
  Synthetic oligonucleotide; CTG chr11 5335579 5335600 5335584 5335579 -
ctgtgacatgatactttacttc

SEQ ID NO: 124482 - DNA, 22 bp, Artificial Sequence
  Synthetic oligonucleotide; CTG chr11 5335576 5335597 5335581 5335576 -
tgacatgatactttacttcaca

SEQ ID NO: 124483 - DNA, 22 bp, Artificial Sequence
  Synthetic oligonucleotide; CTT chr11 5335563 5335584 5335568 5335563 -
tacttcacaggcaatacagcag

SEQ ID NO: 124484 - DNA, 22 bp, Artificial Sequence
  Synthetic oligonucleotide; TTT chr11 5335562 5335583 5335567 5335562 -
acttcacaggcaatacagcagg

SEQ ID NO: 124485 - DNA, 22 bp, Artificial Sequence
  Synthetic oligonucleotide; TTA chr11 5335561 5335582 5335566 5335561 -
cttcacaggcaatacagcagga

SEQ ID NO: 124486 - DNA, 22 bp, Artificial Sequence
  Synthetic oligonucleotide; CTT chr11 5335558 5335579 5335563 5335558 -
cacaggcaatacagcaggaaat

SEQ ID NO: 124487 - DNA, 22 bp, Artificial Sequence
  Synthetic oligonucleotide; TTC chr11 5335557 5335578 5335562 5335557 -
acaggcaatacagcaggaaata

SEQ ID NO: 124488 - DNA, 22 bp, Artificial Sequence
  Synthetic oligonucleotide; CTT chr11 5335513 5335534 5335518 5335513 -
agaaaatacatgaatgagagac

SEQ ID NO: 124489 - DNA, 22 bp, Artificial Sequence
  Synthetic oligonucleotide; TTA chr11 5335512 5335533 5335517 5335512 -
gaaaatacatgaatgagagaca

SEQ ID NO: 124490 - DNA, 22 bp, Artificial Sequence
  Synthetic oligonucleotide; CTA chr11 5335478 5335499 5335483 5335478 -
tttaaggaaatagaagatattt

SEQ ID NO: 124491 - DNA, 22 bp, Artificial Sequence
  Synthetic oligonucleotide; TTT chr11 5335475 5335496 5335480 5335475 -
aaggaaatagaagatattttgg

SEQ ID NO: 124492 - DNA, 22 bp, Artificial Sequence
  Synthetic oligonucleotide; TTA chr11 5335474 5335495 5335479 5335474 -
aggaaatagaagatattttggg

SEQ ID NO: 124493 - DNA, 22 bp, Artificial Sequence
  Synthetic oligonucleotide; TTT chr11 5335456 5335477 5335461 5335456 -
tgggtgccctgcctacttcctc

SEQ ID NO: 124494 - DNA, 22 bp, Artificial Sequence
  Synthetic oligonucleotide; TTT chr11 5335455 5335476 5335460 5335455 -
gggtgccctgcctacttcctcc

SEQ ID NO: 124495 - DNA, 22 bp, Artificial Sequence
  Synthetic oligonucleotide; TTG chr11 5335454 5335475 5335459 5335454 -
ggtgccctgcctacttcctccc

SEQ ID NO: 124496 - DNA, 22 bp, Artificial Sequence
  Synthetic oligonucleotide; CTG chr11 5335445 5335466 5335450 5335445 -
cctacttcctcccagtgcccct

SEQ ID NO: 124497 - DNA, 22 bp, Artificial Sequence
  Synthetic oligonucleotide; CTA chr11 5335441 5335462 5335446 5335441 -
cttcctcccagtgcccctaagc

SEQ ID NO: 124498 - DNA, 22 bp, Artificial Sequence
  Synthetic oligonucleotide; CTT chr11 5335438 5335459 5335443 5335438 -
cctcccagtgcccctaagcttg

SEQ ID NO: 124499 - DNA, 22 bp, Artificial Sequence
  Synthetic oligonucleotide; TTC chr11 5335437 5335458 5335442 5335437 -
ctcccagtgcccctaagcttgg

SEQ ID NO: 124500 - DNA, 22 bp, Artificial Sequence
  Synthetic oligonucleotide; CTC chr11 5335434 5335455 5335439 5335434 -
ccagtgcccctaagcttggtga

SEQ ID NO: 124501 - DNA, 22 bp, Artificial Sequence
  Synthetic oligonucleotide; CTA chr11 5335422 5335443 5335427 5335422 -
agcttggtgactttgagtgttg

SEQ ID NO: 124502 - DNA, 22 bp, Artificial Sequence
  Synthetic oligonucleotide; CTT chr11 5335417 5335438 5335422 5335417 -
ggtgactttgagtgttggctga

SEQ ID NO: 124503 - DNA, 22 bp, Artificial Sequence
  Synthetic oligonucleotide; TTG chr11 5335416 5335437 5335421 5335416 -
gtgactttgagtgttggctgat

SEQ ID NO: 124504 - DNA, 22 bp, Artificial Sequence
  Synthetic oligonucleotide; CTT chr11 5335409 5335430 5335414 5335409 -
tgagtgttggctgataatagtt

SEQ ID NO: 124505 - DNA, 22 bp, Artificial Sequence
  Synthetic oligonucleotide; TTT chr11 5335408 5335429 5335413 5335408 -
gagtgttggctgataatagttg

SEQ ID NO: 124506 - DNA, 22 bp, Artificial Sequence
  Synthetic oligonucleotide; TTG chr11 5335407 5335428 5335412 5335407 -
agtgttggctgataatagttgt

SEQ ID NO: 124507 - DNA, 22 bp, Artificial Sequence
  Synthetic oligonucleotide; TTG chr11 5335400 5335421 5335405 5335400 -
gctgataatagttgttcccatt

SEQ ID NO: 124508 - DNA, 22 bp, Artificial Sequence
  Synthetic oligonucleotide; CTG chr11 5335396 5335417 5335401 5335396 -
ataatagttgttcccattctct

SEQ ID NO: 124509 - DNA, 22 bp, Artificial Sequence
  Synthetic oligonucleotide; TTG chr11 5335386 5335407 5335391 5335386 -
ttcccattctctggaggcttat

SEQ ID NO: 124510 - DNA, 22 bp, Artificial Sequence
  Synthetic oligonucleotide; TTC chr11 5335383 5335404 5335388 5335383 -
ccattctctggaggcttatcct

SEQ ID NO: 124511 - DNA, 22 bp, Artificial Sequence
  Synthetic oligonucleotide; TTC chr11 5335377 5335398 5335382 5335377 -
tctggaggcttatcctccacca

SEQ ID NO: 124512 - DNA, 22 bp, Artificial Sequence
  Synthetic oligonucleotide; CTC chr11 5335375 5335396 5335380 5335375 -
tggaggcttatcctccaccaac

SEQ ID NO: 124513 - DNA, 22 bp, Artificial Sequence
  Synthetic oligonucleotide; CTG chr11 5335373 5335394 5335378 5335373 -
gaggcttatcctccaccaacag

SEQ ID NO: 124514 - DNA, 22 bp, Artificial Sequence
  Synthetic oligonucleotide; CTT chr11 5335366 5335387 5335371 5335366 -
atcctccaccaacagtgtcact

SEQ ID NO: 124515 - DNA, 22 bp, Artificial Sequence
  Synthetic oligonucleotide; TTA chr11 5335365 5335386 5335370 5335365 -
tcctccaccaacagtgtcactt

SEQ ID NO: 124516 - DNA, 22 bp, Artificial Sequence
  Synthetic oligonucleotide; CTC chr11 5335360 5335381 5335365 5335360 -
caccaacagtgtcacttcacat

SEQ ID NO: 124517 - DNA, 22 bp, Artificial Sequence
  Synthetic oligonucleotide; CTT chr11 5335343 5335364 5335348 5335343 -
cacatgagattttatcccaact

SEQ ID NO: 124518 - DNA, 22 bp, Artificial Sequence
  Synthetic oligonucleotide; TTC chr11 5335342 5335363 5335347 5335342 -
acatgagattttatcccaactc

SEQ ID NO: 124519 - DNA, 22 bp, Artificial Sequence
  Synthetic oligonucleotide; TTT chr11 5335331 5335352 5335336 5335331 -
tatcccaactctggggcagtct

SEQ ID NO: 124520 - DNA, 22 bp, Artificial Sequence
  Synthetic oligonucleotide; TTT chr11 5335330 5335351 5335335 5335330 -
atcccaactctggggcagtctg

SEQ ID NO: 124521 - DNA, 22 bp, Artificial Sequence
  Synthetic oligonucleotide; TTA chr11 5335329 5335350 5335334 5335329 -
tcccaactctggggcagtctgc

SEQ ID NO: 124522 - DNA, 22 bp, Artificial Sequence
  Synthetic oligonucleotide; CTC chr11 5335320 5335341 5335325 5335320 -
tggggcagtctgcaggaaatta

SEQ ID NO: 124523 - DNA, 22 bp, Artificial Sequence
  Synthetic oligonucleotide; CTG chr11 5335318 5335339 5335323 5335318 -
gggcagtctgcaggaaattact

SEQ ID NO: 124524 - DNA, 22 bp, Artificial Sequence
  Synthetic oligonucleotide; CTG chr11 5335308 5335329 5335313 5335308 -
caggaaattactttatatctgt

SEQ ID NO: 124525 - DNA, 22 bp, Artificial Sequence
  Synthetic oligonucleotide; TTA chr11 5335298 5335319 5335303 5335298 -
ctttatatctgttctaagataa

SEQ ID NO: 124526 - DNA, 22 bp, Artificial Sequence
  Synthetic oligonucleotide; CTT chr11 5335295 5335316 5335300 5335295 -
tatatctgttctaagataagtg

SEQ ID NO: 124527 - DNA, 22 bp, Artificial Sequence
  Synthetic oligonucleotide; TTT chr11 5335294 5335315 5335299 5335294 -
atatctgttctaagataagtga

SEQ ID NO: 124528 - DNA, 22 bp, Artificial Sequence
  Synthetic oligonucleotide; TTA chr11 5335293 5335314 5335298 5335293 -
tatctgttctaagataagtgat

SEQ ID NO: 124529 - DNA, 22 bp, Artificial Sequence
  Synthetic oligonucleotide; CTG chr11 5335287 5335308 5335292 5335287 -
ttctaagataagtgatgtttcc

SEQ ID NO: 124530 - DNA, 22 bp, Artificial Sequence
  Synthetic oligonucleotide; TTC chr11 5335284 5335305 5335289 5335284 -
taagataagtgatgtttccagg

SEQ ID NO: 124531 - DNA, 22 bp, Artificial Sequence
  Synthetic oligonucleotide; CTA chr11 5335282 5335303 5335287 5335282 -
agataagtgatgtttccaggaa

SEQ ID NO: 124532 - DNA, 22 bp, Artificial Sequence
  Synthetic oligonucleotide; TTT chr11 5335267 5335288 5335272 5335267 -
ccaggaatagagtcatatttat

SEQ ID NO: 124533 - DNA, 22 bp, Artificial Sequence
  Synthetic oligonucleotide; TTC chr11 5335266 5335287 5335271 5335266 -
caggaatagagtcatatttatg

SEQ ID NO: 124534 - DNA, 22 bp, Artificial Sequence
  Synthetic oligonucleotide; TTT chr11 5335247 5335268 5335252 5335247 -
atggggcagaagattcgtgtac

SEQ ID NO: 124535 - DNA, 22 bp, Artificial Sequence
  Synthetic oligonucleotide; TTA chr11 5335246 5335267 5335251 5335246 -
tggggcagaagattcgtgtact

SEQ ID NO: 124536 - DNA, 22 bp, Artificial Sequence
  Synthetic oligonucleotide; TTC chr11 5335231 5335252 5335236 5335231 -
gtgtactgccagtgagagggtc

SEQ ID NO: 124537 - DNA, 22 bp, Artificial Sequence
  Synthetic oligonucleotide; CTG chr11 5335223 5335244 5335228 5335223 -
ccagtgagagggtcaatatacc

SEQ ID NO: 124538 - DNA, 22 bp, Artificial Sequence
  Synthetic oligonucleotide; CTA chr11 5335199 5335220 5335204 5335199 -
ctaatgaaatgggagggcagcc

SEQ ID NO: 124539 - DNA, 22 bp, Artificial Sequence
  Synthetic oligonucleotide; CTA chr11 5335196 5335217 5335201 5335196 -
atgaaatgggagggcagcctga

SEQ ID NO: 124540 - DNA, 22 bp, Artificial Sequence
  Synthetic oligonucleotide; CTG chr11 5335175 5335196 5335180 5335175 -
aaattaaatcagttatctcagg

SEQ ID NO: 124541 - DNA, 22 bp, Artificial Sequence
  Synthetic oligonucleotide; TTA chr11 5335169 5335190 5335174 5335169 -
aatcagttatctcagggtctta

SEQ ID NO: 124542 - DNA, 22 bp, Artificial Sequence
  Synthetic oligonucleotide; TTA chr11 5335160 5335181 5335165 5335160 -
tctcagggtcttactacctcac

SEQ ID NO: 124543 - DNA, 22 bp, Artificial Sequence
  Synthetic oligonucleotide; CTC chr11 5335156 5335177 5335161 5335156 -
agggtcttactacctcacctca

SEQ ID NO: 124544 - DNA, 22 bp, Artificial Sequence
  Synthetic oligonucleotide; CTT chr11 5335148 5335169 5335153 5335148 -
actacctcacctcattttaagt

SEQ ID NO: 124545 - DNA, 22 bp, Artificial Sequence
  Synthetic oligonucleotide; TTA chr11 5335147 5335168 5335152 5335147 -
ctacctcacctcattttaagtt

SEQ ID NO: 124546 - DNA, 22 bp, Artificial Sequence
  Synthetic oligonucleotide; CTA chr11 5335144 5335165 5335149 5335144 -
cctcacctcattttaagttcaa

SEQ ID NO: 124547 - DNA, 22 bp, Artificial Sequence
  Synthetic oligonucleotide; CTC chr11 5335140 5335161 5335145 5335140 -
acctcattttaagttcaaagca

SEQ ID NO: 124548 - DNA, 22 bp, Artificial Sequence
  Synthetic oligonucleotide; CTC chr11 5335135 5335156 5335140 5335135 -
attttaagttcaaagcatggct

SEQ ID NO: 124549 - DNA, 22 bp, Artificial Sequence
  Synthetic oligonucleotide; TTT chr11 5335131 5335152 5335136 5335131 -
taagttcaaagcatggctcccc

SEQ ID NO: 124550 - DNA, 22 bp, Artificial Sequence
  Synthetic oligonucleotide; TTT chr11 5335130 5335151 5335135 5335130 -
aagttcaaagcatggctcccct

SEQ ID NO: 124551 - DNA, 22 bp, Artificial Sequence
  Synthetic oligonucleotide; TTA chr11 5335129 5335150 5335134 5335129 -
agttcaaagcatggctccccta

SEQ ID NO: 124552 - DNA, 22 bp, Artificial Sequence
  Synthetic oligonucleotide; TTC chr11 5335124 5335145 5335129 5335124 -
aaagcatggctcccctaaatca

SEQ ID NO: 124553 - DNA, 22 bp, Artificial Sequence
  Synthetic oligonucleotide; CTC chr11 5335112 5335133 5335117 5335112 -
ccctaaatcaatccagacctaa

SEQ ID NO: 124554 - DNA, 22 bp, Artificial Sequence
  Synthetic oligonucleotide; CTA chr11 5335107 5335128 5335112 5335107 -
aatcaatccagacctaaatttt

SEQ ID NO: 124555 - DNA, 22 bp, Artificial Sequence
  Synthetic oligonucleotide; CTA chr11 5335091 5335112 5335096 5335091 -
aattttaacttagtacaaagag

SEQ ID NO: 124556 - DNA, 22 bp, Artificial Sequence
  Synthetic oligonucleotide; TTT chr11 5335086 5335107 5335091 5335086 -
taacttagtacaaagaggacac

SEQ ID NO: 124557 - DNA, 22 bp, Artificial Sequence
  Synthetic oligonucleotide; TTT chr11 5335085 5335106 5335090 5335085 -
aacttagtacaaagaggacaca

SEQ ID NO: 124558 - DNA, 22 bp, Artificial Sequence
  Synthetic oligonucleotide; TTA chr11 5335084 5335105 5335089 5335084 -
acttagtacaaagaggacacac

SEQ ID NO: 124559 - DNA, 22 bp, Artificial Sequence
  Synthetic oligonucleotide; CTT chr11 5335080 5335101 5335085 5335080 -
agtacaaagaggacacacaaat

SEQ ID NO: 124560 - DNA, 22 bp, Artificial Sequence
  Synthetic oligonucleotide; TTA chr11 5335079 5335100 5335084 5335079 -
gtacaaagaggacacacaaatt

SEQ ID NO: 124561 - DNA, 22 bp, Artificial Sequence
  Synthetic oligonucleotide; TTT chr11 5335056 5335077 5335061 5335056 -
tcagacttaagccatttccaga

SEQ ID NO: 124562 - DNA, 22 bp, Artificial Sequence
  Synthetic oligonucleotide; TTT chr11 5335055 5335076 5335060 5335055 -
cagacttaagccatttccagag

SEQ ID NO: 124563 - DNA, 22 bp, Artificial Sequence
  Synthetic oligonucleotide; TTC chr11 5335054 5335075 5335059 5335054 -
agacttaagccatttccagaga

SEQ ID NO: 124564 - DNA, 22 bp, Artificial Sequence
  Synthetic oligonucleotide; CTT chr11 5335048 5335069 5335053 5335048 -
aagccatttccagagactgact

SEQ ID NO: 124565 - DNA, 22 bp, Artificial Sequence
  Synthetic oligonucleotide; TTA chr11 5335047 5335068 5335052 5335047 -
agccatttccagagactgactt

SEQ ID NO: 124566 - DNA, 22 bp, Artificial Sequence
  Synthetic oligonucleotide; TTT chr11 5335039 5335060 5335044 5335039 -
ccagagactgacttttaatcat

SEQ ID NO: 124567 - DNA, 22 bp, Artificial Sequence
  Synthetic oligonucleotide; TTC chr11 5335038 5335059 5335043 5335038 -
cagagactgacttttaatcatg

SEQ ID NO: 124568 - DNA, 22 bp, Artificial Sequence
  Synthetic oligonucleotide; CTG chr11 5335029 5335050 5335034 5335029 -
acttttaatcatgatttcctac

SEQ ID NO: 124569 - DNA, 22 bp, Artificial Sequence
  Synthetic oligonucleotide; CTT chr11 5335025 5335046 5335030 5335025 -
ttaatcatgatttcctactact

SEQ ID NO: 124570 - DNA, 22 bp, Artificial Sequence
  Synthetic oligonucleotide; TTT chr11 5335024 5335045 5335029 5335024 -
taatcatgatttcctactacta

SEQ ID NO: 124571 - DNA, 22 bp, Artificial Sequence
  Synthetic oligonucleotide; TTT chr11 5335023 5335044 5335028 5335023 -
aatcatgatttcctactactat

SEQ ID NO: 124572 - DNA, 22 bp, Artificial Sequence
  Synthetic oligonucleotide; TTA chr11 5335022 5335043 5335027 5335022 -
atcatgatttcctactactatt

SEQ ID NO: 124573 - DNA, 22 bp, Artificial Sequence
  Synthetic oligonucleotide; TTT chr11 5335012 5335033 5335017 5335012 -
cctactactattctgcttacat

SEQ ID NO: 124574 - DNA, 22 bp, Artificial Sequence
  Synthetic oligonucleotide; TTC chr11 5335011 5335032 5335016 5335011 -
ctactactattctgcttacatt

SEQ ID NO: 124575 - DNA, 22 bp, Artificial Sequence
  Synthetic oligonucleotide; CTA chr11 5335008 5335029 5335013 5335008 -
ctactattctgcttacatttag

SEQ ID NO: 124576 - DNA, 22 bp, Artificial Sequence
  Synthetic oligonucleotide; CTA chr11 5335005 5335026 5335010 5335005 -
ctattctgcttacatttaggaa

SEQ ID NO: 124577 - DNA, 22 bp, Artificial Sequence
  Synthetic oligonucleotide; CTA chr11 5335002 5335023 5335007 5335002 -
ttctgcttacatttaggaagac

SEQ ID NO: 124578 - DNA, 22 bp, Artificial Sequence
  Synthetic oligonucleotide; TTC chr11 5334999 5335020 5335004 5334999 -
tgcttacatttaggaagaccta

SEQ ID NO: 124579 - DNA, 22 bp, Artificial Sequence
  Synthetic oligonucleotide; CTG chr11 5334997 5335018 5335002 5334997 -
cttacatttaggaagacctatg

SEQ ID NO: 124580 - DNA, 22 bp, Artificial Sequence
  Synthetic oligonucleotide; CTT chr11 5334994 5335015 5334999 5334994 -
acatttaggaagacctatgagc

SEQ ID NO: 124581 - DNA, 22 bp, Artificial Sequence
  Synthetic oligonucleotide; TTA chr11 5334993 5335014 5334998 5334993 -
catttaggaagacctatgagca

SEQ ID NO: 124582 - DNA, 22 bp, Artificial Sequence
  Synthetic oligonucleotide; TTT chr11 5334988 5335009 5334993 5334988 -
aggaagacctatgagcagaatg

SEQ ID NO: 124583 - DNA, 22 bp, Artificial Sequence
  Synthetic oligonucleotide; TTA chr11 5334987 5335008 5334992 5334987 -
ggaagacctatgagcagaatgc

SEQ ID NO: 124584 - DNA, 22 bp, Artificial Sequence
  Synthetic oligonucleotide; CTA chr11 5334977 5334998 5334982 5334977 -
tgagcagaatgcagttcaggag

SEQ ID NO: 124585 - DNA, 22 bp, Artificial Sequence
  Synthetic oligonucleotide; TTC chr11 5334960 5334981 5334965 5334960 -
aggaggaacttaactgatgtga

SEQ ID NO: 124586 - DNA, 22 bp, Artificial Sequence
  Synthetic oligonucleotide; CTT chr11 5334949 5334970 5334954 5334949 -
aactgatgtgaaatgtcaggca

SEQ ID NO: 124587 - DNA, 22 bp, Artificial Sequence
  Synthetic oligonucleotide; TTA chr11 5334948 5334969 5334953 5334948 -
actgatgtgaaatgtcaggcac

SEQ ID NO: 124588 - DNA, 22 bp, Artificial Sequence
  Synthetic oligonucleotide; CTG chr11 5334944 5334965 5334949 5334944 -
atgtgaaatgtcaggcaccaaa

SEQ ID NO: 124589 - DNA, 22 bp, Artificial Sequence
  Synthetic oligonucleotide; CTC chr11 5334911 5334932 5334916 5334911 -
atggttcaccacattgcaccca

SEQ ID NO: 124590 - DNA, 22 bp, Artificial Sequence
  Synthetic oligonucleotide; TTC chr11 5334904 5334925 5334909 5334904 -
accacattgcacccatactcat

SEQ ID NO: 124591 - DNA, 22 bp, Artificial Sequence
  Synthetic oligonucleotide; TTG chr11 5334895 5334916 5334900 5334895 -
cacccatactcattttaaaatc

SEQ ID NO: 124592 - DNA, 22 bp, Artificial Sequence
  Synthetic oligonucleotide; CTC chr11 5334884 5334905 5334889 5334884 -
attttaaaatctcatagttggg

SEQ ID NO: 124593 - DNA, 22 bp, Artificial Sequence
  Synthetic oligonucleotide; TTT chr11 5334880 5334901 5334885 5334880 -
taaaatctcatagttgggctaa

SEQ ID NO: 124594 - DNA, 22 bp, Artificial Sequence
  Synthetic oligonucleotide; TTT chr11 5334879 5334900 5334884 5334879 -
aaaatctcatagttgggctaag

SEQ ID NO: 124595 - DNA, 22 bp, Artificial Sequence
  Synthetic oligonucleotide; TTA chr11 5334878 5334899 5334883 5334878 -
aaatctcatagttgggctaagt

SEQ ID NO: 124596 - DNA, 22 bp, Artificial Sequence
  Synthetic oligonucleotide; CTC chr11 5334871 5334892 5334876 5334871 -
atagttgggctaagttccagga

SEQ ID NO: 124597 - DNA, 22 bp, Artificial Sequence
  Synthetic oligonucleotide; TTG chr11 5334864 5334885 5334869 5334864 -
ggctaagttccaggataaattt

SEQ ID NO: 124598 - DNA, 22 bp, Artificial Sequence
  Synthetic oligonucleotide; CTA chr11 5334859 5334880 5334864 5334859 -
agttccaggataaatttaggat

SEQ ID NO: 124599 - DNA, 22 bp, Artificial Sequence
  Synthetic oligonucleotide; TTC chr11 5334854 5334875 5334859 5334854 -
caggataaatttaggatttaag

SEQ ID NO: 124600 - DNA, 22 bp, Artificial Sequence
  Synthetic oligonucleotide; TTT chr11 5334842 5334863 5334847 5334842 -
aggatttaagactgatgagaca

SEQ ID NO: 124601 - DNA, 22 bp, Artificial Sequence
  Synthetic oligonucleotide; TTA chr11 5334841 5334862 5334846 5334841 -
ggatttaagactgatgagacaa

SEQ ID NO: 124602 - DNA, 22 bp, Artificial Sequence
  Synthetic oligonucleotide; TTT chr11 5334835 5334856 5334840 5334835 -
aagactgatgagacaatagaaa

SEQ ID NO: 124603 - DNA, 22 bp, Artificial Sequence
  Synthetic oligonucleotide; TTA chr11 5334834 5334855 5334839 5334834 -
agactgatgagacaatagaaat

SEQ ID NO: 124604 - DNA, 22 bp, Artificial Sequence
  Synthetic oligonucleotide; CTG chr11 5334828 5334849 5334833 5334828 -
atgagacaatagaaattctcag

SEQ ID NO: 124605 - DNA, 22 bp, Artificial Sequence
  Synthetic oligonucleotide; TTC chr11 5334810 5334831 5334815 5334810 -
tcagatccttatttctctgaca

SEQ ID NO: 124606 - DNA, 22 bp, Artificial Sequence
  Synthetic oligonucleotide; CTC chr11 5334808 5334829 5334813 5334808 -
agatccttatttctctgacaga

SEQ ID NO: 124607 - DNA, 22 bp, Artificial Sequence
  Synthetic oligonucleotide; CTT chr11 5334800 5334821 5334805 5334800 -
atttctctgacagactatgaga

SEQ ID NO: 124608 - DNA, 22 bp, Artificial Sequence
  Synthetic oligonucleotide; TTA chr11 5334799 5334820 5334804 5334799 -
tttctctgacagactatgagat

SEQ ID NO: 124609 - DNA, 22 bp, Artificial Sequence
  Synthetic oligonucleotide; TTT chr11 5334796 5334817 5334801 5334796 -
ctctgacagactatgagatgat

SEQ ID NO: 124610 - DNA, 22 bp, Artificial Sequence
  Synthetic oligonucleotide; TTC chr11 5334795 5334816 5334800 5334795 -
tctgacagactatgagatgatt

SEQ ID NO: 124611 - DNA, 22 bp, Artificial Sequence
  Synthetic oligonucleotide; CTC chr11 5334793 5334814 5334798 5334793 -
tgacagactatgagatgattgt

SEQ ID NO: 124612 - DNA, 22 bp, Artificial Sequence
  Synthetic oligonucleotide; CTG chr11 5334791 5334812 5334796 5334791 -
acagactatgagatgattgtat

SEQ ID NO: 124613 - DNA, 22 bp, Artificial Sequence
  Synthetic oligonucleotide; CTA chr11 5334783 5334804 5334788 5334783 -
tgagatgattgtattcaagtac

SEQ ID NO: 124614 - DNA, 22 bp, Artificial Sequence
  Synthetic oligonucleotide; TTG chr11 5334772 5334793 5334777 5334772 -
tattcaagtacaaattgtcaga

SEQ ID NO: 124615 - DNA, 22 bp, Artificial Sequence
  Synthetic oligonucleotide; TTC chr11 5334767 5334788 5334772 5334767 -
aagtacaaattgtcagacaaag

SEQ ID NO: 124616 - DNA, 22 bp, Artificial Sequence
  Synthetic oligonucleotide; TTG chr11 5334755 5334776 5334760 5334755 -
tcagacaaagccagggattaaa

SEQ ID NO: 124617 - DNA, 22 bp, Artificial Sequence
  Synthetic oligonucleotide; TTA chr11 5334735 5334756 5334740 5334735 -
aagaatacctccaccatgtccc

SEQ ID NO: 124618 - DNA, 22 bp, Artificial Sequence
  Synthetic oligonucleotide; CTC chr11 5334724 5334745 5334729 5334724 -
caccatgtcccctttttaacat

SEQ ID NO: 124619 - DNA, 22 bp, Artificial Sequence
  Synthetic oligonucleotide; CTT chr11 5334710 5334731 5334715 5334710 -
tttaacattactacaggacact

SEQ ID NO: 124620 - DNA, 22 bp, Artificial Sequence
  Synthetic oligonucleotide; TTT chr11 5334709 5334730 5334714 5334709 -
ttaacattactacaggacactt

SEQ ID NO: 124621 - DNA, 22 bp, Artificial Sequence
  Synthetic oligonucleotide; TTT chr11 5334708 5334729 5334713 5334708 -
taacattactacaggacactta

SEQ ID NO: 124622 - DNA, 22 bp, Artificial Sequence
  Synthetic oligonucleotide; TTT chr11 5334707 5334728 5334712 5334707 -
aacattactacaggacacttaa

SEQ ID NO: 124623 - DNA, 22 bp, Artificial Sequence
  Synthetic oligonucleotide; TTA chr11 5334706 5334727 5334711 5334706 -
acattactacaggacacttaaa

SEQ ID NO: 124624 - DNA, 22 bp, Artificial Sequence
  Synthetic oligonucleotide; TTA chr11 5334700 5334721 5334705 5334700 -
ctacaggacacttaaataaaat

SEQ ID NO: 124625 - DNA, 22 bp, Artificial Sequence
  Synthetic oligonucleotide; CTA chr11 5334697 5334718 5334702 5334697 -
caggacacttaaataaaatttt

SEQ ID NO: 124626 - DNA, 22 bp, Artificial Sequence
  Synthetic oligonucleotide; CTT chr11 5334687 5334708 5334692 5334687 -
aaataaaattttttaaacttga

SEQ ID NO: 124627 - DNA, 22 bp, Artificial Sequence
  Synthetic oligonucleotide; TTA chr11 5334686 5334707 5334691 5334686 -
aataaaattttttaaacttgat

SEQ ID NO: 124628 - DNA, 22 bp, Artificial Sequence
  Synthetic oligonucleotide; TTT chr11 5334676 5334697 5334681 5334676 -
tttaaacttgatttatattgct

SEQ ID NO: 124629 - DNA, 22 bp, Artificial Sequence
  Synthetic oligonucleotide; TTT chr11 5334675 5334696 5334680 5334675 -
ttaaacttgatttatattgctc

SEQ ID NO: 124630 - DNA, 22 bp, Artificial Sequence
  Synthetic oligonucleotide; TTT chr11 5334674 5334695 5334679 5334674 -
taaacttgatttatattgctcc

SEQ ID NO: 124631 - DNA, 22 bp, Artificial Sequence
  Synthetic oligonucleotide; TTT chr11 5334673 5334694 5334678 5334673 -
aaacttgatttatattgctcca

SEQ ID NO: 124632 - DNA, 22 bp, Artificial Sequence
  Synthetic oligonucleotide; TTA chr11 5334672 5334693 5334677 5334672 -
aacttgatttatattgctccag

SEQ ID NO: 124633 - DNA, 22 bp, Artificial Sequence
  Synthetic oligonucleotide; CTT chr11 5334667 5334688 5334672 5334667 -
gatttatattgctccagaagca

SEQ ID NO: 124634 - DNA, 22 bp, Artificial Sequence
  Synthetic oligonucleotide; TTG chr11 5334666 5334687 5334671 5334666 -
atttatattgctccagaagcag

SEQ ID NO: 124635 - DNA, 22 bp, Artificial Sequence
  Synthetic oligonucleotide; TTT chr11 5334662 5334683 5334667 5334662 -
atattgctccagaagcagtaac

SEQ ID NO: 124636 - DNA, 22 bp, Artificial Sequence
  Synthetic oligonucleotide; TTA chr11 5334661 5334682 5334666 5334661 -
tattgctccagaagcagtaact

SEQ ID NO: 124637 - DNA, 22 bp, Artificial Sequence
  Synthetic oligonucleotide; TTG chr11 5334656 5334677 5334661 5334656 -
ctccagaagcagtaactctgat

SEQ ID NO: 124638 - DNA, 22 bp, Artificial Sequence
  Synthetic oligonucleotide; CTC chr11 5334653 5334674 5334658 5334653 -
cagaagcagtaactctgattct

SEQ ID NO: 124639 - DNA, 22 bp, Artificial Sequence
  Synthetic oligonucleotide; CTC chr11 5334638 5334659 5334643 5334638 -
tgattcttgggcaagacttacc

SEQ ID NO: 124640 - DNA, 22 bp, Artificial Sequence
  Synthetic oligonucleotide; CTG chr11 5334636 5334657 5334641 5334636 -
attcttgggcaagacttaccaa

SEQ ID NO: 124641 - DNA, 22 bp, Artificial Sequence
  Synthetic oligonucleotide; TTC chr11 5334632 5334653 5334637 5334632 -
ttgggcaagacttaccaagaga

SEQ ID NO: 124642 - DNA, 22 bp, Artificial Sequence
  Synthetic oligonucleotide; CTT chr11 5334630 5334651 5334635 5334630 -
gggcaagacttaccaagagaca

SEQ ID NO: 124643 - DNA, 22 bp, Artificial Sequence
  Synthetic oligonucleotide; TTG chr11 5334629 5334650 5334634 5334629 -
ggcaagacttaccaagagacag

SEQ ID NO: 124644 - DNA, 22 bp, Artificial Sequence
  Synthetic oligonucleotide; CTT chr11 5334619 5334640 5334624 5334619 -
accaagagacagaaaacaagct

SEQ ID NO: 124645 - DNA, 22 bp, Artificial Sequence
  Synthetic oligonucleotide; TTA chr11 5334618 5334639 5334623 5334618 -
ccaagagacagaaaacaagctt

SEQ ID NO: 124646 - DNA, 22 bp, Artificial Sequence
  Synthetic oligonucleotide; CTT chr11 5334596 5334617 5334601 5334596 -
actgtttgaaagaacttatcag

SEQ ID NO: 124647 - DNA, 22 bp, Artificial Sequence
  Synthetic oligonucleotide; TTA chr11 5334595 5334616 5334600 5334595 -
ctgtttgaaagaacttatcagc

SEQ ID NO: 124648 - DNA, 22 bp, Artificial Sequence
  Synthetic oligonucleotide; CTG chr11 5334592 5334613 5334597 5334592 -
tttgaaagaacttatcagcagc

SEQ ID NO: 124649 - DNA, 22 bp, Artificial Sequence
  Synthetic oligonucleotide; TTT chr11 5334589 5334610 5334594 5334589 -
gaaagaacttatcagcagcact

SEQ ID NO: 124650 - DNA, 22 bp, Artificial Sequence
  Synthetic oligonucleotide; TTG chr11 5334588 5334609 5334593 5334588 -
aaagaacttatcagcagcactc

SEQ ID NO: 124651 - DNA, 22 bp, Artificial Sequence
  Synthetic oligonucleotide; CTT chr11 5334579 5334600 5334584 5334579 -
atcagcagcactcatttgtgag

SEQ ID NO: 124652 - DNA, 22 bp, Artificial Sequence
  Synthetic oligonucleotide; TTA chr11 5334578 5334599 5334583 5334578 -
tcagcagcactcatttgtgagt

SEQ ID NO: 124653 - DNA, 22 bp, Artificial Sequence
  Synthetic oligonucleotide; CTC chr11 5334566 5334587 5334571 5334566 -
atttgtgagtatatataacaaa

SEQ ID NO: 124654 - DNA, 22 bp, Artificial Sequence
  Synthetic oligonucleotide; TTT chr11 5334562 5334583 5334567 5334562 -
gtgagtatatataacaaacaat

SEQ ID NO: 124655 - DNA, 22 bp, Artificial Sequence
  Synthetic oligonucleotide; TTG chr11 5334561 5334582 5334566 5334561 -
tgagtatatataacaaacaatc

SEQ ID NO: 124656 - DNA, 22 bp, Artificial Sequence
  Synthetic oligonucleotide; CTT chr11 5334537 5334558 5334542 5334537 -
atttgaaaccaagaaaagatta

SEQ ID NO: 124657 - DNA, 22 bp, Artificial Sequence
  Synthetic oligonucleotide; TTA chr11 5334536 5334557 5334541 5334536 -
tttgaaaccaagaaaagattaa

SEQ ID NO: 124658 - DNA, 22 bp, Artificial Sequence
  Synthetic oligonucleotide; TTT chr11 5334533 5334554 5334538 5334533 -
gaaaccaagaaaagattaagtg

SEQ ID NO: 124659 - DNA, 22 bp, Artificial Sequence
  Synthetic oligonucleotide; TTG chr11 5334532 5334553 5334537 5334532 -
aaaccaagaaaagattaagtgt

SEQ ID NO: 124660 - DNA, 22 bp, Artificial Sequence
  Synthetic oligonucleotide; TTA chr11 5334515 5334536 5334520 5334515 -
agtgtgagggattattaagctt

SEQ ID NO: 124661 - DNA, 22 bp, Artificial Sequence
  Synthetic oligonucleotide; TTA chr11 5334501 5334522 5334506 5334501 -
ttaagctttgtctaagttgagt

SEQ ID NO: 124662 - DNA, 22 bp, Artificial Sequence
  Synthetic oligonucleotide; TTA chr11 5334498 5334519 5334503 5334498 -
agctttgtctaagttgagtgag

SEQ ID NO: 124663 - DNA, 22 bp, Artificial Sequence
  Synthetic oligonucleotide; CTT chr11 5334493 5334514 5334498 5334493 -
tgtctaagttgagtgagcttat

SEQ ID NO: 124664 - DNA, 22 bp, Artificial Sequence
  Synthetic oligonucleotide; TTT chr11 5334492 5334513 5334497 5334492 -
gtctaagttgagtgagcttatt

SEQ ID NO: 124665 - DNA, 22 bp, Artificial Sequence
  Synthetic oligonucleotide; TTG chr11 5334491 5334512 5334496 5334491 -
tctaagttgagtgagcttattg

SEQ ID NO: 124666 - DNA, 22 bp, Artificial Sequence
  Synthetic oligonucleotide; CTA chr11 5334487 5334508 5334492 5334487 -
agttgagtgagcttattggcta

SEQ ID NO: 124667 - DNA, 22 bp, Artificial Sequence
  Synthetic oligonucleotide; TTG chr11 5334482 5334503 5334487 5334482 -
agtgagcttattggctacaggg

SEQ ID NO: 124668 - DNA, 22 bp, Artificial Sequence
  Synthetic oligonucleotide; CTT chr11 5334473 5334494 5334478 5334473 -
attggctacagggttaaggaat

SEQ ID NO: 124669 - DNA, 22 bp, Artificial Sequence
  Synthetic oligonucleotide; TTA chr11 5334472 5334493 5334477 5334472 -
ttggctacagggttaaggaata

SEQ ID NO: 124670 - DNA, 22 bp, Artificial Sequence
  Synthetic oligonucleotide; TTG chr11 5334469 5334490 5334474 5334469 -
gctacagggttaaggaataaca

SEQ ID NO: 124671 - DNA, 22 bp, Artificial Sequence
  Synthetic oligonucleotide; CTA chr11 5334465 5334486 5334470 5334465 -
cagggttaaggaataacaaaag

SEQ ID NO: 124672 - DNA, 22 bp, Artificial Sequence
  Synthetic oligonucleotide; TTA chr11 5334457 5334478 5334462 5334457 -
aggaataacaaaagtaggcttc

SEQ ID NO: 124673 - DNA, 22 bp, Artificial Sequence
  Synthetic oligonucleotide; CTT chr11 5334436 5334457 5334441 5334436 -
cacggtatcttctttttgaggt

SEQ ID NO: 124674 - DNA, 22 bp, Artificial Sequence
  Synthetic oligonucleotide; TTC chr11 5334435 5334456 5334440 5334435 -
acggtatcttctttttgaggtg

SEQ ID NO: 124675 - DNA, 22 bp, Artificial Sequence
  Synthetic oligonucleotide; CTT chr11 5334425 5334446 5334430 5334425 -
ctttttgaggtggggaatcata

SEQ ID NO: 124676 - DNA, 22 bp, Artificial Sequence
  Synthetic oligonucleotide; TTC chr11 5334424 5334445 5334429 5334424 -
tttttgaggtggggaatcatac

SEQ ID NO: 124677 - DNA, 22 bp, Artificial Sequence
  Synthetic oligonucleotide; CTT chr11 5334422 5334443 5334427 5334422 -
tttgaggtggggaatcatacaa

SEQ ID NO: 124678 - DNA, 22 bp, Artificial Sequence
  Synthetic oligonucleotide; TTT chr11 5334421 5334442 5334426 5334421 -
ttgaggtggggaatcatacaag

SEQ ID NO: 124679 - DNA, 22 bp, Artificial Sequence
  Synthetic oligonucleotide; TTT chr11 5334420 5334441 5334425 5334420 -
tgaggtggggaatcatacaagg

SEQ ID NO: 124680 - DNA, 22 bp, Artificial Sequence
  Synthetic oligonucleotide; TTT chr11 5334419 5334440 5334424 5334419 -
gaggtggggaatcatacaaggc

SEQ ID NO: 124681 - DNA, 22 bp, Artificial Sequence
  Synthetic oligonucleotide; TTG chr11 5334418 5334439 5334423 5334418 -
aggtggggaatcatacaaggca

SEQ ID NO: 124682 - DNA, 22 bp, Artificial Sequence
  Synthetic oligonucleotide; TTA chr11 5334386 5334407 5334391 5334386 -
gatagcatgacttccatgtgct

SEQ ID NO: 124683 - DNA, 22 bp, Artificial Sequence
  Synthetic oligonucleotide; CTT chr11 5334373 5334394 5334378 5334373 -
ccatgtgctggatgaagctaca

SEQ ID NO: 124684 - DNA, 22 bp, Artificial Sequence
  Synthetic oligonucleotide; TTC chr11 5334372 5334393 5334377 5334372 -
catgtgctggatgaagctacaa

SEQ ID NO: 124685 - DNA, 22 bp, Artificial Sequence
  Synthetic oligonucleotide; CTG chr11 5334363 5334384 5334368 5334363 -
gatgaagctacaattctgtttt

SEQ ID NO: 124686 - DNA, 22 bp, Artificial Sequence
  Synthetic oligonucleotide; CTA chr11 5334353 5334374 5334358 5334353 -
caattctgttttctttttgcaa

SEQ ID NO: 124687 - DNA, 22 bp, Artificial Sequence
  Synthetic oligonucleotide; TTC chr11 5334347 5334368 5334352 5334347 -
tgttttctttttgcaaagaaaa

SEQ ID NO: 124688 - DNA, 22 bp, Artificial Sequence
  Synthetic oligonucleotide; CTG chr11 5334345 5334366 5334350 5334345 -
ttttctttttgcaaagaaaata

SEQ ID NO: 124689 - DNA, 22 bp, Artificial Sequence
  Synthetic oligonucleotide; TTT chr11 5334342 5334363 5334347 5334342 -
tctttttgcaaagaaaatatgg

SEQ ID NO: 124690 - DNA, 22 bp, Artificial Sequence
  Synthetic oligonucleotide; TTT chr11 5334341 5334362 5334346 5334341 -
ctttttgcaaagaaaatatggg

SEQ ID NO: 124691 - DNA, 22 bp, Artificial Sequence
  Synthetic oligonucleotide; TTC chr11 5334340 5334361 5334345 5334340 -
tttttgcaaagaaaatatgggg

SEQ ID NO: 124692 - DNA, 22 bp, Artificial Sequence
  Synthetic oligonucleotide; CTT chr11 5334338 5334359 5334343 5334338 -
tttgcaaagaaaatatggggct

SEQ ID NO: 124693 - DNA, 22 bp, Artificial Sequence
  Synthetic oligonucleotide; TTT chr11 5334337 5334358 5334342 5334337 -
ttgcaaagaaaatatggggctt

SEQ ID NO: 124694 - DNA, 22 bp, Artificial Sequence
  Synthetic oligonucleotide; TTT chr11 5334336 5334357 5334341 5334336 -
tgcaaagaaaatatggggcttt

SEQ ID NO: 124695 - DNA, 22 bp, Artificial Sequence
  Synthetic oligonucleotide; TTT chr11 5334335 5334356 5334340 5334335 -
gcaaagaaaatatggggcttta

SEQ ID NO: 124696 - DNA, 22 bp, Artificial Sequence
  Synthetic oligonucleotide; TTG chr11 5334334 5334355 5334339 5334334 -
caaagaaaatatggggctttaa

SEQ ID NO: 124697 - DNA, 22 bp, Artificial Sequence
  Synthetic oligonucleotide; CTT chr11 5334315 5334336 5334320 5334315 -
taagaacacagttctggagccc

SEQ ID NO: 124698 - DNA, 22 bp, Artificial Sequence
  Synthetic oligonucleotide; TTT chr11 5334314 5334335 5334319 5334314 -
aagaacacagttctggagccca

SEQ ID NO: 124699 - DNA, 22 bp, Artificial Sequence
  Synthetic oligonucleotide; TTA chr11 5334313 5334334 5334318 5334313 -
agaacacagttctggagcccac

SEQ ID NO: 124700 - DNA, 22 bp, Artificial Sequence
  Synthetic oligonucleotide; TTC chr11 5334301 5334322 5334306 5334301 -
tggagcccacttccttctccaa

SEQ ID NO: 124701 - DNA, 22 bp, Artificial Sequence
  Synthetic oligonucleotide; CTG chr11 5334299 5334320 5334304 5334299 -
gagcccacttccttctccaaag

SEQ ID NO: 124702 - DNA, 22 bp, Artificial Sequence
  Synthetic oligonucleotide; CTT chr11 5334289 5334310 5334294 5334289 -
ccttctccaaaggaggcttgaa

SEQ ID NO: 124703 - DNA, 22 bp, Artificial Sequence
  Synthetic oligonucleotide; TTC chr11 5334288 5334309 5334293 5334288 -
cttctccaaaggaggcttgaaa

SEQ ID NO: 124704 - DNA, 22 bp, Artificial Sequence
  Synthetic oligonucleotide; CTT chr11 5334285 5334306 5334290 5334285 -
ctccaaaggaggcttgaaaaaa

SEQ ID NO: 124705 - DNA, 22 bp, Artificial Sequence
  Synthetic oligonucleotide; TTC chr11 5334284 5334305 5334289 5334284 -
tccaaaggaggcttgaaaaaaa

SEQ ID NO: 124706 - DNA, 22 bp, Artificial Sequence
  Synthetic oligonucleotide; CTC chr11 5334282 5334303 5334287 5334282 -
caaaggaggcttgaaaaaaaat

SEQ ID NO: 124707 - DNA, 22 bp, Artificial Sequence
  Synthetic oligonucleotide; CTT chr11 5334270 5334291 5334275 5334270 -
gaaaaaaaatatcccagtagcc

SEQ ID NO: 124708 - DNA, 22 bp, Artificial Sequence
  Synthetic oligonucleotide; TTG chr11 5334269 5334290 5334274 5334269 -
aaaaaaaatatcccagtagcct

SEQ ID NO: 124709 - DNA, 22 bp, Artificial Sequence
  Synthetic oligonucleotide; CTA chr11 5334246 5334267 5334251 5334246 -
attatccagcatcaagacagat

SEQ ID NO: 124710 - DNA, 22 bp, Artificial Sequence
  Synthetic oligonucleotide; TTA chr11 5334242 5334263 5334247 5334242 -
tccagcatcaagacagatactg

SEQ ID NO: 124711 - DNA, 22 bp, Artificial Sequence
  Synthetic oligonucleotide; CTG chr11 5334220 5334241 5334225 5334220 -
gggaacaattttgaatacaaat

SEQ ID NO: 124712 - DNA, 22 bp, Artificial Sequence
  Synthetic oligonucleotide; TTT chr11 5334209 5334230 5334214 5334209 -
tgaatacaaataacctcacaaa

SEQ ID NO: 124713 - DNA, 22 bp, Artificial Sequence
  Synthetic oligonucleotide; TTT chr11 5334208 5334229 5334213 5334208 -
gaatacaaataacctcacaaat

SEQ ID NO: 124714 - DNA, 22 bp, Artificial Sequence
  Synthetic oligonucleotide; TTG chr11 5334207 5334228 5334212 5334207 -
aatacaaataacctcacaaatt

SEQ ID NO: 124715 - DNA, 22 bp, Artificial Sequence
  Synthetic oligonucleotide; CTC chr11 5334192 5334213 5334197 5334192 -
acaaattaaccctgttagcagt

SEQ ID NO: 124716 - DNA, 22 bp, Artificial Sequence
  Synthetic oligonucleotide; TTA chr11 5334184 5334205 5334189 5334184 -
accctgttagcagtcttcagag

SEQ ID NO: 124717 - DNA, 22 bp, Artificial Sequence
  Synthetic oligonucleotide; CTG chr11 5334178 5334199 5334183 5334178 -
ttagcagtcttcagagatacca

SEQ ID NO: 124718 - DNA, 22 bp, Artificial Sequence
  Synthetic oligonucleotide; TTA chr11 5334175 5334196 5334180 5334175 -
gcagtcttcagagataccattt

SEQ ID NO: 124719 - DNA, 22 bp, Artificial Sequence
  Synthetic oligonucleotide; CTT chr11 5334167 5334188 5334172 5334167 -
cagagataccatttaaaccaat

SEQ ID NO: 124720 - DNA, 22 bp, Artificial Sequence
  Synthetic oligonucleotide; TTC chr11 5334166 5334187 5334171 5334166 -
agagataccatttaaaccaatt

SEQ ID NO: 124721 - DNA, 22 bp, Artificial Sequence
  Synthetic oligonucleotide; TTT chr11 5334153 5334174 5334158 5334153 -
aaaccaatttctacaccaggac

SEQ ID NO: 124722 - DNA, 22 bp, Artificial Sequence
  Synthetic oligonucleotide; TTA chr11 5334152 5334173 5334157 5334152 -
aaccaatttctacaccaggact

SEQ ID NO: 124723 - DNA, 22 bp, Artificial Sequence
  Synthetic oligonucleotide; TTT chr11 5334143 5334164 5334148 5334143 -
ctacaccaggactcagcaatta

SEQ ID NO: 124724 - DNA, 22 bp, Artificial Sequence
  Synthetic oligonucleotide; TTC chr11 5334142 5334163 5334147 5334142 -
tacaccaggactcagcaattac

SEQ ID NO: 124725 - DNA, 22 bp, Artificial Sequence
  Synthetic oligonucleotide; CTA chr11 5334140 5334161 5334145 5334140 -
caccaggactcagcaattacct

SEQ ID NO: 124726 - DNA, 22 bp, Artificial Sequence
  Synthetic oligonucleotide; CTC chr11 5334129 5334150 5334134 5334129 -
agcaattacctctccccttaat

SEQ ID NO: 124727 - DNA, 22 bp, Artificial Sequence
  Synthetic oligonucleotide; TTA chr11 5334121 5334142 5334126 5334121 -
cctctccccttaatttctgata

SEQ ID NO: 124728 - DNA, 22 bp, Artificial Sequence
  Synthetic oligonucleotide; CTC chr11 5334117 5334138 5334122 5334117 -
tccccttaatttctgatacccc

SEQ ID NO: 124729 - DNA, 22 bp, Artificial Sequence
  Synthetic oligonucleotide; CTC chr11 5334115 5334136 5334120 5334115 -
cccttaatttctgataccccag

SEQ ID NO: 124730 - DNA, 22 bp, Artificial Sequence
  Synthetic oligonucleotide; CTT chr11 5334110 5334131 5334115 5334110 -
aatttctgataccccaggtcag

SEQ ID NO: 124731 - DNA, 22 bp, Artificial Sequence
  Synthetic oligonucleotide; TTA chr11 5334109 5334130 5334114 5334109 -
atttctgataccccaggtcagg

SEQ ID NO: 124732 - DNA, 22 bp, Artificial Sequence
  Synthetic oligonucleotide; TTT chr11 5334105 5334126 5334110 5334105 -
ctgataccccaggtcaggctct

SEQ ID NO: 124733 - DNA, 22 bp, Artificial Sequence
  Synthetic oligonucleotide; TTC chr11 5334104 5334125 5334109 5334104 -
tgataccccaggtcaggctcta

SEQ ID NO: 124734 - DNA, 22 bp, Artificial Sequence
  Synthetic oligonucleotide; CTG chr11 5334102 5334123 5334107 5334102 -
ataccccaggtcaggctctagt

SEQ ID NO: 124735 - DNA, 22 bp, Artificial Sequence
  Synthetic oligonucleotide; CTC chr11 5334084 5334105 5334089 5334084 -
tagtgactatgggagaatggaa

SEQ ID NO: 124736 - DNA, 22 bp, Artificial Sequence
  Synthetic oligonucleotide; CTA chr11 5334082 5334103 5334087 5334082 -
gtgactatgggagaatggaatg

SEQ ID NO: 124737 - DNA, 22 bp, Artificial Sequence
  Synthetic oligonucleotide; CTA chr11 5334075 5334096 5334080 5334075 -
tgggagaatggaatgaaggtaa

SEQ ID NO: 124738 - DNA, 22 bp, Artificial Sequence
  Synthetic oligonucleotide; TTG chr11 5334050 5334071 5334055 5334050 -
agaggaaaataaagactaatct

SEQ ID NO: 124739 - DNA, 22 bp, Artificial Sequence
  Synthetic oligonucleotide; CTA chr11 5334032 5334053 5334037 5334032 -
atcttcttggattctcttccac

SEQ ID NO: 124740 - DNA, 22 bp, Artificial Sequence
  Synthetic oligonucleotide; CTT chr11 5334027 5334048 5334032 5334027 -
cttggattctcttccaccacat

SEQ ID NO: 124741 - DNA, 22 bp, Artificial Sequence
  Synthetic oligonucleotide; TTC chr11 5334026 5334047 5334031 5334026 -
ttggattctcttccaccacata

SEQ ID NO: 124742 - DNA, 22 bp, Artificial Sequence
  Synthetic oligonucleotide; CTT chr11 5334024 5334045 5334029 5334024 -
ggattctcttccaccacatagt

SEQ ID NO: 124743 - DNA, 22 bp, Artificial Sequence
  Synthetic oligonucleotide; TTG chr11 5334023 5334044 5334028 5334023 -
gattctcttccaccacatagtt

SEQ ID NO: 124744 - DNA, 22 bp, Artificial Sequence
  Synthetic oligonucleotide; TTC chr11 5334018 5334039 5334023 5334018 -
tcttccaccacatagttgttgc

SEQ ID NO: 124745 - DNA, 22 bp, Artificial Sequence
  Synthetic oligonucleotide; CTC chr11 5334016 5334037 5334021 5334016 -
ttccaccacatagttgttgcaa

SEQ ID NO: 124746 - DNA, 22 bp, Artificial Sequence
  Synthetic oligonucleotide; CTT chr11 5334014 5334035 5334019 5334014 -
ccaccacatagttgttgcaaga

SEQ ID NO: 124747 - DNA, 22 bp, Artificial Sequence
  Synthetic oligonucleotide; TTC chr11 5334013 5334034 5334018 5334013 -
caccacatagttgttgcaagag

SEQ ID NO: 124748 - DNA, 22 bp, Artificial Sequence
  Synthetic oligonucleotide; TTG chr11 5334000 5334021 5334005 5334000 -
ttgcaagagggtaaatagagaa

SEQ ID NO: 124749 - DNA, 22 bp, Artificial Sequence
  Synthetic oligonucleotide; TTG chr11 5333997 5334018 5334002 5333997 -
caagagggtaaatagagaaaag

SEQ ID NO: 124750 - DNA, 22 bp, Artificial Sequence
  Synthetic oligonucleotide; CTG chr11 5333961 5333982 5333966 5333961 -
tatctacagattctgccgggtg

SEQ ID NO: 124751 - DNA, 22 bp, Artificial Sequence
  Synthetic oligonucleotide; CTA chr11 5333955 5333976 5333960 5333955 -
cagattctgccgggtgtatcaa

SEQ ID NO: 124752 - DNA, 22 bp, Artificial Sequence
  Synthetic oligonucleotide; TTC chr11 5333948 5333969 5333953 5333948 -
tgccgggtgtatcaacctccaa

SEQ ID NO: 124753 - DNA, 22 bp, Artificial Sequence
  Synthetic oligonucleotide; CTG chr11 5333946 5333967 5333951 5333946 -
ccgggtgtatcaacctccaaca

SEQ ID NO: 124754 - DNA, 22 bp, Artificial Sequence
  Synthetic oligonucleotide; CTC chr11 5333929 5333950 5333934 5333929 -
caacataaaagttcaacttcct

SEQ ID NO: 124755 - DNA, 22 bp, Artificial Sequence
  Synthetic oligonucleotide; TTC chr11 5333915 5333936 5333920 5333915 -
aacttcctagcaaatgttaact

SEQ ID NO: 124756 - DNA, 22 bp, Artificial Sequence
  Synthetic oligonucleotide; CTT chr11 5333910 5333931 5333915 5333910 -
cctagcaaatgttaactctgaa

SEQ ID NO: 124757 - DNA, 22 bp, Artificial Sequence
  Synthetic oligonucleotide; TTC chr11 5333909 5333930 5333914 5333909 -
ctagcaaatgttaactctgaaa

SEQ ID NO: 124758 - DNA, 22 bp, Artificial Sequence
  Synthetic oligonucleotide; CTA chr11 5333906 5333927 5333911 5333906 -
gcaaatgttaactctgaaataa

SEQ ID NO: 124759 - DNA, 22 bp, Artificial Sequence
  Synthetic oligonucleotide; TTA chr11 5333896 5333917 5333901 5333896 -
actctgaaataaaaacagtagt

SEQ ID NO: 124760 - DNA, 22 bp, Artificial Sequence
  Synthetic oligonucleotide; CTC chr11 5333892 5333913 5333897 5333892 -
tgaaataaaaacagtagtttta

SEQ ID NO: 124761 - DNA, 22 bp, Artificial Sequence
  Synthetic oligonucleotide; CTG chr11 5333890 5333911 5333895 5333890 -
aaataaaaacagtagttttatg

SEQ ID NO: 124762 - DNA, 22 bp, Artificial Sequence
  Synthetic oligonucleotide; TTT chr11 5333872 5333893 5333877 5333872 -
tatgtgatgggtgcttacatga

SEQ ID NO: 124763 - DNA, 22 bp, Artificial Sequence
  Synthetic oligonucleotide; TTT chr11 5333871 5333892 5333876 5333871 -
atgtgatgggtgcttacatgaa

SEQ ID NO: 124764 - DNA, 22 bp, Artificial Sequence
  Synthetic oligonucleotide; TTA chr11 5333870 5333891 5333875 5333870 -
tgtgatgggtgcttacatgaat

SEQ ID NO: 124765 - DNA, 22 bp, Artificial Sequence
  Synthetic oligonucleotide; CTT chr11 5333856 5333877 5333861 5333856 -
acatgaataattaagagttctg

SEQ ID NO: 124766 - DNA, 22 bp, Artificial Sequence
  Synthetic oligonucleotide; TTA chr11 5333855 5333876 5333860 5333855 -
catgaataattaagagttctga

SEQ ID NO: 124767 - DNA, 22 bp, Artificial Sequence
  Synthetic oligonucleotide; TTA chr11 5333843 5333864 5333848 5333843 -
agagttctgagttgatatctag

SEQ ID NO: 124768 - DNA, 22 bp, Artificial Sequence
  Synthetic oligonucleotide; TTC chr11 5333836 5333857 5333841 5333836 -
tgagttgatatctagaagttct

SEQ ID NO: 124769 - DNA, 22 bp, Artificial Sequence
  Synthetic oligonucleotide; CTG chr11 5333834 5333855 5333839 5333834 -
agttgatatctagaagttcttg

SEQ ID NO: 124770 - DNA, 22 bp, Artificial Sequence
  Synthetic oligonucleotide; TTG chr11 5333829 5333850 5333834 5333829 -
atatctagaagttcttgttagc

SEQ ID NO: 124771 - DNA, 22 bp, Artificial Sequence
  Synthetic oligonucleotide; CTA chr11 5333822 5333843 5333827 5333822 -
gaagttcttgttagctcagcgc

SEQ ID NO: 124772 - DNA, 22 bp, Artificial Sequence
  Synthetic oligonucleotide; TTC chr11 5333815 5333836 5333820 5333815 -
ttgttagctcagcgctattaag

SEQ ID NO: 124773 - DNA, 22 bp, Artificial Sequence
  Synthetic oligonucleotide; CTT chr11 5333813 5333834 5333818 5333813 -
gttagctcagcgctattaagaa

SEQ ID NO: 124774 - DNA, 22 bp, Artificial Sequence
  Synthetic oligonucleotide; TTG chr11 5333812 5333833 5333817 5333812 -
ttagctcagcgctattaagaac

SEQ ID NO: 124775 - DNA, 22 bp, Artificial Sequence
  Synthetic oligonucleotide; TTA chr11 5333809 5333830 5333814 5333809 -
gctcagcgctattaagaacact

SEQ ID NO: 124776 - DNA, 22 bp, Artificial Sequence
  Synthetic oligonucleotide; CTC chr11 5333805 5333826 5333810 5333805 -
agcgctattaagaacacttttc

SEQ ID NO: 124777 - DNA, 22 bp, Artificial Sequence
  Synthetic oligonucleotide; CTA chr11 5333798 5333819 5333803 5333798 -
ttaagaacacttttcctacaat

SEQ ID NO: 124778 - DNA, 22 bp, Artificial Sequence
  Synthetic oligonucleotide; TTA chr11 5333795 5333816 5333800 5333795 -
agaacacttttcctacaataga

SEQ ID NO: 124779 - DNA, 22 bp, Artificial Sequence
  Synthetic oligonucleotide; CTT chr11 5333786 5333807 5333791 5333786 -
ttcctacaatagaaattttctt

SEQ ID NO: 124780 - DNA, 22 bp, Artificial Sequence
  Synthetic oligonucleotide; TTT chr11 5333785 5333806 5333790 5333785 -
tcctacaatagaaattttcttt

SEQ ID NO: 124781 - DNA, 22 bp, Artificial Sequence
  Synthetic oligonucleotide; TTT chr11 5333784 5333805 5333789 5333784 -
cctacaatagaaattttctttg

SEQ ID NO: 124782 - DNA, 22 bp, Artificial Sequence
  Synthetic oligonucleotide; TTC chr11 5333783 5333804 5333788 5333783 -
ctacaatagaaattttctttgg

SEQ ID NO: 124783 - DNA, 22 bp, Artificial Sequence
  Synthetic oligonucleotide; CTA chr11 5333780 5333801 5333785 5333780 -
caatagaaattttctttggaag

SEQ ID NO: 124784 - DNA, 22 bp, Artificial Sequence
  Synthetic oligonucleotide; TTT chr11 5333768 5333789 5333773 5333768 -
tctttggaagaggcaggagagg

SEQ ID NO: 124785 - DNA, 22 bp, Artificial Sequence
  Synthetic oligonucleotide; TTT chr11 5333767 5333788 5333772 5333767 -
ctttggaagaggcaggagagga

SEQ ID NO: 124786 - DNA, 22 bp, Artificial Sequence
  Synthetic oligonucleotide; TTC chr11 5333766 5333787 5333771 5333766 -
tttggaagaggcaggagaggaa

SEQ ID NO: 124787 - DNA, 22 bp, Artificial Sequence
  Synthetic oligonucleotide; CTT chr11 5333764 5333785 5333769 5333764 -
tggaagaggcaggagaggaaag

SEQ ID NO: 124788 - DNA, 22 bp, Artificial Sequence
  Synthetic oligonucleotide; TTT chr11 5333763 5333784 5333768 5333763 -
ggaagaggcaggagaggaaaga

SEQ ID NO: 124789 - DNA, 22 bp, Artificial Sequence
  Synthetic oligonucleotide; TTG chr11 5333762 5333783 5333767 5333762 -
gaagaggcaggagaggaaagag

SEQ ID NO: 124790 - DNA, 22 bp, Artificial Sequence
  Synthetic oligonucleotide; CTG chr11 5333736 5333757 5333741 5333736 -
actctgggagtgaatgtgcagg

SEQ ID NO: 124791 - DNA, 22 bp, Artificial Sequence
  Synthetic oligonucleotide; CTC chr11 5333732 5333753 5333737 5333732 -
tgggagtgaatgtgcagggtgg

SEQ ID NO: 124792 - DNA, 22 bp, Artificial Sequence
  Synthetic oligonucleotide; CTG chr11 5333730 5333751 5333735 5333730 -
ggagtgaatgtgcagggtgggg

SEQ ID NO: 124793 - DNA, 22 bp, Artificial Sequence
  Synthetic oligonucleotide; CTG chr11 5333693 5333714 5333698 5333693 -
taggtctctatactacctctcc

SEQ ID NO: 124794 - DNA, 22 bp, Artificial Sequence
  Synthetic oligonucleotide; CTC chr11 5333685 5333706 5333690 5333685 -
tatactacctctcctcctcctc

SEQ ID NO: 124795 - DNA, 22 bp, Artificial Sequence
  Synthetic oligonucleotide; CTA chr11 5333683 5333704 5333688 5333683 -
tactacctctcctcctcctctt

SEQ ID NO: 124796 - DNA, 22 bp, Artificial Sequence
  Synthetic oligonucleotide; CTA chr11 5333678 5333699 5333683 5333678 -
cctctcctcctcctcttgatgc

SEQ ID NO: 124797 - DNA, 22 bp, Artificial Sequence
  Synthetic oligonucleotide; CTC chr11 5333674 5333695 5333679 5333674 -
tcctcctcctcttgatgcagtt

SEQ ID NO: 124798 - DNA, 22 bp, Artificial Sequence
  Synthetic oligonucleotide; CTC chr11 5333672 5333693 5333677 5333672 -
ctcctcctcttgatgcagttct

SEQ ID NO: 124799 - DNA, 22 bp, Artificial Sequence
  Synthetic oligonucleotide; CTC chr11 5333669 5333690 5333674 5333669 -
ctcctcttgatgcagttctcta

SEQ ID NO: 124800 - DNA, 22 bp, Artificial Sequence
  Synthetic oligonucleotide; CTC chr11 5333666 5333687 5333671 5333666 -
ctcttgatgcagttctctaggc

SEQ ID NO: 124801 - DNA, 22 bp, Artificial Sequence
  Synthetic oligonucleotide; CTC chr11 5333663 5333684 5333668 5333663 -
ttgatgcagttctctaggctca

SEQ ID NO: 124802 - DNA, 22 bp, Artificial Sequence
  Synthetic oligonucleotide; CTT chr11 5333661 5333682 5333666 5333661 -
gatgcagttctctaggctcagt

SEQ ID NO: 124803 - DNA, 22 bp, Artificial Sequence
  Synthetic oligonucleotide; TTG chr11 5333660 5333681 5333665 5333660 -
atgcagttctctaggctcagtt

SEQ ID NO: 124804 - DNA, 22 bp, Artificial Sequence
  Synthetic oligonucleotide; TTC chr11 5333651 5333672 5333656 5333651 -
tctaggctcagttttctctatc

SEQ ID NO: 124805 - DNA, 22 bp, Artificial Sequence
  Synthetic oligonucleotide; CTC chr11 5333649 5333670 5333654 5333649 -
taggctcagttttctctatctt

SEQ ID NO: 124806 - DNA, 22 bp, Artificial Sequence
  Synthetic oligonucleotide; CTA chr11 5333647 5333668 5333652 5333647 -
ggctcagttttctctatcttac

SEQ ID NO: 124807 - DNA, 22 bp, Artificial Sequence
  Synthetic oligonucleotide; CTC chr11 5333642 5333663 5333647 5333642 -
agttttctctatcttacatcca

SEQ ID NO: 124808 - DNA, 22 bp, Artificial Sequence
  Synthetic oligonucleotide; TTT chr11 5333637 5333658 5333642 5333637 -
tctctatcttacatccacctat

SEQ ID NO: 124809 - DNA, 22 bp, Artificial Sequence
  Synthetic oligonucleotide; TTT chr11 5333636 5333657 5333641 5333636 -
ctctatcttacatccacctatg

SEQ ID NO: 124810 - DNA, 22 bp, Artificial Sequence
  Synthetic oligonucleotide; TTC chr11 5333635 5333656 5333640 5333635 -
tctatcttacatccacctatgt

SEQ ID NO: 124811 - DNA, 22 bp, Artificial Sequence
  Synthetic oligonucleotide; CTC chr11 5333633 5333654 5333638 5333633 -
tatcttacatccacctatgttc

SEQ ID NO: 124812 - DNA, 22 bp, Artificial Sequence
  Synthetic oligonucleotide; CTA chr11 5333631 5333652 5333636 5333631 -
tcttacatccacctatgttccc

SEQ ID NO: 124813 - DNA, 22 bp, Artificial Sequence
  Synthetic oligonucleotide; CTT chr11 5333627 5333648 5333632 5333627 -
acatccacctatgttccctttc

SEQ ID NO: 124814 - DNA, 22 bp, Artificial Sequence
  Synthetic oligonucleotide; TTA chr11 5333626 5333647 5333631 5333626 -
catccacctatgttccctttct

SEQ ID NO: 124815 - DNA, 22 bp, Artificial Sequence
  Synthetic oligonucleotide; CTA chr11 5333616 5333637 5333621 5333616 -
tgttccctttctgccttcttcc

SEQ ID NO: 124816 - DNA, 22 bp, Artificial Sequence
  Synthetic oligonucleotide; TTC chr11 5333611 5333632 5333616 5333611 -
cctttctgccttcttcctcctc

SEQ ID NO: 124817 - DNA, 22 bp, Artificial Sequence
  Synthetic oligonucleotide; CTT chr11 5333607 5333628 5333612 5333607 -
tctgccttcttcctcctctact

SEQ ID NO: 124818 - DNA, 22 bp, Artificial Sequence
  Synthetic oligonucleotide; TTT chr11 5333606 5333627 5333611 5333606 -
ctgccttcttcctcctctactt

SEQ ID NO: 124819 - DNA, 22 bp, Artificial Sequence
  Synthetic oligonucleotide; TTC chr11 5333605 5333626 5333610 5333605 -
tgccttcttcctcctctacttt

SEQ ID NO: 124820 - DNA, 22 bp, Artificial Sequence
  Synthetic oligonucleotide; CTG chr11 5333603 5333624 5333608 5333603 -
ccttcttcctcctctactttgt

SEQ ID NO: 124821 - DNA, 22 bp, Artificial Sequence
  Synthetic oligonucleotide; CTT chr11 5333599 5333620 5333604 5333599 -
cttcctcctctactttgtagct

SEQ ID NO: 124822 - DNA, 22 bp, Artificial Sequence
  Synthetic oligonucleotide; TTC chr11 5333598 5333619 5333603 5333598 -
ttcctcctctactttgtagctc

SEQ ID NO: 124823 - DNA, 22 bp, Artificial Sequence
  Synthetic oligonucleotide; CTT chr11 5333596 5333617 5333601 5333596 -
cctcctctactttgtagctccc

SEQ ID NO: 124824 - DNA, 22 bp, Artificial Sequence
  Synthetic oligonucleotide; TTC chr11 5333595 5333616 5333600 5333595 -
ctcctctactttgtagctccca

SEQ ID NO: 124825 - DNA, 22 bp, Artificial Sequence
  Synthetic oligonucleotide; CTC chr11 5333592 5333613 5333597 5333592 -
ctctactttgtagctcccacat

SEQ ID NO: 124826 - DNA, 22 bp, Artificial Sequence
  Synthetic oligonucleotide; CTC chr11 5333589 5333610 5333594 5333589 -
tactttgtagctcccacatttt

SEQ ID NO: 124827 - DNA, 22 bp, Artificial Sequence
  Synthetic oligonucleotide; CTA chr11 5333587 5333608 5333592 5333587 -
ctttgtagctcccacattttca

SEQ ID NO: 124828 - DNA, 22 bp, Artificial Sequence
  Synthetic oligonucleotide; CTT chr11 5333584 5333605 5333589 5333584 -
tgtagctcccacattttcagct

SEQ ID NO: 124829 - DNA, 22 bp, Artificial Sequence
  Synthetic oligonucleotide; TTT chr11 5333583 5333604 5333588 5333583 -
gtagctcccacattttcagctt

SEQ ID NO: 124830 - DNA, 22 bp, Artificial Sequence
  Synthetic oligonucleotide; TTG chr11 5333582 5333603 5333587 5333582 -
tagctcccacattttcagctta

SEQ ID NO: 124831 - DNA, 22 bp, Artificial Sequence
  Synthetic oligonucleotide; CTC chr11 5333576 5333597 5333581 5333576 -
ccacattttcagcttatatatt

SEQ ID NO: 124832 - DNA, 22 bp, Artificial Sequence
  Synthetic oligonucleotide; TTT chr11 5333568 5333589 5333573 5333568 -
tcagcttatatattagccaatt

SEQ ID NO: 124833 - DNA, 22 bp, Artificial Sequence
  Synthetic oligonucleotide; TTT chr11 5333567 5333588 5333572 5333567 -
cagcttatatattagccaatta

SEQ ID NO: 124834 - DNA, 22 bp, Artificial Sequence
  Synthetic oligonucleotide; TTC chr11 5333566 5333587 5333571 5333566 -
agcttatatattagccaattag

SEQ ID NO: 124835 - DNA, 22 bp, Artificial Sequence
  Synthetic oligonucleotide; CTT chr11 5333561 5333582 5333566 5333561 -
atatattagccaattagtatat

SEQ ID NO: 124836 - DNA, 22 bp, Artificial Sequence
  Synthetic oligonucleotide; TTA chr11 5333560 5333581 5333565 5333560 -
tatattagccaattagtatatt

SEQ ID NO: 124837 - DNA, 22 bp, Artificial Sequence
  Synthetic oligonucleotide; TTA chr11 5333553 5333574 5333558 5333553 -
gccaattagtatattagtaata

SEQ ID NO: 124838 - DNA, 22 bp, Artificial Sequence
  Synthetic oligonucleotide; TTA chr11 5333545 5333566 5333550 5333545 -
gtatattagtaatattttgaag

SEQ ID NO: 124839 - DNA, 22 bp, Artificial Sequence
  Synthetic oligonucleotide; TTA chr11 5333537 5333558 5333542 5333537 -
gtaatattttgaagtcactgtt

SEQ ID NO: 124840 - DNA, 22 bp, Artificial Sequence
  Synthetic oligonucleotide; TTT chr11 5333528 5333549 5333533 5333528 -
tgaagtcactgttcttacctaa

SEQ ID NO: 124841 - DNA, 22 bp, Artificial Sequence
  Synthetic oligonucleotide; TTT chr11 5333527 5333548 5333532 5333527 -
gaagtcactgttcttacctaag

SEQ ID NO: 124842 - DNA, 22 bp, Artificial Sequence
  Synthetic oligonucleotide; TTG chr11 5333526 5333547 5333531 5333526 -
aagtcactgttcttacctaagt

SEQ ID NO: 124843 - DNA, 22 bp, Artificial Sequence
  Synthetic oligonucleotide; CTG chr11 5333517 5333538 5333522 5333517 -
ttcttacctaagtcagtttaac

SEQ ID NO: 124844 - DNA, 22 bp, Artificial Sequence
  Synthetic oligonucleotide; TTC chr11 5333514 5333535 5333519 5333514 -
ttacctaagtcagtttaacaat

SEQ ID NO: 124845 - DNA, 22 bp, Artificial Sequence
  Synthetic oligonucleotide; CTT chr11 5333512 5333533 5333517 5333512 -
acctaagtcagtttaacaatca

SEQ ID NO: 124846 - DNA, 22 bp, Artificial Sequence
  Synthetic oligonucleotide; TTA chr11 5333511 5333532 5333516 5333511 -
cctaagtcagtttaacaatcag

SEQ ID NO: 124847 - DNA, 22 bp, Artificial Sequence
  Synthetic oligonucleotide; CTA chr11 5333507 5333528 5333512 5333507 -
agtcagtttaacaatcagcata

SEQ ID NO: 124848 - DNA, 22 bp, Artificial Sequence
  Synthetic oligonucleotide; TTT chr11 5333498 5333519 5333503 5333498 -
aacaatcagcataccagtcagt

SEQ ID NO: 124849 - DNA, 22 bp, Artificial Sequence
  Synthetic oligonucleotide; TTA chr11 5333497 5333518 5333502 5333497 -
acaatcagcataccagtcagtt

SEQ ID NO: 124850 - DNA, 22 bp, Artificial Sequence
  Synthetic oligonucleotide; TTA chr11 5333474 5333495 5333479 5333474 -
gtgatcaatgtgttaatcataa

SEQ ID NO: 124851 - DNA, 22 bp, Artificial Sequence
  Synthetic oligonucleotide; TTA chr11 5333459 5333480 5333464 5333459 -
atcataaagtaattaaaatttt

SEQ ID NO: 124852 - DNA, 22 bp, Artificial Sequence
  Synthetic oligonucleotide; TTA chr11 5333444 5333465 5333449 5333444 -
aaattttataaataaccttaca

SEQ ID NO: 124853 - DNA, 22 bp, Artificial Sequence
  Synthetic oligonucleotide; TTT chr11 5333438 5333459 5333443 5333438 -
tataaataaccttacaatcaat

SEQ ID NO: 124854 - DNA, 22 bp, Artificial Sequence
  Synthetic oligonucleotide; TTT chr11 5333437 5333458 5333442 5333437 -
ataaataaccttacaatcaata

SEQ ID NO: 124855 - DNA, 22 bp, Artificial Sequence
  Synthetic oligonucleotide; TTA chr11 5333436 5333457 5333441 5333436 -
taaataaccttacaatcaatat

SEQ ID NO: 124856 - DNA, 22 bp, Artificial Sequence
  Synthetic oligonucleotide; CTT chr11 5333425 5333446 5333430 5333425 -
acaatcaatatgtcaaactctg

SEQ ID NO: 124857 - DNA, 22 bp, Artificial Sequence
  Synthetic oligonucleotide; TTA chr11 5333424 5333445 5333429 5333424 -
caatcaatatgtcaaactctgt

SEQ ID NO: 124858 - DNA, 22 bp, Artificial Sequence
  Synthetic oligonucleotide; CTC chr11 5333405 5333426 5333410 5333405 -
tgtcattgcttccagggccatt

SEQ ID NO: 124859 - DNA, 22 bp, Artificial Sequence
  Synthetic oligonucleotide; CTG chr11 5333403 5333424 5333408 5333403 -
tcattgcttccagggccattgg

SEQ ID NO: 124860 - DNA, 22 bp, Artificial Sequence
  Synthetic oligonucleotide; TTG chr11 5333397 5333418 5333402 5333397 -
cttccagggccattggtgtgtt

SEQ ID NO: 124861 - DNA, 22 bp, Artificial Sequence
  Synthetic oligonucleotide; CTT chr11 5333394 5333415 5333399 5333394 -
ccagggccattggtgtgttaat

SEQ ID NO: 124862 - DNA, 22 bp, Artificial Sequence
  Synthetic oligonucleotide; TTC chr11 5333393 5333414 5333398 5333393 -
cagggccattggtgtgttaata

SEQ ID NO: 124863 - DNA, 22 bp, Artificial Sequence
  Synthetic oligonucleotide; TTG chr11 5333382 5333403 5333387 5333382 -
gtgtgttaatacaacacttagt

SEQ ID NO: 124864 - DNA, 22 bp, Artificial Sequence
  Synthetic oligonucleotide; TTA chr11 5333374 5333395 5333379 5333374 -
atacaacacttagtaaagtaag

SEQ ID NO: 124865 - DNA, 22 bp, Artificial Sequence
  Synthetic oligonucleotide; CTT chr11 5333363 5333384 5333368 5333363 -
agtaaagtaagcaatgttagtg

SEQ ID NO: 124866 - DNA, 22 bp, Artificial Sequence
  Synthetic oligonucleotide; TTA chr11 5333362 5333383 5333367 5333362 -
gtaaagtaagcaatgttagtgt

SEQ ID NO: 124867 - DNA, 22 bp, Artificial Sequence
  Synthetic oligonucleotide; TTA chr11 5333344 5333365 5333349 5333344 -
gtgttggagtgggagtagaacc

SEQ ID NO: 124868 - DNA, 22 bp, Artificial Sequence
  Synthetic oligonucleotide; TTG chr11 5333338 5333359 5333343 5333338 -
gagtgggagtagaaccgtgttt

SEQ ID NO: 124869 - DNA, 22 bp, Artificial Sequence
  Synthetic oligonucleotide; TTT chr11 5333316 5333337 5333321 5333316 -
tttactacaatgagttagagcc

SEQ ID NO: 124870 - DNA, 22 bp, Artificial Sequence
  Synthetic oligonucleotide; TTT chr11 5333315 5333336 5333320 5333315 -
ttactacaatgagttagagcca

SEQ ID NO: 124871 - DNA, 22 bp, Artificial Sequence
  Synthetic oligonucleotide; TTT chr11 5333314 5333335 5333319 5333314 -
tactacaatgagttagagccac

SEQ ID NO: 124872 - DNA, 22 bp, Artificial Sequence
  Synthetic oligonucleotide; TTT chr11 5333313 5333334 5333318 5333313 -
actacaatgagttagagccact

SEQ ID NO: 124873 - DNA, 22 bp, Artificial Sequence
  Synthetic oligonucleotide; TTA chr11 5333312 5333333 5333317 5333312 -
ctacaatgagttagagccacta

SEQ ID NO: 124874 - DNA, 22 bp, Artificial Sequence
  Synthetic oligonucleotide; CTA chr11 5333309 5333330 5333314 5333309 -
caatgagttagagccactaggt

SEQ ID NO: 124875 - DNA, 22 bp, Artificial Sequence
  Synthetic oligonucleotide; TTA chr11 5333299 5333320 5333304 5333299 -
gagccactaggtctgagagact

SEQ ID NO: 124876 - DNA, 22 bp, Artificial Sequence
  Synthetic oligonucleotide; CTA chr11 5333290 5333311 5333295 5333290 -
ggtctgagagactagtaaaaga

SEQ ID NO: 124877 - DNA, 22 bp, Artificial Sequence
  Synthetic oligonucleotide; CTG chr11 5333284 5333305 5333289 5333284 -
agagactagtaaaagaatgtaa

SEQ ID NO: 124878 - DNA, 22 bp, Artificial Sequence
  Synthetic oligonucleotide; CTA chr11 5333276 5333297 5333281 5333276 -
gtaaaagaatgtaaacagtaaa

SEQ ID NO: 124879 - DNA, 22 bp, Artificial Sequence
  Synthetic oligonucleotide; TTT chr11 5333249 5333270 5333254 5333249 -
tgtgctaagttttatgctaaag

SEQ ID NO: 124880 - DNA, 22 bp, Artificial Sequence
  Synthetic oligonucleotide; TTT chr11 5333248 5333269 5333253 5333248 -
gtgctaagttttatgctaaagt

SEQ ID NO: 124881 - DNA, 22 bp, Artificial Sequence
  Synthetic oligonucleotide; TTG chr11 5333247 5333268 5333252 5333247 -
tgctaagttttatgctaaagtc

SEQ ID NO: 124882 - DNA, 22 bp, Artificial Sequence
  Synthetic oligonucleotide; CTA chr11 5333242 5333263 5333247 5333242 -
agttttatgctaaagtctgggt

SEQ ID NO: 124883 - DNA, 22 bp, Artificial Sequence
  Synthetic oligonucleotide; TTT chr11 5333237 5333258 5333242 5333237 -
tatgctaaagtctgggtgatgc

SEQ ID NO: 124884 - DNA, 22 bp, Artificial Sequence
  Synthetic oligonucleotide; TTT chr11 5333236 5333257 5333241 5333236 -
atgctaaagtctgggtgatgca

SEQ ID NO: 124885 - DNA, 22 bp, Artificial Sequence
  Synthetic oligonucleotide; TTA chr11 5333235 5333256 5333240 5333235 -
tgctaaagtctgggtgatgcaa

SEQ ID NO: 124886 - DNA, 22 bp, Artificial Sequence
  Synthetic oligonucleotide; CTA chr11 5333230 5333251 5333235 5333230 -
aagtctgggtgatgcaaaagag

SEQ ID NO: 124887 - DNA, 22 bp, Artificial Sequence
  Synthetic oligonucleotide; CTG chr11 5333223 5333244 5333228 5333223 -
ggtgatgcaaaagagacatctg

SEQ ID NO: 124888 - DNA, 22 bp, Artificial Sequence
  Synthetic oligonucleotide; CTG chr11 5333201 5333222 5333206 5333201 -
gggtttagttagagagggcaaa

SEQ ID NO: 124889 - DNA, 22 bp, Artificial Sequence
  Synthetic oligonucleotide; TTT chr11 5333195 5333216 5333200 5333195 -
agttagagagggcaaaataaga

SEQ ID NO: 124890 - DNA, 22 bp, Artificial Sequence
  Synthetic oligonucleotide; TTA chr11 5333194 5333215 5333199 5333194 -
gttagagagggcaaaataagag

SEQ ID NO: 124891 - DNA, 22 bp, Artificial Sequence
  Synthetic oligonucleotide; TTA chr11 5333190 5333211 5333195 5333190 -
gagagggcaaaataagagacaa

SEQ ID NO: 124892 - DNA, 22 bp, Artificial Sequence
  Synthetic oligonucleotide; CTG chr11 5333085 5333106 5333090 5333085 -
caccctatgtacctgagcagat

SEQ ID NO: 124893 - DNA, 22 bp, Artificial Sequence
  Synthetic oligonucleotide; CTA chr11 5333078 5333099 5333083 5333078 -
tgtacctgagcagatggtgcag

SEQ ID NO: 124894 - DNA, 22 bp, Artificial Sequence
  Synthetic oligonucleotide; CTG chr11 5333070 5333091 5333075 5333070 -
agcagatggtgcagaaatgatc

SEQ ID NO: 124895 - DNA, 22 bp, Artificial Sequence
  Synthetic oligonucleotide; CTG chr11 5333041 5333062 5333046 5333041 -
cccagccaagcccagcctaaat

SEQ ID NO: 124896 - DNA, 22 bp, Artificial Sequence
  Synthetic oligonucleotide; CTA chr11 5333022 5333043 5333027 5333022 -
aataagttgaaccatgcattag

SEQ ID NO: 124897 - DNA, 22 bp, Artificial Sequence
  Synthetic oligonucleotide; TTG chr11 5333013 5333034 5333018 5333013 -
aaccatgcattagagtgaaaaa

SEQ ID NO: 124898 - DNA, 22 bp, Artificial Sequence
  Synthetic oligonucleotide; TTA chr11 5333001 5333022 5333006 5333001 -
gagtgaaaaataaatgtttaat

SEQ ID NO: 124899 - DNA, 22 bp, Artificial Sequence
  Synthetic oligonucleotide; TTT chr11 5332982 5333003 5332987 5332982 -
aatgttgtcagccactgatgct

SEQ ID NO: 124900 - DNA, 22 bp, Artificial Sequence
  Synthetic oligonucleotide; TTA chr11 5332981 5333002 5332986 5332981 -
atgttgtcagccactgatgcta

SEQ ID NO: 124901 - DNA, 22 bp, Artificial Sequence
  Synthetic oligonucleotide; TTG chr11 5332975 5332996 5332980 5332975 -
tcagccactgatgctatacagg

SEQ ID NO: 124902 - DNA, 22 bp, Artificial Sequence
  Synthetic oligonucleotide; CTG chr11 5332965 5332986 5332970 5332965 -
atgctatacagggctttgtgat

SEQ ID NO: 124903 - DNA, 22 bp, Artificial Sequence
  Synthetic oligonucleotide; CTA chr11 5332959 5332980 5332964 5332959 -
tacagggctttgtgatgtgaca

SEQ ID NO: 124904 - DNA, 22 bp, Artificial Sequence
  Synthetic oligonucleotide; CTT chr11 5332949 5332970 5332954 5332949 -
tgtgatgtgacaattctgtgat

SEQ ID NO: 124905 - DNA, 22 bp, Artificial Sequence
  Synthetic oligonucleotide; TTT chr11 5332948 5332969 5332953 5332948 -
gtgatgtgacaattctgtgata

SEQ ID NO: 124906 - DNA, 22 bp, Artificial Sequence
  Synthetic oligonucleotide; TTG chr11 5332947 5332968 5332952 5332947 -
tgatgtgacaattctgtgataa

SEQ ID NO: 124907 - DNA, 22 bp, Artificial Sequence
  Synthetic oligonucleotide; TTC chr11 5332933 5332954 5332938 5332933 -
tgtgataatagataaatgatac

SEQ ID NO: 124908 - DNA, 22 bp, Artificial Sequence
  Synthetic oligonucleotide; CTG chr11 5332931 5332952 5332936 5332931 -
tgataatagataaatgatacaa

SEQ ID NO: 124909 - DNA, 22 bp, Artificial Sequence
  Synthetic oligonucleotide; TTT chr11 5332903 5332924 5332908 5332903 -
acataaaccctgtaaatattag

SEQ ID NO: 124910 - DNA, 22 bp, Artificial Sequence
  Synthetic oligonucleotide; TTA chr11 5332902 5332923 5332907 5332902 -
cataaaccctgtaaatattagt

SEQ ID NO: 124911 - DNA, 22 bp, Artificial Sequence
  Synthetic oligonucleotide; CTG chr11 5332891 5332912 5332896 5332891 -
taaatattagtttattatagaa

SEQ ID NO: 124912 - DNA, 22 bp, Artificial Sequence
  Synthetic oligonucleotide; TTA chr11 5332882 5332903 5332887 5332882 -
gtttattatagaactctataaa

SEQ ID NO: 124913 - DNA, 22 bp, Artificial Sequence
  Synthetic oligonucleotide; TTT chr11 5332878 5332899 5332883 5332878 -
attatagaactctataaactct

SEQ ID NO: 124914 - DNA, 22 bp, Artificial Sequence
  Synthetic oligonucleotide; TTA chr11 5332877 5332898 5332882 5332877 -
ttatagaactctataaactctt

SEQ ID NO: 124915 - DNA, 22 bp, Artificial Sequence
  Synthetic oligonucleotide; TTA chr11 5332874 5332895 5332879 5332874 -
tagaactctataaactcttaat

SEQ ID NO: 124916 - DNA, 22 bp, Artificial Sequence
  Synthetic oligonucleotide; CTC chr11 5332866 5332887 5332871 5332866 -
tataaactcttaataaaatatg

SEQ ID NO: 124917 - DNA, 22 bp, Artificial Sequence
  Synthetic oligonucleotide; CTA chr11 5332864 5332885 5332869 5332864 -
taaactcttaataaaatatgga

SEQ ID NO: 124918 - DNA, 22 bp, Artificial Sequence
  Synthetic oligonucleotide; CTC chr11 5332857 5332878 5332862 5332857 -
ttaataaaatatggataatagt

SEQ ID NO: 124919 - DNA, 22 bp, Artificial Sequence
  Synthetic oligonucleotide; CTT chr11 5332855 5332876 5332860 5332855 -
aataaaatatggataatagtaa

SEQ ID NO: 124920 - DNA, 22 bp, Artificial Sequence
  Synthetic oligonucleotide; TTA chr11 5332854 5332875 5332859 5332854 -
ataaaatatggataatagtaat

SEQ ID NO: 124921 - DNA, 22 bp, Artificial Sequence
  Synthetic oligonucleotide; CTT chr11 5332828 5332849 5332833 5332828 -
tgcattagttttctattgttat

SEQ ID NO: 124922 - DNA, 22 bp, Artificial Sequence
  Synthetic oligonucleotide; TTT chr11 5332827 5332848 5332832 5332827 -
gcattagttttctattgttata

SEQ ID NO: 124923 - DNA, 22 bp, Artificial Sequence
  Synthetic oligonucleotide; TTG chr11 5332826 5332847 5332831 5332826 -
cattagttttctattgttatac

SEQ ID NO: 124924 - DNA, 22 bp, Artificial Sequence
  Synthetic oligonucleotide; TTA chr11 5332821 5332842 5332826 5332821 -
gttttctattgttatacataaa

SEQ ID NO: 124925 - DNA, 22 bp, Artificial Sequence
  Synthetic oligonucleotide; TTT chr11 5332817 5332838 5332822 5332817 -
tctattgttatacataaattac

SEQ ID NO: 124926 - DNA, 22 bp, Artificial Sequence
  Synthetic oligonucleotide; TTT chr11 5332816 5332837 5332821 5332816 -
ctattgttatacataaattact

SEQ ID NO: 124927 - DNA, 22 bp, Artificial Sequence
  Synthetic oligonucleotide; TTC chr11 5332815 5332836 5332820 5332815 -
tattgttatacataaattactg

SEQ ID NO: 124928 - DNA, 22 bp, Artificial Sequence
  Synthetic oligonucleotide; CTA chr11 5332813 5332834 5332818 5332813 -
ttgttatacataaattactgca

SEQ ID NO: 124929 - DNA, 22 bp, Artificial Sequence
  Synthetic oligonucleotide; TTG chr11 5332810 5332831 5332815 5332810 -
ttatacataaattactgcaact

SEQ ID NO: 124930 - DNA, 22 bp, Artificial Sequence
  Synthetic oligonucleotide; TTA chr11 5332807 5332828 5332812 5332807 -
tacataaattactgcaacttga

SEQ ID NO: 124931 - DNA, 22 bp, Artificial Sequence
  Synthetic oligonucleotide; TTA chr11 5332796 5332817 5332801 5332796 -
ctgcaacttgagctgcttcaaa

SEQ ID NO: 124932 - DNA, 22 bp, Artificial Sequence
  Synthetic oligonucleotide; CTG chr11 5332793 5332814 5332798 5332793 -
caacttgagctgcttcaaacat

SEQ ID NO: 124933 - DNA, 22 bp, Artificial Sequence
  Synthetic oligonucleotide; CTT chr11 5332787 5332808 5332792 5332787 -
gagctgcttcaaacattattag

SEQ ID NO: 124934 - DNA, 22 bp, Artificial Sequence
  Synthetic oligonucleotide; TTG chr11 5332786 5332807 5332791 5332786 -
agctgcttcaaacattattagt

SEQ ID NO: 124935 - DNA, 22 bp, Artificial Sequence
  Synthetic oligonucleotide; CTG chr11 5332781 5332802 5332786 5332781 -
cttcaaacattattagtttatt

SEQ ID NO: 124936 - DNA, 22 bp, Artificial Sequence
  Synthetic oligonucleotide; CTT chr11 5332778 5332799 5332783 5332778 -
caaacattattagtttattata

SEQ ID NO: 124937 - DNA, 22 bp, Artificial Sequence
  Synthetic oligonucleotide; TTC chr11 5332777 5332798 5332782 5332777 -
aaacattattagtttattatat

SEQ ID NO: 124938 - DNA, 22 bp, Artificial Sequence
  Synthetic oligonucleotide; TTA chr11 5332769 5332790 5332774 5332769 -
ttagtttattatatcacatttc

SEQ ID NO: 124939 - DNA, 22 bp, Artificial Sequence
  Synthetic oligonucleotide; TTA chr11 5332766 5332787 5332771 5332766 -
gtttattatatcacatttctat

SEQ ID NO: 124940 - DNA, 22 bp, Artificial Sequence
  Synthetic oligonucleotide; TTT chr11 5332762 5332783 5332767 5332762 -
attatatcacatttctataggt

SEQ ID NO: 124941 - DNA, 22 bp, Artificial Sequence
  Synthetic oligonucleotide; TTA chr11 5332761 5332782 5332766 5332761 -
ttatatcacatttctataggtc

SEQ ID NO: 124942 - DNA, 22 bp, Artificial Sequence
  Synthetic oligonucleotide; TTA chr11 5332758 5332779 5332763 5332758 -
tatcacatttctataggtctgc

SEQ ID NO: 124943 - DNA, 22 bp, Artificial Sequence
  Synthetic oligonucleotide; TTT chr11 5332748 5332769 5332753 5332748 -
ctataggtctgcactctcatag

SEQ ID NO: 124944 - DNA, 22 bp, Artificial Sequence
  Synthetic oligonucleotide; TTC chr11 5332747 5332768 5332752 5332747 -
tataggtctgcactctcatagg

SEQ ID NO: 124945 - DNA, 22 bp, Artificial Sequence
  Synthetic oligonucleotide; CTA chr11 5332745 5332766 5332750 5332745 -
taggtctgcactctcataggct

SEQ ID NO: 124946 - DNA, 22 bp, Artificial Sequence
  Synthetic oligonucleotide; CTG chr11 5332737 5332758 5332742 5332737 -
cactctcataggcttaactgag

SEQ ID NO: 124947 - DNA, 22 bp, Artificial Sequence
  Synthetic oligonucleotide; CTC chr11 5332732 5332753 5332737 5332732 -
tcataggcttaactgagttctc

SEQ ID NO: 124948 - DNA, 22 bp, Artificial Sequence
  Synthetic oligonucleotide; CTC chr11 5332730 5332751 5332735 5332730 -
ataggcttaactgagttctctg

SEQ ID NO: 124949 - DNA, 22 bp, Artificial Sequence
  Synthetic oligonucleotide; CTT chr11 5332722 5332743 5332727 5332722 -
aactgagttctctgcttagggt

SEQ ID NO: 124950 - DNA, 22 bp, Artificial Sequence
  Synthetic oligonucleotide; TTA chr11 5332721 5332742 5332726 5332721 -
actgagttctctgcttagggta

SEQ ID NO: 124951 - DNA, 22 bp, Artificial Sequence
  Synthetic oligonucleotide; CTG chr11 5332717 5332738 5332722 5332717 -
agttctctgcttagggtatcat

SEQ ID NO: 124952 - DNA, 22 bp, Artificial Sequence
  Synthetic oligonucleotide; TTC chr11 5332712 5332733 5332717 5332712 -
tctgcttagggtatcataaggt

SEQ ID NO: 124953 - DNA, 22 bp, Artificial Sequence
  Synthetic oligonucleotide; CTC chr11 5332710 5332731 5332715 5332710 -
tgcttagggtatcataaggtca

SEQ ID NO: 124954 - DNA, 22 bp, Artificial Sequence
  Synthetic oligonucleotide; CTG chr11 5332708 5332729 5332713 5332708 -
cttagggtatcataaggtcaaa

SEQ ID NO: 124955 - DNA, 22 bp, Artificial Sequence
  Synthetic oligonucleotide; CTT chr11 5332705 5332726 5332710 5332705 -
agggtatcataaggtcaaattc

SEQ ID NO: 124956 - DNA, 22 bp, Artificial Sequence
  Synthetic oligonucleotide; TTA chr11 5332704 5332725 5332709 5332704 -
gggtatcataaggtcaaattca

SEQ ID NO: 124957 - DNA, 22 bp, Artificial Sequence
  Synthetic oligonucleotide; TTC chr11 5332683 5332704 5332688 5332683 -
aaaatatcgggagggctgggct

SEQ ID NO: 124958 - DNA, 22 bp, Artificial Sequence
  Synthetic oligonucleotide; CTG chr11 5332665 5332686 5332670 5332665 -
ggctcttatccaaaggctctgg

SEQ ID NO: 124959 - DNA, 22 bp, Artificial Sequence
  Synthetic oligonucleotide; CTC chr11 5332660 5332681 5332665 5332660 -
ttatccaaaggctctggggaag

SEQ ID NO: 124960 - DNA, 22 bp, Artificial Sequence
  Synthetic oligonucleotide; CTT chr11 5332658 5332679 5332663 5332658 -
atccaaaggctctggggaagaa

SEQ ID NO: 124961 - DNA, 22 bp, Artificial Sequence
  Synthetic oligonucleotide; TTA chr11 5332657 5332678 5332662 5332657 -
tccaaaggctctggggaagaat

SEQ ID NO: 124962 - DNA, 22 bp, Artificial Sequence
  Synthetic oligonucleotide; CTC chr11 5332646 5332667 5332651 5332646 -
tggggaagaattcgcttccacg

SEQ ID NO: 124963 - DNA, 22 bp, Artificial Sequence
  Synthetic oligonucleotide; CTG chr11 5332644 5332665 5332649 5332644 -
gggaagaattcgcttccacgtt

SEQ ID NO: 124964 - DNA, 22 bp, Artificial Sequence
  Synthetic oligonucleotide; TTC chr11 5332633 5332654 5332638 5332633 -
gcttccacgttcattcagattg

SEQ ID NO: 124965 - DNA, 22 bp, Artificial Sequence
  Synthetic oligonucleotide; CTT chr11 5332629 5332650 5332634 5332629 -
ccacgttcattcagattgtagt

SEQ ID NO: 124966 - DNA, 22 bp, Artificial Sequence
  Synthetic oligonucleotide; TTC chr11 5332628 5332649 5332633 5332628 -
cacgttcattcagattgtagtc

SEQ ID NO: 124967 - DNA, 22 bp, Artificial Sequence
  Synthetic oligonucleotide; TTC chr11 5332621 5332642 5332626 5332621 -
attcagattgtagtcagagctc

SEQ ID NO: 124968 - DNA, 22 bp, Artificial Sequence
  Synthetic oligonucleotide; TTC chr11 5332617 5332638 5332622 5332617 -
agattgtagtcagagctcagtt

SEQ ID NO: 124969 - DNA, 22 bp, Artificial Sequence
  Synthetic oligonucleotide; TTG chr11 5332611 5332632 5332616 5332611 -
tagtcagagctcagtttctttt

SEQ ID NO: 124970 - DNA, 22 bp, Artificial Sequence
  Synthetic oligonucleotide; CTC chr11 5332599 5332620 5332604 5332599 -
agtttctttttttttctttttt

SEQ ID NO: 124971 - DNA, 22 bp, Artificial Sequence
  Synthetic oligonucleotide; TTT chr11 5332594 5332615 5332599 5332594 -
ctttttttttcttttttttttt

SEQ ID NO: 124972 - DNA, 22 bp, Artificial Sequence
  Synthetic oligonucleotide; TTC chr11 5332593 5332614 5332598 5332593 -
tttttttttctttttttttttt

SEQ ID NO: 124973 - DNA, 22 bp, Artificial Sequence
  Synthetic oligonucleotide; CTT chr11 5332591 5332612 5332596 5332591 -
tttttttctttttttttttttt

SEQ ID NO: 124974 - DNA, 22 bp, Artificial Sequence
  Synthetic oligonucleotide; TTT chr11 5332590 5332611 5332595 5332590 -
ttttttcttttttttttttttt

SEQ ID NO: 124975 - DNA, 22 bp, Artificial Sequence
  Synthetic oligonucleotide; TTT chr11 5332589 5332610 5332594 5332589 -
tttttctttttttttttttttt

SEQ ID NO: 124976 - DNA, 22 bp, Artificial Sequence
  Synthetic oligonucleotide; TTT chr11 5332588 5332609 5332593 5332588 -
ttttcttttttttttttttttt

SEQ ID NO: 124977 - DNA, 22 bp, Artificial Sequence
  Synthetic oligonucleotide; TTT chr11 5332587 5332608 5332592 5332587 -
tttctttttttttttttttttt

SEQ ID NO: 124978 - DNA, 22 bp, Artificial Sequence
  Synthetic oligonucleotide; TTT chr11 5332586 5332607 5332591 5332586 -
ttcttttttttttttttttttt

SEQ ID NO: 124979 - DNA, 22 bp, Artificial Sequence
  Synthetic oligonucleotide; TTT chr11 5332585 5332606 5332590 5332585 -
tctttttttttttttttttttt

SEQ ID NO: 124980 - DNA, 22 bp, Artificial Sequence
  Synthetic oligonucleotide; TTT chr11 5332584 5332605 5332589 5332584 -
cttttttttttttttttttttg

SEQ ID NO: 124981 - DNA, 22 bp, Artificial Sequence
  Synthetic oligonucleotide; TTC chr11 5332583 5332604 5332588 5332583 -
ttttttttttttttttttttga

SEQ ID NO: 124982 - DNA, 22 bp, Artificial Sequence
  Synthetic oligonucleotide; CTT chr11 5332581 5332602 5332586 5332581 -
ttttttttttttttttttgaga

SEQ ID NO: 124983 - DNA, 22 bp, Artificial Sequence
  Synthetic oligonucleotide; TTT chr11 5332580 5332601 5332585 5332580 -
tttttttttttttttttgagat

SEQ ID NO: 124984 - DNA, 22 bp, Artificial Sequence
  Synthetic oligonucleotide; TTT chr11 5332579 5332600 5332584 5332579 -
ttttttttttttttttgagatg

SEQ ID NO: 124985 - DNA, 22 bp, Artificial Sequence
  Synthetic oligonucleotide; TTT chr11 5332578 5332599 5332583 5332578 -
tttttttttttttttgagatgg

SEQ ID NO: 124986 - DNA, 22 bp, Artificial Sequence
  Synthetic oligonucleotide; TTT chr11 5332577 5332598 5332582 5332577 -
ttttttttttttttgagatgga

SEQ ID NO: 124987 - DNA, 22 bp, Artificial Sequence
  Synthetic oligonucleotide; TTT chr11 5332576 5332597 5332581 5332576 -
tttttttttttttgagatggag

SEQ ID NO: 124988 - DNA, 22 bp, Artificial Sequence
  Synthetic oligonucleotide; TTT chr11 5332575 5332596 5332580 5332575 -
ttttttttttttgagatggagt

SEQ ID NO: 124989 - DNA, 22 bp, Artificial Sequence
  Synthetic oligonucleotide; TTT chr11 5332574 5332595 5332579 5332574 -
tttttttttttgagatggagtc

SEQ ID NO: 124990 - DNA, 22 bp, Artificial Sequence
  Synthetic oligonucleotide; TTT chr11 5332573 5332594 5332578 5332573 -
ttttttttttgagatggagtct

SEQ ID NO: 124991 - DNA, 22 bp, Artificial Sequence
  Synthetic oligonucleotide; TTT chr11 5332572 5332593 5332577 5332572 -
tttttttttgagatggagtctc

SEQ ID NO: 124992 - DNA, 22 bp, Artificial Sequence
  Synthetic oligonucleotide; TTT chr11 5332571 5332592 5332576 5332571 -
ttttttttgagatggagtctcg

SEQ ID NO: 124993 - DNA, 22 bp, Artificial Sequence
  Synthetic oligonucleotide; TTT chr11 5332570 5332591 5332575 5332570 -
tttttttgagatggagtctcgc

SEQ ID NO: 124994 - DNA, 22 bp, Artificial Sequence
  Synthetic oligonucleotide; TTT chr11 5332569 5332590 5332574 5332569 -
ttttttgagatggagtctcgct

SEQ ID NO: 124995 - DNA, 22 bp, Artificial Sequence
  Synthetic oligonucleotide; TTT chr11 5332568 5332589 5332573 5332568 -
tttttgagatggagtctcgctc

SEQ ID NO: 124996 - DNA, 22 bp, Artificial Sequence
  Synthetic oligonucleotide; TTT chr11 5332567 5332588 5332572 5332567 -
ttttgagatggagtctcgctct

SEQ ID NO: 124997 - DNA, 22 bp, Artificial Sequence
  Synthetic oligonucleotide; TTT chr11 5332566 5332587 5332571 5332566 -
tttgagatggagtctcgctctg

SEQ ID NO: 124998 - DNA, 22 bp, Artificial Sequence
  Synthetic oligonucleotide; TTT chr11 5332565 5332586 5332570 5332565 -
ttgagatggagtctcgctctgt

SEQ ID NO: 124999 - DNA, 22 bp, Artificial Sequence
  Synthetic oligonucleotide; TTT chr11 5332564 5332585 5332569 5332564 -
tgagatggagtctcgctctgtc

SEQ ID NO: 125000 - DNA, 22 bp, Artificial Sequence
  Synthetic oligonucleotide; TTT chr11 5332563 5332584 5332568 5332563 -
gagatggagtctcgctctgtca

SEQ ID NO: 125001 - DNA, 22 bp, Artificial Sequence
  Synthetic oligonucleotide; TTG chr11 5332562 5332583 5332567 5332562 -
agatggagtctcgctctgtcac

SEQ ID NO: 125002 - DNA, 22 bp, Artificial Sequence
  Synthetic oligonucleotide; CTC chr11 5332550 5332571 5332555 5332550 -
gctctgtcacccagcctggagt

SEQ ID NO: 125003 - DNA, 22 bp, Artificial Sequence
  Synthetic oligonucleotide; CTC chr11 5332546 5332567 5332551 5332546 -
tgtcacccagcctggagtgcag

SEQ ID NO: 125004 - DNA, 22 bp, Artificial Sequence
  Synthetic oligonucleotide; CTG chr11 5332544 5332565 5332549 5332544 -
tcacccagcctggagtgcagtg

SEQ ID NO: 125005 - DNA, 22 bp, Artificial Sequence
  Synthetic oligonucleotide; CTG chr11 5332532 5332553 5332537 5332532 -
gagtgcagtggcacaatctctt

SEQ ID NO: 125006 - DNA, 22 bp, Artificial Sequence
  Synthetic oligonucleotide; CTC chr11 5332512 5332533 5332517 5332512 -
ttgctccctgcaacctgtgcct

SEQ ID NO: 125007 - DNA, 22 bp, Artificial Sequence
  Synthetic oligonucleotide; CTT chr11 5332510 5332531 5332515 5332510 -
gctccctgcaacctgtgcctcc

SEQ ID NO: 125008 - DNA, 22 bp, Artificial Sequence
  Synthetic oligonucleotide; TTG chr11 5332509 5332530 5332514 5332509 -
ctccctgcaacctgtgcctccc

SEQ ID NO: 125009 - DNA, 22 bp, Artificial Sequence
  Synthetic oligonucleotide; CTC chr11 5332506 5332527 5332511 5332506 -
cctgcaacctgtgcctcccggg

SEQ ID NO: 125010 - DNA, 22 bp, Artificial Sequence
  Synthetic oligonucleotide; CTG chr11 5332502 5332523 5332507 5332502 -
caacctgtgcctcccgggttca

SEQ ID NO: 125011 - DNA, 22 bp, Artificial Sequence
  Synthetic oligonucleotide; CTG chr11 5332495 5332516 5332500 5332495 -
tgcctcccgggttcaagcaatt

SEQ ID NO: 125012 - DNA, 22 bp, Artificial Sequence
  Synthetic oligonucleotide; CTC chr11 5332489 5332510 5332494 5332489 -
ccgggttcaagcaattctcctg

SEQ ID NO: 125013 - DNA, 22 bp, Artificial Sequence
  Synthetic oligonucleotide; TTC chr11 5332481 5332502 5332486 5332481 -
aagcaattctcctgcctcagtt

SEQ ID NO: 125014 - DNA, 22 bp, Artificial Sequence
  Synthetic oligonucleotide; TTC chr11 5332472 5332493 5332477 5332472 -
tcctgcctcagtttcccaagta

SEQ ID NO: 125015 - DNA, 22 bp, Artificial Sequence
  Synthetic oligonucleotide; CTC chr11 5332470 5332491 5332475 5332470 -
ctgcctcagtttcccaagtagc

SEQ ID NO: 125016 - DNA, 22 bp, Artificial Sequence
  Synthetic oligonucleotide; CTG chr11 5332467 5332488 5332472 5332467 -
cctcagtttcccaagtagctgg

SEQ ID NO: 125017 - DNA, 22 bp, Artificial Sequence
  Synthetic oligonucleotide; CTC chr11 5332463 5332484 5332468 5332463 -
agtttcccaagtagctggaact

SEQ ID NO: 125018 - DNA, 22 bp, Artificial Sequence
  Synthetic oligonucleotide; TTT chr11 5332458 5332479 5332463 5332458 -
cccaagtagctggaactacagg

SEQ ID NO: 125019 - DNA, 22 bp, Artificial Sequence
  Synthetic oligonucleotide; TTC chr11 5332457 5332478 5332462 5332457 -
ccaagtagctggaactacaggc

SEQ ID NO: 125020 - DNA, 22 bp, Artificial Sequence
  Synthetic oligonucleotide; CTG chr11 5332446 5332467 5332451 5332446 -
gaactacaggcaactgcaacca

SEQ ID NO: 125021 - DNA, 22 bp, Artificial Sequence
  Synthetic oligonucleotide; CTA chr11 5332440 5332461 5332445 5332440 -
caggcaactgcaaccacacctg

SEQ ID NO: 125022 - DNA, 22 bp, Artificial Sequence
  Synthetic oligonucleotide; CTG chr11 5332430 5332451 5332435 5332430 -
caaccacacctggctaattttt

SEQ ID NO: 125023 - DNA, 22 bp, Artificial Sequence
  Synthetic oligonucleotide; CTG chr11 5332418 5332439 5332423 5332418 -
gctaatttttatattttttggt

SEQ ID NO: 125024 - DNA, 22 bp, Artificial Sequence
  Synthetic oligonucleotide; CTA chr11 5332414 5332435 5332419 5332414 -
atttttatattttttggtaggg

SEQ ID NO: 125025 - DNA, 22 bp, Artificial Sequence
  Synthetic oligonucleotide; TTT chr11 5332410 5332431 5332415 5332410 -
ttatattttttggtagggatgg

SEQ ID NO: 125026 - DNA, 22 bp, Artificial Sequence
  Synthetic oligonucleotide; TTT chr11 5332409 5332430 5332414 5332409 -
tatattttttggtagggatgga

SEQ ID NO: 125027 - DNA, 22 bp, Artificial Sequence
  Synthetic oligonucleotide; TTT chr11 5332408 5332429 5332413 5332408 -
atattttttggtagggatggaa

SEQ ID NO: 125028 - DNA, 22 bp, Artificial Sequence
  Synthetic oligonucleotide; TTA chr11 5332407 5332428 5332412 5332407 -
tattttttggtagggatggaat

SEQ ID NO: 125029 - DNA, 22 bp, Artificial Sequence
  Synthetic oligonucleotide; TTT chr11 5332402 5332423 5332407 5332402 -
tttggtagggatggaatttcac

SEQ ID NO: 125030 - DNA, 22 bp, Artificial Sequence
  Synthetic oligonucleotide; TTT chr11 5332401 5332422 5332406 5332401 -
ttggtagggatggaatttcacc

SEQ ID NO: 125031 - DNA, 22 bp, Artificial Sequence
  Synthetic oligonucleotide; TTT chr11 5332400 5332421 5332405 5332400 -
tggtagggatggaatttcacca

SEQ ID NO: 125032 - DNA, 22 bp, Artificial Sequence
  Synthetic oligonucleotide; TTT chr11 5332399 5332420 5332404 5332399 -
ggtagggatggaatttcaccat

SEQ ID NO: 125033 - DNA, 22 bp, Artificial Sequence
  Synthetic oligonucleotide; TTG chr11 5332398 5332419 5332403 5332398 -
gtagggatggaatttcaccatg

SEQ ID NO: 125034 - DNA, 22 bp, Artificial Sequence
  Synthetic oligonucleotide; TTT chr11 5332383 5332404 5332388 5332383 -
caccatgttggccaggctggtc

SEQ ID NO: 125035 - DNA, 22 bp, Artificial Sequence
  Synthetic oligonucleotide; TTC chr11 5332382 5332403 5332387 5332382 -
accatgttggccaggctggtct

SEQ ID NO: 125036 - DNA, 22 bp, Artificial Sequence
  Synthetic oligonucleotide; TTG chr11 5332373 5332394 5332378 5332373 -
gccaggctggtctggaactcct

SEQ ID NO: 125037 - DNA, 22 bp, Artificial Sequence
  Synthetic oligonucleotide; CTG chr11 5332364 5332385 5332369 5332364 -
gtctggaactcctgacctcagg

SEQ ID NO: 125038 - DNA, 22 bp, Artificial Sequence
  Synthetic oligonucleotide; CTG chr11 5332359 5332380 5332364 5332359 -
gaactcctgacctcaggtgatc

SEQ ID NO: 125039 - DNA, 22 bp, Artificial Sequence
  Synthetic oligonucleotide; CTC chr11 5332353 5332374 5332358 5332353 -
ctgacctcaggtgatccgcccg

SEQ ID NO: 125040 - DNA, 22 bp, Artificial Sequence
  Synthetic oligonucleotide; CTG chr11 5332350 5332371 5332355 5332350 -
acctcaggtgatccgcccgcct

SEQ ID NO: 125041 - DNA, 22 bp, Artificial Sequence
  Synthetic oligonucleotide; CTC chr11 5332345 5332366 5332350 5332345 -
aggtgatccgcccgccttggcc

SEQ ID NO: 125042 - DNA, 22 bp, Artificial Sequence
  Synthetic oligonucleotide; CTT chr11 5332327 5332348 5332332 5332327 -
ggcctcccaaagtgctgggatt

SEQ ID NO: 125043 - DNA, 22 bp, Artificial Sequence
  Synthetic oligonucleotide; TTG chr11 5332326 5332347 5332331 5332326 -
gcctcccaaagtgctgggatta

SEQ ID NO: 125044 - DNA, 22 bp, Artificial Sequence
  Synthetic oligonucleotide; CTC chr11 5332321 5332342 5332326 5332321 -
ccaaagtgctgggattacaggc

SEQ ID NO: 125045 - DNA, 22 bp, Artificial Sequence
  Synthetic oligonucleotide; CTG chr11 5332310 5332331 5332315 5332310 -
ggattacaggcttgaatgagcc

SEQ ID NO: 125046 - DNA, 22 bp, Artificial Sequence
  Synthetic oligonucleotide; TTA chr11 5332304 5332325 5332309 5332304 -
caggcttgaatgagccattgca

SEQ ID NO: 125047 - DNA, 22 bp, Artificial Sequence
  Synthetic oligonucleotide; CTT chr11 5332297 5332318 5332302 5332297 -
gaatgagccattgcacccggct

SEQ ID NO: 125048 - DNA, 22 bp, Artificial Sequence
  Synthetic oligonucleotide; TTG chr11 5332296 5332317 5332301 5332296 -
aatgagccattgcacccggctg

SEQ ID NO: 125049 - DNA, 22 bp, Artificial Sequence
  Synthetic oligonucleotide; TTG chr11 5332284 5332305 5332289 5332284 -
cacccggctgtcagagttcagt

SEQ ID NO: 125050 - DNA, 22 bp, Artificial Sequence
  Synthetic oligonucleotide; CTG chr11 5332274 5332295 5332279 5332274 -
tcagagttcagtttcctactgc

SEQ ID NO: 125051 - DNA, 22 bp, Artificial Sequence
  Synthetic oligonucleotide; TTC chr11 5332265 5332286 5332270 5332265 -
agtttcctactgctgaactctg

SEQ ID NO: 125052 - DNA, 22 bp, Artificial Sequence
  Synthetic oligonucleotide; TTT chr11 5332260 5332281 5332265 5332260 -
cctactgctgaactctgaagtc

SEQ ID NO: 125053 - DNA, 22 bp, Artificial Sequence
  Synthetic oligonucleotide; TTC chr11 5332259 5332280 5332264 5332259 -
ctactgctgaactctgaagtcc

SEQ ID NO: 125054 - DNA, 22 bp, Artificial Sequence
  Synthetic oligonucleotide; CTA chr11 5332256 5332277 5332261 5332256 -
ctgctgaactctgaagtccctg

SEQ ID NO: 125055 - DNA, 22 bp, Artificial Sequence
  Synthetic oligonucleotide; CTG chr11 5332253 5332274 5332258 5332253 -
ctgaactctgaagtccctgttt

SEQ ID NO: 125056 - DNA, 22 bp, Artificial Sequence
  Synthetic oligonucleotide; CTG chr11 5332250 5332271 5332255 5332250 -
aactctgaagtccctgtttgtt

SEQ ID NO: 125057 - DNA, 22 bp, Artificial Sequence
  Synthetic oligonucleotide; CTC chr11 5332245 5332266 5332250 5332245 -
tgaagtccctgtttgtttttgt

SEQ ID NO: 125058 - DNA, 22 bp, Artificial Sequence
  Synthetic oligonucleotide; CTG chr11 5332243 5332264 5332248 5332243 -
aagtccctgtttgtttttgttt

SEQ ID NO: 125059 - DNA, 22 bp, Artificial Sequence
  Synthetic oligonucleotide; CTG chr11 5332234 5332255 5332239 5332234 -
tttgtttttgtttttgtttttt

SEQ ID NO: 125060 - DNA, 22 bp, Artificial Sequence
  Synthetic oligonucleotide; TTT chr11 5332231 5332252 5332236 5332231 -
gtttttgtttttgttttttgtt

SEQ ID NO: 125061 - DNA, 22 bp, Artificial Sequence
  Synthetic oligonucleotide; TTG chr11 5332230 5332251 5332235 5332230 -
tttttgtttttgttttttgttt

SEQ ID NO: 125062 - DNA, 22 bp, Artificial Sequence
  Synthetic oligonucleotide; TTT chr11 5332227 5332248 5332232 5332227 -
ttgtttttgttttttgtttgtt

SEQ ID NO: 125063 - DNA, 22 bp, Artificial Sequence
  Synthetic oligonucleotide; TTT chr11 5332226 5332247 5332231 5332226 -
tgtttttgttttttgtttgttt

SEQ ID NO: 125064 - DNA, 22 bp, Artificial Sequence
  Synthetic oligonucleotide; TTT chr11 5332225 5332246 5332230 5332225 -
gtttttgttttttgtttgtttg

SEQ ID NO: 125065 - DNA, 22 bp, Artificial Sequence
  Synthetic oligonucleotide; TTG chr11 5332224 5332245 5332229 5332224 -
tttttgttttttgtttgtttgt

SEQ ID NO: 125066 - DNA, 22 bp, Artificial Sequence
  Synthetic oligonucleotide; TTT chr11 5332221 5332242 5332226 5332221 -
ttgttttttgtttgtttgtttg

SEQ ID NO: 125067 - DNA, 22 bp, Artificial Sequence
  Synthetic oligonucleotide; TTT chr11 5332220 5332241 5332225 5332220 -
tgttttttgtttgtttgtttgc

SEQ ID NO: 125068 - DNA, 22 bp, Artificial Sequence
  Synthetic oligonucleotide; TTT chr11 5332219 5332240 5332224 5332219 -
gttttttgtttgtttgtttgca

SEQ ID NO: 125069 - DNA, 22 bp, Artificial Sequence
  Synthetic oligonucleotide; TTG chr11 5332218 5332239 5332223 5332218 -
ttttttgtttgtttgtttgcag

SEQ ID NO: 125070 - DNA, 22 bp, Artificial Sequence
  Synthetic oligonucleotide; TTT chr11 5332215 5332236 5332220 5332215 -
tttgtttgtttgtttgcaggct

SEQ ID NO: 125071 - DNA, 22 bp, Artificial Sequence
  Synthetic oligonucleotide; TTT chr11 5332214 5332235 5332219 5332214 -
ttgtttgtttgtttgcaggctg

SEQ ID NO: 125072 - DNA, 22 bp, Artificial Sequence
  Synthetic oligonucleotide; TTT chr11 5332213 5332234 5332218 5332213 -
tgtttgtttgtttgcaggctgt

SEQ ID NO: 125073 - DNA, 22 bp, Artificial Sequence
  Synthetic oligonucleotide; TTT chr11 5332212 5332233 5332217 5332212 -
gtttgtttgtttgcaggctgtt

SEQ ID NO: 125074 - DNA, 22 bp, Artificial Sequence
  Synthetic oligonucleotide; TTG chr11 5332211 5332232 5332216 5332211 -
tttgtttgtttgcaggctgtta

SEQ ID NO: 125075 - DNA, 22 bp, Artificial Sequence
  Synthetic oligonucleotide; TTT chr11 5332208 5332229 5332213 5332208 -
gtttgtttgcaggctgttagct

SEQ ID NO: 125076 - DNA, 22 bp, Artificial Sequence
  Synthetic oligonucleotide; TTG chr11 5332207 5332228 5332212 5332207 -
tttgtttgcaggctgttagcta

SEQ ID NO: 125077 - DNA, 22 bp, Artificial Sequence
  Synthetic oligonucleotide; TTT chr11 5332204 5332225 5332209 5332204 -
gtttgcaggctgttagctagga

SEQ ID NO: 125078 - DNA, 22 bp, Artificial Sequence
  Synthetic oligonucleotide; TTG chr11 5332203 5332224 5332208 5332203 -
tttgcaggctgttagctaggat

SEQ ID NO: 125079 - DNA, 22 bp, Artificial Sequence
  Synthetic oligonucleotide; TTT chr11 5332200 5332221 5332205 5332200 -
gcaggctgttagctaggatgcc

SEQ ID NO: 125080 - DNA, 22 bp, Artificial Sequence
  Synthetic oligonucleotide; TTG chr11 5332199 5332220 5332204 5332199 -
caggctgttagctaggatgccc

SEQ ID NO: 125081 - DNA, 22 bp, Artificial Sequence
  Synthetic oligonucleotide; CTG chr11 5332192 5332213 5332197 5332192 -
ttagctaggatgcccgttctgt

SEQ ID NO: 125082 - DNA, 22 bp, Artificial Sequence
  Synthetic oligonucleotide; TTA chr11 5332189 5332210 5332194 5332189 -
gctaggatgcccgttctgtacc

SEQ ID NO: 125083 - DNA, 22 bp, Artificial Sequence
  Synthetic oligonucleotide; CTA chr11 5332185 5332206 5332190 5332185 -
ggatgcccgttctgtacctagg

SEQ ID NO: 125084 - DNA, 22 bp, Artificial Sequence
  Synthetic oligonucleotide; TTC chr11 5332173 5332194 5332178 5332173 -
tgtacctaggggcttcttgcat

SEQ ID NO: 125085 - DNA, 22 bp, Artificial Sequence
  Synthetic oligonucleotide; CTG chr11 5332171 5332192 5332176 5332171 -
tacctaggggcttcttgcattc

SEQ ID NO: 125086 - DNA, 22 bp, Artificial Sequence
  Synthetic oligonucleotide; CTA chr11 5332165 5332186 5332170 5332165 -
ggggcttcttgcattccttctt

SEQ ID NO: 125087 - DNA, 22 bp, Artificial Sequence
  Synthetic oligonucleotide; CTT chr11 5332158 5332179 5332163 5332158 -
cttgcattccttcttttgtgac

SEQ ID NO: 125088 - DNA, 22 bp, Artificial Sequence
  Synthetic oligonucleotide; TTC chr11 5332157 5332178 5332162 5332157 -
ttgcattccttcttttgtgacc

SEQ ID NO: 125089 - DNA, 22 bp, Artificial Sequence
  Synthetic oligonucleotide; CTT chr11 5332155 5332176 5332160 5332155 -
gcattccttcttttgtgacctc

SEQ ID NO: 125090 - DNA, 22 bp, Artificial Sequence
  Synthetic oligonucleotide; TTG chr11 5332154 5332175 5332159 5332154 -
cattccttcttttgtgacctcc

SEQ ID NO: 125091 - DNA, 22 bp, Artificial Sequence
  Synthetic oligonucleotide; TTC chr11 5332149 5332170 5332154 5332149 -
cttcttttgtgacctccttata

SEQ ID NO: 125092 - DNA, 22 bp, Artificial Sequence
  Synthetic oligonucleotide; CTT chr11 5332146 5332167 5332151 5332146 -
cttttgtgacctccttatattt

SEQ ID NO: 125093 - DNA, 22 bp, Artificial Sequence
  Synthetic oligonucleotide; TTC chr11 5332145 5332166 5332150 5332145 -
ttttgtgacctccttatatttc

SEQ ID NO: 125094 - DNA, 22 bp, Artificial Sequence
  Synthetic oligonucleotide; CTT chr11 5332143 5332164 5332148 5332143 -
ttgtgacctccttatatttcaa

SEQ ID NO: 125095 - DNA, 22 bp, Artificial Sequence
  Synthetic oligonucleotide; TTT chr11 5332142 5332163 5332147 5332142 -
tgtgacctccttatatttcaaa

SEQ ID NO: 125096 - DNA, 22 bp, Artificial Sequence
  Synthetic oligonucleotide; TTT chr11 5332141 5332162 5332146 5332141 -
gtgacctccttatatttcaaac

SEQ ID NO: 125097 - DNA, 22 bp, Artificial Sequence
  Synthetic oligonucleotide; TTG chr11 5332140 5332161 5332145 5332140 -
tgacctccttatatttcaaacc

SEQ ID NO: 125098 - DNA, 22 bp, Artificial Sequence
  Synthetic oligonucleotide; CTC chr11 5332133 5332154 5332138 5332133 -
cttatatttcaaaccagcaact

SEQ ID NO: 125099 - DNA, 22 bp, Artificial Sequence
  Synthetic oligonucleotide; CTT chr11 5332130 5332151 5332135 5332130 -
atatttcaaaccagcaactgac

SEQ ID NO: 125100 - DNA, 22 bp, Artificial Sequence
  Synthetic oligonucleotide; TTA chr11 5332129 5332150 5332134 5332129 -
tatttcaaaccagcaactgacc

SEQ ID NO: 125101 - DNA, 22 bp, Artificial Sequence
  Synthetic oligonucleotide; TTT chr11 5332124 5332145 5332129 5332124 -
caaaccagcaactgacccatga

SEQ ID NO: 125102 - DNA, 22 bp, Artificial Sequence
  Synthetic oligonucleotide; TTC chr11 5332123 5332144 5332128 5332123 -
aaaccagcaactgacccatgaa

SEQ ID NO: 125103 - DNA, 22 bp, Artificial Sequence
  Synthetic oligonucleotide; CTG chr11 5332110 5332131 5332115 5332110 -
acccatgaacctttctcaaatt

SEQ ID NO: 125104 - DNA, 22 bp, Artificial Sequence
  Synthetic oligonucleotide; CTT chr11 5332097 5332118 5332102 5332097 -
tctcaaattttgaatatgtctg

SEQ ID NO: 125105 - DNA, 22 bp, Artificial Sequence
  Synthetic oligonucleotide; TTT chr11 5332096 5332117 5332101 5332096 -
ctcaaattttgaatatgtctgg

SEQ ID NO: 125106 - DNA, 22 bp, Artificial Sequence
  Synthetic oligonucleotide; TTC chr11 5332095 5332116 5332100 5332095 -
tcaaattttgaatatgtctggc

SEQ ID NO: 125107 - DNA, 22 bp, Artificial Sequence
  Synthetic oligonucleotide; CTC chr11 5332093 5332114 5332098 5332093 -
aaattttgaatatgtctggctt

SEQ ID NO: 125108 - DNA, 22 bp, Artificial Sequence
  Synthetic oligonucleotide; TTT chr11 5332087 5332108 5332092 5332087 -
tgaatatgtctggcttcctatt

SEQ ID NO: 125109 - DNA, 22 bp, Artificial Sequence
  Synthetic oligonucleotide; TTT chr11 5332086 5332107 5332091 5332086 -
gaatatgtctggcttcctattc

SEQ ID NO: 125110 - DNA, 22 bp, Artificial Sequence
  Synthetic oligonucleotide; TTG chr11 5332085 5332106 5332090 5332085 -
aatatgtctggcttcctattct

SEQ ID NO: 125111 - DNA, 22 bp, Artificial Sequence
  Synthetic oligonucleotide; CTG chr11 5332075 5332096 5332080 5332075 -
gcttcctattctcctactactt

SEQ ID NO: 125112 - DNA, 22 bp, Artificial Sequence
  Synthetic oligonucleotide; CTT chr11 5332071 5332092 5332076 5332071 -
cctattctcctactacttggtg

SEQ ID NO: 125113 - DNA, 22 bp, Artificial Sequence
  Synthetic oligonucleotide; TTC chr11 5332070 5332091 5332075 5332070 -
ctattctcctactacttggtga

SEQ ID NO: 125114 - DNA, 22 bp, Artificial Sequence
  Synthetic oligonucleotide; CTA chr11 5332067 5332088 5332072 5332067 -
ttctcctactacttggtgaaaa

SEQ ID NO: 125115 - DNA, 22 bp, Artificial Sequence
  Synthetic oligonucleotide; TTC chr11 5332064 5332085 5332069 5332064 -
tcctactacttggtgaaaactc

SEQ ID NO: 125116 - DNA, 22 bp, Artificial Sequence
  Synthetic oligonucleotide; CTC chr11 5332062 5332083 5332067 5332062 -
ctactacttggtgaaaactctg

SEQ ID NO: 125117 - DNA, 22 bp, Artificial Sequence
  Synthetic oligonucleotide; CTA chr11 5332059 5332080 5332064 5332059 -
ctacttggtgaaaactctgctt

SEQ ID NO: 125118 - DNA, 22 bp, Artificial Sequence
  Synthetic oligonucleotide; CTA chr11 5332056 5332077 5332061 5332056 -
cttggtgaaaactctgctttta

SEQ ID NO: 125119 - DNA, 22 bp, Artificial Sequence
  Synthetic oligonucleotide; CTT chr11 5332053 5332074 5332058 5332053 -
ggtgaaaactctgcttttaggg

SEQ ID NO: 125120 - DNA, 22 bp, Artificial Sequence
  Synthetic oligonucleotide; TTG chr11 5332052 5332073 5332057 5332052 -
gtgaaaactctgcttttagggg

SEQ ID NO: 125121 - DNA, 22 bp, Artificial Sequence
  Synthetic oligonucleotide; CTC chr11 5332042 5332063 5332047 5332042 -
tgcttttaggggctcatggaat

SEQ ID NO: 125122 - DNA, 22 bp, Artificial Sequence
  Synthetic oligonucleotide; CTG chr11 5332040 5332061 5332045 5332040 -
cttttaggggctcatggaatta

SEQ ID NO: 125123 - DNA, 22 bp, Artificial Sequence
  Synthetic oligonucleotide; CTT chr11 5332037 5332058 5332042 5332037 -
ttaggggctcatggaattagac

SEQ ID NO: 125124 - DNA, 22 bp, Artificial Sequence
  Synthetic oligonucleotide; TTT chr11 5332036 5332057 5332041 5332036 -
taggggctcatggaattagact

SEQ ID NO: 125125 - DNA, 22 bp, Artificial Sequence
  Synthetic oligonucleotide; TTT chr11 5332035 5332056 5332040 5332035 -
aggggctcatggaattagacta

SEQ ID NO: 125126 - DNA, 22 bp, Artificial Sequence
  Synthetic oligonucleotide; TTA chr11 5332034 5332055 5332039 5332034 -
ggggctcatggaattagactag

SEQ ID NO: 125127 - DNA, 22 bp, Artificial Sequence
  Synthetic oligonucleotide; CTC chr11 5332027 5332048 5332032 5332027 -
atggaattagactaggttcccc

SEQ ID NO: 125128 - DNA, 22 bp, Artificial Sequence
  Synthetic oligonucleotide; TTA chr11 5332018 5332039 5332023 5332018 -
gactaggttcccctgagtaatt

SEQ ID NO: 125129 - DNA, 22 bp, Artificial Sequence
  Synthetic oligonucleotide; CTA chr11 5332013 5332034 5332018 5332013 -
ggttcccctgagtaatttcctt

SEQ ID NO: 125130 - DNA, 22 bp, Artificial Sequence
  Synthetic oligonucleotide; TTC chr11 5332008 5332029 5332013 5332008 -
ccctgagtaatttccttttcaa

SEQ ID NO: 125131 - DNA, 22 bp, Artificial Sequence
  Synthetic oligonucleotide; CTG chr11 5332003 5332024 5332008 5332003 -
agtaatttccttttcaattaac

SEQ ID NO: 125132 - DNA, 22 bp, Artificial Sequence
  Synthetic oligonucleotide; TTT chr11 5331995 5332016 5332000 5331995 -
ccttttcaattaactcaaagtc

SEQ ID NO: 125133 - DNA, 22 bp, Artificial Sequence
  Synthetic oligonucleotide; TTC chr11 5331994 5332015 5331999 5331994 -
cttttcaattaactcaaagtca

SEQ ID NO: 125134 - DNA, 22 bp, Artificial Sequence
  Synthetic oligonucleotide; CTT chr11 5331991 5332012 5331996 5331991 -
ttcaattaactcaaagtcaata

SEQ ID NO: 125135 - DNA, 22 bp, Artificial Sequence
  Synthetic oligonucleotide; TTT chr11 5331990 5332011 5331995 5331990 -
tcaattaactcaaagtcaatag

SEQ ID NO: 125136 - DNA, 22 bp, Artificial Sequence
  Synthetic oligonucleotide; TTT chr11 5331989 5332010 5331994 5331989 -
caattaactcaaagtcaataga

SEQ ID NO: 125137 - DNA, 22 bp, Artificial Sequence
  Synthetic oligonucleotide; TTC chr11 5331988 5332009 5331993 5331988 -
aattaactcaaagtcaatagat

SEQ ID NO: 125138 - DNA, 22 bp, Artificial Sequence
  Synthetic oligonucleotide; TTA chr11 5331983 5332004 5331988 5331983 -
actcaaagtcaatagatcagca

SEQ ID NO: 125139 - DNA, 22 bp, Artificial Sequence
  Synthetic oligonucleotide; CTC chr11 5331979 5332000 5331984 5331979 -
aaagtcaatagatcagcaactt

SEQ ID NO: 125140 - DNA, 22 bp, Artificial Sequence
  Synthetic oligonucleotide; CTT chr11 5331957 5331978 5331962 5331957 -
taattacatctgtataacccca

SEQ ID NO: 125141 - DNA, 22 bp, Artificial Sequence
  Synthetic oligonucleotide; TTT chr11 5331956 5331977 5331961 5331956 -
aattacatctgtataaccccaa

SEQ ID NO: 125142 - DNA, 22 bp, Artificial Sequence
  Synthetic oligonucleotide; TTA chr11 5331955 5331976 5331960 5331955 -
attacatctgtataaccccaag

SEQ ID NO: 125143 - DNA, 22 bp, Artificial Sequence
  Synthetic oligonucleotide; TTA chr11 5331951 5331972 5331956 5331951 -
catctgtataaccccaagcatg

SEQ ID NO: 125144 - DNA, 22 bp, Artificial Sequence
  Synthetic oligonucleotide; CTG chr11 5331945 5331966 5331950 5331945 -
tataaccccaagcatgatattg

SEQ ID NO: 125145 - DNA, 22 bp, Artificial Sequence
  Synthetic oligonucleotide; TTG chr11 5331923 5331944 5331928 5331923 -
tatcatattcacagtcctagaa

SEQ ID NO: 125146 - DNA, 22 bp, Artificial Sequence
  Synthetic oligonucleotide; TTC chr11 5331913 5331934 5331918 5331913 -
acagtcctagaaattaggatag

SEQ ID NO: 125147 - DNA, 22 bp, Artificial Sequence
  Synthetic oligonucleotide; CTA chr11 5331904 5331925 5331909 5331904 -
gaaattaggataggaaatcttg

SEQ ID NO: 125148 - DNA, 22 bp, Artificial Sequence
  Synthetic oligonucleotide; TTA chr11 5331897 5331918 5331902 5331897 -
ggataggaaatcttgtggtaga

SEQ ID NO: 125149 - DNA, 22 bp, Artificial Sequence
  Synthetic oligonucleotide; CTT chr11 5331883 5331904 5331888 5331883 -
gtggtagaaaggtttttaaaat

SEQ ID NO: 125150 - DNA, 22 bp, Artificial Sequence
  Synthetic oligonucleotide; TTG chr11 5331882 5331903 5331887 5331882 -
tggtagaaaggtttttaaaatt

SEQ ID NO: 125151 - DNA, 22 bp, Artificial Sequence
  Synthetic oligonucleotide; TTT chr11 5331868 5331889 5331873 5331868 -
ttaaaattatgcctatcacacc

SEQ ID NO: 125152 - DNA, 22 bp, Artificial Sequence
  Synthetic oligonucleotide; TTT chr11 5331867 5331888 5331872 5331867 -
taaaattatgcctatcacacca

SEQ ID NO: 125153 - DNA, 22 bp, Artificial Sequence
  Synthetic oligonucleotide; TTT chr11 5331866 5331887 5331871 5331866 -
aaaattatgcctatcacaccat

SEQ ID NO: 125154 - DNA, 22 bp, Artificial Sequence
  Synthetic oligonucleotide; TTA chr11 5331865 5331886 5331870 5331865 -
aaattatgcctatcacaccatt

SEQ ID NO: 125155 - DNA, 22 bp, Artificial Sequence
  Synthetic oligonucleotide; TTA chr11 5331859 5331880 5331864 5331859 -
tgcctatcacaccatttaaaaa

SEQ ID NO: 125156 - DNA, 22 bp, Artificial Sequence
  Synthetic oligonucleotide; CTA chr11 5331853 5331874 5331858 5331853 -
tcacaccatttaaaaaatagct

SEQ ID NO: 125157 - DNA, 22 bp, Artificial Sequence
  Synthetic oligonucleotide; TTT chr11 5331842 5331863 5331847 5331842 -
aaaaaatagctagtgagagagg

SEQ ID NO: 125158 - DNA, 22 bp, Artificial Sequence
  Synthetic oligonucleotide; TTA chr11 5331841 5331862 5331846 5331841 -
aaaaatagctagtgagagagga

SEQ ID NO: 125159 - DNA, 22 bp, Artificial Sequence
  Synthetic oligonucleotide; CTA chr11 5331830 5331851 5331835 5331830 -
gtgagagaggagactttctttt

SEQ ID NO: 125160 - DNA, 22 bp, Artificial Sequence
  Synthetic oligonucleotide; CTT chr11 5331814 5331835 5331819 5331814 -
tcttttccaatatatgtgttag

SEQ ID NO: 125161 - DNA, 22 bp, Artificial Sequence
  Synthetic oligonucleotide; TTT chr11 5331813 5331834 5331818 5331813 -
cttttccaatatatgtgttagt

SEQ ID NO: 125162 - DNA, 22 bp, Artificial Sequence
  Synthetic oligonucleotide; TTC chr11 5331812 5331833 5331817 5331812 -
ttttccaatatatgtgttagtt

SEQ ID NO: 125163 - DNA, 22 bp, Artificial Sequence
  Synthetic oligonucleotide; CTT chr11 5331810 5331831 5331815 5331810 -
ttccaatatatgtgttagtttt

SEQ ID NO: 125164 - DNA, 22 bp, Artificial Sequence
  Synthetic oligonucleotide; TTT chr11 5331809 5331830 5331814 5331809 -
tccaatatatgtgttagtttta

SEQ ID NO: 125165 - DNA, 22 bp, Artificial Sequence
  Synthetic oligonucleotide; TTT chr11 5331808 5331829 5331813 5331808 -
ccaatatatgtgttagttttaa

SEQ ID NO: 125166 - DNA, 22 bp, Artificial Sequence
  Synthetic oligonucleotide; TTC chr11 5331807 5331828 5331812 5331807 -
caatatatgtgttagttttaaa

SEQ ID NO: 125167 - DNA, 22 bp, Artificial Sequence
  Synthetic oligonucleotide; TTA chr11 5331793 5331814 5331798 5331793 -
gttttaaagtatgtgtgaaata

SEQ ID NO: 125168 - DNA, 22 bp, Artificial Sequence
  Synthetic oligonucleotide; TTT chr11 5331789 5331810 5331794 5331789 -
taaagtatgtgtgaaataattt

SEQ ID NO: 125169 - DNA, 22 bp, Artificial Sequence
  Synthetic oligonucleotide; TTT chr11 5331788 5331809 5331793 5331788 -
aaagtatgtgtgaaataatttt

SEQ ID NO: 125170 - DNA, 22 bp, Artificial Sequence
  Synthetic oligonucleotide; TTA chr11 5331787 5331808 5331792 5331787 -
aagtatgtgtgaaataattttt

SEQ ID NO: 125171 - DNA, 22 bp, Artificial Sequence
  Synthetic oligonucleotide; TTT chr11 5331767 5331788 5331772 5331767 -
ttattcttaacatttttttgat

SEQ ID NO: 125172 - DNA, 22 bp, Artificial Sequence
  Synthetic oligonucleotide; TTT chr11 5331766 5331787 5331771 5331766 -
tattcttaacatttttttgatg

SEQ ID NO: 125173 - DNA, 22 bp, Artificial Sequence
  Synthetic oligonucleotide; TTT chr11 5331765 5331786 5331770 5331765 -
attcttaacatttttttgatga

SEQ ID NO: 125174 - DNA, 22 bp, Artificial Sequence
  Synthetic oligonucleotide; TTA chr11 5331764 5331785 5331769 5331764 -
ttcttaacatttttttgatgaa

SEQ ID NO: 125175 - DNA, 22 bp, Artificial Sequence
  Synthetic oligonucleotide; TTC chr11 5331761 5331782 5331766 5331761 -
ttaacatttttttgatgaagca

SEQ ID NO: 125176 - DNA, 22 bp, Artificial Sequence
  Synthetic oligonucleotide; CTT chr11 5331759 5331780 5331764 5331759 -
aacatttttttgatgaagcaca

SEQ ID NO: 125177 - DNA, 22 bp, Artificial Sequence
  Synthetic oligonucleotide; TTA chr11 5331758 5331779 5331763 5331758 -
acatttttttgatgaagcacaa

SEQ ID NO: 125178 - DNA, 22 bp, Artificial Sequence
  Synthetic oligonucleotide; TTT chr11 5331752 5331773 5331757 5331752 -
ttttgatgaagcacaatgtctg

SEQ ID NO: 125179 - DNA, 22 bp, Artificial Sequence
  Synthetic oligonucleotide; TTT chr11 5331751 5331772 5331756 5331751 -
tttgatgaagcacaatgtctga

SEQ ID NO: 125180 - DNA, 22 bp, Artificial Sequence
  Synthetic oligonucleotide; TTT chr11 5331750 5331771 5331755 5331750 -
ttgatgaagcacaatgtctgaa

SEQ ID NO: 125181 - DNA, 22 bp, Artificial Sequence
  Synthetic oligonucleotide; TTT chr11 5331749 5331770 5331754 5331749 -
tgatgaagcacaatgtctgaaa

SEQ ID NO: 125182 - DNA, 22 bp, Artificial Sequence
  Synthetic oligonucleotide; TTT chr11 5331748 5331769 5331753 5331748 -
gatgaagcacaatgtctgaaag

SEQ ID NO: 125183 - DNA, 22 bp, Artificial Sequence
  Synthetic oligonucleotide; TTG chr11 5331747 5331768 5331752 5331747 -
atgaagcacaatgtctgaaagg

SEQ ID NO: 125184 - DNA, 22 bp, Artificial Sequence
  Synthetic oligonucleotide; CTG chr11 5331730 5331751 5331735 5331730 -
aaagggtggtagaaagcagctg

SEQ ID NO: 125185 - DNA, 22 bp, Artificial Sequence
  Synthetic oligonucleotide; CTG chr11 5331708 5331729 5331713 5331708 -
gagtcgaaactgaggatgaagt

SEQ ID NO: 125186 - DNA, 22 bp, Artificial Sequence
  Synthetic oligonucleotide; CTG chr11 5331696 5331717 5331701 5331696 -
aggatgaagtcgtatagtctag

SEQ ID NO: 125187 - DNA, 22 bp, Artificial Sequence
  Synthetic oligonucleotide; CTA chr11 5331675 5331696 5331680 5331675 -
gagctgtgctgtccaaaacagt

SEQ ID NO: 125188 - DNA, 22 bp, Artificial Sequence
  Synthetic oligonucleotide; CTG chr11 5331669 5331690 5331674 5331669 -
tgctgtccaaaacagtagcatc

SEQ ID NO: 125189 - DNA, 22 bp, Artificial Sequence
  Synthetic oligonucleotide; CTG chr11 5331664 5331685 5331669 5331664 -
tccaaaacagtagcatctggtt

SEQ ID NO: 125190 - DNA, 22 bp, Artificial Sequence
  Synthetic oligonucleotide; CTG chr11 5331645 5331666 5331650 5331645 -
gttagcttgagtcagaattttc

SEQ ID NO: 125191 - DNA, 22 bp, Artificial Sequence
  Synthetic oligonucleotide; TTA chr11 5331641 5331662 5331646 5331641 -
gcttgagtcagaattttctgta

SEQ ID NO: 125192 - DNA, 22 bp, Artificial Sequence
  Synthetic oligonucleotide; CTT chr11 5331637 5331658 5331642 5331637 -
gagtcagaattttctgtaagtg

SEQ ID NO: 125193 - DNA, 22 bp, Artificial Sequence
  Synthetic oligonucleotide; TTG chr11 5331636 5331657 5331641 5331636 -
agtcagaattttctgtaagtgt

SEQ ID NO: 125194 - DNA, 22 bp, Artificial Sequence
  Synthetic oligonucleotide; TTT chr11 5331625 5331646 5331630 5331625 -
tctgtaagtgtaaacactcgat

SEQ ID NO: 125195 - DNA, 22 bp, Artificial Sequence
  Synthetic oligonucleotide; TTT chr11 5331624 5331645 5331629 5331624 -
ctgtaagtgtaaacactcgatt

SEQ ID NO: 125196 - DNA, 22 bp, Artificial Sequence
  Synthetic oligonucleotide; TTC chr11 5331623 5331644 5331628 5331623 -
tgtaagtgtaaacactcgattt

SEQ ID NO: 125197 - DNA, 22 bp, Artificial Sequence
  Synthetic oligonucleotide; CTG chr11 5331621 5331642 5331626 5331621 -
taagtgtaaacactcgattttg

SEQ ID NO: 125198 - DNA, 22 bp, Artificial Sequence
  Synthetic oligonucleotide; CTC chr11 5331606 5331627 5331611 5331606 -
gattttgaagaatttgtaccaa

SEQ ID NO: 125199 - DNA, 22 bp, Artificial Sequence
  Synthetic oligonucleotide; TTT chr11 5331601 5331622 5331606 5331601 -
tgaagaatttgtaccaaaaaaa

SEQ ID NO: 125200 - DNA, 22 bp, Artificial Sequence
  Synthetic oligonucleotide; TTT chr11 5331600 5331621 5331605 5331600 -
gaagaatttgtaccaaaaaaaa

SEQ ID NO: 125201 - DNA, 22 bp, Artificial Sequence
  Synthetic oligonucleotide; TTG chr11 5331599 5331620 5331604 5331599 -
aagaatttgtaccaaaaaaaaa

SEQ ID NO: 125202 - DNA, 22 bp, Artificial Sequence
  Synthetic oligonucleotide; TTT chr11 5331591 5331612 5331596 5331591 -
gtaccaaaaaaaaatcgtggga

SEQ ID NO: 125203 - DNA, 22 bp, Artificial Sequence
  Synthetic oligonucleotide; TTG chr11 5331590 5331611 5331595 5331590 -
taccaaaaaaaaatcgtgggaa

SEQ ID NO: 125204 - DNA, 22 bp, Artificial Sequence
  Synthetic oligonucleotide; CTA chr11 5331565 5331586 5331570 5331565 -
tctcatatatgatttttatgct

SEQ ID NO: 125205 - DNA, 22 bp, Artificial Sequence
  Synthetic oligonucleotide; CTC chr11 5331561 5331582 5331566 5331561 -
atatatgatttttatgctgatt

SEQ ID NO: 125206 - DNA, 22 bp, Artificial Sequence
  Synthetic oligonucleotide; TTT chr11 5331550 5331571 5331555 5331550 -
ttatgctgattatctattaaaa

SEQ ID NO: 125207 - DNA, 22 bp, Artificial Sequence
  Synthetic oligonucleotide; TTT chr11 5331549 5331570 5331554 5331549 -
tatgctgattatctattaaaat

SEQ ID NO: 125208 - DNA, 22 bp, Artificial Sequence
  Synthetic oligonucleotide; TTT chr11 5331548 5331569 5331553 5331548 -
atgctgattatctattaaaatg

SEQ ID NO: 125209 - DNA, 22 bp, Artificial Sequence
  Synthetic oligonucleotide; TTA chr11 5331547 5331568 5331552 5331547 -
tgctgattatctattaaaatga

SEQ ID NO: 125210 - DNA, 22 bp, Artificial Sequence
  Synthetic oligonucleotide; CTG chr11 5331542 5331563 5331547 5331542 -
attatctattaaaatgataata

SEQ ID NO: 125211 - DNA, 22 bp, Artificial Sequence
  Synthetic oligonucleotide; TTA chr11 5331538 5331559 5331543 5331538 -
tctattaaaatgataatatttt

SEQ ID NO: 125212 - DNA, 22 bp, Artificial Sequence
  Synthetic oligonucleotide; CTA chr11 5331534 5331555 5331539 5331534 -
ttaaaatgataatatttttgat

SEQ ID NO: 125213 - DNA, 22 bp, Artificial Sequence
  Synthetic oligonucleotide; TTA chr11 5331531 5331552 5331536 5331531 -
aaatgataatatttttgatata

SEQ ID NO: 125214 - DNA, 22 bp, Artificial Sequence
  Synthetic oligonucleotide; TTT chr11 5331517 5331538 5331522 5331517 -
ttgatatagtagcttaaataag

SEQ ID NO: 125215 - DNA, 22 bp, Artificial Sequence
  Synthetic oligonucleotide; TTT chr11 5331516 5331537 5331521 5331516 -
tgatatagtagcttaaataaga

SEQ ID NO: 125216 - DNA, 22 bp, Artificial Sequence
  Synthetic oligonucleotide; TTT chr11 5331515 5331536 5331520 5331515 -
gatatagtagcttaaataagac

SEQ ID NO: 125217 - DNA, 22 bp, Artificial Sequence
  Synthetic oligonucleotide; TTG chr11 5331514 5331535 5331519 5331514 -
atatagtagcttaaataagaca

SEQ ID NO: 125218 - DNA, 22 bp, Artificial Sequence
  Synthetic oligonucleotide; CTT chr11 5331502 5331523 5331507 5331502 -
aaataagacatactaatattaa

SEQ ID NO: 125219 - DNA, 22 bp, Artificial Sequence
  Synthetic oligonucleotide; TTA chr11 5331501 5331522 5331506 5331501 -
aataagacatactaatattaat

SEQ ID NO: 125220 - DNA, 22 bp, Artificial Sequence
  Synthetic oligonucleotide; CTA chr11 5331487 5331508 5331492 5331487 -
atattaattttaccacttttct

SEQ ID NO: 125221 - DNA, 22 bp, Artificial Sequence
  Synthetic oligonucleotide; TTA chr11 5331481 5331502 5331486 5331481 -
attttaccacttttctttttac

SEQ ID NO: 125222 - DNA, 22 bp, Artificial Sequence
  Synthetic oligonucleotide; TTT chr11 5331477 5331498 5331482 5331477 -
taccacttttctttttactcct

SEQ ID NO: 125223 - DNA, 22 bp, Artificial Sequence
  Synthetic oligonucleotide; TTT chr11 5331476 5331497 5331481 5331476 -
accacttttctttttactcctt

SEQ ID NO: 125224 - DNA, 22 bp, Artificial Sequence
  Synthetic oligonucleotide; TTA chr11 5331475 5331496 5331480 5331475 -
ccacttttctttttactccttt

SEQ ID NO: 125225 - DNA, 22 bp, Artificial Sequence
  Synthetic oligonucleotide; CTT chr11 5331469 5331490 5331474 5331469 -
ttctttttactccttttaatgt

SEQ ID NO: 125226 - DNA, 22 bp, Artificial Sequence
  Synthetic oligonucleotide; TTT chr11 5331468 5331489 5331473 5331468 -
tctttttactccttttaatgtg

SEQ ID NO: 125227 - DNA, 22 bp, Artificial Sequence
  Synthetic oligonucleotide; TTT chr11 5331467 5331488 5331472 5331467 -
ctttttactccttttaatgtga

SEQ ID NO: 125228 - DNA, 22 bp, Artificial Sequence
  Synthetic oligonucleotide; TTC chr11 5331466 5331487 5331471 5331466 -
tttttactccttttaatgtgac

SEQ ID NO: 125229 - DNA, 22 bp, Artificial Sequence
  Synthetic oligonucleotide; CTT chr11 5331464 5331485 5331469 5331464 -
tttactccttttaatgtgacta

SEQ ID NO: 125230 - DNA, 22 bp, Artificial Sequence
  Synthetic oligonucleotide; TTT chr11 5331463 5331484 5331468 5331463 -
ttactccttttaatgtgactac

SEQ ID NO: 125231 - DNA, 22 bp, Artificial Sequence
  Synthetic oligonucleotide; TTT chr11 5331462 5331483 5331467 5331462 -
tactccttttaatgtgactacc

SEQ ID NO: 125232 - DNA, 22 bp, Artificial Sequence
  Synthetic oligonucleotide; TTT chr11 5331461 5331482 5331466 5331461 -
actccttttaatgtgactacca

SEQ ID NO: 125233 - DNA, 22 bp, Artificial Sequence
  Synthetic oligonucleotide; TTA chr11 5331460 5331481 5331465 5331460 -
ctccttttaatgtgactaccag

SEQ ID NO: 125234 - DNA, 22 bp, Artificial Sequence
  Synthetic oligonucleotide; CTC chr11 5331457 5331478 5331462 5331457 -
cttttaatgtgactaccagaac

SEQ ID NO: 125235 - DNA, 22 bp, Artificial Sequence
  Synthetic oligonucleotide; CTT chr11 5331454 5331475 5331459 5331454 -
ttaatgtgactaccagaacatt

SEQ ID NO: 125236 - DNA, 22 bp, Artificial Sequence
  Synthetic oligonucleotide; TTT chr11 5331453 5331474 5331458 5331453 -
taatgtgactaccagaacattt

SEQ ID NO: 125237 - DNA, 22 bp, Artificial Sequence
  Synthetic oligonucleotide; TTT chr11 5331452 5331473 5331457 5331452 -
aatgtgactaccagaacattta

SEQ ID NO: 125238 - DNA, 22 bp, Artificial Sequence
  Synthetic oligonucleotide; TTA chr11 5331451 5331472 5331456 5331451 -
atgtgactaccagaacatttaa

SEQ ID NO: 125239 - DNA, 22 bp, Artificial Sequence
  Synthetic oligonucleotide; CTA chr11 5331442 5331463 5331447 5331442 -
ccagaacatttaacatcacata

SEQ ID NO: 125240 - DNA, 22 bp, Artificial Sequence
  Synthetic oligonucleotide; TTT chr11 5331431 5331452 5331436 5331431 -
aacatcacatatttagctctaa

SEQ ID NO: 125241 - DNA, 22 bp, Artificial Sequence
  Synthetic oligonucleotide; TTA chr11 5331430 5331451 5331435 5331430 -
acatcacatatttagctctaat

SEQ ID NO: 125242 - DNA, 22 bp, Artificial Sequence
  Synthetic oligonucleotide; TTT chr11 5331417 5331438 5331422 5331417 -
agctctaattatatttccacca

SEQ ID NO: 125243 - DNA, 22 bp, Artificial Sequence
  Synthetic oligonucleotide; TTA chr11 5331416 5331437 5331421 5331416 -
gctctaattatatttccaccac

SEQ ID NO: 125244 - DNA, 22 bp, Artificial Sequence
  Synthetic oligonucleotide; CTC chr11 5331412 5331433 5331417 5331412 -
taattatatttccaccacatag

SEQ ID NO: 125245 - DNA, 22 bp, Artificial Sequence
  Synthetic oligonucleotide; CTA chr11 5331410 5331431 5331415 5331410 -
attatatttccaccacatagtg

SEQ ID NO: 125246 - DNA, 22 bp, Artificial Sequence
  Synthetic oligonucleotide; TTA chr11 5331406 5331427 5331411 5331406 -
tatttccaccacatagtgctgg

SEQ ID NO: 125247 - DNA, 22 bp, Artificial Sequence
  Synthetic oligonucleotide; TTT chr11 5331401 5331422 5331406 5331401 -
ccaccacatagtgctggtctag

SEQ ID NO: 125248 - DNA, 22 bp, Artificial Sequence
  Synthetic oligonucleotide; TTC chr11 5331400 5331421 5331405 5331400 -
caccacatagtgctggtctaga

SEQ ID NO: 125249 - DNA, 22 bp, Artificial Sequence
  Synthetic oligonucleotide; CTG chr11 5331385 5331406 5331390 5331385 -
gtctagagagctgttttgtttg

SEQ ID NO: 125250 - DNA, 22 bp, Artificial Sequence
  Synthetic oligonucleotide; CTA chr11 5331380 5331401 5331385 5331380 -
gagagctgttttgtttgtttgt

SEQ ID NO: 125251 - DNA, 22 bp, Artificial Sequence
  Synthetic oligonucleotide; CTG chr11 5331372 5331393 5331377 5331372 -
ttttgtttgtttgtttctcctc

SEQ ID NO: 125252 - DNA, 22 bp, Artificial Sequence
  Synthetic oligonucleotide; TTT chr11 5331369 5331390 5331374 5331369 -
tgtttgtttgtttctcctcagg

SEQ ID NO: 125253 - DNA, 22 bp, Artificial Sequence
  Synthetic oligonucleotide; TTT chr11 5331368 5331389 5331373 5331368 -
gtttgtttgtttctcctcaggt

SEQ ID NO: 125254 - DNA, 22 bp, Artificial Sequence
  Synthetic oligonucleotide; TTG chr11 5331367 5331388 5331372 5331367 -
tttgtttgtttctcctcaggta

SEQ ID NO: 125255 - DNA, 22 bp, Artificial Sequence
  Synthetic oligonucleotide; TTT chr11 5331364 5331385 5331369 5331364 -
gtttgtttctcctcaggtatcc

SEQ ID NO: 125256 - DNA, 22 bp, Artificial Sequence
  Synthetic oligonucleotide; TTG chr11 5331363 5331384 5331368 5331363 -
tttgtttctcctcaggtatcca

SEQ ID NO: 125257 - DNA, 22 bp, Artificial Sequence
  Synthetic oligonucleotide; TTT chr11 5331360 5331381 5331365 5331360 -
gtttctcctcaggtatccacca

SEQ ID NO: 125258 - DNA, 22 bp, Artificial Sequence
  Synthetic oligonucleotide; TTG chr11 5331359 5331380 5331364 5331359 -
tttctcctcaggtatccaccat

SEQ ID NO: 125259 - DNA, 22 bp, Artificial Sequence
  Synthetic oligonucleotide; TTT chr11 5331356 5331377 5331361 5331356 -
ctcctcaggtatccaccatgtc

SEQ ID NO: 125260 - DNA, 22 bp, Artificial Sequence
  Synthetic oligonucleotide; TTC chr11 5331355 5331376 5331360 5331355 -
tcctcaggtatccaccatgtca

SEQ ID NO: 125261 - DNA, 22 bp, Artificial Sequence
  Synthetic oligonucleotide; CTC chr11 5331353 5331374 5331358 5331353 -
ctcaggtatccaccatgtcacc

SEQ ID NO: 125262 - DNA, 22 bp, Artificial Sequence
  Synthetic oligonucleotide; CTC chr11 5331350 5331371 5331355 5331350 -
aggtatccaccatgtcacccac

SEQ ID NO: 125263 - DNA, 22 bp, Artificial Sequence
  Synthetic oligonucleotide; TTA chr11 5331323 5331344 5331328 5331323 -
ctgctgccccttttctcctcac

SEQ ID NO: 125264 - DNA, 22 bp, Artificial Sequence
  Synthetic oligonucleotide; CTG chr11 5331320 5331341 5331325 5331320 -
ctgccccttttctcctcactgg

SEQ ID NO: 125265 - DNA, 22 bp, Artificial Sequence
  Synthetic oligonucleotide; CTG chr11 5331317 5331338 5331322 5331317 -
ccccttttctcctcactggctt

SEQ ID NO: 125266 - DNA, 22 bp, Artificial Sequence
  Synthetic oligonucleotide; CTT chr11 5331311 5331332 5331316 5331311 -
ttctcctcactggctttccagg

SEQ ID NO: 125267 - DNA, 22 bp, Artificial Sequence
  Synthetic oligonucleotide; TTT chr11 5331310 5331331 5331315 5331310 -
tctcctcactggctttccaggt

SEQ ID NO: 125268 - DNA, 22 bp, Artificial Sequence
  Synthetic oligonucleotide; TTT chr11 5331309 5331330 5331314 5331309 -
ctcctcactggctttccaggtc

SEQ ID NO: 125269 - DNA, 22 bp, Artificial Sequence
  Synthetic oligonucleotide; TTC chr11 5331308 5331329 5331313 5331308 -
tcctcactggctttccaggtct

SEQ ID NO: 125270 - DNA, 22 bp, Artificial Sequence
  Synthetic oligonucleotide; CTC chr11 5331306 5331327 5331311 5331306 -
ctcactggctttccaggtctgg

SEQ ID NO: 125271 - DNA, 22 bp, Artificial Sequence
  Synthetic oligonucleotide; CTC chr11 5331303 5331324 5331308 5331303 -
actggctttccaggtctggaga

SEQ ID NO: 125272 - DNA, 22 bp, Artificial Sequence
  Synthetic oligonucleotide; CTG chr11 5331299 5331320 5331304 5331299 -
gctttccaggtctggagagatt

SEQ ID NO: 125273 - DNA, 22 bp, Artificial Sequence
  Synthetic oligonucleotide; CTT chr11 5331295 5331316 5331300 5331295 -
tccaggtctggagagatttcat

SEQ ID NO: 125274 - DNA, 22 bp, Artificial Sequence
  Synthetic oligonucleotide; TTT chr11 5331294 5331315 5331299 5331294 -
ccaggtctggagagatttcatc

SEQ ID NO: 125275 - DNA, 22 bp, Artificial Sequence
  Synthetic oligonucleotide; TTC chr11 5331293 5331314 5331298 5331293 -
caggtctggagagatttcatcc

SEQ ID NO: 125276 - DNA, 22 bp, Artificial Sequence
  Synthetic oligonucleotide; CTG chr11 5331285 5331306 5331290 5331285 -
gagagatttcatccttggagtt

SEQ ID NO: 125277 - DNA, 22 bp, Artificial Sequence
  Synthetic oligonucleotide; TTT chr11 5331276 5331297 5331281 5331276 -
catccttggagttctatctcct

SEQ ID NO: 125278 - DNA, 22 bp, Artificial Sequence
  Synthetic oligonucleotide; TTC chr11 5331275 5331296 5331280 5331275 -
atccttggagttctatctcctt

SEQ ID NO: 125279 - DNA, 22 bp, Artificial Sequence
  Synthetic oligonucleotide; CTT chr11 5331269 5331290 5331274 5331269 -
ggagttctatctccttctttat

SEQ ID NO: 125280 - DNA, 22 bp, Artificial Sequence
  Synthetic oligonucleotide; TTG chr11 5331268 5331289 5331273 5331268 -
gagttctatctccttctttatc

SEQ ID NO: 125281 - DNA, 22 bp, Artificial Sequence
  Synthetic oligonucleotide; TTC chr11 5331262 5331283 5331267 5331262 -
tatctccttctttatcatctat

SEQ ID NO: 125282 - DNA, 22 bp, Artificial Sequence
  Synthetic oligonucleotide; CTA chr11 5331260 5331281 5331265 5331260 -
tctccttctttatcatctatgt

SEQ ID NO: 125283 - DNA, 22 bp, Artificial Sequence
  Synthetic oligonucleotide; CTC chr11 5331256 5331277 5331261 5331256 -
cttctttatcatctatgtctct

SEQ ID NO: 125284 - DNA, 22 bp, Artificial Sequence
  Synthetic oligonucleotide; CTT chr11 5331253 5331274 5331258 5331253 -
ctttatcatctatgtctctaca

SEQ ID NO: 125285 - DNA, 22 bp, Artificial Sequence
  Synthetic oligonucleotide; TTC chr11 5331252 5331273 5331257 5331252 -
tttatcatctatgtctctacag

SEQ ID NO: 125286 - DNA, 22 bp, Artificial Sequence
  Synthetic oligonucleotide; CTT chr11 5331250 5331271 5331255 5331250 -
tatcatctatgtctctacagtc

SEQ ID NO: 125287 - DNA, 22 bp, Artificial Sequence
  Synthetic oligonucleotide; TTT chr11 5331249 5331270 5331254 5331249 -
atcatctatgtctctacagtcc

SEQ ID NO: 125288 - DNA, 22 bp, Artificial Sequence
  Synthetic oligonucleotide; TTA chr11 5331248 5331269 5331253 5331248 -
tcatctatgtctctacagtcct

SEQ ID NO: 125289 - DNA, 22 bp, Artificial Sequence
  Synthetic oligonucleotide; CTA chr11 5331241 5331262 5331246 5331241 -
tgtctctacagtccttggcaat

SEQ ID NO: 125290 - DNA, 22 bp, Artificial Sequence
  Synthetic oligonucleotide; CTC chr11 5331235 5331256 5331240 5331235 -
tacagtccttggcaatggcagc

SEQ ID NO: 125291 - DNA, 22 bp, Artificial Sequence
  Synthetic oligonucleotide; CTA chr11 5331233 5331254 5331238 5331233 -
cagtccttggcaatggcagcct

SEQ ID NO: 125292 - DNA, 22 bp, Artificial Sequence
  Synthetic oligonucleotide; CTT chr11 5331225 5331246 5331230 5331225 -
ggcaatggcagcctcctcctct

SEQ ID NO: 125293 - DNA, 22 bp, Artificial Sequence
  Synthetic oligonucleotide; TTG chr11 5331224 5331245 5331229 5331224 -
gcaatggcagcctcctcctctt

SEQ ID NO: 125294 - DNA, 22 bp, Artificial Sequence
  Synthetic oligonucleotide; CTC chr11 5331210 5331231 5331215 5331210 -
ctcctctttatcagagaagact

SEQ ID NO: 125295 - DNA, 22 bp, Artificial Sequence
  Synthetic oligonucleotide; CTC chr11 5331207 5331228 5331212 5331207 -
ctctttatcagagaagactgca

SEQ ID NO: 125296 - DNA, 22 bp, Artificial Sequence
  Synthetic oligonucleotide; CTC chr11 5331204 5331225 5331209 5331204 -
tttatcagagaagactgcactc

SEQ ID NO: 125297 - DNA, 22 bp, Artificial Sequence
  Synthetic oligonucleotide; CTT chr11 5331202 5331223 5331207 5331202 -
tatcagagaagactgcactctt

SEQ ID NO: 125298 - DNA, 22 bp, Artificial Sequence
  Synthetic oligonucleotide; TTT chr11 5331201 5331222 5331206 5331201 -
atcagagaagactgcactcttc

SEQ ID NO: 125299 - DNA, 22 bp, Artificial Sequence
  Synthetic oligonucleotide; TTA chr11 5331200 5331221 5331205 5331200 -
tcagagaagactgcactcttca

SEQ ID NO: 125300 - DNA, 22 bp, Artificial Sequence
  Synthetic oligonucleotide; CTG chr11 5331187 5331208 5331192 5331187 -
cactcttcatgagcccgtgtac

SEQ ID NO: 125301 - DNA, 22 bp, Artificial Sequence
  Synthetic oligonucleotide; CTC chr11 5331182 5331203 5331187 5331182 -
ttcatgagcccgtgtactactc

SEQ ID NO: 125302 - DNA, 22 bp, Artificial Sequence
  Synthetic oligonucleotide; CTT chr11 5331180 5331201 5331185 5331180 -
catgagcccgtgtactactctc

SEQ ID NO: 125303 - DNA, 22 bp, Artificial Sequence
  Synthetic oligonucleotide; TTC chr11 5331179 5331200 5331184 5331179 -
atgagcccgtgtactactctct

SEQ ID NO: 125304 - DNA, 22 bp, Artificial Sequence
  Synthetic oligonucleotide; CTA chr11 5331163 5331184 5331168 5331163 -
ctctctgactatactggcagcc

SEQ ID NO: 125305 - DNA, 22 bp, Artificial Sequence
  Synthetic oligonucleotide; CTC chr11 5331160 5331181 5331165 5331160 -
tctgactatactggcagccata

SEQ ID NO: 125306 - DNA, 22 bp, Artificial Sequence
  Synthetic oligonucleotide; CTC chr11 5331158 5331179 5331163 5331158 -
tgactatactggcagccataga

SEQ ID NO: 125307 - DNA, 22 bp, Artificial Sequence
  Synthetic oligonucleotide; CTG chr11 5331156 5331177 5331161 5331156 -
actatactggcagccatagacc

SEQ ID NO: 125308 - DNA, 22 bp, Artificial Sequence
  Synthetic oligonucleotide; CTA chr11 5331152 5331173 5331157 5331152 -
tactggcagccatagaccttgg

SEQ ID NO: 125309 - DNA, 22 bp, Artificial Sequence
  Synthetic oligonucleotide; CTG chr11 5331147 5331168 5331152 5331147 -
gcagccatagaccttggtgtaa

SEQ ID NO: 125310 - DNA, 22 bp, Artificial Sequence
  Synthetic oligonucleotide; CTT chr11 5331132 5331153 5331137 5331132 -
ggtgtaactttgacaacaatgt

SEQ ID NO: 125311 - DNA, 22 bp, Artificial Sequence
  Synthetic oligonucleotide; TTG chr11 5331131 5331152 5331136 5331131 -
gtgtaactttgacaacaatgtc

SEQ ID NO: 125312 - DNA, 22 bp, Artificial Sequence
  Synthetic oligonucleotide; CTT chr11 5331122 5331143 5331127 5331122 -
tgacaacaatgtccactgtcct

SEQ ID NO: 125313 - DNA, 22 bp, Artificial Sequence
  Synthetic oligonucleotide; TTT chr11 5331121 5331142 5331126 5331121 -
gacaacaatgtccactgtcctt

SEQ ID NO: 125314 - DNA, 22 bp, Artificial Sequence
  Synthetic oligonucleotide; TTG chr11 5331120 5331141 5331125 5331120 -
acaacaatgtccactgtccttg

SEQ ID NO: 125315 - DNA, 22 bp, Artificial Sequence
  Synthetic oligonucleotide; CTG chr11 5331104 5331125 5331109 5331104 -
tccttggtgttctctggctaga

SEQ ID NO: 125316 - DNA, 22 bp, Artificial Sequence
  Synthetic oligonucleotide; CTT chr11 5331099 5331120 5331104 5331099 -
ggtgttctctggctagatcaca

SEQ ID NO: 125317 - DNA, 22 bp, Artificial Sequence
  Synthetic oligonucleotide; TTG chr11 5331098 5331119 5331103 5331098 -
gtgttctctggctagatcacag

SEQ ID NO: 125318 - DNA, 22 bp, Artificial Sequence
  Synthetic oligonucleotide; TTC chr11 5331092 5331113 5331097 5331092 -
tctggctagatcacaggaaaat

SEQ ID NO: 125319 - DNA, 22 bp, Artificial Sequence
  Synthetic oligonucleotide; CTC chr11 5331090 5331111 5331095 5331090 -
tggctagatcacaggaaaatga

SEQ ID NO: 125320 - DNA, 22 bp, Artificial Sequence
  Synthetic oligonucleotide; CTG chr11 5331088 5331109 5331093 5331088 -
gctagatcacaggaaaatgagc

SEQ ID NO: 125321 - DNA, 22 bp, Artificial Sequence
  Synthetic oligonucleotide; CTA chr11 5331084 5331105 5331089 5331084 -
gatcacaggaaaatgagccatg

SEQ ID NO: 125322 - DNA, 22 bp, Artificial Sequence
  Synthetic oligonucleotide; CTG chr11 5331055 5331076 5331060 5331055 -
cttcctccaggcctatctaatc

SEQ ID NO: 125323 - DNA, 22 bp, Artificial Sequence
  Synthetic oligonucleotide; CTT chr11 5331052 5331073 5331057 5331052 -
cctccaggcctatctaatccac

SEQ ID NO: 125324 - DNA, 22 bp, Artificial Sequence
  Synthetic oligonucleotide; TTC chr11 5331051 5331072 5331056 5331051 -
ctccaggcctatctaatccact

SEQ ID NO: 125325 - DNA, 22 bp, Artificial Sequence
  Synthetic oligonucleotide; CTC chr11 5331048 5331069 5331053 5331048 -
caggcctatctaatccactccc

SEQ ID NO: 125326 - DNA, 22 bp, Artificial Sequence
  Synthetic oligonucleotide; CTA chr11 5331040 5331061 5331045 5331040 -
tctaatccactccctctctatc

SEQ ID NO: 125327 - DNA, 22 bp, Artificial Sequence
  Synthetic oligonucleotide; CTA chr11 5331036 5331057 5331041 5331036 -
atccactccctctctatcgtgg

SEQ ID NO: 125328 - DNA, 22 bp, Artificial Sequence
  Synthetic oligonucleotide; CTC chr11 5331028 5331049 5331033 5331028 -
cctctctatcgtggagtccaga

SEQ ID NO: 125329 - DNA, 22 bp, Artificial Sequence
  Synthetic oligonucleotide; CTC chr11 5331024 5331045 5331029 5331024 -
tctatcgtggagtccagagtgt

SEQ ID NO: 125330 - DNA, 22 bp, Artificial Sequence
  Synthetic oligonucleotide; CTC chr11 5331022 5331043 5331027 5331022 -
tatcgtggagtccagagtgttg

SEQ ID NO: 125331 - DNA, 22 bp, Artificial Sequence
  Synthetic oligonucleotide; CTA chr11 5331020 5331041 5331025 5331020 -
tcgtggagtccagagtgttgct

SEQ ID NO: 125332 - DNA, 22 bp, Artificial Sequence
  Synthetic oligonucleotide; TTG chr11 5331000 5331021 5331005 5331000 -
ctcatcatggcccatgactgtt

SEQ ID NO: 125333 - DNA, 22 bp, Artificial Sequence
  Synthetic oligonucleotide; CTC chr11 5330997 5331018 5331002 5330997 -
atcatggcccatgactgtttta

SEQ ID NO: 125334 - DNA, 22 bp, Artificial Sequence
  Synthetic oligonucleotide; CTG chr11 5330980 5331001 5330985 5330980 -
ttttattggcatccataatccc

SEQ ID NO: 125335 - DNA, 22 bp, Artificial Sequence
  Synthetic oligonucleotide; TTT chr11 5330977 5330998 5330982 5330977 -
tattggcatccataatcccctg

SEQ ID NO: 125336 - DNA, 22 bp, Artificial Sequence
  Synthetic oligonucleotide; TTT chr11 5330976 5330997 5330981 5330976 -
attggcatccataatcccctga

SEQ ID NO: 125337 - DNA, 22 bp, Artificial Sequence
  Synthetic oligonucleotide; TTA chr11 5330975 5330996 5330980 5330975 -
ttggcatccataatcccctgag

SEQ ID NO: 125338 - DNA, 22 bp, Artificial Sequence
  Synthetic oligonucleotide; TTG chr11 5330972 5330993 5330977 5330972 -
gcatccataatcccctgagata

SEQ ID NO: 125339 - DNA, 22 bp, Artificial Sequence
  Synthetic oligonucleotide; CTG chr11 5330955 5330976 5330960 5330955 -
agatacacctccattctcacca

SEQ ID NO: 125340 - DNA, 22 bp, Artificial Sequence
  Synthetic oligonucleotide; CTC chr11 5330944 5330965 5330949 5330944 -
cattctcaccaatgctaaggtg

SEQ ID NO: 125341 - DNA, 22 bp, Artificial Sequence
  Synthetic oligonucleotide; TTC chr11 5330939 5330960 5330944 5330939 -
tcaccaatgctaaggtggtgaa

SEQ ID NO: 125342 - DNA, 22 bp, Artificial Sequence
  Synthetic oligonucleotide; CTC chr11 5330937 5330958 5330942 5330937 -
accaatgctaaggtggtgaaga

SEQ ID NO: 125343 - DNA, 22 bp, Artificial Sequence
  Synthetic oligonucleotide; CTA chr11 5330927 5330948 5330932 5330927 -
aggtggtgaagatagatctggg

SEQ ID NO: 125344 - DNA, 22 bp, Artificial Sequence
  Synthetic oligonucleotide; CTG chr11 5330907 5330928 5330912 5330907 -
ggggttcaaatgaggggatttg

SEQ ID NO: 125345 - DNA, 22 bp, Artificial Sequence
  Synthetic oligonucleotide; TTC chr11 5330900 5330921 5330905 5330900 -
aaatgaggggatttgttatgct

SEQ ID NO: 125346 - DNA, 22 bp, Artificial Sequence
  Synthetic oligonucleotide; TTT chr11 5330886 5330907 5330891 5330886 -
gttatgctaattgtgcccataa

SEQ ID NO: 125347 - DNA, 22 bp, Artificial Sequence
  Synthetic oligonucleotide; TTG chr11 5330885 5330906 5330890 5330885 -
ttatgctaattgtgcccataat

SEQ ID NO: 125348 - DNA, 22 bp, Artificial Sequence
  Synthetic oligonucleotide; TTA chr11 5330882 5330903 5330887 5330882 -
tgctaattgtgcccataatcat

SEQ ID NO: 125349 - DNA, 22 bp, Artificial Sequence
  Synthetic oligonucleotide; CTA chr11 5330877 5330898 5330882 5330877 -
attgtgcccataatcatcaccc

SEQ ID NO: 125350 - DNA, 22 bp, Artificial Sequence
  Synthetic oligonucleotide; TTG chr11 5330873 5330894 5330878 5330873 -
tgcccataatcatcaccctctc

SEQ ID NO: 125351 - DNA, 22 bp, Artificial Sequence
  Synthetic oligonucleotide; CTC chr11 5330853 5330874 5330858 5330853 -
tctggattcccctactgtcaat

SEQ ID NO: 125352 - DNA, 22 bp, Artificial Sequence
  Synthetic oligonucleotide; CTC chr11 5330851 5330872 5330856 5330851 -
tggattcccctactgtcaatcc

SEQ ID NO: 125353 - DNA, 22 bp, Artificial Sequence
  Synthetic oligonucleotide; CTG chr11 5330849 5330870 5330854 5330849 -
gattcccctactgtcaatccca

SEQ ID NO: 125354 - DNA, 22 bp, Artificial Sequence
  Synthetic oligonucleotide; TTC chr11 5330844 5330865 5330849 5330844 -
ccctactgtcaatcccatgtcc

SEQ ID NO: 125355 - DNA, 22 bp, Artificial Sequence
  Synthetic oligonucleotide; CTA chr11 5330839 5330860 5330844 5330839 -
ctgtcaatcccatgtcctctcc

SEQ ID NO: 125356 - DNA, 22 bp, Artificial Sequence
  Synthetic oligonucleotide; CTG chr11 5330836 5330857 5330841 5330836 -
tcaatcccatgtcctctcccat

SEQ ID NO: 125357 - DNA, 22 bp, Artificial Sequence
  Synthetic oligonucleotide; CTC chr11 5330820 5330841 5330825 5330820 -
tcccatgctttctgcctgcacc

SEQ ID NO: 125358 - DNA, 22 bp, Artificial Sequence
  Synthetic oligonucleotide; CTC chr11 5330818 5330839 5330823 5330818 -
ccatgctttctgcctgcaccag

SEQ ID NO: 125359 - DNA, 22 bp, Artificial Sequence
  Synthetic oligonucleotide; CTT chr11 5330810 5330831 5330815 5330810 -
tctgcctgcaccagatgtgatc

SEQ ID NO: 125360 - DNA, 22 bp, Artificial Sequence
  Synthetic oligonucleotide; TTT chr11 5330809 5330830 5330814 5330809 -
ctgcctgcaccagatgtgatca

SEQ ID NO: 125361 - DNA, 22 bp, Artificial Sequence
  Synthetic oligonucleotide; TTC chr11 5330808 5330829 5330813 5330808 -
tgcctgcaccagatgtgatcaa

SEQ ID NO: 125362 - DNA, 22 bp, Artificial Sequence
  Synthetic oligonucleotide; CTG chr11 5330806 5330827 5330811 5330806 -
cctgcaccagatgtgatcaaac

SEQ ID NO: 125363 - DNA, 22 bp, Artificial Sequence
  Synthetic oligonucleotide; CTG chr11 5330802 5330823 5330807 5330802 -
caccagatgtgatcaaactggc

SEQ ID NO: 125364 - DNA, 22 bp, Artificial Sequence
  Synthetic oligonucleotide; CTG chr11 5330782 5330803 5330787 5330782 -
gcctgtgcagacatcaccttta

SEQ ID NO: 125365 - DNA, 22 bp, Artificial Sequence
  Synthetic oligonucleotide; CTG chr11 5330777 5330798 5330782 5330777 -
tgcagacatcacctttaataga

SEQ ID NO: 125366 - DNA, 22 bp, Artificial Sequence
  Synthetic oligonucleotide; CTT chr11 5330762 5330783 5330767 5330762 -
taatagactttatcctatagtc

SEQ ID NO: 125367 - DNA, 22 bp, Artificial Sequence
  Synthetic oligonucleotide; TTT chr11 5330761 5330782 5330766 5330761 -
aatagactttatcctatagtcc

SEQ ID NO: 125368 - DNA, 22 bp, Artificial Sequence
  Synthetic oligonucleotide; TTA chr11 5330760 5330781 5330765 5330760 -
atagactttatcctatagtcct

SEQ ID NO: 125369 - DNA, 22 bp, Artificial Sequence
  Synthetic oligonucleotide; CTT chr11 5330752 5330773 5330757 5330752 -
tatcctatagtcctggtctcat

SEQ ID NO: 125370 - DNA, 22 bp, Artificial Sequence
  Synthetic oligonucleotide; TTT chr11 5330751 5330772 5330756 5330751 -
atcctatagtcctggtctcatc

SEQ ID NO: 125371 - DNA, 22 bp, Artificial Sequence
  Synthetic oligonucleotide; TTA chr11 5330750 5330771 5330755 5330750 -
tcctatagtcctggtctcatca

SEQ ID NO: 125372 - DNA, 22 bp, Artificial Sequence
  Synthetic oligonucleotide; CTA chr11 5330745 5330766 5330750 5330745 -
tagtcctggtctcatcaactgg

SEQ ID NO: 125373 - DNA, 22 bp, Artificial Sequence
  Synthetic oligonucleotide; CTG chr11 5330737 5330758 5330742 5330737 -
gtctcatcaactggtttcttgg

SEQ ID NO: 125374 - DNA, 22 bp, Artificial Sequence
  Synthetic oligonucleotide; CTC chr11 5330732 5330753 5330737 5330732 -
atcaactggtttcttggacttt

SEQ ID NO: 125375 - DNA, 22 bp, Artificial Sequence
  Synthetic oligonucleotide; CTG chr11 5330724 5330745 5330729 5330724 -
gtttcttggactttgtgcttat

SEQ ID NO: 125376 - DNA, 22 bp, Artificial Sequence
  Synthetic oligonucleotide; TTT chr11 5330720 5330741 5330725 5330720 -
cttggactttgtgcttatcctt

SEQ ID NO: 125377 - DNA, 22 bp, Artificial Sequence
  Synthetic oligonucleotide; TTC chr11 5330719 5330740 5330724 5330719 -
ttggactttgtgcttatcctta

SEQ ID NO: 125378 - DNA, 22 bp, Artificial Sequence
  Synthetic oligonucleotide; CTT chr11 5330717 5330738 5330722 5330717 -
ggactttgtgcttatccttatc

SEQ ID NO: 125379 - DNA, 22 bp, Artificial Sequence
  Synthetic oligonucleotide; TTG chr11 5330716 5330737 5330721 5330716 -
gactttgtgcttatccttatct

SEQ ID NO: 125380 - DNA, 22 bp, Artificial Sequence
  Synthetic oligonucleotide; CTT chr11 5330711 5330732 5330716 5330711 -
tgtgcttatccttatctcttac

SEQ ID NO: 125381 - DNA, 22 bp, Artificial Sequence
  Synthetic oligonucleotide; TTT chr11 5330710 5330731 5330715 5330710 -
gtgcttatccttatctcttaca

SEQ ID NO: 125382 - DNA, 22 bp, Artificial Sequence
  Synthetic oligonucleotide; TTG chr11 5330709 5330730 5330714 5330709 -
tgcttatccttatctcttacat

SEQ ID NO: 125383 - DNA, 22 bp, Artificial Sequence
  Synthetic oligonucleotide; CTT chr11 5330704 5330725 5330709 5330704 -
atccttatctcttacattctga

SEQ ID NO: 125384 - DNA, 22 bp, Artificial Sequence
  Synthetic oligonucleotide; TTA chr11 5330703 5330724 5330708 5330703 -
tccttatctcttacattctgat

SEQ ID NO: 125385 - DNA, 22 bp, Artificial Sequence
  Synthetic oligonucleotide; CTT chr11 5330698 5330719 5330703 5330698 -
atctcttacattctgatcctta

SEQ ID NO: 125386 - DNA, 22 bp, Artificial Sequence
  Synthetic oligonucleotide; TTA chr11 5330697 5330718 5330702 5330697 -
tctcttacattctgatccttaa

SEQ ID NO: 125387 - DNA, 22 bp, Artificial Sequence
  Synthetic oligonucleotide; CTC chr11 5330693 5330714 5330698 5330693 -
ttacattctgatccttaagaag

SEQ ID NO: 125388 - DNA, 22 bp, Artificial Sequence
  Synthetic oligonucleotide; CTT chr11 5330691 5330712 5330696 5330691 -
acattctgatccttaagaaggt

SEQ ID NO: 125389 - DNA, 22 bp, Artificial Sequence
  Synthetic oligonucleotide; TTA chr11 5330690 5330711 5330695 5330690 -
cattctgatccttaagaaggtc

SEQ ID NO: 125390 - DNA, 22 bp, Artificial Sequence
  Synthetic oligonucleotide; TTC chr11 5330685 5330706 5330690 5330685 -
tgatccttaagaaggtcatggg

SEQ ID NO: 125391 - DNA, 22 bp, Artificial Sequence
  Synthetic oligonucleotide; CTG chr11 5330683 5330704 5330688 5330683 -
atccttaagaaggtcatgggaa

SEQ ID NO: 125392 - DNA, 22 bp, Artificial Sequence
  Synthetic oligonucleotide; CTT chr11 5330677 5330698 5330682 5330677 -
aagaaggtcatgggaattgcct

SEQ ID NO: 125393 - DNA, 22 bp, Artificial Sequence
  Synthetic oligonucleotide; TTA chr11 5330676 5330697 5330681 5330676 -
agaaggtcatgggaattgcctc

SEQ ID NO: 125394 - DNA, 22 bp, Artificial Sequence
  Synthetic oligonucleotide; TTG chr11 5330658 5330679 5330663 5330658 -
cctcagacaaggagcagactaa

SEQ ID NO: 125395 - DNA, 22 bp, Artificial Sequence
  Synthetic oligonucleotide; CTC chr11 5330654 5330675 5330659 5330654 -
agacaaggagcagactaaggcc

SEQ ID NO: 125396 - DNA, 22 bp, Artificial Sequence
  Synthetic oligonucleotide; CTA chr11 5330637 5330658 5330642 5330637 -
aggccctaaatacttgtatttc

SEQ ID NO: 125397 - DNA, 22 bp, Artificial Sequence
  Synthetic oligonucleotide; CTA chr11 5330629 5330650 5330634 5330629 -
aatacttgtatttctcacatta

SEQ ID NO: 125398 - DNA, 22 bp, Artificial Sequence
  Synthetic oligonucleotide; CTT chr11 5330622 5330643 5330627 5330622 -
gtatttctcacattagctgtgt

SEQ ID NO: 125399 - DNA, 22 bp, Artificial Sequence
  Synthetic oligonucleotide; TTG chr11 5330621 5330642 5330626 5330621 -
tatttctcacattagctgtgtt

SEQ ID NO: 125400 - DNA, 22 bp, Artificial Sequence
  Synthetic oligonucleotide; TTT chr11 5330616 5330637 5330621 5330616 -
ctcacattagctgtgttctggt

SEQ ID NO: 125401 - DNA, 22 bp, Artificial Sequence
  Synthetic oligonucleotide; TTC chr11 5330615 5330636 5330620 5330615 -
tcacattagctgtgttctggtt

SEQ ID NO: 125402 - DNA, 22 bp, Artificial Sequence
  Synthetic oligonucleotide; CTC chr11 5330613 5330634 5330618 5330613 -
acattagctgtgttctggtttt

SEQ ID NO: 125403 - DNA, 22 bp, Artificial Sequence
  Synthetic oligonucleotide; TTA chr11 5330607 5330628 5330612 5330607 -
gctgtgttctggtttttaatgt

SEQ ID NO: 125404 - DNA, 22 bp, Artificial Sequence
  Synthetic oligonucleotide; CTG chr11 5330603 5330624 5330608 5330603 -
tgttctggtttttaatgtcact

SEQ ID NO: 125405 - DNA, 22 bp, Artificial Sequence
  Synthetic oligonucleotide; TTC chr11 5330598 5330619 5330603 5330598 -
tggtttttaatgtcacttgatt

SEQ ID NO: 125406 - DNA, 22 bp, Artificial Sequence
  Synthetic oligonucleotide; CTG chr11 5330596 5330617 5330601 5330596 -
gtttttaatgtcacttgattgg

SEQ ID NO: 125407 - DNA, 22 bp, Artificial Sequence
  Synthetic oligonucleotide; TTT chr11 5330592 5330613 5330597 5330592 -
ttaatgtcacttgattgggcta

SEQ ID NO: 125408 - DNA, 22 bp, Artificial Sequence
  Synthetic oligonucleotide; TTT chr11 5330591 5330612 5330596 5330591 -
taatgtcacttgattgggctac

SEQ ID NO: 125409 - DNA, 22 bp, Artificial Sequence
  Synthetic oligonucleotide; TTT chr11 5330590 5330611 5330595 5330590 -
aatgtcacttgattgggctacc

SEQ ID NO: 125410 - DNA, 22 bp, Artificial Sequence
  Synthetic oligonucleotide; TTA chr11 5330589 5330610 5330594 5330589 -
atgtcacttgattgggctacca

SEQ ID NO: 125411 - DNA, 22 bp, Artificial Sequence
  Synthetic oligonucleotide; CTT chr11 5330580 5330601 5330585 5330580 -
gattgggctaccaccctttcag

SEQ ID NO: 125412 - DNA, 22 bp, Artificial Sequence
  Synthetic oligonucleotide; TTG chr11 5330579 5330600 5330584 5330579 -
attgggctaccaccctttcaga

SEQ ID NO: 125413 - DNA, 22 bp, Artificial Sequence
  Synthetic oligonucleotide; TTG chr11 5330575 5330596 5330580 5330575 -
ggctaccaccctttcagacact

SEQ ID NO: 125414 - DNA, 22 bp, Artificial Sequence
  Synthetic oligonucleotide; CTA chr11 5330570 5330591 5330575 5330570 -
ccaccctttcagacactgtgct

SEQ ID NO: 125415 - DNA, 22 bp, Artificial Sequence
  Synthetic oligonucleotide; CTT chr11 5330562 5330583 5330567 5330562 -
tcagacactgtgcttcatcaaa

SEQ ID NO: 125416 - DNA, 22 bp, Artificial Sequence
  Synthetic oligonucleotide; TTT chr11 5330561 5330582 5330566 5330561 -
cagacactgtgcttcatcaaaa

SEQ ID NO: 125417 - DNA, 22 bp, Artificial Sequence
  Synthetic oligonucleotide; TTC chr11 5330560 5330581 5330565 5330560 -
agacactgtgcttcatcaaaaa

SEQ ID NO: 125418 - DNA, 22 bp, Artificial Sequence
  Synthetic oligonucleotide; CTG chr11 5330552 5330573 5330557 5330552 -
tgcttcatcaaaaaaatgttaa

SEQ ID NO: 125419 - DNA, 22 bp, Artificial Sequence
  Synthetic oligonucleotide; CTT chr11 5330547 5330568 5330552 5330547 -
catcaaaaaaatgttaagaata

SEQ ID NO: 125420 - DNA, 22 bp, Artificial Sequence
  Synthetic oligonucleotide; TTC chr11 5330546 5330567 5330551 5330546 -
atcaaaaaaatgttaagaataa

SEQ ID NO: 125421 - DNA, 22 bp, Artificial Sequence
  Synthetic oligonucleotide; TTA chr11 5330531 5330552 5330536 5330531 -
agaataaaaattatttcacaca

SEQ ID NO: 125422 - DNA, 22 bp, Artificial Sequence
  Synthetic oligonucleotide; TTA chr11 5330518 5330539 5330523 5330518 -
tttcacacatactttaaaacta

SEQ ID NO: 125423 - DNA, 22 bp, Artificial Sequence
  Synthetic oligonucleotide; TTT chr11 5330515 5330536 5330520 5330515 -
cacacatactttaaaactaaca

SEQ ID NO: 125424 - DNA, 22 bp, Artificial Sequence
  Synthetic oligonucleotide; TTC chr11 5330514 5330535 5330519 5330514 -
acacatactttaaaactaacac

SEQ ID NO: 125425 - DNA, 22 bp, Artificial Sequence
  Synthetic oligonucleotide; CTT chr11 5330504 5330525 5330509 5330504 -
taaaactaacacgtcacaatgc

SEQ ID NO: 125426 - DNA, 22 bp, Artificial Sequence
  Synthetic oligonucleotide; TTT chr11 5330503 5330524 5330508 5330503 -
aaaactaacacgtcacaatgca

SEQ ID NO: 125427 - DNA, 22 bp, Artificial Sequence
  Synthetic oligonucleotide; TTA chr11 5330502 5330523 5330507 5330502 -
aaactaacacgtcacaatgcaa

SEQ ID NO: 125428 - DNA, 22 bp, Artificial Sequence
  Synthetic oligonucleotide; CTA chr11 5330496 5330517 5330501 5330496 -
acacgtcacaatgcaaatcaaa

SEQ ID NO: 125429 - DNA, 22 bp, Artificial Sequence
  Synthetic oligonucleotide; CTC chr11 5330453 5330474 5330458 5330453 -
acaccagttagaatggcaatca

SEQ ID NO: 125430 - DNA, 22 bp, Artificial Sequence
  Synthetic oligonucleotide; TTA chr11 5330443 5330464 5330448 5330443 -
gaatggcaatcattaaaaagtc

SEQ ID NO: 125431 - DNA, 22 bp, Artificial Sequence
  Synthetic oligonucleotide; TTA chr11 5330428 5330449 5330433 5330428 -
aaaagtcagggaacaacaggtg

SEQ ID NO: 125432 - DNA, 22 bp, Artificial Sequence
  Synthetic oligonucleotide; CTG chr11 5330403 5330424 5330408 5330403 -
gagaggatgtggagaaatagga

SEQ ID NO: 125433 - DNA, 22 bp, Artificial Sequence
  Synthetic oligonucleotide; CTT chr11 5330375 5330396 5330380 5330375 -
ttacactcttggtgggactgta

SEQ ID NO: 125434 - DNA, 22 bp, Artificial Sequence
  Synthetic oligonucleotide; TTT chr11 5330374 5330395 5330379 5330374 -
tacactcttggtgggactgtaa

SEQ ID NO: 125435 - DNA, 22 bp, Artificial Sequence
  Synthetic oligonucleotide; TTT chr11 5330373 5330394 5330378 5330373 -
acactcttggtgggactgtaaa

SEQ ID NO: 125436 - DNA, 22 bp, Artificial Sequence
  Synthetic oligonucleotide; TTA chr11 5330372 5330393 5330377 5330372 -
cactcttggtgggactgtaaac

SEQ ID NO: 125437 - DNA, 22 bp, Artificial Sequence
  Synthetic oligonucleotide; CTC chr11 5330367 5330388 5330372 5330367 -
ttggtgggactgtaaactagtt

SEQ ID NO: 125438 - DNA, 22 bp, Artificial Sequence
  Synthetic oligonucleotide; CTT chr11 5330365 5330386 5330370 5330365 -
ggtgggactgtaaactagttca

SEQ ID NO: 125439 - DNA, 22 bp, Artificial Sequence
  Synthetic oligonucleotide; TTG chr11 5330364 5330385 5330369 5330364 -
gtgggactgtaaactagttcaa

SEQ ID NO: 125440 - DNA, 22 bp, Artificial Sequence
  Synthetic oligonucleotide; CTG chr11 5330355 5330376 5330360 5330355 -
taaactagttcaaccattgtgg

SEQ ID NO: 125441 - DNA, 22 bp, Artificial Sequence
  Synthetic oligonucleotide; CTA chr11 5330348 5330369 5330353 5330348 -
gttcaaccattgtggaagtcag

SEQ ID NO: 125442 - DNA, 22 bp, Artificial Sequence
  Synthetic oligonucleotide; TTC chr11 5330344 5330365 5330349 5330344 -
aaccattgtggaagtcagtgtg

SEQ ID NO: 125443 - DNA, 22 bp, Artificial Sequence
  Synthetic oligonucleotide; TTG chr11 5330336 5330357 5330341 5330336 -
tggaagtcagtgtggcgattcc

SEQ ID NO: 125444 - DNA, 22 bp, Artificial Sequence
  Synthetic oligonucleotide; TTC chr11 5330315 5330336 5330320 5330315 -
ctcagggatctagaactagaaa

SEQ ID NO: 125445 - DNA, 22 bp, Artificial Sequence
  Synthetic oligonucleotide; CTC chr11 5330312 5330333 5330317 5330312 -
agggatctagaactagaaatac

SEQ ID NO: 125446 - DNA, 22 bp, Artificial Sequence
  Synthetic oligonucleotide; CTA chr11 5330303 5330324 5330308 5330303 -
gaactagaaataccatttgacc

SEQ ID NO: 125447 - DNA, 22 bp, Artificial Sequence
  Synthetic oligonucleotide; CTA chr11 5330297 5330318 5330302 5330297 -
gaaataccatttgacccagcca

SEQ ID NO: 125448 - DNA, 22 bp, Artificial Sequence
  Synthetic oligonucleotide; TTT chr11 5330285 5330306 5330290 5330285 -
gacccagccatcccattactgg

SEQ ID NO: 125449 - DNA, 22 bp, Artificial Sequence
  Synthetic oligonucleotide; TTG chr11 5330284 5330305 5330289 5330284 -
acccagccatcccattactggg

SEQ ID NO: 125450 - DNA, 22 bp, Artificial Sequence
  Synthetic oligonucleotide; TTA chr11 5330267 5330288 5330272 5330267 -
ctgggtatatacccaacggatt

SEQ ID NO: 125451 - DNA, 22 bp, Artificial Sequence
  Synthetic oligonucleotide; CTG chr11 5330264 5330285 5330269 5330264 -
ggtatatacccaacggattata

SEQ ID NO: 125452 - DNA, 22 bp, Artificial Sequence
  Synthetic oligonucleotide; TTA chr11 5330244 5330265 5330249 5330244 -
taaatcatgctgctataaagac

SEQ ID NO: 125453 - DNA, 22 bp, Artificial Sequence
  Synthetic oligonucleotide; CTG chr11 5330232 5330253 5330237 5330232 -
ctataaagacacatgcacacgt

SEQ ID NO: 125454 - DNA, 22 bp, Artificial Sequence
  Synthetic oligonucleotide; CTA chr11 5330229 5330250 5330234 5330229 -
taaagacacatgcacacgtatg

SEQ ID NO: 125455 - DNA, 22 bp, Artificial Sequence
  Synthetic oligonucleotide; TTT chr11 5330204 5330225 5330209 5330204 -
actgtggcactattcacaatag

SEQ ID NO: 125456 - DNA, 22 bp, Artificial Sequence
  Synthetic oligonucleotide; TTA chr11 5330203 5330224 5330208 5330203 -
ctgtggcactattcacaatagc

SEQ ID NO: 125457 - DNA, 22 bp, Artificial Sequence
  Synthetic oligonucleotide; CTG chr11 5330200 5330221 5330205 5330200 -
tggcactattcacaatagcaaa

SEQ ID NO: 125458 - DNA, 22 bp, Artificial Sequence
  Synthetic oligonucleotide; CTA chr11 5330192 5330213 5330197 5330192 -
ttcacaatagcaaagacttgga

SEQ ID NO: 125459 - DNA, 22 bp, Artificial Sequence
  Synthetic oligonucleotide; TTC chr11 5330189 5330210 5330194 5330189 -
acaatagcaaagacttggaacc

SEQ ID NO: 125460 - DNA, 22 bp, Artificial Sequence
  Synthetic oligonucleotide; CTT chr11 5330173 5330194 5330178 5330173 -
ggaaccaacccaaatgtccaac

SEQ ID NO: 125461 - DNA, 22 bp, Artificial Sequence
  Synthetic oligonucleotide; TTG chr11 5330172 5330193 5330177 5330172 -
gaaccaacccaaatgtccaaca

SEQ ID NO: 125462 - DNA, 22 bp, Artificial Sequence
  Synthetic oligonucleotide; CTG chr11 5330139 5330160 5330144 5330139 -
aattaagaaaatgtggcacata

SEQ ID NO: 125463 - DNA, 22 bp, Artificial Sequence
  Synthetic oligonucleotide; TTA chr11 5330134 5330155 5330139 5330134 -
agaaaatgtggcacatatacac

SEQ ID NO: 125464 - DNA, 22 bp, Artificial Sequence
  Synthetic oligonucleotide; CTA chr11 5330100 5330121 5330105 5330100 -
tgcagccataaaaaatgaagag

SEQ ID NO: 125465 - DNA, 22 bp, Artificial Sequence
  Synthetic oligonucleotide; TTC chr11 5330075 5330096 5330080 5330075 -
atgtcatttgtagggacatgga

SEQ ID NO: 125466 - DNA, 22 bp, Artificial Sequence
  Synthetic oligonucleotide; TTT chr11 5330066 5330087 5330071 5330066 -
gtagggacatggatgaaactgg

SEQ ID NO: 125467 - DNA, 22 bp, Artificial Sequence
  Synthetic oligonucleotide; TTG chr11 5330065 5330086 5330070 5330065 -
tagggacatggatgaaactgga

SEQ ID NO: 125468 - DNA, 22 bp, Artificial Sequence
  Synthetic oligonucleotide; CTG chr11 5330045 5330066 5330050 5330045 -
gaaaccatcattctcagcaaac

SEQ ID NO: 125469 - DNA, 22 bp, Artificial Sequence
  Synthetic oligonucleotide; TTC chr11 5330032 5330053 5330037 5330032 -
tcagcaaactatcgcaaggaca

SEQ ID NO: 125470 - DNA, 22 bp, Artificial Sequence
  Synthetic oligonucleotide; CTC chr11 5330030 5330051 5330035 5330030 -
agcaaactatcgcaaggacaaa

SEQ ID NO: 125471 - DNA, 22 bp, Artificial Sequence
  Synthetic oligonucleotide; CTA chr11 5330021 5330042 5330026 5330021 -
tcgcaaggacaaaaaaccaagc

SEQ ID NO: 125472 - DNA, 22 bp, Artificial Sequence
  Synthetic oligonucleotide; CTG chr11 5329995 5330016 5330000 5329995 -
catgttctcactcataggtggg

SEQ ID NO: 125473 - DNA, 22 bp, Artificial Sequence
  Synthetic oligonucleotide; TTC chr11 5329988 5330009 5329993 5329988 -
tcactcataggtgggaattgaa

SEQ ID NO: 125474 - DNA, 22 bp, Artificial Sequence
  Synthetic oligonucleotide; CTC chr11 5329986 5330007 5329991 5329986 -
actcataggtgggaattgaaca

SEQ ID NO: 125475 - DNA, 22 bp, Artificial Sequence
  Synthetic oligonucleotide; CTC chr11 5329982 5330003 5329987 5329982 -
ataggtgggaattgaacaatga

SEQ ID NO: 125476 - DNA, 22 bp, Artificial Sequence
  Synthetic oligonucleotide; TTG chr11 5329968 5329989 5329973 5329968 -
aacaatgagaacacatggacac

SEQ ID NO: 125477 - DNA, 22 bp, Artificial Sequence
  Synthetic oligonucleotide; CTC chr11 5329925 5329946 5329930 5329925 -
cggggactgttgtgaggtgggg

SEQ ID NO: 125478 - DNA, 22 bp, Artificial Sequence
  Synthetic oligonucleotide; CTG chr11 5329916 5329937 5329921 5329916 -
ttgtgaggtggggggaaggggg

SEQ ID NO: 125479 - DNA, 22 bp, Artificial Sequence
  Synthetic oligonucleotide; TTG chr11 5329913 5329934 5329918 5329913 -
tgaggtggggggaagggggaga

SEQ ID NO: 125480 - DNA, 22 bp, Artificial Sequence
  Synthetic oligonucleotide; TTA chr11 5329881 5329902 5329886 5329881 -
ggagatatacctaatgctaagt

SEQ ID NO: 125481 - DNA, 22 bp, Artificial Sequence
  Synthetic oligonucleotide; CTA chr11 5329868 5329889 5329873 5329868 -
atgctaagtgacaagttaatgg

SEQ ID NO: 125482 - DNA, 22 bp, Artificial Sequence
  Synthetic oligonucleotide; CTA chr11 5329862 5329883 5329867 5329862 -
agtgacaagttaatgggtgcag

SEQ ID NO: 125483 - DNA, 22 bp, Artificial Sequence
  Synthetic oligonucleotide; TTA chr11 5329850 5329871 5329855 5329850 -
atgggtgcagcacaccaacatg

SEQ ID NO: 125484 - DNA, 22 bp, Artificial Sequence
  Synthetic oligonucleotide; CTG chr11 5329800 5329821 5329805 5329800 -
cacattgtgcacatgtacccta

SEQ ID NO: 125485 - DNA, 22 bp, Artificial Sequence
  Synthetic oligonucleotide; TTG chr11 5329793 5329814 5329798 5329793 -
tgcacatgtaccctaaaactta

SEQ ID NO: 125486 - DNA, 22 bp, Artificial Sequence
  Synthetic oligonucleotide; CTA chr11 5329778 5329799 5329783 5329778 -
aaacttaaagtataataataat

SEQ ID NO: 125487 - DNA, 22 bp, Artificial Sequence
  Synthetic oligonucleotide; CTT chr11 5329772 5329793 5329777 5329772 -
aaagtataataataataataat

SEQ ID NO: 125488 - DNA, 22 bp, Artificial Sequence
  Synthetic oligonucleotide; TTA chr11 5329771 5329792 5329776 5329771 -
aagtataataataataataata

SEQ ID NO: 125489 - DNA, 22 bp, Artificial Sequence
  Synthetic oligonucleotide; TTA chr11 5329738 5329759 5329743 5329738 -
ttttggattaacaaaaaccaac

SEQ ID NO: 125490 - DNA, 22 bp, Artificial Sequence
  Synthetic oligonucleotide; TTT chr11 5329735 5329756 5329740 5329735 -
tggattaacaaaaaccaacagg

SEQ ID NO: 125491 - DNA, 22 bp, Artificial Sequence
  Synthetic oligonucleotide; TTT chr11 5329734 5329755 5329739 5329734 -
ggattaacaaaaaccaacaggc

SEQ ID NO: 125492 - DNA, 22 bp, Artificial Sequence
  Synthetic oligonucleotide; TTG chr11 5329733 5329754 5329738 5329733 -
gattaacaaaaaccaacaggct

SEQ ID NO: 125493 - DNA, 22 bp, Artificial Sequence
  Synthetic oligonucleotide; TTA chr11 5329728 5329749 5329733 5329728 -
acaaaaaccaacaggctaccac

SEQ ID NO: 125494 - DNA, 22 bp, Artificial Sequence
  Synthetic oligonucleotide; CTA chr11 5329710 5329731 5329715 5329710 -
ccacagattctctttgtgttca

SEQ ID NO: 125495 - DNA, 22 bp, Artificial Sequence
  Synthetic oligonucleotide; TTC chr11 5329700 5329721 5329705 5329700 -
tctttgtgttcaattttctcac

SEQ ID NO: 125496 - DNA, 22 bp, Artificial Sequence
  Synthetic oligonucleotide; CTC chr11 5329698 5329719 5329703 5329698 -
tttgtgttcaattttctcacat

SEQ ID NO: 125497 - DNA, 22 bp, Artificial Sequence
  Synthetic oligonucleotide; CTT chr11 5329696 5329717 5329701 5329696 -
tgtgttcaattttctcacatgt

SEQ ID NO: 125498 - DNA, 22 bp, Artificial Sequence
  Synthetic oligonucleotide; TTT chr11 5329695 5329716 5329700 5329695 -
gtgttcaattttctcacatgtt

SEQ ID NO: 125499 - DNA, 22 bp, Artificial Sequence
  Synthetic oligonucleotide; TTG chr11 5329694 5329715 5329699 5329694 -
tgttcaattttctcacatgttt

SEQ ID NO: 125500 - DNA, 22 bp, Artificial Sequence
  Synthetic oligonucleotide; TTC chr11 5329689 5329710 5329694 5329689 -
aattttctcacatgttttgtta

SEQ ID NO: 125501 - DNA, 22 bp, Artificial Sequence
  Synthetic oligonucleotide; TTT chr11 5329684 5329705 5329689 5329684 -
tctcacatgttttgttattctg

SEQ ID NO: 125502 - DNA, 22 bp, Artificial Sequence
  Synthetic oligonucleotide; TTT chr11 5329683 5329704 5329688 5329683 -
ctcacatgttttgttattctgg

SEQ ID NO: 125503 - DNA, 22 bp, Artificial Sequence
  Synthetic oligonucleotide; TTC chr11 5329682 5329703 5329687 5329682 -
tcacatgttttgttattctggc

SEQ ID NO: 125504 - DNA, 22 bp, Artificial Sequence
  Synthetic oligonucleotide; CTC chr11 5329680 5329701 5329685 5329680 -
acatgttttgttattctggctc

SEQ ID NO: 125505 - DNA, 22 bp, Artificial Sequence
  Synthetic oligonucleotide; TTT chr11 5329672 5329693 5329677 5329672 -
tgttattctggctctgctagaa

SEQ ID NO: 125506 - DNA, 22 bp, Artificial Sequence
  Synthetic oligonucleotide; TTT chr11 5329671 5329692 5329676 5329671 -
gttattctggctctgctagaat

SEQ ID NO: 125507 - DNA, 22 bp, Artificial Sequence
  Synthetic oligonucleotide; TTG chr11 5329670 5329691 5329675 5329670 -
ttattctggctctgctagaatt

SEQ ID NO: 125508 - DNA, 22 bp, Artificial Sequence
  Synthetic oligonucleotide; TTA chr11 5329667 5329688 5329672 5329667 -
ttctggctctgctagaattctc

SEQ ID NO: 125509 - DNA, 22 bp, Artificial Sequence
  Synthetic oligonucleotide; TTC chr11 5329664 5329685 5329669 5329664 -
tggctctgctagaattctcttg

SEQ ID NO: 125510 - DNA, 22 bp, Artificial Sequence
  Synthetic oligonucleotide; CTG chr11 5329662 5329683 5329667 5329662 -
gctctgctagaattctcttgat

SEQ ID NO: 125511 - DNA, 22 bp, Artificial Sequence
  Synthetic oligonucleotide; CTC chr11 5329658 5329679 5329663 5329658 -
tgctagaattctcttgatttga

SEQ ID NO: 125512 - DNA, 22 bp, Artificial Sequence
  Synthetic oligonucleotide; CTG chr11 5329656 5329677 5329661 5329656 -
ctagaattctcttgatttgagt

SEQ ID NO: 125513 - DNA, 22 bp, Artificial Sequence
  Synthetic oligonucleotide; CTA chr11 5329653 5329674 5329658 5329653 -
gaattctcttgatttgagtttg

SEQ ID NO: 125514 - DNA, 22 bp, Artificial Sequence
  Synthetic oligonucleotide; TTC chr11 5329647 5329668 5329652 5329647 -
tcttgatttgagtttgtcatat

SEQ ID NO: 125515 - DNA, 22 bp, Artificial Sequence
  Synthetic oligonucleotide; CTC chr11 5329645 5329666 5329650 5329645 -
ttgatttgagtttgtcatattt

SEQ ID NO: 125516 - DNA, 22 bp, Artificial Sequence
  Synthetic oligonucleotide; CTT chr11 5329643 5329664 5329648 5329643 -
gatttgagtttgtcatattttc

SEQ ID NO: 125517 - DNA, 22 bp, Artificial Sequence
  Synthetic oligonucleotide; TTG chr11 5329642 5329663 5329647 5329642 -
atttgagtttgtcatattttct

SEQ ID NO: 125518 - DNA, 22 bp, Artificial Sequence
  Synthetic oligonucleotide; TTT chr11 5329638 5329659 5329643 5329638 -
gagtttgtcatattttctcttt

SEQ ID NO: 125519 - DNA, 22 bp, Artificial Sequence
  Synthetic oligonucleotide; TTG chr11 5329637 5329658 5329642 5329637 -
agtttgtcatattttctctttc

SEQ ID NO: 125520 - DNA, 22 bp, Artificial Sequence
  Synthetic oligonucleotide; TTT chr11 5329632 5329653 5329637 5329632 -
gtcatattttctctttccccat

SEQ ID NO: 125521 - DNA, 22 bp, Artificial Sequence
  Synthetic oligonucleotide; TTG chr11 5329631 5329652 5329636 5329631 -
tcatattttctctttccccata

SEQ ID NO: 125522 - DNA, 22 bp, Artificial Sequence
  Synthetic oligonucleotide; TTT chr11 5329623 5329644 5329628 5329623 -
tctctttccccatagcctgtgt

SEQ ID NO: 125523 - DNA, 22 bp, Artificial Sequence
  Synthetic oligonucleotide; TTT chr11 5329622 5329643 5329627 5329622 -
ctctttccccatagcctgtgta

SEQ ID NO: 125524 - DNA, 22 bp, Artificial Sequence
  Synthetic oligonucleotide; TTC chr11 5329621 5329642 5329626 5329621 -
tctttccccatagcctgtgtat

SEQ ID NO: 125525 - DNA, 22 bp, Artificial Sequence
  Synthetic oligonucleotide; CTC chr11 5329619 5329640 5329624 5329619 -
tttccccatagcctgtgtattt

SEQ ID NO: 125526 - DNA, 22 bp, Artificial Sequence
  Synthetic oligonucleotide; CTT chr11 5329617 5329638 5329622 5329617 -
tccccatagcctgtgtattttt

SEQ ID NO: 125527 - DNA, 22 bp, Artificial Sequence
  Synthetic oligonucleotide; TTT chr11 5329616 5329637 5329621 5329616 -
ccccatagcctgtgtatttttt

SEQ ID NO: 125528 - DNA, 22 bp, Artificial Sequence
  Synthetic oligonucleotide; TTC chr11 5329615 5329636 5329620 5329615 -
cccatagcctgtgtattttttc

SEQ ID NO: 125529 - DNA, 22 bp, Artificial Sequence
  Synthetic oligonucleotide; CTG chr11 5329604 5329625 5329609 5329604 -
tgtattttttcttcctttataa

SEQ ID NO: 125530 - DNA, 22 bp, Artificial Sequence
  Synthetic oligonucleotide; TTT chr11 5329597 5329618 5329602 5329597 -
tttcttcctttataaactgtac

SEQ ID NO: 125531 - DNA, 22 bp, Artificial Sequence
  Synthetic oligonucleotide; TTT chr11 5329596 5329617 5329601 5329596 -
ttcttcctttataaactgtacc

SEQ ID NO: 125532 - DNA, 22 bp, Artificial Sequence
  Synthetic oligonucleotide; TTT chr11 5329595 5329616 5329600 5329595 -
tcttcctttataaactgtaccc

SEQ ID NO: 125533 - DNA, 22 bp, Artificial Sequence
  Synthetic oligonucleotide; TTT chr11 5329594 5329615 5329599 5329594 -
cttcctttataaactgtacccc

SEQ ID NO: 125534 - DNA, 22 bp, Artificial Sequence
  Synthetic oligonucleotide; TTC chr11 5329593 5329614 5329598 5329593 -
ttcctttataaactgtacccca

SEQ ID NO: 125535 - DNA, 22 bp, Artificial Sequence
  Synthetic oligonucleotide; CTT chr11 5329591 5329612 5329596 5329591 -
cctttataaactgtaccccact

SEQ ID NO: 125536 - DNA, 22 bp, Artificial Sequence
  Synthetic oligonucleotide; TTC chr11 5329590 5329611 5329595 5329590 -
ctttataaactgtaccccactt

SEQ ID NO: 125537 - DNA, 22 bp, Artificial Sequence
  Synthetic oligonucleotide; CTT chr11 5329587 5329608 5329592 5329587 -
tataaactgtaccccacttata

SEQ ID NO: 125538 - DNA, 22 bp, Artificial Sequence
  Synthetic oligonucleotide; TTT chr11 5329586 5329607 5329591 5329586 -
ataaactgtaccccacttatac

SEQ ID NO: 125539 - DNA, 22 bp, Artificial Sequence
  Synthetic oligonucleotide; TTA chr11 5329585 5329606 5329590 5329585 -
taaactgtaccccacttataca

SEQ ID NO: 125540 - DNA, 22 bp, Artificial Sequence
  Synthetic oligonucleotide; CTG chr11 5329578 5329599 5329583 5329578 -
taccccacttatacaaacacta

SEQ ID NO: 125541 - DNA, 22 bp, Artificial Sequence
  Synthetic oligonucleotide; CTT chr11 5329568 5329589 5329573 5329568 -
atacaaacactatatttgttac

SEQ ID NO: 125542 - DNA, 22 bp, Artificial Sequence
  Synthetic oligonucleotide; TTA chr11 5329567 5329588 5329572 5329567 -
tacaaacactatatttgttacc

SEQ ID NO: 125543 - DNA, 22 bp, Artificial Sequence
  Synthetic oligonucleotide; CTA chr11 5329556 5329577 5329561 5329556 -
tatttgttaccttccttgtttt

SEQ ID NO: 125544 - DNA, 22 bp, Artificial Sequence
  Synthetic oligonucleotide; TTT chr11 5329551 5329572 5329556 5329551 -
gttaccttccttgtttttcaat

SEQ ID NO: 125545 - DNA, 22 bp, Artificial Sequence
  Synthetic oligonucleotide; TTG chr11 5329550 5329571 5329555 5329550 -
ttaccttccttgtttttcaatt

SEQ ID NO: 125546 - DNA, 22 bp, Artificial Sequence
  Synthetic oligonucleotide; TTA chr11 5329547 5329568 5329552 5329547 -
ccttccttgtttttcaattatt

SEQ ID NO: 125547 - DNA, 22 bp, Artificial Sequence
  Synthetic oligonucleotide; CTT chr11 5329543 5329564 5329548 5329543 -
ccttgtttttcaattattagct

SEQ ID NO: 125548 - DNA, 22 bp, Artificial Sequence
  Synthetic oligonucleotide; TTC chr11 5329542 5329563 5329547 5329542 -
cttgtttttcaattattagctt

SEQ ID NO: 125549 - DNA, 22 bp, Artificial Sequence
  Synthetic oligonucleotide; CTT chr11 5329539 5329560 5329544 5329539 -
gtttttcaattattagcttaaa

SEQ ID NO: 125550 - DNA, 22 bp, Artificial Sequence
  Synthetic oligonucleotide; TTG chr11 5329538 5329559 5329543 5329538 -
tttttcaattattagcttaaat

SEQ ID NO: 125551 - DNA, 22 bp, Artificial Sequence
  Synthetic oligonucleotide; TTT chr11 5329535 5329556 5329540 5329535 -
ttcaattattagcttaaataat

SEQ ID NO: 125552 - DNA, 22 bp, Artificial Sequence
  Synthetic oligonucleotide; TTT chr11 5329534 5329555 5329539 5329534 -
tcaattattagcttaaataata

SEQ ID NO: 125553 - DNA, 22 bp, Artificial Sequence
  Synthetic oligonucleotide; TTT chr11 5329533 5329554 5329538 5329533 -
caattattagcttaaataatat

SEQ ID NO: 125554 - DNA, 22 bp, Artificial Sequence
  Synthetic oligonucleotide; TTC chr11 5329532 5329553 5329537 5329532 -
aattattagcttaaataatatt

SEQ ID NO: 125555 - DNA, 22 bp, Artificial Sequence
  Synthetic oligonucleotide; TTA chr11 5329527 5329548 5329532 5329527 -
ttagcttaaataatatttcttt

SEQ ID NO: 125556 - DNA, 22 bp, Artificial Sequence
  Synthetic oligonucleotide; TTA chr11 5329524 5329545 5329529 5329524 -
gcttaaataatatttcttttga

SEQ ID NO: 125557 - DNA, 22 bp, Artificial Sequence
  Synthetic oligonucleotide; CTT chr11 5329520 5329541 5329525 5329520 -
aaataatatttcttttgagaaa

SEQ ID NO: 125558 - DNA, 22 bp, Artificial Sequence
  Synthetic oligonucleotide; TTA chr11 5329519 5329540 5329524 5329519 -
aataatatttcttttgagaaat

SEQ ID NO: 125559 - DNA, 22 bp, Artificial Sequence
  Synthetic oligonucleotide; TTT chr11 5329509 5329530 5329514 5329509 -
cttttgagaaattttcccctgc

SEQ ID NO: 125560 - DNA, 22 bp, Artificial Sequence
  Synthetic oligonucleotide; TTC chr11 5329508 5329529 5329513 5329508 -
ttttgagaaattttcccctgcc

SEQ ID NO: 125561 - DNA, 22 bp, Artificial Sequence
  Synthetic oligonucleotide; CTT chr11 5329506 5329527 5329511 5329506 -
ttgagaaattttcccctgcccc

SEQ ID NO: 125562 - DNA, 22 bp, Artificial Sequence
  Synthetic oligonucleotide; TTT chr11 5329505 5329526 5329510 5329505 -
tgagaaattttcccctgcccca

SEQ ID NO: 125563 - DNA, 22 bp, Artificial Sequence
  Synthetic oligonucleotide; TTT chr11 5329504 5329525 5329509 5329504 -
gagaaattttcccctgccccaa

SEQ ID NO: 125564 - DNA, 22 bp, Artificial Sequence
  Synthetic oligonucleotide; TTG chr11 5329503 5329524 5329508 5329503 -
agaaattttcccctgccccaaa

SEQ ID NO: 125565 - DNA, 22 bp, Artificial Sequence
  Synthetic oligonucleotide; TTT chr11 5329495 5329516 5329500 5329495 -
tcccctgccccaaagatgcttt

SEQ ID NO: 125566 - DNA, 22 bp, Artificial Sequence
  Synthetic oligonucleotide; TTT chr11 5329494 5329515 5329499 5329494 -
cccctgccccaaagatgctttc

SEQ ID NO: 125567 - DNA, 22 bp, Artificial Sequence
  Synthetic oligonucleotide; TTC chr11 5329493 5329514 5329498 5329493 -
ccctgccccaaagatgctttct

SEQ ID NO: 125568 - DNA, 22 bp, Artificial Sequence
  Synthetic oligonucleotide; CTG chr11 5329488 5329509 5329493 5329488 -
ccccaaagatgctttctgtggg

SEQ ID NO: 125569 - DNA, 22 bp, Artificial Sequence
  Synthetic oligonucleotide; CTT chr11 5329474 5329495 5329479 5329474 -
tctgtgggctccctttagcatg

SEQ ID NO: 125570 - DNA, 22 bp, Artificial Sequence
  Synthetic oligonucleotide; TTT chr11 5329473 5329494 5329478 5329473 -
ctgtgggctccctttagcatgc

SEQ ID NO: 125571 - DNA, 22 bp, Artificial Sequence
  Synthetic oligonucleotide; TTC chr11 5329472 5329493 5329477 5329472 -
tgtgggctccctttagcatgct

SEQ ID NO: 125572 - DNA, 22 bp, Artificial Sequence
  Synthetic oligonucleotide; CTG chr11 5329470 5329491 5329475 5329470 -
tgggctccctttagcatgctac

SEQ ID NO: 125573 - DNA, 22 bp, Artificial Sequence
  Synthetic oligonucleotide; CTC chr11 5329463 5329484 5329468 5329463 -
cctttagcatgctaccatctat

SEQ ID NO: 125574 - DNA, 22 bp, Artificial Sequence
  Synthetic oligonucleotide; CTT chr11 5329459 5329480 5329464 5329459 -
tagcatgctaccatctatgcag

SEQ ID NO: 125575 - DNA, 22 bp, Artificial Sequence
  Synthetic oligonucleotide; TTT chr11 5329458 5329479 5329463 5329458 -
agcatgctaccatctatgcagt

SEQ ID NO: 125576 - DNA, 22 bp, Artificial Sequence
  Synthetic oligonucleotide; TTA chr11 5329457 5329478 5329462 5329457 -
gcatgctaccatctatgcagta

SEQ ID NO: 125577 - DNA, 22 bp, Artificial Sequence
  Synthetic oligonucleotide; CTA chr11 5329449 5329470 5329454 5329449 -
ccatctatgcagtaatgatagt

SEQ ID NO: 125578 - DNA, 22 bp, Artificial Sequence
  Synthetic oligonucleotide; CTA chr11 5329442 5329463 5329447 5329442 -
tgcagtaatgatagtgctatga

SEQ ID NO: 125579 - DNA, 22 bp, Artificial Sequence
  Synthetic oligonucleotide; CTA chr11 5329423 5329444 5329428 5329423 -
tgaaaatttgtggtaactattt

SEQ ID NO: 125580 - DNA, 22 bp, Artificial Sequence
  Synthetic oligonucleotide; TTT chr11 5329414 5329435 5329419 5329414 -
gtggtaactattttctttatat

SEQ ID NO: 125581 - DNA, 22 bp, Artificial Sequence
  Synthetic oligonucleotide; TTG chr11 5329413 5329434 5329418 5329413 -
tggtaactattttctttatatt

SEQ ID NO: 125582 - DNA, 22 bp, Artificial Sequence
  Synthetic oligonucleotide; CTA chr11 5329404 5329425 5329409 5329404 -
ttttctttatattacacactat

SEQ ID NO: 125583 - DNA, 22 bp, Artificial Sequence
  Synthetic oligonucleotide; TTT chr11 5329401 5329422 5329406 5329401 -
tctttatattacacactattta

SEQ ID NO: 125584 - DNA, 22 bp, Artificial Sequence
  Synthetic oligonucleotide; TTT chr11 5329400 5329421 5329405 5329400 -
ctttatattacacactatttac

SEQ ID NO: 125585 - DNA, 22 bp, Artificial Sequence
  Synthetic oligonucleotide; TTC chr11 5329399 5329420 5329404 5329399 -
tttatattacacactatttaca

SEQ ID NO: 125586 - DNA, 22 bp, Artificial Sequence
  Synthetic oligonucleotide; CTT chr11 5329397 5329418 5329402 5329397 -
tatattacacactatttacatt

SEQ ID NO: 125587 - DNA, 22 bp, Artificial Sequence
  Synthetic oligonucleotide; TTT chr11 5329396 5329417 5329401 5329396 -
atattacacactatttacattc

SEQ ID NO: 125588 - DNA, 22 bp, Artificial Sequence
  Synthetic oligonucleotide; TTA chr11 5329395 5329416 5329400 5329395 -
tattacacactatttacattct

SEQ ID NO: 125589 - DNA, 22 bp, Artificial Sequence
  Synthetic oligonucleotide; TTA chr11 5329390 5329411 5329395 5329390 -
cacactatttacattctgtgaa

SEQ ID NO: 125590 - DNA, 22 bp, Artificial Sequence
  Synthetic oligonucleotide; CTA chr11 5329383 5329404 5329388 5329383 -
tttacattctgtgaataaagac

SEQ ID NO: 125591 - DNA, 22 bp, Artificial Sequence
  Synthetic oligonucleotide; TTT chr11 5329380 5329401 5329385 5329380 -
acattctgtgaataaagactat

SEQ ID NO: 125592 - DNA, 22 bp, Artificial Sequence
  Synthetic oligonucleotide; TTA chr11 5329379 5329400 5329384 5329379 -
cattctgtgaataaagactatg

SEQ ID NO: 125593 - DNA, 22 bp, Artificial Sequence
  Synthetic oligonucleotide; TTC chr11 5329374 5329395 5329379 5329374 -
tgtgaataaagactatgctcct

SEQ ID NO: 125594 - DNA, 22 bp, Artificial Sequence
  Synthetic oligonucleotide; CTG chr11 5329372 5329393 5329377 5329372 -
tgaataaagactatgctcctca

SEQ ID NO: 125595 - DNA, 22 bp, Artificial Sequence
  Synthetic oligonucleotide; CTA chr11 5329359 5329380 5329364 5329359 -
tgctcctcattgtgtatctggc

SEQ ID NO: 125596 - DNA, 22 bp, Artificial Sequence
  Synthetic oligonucleotide; CTC chr11 5329354 5329375 5329359 5329354 -
ctcattgtgtatctggcaaaaa

SEQ ID NO: 125597 - DNA, 22 bp, Artificial Sequence
  Synthetic oligonucleotide; CTC chr11 5329351 5329372 5329356 5329351 -
attgtgtatctggcaaaaaaaa

SEQ ID NO: 125598 - DNA, 22 bp, Artificial Sequence
  Synthetic oligonucleotide; TTG chr11 5329347 5329368 5329352 5329347 -
tgtatctggcaaaaaaaaaaaa

SEQ ID NO: 125599 - DNA, 22 bp, Artificial Sequence
  Synthetic oligonucleotide; CTG chr11 5329339 5329360 5329344 5329339 -
gcaaaaaaaaaaaaaaagggca

SEQ ID NO: 125600 - DNA, 22 bp, Artificial Sequence
  Synthetic oligonucleotide; CTA chr11 5329309 5329330 5329314 5329309 -
caagtaatataattttaagata

SEQ ID NO: 125601 - DNA, 22 bp, Artificial Sequence
  Synthetic oligonucleotide; TTT chr11 5329294 5329315 5329299 5329294 -
taagataaaaagctgaatgtca

SEQ ID NO: 125602 - DNA, 22 bp, Artificial Sequence
  Synthetic oligonucleotide; TTT chr11 5329293 5329314 5329298 5329293 -
aagataaaaagctgaatgtcag

SEQ ID NO: 125603 - DNA, 22 bp, Artificial Sequence
  Synthetic oligonucleotide; TTA chr11 5329292 5329313 5329297 5329292 -
agataaaaagctgaatgtcagc

SEQ ID NO: 125604 - DNA, 22 bp, Artificial Sequence
  Synthetic oligonucleotide; CTG chr11 5329279 5329300 5329284 5329279 -
aatgtcagccgggcgcagtgac

SEQ ID NO: 125605 - DNA, 22 bp, Artificial Sequence
  Synthetic oligonucleotide; CTC chr11 5329255 5329276 5329260 5329255 -
acacctgcaatcccagcacttt

SEQ ID NO: 125606 - DNA, 22 bp, Artificial Sequence
  Synthetic oligonucleotide; CTG chr11 5329248 5329269 5329253 5329248 -
caatcccagcactttgggaggc

SEQ ID NO: 125607 - DNA, 22 bp, Artificial Sequence
  Synthetic oligonucleotide; CTT chr11 5329234 5329255 5329239 5329234 -
tgggaggccaaggagggtggat

SEQ ID NO: 125608 - DNA, 22 bp, Artificial Sequence
  Synthetic oligonucleotide; TTT chr11 5329233 5329254 5329238 5329233 -
gggaggccaaggagggtggatc

SEQ ID NO: 125609 - DNA, 22 bp, Artificial Sequence
  Synthetic oligonucleotide; TTG chr11 5329232 5329253 5329237 5329232 -
ggaggccaaggagggtggatca

SEQ ID NO: 125610 - DNA, 22 bp, Artificial Sequence
  Synthetic oligonucleotide; CTG chr11 5329183 5329204 5329188 5329183 -
gccaatatggtgaaaccccgtg

SEQ ID NO: 125611 - DNA, 22 bp, Artificial Sequence
  Synthetic oligonucleotide; CTA chr11 5329157 5329178 5329162 5329157 -
ctaaaaatacaaaaattagctg

SEQ ID NO: 125612 - DNA, 22 bp, Artificial Sequence
  Synthetic oligonucleotide; CTA chr11 5329154 5329175 5329159 5329154 -
aaaatacaaaaattagctgggt

SEQ ID NO: 125613 - DNA, 22 bp, Artificial Sequence
  Synthetic oligonucleotide; TTA chr11 5329139 5329160 5329144 5329139 -
gctgggtgtggtgacgcgctac

SEQ ID NO: 125614 - DNA, 22 bp, Artificial Sequence
  Synthetic oligonucleotide; CTG chr11 5329135 5329156 5329140 5329135 -
ggtgtggtgacgcgctactgta

SEQ ID NO: 125615 - DNA, 22 bp, Artificial Sequence
  Synthetic oligonucleotide; CTA chr11 5329118 5329139 5329123 5329118 -
ctgtagtcccagcttctcagga

SEQ ID NO: 125616 - DNA, 22 bp, Artificial Sequence
  Synthetic oligonucleotide; CTG chr11 5329115 5329136 5329120 5329115 -
tagtcccagcttctcaggaggc

SEQ ID NO: 125617 - DNA, 22 bp, Artificial Sequence
  Synthetic oligonucleotide; CTT chr11 5329103 5329124 5329108 5329103 -
ctcaggaggctgtggcaggaga

SEQ ID NO: 125618 - DNA, 22 bp, Artificial Sequence
  Synthetic oligonucleotide; TTC chr11 5329102 5329123 5329107 5329102 -
tcaggaggctgtggcaggagaa

SEQ ID NO: 125619 - DNA, 22 bp, Artificial Sequence
  Synthetic oligonucleotide; CTC chr11 5329100 5329121 5329105 5329100 -
aggaggctgtggcaggagaatc

SEQ ID NO: 125620 - DNA, 22 bp, Artificial Sequence
  Synthetic oligonucleotide; CTG chr11 5329091 5329112 5329096 5329091 -
tggcaggagaatcacttgaacc

SEQ ID NO: 125621 - DNA, 22 bp, Artificial Sequence
  Synthetic oligonucleotide; CTT chr11 5329074 5329095 5329079 5329074 -
gaacctgggaggtggagtttgc

SEQ ID NO: 125622 - DNA, 22 bp, Artificial Sequence
  Synthetic oligonucleotide; TTG chr11 5329073 5329094 5329078 5329073 -
aacctgggaggtggagtttgca

SEQ ID NO: 125623 - DNA, 22 bp, Artificial Sequence
  Synthetic oligonucleotide; CTG chr11 5329067 5329088 5329072 5329067 -
ggaggtggagtttgcagtgagc

SEQ ID NO: 125624 - DNA, 22 bp, Artificial Sequence
  Synthetic oligonucleotide; TTT chr11 5329054 5329075 5329059 5329054 -
gcagtgagctgagattgtgcta

SEQ ID NO: 125625 - DNA, 22 bp, Artificial Sequence
  Synthetic oligonucleotide; TTG chr11 5329053 5329074 5329058 5329053 -
cagtgagctgagattgtgctac

SEQ ID NO: 125626 - DNA, 22 bp, Artificial Sequence
  Synthetic oligonucleotide; CTG chr11 5329043 5329064 5329048 5329043 -
agattgtgctactgcactccag

SEQ ID NO: 125627 - DNA, 22 bp, Artificial Sequence
  Synthetic oligonucleotide; TTG chr11 5329037 5329058 5329042 5329037 -
tgctactgcactccagcctggc

SEQ ID NO: 125628 - DNA, 22 bp, Artificial Sequence
  Synthetic oligonucleotide; CTA chr11 5329032 5329053 5329037 5329032 -
ctgcactccagcctggcgacag

SEQ ID NO: 125629 - DNA, 22 bp, Artificial Sequence
  Synthetic oligonucleotide; CTG chr11 5329029 5329050 5329034 5329029 -
cactccagcctggcgacagagt

SEQ ID NO: 125630 - DNA, 22 bp, Artificial Sequence
  Synthetic oligonucleotide; CTC chr11 5329024 5329045 5329029 5329024 -
cagcctggcgacagagtgagac

SEQ ID NO: 125631 - DNA, 22 bp, Artificial Sequence
  Synthetic oligonucleotide; CTG chr11 5329017 5329038 5329022 5329017 -
gcgacagagtgagactctatct

SEQ ID NO: 125632 - DNA, 22 bp, Artificial Sequence
  Synthetic oligonucleotide; CTC chr11 5329000 5329021 5329005 5329000 -
tatctaaaaaaaaaaaaaaaaa

SEQ ID NO: 125633 - DNA, 22 bp, Artificial Sequence
  Synthetic oligonucleotide; CTA chr11 5328998 5329019 5329003 5328998 -
tctaaaaaaaaaaaaaaaaaaa

SEQ ID NO: 125634 - DNA, 22 bp, Artificial Sequence
  Synthetic oligonucleotide; CTA chr11 5328994 5329015 5328999 5328994 -
aaaaaaaaaaaaaaaaaaaaaa

SEQ ID NO: 125635 - DNA, 22 bp, Artificial Sequence
  Synthetic oligonucleotide; CTG chr11 5328963 5328984 5328968 5328963 -
aatgtcatgaatctgcatgact

SEQ ID NO: 125636 - DNA, 22 bp, Artificial Sequence
  Synthetic oligonucleotide; CTG chr11 5328948 5328969 5328953 5328948 -
catgactattaacagatccatt

SEQ ID NO: 125637 - DNA, 22 bp, Artificial Sequence
  Synthetic oligonucleotide; CTA chr11 5328940 5328961 5328945 5328940 -
ttaacagatccattgaagttcc

SEQ ID NO: 125638 - DNA, 22 bp, Artificial Sequence
  Synthetic oligonucleotide; TTA chr11 5328937 5328958 5328942 5328937 -
acagatccattgaagttccagt

SEQ ID NO: 125639 - DNA, 22 bp, Artificial Sequence
  Synthetic oligonucleotide; TTG chr11 5328925 5328946 5328930 5328925 -
aagttccagtagataagaacaa

SEQ ID NO: 125640 - DNA, 22 bp, Artificial Sequence
  Synthetic oligonucleotide; TTC chr11 5328919 5328940 5328924 5328919 -
cagtagataagaacaaatttta

SEQ ID NO: 125641 - DNA, 22 bp, Artificial Sequence
  Synthetic oligonucleotide; TTT chr11 5328899 5328920 5328904 5328899 -
taccaaagtaacaggaaagaca

SEQ ID NO: 125642 - DNA, 22 bp, Artificial Sequence
  Synthetic oligonucleotide; TTT chr11 5328898 5328919 5328903 5328898 -
accaaagtaacaggaaagacaa

SEQ ID NO: 125643 - DNA, 22 bp, Artificial Sequence
  Synthetic oligonucleotide; TTA chr11 5328897 5328918 5328902 5328897 -
ccaaagtaacaggaaagacaaa

SEQ ID NO: 125644 - DNA, 22 bp, Artificial Sequence
  Synthetic oligonucleotide; TTG chr11 5328865 5328886 5328870 5328865 -
gaattcataagctctaggaccc

SEQ ID NO: 125645 - DNA, 22 bp, Artificial Sequence
  Synthetic oligonucleotide; TTC chr11 5328859 5328880 5328864 5328859 -
ataagctctaggacccgtagag

SEQ ID NO: 125646 - DNA, 22 bp, Artificial Sequence
  Synthetic oligonucleotide; CTC chr11 5328851 5328872 5328856 5328851 -
taggacccgtagaggtacatat

SEQ ID NO: 125647 - DNA, 22 bp, Artificial Sequence
  Synthetic oligonucleotide; CTA chr11 5328849 5328870 5328854 5328849 -
ggacccgtagaggtacatatga

SEQ ID NO: 125648 - DNA, 22 bp, Artificial Sequence
  Synthetic oligonucleotide; CTG chr11 5328821 5328842 5328826 5328821 -
aagacaaccgatatcccctaac

SEQ ID NO: 125649 - DNA, 22 bp, Artificial Sequence
  Synthetic oligonucleotide; CTA chr11 5328801 5328822 5328806 5328801 -
accctttcaaataaactaagtt

SEQ ID NO: 125650 - DNA, 22 bp, Artificial Sequence
  Synthetic oligonucleotide; CTT chr11 5328795 5328816 5328800 5328795 -
tcaaataaactaagttatgatg

SEQ ID NO: 125651 - DNA, 22 bp, Artificial Sequence
  Synthetic oligonucleotide; TTT chr11 5328794 5328815 5328799 5328794 -
caaataaactaagttatgatgc

SEQ ID NO: 125652 - DNA, 22 bp, Artificial Sequence
  Synthetic oligonucleotide; TTC chr11 5328793 5328814 5328798 5328793 -
aaataaactaagttatgatgct

SEQ ID NO: 125653 - DNA, 22 bp, Artificial Sequence
  Synthetic oligonucleotide; CTA chr11 5328783 5328804 5328788 5328783 -
agttatgatgctgagcctcctt

SEQ ID NO: 125654 - DNA, 22 bp, Artificial Sequence
  Synthetic oligonucleotide; TTA chr11 5328778 5328799 5328783 5328778 -
tgatgctgagcctccttgggtc

SEQ ID NO: 125655 - DNA, 22 bp, Artificial Sequence
  Synthetic oligonucleotide; CTG chr11 5328770 5328791 5328775 5328770 -
agcctccttgggtcacataacc

SEQ ID NO: 125656 - DNA, 22 bp, Artificial Sequence
  Synthetic oligonucleotide; CTC chr11 5328764 5328785 5328769 5328764 -
cttgggtcacataaccaagccc

SEQ ID NO: 125657 - DNA, 22 bp, Artificial Sequence
  Synthetic oligonucleotide; CTT chr11 5328761 5328782 5328766 5328761 -
gggtcacataaccaagccctgg

SEQ ID NO: 125658 - DNA, 22 bp, Artificial Sequence
  Synthetic oligonucleotide; TTG chr11 5328760 5328781 5328765 5328760 -
ggtcacataaccaagccctggt

SEQ ID NO: 125659 - DNA, 22 bp, Artificial Sequence
  Synthetic oligonucleotide; CTG chr11 5328740 5328761 5328745 5328740 -
gtatccctatcttacatcagct

SEQ ID NO: 125660 - DNA, 22 bp, Artificial Sequence
  Synthetic oligonucleotide; CTA chr11 5328731 5328752 5328736 5328731 -
tcttacatcagctggtttttga

SEQ ID NO: 125661 - DNA, 22 bp, Artificial Sequence
  Synthetic oligonucleotide; CTT chr11 5328727 5328748 5328732 5328727 -
acatcagctggtttttgaattt

SEQ ID NO: 125662 - DNA, 22 bp, Artificial Sequence
  Synthetic oligonucleotide; TTA chr11 5328726 5328747 5328731 5328726 -
catcagctggtttttgaatttc

SEQ ID NO: 125663 - DNA, 22 bp, Artificial Sequence
  Synthetic oligonucleotide; CTG chr11 5328717 5328738 5328722 5328717 -
gtttttgaatttcaaattttcc

SEQ ID NO: 125664 - DNA, 22 bp, Artificial Sequence
  Synthetic oligonucleotide; TTT chr11 5328713 5328734 5328718 5328713 -
ttgaatttcaaattttcctcac

SEQ ID NO: 125665 - DNA, 22 bp, Artificial Sequence
  Synthetic oligonucleotide; TTT chr11 5328712 5328733 5328717 5328712 -
tgaatttcaaattttcctcacc

SEQ ID NO: 125666 - DNA, 22 bp, Artificial Sequence
  Synthetic oligonucleotide; TTT chr11 5328711 5328732 5328716 5328711 -
gaatttcaaattttcctcaccc

SEQ ID NO: 125667 - DNA, 22 bp, Artificial Sequence
  Synthetic oligonucleotide; TTG chr11 5328710 5328731 5328715 5328710 -
aatttcaaattttcctcacccc

SEQ ID NO: 125668 - DNA, 22 bp, Artificial Sequence
  Synthetic oligonucleotide; TTT chr11 5328705 5328726 5328710 5328705 -
caaattttcctcaccccattct

SEQ ID NO: 125669 - DNA, 22 bp, Artificial Sequence
  Synthetic oligonucleotide; TTC chr11 5328704 5328725 5328709 5328704 -
aaattttcctcaccccattctt

SEQ ID NO: 125670 - DNA, 22 bp, Artificial Sequence
  Synthetic oligonucleotide; TTT chr11 5328698 5328719 5328703 5328698 -
tcctcaccccattcttcaggaa

SEQ ID NO: 125671 - DNA, 22 bp, Artificial Sequence
  Synthetic oligonucleotide; TTT chr11 5328697 5328718 5328702 5328697 -
cctcaccccattcttcaggaaa

SEQ ID NO: 125672 - DNA, 22 bp, Artificial Sequence
  Synthetic oligonucleotide; TTC chr11 5328696 5328717 5328701 5328696 -
ctcaccccattcttcaggaaac

SEQ ID NO: 125673 - DNA, 22 bp, Artificial Sequence
  Synthetic oligonucleotide; CTC chr11 5328693 5328714 5328698 5328693 -
accccattcttcaggaaacacc

SEQ ID NO: 125674 - DNA, 22 bp, Artificial Sequence
  Synthetic oligonucleotide; TTC chr11 5328684 5328705 5328689 5328684 -
ttcaggaaacacctgaaaatcc

SEQ ID NO: 125675 - DNA, 22 bp, Artificial Sequence
  Synthetic oligonucleotide; CTT chr11 5328682 5328703 5328687 5328682 -
caggaaacacctgaaaatcccg

SEQ ID NO: 125676 - DNA, 22 bp, Artificial Sequence
  Synthetic oligonucleotide; TTC chr11 5328681 5328702 5328686 5328681 -
aggaaacacctgaaaatcccga

SEQ ID NO: 125677 - DNA, 22 bp, Artificial Sequence
  Synthetic oligonucleotide; CTG chr11 5328669 5328690 5328674 5328669 -
aaaatcccgaggacatcagttg

SEQ ID NO: 125678 - DNA, 22 bp, Artificial Sequence
  Synthetic oligonucleotide; TTG chr11 5328647 5328668 5328652 5328647 -
tggggccctgttcctcccgaac

SEQ ID NO: 125679 - DNA, 22 bp, Artificial Sequence
  Synthetic oligonucleotide; CTG chr11 5328637 5328658 5328642 5328637 -
ttcctcccgaacagagaagaga

SEQ ID NO: 125680 - DNA, 22 bp, Artificial Sequence
  Synthetic oligonucleotide; TTC chr11 5328634 5328655 5328639 5328634 -
ctcccgaacagagaagagaggg

SEQ ID NO: 125681 - DNA, 22 bp, Artificial Sequence
  Synthetic oligonucleotide; CTC chr11 5328631 5328652 5328636 5328631 -
ccgaacagagaagagagggaag

SEQ ID NO: 125682 - DNA, 22 bp, Artificial Sequence
  Synthetic oligonucleotide; CTC chr11 5328592 5328613 5328597 5328592 -
ctgagatgctagaaagatgaaa

SEQ ID NO: 125683 - DNA, 22 bp, Artificial Sequence
  Synthetic oligonucleotide; CTG chr11 5328589 5328610 5328594 5328589 -
agatgctagaaagatgaaactc

SEQ ID NO: 125684 - DNA, 22 bp, Artificial Sequence
  Synthetic oligonucleotide; CTA chr11 5328581 5328602 5328586 5328581 -
gaaagatgaaactcaggggagg

SEQ ID NO: 125685 - DNA, 22 bp, Artificial Sequence
  Synthetic oligonucleotide; CTC chr11 5328567 5328588 5328572 5328567 -
aggggaggtgatttccacatgc

SEQ ID NO: 125686 - DNA, 22 bp, Artificial Sequence
  Synthetic oligonucleotide; TTT chr11 5328553 5328574 5328558 5328553 -
ccacatgcataagctttaaaat

SEQ ID NO: 125687 - DNA, 22 bp, Artificial Sequence
  Synthetic oligonucleotide; TTC chr11 5328552 5328573 5328557 5328552 -
cacatgcataagctttaaaatg

SEQ ID NO: 125688 - DNA, 22 bp, Artificial Sequence
  Synthetic oligonucleotide; CTT chr11 5328537 5328558 5328542 5328537 -
taaaatgaggcctcatgagagg

SEQ ID NO: 125689 - DNA, 22 bp, Artificial Sequence
  Synthetic oligonucleotide; TTT chr11 5328536 5328557 5328541 5328536 -
aaaatgaggcctcatgagaggt

SEQ ID NO: 125690 - DNA, 22 bp, Artificial Sequence
  Synthetic oligonucleotide; TTA chr11 5328535 5328556 5328540 5328535 -
aaatgaggcctcatgagaggtc

SEQ ID NO: 125691 - DNA, 22 bp, Artificial Sequence
  Synthetic oligonucleotide; CTC chr11 5328523 5328544 5328528 5328523 -
atgagaggtctgtgagtgaatg

SEQ ID NO: 125692 - DNA, 22 bp, Artificial Sequence
  Synthetic oligonucleotide; CTG chr11 5328511 5328532 5328516 5328511 -
tgagtgaatgatctgaactgag

SEQ ID NO: 125693 - DNA, 22 bp, Artificial Sequence
  Synthetic oligonucleotide; CTG chr11 5328496 5328517 5328501 5328496 -
aactgagtcctcaaagaggaca

SEQ ID NO: 125694 - DNA, 22 bp, Artificial Sequence
  Synthetic oligonucleotide; CTG chr11 5328491 5328512 5328496 5328491 -
agtcctcaaagaggacaggaat

SEQ ID NO: 125695 - DNA, 22 bp, Artificial Sequence
  Synthetic oligonucleotide; CTC chr11 5328484 5328505 5328489 5328484 -
aaagaggacaggaataggttcc

SEQ ID NO: 125696 - DNA, 22 bp, Artificial Sequence
  Synthetic oligonucleotide; TTC chr11 5328463 5328484 5328468 5328463 -
ctattttagccacaatactgtg

SEQ ID NO: 125697 - DNA, 22 bp, Artificial Sequence
  Synthetic oligonucleotide; CTA chr11 5328460 5328481 5328465 5328460 -
ttttagccacaatactgtgagt

SEQ ID NO: 125698 - DNA, 22 bp, Artificial Sequence
  Synthetic oligonucleotide; TTT chr11 5328457 5328478 5328462 5328457 -
tagccacaatactgtgagtggg

SEQ ID NO: 125699 - DNA, 22 bp, Artificial Sequence
  Synthetic oligonucleotide; TTT chr11 5328456 5328477 5328461 5328456 -
agccacaatactgtgagtgggt

SEQ ID NO: 125700 - DNA, 22 bp, Artificial Sequence
  Synthetic oligonucleotide; TTA chr11 5328455 5328476 5328460 5328455 -
gccacaatactgtgagtgggtg

SEQ ID NO: 125701 - DNA, 22 bp, Artificial Sequence
  Synthetic oligonucleotide; CTG chr11 5328443 5328464 5328448 5328443 -
tgagtgggtgagtgccaggaac

SEQ ID NO: 125702 - DNA, 22 bp, Artificial Sequence
  Synthetic oligonucleotide; CTT chr11 5328419 5328440 5328424 5328419 -
gaatatggaatgattcctctct

SEQ ID NO: 125703 - DNA, 22 bp, Artificial Sequence
  Synthetic oligonucleotide; TTG chr11 5328418 5328439 5328423 5328418 -
aatatggaatgattcctctctc

SEQ ID NO: 125704 - DNA, 22 bp, Artificial Sequence
  Synthetic oligonucleotide; TTC chr11 5328403 5328424 5328408 5328403 -
ctctctcttctgatgtgagatg

SEQ ID NO: 125705 - DNA, 22 bp, Artificial Sequence
  Synthetic oligonucleotide; CTC chr11 5328400 5328421 5328405 5328400 -
tctcttctgatgtgagatgcac

SEQ ID NO: 125706 - DNA, 22 bp, Artificial Sequence
  Synthetic oligonucleotide; CTC chr11 5328398 5328419 5328403 5328398 -
tcttctgatgtgagatgcactc

SEQ ID NO: 125707 - DNA, 22 bp, Artificial Sequence
  Synthetic oligonucleotide; CTC chr11 5328396 5328417 5328401 5328396 -
ttctgatgtgagatgcactcaa

SEQ ID NO: 125708 - DNA, 22 bp, Artificial Sequence
  Synthetic oligonucleotide; CTT chr11 5328394 5328415 5328399 5328394 -
ctgatgtgagatgcactcaagg

SEQ ID NO: 125709 - DNA, 22 bp, Artificial Sequence
  Synthetic oligonucleotide; TTC chr11 5328393 5328414 5328398 5328393 -
tgatgtgagatgcactcaagga

SEQ ID NO: 125710 - DNA, 22 bp, Artificial Sequence
  Synthetic oligonucleotide; CTG chr11 5328391 5328412 5328396 5328391 -
atgtgagatgcactcaaggaaa

SEQ ID NO: 125711 - DNA, 22 bp, Artificial Sequence
  Synthetic oligonucleotide; CTC chr11 5328376 5328397 5328381 5328376 -
aaggaaagcatataagaaggtt

SEQ ID NO: 125712 - DNA, 22 bp, Artificial Sequence
  Synthetic oligonucleotide; TTT chr11 5328353 5328374 5328358 5328353 -
tccagaggtctgcctagaggta

SEQ ID NO: 125713 - DNA, 22 bp, Artificial Sequence
  Synthetic oligonucleotide; TTT chr11 5328352 5328373 5328357 5328352 -
ccagaggtctgcctagaggtaa

SEQ ID NO: 125714 - DNA, 22 bp, Artificial Sequence
  Synthetic oligonucleotide; TTC chr11 5328351 5328372 5328356 5328351 -
cagaggtctgcctagaggtaaa

SEQ ID NO: 125715 - DNA, 22 bp, Artificial Sequence
  Synthetic oligonucleotide; CTG chr11 5328341 5328362 5328346 5328341 -
cctagaggtaaagatcacagct

SEQ ID NO: 125716 - DNA, 22 bp, Artificial Sequence
  Synthetic oligonucleotide; CTA chr11 5328337 5328358 5328342 5328337 -
gaggtaaagatcacagctgagg

SEQ ID NO: 125717 - DNA, 22 bp, Artificial Sequence
  Synthetic oligonucleotide; CTG chr11 5328318 5328339 5328323 5328318 -
aggtgggatatcctacagcaca

SEQ ID NO: 125718 - DNA, 22 bp, Artificial Sequence
  Synthetic oligonucleotide; CTA chr11 5328303 5328324 5328308 5328303 -
cagcacagatttttttttttct

SEQ ID NO: 125719 - DNA, 22 bp, Artificial Sequence
  Synthetic oligonucleotide; TTT chr11 5328291 5328312 5328296 5328291 -
ttttttttcttttttgaaagag

SEQ ID NO: 125720 - DNA, 22 bp, Artificial Sequence
  Synthetic oligonucleotide; TTT chr11 5328290 5328311 5328295 5328290 -
tttttttcttttttgaaagagt

SEQ ID NO: 125721 - DNA, 22 bp, Artificial Sequence
  Synthetic oligonucleotide; TTT chr11 5328289 5328310 5328294 5328289 -
ttttttcttttttgaaagagta

SEQ ID NO: 125722 - DNA, 22 bp, Artificial Sequence
  Synthetic oligonucleotide; TTT chr11 5328288 5328309 5328293 5328288 -
tttttcttttttgaaagagtat

SEQ ID NO: 125723 - DNA, 22 bp, Artificial Sequence
  Synthetic oligonucleotide; TTT chr11 5328287 5328308 5328292 5328287 -
ttttcttttttgaaagagtatt

SEQ ID NO: 125724 - DNA, 22 bp, Artificial Sequence
  Synthetic oligonucleotide; TTT chr11 5328286 5328307 5328291 5328286 -
tttcttttttgaaagagtattt

SEQ ID NO: 125725 - DNA, 22 bp, Artificial Sequence
  Synthetic oligonucleotide; TTT chr11 5328285 5328306 5328290 5328285 -
ttcttttttgaaagagtattta

SEQ ID NO: 125726 - DNA, 22 bp, Artificial Sequence
  Synthetic oligonucleotide; TTT chr11 5328284 5328305 5328289 5328284 -
tcttttttgaaagagtatttaa

SEQ ID NO: 125727 - DNA, 22 bp, Artificial Sequence
  Synthetic oligonucleotide; TTT chr11 5328283 5328304 5328288 5328283 -
cttttttgaaagagtatttaag

SEQ ID NO: 125728 - DNA, 22 bp, Artificial Sequence
  Synthetic oligonucleotide; TTC chr11 5328282 5328303 5328287 5328282 -
ttttttgaaagagtatttaagg

SEQ ID NO: 125729 - DNA, 22 bp, Artificial Sequence
  Synthetic oligonucleotide; CTT chr11 5328280 5328301 5328285 5328280 -
ttttgaaagagtatttaaggaa

SEQ ID NO: 125730 - DNA, 22 bp, Artificial Sequence
  Synthetic oligonucleotide; TTT chr11 5328279 5328300 5328284 5328279 -
tttgaaagagtatttaaggaac

SEQ ID NO: 125731 - DNA, 22 bp, Artificial Sequence
  Synthetic oligonucleotide; TTT chr11 5328278 5328299 5328283 5328278 -
ttgaaagagtatttaaggaact

SEQ ID NO: 125732 - DNA, 22 bp, Artificial Sequence
  Synthetic oligonucleotide; TTT chr11 5328277 5328298 5328282 5328277 -
tgaaagagtatttaaggaactg

SEQ ID NO: 125733 - DNA, 22 bp, Artificial Sequence
  Synthetic oligonucleotide; TTT chr11 5328276 5328297 5328281 5328276 -
gaaagagtatttaaggaactgt

SEQ ID NO: 125734 - DNA, 22 bp, Artificial Sequence
  Synthetic oligonucleotide; TTG chr11 5328275 5328296 5328280 5328275 -
aaagagtatttaaggaactgtg

SEQ ID NO: 125735 - DNA, 22 bp, Artificial Sequence
  Synthetic oligonucleotide; TTT chr11 5328264 5328285 5328269 5328264 -
aaggaactgtgatagatttagg

SEQ ID NO: 125736 - DNA, 22 bp, Artificial Sequence
  Synthetic oligonucleotide; TTA chr11 5328263 5328284 5328268 5328263 -
aggaactgtgatagatttaggt

SEQ ID NO: 125737 - DNA, 22 bp, Artificial Sequence
  Synthetic oligonucleotide; CTG chr11 5328255 5328276 5328260 5328255 -
tgatagatttaggttttctaat

SEQ ID NO: 125738 - DNA, 22 bp, Artificial Sequence
  Synthetic oligonucleotide; TTT chr11 5328245 5328266 5328250 5328245 -
aggttttctaatctgggaccct

SEQ ID NO: 125739 - DNA, 22 bp, Artificial Sequence
  Synthetic oligonucleotide; TTA chr11 5328244 5328265 5328249 5328244 -
ggttttctaatctgggaccctt

SEQ ID NO: 125740 - DNA, 22 bp, Artificial Sequence
  Synthetic oligonucleotide; TTT chr11 5328239 5328260 5328244 5328239 -
tctaatctgggacccttggatt

SEQ ID NO: 125741 - DNA, 22 bp, Artificial Sequence
  Synthetic oligonucleotide; TTT chr11 5328238 5328259 5328243 5328238 -
ctaatctgggacccttggattg

SEQ ID NO: 125742 - DNA, 22 bp, Artificial Sequence
  Synthetic oligonucleotide; TTC chr11 5328237 5328258 5328242 5328237 -
taatctgggacccttggattgg

SEQ ID NO: 125743 - DNA, 22 bp, Artificial Sequence
  Synthetic oligonucleotide; CTA chr11 5328235 5328256 5328240 5328235 -
atctgggacccttggattggca

SEQ ID NO: 125744 - DNA, 22 bp, Artificial Sequence
  Synthetic oligonucleotide; CTG chr11 5328230 5328251 5328235 5328230 -
ggacccttggattggcataagt

SEQ ID NO: 125745 - DNA, 22 bp, Artificial Sequence
  Synthetic oligonucleotide; CTT chr11 5328222 5328243 5328227 5328222 -
ggattggcataagtataattgt

SEQ ID NO: 125746 - DNA, 22 bp, Artificial Sequence
  Synthetic oligonucleotide; TTG chr11 5328221 5328242 5328226 5328221 -
gattggcataagtataattgtt

SEQ ID NO: 125747 - DNA, 22 bp, Artificial Sequence
  Synthetic oligonucleotide; TTG chr11 5328216 5328237 5328221 5328216 -
gcataagtataattgttaatgc

SEQ ID NO: 125748 - DNA, 22 bp, Artificial Sequence
  Synthetic oligonucleotide; TTG chr11 5328201 5328222 5328206 5328201 -
ttaatgctcagaactgcatgtg

SEQ ID NO: 125749 - DNA, 22 bp, Artificial Sequence
  Synthetic oligonucleotide; TTA chr11 5328198 5328219 5328203 5328198 -
atgctcagaactgcatgtgtca

SEQ ID NO: 125750 - DNA, 22 bp, Artificial Sequence
  Synthetic oligonucleotide; CTC chr11 5328192 5328213 5328197 5328192 -
agaactgcatgtgtcattgtgc

SEQ ID NO: 125751 - DNA, 22 bp, Artificial Sequence
  Synthetic oligonucleotide; CTG chr11 5328185 5328206 5328190 5328185 -
catgtgtcattgtgcattctta

SEQ ID NO: 125752 - DNA, 22 bp, Artificial Sequence
  Synthetic oligonucleotide; TTG chr11 5328173 5328194 5328178 5328173 -
tgcattcttactcatttttcta

SEQ ID NO: 125753 - DNA, 22 bp, Artificial Sequence
  Synthetic oligonucleotide; TTC chr11 5328166 5328187 5328171 5328166 -
ttactcatttttctatgtagat

SEQ ID NO: 125754 - DNA, 22 bp, Artificial Sequence
  Synthetic oligonucleotide; CTT chr11 5328164 5328185 5328169 5328164 -
actcatttttctatgtagatgt

SEQ ID NO: 125755 - DNA, 22 bp, Artificial Sequence
  Synthetic oligonucleotide; TTA chr11 5328163 5328184 5328168 5328163 -
ctcatttttctatgtagatgtt

SEQ ID NO: 125756 - DNA, 22 bp, Artificial Sequence
  Synthetic oligonucleotide; CTC chr11 5328160 5328181 5328165 5328160 -
atttttctatgtagatgtttat

SEQ ID NO: 125757 - DNA, 22 bp, Artificial Sequence
  Synthetic oligonucleotide; TTT chr11 5328156 5328177 5328161 5328156 -
ttctatgtagatgtttatagct

SEQ ID NO: 125758 - DNA, 22 bp, Artificial Sequence
  Synthetic oligonucleotide; TTT chr11 5328155 5328176 5328160 5328155 -
tctatgtagatgtttatagctt

SEQ ID NO: 125759 - DNA, 22 bp, Artificial Sequence
  Synthetic oligonucleotide; TTT chr11 5328154 5328175 5328159 5328154 -
ctatgtagatgtttatagcttt

SEQ ID NO: 125760 - DNA, 22 bp, Artificial Sequence
  Synthetic oligonucleotide; TTC chr11 5328153 5328174 5328158 5328153 -
tatgtagatgtttatagctttt

SEQ ID NO: 125761 - DNA, 22 bp, Artificial Sequence
  Synthetic oligonucleotide; CTA chr11 5328151 5328172 5328156 5328151 -
tgtagatgtttatagctttttt

SEQ ID NO: 125762 - DNA, 22 bp, Artificial Sequence
  Synthetic oligonucleotide; TTT chr11 5328140 5328161 5328145 5328140 -
atagcttttttttcagagaata

SEQ ID NO: 125763 - DNA, 22 bp, Artificial Sequence
  Synthetic oligonucleotide; TTA chr11 5328139 5328160 5328144 5328139 -
tagcttttttttcagagaatat

SEQ ID NO: 125764 - DNA, 22 bp, Artificial Sequence
  Synthetic oligonucleotide; CTT chr11 5328133 5328154 5328138 5328133 -
ttttttcagagaatatttcttc

SEQ ID NO: 125765 - DNA, 22 bp, Artificial Sequence
  Synthetic oligonucleotide; TTT chr11 5328132 5328153 5328137 5328132 -
tttttcagagaatatttcttca

SEQ ID NO: 125766 - DNA, 22 bp, Artificial Sequence
  Synthetic oligonucleotide; TTT chr11 5328131 5328152 5328136 5328131 -
ttttcagagaatatttcttcat

SEQ ID NO: 125767 - DNA, 22 bp, Artificial Sequence
  Synthetic oligonucleotide; TTT chr11 5328130 5328151 5328135 5328130 -
tttcagagaatatttcttcatt

SEQ ID NO: 125768 - DNA, 22 bp, Artificial Sequence
  Synthetic oligonucleotide; TTT chr11 5328129 5328150 5328134 5328129 -
ttcagagaatatttcttcattc

SEQ ID NO: 125769 - DNA, 22 bp, Artificial Sequence
  Synthetic oligonucleotide; TTT chr11 5328128 5328149 5328133 5328128 -
tcagagaatatttcttcattcc

SEQ ID NO: 125770 - DNA, 22 bp, Artificial Sequence
  Synthetic oligonucleotide; TTT chr11 5328127 5328148 5328132 5328127 -
cagagaatatttcttcattcca

SEQ ID NO: 125771 - DNA, 22 bp, Artificial Sequence
  Synthetic oligonucleotide; TTC chr11 5328126 5328147 5328131 5328126 -
agagaatatttcttcattccaa

SEQ ID NO: 125772 - DNA, 22 bp, Artificial Sequence
  Synthetic oligonucleotide; TTT chr11 5328115 5328136 5328120 5328115 -
cttcattccaaaacagctttgt

SEQ ID NO: 125773 - DNA, 22 bp, Artificial Sequence
  Synthetic oligonucleotide; TTC chr11 5328114 5328135 5328119 5328114 -
ttcattccaaaacagctttgtt

SEQ ID NO: 125774 - DNA, 22 bp, Artificial Sequence
  Synthetic oligonucleotide; CTT chr11 5328112 5328133 5328117 5328112 -
cattccaaaacagctttgttat

SEQ ID NO: 125775 - DNA, 22 bp, Artificial Sequence
  Synthetic oligonucleotide; TTC chr11 5328111 5328132 5328116 5328111 -
attccaaaacagctttgttatc

SEQ ID NO: 125776 - DNA, 22 bp, Artificial Sequence
  Synthetic oligonucleotide; TTC chr11 5328107 5328128 5328112 5328107 -
caaaacagctttgttatcactc

SEQ ID NO: 125777 - DNA, 22 bp, Artificial Sequence
  Synthetic oligonucleotide; CTT chr11 5328096 5328117 5328101 5328096 -
tgttatcactcacctcctttgt

SEQ ID NO: 125778 - DNA, 22 bp, Artificial Sequence
  Synthetic oligonucleotide; TTT chr11 5328095 5328116 5328100 5328095 -
gttatcactcacctcctttgtt

SEQ ID NO: 125779 - DNA, 22 bp, Artificial Sequence
  Synthetic oligonucleotide; TTG chr11 5328094 5328115 5328099 5328094 -
ttatcactcacctcctttgttc

SEQ ID NO: 125780 - DNA, 22 bp, Artificial Sequence
  Synthetic oligonucleotide; TTA chr11 5328091 5328112 5328096 5328091 -
tcactcacctcctttgttcagt

SEQ ID NO: 125781 - DNA, 22 bp, Artificial Sequence
  Synthetic oligonucleotide; CTC chr11 5328085 5328106 5328090 5328085 -
acctcctttgttcagttattgg

SEQ ID NO: 125782 - DNA, 22 bp, Artificial Sequence
  Synthetic oligonucleotide; CTC chr11 5328080 5328101 5328085 5328080 -
ctttgttcagttattggtaaat

SEQ ID NO: 125783 - DNA, 22 bp, Artificial Sequence
  Synthetic oligonucleotide; CTT chr11 5328077 5328098 5328082 5328077 -
tgttcagttattggtaaatata

SEQ ID NO: 125784 - DNA, 22 bp, Artificial Sequence
  Synthetic oligonucleotide; TTT chr11 5328076 5328097 5328081 5328076 -
gttcagttattggtaaatatat

SEQ ID NO: 125785 - DNA, 22 bp, Artificial Sequence
  Synthetic oligonucleotide; TTG chr11 5328075 5328096 5328080 5328075 -
ttcagttattggtaaatatatt

SEQ ID NO: 125786 - DNA, 22 bp, Artificial Sequence
  Synthetic oligonucleotide; TTC chr11 5328072 5328093 5328077 5328072 -
agttattggtaaatatattaca

SEQ ID NO: 125787 - DNA, 22 bp, Artificial Sequence
  Synthetic oligonucleotide; TTA chr11 5328067 5328088 5328072 5328067 -
ttggtaaatatattacatttat

SEQ ID NO: 125788 - DNA, 22 bp, Artificial Sequence
  Synthetic oligonucleotide; TTG chr11 5328064 5328085 5328069 5328064 -
gtaaatatattacatttatatt

SEQ ID NO: 125789 - DNA, 22 bp, Artificial Sequence
  Synthetic oligonucleotide; TTA chr11 5328052 5328073 5328057 5328052 -
catttatatttgtaatagttcc

SEQ ID NO: 125790 - DNA, 22 bp, Artificial Sequence
  Synthetic oligonucleotide; TTT chr11 5328047 5328068 5328052 5328047 -
atatttgtaatagttccagcaa

SEQ ID NO: 125791 - DNA, 22 bp, Artificial Sequence
  Synthetic oligonucleotide; TTA chr11 5328046 5328067 5328051 5328046 -
tatttgtaatagttccagcaat

SEQ ID NO: 125792 - DNA, 22 bp, Artificial Sequence
  Synthetic oligonucleotide; TTT chr11 5328041 5328062 5328046 5328041 -
gtaatagttccagcaatgcaat

SEQ ID NO: 125793 - DNA, 22 bp, Artificial Sequence
  Synthetic oligonucleotide; TTG chr11 5328040 5328061 5328045 5328040 -
taatagttccagcaatgcaatt

SEQ ID NO: 125794 - DNA, 22 bp, Artificial Sequence
  Synthetic oligonucleotide; TTC chr11 5328031 5328052 5328036 5328031 -
cagcaatgcaattctatttttt

SEQ ID NO: 125795 - DNA, 22 bp, Artificial Sequence
  Synthetic oligonucleotide; TTC chr11 5328017 5328038 5328022 5328017 -
tattttttattgtaatacattc

SEQ ID NO: 125796 - DNA, 22 bp, Artificial Sequence
  Synthetic oligonucleotide; CTA chr11 5328015 5328036 5328020 5328015 -
ttttttattgtaatacattcat

SEQ ID NO: 125797 - DNA, 22 bp, Artificial Sequence
  Synthetic oligonucleotide; TTT chr11 5328012 5328033 5328017 5328012 -
tttattgtaatacattcatttt

SEQ ID NO: 125798 - DNA, 22 bp, Artificial Sequence
  Synthetic oligonucleotide; TTT chr11 5328011 5328032 5328016 5328011 -
ttattgtaatacattcattttt

SEQ ID NO: 125799 - DNA, 22 bp, Artificial Sequence
  Synthetic oligonucleotide; TTT chr11 5328010 5328031 5328015 5328010 -
tattgtaatacattcatttttg

SEQ ID NO: 125800 - DNA, 22 bp, Artificial Sequence
  Synthetic oligonucleotide; TTT chr11 5328009 5328030 5328014 5328009 -
attgtaatacattcatttttga

SEQ ID NO: 125801 - DNA, 22 bp, Artificial Sequence
  Synthetic oligonucleotide; TTA chr11 5328008 5328029 5328013 5328008 -
ttgtaatacattcatttttgaa

SEQ ID NO: 125802 - DNA, 22 bp, Artificial Sequence
  Synthetic oligonucleotide; TTG chr11 5328005 5328026 5328010 5328005 -
taatacattcatttttgaaaat

SEQ ID NO: 125803 - DNA, 22 bp, Artificial Sequence
  Synthetic oligonucleotide; TTC chr11 5327995 5328016 5328000 5327995 -
atttttgaaaataagaagcaga

SEQ ID NO: 125804 - DNA, 22 bp, Artificial Sequence
  Synthetic oligonucleotide; TTT chr11 5327991 5328012 5327996 5327991 -
ttgaaaataagaagcagaaagg

SEQ ID NO: 125805 - DNA, 22 bp, Artificial Sequence
  Synthetic oligonucleotide; TTT chr11 5327990 5328011 5327995 5327990 -
tgaaaataagaagcagaaagga

SEQ ID NO: 125806 - DNA, 22 bp, Artificial Sequence
  Synthetic oligonucleotide; TTT chr11 5327989 5328010 5327994 5327989 -
gaaaataagaagcagaaaggaa

SEQ ID NO: 125807 - DNA, 22 bp, Artificial Sequence
  Synthetic oligonucleotide; TTG chr11 5327988 5328009 5327993 5327988 -
aaaataagaagcagaaaggaat

SEQ ID NO: 125808 - DNA, 22 bp, Artificial Sequence
  Synthetic oligonucleotide; CTT chr11 5327948 5327969 5327953 5327948 -
ctataatgacatgactatcttt

SEQ ID NO: 125809 - DNA, 22 bp, Artificial Sequence
  Synthetic oligonucleotide; TTC chr11 5327947 5327968 5327952 5327947 -
tataatgacatgactatcttta

SEQ ID NO: 125810 - DNA, 22 bp, Artificial Sequence
  Synthetic oligonucleotide; CTA chr11 5327945 5327966 5327950 5327945 -
taatgacatgactatctttact

SEQ ID NO: 125811 - DNA, 22 bp, Artificial Sequence
  Synthetic oligonucleotide; CTA chr11 5327931 5327952 5327936 5327931 -
tctttactggtgcttttgtcat

SEQ ID NO: 125812 - DNA, 22 bp, Artificial Sequence
  Synthetic oligonucleotide; CTT chr11 5327927 5327948 5327932 5327927 -
tactggtgcttttgtcatttta

SEQ ID NO: 125813 - DNA, 22 bp, Artificial Sequence
  Synthetic oligonucleotide; TTT chr11 5327926 5327947 5327931 5327926 -
actggtgcttttgtcattttat

SEQ ID NO: 125814 - DNA, 22 bp, Artificial Sequence
  Synthetic oligonucleotide; TTA chr11 5327925 5327946 5327930 5327925 -
ctggtgcttttgtcattttatg

SEQ ID NO: 125815 - DNA, 22 bp, Artificial Sequence
  Synthetic oligonucleotide; CTG chr11 5327922 5327943 5327927 5327922 -
gtgcttttgtcattttatgtag

SEQ ID NO: 125816 - DNA, 22 bp, Artificial Sequence
  Synthetic oligonucleotide; CTT chr11 5327916 5327937 5327921 5327916 -
ttgtcattttatgtagattcaa

SEQ ID NO: 125817 - DNA, 22 bp, Artificial Sequence
  Synthetic oligonucleotide; TTT chr11 5327915 5327936 5327920 5327915 -
tgtcattttatgtagattcaaa

SEQ ID NO: 125818 - DNA, 22 bp, Artificial Sequence
  Synthetic oligonucleotide; TTT chr11 5327914 5327935 5327919 5327914 -
gtcattttatgtagattcaaat

SEQ ID NO: 125819 - DNA, 22 bp, Artificial Sequence
  Synthetic oligonucleotide; TTG chr11 5327913 5327934 5327918 5327913 -
tcattttatgtagattcaaatg

SEQ ID NO: 125820 - DNA, 22 bp, Artificial Sequence
  Synthetic oligonucleotide; TTT chr11 5327907 5327928 5327912 5327907 -
tatgtagattcaaatgatcatc

SEQ ID NO: 125821 - DNA, 22 bp, Artificial Sequence
  Synthetic oligonucleotide; TTT chr11 5327906 5327927 5327911 5327906 -
atgtagattcaaatgatcatct

SEQ ID NO: 125822 - DNA, 22 bp, Artificial Sequence
  Synthetic oligonucleotide; TTA chr11 5327905 5327926 5327910 5327905 -
tgtagattcaaatgatcatctt

SEQ ID NO: 125823 - DNA, 22 bp, Artificial Sequence
  Synthetic oligonucleotide; TTC chr11 5327896 5327917 5327901 5327896 -
aaatgatcatctttggtcattt

SEQ ID NO: 125824 - DNA, 22 bp, Artificial Sequence
  Synthetic oligonucleotide; CTT chr11 5327883 5327904 5327888 5327883 -
tggtcatttggtttcaacttag

SEQ ID NO: 125825 - DNA, 22 bp, Artificial Sequence
  Synthetic oligonucleotide; TTT chr11 5327882 5327903 5327887 5327882 -
ggtcatttggtttcaacttagt

SEQ ID NO: 125826 - DNA, 22 bp, Artificial Sequence
  Synthetic oligonucleotide; TTG chr11 5327881 5327902 5327886 5327881 -
gtcatttggtttcaacttagtt

SEQ ID NO: 125827 - DNA, 22 bp, Artificial Sequence
  Synthetic oligonucleotide; TTT chr11 5327874 5327895 5327879 5327874 -
ggtttcaacttagttgaaatca

SEQ ID NO: 125828 - DNA, 22 bp, Artificial Sequence
  Synthetic oligonucleotide; TTG chr11 5327873 5327894 5327878 5327873 -
gtttcaacttagttgaaatcaa

SEQ ID NO: 125829 - DNA, 22 bp, Artificial Sequence
  Synthetic oligonucleotide; TTT chr11 5327869 5327890 5327874 5327869 -
caacttagttgaaatcaactca

SEQ ID NO: 125830 - DNA, 22 bp, Artificial Sequence
  Synthetic oligonucleotide; TTC chr11 5327868 5327889 5327873 5327868 -
aacttagttgaaatcaactcag

SEQ ID NO: 125831 - DNA, 22 bp, Artificial Sequence
  Synthetic oligonucleotide; CTT chr11 5327863 5327884 5327868 5327863 -
agttgaaatcaactcagttttt

SEQ ID NO: 125832 - DNA, 22 bp, Artificial Sequence
  Synthetic oligonucleotide; TTA chr11 5327862 5327883 5327867 5327862 -
gttgaaatcaactcagtttttg

SEQ ID NO: 125833 - DNA, 22 bp, Artificial Sequence
  Synthetic oligonucleotide; TTG chr11 5327858 5327879 5327863 5327858 -
aaatcaactcagtttttgttta

SEQ ID NO: 125834 - DNA, 22 bp, Artificial Sequence
  Synthetic oligonucleotide; CTC chr11 5327848 5327869 5327853 5327848 -
agtttttgtttatccagaaagg

SEQ ID NO: 125835 - DNA, 22 bp, Artificial Sequence
  Synthetic oligonucleotide; TTT chr11 5327843 5327864 5327848 5327843 -
ttgtttatccagaaagggctta

SEQ ID NO: 125836 - DNA, 22 bp, Artificial Sequence
  Synthetic oligonucleotide; TTT chr11 5327842 5327863 5327847 5327842 -
tgtttatccagaaagggcttat

SEQ ID NO: 125837 - DNA, 22 bp, Artificial Sequence
  Synthetic oligonucleotide; TTT chr11 5327841 5327862 5327846 5327841 -
gtttatccagaaagggcttatt

SEQ ID NO: 125838 - DNA, 22 bp, Artificial Sequence
  Synthetic oligonucleotide; TTG chr11 5327840 5327861 5327845 5327840 -
tttatccagaaagggcttattt

SEQ ID NO: 125839 - DNA, 22 bp, Artificial Sequence
  Synthetic oligonucleotide; TTT chr11 5327837 5327858 5327842 5327837 -
atccagaaagggcttattttac

SEQ ID NO: 125840 - DNA, 22 bp, Artificial Sequence
  Synthetic oligonucleotide; TTA chr11 5327836 5327857 5327841 5327836 -
tccagaaagggcttattttacg

SEQ ID NO: 125841 - DNA, 22 bp, Artificial Sequence
  Synthetic oligonucleotide; CTT chr11 5327822 5327843 5327827 5327822 -
attttacgtttattttttattg

SEQ ID NO: 125842 - DNA, 22 bp, Artificial Sequence
  Synthetic oligonucleotide; TTA chr11 5327821 5327842 5327826 5327821 -
ttttacgtttattttttattga

SEQ ID NO: 125843 - DNA, 22 bp, Artificial Sequence
  Synthetic oligonucleotide; TTT chr11 5327818 5327839 5327823 5327818 -
tacgtttattttttattgataa

SEQ ID NO: 125844 - DNA, 22 bp, Artificial Sequence
  Synthetic oligonucleotide; TTT chr11 5327817 5327838 5327822 5327817 -
acgtttattttttattgataac

SEQ ID NO: 125845 - DNA, 22 bp, Artificial Sequence
  Synthetic oligonucleotide; TTA chr11 5327816 5327837 5327821 5327816 -
cgtttattttttattgataact

SEQ ID NO: 125846 - DNA, 22 bp, Artificial Sequence
  Synthetic oligonucleotide; TTT chr11 5327811 5327832 5327816 5327811 -
attttttattgataactttcct

SEQ ID NO: 125847 - DNA, 22 bp, Artificial Sequence
  Synthetic oligonucleotide; TTA chr11 5327810 5327831 5327815 5327810 -
ttttttattgataactttcctg

SEQ ID NO: 125848 - DNA, 22 bp, Artificial Sequence
  Synthetic oligonucleotide; TTT chr11 5327807 5327828 5327812 5327807 -
tttattgataactttcctgttc

SEQ ID NO: 125849 - DNA, 22 bp, Artificial Sequence
  Synthetic oligonucleotide; TTT chr11 5327806 5327827 5327811 5327806 -
ttattgataactttcctgttca

SEQ ID NO: 125850 - DNA, 22 bp, Artificial Sequence
  Synthetic oligonucleotide; TTT chr11 5327805 5327826 5327810 5327805 -
tattgataactttcctgttcag

SEQ ID NO: 125851 - DNA, 22 bp, Artificial Sequence
  Synthetic oligonucleotide; TTT chr11 5327804 5327825 5327809 5327804 -
attgataactttcctgttcaga

SEQ ID NO: 125852 - DNA, 22 bp, Artificial Sequence
  Synthetic oligonucleotide; TTA chr11 5327803 5327824 5327808 5327803 -
ttgataactttcctgttcagag

SEQ ID NO: 125853 - DNA, 22 bp, Artificial Sequence
  Synthetic oligonucleotide; TTG chr11 5327800 5327821 5327805 5327800 -
ataactttcctgttcagaggat

SEQ ID NO: 125854 - DNA, 22 bp, Artificial Sequence
  Synthetic oligonucleotide; CTT chr11 5327793 5327814 5327798 5327793 -
tcctgttcagaggattttttgt

SEQ ID NO: 125855 - DNA, 22 bp, Artificial Sequence
  Synthetic oligonucleotide; TTT chr11 5327792 5327813 5327797 5327792 -
cctgttcagaggattttttgtt

SEQ ID NO: 125856 - DNA, 22 bp, Artificial Sequence
  Synthetic oligonucleotide; TTC chr11 5327791 5327812 5327796 5327791 -
ctgttcagaggattttttgttg

SEQ ID NO: 125857 - DNA, 22 bp, Artificial Sequence
  Synthetic oligonucleotide; CTG chr11 5327788 5327809 5327793 5327788 -
ttcagaggattttttgttgata

SEQ ID NO: 125858 - DNA, 22 bp, Artificial Sequence
  Synthetic oligonucleotide; TTC chr11 5327785 5327806 5327790 5327785 -
agaggattttttgttgatagtt

SEQ ID NO: 125859 - DNA, 22 bp, Artificial Sequence
  Synthetic oligonucleotide; TTT chr11 5327776 5327797 5327781 5327776 -
tttgttgatagtttttctctga

SEQ ID NO: 125860 - DNA, 22 bp, Artificial Sequence
  Synthetic oligonucleotide; TTT chr11 5327775 5327796 5327780 5327775 -
ttgttgatagtttttctctgaa

SEQ ID NO: 125861 - DNA, 22 bp, Artificial Sequence
  Synthetic oligonucleotide; TTT chr11 5327774 5327795 5327779 5327774 -
tgttgatagtttttctctgaag

SEQ ID NO: 125862 - DNA, 22 bp, Artificial Sequence
  Synthetic oligonucleotide; TTT chr11 5327773 5327794 5327778 5327773 -
gttgatagtttttctctgaaga

SEQ ID NO: 125863 - DNA, 22 bp, Artificial Sequence
  Synthetic oligonucleotide; TTG chr11 5327772 5327793 5327777 5327772 -
ttgatagtttttctctgaagag

SEQ ID NO: 125864 - DNA, 22 bp, Artificial Sequence
  Synthetic oligonucleotide; TTG chr11 5327769 5327790 5327774 5327769 -
atagtttttctctgaagagtag

SEQ ID NO: 125865 - DNA, 22 bp, Artificial Sequence
  Synthetic oligonucleotide; TTT chr11 5327762 5327783 5327767 5327762 -
ttctctgaagagtagacaaaaa

SEQ ID NO: 125866 - DNA, 22 bp, Artificial Sequence
  Synthetic oligonucleotide; TTT chr11 5327761 5327782 5327766 5327761 -
tctctgaagagtagacaaaaaa

SEQ ID NO: 125867 - DNA, 22 bp, Artificial Sequence
  Synthetic oligonucleotide; TTT chr11 5327760 5327781 5327765 5327760 -
ctctgaagagtagacaaaaaat

SEQ ID NO: 125868 - DNA, 22 bp, Artificial Sequence
  Synthetic oligonucleotide; TTC chr11 5327759 5327780 5327764 5327759 -
tctgaagagtagacaaaaaatt

SEQ ID NO: 125869 - DNA, 22 bp, Artificial Sequence
  Synthetic oligonucleotide; CTC chr11 5327757 5327778 5327762 5327757 -
tgaagagtagacaaaaaattct

SEQ ID NO: 125870 - DNA, 22 bp, Artificial Sequence
  Synthetic oligonucleotide; CTG chr11 5327755 5327776 5327760 5327755 -
aagagtagacaaaaaattctga

SEQ ID NO: 125871 - DNA, 22 bp, Artificial Sequence
  Synthetic oligonucleotide; TTC chr11 5327736 5327757 5327741 5327736 -
tgaatcgagttgaaaggcttag

SEQ ID NO: 125872 - DNA, 22 bp, Artificial Sequence
  Synthetic oligonucleotide; CTG chr11 5327734 5327755 5327739 5327734 -
aatcgagttgaaaggcttagaa

SEQ ID NO: 125873 - DNA, 22 bp, Artificial Sequence
  Synthetic oligonucleotide; TTG chr11 5327724 5327745 5327729 5327724 -
aaaggcttagaaaagggcagcc

SEQ ID NO: 125874 - DNA, 22 bp, Artificial Sequence
  Synthetic oligonucleotide; CTT chr11 5327716 5327737 5327721 5327716 -
agaaaagggcagccaaattaag

SEQ ID NO: 125875 - DNA, 22 bp, Artificial Sequence
  Synthetic oligonucleotide; TTA chr11 5327715 5327736 5327720 5327715 -
gaaaagggcagccaaattaaga

SEQ ID NO: 125876 - DNA, 22 bp, Artificial Sequence
  Synthetic oligonucleotide; TTA chr11 5327696 5327717 5327701 5327696 -
agatctaagaaagcaaattgga

SEQ ID NO: 125877 - DNA, 22 bp, Artificial Sequence
  Synthetic oligonucleotide; CTA chr11 5327689 5327710 5327694 5327689 -
agaaagcaaattggattgaaaa

SEQ ID NO: 125878 - DNA, 22 bp, Artificial Sequence
  Synthetic oligonucleotide; TTG chr11 5327676 5327697 5327681 5327676 -
gattgaaaatgaaatcatattg

SEQ ID NO: 125879 - DNA, 22 bp, Artificial Sequence
  Synthetic oligonucleotide; TTG chr11 5327671 5327692 5327676 5327671 -
aaaatgaaatcatattgatggc

SEQ ID NO: 125880 - DNA, 22 bp, Artificial Sequence
  Synthetic oligonucleotide; TTG chr11 5327654 5327675 5327659 5327654 -
atggcagatgataatatattgg

SEQ ID NO: 125881 - DNA, 22 bp, Artificial Sequence
  Synthetic oligonucleotide; TTG chr11 5327633 5327654 5327638 5327633 -
gactgggttggagaaggcagga

SEQ ID NO: 125882 - DNA, 22 bp, Artificial Sequence
  Synthetic oligonucleotide; CTG chr11 5327628 5327649 5327633 5327628 -
ggttggagaaggcaggaggaat

SEQ ID NO: 125883 - DNA, 22 bp, Artificial Sequence
  Synthetic oligonucleotide; TTG chr11 5327623 5327644 5327628 5327623 -
gagaaggcaggaggaatttaac

SEQ ID NO: 125884 - DNA, 22 bp, Artificial Sequence
  Synthetic oligonucleotide; TTT chr11 5327604 5327625 5327609 5327604 -
aacttgtggacaatagaaatct

SEQ ID NO: 125885 - DNA, 22 bp, Artificial Sequence
  Synthetic oligonucleotide; TTA chr11 5327603 5327624 5327608 5327603 -
acttgtggacaatagaaatctg

SEQ ID NO: 125886 - DNA, 22 bp, Artificial Sequence
  Synthetic oligonucleotide; CTT chr11 5327599 5327620 5327604 5327599 -
gtggacaatagaaatctgagag

SEQ ID NO: 125887 - DNA, 22 bp, Artificial Sequence
  Synthetic oligonucleotide; TTG chr11 5327598 5327619 5327603 5327598 -
tggacaatagaaatctgagagt

SEQ ID NO: 125888 - DNA, 22 bp, Artificial Sequence
  Synthetic oligonucleotide; CTG chr11 5327581 5327602 5327586 5327581 -
agagttgggtagtcccaactgt

SEQ ID NO: 125889 - DNA, 22 bp, Artificial Sequence
  Synthetic oligonucleotide; TTG chr11 5327574 5327595 5327579 5327574 -
ggtagtcccaactgtcaggccc

SEQ ID NO: 125890 - DNA, 22 bp, Artificial Sequence
  Synthetic oligonucleotide; CTG chr11 5327560 5327581 5327565 5327560 -
tcaggccctcaggactggggcc

SEQ ID NO: 125891 - DNA, 22 bp, Artificial Sequence
  Synthetic oligonucleotide; CTC chr11 5327550 5327571 5327555 5327550 -
aggactggggccaaatggagga

SEQ ID NO: 125892 - DNA, 22 bp, Artificial Sequence
  Synthetic oligonucleotide; CTG chr11 5327543 5327564 5327548 5327543 -
gggccaaatggaggactcactt

SEQ ID NO: 125893 - DNA, 22 bp, Artificial Sequence
  Synthetic oligonucleotide; CTC chr11 5327525 5327546 5327530 5327525 -
acttttttgaagattaaagaca

SEQ ID NO: 125894 - DNA, 22 bp, Artificial Sequence
  Synthetic oligonucleotide; CTT chr11 5327521 5327542 5327526 5327521 -
ttttgaagattaaagacaatgc

SEQ ID NO: 125895 - DNA, 22 bp, Artificial Sequence
  Synthetic oligonucleotide; TTT chr11 5327520 5327541 5327525 5327520 -
tttgaagattaaagacaatgcg

SEQ ID NO: 125896 - DNA, 22 bp, Artificial Sequence
  Synthetic oligonucleotide; TTT chr11 5327519 5327540 5327524 5327519 -
ttgaagattaaagacaatgcgt

SEQ ID NO: 125897 - DNA, 22 bp, Artificial Sequence
  Synthetic oligonucleotide; TTT chr11 5327518 5327539 5327523 5327518 -
tgaagattaaagacaatgcgtg

SEQ ID NO: 125898 - DNA, 22 bp, Artificial Sequence
  Synthetic oligonucleotide; TTT chr11 5327517 5327538 5327522 5327517 -
gaagattaaagacaatgcgtga

SEQ ID NO: 125899 - DNA, 22 bp, Artificial Sequence
  Synthetic oligonucleotide; TTG chr11 5327516 5327537 5327521 5327516 -
aagattaaagacaatgcgtgag

SEQ ID NO: 125900 - DNA, 22 bp, Artificial Sequence
  Synthetic oligonucleotide; TTA chr11 5327509 5327530 5327514 5327509 -
aagacaatgcgtgagagcacgg

SEQ ID NO: 125901 - DNA, 22 bp, Artificial Sequence
  Synthetic oligonucleotide; TTC chr11 5327482 5327503 5327487 5327482 -
tgaacctaaacaggctgagctt

SEQ ID NO: 125902 - DNA, 22 bp, Artificial Sequence
  Synthetic oligonucleotide; CTG chr11 5327480 5327501 5327485 5327480 -
aacctaaacaggctgagcttct

SEQ ID NO: 125903 - DNA, 22 bp, Artificial Sequence
  Synthetic oligonucleotide; CTA chr11 5327474 5327495 5327479 5327474 -
aacaggctgagcttctgcactc

SEQ ID NO: 125904 - DNA, 22 bp, Artificial Sequence
  Synthetic oligonucleotide; CTG chr11 5327465 5327486 5327470 5327465 -
agcttctgcactctgctaagat

SEQ ID NO: 125905 - DNA, 22 bp, Artificial Sequence
  Synthetic oligonucleotide; CTT chr11 5327460 5327481 5327465 5327460 -
ctgcactctgctaagatcctga

SEQ ID NO: 125906 - DNA, 22 bp, Artificial Sequence
  Synthetic oligonucleotide; TTC chr11 5327459 5327480 5327464 5327459 -
tgcactctgctaagatcctgaa

SEQ ID NO: 125907 - DNA, 22 bp, Artificial Sequence
  Synthetic oligonucleotide; CTG chr11 5327457 5327478 5327462 5327457 -
cactctgctaagatcctgaaat

SEQ ID NO: 125908 - DNA, 22 bp, Artificial Sequence
  Synthetic oligonucleotide; CTC chr11 5327452 5327473 5327457 5327452 -
tgctaagatcctgaaatttata

SEQ ID NO: 125909 - DNA, 22 bp, Artificial Sequence
  Synthetic oligonucleotide; CTG chr11 5327450 5327471 5327455 5327450 -
ctaagatcctgaaatttataga

SEQ ID NO: 125910 - DNA, 22 bp, Artificial Sequence
  Synthetic oligonucleotide; CTA chr11 5327447 5327468 5327452 5327447 -
agatcctgaaatttatagaaag

SEQ ID NO: 125911 - DNA, 22 bp, Artificial Sequence
  Synthetic oligonucleotide; CTG chr11 5327439 5327460 5327444 5327439 -
aaatttatagaaagaaaagtca

SEQ ID NO: 125912 - DNA, 22 bp, Artificial Sequence
  Synthetic oligonucleotide; TTT chr11 5327433 5327454 5327438 5327433 -
atagaaagaaaagtcaccattt

SEQ ID NO: 125913 - DNA, 22 bp, Artificial Sequence
  Synthetic oligonucleotide; TTA chr11 5327432 5327453 5327437 5327432 -
tagaaagaaaagtcaccatttt

SEQ ID NO: 125914 - DNA, 22 bp, Artificial Sequence
  Synthetic oligonucleotide; TTT chr11 5327411 5327432 5327416 5327411 -
taacatataacaatttaattta

SEQ ID NO: 125915 - DNA, 22 bp, Artificial Sequence
  Synthetic oligonucleotide; TTT chr11 5327410 5327431 5327415 5327410 -
aacatataacaatttaatttat

SEQ ID NO: 125916 - DNA, 22 bp, Artificial Sequence
  Synthetic oligonucleotide; TTA chr11 5327409 5327430 5327414 5327409 -
acatataacaatttaatttata

SEQ ID NO: 125917 - DNA, 22 bp, Artificial Sequence
  Synthetic oligonucleotide; TTT chr11 5327395 5327416 5327400 5327395 -
aatttataagatccaaacaaca

SEQ ID NO: 125918 - DNA, 22 bp, Artificial Sequence
  Synthetic oligonucleotide; TTA chr11 5327394 5327415 5327399 5327394 -
atttataagatccaaacaacac

SEQ ID NO: 125919 - DNA, 22 bp, Artificial Sequence
  Synthetic oligonucleotide; TTT chr11 5327390 5327411 5327395 5327390 -
ataagatccaaacaacacccct

SEQ ID NO: 125920 - DNA, 22 bp, Artificial Sequence
  Synthetic oligonucleotide; TTA chr11 5327389 5327410 5327394 5327389 -
taagatccaaacaacacccctt

SEQ ID NO: 125921 - DNA, 22 bp, Artificial Sequence
  Synthetic oligonucleotide; CTT chr11 5327367 5327388 5327372 5327367 -
gaaacacacacatgcatgtgtg

SEQ ID NO: 125922 - DNA, 22 bp, Artificial Sequence
  Synthetic oligonucleotide; TTG chr11 5327366 5327387 5327371 5327366 -
aaacacacacatgcatgtgtgt

SEQ ID NO: 125923 - DNA, 22 bp, Artificial Sequence
  Synthetic oligonucleotide; CTG chr11 5327341 5327362 5327346 5327341 -
tgtgtttgtttgaagaactgct

SEQ ID NO: 125924 - DNA, 22 bp, Artificial Sequence
  Synthetic oligonucleotide; TTT chr11 5327334 5327355 5327339 5327334 -
gtttgaagaactgctctaagag

SEQ ID NO: 125925 - DNA, 22 bp, Artificial Sequence
  Synthetic oligonucleotide; TTG chr11 5327333 5327354 5327338 5327333 -
tttgaagaactgctctaagaga

SEQ ID NO: 125926 - DNA, 22 bp, Artificial Sequence
  Synthetic oligonucleotide; TTT chr11 5327330 5327351 5327335 5327330 -
gaagaactgctctaagagatgg

SEQ ID NO: 125927 - DNA, 22 bp, Artificial Sequence
  Synthetic oligonucleotide; TTG chr11 5327329 5327350 5327334 5327329 -
aagaactgctctaagagatggc

SEQ ID NO: 125928 - DNA, 22 bp, Artificial Sequence
  Synthetic oligonucleotide; CTG chr11 5327321 5327342 5327326 5327321 -
ctctaagagatggcatgagtag

SEQ ID NO: 125929 - DNA, 22 bp, Artificial Sequence
  Synthetic oligonucleotide; CTC chr11 5327318 5327339 5327323 5327318 -
taagagatggcatgagtagtca

SEQ ID NO: 125930 - DNA, 22 bp, Artificial Sequence
  Synthetic oligonucleotide; CTA chr11 5327316 5327337 5327321 5327316 -
agagatggcatgagtagtcagt

SEQ ID NO: 125931 - DNA, 22 bp, Artificial Sequence
  Synthetic oligonucleotide; CTC chr11 5327287 5327308 5327292 5327287 -
actagaaaaattctagagacag

SEQ ID NO: 125932 - DNA, 22 bp, Artificial Sequence
  Synthetic oligonucleotide; CTA chr11 5327283 5327304 5327288 5327283 -
gaaaaattctagagacagggcc

SEQ ID NO: 125933 - DNA, 22 bp, Artificial Sequence
  Synthetic oligonucleotide; TTC chr11 5327274 5327295 5327279 5327274 -
tagagacagggcccatctcctt

SEQ ID NO: 125934 - DNA, 22 bp, Artificial Sequence
  Synthetic oligonucleotide; CTA chr11 5327272 5327293 5327277 5327272 -
gagacagggcccatctccttag

SEQ ID NO: 125935 - DNA, 22 bp, Artificial Sequence
  Synthetic oligonucleotide; CTC chr11 5327255 5327276 5327260 5327255 -
cttaggaaggtgcggggacaca

SEQ ID NO: 125936 - DNA, 22 bp, Artificial Sequence
  Synthetic oligonucleotide; CTT chr11 5327252 5327273 5327257 5327252 -
aggaaggtgcggggacacatct

SEQ ID NO: 125937 - DNA, 22 bp, Artificial Sequence
  Synthetic oligonucleotide; TTA chr11 5327251 5327272 5327256 5327251 -
ggaaggtgcggggacacatctt

SEQ ID NO: 125938 - DNA, 22 bp, Artificial Sequence
  Synthetic oligonucleotide; CTT chr11 5327229 5327250 5327234 5327229 -
ccatccaactcagaaggagggc

SEQ ID NO: 125939 - DNA, 22 bp, Artificial Sequence
  Synthetic oligonucleotide; TTC chr11 5327228 5327249 5327233 5327228 -
catccaactcagaaggagggca

SEQ ID NO: 125940 - DNA, 22 bp, Artificial Sequence
  Synthetic oligonucleotide; CTC chr11 5327218 5327239 5327223 5327218 -
agaaggagggcagagtaggaaa

SEQ ID NO: 125941 - DNA, 22 bp, Artificial Sequence
  Synthetic oligonucleotide; TTT chr11 5327164 5327185 5327169 5327164 -
tttcctctttcacttgtttatg

SEQ ID NO: 125942 - DNA, 22 bp, Artificial Sequence
  Synthetic oligonucleotide; TTT chr11 5327163 5327184 5327168 5327163 -
ttcctctttcacttgtttatgt

SEQ ID NO: 125943 - DNA, 22 bp, Artificial Sequence
  Synthetic oligonucleotide; TTT chr11 5327162 5327183 5327167 5327162 -
tcctctttcacttgtttatgta

SEQ ID NO: 125944 - DNA, 22 bp, Artificial Sequence
  Synthetic oligonucleotide; TTT chr11 5327161 5327182 5327166 5327161 -
cctctttcacttgtttatgtag

SEQ ID NO: 125945 - DNA, 22 bp, Artificial Sequence
  Synthetic oligonucleotide; TTC chr11 5327160 5327181 5327165 5327160 -
ctctttcacttgtttatgtaga

SEQ ID NO: 125946 - DNA, 22 bp, Artificial Sequence
  Synthetic oligonucleotide; CTC chr11 5327157 5327178 5327162 5327157 -
tttcacttgtttatgtagactg

SEQ ID NO: 125947 - DNA, 22 bp, Artificial Sequence
  Synthetic oligonucleotide; CTT chr11 5327155 5327176 5327160 5327155 -
tcacttgtttatgtagactgta

SEQ ID NO: 125948 - DNA, 22 bp, Artificial Sequence
  Synthetic oligonucleotide; TTT chr11 5327154 5327175 5327159 5327154 -
cacttgtttatgtagactgtat

SEQ ID NO: 125949 - DNA, 22 bp, Artificial Sequence
  Synthetic oligonucleotide; TTC chr11 5327153 5327174 5327158 5327153 -
acttgtttatgtagactgtata

SEQ ID NO: 125950 - DNA, 22 bp, Artificial Sequence
  Synthetic oligonucleotide; CTT chr11 5327149 5327170 5327154 5327149 -
gtttatgtagactgtataatag

SEQ ID NO: 125951 - DNA, 22 bp, Artificial Sequence
  Synthetic oligonucleotide; TTG chr11 5327148 5327169 5327153 5327148 -
tttatgtagactgtataataga

SEQ ID NO: 125952 - DNA, 22 bp, Artificial Sequence
  Synthetic oligonucleotide; TTT chr11 5327145 5327166 5327150 5327145 -
atgtagactgtataatagattc

SEQ ID NO: 125953 - DNA, 22 bp, Artificial Sequence
  Synthetic oligonucleotide; TTA chr11 5327144 5327165 5327149 5327144 -
tgtagactgtataatagattca

SEQ ID NO: 125954 - DNA, 22 bp, Artificial Sequence
  Synthetic oligonucleotide; CTG chr11 5327135 5327156 5327140 5327135 -
tataatagattcactatttact

SEQ ID NO: 125955 - DNA, 22 bp, Artificial Sequence
  Synthetic oligonucleotide; TTC chr11 5327123 5327144 5327128 5327123 -
actatttactacattttcttga

SEQ ID NO: 125956 - DNA, 22 bp, Artificial Sequence
  Synthetic oligonucleotide; CTA chr11 5327119 5327140 5327124 5327119 -
tttactacattttcttgaggct

SEQ ID NO: 125957 - DNA, 22 bp, Artificial Sequence
  Synthetic oligonucleotide; TTT chr11 5327116 5327137 5327121 5327116 -
actacattttcttgaggctaac

SEQ ID NO: 125958 - DNA, 22 bp, Artificial Sequence
  Synthetic oligonucleotide; TTA chr11 5327115 5327136 5327120 5327115 -
ctacattttcttgaggctaaca

SEQ ID NO: 125959 - DNA, 22 bp, Artificial Sequence
  Synthetic oligonucleotide; CTA chr11 5327112 5327133 5327117 5327112 -
cattttcttgaggctaacagat

SEQ ID NO: 125960 - DNA, 22 bp, Artificial Sequence
  Synthetic oligonucleotide; TTT chr11 5327107 5327128 5327112 5327107 -
tcttgaggctaacagatctttc

SEQ ID NO: 125961 - DNA, 22 bp, Artificial Sequence
  Synthetic oligonucleotide; TTT chr11 5327106 5327127 5327111 5327106 -
cttgaggctaacagatctttcc

SEQ ID NO: 125962 - DNA, 22 bp, Artificial Sequence
  Synthetic oligonucleotide; TTC chr11 5327105 5327126 5327110 5327105 -
ttgaggctaacagatctttcct

SEQ ID NO: 125963 - DNA, 22 bp, Artificial Sequence
  Synthetic oligonucleotide; CTT chr11 5327103 5327124 5327108 5327103 -
gaggctaacagatctttcctgt

SEQ ID NO: 125964 - DNA, 22 bp, Artificial Sequence
  Synthetic oligonucleotide; TTG chr11 5327102 5327123 5327107 5327102 -
aggctaacagatctttcctgtc

SEQ ID NO: 125965 - DNA, 22 bp, Artificial Sequence
  Synthetic oligonucleotide; CTA chr11 5327096 5327117 5327101 5327096 -
acagatctttcctgtctgttcc

SEQ ID NO: 125966 - DNA, 22 bp, Artificial Sequence
  Synthetic oligonucleotide; CTT chr11 5327087 5327108 5327092 5327087 -
tcctgtctgttccttcttcata

SEQ ID NO: 125967 - DNA, 22 bp, Artificial Sequence
  Synthetic oligonucleotide; TTT chr11 5327086 5327107 5327091 5327086 -
cctgtctgttccttcttcatac

SEQ ID NO: 125968 - DNA, 22 bp, Artificial Sequence
  Synthetic oligonucleotide; TTC chr11 5327085 5327106 5327090 5327085 -
ctgtctgttccttcttcatact

SEQ ID NO: 125969 - DNA, 22 bp, Artificial Sequence
  Synthetic oligonucleotide; CTG chr11 5327082 5327103 5327087 5327082 -
tctgttccttcttcatactaca

SEQ ID NO: 125970 - DNA, 22 bp, Artificial Sequence
  Synthetic oligonucleotide; CTG chr11 5327078 5327099 5327083 5327078 -
ttccttcttcatactacaaagt

SEQ ID NO: 125971 - DNA, 22 bp, Artificial Sequence
  Synthetic oligonucleotide; TTC chr11 5327075 5327096 5327080 5327075 -
cttcttcatactacaaagttcc

SEQ ID NO: 125972 - DNA, 22 bp, Artificial Sequence
  Synthetic oligonucleotide; CTT chr11 5327072 5327093 5327077 5327072 -
cttcatactacaaagttccctc

SEQ ID NO: 125973 - DNA, 22 bp, Artificial Sequence
  Synthetic oligonucleotide; TTC chr11 5327071 5327092 5327076 5327071 -
ttcatactacaaagttccctct

SEQ ID NO: 125974 - DNA, 22 bp, Artificial Sequence
  Synthetic oligonucleotide; CTT chr11 5327069 5327090 5327074 5327069 -
catactacaaagttccctctgt

SEQ ID NO: 125975 - DNA, 22 bp, Artificial Sequence
  Synthetic oligonucleotide; TTC chr11 5327068 5327089 5327073 5327068 -
atactacaaagttccctctgtc

SEQ ID NO: 125976 - DNA, 22 bp, Artificial Sequence
  Synthetic oligonucleotide; CTA chr11 5327062 5327083 5327067 5327062 -
caaagttccctctgtctccttt

SEQ ID NO: 125977 - DNA, 22 bp, Artificial Sequence
  Synthetic oligonucleotide; TTC chr11 5327054 5327075 5327059 5327054 -
cctctgtctcctttactccctt

SEQ ID NO: 125978 - DNA, 22 bp, Artificial Sequence
  Synthetic oligonucleotide; CTC chr11 5327050 5327071 5327055 5327050 -
tgtctcctttactcccttgtat

SEQ ID NO: 125979 - DNA, 22 bp, Artificial Sequence
  Synthetic oligonucleotide; CTG chr11 5327048 5327069 5327053 5327048 -
tctcctttactcccttgtatct

SEQ ID NO: 125980 - DNA, 22 bp, Artificial Sequence
  Synthetic oligonucleotide; CTC chr11 5327044 5327065 5327049 5327044 -
ctttactcccttgtatctggta

SEQ ID NO: 125981 - DNA, 22 bp, Artificial Sequence
  Synthetic oligonucleotide; CTT chr11 5327041 5327062 5327046 5327041 -
tactcccttgtatctggtaaca

SEQ ID NO: 125982 - DNA, 22 bp, Artificial Sequence
  Synthetic oligonucleotide; TTT chr11 5327040 5327061 5327045 5327040 -
actcccttgtatctggtaacat

SEQ ID NO: 125983 - DNA, 22 bp, Artificial Sequence
  Synthetic oligonucleotide; TTA chr11 5327039 5327060 5327044 5327039 -
ctcccttgtatctggtaacatt

SEQ ID NO: 125984 - DNA, 22 bp, Artificial Sequence
  Synthetic oligonucleotide; CTC chr11 5327036 5327057 5327041 5327036 -
ccttgtatctggtaacattcaa

SEQ ID NO: 125985 - DNA, 22 bp, Artificial Sequence
  Synthetic oligonucleotide; CTT chr11 5327032 5327053 5327037 5327032 -
gtatctggtaacattcaaatta

SEQ ID NO: 125986 - DNA, 22 bp, Artificial Sequence
  Synthetic oligonucleotide; TTG chr11 5327031 5327052 5327036 5327031 -
tatctggtaacattcaaattat

SEQ ID NO: 125987 - DNA, 22 bp, Artificial Sequence
  Synthetic oligonucleotide; CTG chr11 5327025 5327046 5327030 5327025 -
gtaacattcaaattatgttctc

SEQ ID NO: 125988 - DNA, 22 bp, Artificial Sequence
  Synthetic oligonucleotide; TTC chr11 5327016 5327037 5327021 5327016 -
aaattatgttctcaaagtgagc

SEQ ID NO: 125989 - DNA, 22 bp, Artificial Sequence
  Synthetic oligonucleotide; TTA chr11 5327010 5327031 5327015 5327010 -
tgttctcaaagtgagcatgaca

SEQ ID NO: 125990 - DNA, 22 bp, Artificial Sequence
  Synthetic oligonucleotide; TTC chr11 5327005 5327026 5327010 5327005 -
tcaaagtgagcatgacaacttt

SEQ ID NO: 125991 - DNA, 22 bp, Artificial Sequence
  Synthetic oligonucleotide; CTC chr11 5327003 5327024 5327008 5327003 -
aaagtgagcatgacaacttttt

SEQ ID NO: 125992 - DNA, 22 bp, Artificial Sequence
  Synthetic oligonucleotide; CTT chr11 5326984 5327005 5326989 5326984 -
ttttccatggacctgtatgtat

SEQ ID NO: 125993 - DNA, 22 bp, Artificial Sequence
  Synthetic oligonucleotide; TTT chr11 5326983 5327004 5326988 5326983 -
tttccatggacctgtatgtatt

SEQ ID NO: 125994 - DNA, 22 bp, Artificial Sequence
  Synthetic oligonucleotide; TTT chr11 5326982 5327003 5326987 5326982 -
ttccatggacctgtatgtattt

SEQ ID NO: 125995 - DNA, 22 bp, Artificial Sequence
  Synthetic oligonucleotide; TTT chr11 5326981 5327002 5326986 5326981 -
tccatggacctgtatgtattta

SEQ ID NO: 125996 - DNA, 22 bp, Artificial Sequence
  Synthetic oligonucleotide; TTT chr11 5326980 5327001 5326985 5326980 -
ccatggacctgtatgtatttat

SEQ ID NO: 125997 - DNA, 22 bp, Artificial Sequence
  Synthetic oligonucleotide; TTC chr11 5326979 5327000 5326984 5326979 -
catggacctgtatgtatttatg

SEQ ID NO: 125998 - DNA, 22 bp, Artificial Sequence
  Synthetic oligonucleotide; CTG chr11 5326969 5326990 5326974 5326969 -
tatgtatttatgcatcttggtg

SEQ ID NO: 125999 - DNA, 22 bp, Artificial Sequence
  Synthetic oligonucleotide; TTT chr11 5326960 5326981 5326965 5326960 -
atgcatcttggtgagagtgttg

SEQ ID NO: 126000 - DNA, 22 bp, Artificial Sequence
  Synthetic oligonucleotide; TTA chr11 5326959 5326980 5326964 5326959 -
tgcatcttggtgagagtgttgc

SEQ ID NO: 126001 - DNA, 22 bp, Artificial Sequence
  Synthetic oligonucleotide; CTT chr11 5326951 5326972 5326956 5326951 -
ggtgagagtgttgctacaagta

SEQ ID NO: 126002 - DNA, 22 bp, Artificial Sequence
  Synthetic oligonucleotide; TTG chr11 5326950 5326971 5326955 5326950 -
gtgagagtgttgctacaagtat

SEQ ID NO: 126003 - DNA, 22 bp, Artificial Sequence
  Synthetic oligonucleotide; TTG chr11 5326938 5326959 5326943 5326938 -
ctacaagtataggaatcttatt

SEQ ID NO: 126004 - DNA, 22 bp, Artificial Sequence
  Synthetic oligonucleotide; CTA chr11 5326935 5326956 5326940 5326935 -
caagtataggaatcttattcat

SEQ ID NO: 126005 - DNA, 22 bp, Artificial Sequence
  Synthetic oligonucleotide; CTT chr11 5326919 5326940 5326924 5326919 -
attcatctagaaatatatcatc

SEQ ID NO: 126006 - DNA, 22 bp, Artificial Sequence
  Synthetic oligonucleotide; TTA chr11 5326918 5326939 5326923 5326918 -
ttcatctagaaatatatcatca

SEQ ID NO: 126007 - DNA, 22 bp, Artificial Sequence
  Synthetic oligonucleotide; TTC chr11 5326915 5326936 5326920 5326915 -
atctagaaatatatcatcatgt

SEQ ID NO: 126008 - DNA, 22 bp, Artificial Sequence
  Synthetic oligonucleotide; CTA chr11 5326910 5326931 5326915 5326910 -
gaaatatatcatcatgtgaaat

SEQ ID NO: 126009 - DNA, 22 bp, Artificial Sequence
  Synthetic oligonucleotide; TTC chr11 5326886 5326907 5326891 5326886 -
aggtcaatagaacatctagaat

SEQ ID NO: 126010 - DNA, 22 bp, Artificial Sequence
  Synthetic oligonucleotide; CTA chr11 5326868 5326889 5326873 5326868 -
gaatgaagctagaatgaagcag

SEQ ID NO: 126011 - DNA, 22 bp, Artificial Sequence
  Synthetic oligonucleotide; CTA chr11 5326857 5326878 5326862 5326857 -
gaatgaagcagggcttagatct

SEQ ID NO: 126012 - DNA, 22 bp, Artificial Sequence
  Synthetic oligonucleotide; CTT chr11 5326841 5326862 5326846 5326841 -
agatctatgatttttctcaagt

SEQ ID NO: 126013 - DNA, 22 bp, Artificial Sequence
  Synthetic oligonucleotide; TTA chr11 5326840 5326861 5326845 5326840 -
gatctatgatttttctcaagtt

SEQ ID NO: 126014 - DNA, 22 bp, Artificial Sequence
  Synthetic oligonucleotide; CTA chr11 5326834 5326855 5326839 5326834 -
tgatttttctcaagttttcagc

SEQ ID NO: 126015 - DNA, 22 bp, Artificial Sequence
  Synthetic oligonucleotide; TTT chr11 5326828 5326849 5326833 5326828 -
ttctcaagttttcagcattatg

SEQ ID NO: 126016 - DNA, 22 bp, Artificial Sequence
  Synthetic oligonucleotide; TTT chr11 5326827 5326848 5326832 5326827 -
tctcaagttttcagcattatgg

SEQ ID NO: 126017 - DNA, 22 bp, Artificial Sequence
  Synthetic oligonucleotide; TTT chr11 5326826 5326847 5326831 5326826 -
ctcaagttttcagcattatgga

SEQ ID NO: 126018 - DNA, 22 bp, Artificial Sequence
  Synthetic oligonucleotide; TTC chr11 5326825 5326846 5326830 5326825 -
tcaagttttcagcattatggat

SEQ ID NO: 126019 - DNA, 22 bp, Artificial Sequence
  Synthetic oligonucleotide; CTC chr11 5326823 5326844 5326828 5326823 -
aagttttcagcattatggatcc

SEQ ID NO: 126020 - DNA, 22 bp, Artificial Sequence
  Synthetic oligonucleotide; TTT chr11 5326817 5326838 5326822 5326817 -
tcagcattatggatcctgttga

SEQ ID NO: 126021 - DNA, 22 bp, Artificial Sequence
  Synthetic oligonucleotide; TTT chr11 5326816 5326837 5326821 5326816 -
cagcattatggatcctgttgag

SEQ ID NO: 126022 - DNA, 22 bp, Artificial Sequence
  Synthetic oligonucleotide; TTC chr11 5326815 5326836 5326820 5326815 -
agcattatggatcctgttgaga

SEQ ID NO: 126023 - DNA, 22 bp, Artificial Sequence
  Synthetic oligonucleotide; TTA chr11 5326808 5326829 5326813 5326808 -
tggatcctgttgagacattcaa

SEQ ID NO: 126024 - DNA, 22 bp, Artificial Sequence
  Synthetic oligonucleotide; CTG chr11 5326799 5326820 5326804 5326799 -
ttgagacattcaagggcaatat

SEQ ID NO: 126025 - DNA, 22 bp, Artificial Sequence
  Synthetic oligonucleotide; TTG chr11 5326796 5326817 5326801 5326796 -
agacattcaagggcaatattct

SEQ ID NO: 126026 - DNA, 22 bp, Artificial Sequence
  Synthetic oligonucleotide; TTC chr11 5326788 5326809 5326793 5326788 -
aagggcaatattctgcataaaa

SEQ ID NO: 126027 - DNA, 22 bp, Artificial Sequence
  Synthetic oligonucleotide; TTC chr11 5326775 5326796 5326780 5326775 -
tgcataaaattgaagggagaat

SEQ ID NO: 126028 - DNA, 22 bp, Artificial Sequence
  Synthetic oligonucleotide; CTG chr11 5326773 5326794 5326778 5326773 -
cataaaattgaagggagaatat

SEQ ID NO: 126029 - DNA, 22 bp, Artificial Sequence
  Synthetic oligonucleotide; TTG chr11 5326763 5326784 5326768 5326763 -
aagggagaatattaagcactat

SEQ ID NO: 126030 - DNA, 22 bp, Artificial Sequence
  Synthetic oligonucleotide; TTA chr11 5326749 5326770 5326754 5326749 -
agcactattataaactcatagg

SEQ ID NO: 126031 - DNA, 22 bp, Artificial Sequence
  Synthetic oligonucleotide; CTA chr11 5326742 5326763 5326747 5326742 -
ttataaactcataggccatatt

SEQ ID NO: 126032 - DNA, 22 bp, Artificial Sequence
  Synthetic oligonucleotide; TTA chr11 5326739 5326760 5326744 5326739 -
taaactcataggccatattgag

SEQ ID NO: 126033 - DNA, 22 bp, Artificial Sequence
  Synthetic oligonucleotide; CTC chr11 5326732 5326753 5326737 5326732 -
ataggccatattgagagcttct

SEQ ID NO: 126034 - DNA, 22 bp, Artificial Sequence
  Synthetic oligonucleotide; TTG chr11 5326719 5326740 5326724 5326719 -
agagcttcttaagagcagactg

SEQ ID NO: 126035 - DNA, 22 bp, Artificial Sequence
  Synthetic oligonucleotide; CTT chr11 5326712 5326733 5326717 5326712 -
cttaagagcagactgtgcttat

SEQ ID NO: 126036 - DNA, 22 bp, Artificial Sequence
  Synthetic oligonucleotide; TTC chr11 5326711 5326732 5326716 5326711 -
ttaagagcagactgtgcttatt

SEQ ID NO: 126037 - DNA, 22 bp, Artificial Sequence
  Synthetic oligonucleotide; CTT chr11 5326709 5326730 5326714 5326709 -
aagagcagactgtgcttattac

SEQ ID NO: 126038 - DNA, 22 bp, Artificial Sequence
  Synthetic oligonucleotide; TTA chr11 5326708 5326729 5326713 5326708 -
agagcagactgtgcttattaca

SEQ ID NO: 126039 - DNA, 22 bp, Artificial Sequence
  Synthetic oligonucleotide; CTG chr11 5326697 5326718 5326702 5326697 -
tgcttattacatggttatttag

SEQ ID NO: 126040 - DNA, 22 bp, Artificial Sequence
  Synthetic oligonucleotide; CTT chr11 5326692 5326713 5326697 5326692 -
attacatggttatttagaacta

SEQ ID NO: 126041 - DNA, 22 bp, Artificial Sequence
  Synthetic oligonucleotide; TTA chr11 5326691 5326712 5326696 5326691 -
ttacatggttatttagaactaa

SEQ ID NO: 126042 - DNA, 22 bp, Artificial Sequence
  Synthetic oligonucleotide; TTA chr11 5326688 5326709 5326693 5326688 -
catggttatttagaactaaaca

SEQ ID NO: 126043 - DNA, 22 bp, Artificial Sequence
  Synthetic oligonucleotide; TTA chr11 5326680 5326701 5326685 5326680 -
tttagaactaaacacagtgcag

SEQ ID NO: 126044 - DNA, 22 bp, Artificial Sequence
  Synthetic oligonucleotide; TTT chr11 5326677 5326698 5326682 5326677 -
agaactaaacacagtgcagttg

SEQ ID NO: 126045 - DNA, 22 bp, Artificial Sequence
  Synthetic oligonucleotide; TTA chr11 5326676 5326697 5326681 5326676 -
gaactaaacacagtgcagttgt

SEQ ID NO: 126046 - DNA, 22 bp, Artificial Sequence
  Synthetic oligonucleotide; CTA chr11 5326670 5326691 5326675 5326670 -
aacacagtgcagttgtgtggca

SEQ ID NO: 126047 - DNA, 22 bp, Artificial Sequence
  Synthetic oligonucleotide; TTG chr11 5326655 5326676 5326660 5326655 -
tgtggcatgtgctcaccaattc

SEQ ID NO: 126048 - DNA, 22 bp, Artificial Sequence
  Synthetic oligonucleotide; CTC chr11 5326641 5326662 5326646 5326641 -
accaattctgtgctgactcaaa

SEQ ID NO: 126049 - DNA, 22 bp, Artificial Sequence
  Synthetic oligonucleotide; TTC chr11 5326633 5326654 5326638 5326633 -
tgtgctgactcaaaatagtcat

SEQ ID NO: 126050 - DNA, 22 bp, Artificial Sequence
  Synthetic oligonucleotide; CTG chr11 5326631 5326652 5326636 5326631 -
tgctgactcaaaatagtcattt

SEQ ID NO: 126051 - DNA, 22 bp, Artificial Sequence
  Synthetic oligonucleotide; CTG chr11 5326626 5326647 5326631 5326626 -
actcaaaatagtcattttccaa

SEQ ID NO: 126052 - DNA, 22 bp, Artificial Sequence
  Synthetic oligonucleotide; CTC chr11 5326622 5326643 5326627 5326622 -
aaaatagtcattttccaacttg

SEQ ID NO: 126053 - DNA, 22 bp, Artificial Sequence
  Synthetic oligonucleotide; TTT chr11 5326609 5326630 5326614 5326609 -
tccaacttgtcccagatggtat

SEQ ID NO: 126054 - DNA, 22 bp, Artificial Sequence
  Synthetic oligonucleotide; TTT chr11 5326608 5326629 5326613 5326608 -
ccaacttgtcccagatggtatt

SEQ ID NO: 126055 - DNA, 22 bp, Artificial Sequence
  Synthetic oligonucleotide; TTC chr11 5326607 5326628 5326612 5326607 -
caacttgtcccagatggtattg

SEQ ID NO: 126056 - DNA, 22 bp, Artificial Sequence
  Synthetic oligonucleotide; CTT chr11 5326601 5326622 5326606 5326601 -
gtcccagatggtattggtgaat

SEQ ID NO: 126057 - DNA, 22 bp, Artificial Sequence
  Synthetic oligonucleotide; TTG chr11 5326600 5326621 5326605 5326600 -
tcccagatggtattggtgaatg

SEQ ID NO: 126058 - DNA, 22 bp, Artificial Sequence
  Synthetic oligonucleotide; TTG chr11 5326585 5326606 5326590 5326585 -
gtgaatggagctcctacaggtt

SEQ ID NO: 126059 - DNA, 22 bp, Artificial Sequence
  Synthetic oligonucleotide; CTC chr11 5326572 5326593 5326577 5326572 -
ctacaggttgcttatatcttca

SEQ ID NO: 126060 - DNA, 22 bp, Artificial Sequence
  Synthetic oligonucleotide; CTA chr11 5326569 5326590 5326574 5326569 -
caggttgcttatatcttcatat

SEQ ID NO: 126061 - DNA, 22 bp, Artificial Sequence
  Synthetic oligonucleotide; TTG chr11 5326562 5326583 5326567 5326562 -
cttatatcttcatatatgatat

SEQ ID NO: 126062 - DNA, 22 bp, Artificial Sequence
  Synthetic oligonucleotide; CTT chr11 5326559 5326580 5326564 5326559 -
atatcttcatatatgatatatc

SEQ ID NO: 126063 - DNA, 22 bp, Artificial Sequence
  Synthetic oligonucleotide; TTA chr11 5326558 5326579 5326563 5326558 -
tatcttcatatatgatatatca

SEQ ID NO: 126064 - DNA, 22 bp, Artificial Sequence
  Synthetic oligonucleotide; CTT chr11 5326552 5326573 5326557 5326552 -
catatatgatatatcagttcaa

SEQ ID NO: 126065 - DNA, 22 bp, Artificial Sequence
  Synthetic oligonucleotide; TTC chr11 5326551 5326572 5326556 5326551 -
atatatgatatatcagttcaag

SEQ ID NO: 126066 - DNA, 22 bp, Artificial Sequence
  Synthetic oligonucleotide; TTC chr11 5326532 5326553 5326537 5326532 -
aaggaaaaatcatcacacatca

SEQ ID NO: 126067 - DNA, 22 bp, Artificial Sequence
  Synthetic oligonucleotide; CTT chr11 5326490 5326511 5326495 5326490 -
aggaaatcactaaacatttatg

SEQ ID NO: 126068 - DNA, 22 bp, Artificial Sequence
  Synthetic oligonucleotide; TTA chr11 5326489 5326510 5326494 5326489 -
ggaaatcactaaacatttatgt

SEQ ID NO: 126069 - DNA, 22 bp, Artificial Sequence
  Synthetic oligonucleotide; CTA chr11 5326478 5326499 5326483 5326478 -
aacatttatgttctgagttgag

SEQ ID NO: 126070 - DNA, 22 bp, Artificial Sequence
  Synthetic oligonucleotide; TTT chr11 5326471 5326492 5326476 5326471 -
atgttctgagttgagagctgcc

SEQ ID NO: 126071 - DNA, 22 bp, Artificial Sequence
  Synthetic oligonucleotide; TTA chr11 5326470 5326491 5326475 5326470 -
tgttctgagttgagagctgcct

SEQ ID NO: 126072 - DNA, 22 bp, Artificial Sequence
  Synthetic oligonucleotide; TTC chr11 5326465 5326486 5326470 5326465 -
tgagttgagagctgcctatcaa

SEQ ID NO: 126073 - DNA, 22 bp, Artificial Sequence
  Synthetic oligonucleotide; CTG chr11 5326463 5326484 5326468 5326463 -
agttgagagctgcctatcaatt

SEQ ID NO: 126074 - DNA, 22 bp, Artificial Sequence
  Synthetic oligonucleotide; TTG chr11 5326458 5326479 5326463 5326458 -
agagctgcctatcaatttcaca

SEQ ID NO: 126075 - DNA, 22 bp, Artificial Sequence
  Synthetic oligonucleotide; CTG chr11 5326451 5326472 5326456 5326451 -
cctatcaatttcacagccatag

SEQ ID NO: 126076 - DNA, 22 bp, Artificial Sequence
  Synthetic oligonucleotide; CTA chr11 5326447 5326468 5326452 5326447 -
tcaatttcacagccatagctgc

SEQ ID NO: 126077 - DNA, 22 bp, Artificial Sequence
  Synthetic oligonucleotide; TTT chr11 5326440 5326461 5326445 5326440 -
cacagccatagctgctccacct

SEQ ID NO: 126078 - DNA, 22 bp, Artificial Sequence
  Synthetic oligonucleotide; TTC chr11 5326439 5326460 5326444 5326439 -
acagccatagctgctccacctt

SEQ ID NO: 126079 - DNA, 22 bp, Artificial Sequence
  Synthetic oligonucleotide; CTG chr11 5326426 5326447 5326431 5326426 -
ctccacctttatccagaaaaac

SEQ ID NO: 126080 - DNA, 22 bp, Artificial Sequence
  Synthetic oligonucleotide; CTC chr11 5326423 5326444 5326428 5326423 -
cacctttatccagaaaaactag

SEQ ID NO: 126081 - DNA, 22 bp, Artificial Sequence
  Synthetic oligonucleotide; CTT chr11 5326417 5326438 5326422 5326417 -
tatccagaaaaactagttcttg

SEQ ID NO: 126082 - DNA, 22 bp, Artificial Sequence
  Synthetic oligonucleotide; TTT chr11 5326416 5326437 5326421 5326416 -
atccagaaaaactagttcttgt

SEQ ID NO: 126083 - DNA, 22 bp, Artificial Sequence
  Synthetic oligonucleotide; TTA chr11 5326415 5326436 5326420 5326415 -
tccagaaaaactagttcttgtg

SEQ ID NO: 126084 - DNA, 22 bp, Artificial Sequence
  Synthetic oligonucleotide; CTA chr11 5326402 5326423 5326407 5326402 -
gttcttgtgcttctagtataat

SEQ ID NO: 126085 - DNA, 22 bp, Artificial Sequence
  Synthetic oligonucleotide; TTC chr11 5326398 5326419 5326403 5326398 -
ttgtgcttctagtataattttc

SEQ ID NO: 126086 - DNA, 22 bp, Artificial Sequence
  Synthetic oligonucleotide; CTT chr11 5326396 5326417 5326401 5326396 -
gtgcttctagtataattttctt

SEQ ID NO: 126087 - DNA, 22 bp, Artificial Sequence
  Synthetic oligonucleotide; TTG chr11 5326395 5326416 5326400 5326395 -
tgcttctagtataattttctta

SEQ ID NO: 126088 - DNA, 22 bp, Artificial Sequence
  Synthetic oligonucleotide; CTT chr11 5326390 5326411 5326395 5326390 -
ctagtataattttcttaacact

SEQ ID NO: 126089 - DNA, 22 bp, Artificial Sequence
  Synthetic oligonucleotide; TTC chr11 5326389 5326410 5326394 5326389 -
tagtataattttcttaacactt

SEQ ID NO: 126090 - DNA, 22 bp, Artificial Sequence
  Synthetic oligonucleotide; CTA chr11 5326387 5326408 5326392 5326387 -
gtataattttcttaacacttgt

SEQ ID NO: 126091 - DNA, 22 bp, Artificial Sequence
  Synthetic oligonucleotide; TTT chr11 5326378 5326399 5326383 5326378 -
tcttaacacttgttaatagcta

SEQ ID NO: 126092 - DNA, 22 bp, Artificial Sequence
  Synthetic oligonucleotide; TTT chr11 5326377 5326398 5326382 5326377 -
cttaacacttgttaatagctaa

SEQ ID NO: 126093 - DNA, 22 bp, Artificial Sequence
  Synthetic oligonucleotide; TTC chr11 5326376 5326397 5326381 5326376 -
ttaacacttgttaatagctaag

SEQ ID NO: 126094 - DNA, 22 bp, Artificial Sequence
  Synthetic oligonucleotide; CTT chr11 5326374 5326395 5326379 5326374 -
aacacttgttaatagctaagcc

SEQ ID NO: 126095 - DNA, 22 bp, Artificial Sequence
  Synthetic oligonucleotide; TTA chr11 5326373 5326394 5326378 5326373 -
acacttgttaatagctaagcca

SEQ ID NO: 126096 - DNA, 22 bp, Artificial Sequence
  Synthetic oligonucleotide; CTT chr11 5326367 5326388 5326372 5326367 -
gttaatagctaagccatctgaa

SEQ ID NO: 126097 - DNA, 22 bp, Artificial Sequence
  Synthetic oligonucleotide; TTG chr11 5326366 5326387 5326371 5326366 -
ttaatagctaagccatctgaat

SEQ ID NO: 126098 - DNA, 22 bp, Artificial Sequence
  Synthetic oligonucleotide; TTA chr11 5326363 5326384 5326368 5326363 -
atagctaagccatctgaatgga

SEQ ID NO: 126099 - DNA, 22 bp, Artificial Sequence
  Synthetic oligonucleotide; CTA chr11 5326356 5326377 5326361 5326356 -
agccatctgaatggaattttgc

SEQ ID NO: 126100 - DNA, 22 bp, Artificial Sequence
  Synthetic oligonucleotide; CTG chr11 5326347 5326368 5326352 5326347 -
aatggaattttgccacatagtg

SEQ ID NO: 126101 - DNA, 22 bp, Artificial Sequence
  Synthetic oligonucleotide; TTT chr11 5326337 5326358 5326342 5326337 -
tgccacatagtgcagccttggg

SEQ ID NO: 126102 - DNA, 22 bp, Artificial Sequence
  Synthetic oligonucleotide; TTT chr11 5326336 5326357 5326341 5326336 -
gccacatagtgcagccttggga

SEQ ID NO: 126103 - DNA, 22 bp, Artificial Sequence
  Synthetic oligonucleotide; TTG chr11 5326335 5326356 5326340 5326335 -
ccacatagtgcagccttgggag

SEQ ID NO: 126104 - DNA, 22 bp, Artificial Sequence
  Synthetic oligonucleotide; CTT chr11 5326318 5326339 5326323 5326318 -
gggagcatgcatacagtatggc

SEQ ID NO: 126105 - DNA, 22 bp, Artificial Sequence
  Synthetic oligonucleotide; TTG chr11 5326317 5326338 5326322 5326317 -
ggagcatgcatacagtatggct

SEQ ID NO: 126106 - DNA, 22 bp, Artificial Sequence
  Synthetic oligonucleotide; CTT chr11 5326294 5326315 5326299 5326294 -
catctctggtgacactgcttat

SEQ ID NO: 126107 - DNA, 22 bp, Artificial Sequence
  Synthetic oligonucleotide; TTC chr11 5326293 5326314 5326298 5326293 -
atctctggtgacactgcttata

SEQ ID NO: 126108 - DNA, 22 bp, Artificial Sequence
  Synthetic oligonucleotide; CTC chr11 5326288 5326309 5326293 5326288 -
tggtgacactgcttatagtggg

SEQ ID NO: 126109 - DNA, 22 bp, Artificial Sequence
  Synthetic oligonucleotide; CTG chr11 5326286 5326307 5326291 5326286 -
gtgacactgcttatagtgggcc

SEQ ID NO: 126110 - DNA, 22 bp, Artificial Sequence
  Synthetic oligonucleotide; CTG chr11 5326277 5326298 5326282 5326277 -
cttatagtgggcctcagtttga

SEQ ID NO: 126111 - DNA, 22 bp, Artificial Sequence
  Synthetic oligonucleotide; CTT chr11 5326274 5326295 5326279 5326274 -
atagtgggcctcagtttgatga

SEQ ID NO: 126112 - DNA, 22 bp, Artificial Sequence
  Synthetic oligonucleotide; TTA chr11 5326273 5326294 5326278 5326273 -
tagtgggcctcagtttgatgac

SEQ ID NO: 126113 - DNA, 22 bp, Artificial Sequence
  Synthetic oligonucleotide; CTC chr11 5326262 5326283 5326267 5326262 -
agtttgatgacagtatctagct

SEQ ID NO: 126114 - DNA, 22 bp, Artificial Sequence
  Synthetic oligonucleotide; TTT chr11 5326257 5326278 5326262 5326257 -
gatgacagtatctagctctcct

SEQ ID NO: 126115 - DNA, 22 bp, Artificial Sequence
  Synthetic oligonucleotide; TTG chr11 5326256 5326277 5326261 5326256 -
atgacagtatctagctctccta

SEQ ID NO: 126116 - DNA, 22 bp, Artificial Sequence
  Synthetic oligonucleotide; CTA chr11 5326243 5326264 5326248 5326243 -
gctctcctagaatccccacacg

SEQ ID NO: 126117 - DNA, 22 bp, Artificial Sequence
  Synthetic oligonucleotide; CTC chr11 5326239 5326260 5326244 5326239 -
tcctagaatccccacacgcctg

SEQ ID NO: 126118 - DNA, 22 bp, Artificial Sequence
  Synthetic oligonucleotide; CTC chr11 5326237 5326258 5326242 5326237 -
ctagaatccccacacgcctgcc

SEQ ID NO: 126119 - DNA, 22 bp, Artificial Sequence
  Synthetic oligonucleotide; CTA chr11 5326234 5326255 5326239 5326234 -
gaatccccacacgcctgcctct

SEQ ID NO: 126120 - DNA, 22 bp, Artificial Sequence
  Synthetic oligonucleotide; CTG chr11 5326217 5326238 5326222 5326217 -
cctctgggtaaatatcaacggc

SEQ ID NO: 126121 - DNA, 22 bp, Artificial Sequence
  Synthetic oligonucleotide; CTC chr11 5326213 5326234 5326218 5326213 -
tgggtaaatatcaacggcttcc

SEQ ID NO: 126122 - DNA, 22 bp, Artificial Sequence
  Synthetic oligonucleotide; CTG chr11 5326211 5326232 5326216 5326211 -
ggtaaatatcaacggcttccca

SEQ ID NO: 126123 - DNA, 22 bp, Artificial Sequence
  Synthetic oligonucleotide; CTT chr11 5326193 5326214 5326198 5326193 -
cccagtgttgggcaggcttctt

SEQ ID NO: 126124 - DNA, 22 bp, Artificial Sequence
  Synthetic oligonucleotide; TTC chr11 5326192 5326213 5326197 5326192 -
ccagtgttgggcaggcttcttt

SEQ ID NO: 126125 - DNA, 22 bp, Artificial Sequence
  Synthetic oligonucleotide; TTG chr11 5326183 5326204 5326188 5326183 -
ggcaggcttcttttgtgtttct

SEQ ID NO: 126126 - DNA, 22 bp, Artificial Sequence
  Synthetic oligonucleotide; CTT chr11 5326174 5326195 5326179 5326174 -
cttttgtgtttctttttattcc

SEQ ID NO: 126127 - DNA, 22 bp, Artificial Sequence
  Synthetic oligonucleotide; TTC chr11 5326173 5326194 5326178 5326173 -
ttttgtgtttctttttattccc

SEQ ID NO: 126128 - DNA, 22 bp, Artificial Sequence
  Synthetic oligonucleotide; CTT chr11 5326171 5326192 5326176 5326171 -
ttgtgtttctttttattcccaa

SEQ ID NO: 126129 - DNA, 22 bp, Artificial Sequence
  Synthetic oligonucleotide; TTT chr11 5326170 5326191 5326175 5326170 -
tgtgtttctttttattcccaaa

SEQ ID NO: 126130 - DNA, 22 bp, Artificial Sequence
  Synthetic oligonucleotide; TTT chr11 5326169 5326190 5326174 5326169 -
gtgtttctttttattcccaaaa

SEQ ID NO: 126131 - DNA, 22 bp, Artificial Sequence
  Synthetic oligonucleotide; TTG chr11 5326168 5326189 5326173 5326168 -
tgtttctttttattcccaaaat

SEQ ID NO: 126132 - DNA, 22 bp, Artificial Sequence
  Synthetic oligonucleotide; TTT chr11 5326163 5326184 5326168 5326163 -
ctttttattcccaaaatctcag

SEQ ID NO: 126133 - DNA, 22 bp, Artificial Sequence
  Synthetic oligonucleotide; TTC chr11 5326162 5326183 5326167 5326162 -
tttttattcccaaaatctcaga

SEQ ID NO: 126134 - DNA, 22 bp, Artificial Sequence
  Synthetic oligonucleotide; CTT chr11 5326160 5326181 5326165 5326160 -
tttattcccaaaatctcagaca

SEQ ID NO: 126135 - DNA, 22 bp, Artificial Sequence
  Synthetic oligonucleotide; TTT chr11 5326159 5326180 5326164 5326159 -
ttattcccaaaatctcagacat

SEQ ID NO: 126136 - DNA, 22 bp, Artificial Sequence
  Synthetic oligonucleotide; TTT chr11 5326158 5326179 5326163 5326158 -
tattcccaaaatctcagacatg

SEQ ID NO: 126137 - DNA, 22 bp, Artificial Sequence
  Synthetic oligonucleotide; TTT chr11 5326157 5326178 5326162 5326157 -
attcccaaaatctcagacatga

SEQ ID NO: 126138 - DNA, 22 bp, Artificial Sequence
  Synthetic oligonucleotide; TTA chr11 5326156 5326177 5326161 5326156 -
ttcccaaaatctcagacatgat

SEQ ID NO: 126139 - DNA, 22 bp, Artificial Sequence
  Synthetic oligonucleotide; TTC chr11 5326153 5326174 5326158 5326153 -
ccaaaatctcagacatgattta

SEQ ID NO: 126140 - DNA, 22 bp, Artificial Sequence
  Synthetic oligonucleotide; CTC chr11 5326143 5326164 5326148 5326143 -
agacatgatttacctttcattt

SEQ ID NO: 126141 - DNA, 22 bp, Artificial Sequence
  Synthetic oligonucleotide; TTT chr11 5326132 5326153 5326137 5326132 -
acctttcattttctttgaggta

SEQ ID NO: 126142 - DNA, 22 bp, Artificial Sequence
  Synthetic oligonucleotide; TTA chr11 5326131 5326152 5326136 5326131 -
cctttcattttctttgaggtac

SEQ ID NO: 126143 - DNA, 22 bp, Artificial Sequence
  Synthetic oligonucleotide; CTT chr11 5326127 5326148 5326132 5326127 -
tcattttctttgaggtaccata

SEQ ID NO: 126144 - DNA, 22 bp, Artificial Sequence
  Synthetic oligonucleotide; TTT chr11 5326126 5326147 5326131 5326126 -
cattttctttgaggtaccataa

SEQ ID NO: 126145 - DNA, 22 bp, Artificial Sequence
  Synthetic oligonucleotide; TTC chr11 5326125 5326146 5326130 5326125 -
attttctttgaggtaccataac

SEQ ID NO: 126146 - DNA, 22 bp, Artificial Sequence
  Synthetic oligonucleotide; TTT chr11 5326121 5326142 5326126 5326121 -
tctttgaggtaccataaccttc

SEQ ID NO: 126147 - DNA, 22 bp, Artificial Sequence
  Synthetic oligonucleotide; TTT chr11 5326120 5326141 5326125 5326120 -
ctttgaggtaccataaccttcc

SEQ ID NO: 126148 - DNA, 22 bp, Artificial Sequence
  Synthetic oligonucleotide; TTC chr11 5326119 5326140 5326124 5326119 -
tttgaggtaccataaccttccc

SEQ ID NO: 126149 - DNA, 22 bp, Artificial Sequence
  Synthetic oligonucleotide; CTT chr11 5326117 5326138 5326122 5326117 -
tgaggtaccataaccttccctg

SEQ ID NO: 126150 - DNA, 22 bp, Artificial Sequence
  Synthetic oligonucleotide; TTT chr11 5326116 5326137 5326121 5326116 -
gaggtaccataaccttccctgt

SEQ ID NO: 126151 - DNA, 22 bp, Artificial Sequence
  Synthetic oligonucleotide; TTG chr11 5326115 5326136 5326120 5326115 -
aggtaccataaccttccctgtc

SEQ ID NO: 126152 - DNA, 22 bp, Artificial Sequence
  Synthetic oligonucleotide; CTT chr11 5326100 5326121 5326105 5326100 -
ccctgtcttacttttaatgacc

SEQ ID NO: 126153 - DNA, 22 bp, Artificial Sequence
  Synthetic oligonucleotide; TTC chr11 5326099 5326120 5326104 5326099 -
cctgtcttacttttaatgaccc

SEQ ID NO: 126154 - DNA, 22 bp, Artificial Sequence
  Synthetic oligonucleotide; CTG chr11 5326095 5326116 5326100 5326095 -
tcttacttttaatgacccaagc

SEQ ID NO: 126155 - DNA, 22 bp, Artificial Sequence
  Synthetic oligonucleotide; CTT chr11 5326091 5326112 5326096 5326091 -
acttttaatgacccaagcttag

SEQ ID NO: 126156 - DNA, 22 bp, Artificial Sequence
  Synthetic oligonucleotide; TTA chr11 5326090 5326111 5326095 5326090 -
cttttaatgacccaagcttaga

SEQ ID NO: 126157 - DNA, 22 bp, Artificial Sequence
  Synthetic oligonucleotide; CTT chr11 5326087 5326108 5326092 5326087 -
ttaatgacccaagcttagagat

SEQ ID NO: 126158 - DNA, 22 bp, Artificial Sequence
  Synthetic oligonucleotide; TTT chr11 5326086 5326107 5326091 5326086 -
taatgacccaagcttagagatg

SEQ ID NO: 126159 - DNA, 22 bp, Artificial Sequence
  Synthetic oligonucleotide; TTT chr11 5326085 5326106 5326090 5326085 -
aatgacccaagcttagagatgg

SEQ ID NO: 126160 - DNA, 22 bp, Artificial Sequence
  Synthetic oligonucleotide; TTA chr11 5326084 5326105 5326089 5326084 -
atgacccaagcttagagatgga

SEQ ID NO: 126161 - DNA, 22 bp, Artificial Sequence
  Synthetic oligonucleotide; CTT chr11 5326071 5326092 5326076 5326071 -
agagatggagggagatatgact

SEQ ID NO: 126162 - DNA, 22 bp, Artificial Sequence
  Synthetic oligonucleotide; TTA chr11 5326070 5326091 5326075 5326070 -
gagatggagggagatatgactg

SEQ ID NO: 126163 - DNA, 22 bp, Artificial Sequence
  Synthetic oligonucleotide; CTG chr11 5326048 5326069 5326053 5326048 -
taaacatttttttctgctcata

SEQ ID NO: 126164 - DNA, 22 bp, Artificial Sequence
  Synthetic oligonucleotide; TTT chr11 5326039 5326060 5326044 5326039 -
ttttctgctcataaatataata

SEQ ID NO: 126165 - DNA, 22 bp, Artificial Sequence
  Synthetic oligonucleotide; TTT chr11 5326038 5326059 5326043 5326038 -
tttctgctcataaatataataa

SEQ ID NO: 126166 - DNA, 22 bp, Artificial Sequence
  Synthetic oligonucleotide; TTT chr11 5326037 5326058 5326042 5326037 -
ttctgctcataaatataataaa

SEQ ID NO: 126167 - DNA, 22 bp, Artificial Sequence
  Synthetic oligonucleotide; TTT chr11 5326036 5326057 5326041 5326036 -
tctgctcataaatataataaaa

SEQ ID NO: 126168 - DNA, 22 bp, Artificial Sequence
  Synthetic oligonucleotide; TTT chr11 5326035 5326056 5326040 5326035 -
ctgctcataaatataataaaaa

SEQ ID NO: 126169 - DNA, 22 bp, Artificial Sequence
  Synthetic oligonucleotide; TTC chr11 5326034 5326055 5326039 5326034 -
tgctcataaatataataaaaaa

SEQ ID NO: 126170 - DNA, 22 bp, Artificial Sequence
  Synthetic oligonucleotide; CTG chr11 5326032 5326053 5326037 5326032 -
ctcataaatataataaaaaact

SEQ ID NO: 126171 - DNA, 22 bp, Artificial Sequence
  Synthetic oligonucleotide; CTC chr11 5326029 5326050 5326034 5326029 -
ataaatataataaaaaactttc

SEQ ID NO: 126172 - DNA, 22 bp, Artificial Sequence
  Synthetic oligonucleotide; CTT chr11 5326009 5326030 5326014 5326009 -
tcttttttggtttcaagtgttt

SEQ ID NO: 126173 - DNA, 22 bp, Artificial Sequence
  Synthetic oligonucleotide; TTT chr11 5326008 5326029 5326013 5326008 -
cttttttggtttcaagtgtttt

SEQ ID NO: 126174 - DNA, 22 bp, Artificial Sequence
  Synthetic oligonucleotide; TTC chr11 5326007 5326028 5326012 5326007 -
ttttttggtttcaagtgtttta

SEQ ID NO: 126175 - DNA, 22 bp, Artificial Sequence
  Synthetic oligonucleotide; CTT chr11 5326005 5326026 5326010 5326005 -
ttttggtttcaagtgttttatg

SEQ ID NO: 126176 - DNA, 22 bp, Artificial Sequence
  Synthetic oligonucleotide; TTT chr11 5326004 5326025 5326009 5326004 -
tttggtttcaagtgttttatgg

SEQ ID NO: 126177 - DNA, 22 bp, Artificial Sequence
  Synthetic oligonucleotide; TTT chr11 5326003 5326024 5326008 5326003 -
ttggtttcaagtgttttatggc

SEQ ID NO: 126178 - DNA, 22 bp, Artificial Sequence
  Synthetic oligonucleotide; TTT chr11 5326002 5326023 5326007 5326002 -
tggtttcaagtgttttatggcc

SEQ ID NO: 126179 - DNA, 22 bp, Artificial Sequence
  Synthetic oligonucleotide; TTT chr11 5326001 5326022 5326006 5326001 -
ggtttcaagtgttttatggcca

SEQ ID NO: 126180 - DNA, 22 bp, Artificial Sequence
  Synthetic oligonucleotide; TTG chr11 5326000 5326021 5326005 5326000 -
gtttcaagtgttttatggccaa

SEQ ID NO: 126181 - DNA, 22 bp, Artificial Sequence
  Synthetic oligonucleotide; TTT chr11 5325996 5326017 5326001 5325996 -
caagtgttttatggccaatttc

SEQ ID NO: 126182 - DNA, 22 bp, Artificial Sequence
  Synthetic oligonucleotide; TTC chr11 5325995 5326016 5326000 5325995 -
aagtgttttatggccaatttct

SEQ ID NO: 126183 - DNA, 22 bp, Artificial Sequence
  Synthetic oligonucleotide; TTT chr11 5325987 5326008 5325992 5325987 -
tatggccaatttctctaaagac

SEQ ID NO: 126184 - DNA, 22 bp, Artificial Sequence
  Synthetic oligonucleotide; TTT chr11 5325986 5326007 5325991 5325986 -
atggccaatttctctaaagacg

SEQ ID NO: 126185 - DNA, 22 bp, Artificial Sequence
  Synthetic oligonucleotide; TTA chr11 5325985 5326006 5325990 5325985 -
tggccaatttctctaaagacgt

SEQ ID NO: 126186 - DNA, 22 bp, Artificial Sequence
  Synthetic oligonucleotide; TTT chr11 5325975 5325996 5325980 5325975 -
ctctaaagacgttattgttttt

SEQ ID NO: 126187 - DNA, 22 bp, Artificial Sequence
  Synthetic oligonucleotide; TTC chr11 5325974 5325995 5325979 5325974 -
tctaaagacgttattgtttttt

SEQ ID NO: 126188 - DNA, 22 bp, Artificial Sequence
  Synthetic oligonucleotide; CTC chr11 5325972 5325993 5325977 5325972 -
taaagacgttattgttttttaa

SEQ ID NO: 126189 - DNA, 22 bp, Artificial Sequence
  Synthetic oligonucleotide; CTA chr11 5325970 5325991 5325975 5325970 -
aagacgttattgttttttaagg

SEQ ID NO: 126190 - DNA, 22 bp, Artificial Sequence
  Synthetic oligonucleotide; TTA chr11 5325961 5325982 5325966 5325961 -
ttgttttttaaggaaaagctca

SEQ ID NO: 126191 - DNA, 22 bp, Artificial Sequence
  Synthetic oligonucleotide; TTG chr11 5325958 5325979 5325963 5325958 -
ttttttaaggaaaagctcacaa

SEQ ID NO: 126192 - DNA, 22 bp, Artificial Sequence
  Synthetic oligonucleotide; TTT chr11 5325955 5325976 5325960 5325955 -
tttaaggaaaagctcacaaaca

SEQ ID NO: 126193 - DNA, 22 bp, Artificial Sequence
  Synthetic oligonucleotide; TTT chr11 5325954 5325975 5325959 5325954 -
ttaaggaaaagctcacaaacat

SEQ ID NO: 126194 - DNA, 22 bp, Artificial Sequence
  Synthetic oligonucleotide; TTT chr11 5325953 5325974 5325958 5325953 -
taaggaaaagctcacaaacatt

SEQ ID NO: 126195 - DNA, 22 bp, Artificial Sequence
  Synthetic oligonucleotide; TTT chr11 5325952 5325973 5325957 5325952 -
aaggaaaagctcacaaacattt

SEQ ID NO: 126196 - DNA, 22 bp, Artificial Sequence
  Synthetic oligonucleotide; TTA chr11 5325951 5325972 5325956 5325951 -
aggaaaagctcacaaacatttt

SEQ ID NO: 126197 - DNA, 22 bp, Artificial Sequence
  Synthetic oligonucleotide; CTC chr11 5325940 5325961 5325945 5325940 -
acaaacattttaaaaagtactt

SEQ ID NO: 126198 - DNA, 22 bp, Artificial Sequence
  Synthetic oligonucleotide; TTT chr11 5325930 5325951 5325935 5325930 -
taaaaagtacttgtgctctgga

SEQ ID NO: 126199 - DNA, 22 bp, Artificial Sequence
  Synthetic oligonucleotide; TTT chr11 5325929 5325950 5325934 5325929 -
aaaaagtacttgtgctctggaa

SEQ ID NO: 126200 - DNA, 22 bp, Artificial Sequence
  Synthetic oligonucleotide; TTA chr11 5325928 5325949 5325933 5325928 -
aaaagtacttgtgctctggaaa

SEQ ID NO: 126201 - DNA, 22 bp, Artificial Sequence
  Synthetic oligonucleotide; CTT chr11 5325918 5325939 5325923 5325918 -
gtgctctggaaatctagtttga

SEQ ID NO: 126202 - DNA, 22 bp, Artificial Sequence
  Synthetic oligonucleotide; TTG chr11 5325917 5325938 5325922 5325917 -
tgctctggaaatctagtttgat

SEQ ID NO: 126203 - DNA, 22 bp, Artificial Sequence
  Synthetic oligonucleotide; CTC chr11 5325912 5325933 5325917 5325912 -
tggaaatctagtttgatcctta

SEQ ID NO: 126204 - DNA, 22 bp, Artificial Sequence
  Synthetic oligonucleotide; CTG chr11 5325910 5325931 5325915 5325910 -
gaaatctagtttgatccttaca

SEQ ID NO: 126205 - DNA, 22 bp, Artificial Sequence
  Synthetic oligonucleotide; CTA chr11 5325902 5325923 5325907 5325902 -
gtttgatccttacacaattttt

SEQ ID NO: 126206 - DNA, 22 bp, Artificial Sequence
  Synthetic oligonucleotide; TTT chr11 5325898 5325919 5325903 5325898 -
gatccttacacaatttttttta

SEQ ID NO: 126207 - DNA, 22 bp, Artificial Sequence
  Synthetic oligonucleotide; TTG chr11 5325897 5325918 5325902 5325897 -
atccttacacaattttttttaa

SEQ ID NO: 126208 - DNA, 22 bp, Artificial Sequence
  Synthetic oligonucleotide; CTT chr11 5325891 5325912 5325896 5325891 -
acacaattttttttaaaggaat

SEQ ID NO: 126209 - DNA, 22 bp, Artificial Sequence
  Synthetic oligonucleotide; TTA chr11 5325890 5325911 5325895 5325890 -
cacaattttttttaaaggaatc

SEQ ID NO: 126210 - DNA, 22 bp, Artificial Sequence
  Synthetic oligonucleotide; TTT chr11 5325882 5325903 5325887 5325882 -
tttttaaaggaatcccagattt

SEQ ID NO: 126211 - DNA, 22 bp, Artificial Sequence
  Synthetic oligonucleotide; TTT chr11 5325881 5325902 5325886 5325881 -
ttttaaaggaatcccagatttt

SEQ ID NO: 126212 - DNA, 22 bp, Artificial Sequence
  Synthetic oligonucleotide; TTT chr11 5325880 5325901 5325885 5325880 -
tttaaaggaatcccagatttta

SEQ ID NO: 126213 - DNA, 22 bp, Artificial Sequence
  Synthetic oligonucleotide; TTT chr11 5325879 5325900 5325884 5325879 -
ttaaaggaatcccagattttat

SEQ ID NO: 126214 - DNA, 22 bp, Artificial Sequence
  Synthetic oligonucleotide; TTT chr11 5325878 5325899 5325883 5325878 -
taaaggaatcccagattttatg

SEQ ID NO: 126215 - DNA, 22 bp, Artificial Sequence
  Synthetic oligonucleotide; TTT chr11 5325877 5325898 5325882 5325877 -
aaaggaatcccagattttatgg

SEQ ID NO: 126216 - DNA, 22 bp, Artificial Sequence
  Synthetic oligonucleotide; TTA chr11 5325876 5325897 5325881 5325876 -
aaggaatcccagattttatggc

SEQ ID NO: 126217 - DNA, 22 bp, Artificial Sequence
  Synthetic oligonucleotide; TTT chr11 5325860 5325881 5325865 5325860 -
tatggctttctttttaaaaatt

SEQ ID NO: 126218 - DNA, 22 bp, Artificial Sequence
  Synthetic oligonucleotide; TTT chr11 5325859 5325880 5325864 5325859 -
atggctttctttttaaaaattt

SEQ ID NO: 126219 - DNA, 22 bp, Artificial Sequence
  Synthetic oligonucleotide; TTA chr11 5325858 5325879 5325863 5325858 -
tggctttctttttaaaaatttt

SEQ ID NO: 126220 - DNA, 22 bp, Artificial Sequence
  Synthetic oligonucleotide; CTT chr11 5325852 5325873 5325857 5325852 -
tctttttaaaaattttttattt

SEQ ID NO: 126221 - DNA, 22 bp, Artificial Sequence
  Synthetic oligonucleotide; TTT chr11 5325851 5325872 5325856 5325851 -
ctttttaaaaattttttatttt

SEQ ID NO: 126222 - DNA, 22 bp, Artificial Sequence
  Synthetic oligonucleotide; TTC chr11 5325850 5325871 5325855 5325850 -
tttttaaaaattttttattttt

SEQ ID NO: 126223 - DNA, 22 bp, Artificial Sequence
  Synthetic oligonucleotide; CTT chr11 5325848 5325869 5325853 5325848 -
tttaaaaattttttatttttaa

SEQ ID NO: 126224 - DNA, 22 bp, Artificial Sequence
  Synthetic oligonucleotide; TTT chr11 5325847 5325868 5325852 5325847 -
ttaaaaattttttatttttaaa

SEQ ID NO: 126225 - DNA, 22 bp, Artificial Sequence
  Synthetic oligonucleotide; TTT chr11 5325846 5325867 5325851 5325846 -
taaaaattttttatttttaaaa

SEQ ID NO: 126226 - DNA, 22 bp, Artificial Sequence
  Synthetic oligonucleotide; TTT chr11 5325845 5325866 5325850 5325845 -
aaaaattttttatttttaaaat

SEQ ID NO: 126227 - DNA, 22 bp, Artificial Sequence
  Synthetic oligonucleotide; TTA chr11 5325844 5325865 5325849 5325844 -
aaaattttttatttttaaaatt

SEQ ID NO: 126228 - DNA, 22 bp, Artificial Sequence
  Synthetic oligonucleotide; TTT chr11 5325837 5325858 5325842 5325837 -
tttatttttaaaattttttaaa

SEQ ID NO: 126229 - DNA, 22 bp, Artificial Sequence
  Synthetic oligonucleotide; TTT chr11 5325836 5325857 5325841 5325836 -
ttatttttaaaattttttaaaa

SEQ ID NO: 126230 - DNA, 22 bp, Artificial Sequence
  Synthetic oligonucleotide; TTT chr11 5325835 5325856 5325840 5325835 -
tatttttaaaattttttaaaac

SEQ ID NO: 126231 - DNA, 22 bp, Artificial Sequence
  Synthetic oligonucleotide; TTT chr11 5325834 5325855 5325839 5325834 -
atttttaaaattttttaaaact

SEQ ID NO: 126232 - DNA, 22 bp, Artificial Sequence
  Synthetic oligonucleotide; TTA chr11 5325833 5325854 5325838 5325833 -
tttttaaaattttttaaaactt

SEQ ID NO: 126233 - DNA, 22 bp, Artificial Sequence
  Synthetic oligonucleotide; TTT chr11 5325830 5325851 5325835 5325830 -
ttaaaattttttaaaactttaa

SEQ ID NO: 126234 - DNA, 22 bp, Artificial Sequence
  Synthetic oligonucleotide; TTT chr11 5325829 5325850 5325834 5325829 -
taaaattttttaaaactttaat

SEQ ID NO: 126235 - DNA, 22 bp, Artificial Sequence
  Synthetic oligonucleotide; TTT chr11 5325828 5325849 5325833 5325828 -
aaaattttttaaaactttaatt

SEQ ID NO: 126236 - DNA, 22 bp, Artificial Sequence
  Synthetic oligonucleotide; TTA chr11 5325827 5325848 5325832 5325827 -
aaattttttaaaactttaatta

SEQ ID NO: 126237 - DNA, 22 bp, Artificial Sequence
  Synthetic oligonucleotide; TTT chr11 5325821 5325842 5325826 5325821 -
tttaaaactttaattaaaaaaa

SEQ ID NO: 126238 - DNA, 22 bp, Artificial Sequence
  Synthetic oligonucleotide; TTT chr11 5325820 5325841 5325825 5325820 -
ttaaaactttaattaaaaaaaa

SEQ ID NO: 126239 - DNA, 22 bp, Artificial Sequence
  Synthetic oligonucleotide; TTT chr11 5325819 5325840 5325824 5325819 -
taaaactttaattaaaaaaaat

SEQ ID NO: 126240 - DNA, 22 bp, Artificial Sequence
  Synthetic oligonucleotide; TTT chr11 5325818 5325839 5325823 5325818 -
aaaactttaattaaaaaaaatt

SEQ ID NO: 126241 - DNA, 22 bp, Artificial Sequence
  Synthetic oligonucleotide; TTA chr11 5325817 5325838 5325822 5325817 -
aaactttaattaaaaaaaattt

SEQ ID NO: 126242 - DNA, 22 bp, Artificial Sequence
  Synthetic oligonucleotide; CTT chr11 5325811 5325832 5325816 5325811 -
taattaaaaaaaattttaatgt

SEQ ID NO: 126243 - DNA, 22 bp, Artificial Sequence
  Synthetic oligonucleotide; TTT chr11 5325810 5325831 5325815 5325810 -
aattaaaaaaaattttaatgtg

SEQ ID NO: 126244 - DNA, 22 bp, Artificial Sequence
  Synthetic oligonucleotide; TTA chr11 5325809 5325830 5325814 5325809 -
attaaaaaaaattttaatgtga

SEQ ID NO: 126245 - DNA, 22 bp, Artificial Sequence
  Synthetic oligonucleotide; TTA chr11 5325805 5325826 5325810 5325805 -
aaaaaaattttaatgtgacttt

SEQ ID NO: 126246 - DNA, 22 bp, Artificial Sequence
  Synthetic oligonucleotide; TTT chr11 5325795 5325816 5325800 5325795 -
taatgtgactttcttctatgtt

SEQ ID NO: 126247 - DNA, 22 bp, Artificial Sequence
  Synthetic oligonucleotide; TTT chr11 5325794 5325815 5325799 5325794 -
aatgtgactttcttctatgttt

SEQ ID NO: 126248 - DNA, 22 bp, Artificial Sequence
  Synthetic oligonucleotide; TTA chr11 5325793 5325814 5325798 5325793 -
atgtgactttcttctatgttta

SEQ ID NO: 126249 - DNA, 22 bp, Artificial Sequence
  Synthetic oligonucleotide; CTT chr11 5325784 5325805 5325789 5325784 -
tcttctatgtttacccttcaga

SEQ ID NO: 126250 - DNA, 22 bp, Artificial Sequence
  Synthetic oligonucleotide; TTT chr11 5325783 5325804 5325788 5325783 -
cttctatgtttacccttcagaa

SEQ ID NO: 126251 - DNA, 22 bp, Artificial Sequence
  Synthetic oligonucleotide; TTC chr11 5325782 5325803 5325787 5325782 -
ttctatgtttacccttcagaat

SEQ ID NO: 126252 - DNA, 22 bp, Artificial Sequence
  Synthetic oligonucleotide; CTT chr11 5325780 5325801 5325785 5325780 -
ctatgtttacccttcagaatat

SEQ ID NO: 126253 - DNA, 22 bp, Artificial Sequence
  Synthetic oligonucleotide; TTC chr11 5325779 5325800 5325784 5325779 -
tatgtttacccttcagaatatg

SEQ ID NO: 126254 - DNA, 22 bp, Artificial Sequence
  Synthetic oligonucleotide; CTA chr11 5325777 5325798 5325782 5325777 -
tgtttacccttcagaatatgtg

SEQ ID NO: 126255 - DNA, 22 bp, Artificial Sequence
  Synthetic oligonucleotide; TTT chr11 5325772 5325793 5325777 5325772 -
acccttcagaatatgtgtcacc

SEQ ID NO: 126256 - DNA, 22 bp, Artificial Sequence
  Synthetic oligonucleotide; TTA chr11 5325771 5325792 5325776 5325771 -
cccttcagaatatgtgtcacca

SEQ ID NO: 126257 - DNA, 22 bp, Artificial Sequence
  Synthetic oligonucleotide; CTT chr11 5325766 5325787 5325771 5325766 -
cagaatatgtgtcaccaatttg

SEQ ID NO: 126258 - DNA, 22 bp, Artificial Sequence
  Synthetic oligonucleotide; TTC chr11 5325765 5325786 5325770 5325765 -
agaatatgtgtcaccaatttgt

SEQ ID NO: 126259 - DNA, 22 bp, Artificial Sequence
  Synthetic oligonucleotide; TTT chr11 5325745 5325766 5325750 5325745 -
gtcctttctctaatctgccatt

SEQ ID NO: 126260 - DNA, 22 bp, Artificial Sequence
  Synthetic oligonucleotide; TTG chr11 5325744 5325765 5325749 5325744 -
tcctttctctaatctgccattc

SEQ ID NO: 126261 - DNA, 22 bp, Artificial Sequence
  Synthetic oligonucleotide; CTT chr11 5325739 5325760 5325744 5325739 -
tctctaatctgccattctcttc

SEQ ID NO: 126262 - DNA, 22 bp, Artificial Sequence
  Synthetic oligonucleotide; TTT chr11 5325738 5325759 5325743 5325738 -
ctctaatctgccattctcttcc

SEQ ID NO: 126263 - DNA, 22 bp, Artificial Sequence
  Synthetic oligonucleotide; TTC chr11 5325737 5325758 5325742 5325737 -
tctaatctgccattctcttcct

SEQ ID NO: 126264 - DNA, 22 bp, Artificial Sequence
  Synthetic oligonucleotide; CTC chr11 5325735 5325756 5325740 5325735 -
taatctgccattctcttcctcc

SEQ ID NO: 126265 - DNA, 22 bp, Artificial Sequence
  Synthetic oligonucleotide; CTA chr11 5325733 5325754 5325738 5325733 -
atctgccattctcttcctccta

SEQ ID NO: 126266 - DNA, 22 bp, Artificial Sequence
  Synthetic oligonucleotide; CTG chr11 5325728 5325749 5325733 5325728 -
ccattctcttcctcctatacct

SEQ ID NO: 126267 - DNA, 22 bp, Artificial Sequence
  Synthetic oligonucleotide; TTC chr11 5325722 5325743 5325727 5325722 -
tcttcctcctatacctcattcc

SEQ ID NO: 126268 - DNA, 22 bp, Artificial Sequence
  Synthetic oligonucleotide; CTC chr11 5325720 5325741 5325725 5325720 -
ttcctcctatacctcattccgt

SEQ ID NO: 126269 - DNA, 22 bp, Artificial Sequence
  Synthetic oligonucleotide; CTT chr11 5325718 5325739 5325723 5325718 -
cctcctatacctcattccgtac

SEQ ID NO: 126270 - DNA, 22 bp, Artificial Sequence
  Synthetic oligonucleotide; TTC chr11 5325717 5325738 5325722 5325717 -
ctcctatacctcattccgtaca

SEQ ID NO: 126271 - DNA, 22 bp, Artificial Sequence
  Synthetic oligonucleotide; CTC chr11 5325714 5325735 5325719 5325714 -
ctatacctcattccgtacatcc

SEQ ID NO: 126272 - DNA, 22 bp, Artificial Sequence
  Synthetic oligonucleotide; CTA chr11 5325711 5325732 5325716 5325711 -
tacctcattccgtacatcctct

SEQ ID NO: 126273 - DNA, 22 bp, Artificial Sequence
  Synthetic oligonucleotide; CTC chr11 5325705 5325726 5325710 5325705 -
attccgtacatcctcttattcc

SEQ ID NO: 126274 - DNA, 22 bp, Artificial Sequence
  Synthetic oligonucleotide; TTC chr11 5325701 5325722 5325706 5325701 -
cgtacatcctcttattcctcaa

SEQ ID NO: 126275 - DNA, 22 bp, Artificial Sequence
  Synthetic oligonucleotide; CTC chr11 5325690 5325711 5325695 5325690 -
ttattcctcaatctgtgttttt

SEQ ID NO: 126276 - DNA, 22 bp, Artificial Sequence
  Synthetic oligonucleotide; CTT chr11 5325688 5325709 5325693 5325688 -
attcctcaatctgtgtttttaa

SEQ ID NO: 126277 - DNA, 22 bp, Artificial Sequence
  Synthetic oligonucleotide; TTA chr11 5325687 5325708 5325692 5325687 -
ttcctcaatctgtgtttttaag

SEQ ID NO: 126278 - DNA, 22 bp, Artificial Sequence
  Synthetic oligonucleotide; TTC chr11 5325684 5325705 5325689 5325684 -
ctcaatctgtgtttttaagcat

SEQ ID NO: 126279 - DNA, 22 bp, Artificial Sequence
  Synthetic oligonucleotide; CTC chr11 5325681 5325702 5325686 5325681 -
aatctgtgtttttaagcatgaa

SEQ ID NO: 126280 - DNA, 22 bp, Artificial Sequence
  Synthetic oligonucleotide; CTG chr11 5325675 5325696 5325680 5325675 -
tgtttttaagcatgaaggatct

SEQ ID NO: 126281 - DNA, 22 bp, Artificial Sequence
  Synthetic oligonucleotide; TTT chr11 5325670 5325691 5325675 5325670 -
ttaagcatgaaggatctttcga

SEQ ID NO: 126282 - DNA, 22 bp, Artificial Sequence
  Synthetic oligonucleotide; TTT chr11 5325669 5325690 5325674 5325669 -
taagcatgaaggatctttcgaa

SEQ ID NO: 126283 - DNA, 22 bp, Artificial Sequence
  Synthetic oligonucleotide; TTT chr11 5325668 5325689 5325673 5325668 -
aagcatgaaggatctttcgaag

SEQ ID NO: 126284 - DNA, 22 bp, Artificial Sequence
  Synthetic oligonucleotide; TTA chr11 5325667 5325688 5325672 5325667 -
agcatgaaggatctttcgaagg

SEQ ID NO: 126285 - DNA, 22 bp, Artificial Sequence
  Synthetic oligonucleotide; CTT chr11 5325652 5325673 5325657 5325652 -
tcgaaggtagaacaacatttgt

SEQ ID NO: 126286 - DNA, 22 bp, Artificial Sequence
  Synthetic oligonucleotide; TTT chr11 5325651 5325672 5325656 5325651 -
cgaaggtagaacaacatttgtg

SEQ ID NO: 126287 - DNA, 22 bp, Artificial Sequence
  Synthetic oligonucleotide; TTC chr11 5325650 5325671 5325655 5325650 -
gaaggtagaacaacatttgtgt

SEQ ID NO: 126288 - DNA, 22 bp, Artificial Sequence
  Synthetic oligonucleotide; TTT chr11 5325632 5325653 5325637 5325632 -
gtgtaataattataattcagtc

SEQ ID NO: 126289 - DNA, 22 bp, Artificial Sequence
  Synthetic oligonucleotide; TTG chr11 5325631 5325652 5325636 5325631 -
tgtaataattataattcagtct

SEQ ID NO: 126290 - DNA, 22 bp, Artificial Sequence
  Synthetic oligonucleotide; TTA chr11 5325620 5325641 5325625 5325620 -
taattcagtcttctatatgaat

SEQ ID NO: 126291 - DNA, 22 bp, Artificial Sequence
  Synthetic oligonucleotide; TTC chr11 5325614 5325635 5325619 5325614 -
agtcttctatatgaattcaatg

SEQ ID NO: 126292 - DNA, 22 bp, Artificial Sequence
  Synthetic oligonucleotide; CTT chr11 5325608 5325629 5325613 5325608 -
ctatatgaattcaatgtgattt

SEQ ID NO: 126293 - DNA, 22 bp, Artificial Sequence
  Synthetic oligonucleotide; TTC chr11 5325607 5325628 5325612 5325607 -
tatatgaattcaatgtgattta

SEQ ID NO: 126294 - DNA, 22 bp, Artificial Sequence
  Synthetic oligonucleotide; CTA chr11 5325605 5325626 5325610 5325605 -
tatgaattcaatgtgatttaat

SEQ ID NO: 126295 - DNA, 22 bp, Artificial Sequence
  Synthetic oligonucleotide; TTC chr11 5325596 5325617 5325601 5325596 -
aatgtgatttaattttagggat

SEQ ID NO: 126296 - DNA, 22 bp, Artificial Sequence
  Synthetic oligonucleotide; TTT chr11 5325586 5325607 5325591 5325586 -
aattttagggattccctagtgt

SEQ ID NO: 126297 - DNA, 22 bp, Artificial Sequence
  Synthetic oligonucleotide; TTA chr11 5325585 5325606 5325590 5325585 -
attttagggattccctagtgtt

SEQ ID NO: 126298 - DNA, 22 bp, Artificial Sequence
  Synthetic oligonucleotide; TTT chr11 5325581 5325602 5325586 5325581 -
tagggattccctagtgttggtg

SEQ ID NO: 126299 - DNA, 22 bp, Artificial Sequence
  Synthetic oligonucleotide; TTT chr11 5325580 5325601 5325585 5325580 -
agggattccctagtgttggtga

SEQ ID NO: 126300 - DNA, 22 bp, Artificial Sequence
  Synthetic oligonucleotide; TTA chr11 5325579 5325600 5325584 5325579 -
gggattccctagtgttggtgat

SEQ ID NO: 126301 - DNA, 22 bp, Artificial Sequence
  Synthetic oligonucleotide; TTC chr11 5325572 5325593 5325577 5325572 -
cctagtgttggtgatttcaatc

SEQ ID NO: 126302 - DNA, 22 bp, Artificial Sequence
  Synthetic oligonucleotide; CTA chr11 5325568 5325589 5325573 5325568 -
gtgttggtgatttcaatctcag

SEQ ID NO: 126303 - DNA, 22 bp, Artificial Sequence
  Synthetic oligonucleotide; TTG chr11 5325562 5325583 5325567 5325562 -
gtgatttcaatctcagtaagtt

SEQ ID NO: 126304 - DNA, 22 bp, Artificial Sequence
  Synthetic oligonucleotide; TTT chr11 5325555 5325576 5325560 5325555 -
caatctcagtaagttagtaatc

SEQ ID NO: 126305 - DNA, 22 bp, Artificial Sequence
  Synthetic oligonucleotide; TTC chr11 5325554 5325575 5325559 5325554 -
aatctcagtaagttagtaatcc

SEQ ID NO: 126306 - DNA, 22 bp, Artificial Sequence
  Synthetic oligonucleotide; CTC chr11 5325548 5325569 5325553 5325548 -
agtaagttagtaatcctgactc

SEQ ID NO: 126307 - DNA, 22 bp, Artificial Sequence
  Synthetic oligonucleotide; TTA chr11 5325539 5325560 5325544 5325539 -
gtaatcctgactcacaggagct

SEQ ID NO: 126308 - DNA, 22 bp, Artificial Sequence
  Synthetic oligonucleotide; CTG chr11 5325530 5325551 5325535 5325530 -
actcacaggagctgatacagag

SEQ ID NO: 126309 - DNA, 22 bp, Artificial Sequence
  Synthetic oligonucleotide; CTC chr11 5325526 5325547 5325531 5325526 -
acaggagctgatacagaggtag

SEQ ID NO: 126310 - DNA, 22 bp, Artificial Sequence
  Synthetic oligonucleotide; CTG chr11 5325516 5325537 5325521 5325516 -
atacagaggtagcatcagaaca

SEQ ID NO: 126311 - DNA, 22 bp, Artificial Sequence
  Synthetic oligonucleotide; TTT chr11 5325491 5325512 5325496 5325491 -
ccttatacaatatgaaatgctt

SEQ ID NO: 126312 - DNA, 22 bp, Artificial Sequence
  Synthetic oligonucleotide; TTC chr11 5325490 5325511 5325495 5325490 -
cttatacaatatgaaatgcttt

SEQ ID NO: 126313 - DNA, 22 bp, Artificial Sequence
  Synthetic oligonucleotide; CTT chr11 5325487 5325508 5325492 5325487 -
atacaatatgaaatgctttgtg

SEQ ID NO: 126314 - DNA, 22 bp, Artificial Sequence
  Synthetic oligonucleotide; TTA chr11 5325486 5325507 5325491 5325486 -
tacaatatgaaatgctttgtga

SEQ ID NO: 126315 - DNA, 22 bp, Artificial Sequence
  Synthetic oligonucleotide; CTT chr11 5325469 5325490 5325474 5325469 -
tgtgatttcttctgattctgat

SEQ ID NO: 126316 - DNA, 22 bp, Artificial Sequence
  Synthetic oligonucleotide; TTT chr11 5325468 5325489 5325473 5325468 -
gtgatttcttctgattctgatt

SEQ ID NO: 126317 - DNA, 22 bp, Artificial Sequence
  Synthetic oligonucleotide; TTG chr11 5325467 5325488 5325472 5325467 -
tgatttcttctgattctgattt

SEQ ID NO: 126318 - DNA, 22 bp, Artificial Sequence
  Synthetic oligonucleotide; TTT chr11 5325461 5325482 5325466 5325461 -
cttctgattctgatttattttt

SEQ ID NO: 126319 - DNA, 22 bp, Artificial Sequence
  Synthetic oligonucleotide; TTC chr11 5325460 5325481 5325465 5325460 -
ttctgattctgatttatttttg

SEQ ID NO: 126320 - DNA, 22 bp, Artificial Sequence
  Synthetic oligonucleotide; CTT chr11 5325458 5325479 5325463 5325458 -
ctgattctgatttatttttgat

SEQ ID NO: 126321 - DNA, 22 bp, Artificial Sequence
  Synthetic oligonucleotide; TTC chr11 5325457 5325478 5325462 5325457 -
tgattctgatttatttttgata

SEQ ID NO: 126322 - DNA, 22 bp, Artificial Sequence
  Synthetic oligonucleotide; CTG chr11 5325455 5325476 5325460 5325455 -
attctgatttatttttgatact

SEQ ID NO: 126323 - DNA, 22 bp, Artificial Sequence
  Synthetic oligonucleotide; TTC chr11 5325451 5325472 5325456 5325451 -
tgatttatttttgatactgagg

SEQ ID NO: 126324 - DNA, 22 bp, Artificial Sequence
  Synthetic oligonucleotide; CTG chr11 5325449 5325470 5325454 5325449 -
atttatttttgatactgaggcc

SEQ ID NO: 126325 - DNA, 22 bp, Artificial Sequence
  Synthetic oligonucleotide; TTT chr11 5325445 5325466 5325450 5325445 -
atttttgatactgaggccattt

SEQ ID NO: 126326 - DNA, 22 bp, Artificial Sequence
  Synthetic oligonucleotide; TTA chr11 5325444 5325465 5325449 5325444 -
tttttgatactgaggccatttt

SEQ ID NO: 126327 - DNA, 22 bp, Artificial Sequence
  Synthetic oligonucleotide; TTT chr11 5325441 5325462 5325446 5325441 -
ttgatactgaggccattttatg

SEQ ID NO: 126328 - DNA, 22 bp, Artificial Sequence
  Synthetic oligonucleotide; TTT chr11 5325440 5325461 5325445 5325440 -
tgatactgaggccattttatga

SEQ ID NO: 126329 - DNA, 22 bp, Artificial Sequence
  Synthetic oligonucleotide; TTT chr11 5325439 5325460 5325444 5325439 -
gatactgaggccattttatgaa

SEQ ID NO: 126330 - DNA, 22 bp, Artificial Sequence
  Synthetic oligonucleotide; TTG chr11 5325438 5325459 5325443 5325438 -
atactgaggccattttatgaag

SEQ ID NO: 126331 - DNA, 22 bp, Artificial Sequence
  Synthetic oligonucleotide; CTG chr11 5325432 5325453 5325437 5325432 -
aggccattttatgaagaaaact

SEQ ID NO: 126332 - DNA, 22 bp, Artificial Sequence
  Synthetic oligonucleotide; TTT chr11 5325423 5325444 5325428 5325423 -
tatgaagaaaactgctaggtgc

SEQ ID NO: 126333 - DNA, 22 bp, Artificial Sequence
  Synthetic oligonucleotide; TTT chr11 5325422 5325443 5325427 5325422 -
atgaagaaaactgctaggtgct

SEQ ID NO: 126334 - DNA, 22 bp, Artificial Sequence
  Synthetic oligonucleotide; TTA chr11 5325421 5325442 5325426 5325421 -
tgaagaaaactgctaggtgcta

SEQ ID NO: 126335 - DNA, 22 bp, Artificial Sequence
  Synthetic oligonucleotide; CTG chr11 5325409 5325430 5325414 5325409 -
ctaggtgctaaagacttgcctc

SEQ ID NO: 126336 - DNA, 22 bp, Artificial Sequence
  Synthetic oligonucleotide; CTA chr11 5325406 5325427 5325411 5325406 -
ggtgctaaagacttgcctccag

SEQ ID NO: 126337 - DNA, 22 bp, Artificial Sequence
  Synthetic oligonucleotide; CTA chr11 5325399 5325420 5325404 5325399 -
aagacttgcctccaggattctg

SEQ ID NO: 126338 - DNA, 22 bp, Artificial Sequence
  Synthetic oligonucleotide; CTT chr11 5325392 5325413 5325397 5325392 -
gcctccaggattctgaatttct

SEQ ID NO: 126339 - DNA, 22 bp, Artificial Sequence
  Synthetic oligonucleotide; TTG chr11 5325391 5325412 5325396 5325391 -
cctccaggattctgaatttctc

SEQ ID NO: 126340 - DNA, 22 bp, Artificial Sequence
  Synthetic oligonucleotide; CTC chr11 5325387 5325408 5325392 5325387 -
caggattctgaatttctcgtta

SEQ ID NO: 126341 - DNA, 22 bp, Artificial Sequence
  Synthetic oligonucleotide; TTC chr11 5325379 5325400 5325384 5325379 -
tgaatttctcgttaaataagac

SEQ ID NO: 126342 - DNA, 22 bp, Artificial Sequence
  Synthetic oligonucleotide; CTG chr11 5325377 5325398 5325382 5325377 -
aatttctcgttaaataagactg

SEQ ID NO: 126343 - DNA, 22 bp, Artificial Sequence
  Synthetic oligonucleotide; TTT chr11 5325372 5325393 5325377 5325372 -
ctcgttaaataagactgcagca

SEQ ID NO: 126344 - DNA, 22 bp, Artificial Sequence
  Synthetic oligonucleotide; TTC chr11 5325371 5325392 5325376 5325371 -
tcgttaaataagactgcagcag

SEQ ID NO: 126345 - DNA, 22 bp, Artificial Sequence
  Synthetic oligonucleotide; CTC chr11 5325369 5325390 5325374 5325369 -
gttaaataagactgcagcagag

SEQ ID NO: 126346 - DNA, 22 bp, Artificial Sequence
  Synthetic oligonucleotide; TTA chr11 5325365 5325386 5325370 5325365 -
aataagactgcagcagagctgg

SEQ ID NO: 126347 - DNA, 22 bp, Artificial Sequence
  Synthetic oligonucleotide; CTG chr11 5325355 5325376 5325360 5325355 -
cagcagagctggtaataagctt

SEQ ID NO: 126348 - DNA, 22 bp, Artificial Sequence
  Synthetic oligonucleotide; CTG chr11 5325344 5325365 5325349 5325344 -
gtaataagcttcttctttctcc

SEQ ID NO: 126349 - DNA, 22 bp, Artificial Sequence
  Synthetic oligonucleotide; CTT chr11 5325333 5325354 5325338 5325333 -
cttctttctcccatacccctct

SEQ ID NO: 126350 - DNA, 22 bp, Artificial Sequence
  Synthetic oligonucleotide; TTC chr11 5325332 5325353 5325337 5325332 -
ttctttctcccatacccctctt

SEQ ID NO: 126351 - DNA, 22 bp, Artificial Sequence
  Synthetic oligonucleotide; CTT chr11 5325330 5325351 5325335 5325330 -
ctttctcccatacccctcttgg

SEQ ID NO: 126352 - DNA, 22 bp, Artificial Sequence
  Synthetic oligonucleotide; TTC chr11 5325329 5325350 5325334 5325329 -
tttctcccatacccctcttgga

SEQ ID NO: 126353 - DNA, 22 bp, Artificial Sequence
  Synthetic oligonucleotide; CTT chr11 5325327 5325348 5325332 5325327 -
tctcccatacccctcttggatc

SEQ ID NO: 126354 - DNA, 22 bp, Artificial Sequence
  Synthetic oligonucleotide; TTT chr11 5325326 5325347 5325331 5325326 -
ctcccatacccctcttggatcg

SEQ ID NO: 126355 - DNA, 22 bp, Artificial Sequence
  Synthetic oligonucleotide; TTC chr11 5325325 5325346 5325330 5325325 -
tcccatacccctcttggatcgt

SEQ ID NO: 126356 - DNA, 22 bp, Artificial Sequence
  Synthetic oligonucleotide; CTC chr11 5325323 5325344 5325328 5325323 -
ccatacccctcttggatcgtgg

SEQ ID NO: 126357 - DNA, 22 bp, Artificial Sequence
  Synthetic oligonucleotide; CTC chr11 5325312 5325333 5325317 5325312 -
ttggatcgtggcaaccaagaaa

SEQ ID NO: 126358 - DNA, 22 bp, Artificial Sequence
  Synthetic oligonucleotide; CTT chr11 5325310 5325331 5325315 5325310 -
ggatcgtggcaaccaagaaaac

SEQ ID NO: 126359 - DNA, 22 bp, Artificial Sequence
  Synthetic oligonucleotide; TTG chr11 5325309 5325330 5325314 5325309 -
gatcgtggcaaccaagaaaaca

SEQ ID NO: 126360 - DNA, 22 bp, Artificial Sequence
  Synthetic oligonucleotide; CTG chr11 5325268 5325289 5325273 5325268 -
gcatccttaggctgtggaaaca

SEQ ID NO: 126361 - DNA, 22 bp, Artificial Sequence
  Synthetic oligonucleotide; CTT chr11 5325260 5325281 5325265 5325260 -
aggctgtggaaacattataatt

SEQ ID NO: 126362 - DNA, 22 bp, Artificial Sequence
  Synthetic oligonucleotide; TTA chr11 5325259 5325280 5325264 5325259 -
ggctgtggaaacattataattt

SEQ ID NO: 126363 - DNA, 22 bp, Artificial Sequence
  Synthetic oligonucleotide; CTG chr11 5325254 5325275 5325259 5325254 -
tggaaacattataattttacct

SEQ ID NO: 126364 - DNA, 22 bp, Artificial Sequence
  Synthetic oligonucleotide; TTA chr11 5325243 5325264 5325248 5325243 -
taattttacctgttacagaact

SEQ ID NO: 126365 - DNA, 22 bp, Artificial Sequence
  Synthetic oligonucleotide; TTT chr11 5325237 5325258 5325242 5325237 -
tacctgttacagaactgcaaca

SEQ ID NO: 126366 - DNA, 22 bp, Artificial Sequence
  Synthetic oligonucleotide; TTT chr11 5325236 5325257 5325241 5325236 -
acctgttacagaactgcaacag

SEQ ID NO: 126367 - DNA, 22 bp, Artificial Sequence
  Synthetic oligonucleotide; TTA chr11 5325235 5325256 5325240 5325235 -
cctgttacagaactgcaacagt

SEQ ID NO: 126368 - DNA, 22 bp, Artificial Sequence
  Synthetic oligonucleotide; CTG chr11 5325231 5325252 5325236 5325231 -
ttacagaactgcaacagttcct

SEQ ID NO: 126369 - DNA, 22 bp, Artificial Sequence
  Synthetic oligonucleotide; TTA chr11 5325228 5325249 5325233 5325228 -
cagaactgcaacagttcctcag

SEQ ID NO: 126370 - DNA, 22 bp, Artificial Sequence
  Synthetic oligonucleotide; CTG chr11 5325220 5325241 5325225 5325220 -
caacagttcctcaggagtttgg

SEQ ID NO: 126371 - DNA, 22 bp, Artificial Sequence
  Synthetic oligonucleotide; TTC chr11 5325211 5325232 5325216 5325211 -
ctcaggagtttggagttgatgg

SEQ ID NO: 126372 - DNA, 22 bp, Artificial Sequence
  Synthetic oligonucleotide; CTC chr11 5325208 5325229 5325213 5325208 -
aggagtttggagttgatggaaa

SEQ ID NO: 126373 - DNA, 22 bp, Artificial Sequence
  Synthetic oligonucleotide; TTT chr11 5325200 5325221 5325205 5325200 -
ggagttgatggaaaagcagaga

SEQ ID NO: 126374 - DNA, 22 bp, Artificial Sequence
  Synthetic oligonucleotide; TTG chr11 5325199 5325220 5325204 5325199 -
gagttgatggaaaagcagagag

SEQ ID NO: 126375 - DNA, 22 bp, Artificial Sequence
  Synthetic oligonucleotide; TTG chr11 5325193 5325214 5325198 5325193 -
atggaaaagcagagagaggtaa

SEQ ID NO: 126376 - DNA, 22 bp, Artificial Sequence
  Synthetic oligonucleotide; CTA chr11 5325151 5325172 5325156 5325151 -
agtatttaattatgggaaataa

SEQ ID NO: 126377 - DNA, 22 bp, Artificial Sequence
  Synthetic oligonucleotide; TTT chr11 5325144 5325165 5325149 5325144 -
aattatgggaaataatgttgga

SEQ ID NO: 126378 - DNA, 22 bp, Artificial Sequence
  Synthetic oligonucleotide; TTA chr11 5325143 5325164 5325148 5325143 -
attatgggaaataatgttggaa

SEQ ID NO: 126379 - DNA, 22 bp, Artificial Sequence
  Synthetic oligonucleotide; TTA chr11 5325139 5325160 5325144 5325139 -
tgggaaataatgttggaaaggg

SEQ ID NO: 126380 - DNA, 22 bp, Artificial Sequence
  Synthetic oligonucleotide; TTG chr11 5325124 5325145 5325129 5325124 -
gaaagggcaagtggcagaaaga

SEQ ID NO: 126381 - DNA, 22 bp, Artificial Sequence
  Synthetic oligonucleotide; TTG chr11 5325062 5325083 5325067 5325062 -
tatgaagatatttggagaaaat

SEQ ID NO: 126382 - DNA, 22 bp, Artificial Sequence
  Synthetic oligonucleotide; TTT chr11 5325049 5325070 5325054 5325049 -
ggagaaaatgagaaaatcaact

SEQ ID NO: 126383 - DNA, 22 bp, Artificial Sequence
  Synthetic oligonucleotide; TTG chr11 5325048 5325069 5325053 5325048 -
gagaaaatgagaaaatcaactg

SEQ ID NO: 126384 - DNA, 22 bp, Artificial Sequence
  Synthetic oligonucleotide; CTG chr11 5325026 5325047 5325031 5325026 -
gatggaagcattaaaaggtttc

SEQ ID NO: 126385 - DNA, 22 bp, Artificial Sequence
  Synthetic oligonucleotide; TTA chr11 5325013 5325034 5325018 5325013 -
aaaggtttctatctcgaaagat

SEQ ID NO: 126386 - DNA, 22 bp, Artificial Sequence
  Synthetic oligonucleotide; TTT chr11 5325005 5325026 5325010 5325005 -
ctatctcgaaagatggattagg

SEQ ID NO: 126387 - DNA, 22 bp, Artificial Sequence
  Synthetic oligonucleotide; TTC chr11 5325004 5325025 5325009 5325004 -
tatctcgaaagatggattaggt

SEQ ID NO: 126388 - DNA, 22 bp, Artificial Sequence
  Synthetic oligonucleotide; CTA chr11 5325002 5325023 5325007 5325002 -
tctcgaaagatggattaggtat

SEQ ID NO: 126389 - DNA, 22 bp, Artificial Sequence
  Synthetic oligonucleotide; CTC chr11 5324998 5325019 5325003 5324998 -
gaaagatggattaggtatgaaa

SEQ ID NO: 126390 - DNA, 22 bp, Artificial Sequence
  Synthetic oligonucleotide; TTA chr11 5324985 5325006 5324990 5324985 -
ggtatgaaatgcttatagcagt

SEQ ID NO: 126391 - DNA, 22 bp, Artificial Sequence
  Synthetic oligonucleotide; CTT chr11 5324971 5324992 5324976 5324971 -
atagcagtgatgcccagacatt

SEQ ID NO: 126392 - DNA, 22 bp, Artificial Sequence
  Synthetic oligonucleotide; TTA chr11 5324970 5324991 5324975 5324970 -
tagcagtgatgcccagacattg

SEQ ID NO: 126393 - DNA, 22 bp, Artificial Sequence
  Synthetic oligonucleotide; TTG chr11 5324948 5324969 5324953 5324948 -
ttttgcactggaatcacctgag

SEQ ID NO: 126394 - DNA, 22 bp, Artificial Sequence
  Synthetic oligonucleotide; TTT chr11 5324945 5324966 5324950 5324945 -
tgcactggaatcacctgaggac

SEQ ID NO: 126395 - DNA, 22 bp, Artificial Sequence
  Synthetic oligonucleotide; TTT chr11 5324944 5324965 5324949 5324944 -
gcactggaatcacctgaggacc

SEQ ID NO: 126396 - DNA, 22 bp, Artificial Sequence
  Synthetic oligonucleotide; TTG chr11 5324943 5324964 5324948 5324943 -
cactggaatcacctgaggacct

SEQ ID NO: 126397 - DNA, 22 bp, Artificial Sequence
  Synthetic oligonucleotide; CTG chr11 5324938 5324959 5324943 5324938 -
gaatcacctgaggacctgaaaa

SEQ ID NO: 126398 - DNA, 22 bp, Artificial Sequence
  Synthetic oligonucleotide; CTG chr11 5324928 5324949 5324933 5324928 -
aggacctgaaaaaagcgaattt

SEQ ID NO: 126399 - DNA, 22 bp, Artificial Sequence
  Synthetic oligonucleotide; CTG chr11 5324920 5324941 5324925 5324920 -
aaaaaagcgaatttgattcaga

SEQ ID NO: 126400 - DNA, 22 bp, Artificial Sequence
  Synthetic oligonucleotide; TTT chr11 5324906 5324927 5324911 5324906 -
gattcagaatgttggaaggggc

SEQ ID NO: 126401 - DNA, 22 bp, Artificial Sequence
  Synthetic oligonucleotide; TTG chr11 5324905 5324926 5324910 5324905 -
attcagaatgttggaaggggca

SEQ ID NO: 126402 - DNA, 22 bp, Artificial Sequence
  Synthetic oligonucleotide; TTC chr11 5324901 5324922 5324906 5324901 -
agaatgttggaaggggcagaat

SEQ ID NO: 126403 - DNA, 22 bp, Artificial Sequence
  Synthetic oligonucleotide; TTG chr11 5324892 5324913 5324897 5324892 -
gaaggggcagaatctgaggctg

SEQ ID NO: 126404 - DNA, 22 bp, Artificial Sequence
  Synthetic oligonucleotide; CTG chr11 5324876 5324897 5324881 5324876 -
aggctgcatgcctaacaagccc

SEQ ID NO: 126405 - DNA, 22 bp, Artificial Sequence
  Synthetic oligonucleotide; CTG chr11 5324870 5324891 5324875 5324870 -
catgcctaacaagcccgctgct

SEQ ID NO: 126406 - DNA, 22 bp, Artificial Sequence
  Synthetic oligonucleotide; CTA chr11 5324862 5324883 5324867 5324862 -
acaagcccgctgcttgttagct

SEQ ID NO: 126407 - DNA, 22 bp, Artificial Sequence
  Synthetic oligonucleotide; CTG chr11 5324850 5324871 5324855 5324850 -
cttgttagctgcgtctagtctg

SEQ ID NO: 126408 - DNA, 22 bp, Artificial Sequence
  Synthetic oligonucleotide; CTT chr11 5324847 5324868 5324852 5324847 -
gttagctgcgtctagtctgtga

SEQ ID NO: 126409 - DNA, 22 bp, Artificial Sequence
  Synthetic oligonucleotide; TTG chr11 5324846 5324867 5324851 5324846 -
ttagctgcgtctagtctgtgat

SEQ ID NO: 126410 - DNA, 22 bp, Artificial Sequence
  Synthetic oligonucleotide; TTA chr11 5324843 5324864 5324848 5324843 -
gctgcgtctagtctgtgatcca

SEQ ID NO: 126411 - DNA, 22 bp, Artificial Sequence
  Synthetic oligonucleotide; CTG chr11 5324839 5324860 5324844 5324839 -
cgtctagtctgtgatccacaac

SEQ ID NO: 126412 - DNA, 22 bp, Artificial Sequence
  Synthetic oligonucleotide; CTA chr11 5324833 5324854 5324838 5324833 -
gtctgtgatccacaactctggt

SEQ ID NO: 126413 - DNA, 22 bp, Artificial Sequence
  Synthetic oligonucleotide; CTG chr11 5324828 5324849 5324833 5324828 -
tgatccacaactctggtggcca

SEQ ID NO: 126414 - DNA, 22 bp, Artificial Sequence
  Synthetic oligonucleotide; CTC chr11 5324815 5324836 5324820 5324815 -
tggtggccaagctcaagtaact

SEQ ID NO: 126415 - DNA, 22 bp, Artificial Sequence
  Synthetic oligonucleotide; CTG chr11 5324813 5324834 5324818 5324813 -
gtggccaagctcaagtaactgt

SEQ ID NO: 126416 - DNA, 22 bp, Artificial Sequence
  Synthetic oligonucleotide; CTC chr11 5324801 5324822 5324806 5324801 -
aagtaactgttagagtgacaaa

SEQ ID NO: 126417 - DNA, 22 bp, Artificial Sequence
  Synthetic oligonucleotide; CTG chr11 5324792 5324813 5324797 5324792 -
ttagagtgacaaagccgttcat

SEQ ID NO: 126418 - DNA, 22 bp, Artificial Sequence
  Synthetic oligonucleotide; TTA chr11 5324789 5324810 5324794 5324789 -
gagtgacaaagccgttcattgg

SEQ ID NO: 126419 - DNA, 22 bp, Artificial Sequence
  Synthetic oligonucleotide; TTC chr11 5324772 5324793 5324777 5324772 -
attggtagtgatggtgatgcac

SEQ ID NO: 126420 - DNA, 22 bp, Artificial Sequence
  Synthetic oligonucleotide; TTG chr11 5324768 5324789 5324773 5324768 -
gtagtgatggtgatgcacgcta

SEQ ID NO: 126421 - DNA, 22 bp, Artificial Sequence
  Synthetic oligonucleotide; CTA chr11 5324746 5324767 5324751 5324746 -
tagtgcataaaacactgacatt

SEQ ID NO: 126422 - DNA, 22 bp, Artificial Sequence
  Synthetic oligonucleotide; CTG chr11 5324729 5324750 5324734 5324729 -
acattcaatttccaaaaaaaat

SEQ ID NO: 126423 - DNA, 22 bp, Artificial Sequence
  Synthetic oligonucleotide; TTC chr11 5324723 5324744 5324728 5324723 -
aatttccaaaaaaaatgagaaa

SEQ ID NO: 126424 - DNA, 22 bp, Artificial Sequence
  Synthetic oligonucleotide; TTT chr11 5324718 5324739 5324723 5324718 -
ccaaaaaaaatgagaaaaactg

SEQ ID NO: 126425 - DNA, 22 bp, Artificial Sequence
  Synthetic oligonucleotide; TTC chr11 5324717 5324738 5324722 5324717 -
caaaaaaaatgagaaaaactgc

SEQ ID NO: 126426 - DNA, 22 bp, Artificial Sequence
  Synthetic oligonucleotide; CTG chr11 5324696 5324717 5324701 5324696 -
cattaactgaaaaaactgtctt

SEQ ID NO: 126427 - DNA, 22 bp, Artificial Sequence
  Synthetic oligonucleotide; TTA chr11 5324691 5324712 5324696 5324691 -
actgaaaaaactgtcttcatca

SEQ ID NO: 126428 - DNA, 22 bp, Artificial Sequence
  Synthetic oligonucleotide; CTG chr11 5324687 5324708 5324692 5324687 -
aaaaaactgtcttcatcataat

SEQ ID NO: 126429 - DNA, 22 bp, Artificial Sequence
  Synthetic oligonucleotide; CTG chr11 5324678 5324699 5324683 5324678 -
tcttcatcataatcgtgaaatg

SEQ ID NO: 126430 - DNA, 22 bp, Artificial Sequence
  Synthetic oligonucleotide; CTT chr11 5324674 5324695 5324679 5324674 -
catcataatcgtgaaatgtaaa

SEQ ID NO: 126431 - DNA, 22 bp, Artificial Sequence
  Synthetic oligonucleotide; TTC chr11 5324673 5324694 5324678 5324673 -
atcataatcgtgaaatgtaaaa

SEQ ID NO: 126432 - DNA, 22 bp, Artificial Sequence
  Synthetic oligonucleotide; TTA chr11 5324648 5324669 5324653 5324648 -
caacaatcatttccaaatggtc

SEQ ID NO: 126433 - DNA, 22 bp, Artificial Sequence
  Synthetic oligonucleotide; TTT chr11 5324636 5324657 5324641 5324636 -
ccaaatggtcagtaatcacagc

SEQ ID NO: 126434 - DNA, 22 bp, Artificial Sequence
  Synthetic oligonucleotide; TTC chr11 5324635 5324656 5324640 5324635 -
caaatggtcagtaatcacagca

SEQ ID NO: 126435 - DNA, 22 bp, Artificial Sequence
  Synthetic oligonucleotide; CTA chr11 5324601 5324622 5324606 5324601 -
agccagattattatccatttat

SEQ ID NO: 126436 - DNA, 22 bp, Artificial Sequence
  Synthetic oligonucleotide; TTA chr11 5324591 5324612 5324596 5324591 -
ttatccatttatgtatatttat

SEQ ID NO: 126437 - DNA, 22 bp, Artificial Sequence
  Synthetic oligonucleotide; TTA chr11 5324588 5324609 5324593 5324588 -
tccatttatgtatatttatgtt

SEQ ID NO: 126438 - DNA, 22 bp, Artificial Sequence
  Synthetic oligonucleotide; TTT chr11 5324581 5324602 5324586 5324581 -
atgtatatttatgttatgtgtt

SEQ ID NO: 126439 - DNA, 22 bp, Artificial Sequence
  Synthetic oligonucleotide; TTA chr11 5324580 5324601 5324585 5324580 -
tgtatatttatgttatgtgttt

SEQ ID NO: 126440 - DNA, 22 bp, Artificial Sequence
  Synthetic oligonucleotide; TTT chr11 5324571 5324592 5324576 5324571 -
atgttatgtgtttttgttatca

SEQ ID NO: 126441 - DNA, 22 bp, Artificial Sequence
  Synthetic oligonucleotide; TTA chr11 5324570 5324591 5324575 5324570 -
tgttatgtgtttttgttatcac

SEQ ID NO: 126442 - DNA, 22 bp, Artificial Sequence
  Synthetic oligonucleotide; TTA chr11 5324565 5324586 5324570 5324565 -
tgtgtttttgttatcactgttg

SEQ ID NO: 126443 - DNA, 22 bp, Artificial Sequence
  Synthetic oligonucleotide; TTT chr11 5324558 5324579 5324563 5324558 -
ttgttatcactgttgttgcaaa

SEQ ID NO: 126444 - DNA, 22 bp, Artificial Sequence
  Synthetic oligonucleotide; TTT chr11 5324557 5324578 5324562 5324557 -
tgttatcactgttgttgcaaat

SEQ ID NO: 126445 - DNA, 22 bp, Artificial Sequence
  Synthetic oligonucleotide; TTT chr11 5324556 5324577 5324561 5324556 -
gttatcactgttgttgcaaata

SEQ ID NO: 126446 - DNA, 22 bp, Artificial Sequence
  Synthetic oligonucleotide; TTG chr11 5324555 5324576 5324560 5324555 -
ttatcactgttgttgcaaatat

SEQ ID NO: 126447 - DNA, 22 bp, Artificial Sequence
  Synthetic oligonucleotide; TTA chr11 5324552 5324573 5324557 5324552 -
tcactgttgttgcaaatattta

SEQ ID NO: 126448 - DNA, 22 bp, Artificial Sequence
  Synthetic oligonucleotide; CTG chr11 5324546 5324567 5324551 5324546 -
ttgttgcaaatatttataagta

SEQ ID NO: 126449 - DNA, 22 bp, Artificial Sequence
  Synthetic oligonucleotide; TTG chr11 5324543 5324564 5324548 5324543 -
ttgcaaatatttataagtaccc

SEQ ID NO: 126450 - DNA, 22 bp, Artificial Sequence
  Synthetic oligonucleotide; TTG chr11 5324540 5324561 5324545 5324540 -
caaatatttataagtaccctca

SEQ ID NO: 126451 - DNA, 22 bp, Artificial Sequence
  Synthetic oligonucleotide; TTT chr11 5324531 5324552 5324536 5324531 -
ataagtaccctcaaaatagttg

SEQ ID NO: 126452 - DNA, 22 bp, Artificial Sequence
  Synthetic oligonucleotide; TTA chr11 5324530 5324551 5324535 5324530 -
taagtaccctcaaaatagttgc

SEQ ID NO: 126453 - DNA, 22 bp, Artificial Sequence
  Synthetic oligonucleotide; CTC chr11 5324519 5324540 5324524 5324519 -
aaaatagttgcggataatatat

SEQ ID NO: 126454 - DNA, 22 bp, Artificial Sequence
  Synthetic oligonucleotide; TTG chr11 5324509 5324530 5324514 5324509 -
cggataatatatttaaaattaa

SEQ ID NO: 126455 - DNA, 22 bp, Artificial Sequence
  Synthetic oligonucleotide; TTT chr11 5324495 5324516 5324500 5324495 -
aaaattaatgaaaaatttttga

SEQ ID NO: 126456 - DNA, 22 bp, Artificial Sequence
  Synthetic oligonucleotide; TTA chr11 5324494 5324515 5324499 5324494 -
aaattaatgaaaaatttttgaa

SEQ ID NO: 126457 - DNA, 22 bp, Artificial Sequence
  Synthetic oligonucleotide; TTA chr11 5324488 5324509 5324493 5324488 -
atgaaaaatttttgaatttgag

SEQ ID NO: 126458 - DNA, 22 bp, Artificial Sequence
  Synthetic oligonucleotide; TTT chr11 5324477 5324498 5324482 5324477 -
ttgaatttgagaaaaatcgaac

SEQ ID NO: 126459 - DNA, 22 bp, Artificial Sequence
  Synthetic oligonucleotide; TTT chr11 5324476 5324497 5324481 5324476 -
tgaatttgagaaaaatcgaacc

SEQ ID NO: 126460 - DNA, 22 bp, Artificial Sequence
  Synthetic oligonucleotide; TTT chr11 5324475 5324496 5324480 5324475 -
gaatttgagaaaaatcgaacca

SEQ ID NO: 126461 - DNA, 22 bp, Artificial Sequence
  Synthetic oligonucleotide; TTG chr11 5324474 5324495 5324479 5324474 -
aatttgagaaaaatcgaaccat

SEQ ID NO: 126462 - DNA, 22 bp, Artificial Sequence
  Synthetic oligonucleotide; TTT chr11 5324469 5324490 5324474 5324469 -
gagaaaaatcgaaccattaact

SEQ ID NO: 126463 - DNA, 22 bp, Artificial Sequence
  Synthetic oligonucleotide; TTG chr11 5324468 5324489 5324473 5324468 -
agaaaaatcgaaccattaactc

SEQ ID NO: 126464 - DNA, 22 bp, Artificial Sequence
  Synthetic oligonucleotide; TTA chr11 5324450 5324471 5324455 5324450 -
actcagtattttttctaattag

SEQ ID NO: 126465 - DNA, 22 bp, Artificial Sequence
  Synthetic oligonucleotide; CTC chr11 5324446 5324467 5324451 5324446 -
agtattttttctaattagggaa

SEQ ID NO: 126466 - DNA, 22 bp, Artificial Sequence
  Synthetic oligonucleotide; TTT chr11 5324439 5324460 5324444 5324439 -
tttctaattagggaaaaaacca

SEQ ID NO: 126467 - DNA, 22 bp, Artificial Sequence
  Synthetic oligonucleotide; TTT chr11 5324438 5324459 5324443 5324438 -
ttctaattagggaaaaaaccat

SEQ ID NO: 126468 - DNA, 22 bp, Artificial Sequence
  Synthetic oligonucleotide; TTT chr11 5324437 5324458 5324442 5324437 -
tctaattagggaaaaaaccata

SEQ ID NO: 126469 - DNA, 22 bp, Artificial Sequence
  Synthetic oligonucleotide; TTT chr11 5324436 5324457 5324441 5324436 -
ctaattagggaaaaaaccatag

SEQ ID NO: 126470 - DNA, 22 bp, Artificial Sequence
  Synthetic oligonucleotide; TTC chr11 5324435 5324456 5324440 5324435 -
taattagggaaaaaaccatagt

SEQ ID NO: 126471 - DNA, 22 bp, Artificial Sequence
  Synthetic oligonucleotide; CTA chr11 5324433 5324454 5324438 5324433 -
attagggaaaaaaccatagtct

SEQ ID NO: 126472 - DNA, 22 bp, Artificial Sequence
  Synthetic oligonucleotide; TTA chr11 5324429 5324450 5324434 5324429 -
gggaaaaaaccatagtctgtac

SEQ ID NO: 126473 - DNA, 22 bp, Artificial Sequence
  Synthetic oligonucleotide; CTG chr11 5324410 5324431 5324415 5324410 -
tacatgctattcttcttcagga

SEQ ID NO: 126474 - DNA, 22 bp, Artificial Sequence
  Synthetic oligonucleotide; CTA chr11 5324401 5324422 5324406 5324401 -
ttcttcttcaggaaaatagttg

SEQ ID NO: 126475 - DNA, 22 bp, Artificial Sequence
  Synthetic oligonucleotide; TTC chr11 5324398 5324419 5324403 5324398 -
ttcttcaggaaaatagttgcag

SEQ ID NO: 126476 - DNA, 22 bp, Artificial Sequence
  Synthetic oligonucleotide; CTT chr11 5324396 5324417 5324401 5324396 -
cttcaggaaaatagttgcagag

SEQ ID NO: 126477 - DNA, 22 bp, Artificial Sequence
  Synthetic oligonucleotide; TTC chr11 5324395 5324416 5324400 5324395 -
ttcaggaaaatagttgcagagt

SEQ ID NO: 126478 - DNA, 22 bp, Artificial Sequence
  Synthetic oligonucleotide; CTT chr11 5324393 5324414 5324398 5324393 -
caggaaaatagttgcagagtca

SEQ ID NO: 126479 - DNA, 22 bp, Artificial Sequence
  Synthetic oligonucleotide; TTC chr11 5324392 5324413 5324397 5324392 -
aggaaaatagttgcagagtcaa

SEQ ID NO: 126480 - DNA, 22 bp, Artificial Sequence
  Synthetic oligonucleotide; TTG chr11 5324379 5324400 5324384 5324379 -
cagagtcaaatttatcacacca

SEQ ID NO: 126481 - DNA, 22 bp, Artificial Sequence
  Synthetic oligonucleotide; TTT chr11 5324366 5324387 5324371 5324366 -
atcacaccagttaatcatctcc

SEQ ID NO: 126482 - DNA, 22 bp, Artificial Sequence
  Synthetic oligonucleotide; TTA chr11 5324365 5324386 5324370 5324365 -
tcacaccagttaatcatctcca

SEQ ID NO: 126483 - DNA, 22 bp, Artificial Sequence
  Synthetic oligonucleotide; TTA chr11 5324353 5324374 5324358 5324353 -
atcatctccaagcaggaagatt

SEQ ID NO: 126484 - DNA, 22 bp, Artificial Sequence
  Synthetic oligonucleotide; CTC chr11 5324345 5324366 5324350 5324345 -
caagcaggaagattggaggctc

SEQ ID NO: 126485 - DNA, 22 bp, Artificial Sequence
  Synthetic oligonucleotide; TTG chr11 5324330 5324351 5324335 5324330 -
gaggctcctggtttcaaggttt

SEQ ID NO: 126486 - DNA, 22 bp, Artificial Sequence
  Synthetic oligonucleotide; CTC chr11 5324323 5324344 5324328 5324323 -
ctggtttcaaggtttcaagaaa

SEQ ID NO: 126487 - DNA, 22 bp, Artificial Sequence
  Synthetic oligonucleotide; CTG chr11 5324320 5324341 5324325 5324320 -
gtttcaaggtttcaagaaatct

SEQ ID NO: 126488 - DNA, 22 bp, Artificial Sequence
  Synthetic oligonucleotide; TTT chr11 5324316 5324337 5324321 5324316 -
caaggtttcaagaaatctgatc

SEQ ID NO: 126489 - DNA, 22 bp, Artificial Sequence
  Synthetic oligonucleotide; TTC chr11 5324315 5324336 5324320 5324315 -
aaggtttcaagaaatctgatct

SEQ ID NO: 126490 - DNA, 22 bp, Artificial Sequence
  Synthetic oligonucleotide; TTT chr11 5324308 5324329 5324313 5324308 -
caagaaatctgatctttaccgg

SEQ ID NO: 126491 - DNA, 22 bp, Artificial Sequence
  Synthetic oligonucleotide; TTC chr11 5324307 5324328 5324312 5324307 -
aagaaatctgatctttaccggt

SEQ ID NO: 126492 - DNA, 22 bp, Artificial Sequence
  Synthetic oligonucleotide; CTG chr11 5324297 5324318 5324302 5324297 -
atctttaccggtggatacacta

SEQ ID NO: 126493 - DNA, 22 bp, Artificial Sequence
  Synthetic oligonucleotide; CTT chr11 5324292 5324313 5324297 5324292 -
taccggtggatacactatgtgg

SEQ ID NO: 126494 - DNA, 22 bp, Artificial Sequence
  Synthetic oligonucleotide; TTT chr11 5324291 5324312 5324296 5324291 -
accggtggatacactatgtggc

SEQ ID NO: 126495 - DNA, 22 bp, Artificial Sequence
  Synthetic oligonucleotide; TTA chr11 5324290 5324311 5324295 5324290 -
ccggtggatacactatgtggcc

SEQ ID NO: 126496 - DNA, 22 bp, Artificial Sequence
  Synthetic oligonucleotide; CTA chr11 5324275 5324296 5324280 5324275 -
tgtggcccaatattactgcagc

SEQ ID NO: 126497 - DNA, 22 bp, Artificial Sequence
  Synthetic oligonucleotide; TTA chr11 5324260 5324281 5324265 5324260 -
ctgcagccccttttttgctgac

SEQ ID NO: 126498 - DNA, 22 bp, Artificial Sequence
  Synthetic oligonucleotide; CTG chr11 5324257 5324278 5324262 5324257 -
cagccccttttttgctgactgg

SEQ ID NO: 126499 - DNA, 22 bp, Artificial Sequence
  Synthetic oligonucleotide; CTT chr11 5324248 5324269 5324253 5324248 -
ttttgctgactggctttccagg

SEQ ID NO: 126500 - DNA, 22 bp, Artificial Sequence
  Synthetic oligonucleotide; TTT chr11 5324247 5324268 5324252 5324247 -
tttgctgactggctttccaggg

SEQ ID NO: 126501 - DNA, 22 bp, Artificial Sequence
  Synthetic oligonucleotide; TTT chr11 5324246 5324267 5324251 5324246 -
ttgctgactggctttccagggc

SEQ ID NO: 126502 - DNA, 22 bp, Artificial Sequence
  Synthetic oligonucleotide; TTT chr11 5324245 5324266 5324250 5324245 -
tgctgactggctttccagggct

SEQ ID NO: 126503 - DNA, 22 bp, Artificial Sequence
  Synthetic oligonucleotide; TTT chr11 5324244 5324265 5324249 5324244 -
gctgactggctttccagggctg

SEQ ID NO: 126504 - DNA, 22 bp, Artificial Sequence
  Synthetic oligonucleotide; TTG chr11 5324243 5324264 5324248 5324243 -
ctgactggctttccagggctgg

SEQ ID NO: 126505 - DNA, 22 bp, Artificial Sequence
  Synthetic oligonucleotide; CTG chr11 5324240 5324261 5324245 5324240 -
actggctttccagggctggagg

SEQ ID NO: 126506 - DNA, 22 bp, Artificial Sequence
  Synthetic oligonucleotide; CTG chr11 5324236 5324257 5324241 5324236 -
gctttccagggctggaggcagc

SEQ ID NO: 126507 - DNA, 22 bp, Artificial Sequence
  Synthetic oligonucleotide; CTT chr11 5324232 5324253 5324237 5324232 -
tccagggctggaggcagctcat

SEQ ID NO: 126508 - DNA, 22 bp, Artificial Sequence
  Synthetic oligonucleotide; TTT chr11 5324231 5324252 5324236 5324231 -
ccagggctggaggcagctcatc

SEQ ID NO: 126509 - DNA, 22 bp, Artificial Sequence
  Synthetic oligonucleotide; TTC chr11 5324230 5324251 5324235 5324230 -
cagggctggaggcagctcatca

SEQ ID NO: 126510 - DNA, 22 bp, Artificial Sequence
  Synthetic oligonucleotide; CTG chr11 5324222 5324243 5324227 5324222 -
gaggcagctcatcactggatct

SEQ ID NO: 126511 - DNA, 22 bp, Artificial Sequence
  Synthetic oligonucleotide; CTC chr11 5324212 5324233 5324217 5324212 -
atcactggatctccatcccctt

SEQ ID NO: 126512 - DNA, 22 bp, Artificial Sequence
  Synthetic oligonucleotide; CTG chr11 5324205 5324226 5324210 5324205 -
gatctccatccccttctttgct

SEQ ID NO: 126513 - DNA, 22 bp, Artificial Sequence
  Synthetic oligonucleotide; CTC chr11 5324199 5324220 5324204 5324199 -
catccccttctttgctgtttat

SEQ ID NO: 126514 - DNA, 22 bp, Artificial Sequence
  Synthetic oligonucleotide; CTT chr11 5324190 5324211 5324195 5324190 -
ctttgctgtttatgtgtgcatc

SEQ ID NO: 126515 - DNA, 22 bp, Artificial Sequence
  Synthetic oligonucleotide; TTC chr11 5324189 5324210 5324194 5324189 -
tttgctgtttatgtgtgcatcc

SEQ ID NO: 126516 - DNA, 22 bp, Artificial Sequence
  Synthetic oligonucleotide; CTT chr11 5324187 5324208 5324192 5324187 -
tgctgtttatgtgtgcatcctt

SEQ ID NO: 126517 - DNA, 22 bp, Artificial Sequence
  Synthetic oligonucleotide; TTT chr11 5324186 5324207 5324191 5324186 -
gctgtttatgtgtgcatccttc

SEQ ID NO: 126518 - DNA, 22 bp, Artificial Sequence
  Synthetic oligonucleotide; TTG chr11 5324185 5324206 5324190 5324185 -
ctgtttatgtgtgcatccttct

SEQ ID NO: 126519 - DNA, 22 bp, Artificial Sequence
  Synthetic oligonucleotide; CTG chr11 5324182 5324203 5324187 5324182 -
tttatgtgtgcatccttctggg

SEQ ID NO: 126520 - DNA, 22 bp, Artificial Sequence
  Synthetic oligonucleotide; TTT chr11 5324179 5324200 5324184 5324179 -
atgtgtgcatccttctgggcaa

SEQ ID NO: 126521 - DNA, 22 bp, Artificial Sequence
  Synthetic oligonucleotide; TTA chr11 5324178 5324199 5324183 5324178 -
tgtgtgcatccttctgggcaat

SEQ ID NO: 126522 - DNA, 22 bp, Artificial Sequence
  Synthetic oligonucleotide; CTT chr11 5324165 5324186 5324170 5324165 -
ctgggcaatggcatgctcctct

SEQ ID NO: 126523 - DNA, 22 bp, Artificial Sequence
  Synthetic oligonucleotide; TTC chr11 5324164 5324185 5324169 5324164 -
tgggcaatggcatgctcctcta

SEQ ID NO: 126524 - DNA, 22 bp, Artificial Sequence
  Synthetic oligonucleotide; CTG chr11 5324162 5324183 5324167 5324162 -
ggcaatggcatgctcctctacc

SEQ ID NO: 126525 - DNA, 22 bp, Artificial Sequence
  Synthetic oligonucleotide; CTC chr11 5324147 5324168 5324152 5324147 -
ctctacctcatcaagcatgacc

SEQ ID NO: 126526 - DNA, 22 bp, Artificial Sequence
  Synthetic oligonucleotide; CTC chr11 5324144 5324165 5324149 5324144 -
tacctcatcaagcatgaccaca

SEQ ID NO: 126527 - DNA, 22 bp, Artificial Sequence
  Synthetic oligonucleotide; CTA chr11 5324142 5324163 5324147 5324142 -
cctcatcaagcatgaccacagt

SEQ ID NO: 126528 - DNA, 22 bp, Artificial Sequence
  Synthetic oligonucleotide; CTC chr11 5324138 5324159 5324143 5324138 -
atcaagcatgaccacagtcttc

SEQ ID NO: 126529 - DNA, 22 bp, Artificial Sequence
  Synthetic oligonucleotide; CTT chr11 5324117 5324138 5324122 5324117 -
catgagcccatgtactacttcc

SEQ ID NO: 126530 - DNA, 22 bp, Artificial Sequence
  Synthetic oligonucleotide; TTC chr11 5324116 5324137 5324121 5324116 -
atgagcccatgtactacttcct

SEQ ID NO: 126531 - DNA, 22 bp, Artificial Sequence
  Synthetic oligonucleotide; CTA chr11 5324100 5324121 5324105 5324100 -
cttcctcaccatgctggcaggc

SEQ ID NO: 126532 - DNA, 22 bp, Artificial Sequence
  Synthetic oligonucleotide; CTT chr11 5324097 5324118 5324102 5324097 -
cctcaccatgctggcaggcaca

SEQ ID NO: 126533 - DNA, 22 bp, Artificial Sequence
  Synthetic oligonucleotide; TTC chr11 5324096 5324117 5324101 5324096 -
ctcaccatgctggcaggcacag

SEQ ID NO: 126534 - DNA, 22 bp, Artificial Sequence
  Synthetic oligonucleotide; CTC chr11 5324093 5324114 5324098 5324093 -
accatgctggcaggcacagacc

SEQ ID NO: 126535 - DNA, 22 bp, Artificial Sequence
  Synthetic oligonucleotide; CTG chr11 5324084 5324105 5324089 5324084 -
gcaggcacagacctcatggtga

SEQ ID NO: 126536 - DNA, 22 bp, Artificial Sequence
  Synthetic oligonucleotide; CTC chr11 5324069 5324090 5324074 5324069 -
atggtgacattgaccacgatgc

SEQ ID NO: 126537 - DNA, 22 bp, Artificial Sequence
  Synthetic oligonucleotide; TTG chr11 5324057 5324078 5324062 5324057 -
accacgatgcctactgtaatgg

SEQ ID NO: 126538 - DNA, 22 bp, Artificial Sequence
  Synthetic oligonucleotide; CTA chr11 5324044 5324065 5324049 5324044 -
ctgtaatgggcatcctatgggt

SEQ ID NO: 126539 - DNA, 22 bp, Artificial Sequence
  Synthetic oligonucleotide; CTG chr11 5324041 5324062 5324046 5324041 -
taatgggcatcctatgggtgaa

SEQ ID NO: 126540 - DNA, 22 bp, Artificial Sequence
  Synthetic oligonucleotide; CTA chr11 5324027 5324048 5324032 5324027 -
tgggtgaatcacagggagatta

SEQ ID NO: 126541 - DNA, 22 bp, Artificial Sequence
  Synthetic oligonucleotide; TTA chr11 5324005 5324026 5324010 5324005 -
gcagtgtgggctgcttcctaca

SEQ ID NO: 126542 - DNA, 22 bp, Artificial Sequence
  Synthetic oligonucleotide; CTG chr11 5323992 5324013 5323997 5323992 -
cttcctacaggcttactttatt

SEQ ID NO: 126543 - DNA, 22 bp, Artificial Sequence
  Synthetic oligonucleotide; CTT chr11 5323989 5324010 5323994 5323989 -
cctacaggcttactttattcac

SEQ ID NO: 126544 - DNA, 22 bp, Artificial Sequence
  Synthetic oligonucleotide; TTC chr11 5323988 5324009 5323993 5323988 -
ctacaggcttactttattcact

SEQ ID NO: 126545 - DNA, 22 bp, Artificial Sequence
  Synthetic oligonucleotide; CTA chr11 5323985 5324006 5323990 5323985 -
caggcttactttattcactccc

SEQ ID NO: 126546 - DNA, 22 bp, Artificial Sequence
  Synthetic oligonucleotide; CTT chr11 5323978 5323999 5323983 5323978 -
actttattcactccctttctgt

SEQ ID NO: 126547 - DNA, 22 bp, Artificial Sequence
  Synthetic oligonucleotide; TTA chr11 5323977 5323998 5323982 5323977 -
ctttattcactccctttctgtt

SEQ ID NO: 126548 - DNA, 22 bp, Artificial Sequence
  Synthetic oligonucleotide; CTT chr11 5323974 5323995 5323979 5323974 -
tattcactccctttctgttgtg

SEQ ID NO: 126549 - DNA, 22 bp, Artificial Sequence
  Synthetic oligonucleotide; TTT chr11 5323973 5323994 5323978 5323973 -
attcactccctttctgttgtgg

SEQ ID NO: 126550 - DNA, 22 bp, Artificial Sequence
  Synthetic oligonucleotide; TTA chr11 5323972 5323993 5323977 5323972 -
ttcactccctttctgttgtgga

SEQ ID NO: 126551 - DNA, 22 bp, Artificial Sequence
  Synthetic oligonucleotide; TTC chr11 5323969 5323990 5323974 5323969 -
actccctttctgttgtggaatc

SEQ ID NO: 126552 - DNA, 22 bp, Artificial Sequence
  Synthetic oligonucleotide; CTC chr11 5323965 5323986 5323970 5323965 -
cctttctgttgtggaatcaggt

SEQ ID NO: 126553 - DNA, 22 bp, Artificial Sequence
  Synthetic oligonucleotide; CTT chr11 5323961 5323982 5323966 5323961 -
tctgttgtggaatcaggttccc

SEQ ID NO: 126554 - DNA, 22 bp, Artificial Sequence
  Synthetic oligonucleotide; TTT chr11 5323960 5323981 5323965 5323960 -
ctgttgtggaatcaggttccct

SEQ ID NO: 126555 - DNA, 22 bp, Artificial Sequence
  Synthetic oligonucleotide; TTC chr11 5323959 5323980 5323964 5323959 -
tgttgtggaatcaggttccctc

SEQ ID NO: 126556 - DNA, 22 bp, Artificial Sequence
  Synthetic oligonucleotide; CTG chr11 5323957 5323978 5323962 5323957 -
ttgtggaatcaggttccctcct

SEQ ID NO: 126557 - DNA, 22 bp, Artificial Sequence
  Synthetic oligonucleotide; TTG chr11 5323954 5323975 5323959 5323954 -
tggaatcaggttccctcctggc

SEQ ID NO: 126558 - DNA, 22 bp, Artificial Sequence
  Synthetic oligonucleotide; TTC chr11 5323941 5323962 5323946 5323941 -
cctcctggcaatggcatatgat

SEQ ID NO: 126559 - DNA, 22 bp, Artificial Sequence
  Synthetic oligonucleotide; CTC chr11 5323937 5323958 5323942 5323937 -
ctggcaatggcatatgattgtt

SEQ ID NO: 126560 - DNA, 22 bp, Artificial Sequence
  Synthetic oligonucleotide; CTG chr11 5323934 5323955 5323939 5323934 -
gcaatggcatatgattgtttca

SEQ ID NO: 126561 - DNA, 22 bp, Artificial Sequence
  Synthetic oligonucleotide; TTG chr11 5323917 5323938 5323922 5323917 -
tttcattgccatccgcaatcct

SEQ ID NO: 126562 - DNA, 22 bp, Artificial Sequence
  Synthetic oligonucleotide; TTT chr11 5323914 5323935 5323919 5323914 -
cattgccatccgcaatcctttg

SEQ ID NO: 126563 - DNA, 22 bp, Artificial Sequence
  Synthetic oligonucleotide; TTC chr11 5323913 5323934 5323918 5323913 -
attgccatccgcaatcctttga

SEQ ID NO: 126564 - DNA, 22 bp, Artificial Sequence
  Synthetic oligonucleotide; TTG chr11 5323909 5323930 5323914 5323909 -
ccatccgcaatcctttgagata

SEQ ID NO: 126565 - DNA, 22 bp, Artificial Sequence
  Synthetic oligonucleotide; CTT chr11 5323894 5323915 5323899 5323894 -
tgagatatgcttccattctcac

SEQ ID NO: 126566 - DNA, 22 bp, Artificial Sequence
  Synthetic oligonucleotide; TTT chr11 5323893 5323914 5323898 5323893 -
gagatatgcttccattctcacc

SEQ ID NO: 126567 - DNA, 22 bp, Artificial Sequence
  Synthetic oligonucleotide; TTG chr11 5323892 5323913 5323897 5323892 -
agatatgcttccattctcacca

SEQ ID NO: 126568 - DNA, 22 bp, Artificial Sequence
  Synthetic oligonucleotide; CTT chr11 5323882 5323903 5323887 5323882 -
ccattctcaccaatactagagt

SEQ ID NO: 126569 - DNA, 22 bp, Artificial Sequence
  Synthetic oligonucleotide; TTC chr11 5323881 5323902 5323886 5323881 -
cattctcaccaatactagagtc

SEQ ID NO: 126570 - DNA, 22 bp, Artificial Sequence
  Synthetic oligonucleotide; TTC chr11 5323876 5323897 5323881 5323876 -
tcaccaatactagagtcatagc

SEQ ID NO: 126571 - DNA, 22 bp, Artificial Sequence
  Synthetic oligonucleotide; CTC chr11 5323874 5323895 5323879 5323874 -
accaatactagagtcatagcgt

SEQ ID NO: 126572 - DNA, 22 bp, Artificial Sequence
  Synthetic oligonucleotide; CTA chr11 5323864 5323885 5323869 5323864 -
gagtcatagcgttaggagtggg

SEQ ID NO: 126573 - DNA, 22 bp, Artificial Sequence
  Synthetic oligonucleotide; TTA chr11 5323850 5323871 5323855 5323850 -
ggagtgggagtgtttctaaggg

SEQ ID NO: 126574 - DNA, 22 bp, Artificial Sequence
  Synthetic oligonucleotide; TTT chr11 5323835 5323856 5323840 5323835 -
ctaaggggttttgtatccatcc

SEQ ID NO: 126575 - DNA, 22 bp, Artificial Sequence
  Synthetic oligonucleotide; TTC chr11 5323834 5323855 5323839 5323834 -
taaggggttttgtatccatcct

SEQ ID NO: 126576 - DNA, 22 bp, Artificial Sequence
  Synthetic oligonucleotide; CTA chr11 5323832 5323853 5323837 5323832 -
aggggttttgtatccatcctgc

SEQ ID NO: 126577 - DNA, 22 bp, Artificial Sequence
  Synthetic oligonucleotide; TTT chr11 5323824 5323845 5323829 5323824 -
tgtatccatcctgcctgtaatt

SEQ ID NO: 126578 - DNA, 22 bp, Artificial Sequence
  Synthetic oligonucleotide; TTT chr11 5323823 5323844 5323828 5323823 -
gtatccatcctgcctgtaattt

SEQ ID NO: 126579 - DNA, 22 bp, Artificial Sequence
  Synthetic oligonucleotide; TTG chr11 5323822 5323843 5323827 5323822 -
tatccatcctgcctgtaatttt

SEQ ID NO: 126580 - DNA, 22 bp, Artificial Sequence
  Synthetic oligonucleotide; CTG chr11 5323811 5323832 5323816 5323811 -
cctgtaattttgcgtctttttt

SEQ ID NO: 126581 - DNA, 22 bp, Artificial Sequence
  Synthetic oligonucleotide; CTG chr11 5323807 5323828 5323812 5323807 -
taattttgcgtcttttttcatt

SEQ ID NO: 126582 - DNA, 22 bp, Artificial Sequence
  Synthetic oligonucleotide; TTT chr11 5323801 5323822 5323806 5323801 -
tgcgtcttttttcattttcata

SEQ ID NO: 126583 - DNA, 22 bp, Artificial Sequence
  Synthetic oligonucleotide; TTT chr11 5323800 5323821 5323805 5323800 -
gcgtcttttttcattttcatat

SEQ ID NO: 126584 - DNA, 22 bp, Artificial Sequence
  Synthetic oligonucleotide; TTG chr11 5323799 5323820 5323804 5323799 -
cgtcttttttcattttcatatt

SEQ ID NO: 126585 - DNA, 22 bp, Artificial Sequence
  Synthetic oligonucleotide; CTT chr11 5323793 5323814 5323798 5323793 -
ttttcattttcatattgcaaat

SEQ ID NO: 126586 - DNA, 22 bp, Artificial Sequence
  Synthetic oligonucleotide; TTT chr11 5323792 5323813 5323797 5323792 -
tttcattttcatattgcaaatc

SEQ ID NO: 126587 - DNA, 22 bp, Artificial Sequence
  Synthetic oligonucleotide; TTT chr11 5323791 5323812 5323796 5323791 -
ttcattttcatattgcaaatct

SEQ ID NO: 126588 - DNA, 22 bp, Artificial Sequence
  Synthetic oligonucleotide; TTT chr11 5323790 5323811 5323795 5323790 -
tcattttcatattgcaaatctc

SEQ ID NO: 126589 - DNA, 22 bp, Artificial Sequence
  Synthetic oligonucleotide; TTT chr11 5323789 5323810 5323794 5323789 -
cattttcatattgcaaatctca

SEQ ID NO: 126590 - DNA, 22 bp, Artificial Sequence
  Synthetic oligonucleotide; TTC chr11 5323788 5323809 5323793 5323788 -
attttcatattgcaaatctcat

SEQ ID NO: 126591 - DNA, 22 bp, Artificial Sequence
  Synthetic oligonucleotide; TTT chr11 5323784 5323805 5323789 5323784 -
tcatattgcaaatctcatgtta

SEQ ID NO: 126592 - DNA, 22 bp, Artificial Sequence
  Synthetic oligonucleotide; TTT chr11 5323783 5323804 5323788 5323783 -
catattgcaaatctcatgttat

SEQ ID NO: 126593 - DNA, 22 bp, Artificial Sequence
  Synthetic oligonucleotide; TTC chr11 5323782 5323803 5323787 5323782 -
atattgcaaatctcatgttatc

SEQ ID NO: 126594 - DNA, 22 bp, Artificial Sequence
  Synthetic oligonucleotide; TTG chr11 5323776 5323797 5323781 5323776 -
caaatctcatgttatcacacgt

SEQ ID NO: 126595 - DNA, 22 bp, Artificial Sequence
  Synthetic oligonucleotide; CTC chr11 5323768 5323789 5323773 5323768 -
atgttatcacacgtgctttctg

SEQ ID NO: 126596 - DNA, 22 bp, Artificial Sequence
  Synthetic oligonucleotide; TTA chr11 5323762 5323783 5323767 5323762 -
tcacacgtgctttctgcctcca

SEQ ID NO: 126597 - DNA, 22 bp, Artificial Sequence
  Synthetic oligonucleotide; CTT chr11 5323750 5323771 5323755 5323750 -
tctgcctccaccaagaaatcat

SEQ ID NO: 126598 - DNA, 22 bp, Artificial Sequence
  Synthetic oligonucleotide; TTT chr11 5323749 5323770 5323754 5323749 -
ctgcctccaccaagaaatcatg

SEQ ID NO: 126599 - DNA, 22 bp, Artificial Sequence
  Synthetic oligonucleotide; TTC chr11 5323748 5323769 5323753 5323748 -
tgcctccaccaagaaatcatga

SEQ ID NO: 126600 - DNA, 22 bp, Artificial Sequence
  Synthetic oligonucleotide; CTG chr11 5323746 5323767 5323751 5323746 -
cctccaccaagaaatcatgaga

SEQ ID NO: 126601 - DNA, 22 bp, Artificial Sequence
  Synthetic oligonucleotide; CTC chr11 5323742 5323763 5323747 5323742 -
caccaagaaatcatgagactgg

SEQ ID NO: 126602 - DNA, 22 bp, Artificial Sequence
  Synthetic oligonucleotide; CTG chr11 5323721 5323742 5323726 5323721 -
gcttgtgctgacataactttca

SEQ ID NO: 126603 - DNA, 22 bp, Artificial Sequence
  Synthetic oligonucleotide; CTT chr11 5323717 5323738 5323722 5323717 -
gtgctgacataactttcaatag

SEQ ID NO: 126604 - DNA, 22 bp, Artificial Sequence
  Synthetic oligonucleotide; TTG chr11 5323716 5323737 5323721 5323716 -
tgctgacataactttcaataga

SEQ ID NO: 126605 - DNA, 22 bp, Artificial Sequence
  Synthetic oligonucleotide; CTG chr11 5323711 5323732 5323716 5323711 -
acataactttcaatagacttta

SEQ ID NO: 126606 - DNA, 22 bp, Artificial Sequence
  Synthetic oligonucleotide; CTT chr11 5323702 5323723 5323707 5323702 -
tcaatagactttaccctgtaat

SEQ ID NO: 126607 - DNA, 22 bp, Artificial Sequence
  Synthetic oligonucleotide; TTT chr11 5323701 5323722 5323706 5323701 -
caatagactttaccctgtaatt

SEQ ID NO: 126608 - DNA, 22 bp, Artificial Sequence
  Synthetic oligonucleotide; TTC chr11 5323700 5323721 5323705 5323700 -
aatagactttaccctgtaattt

SEQ ID NO: 126609 - DNA, 22 bp, Artificial Sequence
  Synthetic oligonucleotide; CTT chr11 5323691 5323712 5323696 5323691 -
taccctgtaattttgatctctt

SEQ ID NO: 126610 - DNA, 22 bp, Artificial Sequence
  Synthetic oligonucleotide; TTT chr11 5323690 5323711 5323695 5323690 -
accctgtaattttgatctcttt

SEQ ID NO: 126611 - DNA, 22 bp, Artificial Sequence
  Synthetic oligonucleotide; TTA chr11 5323689 5323710 5323694 5323689 -
ccctgtaattttgatctcttta

SEQ ID NO: 126612 - DNA, 22 bp, Artificial Sequence
  Synthetic oligonucleotide; CTG chr11 5323684 5323705 5323689 5323684 -
taattttgatctctttaacaat

SEQ ID NO: 126613 - DNA, 22 bp, Artificial Sequence
  Synthetic oligonucleotide; TTT chr11 5323678 5323699 5323683 5323678 -
tgatctctttaacaatcttcct

SEQ ID NO: 126614 - DNA, 22 bp, Artificial Sequence
  Synthetic oligonucleotide; TTT chr11 5323677 5323698 5323682 5323677 -
gatctctttaacaatcttccta

SEQ ID NO: 126615 - DNA, 22 bp, Artificial Sequence
  Synthetic oligonucleotide; TTG chr11 5323676 5323697 5323681 5323676 -
atctctttaacaatcttcctag

SEQ ID NO: 126616 - DNA, 22 bp, Artificial Sequence
  Synthetic oligonucleotide; CTC chr11 5323671 5323692 5323676 5323671 -
tttaacaatcttcctagactgt

SEQ ID NO: 126617 - DNA, 22 bp, Artificial Sequence
  Synthetic oligonucleotide; CTT chr11 5323669 5323690 5323674 5323669 -
taacaatcttcctagactgtct

SEQ ID NO: 126618 - DNA, 22 bp, Artificial Sequence
  Synthetic oligonucleotide; TTT chr11 5323668 5323689 5323673 5323668 -
aacaatcttcctagactgtctg

SEQ ID NO: 126619 - DNA, 22 bp, Artificial Sequence
  Synthetic oligonucleotide; TTA chr11 5323667 5323688 5323672 5323667 -
acaatcttcctagactgtctga

SEQ ID NO: 126620 - DNA, 22 bp, Artificial Sequence
  Synthetic oligonucleotide; CTT chr11 5323659 5323680 5323664 5323659 -
cctagactgtctgatcatcctc

SEQ ID NO: 126621 - DNA, 22 bp, Artificial Sequence
  Synthetic oligonucleotide; TTC chr11 5323658 5323679 5323663 5323658 -
ctagactgtctgatcatcctct

SEQ ID NO: 126622 - DNA, 22 bp, Artificial Sequence
  Synthetic oligonucleotide; CTA chr11 5323655 5323676 5323660 5323655 -
gactgtctgatcatcctcttct

SEQ ID NO: 126623 - DNA, 22 bp, Artificial Sequence
  Synthetic oligonucleotide; CTG chr11 5323650 5323671 5323655 5323650 -
tctgatcatcctcttctcctat

SEQ ID NO: 126624 - DNA, 22 bp, Artificial Sequence
  Synthetic oligonucleotide; CTG chr11 5323646 5323667 5323651 5323646 -
atcatcctcttctcctatattc

SEQ ID NO: 126625 - DNA, 22 bp, Artificial Sequence
  Synthetic oligonucleotide; CTC chr11 5323637 5323658 5323642 5323637 -
ttctcctatattctaattctta

SEQ ID NO: 126626 - DNA, 22 bp, Artificial Sequence
  Synthetic oligonucleotide; CTT chr11 5323635 5323656 5323640 5323635 -
ctcctatattctaattcttaat

SEQ ID NO: 126627 - DNA, 22 bp, Artificial Sequence
  Synthetic oligonucleotide; TTC chr11 5323634 5323655 5323639 5323634 -
tcctatattctaattcttaata

SEQ ID NO: 126628 - DNA, 22 bp, Artificial Sequence
  Synthetic oligonucleotide; CTC chr11 5323632 5323653 5323637 5323632 -
ctatattctaattcttaatact

SEQ ID NO: 126629 - DNA, 22 bp, Artificial Sequence
  Synthetic oligonucleotide; CTA chr11 5323629 5323650 5323634 5323629 -
tattctaattcttaatactgtc

SEQ ID NO: 126630 - DNA, 22 bp, Artificial Sequence
  Synthetic oligonucleotide; TTC chr11 5323624 5323645 5323629 5323624 -
taattcttaatactgtcatagg

SEQ ID NO: 126631 - DNA, 22 bp, Artificial Sequence
  Synthetic oligonucleotide; CTA chr11 5323622 5323643 5323627 5323622 -
attcttaatactgtcataggca

SEQ ID NO: 126632 - DNA, 22 bp, Artificial Sequence
  Synthetic oligonucleotide; TTC chr11 5323618 5323639 5323623 5323618 -
ttaatactgtcataggcattgc

SEQ ID NO: 126633 - DNA, 22 bp, Artificial Sequence
  Synthetic oligonucleotide; CTT chr11 5323616 5323637 5323621 5323616 -
aatactgtcataggcattgctt

SEQ ID NO: 126634 - DNA, 22 bp, Artificial Sequence
  Synthetic oligonucleotide; TTA chr11 5323615 5323636 5323620 5323615 -
atactgtcataggcattgcttc

SEQ ID NO: 126635 - DNA, 22 bp, Artificial Sequence
  Synthetic oligonucleotide; CTG chr11 5323609 5323630 5323614 5323609 -
tcataggcattgcttctggtga

SEQ ID NO: 126636 - DNA, 22 bp, Artificial Sequence
  Synthetic oligonucleotide; TTG chr11 5323597 5323618 5323602 5323597 -
cttctggtgaagagagagccaa

SEQ ID NO: 126637 - DNA, 22 bp, Artificial Sequence
  Synthetic oligonucleotide; CTT chr11 5323594 5323615 5323599 5323594 -
ctggtgaagagagagccaaagc

SEQ ID NO: 126638 - DNA, 22 bp, Artificial Sequence
  Synthetic oligonucleotide; TTC chr11 5323593 5323614 5323598 5323593 -
tggtgaagagagagccaaagcc

SEQ ID NO: 126639 - DNA, 22 bp, Artificial Sequence
  Synthetic oligonucleotide; CTG chr11 5323591 5323612 5323596 5323591 -
gtgaagagagagccaaagccct

SEQ ID NO: 126640 - DNA, 22 bp, Artificial Sequence
  Synthetic oligonucleotide; CTC chr11 5323568 5323589 5323573 5323568 -
aatacctgtatctcccacatta

SEQ ID NO: 126641 - DNA, 22 bp, Artificial Sequence
  Synthetic oligonucleotide; CTG chr11 5323560 5323581 5323565 5323560 -
tatctcccacattagttgtgtt

SEQ ID NO: 126642 - DNA, 22 bp, Artificial Sequence
  Synthetic oligonucleotide; CTC chr11 5323554 5323575 5323559 5323554 -
ccacattagttgtgttcttatc

SEQ ID NO: 126643 - DNA, 22 bp, Artificial Sequence
  Synthetic oligonucleotide; TTA chr11 5323546 5323567 5323551 5323546 -
gttgtgttcttatcttctatgt

SEQ ID NO: 126644 - DNA, 22 bp, Artificial Sequence
  Synthetic oligonucleotide; TTG chr11 5323542 5323563 5323547 5323542 -
tgttcttatcttctatgttaca

SEQ ID NO: 126645 - DNA, 22 bp, Artificial Sequence
  Synthetic oligonucleotide; TTC chr11 5323537 5323558 5323542 5323537 -
ttatcttctatgttacagtgat

SEQ ID NO: 126646 - DNA, 22 bp, Artificial Sequence
  Synthetic oligonucleotide; CTT chr11 5323535 5323556 5323540 5323535 -
atcttctatgttacagtgatgg

SEQ ID NO: 126647 - DNA, 22 bp, Artificial Sequence
  Synthetic oligonucleotide; TTA chr11 5323534 5323555 5323539 5323534 -
tcttctatgttacagtgatggg

SEQ ID NO: 126648 - DNA, 22 bp, Artificial Sequence
  Synthetic oligonucleotide; CTT chr11 5323530 5323551 5323535 5323530 -
ctatgttacagtgatgggtttg

SEQ ID NO: 126649 - DNA, 22 bp, Artificial Sequence
  Synthetic oligonucleotide; TTC chr11 5323529 5323550 5323534 5323529 -
tatgttacagtgatgggtttga

SEQ ID NO: 126650 - DNA, 22 bp, Artificial Sequence
  Synthetic oligonucleotide; CTA chr11 5323527 5323548 5323532 5323527 -
tgttacagtgatgggtttgaca

SEQ ID NO: 126651 - DNA, 22 bp, Artificial Sequence
  Synthetic oligonucleotide; TTA chr11 5323522 5323543 5323527 5323522 -
cagtgatgggtttgacattcat

SEQ ID NO: 126652 - DNA, 22 bp, Artificial Sequence
  Synthetic oligonucleotide; TTT chr11 5323509 5323530 5323514 5323509 -
gacattcatttacagatttggg

SEQ ID NO: 126653 - DNA, 22 bp, Artificial Sequence
  Synthetic oligonucleotide; TTG chr11 5323508 5323529 5323513 5323508 -
acattcatttacagatttggga

SEQ ID NO: 126654 - DNA, 22 bp, Artificial Sequence
  Synthetic oligonucleotide; TTC chr11 5323502 5323523 5323507 5323502 -
atttacagatttgggaagaatg

SEQ ID NO: 126655 - DNA, 22 bp, Artificial Sequence
  Synthetic oligonucleotide; TTT chr11 5323498 5323519 5323503 5323498 -
acagatttgggaagaatgtgcc

SEQ ID NO: 126656 - DNA, 22 bp, Artificial Sequence
  Synthetic oligonucleotide; TTA chr11 5323497 5323518 5323502 5323497 -
cagatttgggaagaatgtgcca

SEQ ID NO: 126657 - DNA, 22 bp, Artificial Sequence
  Synthetic oligonucleotide; TTT chr11 5323490 5323511 5323495 5323490 -
gggaagaatgtgccagaggttg

SEQ ID NO: 126658 - DNA, 22 bp, Artificial Sequence
  Synthetic oligonucleotide; TTG chr11 5323489 5323510 5323494 5323489 -
ggaagaatgtgccagaggttgt

SEQ ID NO: 126659 - DNA, 22 bp, Artificial Sequence
  Synthetic oligonucleotide; TTG chr11 5323468 5323489 5323473 5323468 -
tccacattatcatgagttacat

SEQ ID NO: 126660 - DNA, 22 bp, Artificial Sequence
  Synthetic oligonucleotide; TTA chr11 5323459 5323480 5323464 5323459 -
tcatgagttacatctacttcct

SEQ ID NO: 126661 - DNA, 22 bp, Artificial Sequence
  Synthetic oligonucleotide; TTA chr11 5323449 5323470 5323454 5323449 -
catctacttcctctttcctcct

SEQ ID NO: 126662 - DNA, 22 bp, Artificial Sequence
  Synthetic oligonucleotide; CTA chr11 5323443 5323464 5323448 5323443 -
cttcctctttcctcctttaatg

SEQ ID NO: 126663 - DNA, 22 bp, Artificial Sequence
  Synthetic oligonucleotide; CTT chr11 5323440 5323461 5323445 5323440 -
cctctttcctcctttaatgaac

SEQ ID NO: 126664 - DNA, 22 bp, Artificial Sequence
  Synthetic oligonucleotide; TTC chr11 5323439 5323460 5323444 5323439 -
ctctttcctcctttaatgaacc

SEQ ID NO: 126665 - DNA, 22 bp, Artificial Sequence
  Synthetic oligonucleotide; CTC chr11 5323436 5323457 5323441 5323436 -
tttcctcctttaatgaaccctg

SEQ ID NO: 126666 - DNA, 22 bp, Artificial Sequence
  Synthetic oligonucleotide; CTT chr11 5323434 5323455 5323439 5323434 -
tcctcctttaatgaaccctgtc

SEQ ID NO: 126667 - DNA, 22 bp, Artificial Sequence
  Synthetic oligonucleotide; TTT chr11 5323433 5323454 5323438 5323433 -
cctcctttaatgaaccctgtca

SEQ ID NO: 126668 - DNA, 22 bp, Artificial Sequence
  Synthetic oligonucleotide; TTC chr11 5323432 5323453 5323437 5323432 -
ctcctttaatgaaccctgtcat

SEQ ID NO: 126669 - DNA, 22 bp, Artificial Sequence
  Synthetic oligonucleotide; CTC chr11 5323429 5323450 5323434 5323429 -
ctttaatgaaccctgtcatcta

SEQ ID NO: 126670 - DNA, 22 bp, Artificial Sequence
  Synthetic oligonucleotide; CTT chr11 5323426 5323447 5323431 5323426 -
taatgaaccctgtcatctacag

SEQ ID NO: 126671 - DNA, 22 bp, Artificial Sequence
  Synthetic oligonucleotide; TTT chr11 5323425 5323446 5323430 5323425 -
aatgaaccctgtcatctacagc

SEQ ID NO: 126672 - DNA, 22 bp, Artificial Sequence
  Synthetic oligonucleotide; TTA chr11 5323424 5323445 5323429 5323424 -
atgaaccctgtcatctacagca

SEQ ID NO: 126673 - DNA, 22 bp, Artificial Sequence
  Synthetic oligonucleotide; CTG chr11 5323414 5323435 5323419 5323414 -
tcatctacagcatcaaaaccaa

SEQ ID NO: 126674 - DNA, 22 bp, Artificial Sequence
  Synthetic oligonucleotide; CTA chr11 5323407 5323428 5323412 5323407 -
cagcatcaaaaccaagcaaata

SEQ ID NO: 126675 - DNA, 22 bp, Artificial Sequence
  Synthetic oligonucleotide; TTA chr11 5323372 5323393 5323377 5323372 -
tccgccttttatctaaacatag

SEQ ID NO: 126676 - DNA, 22 bp, Artificial Sequence
  Synthetic oligonucleotide; CTT chr11 5323364 5323385 5323369 5323364 -
ttatctaaacataggtttagta

SEQ ID NO: 126677 - DNA, 22 bp, Artificial Sequence
  Synthetic oligonucleotide; TTT chr11 5323363 5323384 5323368 5323363 -
tatctaaacataggtttagtag

SEQ ID NO: 126678 - DNA, 22 bp, Artificial Sequence
  Synthetic oligonucleotide; TTT chr11 5323362 5323383 5323367 5323362 -
atctaaacataggtttagtagt

SEQ ID NO: 126679 - DNA, 22 bp, Artificial Sequence
  Synthetic oligonucleotide; TTA chr11 5323361 5323382 5323366 5323361 -
tctaaacataggtttagtagtt

SEQ ID NO: 126680 - DNA, 22 bp, Artificial Sequence
  Synthetic oligonucleotide; CTA chr11 5323357 5323378 5323362 5323357 -
aacataggtttagtagttaaac

SEQ ID NO: 126681 - DNA, 22 bp, Artificial Sequence
  Synthetic oligonucleotide; TTT chr11 5323346 5323367 5323351 5323346 -
agtagttaaactcggatctgga

SEQ ID NO: 126682 - DNA, 22 bp, Artificial Sequence
  Synthetic oligonucleotide; TTA chr11 5323345 5323366 5323350 5323345 -
gtagttaaactcggatctggag

SEQ ID NO: 126683 - DNA, 22 bp, Artificial Sequence
  Synthetic oligonucleotide; TTA chr11 5323338 5323359 5323343 5323338 -
aactcggatctggagaatcaga

SEQ ID NO: 126684 - DNA, 22 bp, Artificial Sequence
  Synthetic oligonucleotide; CTC chr11 5323333 5323354 5323338 5323333 -
ggatctggagaatcagacacag

SEQ ID NO: 126685 - DNA, 22 bp, Artificial Sequence
  Synthetic oligonucleotide; CTG chr11 5323326 5323347 5323331 5323326 -
gagaatcagacacagacataaa

SEQ ID NO: 126686 - DNA, 22 bp, Artificial Sequence
  Synthetic oligonucleotide; CTG chr11 5323274 5323295 5323279 5323274 -
gagttctttcttagcaaagagc

SEQ ID NO: 126687 - DNA, 22 bp, Artificial Sequence
  Synthetic oligonucleotide; TTC chr11 5323268 5323289 5323273 5323268 -
tttcttagcaaagagcaagggt

SEQ ID NO: 126688 - DNA, 22 bp, Artificial Sequence
  Synthetic oligonucleotide; CTT chr11 5323266 5323287 5323271 5323266 -
tcttagcaaagagcaagggtat

SEQ ID NO: 126689 - DNA, 22 bp, Artificial Sequence
  Synthetic oligonucleotide; TTT chr11 5323265 5323286 5323270 5323265 -
cttagcaaagagcaagggtata

SEQ ID NO: 126690 - DNA, 22 bp, Artificial Sequence
  Synthetic oligonucleotide; TTC chr11 5323264 5323285 5323269 5323264 -
ttagcaaagagcaagggtatac

SEQ ID NO: 126691 - DNA, 22 bp, Artificial Sequence
  Synthetic oligonucleotide; CTT chr11 5323262 5323283 5323267 5323262 -
agcaaagagcaagggtatactg

SEQ ID NO: 126692 - DNA, 22 bp, Artificial Sequence
  Synthetic oligonucleotide; TTA chr11 5323261 5323282 5323266 5323261 -
gcaaagagcaagggtatactgg

SEQ ID NO: 126693 - DNA, 22 bp, Artificial Sequence
  Synthetic oligonucleotide; CTG chr11 5323240 5323261 5323245 5323240 -
gaagacaatgttgtcactcaca

SEQ ID NO: 126694 - DNA, 22 bp, Artificial Sequence
  Synthetic oligonucleotide; TTG chr11 5323227 5323248 5323232 5323227 -
tcactcacaaggacttaagtac

SEQ ID NO: 126695 - DNA, 22 bp, Artificial Sequence
  Synthetic oligonucleotide; CTC chr11 5323221 5323242 5323226 5323221 -
acaaggacttaagtactttacc

SEQ ID NO: 126696 - DNA, 22 bp, Artificial Sequence
  Synthetic oligonucleotide; CTT chr11 5323211 5323232 5323216 5323211 -
aagtactttaccatagggttgg

SEQ ID NO: 126697 - DNA, 22 bp, Artificial Sequence
  Synthetic oligonucleotide; TTA chr11 5323210 5323231 5323215 5323210 -
agtactttaccatagggttggg

SEQ ID NO: 126698 - DNA, 22 bp, Artificial Sequence
  Synthetic oligonucleotide; CTT chr11 5323203 5323224 5323208 5323203 -
taccatagggttgggggcatat

SEQ ID NO: 126699 - DNA, 22 bp, Artificial Sequence
  Synthetic oligonucleotide; TTT chr11 5323202 5323223 5323207 5323202 -
accatagggttgggggcatatc

SEQ ID NO: 126700 - DNA, 22 bp, Artificial Sequence
  Synthetic oligonucleotide; TTA chr11 5323201 5323222 5323206 5323201 -
ccatagggttgggggcatatct

SEQ ID NO: 126701 - DNA, 22 bp, Artificial Sequence
  Synthetic oligonucleotide; TTG chr11 5323190 5323211 5323195 5323190 -
ggggcatatcttaggagaagtc

SEQ ID NO: 126702 - DNA, 22 bp, Artificial Sequence
  Synthetic oligonucleotide; CTT chr11 5323178 5323199 5323183 5323178 -
aggagaagtctggtgacagaac

SEQ ID NO: 126703 - DNA, 22 bp, Artificial Sequence
  Synthetic oligonucleotide; TTA chr11 5323177 5323198 5323182 5323177 -
ggagaagtctggtgacagaaca

SEQ ID NO: 126704 - DNA, 22 bp, Artificial Sequence
  Synthetic oligonucleotide; CTG chr11 5323166 5323187 5323171 5323166 -
gtgacagaacactgaatagacc

SEQ ID NO: 126705 - DNA, 22 bp, Artificial Sequence
  Synthetic oligonucleotide; CTG chr11 5323152 5323173 5323157 5323152 -
aatagaccatatggaactgaaa

SEQ ID NO: 126706 - DNA, 22 bp, Artificial Sequence
  Synthetic oligonucleotide; CTG chr11 5323133 5323154 5323138 5323133 -
aaaaagtctatatttaaattct

SEQ ID NO: 126707 - DNA, 22 bp, Artificial Sequence
  Synthetic oligonucleotide; CTA chr11 5323123 5323144 5323128 5323123 -
tatttaaattcttctttcaaat

SEQ ID NO: 126708 - DNA, 22 bp, Artificial Sequence
  Synthetic oligonucleotide; TTT chr11 5323118 5323139 5323123 5323118 -
aaattcttctttcaaatgcacc

SEQ ID NO: 126709 - DNA, 22 bp, Artificial Sequence
  Synthetic oligonucleotide; TTA chr11 5323117 5323138 5323122 5323117 -
aattcttctttcaaatgcacct

SEQ ID NO: 126710 - DNA, 22 bp, Artificial Sequence
  Synthetic oligonucleotide; TTC chr11 5323112 5323133 5323117 5323112 -
ttctttcaaatgcacctgaaat

SEQ ID NO: 126711 - DNA, 22 bp, Artificial Sequence
  Synthetic oligonucleotide; CTT chr11 5323110 5323131 5323115 5323110 -
ctttcaaatgcacctgaaatta

SEQ ID NO: 126712 - DNA, 22 bp, Artificial Sequence
  Synthetic oligonucleotide; TTC chr11 5323109 5323130 5323114 5323109 -
tttcaaatgcacctgaaattag

SEQ ID NO: 126713 - DNA, 22 bp, Artificial Sequence
  Synthetic oligonucleotide; CTT chr11 5323107 5323128 5323112 5323107 -
tcaaatgcacctgaaattagcc

SEQ ID NO: 126714 - DNA, 22 bp, Artificial Sequence
  Synthetic oligonucleotide; TTT chr11 5323106 5323127 5323111 5323106 -
caaatgcacctgaaattagcca

SEQ ID NO: 126715 - DNA, 22 bp, Artificial Sequence
  Synthetic oligonucleotide; TTC chr11 5323105 5323126 5323110 5323105 -
aaatgcacctgaaattagccac

SEQ ID NO: 126716 - DNA, 22 bp, Artificial Sequence
  Synthetic oligonucleotide; CTG chr11 5323094 5323115 5323099 5323094 -
aaattagccacctcagtgaaat

SEQ ID NO: 126717 - DNA, 22 bp, Artificial Sequence
  Synthetic oligonucleotide; TTA chr11 5323088 5323109 5323093 5323088 -
gccacctcagtgaaatttgagg

SEQ ID NO: 126718 - DNA, 22 bp, Artificial Sequence
  Synthetic oligonucleotide; CTC chr11 5323080 5323101 5323085 5323080 -
agtgaaatttgaggaaaaggca

SEQ ID NO: 126719 - DNA, 22 bp, Artificial Sequence
  Synthetic oligonucleotide; TTT chr11 5323070 5323091 5323075 5323070 -
gaggaaaaggcagaacatataa

SEQ ID NO: 126720 - DNA, 22 bp, Artificial Sequence
  Synthetic oligonucleotide; TTG chr11 5323069 5323090 5323074 5323069 -
aggaaaaggcagaacatataat

SEQ ID NO: 126721 - DNA, 22 bp, Artificial Sequence
  Synthetic oligonucleotide; CTC chr11 5323044 5323065 5323049 5323044 -
tatgaaaaacttttgcctcagt

SEQ ID NO: 126722 - DNA, 22 bp, Artificial Sequence
  Synthetic oligonucleotide; CTA chr11 5323042 5323063 5323047 5323042 -
tgaaaaacttttgcctcagtgt

SEQ ID NO: 126723 - DNA, 22 bp, Artificial Sequence
  Synthetic oligonucleotide; CTT chr11 5323032 5323053 5323037 5323032 -
ttgcctcagtgtgcacatttgt

SEQ ID NO: 126724 - DNA, 22 bp, Artificial Sequence
  Synthetic oligonucleotide; TTT chr11 5323031 5323052 5323036 5323031 -
tgcctcagtgtgcacatttgtg

SEQ ID NO: 126725 - DNA, 22 bp, Artificial Sequence
  Synthetic oligonucleotide; TTT chr11 5323030 5323051 5323035 5323030 -
gcctcagtgtgcacatttgtgc

SEQ ID NO: 126726 - DNA, 22 bp, Artificial Sequence
  Synthetic oligonucleotide; TTG chr11 5323029 5323050 5323034 5323029 -
cctcagtgtgcacatttgtgca

SEQ ID NO: 126727 - DNA, 22 bp, Artificial Sequence
  Synthetic oligonucleotide; CTC chr11 5323025 5323046 5323030 5323025 -
agtgtgcacatttgtgcataca

SEQ ID NO: 126728 - DNA, 22 bp, Artificial Sequence
  Synthetic oligonucleotide; TTT chr11 5323012 5323033 5323017 5323012 -
gtgcatacatgtttatgtgttt

SEQ ID NO: 126729 - DNA, 22 bp, Artificial Sequence
  Synthetic oligonucleotide; TTG chr11 5323011 5323032 5323016 5323011 -
tgcatacatgtttatgtgtttg

SEQ ID NO: 126730 - DNA, 22 bp, Artificial Sequence
  Synthetic oligonucleotide; TTT chr11 5322998 5323019 5323003 5322998 -
atgtgtttgcataggctaatgc

SEQ ID NO: 126731 - DNA, 22 bp, Artificial Sequence
  Synthetic oligonucleotide; TTA chr11 5322997 5323018 5323002 5322997 -
tgtgtttgcataggctaatgca

SEQ ID NO: 126732 - DNA, 22 bp, Artificial Sequence
  Synthetic oligonucleotide; TTT chr11 5322990 5323011 5322995 5322990 -
gcataggctaatgcacacaagt

SEQ ID NO: 126733 - DNA, 22 bp, Artificial Sequence
  Synthetic oligonucleotide; TTG chr11 5322989 5323010 5322994 5322989 -
cataggctaatgcacacaagtg

SEQ ID NO: 126734 - DNA, 22 bp, Artificial Sequence
  Synthetic oligonucleotide; CTA chr11 5322980 5323001 5322985 5322980 -
atgcacacaagtgtaaaaaaaa

SEQ ID NO: 126735 - DNA, 22 bp, Artificial Sequence
  Synthetic oligonucleotide; TTG chr11 5322952 5322973 5322957 5322952 -
atcatcattctctagaaataaa

SEQ ID NO: 126736 - DNA, 22 bp, Artificial Sequence
  Synthetic oligonucleotide; TTC chr11 5322942 5322963 5322947 5322942 -
tctagaaataaattcttattta

SEQ ID NO: 126737 - DNA, 22 bp, Artificial Sequence
  Synthetic oligonucleotide; CTC chr11 5322940 5322961 5322945 5322940 -
tagaaataaattcttatttaaa

SEQ ID NO: 126738 - DNA, 22 bp, Artificial Sequence
  Synthetic oligonucleotide; CTA chr11 5322938 5322959 5322943 5322938 -
gaaataaattcttatttaaaat

SEQ ID NO: 126739 - DNA, 22 bp, Artificial Sequence
  Synthetic oligonucleotide; TTC chr11 5322927 5322948 5322932 5322927 -
ttatttaaaattttcattattc

SEQ ID NO: 126740 - DNA, 22 bp, Artificial Sequence
  Synthetic oligonucleotide; CTT chr11 5322925 5322946 5322930 5322925 -
atttaaaattttcattattctc

SEQ ID NO: 126741 - DNA, 22 bp, Artificial Sequence
  Synthetic oligonucleotide; TTA chr11 5322924 5322945 5322929 5322924 -
tttaaaattttcattattctca

SEQ ID NO: 126742 - DNA, 22 bp, Artificial Sequence
  Synthetic oligonucleotide; TTT chr11 5322921 5322942 5322926 5322921 -
aaaattttcattattctcatgg

SEQ ID NO: 126743 - DNA, 22 bp, Artificial Sequence
  Synthetic oligonucleotide; TTA chr11 5322920 5322941 5322925 5322920 -
aaattttcattattctcatggc

SEQ ID NO: 126744 - DNA, 22 bp, Artificial Sequence
  Synthetic oligonucleotide; TTT chr11 5322914 5322935 5322919 5322914 -
tcattattctcatggcaaatat

SEQ ID NO: 126745 - DNA, 22 bp, Artificial Sequence
  Synthetic oligonucleotide; TTT chr11 5322913 5322934 5322918 5322913 -
cattattctcatggcaaatata

SEQ ID NO: 126746 - DNA, 22 bp, Artificial Sequence
  Synthetic oligonucleotide; TTC chr11 5322912 5322933 5322917 5322912 -
attattctcatggcaaatatag

SEQ ID NO: 126747 - DNA, 22 bp, Artificial Sequence
  Synthetic oligonucleotide; TTA chr11 5322908 5322929 5322913 5322908 -
ttctcatggcaaatatagtgat

SEQ ID NO: 126748 - DNA, 22 bp, Artificial Sequence
  Synthetic oligonucleotide; TTC chr11 5322905 5322926 5322910 5322905 -
tcatggcaaatatagtgataag

SEQ ID NO: 126749 - DNA, 22 bp, Artificial Sequence
  Synthetic oligonucleotide; CTC chr11 5322903 5322924 5322908 5322903 -
atggcaaatatagtgataagaa

SEQ ID NO: 126750 - DNA, 22 bp, Artificial Sequence
  Synthetic oligonucleotide; CTA chr11 5322877 5322898 5322882 5322877 -
acattttaaatttacttttaaa

SEQ ID NO: 126751 - DNA, 22 bp, Artificial Sequence
  Synthetic oligonucleotide; TTT chr11 5322871 5322892 5322876 5322871 -
taaatttacttttaaataagta

SEQ ID NO: 126752 - DNA, 22 bp, Artificial Sequence
  Synthetic oligonucleotide; TTT chr11 5322870 5322891 5322875 5322870 -
aaatttacttttaaataagtaa

SEQ ID NO: 126753 - DNA, 22 bp, Artificial Sequence
  Synthetic oligonucleotide; TTA chr11 5322869 5322890 5322874 5322869 -
aatttacttttaaataagtaag

SEQ ID NO: 126754 - DNA, 22 bp, Artificial Sequence
  Synthetic oligonucleotide; TTT chr11 5322864 5322885 5322869 5322864 -
acttttaaataagtaagtgttg

SEQ ID NO: 126755 - DNA, 22 bp, Artificial Sequence
  Synthetic oligonucleotide; TTA chr11 5322863 5322884 5322868 5322863 -
cttttaaataagtaagtgttgg

SEQ ID NO: 126756 - DNA, 22 bp, Artificial Sequence
  Synthetic oligonucleotide; CTT chr11 5322860 5322881 5322865 5322860 -
ttaaataagtaagtgttggtta

SEQ ID NO: 126757 - DNA, 22 bp, Artificial Sequence
  Synthetic oligonucleotide; TTT chr11 5322859 5322880 5322864 5322859 -
taaataagtaagtgttggttat

SEQ ID NO: 126758 - DNA, 22 bp, Artificial Sequence
  Synthetic oligonucleotide; TTT chr11 5322858 5322879 5322863 5322858 -
aaataagtaagtgttggttatc

SEQ ID NO: 126759 - DNA, 22 bp, Artificial Sequence
  Synthetic oligonucleotide; TTA chr11 5322857 5322878 5322862 5322857 -
aataagtaagtgttggttatct

SEQ ID NO: 126760 - DNA, 22 bp, Artificial Sequence
  Synthetic oligonucleotide; TTG chr11 5322842 5322863 5322847 5322842 -
gttatcttttaactgtcctcta

SEQ ID NO: 126761 - DNA, 22 bp, Artificial Sequence
  Synthetic oligonucleotide; TTA chr11 5322838 5322859 5322843 5322838 -
tcttttaactgtcctctaccct

SEQ ID NO: 126762 - DNA, 22 bp, Artificial Sequence
  Synthetic oligonucleotide; CTT chr11 5322834 5322855 5322839 5322834 -
ttaactgtcctctaccctgagt

SEQ ID NO: 126763 - DNA, 22 bp, Artificial Sequence
  Synthetic oligonucleotide; TTT chr11 5322833 5322854 5322838 5322833 -
taactgtcctctaccctgagtt

SEQ ID NO: 126764 - DNA, 22 bp, Artificial Sequence
  Synthetic oligonucleotide; TTT chr11 5322832 5322853 5322837 5322832 -
aactgtcctctaccctgagtta

SEQ ID NO: 126765 - DNA, 22 bp, Artificial Sequence
  Synthetic oligonucleotide; TTA chr11 5322831 5322852 5322836 5322831 -
actgtcctctaccctgagttag

SEQ ID NO: 126766 - DNA, 22 bp, Artificial Sequence
  Synthetic oligonucleotide; CTG chr11 5322827 5322848 5322832 5322827 -
tcctctaccctgagttagggta

SEQ ID NO: 126767 - DNA, 22 bp, Artificial Sequence
  Synthetic oligonucleotide; CTC chr11 5322822 5322843 5322827 5322822 -
taccctgagttagggtactctc

SEQ ID NO: 126768 - DNA, 22 bp, Artificial Sequence
  Synthetic oligonucleotide; CTA chr11 5322820 5322841 5322825 5322820 -
ccctgagttagggtactctcta

SEQ ID NO: 126769 - DNA, 22 bp, Artificial Sequence
  Synthetic oligonucleotide; CTG chr11 5322815 5322836 5322820 5322815 -
agttagggtactctctagggcc

SEQ ID NO: 126770 - DNA, 22 bp, Artificial Sequence
  Synthetic oligonucleotide; TTA chr11 5322810 5322831 5322815 5322810 -
gggtactctctagggccatgat

SEQ ID NO: 126771 - DNA, 22 bp, Artificial Sequence
  Synthetic oligonucleotide; CTC chr11 5322802 5322823 5322807 5322802 -
tctagggccatgatttgcattt

SEQ ID NO: 126772 - DNA, 22 bp, Artificial Sequence
  Synthetic oligonucleotide; CTC chr11 5322800 5322821 5322805 5322800 -
tagggccatgatttgcatttaa

SEQ ID NO: 126773 - DNA, 22 bp, Artificial Sequence
  Synthetic oligonucleotide; CTA chr11 5322798 5322819 5322803 5322798 -
gggccatgatttgcatttaata

SEQ ID NO: 126774 - DNA, 22 bp, Artificial Sequence
  Synthetic oligonucleotide; TTT chr11 5322786 5322807 5322791 5322786 -
gcatttaatattttctaaatac

SEQ ID NO: 126775 - DNA, 22 bp, Artificial Sequence
  Synthetic oligonucleotide; TTG chr11 5322785 5322806 5322790 5322785 -
catttaatattttctaaataca

SEQ ID NO: 126776 - DNA, 22 bp, Artificial Sequence
  Synthetic oligonucleotide; TTT chr11 5322780 5322801 5322785 5322780 -
aatattttctaaatacagtcgt

SEQ ID NO: 126777 - DNA, 22 bp, Artificial Sequence
  Synthetic oligonucleotide; TTA chr11 5322779 5322800 5322784 5322779 -
atattttctaaatacagtcgta

SEQ ID NO: 126778 - DNA, 22 bp, Artificial Sequence
  Synthetic oligonucleotide; TTT chr11 5322773 5322794 5322778 5322773 -
tctaaatacagtcgtaagtcac

SEQ ID NO: 126779 - DNA, 22 bp, Artificial Sequence
  Synthetic oligonucleotide; TTT chr11 5322772 5322793 5322777 5322772 -
ctaaatacagtcgtaagtcact

SEQ ID NO: 126780 - DNA, 22 bp, Artificial Sequence
  Synthetic oligonucleotide; TTC chr11 5322771 5322792 5322776 5322771 -
taaatacagtcgtaagtcactt

SEQ ID NO: 126781 - DNA, 22 bp, Artificial Sequence
  Synthetic oligonucleotide; CTA chr11 5322769 5322790 5322774 5322769 -
aatacagtcgtaagtcacttac

SEQ ID NO: 126782 - DNA, 22 bp, Artificial Sequence
  Synthetic oligonucleotide; CTT chr11 5322749 5322770 5322754 5322749 -
acagagtatttcaataagagct

SEQ ID NO: 126783 - DNA, 22 bp, Artificial Sequence
  Synthetic oligonucleotide; TTA chr11 5322748 5322769 5322753 5322748 -
cagagtatttcaataagagctt

SEQ ID NO: 126784 - DNA, 22 bp, Artificial Sequence
  Synthetic oligonucleotide; TTT chr11 5322738 5322759 5322743 5322738 -
caataagagctttttaattttc

SEQ ID NO: 126785 - DNA, 22 bp, Artificial Sequence
  Synthetic oligonucleotide; TTC chr11 5322737 5322758 5322742 5322737 -
aataagagctttttaattttca

SEQ ID NO: 126786 - DNA, 22 bp, Artificial Sequence
  Synthetic oligonucleotide; CTT chr11 5322726 5322747 5322731 5322726 -
tttaattttcaatacattcctt

SEQ ID NO: 126787 - DNA, 22 bp, Artificial Sequence
  Synthetic oligonucleotide; TTT chr11 5322725 5322746 5322730 5322725 -
ttaattttcaatacattccttg

SEQ ID NO: 126788 - DNA, 22 bp, Artificial Sequence
  Synthetic oligonucleotide; TTT chr11 5322724 5322745 5322729 5322724 -
taattttcaatacattccttgc

SEQ ID NO: 126789 - DNA, 22 bp, Artificial Sequence
  Synthetic oligonucleotide; TTT chr11 5322723 5322744 5322728 5322723 -
aattttcaatacattccttgca

SEQ ID NO: 126790 - DNA, 22 bp, Artificial Sequence
  Synthetic oligonucleotide; TTA chr11 5322722 5322743 5322727 5322722 -
attttcaatacattccttgcag

SEQ ID NO: 126791 - DNA, 22 bp, Artificial Sequence
  Synthetic oligonucleotide; TTT chr11 5322718 5322739 5322723 5322718 -
tcaatacattccttgcaggatg

SEQ ID NO: 126792 - DNA, 22 bp, Artificial Sequence
  Synthetic oligonucleotide; TTT chr11 5322717 5322738 5322722 5322717 -
caatacattccttgcaggatgt

SEQ ID NO: 126793 - DNA, 22 bp, Artificial Sequence
  Synthetic oligonucleotide; TTC chr11 5322716 5322737 5322721 5322716 -
aatacattccttgcaggatgtc

SEQ ID NO: 126794 - DNA, 22 bp, Artificial Sequence
  Synthetic oligonucleotide; TTC chr11 5322707 5322728 5322712 5322707 -
cttgcaggatgtctggatttta

SEQ ID NO: 126795 - DNA, 22 bp, Artificial Sequence
  Synthetic oligonucleotide; CTT chr11 5322704 5322725 5322709 5322704 -
gcaggatgtctggattttataa

SEQ ID NO: 126796 - DNA, 22 bp, Artificial Sequence
  Synthetic oligonucleotide; TTG chr11 5322703 5322724 5322708 5322703 -
caggatgtctggattttataaa

SEQ ID NO: 126797 - DNA, 22 bp, Artificial Sequence
  Synthetic oligonucleotide; CTG chr11 5322692 5322713 5322697 5322692 -
gattttataaaagtgtatttct

SEQ ID NO: 126798 - DNA, 22 bp, Artificial Sequence
  Synthetic oligonucleotide; TTT chr11 5322687 5322708 5322692 5322687 -
tataaaagtgtatttctttacc

SEQ ID NO: 126799 - DNA, 22 bp, Artificial Sequence
  Synthetic oligonucleotide; TTT chr11 5322686 5322707 5322691 5322686 -
ataaaagtgtatttctttacct

SEQ ID NO: 126800 - DNA, 22 bp, Artificial Sequence
  Synthetic oligonucleotide; TTA chr11 5322685 5322706 5322690 5322685 -
taaaagtgtatttctttacctc

SEQ ID NO: 126801 - DNA, 22 bp, Artificial Sequence
  Synthetic oligonucleotide; TTT chr11 5322672 5322693 5322677 5322672 -
ctttacctcattcttctataaa

SEQ ID NO: 126802 - DNA, 22 bp, Artificial Sequence
  Synthetic oligonucleotide; TTC chr11 5322671 5322692 5322676 5322671 -
tttacctcattcttctataaat

SEQ ID NO: 126803 - DNA, 22 bp, Artificial Sequence
  Synthetic oligonucleotide; CTT chr11 5322669 5322690 5322674 5322669 -
tacctcattcttctataaatat

SEQ ID NO: 126804 - DNA, 22 bp, Artificial Sequence
  Synthetic oligonucleotide; TTT chr11 5322668 5322689 5322673 5322668 -
acctcattcttctataaatatt

SEQ ID NO: 126805 - DNA, 22 bp, Artificial Sequence
  Synthetic oligonucleotide; TTA chr11 5322667 5322688 5322672 5322667 -
cctcattcttctataaatattc

SEQ ID NO: 126806 - DNA, 22 bp, Artificial Sequence
  Synthetic oligonucleotide; CTC chr11 5322663 5322684 5322668 5322663 -
attcttctataaatattctttt

SEQ ID NO: 126807 - DNA, 22 bp, Artificial Sequence
  Synthetic oligonucleotide; TTC chr11 5322659 5322680 5322664 5322659 -
ttctataaatattcttttgccc

SEQ ID NO: 126808 - DNA, 22 bp, Artificial Sequence
  Synthetic oligonucleotide; CTT chr11 5322657 5322678 5322662 5322657 -
ctataaatattcttttgcccaa

SEQ ID NO: 126809 - DNA, 22 bp, Artificial Sequence
  Synthetic oligonucleotide; TTC chr11 5322656 5322677 5322661 5322656 -
tataaatattcttttgcccaaa

SEQ ID NO: 126810 - DNA, 22 bp, Artificial Sequence
  Synthetic oligonucleotide; CTA chr11 5322654 5322675 5322659 5322654 -
taaatattcttttgcccaaaaa

SEQ ID NO: 126811 - DNA, 22 bp, Artificial Sequence
  Synthetic oligonucleotide; TTC chr11 5322645 5322666 5322650 5322645 -
ttttgcccaaaaaaatcttaga

SEQ ID NO: 126812 - DNA, 22 bp, Artificial Sequence
  Synthetic oligonucleotide; CTT chr11 5322643 5322664 5322648 5322643 -
ttgcccaaaaaaatcttagaag

SEQ ID NO: 126813 - DNA, 22 bp, Artificial Sequence
  Synthetic oligonucleotide; TTT chr11 5322642 5322663 5322647 5322642 -
tgcccaaaaaaatcttagaagg

SEQ ID NO: 126814 - DNA, 22 bp, Artificial Sequence
  Synthetic oligonucleotide; TTT chr11 5322641 5322662 5322646 5322641 -
gcccaaaaaaatcttagaagga

SEQ ID NO: 126815 - DNA, 22 bp, Artificial Sequence
  Synthetic oligonucleotide; TTG chr11 5322640 5322661 5322645 5322640 -
cccaaaaaaatcttagaaggaa

SEQ ID NO: 126816 - DNA, 22 bp, Artificial Sequence
  Synthetic oligonucleotide; CTT chr11 5322626 5322647 5322631 5322626 -
agaaggaaaaacctagacaagc

SEQ ID NO: 126817 - DNA, 22 bp, Artificial Sequence
  Synthetic oligonucleotide; TTA chr11 5322625 5322646 5322630 5322625 -
gaaggaaaaacctagacaagct

SEQ ID NO: 126818 - DNA, 22 bp, Artificial Sequence
  Synthetic oligonucleotide; CTA chr11 5322611 5322632 5322616 5322611 -
gacaagcttcttgtcagctcgt

SEQ ID NO: 126819 - DNA, 22 bp, Artificial Sequence
  Synthetic oligonucleotide; CTT chr11 5322602 5322623 5322607 5322602 -
cttgtcagctcgtaaaaaagta

SEQ ID NO: 126820 - DNA, 22 bp, Artificial Sequence
  Synthetic oligonucleotide; TTC chr11 5322601 5322622 5322606 5322601 -
ttgtcagctcgtaaaaaagtaa

SEQ ID NO: 126821 - DNA, 22 bp, Artificial Sequence
  Synthetic oligonucleotide; CTT chr11 5322599 5322620 5322604 5322599 -
gtcagctcgtaaaaaagtaaaa

SEQ ID NO: 126822 - DNA, 22 bp, Artificial Sequence
  Synthetic oligonucleotide; TTG chr11 5322598 5322619 5322603 5322598 -
tcagctcgtaaaaaagtaaaaa

SEQ ID NO: 126823 - DNA, 22 bp, Artificial Sequence
  Synthetic oligonucleotide; CTC chr11 5322591 5322612 5322596 5322591 -
gtaaaaaagtaaaaagtgagtt

SEQ ID NO: 126824 - DNA, 22 bp, Artificial Sequence
  Synthetic oligonucleotide; TTT chr11 5322568 5322589 5322573 5322568 -
ttaagagtatgtttgctcttca

SEQ ID NO: 126825 - DNA, 22 bp, Artificial Sequence
  Synthetic oligonucleotide; TTT chr11 5322567 5322588 5322572 5322567 -
taagagtatgtttgctcttcag

SEQ ID NO: 126826 - DNA, 22 bp, Artificial Sequence
  Synthetic oligonucleotide; TTT chr11 5322566 5322587 5322571 5322566 -
aagagtatgtttgctcttcaga

SEQ ID NO: 126827 - DNA, 22 bp, Artificial Sequence
  Synthetic oligonucleotide; TTA chr11 5322565 5322586 5322570 5322565 -
agagtatgtttgctcttcagat

SEQ ID NO: 126828 - DNA, 22 bp, Artificial Sequence
  Synthetic oligonucleotide; TTT chr11 5322554 5322575 5322559 5322554 -
gctcttcagatgattttaacat

SEQ ID NO: 126829 - DNA, 22 bp, Artificial Sequence
  Synthetic oligonucleotide; TTG chr11 5322553 5322574 5322558 5322553 -
ctcttcagatgattttaacata

SEQ ID NO: 126830 - DNA, 22 bp, Artificial Sequence
  Synthetic oligonucleotide; CTC chr11 5322550 5322571 5322555 5322550 -
ttcagatgattttaacatactt

SEQ ID NO: 126831 - DNA, 22 bp, Artificial Sequence
  Synthetic oligonucleotide; CTT chr11 5322548 5322569 5322553 5322548 -
cagatgattttaacatactttt

SEQ ID NO: 126832 - DNA, 22 bp, Artificial Sequence
  Synthetic oligonucleotide; TTC chr11 5322547 5322568 5322552 5322547 -
agatgattttaacatacttttc

SEQ ID NO: 126833 - DNA, 22 bp, Artificial Sequence
  Synthetic oligonucleotide; TTT chr11 5322538 5322559 5322543 5322538 -
taacatacttttcccttggcct

SEQ ID NO: 126834 - DNA, 22 bp, Artificial Sequence
  Synthetic oligonucleotide; TTT chr11 5322537 5322558 5322542 5322537 -
aacatacttttcccttggccta

SEQ ID NO: 126835 - DNA, 22 bp, Artificial Sequence
  Synthetic oligonucleotide; TTA chr11 5322536 5322557 5322541 5322536 -
acatacttttcccttggcctaa

SEQ ID NO: 126836 - DNA, 22 bp, Artificial Sequence
  Synthetic oligonucleotide; CTT chr11 5322528 5322549 5322533 5322528 -
ttcccttggcctaataatagga

SEQ ID NO: 126837 - DNA, 22 bp, Artificial Sequence
  Synthetic oligonucleotide; TTT chr11 5322527 5322548 5322532 5322527 -
tcccttggcctaataataggaa

SEQ ID NO: 126838 - DNA, 22 bp, Artificial Sequence
  Synthetic oligonucleotide; TTT chr11 5322526 5322547 5322531 5322526 -
cccttggcctaataataggaag

SEQ ID NO: 126839 - DNA, 22 bp, Artificial Sequence
  Synthetic oligonucleotide; TTC chr11 5322525 5322546 5322530 5322525 -
ccttggcctaataataggaagg

SEQ ID NO: 126840 - DNA, 22 bp, Artificial Sequence
  Synthetic oligonucleotide; CTT chr11 5322521 5322542 5322526 5322521 -
ggcctaataataggaagggtca

SEQ ID NO: 126841 - DNA, 22 bp, Artificial Sequence
  Synthetic oligonucleotide; TTG chr11 5322520 5322541 5322525 5322520 -
gcctaataataggaagggtcaa

SEQ ID NO: 126842 - DNA, 22 bp, Artificial Sequence
  Synthetic oligonucleotide; CTA chr11 5322515 5322536 5322520 5322515 -
ataataggaagggtcaaggctc

SEQ ID NO: 126843 - DNA, 22 bp, Artificial Sequence
  Synthetic oligonucleotide; CTC chr11 5322493 5322514 5322498 5322493 -
tattcaaaaatagaaaatatag

SEQ ID NO: 126844 - DNA, 22 bp, Artificial Sequence
  Synthetic oligonucleotide; CTA chr11 5322491 5322512 5322496 5322491 -
ttcaaaaatagaaaatatagcc

SEQ ID NO: 126845 - DNA, 22 bp, Artificial Sequence
  Synthetic oligonucleotide; TTC chr11 5322488 5322509 5322493 5322488 -
aaaaatagaaaatatagccatt

SEQ ID NO: 126846 - DNA, 22 bp, Artificial Sequence
  Synthetic oligonucleotide; TTC chr11 5322465 5322486 5322470 5322465 -
tagaatgaaaaatatgagacat

SEQ ID NO: 126847 - DNA, 22 bp, Artificial Sequence
  Synthetic oligonucleotide; CTA chr11 5322463 5322484 5322468 5322463 -
gaatgaaaaatatgagacatca

SEQ ID NO: 126848 - DNA, 22 bp, Artificial Sequence
  Synthetic oligonucleotide; TTA chr11 5322438 5322459 5322443 5322438 -
cttcacaagttatatatacttt

SEQ ID NO: 126849 - DNA, 22 bp, Artificial Sequence
  Synthetic oligonucleotide; CTT chr11 5322435 5322456 5322440 5322435 -
cacaagttatatatactttata

SEQ ID NO: 126850 - DNA, 22 bp, Artificial Sequence
  Synthetic oligonucleotide; TTC chr11 5322434 5322455 5322439 5322434 -
acaagttatatatactttatat

SEQ ID NO: 126851 - DNA, 22 bp, Artificial Sequence
  Synthetic oligonucleotide; TTA chr11 5322426 5322447 5322431 5322426 -
tatatactttatatatgttcag

SEQ ID NO: 126852 - DNA, 22 bp, Artificial Sequence
  Synthetic oligonucleotide; CTT chr11 5322417 5322438 5322422 5322417 -
tatatatgttcagagggaaaaa

SEQ ID NO: 126853 - DNA, 22 bp, Artificial Sequence
  Synthetic oligonucleotide; TTT chr11 5322416 5322437 5322421 5322416 -
atatatgttcagagggaaaaat

SEQ ID NO: 126854 - DNA, 22 bp, Artificial Sequence
  Synthetic oligonucleotide; TTA chr11 5322415 5322436 5322420 5322415 -
tatatgttcagagggaaaaatt

SEQ ID NO: 126855 - DNA, 22 bp, Artificial Sequence
  Synthetic oligonucleotide; TTC chr11 5322406 5322427 5322411 5322406 -
agagggaaaaattagaaatggt

SEQ ID NO: 126856 - DNA, 22 bp, Artificial Sequence
  Synthetic oligonucleotide; TTA chr11 5322392 5322413 5322397 5322392 -
gaaatggtgattcttttgccat

SEQ ID NO: 126857 - DNA, 22 bp, Artificial Sequence
  Synthetic oligonucleotide; TTC chr11 5322379 5322400 5322384 5322379 -
ttttgccataaatactttctct

SEQ ID NO: 126858 - DNA, 22 bp, Artificial Sequence
  Synthetic oligonucleotide; CTT chr11 5322377 5322398 5322382 5322377 -
ttgccataaatactttctctga

SEQ ID NO: 126859 - DNA, 22 bp, Artificial Sequence
  Synthetic oligonucleotide; TTT chr11 5322376 5322397 5322381 5322376 -
tgccataaatactttctctgac

SEQ ID NO: 126860 - DNA, 22 bp, Artificial Sequence
  Synthetic oligonucleotide; TTT chr11 5322375 5322396 5322380 5322375 -
gccataaatactttctctgaca

SEQ ID NO: 126861 - DNA, 22 bp, Artificial Sequence
  Synthetic oligonucleotide; TTG chr11 5322374 5322395 5322379 5322374 -
ccataaatactttctctgacat

SEQ ID NO: 126862 - DNA, 22 bp, Artificial Sequence
  Synthetic oligonucleotide; CTT chr11 5322362 5322383 5322367 5322362 -
tctctgacatctactgtaaact

SEQ ID NO: 126863 - DNA, 22 bp, Artificial Sequence
  Synthetic oligonucleotide; TTT chr11 5322361 5322382 5322366 5322361 -
ctctgacatctactgtaaactc

SEQ ID NO: 126864 - DNA, 22 bp, Artificial Sequence
  Synthetic oligonucleotide; TTC chr11 5322360 5322381 5322365 5322360 -
tctgacatctactgtaaactct

SEQ ID NO: 126865 - DNA, 22 bp, Artificial Sequence
  Synthetic oligonucleotide; CTC chr11 5322358 5322379 5322363 5322358 -
tgacatctactgtaaactctct

SEQ ID NO: 126866 - DNA, 22 bp, Artificial Sequence
  Synthetic oligonucleotide; CTG chr11 5322356 5322377 5322361 5322356 -
acatctactgtaaactctctat

SEQ ID NO: 126867 - DNA, 22 bp, Artificial Sequence
  Synthetic oligonucleotide; CTA chr11 5322349 5322370 5322354 5322349 -
ctgtaaactctctatattagga

SEQ ID NO: 126868 - DNA, 22 bp, Artificial Sequence
  Synthetic oligonucleotide; CTG chr11 5322346 5322367 5322351 5322346 -
taaactctctatattaggaaga

SEQ ID NO: 126869 - DNA, 22 bp, Artificial Sequence
  Synthetic oligonucleotide; CTC chr11 5322339 5322360 5322344 5322339 -
tctatattaggaagaccaacaa

SEQ ID NO: 126870 - DNA, 22 bp, Artificial Sequence
  Synthetic oligonucleotide; CTC chr11 5322337 5322358 5322342 5322337 -
tatattaggaagaccaacaatg

SEQ ID NO: 126871 - DNA, 22 bp, Artificial Sequence
  Synthetic oligonucleotide; CTA chr11 5322335 5322356 5322340 5322335 -
tattaggaagaccaacaatgtt

SEQ ID NO: 126872 - DNA, 22 bp, Artificial Sequence
  Synthetic oligonucleotide; TTA chr11 5322330 5322351 5322335 5322330 -
ggaagaccaacaatgttgagag

SEQ ID NO: 126873 - DNA, 22 bp, Artificial Sequence
  Synthetic oligonucleotide; TTG chr11 5322312 5322333 5322317 5322312 -
agagaaatggatttcaattcat

SEQ ID NO: 126874 - DNA, 22 bp, Artificial Sequence
  Synthetic oligonucleotide; TTT chr11 5322298 5322319 5322303 5322298 -
caattcatccaatgactaaaaa

SEQ ID NO: 126875 - DNA, 22 bp, Artificial Sequence
  Synthetic oligonucleotide; TTC chr11 5322297 5322318 5322302 5322297 -
aattcatccaatgactaaaaaa

SEQ ID NO: 126876 - DNA, 22 bp, Artificial Sequence
  Synthetic oligonucleotide; TTC chr11 5322292 5322313 5322297 5322292 -
atccaatgactaaaaaattgtg

SEQ ID NO: 126877 - DNA, 22 bp, Artificial Sequence
  Synthetic oligonucleotide; CTA chr11 5322280 5322301 5322285 5322280 -
aaaaattgtggtgggaggagtt

SEQ ID NO: 126878 - DNA, 22 bp, Artificial Sequence
  Synthetic oligonucleotide; TTG chr11 5322272 5322293 5322277 5322272 -
tggtgggaggagtttttgtgtg

SEQ ID NO: 126879 - DNA, 22 bp, Artificial Sequence
  Synthetic oligonucleotide; TTT chr11 5322257 5322278 5322262 5322257 -
ttgtgtgactgtgtactaaaag

SEQ ID NO: 126880 - DNA, 22 bp, Artificial Sequence
  Synthetic oligonucleotide; TTT chr11 5322256 5322277 5322261 5322256 -
tgtgtgactgtgtactaaaagc

SEQ ID NO: 126881 - DNA, 22 bp, Artificial Sequence
  Synthetic oligonucleotide; TTT chr11 5322255 5322276 5322260 5322255 -
gtgtgactgtgtactaaaagct

SEQ ID NO: 126882 - DNA, 22 bp, Artificial Sequence
  Synthetic oligonucleotide; TTG chr11 5322254 5322275 5322259 5322254 -
tgtgactgtgtactaaaagctt

SEQ ID NO: 126883 - DNA, 22 bp, Artificial Sequence
  Synthetic oligonucleotide; CTG chr11 5322246 5322267 5322251 5322246 -
tgtactaaaagcttcttttaga

SEQ ID NO: 126884 - DNA, 22 bp, Artificial Sequence
  Synthetic oligonucleotide; CTA chr11 5322239 5322260 5322244 5322239 -
aaagcttcttttagactgattt

SEQ ID NO: 126885 - DNA, 22 bp, Artificial Sequence
  Synthetic oligonucleotide; CTT chr11 5322232 5322253 5322237 5322232 -
cttttagactgatttaattgtg

SEQ ID NO: 126886 - DNA, 22 bp, Artificial Sequence
  Synthetic oligonucleotide; TTC chr11 5322231 5322252 5322236 5322231 -
ttttagactgatttaattgtga

SEQ ID NO: 126887 - DNA, 22 bp, Artificial Sequence
  Synthetic oligonucleotide; CTT chr11 5322229 5322250 5322234 5322229 -
ttagactgatttaattgtgaaa

SEQ ID NO: 126888 - DNA, 22 bp, Artificial Sequence
  Synthetic oligonucleotide; TTT chr11 5322228 5322249 5322233 5322228 -
tagactgatttaattgtgaaac

SEQ ID NO: 126889 - DNA, 22 bp, Artificial Sequence
  Synthetic oligonucleotide; TTT chr11 5322227 5322248 5322232 5322227 -
agactgatttaattgtgaaaca

SEQ ID NO: 126890 - DNA, 22 bp, Artificial Sequence
  Synthetic oligonucleotide; TTA chr11 5322226 5322247 5322231 5322226 -
gactgatttaattgtgaaacag

SEQ ID NO: 126891 - DNA, 22 bp, Artificial Sequence
  Synthetic oligonucleotide; CTG chr11 5322221 5322242 5322226 5322221 -
atttaattgtgaaacaggattt

SEQ ID NO: 126892 - DNA, 22 bp, Artificial Sequence
  Synthetic oligonucleotide; TTT chr11 5322217 5322238 5322222 5322217 -
aattgtgaaacaggattttcat

SEQ ID NO: 126893 - DNA, 22 bp, Artificial Sequence
  Synthetic oligonucleotide; TTA chr11 5322216 5322237 5322221 5322216 -
attgtgaaacaggattttcatc

SEQ ID NO: 126894 - DNA, 22 bp, Artificial Sequence
  Synthetic oligonucleotide; TTG chr11 5322212 5322233 5322217 5322212 -
tgaaacaggattttcatccaca

SEQ ID NO: 126895 - DNA, 22 bp, Artificial Sequence
  Synthetic oligonucleotide; TTT chr11 5322199 5322220 5322204 5322199 -
tcatccacaaatttcaaaaggg

SEQ ID NO: 126896 - DNA, 22 bp, Artificial Sequence
  Synthetic oligonucleotide; TTT chr11 5322198 5322219 5322203 5322198 -
catccacaaatttcaaaagggg

SEQ ID NO: 126897 - DNA, 22 bp, Artificial Sequence
  Synthetic oligonucleotide; TTC chr11 5322197 5322218 5322202 5322197 -
atccacaaatttcaaaagggga

SEQ ID NO: 126898 - DNA, 22 bp, Artificial Sequence
  Synthetic oligonucleotide; TTT chr11 5322185 5322206 5322190 5322185 -
caaaaggggaaaacctatctca

SEQ ID NO: 126899 - DNA, 22 bp, Artificial Sequence
  Synthetic oligonucleotide; TTC chr11 5322184 5322205 5322189 5322184 -
aaaaggggaaaacctatctcag

SEQ ID NO: 126900 - DNA, 22 bp, Artificial Sequence
  Synthetic oligonucleotide; CTA chr11 5322168 5322189 5322173 5322168 -
tctcagagtataatgttcaagt

SEQ ID NO: 126901 - DNA, 22 bp, Artificial Sequence
  Synthetic oligonucleotide; CTC chr11 5322164 5322185 5322169 5322164 -
agagtataatgttcaagttatt

SEQ ID NO: 126902 - DNA, 22 bp, Artificial Sequence
  Synthetic oligonucleotide; TTC chr11 5322150 5322171 5322155 5322150 -
aagttattgatgctgaatataa

SEQ ID NO: 126903 - DNA, 22 bp, Artificial Sequence
  Synthetic oligonucleotide; TTA chr11 5322144 5322165 5322149 5322144 -
ttgatgctgaatataaactcaa

SEQ ID NO: 126904 - DNA, 22 bp, Artificial Sequence
  Synthetic oligonucleotide; TTG chr11 5322141 5322162 5322146 5322141 -
atgctgaatataaactcaaatc

SEQ ID NO: 126905 - DNA, 22 bp, Artificial Sequence
  Synthetic oligonucleotide; CTG chr11 5322135 5322156 5322140 5322135 -
aatataaactcaaatcctaaaa

SEQ ID NO: 126906 - DNA, 22 bp, Artificial Sequence
  Synthetic oligonucleotide; CTC chr11 5322124 5322145 5322129 5322124 -
aaatcctaaaagtcagttatct

SEQ ID NO: 126907 - DNA, 22 bp, Artificial Sequence
  Synthetic oligonucleotide; CTA chr11 5322116 5322137 5322121 5322116 -
aaagtcagttatctaccaaaga

SEQ ID NO: 126908 - DNA, 22 bp, Artificial Sequence
  Synthetic oligonucleotide; TTA chr11 5322105 5322126 5322110 5322105 -
tctaccaaagactttctctgtt

SEQ ID NO: 126909 - DNA, 22 bp, Artificial Sequence
  Synthetic oligonucleotide; CTA chr11 5322101 5322122 5322106 5322101 -
ccaaagactttctctgttcctt

SEQ ID NO: 126910 - DNA, 22 bp, Artificial Sequence
  Synthetic oligonucleotide; CTT chr11 5322091 5322112 5322096 5322091 -
tctctgttccttatatgtgacc

SEQ ID NO: 126911 - DNA, 22 bp, Artificial Sequence
  Synthetic oligonucleotide; TTT chr11 5322090 5322111 5322095 5322090 -
ctctgttccttatatgtgacca

SEQ ID NO: 126912 - DNA, 22 bp, Artificial Sequence
  Synthetic oligonucleotide; TTC chr11 5322089 5322110 5322094 5322089 -
tctgttccttatatgtgaccat

SEQ ID NO: 126913 - DNA, 22 bp, Artificial Sequence
  Synthetic oligonucleotide; CTC chr11 5322087 5322108 5322092 5322087 -
tgttccttatatgtgaccatga

SEQ ID NO: 126914 - DNA, 22 bp, Artificial Sequence
  Synthetic oligonucleotide; CTG chr11 5322085 5322106 5322090 5322085 -
ttccttatatgtgaccatgagg

SEQ ID NO: 126915 - DNA, 22 bp, Artificial Sequence
  Synthetic oligonucleotide; TTC chr11 5322082 5322103 5322087 5322082 -
cttatatgtgaccatgaggtct

SEQ ID NO: 126916 - DNA, 22 bp, Artificial Sequence
  Synthetic oligonucleotide; CTT chr11 5322079 5322100 5322084 5322079 -
atatgtgaccatgaggtctata

SEQ ID NO: 126917 - DNA, 22 bp, Artificial Sequence
  Synthetic oligonucleotide; TTA chr11 5322078 5322099 5322083 5322078 -
tatgtgaccatgaggtctataa

SEQ ID NO: 126918 - DNA, 22 bp, Artificial Sequence
  Synthetic oligonucleotide; CTA chr11 5322059 5322080 5322064 5322059 -
taatacatctaggcatcttaat

SEQ ID NO: 126919 - DNA, 22 bp, Artificial Sequence
  Synthetic oligonucleotide; CTA chr11 5322048 5322069 5322053 5322048 -
ggcatcttaatggaaaaatctc

SEQ ID NO: 126920 - DNA, 22 bp, Artificial Sequence
  Synthetic oligonucleotide; CTT chr11 5322040 5322061 5322045 5322040 -
aatggaaaaatctcatttcgga

SEQ ID NO: 126921 - DNA, 22 bp, Artificial Sequence
  Synthetic oligonucleotide; TTA chr11 5322039 5322060 5322044 5322039 -
atggaaaaatctcatttcggat

SEQ ID NO: 126922 - DNA, 22 bp, Artificial Sequence
  Synthetic oligonucleotide; CTC chr11 5322026 5322047 5322031 5322026 -
atttcggataattcccatcttg

SEQ ID NO: 126923 - DNA, 22 bp, Artificial Sequence
  Synthetic oligonucleotide; TTT chr11 5322022 5322043 5322027 5322022 -
cggataattcccatcttgattt

SEQ ID NO: 126924 - DNA, 22 bp, Artificial Sequence
  Synthetic oligonucleotide; TTC chr11 5322021 5322042 5322026 5322021 -
ggataattcccatcttgatttg

SEQ ID NO: 126925 - DNA, 22 bp, Artificial Sequence
  Synthetic oligonucleotide; TTC chr11 5322012 5322033 5322017 5322012 -
ccatcttgatttgctatcttga

SEQ ID NO: 126926 - DNA, 22 bp, Artificial Sequence
  Synthetic oligonucleotide; CTT chr11 5322005 5322026 5322010 5322005 -
gatttgctatcttgatgcagaa

SEQ ID NO: 126927 - DNA, 22 bp, Artificial Sequence
  Synthetic oligonucleotide; TTG chr11 5322004 5322025 5322009 5322004 -
atttgctatcttgatgcagaac

SEQ ID NO: 126928 - DNA, 22 bp, Artificial Sequence
  Synthetic oligonucleotide; TTT chr11 5322000 5322021 5322005 5322000 -
gctatcttgatgcagaacctct

SEQ ID NO: 126929 - DNA, 22 bp, Artificial Sequence
  Synthetic oligonucleotide; TTG chr11 5321999 5322020 5322004 5321999 -
ctatcttgatgcagaacctctt

SEQ ID NO: 126930 - DNA, 22 bp, Artificial Sequence
  Synthetic oligonucleotide; CTA chr11 5321996 5322017 5322001 5321996 -
tcttgatgcagaacctcttgta

SEQ ID NO: 126931 - DNA, 22 bp, Artificial Sequence
  Synthetic oligonucleotide; CTT chr11 5321992 5322013 5321997 5321992 -
gatgcagaacctcttgtagctg

SEQ ID NO: 126932 - DNA, 22 bp, Artificial Sequence
  Synthetic oligonucleotide; TTG chr11 5321991 5322012 5321996 5321991 -
atgcagaacctcttgtagctga

SEQ ID NO: 126933 - DNA, 22 bp, Artificial Sequence
  Synthetic oligonucleotide; CTC chr11 5321979 5322000 5321984 5321979 -
ttgtagctgaggaaagcctgcc

SEQ ID NO: 126934 - DNA, 22 bp, Artificial Sequence
  Synthetic oligonucleotide; CTT chr11 5321977 5321998 5321982 5321977 -
gtagctgaggaaagcctgcctt

SEQ ID NO: 126935 - DNA, 22 bp, Artificial Sequence
  Synthetic oligonucleotide; TTG chr11 5321976 5321997 5321981 5321976 -
tagctgaggaaagcctgccttt

SEQ ID NO: 126936 - DNA, 22 bp, Artificial Sequence
  Synthetic oligonucleotide; CTG chr11 5321970 5321991 5321975 5321970 -
aggaaagcctgcctttgtttcc

SEQ ID NO: 126937 - DNA, 22 bp, Artificial Sequence
  Synthetic oligonucleotide; CTG chr11 5321959 5321980 5321964 5321959 -
cctttgtttcccatctttgtag

SEQ ID NO: 126938 - DNA, 22 bp, Artificial Sequence
  Synthetic oligonucleotide; CTT chr11 5321955 5321976 5321960 5321955 -
tgtttcccatctttgtagaaca

SEQ ID NO: 126939 - DNA, 22 bp, Artificial Sequence
  Synthetic oligonucleotide; TTT chr11 5321954 5321975 5321959 5321954 -
gtttcccatctttgtagaacag

SEQ ID NO: 126940 - DNA, 22 bp, Artificial Sequence
  Synthetic oligonucleotide; TTG chr11 5321953 5321974 5321958 5321953 -
tttcccatctttgtagaacaga

SEQ ID NO: 126941 - DNA, 22 bp, Artificial Sequence
  Synthetic oligonucleotide; TTT chr11 5321950 5321971 5321955 5321950 -
cccatctttgtagaacagaagc

SEQ ID NO: 126942 - DNA, 22 bp, Artificial Sequence
  Synthetic oligonucleotide; TTC chr11 5321949 5321970 5321954 5321949 -
ccatctttgtagaacagaagct

SEQ ID NO: 126943 - DNA, 22 bp, Artificial Sequence
  Synthetic oligonucleotide; CTT chr11 5321942 5321963 5321947 5321942 -
tgtagaacagaagctgtgggac

SEQ ID NO: 126944 - DNA, 22 bp, Artificial Sequence
  Synthetic oligonucleotide; TTT chr11 5321941 5321962 5321946 5321941 -
gtagaacagaagctgtgggaca

SEQ ID NO: 126945 - DNA, 22 bp, Artificial Sequence
  Synthetic oligonucleotide; TTG chr11 5321940 5321961 5321945 5321940 -
tagaacagaagctgtgggacat

SEQ ID NO: 126946 - DNA, 22 bp, Artificial Sequence
  Synthetic oligonucleotide; CTG chr11 5321926 5321947 5321931 5321926 -
tgggacatcacaagttgctgtg

SEQ ID NO: 126947 - DNA, 22 bp, Artificial Sequence
  Synthetic oligonucleotide; TTG chr11 5321909 5321930 5321914 5321909 -
ctgtggtaatcacaagttactg

SEQ ID NO: 126948 - DNA, 22 bp, Artificial Sequence
  Synthetic oligonucleotide; CTG chr11 5321906 5321927 5321911 5321906 -
tggtaatcacaagttactgcga

SEQ ID NO: 126949 - DNA, 22 bp, Artificial Sequence
  Synthetic oligonucleotide; TTA chr11 5321890 5321911 5321895 5321890 -
ctgcgatattatatccccatct

SEQ ID NO: 126950 - DNA, 22 bp, Artificial Sequence
  Synthetic oligonucleotide; CTG chr11 5321887 5321908 5321892 5321887 -
cgatattatatccccatctgat

SEQ ID NO: 126951 - DNA, 22 bp, Artificial Sequence
  Synthetic oligonucleotide; TTA chr11 5321879 5321900 5321884 5321879 -
tatccccatctgatatctaaat

SEQ ID NO: 126952 - DNA, 22 bp, Artificial Sequence
  Synthetic oligonucleotide; CTG chr11 5321867 5321888 5321872 5321867 -
atatctaaattttgaggatagg

SEQ ID NO: 126953 - DNA, 22 bp, Artificial Sequence
  Synthetic oligonucleotide; CTA chr11 5321860 5321881 5321865 5321860 -
aattttgaggataggctatctg

SEQ ID NO: 126954 - DNA, 22 bp, Artificial Sequence
  Synthetic oligonucleotide; TTT chr11 5321855 5321876 5321860 5321855 -
tgaggataggctatctgtttta

SEQ ID NO: 126955 - DNA, 22 bp, Artificial Sequence
  Synthetic oligonucleotide; TTT chr11 5321854 5321875 5321859 5321854 -
gaggataggctatctgttttac

SEQ ID NO: 126956 - DNA, 22 bp, Artificial Sequence
  Synthetic oligonucleotide; TTG chr11 5321853 5321874 5321858 5321853 -
aggataggctatctgttttaca

SEQ ID NO: 126957 - DNA, 22 bp, Artificial Sequence
  Synthetic oligonucleotide; CTA chr11 5321842 5321863 5321847 5321842 -
tctgttttacagtgatacattt

SEQ ID NO: 126958 - DNA, 22 bp, Artificial Sequence
  Synthetic oligonucleotide; CTG chr11 5321838 5321859 5321843 5321838 -
ttttacagtgatacatttgatg

SEQ ID NO: 126959 - DNA, 22 bp, Artificial Sequence
  Synthetic oligonucleotide; TTT chr11 5321835 5321856 5321840 5321835 -
tacagtgatacatttgatggaa

SEQ ID NO: 126960 - DNA, 22 bp, Artificial Sequence
  Synthetic oligonucleotide; TTT chr11 5321834 5321855 5321839 5321834 -
acagtgatacatttgatggaag

SEQ ID NO: 126961 - DNA, 22 bp, Artificial Sequence
  Synthetic oligonucleotide; TTA chr11 5321833 5321854 5321838 5321833 -
cagtgatacatttgatggaagg

SEQ ID NO: 126962 - DNA, 22 bp, Artificial Sequence
  Synthetic oligonucleotide; TTT chr11 5321820 5321841 5321825 5321820 -
gatggaaggactcttagtttaa

SEQ ID NO: 126963 - DNA, 22 bp, Artificial Sequence
  Synthetic oligonucleotide; TTG chr11 5321819 5321840 5321824 5321819 -
atggaaggactcttagtttaac

SEQ ID NO: 126964 - DNA, 22 bp, Artificial Sequence
  Synthetic oligonucleotide; CTC chr11 5321807 5321828 5321812 5321807 -
ttagtttaactggccaaggcca

SEQ ID NO: 126965 - DNA, 22 bp, Artificial Sequence
  Synthetic oligonucleotide; CTT chr11 5321805 5321826 5321810 5321805 -
agtttaactggccaaggccagg

SEQ ID NO: 126966 - DNA, 22 bp, Artificial Sequence
  Synthetic oligonucleotide; TTA chr11 5321804 5321825 5321809 5321804 -
gtttaactggccaaggccagga

SEQ ID NO: 126967 - DNA, 22 bp, Artificial Sequence
  Synthetic oligonucleotide; TTT chr11 5321800 5321821 5321805 5321800 -
aactggccaaggccaggacttc

SEQ ID NO: 126968 - DNA, 22 bp, Artificial Sequence
  Synthetic oligonucleotide; TTA chr11 5321799 5321820 5321804 5321799 -
actggccaaggccaggacttca

SEQ ID NO: 126969 - DNA, 22 bp, Artificial Sequence
  Synthetic oligonucleotide; CTG chr11 5321795 5321816 5321800 5321795 -
gccaaggccaggacttcaagcc

SEQ ID NO: 126970 - DNA, 22 bp, Artificial Sequence
  Synthetic oligonucleotide; CTT chr11 5321779 5321800 5321784 5321779 -
caagccatagtttaattacctg

SEQ ID NO: 126971 - DNA, 22 bp, Artificial Sequence
  Synthetic oligonucleotide; TTC chr11 5321778 5321799 5321783 5321778 -
aagccatagtttaattacctgc

SEQ ID NO: 126972 - DNA, 22 bp, Artificial Sequence
  Synthetic oligonucleotide; TTT chr11 5321766 5321787 5321771 5321766 -
aattacctgccacatgtgtgag

SEQ ID NO: 126973 - DNA, 22 bp, Artificial Sequence
  Synthetic oligonucleotide; TTA chr11 5321765 5321786 5321770 5321765 -
attacctgccacatgtgtgaga

SEQ ID NO: 126974 - DNA, 22 bp, Artificial Sequence
  Synthetic oligonucleotide; TTA chr11 5321761 5321782 5321766 5321761 -
cctgccacatgtgtgagaaata

SEQ ID NO: 126975 - DNA, 22 bp, Artificial Sequence
  Synthetic oligonucleotide; CTG chr11 5321757 5321778 5321762 5321757 -
ccacatgtgtgagaaataagga

SEQ ID NO: 126976 - DNA, 22 bp, Artificial Sequence
  Synthetic oligonucleotide; TTT chr11 5321730 5321751 5321735 5321730 -
caaaccatgatggagcagcatc

SEQ ID NO: 126977 - DNA, 22 bp, Artificial Sequence
  Synthetic oligonucleotide; TTC chr11 5321729 5321750 5321734 5321729 -
aaaccatgatggagcagcatca

SEQ ID NO: 126978 - DNA, 22 bp, Artificial Sequence
  Synthetic oligonucleotide; CTG chr11 5321704 5321725 5321709 5321704 -
gcatgccttttgtgtatatggt

SEQ ID NO: 126979 - DNA, 22 bp, Artificial Sequence
  Synthetic oligonucleotide; CTT chr11 5321695 5321716 5321700 5321695 -
ttgtgtatatggtgggttgagg

SEQ ID NO: 126980 - DNA, 22 bp, Artificial Sequence
  Synthetic oligonucleotide; TTT chr11 5321694 5321715 5321699 5321694 -
tgtgtatatggtgggttgagga

SEQ ID NO: 126981 - DNA, 22 bp, Artificial Sequence
  Synthetic oligonucleotide; TTT chr11 5321693 5321714 5321698 5321693 -
gtgtatatggtgggttgaggat

SEQ ID NO: 126982 - DNA, 22 bp, Artificial Sequence
  Synthetic oligonucleotide; TTG chr11 5321692 5321713 5321697 5321692 -
tgtatatggtgggttgaggata

SEQ ID NO: 126983 - DNA, 22 bp, Artificial Sequence
  Synthetic oligonucleotide; TTG chr11 5321676 5321697 5321681 5321676 -
aggatatggcaatattgcagcc

SEQ ID NO: 126984 - DNA, 22 bp, Artificial Sequence
  Synthetic oligonucleotide; TTG chr11 5321659 5321680 5321664 5321659 -
cagcctcactgaataggtataa

SEQ ID NO: 126985 - DNA, 22 bp, Artificial Sequence
  Synthetic oligonucleotide; CTC chr11 5321652 5321673 5321657 5321652 -
actgaataggtataaggaggtg

SEQ ID NO: 126986 - DNA, 22 bp, Artificial Sequence
  Synthetic oligonucleotide; CTG chr11 5321648 5321669 5321653 5321648 -
aataggtataaggaggtgctta

SEQ ID NO: 126987 - DNA, 22 bp, Artificial Sequence
  Synthetic oligonucleotide; CTT chr11 5321627 5321648 5321632 5321627 -
actttggataagcagtgttgtt

SEQ ID NO: 126988 - DNA, 22 bp, Artificial Sequence
  Synthetic oligonucleotide; TTA chr11 5321626 5321647 5321631 5321626 -
ctttggataagcagtgttgttt

SEQ ID NO: 126989 - DNA, 22 bp, Artificial Sequence
  Synthetic oligonucleotide; CTT chr11 5321623 5321644 5321628 5321623 -
tggataagcagtgttgtttcca

SEQ ID NO: 126990 - DNA, 22 bp, Artificial Sequence
  Synthetic oligonucleotide; TTT chr11 5321622 5321643 5321627 5321622 -
ggataagcagtgttgtttccaa

SEQ ID NO: 126991 - DNA, 22 bp, Artificial Sequence
  Synthetic oligonucleotide; TTG chr11 5321621 5321642 5321626 5321621 -
gataagcagtgttgtttccaag

SEQ ID NO: 126992 - DNA, 22 bp, Artificial Sequence
  Synthetic oligonucleotide; TTG chr11 5321607 5321628 5321612 5321607 -
tttccaagatgaaagaagccca

SEQ ID NO: 126993 - DNA, 22 bp, Artificial Sequence
  Synthetic oligonucleotide; TTT chr11 5321604 5321625 5321609 5321604 -
ccaagatgaaagaagcccaaat

SEQ ID NO: 126994 - DNA, 22 bp, Artificial Sequence
  Synthetic oligonucleotide; TTC chr11 5321603 5321624 5321608 5321603 -
caagatgaaagaagcccaaatt

SEQ ID NO: 126995 - DNA, 22 bp, Artificial Sequence
  Synthetic oligonucleotide; TTA chr11 5321580 5321601 5321585 5321580 -
ttgggaaatatgtttattatta

SEQ ID NO: 126996 - DNA, 22 bp, Artificial Sequence
  Synthetic oligonucleotide; TTG chr11 5321577 5321598 5321582 5321577 -
ggaaatatgtttattattaatg

SEQ ID NO: 126997 - DNA, 22 bp, Artificial Sequence
  Synthetic oligonucleotide; TTT chr11 5321565 5321586 5321570 5321565 -
attattaatgacgttgtcctta

SEQ ID NO: 126998 - DNA, 22 bp, Artificial Sequence
  Synthetic oligonucleotide; TTA chr11 5321564 5321585 5321569 5321564 -
ttattaatgacgttgtccttaa

SEQ ID NO: 126999 - DNA, 22 bp, Artificial Sequence
  Synthetic oligonucleotide; TTA chr11 5321561 5321582 5321566 5321561 -
ttaatgacgttgtccttaaact

SEQ ID NO: 127000 - DNA, 22 bp, Artificial Sequence
  Synthetic oligonucleotide; TTA chr11 5321558 5321579 5321563 5321558 -
atgacgttgtccttaaactggt

SEQ ID NO: 127001 - DNA, 22 bp, Artificial Sequence
  Synthetic oligonucleotide; TTG chr11 5321549 5321570 5321554 5321549 -
tccttaaactggtttagacgtt

SEQ ID NO: 127002 - DNA, 22 bp, Artificial Sequence
  Synthetic oligonucleotide; CTT chr11 5321544 5321565 5321549 5321544 -
aaactggtttagacgttgaatt

SEQ ID NO: 127003 - DNA, 22 bp, Artificial Sequence
  Synthetic oligonucleotide; TTA chr11 5321543 5321564 5321548 5321543 -
aactggtttagacgttgaattc

SEQ ID NO: 127004 - DNA, 22 bp, Artificial Sequence
  Synthetic oligonucleotide; CTG chr11 5321538 5321559 5321543 5321538 -
gtttagacgttgaattctctgt

SEQ ID NO: 127005 - DNA, 22 bp, Artificial Sequence
  Synthetic oligonucleotide; TTT chr11 5321534 5321555 5321539 5321534 -
agacgttgaattctctgttctt

SEQ ID NO: 127006 - DNA, 22 bp, Artificial Sequence
  Synthetic oligonucleotide; TTA chr11 5321533 5321554 5321538 5321533 -
gacgttgaattctctgttcttg

SEQ ID NO: 127007 - DNA, 22 bp, Artificial Sequence
  Synthetic oligonucleotide; TTG chr11 5321526 5321547 5321531 5321526 -
aattctctgttcttggtgcctt

SEQ ID NO: 127008 - DNA, 22 bp, Artificial Sequence
  Synthetic oligonucleotide; TTC chr11 5321521 5321542 5321526 5321521 -
tctgttcttggtgccttcatgg

SEQ ID NO: 127009 - DNA, 22 bp, Artificial Sequence
  Synthetic oligonucleotide; CTC chr11 5321519 5321540 5321524 5321519 -
tgttcttggtgccttcatggtt

SEQ ID NO: 127010 - DNA, 22 bp, Artificial Sequence
  Synthetic oligonucleotide; CTG chr11 5321517 5321538 5321522 5321517 -
ttcttggtgccttcatggttgt

SEQ ID NO: 127011 - DNA, 22 bp, Artificial Sequence
  Synthetic oligonucleotide; TTC chr11 5321514 5321535 5321519 5321514 -
ttggtgccttcatggttgttta

SEQ ID NO: 127012 - DNA, 22 bp, Artificial Sequence
  Synthetic oligonucleotide; CTT chr11 5321512 5321533 5321517 5321512 -
ggtgccttcatggttgtttaaa

SEQ ID NO: 127013 - DNA, 22 bp, Artificial Sequence
  Synthetic oligonucleotide; TTG chr11 5321511 5321532 5321516 5321511 -
gtgccttcatggttgtttaaag

SEQ ID NO: 127014 - DNA, 22 bp, Artificial Sequence
  Synthetic oligonucleotide; CTT chr11 5321504 5321525 5321509 5321504 -
catggttgtttaaagaaaatat

SEQ ID NO: 127015 - DNA, 22 bp, Artificial Sequence
  Synthetic oligonucleotide; TTC chr11 5321503 5321524 5321508 5321503 -
atggttgtttaaagaaaatatt

SEQ ID NO: 127016 - DNA, 22 bp, Artificial Sequence
  Synthetic oligonucleotide; TTG chr11 5321496 5321517 5321501 5321496 -
tttaaagaaaatatttttcaaa

SEQ ID NO: 127017 - DNA, 22 bp, Artificial Sequence
  Synthetic oligonucleotide; TTT chr11 5321493 5321514 5321498 5321493 -
aaagaaaatatttttcaaattg

SEQ ID NO: 127018 - DNA, 22 bp, Artificial Sequence
  Synthetic oligonucleotide; TTA chr11 5321492 5321513 5321497 5321492 -
aagaaaatatttttcaaattga

SEQ ID NO: 127019 - DNA, 22 bp, Artificial Sequence
  Synthetic oligonucleotide; TTT chr11 5321480 5321501 5321485 5321480 -
ttcaaattgattctaagagggt

SEQ ID NO: 127020 - DNA, 22 bp, Artificial Sequence
  Synthetic oligonucleotide; TTT chr11 5321479 5321500 5321484 5321479 -
tcaaattgattctaagagggtg

SEQ ID NO: 127021 - DNA, 22 bp, Artificial Sequence
  Synthetic oligonucleotide; TTT chr11 5321478 5321499 5321483 5321478 -
caaattgattctaagagggtga

SEQ ID NO: 127022 - DNA, 22 bp, Artificial Sequence
  Synthetic oligonucleotide; TTC chr11 5321477 5321498 5321482 5321477 -
aaattgattctaagagggtgat

SEQ ID NO: 127023 - DNA, 22 bp, Artificial Sequence
  Synthetic oligonucleotide; TTG chr11 5321471 5321492 5321476 5321471 -
attctaagagggtgatctgaat

SEQ ID NO: 127024 - DNA, 22 bp, Artificial Sequence
  Synthetic oligonucleotide; TTC chr11 5321467 5321488 5321472 5321467 -
taagagggtgatctgaatccac

SEQ ID NO: 127025 - DNA, 22 bp, Artificial Sequence
  Synthetic oligonucleotide; CTA chr11 5321465 5321486 5321470 5321465 -
agagggtgatctgaatccacta

SEQ ID NO: 127026 - DNA, 22 bp, Artificial Sequence
  Synthetic oligonucleotide; CTG chr11 5321452 5321473 5321457 5321452 -
aatccactagcattttatttca

SEQ ID NO: 127027 - DNA, 22 bp, Artificial Sequence
  Synthetic oligonucleotide; CTA chr11 5321443 5321464 5321448 5321443 -
gcattttatttcattgagactt

SEQ ID NO: 127028 - DNA, 22 bp, Artificial Sequence
  Synthetic oligonucleotide; TTT chr11 5321437 5321458 5321442 5321437 -
tatttcattgagacttttcatc

SEQ ID NO: 127029 - DNA, 22 bp, Artificial Sequence
  Synthetic oligonucleotide; TTT chr11 5321436 5321457 5321441 5321436 -
atttcattgagacttttcatct

SEQ ID NO: 127030 - DNA, 22 bp, Artificial Sequence
  Synthetic oligonucleotide; TTA chr11 5321435 5321456 5321440 5321435 -
tttcattgagacttttcatctt

SEQ ID NO: 127031 - DNA, 22 bp, Artificial Sequence
  Synthetic oligonucleotide; TTT chr11 5321432 5321453 5321437 5321432 -
cattgagacttttcatctttta

SEQ ID NO: 127032 - DNA, 22 bp, Artificial Sequence
  Synthetic oligonucleotide; TTC chr11 5321431 5321452 5321436 5321431 -
attgagacttttcatcttttac

SEQ ID NO: 127033 - DNA, 22 bp, Artificial Sequence
  Synthetic oligonucleotide; TTG chr11 5321427 5321448 5321432 5321427 -
agacttttcatcttttacatag

SEQ ID NO: 127034 - DNA, 22 bp, Artificial Sequence
  Synthetic oligonucleotide; CTT chr11 5321421 5321442 5321426 5321421 -
ttcatcttttacatagaaggaa

SEQ ID NO: 127035 - DNA, 22 bp, Artificial Sequence
  Synthetic oligonucleotide; TTT chr11 5321420 5321441 5321425 5321420 -
tcatcttttacatagaaggaaa

SEQ ID NO: 127036 - DNA, 22 bp, Artificial Sequence
  Synthetic oligonucleotide; TTT chr11 5321419 5321440 5321424 5321419 -
catcttttacatagaaggaaac

SEQ ID NO: 127037 - DNA, 22 bp, Artificial Sequence
  Synthetic oligonucleotide; TTC chr11 5321418 5321439 5321423 5321418 -
atcttttacatagaaggaaact

SEQ ID NO: 127038 - DNA, 22 bp, Artificial Sequence
  Synthetic oligonucleotide; CTT chr11 5321413 5321434 5321418 5321413 -
ttacatagaaggaaactaagtt

SEQ ID NO: 127039 - DNA, 22 bp, Artificial Sequence
  Synthetic oligonucleotide; TTT chr11 5321412 5321433 5321417 5321412 -
tacatagaaggaaactaagtta

SEQ ID NO: 127040 - DNA, 22 bp, Artificial Sequence
  Synthetic oligonucleotide; TTT chr11 5321411 5321432 5321416 5321411 -
acatagaaggaaactaagttat

SEQ ID NO: 127041 - DNA, 22 bp, Artificial Sequence
  Synthetic oligonucleotide; TTA chr11 5321410 5321431 5321415 5321410 -
catagaaggaaactaagttatt

SEQ ID NO: 127042 - DNA, 22 bp, Artificial Sequence
  Synthetic oligonucleotide; CTA chr11 5321395 5321416 5321400 5321395 -
agttattagtgctctgaaatat

SEQ ID NO: 127043 - DNA, 22 bp, Artificial Sequence
  Synthetic oligonucleotide; TTA chr11 5321390 5321411 5321395 5321390 -
ttagtgctctgaaatatcaact

SEQ ID NO: 127044 - DNA, 22 bp, Artificial Sequence
  Synthetic oligonucleotide; TTA chr11 5321387 5321408 5321392 5321387 -
gtgctctgaaatatcaactttc

SEQ ID NO: 127045 - DNA, 22 bp, Artificial Sequence
  Synthetic oligonucleotide; CTC chr11 5321381 5321402 5321386 5321381 -
tgaaatatcaactttcatgata

SEQ ID NO: 127046 - DNA, 22 bp, Artificial Sequence
  Synthetic oligonucleotide; CTG chr11 5321379 5321400 5321384 5321379 -
aaatatcaactttcatgataaa

SEQ ID NO: 127047 - DNA, 22 bp, Artificial Sequence
  Synthetic oligonucleotide; CTT chr11 5321367 5321388 5321372 5321367 -
tcatgataaaagatacacagtc

SEQ ID NO: 127048 - DNA, 22 bp, Artificial Sequence
  Synthetic oligonucleotide; TTT chr11 5321366 5321387 5321371 5321366 -
catgataaaagatacacagtcc

SEQ ID NO: 127049 - DNA, 22 bp, Artificial Sequence
  Synthetic oligonucleotide; TTC chr11 5321365 5321386 5321370 5321365 -
atgataaaagatacacagtccc

SEQ ID NO: 127050 - DNA, 22 bp, Artificial Sequence
  Synthetic oligonucleotide; CTT chr11 5321341 5321362 5321346 5321341 -
ctgagggcacaagccaatactt

SEQ ID NO: 127051 - DNA, 22 bp, Artificial Sequence
  Synthetic oligonucleotide; TTC chr11 5321340 5321361 5321345 5321340 -
tgagggcacaagccaatacttc

SEQ ID NO: 127052 - DNA, 22 bp, Artificial Sequence
  Synthetic oligonucleotide; CTG chr11 5321338 5321359 5321343 5321338 -
agggcacaagccaatacttcat

SEQ ID NO: 127053 - DNA, 22 bp, Artificial Sequence
  Synthetic oligonucleotide; CTT chr11 5321319 5321340 5321324 5321319 -
cattaaaccaaaccagctatca

SEQ ID NO: 127054 - DNA, 22 bp, Artificial Sequence
  Synthetic oligonucleotide; TTC chr11 5321318 5321339 5321323 5321318 -
attaaaccaaaccagctatcac

SEQ ID NO: 127055 - DNA, 22 bp, Artificial Sequence
  Synthetic oligonucleotide; TTA chr11 5321314 5321335 5321319 5321314 -
aaccaaaccagctatcactctt

SEQ ID NO: 127056 - DNA, 22 bp, Artificial Sequence
  Synthetic oligonucleotide; CTA chr11 5321300 5321321 5321305 5321300 -
tcactcttctgtcatattttta

SEQ ID NO: 127057 - DNA, 22 bp, Artificial Sequence
  Synthetic oligonucleotide; CTC chr11 5321294 5321315 5321299 5321294 -
ttctgtcatatttttaataagg

SEQ ID NO: 127058 - DNA, 22 bp, Artificial Sequence
  Synthetic oligonucleotide; CTT chr11 5321292 5321313 5321297 5321292 -
ctgtcatatttttaataaggag

SEQ ID NO: 127059 - DNA, 22 bp, Artificial Sequence
  Synthetic oligonucleotide; TTC chr11 5321291 5321312 5321296 5321291 -
tgtcatatttttaataaggagg

SEQ ID NO: 127060 - DNA, 22 bp, Artificial Sequence
  Synthetic oligonucleotide; CTG chr11 5321289 5321310 5321294 5321289 -
tcatatttttaataaggaggac

SEQ ID NO: 127061 - DNA, 22 bp, Artificial Sequence
  Synthetic oligonucleotide; TTT chr11 5321281 5321302 5321286 5321281 -
ttaataaggaggacagcttcct

SEQ ID NO: 127062 - DNA, 22 bp, Artificial Sequence
  Synthetic oligonucleotide; TTT chr11 5321280 5321301 5321285 5321280 -
taataaggaggacagcttcctt

SEQ ID NO: 127063 - DNA, 22 bp, Artificial Sequence
  Synthetic oligonucleotide; TTT chr11 5321279 5321300 5321284 5321279 -
aataaggaggacagcttccttt

SEQ ID NO: 127064 - DNA, 22 bp, Artificial Sequence
  Synthetic oligonucleotide; TTA chr11 5321278 5321299 5321283 5321278 -
ataaggaggacagcttccttta

SEQ ID NO: 127065 - DNA, 22 bp, Artificial Sequence
  Synthetic oligonucleotide; CTT chr11 5321262 5321283 5321267 5321262 -
cctttaaattctctaaaaacaa

SEQ ID NO: 127066 - DNA, 22 bp, Artificial Sequence
  Synthetic oligonucleotide; TTC chr11 5321261 5321282 5321266 5321261 -
ctttaaattctctaaaaacaaa

SEQ ID NO: 127067 - DNA, 22 bp, Artificial Sequence
  Synthetic oligonucleotide; CTT chr11 5321258 5321279 5321263 5321258 -
taaattctctaaaaacaaaata

SEQ ID NO: 127068 - DNA, 22 bp, Artificial Sequence
  Synthetic oligonucleotide; TTT chr11 5321257 5321278 5321262 5321257 -
aaattctctaaaaacaaaataa

SEQ ID NO: 127069 - DNA, 22 bp, Artificial Sequence
  Synthetic oligonucleotide; TTA chr11 5321256 5321277 5321261 5321256 -
aattctctaaaaacaaaataat

SEQ ID NO: 127070 - DNA, 22 bp, Artificial Sequence
  Synthetic oligonucleotide; TTC chr11 5321251 5321272 5321256 5321251 -
tctaaaaacaaaataatatcct

SEQ ID NO: 127071 - DNA, 22 bp, Artificial Sequence
  Synthetic oligonucleotide; CTC chr11 5321249 5321270 5321254 5321249 -
taaaaacaaaataatatcctta

SEQ ID NO: 127072 - DNA, 22 bp, Artificial Sequence
  Synthetic oligonucleotide; CTA chr11 5321247 5321268 5321252 5321247 -
aaaacaaaataatatccttatt

SEQ ID NO: 127073 - DNA, 22 bp, Artificial Sequence
  Synthetic oligonucleotide; CTT chr11 5321228 5321249 5321233 5321228 -
attcagccttcccactttacca

SEQ ID NO: 127074 - DNA, 22 bp, Artificial Sequence
  Synthetic oligonucleotide; TTA chr11 5321227 5321248 5321232 5321227 -
ttcagccttcccactttaccac

SEQ ID NO: 127075 - DNA, 22 bp, Artificial Sequence
  Synthetic oligonucleotide; TTC chr11 5321224 5321245 5321229 5321224 -
agccttcccactttaccacatg

SEQ ID NO: 127076 - DNA, 22 bp, Artificial Sequence
  Synthetic oligonucleotide; CTT chr11 5321218 5321239 5321223 5321218 -
cccactttaccacatgacctga

SEQ ID NO: 127077 - DNA, 22 bp, Artificial Sequence
  Synthetic oligonucleotide; TTC chr11 5321217 5321238 5321222 5321217 -
ccactttaccacatgacctgat

SEQ ID NO: 127078 - DNA, 22 bp, Artificial Sequence
  Synthetic oligonucleotide; CTT chr11 5321211 5321232 5321216 5321211 -
taccacatgacctgattaacct

SEQ ID NO: 127079 - DNA, 22 bp, Artificial Sequence
  Synthetic oligonucleotide; TTT chr11 5321210 5321231 5321215 5321210 -
accacatgacctgattaaccta

SEQ ID NO: 127080 - DNA, 22 bp, Artificial Sequence
  Synthetic oligonucleotide; TTA chr11 5321209 5321230 5321214 5321209 -
ccacatgacctgattaacctat

SEQ ID NO: 127081 - DNA, 22 bp, Artificial Sequence
  Synthetic oligonucleotide; CTG chr11 5321197 5321218 5321202 5321197 -
attaacctattaatgacactgt

SEQ ID NO: 127082 - DNA, 22 bp, Artificial Sequence
  Synthetic oligonucleotide; TTA chr11 5321193 5321214 5321198 5321193 -
acctattaatgacactgtacta

SEQ ID NO: 127083 - DNA, 22 bp, Artificial Sequence
  Synthetic oligonucleotide; CTA chr11 5321188 5321209 5321193 5321188 -
ttaatgacactgtactatgtca

SEQ ID NO: 127084 - DNA, 22 bp, Artificial Sequence
  Synthetic oligonucleotide; TTA chr11 5321185 5321206 5321190 5321185 -
atgacactgtactatgtcaatt

SEQ ID NO: 127085 - DNA, 22 bp, Artificial Sequence
  Synthetic oligonucleotide; CTG chr11 5321176 5321197 5321181 5321176 -
tactatgtcaattatgatatcc

SEQ ID NO: 127086 - DNA, 22 bp, Artificial Sequence
  Synthetic oligonucleotide; CTA chr11 5321171 5321192 5321176 5321171 -
tgtcaattatgatatcctgtct

SEQ ID NO: 127087 - DNA, 22 bp, Artificial Sequence
  Synthetic oligonucleotide; TTA chr11 5321162 5321183 5321167 5321162 -
tgatatcctgtctttacctata

SEQ ID NO: 127088 - DNA, 22 bp, Artificial Sequence
  Synthetic oligonucleotide; CTG chr11 5321152 5321173 5321157 5321152 -
tctttacctatatgttaatgaa

SEQ ID NO: 127089 - DNA, 22 bp, Artificial Sequence
  Synthetic oligonucleotide; CTT chr11 5321148 5321169 5321153 5321148 -
tacctatatgttaatgaaactg

SEQ ID NO: 127090 - DNA, 22 bp, Artificial Sequence
  Synthetic oligonucleotide; TTT chr11 5321147 5321168 5321152 5321147 -
acctatatgttaatgaaactgt

SEQ ID NO: 127091 - DNA, 22 bp, Artificial Sequence
  Synthetic oligonucleotide; TTA chr11 5321146 5321167 5321151 5321146 -
cctatatgttaatgaaactgtt

SEQ ID NO: 127092 - DNA, 22 bp, Artificial Sequence
  Synthetic oligonucleotide; CTA chr11 5321142 5321163 5321147 5321142 -
tatgttaatgaaactgttagaa

SEQ ID NO: 127093 - DNA, 22 bp, Artificial Sequence
  Synthetic oligonucleotide; TTA chr11 5321135 5321156 5321140 5321135 -
atgaaactgttagaaaagaaaa

SEQ ID NO: 127094 - DNA, 22 bp, Artificial Sequence
  Synthetic oligonucleotide; CTG chr11 5321126 5321147 5321131 5321126 -
ttagaaaagaaaatgatatgag

SEQ ID NO: 127095 - DNA, 22 bp, Artificial Sequence
  Synthetic oligonucleotide; TTA chr11 5321123 5321144 5321128 5321123 -
gaaaagaaaatgatatgagtaa

SEQ ID NO: 127096 - DNA, 22 bp, Artificial Sequence
  Synthetic oligonucleotide; TTT chr11 5321098 5321119 5321103 5321098 -
tctccagggtatcctttgtgca

SEQ ID NO: 127097 - DNA, 22 bp, Artificial Sequence
  Synthetic oligonucleotide; TTT chr11 5321097 5321118 5321102 5321097 -
ctccagggtatcctttgtgcaa

SEQ ID NO: 127098 - DNA, 22 bp, Artificial Sequence
  Synthetic oligonucleotide; TTC chr11 5321096 5321117 5321101 5321096 -
tccagggtatcctttgtgcaaa

SEQ ID NO: 127099 - DNA, 22 bp, Artificial Sequence
  Synthetic oligonucleotide; CTC chr11 5321094 5321115 5321099 5321094 -
cagggtatcctttgtgcaaagc

SEQ ID NO: 127100 - DNA, 22 bp, Artificial Sequence
  Synthetic oligonucleotide; CTT chr11 5321082 5321103 5321087 5321082 -
tgtgcaaagcacttcattgaaa

SEQ ID NO: 127101 - DNA, 22 bp, Artificial Sequence
  Synthetic oligonucleotide; TTT chr11 5321081 5321102 5321086 5321081 -
gtgcaaagcacttcattgaaac

SEQ ID NO: 127102 - DNA, 22 bp, Artificial Sequence
  Synthetic oligonucleotide; TTG chr11 5321080 5321101 5321085 5321080 -
tgcaaagcacttcattgaaact

SEQ ID NO: 127103 - DNA, 22 bp, Artificial Sequence
  Synthetic oligonucleotide; CTT chr11 5321068 5321089 5321073 5321068 -
cattgaaactgattctcttcat

SEQ ID NO: 127104 - DNA, 22 bp, Artificial Sequence
  Synthetic oligonucleotide; TTC chr11 5321067 5321088 5321072 5321067 -
attgaaactgattctcttcatc

SEQ ID NO: 127105 - DNA, 22 bp, Artificial Sequence
  Synthetic oligonucleotide; TTG chr11 5321063 5321084 5321068 5321063 -
aaactgattctcttcatctttt

SEQ ID NO: 127106 - DNA, 22 bp, Artificial Sequence
  Synthetic oligonucleotide; CTG chr11 5321057 5321078 5321062 5321057 -
attctcttcatcttttctacaa

SEQ ID NO: 127107 - DNA, 22 bp, Artificial Sequence
  Synthetic oligonucleotide; TTC chr11 5321053 5321074 5321058 5321053 -
tcttcatcttttctacaaagtc

SEQ ID NO: 127108 - DNA, 22 bp, Artificial Sequence
  Synthetic oligonucleotide; CTC chr11 5321051 5321072 5321056 5321051 -
ttcatcttttctacaaagtcag

SEQ ID NO: 127109 - DNA, 22 bp, Artificial Sequence
  Synthetic oligonucleotide; CTT chr11 5321049 5321070 5321054 5321049 -
catcttttctacaaagtcagca

SEQ ID NO: 127110 - DNA, 22 bp, Artificial Sequence
  Synthetic oligonucleotide; TTC chr11 5321048 5321069 5321053 5321048 -
atcttttctacaaagtcagcat

SEQ ID NO: 127111 - DNA, 22 bp, Artificial Sequence
  Synthetic oligonucleotide; CTT chr11 5321043 5321064 5321048 5321043 -
ttctacaaagtcagcatgtaaa

SEQ ID NO: 127112 - DNA, 22 bp, Artificial Sequence
  Synthetic oligonucleotide; TTT chr11 5321042 5321063 5321047 5321042 -
tctacaaagtcagcatgtaaaa

SEQ ID NO: 127113 - DNA, 22 bp, Artificial Sequence
  Synthetic oligonucleotide; TTT chr11 5321041 5321062 5321046 5321041 -
ctacaaagtcagcatgtaaaac

SEQ ID NO: 127114 - DNA, 22 bp, Artificial Sequence
  Synthetic oligonucleotide; TTC chr11 5321040 5321061 5321045 5321040 -
tacaaagtcagcatgtaaaaca

SEQ ID NO: 127115 - DNA, 22 bp, Artificial Sequence
  Synthetic oligonucleotide; CTA chr11 5321038 5321059 5321043 5321038 -
caaagtcagcatgtaaaacact

SEQ ID NO: 127116 - DNA, 22 bp, Artificial Sequence
  Synthetic oligonucleotide; CTC chr11 5321015 5321036 5321020 5321015 -
attaatgtacaatgaccaatca

SEQ ID NO: 127117 - DNA, 22 bp, Artificial Sequence
  Synthetic oligonucleotide; TTA chr11 5321011 5321032 5321016 5321011 -
atgtacaatgaccaatcaataa

SEQ ID NO: 127118 - DNA, 22 bp, Artificial Sequence
  Synthetic oligonucleotide; CTG chr11 5320982 5321003 5320987 5320982 -
ttgattagtgaataaagtcatt

SEQ ID NO: 127119 - DNA, 22 bp, Artificial Sequence
  Synthetic oligonucleotide; TTG chr11 5320979 5321000 5320984 5320979 -
attagtgaataaagtcattatc

SEQ ID NO: 127120 - DNA, 22 bp, Artificial Sequence
  Synthetic oligonucleotide; TTA chr11 5320975 5320996 5320980 5320975 -
gtgaataaagtcattatcttct

SEQ ID NO: 127121 - DNA, 22 bp, Artificial Sequence
  Synthetic oligonucleotide; TTA chr11 5320959 5320980 5320964 5320959 -
tcttcttgtgataactatggaa

SEQ ID NO: 127122 - DNA, 22 bp, Artificial Sequence
  Synthetic oligonucleotide; CTT chr11 5320955 5320976 5320960 5320955 -
cttgtgataactatggaagtca

SEQ ID NO: 127123 - DNA, 22 bp, Artificial Sequence
  Synthetic oligonucleotide; TTC chr11 5320954 5320975 5320959 5320954 -
ttgtgataactatggaagtcaa

SEQ ID NO: 127124 - DNA, 22 bp, Artificial Sequence
  Synthetic oligonucleotide; CTT chr11 5320952 5320973 5320957 5320952 -
gtgataactatggaagtcaatg

SEQ ID NO: 127125 - DNA, 22 bp, Artificial Sequence
  Synthetic oligonucleotide; TTG chr11 5320951 5320972 5320956 5320951 -
tgataactatggaagtcaatgg

SEQ ID NO: 127126 - DNA, 22 bp, Artificial Sequence
  Synthetic oligonucleotide; CTA chr11 5320942 5320963 5320947 5320942 -
tggaagtcaatggaactactct

SEQ ID NO: 127127 - DNA, 22 bp, Artificial Sequence
  Synthetic oligonucleotide; CTA chr11 5320924 5320945 5320929 5320924 -
ctctccattcagcaaaactcag

SEQ ID NO: 127128 - DNA, 22 bp, Artificial Sequence
  Synthetic oligonucleotide; CTC chr11 5320921 5320942 5320926 5320921 -
tccattcagcaaaactcagaaa

SEQ ID NO: 127129 - DNA, 22 bp, Artificial Sequence
  Synthetic oligonucleotide; CTC chr11 5320919 5320940 5320924 5320919 -
cattcagcaaaactcagaaatt

SEQ ID NO: 127130 - DNA, 22 bp, Artificial Sequence
  Synthetic oligonucleotide; TTC chr11 5320914 5320935 5320919 5320914 -
agcaaaactcagaaattcaggt

SEQ ID NO: 127131 - DNA, 22 bp, Artificial Sequence
  Synthetic oligonucleotide; CTC chr11 5320904 5320925 5320909 5320904 -
agaaattcaggtggcattactt

SEQ ID NO: 127132 - DNA, 22 bp, Artificial Sequence
  Synthetic oligonucleotide; TTC chr11 5320896 5320917 5320901 5320896 -
aggtggcattacttacgcttct

SEQ ID NO: 127133 - DNA, 22 bp, Artificial Sequence
  Synthetic oligonucleotide; TTA chr11 5320885 5320906 5320890 5320885 -
cttacgcttctttctctttaat

SEQ ID NO: 127134 - DNA, 22 bp, Artificial Sequence
  Synthetic oligonucleotide; CTT chr11 5320882 5320903 5320887 5320882 -
acgcttctttctctttaatcta

SEQ ID NO: 127135 - DNA, 22 bp, Artificial Sequence
  Synthetic oligonucleotide; TTA chr11 5320881 5320902 5320886 5320881 -
cgcttctttctctttaatctac

SEQ ID NO: 127136 - DNA, 22 bp, Artificial Sequence
  Synthetic oligonucleotide; CTT chr11 5320876 5320897 5320881 5320876 -
ctttctctttaatctactacct

SEQ ID NO: 127137 - DNA, 22 bp, Artificial Sequence
  Synthetic oligonucleotide; TTC chr11 5320875 5320896 5320880 5320875 -
tttctctttaatctactacctt

SEQ ID NO: 127138 - DNA, 22 bp, Artificial Sequence
  Synthetic oligonucleotide; CTT chr11 5320873 5320894 5320878 5320873 -
tctctttaatctactaccttca

SEQ ID NO: 127139 - DNA, 22 bp, Artificial Sequence
  Synthetic oligonucleotide; TTT chr11 5320872 5320893 5320877 5320872 -
ctctttaatctactaccttcaa

SEQ ID NO: 127140 - DNA, 22 bp, Artificial Sequence
  Synthetic oligonucleotide; TTC chr11 5320871 5320892 5320876 5320871 -
tctttaatctactaccttcaat

SEQ ID NO: 127141 - DNA, 22 bp, Artificial Sequence
  Synthetic oligonucleotide; CTC chr11 5320869 5320890 5320874 5320869 -
tttaatctactaccttcaatca

SEQ ID NO: 127142 - DNA, 22 bp, Artificial Sequence
  Synthetic oligonucleotide; CTT chr11 5320867 5320888 5320872 5320867 -
taatctactaccttcaatcact

SEQ ID NO: 127143 - DNA, 22 bp, Artificial Sequence
  Synthetic oligonucleotide; TTT chr11 5320866 5320887 5320871 5320866 -
aatctactaccttcaatcactc

SEQ ID NO: 127144 - DNA, 22 bp, Artificial Sequence
  Synthetic oligonucleotide; TTA chr11 5320865 5320886 5320870 5320865 -
atctactaccttcaatcactca

SEQ ID NO: 127145 - DNA, 22 bp, Artificial Sequence
  Synthetic oligonucleotide; CTA chr11 5320860 5320881 5320865 5320860 -
ctaccttcaatcactcagttct

SEQ ID NO: 127146 - DNA, 22 bp, Artificial Sequence
  Synthetic oligonucleotide; CTA chr11 5320857 5320878 5320862 5320857 -
ccttcaatcactcagttctatt

SEQ ID NO: 127147 - DNA, 22 bp, Artificial Sequence
  Synthetic oligonucleotide; CTT chr11 5320853 5320874 5320858 5320853 -
caatcactcagttctattctaa

SEQ ID NO: 127148 - DNA, 22 bp, Artificial Sequence
  Synthetic oligonucleotide; TTC chr11 5320852 5320873 5320857 5320852 -
aatcactcagttctattctaag

SEQ ID NO: 127149 - DNA, 22 bp, Artificial Sequence
  Synthetic oligonucleotide; CTC chr11 5320844 5320865 5320849 5320844 -
agttctattctaagtcatagaa

SEQ ID NO: 127150 - DNA, 22 bp, Artificial Sequence
  Synthetic oligonucleotide; TTC chr11 5320839 5320860 5320844 5320839 -
tattctaagtcatagaatctct

SEQ ID NO: 127151 - DNA, 22 bp, Artificial Sequence
  Synthetic oligonucleotide; CTA chr11 5320837 5320858 5320842 5320837 -
ttctaagtcatagaatctctct

SEQ ID NO: 127152 - DNA, 22 bp, Artificial Sequence
  Synthetic oligonucleotide; TTC chr11 5320834 5320855 5320839 5320834 -
taagtcatagaatctctcttct

SEQ ID NO: 127153 - DNA, 22 bp, Artificial Sequence
  Synthetic oligonucleotide; CTA chr11 5320832 5320853 5320837 5320832 -
agtcatagaatctctcttctat

SEQ ID NO: 127154 - DNA, 22 bp, Artificial Sequence
  Synthetic oligonucleotide; CTC chr11 5320818 5320839 5320823 5320818 -
tcttctattcaagcctttctaa

SEQ ID NO: 127155 - DNA, 22 bp, Artificial Sequence
  Synthetic oligonucleotide; CTC chr11 5320816 5320837 5320821 5320816 -
ttctattcaagcctttctaatg

SEQ ID NO: 127156 - DNA, 22 bp, Artificial Sequence
  Synthetic oligonucleotide; CTT chr11 5320814 5320835 5320819 5320814 -
ctattcaagcctttctaatgct

SEQ ID NO: 127157 - DNA, 22 bp, Artificial Sequence
  Synthetic oligonucleotide; TTC chr11 5320813 5320834 5320818 5320813 -
tattcaagcctttctaatgcta

SEQ ID NO: 127158 - DNA, 22 bp, Artificial Sequence
  Synthetic oligonucleotide; CTA chr11 5320811 5320832 5320816 5320811 -
ttcaagcctttctaatgctact

SEQ ID NO: 127159 - DNA, 22 bp, Artificial Sequence
  Synthetic oligonucleotide; TTC chr11 5320808 5320829 5320813 5320808 -
aagcctttctaatgctactgat

SEQ ID NO: 127160 - DNA, 22 bp, Artificial Sequence
  Synthetic oligonucleotide; CTT chr11 5320801 5320822 5320806 5320801 -
tctaatgctactgataacaact

SEQ ID NO: 127161 - DNA, 22 bp, Artificial Sequence
  Synthetic oligonucleotide; TTT chr11 5320800 5320821 5320805 5320800 -
ctaatgctactgataacaacta

SEQ ID NO: 127162 - DNA, 22 bp, Artificial Sequence
  Synthetic oligonucleotide; TTC chr11 5320799 5320820 5320804 5320799 -
taatgctactgataacaactag

SEQ ID NO: 127163 - DNA, 22 bp, Artificial Sequence
  Synthetic oligonucleotide; CTA chr11 5320797 5320818 5320802 5320797 -
atgctactgataacaactagtc

SEQ ID NO: 127164 - DNA, 22 bp, Artificial Sequence
  Synthetic oligonucleotide; CTA chr11 5320791 5320812 5320796 5320791 -
ctgataacaactagtcaaaacc

SEQ ID NO: 127165 - DNA, 22 bp, Artificial Sequence
  Synthetic oligonucleotide; CTG chr11 5320788 5320809 5320793 5320788 -
ataacaactagtcaaaaccaca

SEQ ID NO: 127166 - DNA, 22 bp, Artificial Sequence
  Synthetic oligonucleotide; CTA chr11 5320778 5320799 5320783 5320778 -
gtcaaaaccacaccaacacaat

SEQ ID NO: 127167 - DNA, 22 bp, Artificial Sequence
  Synthetic oligonucleotide; TTT chr11 5320754 5320775 5320759 5320754 -
gacacgtgtattgtcatatcct

SEQ ID NO: 127168 - DNA, 22 bp, Artificial Sequence
  Synthetic oligonucleotide; TTG chr11 5320753 5320774 5320758 5320753 -
acacgtgtattgtcatatcctg

SEQ ID NO: 127169 - DNA, 22 bp, Artificial Sequence
  Synthetic oligonucleotide; TTG chr11 5320741 5320762 5320746 5320741 -
tcatatcctgatacttctttta

SEQ ID NO: 127170 - DNA, 22 bp, Artificial Sequence
  Synthetic oligonucleotide; CTG chr11 5320731 5320752 5320736 5320731 -
atacttcttttacctgttctcc

SEQ ID NO: 127171 - DNA, 22 bp, Artificial Sequence
  Synthetic oligonucleotide; CTT chr11 5320725 5320746 5320730 5320725 -
cttttacctgttctcccccttt

SEQ ID NO: 127172 - DNA, 22 bp, Artificial Sequence
  Synthetic oligonucleotide; TTC chr11 5320724 5320745 5320729 5320724 -
ttttacctgttctccccctttt

SEQ ID NO: 127173 - DNA, 22 bp, Artificial Sequence
  Synthetic oligonucleotide; CTT chr11 5320722 5320743 5320727 5320722 -
ttacctgttctcccccttttcc

SEQ ID NO: 127174 - DNA, 22 bp, Artificial Sequence
  Synthetic oligonucleotide; TTT chr11 5320721 5320742 5320726 5320721 -
tacctgttctcccccttttcca

SEQ ID NO: 127175 - DNA, 22 bp, Artificial Sequence
  Synthetic oligonucleotide; TTT chr11 5320720 5320741 5320725 5320720 -
acctgttctcccccttttccaa

SEQ ID NO: 127176 - DNA, 22 bp, Artificial Sequence
  Synthetic oligonucleotide; TTA chr11 5320719 5320740 5320724 5320719 -
cctgttctcccccttttccaac

SEQ ID NO: 127177 - DNA, 22 bp, Artificial Sequence
  Synthetic oligonucleotide; CTG chr11 5320715 5320736 5320720 5320715 -
ttctcccccttttccaacatgt

SEQ ID NO: 127178 - DNA, 22 bp, Artificial Sequence
  Synthetic oligonucleotide; TTC chr11 5320712 5320733 5320717 5320712 -
tcccccttttccaacatgtttc

SEQ ID NO: 127179 - DNA, 22 bp, Artificial Sequence
  Synthetic oligonucleotide; CTC chr11 5320710 5320731 5320715 5320710 -
ccccttttccaacatgtttctc

SEQ ID NO: 127180 - DNA, 22 bp, Artificial Sequence
  Synthetic oligonucleotide; CTT chr11 5320704 5320725 5320709 5320704 -
ttccaacatgtttctcatactg

SEQ ID NO: 127181 - DNA, 22 bp, Artificial Sequence
  Synthetic oligonucleotide; TTT chr11 5320703 5320724 5320708 5320703 -
tccaacatgtttctcatactgt

SEQ ID NO: 127182 - DNA, 22 bp, Artificial Sequence
  Synthetic oligonucleotide; TTT chr11 5320702 5320723 5320707 5320702 -
ccaacatgtttctcatactgta

SEQ ID NO: 127183 - DNA, 22 bp, Artificial Sequence
  Synthetic oligonucleotide; TTC chr11 5320701 5320722 5320706 5320701 -
caacatgtttctcatactgtag

SEQ ID NO: 127184 - DNA, 22 bp, Artificial Sequence
  Synthetic oligonucleotide; TTT chr11 5320691 5320712 5320696 5320691 -
ctcatactgtagccatagtaac

SEQ ID NO: 127185 - DNA, 22 bp, Artificial Sequence
  Synthetic oligonucleotide; TTC chr11 5320690 5320711 5320695 5320690 -
tcatactgtagccatagtaact

SEQ ID NO: 127186 - DNA, 22 bp, Artificial Sequence
  Synthetic oligonucleotide; CTC chr11 5320688 5320709 5320693 5320688 -
atactgtagccatagtaacttt

SEQ ID NO: 127187 - DNA, 22 bp, Artificial Sequence
  Synthetic oligonucleotide; CTG chr11 5320682 5320703 5320687 5320682 -
tagccatagtaactttaaacaa

SEQ ID NO: 127188 - DNA, 22 bp, Artificial Sequence
  Synthetic oligonucleotide; CTT chr11 5320667 5320688 5320672 5320667 -
taaacaataactacttgattat

SEQ ID NO: 127189 - DNA, 22 bp, Artificial Sequence
  Synthetic oligonucleotide; TTT chr11 5320666 5320687 5320671 5320666 -
aaacaataactacttgattata

SEQ ID NO: 127190 - DNA, 22 bp, Artificial Sequence
  Synthetic oligonucleotide; TTA chr11 5320665 5320686 5320670 5320665 -
aacaataactacttgattataa

SEQ ID NO: 127191 - DNA, 22 bp, Artificial Sequence
  Synthetic oligonucleotide; CTA chr11 5320654 5320675 5320659 5320654 -
cttgattataagtactcatcat

SEQ ID NO: 127192 - DNA, 22 bp, Artificial Sequence
  Synthetic oligonucleotide; CTT chr11 5320651 5320672 5320656 5320651 -
gattataagtactcatcatacc

SEQ ID NO: 127193 - DNA, 22 bp, Artificial Sequence
  Synthetic oligonucleotide; TTG chr11 5320650 5320671 5320655 5320650 -
attataagtactcatcatacct

SEQ ID NO: 127194 - DNA, 22 bp, Artificial Sequence
  Synthetic oligonucleotide; TTA chr11 5320646 5320667 5320651 5320646 -
taagtactcatcatacctcttg

SEQ ID NO: 127195 - DNA, 22 bp, Artificial Sequence
  Synthetic oligonucleotide; CTC chr11 5320637 5320658 5320642 5320637 -
atcatacctcttgttttatatt

SEQ ID NO: 127196 - DNA, 22 bp, Artificial Sequence
  Synthetic oligonucleotide; CTC chr11 5320627 5320648 5320632 5320627 -
ttgttttatattcattccctta

SEQ ID NO: 127197 - DNA, 22 bp, Artificial Sequence
  Synthetic oligonucleotide; CTT chr11 5320625 5320646 5320630 5320625 -
gttttatattcattcccttatg

SEQ ID NO: 127198 - DNA, 22 bp, Artificial Sequence
  Synthetic oligonucleotide; TTG chr11 5320624 5320645 5320629 5320624 -
ttttatattcattcccttatgg

SEQ ID NO: 127199 - DNA, 22 bp, Artificial Sequence
  Synthetic oligonucleotide; TTT chr11 5320621 5320642 5320626 5320621 -
tatattcattcccttatggtaa

SEQ ID NO: 127200 - DNA, 22 bp, Artificial Sequence
  Synthetic oligonucleotide; TTT chr11 5320620 5320641 5320625 5320620 -
atattcattcccttatggtaat

SEQ ID NO: 127201 - DNA, 22 bp, Artificial Sequence
  Synthetic oligonucleotide; TTA chr11 5320619 5320640 5320624 5320619 -
tattcattcccttatggtaatg

SEQ ID NO: 127202 - DNA, 22 bp, Artificial Sequence
  Synthetic oligonucleotide; TTC chr11 5320614 5320635 5320619 5320614 -
attcccttatggtaatgtcaaa

SEQ ID NO: 127203 - DNA, 22 bp, Artificial Sequence
  Synthetic oligonucleotide; TTC chr11 5320610 5320631 5320615 5320610 -
ccttatggtaatgtcaaaatgt

SEQ ID NO: 127204 - DNA, 22 bp, Artificial Sequence
  Synthetic oligonucleotide; CTT chr11 5320606 5320627 5320611 5320606 -
atggtaatgtcaaaatgtttta

SEQ ID NO: 127205 - DNA, 22 bp, Artificial Sequence
  Synthetic oligonucleotide; TTA chr11 5320605 5320626 5320610 5320605 -
tggtaatgtcaaaatgttttac

SEQ ID NO: 127206 - DNA, 22 bp, Artificial Sequence
  Synthetic oligonucleotide; TTT chr11 5320586 5320607 5320591 5320586 -
tacatgatttgcaagatatatt

SEQ ID NO: 127207 - DNA, 22 bp, Artificial Sequence
  Synthetic oligonucleotide; TTT chr11 5320585 5320606 5320590 5320585 -
acatgatttgcaagatatattg

SEQ ID NO: 127208 - DNA, 22 bp, Artificial Sequence
  Synthetic oligonucleotide; TTA chr11 5320584 5320605 5320589 5320584 -
catgatttgcaagatatattgt

SEQ ID NO: 127209 - DNA, 22 bp, Artificial Sequence
  Synthetic oligonucleotide; TTT chr11 5320576 5320597 5320581 5320576 -
gcaagatatattgtgatcagaa

SEQ ID NO: 127210 - DNA, 22 bp, Artificial Sequence
  Synthetic oligonucleotide; TTG chr11 5320575 5320596 5320580 5320575 -
caagatatattgtgatcagaac

SEQ ID NO: 127211 - DNA, 22 bp, Artificial Sequence
  Synthetic oligonucleotide; TTG chr11 5320563 5320584 5320568 5320563 -
tgatcagaacctgctactacta

SEQ ID NO: 127212 - DNA, 22 bp, Artificial Sequence
  Synthetic oligonucleotide; CTG chr11 5320550 5320571 5320555 5320550 -
ctactactacagattcattttc

SEQ ID NO: 127213 - DNA, 22 bp, Artificial Sequence
  Synthetic oligonucleotide; CTA chr11 5320547 5320568 5320552 5320547 -
ctactacagattcattttctct

SEQ ID NO: 127214 - DNA, 22 bp, Artificial Sequence
  Synthetic oligonucleotide; CTA chr11 5320544 5320565 5320549 5320544 -
ctacagattcattttctctcaa

SEQ ID NO: 127215 - DNA, 22 bp, Artificial Sequence
  Synthetic oligonucleotide; CTA chr11 5320541 5320562 5320546 5320541 -
cagattcattttctctcaagct

SEQ ID NO: 127216 - DNA, 22 bp, Artificial Sequence
  Synthetic oligonucleotide; TTC chr11 5320534 5320555 5320539 5320534 -
attttctctcaagctttttttc

SEQ ID NO: 127217 - DNA, 22 bp, Artificial Sequence
  Synthetic oligonucleotide; TTT chr11 5320530 5320551 5320535 5320530 -
tctctcaagctttttttcatgt

SEQ ID NO: 127218 - DNA, 22 bp, Artificial Sequence
  Synthetic oligonucleotide; TTT chr11 5320529 5320550 5320534 5320529 -
ctctcaagctttttttcatgta

SEQ ID NO: 127219 - DNA, 22 bp, Artificial Sequence
  Synthetic oligonucleotide; TTC chr11 5320528 5320549 5320533 5320528 -
tctcaagctttttttcatgtat

SEQ ID NO: 127220 - DNA, 22 bp, Artificial Sequence
  Synthetic oligonucleotide; CTC chr11 5320526 5320547 5320531 5320526 -
tcaagctttttttcatgtattg

SEQ ID NO: 127221 - DNA, 22 bp, Artificial Sequence
  Synthetic oligonucleotide; CTC chr11 5320524 5320545 5320529 5320524 -
aagctttttttcatgtattgtt

SEQ ID NO: 127222 - DNA, 22 bp, Artificial Sequence
  Synthetic oligonucleotide; CTT chr11 5320518 5320539 5320523 5320518 -
tttttcatgtattgttgttcaa

SEQ ID NO: 127223 - DNA, 22 bp, Artificial Sequence
  Synthetic oligonucleotide; TTT chr11 5320517 5320538 5320522 5320517 -
ttttcatgtattgttgttcaag

SEQ ID NO: 127224 - DNA, 22 bp, Artificial Sequence
  Synthetic oligonucleotide; TTT chr11 5320516 5320537 5320521 5320516 -
tttcatgtattgttgttcaaga

SEQ ID NO: 127225 - DNA, 22 bp, Artificial Sequence
  Synthetic oligonucleotide; TTT chr11 5320515 5320536 5320520 5320515 -
ttcatgtattgttgttcaagag

SEQ ID NO: 127226 - DNA, 22 bp, Artificial Sequence
  Synthetic oligonucleotide; TTT chr11 5320514 5320535 5320519 5320514 -
tcatgtattgttgttcaagaga

SEQ ID NO: 127227 - DNA, 22 bp, Artificial Sequence
  Synthetic oligonucleotide; TTT chr11 5320513 5320534 5320518 5320513 -
catgtattgttgttcaagagat

SEQ ID NO: 127228 - DNA, 22 bp, Artificial Sequence
  Synthetic oligonucleotide; TTC chr11 5320512 5320533 5320517 5320512 -
atgtattgttgttcaagagata

SEQ ID NO: 127229 - DNA, 22 bp, Artificial Sequence
  Synthetic oligonucleotide; TTG chr11 5320504 5320525 5320509 5320504 -
ttgttcaagagatattatactt

SEQ ID NO: 127230 - DNA, 22 bp, Artificial Sequence
  Synthetic oligonucleotide; TTG chr11 5320501 5320522 5320506 5320501 -
ttcaagagatattatacttcct

SEQ ID NO: 127231 - DNA, 22 bp, Artificial Sequence
  Synthetic oligonucleotide; TTC chr11 5320498 5320519 5320503 5320498 -
aagagatattatacttccttaa

SEQ ID NO: 127232 - DNA, 22 bp, Artificial Sequence
  Synthetic oligonucleotide; TTA chr11 5320487 5320508 5320492 5320487 -
tacttccttaatgtatattttg

SEQ ID NO: 127233 - DNA, 22 bp, Artificial Sequence
  Synthetic oligonucleotide; CTT chr11 5320482 5320503 5320487 5320482 -
ccttaatgtatattttgaataa

SEQ ID NO: 127234 - DNA, 22 bp, Artificial Sequence
  Synthetic oligonucleotide; TTC chr11 5320481 5320502 5320486 5320481 -
cttaatgtatattttgaataaa

SEQ ID NO: 127235 - DNA, 22 bp, Artificial Sequence
  Synthetic oligonucleotide; CTT chr11 5320478 5320499 5320483 5320478 -
aatgtatattttgaataaaatt

SEQ ID NO: 127236 - DNA, 22 bp, Artificial Sequence
  Synthetic oligonucleotide; TTA chr11 5320477 5320498 5320482 5320477 -
atgtatattttgaataaaatta

SEQ ID NO: 127237 - DNA, 22 bp, Artificial Sequence
  Synthetic oligonucleotide; TTT chr11 5320467 5320488 5320472 5320467 -
tgaataaaattatttttatttg

SEQ ID NO: 127238 - DNA, 22 bp, Artificial Sequence
  Synthetic oligonucleotide; TTT chr11 5320466 5320487 5320471 5320466 -
gaataaaattatttttatttga

SEQ ID NO: 127239 - DNA, 22 bp, Artificial Sequence
  Synthetic oligonucleotide; TTG chr11 5320465 5320486 5320470 5320465 -
aataaaattatttttatttgaa

SEQ ID NO: 127240 - DNA, 22 bp, Artificial Sequence
  Synthetic oligonucleotide; TTA chr11 5320455 5320476 5320460 5320455 -
tttttatttgaatttatagtat

SEQ ID NO: 127241 - DNA, 22 bp, Artificial Sequence
  Synthetic oligonucleotide; TTT chr11 5320452 5320473 5320457 5320452 -
ttatttgaatttatagtattta

SEQ ID NO: 127242 - DNA, 22 bp, Artificial Sequence
  Synthetic oligonucleotide; TTT chr11 5320451 5320472 5320456 5320451 -
tatttgaatttatagtatttaa

SEQ ID NO: 127243 - DNA, 22 bp, Artificial Sequence
  Synthetic oligonucleotide; TTT chr11 5320450 5320471 5320455 5320450 -
atttgaatttatagtatttaat

SEQ ID NO: 127244 - DNA, 22 bp, Artificial Sequence
  Synthetic oligonucleotide; TTA chr11 5320449 5320470 5320454 5320449 -
tttgaatttatagtatttaatc

SEQ ID NO: 127245 - DNA, 22 bp, Artificial Sequence
  Synthetic oligonucleotide; TTT chr11 5320446 5320467 5320451 5320446 -
gaatttatagtatttaatcttg

SEQ ID NO: 127246 - DNA, 22 bp, Artificial Sequence
  Synthetic oligonucleotide; TTG chr11 5320445 5320466 5320450 5320445 -
aatttatagtatttaatcttgc

SEQ ID NO: 127247 - DNA, 22 bp, Artificial Sequence
  Synthetic oligonucleotide; TTT chr11 5320440 5320461 5320445 5320440 -
atagtatttaatcttgccccat

SEQ ID NO: 127248 - DNA, 22 bp, Artificial Sequence
  Synthetic oligonucleotide; TTA chr11 5320439 5320460 5320444 5320439 -
tagtatttaatcttgccccatt

SEQ ID NO: 127249 - DNA, 22 bp, Artificial Sequence
  Synthetic oligonucleotide; TTT chr11 5320431 5320452 5320436 5320431 -
aatcttgccccattaccaatgt

SEQ ID NO: 127250 - DNA, 22 bp, Artificial Sequence
  Synthetic oligonucleotide; TTA chr11 5320430 5320451 5320435 5320430 -
atcttgccccattaccaatgta

SEQ ID NO: 127251 - DNA, 22 bp, Artificial Sequence
  Synthetic oligonucleotide; CTT chr11 5320425 5320446 5320430 5320425 -
gccccattaccaatgtacattt

SEQ ID NO: 127252 - DNA, 22 bp, Artificial Sequence
  Synthetic oligonucleotide; TTG chr11 5320424 5320445 5320429 5320424 -
ccccattaccaatgtacatttt

SEQ ID NO: 127253 - DNA, 22 bp, Artificial Sequence
  Synthetic oligonucleotide; TTA chr11 5320416 5320437 5320421 5320416 -
ccaatgtacattttacaaactt

SEQ ID NO: 127254 - DNA, 22 bp, Artificial Sequence
  Synthetic oligonucleotide; TTT chr11 5320403 5320424 5320408 5320403 -
tacaaactttaatttgtttact

SEQ ID NO: 127255 - DNA, 22 bp, Artificial Sequence
  Synthetic oligonucleotide; TTT chr11 5320402 5320423 5320407 5320402 -
acaaactttaatttgtttactt

SEQ ID NO: 127256 - DNA, 22 bp, Artificial Sequence
  Synthetic oligonucleotide; TTA chr11 5320401 5320422 5320406 5320401 -
caaactttaatttgtttacttg

SEQ ID NO: 127257 - DNA, 22 bp, Artificial Sequence
  Synthetic oligonucleotide; CTT chr11 5320394 5320415 5320399 5320394 -
taatttgtttacttgtttcgtt

SEQ ID NO: 127258 - DNA, 22 bp, Artificial Sequence
  Synthetic oligonucleotide; TTT chr11 5320393 5320414 5320398 5320393 -
aatttgtttacttgtttcgttt

SEQ ID NO: 127259 - DNA, 22 bp, Artificial Sequence
  Synthetic oligonucleotide; TTA chr11 5320392 5320413 5320397 5320392 -
atttgtttacttgtttcgtttt

SEQ ID NO: 127260 - DNA, 22 bp, Artificial Sequence
  Synthetic oligonucleotide; TTT chr11 5320388 5320409 5320393 5320388 -
gtttacttgtttcgttttgtgt

SEQ ID NO: 127261 - DNA, 22 bp, Artificial Sequence
  Synthetic oligonucleotide; TTG chr11 5320387 5320408 5320392 5320387 -
tttacttgtttcgttttgtgtt

SEQ ID NO: 127262 - DNA, 22 bp, Artificial Sequence
  Synthetic oligonucleotide; TTT chr11 5320384 5320405 5320389 5320384 -
acttgtttcgttttgtgtttgt

SEQ ID NO: 127263 - DNA, 22 bp, Artificial Sequence
  Synthetic oligonucleotide; TTA chr11 5320383 5320404 5320388 5320383 -
cttgtttcgttttgtgtttgtt

SEQ ID NO: 127264 - DNA, 22 bp, Artificial Sequence
  Synthetic oligonucleotide; CTT chr11 5320380 5320401 5320385 5320380 -
gtttcgttttgtgtttgttctt

SEQ ID NO: 127265 - DNA, 22 bp, Artificial Sequence
  Synthetic oligonucleotide; TTG chr11 5320379 5320400 5320384 5320379 -
tttcgttttgtgtttgttcttt

SEQ ID NO: 127266 - DNA, 22 bp, Artificial Sequence
  Synthetic oligonucleotide; TTT chr11 5320376 5320397 5320381 5320376 -
cgttttgtgtttgttcttttca

SEQ ID NO: 127267 - DNA, 22 bp, Artificial Sequence
  Synthetic oligonucleotide; TTC chr11 5320375 5320396 5320380 5320375 -
gttttgtgtttgttcttttcac

SEQ ID NO: 127268 - DNA, 22 bp, Artificial Sequence
  Synthetic oligonucleotide; TTT chr11 5320371 5320392 5320376 5320371 -
tgtgtttgttcttttcacctgt

SEQ ID NO: 127269 - DNA, 22 bp, Artificial Sequence
  Synthetic oligonucleotide; TTT chr11 5320370 5320391 5320375 5320370 -
gtgtttgttcttttcacctgta

SEQ ID NO: 127270 - DNA, 22 bp, Artificial Sequence
  Synthetic oligonucleotide; TTG chr11 5320369 5320390 5320374 5320369 -
tgtttgttcttttcacctgtac

SEQ ID NO: 127271 - DNA, 22 bp, Artificial Sequence
  Synthetic oligonucleotide; TTT chr11 5320364 5320385 5320369 5320364 -
gttcttttcacctgtacgcaat

SEQ ID NO: 127272 - DNA, 22 bp, Artificial Sequence
  Synthetic oligonucleotide; TTG chr11 5320363 5320384 5320368 5320363 -
ttcttttcacctgtacgcaatg

SEQ ID NO: 127273 - DNA, 22 bp, Artificial Sequence
  Synthetic oligonucleotide; TTC chr11 5320360 5320381 5320365 5320360 -
ttttcacctgtacgcaatgatt

SEQ ID NO: 127274 - DNA, 22 bp, Artificial Sequence
  Synthetic oligonucleotide; CTT chr11 5320358 5320379 5320363 5320358 -
ttcacctgtacgcaatgattgc

SEQ ID NO: 127275 - DNA, 22 bp, Artificial Sequence
  Synthetic oligonucleotide; TTT chr11 5320357 5320378 5320362 5320357 -
tcacctgtacgcaatgattgca

SEQ ID NO: 127276 - DNA, 22 bp, Artificial Sequence
  Synthetic oligonucleotide; TTT chr11 5320356 5320377 5320361 5320356 -
cacctgtacgcaatgattgcac

SEQ ID NO: 127277 - DNA, 22 bp, Artificial Sequence
  Synthetic oligonucleotide; TTC chr11 5320355 5320376 5320360 5320355 -
acctgtacgcaatgattgcact

SEQ ID NO: 127278 - DNA, 22 bp, Artificial Sequence
  Synthetic oligonucleotide; CTG chr11 5320350 5320371 5320355 5320350 -
tacgcaatgattgcactacccc

SEQ ID NO: 127279 - DNA, 22 bp, Artificial Sequence
  Synthetic oligonucleotide; TTG chr11 5320337 5320358 5320342 5320337 -
cactaccccaccaaatactact

SEQ ID NO: 127280 - DNA, 22 bp, Artificial Sequence
  Synthetic oligonucleotide; CTA chr11 5320332 5320353 5320337 5320332 -
ccccaccaaatactactacact

SEQ ID NO: 127281 - DNA, 22 bp, Artificial Sequence
  Synthetic oligonucleotide; CTA chr11 5320317 5320338 5320322 5320317 -
ctacactactaatatagtagca

SEQ ID NO: 127282 - DNA, 22 bp, Artificial Sequence
  Synthetic oligonucleotide; CTA chr11 5320314 5320335 5320319 5320314 -
cactactaatatagtagcattt

SEQ ID NO: 127283 - DNA, 22 bp, Artificial Sequence
  Synthetic oligonucleotide; CTA chr11 5320309 5320330 5320314 5320309 -
ctaatatagtagcatttaattc

SEQ ID NO: 127284 - DNA, 22 bp, Artificial Sequence
  Synthetic oligonucleotide; CTA chr11 5320306 5320327 5320311 5320306 -
atatagtagcatttaattctca

SEQ ID NO: 127285 - DNA, 22 bp, Artificial Sequence
  Synthetic oligonucleotide; TTT chr11 5320292 5320313 5320297 5320292 -
aattctcagcttaagtagcatt

SEQ ID NO: 127286 - DNA, 22 bp, Artificial Sequence
  Synthetic oligonucleotide; TTA chr11 5320291 5320312 5320296 5320291 -
attctcagcttaagtagcattt

SEQ ID NO: 127287 - DNA, 22 bp, Artificial Sequence
  Synthetic oligonucleotide; TTC chr11 5320287 5320308 5320292 5320287 -
tcagcttaagtagcatttcttc

SEQ ID NO: 127288 - DNA, 22 bp, Artificial Sequence
  Synthetic oligonucleotide; CTC chr11 5320285 5320306 5320290 5320285 -
agcttaagtagcatttcttctg

SEQ ID NO: 127289 - DNA, 22 bp, Artificial Sequence
  Synthetic oligonucleotide; CTT chr11 5320280 5320301 5320285 5320280 -
aagtagcatttcttctggaaaa

SEQ ID NO: 127290 - DNA, 22 bp, Artificial Sequence
  Synthetic oligonucleotide; TTA chr11 5320279 5320300 5320284 5320279 -
agtagcatttcttctggaaaat

SEQ ID NO: 127291 - DNA, 22 bp, Artificial Sequence
  Synthetic oligonucleotide; TTT chr11 5320269 5320290 5320274 5320269 -
cttctggaaaatgttccctgat

SEQ ID NO: 127292 - DNA, 22 bp, Artificial Sequence
  Synthetic oligonucleotide; TTC chr11 5320268 5320289 5320273 5320268 -
ttctggaaaatgttccctgatc

SEQ ID NO: 127293 - DNA, 22 bp, Artificial Sequence
  Synthetic oligonucleotide; CTT chr11 5320266 5320287 5320271 5320266 -
ctggaaaatgttccctgatccc

SEQ ID NO: 127294 - DNA, 22 bp, Artificial Sequence
  Synthetic oligonucleotide; TTC chr11 5320265 5320286 5320270 5320265 -
tggaaaatgttccctgatccca

SEQ ID NO: 127295 - DNA, 22 bp, Artificial Sequence
  Synthetic oligonucleotide; CTG chr11 5320263 5320284 5320268 5320263 -
gaaaatgttccctgatcccaga

SEQ ID NO: 127296 - DNA, 22 bp, Artificial Sequence
  Synthetic oligonucleotide; TTC chr11 5320253 5320274 5320258 5320253 -
cctgatcccagaaatttatttg

SEQ ID NO: 127297 - DNA, 22 bp, Artificial Sequence
  Synthetic oligonucleotide; CTG chr11 5320249 5320270 5320254 5320249 -
atcccagaaatttatttgatgt

SEQ ID NO: 127298 - DNA, 22 bp, Artificial Sequence
  Synthetic oligonucleotide; TTT chr11 5320236 5320257 5320241 5320236 -
atttgatgtgtctctcatagca

SEQ ID NO: 127299 - DNA, 22 bp, Artificial Sequence
  Synthetic oligonucleotide; TTA chr11 5320235 5320256 5320240 5320235 -
tttgatgtgtctctcatagcac

SEQ ID NO: 127300 - DNA, 22 bp, Artificial Sequence
  Synthetic oligonucleotide; TTT chr11 5320232 5320253 5320237 5320232 -
gatgtgtctctcatagcacact

SEQ ID NO: 127301 - DNA, 22 bp, Artificial Sequence
  Synthetic oligonucleotide; TTG chr11 5320231 5320252 5320236 5320231 -
atgtgtctctcatagcacacta

SEQ ID NO: 127302 - DNA, 22 bp, Artificial Sequence
  Synthetic oligonucleotide; CTC chr11 5320222 5320243 5320227 5320222 -
tcatagcacactaatattcacg

SEQ ID NO: 127303 - DNA, 22 bp, Artificial Sequence
  Synthetic oligonucleotide; CTC chr11 5320220 5320241 5320225 5320220 -
atagcacactaatattcacgta

SEQ ID NO: 127304 - DNA, 22 bp, Artificial Sequence
  Synthetic oligonucleotide; CTA chr11 5320209 5320230 5320214 5320209 -
atattcacgtagtaatgatagt

SEQ ID NO: 127305 - DNA, 22 bp, Artificial Sequence
  Synthetic oligonucleotide; TTC chr11 5320203 5320224 5320208 5320203 -
acgtagtaatgatagtgttgta

SEQ ID NO: 127306 - DNA, 22 bp, Artificial Sequence
  Synthetic oligonucleotide; TTG chr11 5320183 5320204 5320188 5320183 -
tatgaattcatggtaaatattt

SEQ ID NO: 127307 - DNA, 22 bp, Artificial Sequence
  Synthetic oligonucleotide; TTC chr11 5320174 5320195 5320179 5320174 -
atggtaaatattttctttctag

SEQ ID NO: 127308 - DNA, 22 bp, Artificial Sequence
  Synthetic oligonucleotide; TTT chr11 5320161 5320182 5320166 5320161 -
tctttctagtgcctgcttgggt

SEQ ID NO: 127309 - DNA, 22 bp, Artificial Sequence
  Synthetic oligonucleotide; TTT chr11 5320160 5320181 5320165 5320160 -
ctttctagtgcctgcttgggtt

SEQ ID NO: 127310 - DNA, 22 bp, Artificial Sequence
  Synthetic oligonucleotide; TTC chr11 5320159 5320180 5320164 5320159 -
tttctagtgcctgcttgggttt

SEQ ID NO: 127311 - DNA, 22 bp, Artificial Sequence
  Synthetic oligonucleotide; CTT chr11 5320157 5320178 5320162 5320157 -
tctagtgcctgcttgggtttta

SEQ ID NO: 127312 - DNA, 22 bp, Artificial Sequence
  Synthetic oligonucleotide; TTT chr11 5320156 5320177 5320161 5320156 -
ctagtgcctgcttgggttttaa

SEQ ID NO: 127313 - DNA, 22 bp, Artificial Sequence
  Synthetic oligonucleotide; TTC chr11 5320155 5320176 5320160 5320155 -
tagtgcctgcttgggttttaaa

SEQ ID NO: 127314 - DNA, 22 bp, Artificial Sequence
  Synthetic oligonucleotide; CTA chr11 5320153 5320174 5320158 5320153 -
gtgcctgcttgggttttaaatt

SEQ ID NO: 127315 - DNA, 22 bp, Artificial Sequence
  Synthetic oligonucleotide; CTG chr11 5320146 5320167 5320151 5320146 -
cttgggttttaaatttcaataa

SEQ ID NO: 127316 - DNA, 22 bp, Artificial Sequence
  Synthetic oligonucleotide; CTT chr11 5320143 5320164 5320148 5320143 -
gggttttaaatttcaataaaaa

SEQ ID NO: 127317 - DNA, 22 bp, Artificial Sequence
  Synthetic oligonucleotide; TTG chr11 5320142 5320163 5320147 5320142 -
ggttttaaatttcaataaaaag

SEQ ID NO: 127318 - DNA, 22 bp, Artificial Sequence
  Synthetic oligonucleotide; TTT chr11 5320137 5320158 5320142 5320137 -
taaatttcaataaaaagaacaa

SEQ ID NO: 127319 - DNA, 22 bp, Artificial Sequence
  Synthetic oligonucleotide; TTT chr11 5320136 5320157 5320141 5320136 -
aaatttcaataaaaagaacaag

SEQ ID NO: 127320 - DNA, 22 bp, Artificial Sequence
  Synthetic oligonucleotide; TTA chr11 5320135 5320156 5320140 5320135 -
aatttcaataaaaagaacaagt

SEQ ID NO: 127321 - DNA, 22 bp, Artificial Sequence
  Synthetic oligonucleotide; TTT chr11 5320130 5320151 5320135 5320130 -
caataaaaagaacaagtcctag

SEQ ID NO: 127322 - DNA, 22 bp, Artificial Sequence
  Synthetic oligonucleotide; TTC chr11 5320129 5320150 5320134 5320129 -
aataaaaagaacaagtcctagg

SEQ ID NO: 127323 - DNA, 22 bp, Artificial Sequence
  Synthetic oligonucleotide; CTA chr11 5320109 5320130 5320114 5320109 -
ggtatttcattttctttgtggc

SEQ ID NO: 127324 - DNA, 22 bp, Artificial Sequence
  Synthetic oligonucleotide; TTT chr11 5320102 5320123 5320107 5320102 -
cattttctttgtggctgttctt

SEQ ID NO: 127325 - DNA, 22 bp, Artificial Sequence
  Synthetic oligonucleotide; TTC chr11 5320101 5320122 5320106 5320101 -
attttctttgtggctgttctta

SEQ ID NO: 127326 - DNA, 22 bp, Artificial Sequence
  Synthetic oligonucleotide; TTT chr11 5320097 5320118 5320102 5320097 -
tctttgtggctgttcttaatgg

SEQ ID NO: 127327 - DNA, 22 bp, Artificial Sequence
  Synthetic oligonucleotide; TTT chr11 5320096 5320117 5320101 5320096 -
ctttgtggctgttcttaatggg

SEQ ID NO: 127328 - DNA, 22 bp, Artificial Sequence
  Synthetic oligonucleotide; TTC chr11 5320095 5320116 5320100 5320095 -
tttgtggctgttcttaatggga

SEQ ID NO: 127329 - DNA, 22 bp, Artificial Sequence
  Synthetic oligonucleotide; CTT chr11 5320093 5320114 5320098 5320093 -
tgtggctgttcttaatgggatt

SEQ ID NO: 127330 - DNA, 22 bp, Artificial Sequence
  Synthetic oligonucleotide; TTT chr11 5320092 5320113 5320097 5320092 -
gtggctgttcttaatgggattg

SEQ ID NO: 127331 - DNA, 22 bp, Artificial Sequence
  Synthetic oligonucleotide; TTG chr11 5320091 5320112 5320096 5320091 -
tggctgttcttaatgggattgt

SEQ ID NO: 127332 - DNA, 22 bp, Artificial Sequence
  Synthetic oligonucleotide; CTG chr11 5320085 5320106 5320090 5320085 -
ttcttaatgggattgtgttctc

SEQ ID NO: 127333 - DNA, 22 bp, Artificial Sequence
  Synthetic oligonucleotide; TTC chr11 5320082 5320103 5320087 5320082 -
ttaatgggattgtgttctcgat

SEQ ID NO: 127334 - DNA, 22 bp, Artificial Sequence
  Synthetic oligonucleotide; CTT chr11 5320080 5320101 5320085 5320080 -
aatgggattgtgttctcgattt

SEQ ID NO: 127335 - DNA, 22 bp, Artificial Sequence
  Synthetic oligonucleotide; TTA chr11 5320079 5320100 5320084 5320079 -
atgggattgtgttctcgatttg

SEQ ID NO: 127336 - DNA, 22 bp, Artificial Sequence
  Synthetic oligonucleotide; TTG chr11 5320070 5320091 5320075 5320070 -
tgttctcgatttgactctcagc

SEQ ID NO: 127337 - DNA, 22 bp, Artificial Sequence
  Synthetic oligonucleotide; TTC chr11 5320065 5320086 5320070 5320065 -
tcgatttgactctcagcctggg

SEQ ID NO: 127338 - DNA, 22 bp, Artificial Sequence
  Synthetic oligonucleotide; CTC chr11 5320063 5320084 5320068 5320063 -
gatttgactctcagcctgggcc

SEQ ID NO: 127339 - DNA, 22 bp, Artificial Sequence
  Synthetic oligonucleotide; TTT chr11 5320058 5320079 5320063 5320058 -
gactctcagcctgggccttatt

SEQ ID NO: 127340 - DNA, 22 bp, Artificial Sequence
  Synthetic oligonucleotide; TTG chr11 5320057 5320078 5320062 5320057 -
actctcagcctgggccttattg

SEQ ID NO: 127341 - DNA, 22 bp, Artificial Sequence
  Synthetic oligonucleotide; CTC chr11 5320053 5320074 5320058 5320053 -
tcagcctgggccttattggtgt

SEQ ID NO: 127342 - DNA, 22 bp, Artificial Sequence
  Synthetic oligonucleotide; CTC chr11 5320051 5320072 5320056 5320051 -
agcctgggccttattggtgtat

SEQ ID NO: 127343 - DNA, 22 bp, Artificial Sequence
  Synthetic oligonucleotide; CTG chr11 5320045 5320066 5320050 5320045 -
ggccttattggtgtatggaaat

SEQ ID NO: 127344 - DNA, 22 bp, Artificial Sequence
  Synthetic oligonucleotide; CTT chr11 5320039 5320060 5320044 5320039 -
attggtgtatggaaatgctact

SEQ ID NO: 127345 - DNA, 22 bp, Artificial Sequence
  Synthetic oligonucleotide; TTA chr11 5320038 5320059 5320043 5320038 -
ttggtgtatggaaatgctactg

SEQ ID NO: 127346 - DNA, 22 bp, Artificial Sequence
  Synthetic oligonucleotide; TTG chr11 5320035 5320056 5320040 5320035 -
gtgtatggaaatgctactgatt

SEQ ID NO: 127347 - DNA, 22 bp, Artificial Sequence
  Synthetic oligonucleotide; CTA chr11 5320019 5320040 5320024 5320019 -
ctgatttttgtatgtgattttg

SEQ ID NO: 127348 - DNA, 22 bp, Artificial Sequence
  Synthetic oligonucleotide; CTG chr11 5320016 5320037 5320021 5320016 -
atttttgtatgtgattttgtat

SEQ ID NO: 127349 - DNA, 22 bp, Artificial Sequence
  Synthetic oligonucleotide; TTT chr11 5320012 5320033 5320017 5320012 -
ttgtatgtgattttgtatcctg

SEQ ID NO: 127350 - DNA, 22 bp, Artificial Sequence
  Synthetic oligonucleotide; TTT chr11 5320011 5320032 5320016 5320011 -
tgtatgtgattttgtatcctga

SEQ ID NO: 127351 - DNA, 22 bp, Artificial Sequence
  Synthetic oligonucleotide; TTT chr11 5320010 5320031 5320015 5320010 -
gtatgtgattttgtatcctgaa

SEQ ID NO: 127352 - DNA, 22 bp, Artificial Sequence
  Synthetic oligonucleotide; TTG chr11 5320009 5320030 5320014 5320009 -
tatgtgattttgtatcctgaaa

SEQ ID NO: 127353 - DNA, 22 bp, Artificial Sequence
  Synthetic oligonucleotide; TTT chr11 5319999 5320020 5320004 5319999 -
tgtatcctgaaaccttgctaaa

SEQ ID NO: 127354 - DNA, 22 bp, Artificial Sequence
  Synthetic oligonucleotide; TTT chr11 5319998 5320019 5320003 5319998 -
gtatcctgaaaccttgctaaaa

SEQ ID NO: 127355 - DNA, 22 bp, Artificial Sequence
  Synthetic oligonucleotide; TTG chr11 5319997 5320018 5320002 5319997 -
tatcctgaaaccttgctaaaat

SEQ ID NO: 127356 - DNA, 22 bp, Artificial Sequence
  Synthetic oligonucleotide; CTG chr11 5319990 5320011 5319995 5319990 -
aaaccttgctaaaattgtttat

SEQ ID NO: 127357 - DNA, 22 bp, Artificial Sequence
  Synthetic oligonucleotide; CTT chr11 5319983 5320004 5319988 5319983 -
gctaaaattgtttatcagttct

SEQ ID NO: 127358 - DNA, 22 bp, Artificial Sequence
  Synthetic oligonucleotide; TTG chr11 5319982 5320003 5319987 5319982 -
ctaaaattgtttatcagttcta

SEQ ID NO: 127359 - DNA, 22 bp, Artificial Sequence
  Synthetic oligonucleotide; CTA chr11 5319979 5320000 5319984 5319979 -
aaattgtttatcagttctagca

SEQ ID NO: 127360 - DNA, 22 bp, Artificial Sequence
  Synthetic oligonucleotide; TTG chr11 5319973 5319994 5319978 5319973 -
tttatcagttctagcagccttt

SEQ ID NO: 127361 - DNA, 22 bp, Artificial Sequence
  Synthetic oligonucleotide; TTT chr11 5319970 5319991 5319975 5319970 -
atcagttctagcagccttttgg

SEQ ID NO: 127362 - DNA, 22 bp, Artificial Sequence
  Synthetic oligonucleotide; TTA chr11 5319969 5319990 5319974 5319969 -
tcagttctagcagccttttgga

SEQ ID NO: 127363 - DNA, 22 bp, Artificial Sequence
  Synthetic oligonucleotide; TTC chr11 5319962 5319983 5319967 5319962 -
tagcagccttttggaagaatct

SEQ ID NO: 127364 - DNA, 22 bp, Artificial Sequence
  Synthetic oligonucleotide; CTA chr11 5319960 5319981 5319965 5319960 -
gcagccttttggaagaatctgt

SEQ ID NO: 127365 - DNA, 22 bp, Artificial Sequence
  Synthetic oligonucleotide; CTT chr11 5319952 5319973 5319957 5319952 -
ttggaagaatctgtaggatttt

SEQ ID NO: 127366 - DNA, 22 bp, Artificial Sequence
  Synthetic oligonucleotide; TTT chr11 5319951 5319972 5319956 5319951 -
tggaagaatctgtaggattttc

SEQ ID NO: 127367 - DNA, 22 bp, Artificial Sequence
  Synthetic oligonucleotide; TTT chr11 5319950 5319971 5319955 5319950 -
ggaagaatctgtaggattttct

SEQ ID NO: 127368 - DNA, 22 bp, Artificial Sequence
  Synthetic oligonucleotide; TTG chr11 5319949 5319970 5319954 5319949 -
gaagaatctgtaggattttcta

SEQ ID NO: 127369 - DNA, 22 bp, Artificial Sequence
  Synthetic oligonucleotide; CTG chr11 5319939 5319960 5319944 5319939 -
taggattttctaagtatagagt

SEQ ID NO: 127370 - DNA, 22 bp, Artificial Sequence
  Synthetic oligonucleotide; TTT chr11 5319931 5319952 5319936 5319931 -
tctaagtatagagtcatatcat

SEQ ID NO: 127371 - DNA, 22 bp, Artificial Sequence
  Synthetic oligonucleotide; TTT chr11 5319930 5319951 5319935 5319930 -
ctaagtatagagtcatatcatc

SEQ ID NO: 127372 - DNA, 22 bp, Artificial Sequence
  Synthetic oligonucleotide; TTC chr11 5319929 5319950 5319934 5319929 -
taagtatagagtcatatcatca

SEQ ID NO: 127373 - DNA, 22 bp, Artificial Sequence
  Synthetic oligonucleotide; CTA chr11 5319927 5319948 5319932 5319927 -
agtatagagtcatatcatcagc

SEQ ID NO: 127374 - DNA, 22 bp, Artificial Sequence
  Synthetic oligonucleotide; TTT chr11 5319890 5319911 5319895 5319890 -
ggcttattgtcctattttgatg

SEQ ID NO: 127375 - DNA, 22 bp, Artificial Sequence
  Synthetic oligonucleotide; TTG chr11 5319889 5319910 5319894 5319889 -
gcttattgtcctattttgatgc

SEQ ID NO: 127376 - DNA, 22 bp, Artificial Sequence
  Synthetic oligonucleotide; CTT chr11 5319885 5319906 5319890 5319885 -
attgtcctattttgatgccatt

SEQ ID NO: 127377 - DNA, 22 bp, Artificial Sequence
  Synthetic oligonucleotide; TTA chr11 5319884 5319905 5319889 5319884 -
ttgtcctattttgatgccattt

SEQ ID NO: 127378 - DNA, 22 bp, Artificial Sequence
  Synthetic oligonucleotide; TTG chr11 5319881 5319902 5319886 5319881 -
tcctattttgatgccatttctt

SEQ ID NO: 127379 - DNA, 22 bp, Artificial Sequence
  Synthetic oligonucleotide; CTA chr11 5319876 5319897 5319881 5319876 -
ttttgatgccatttctttcttt

SEQ ID NO: 127380 - DNA, 22 bp, Artificial Sequence
  Synthetic oligonucleotide; TTT chr11 5319873 5319894 5319878 5319873 -
tgatgccatttctttctttctc

SEQ ID NO: 127381 - DNA, 22 bp, Artificial Sequence
  Synthetic oligonucleotide; TTT chr11 5319872 5319893 5319877 5319872 -
gatgccatttctttctttctct

SEQ ID NO: 127382 - DNA, 22 bp, Artificial Sequence
  Synthetic oligonucleotide; TTG chr11 5319871 5319892 5319876 5319871 -
atgccatttctttctttctctc

SEQ ID NO: 127383 - DNA, 22 bp, Artificial Sequence
  Synthetic oligonucleotide; TTT chr11 5319862 5319883 5319867 5319862 -
ctttctttctctcgcctgattg

SEQ ID NO: 127384 - DNA, 22 bp, Artificial Sequence
  Synthetic oligonucleotide; TTC chr11 5319861 5319882 5319866 5319861 -
tttctttctctcgcctgattgc

SEQ ID NO: 127385 - DNA, 22 bp, Artificial Sequence
  Synthetic oligonucleotide; CTT chr11 5319859 5319880 5319864 5319859 -
tctttctctcgcctgattgccc

SEQ ID NO: 127386 - DNA, 22 bp, Artificial Sequence
  Synthetic oligonucleotide; TTT chr11 5319858 5319879 5319863 5319858 -
ctttctctcgcctgattgccct

SEQ ID NO: 127387 - DNA, 22 bp, Artificial Sequence
  Synthetic oligonucleotide; TTC chr11 5319857 5319878 5319862 5319857 -
tttctctcgcctgattgccctg

SEQ ID NO: 127388 - DNA, 22 bp, Artificial Sequence
  Synthetic oligonucleotide; CTT chr11 5319855 5319876 5319860 5319855 -
tctctcgcctgattgccctggt

SEQ ID NO: 127389 - DNA, 22 bp, Artificial Sequence
  Synthetic oligonucleotide; TTT chr11 5319854 5319875 5319859 5319854 -
ctctcgcctgattgccctggtt

SEQ ID NO: 127390 - DNA, 22 bp, Artificial Sequence
  Synthetic oligonucleotide; TTC chr11 5319853 5319874 5319858 5319853 -
tctcgcctgattgccctggtta

SEQ ID NO: 127391 - DNA, 22 bp, Artificial Sequence
  Synthetic oligonucleotide; CTC chr11 5319851 5319872 5319856 5319851 -
tcgcctgattgccctggttagg

SEQ ID NO: 127392 - DNA, 22 bp, Artificial Sequence
  Synthetic oligonucleotide; CTC chr11 5319849 5319870 5319854 5319849 -
gcctgattgccctggttaggac

SEQ ID NO: 127393 - DNA, 22 bp, Artificial Sequence
  Synthetic oligonucleotide; CTG chr11 5319844 5319865 5319849 5319844 -
attgccctggttaggacttcca

SEQ ID NO: 127394 - DNA, 22 bp, Artificial Sequence
  Synthetic oligonucleotide; TTG chr11 5319840 5319861 5319845 5319840 -
ccctggttaggacttccaattt

SEQ ID NO: 127395 - DNA, 22 bp, Artificial Sequence
  Synthetic oligonucleotide; CTG chr11 5319835 5319856 5319840 5319835 -
gttaggacttccaattttatgt

SEQ ID NO: 127396 - DNA, 22 bp, Artificial Sequence
  Synthetic oligonucleotide; TTA chr11 5319831 5319852 5319836 5319831 -
ggacttccaattttatgttcac

SEQ ID NO: 127397 - DNA, 22 bp, Artificial Sequence
  Synthetic oligonucleotide; CTT chr11 5319825 5319846 5319830 5319825 -
ccaattttatgttcactaggag

SEQ ID NO: 127398 - DNA, 22 bp, Artificial Sequence
  Synthetic oligonucleotide; TTC chr11 5319824 5319845 5319829 5319824 -
caattttatgttcactaggagt

SEQ ID NO: 127399 - DNA, 22 bp, Artificial Sequence
  Synthetic oligonucleotide; TTT chr11 5319818 5319839 5319823 5319818 -
tatgttcactaggagtggtgag

SEQ ID NO: 127400 - DNA, 22 bp, Artificial Sequence
  Synthetic oligonucleotide; TTT chr11 5319817 5319838 5319822 5319817 -
atgttcactaggagtggtgaga

SEQ ID NO: 127401 - DNA, 22 bp, Artificial Sequence
  Synthetic oligonucleotide; TTA chr11 5319816 5319837 5319821 5319816 -
tgttcactaggagtggtgagaa

SEQ ID NO: 127402 - DNA, 22 bp, Artificial Sequence
  Synthetic oligonucleotide; TTC chr11 5319811 5319832 5319816 5319811 -
actaggagtggtgagaatggga

SEQ ID NO: 127403 - DNA, 22 bp, Artificial Sequence
  Synthetic oligonucleotide; CTA chr11 5319807 5319828 5319812 5319807 -
ggagtggtgagaatgggaatcc

SEQ ID NO: 127404 - DNA, 22 bp, Artificial Sequence
  Synthetic oligonucleotide; CTT chr11 5319783 5319804 5319788 5319783 -
gtcttgttgcagttttcgagga

SEQ ID NO: 127405 - DNA, 22 bp, Artificial Sequence
  Synthetic oligonucleotide; TTG chr11 5319782 5319803 5319787 5319782 -
tcttgttgcagttttcgaggag

SEQ ID NO: 127406 - DNA, 22 bp, Artificial Sequence
  Synthetic oligonucleotide; CTT chr11 5319778 5319799 5319783 5319778 -
gttgcagttttcgaggagaata

SEQ ID NO: 127407 - DNA, 22 bp, Artificial Sequence
  Synthetic oligonucleotide; TTG chr11 5319777 5319798 5319782 5319777 -
ttgcagttttcgaggagaatag

SEQ ID NO: 127408 - DNA, 22 bp, Artificial Sequence
  Synthetic oligonucleotide; TTG chr11 5319774 5319795 5319779 5319774 -
cagttttcgaggagaatagttc

SEQ ID NO: 127409 - DNA, 22 bp, Artificial Sequence
  Synthetic oligonucleotide; TTT chr11 5319768 5319789 5319773 5319768 -
tcgaggagaatagttccagctt

SEQ ID NO: 127410 - DNA, 22 bp, Artificial Sequence
  Synthetic oligonucleotide; TTT chr11 5319767 5319788 5319772 5319767 -
cgaggagaatagttccagcttt

SEQ ID NO: 127411 - DNA, 22 bp, Artificial Sequence
  Synthetic oligonucleotide; TTC chr11 5319766 5319787 5319771 5319766 -
gaggagaatagttccagctttt

SEQ ID NO: 127412 - DNA, 22 bp, Artificial Sequence
  Synthetic oligonucleotide; TTC chr11 5319752 5319773 5319757 5319752 -
cagcttttgcccattcagtatg

SEQ ID NO: 127413 - DNA, 22 bp, Artificial Sequence
  Synthetic oligonucleotide; CTT chr11 5319746 5319767 5319751 5319746 -
ttgcccattcagtatggttttg

SEQ ID NO: 127414 - DNA, 22 bp, Artificial Sequence
  Synthetic oligonucleotide; TTT chr11 5319745 5319766 5319750 5319745 -
tgcccattcagtatggttttgg

SEQ ID NO: 127415 - DNA, 22 bp, Artificial Sequence
  Synthetic oligonucleotide; TTT chr11 5319744 5319765 5319749 5319744 -
gcccattcagtatggttttggt

SEQ ID NO: 127416 - DNA, 22 bp, Artificial Sequence
  Synthetic oligonucleotide; TTG chr11 5319743 5319764 5319748 5319743 -
cccattcagtatggttttggtt

SEQ ID NO: 127417 - DNA, 22 bp, Artificial Sequence
  Synthetic oligonucleotide; TTC chr11 5319736 5319757 5319741 5319736 -
agtatggttttggttatgggtt

SEQ ID NO: 127418 - DNA, 22 bp, Artificial Sequence
  Synthetic oligonucleotide; TTT chr11 5319726 5319747 5319731 5319726 -
tggttatgggtttttcatacgt

SEQ ID NO: 127419 - DNA, 22 bp, Artificial Sequence
  Synthetic oligonucleotide; TTT chr11 5319725 5319746 5319730 5319725 -
ggttatgggtttttcatacgtg

SEQ ID NO: 127420 - DNA, 22 bp, Artificial Sequence
  Synthetic oligonucleotide; TTG chr11 5319724 5319745 5319729 5319724 -
gttatgggtttttcatacgtgg

SEQ ID NO: 127421 - DNA, 22 bp, Artificial Sequence
  Synthetic oligonucleotide; TTA chr11 5319720 5319741 5319725 5319720 -
tgggtttttcatacgtggcttt

SEQ ID NO: 127422 - DNA, 22 bp, Artificial Sequence
  Synthetic oligonucleotide; TTT chr11 5319713 5319734 5319718 5319713 -
ttcatacgtggcttttattctt

SEQ ID NO: 127423 - DNA, 22 bp, Artificial Sequence
  Synthetic oligonucleotide; TTT chr11 5319712 5319733 5319717 5319712 -
tcatacgtggcttttattcttt

SEQ ID NO: 127424 - DNA, 22 bp, Artificial Sequence
  Synthetic oligonucleotide; TTT chr11 5319711 5319732 5319716 5319711 -
catacgtggcttttattctttt

SEQ ID NO: 127425 - DNA, 22 bp, Artificial Sequence
  Synthetic oligonucleotide; TTC chr11 5319710 5319731 5319715 5319710 -
atacgtggcttttattcttttg

SEQ ID NO: 127426 - DNA, 22 bp, Artificial Sequence
  Synthetic oligonucleotide; CTT chr11 5319699 5319720 5319704 5319699 -
ttattcttttgaggtatgttcc

SEQ ID NO: 127427 - DNA, 22 bp, Artificial Sequence
  Synthetic oligonucleotide; TTT chr11 5319698 5319719 5319703 5319698 -
tattcttttgaggtatgttcct

SEQ ID NO: 127428 - DNA, 22 bp, Artificial Sequence
  Synthetic oligonucleotide; TTT chr11 5319697 5319718 5319702 5319697 -
attcttttgaggtatgttcctt

SEQ ID NO: 127429 - DNA, 22 bp, Artificial Sequence
  Synthetic oligonucleotide; TTA chr11 5319696 5319717 5319701 5319696 -
ttcttttgaggtatgttccttt

SEQ ID NO: 127430 - DNA, 22 bp, Artificial Sequence
  Synthetic oligonucleotide; TTC chr11 5319693 5319714 5319698 5319693 -
ttttgaggtatgttcctttgat

SEQ ID NO: 127431 - DNA, 22 bp, Artificial Sequence
  Synthetic oligonucleotide; CTT chr11 5319691 5319712 5319696 5319691 -
ttgaggtatgttcctttgatgc

SEQ ID NO: 127432 - DNA, 22 bp, Artificial Sequence
  Synthetic oligonucleotide; TTT chr11 5319690 5319711 5319695 5319690 -
tgaggtatgttcctttgatgcc

SEQ ID NO: 127433 - DNA, 22 bp, Artificial Sequence
  Synthetic oligonucleotide; TTT chr11 5319689 5319710 5319694 5319689 -
gaggtatgttcctttgatgcct

SEQ ID NO: 127434 - DNA, 22 bp, Artificial Sequence
  Synthetic oligonucleotide; TTG chr11 5319688 5319709 5319693 5319688 -
aggtatgttcctttgatgccta

SEQ ID NO: 127435 - DNA, 22 bp, Artificial Sequence
  Synthetic oligonucleotide; TTC chr11 5319678 5319699 5319683 5319678 -
ctttgatgcctagtctgttgga

SEQ ID NO: 127436 - DNA, 22 bp, Artificial Sequence
  Synthetic oligonucleotide; CTT chr11 5319675 5319696 5319680 5319675 -
tgatgcctagtctgttggaggt

SEQ ID NO: 127437 - DNA, 22 bp, Artificial Sequence
  Synthetic oligonucleotide; TTT chr11 5319674 5319695 5319679 5319674 -
gatgcctagtctgttggaggtt

SEQ ID NO: 127438 - DNA, 22 bp, Artificial Sequence
  Synthetic oligonucleotide; TTG chr11 5319673 5319694 5319678 5319673 -
atgcctagtctgttggaggttt

SEQ ID NO: 127439 - DNA, 22 bp, Artificial Sequence
  Synthetic oligonucleotide; CTA chr11 5319666 5319687 5319671 5319666 -
gtctgttggaggtttttatcat

SEQ ID NO: 127440 - DNA, 22 bp, Artificial Sequence
  Synthetic oligonucleotide; CTG chr11 5319661 5319682 5319666 5319661 -
ttggaggtttttatcatgaagg

SEQ ID NO: 127441 - DNA, 22 bp, Artificial Sequence
  Synthetic oligonucleotide; TTG chr11 5319658 5319679 5319663 5319658 -
gaggtttttatcatgaagggat

SEQ ID NO: 127442 - DNA, 22 bp, Artificial Sequence
  Synthetic oligonucleotide; TTT chr11 5319651 5319672 5319656 5319651 -
ttatcatgaagggatgttgaat

SEQ ID NO: 127443 - DNA, 22 bp, Artificial Sequence
  Synthetic oligonucleotide; TTT chr11 5319650 5319671 5319655 5319650 -
tatcatgaagggatgttgaatt

SEQ ID NO: 127444 - DNA, 22 bp, Artificial Sequence
  Synthetic oligonucleotide; TTT chr11 5319649 5319670 5319654 5319649 -
atcatgaagggatgttgaattt

SEQ ID NO: 127445 - DNA, 22 bp, Artificial Sequence
  Synthetic oligonucleotide; TTA chr11 5319648 5319669 5319653 5319648 -
tcatgaagggatgttgaatttt

SEQ ID NO: 127446 - DNA, 22 bp, Artificial Sequence
  Synthetic oligonucleotide; TTG chr11 5319632 5319653 5319637 5319632 -
aattttattgaaaggtttttct

SEQ ID NO: 127447 - DNA, 22 bp, Artificial Sequence
  Synthetic oligonucleotide; TTT chr11 5319627 5319648 5319632 5319627 -
tattgaaaggtttttctcagtc

SEQ ID NO: 127448 - DNA, 22 bp, Artificial Sequence
  Synthetic oligonucleotide; TTT chr11 5319626 5319647 5319631 5319626 -
attgaaaggtttttctcagtct

SEQ ID NO: 127449 - DNA, 22 bp, Artificial Sequence
  Synthetic oligonucleotide; TTA chr11 5319625 5319646 5319630 5319625 -
ttgaaaggtttttctcagtcta

SEQ ID NO: 127450 - DNA, 22 bp, Artificial Sequence
  Synthetic oligonucleotide; TTG chr11 5319622 5319643 5319627 5319622 -
aaaggtttttctcagtctattg

SEQ ID NO: 127451 - DNA, 22 bp, Artificial Sequence
  Synthetic oligonucleotide; TTT chr11 5319614 5319635 5319619 5319614 -
ttctcagtctattgagatgatc

SEQ ID NO: 127452 - DNA, 22 bp, Artificial Sequence
  Synthetic oligonucleotide; TTT chr11 5319613 5319634 5319618 5319613 -
tctcagtctattgagatgatca

SEQ ID NO: 127453 - DNA, 22 bp, Artificial Sequence
  Synthetic oligonucleotide; TTT chr11 5319612 5319633 5319617 5319612 -
ctcagtctattgagatgatcat

SEQ ID NO: 127454 - DNA, 22 bp, Artificial Sequence
  Synthetic oligonucleotide; TTC chr11 5319611 5319632 5319616 5319611 -
tcagtctattgagatgatcata

SEQ ID NO: 127455 - DNA, 22 bp, Artificial Sequence
  Synthetic oligonucleotide; CTC chr11 5319609 5319630 5319614 5319609 -
agtctattgagatgatcatatg

SEQ ID NO: 127456 - DNA, 22 bp, Artificial Sequence
  Synthetic oligonucleotide; CTA chr11 5319603 5319624 5319608 5319603 -
ttgagatgatcatatggtttgt

SEQ ID NO: 127457 - DNA, 22 bp, Artificial Sequence
  Synthetic oligonucleotide; TTG chr11 5319600 5319621 5319605 5319600 -
agatgatcatatggtttgtggg

SEQ ID NO: 127458 - DNA, 22 bp, Artificial Sequence
  Synthetic oligonucleotide; TTT chr11 5319583 5319604 5319588 5319583 -
gtgggaggtgaaagatctctac

SEQ ID NO: 127459 - DNA, 22 bp, Artificial Sequence
  Synthetic oligonucleotide; TTG chr11 5319582 5319603 5319587 5319582 -
tgggaggtgaaagatctctaca

SEQ ID NO: 127460 - DNA, 22 bp, Artificial Sequence
  Synthetic oligonucleotide; CTC chr11 5319564 5319585 5319569 5319564 -
tacaaggagaactacaaaacac

SEQ ID NO: 127461 - DNA, 22 bp, Artificial Sequence
  Synthetic oligonucleotide; CTA chr11 5319562 5319583 5319567 5319562 -
caaggagaactacaaaacactg

SEQ ID NO: 127462 - DNA, 22 bp, Artificial Sequence
  Synthetic oligonucleotide; CTA chr11 5319550 5319571 5319555 5319550 -
caaaacactgctgaaagaaatc

SEQ ID NO: 127463 - DNA, 22 bp, Artificial Sequence
  Synthetic oligonucleotide; CTG chr11 5319540 5319561 5319545 5319540 -
ctgaaagaaatcagaaacaaca

SEQ ID NO: 127464 - DNA, 22 bp, Artificial Sequence
  Synthetic oligonucleotide; CTG chr11 5319537 5319558 5319542 5319537 -
aaagaaatcagaaacaacacaa

SEQ ID NO: 127465 - DNA, 22 bp, Artificial Sequence
  Synthetic oligonucleotide; CTT chr11 5319497 5319518 5319502 5319497 -
tccaggctcatggattggaaga

SEQ ID NO: 127466 - DNA, 22 bp, Artificial Sequence
  Synthetic oligonucleotide; TTT chr11 5319496 5319517 5319501 5319496 -
ccaggctcatggattggaagaa

SEQ ID NO: 127467 - DNA, 22 bp, Artificial Sequence
  Synthetic oligonucleotide; TTC chr11 5319495 5319516 5319500 5319495 -
caggctcatggattggaagaat

SEQ ID NO: 127468 - DNA, 22 bp, Artificial Sequence
  Synthetic oligonucleotide; CTC chr11 5319488 5319509 5319493 5319488 -
atggattggaagaatcaatatg

SEQ ID NO: 127469 - DNA, 22 bp, Artificial Sequence
  Synthetic oligonucleotide; TTG chr11 5319480 5319501 5319485 5319480 -
gaagaatcaatatgaatttaaa

SEQ ID NO: 127470 - DNA, 22 bp, Artificial Sequence
  Synthetic oligonucleotide; TTT chr11 5319461 5319482 5319466 5319461 -
aaatggccatactgctcaaagc

SEQ ID NO: 127471 - DNA, 22 bp, Artificial Sequence
  Synthetic oligonucleotide; TTA chr11 5319460 5319481 5319465 5319460 -
aatggccatactgctcaaagca

SEQ ID NO: 127472 - DNA, 22 bp, Artificial Sequence
  Synthetic oligonucleotide; CTG chr11 5319447 5319468 5319452 5319447 -
ctcaaagcaatttagacattca

SEQ ID NO: 127473 - DNA, 22 bp, Artificial Sequence
  Synthetic oligonucleotide; CTC chr11 5319444 5319465 5319449 5319444 -
aaagcaatttagacattcattg

SEQ ID NO: 127474 - DNA, 22 bp, Artificial Sequence
  Synthetic oligonucleotide; TTT chr11 5319434 5319455 5319439 5319434 -
agacattcattgcaatttctat

SEQ ID NO: 127475 - DNA, 22 bp, Artificial Sequence
  Synthetic oligonucleotide; TTA chr11 5319433 5319454 5319438 5319433 -
gacattcattgcaatttctatc

SEQ ID NO: 127476 - DNA, 22 bp, Artificial Sequence
  Synthetic oligonucleotide; TTC chr11 5319426 5319447 5319431 5319426 -
attgcaatttctatccaattac

SEQ ID NO: 127477 - DNA, 22 bp, Artificial Sequence
  Synthetic oligonucleotide; TTG chr11 5319422 5319443 5319427 5319422 -
caatttctatccaattaccaat

SEQ ID NO: 127478 - DNA, 22 bp, Artificial Sequence
  Synthetic oligonucleotide; TTT chr11 5319416 5319437 5319421 5319416 -
ctatccaattaccaatgtcatt

SEQ ID NO: 127479 - DNA, 22 bp, Artificial Sequence
  Synthetic oligonucleotide; TTC chr11 5319415 5319436 5319420 5319415 -
tatccaattaccaatgtcattc

SEQ ID NO: 127480 - DNA, 22 bp, Artificial Sequence
  Synthetic oligonucleotide; CTA chr11 5319413 5319434 5319418 5319413 -
tccaattaccaatgtcattctt

SEQ ID NO: 127481 - DNA, 22 bp, Artificial Sequence
  Synthetic oligonucleotide; TTA chr11 5319405 5319426 5319410 5319405 -
ccaatgtcattcttcacagtat

SEQ ID NO: 127482 - DNA, 22 bp, Artificial Sequence
  Synthetic oligonucleotide; TTC chr11 5319393 5319414 5319398 5319393 -
ttcacagtattagaaaaactag

SEQ ID NO: 127483 - DNA, 22 bp, Artificial Sequence
  Synthetic oligonucleotide; CTT chr11 5319391 5319412 5319396 5319391 -
cacagtattagaaaaactagtt

SEQ ID NO: 127484 - DNA, 22 bp, Artificial Sequence
  Synthetic oligonucleotide; TTC chr11 5319390 5319411 5319395 5319390 -
acagtattagaaaaactagttt

SEQ ID NO: 127485 - DNA, 22 bp, Artificial Sequence
  Synthetic oligonucleotide; TTA chr11 5319381 5319402 5319386 5319381 -
gaaaaactagtttaaaattcat

SEQ ID NO: 127486 - DNA, 22 bp, Artificial Sequence
  Synthetic oligonucleotide; CTA chr11 5319372 5319393 5319377 5319372 -
gtttaaaattcatatggaacca

SEQ ID NO: 127487 - DNA, 22 bp, Artificial Sequence
  Synthetic oligonucleotide; TTT chr11 5319368 5319389 5319373 5319368 -
aaaattcatatggaaccaaaaa

SEQ ID NO: 127488 - DNA, 22 bp, Artificial Sequence
  Synthetic oligonucleotide; TTA chr11 5319367 5319388 5319372 5319367 -
aaattcatatggaaccaaaaag

SEQ ID NO: 127489 - DNA, 22 bp, Artificial Sequence
  Synthetic oligonucleotide; TTC chr11 5319361 5319382 5319366 5319361 -
atatggaaccaaaaagagcctg

SEQ ID NO: 127490 - DNA, 22 bp, Artificial Sequence
  Synthetic oligonucleotide; CTG chr11 5319339 5319360 5319344 5319339 -
aacaggcaaagcaatcttaagc

SEQ ID NO: 127491 - DNA, 22 bp, Artificial Sequence
  Synthetic oligonucleotide; CTT chr11 5319321 5319342 5319326 5319321 -
aagcagaaagaacaaaattgga

SEQ ID NO: 127492 - DNA, 22 bp, Artificial Sequence
  Synthetic oligonucleotide; TTA chr11 5319320 5319341 5319325 5319320 -
agcagaaagaacaaaattggaa

SEQ ID NO: 127493 - DNA, 22 bp, Artificial Sequence
  Synthetic oligonucleotide; TTG chr11 5319301 5319322 5319306 5319301 -
gaagcaccacaccacctgactt

SEQ ID NO: 127494 - DNA, 22 bp, Artificial Sequence
  Synthetic oligonucleotide; CTG chr11 5319283 5319304 5319288 5319283 -
acttgaaactacaggccaggca

SEQ ID NO: 127495 - DNA, 22 bp, Artificial Sequence
  Synthetic oligonucleotide; CTT chr11 5319279 5319300 5319284 5319279 -
gaaactacaggccaggcacggt

SEQ ID NO: 127496 - DNA, 22 bp, Artificial Sequence
  Synthetic oligonucleotide; TTG chr11 5319278 5319299 5319283 5319278 -
aaactacaggccaggcacggtg

SEQ ID NO: 127497 - DNA, 22 bp, Artificial Sequence
  Synthetic oligonucleotide; CTA chr11 5319272 5319293 5319277 5319272 -
caggccaggcacggtggctcac

SEQ ID NO: 127498 - DNA, 22 bp, Artificial Sequence
  Synthetic oligonucleotide; CTC chr11 5319252 5319273 5319257 5319252 -
acgcctgtaactctagcacttt

SEQ ID NO: 127499 - DNA, 22 bp, Artificial Sequence
  Synthetic oligonucleotide; CTG chr11 5319245 5319266 5319250 5319245 -
taactctagcactttagggggc

SEQ ID NO: 127500 - DNA, 22 bp, Artificial Sequence
  Synthetic oligonucleotide; CTC chr11 5319239 5319260 5319244 5319239 -
tagcactttagggggctgaggt

SEQ ID NO: 127501 - DNA, 22 bp, Artificial Sequence
  Synthetic oligonucleotide; CTA chr11 5319237 5319258 5319242 5319237 -
gcactttagggggctgaggtgg

SEQ ID NO: 127502 - DNA, 22 bp, Artificial Sequence
  Synthetic oligonucleotide; CTT chr11 5319231 5319252 5319236 5319231 -
tagggggctgaggtgggtgtat

SEQ ID NO: 127503 - DNA, 22 bp, Artificial Sequence
  Synthetic oligonucleotide; TTT chr11 5319230 5319251 5319235 5319230 -
agggggctgaggtgggtgtatc

SEQ ID NO: 127504 - DNA, 22 bp, Artificial Sequence
  Synthetic oligonucleotide; TTA chr11 5319229 5319250 5319234 5319229 -
gggggctgaggtgggtgtatca

SEQ ID NO: 127505 - DNA, 22 bp, Artificial Sequence
  Synthetic oligonucleotide; CTG chr11 5319221 5319242 5319226 5319221 -
aggtgggtgtatcacctgaggt

SEQ ID NO: 127506 - DNA, 22 bp, Artificial Sequence
  Synthetic oligonucleotide; CTG chr11 5319203 5319224 5319208 5319203 -
aggtcaggagttcaagaccagc

SEQ ID NO: 127507 - DNA, 22 bp, Artificial Sequence
  Synthetic oligonucleotide; TTC chr11 5319190 5319211 5319195 5319190 -
aagaccagcctggtcaacatgg

SEQ ID NO: 127508 - DNA, 22 bp, Artificial Sequence
  Synthetic oligonucleotide; CTG chr11 5319178 5319199 5319183 5319178 -
gtcaacatggtgaaacactgtc

SEQ ID NO: 127509 - DNA, 22 bp, Artificial Sequence
  Synthetic oligonucleotide; CTG chr11 5319158 5319179 5319163 5319158 -
tctctactaaaaatacaaaatt

SEQ ID NO: 127510 - DNA, 22 bp, Artificial Sequence
  Synthetic oligonucleotide; CTC chr11 5319154 5319175 5319159 5319154 -
tactaaaaatacaaaattagcc

SEQ ID NO: 127511 - DNA, 22 bp, Artificial Sequence
  Synthetic oligonucleotide; CTA chr11 5319152 5319173 5319157 5319152 -
ctaaaaatacaaaattagccgg

SEQ ID NO: 127512 - DNA, 22 bp, Artificial Sequence
  Synthetic oligonucleotide; CTA chr11 5319149 5319170 5319154 5319149 -
aaaatacaaaattagccggctg

SEQ ID NO: 127513 - DNA, 22 bp, Artificial Sequence
  Synthetic oligonucleotide; TTA chr11 5319135 5319156 5319140 5319135 -
gccggctgtggtggtgggggct

SEQ ID NO: 127514 - DNA, 22 bp, Artificial Sequence
  Synthetic oligonucleotide; CTG chr11 5319127 5319148 5319132 5319127 -
tggtggtgggggctgtaatccc

SEQ ID NO: 127515 - DNA, 22 bp, Artificial Sequence
  Synthetic oligonucleotide; CTG chr11 5319112 5319133 5319117 5319112 -
taatcccagctactcggaaggc

SEQ ID NO: 127516 - DNA, 22 bp, Artificial Sequence
  Synthetic oligonucleotide; CTA chr11 5319100 5319121 5319105 5319100 -
ctcggaaggctgaggcaggaga

SEQ ID NO: 127517 - DNA, 22 bp, Artificial Sequence
  Synthetic oligonucleotide; CTC chr11 5319097 5319118 5319102 5319097 -
ggaaggctgaggcaggagaatt

SEQ ID NO: 127518 - DNA, 22 bp, Artificial Sequence
  Synthetic oligonucleotide; CTG chr11 5319088 5319109 5319093 5319088 -
aggcaggagaattgcttgaact

SEQ ID NO: 127519 - DNA, 22 bp, Artificial Sequence
  Synthetic oligonucleotide; TTG chr11 5319074 5319095 5319079 5319074 -
cttgaactctggaggcagacgg

SEQ ID NO: 127520 - DNA, 22 bp, Artificial Sequence
  Synthetic oligonucleotide; CTT chr11 5319071 5319092 5319076 5319071 -
gaactctggaggcagacggtgc

SEQ ID NO: 127521 - DNA, 22 bp, Artificial Sequence
  Synthetic oligonucleotide; TTG chr11 5319070 5319091 5319075 5319070 -
aactctggaggcagacggtgca

SEQ ID NO: 127522 - DNA, 22 bp, Artificial Sequence
  Synthetic oligonucleotide; CTC chr11 5319065 5319086 5319070 5319065 -
tggaggcagacggtgcagtgag

SEQ ID NO: 127523 - DNA, 22 bp, Artificial Sequence
  Synthetic oligonucleotide; CTG chr11 5319063 5319084 5319068 5319063 -
gaggcagacggtgcagtgagcc

SEQ ID NO: 127524 - DNA, 22 bp, Artificial Sequence
  Synthetic oligonucleotide; CTG chr11 5319026 5319047 5319031 5319026 -
cactccagcctgggtgacagag

SEQ ID NO: 127525 - DNA, 22 bp, Artificial Sequence
  Synthetic oligonucleotide; CTC chr11 5319021 5319042 5319026 5319021 -
cagcctgggtgacagagtgaaa

SEQ ID NO: 127526 - DNA, 22 bp, Artificial Sequence
  Synthetic oligonucleotide; CTG chr11 5319014 5319035 5319019 5319014 -
ggtgacagagtgaaactctgaa

SEQ ID NO: 127527 - DNA, 22 bp, Artificial Sequence
  Synthetic oligonucleotide; CTC chr11 5318996 5319017 5319001 5318996 -
tgaaaaaataaaaaaagaaaga

SEQ ID NO: 127528 - DNA, 22 bp, Artificial Sequence
  Synthetic oligonucleotide; CTG chr11 5318994 5319015 5318999 5318994 -
aaaaaataaaaaaagaaagaaa

SEQ ID NO: 127529 - DNA, 22 bp, Artificial Sequence
  Synthetic oligonucleotide; CTA chr11 5318938 5318959 5318943 5318938 -
cattataaggccacagtacccc

SEQ ID NO: 127530 - DNA, 22 bp, Artificial Sequence
  Synthetic oligonucleotide; TTA chr11 5318933 5318954 5318938 5318933 -
taaggccacagtaccccaaaca

SEQ ID NO: 127531 - DNA, 22 bp, Artificial Sequence
  Synthetic oligonucleotide; TTG chr11 5318900 5318921 5318905 5318900 -
ttacaaaaatagacacattgac

SEQ ID NO: 127532 - DNA, 22 bp, Artificial Sequence
  Synthetic oligonucleotide; TTA chr11 5318897 5318918 5318902 5318897 -
caaaaatagacacattgactaa

SEQ ID NO: 127533 - DNA, 22 bp, Artificial Sequence
  Synthetic oligonucleotide; TTG chr11 5318880 5318901 5318885 5318880 -
actaaggaaacacaatagaaaa

SEQ ID NO: 127534 - DNA, 22 bp, Artificial Sequence
  Synthetic oligonucleotide; CTA chr11 5318876 5318897 5318881 5318876 -
aggaaacacaatagaaaactca

SEQ ID NO: 127535 - DNA, 22 bp, Artificial Sequence
  Synthetic oligonucleotide; CTC chr11 5318855 5318876 5318860 5318855 -
aaaaataaagctacatagttac

SEQ ID NO: 127536 - DNA, 22 bp, Artificial Sequence
  Synthetic oligonucleotide; CTA chr11 5318842 5318863 5318847 5318842 -
catagttacaaccatctgatct

SEQ ID NO: 127537 - DNA, 22 bp, Artificial Sequence
  Synthetic oligonucleotide; TTA chr11 5318834 5318855 5318839 5318834 -
caaccatctgatcttcaacaac

SEQ ID NO: 127538 - DNA, 22 bp, Artificial Sequence
  Synthetic oligonucleotide; CTG chr11 5318824 5318845 5318829 5318824 -
atcttcaacaacactgacaaaa

SEQ ID NO: 127539 - DNA, 22 bp, Artificial Sequence
  Synthetic oligonucleotide; CTT chr11 5318819 5318840 5318824 5318819 -
caacaacactgacaaaaacaag

SEQ ID NO: 127540 - DNA, 22 bp, Artificial Sequence
  Synthetic oligonucleotide; TTC chr11 5318818 5318839 5318823 5318818 -
aacaacactgacaaaaacaagc

SEQ ID NO: 127541 - DNA, 22 bp, Artificial Sequence
  Synthetic oligonucleotide; CTG chr11 5318808 5318829 5318813 5318808 -
acaaaaacaagcagcgggaaaa

SEQ ID NO: 127542 - DNA, 22 bp, Artificial Sequence
  Synthetic oligonucleotide; CTA chr11 5318780 5318801 5318785 5318780 -
cctatccaataaactgtgctgg

SEQ ID NO: 127543 - DNA, 22 bp, Artificial Sequence
  Synthetic oligonucleotide; CTA chr11 5318776 5318797 5318781 5318776 -
tccaataaactgtgctggaata

SEQ ID NO: 127544 - DNA, 22 bp, Artificial Sequence
  Synthetic oligonucleotide; CTG chr11 5318764 5318785 5318769 5318764 -
tgctggaatacgtggctagcca

SEQ ID NO: 127545 - DNA, 22 bp, Artificial Sequence
  Synthetic oligonucleotide; CTG chr11 5318759 5318780 5318764 5318759 -
gaatacgtggctagccatatgc

SEQ ID NO: 127546 - DNA, 22 bp, Artificial Sequence
  Synthetic oligonucleotide; CTA chr11 5318746 5318767 5318751 5318746 -
gccatatgcagaagaatgaaac

SEQ ID NO: 127547 - DNA, 22 bp, Artificial Sequence
  Synthetic oligonucleotide; CTA chr11 5318722 5318743 5318727 5318722 -
gacccttaccttacaccattta

SEQ ID NO: 127548 - DNA, 22 bp, Artificial Sequence
  Synthetic oligonucleotide; CTT chr11 5318715 5318736 5318720 5318715 -
accttacaccatttagagaaat

SEQ ID NO: 127549 - DNA, 22 bp, Artificial Sequence
  Synthetic oligonucleotide; TTA chr11 5318714 5318735 5318719 5318714 -
ccttacaccatttagagaaatc

SEQ ID NO: 127550 - DNA, 22 bp, Artificial Sequence
  Synthetic oligonucleotide; CTT chr11 5318710 5318731 5318715 5318710 -
acaccatttagagaaatcaact

SEQ ID NO: 127551 - DNA, 22 bp, Artificial Sequence
  Synthetic oligonucleotide; TTA chr11 5318709 5318730 5318714 5318709 -
caccatttagagaaatcaactg

SEQ ID NO: 127552 - DNA, 22 bp, Artificial Sequence
  Synthetic oligonucleotide; TTT chr11 5318701 5318722 5318706 5318701 -
agagaaatcaactgaaaatgaa

SEQ ID NO: 127553 - DNA, 22 bp, Artificial Sequence
  Synthetic oligonucleotide; TTA chr11 5318700 5318721 5318705 5318700 -
gagaaatcaactgaaaatgaat

SEQ ID NO: 127554 - DNA, 22 bp, Artificial Sequence
  Synthetic oligonucleotide; CTG chr11 5318687 5318708 5318692 5318687 -
aaaatgaattcaaaacttaaat

SEQ ID NO: 127555 - DNA, 22 bp, Artificial Sequence
  Synthetic oligonucleotide; TTC chr11 5318676 5318697 5318681 5318676 -
aaaacttaaatgtaagatctca

SEQ ID NO: 127556 - DNA, 22 bp, Artificial Sequence
  Synthetic oligonucleotide; CTT chr11 5318669 5318690 5318674 5318669 -
aaatgtaagatctcaaatctta

SEQ ID NO: 127557 - DNA, 22 bp, Artificial Sequence
  Synthetic oligonucleotide; TTA chr11 5318668 5318689 5318673 5318668 -
aatgtaagatctcaaatcttac

SEQ ID NO: 127558 - DNA, 22 bp, Artificial Sequence
  Synthetic oligonucleotide; CTC chr11 5318655 5318676 5318660 5318655 -
aaatcttacctgcactggcagt

SEQ ID NO: 127559 - DNA, 22 bp, Artificial Sequence
  Synthetic oligonucleotide; CTT chr11 5318648 5318669 5318653 5318648 -
acctgcactggcagtgcatttt

SEQ ID NO: 127560 - DNA, 22 bp, Artificial Sequence
  Synthetic oligonucleotide; TTA chr11 5318647 5318668 5318652 5318647 -
cctgcactggcagtgcattttt

SEQ ID NO: 127561 - DNA, 22 bp, Artificial Sequence
  Synthetic oligonucleotide; CTG chr11 5318643 5318664 5318648 5318643 -
cactggcagtgcatttttggct

SEQ ID NO: 127562 - DNA, 22 bp, Artificial Sequence
  Synthetic oligonucleotide; CTG chr11 5318638 5318659 5318643 5318638 -
gcagtgcatttttggctaagcc

SEQ ID NO: 127563 - DNA, 22 bp, Artificial Sequence
  Synthetic oligonucleotide; TTT chr11 5318627 5318648 5318632 5318627 -
ttggctaagcccccaaaagcaa

SEQ ID NO: 127564 - DNA, 22 bp, Artificial Sequence
  Synthetic oligonucleotide; TTT chr11 5318626 5318647 5318631 5318626 -
tggctaagcccccaaaagcaat

SEQ ID NO: 127565 - DNA, 22 bp, Artificial Sequence
  Synthetic oligonucleotide; TTT chr11 5318625 5318646 5318630 5318625 -
ggctaagcccccaaaagcaatt

SEQ ID NO: 127566 - DNA, 22 bp, Artificial Sequence
  Synthetic oligonucleotide; TTG chr11 5318624 5318645 5318629 5318624 -
gctaagcccccaaaagcaattg

SEQ ID NO: 127567 - DNA, 22 bp, Artificial Sequence
  Synthetic oligonucleotide; CTA chr11 5318620 5318641 5318625 5318620 -
agcccccaaaagcaattgcaat

SEQ ID NO: 127568 - DNA, 22 bp, Artificial Sequence
  Synthetic oligonucleotide; TTG chr11 5318602 5318623 5318607 5318602 -
caatgcaaagaaaaattcacaa

SEQ ID NO: 127569 - DNA, 22 bp, Artificial Sequence
  Synthetic oligonucleotide; TTC chr11 5318584 5318605 5318589 5318584 -
acaagtggaacctaattaaact

SEQ ID NO: 127570 - DNA, 22 bp, Artificial Sequence
  Synthetic oligonucleotide; CTA chr11 5318570 5318591 5318575 5318570 -
attaaactaaagagcttcacta

SEQ ID NO: 127571 - DNA, 22 bp, Artificial Sequence
  Synthetic oligonucleotide; TTA chr11 5318566 5318587 5318571 5318566 -
aactaaagagcttcactattca

SEQ ID NO: 127572 - DNA, 22 bp, Artificial Sequence
  Synthetic oligonucleotide; CTA chr11 5318561 5318582 5318566 5318561 -
aagagcttcactattcacaata

SEQ ID NO: 127573 - DNA, 22 bp, Artificial Sequence
  Synthetic oligonucleotide; CTT chr11 5318553 5318574 5318558 5318553 -
cactattcacaataacaaagac

SEQ ID NO: 127574 - DNA, 22 bp, Artificial Sequence
  Synthetic oligonucleotide; TTC chr11 5318552 5318573 5318557 5318552 -
actattcacaataacaaagact

SEQ ID NO: 127575 - DNA, 22 bp, Artificial Sequence
  Synthetic oligonucleotide; CTA chr11 5318548 5318569 5318553 5318548 -
ttcacaataacaaagacttgga

SEQ ID NO: 127576 - DNA, 22 bp, Artificial Sequence
  Synthetic oligonucleotide; TTC chr11 5318545 5318566 5318550 5318545 -
acaataacaaagacttggaacc

SEQ ID NO: 127577 - DNA, 22 bp, Artificial Sequence
  Synthetic oligonucleotide; CTT chr11 5318529 5318550 5318534 5318529 -
ggaaccaacccaaatgtccaac

SEQ ID NO: 127578 - DNA, 22 bp, Artificial Sequence
  Synthetic oligonucleotide; TTG chr11 5318528 5318549 5318533 5318528 -
gaaccaacccaaatgtccaaca

SEQ ID NO: 127579 - DNA, 22 bp, Artificial Sequence
  Synthetic oligonucleotide; TTA chr11 5318490 5318511 5318495 5318490 -
agaaaatgtggcacatatacac

SEQ ID NO: 127580 - DNA, 22 bp, Artificial Sequence
  Synthetic oligonucleotide; CTA chr11 5318456 5318477 5318461 5318456 -
tgcagccataaaaaatgatgag

SEQ ID NO: 127581 - DNA, 22 bp, Artificial Sequence
  Synthetic oligonucleotide; TTC chr11 5318431 5318452 5318436 5318431 -
atgtcctttgtagggacatgga

SEQ ID NO: 127582 - DNA, 22 bp, Artificial Sequence
  Synthetic oligonucleotide; CTT chr11 5318423 5318444 5318428 5318423 -
tgtagggacatggatgaagctg

SEQ ID NO: 127583 - DNA, 22 bp, Artificial Sequence
  Synthetic oligonucleotide; TTT chr11 5318422 5318443 5318427 5318422 -
gtagggacatggatgaagctgg

SEQ ID NO: 127584 - DNA, 22 bp, Artificial Sequence
  Synthetic oligonucleotide; TTG chr11 5318421 5318442 5318426 5318421 -
tagggacatggatgaagctgga

SEQ ID NO: 127585 - DNA, 22 bp, Artificial Sequence
  Synthetic oligonucleotide; CTG chr11 5318401 5318422 5318406 5318401 -
gaaaccatcattctcagcaaac

SEQ ID NO: 127586 - DNA, 22 bp, Artificial Sequence
  Synthetic oligonucleotide; TTC chr11 5318388 5318409 5318393 5318388 -
tcagcaaactatcacaaggaca

SEQ ID NO: 127587 - DNA, 22 bp, Artificial Sequence
  Synthetic oligonucleotide; CTC chr11 5318386 5318407 5318391 5318386 -
agcaaactatcacaaggacaaa

SEQ ID NO: 127588 - DNA, 22 bp, Artificial Sequence
  Synthetic oligonucleotide; CTA chr11 5318377 5318398 5318382 5318377 -
tcacaaggacaaaaaaccaaat

SEQ ID NO: 127589 - DNA, 22 bp, Artificial Sequence
  Synthetic oligonucleotide; TTC chr11 5318344 5318365 5318349 5318344 -
tcacttataggtgggaattgaa

SEQ ID NO: 127590 - DNA, 22 bp, Artificial Sequence
  Synthetic oligonucleotide; CTC chr11 5318342 5318363 5318347 5318342 -
acttataggtgggaattgaaca

SEQ ID NO: 127591 - DNA, 22 bp, Artificial Sequence
  Synthetic oligonucleotide; CTT chr11 5318338 5318359 5318343 5318338 -
ataggtgggaattgaacaatga

SEQ ID NO: 127592 - DNA, 22 bp, Artificial Sequence
  Synthetic oligonucleotide; TTA chr11 5318337 5318358 5318342 5318337 -
taggtgggaattgaacaatgag

SEQ ID NO: 127593 - DNA, 22 bp, Artificial Sequence
  Synthetic oligonucleotide; TTG chr11 5318324 5318345 5318329 5318324 -
aacaatgagaacacttggacag

SEQ ID NO: 127594 - DNA, 22 bp, Artificial Sequence
  Synthetic oligonucleotide; CTT chr11 5318308 5318329 5318313 5318308 -
ggacagaggaaggggaacatca

SEQ ID NO: 127595 - DNA, 22 bp, Artificial Sequence
  Synthetic oligonucleotide; TTG chr11 5318307 5318328 5318312 5318307 -
gacagaggaaggggaacatcac

SEQ ID NO: 127596 - DNA, 22 bp, Artificial Sequence
  Synthetic oligonucleotide; CTG chr11 5318272 5318293 5318277 5318272 -
ttgtggggtgggggtggggggt

SEQ ID NO: 127597 - DNA, 22 bp, Artificial Sequence
  Synthetic oligonucleotide; TTG chr11 5318269 5318290 5318274 5318269 -
tggggtgggggtggggggtgga

SEQ ID NO: 127598 - DNA, 22 bp, Artificial Sequence
  Synthetic oligonucleotide; TTA chr11 5318233 5318254 5318238 5318233 -
ggagatatacctaatgtaaatg

SEQ ID NO: 127599 - DNA, 22 bp, Artificial Sequence
  Synthetic oligonucleotide; CTA chr11 5318220 5318241 5318225 5318220 -
atgtaaatgatgagttaatggg

SEQ ID NO: 127600 - DNA, 22 bp, Artificial Sequence
  Synthetic oligonucleotide; TTA chr11 5318203 5318224 5318208 5318203 -
atgggtgcagcacaccaacatg

SEQ ID NO: 127601 - DNA, 22 bp, Artificial Sequence
  Synthetic oligonucleotide; CTG chr11 5318153 5318174 5318158 5318153 -
cacgttgcgcacatgtacccta

SEQ ID NO: 127602 - DNA, 22 bp, Artificial Sequence
  Synthetic oligonucleotide; TTG chr11 5318146 5318167 5318151 5318146 -
cgcacatgtaccctagaactta

SEQ ID NO: 127603 - DNA, 22 bp, Artificial Sequence
  Synthetic oligonucleotide; CTA chr11 5318131 5318152 5318136 5318131 -
gaacttaaagtataataataat

SEQ ID NO: 127604 - DNA, 22 bp, Artificial Sequence
  Synthetic oligonucleotide; CTT chr11 5318125 5318146 5318130 5318125 -
aaagtataataataataataaa

SEQ ID NO: 127605 - DNA, 22 bp, Artificial Sequence
  Synthetic oligonucleotide; TTA chr11 5318124 5318145 5318129 5318124 -
aagtataataataataataaaa

SEQ ID NO: 127606 - DNA, 22 bp, Artificial Sequence
  Synthetic oligonucleotide; CTT chr11 5318095 5318116 5318100 5318095 -
ctgtgcagcagaagaaactatc

SEQ ID NO: 127607 - DNA, 22 bp, Artificial Sequence
  Synthetic oligonucleotide; TTC chr11 5318094 5318115 5318099 5318094 -
tgtgcagcagaagaaactatca

SEQ ID NO: 127608 - DNA, 22 bp, Artificial Sequence
  Synthetic oligonucleotide; CTG chr11 5318092 5318113 5318097 5318092 -
tgcagcagaagaaactatcaac

SEQ ID NO: 127609 - DNA, 22 bp, Artificial Sequence
  Synthetic oligonucleotide; CTA chr11 5318075 5318096 5318080 5318075 -
tcaacagagtaaactgacaatc

SEQ ID NO: 127610 - DNA, 22 bp, Artificial Sequence
  Synthetic oligonucleotide; CTG chr11 5318059 5318080 5318064 5318059 -
acaatctacaggataggagaaa

SEQ ID NO: 127611 - DNA, 22 bp, Artificial Sequence
  Synthetic oligonucleotide; CTA chr11 5318051 5318072 5318056 5318051 -
caggataggagaaactattcac

SEQ ID NO: 127612 - DNA, 22 bp, Artificial Sequence
  Synthetic oligonucleotide; CTA chr11 5318034 5318055 5318039 5318034 -
ttcacaaactgtgcatctggaa

SEQ ID NO: 127613 - DNA, 22 bp, Artificial Sequence
  Synthetic oligonucleotide; TTC chr11 5318031 5318052 5318036 5318031 -
acaaactgtgcatctggaaaag

SEQ ID NO: 127614 - DNA, 22 bp, Artificial Sequence
  Synthetic oligonucleotide; CTG chr11 5318023 5318044 5318028 5318023 -
tgcatctggaaaaggtctaata

SEQ ID NO: 127615 - DNA, 22 bp, Artificial Sequence
  Synthetic oligonucleotide; CTG chr11 5318015 5318036 5318020 5318015 -
gaaaaggtctaatattcagaat

SEQ ID NO: 127616 - DNA, 22 bp, Artificial Sequence
  Synthetic oligonucleotide; CTA chr11 5318004 5318025 5318009 5318004 -
atattcagaatctataaggaat

SEQ ID NO: 127617 - DNA, 22 bp, Artificial Sequence
  Synthetic oligonucleotide; TTC chr11 5317998 5318019 5318003 5317998 -
agaatctataaggaattcgaac

SEQ ID NO: 127618 - DNA, 22 bp, Artificial Sequence
  Synthetic oligonucleotide; CTA chr11 5317990 5318011 5317995 5317990 -
taaggaattcgaacatatcagc

SEQ ID NO: 127619 - DNA, 22 bp, Artificial Sequence
  Synthetic oligonucleotide; TTC chr11 5317980 5318001 5317985 5317980 -
gaacatatcagcaagcaaaaag

SEQ ID NO: 127620 - DNA, 22 bp, Artificial Sequence
  Synthetic oligonucleotide; TTC chr11 5317948 5317969 5317953 5317948 -
catttaaaaatgggcaaaatcc

SEQ ID NO: 127621 - DNA, 22 bp, Artificial Sequence
  Synthetic oligonucleotide; TTT chr11 5317943 5317964 5317948 5317943 -
aaaaatgggcaaaatccacgaa

SEQ ID NO: 127622 - DNA, 22 bp, Artificial Sequence
  Synthetic oligonucleotide; TTA chr11 5317942 5317963 5317947 5317942 -
aaaatgggcaaaatccacgaac

SEQ ID NO: 127623 - DNA, 22 bp, Artificial Sequence
  Synthetic oligonucleotide; CTC chr11 5317914 5317935 5317919 5317914 -
ttctcaagagaagacatacagg

SEQ ID NO: 127624 - DNA, 22 bp, Artificial Sequence
  Synthetic oligonucleotide; CTT chr11 5317912 5317933 5317917 5317912 -
ctcaagagaagacatacaggca

SEQ ID NO: 127625 - DNA, 22 bp, Artificial Sequence
  Synthetic oligonucleotide; TTC chr11 5317911 5317932 5317916 5317911 -
tcaagagaagacatacaggcag

SEQ ID NO: 127626 - DNA, 22 bp, Artificial Sequence
  Synthetic oligonucleotide; CTC chr11 5317909 5317930 5317914 5317909 -
aagagaagacatacaggcagcc

SEQ ID NO: 127627 - DNA, 22 bp, Artificial Sequence
  Synthetic oligonucleotide; CTA chr11 5317854 5317875 5317859 5317854 -
atgagagaaatgcaaatcaaaa

SEQ ID NO: 127628 - DNA, 22 bp, Artificial Sequence
  Synthetic oligonucleotide; CTA chr11 5317817 5317838 5317822 5317817 -
tctcataccagtcagaatagct

SEQ ID NO: 127629 - DNA, 22 bp, Artificial Sequence
  Synthetic oligonucleotide; CTC chr11 5317813 5317834 5317818 5317813 -
ataccagtcagaatagctattt

SEQ ID NO: 127630 - DNA, 22 bp, Artificial Sequence
  Synthetic oligonucleotide; CTA chr11 5317794 5317815 5317799 5317794 -
tttttaaaaagccaaaaaacag

SEQ ID NO: 127631 - DNA, 22 bp, Artificial Sequence
  Synthetic oligonucleotide; TTT chr11 5317791 5317812 5317796 5317791 -
ttaaaaagccaaaaaacagatt

SEQ ID NO: 127632 - DNA, 22 bp, Artificial Sequence
  Synthetic oligonucleotide; TTT chr11 5317790 5317811 5317795 5317790 -
taaaaagccaaaaaacagattc

SEQ ID NO: 127633 - DNA, 22 bp, Artificial Sequence
  Synthetic oligonucleotide; TTT chr11 5317789 5317810 5317794 5317789 -
aaaaagccaaaaaacagattct

SEQ ID NO: 127634 - DNA, 22 bp, Artificial Sequence
  Synthetic oligonucleotide; TTA chr11 5317788 5317809 5317793 5317788 -
aaaagccaaaaaacagattctc

SEQ ID NO: 127635 - DNA, 22 bp, Artificial Sequence
  Synthetic oligonucleotide; TTC chr11 5317768 5317789 5317773 5317768 -
tcatgaggctatggagaaaagg

SEQ ID NO: 127636 - DNA, 22 bp, Artificial Sequence
  Synthetic oligonucleotide; CTC chr11 5317766 5317787 5317771 5317766 -
atgaggctatggagaaaaggga

SEQ ID NO: 127637 - DNA, 22 bp, Artificial Sequence
  Synthetic oligonucleotide; CTA chr11 5317757 5317778 5317762 5317757 -
tggagaaaagggaacacttata

SEQ ID NO: 127638 - DNA, 22 bp, Artificial Sequence
  Synthetic oligonucleotide; CTT chr11 5317738 5317759 5317743 5317738 -
atacaatgatgatggggatgta

SEQ ID NO: 127639 - DNA, 22 bp, Artificial Sequence
  Synthetic oligonucleotide; TTA chr11 5317737 5317758 5317742 5317737 -
tacaatgatgatggggatgtaa

SEQ ID NO: 127640 - DNA, 22 bp, Artificial Sequence
  Synthetic oligonucleotide; TTA chr11 5317711 5317732 5317716 5317711 -
gttcaaccactgcagaaaacag

SEQ ID NO: 127641 - DNA, 22 bp, Artificial Sequence
  Synthetic oligonucleotide; TTC chr11 5317707 5317728 5317712 5317707 -
aaccactgcagaaaacagtttg

SEQ ID NO: 127642 - DNA, 22 bp, Artificial Sequence
  Synthetic oligonucleotide; CTG chr11 5317699 5317720 5317704 5317699 -
cagaaaacagtttggagagtct

SEQ ID NO: 127643 - DNA, 22 bp, Artificial Sequence
  Synthetic oligonucleotide; TTT chr11 5317686 5317707 5317691 5317686 -
ggagagtcttcaaagaacttta

SEQ ID NO: 127644 - DNA, 22 bp, Artificial Sequence
  Synthetic oligonucleotide; TTG chr11 5317685 5317706 5317690 5317685 -
gagagtcttcaaagaactttaa

SEQ ID NO: 127645 - DNA, 22 bp, Artificial Sequence
  Synthetic oligonucleotide; CTT chr11 5317676 5317697 5317681 5317676 -
caaagaactttaagcagagcta

SEQ ID NO: 127646 - DNA, 22 bp, Artificial Sequence
  Synthetic oligonucleotide; TTC chr11 5317675 5317696 5317680 5317675 -
aaagaactttaagcagagctac

SEQ ID NO: 127647 - DNA, 22 bp, Artificial Sequence
  Synthetic oligonucleotide; CTT chr11 5317666 5317687 5317671 5317666 -
taagcagagctacaatttgaca

SEQ ID NO: 127648 - DNA, 22 bp, Artificial Sequence
  Synthetic oligonucleotide; TTT chr11 5317665 5317686 5317670 5317665 -
aagcagagctacaatttgacac

SEQ ID NO: 127649 - DNA, 22 bp, Artificial Sequence
  Synthetic oligonucleotide; TTA chr11 5317664 5317685 5317669 5317664 -
agcagagctacaatttgacaca

SEQ ID NO: 127650 - DNA, 22 bp, Artificial Sequence
  Synthetic oligonucleotide; CTA chr11 5317654 5317675 5317659 5317654 -
caatttgacacagcaatcccgc

SEQ ID NO: 127651 - DNA, 22 bp, Artificial Sequence
  Synthetic oligonucleotide; TTT chr11 5317648 5317669 5317653 5317648 -
gacacagcaatcccgctactgg

SEQ ID NO: 127652 - DNA, 22 bp, Artificial Sequence
  Synthetic oligonucleotide; TTG chr11 5317647 5317668 5317652 5317647 -
acacagcaatcccgctactggg

SEQ ID NO: 127653 - DNA, 22 bp, Artificial Sequence
  Synthetic oligonucleotide; CTA chr11 5317630 5317651 5317635 5317630 -
ctgggtatatatccataggaaa

SEQ ID NO: 127654 - DNA, 22 bp, Artificial Sequence
  Synthetic oligonucleotide; CTG chr11 5317627 5317648 5317632 5317627 -
ggtatatatccataggaaaaca

SEQ ID NO: 127655 - DNA, 22 bp, Artificial Sequence
  Synthetic oligonucleotide; TTA chr11 5317597 5317618 5317602 5317597 -
gaccaactagacacatgcactt

SEQ ID NO: 127656 - DNA, 22 bp, Artificial Sequence
  Synthetic oligonucleotide; CTA chr11 5317588 5317609 5317593 5317588 -
gacacatgcacttgcatgttca

SEQ ID NO: 127657 - DNA, 22 bp, Artificial Sequence
  Synthetic oligonucleotide; CTT chr11 5317575 5317596 5317580 5317575 -
gcatgttcactgtaatgctgtt

SEQ ID NO: 127658 - DNA, 22 bp, Artificial Sequence
  Synthetic oligonucleotide; TTG chr11 5317574 5317595 5317579 5317574 -
catgttcactgtaatgctgttt

SEQ ID NO: 127659 - DNA, 22 bp, Artificial Sequence
  Synthetic oligonucleotide; TTC chr11 5317567 5317588 5317572 5317567 -
actgtaatgctgtttagaatag

SEQ ID NO: 127660 - DNA, 22 bp, Artificial Sequence
  Synthetic oligonucleotide; CTG chr11 5317563 5317584 5317568 5317563 -
taatgctgtttagaatagcaaa

SEQ ID NO: 127661 - DNA, 22 bp, Artificial Sequence
  Synthetic oligonucleotide; CTG chr11 5317555 5317576 5317560 5317555 -
tttagaatagcaaatacaaata

SEQ ID NO: 127662 - DNA, 22 bp, Artificial Sequence
  Synthetic oligonucleotide; TTT chr11 5317552 5317573 5317557 5317552 -
agaatagcaaatacaaataact

SEQ ID NO: 127663 - DNA, 22 bp, Artificial Sequence
  Synthetic oligonucleotide; TTA chr11 5317551 5317572 5317556 5317551 -
gaatagcaaatacaaataactg

SEQ ID NO: 127664 - DNA, 22 bp, Artificial Sequence
  Synthetic oligonucleotide; CTG chr11 5317529 5317550 5317534 5317529 -
gcctaggtgtctatcaaaggcg

SEQ ID NO: 127665 - DNA, 22 bp, Artificial Sequence
  Synthetic oligonucleotide; CTA chr11 5317524 5317545 5317529 5317524 -
ggtgtctatcaaaggcggacgg

SEQ ID NO: 127666 - DNA, 22 bp, Artificial Sequence
  Synthetic oligonucleotide; CTA chr11 5317516 5317537 5317521 5317516 -
tcaaaggcggacgggataaaga

SEQ ID NO: 127667 - DNA, 22 bp, Artificial Sequence
  Synthetic oligonucleotide; CTG chr11 5317489 5317510 5317494 5317489 -
tggtacatatacaccaccacta

SEQ ID NO: 127668 - DNA, 22 bp, Artificial Sequence
  Synthetic oligonucleotide; CTA chr11 5317467 5317488 5317472 5317467 -
tgtggcaataagaacaaatgaa

SEQ ID NO: 127669 - DNA, 22 bp, Artificial Sequence
  Synthetic oligonucleotide; CTT chr11 5317434 5317455 5317439 5317434 -
ttcagcaacatgggtggagctg

SEQ ID NO: 127670 - DNA, 22 bp, Artificial Sequence
  Synthetic oligonucleotide; TTT chr11 5317433 5317454 5317438 5317433 -
tcagcaacatgggtggagctgg

SEQ ID NO: 127671 - DNA, 22 bp, Artificial Sequence
  Synthetic oligonucleotide; TTT chr11 5317432 5317453 5317437 5317432 -
cagcaacatgggtggagctgga

SEQ ID NO: 127672 - DNA, 22 bp, Artificial Sequence
  Synthetic oligonucleotide; TTC chr11 5317431 5317452 5317436 5317431 -
agcaacatgggtggagctggag

SEQ ID NO: 127673 - DNA, 22 bp, Artificial Sequence
  Synthetic oligonucleotide; CTG chr11 5317412 5317433 5317417 5317412 -
gaggctataatcctaagcaaat

SEQ ID NO: 127674 - DNA, 22 bp, Artificial Sequence
  Synthetic oligonucleotide; CTA chr11 5317405 5317426 5317410 5317405 -
taatcctaagcaaattaacgca

SEQ ID NO: 127675 - DNA, 22 bp, Artificial Sequence
  Synthetic oligonucleotide; CTA chr11 5317397 5317418 5317402 5317397 -
agcaaattaacgcaagaacaca

SEQ ID NO: 127676 - DNA, 22 bp, Artificial Sequence
  Synthetic oligonucleotide; TTA chr11 5317388 5317409 5317393 5317388 -
acgcaagaacacaaaagcaaat

SEQ ID NO: 127677 - DNA, 22 bp, Artificial Sequence
  Synthetic oligonucleotide; TTC chr11 5317355 5317376 5317360 5317355 -
tcatttataagtggaagctaaa

SEQ ID NO: 127678 - DNA, 22 bp, Artificial Sequence
  Synthetic oligonucleotide; CTC chr11 5317353 5317374 5317358 5317353 -
atttataagtggaagctaaaca

SEQ ID NO: 127679 - DNA, 22 bp, Artificial Sequence
  Synthetic oligonucleotide; TTT chr11 5317349 5317370 5317354 5317349 -
ataagtggaagctaaacattga

SEQ ID NO: 127680 - DNA, 22 bp, Artificial Sequence
  Synthetic oligonucleotide; TTA chr11 5317348 5317369 5317353 5317348 -
taagtggaagctaaacattgag

SEQ ID NO: 127681 - DNA, 22 bp, Artificial Sequence
  Synthetic oligonucleotide; CTA chr11 5317335 5317356 5317340 5317335 -
aacattgagtacacgtggatat

SEQ ID NO: 127682 - DNA, 22 bp, Artificial Sequence
  Synthetic oligonucleotide; TTG chr11 5317328 5317349 5317333 5317328 -
agtacacgtggatataaacatg

SEQ ID NO: 127683 - DNA, 22 bp, Artificial Sequence
  Synthetic oligonucleotide; CTT chr11 5317290 5317311 5317295 5317290 -
gaaactactacaaggggcaggg

SEQ ID NO: 127684 - DNA, 22 bp, Artificial Sequence
  Synthetic oligonucleotide; TTG chr11 5317289 5317310 5317294 5317289 -
aaactactacaaggggcaggga

SEQ ID NO: 127685 - DNA, 22 bp, Artificial Sequence
  Synthetic oligonucleotide; CTA chr11 5317283 5317304 5317288 5317283 -
ctacaaggggcagggagagatg

SEQ ID NO: 127686 - DNA, 22 bp, Artificial Sequence
  Synthetic oligonucleotide; CTA chr11 5317280 5317301 5317285 5317280 -
caaggggcagggagagatgcgg

SEQ ID NO: 127687 - DNA, 22 bp, Artificial Sequence
  Synthetic oligonucleotide; TTA chr11 5317248 5317269 5317253 5317248 -
aaaaatctattggatagtatgc

SEQ ID NO: 127688 - DNA, 22 bp, Artificial Sequence
  Synthetic oligonucleotide; CTA chr11 5317239 5317260 5317244 5317239 -
ttggatagtatgctcaccactg

SEQ ID NO: 127689 - DNA, 22 bp, Artificial Sequence
  Synthetic oligonucleotide; TTG chr11 5317236 5317257 5317241 5317236 -
gatagtatgctcaccactgcat

SEQ ID NO: 127690 - DNA, 22 bp, Artificial Sequence
  Synthetic oligonucleotide; CTC chr11 5317224 5317245 5317229 5317224 -
accactgcatgcaatatatcca

SEQ ID NO: 127691 - DNA, 22 bp, Artificial Sequence
  Synthetic oligonucleotide; CTG chr11 5317217 5317238 5317222 5317217 -
catgcaatatatccatgtaaaa

SEQ ID NO: 127692 - DNA, 22 bp, Artificial Sequence
  Synthetic oligonucleotide; CTG chr11 5317189 5317210 5317194 5317189 -
cacaagtacccactgtatctaa

SEQ ID NO: 127693 - DNA, 22 bp, Artificial Sequence
  Synthetic oligonucleotide; CTG chr11 5317174 5317195 5317179 5317174 -
tatctaaagtaaatgttgaaaa

SEQ ID NO: 127694 - DNA, 22 bp, Artificial Sequence
  Synthetic oligonucleotide; CTA chr11 5317168 5317189 5317173 5317168 -
aagtaaatgttgaaaatttaaa

SEQ ID NO: 127695 - DNA, 22 bp, Artificial Sequence
  Synthetic oligonucleotide; TTG chr11 5317156 5317177 5317161 5317156 -
aaaatttaaaagaaaaaacaaa

SEQ ID NO: 127696 - DNA, 22 bp, Artificial Sequence
  Synthetic oligonucleotide; TTT chr11 5317149 5317170 5317154 5317149 -
aaaagaaaaaacaaataaataa

SEQ ID NO: 127697 - DNA, 22 bp, Artificial Sequence
  Synthetic oligonucleotide; TTA chr11 5317148 5317169 5317153 5317148 -
aaagaaaaaacaaataaataaa

SEQ ID NO: 127698 - DNA, 22 bp, Artificial Sequence
  Synthetic oligonucleotide; CTA chr11 5317116 5317137 5317121 5317116 -
tcctgaacctggtatgaaatgg

SEQ ID NO: 127699 - DNA, 22 bp, Artificial Sequence
  Synthetic oligonucleotide; CTG chr11 5317111 5317132 5317116 5317111 -
aacctggtatgaaatgggcagt

SEQ ID NO: 127700 - DNA, 22 bp, Artificial Sequence
  Synthetic oligonucleotide; CTG chr11 5317105 5317126 5317110 5317105 -
gtatgaaatgggcagtgatttt

SEQ ID NO: 127701 - DNA, 22 bp, Artificial Sequence
  Synthetic oligonucleotide; TTT chr11 5317084 5317105 5317089 5317084 -
ttatataaacaaagttatttta

SEQ ID NO: 127702 - DNA, 22 bp, Artificial Sequence
  Synthetic oligonucleotide; TTT chr11 5317083 5317104 5317088 5317083 -
tatataaacaaagttattttaa

SEQ ID NO: 127703 - DNA, 22 bp, Artificial Sequence
  Synthetic oligonucleotide; TTT chr11 5317082 5317103 5317087 5317082 -
atataaacaaagttattttaag

SEQ ID NO: 127704 - DNA, 22 bp, Artificial Sequence
  Synthetic oligonucleotide; TTA chr11 5317081 5317102 5317086 5317081 -
tataaacaaagttattttaaga

SEQ ID NO: 127705 - DNA, 22 bp, Artificial Sequence
  Synthetic oligonucleotide; TTA chr11 5317067 5317088 5317072 5317067 -
ttttaagacaaaatataatagg

SEQ ID NO: 127706 - DNA, 22 bp, Artificial Sequence
  Synthetic oligonucleotide; TTT chr11 5317064 5317085 5317069 5317064 -
taagacaaaatataataggccc

SEQ ID NO: 127707 - DNA, 22 bp, Artificial Sequence
  Synthetic oligonucleotide; TTT chr11 5317063 5317084 5317068 5317063 -
aagacaaaatataataggccct

SEQ ID NO: 127708 - DNA, 22 bp, Artificial Sequence
  Synthetic oligonucleotide; TTA chr11 5317062 5317083 5317067 5317062 -
agacaaaatataataggccctt

SEQ ID NO: 127709 - DNA, 22 bp, Artificial Sequence
  Synthetic oligonucleotide; CTT chr11 5317040 5317061 5317045 5317040 -
catttacttggctattaataga

SEQ ID NO: 127710 - DNA, 22 bp, Artificial Sequence
  Synthetic oligonucleotide; TTC chr11 5317039 5317060 5317044 5317039 -
atttacttggctattaatagat

SEQ ID NO: 127711 - DNA, 22 bp, Artificial Sequence
  Synthetic oligonucleotide; TTT chr11 5317035 5317056 5317040 5317035 -
acttggctattaatagatccat

SEQ ID NO: 127712 - DNA, 22 bp, Artificial Sequence
  Synthetic oligonucleotide; TTA chr11 5317034 5317055 5317039 5317034 -
cttggctattaatagatccatt

SEQ ID NO: 127713 - DNA, 22 bp, Artificial Sequence
  Synthetic oligonucleotide; CTT chr11 5317031 5317052 5317036 5317031 -
ggctattaatagatccattgag

SEQ ID NO: 127714 - DNA, 22 bp, Artificial Sequence
  Synthetic oligonucleotide; TTG chr11 5317030 5317051 5317035 5317030 -
gctattaatagatccattgagg

SEQ ID NO: 127715 - DNA, 22 bp, Artificial Sequence
  Synthetic oligonucleotide; CTA chr11 5317026 5317047 5317031 5317026 -
ttaatagatccattgaggttcc

SEQ ID NO: 127716 - DNA, 22 bp, Artificial Sequence
  Synthetic oligonucleotide; TTA chr11 5317023 5317044 5317028 5317023 -
atagatccattgaggttcctgt

SEQ ID NO: 127717 - DNA, 22 bp, Artificial Sequence
  Synthetic oligonucleotide; TTG chr11 5317011 5317032 5317016 5317011 -
aggttcctgtggatcagaactg

SEQ ID NO: 127718 - DNA, 22 bp, Artificial Sequence
  Synthetic oligonucleotide; TTC chr11 5317005 5317026 5317010 5317005 -
ctgtggatcagaactgattttc

SEQ ID NO: 127719 - DNA, 22 bp, Artificial Sequence
  Synthetic oligonucleotide; CTG chr11 5317002 5317023 5317007 5317002 -
tggatcagaactgattttccca

SEQ ID NO: 127720 - DNA, 22 bp, Artificial Sequence
  Synthetic oligonucleotide; CTG chr11 5316989 5317010 5316994 5316989 -
attttcccaaagtatcagaaaa

SEQ ID NO: 127721 - DNA, 22 bp, Artificial Sequence
  Synthetic oligonucleotide; TTT chr11 5316985 5317006 5316990 5316985 -
tcccaaagtatcagaaaagaca

SEQ ID NO: 127722 - DNA, 22 bp, Artificial Sequence
  Synthetic oligonucleotide; TTT chr11 5316984 5317005 5316989 5316984 -
cccaaagtatcagaaaagacaa

SEQ ID NO: 127723 - DNA, 22 bp, Artificial Sequence
  Synthetic oligonucleotide; TTC chr11 5316983 5317004 5316988 5316983 -
ccaaagtatcagaaaagacaac

SEQ ID NO: 127724 - DNA, 22 bp, Artificial Sequence
  Synthetic oligonucleotide; TTG chr11 5316951 5316972 5316956 5316951 -
aaatgcataaactccaggacaa

SEQ ID NO: 127725 - DNA, 22 bp, Artificial Sequence
  Synthetic oligonucleotide; CTC chr11 5316937 5316958 5316942 5316937 -
caggacaaagacacatgtgacc

SEQ ID NO: 127726 - DNA, 22 bp, Artificial Sequence
  Synthetic oligonucleotide; CTG chr11 5316912 5316933 5316917 5316912 -
cattcaactagtatctctcaat

SEQ ID NO: 127727 - DNA, 22 bp, Artificial Sequence
  Synthetic oligonucleotide; TTC chr11 5316907 5316928 5316912 5316907 -
aactagtatctctcaatacttt

SEQ ID NO: 127728 - DNA, 22 bp, Artificial Sequence
  Synthetic oligonucleotide; CTA chr11 5316902 5316923 5316907 5316902 -
gtatctctcaatactttgcatt

SEQ ID NO: 127729 - DNA, 22 bp, Artificial Sequence
  Synthetic oligonucleotide; CTC chr11 5316895 5316916 5316900 5316895 -
tcaatactttgcattgtattga

SEQ ID NO: 127730 - DNA, 22 bp, Artificial Sequence
  Synthetic oligonucleotide; CTC chr11 5316893 5316914 5316898 5316893 -
aatactttgcattgtattgaga

SEQ ID NO: 127731 - DNA, 22 bp, Artificial Sequence
  Synthetic oligonucleotide; CTT chr11 5316886 5316907 5316891 5316886 -
tgcattgtattgagacagacaa

SEQ ID NO: 127732 - DNA, 22 bp, Artificial Sequence
  Synthetic oligonucleotide; TTT chr11 5316885 5316906 5316890 5316885 -
gcattgtattgagacagacaat

SEQ ID NO: 127733 - DNA, 22 bp, Artificial Sequence
  Synthetic oligonucleotide; TTG chr11 5316884 5316905 5316889 5316884 -
cattgtattgagacagacaatg

SEQ ID NO: 127734 - DNA, 22 bp, Artificial Sequence
  Synthetic oligonucleotide; TTG chr11 5316879 5316900 5316884 5316879 -
tattgagacagacaatgcaaag

SEQ ID NO: 127735 - DNA, 22 bp, Artificial Sequence
  Synthetic oligonucleotide; TTG chr11 5316874 5316895 5316879 5316874 -
agacagacaatgcaaagtacac

SEQ ID NO: 127736 - DNA, 22 bp, Artificial Sequence
  Synthetic oligonucleotide; CTG chr11 5316838 5316859 5316843 5316838 -
tgtactgatgcttagggtcctg

SEQ ID NO: 127737 - DNA, 22 bp, Artificial Sequence
  Synthetic oligonucleotide; CTG chr11 5316831 5316852 5316836 5316831 -
atgcttagggtcctgaagggtc

SEQ ID NO: 127738 - DNA, 22 bp, Artificial Sequence
  Synthetic oligonucleotide; CTT chr11 5316825 5316846 5316830 5316825 -
agggtcctgaagggtcacataa

SEQ ID NO: 127739 - DNA, 22 bp, Artificial Sequence
  Synthetic oligonucleotide; TTA chr11 5316824 5316845 5316829 5316824 -
gggtcctgaagggtcacataat

SEQ ID NO: 127740 - DNA, 22 bp, Artificial Sequence
  Synthetic oligonucleotide; CTG chr11 5316816 5316837 5316821 5316816 -
aagggtcacataattaagtcct

SEQ ID NO: 127741 - DNA, 22 bp, Artificial Sequence
  Synthetic oligonucleotide; TTA chr11 5316800 5316821 5316805 5316800 -
agtcctggcatcccaatgtaga

SEQ ID NO: 127742 - DNA, 22 bp, Artificial Sequence
  Synthetic oligonucleotide; CTG chr11 5316793 5316814 5316798 5316793 -
gcatcccaatgtagaggtggca

SEQ ID NO: 127743 - DNA, 22 bp, Artificial Sequence
  Synthetic oligonucleotide; TTG chr11 5316768 5316789 5316773 5316768 -
gagtatgcagcttttctcatcc

SEQ ID NO: 127744 - DNA, 22 bp, Artificial Sequence
  Synthetic oligonucleotide; CTT chr11 5316755 5316776 5316760 5316755 -
ttctcatccatccttggagaaa

SEQ ID NO: 127745 - DNA, 22 bp, Artificial Sequence
  Synthetic oligonucleotide; TTT chr11 5316754 5316775 5316759 5316754 -
tctcatccatccttggagaaat

SEQ ID NO: 127746 - DNA, 22 bp, Artificial Sequence
  Synthetic oligonucleotide; TTT chr11 5316753 5316774 5316758 5316753 -
ctcatccatccttggagaaata

SEQ ID NO: 127747 - DNA, 22 bp, Artificial Sequence
  Synthetic oligonucleotide; TTC chr11 5316752 5316773 5316757 5316752 -
tcatccatccttggagaaatac

SEQ ID NO: 127748 - DNA, 22 bp, Artificial Sequence
  Synthetic oligonucleotide; CTC chr11 5316750 5316771 5316755 5316750 -
atccatccttggagaaatacct

SEQ ID NO: 127749 - DNA, 22 bp, Artificial Sequence
  Synthetic oligonucleotide; CTT chr11 5316740 5316761 5316745 5316740 -
ggagaaatacctgaaagttccg

SEQ ID NO: 127750 - DNA, 22 bp, Artificial Sequence
  Synthetic oligonucleotide; TTG chr11 5316739 5316760 5316744 5316739 -
gagaaatacctgaaagttccga

SEQ ID NO: 127751 - DNA, 22 bp, Artificial Sequence
  Synthetic oligonucleotide; CTG chr11 5316727 5316748 5316732 5316727 -
aaagttccgaggacattggttg

SEQ ID NO: 127752 - DNA, 22 bp, Artificial Sequence
  Synthetic oligonucleotide; TTC chr11 5316720 5316741 5316725 5316720 -
cgaggacattggttgagcgtcc

SEQ ID NO: 127753 - DNA, 22 bp, Artificial Sequence
  Synthetic oligonucleotide; TTG chr11 5316709 5316730 5316714 5316709 -
gttgagcgtccctgcttctccc

SEQ ID NO: 127754 - DNA, 22 bp, Artificial Sequence
  Synthetic oligonucleotide; TTG chr11 5316705 5316726 5316710 5316705 -
agcgtccctgcttctcccagac

SEQ ID NO: 127755 - DNA, 22 bp, Artificial Sequence
  Synthetic oligonucleotide; CTG chr11 5316695 5316716 5316700 5316695 -
cttctcccagacagaggaggga

SEQ ID NO: 127756 - DNA, 22 bp, Artificial Sequence
  Synthetic oligonucleotide; CTT chr11 5316692 5316713 5316697 5316692 -
ctcccagacagaggagggaggg

SEQ ID NO: 127757 - DNA, 22 bp, Artificial Sequence
  Synthetic oligonucleotide; TTC chr11 5316691 5316712 5316696 5316691 -
tcccagacagaggagggagggg

SEQ ID NO: 127758 - DNA, 22 bp, Artificial Sequence
  Synthetic oligonucleotide; CTC chr11 5316689 5316710 5316694 5316689 -
ccagacagaggagggaggggag

SEQ ID NO: 127759 - DNA, 22 bp, Artificial Sequence
  Synthetic oligonucleotide; TTC chr11 5316656 5316677 5316661 5316656 -
ttctgagtatttggaaagagga

SEQ ID NO: 127760 - DNA, 22 bp, Artificial Sequence
  Synthetic oligonucleotide; CTT chr11 5316654 5316675 5316659 5316654 -
ctgagtatttggaaagaggaaa

SEQ ID NO: 127761 - DNA, 22 bp, Artificial Sequence
  Synthetic oligonucleotide; TTC chr11 5316653 5316674 5316658 5316653 -
tgagtatttggaaagaggaaac

SEQ ID NO: 127762 - DNA, 22 bp, Artificial Sequence
  Synthetic oligonucleotide; CTG chr11 5316651 5316672 5316656 5316651 -
agtatttggaaagaggaaactc

SEQ ID NO: 127763 - DNA, 22 bp, Artificial Sequence
  Synthetic oligonucleotide; TTT chr11 5316644 5316665 5316649 5316644 -
ggaaagaggaaactctggggaa

SEQ ID NO: 127764 - DNA, 22 bp, Artificial Sequence
  Synthetic oligonucleotide; TTG chr11 5316643 5316664 5316648 5316643 -
gaaagaggaaactctggggaag

SEQ ID NO: 127765 - DNA, 22 bp, Artificial Sequence
  Synthetic oligonucleotide; CTC chr11 5316629 5316650 5316634 5316629 -
tggggaagtgatttccacatac

SEQ ID NO: 127766 - DNA, 22 bp, Artificial Sequence
  Synthetic oligonucleotide; CTG chr11 5316627 5316648 5316632 5316627 -
gggaagtgatttccacatacat

SEQ ID NO: 127767 - DNA, 22 bp, Artificial Sequence
  Synthetic oligonucleotide; TTT chr11 5316615 5316636 5316620 5316615 -
ccacatacataaactctctaat

SEQ ID NO: 127768 - DNA, 22 bp, Artificial Sequence
  Synthetic oligonucleotide; TTC chr11 5316614 5316635 5316619 5316614 -
cacatacataaactctctaatt

SEQ ID NO: 127769 - DNA, 22 bp, Artificial Sequence
  Synthetic oligonucleotide; CTC chr11 5316599 5316620 5316604 5316599 -
tctaatttggcctcttgaatag

SEQ ID NO: 127770 - DNA, 22 bp, Artificial Sequence
  Synthetic oligonucleotide; CTC chr11 5316597 5316618 5316602 5316597 -
taatttggcctcttgaatagtc

SEQ ID NO: 127771 - DNA, 22 bp, Artificial Sequence
  Synthetic oligonucleotide; CTA chr11 5316595 5316616 5316600 5316595 -
atttggcctcttgaatagtctt

SEQ ID NO: 127772 - DNA, 22 bp, Artificial Sequence
  Synthetic oligonucleotide; TTT chr11 5316591 5316612 5316596 5316591 -
ggcctcttgaatagtctttgag

SEQ ID NO: 127773 - DNA, 22 bp, Artificial Sequence
  Synthetic oligonucleotide; TTG chr11 5316590 5316611 5316595 5316590 -
gcctcttgaatagtctttgaga

SEQ ID NO: 127774 - DNA, 22 bp, Artificial Sequence
  Synthetic oligonucleotide; CTC chr11 5316585 5316606 5316590 5316585 -
ttgaatagtctttgagaagtga

SEQ ID NO: 127775 - DNA, 22 bp, Artificial Sequence
  Synthetic oligonucleotide; CTT chr11 5316583 5316604 5316588 5316583 -
gaatagtctttgagaagtgagt

SEQ ID NO: 127776 - DNA, 22 bp, Artificial Sequence
  Synthetic oligonucleotide; TTG chr11 5316582 5316603 5316587 5316582 -
aatagtctttgagaagtgagtg

SEQ ID NO: 127777 - DNA, 22 bp, Artificial Sequence
  Synthetic oligonucleotide; CTT chr11 5316573 5316594 5316578 5316573 -
tgagaagtgagtgtctgaactg

SEQ ID NO: 127778 - DNA, 22 bp, Artificial Sequence
  Synthetic oligonucleotide; TTT chr11 5316572 5316593 5316577 5316572 -
gagaagtgagtgtctgaactga

SEQ ID NO: 127779 - DNA, 22 bp, Artificial Sequence
  Synthetic oligonucleotide; TTG chr11 5316571 5316592 5316576 5316571 -
agaagtgagtgtctgaactgag

SEQ ID NO: 127780 - DNA, 22 bp, Artificial Sequence
  Synthetic oligonucleotide; CTG chr11 5316556 5316577 5316561 5316556 -
aactgagtcttcaaatagagca

SEQ ID NO: 127781 - DNA, 22 bp, Artificial Sequence
  Synthetic oligonucleotide; CTG chr11 5316551 5316572 5316556 5316551 -
agtcttcaaatagagcaggaat

SEQ ID NO: 127782 - DNA, 22 bp, Artificial Sequence
  Synthetic oligonucleotide; CTT chr11 5316545 5316566 5316550 5316545 -
caaatagagcaggaatgggtcc

SEQ ID NO: 127783 - DNA, 22 bp, Artificial Sequence
  Synthetic oligonucleotide; TTC chr11 5316544 5316565 5316549 5316544 -
aaatagagcaggaatgggtcct

SEQ ID NO: 127784 - DNA, 22 bp, Artificial Sequence
  Synthetic oligonucleotide; CTT chr11 5316521 5316542 5316526 5316521 -
attccagcaagaaaatgacagc

SEQ ID NO: 127785 - DNA, 22 bp, Artificial Sequence
  Synthetic oligonucleotide; TTA chr11 5316520 5316541 5316525 5316520 -
ttccagcaagaaaatgacagca

SEQ ID NO: 127786 - DNA, 22 bp, Artificial Sequence
  Synthetic oligonucleotide; TTC chr11 5316517 5316538 5316522 5316517 -
cagcaagaaaatgacagcatag

SEQ ID NO: 127787 - DNA, 22 bp, Artificial Sequence
  Synthetic oligonucleotide; TTC chr11 5316462 5316483 5316467 5316462 -
ctcttccttcttatgttagatg

SEQ ID NO: 127788 - DNA, 22 bp, Artificial Sequence
  Synthetic oligonucleotide; CTC chr11 5316459 5316480 5316464 5316459 -
ttccttcttatgttagatgcag

SEQ ID NO: 127789 - DNA, 22 bp, Artificial Sequence
  Synthetic oligonucleotide; CTT chr11 5316457 5316478 5316462 5316457 -
ccttcttatgttagatgcagcg

SEQ ID NO: 127790 - DNA, 22 bp, Artificial Sequence
  Synthetic oligonucleotide; TTC chr11 5316456 5316477 5316461 5316456 -
cttcttatgttagatgcagcga

SEQ ID NO: 127791 - DNA, 22 bp, Artificial Sequence
  Synthetic oligonucleotide; CTT chr11 5316453 5316474 5316458 5316453 -
cttatgttagatgcagcgaaga

SEQ ID NO: 127792 - DNA, 22 bp, Artificial Sequence
  Synthetic oligonucleotide; TTC chr11 5316452 5316473 5316457 5316452 -
ttatgttagatgcagcgaagag

SEQ ID NO: 127793 - DNA, 22 bp, Artificial Sequence
  Synthetic oligonucleotide; CTT chr11 5316450 5316471 5316455 5316450 -
atgttagatgcagcgaagagaa

SEQ ID NO: 127794 - DNA, 22 bp, Artificial Sequence
  Synthetic oligonucleotide; TTA chr11 5316449 5316470 5316454 5316449 -
tgttagatgcagcgaagagaag

SEQ ID NO: 127795 - DNA, 22 bp, Artificial Sequence
  Synthetic oligonucleotide; TTA chr11 5316444 5316465 5316449 5316444 -
gatgcagcgaagagaagatagg

SEQ ID NO: 127796 - DNA, 22 bp, Artificial Sequence
  Synthetic oligonucleotide; TTT chr11 5316415 5316436 5316420 5316415 -
tcagaggtctgcataggagaac

SEQ ID NO: 127797 - DNA, 22 bp, Artificial Sequence
  Synthetic oligonucleotide; TTT chr11 5316414 5316435 5316419 5316414 -
cagaggtctgcataggagaaca

SEQ ID NO: 127798 - DNA, 22 bp, Artificial Sequence
  Synthetic oligonucleotide; TTC chr11 5316413 5316434 5316418 5316413 -
agaggtctgcataggagaacat

SEQ ID NO: 127799 - DNA, 22 bp, Artificial Sequence
  Synthetic oligonucleotide; CTG chr11 5316404 5316425 5316409 5316404 -
cataggagaacatactccatct

SEQ ID NO: 127800 - DNA, 22 bp, Artificial Sequence
  Synthetic oligonucleotide; CTC chr11 5316387 5316408 5316392 5316387 -
catctgggatgaccaacaccta

SEQ ID NO: 127801 - DNA, 22 bp, Artificial Sequence
  Synthetic oligonucleotide; CTG chr11 5316381 5316402 5316386 5316381 -
ggatgaccaacacctaaagcac

SEQ ID NO: 127802 - DNA, 22 bp, Artificial Sequence
  Synthetic oligonucleotide; CTA chr11 5316365 5316386 5316370 5316365 -
aagcacagactttttcatctca

SEQ ID NO: 127803 - DNA, 22 bp, Artificial Sequence
  Synthetic oligonucleotide; CTT chr11 5316353 5316374 5316358 5316353 -
tttcatctcaacacatgtttca

SEQ ID NO: 127804 - DNA, 22 bp, Artificial Sequence
  Synthetic oligonucleotide; TTT chr11 5316352 5316373 5316357 5316352 -
ttcatctcaacacatgtttcaa

SEQ ID NO: 127805 - DNA, 22 bp, Artificial Sequence
  Synthetic oligonucleotide; TTT chr11 5316351 5316372 5316356 5316351 -
tcatctcaacacatgtttcaag

SEQ ID NO: 127806 - DNA, 22 bp, Artificial Sequence
  Synthetic oligonucleotide; TTT chr11 5316350 5316371 5316355 5316350 -
catctcaacacatgtttcaagg

SEQ ID NO: 127807 - DNA, 22 bp, Artificial Sequence
  Synthetic oligonucleotide; TTC chr11 5316349 5316370 5316354 5316349 -
atctcaacacatgtttcaaggc

SEQ ID NO: 127808 - DNA, 22 bp, Artificial Sequence
  Synthetic oligonucleotide; CTC chr11 5316344 5316365 5316349 5316344 -
aacacatgtttcaaggcaggct

SEQ ID NO: 127809 - DNA, 22 bp, Artificial Sequence
  Synthetic oligonucleotide; TTT chr11 5316333 5316354 5316338 5316333 -
caaggcaggcttgaagtttcaa

SEQ ID NO: 127810 - DNA, 22 bp, Artificial Sequence
  Synthetic oligonucleotide; TTC chr11 5316332 5316353 5316337 5316332 -
aaggcaggcttgaagtttcaaa

SEQ ID NO: 127811 - DNA, 22 bp, Artificial Sequence
  Synthetic oligonucleotide; CTT chr11 5316321 5316342 5316326 5316321 -
gaagtttcaaatgtggtgctca

SEQ ID NO: 127812 - DNA, 22 bp, Artificial Sequence
  Synthetic oligonucleotide; TTG chr11 5316320 5316341 5316325 5316320 -
aagtttcaaatgtggtgctcat

SEQ ID NO: 127813 - DNA, 22 bp, Artificial Sequence
  Synthetic oligonucleotide; TTT chr11 5316314 5316335 5316319 5316314 -
caaatgtggtgctcatggatta

SEQ ID NO: 127814 - DNA, 22 bp, Artificial Sequence
  Synthetic oligonucleotide; TTC chr11 5316313 5316334 5316318 5316313 -
aaatgtggtgctcatggattag

SEQ ID NO: 127815 - DNA, 22 bp, Artificial Sequence
  Synthetic oligonucleotide; CTC chr11 5316300 5316321 5316305 5316300 -
atggattagcttcaggaaaacg

SEQ ID NO: 127816 - DNA, 22 bp, Artificial Sequence
  Synthetic oligonucleotide; TTA chr11 5316292 5316313 5316297 5316292 -
gcttcaggaaaacgtgtgaata

SEQ ID NO: 127817 - DNA, 22 bp, Artificial Sequence
  Synthetic oligonucleotide; CTT chr11 5316288 5316309 5316293 5316288 -
caggaaaacgtgtgaatatttt

SEQ ID NO: 127818 - DNA, 22 bp, Artificial Sequence
  Synthetic oligonucleotide; TTC chr11 5316287 5316308 5316292 5316287 -
aggaaaacgtgtgaatattttt

SEQ ID NO: 127819 - DNA, 22 bp, Artificial Sequence
  Synthetic oligonucleotide; TTT chr11 5316267 5316288 5316272 5316267 -
ttagactaaatgtgacgtcacc

SEQ ID NO: 127820 - DNA, 22 bp, Artificial Sequence
  Synthetic oligonucleotide; TTT chr11 5316266 5316287 5316271 5316266 -
tagactaaatgtgacgtcacct

SEQ ID NO: 127821 - DNA, 22 bp, Artificial Sequence
  Synthetic oligonucleotide; TTT chr11 5316265 5316286 5316270 5316265 -
agactaaatgtgacgtcacctg

SEQ ID NO: 127822 - DNA, 22 bp, Artificial Sequence
  Synthetic oligonucleotide; TTA chr11 5316264 5316285 5316269 5316264 -
gactaaatgtgacgtcacctgc

SEQ ID NO: 127823 - DNA, 22 bp, Artificial Sequence
  Synthetic oligonucleotide; CTA chr11 5316259 5316280 5316264 5316259 -
aatgtgacgtcacctgcttttg

SEQ ID NO: 127824 - DNA, 22 bp, Artificial Sequence
  Synthetic oligonucleotide; CTG chr11 5316243 5316264 5316248 5316243 -
cttttgtccatttttctccaca

SEQ ID NO: 127825 - DNA, 22 bp, Artificial Sequence
  Synthetic oligonucleotide; CTT chr11 5316240 5316261 5316245 5316240 -
ttgtccatttttctccacagag

SEQ ID NO: 127826 - DNA, 22 bp, Artificial Sequence
  Synthetic oligonucleotide; TTT chr11 5316239 5316260 5316244 5316239 -
tgtccatttttctccacagagg

SEQ ID NO: 127827 - DNA, 22 bp, Artificial Sequence
  Synthetic oligonucleotide; TTT chr11 5316238 5316259 5316243 5316238 -
gtccatttttctccacagaggg

SEQ ID NO: 127828 - DNA, 22 bp, Artificial Sequence
  Synthetic oligonucleotide; TTG chr11 5316237 5316258 5316242 5316237 -
tccatttttctccacagagggc

SEQ ID NO: 127829 - DNA, 22 bp, Artificial Sequence
  Synthetic oligonucleotide; TTT chr11 5316230 5316251 5316235 5316230 -
ttctccacagagggctcatggc

SEQ ID NO: 127830 - DNA, 22 bp, Artificial Sequence
  Synthetic oligonucleotide; TTT chr11 5316229 5316250 5316234 5316229 -
tctccacagagggctcatggct

SEQ ID NO: 127831 - DNA, 22 bp, Artificial Sequence
  Synthetic oligonucleotide; TTT chr11 5316228 5316249 5316233 5316228 -
ctccacagagggctcatggctt

SEQ ID NO: 127832 - DNA, 22 bp, Artificial Sequence
  Synthetic oligonucleotide; TTC chr11 5316227 5316248 5316232 5316227 -
tccacagagggctcatggcttt

SEQ ID NO: 127833 - DNA, 22 bp, Artificial Sequence
  Synthetic oligonucleotide; CTC chr11 5316225 5316246 5316230 5316225 -
cacagagggctcatggcttttg

SEQ ID NO: 127834 - DNA, 22 bp, Artificial Sequence
  Synthetic oligonucleotide; CTC chr11 5316213 5316234 5316218 5316213 -
atggcttttgttagaattccat

SEQ ID NO: 127835 - DNA, 22 bp, Artificial Sequence
  Synthetic oligonucleotide; CTT chr11 5316206 5316227 5316211 5316206 -
ttgttagaattccataaaacat

SEQ ID NO: 127836 - DNA, 22 bp, Artificial Sequence
  Synthetic oligonucleotide; TTT chr11 5316205 5316226 5316210 5316205 -
tgttagaattccataaaacatt

SEQ ID NO: 127837 - DNA, 22 bp, Artificial Sequence
  Synthetic oligonucleotide; TTT chr11 5316204 5316225 5316209 5316204 -
gttagaattccataaaacatta

SEQ ID NO: 127838 - DNA, 22 bp, Artificial Sequence
  Synthetic oligonucleotide; TTG chr11 5316203 5316224 5316208 5316203 -
ttagaattccataaaacattaa

SEQ ID NO: 127839 - DNA, 22 bp, Artificial Sequence
  Synthetic oligonucleotide; TTA chr11 5316200 5316221 5316205 5316200 -
gaattccataaaacattaacat

SEQ ID NO: 127840 - DNA, 22 bp, Artificial Sequence
  Synthetic oligonucleotide; TTC chr11 5316194 5316215 5316199 5316194 -
cataaaacattaacattctatt

SEQ ID NO: 127841 - DNA, 22 bp, Artificial Sequence
  Synthetic oligonucleotide; TTA chr11 5316182 5316203 5316187 5316182 -
acattctatttcaaaactaaac

SEQ ID NO: 127842 - DNA, 22 bp, Artificial Sequence
  Synthetic oligonucleotide; TTC chr11 5316176 5316197 5316181 5316176 -
tatttcaaaactaaacaaagaa

SEQ ID NO: 127843 - DNA, 22 bp, Artificial Sequence
  Synthetic oligonucleotide; CTA chr11 5316174 5316195 5316179 5316174 -
tttcaaaactaaacaaagaaaa

SEQ ID NO: 127844 - DNA, 22 bp, Artificial Sequence
  Synthetic oligonucleotide; TTT chr11 5316171 5316192 5316176 5316171 -
caaaactaaacaaagaaaagtt

SEQ ID NO: 127845 - DNA, 22 bp, Artificial Sequence
  Synthetic oligonucleotide; TTC chr11 5316170 5316191 5316175 5316170 -
aaaactaaacaaagaaaagttt

SEQ ID NO: 127846 - DNA, 22 bp, Artificial Sequence
  Synthetic oligonucleotide; CTA chr11 5316163 5316184 5316168 5316163 -
aacaaagaaaagttttctaaca

SEQ ID NO: 127847 - DNA, 22 bp, Artificial Sequence
  Synthetic oligonucleotide; TTT chr11 5316148 5316169 5316153 5316148 -
tctaacaaaacactatgtctat

SEQ ID NO: 127848 - DNA, 22 bp, Artificial Sequence
  Synthetic oligonucleotide; TTT chr11 5316147 5316168 5316152 5316147 -
ctaacaaaacactatgtctata

SEQ ID NO: 127849 - DNA, 22 bp, Artificial Sequence
  Synthetic oligonucleotide; TTC chr11 5316146 5316167 5316151 5316146 -
taacaaaacactatgtctatat

SEQ ID NO: 127850 - DNA, 22 bp, Artificial Sequence
  Synthetic oligonucleotide; CTA chr11 5316144 5316165 5316149 5316144 -
acaaaacactatgtctatatca

SEQ ID NO: 127851 - DNA, 22 bp, Artificial Sequence
  Synthetic oligonucleotide; CTA chr11 5316133 5316154 5316138 5316133 -
tgtctatatcatgattgtgaaa

SEQ ID NO: 127852 - DNA, 22 bp, Artificial Sequence
  Synthetic oligonucleotide; CTA chr11 5316127 5316148 5316132 5316127 -
tatcatgattgtgaaacataaa

SEQ ID NO: 127853 - DNA, 22 bp, Artificial Sequence
  Synthetic oligonucleotide; TTG chr11 5316116 5316137 5316121 5316116 -
tgaaacataaaataaaaatcaa

SEQ ID NO: 127854 - DNA, 22 bp, Artificial Sequence
  Synthetic oligonucleotide; TTT chr11 5316090 5316111 5316095 5316090 -
aaatgtatccaaatatgcaatt

SEQ ID NO: 127855 - DNA, 22 bp, Artificial Sequence
  Synthetic oligonucleotide; TTA chr11 5316089 5316110 5316094 5316089 -
aatgtatccaaatatgcaatta

SEQ ID NO: 127856 - DNA, 22 bp, Artificial Sequence
  Synthetic oligonucleotide; TTA chr11 5316067 5316088 5316072 5316067 -
agctaagcagcaggttaactat

SEQ ID NO: 127857 - DNA, 22 bp, Artificial Sequence
  Synthetic oligonucleotide; CTA chr11 5316062 5316083 5316067 5316062 -
agcagcaggttaactatgtaca

SEQ ID NO: 127858 - DNA, 22 bp, Artificial Sequence
  Synthetic oligonucleotide; TTA chr11 5316050 5316071 5316055 5316050 -
actatgtacaattattatctaa

SEQ ID NO: 127859 - DNA, 22 bp, Artificial Sequence
  Synthetic oligonucleotide; CTA chr11 5316046 5316067 5316051 5316046 -
tgtacaattattatctaattgc

SEQ ID NO: 127860 - DNA, 22 bp, Artificial Sequence
  Synthetic oligonucleotide; TTA chr11 5316036 5316057 5316041 5316036 -
ttatctaattgcatatatttgc

SEQ ID NO: 127861 - DNA, 22 bp, Artificial Sequence
  Synthetic oligonucleotide; TTA chr11 5316033 5316054 5316038 5316033 -
tctaattgcatatatttgcctt

SEQ ID NO: 127862 - DNA, 22 bp, Artificial Sequence
  Synthetic oligonucleotide; CTA chr11 5316029 5316050 5316034 5316029 -
attgcatatatttgccttcttt

SEQ ID NO: 127863 - DNA, 22 bp, Artificial Sequence
  Synthetic oligonucleotide; TTG chr11 5316025 5316046 5316030 5316025 -
catatatttgccttcttttttg

SEQ ID NO: 127864 - DNA, 22 bp, Artificial Sequence
  Synthetic oligonucleotide; TTT chr11 5316016 5316037 5316021 5316016 -
gccttcttttttgttactattg

SEQ ID NO: 127865 - DNA, 22 bp, Artificial Sequence
  Synthetic oligonucleotide; TTG chr11 5316015 5316036 5316020 5316015 -
ccttcttttttgttactattgg

SEQ ID NO: 127866 - DNA, 22 bp, Artificial Sequence
  Synthetic oligonucleotide; CTT chr11 5316011 5316032 5316016 5316011 -
cttttttgttactattggttca

SEQ ID NO: 127867 - DNA, 22 bp, Artificial Sequence
  Synthetic oligonucleotide; TTC chr11 5316010 5316031 5316015 5316010 -
ttttttgttactattggttcaa

SEQ ID NO: 127868 - DNA, 22 bp, Artificial Sequence
  Synthetic oligonucleotide; CTT chr11 5316008 5316029 5316013 5316008 -
ttttgttactattggttcaaac

SEQ ID NO: 127869 - DNA, 22 bp, Artificial Sequence
  Synthetic oligonucleotide; TTT chr11 5316007 5316028 5316012 5316007 -
tttgttactattggttcaaaca

SEQ ID NO: 127870 - DNA, 22 bp, Artificial Sequence
  Synthetic oligonucleotide; TTT chr11 5316006 5316027 5316011 5316006 -
ttgttactattggttcaaacat

SEQ ID NO: 127871 - DNA, 22 bp, Artificial Sequence
  Synthetic oligonucleotide; TTT chr11 5316005 5316026 5316010 5316005 -
tgttactattggttcaaacatt

SEQ ID NO: 127872 - DNA, 22 bp, Artificial Sequence
  Synthetic oligonucleotide; TTT chr11 5316004 5316025 5316009 5316004 -
gttactattggttcaaacattg

SEQ ID NO: 127873 - DNA, 22 bp, Artificial Sequence
  Synthetic oligonucleotide; TTG chr11 5316003 5316024 5316008 5316003 -
ttactattggttcaaacattgt

SEQ ID NO: 127874 - DNA, 22 bp, Artificial Sequence
  Synthetic oligonucleotide; TTA chr11 5316000 5316021 5316005 5316000 -
ctattggttcaaacattgtgca

SEQ ID NO: 127875 - DNA, 22 bp, Artificial Sequence
  Synthetic oligonucleotide; CTA chr11 5315997 5316018 5316002 5315997 -
ttggttcaaacattgtgcagca

SEQ ID NO: 127876 - DNA, 22 bp, Artificial Sequence
  Synthetic oligonucleotide; TTG chr11 5315994 5316015 5315999 5315994 -
gttcaaacattgtgcagcaagc

SEQ ID NO: 127877 - DNA, 22 bp, Artificial Sequence
  Synthetic oligonucleotide; TTC chr11 5315990 5316011 5315995 5315990 -
aaacattgtgcagcaagcacac

SEQ ID NO: 127878 - DNA, 22 bp, Artificial Sequence
  Synthetic oligonucleotide; TTG chr11 5315982 5316003 5315987 5315982 -
tgcagcaagcacaccacagagg

SEQ ID NO: 127879 - DNA, 22 bp, Artificial Sequence
  Synthetic oligonucleotide; TTT chr11 5315946 5315967 5315951 5315946 -
tttaaaatgtgttttttagatt

SEQ ID NO: 127880 - DNA, 22 bp, Artificial Sequence
  Synthetic oligonucleotide; TTT chr11 5315945 5315966 5315950 5315945 -
ttaaaatgtgttttttagatta

SEQ ID NO: 127881 - DNA, 22 bp, Artificial Sequence
  Synthetic oligonucleotide; TTT chr11 5315944 5315965 5315949 5315944 -
taaaatgtgttttttagattaa

SEQ ID NO: 127882 - DNA, 22 bp, Artificial Sequence
  Synthetic oligonucleotide; TTT chr11 5315943 5315964 5315948 5315943 -
aaaatgtgttttttagattaag

SEQ ID NO: 127883 - DNA, 22 bp, Artificial Sequence
  Synthetic oligonucleotide; TTA chr11 5315942 5315963 5315947 5315942 -
aaatgtgttttttagattaaga

SEQ ID NO: 127884 - DNA, 22 bp, Artificial Sequence
  Synthetic oligonucleotide; TTT chr11 5315932 5315953 5315937 5315932 -
tttagattaagaatgcttaact

SEQ ID NO: 127885 - DNA, 22 bp, Artificial Sequence
  Synthetic oligonucleotide; TTT chr11 5315931 5315952 5315936 5315931 -
ttagattaagaatgcttaacta

SEQ ID NO: 127886 - DNA, 22 bp, Artificial Sequence
  Synthetic oligonucleotide; TTT chr11 5315930 5315951 5315935 5315930 -
tagattaagaatgcttaactac

SEQ ID NO: 127887 - DNA, 22 bp, Artificial Sequence
  Synthetic oligonucleotide; TTT chr11 5315929 5315950 5315934 5315929 -
agattaagaatgcttaactact

SEQ ID NO: 127888 - DNA, 22 bp, Artificial Sequence
  Synthetic oligonucleotide; TTA chr11 5315928 5315949 5315933 5315928 -
gattaagaatgcttaactactt

SEQ ID NO: 127889 - DNA, 22 bp, Artificial Sequence
  Synthetic oligonucleotide; TTA chr11 5315923 5315944 5315928 5315923 -
agaatgcttaactacttaatta

SEQ ID NO: 127890 - DNA, 22 bp, Artificial Sequence
  Synthetic oligonucleotide; CTT chr11 5315914 5315935 5315919 5315914 -
aactacttaattattcataact

SEQ ID NO: 127891 - DNA, 22 bp, Artificial Sequence
  Synthetic oligonucleotide; TTA chr11 5315913 5315934 5315918 5315913 -
actacttaattattcataactg

SEQ ID NO: 127892 - DNA, 22 bp, Artificial Sequence
  Synthetic oligonucleotide; CTA chr11 5315909 5315930 5315914 5315909 -
cttaattattcataactgaaga

SEQ ID NO: 127893 - DNA, 22 bp, Artificial Sequence
  Synthetic oligonucleotide; CTT chr11 5315906 5315927 5315911 5315906 -
aattattcataactgaagaaat

SEQ ID NO: 127894 - DNA, 22 bp, Artificial Sequence
  Synthetic oligonucleotide; TTA chr11 5315905 5315926 5315910 5315905 -
attattcataactgaagaaatg

SEQ ID NO: 127895 - DNA, 22 bp, Artificial Sequence
  Synthetic oligonucleotide; TTA chr11 5315901 5315922 5315906 5315901 -
ttcataactgaagaaatgatca

SEQ ID NO: 127896 - DNA, 22 bp, Artificial Sequence
  Synthetic oligonucleotide; TTC chr11 5315898 5315919 5315903 5315898 -
ataactgaagaaatgatcatca

SEQ ID NO: 127897 - DNA, 22 bp, Artificial Sequence
  Synthetic oligonucleotide; CTG chr11 5315891 5315912 5315896 5315891 -
aagaaatgatcatcattcctta

SEQ ID NO: 127898 - DNA, 22 bp, Artificial Sequence
  Synthetic oligonucleotide; TTC chr11 5315873 5315894 5315878 5315873 -
cttatctctagcacagtctata

SEQ ID NO: 127899 - DNA, 22 bp, Artificial Sequence
  Synthetic oligonucleotide; CTT chr11 5315870 5315891 5315875 5315870 -
atctctagcacagtctataaat

SEQ ID NO: 127900 - DNA, 22 bp, Artificial Sequence
  Synthetic oligonucleotide; TTA chr11 5315869 5315890 5315874 5315869 -
tctctagcacagtctataaatg

SEQ ID NO: 127901 - DNA, 22 bp, Artificial Sequence
  Synthetic oligonucleotide; CTC chr11 5315865 5315886 5315870 5315865 -
tagcacagtctataaatgtatt

SEQ ID NO: 127902 - DNA, 22 bp, Artificial Sequence
  Synthetic oligonucleotide; CTA chr11 5315863 5315884 5315868 5315863 -
gcacagtctataaatgtattgc

SEQ ID NO: 127903 - DNA, 22 bp, Artificial Sequence
  Synthetic oligonucleotide; CTA chr11 5315853 5315874 5315858 5315853 -
taaatgtattgctcttctataa

SEQ ID NO: 127904 - DNA, 22 bp, Artificial Sequence
  Synthetic oligonucleotide; TTG chr11 5315842 5315863 5315847 5315842 -
ctcttctataagaaaattgttg

SEQ ID NO: 127905 - DNA, 22 bp, Artificial Sequence
  Synthetic oligonucleotide; CTC chr11 5315839 5315860 5315844 5315839 -
ttctataagaaaattgttgcac

SEQ ID NO: 127906 - DNA, 22 bp, Artificial Sequence
  Synthetic oligonucleotide; CTT chr11 5315837 5315858 5315842 5315837 -
ctataagaaaattgttgcacat

SEQ ID NO: 127907 - DNA, 22 bp, Artificial Sequence
  Synthetic oligonucleotide; TTC chr11 5315836 5315857 5315841 5315836 -
tataagaaaattgttgcacatt

SEQ ID NO: 127908 - DNA, 22 bp, Artificial Sequence
  Synthetic oligonucleotide; CTA chr11 5315834 5315855 5315839 5315834 -
taagaaaattgttgcacattca

SEQ ID NO: 127909 - DNA, 22 bp, Artificial Sequence
  Synthetic oligonucleotide; TTG chr11 5315823 5315844 5315828 5315823 -
ttgcacattcatgcatatacca

SEQ ID NO: 127910 - DNA, 22 bp, Artificial Sequence
  Synthetic oligonucleotide; TTG chr11 5315820 5315841 5315825 5315820 -
cacattcatgcatataccaata

SEQ ID NO: 127911 - DNA, 22 bp, Artificial Sequence
  Synthetic oligonucleotide; TTC chr11 5315813 5315834 5315818 5315813 -
atgcatataccaataaattatt

SEQ ID NO: 127912 - DNA, 22 bp, Artificial Sequence
  Synthetic oligonucleotide; TTA chr11 5315793 5315814 5315798 5315793 -
ttgctaaatatgaatattagga

SEQ ID NO: 127913 - DNA, 22 bp, Artificial Sequence
  Synthetic oligonucleotide; TTG chr11 5315790 5315811 5315795 5315790 -
ctaaatatgaatattaggattg

SEQ ID NO: 127914 - DNA, 22 bp, Artificial Sequence
  Synthetic oligonucleotide; CTA chr11 5315787 5315808 5315792 5315787 -
aatatgaatattaggattgagg

SEQ ID NO: 127915 - DNA, 22 bp, Artificial Sequence
  Synthetic oligonucleotide; TTA chr11 5315774 5315795 5315779 5315774 -
ggattgaggctgcagaaataca

SEQ ID NO: 127916 - DNA, 22 bp, Artificial Sequence
  Synthetic oligonucleotide; TTG chr11 5315768 5315789 5315773 5315768 -
aggctgcagaaatacagtttca

SEQ ID NO: 127917 - DNA, 22 bp, Artificial Sequence
  Synthetic oligonucleotide; CTG chr11 5315762 5315783 5315767 5315762 -
cagaaatacagtttcacaagaa

SEQ ID NO: 127918 - DNA, 22 bp, Artificial Sequence
  Synthetic oligonucleotide; TTT chr11 5315748 5315769 5315753 5315748 -
cacaagaaggtagtaaaaactg

SEQ ID NO: 127919 - DNA, 22 bp, Artificial Sequence
  Synthetic oligonucleotide; TTC chr11 5315747 5315768 5315752 5315747 -
acaagaaggtagtaaaaactga

SEQ ID NO: 127920 - DNA, 22 bp, Artificial Sequence
  Synthetic oligonucleotide; CTG chr11 5315726 5315747 5315731 5315726 -
ataaggcagggatttcagtgta

SEQ ID NO: 127921 - DNA, 22 bp, Artificial Sequence
  Synthetic oligonucleotide; TTT chr11 5315711 5315732 5315716 5315711 -
cagtgtaatagtttctataaag

SEQ ID NO: 127922 - DNA, 22 bp, Artificial Sequence
  Synthetic oligonucleotide; TTC chr11 5315710 5315731 5315715 5315710 -
agtgtaatagtttctataaagc

SEQ ID NO: 127923 - DNA, 22 bp, Artificial Sequence
  Synthetic oligonucleotide; TTT chr11 5315697 5315718 5315702 5315697 -
ctataaagctacttgccacttg

SEQ ID NO: 127924 - DNA, 22 bp, Artificial Sequence
  Synthetic oligonucleotide; TTC chr11 5315696 5315717 5315701 5315696 -
tataaagctacttgccacttgt

SEQ ID NO: 127925 - DNA, 22 bp, Artificial Sequence
  Synthetic oligonucleotide; CTA chr11 5315694 5315715 5315699 5315694 -
taaagctacttgccacttgtga

SEQ ID NO: 127926 - DNA, 22 bp, Artificial Sequence
  Synthetic oligonucleotide; CTA chr11 5315686 5315707 5315691 5315686 -
cttgccacttgtgaacacacaa

SEQ ID NO: 127927 - DNA, 22 bp, Artificial Sequence
  Synthetic oligonucleotide; CTT chr11 5315683 5315704 5315688 5315683 -
gccacttgtgaacacacaatgc

SEQ ID NO: 127928 - DNA, 22 bp, Artificial Sequence
  Synthetic oligonucleotide; TTG chr11 5315682 5315703 5315687 5315682 -
ccacttgtgaacacacaatgcg

SEQ ID NO: 127929 - DNA, 22 bp, Artificial Sequence
  Synthetic oligonucleotide; CTT chr11 5315676 5315697 5315681 5315676 -
gtgaacacacaatgcggctcct

SEQ ID NO: 127930 - DNA, 22 bp, Artificial Sequence
  Synthetic oligonucleotide; TTG chr11 5315675 5315696 5315680 5315675 -
tgaacacacaatgcggctcctt

SEQ ID NO: 127931 - DNA, 22 bp, Artificial Sequence
  Synthetic oligonucleotide; CTC chr11 5315656 5315677 5315661 5315656 -
cttttttgctgcctggcttttc

SEQ ID NO: 127932 - DNA, 22 bp, Artificial Sequence
  Synthetic oligonucleotide; CTT chr11 5315653 5315674 5315658 5315653 -
ttttgctgcctggcttttcagt

SEQ ID NO: 127933 - DNA, 22 bp, Artificial Sequence
  Synthetic oligonucleotide; TTT chr11 5315652 5315673 5315657 5315652 -
tttgctgcctggcttttcagta

SEQ ID NO: 127934 - DNA, 22 bp, Artificial Sequence
  Synthetic oligonucleotide; TTT chr11 5315651 5315672 5315656 5315651 -
ttgctgcctggcttttcagtac

SEQ ID NO: 127935 - DNA, 22 bp, Artificial Sequence
  Synthetic oligonucleotide; TTT chr11 5315650 5315671 5315655 5315650 -
tgctgcctggcttttcagtact

SEQ ID NO: 127936 - DNA, 22 bp, Artificial Sequence
  Synthetic oligonucleotide; TTT chr11 5315649 5315670 5315654 5315649 -
gctgcctggcttttcagtactg

SEQ ID NO: 127937 - DNA, 22 bp, Artificial Sequence
  Synthetic oligonucleotide; TTG chr11 5315648 5315669 5315653 5315648 -
ctgcctggcttttcagtactgg

SEQ ID NO: 127938 - DNA, 22 bp, Artificial Sequence
  Synthetic oligonucleotide; CTG chr11 5315645 5315666 5315650 5315645 -
cctggcttttcagtactggagg

SEQ ID NO: 127939 - DNA, 22 bp, Artificial Sequence
  Synthetic oligonucleotide; CTG chr11 5315641 5315662 5315646 5315641 -
gcttttcagtactggaggcaac

SEQ ID NO: 127940 - DNA, 22 bp, Artificial Sequence
  Synthetic oligonucleotide; CTT chr11 5315637 5315658 5315642 5315637 -
ttcagtactggaggcaacttat

SEQ ID NO: 127941 - DNA, 22 bp, Artificial Sequence
  Synthetic oligonucleotide; TTT chr11 5315636 5315657 5315641 5315636 -
tcagtactggaggcaacttatc

SEQ ID NO: 127942 - DNA, 22 bp, Artificial Sequence
  Synthetic oligonucleotide; TTT chr11 5315635 5315656 5315640 5315635 -
cagtactggaggcaacttatca

SEQ ID NO: 127943 - DNA, 22 bp, Artificial Sequence
  Synthetic oligonucleotide; TTC chr11 5315634 5315655 5315639 5315634 -
agtactggaggcaacttatcac

SEQ ID NO: 127944 - DNA, 22 bp, Artificial Sequence
  Synthetic oligonucleotide; CTG chr11 5315627 5315648 5315632 5315627 -
gaggcaacttatcactcgatct

SEQ ID NO: 127945 - DNA, 22 bp, Artificial Sequence
  Synthetic oligonucleotide; CTT chr11 5315617 5315638 5315622 5315617 -
atcactcgatctccatcccctt

SEQ ID NO: 127946 - DNA, 22 bp, Artificial Sequence
  Synthetic oligonucleotide; TTA chr11 5315616 5315637 5315621 5315616 -
tcactcgatctccatccccttc

SEQ ID NO: 127947 - DNA, 22 bp, Artificial Sequence
  Synthetic oligonucleotide; CTC chr11 5315610 5315631 5315615 5315610 -
gatctccatccccttctttgct

SEQ ID NO: 127948 - DNA, 22 bp, Artificial Sequence
  Synthetic oligonucleotide; CTC chr11 5315604 5315625 5315609 5315604 -
catccccttctttgctgtttat

SEQ ID NO: 127949 - DNA, 22 bp, Artificial Sequence
  Synthetic oligonucleotide; CTT chr11 5315595 5315616 5315600 5315595 -
ctttgctgtttatgtgtgcgtc

SEQ ID NO: 127950 - DNA, 22 bp, Artificial Sequence
  Synthetic oligonucleotide; TTC chr11 5315594 5315615 5315599 5315594 -
tttgctgtttatgtgtgcgtcc

SEQ ID NO: 127951 - DNA, 22 bp, Artificial Sequence
  Synthetic oligonucleotide; CTT chr11 5315592 5315613 5315597 5315592 -
tgctgtttatgtgtgcgtcctt

SEQ ID NO: 127952 - DNA, 22 bp, Artificial Sequence
  Synthetic oligonucleotide; TTT chr11 5315591 5315612 5315596 5315591 -
gctgtttatgtgtgcgtccttc

SEQ ID NO: 127953 - DNA, 22 bp, Artificial Sequence
  Synthetic oligonucleotide; TTG chr11 5315590 5315611 5315595 5315590 -
ctgtttatgtgtgcgtccttct

SEQ ID NO: 127954 - DNA, 22 bp, Artificial Sequence
  Synthetic oligonucleotide; CTG chr11 5315587 5315608 5315592 5315587 -
tttatgtgtgcgtccttcttgg

SEQ ID NO: 127955 - DNA, 22 bp, Artificial Sequence
  Synthetic oligonucleotide; TTT chr11 5315584 5315605 5315589 5315584 -
atgtgtgcgtccttcttggcaa

SEQ ID NO: 127956 - DNA, 22 bp, Artificial Sequence
  Synthetic oligonucleotide; TTA chr11 5315583 5315604 5315588 5315583 -
tgtgtgcgtccttcttggcaat

SEQ ID NO: 127957 - DNA, 22 bp, Artificial Sequence
  Synthetic oligonucleotide; CTT chr11 5315570 5315591 5315575 5315570 -
cttggcaatggcaagctcctct

SEQ ID NO: 127958 - DNA, 22 bp, Artificial Sequence
  Synthetic oligonucleotide; TTC chr11 5315569 5315590 5315574 5315569 -
ttggcaatggcaagctcctcta

SEQ ID NO: 127959 - DNA, 22 bp, Artificial Sequence
  Synthetic oligonucleotide; CTT chr11 5315567 5315588 5315572 5315567 -
ggcaatggcaagctcctctacc

SEQ ID NO: 127960 - DNA, 22 bp, Artificial Sequence
  Synthetic oligonucleotide; TTG chr11 5315566 5315587 5315571 5315566 -
gcaatggcaagctcctctacct

SEQ ID NO: 127961 - DNA, 22 bp, Artificial Sequence
  Synthetic oligonucleotide; CTC chr11 5315552 5315573 5315557 5315552 -
ctctacctcatcaagcatgacc

SEQ ID NO: 127962 - DNA, 22 bp, Artificial Sequence
  Synthetic oligonucleotide; CTC chr11 5315549 5315570 5315554 5315549 -
tacctcatcaagcatgaccaca

SEQ ID NO: 127963 - DNA, 22 bp, Artificial Sequence
  Synthetic oligonucleotide; CTA chr11 5315547 5315568 5315552 5315547 -
cctcatcaagcatgaccacagt

SEQ ID NO: 127964 - DNA, 22 bp, Artificial Sequence
  Synthetic oligonucleotide; CTC chr11 5315543 5315564 5315548 5315543 -
atcaagcatgaccacagtcttc

SEQ ID NO: 127965 - DNA, 22 bp, Artificial Sequence
  Synthetic oligonucleotide; CTT chr11 5315522 5315543 5315527 5315522 -
cacgaacccatgtactgtttcc

SEQ ID NO: 127966 - DNA, 22 bp, Artificial Sequence
  Synthetic oligonucleotide; TTC chr11 5315521 5315542 5315526 5315521 -
acgaacccatgtactgtttcct

SEQ ID NO: 127967 - DNA, 22 bp, Artificial Sequence
  Synthetic oligonucleotide; CTG chr11 5315505 5315526 5315510 5315505 -
tttccttgccacactgaggcaa

SEQ ID NO: 127968 - DNA, 22 bp, Artificial Sequence
  Synthetic oligonucleotide; TTT chr11 5315502 5315523 5315507 5315502 -
ccttgccacactgaggcaagac

SEQ ID NO: 127969 - DNA, 22 bp, Artificial Sequence
  Synthetic oligonucleotide; TTC chr11 5315501 5315522 5315506 5315501 -
cttgccacactgaggcaagacc

SEQ ID NO: 127970 - DNA, 22 bp, Artificial Sequence
  Synthetic oligonucleotide; CTT chr11 5315498 5315519 5315503 5315498 -
gccacactgaggcaagacctca

SEQ ID NO: 127971 - DNA, 22 bp, Artificial Sequence
  Synthetic oligonucleotide; TTG chr11 5315497 5315518 5315502 5315497 -
ccacactgaggcaagacctcat

SEQ ID NO: 127972 - DNA, 22 bp, Artificial Sequence
  Synthetic oligonucleotide; CTG chr11 5315489 5315510 5315494 5315489 -
aggcaagacctcatggtgaaat

SEQ ID NO: 127973 - DNA, 22 bp, Artificial Sequence
  Synthetic oligonucleotide; CTC chr11 5315477 5315498 5315482 5315477 -
atggtgaaattgaccatgatgc

SEQ ID NO: 127974 - DNA, 22 bp, Artificial Sequence
  Synthetic oligonucleotide; TTG chr11 5315465 5315486 5315470 5315465 -
accatgatgcccactgtaatgg

SEQ ID NO: 127975 - DNA, 22 bp, Artificial Sequence
  Synthetic oligonucleotide; CTG chr11 5315449 5315470 5315454 5315449 -
taatgggcgtcttgtggatgaa

SEQ ID NO: 127976 - DNA, 22 bp, Artificial Sequence
  Synthetic oligonucleotide; CTT chr11 5315436 5315457 5315441 5315436 -
gtggatgaatcacaaagaggtt

SEQ ID NO: 127977 - DNA, 22 bp, Artificial Sequence
  Synthetic oligonucleotide; TTG chr11 5315435 5315456 5315440 5315435 -
tggatgaatcacaaagaggtta

SEQ ID NO: 127978 - DNA, 22 bp, Artificial Sequence
  Synthetic oligonucleotide; TTA chr11 5315413 5315434 5315418 5315413 -
tccatggggcctgcttcttgca

SEQ ID NO: 127979 - DNA, 22 bp, Artificial Sequence
  Synthetic oligonucleotide; CTG chr11 5315400 5315421 5315405 5315400 -
cttcttgcaggtttacattatc

SEQ ID NO: 127980 - DNA, 22 bp, Artificial Sequence
  Synthetic oligonucleotide; CTT chr11 5315397 5315418 5315402 5315397 -
cttgcaggtttacattatccac

SEQ ID NO: 127981 - DNA, 22 bp, Artificial Sequence
  Synthetic oligonucleotide; TTC chr11 5315396 5315417 5315401 5315396 -
ttgcaggtttacattatccact

SEQ ID NO: 127982 - DNA, 22 bp, Artificial Sequence
  Synthetic oligonucleotide; CTT chr11 5315394 5315415 5315399 5315394 -
gcaggtttacattatccactcc

SEQ ID NO: 127983 - DNA, 22 bp, Artificial Sequence
  Synthetic oligonucleotide; TTG chr11 5315393 5315414 5315398 5315393 -
caggtttacattatccactccc

SEQ ID NO: 127984 - DNA, 22 bp, Artificial Sequence
  Synthetic oligonucleotide; TTT chr11 5315386 5315407 5315391 5315386 -
acattatccactcccattatcc

SEQ ID NO: 127985 - DNA, 22 bp, Artificial Sequence
  Synthetic oligonucleotide; TTA chr11 5315385 5315406 5315390 5315385 -
cattatccactcccattatcca

SEQ ID NO: 127986 - DNA, 22 bp, Artificial Sequence
  Synthetic oligonucleotide; TTA chr11 5315380 5315401 5315385 5315380 -
tccactcccattatccacttgc

SEQ ID NO: 127987 - DNA, 22 bp, Artificial Sequence
  Synthetic oligonucleotide; CTC chr11 5315373 5315394 5315378 5315373 -
ccattatccacttgcagaatca

SEQ ID NO: 127988 - DNA, 22 bp, Artificial Sequence
  Synthetic oligonucleotide; TTA chr11 5315367 5315388 5315372 5315367 -
tccacttgcagaatcaggtatt

SEQ ID NO: 127989 - DNA, 22 bp, Artificial Sequence
  Synthetic oligonucleotide; CTT chr11 5315360 5315381 5315365 5315360 -
gcagaatcaggtattctcctgt

SEQ ID NO: 127990 - DNA, 22 bp, Artificial Sequence
  Synthetic oligonucleotide; TTG chr11 5315359 5315380 5315364 5315359 -
cagaatcaggtattctcctgtc

SEQ ID NO: 127991 - DNA, 22 bp, Artificial Sequence
  Synthetic oligonucleotide; TTC chr11 5315344 5315365 5315349 5315344 -
tcctgtcaatggcctatgaccg

SEQ ID NO: 127992 - DNA, 22 bp, Artificial Sequence
  Synthetic oligonucleotide; CTC chr11 5315342 5315363 5315347 5315342 -
ctgtcaatggcctatgaccgtt

SEQ ID NO: 127993 - DNA, 22 bp, Artificial Sequence
  Synthetic oligonucleotide; CTG chr11 5315339 5315360 5315344 5315339 -
tcaatggcctatgaccgtttca

SEQ ID NO: 127994 - DNA, 22 bp, Artificial Sequence
  Synthetic oligonucleotide; CTA chr11 5315328 5315349 5315333 5315328 -
tgaccgtttcattatcatccac

SEQ ID NO: 127995 - DNA, 22 bp, Artificial Sequence
  Synthetic oligonucleotide; TTT chr11 5315319 5315340 5315324 5315319 -
cattatcatccacatgcttctc

SEQ ID NO: 127996 - DNA, 22 bp, Artificial Sequence
  Synthetic oligonucleotide; TTC chr11 5315318 5315339 5315323 5315318 -
attatcatccacatgcttctca

SEQ ID NO: 127997 - DNA, 22 bp, Artificial Sequence
  Synthetic oligonucleotide; TTA chr11 5315314 5315335 5315319 5315314 -
tcatccacatgcttctcaggta

SEQ ID NO: 127998 - DNA, 22 bp, Artificial Sequence
  Synthetic oligonucleotide; CTT chr11 5315300 5315321 5315305 5315300 -
ctcaggtataactatttctact

SEQ ID NO: 127999 - DNA, 22 bp, Artificial Sequence
  Synthetic oligonucleotide; TTC chr11 5315299 5315320 5315304 5315299 -
tcaggtataactatttctacta

SEQ ID NO: 128000 - DNA, 22 bp, Artificial Sequence
  Synthetic oligonucleotide; CTC chr11 5315297 5315318 5315302 5315297 -
aggtataactatttctactaaa

SEQ ID NO: 128001 - DNA, 22 bp, Artificial Sequence
  Synthetic oligonucleotide; CTA chr11 5315286 5315307 5315291 5315286 -
tttctactaaatcttgggtgaa

SEQ ID NO: 128002 - DNA, 22 bp, Artificial Sequence
  Synthetic oligonucleotide; TTT chr11 5315283 5315304 5315288 5315283 -
ctactaaatcttgggtgaagat

SEQ ID NO: 128003 - DNA, 22 bp, Artificial Sequence
  Synthetic oligonucleotide; TTC chr11 5315282 5315303 5315287 5315282 -
tactaaatcttgggtgaagata

SEQ ID NO: 128004 - DNA, 22 bp, Artificial Sequence
  Synthetic oligonucleotide; CTA chr11 5315280 5315301 5315285 5315280 -
ctaaatcttgggtgaagataga

SEQ ID NO: 128005 - DNA, 22 bp, Artificial Sequence
  Synthetic oligonucleotide; CTA chr11 5315277 5315298 5315282 5315277 -
aatcttgggtgaagatagaact

SEQ ID NO: 128006 - DNA, 22 bp, Artificial Sequence
  Synthetic oligonucleotide; CTT chr11 5315271 5315292 5315276 5315271 -
gggtgaagatagaactgtggct

SEQ ID NO: 128007 - DNA, 22 bp, Artificial Sequence
  Synthetic oligonucleotide; TTG chr11 5315270 5315291 5315275 5315270 -
ggtgaagatagaactgtggcta

SEQ ID NO: 128008 - DNA, 22 bp, Artificial Sequence
  Synthetic oligonucleotide; CTG chr11 5315254 5315275 5315259 5315254 -
tggctatttatgagggactttt

SEQ ID NO: 128009 - DNA, 22 bp, Artificial Sequence
  Synthetic oligonucleotide; CTA chr11 5315248 5315269 5315253 5315248 -
tttatgagggactttttatccc

SEQ ID NO: 128010 - DNA, 22 bp, Artificial Sequence
  Synthetic oligonucleotide; TTT chr11 5315245 5315266 5315250 5315245 -
atgagggactttttatccctcg

SEQ ID NO: 128011 - DNA, 22 bp, Artificial Sequence
  Synthetic oligonucleotide; TTA chr11 5315244 5315265 5315249 5315244 -
tgagggactttttatccctcgt

SEQ ID NO: 128012 - DNA, 22 bp, Artificial Sequence
  Synthetic oligonucleotide; CTT chr11 5315234 5315255 5315239 5315234 -
tttatccctcgtgcctccaatt

SEQ ID NO: 128013 - DNA, 22 bp, Artificial Sequence
  Synthetic oligonucleotide; TTT chr11 5315233 5315254 5315238 5315233 -
ttatccctcgtgcctccaattc

SEQ ID NO: 128014 - DNA, 22 bp, Artificial Sequence
  Synthetic oligonucleotide; TTT chr11 5315232 5315253 5315237 5315232 -
tatccctcgtgcctccaattct

SEQ ID NO: 128015 - DNA, 22 bp, Artificial Sequence
  Synthetic oligonucleotide; TTT chr11 5315231 5315252 5315236 5315231 -
atccctcgtgcctccaattctg

SEQ ID NO: 128016 - DNA, 22 bp, Artificial Sequence
  Synthetic oligonucleotide; TTA chr11 5315230 5315251 5315235 5315230 -
tccctcgtgcctccaattctgc

SEQ ID NO: 128017 - DNA, 22 bp, Artificial Sequence
  Synthetic oligonucleotide; CTC chr11 5315224 5315245 5315229 5315224 -
gtgcctccaattctgccactcc

SEQ ID NO: 128018 - DNA, 22 bp, Artificial Sequence
  Synthetic oligonucleotide; CTC chr11 5315217 5315238 5315222 5315217 -
caattctgccactccattgctt

SEQ ID NO: 128019 - DNA, 22 bp, Artificial Sequence
  Synthetic oligonucleotide; TTC chr11 5315211 5315232 5315216 5315211 -
tgccactccattgcttcccata

SEQ ID NO: 128020 - DNA, 22 bp, Artificial Sequence
  Synthetic oligonucleotide; CTG chr11 5315209 5315230 5315214 5315209 -
ccactccattgcttcccatatt

SEQ ID NO: 128021 - DNA, 22 bp, Artificial Sequence
  Synthetic oligonucleotide; CTC chr11 5315203 5315224 5315208 5315203 -
cattgcttcccatattgtcatt

SEQ ID NO: 128022 - DNA, 22 bp, Artificial Sequence
  Synthetic oligonucleotide; TTG chr11 5315198 5315219 5315203 5315198 -
cttcccatattgtcattcccat

SEQ ID NO: 128023 - DNA, 22 bp, Artificial Sequence
  Synthetic oligonucleotide; CTT chr11 5315195 5315216 5315200 5315195 -
cccatattgtcattcccatgtt

SEQ ID NO: 128024 - DNA, 22 bp, Artificial Sequence
  Synthetic oligonucleotide; TTC chr11 5315194 5315215 5315199 5315194 -
ccatattgtcattcccatgttc

SEQ ID NO: 128025 - DNA, 22 bp, Artificial Sequence
  Synthetic oligonucleotide; TTG chr11 5315186 5315207 5315191 5315186 -
tcattcccatgttctcttccac

SEQ ID NO: 128026 - DNA, 22 bp, Artificial Sequence
  Synthetic oligonucleotide; TTC chr11 5315180 5315201 5315185 5315180 -
ccatgttctcttccacaccttt

SEQ ID NO: 128027 - DNA, 22 bp, Artificial Sequence
  Synthetic oligonucleotide; TTC chr11 5315172 5315193 5315177 5315172 -
tcttccacaccttttttctcca

SEQ ID NO: 128028 - DNA, 22 bp, Artificial Sequence
  Synthetic oligonucleotide; CTC chr11 5315170 5315191 5315175 5315170 -
ttccacaccttttttctccatc

SEQ ID NO: 128029 - DNA, 22 bp, Artificial Sequence
  Synthetic oligonucleotide; CTT chr11 5315168 5315189 5315173 5315168 -
ccacaccttttttctccatcaa

SEQ ID NO: 128030 - DNA, 22 bp, Artificial Sequence
  Synthetic oligonucleotide; TTC chr11 5315167 5315188 5315172 5315167 -
cacaccttttttctccatcaag

SEQ ID NO: 128031 - DNA, 22 bp, Artificial Sequence
  Synthetic oligonucleotide; CTT chr11 5315159 5315180 5315164 5315159 -
ttttctccatcaagatgtcctg

SEQ ID NO: 128032 - DNA, 22 bp, Artificial Sequence
  Synthetic oligonucleotide; TTT chr11 5315158 5315179 5315163 5315158 -
tttctccatcaagatgtcctga

SEQ ID NO: 128033 - DNA, 22 bp, Artificial Sequence
  Synthetic oligonucleotide; TTT chr11 5315157 5315178 5315162 5315157 -
ttctccatcaagatgtcctgaa

SEQ ID NO: 128034 - DNA, 22 bp, Artificial Sequence
  Synthetic oligonucleotide; TTT chr11 5315156 5315177 5315161 5315156 -
tctccatcaagatgtcctgaaa

SEQ ID NO: 128035 - DNA, 22 bp, Artificial Sequence
  Synthetic oligonucleotide; TTT chr11 5315155 5315176 5315160 5315155 -
ctccatcaagatgtcctgaaac

SEQ ID NO: 128036 - DNA, 22 bp, Artificial Sequence
  Synthetic oligonucleotide; TTC chr11 5315154 5315175 5315159 5315154 -
tccatcaagatgtcctgaaact

SEQ ID NO: 128037 - DNA, 22 bp, Artificial Sequence
  Synthetic oligonucleotide; CTC chr11 5315152 5315173 5315157 5315152 -
catcaagatgtcctgaaacttg

SEQ ID NO: 128038 - DNA, 22 bp, Artificial Sequence
  Synthetic oligonucleotide; CTG chr11 5315137 5315158 5315142 5315137 -
aaacttgcctgtgctgatatta

SEQ ID NO: 128039 - DNA, 22 bp, Artificial Sequence
  Synthetic oligonucleotide; CTT chr11 5315131 5315152 5315136 5315131 -
gcctgtgctgatattacattca

SEQ ID NO: 128040 - DNA, 22 bp, Artificial Sequence
  Synthetic oligonucleotide; TTG chr11 5315130 5315151 5315135 5315130 -
cctgtgctgatattacattcaa

SEQ ID NO: 128041 - DNA, 22 bp, Artificial Sequence
  Synthetic oligonucleotide; CTG chr11 5315126 5315147 5315131 5315126 -
tgctgatattacattcaatcac

SEQ ID NO: 128042 - DNA, 22 bp, Artificial Sequence
  Synthetic oligonucleotide; CTG chr11 5315121 5315142 5315126 5315121 -
atattacattcaatcacttata

SEQ ID NO: 128043 - DNA, 22 bp, Artificial Sequence
  Synthetic oligonucleotide; TTA chr11 5315115 5315136 5315120 5315115 -
cattcaatcacttatacccagc

SEQ ID NO: 128044 - DNA, 22 bp, Artificial Sequence
  Synthetic oligonucleotide; TTC chr11 5315110 5315131 5315115 5315110 -
aatcacttatacccagctattc

SEQ ID NO: 128045 - DNA, 22 bp, Artificial Sequence
  Synthetic oligonucleotide; CTT chr11 5315102 5315123 5315107 5315102 -
atacccagctattctggttgct

SEQ ID NO: 128046 - DNA, 22 bp, Artificial Sequence
  Synthetic oligonucleotide; TTA chr11 5315101 5315122 5315106 5315101 -
tacccagctattctggttgctt

SEQ ID NO: 128047 - DNA, 22 bp, Artificial Sequence
  Synthetic oligonucleotide; CTA chr11 5315091 5315112 5315096 5315091 -
ttctggttgctttgattttctt

SEQ ID NO: 128048 - DNA, 22 bp, Artificial Sequence
  Synthetic oligonucleotide; TTC chr11 5315088 5315109 5315093 5315088 -
tggttgctttgattttcttcct

SEQ ID NO: 128049 - DNA, 22 bp, Artificial Sequence
  Synthetic oligonucleotide; CTG chr11 5315086 5315107 5315091 5315086 -
gttgctttgattttcttcctag

SEQ ID NO: 128050 - DNA, 22 bp, Artificial Sequence
  Synthetic oligonucleotide; TTG chr11 5315082 5315103 5315087 5315082 -
ctttgattttcttcctagacgc

SEQ ID NO: 128051 - DNA, 22 bp, Artificial Sequence
  Synthetic oligonucleotide; CTT chr11 5315079 5315100 5315084 5315079 -
tgattttcttcctagacgctct

SEQ ID NO: 128052 - DNA, 22 bp, Artificial Sequence
  Synthetic oligonucleotide; TTT chr11 5315078 5315099 5315083 5315078 -
gattttcttcctagacgctctg

SEQ ID NO: 128053 - DNA, 22 bp, Artificial Sequence
  Synthetic oligonucleotide; TTG chr11 5315077 5315098 5315082 5315077 -
attttcttcctagacgctctga

SEQ ID NO: 128054 - DNA, 22 bp, Artificial Sequence
  Synthetic oligonucleotide; TTT chr11 5315073 5315094 5315078 5315073 -
tcttcctagacgctctgatcat

SEQ ID NO: 128055 - DNA, 22 bp, Artificial Sequence
  Synthetic oligonucleotide; TTT chr11 5315072 5315093 5315077 5315072 -
cttcctagacgctctgatcatt

SEQ ID NO: 128056 - DNA, 22 bp, Artificial Sequence
  Synthetic oligonucleotide; TTC chr11 5315071 5315092 5315076 5315071 -
ttcctagacgctctgatcattg

SEQ ID NO: 128057 - DNA, 22 bp, Artificial Sequence
  Synthetic oligonucleotide; CTT chr11 5315069 5315090 5315074 5315069 -
cctagacgctctgatcattgtc

SEQ ID NO: 128058 - DNA, 22 bp, Artificial Sequence
  Synthetic oligonucleotide; TTC chr11 5315068 5315089 5315073 5315068 -
ctagacgctctgatcattgtct

SEQ ID NO: 128059 - DNA, 22 bp, Artificial Sequence
  Synthetic oligonucleotide; CTA chr11 5315065 5315086 5315070 5315065 -
gacgctctgatcattgtctttt

SEQ ID NO: 128060 - DNA, 22 bp, Artificial Sequence
  Synthetic oligonucleotide; CTC chr11 5315058 5315079 5315063 5315058 -
tgatcattgtcttttcttatat

SEQ ID NO: 128061 - DNA, 22 bp, Artificial Sequence
  Synthetic oligonucleotide; CTG chr11 5315056 5315077 5315061 5315056 -
atcattgtcttttcttatatcc

SEQ ID NO: 128062 - DNA, 22 bp, Artificial Sequence
  Synthetic oligonucleotide; TTG chr11 5315049 5315070 5315054 5315049 -
tcttttcttatatcctgatcct

SEQ ID NO: 128063 - DNA, 22 bp, Artificial Sequence
  Synthetic oligonucleotide; CTT chr11 5315045 5315066 5315050 5315045 -
ttcttatatcctgatccttaaa

SEQ ID NO: 128064 - DNA, 22 bp, Artificial Sequence
  Synthetic oligonucleotide; TTT chr11 5315044 5315065 5315049 5315044 -
tcttatatcctgatccttaaaa

SEQ ID NO: 128065 - DNA, 22 bp, Artificial Sequence
  Synthetic oligonucleotide; TTT chr11 5315043 5315064 5315048 5315043 -
cttatatcctgatccttaaaac

SEQ ID NO: 128066 - DNA, 22 bp, Artificial Sequence
  Synthetic oligonucleotide; TTC chr11 5315042 5315063 5315047 5315042 -
ttatatcctgatccttaaaaca

SEQ ID NO: 128067 - DNA, 22 bp, Artificial Sequence
  Synthetic oligonucleotide; CTT chr11 5315040 5315061 5315045 5315040 -
atatcctgatccttaaaacagt

SEQ ID NO: 128068 - DNA, 22 bp, Artificial Sequence
  Synthetic oligonucleotide; TTA chr11 5315039 5315060 5315044 5315039 -
tatcctgatccttaaaacagtt

SEQ ID NO: 128069 - DNA, 22 bp, Artificial Sequence
  Synthetic oligonucleotide; CTG chr11 5315032 5315053 5315037 5315032 -
atccttaaaacagttaaaggta

SEQ ID NO: 128070 - DNA, 22 bp, Artificial Sequence
  Synthetic oligonucleotide; CTT chr11 5315026 5315047 5315031 5315026 -
aaaacagttaaaggtattgcct

SEQ ID NO: 128071 - DNA, 22 bp, Artificial Sequence
  Synthetic oligonucleotide; TTA chr11 5315025 5315046 5315030 5315025 -
aaacagttaaaggtattgcctc

SEQ ID NO: 128072 - DNA, 22 bp, Artificial Sequence
  Synthetic oligonucleotide; TTA chr11 5315016 5315037 5315021 5315016 -
aaggtattgcctccagaaaaga

SEQ ID NO: 128073 - DNA, 22 bp, Artificial Sequence
  Synthetic oligonucleotide; TTG chr11 5315007 5315028 5315012 5315007 -
cctccagaaaagagcaagccaa

SEQ ID NO: 128074 - DNA, 22 bp, Artificial Sequence
  Synthetic oligonucleotide; CTC chr11 5315003 5315024 5315008 5315003 -
cagaaaagagcaagccaaagct

SEQ ID NO: 128075 - DNA, 22 bp, Artificial Sequence
  Synthetic oligonucleotide; CTC chr11 5314980 5315001 5314985 5314980 -
tcaacatgtgtgtctcccatat

SEQ ID NO: 128076 - DNA, 22 bp, Artificial Sequence
  Synthetic oligonucleotide; CTC chr11 5314978 5314999 5314983 5314978 -
aacatgtgtgtctcccatatca

SEQ ID NO: 128077 - DNA, 22 bp, Artificial Sequence
  Synthetic oligonucleotide; CTC chr11 5314964 5314985 5314969 5314964 -
ccatatcagctgtgtcttggta

SEQ ID NO: 128078 - DNA, 22 bp, Artificial Sequence
  Synthetic oligonucleotide; CTG chr11 5314952 5314973 5314957 5314952 -
tgtcttggtatttcacatcacc

SEQ ID NO: 128079 - DNA, 22 bp, Artificial Sequence
  Synthetic oligonucleotide; CTT chr11 5314946 5314967 5314951 5314946 -
ggtatttcacatcaccgtgatc

SEQ ID NO: 128080 - DNA, 22 bp, Artificial Sequence
  Synthetic oligonucleotide; TTG chr11 5314945 5314966 5314950 5314945 -
gtatttcacatcaccgtgatca

SEQ ID NO: 128081 - DNA, 22 bp, Artificial Sequence
  Synthetic oligonucleotide; TTT chr11 5314939 5314960 5314944 5314939 -
cacatcaccgtgatcagtgaga

SEQ ID NO: 128082 - DNA, 22 bp, Artificial Sequence
  Synthetic oligonucleotide; TTC chr11 5314938 5314959 5314943 5314938 -
acatcaccgtgatcagtgagac

SEQ ID NO: 128083 - DNA, 22 bp, Artificial Sequence
  Synthetic oligonucleotide; CTT chr11 5314914 5314935 5314919 5314914 -
tcattcacaggtttgggaaaca

SEQ ID NO: 128084 - DNA, 22 bp, Artificial Sequence
  Synthetic oligonucleotide; TTT chr11 5314913 5314934 5314918 5314913 -
cattcacaggtttgggaaacat

SEQ ID NO: 128085 - DNA, 22 bp, Artificial Sequence
  Synthetic oligonucleotide; TTC chr11 5314912 5314933 5314917 5314912 -
attcacaggtttgggaaacatg

SEQ ID NO: 128086 - DNA, 22 bp, Artificial Sequence
  Synthetic oligonucleotide; TTC chr11 5314908 5314929 5314913 5314908 -
acaggtttgggaaacatgcacc

SEQ ID NO: 128087 - DNA, 22 bp, Artificial Sequence
  Synthetic oligonucleotide; TTT chr11 5314900 5314921 5314905 5314900 -
gggaaacatgcaccacatgtgg

SEQ ID NO: 128088 - DNA, 22 bp, Artificial Sequence
  Synthetic oligonucleotide; TTG chr11 5314899 5314920 5314904 5314899 -
ggaaacatgcaccacatgtggt

SEQ ID NO: 128089 - DNA, 22 bp, Artificial Sequence
  Synthetic oligonucleotide; TTA chr11 5314869 5314890 5314874 5314869 -
ccgtgagctaatgactcatttc

SEQ ID NO: 128090 - DNA, 22 bp, Artificial Sequence
  Synthetic oligonucleotide; CTA chr11 5314859 5314880 5314864 5314859 -
atgactcatttctttttcctcc

SEQ ID NO: 128091 - DNA, 22 bp, Artificial Sequence
  Synthetic oligonucleotide; CTC chr11 5314852 5314873 5314857 5314852 -
atttctttttcctccattcatg

SEQ ID NO: 128092 - DNA, 22 bp, Artificial Sequence
  Synthetic oligonucleotide; TTT chr11 5314848 5314869 5314853 5314848 -
ctttttcctccattcatgaacc

SEQ ID NO: 128093 - DNA, 22 bp, Artificial Sequence
  Synthetic oligonucleotide; TTC chr11 5314847 5314868 5314852 5314847 -
tttttcctccattcatgaaccc

SEQ ID NO: 128094 - DNA, 22 bp, Artificial Sequence
  Synthetic oligonucleotide; CTT chr11 5314845 5314866 5314850 5314845 -
tttcctccattcatgaacccta

SEQ ID NO: 128095 - DNA, 22 bp, Artificial Sequence
  Synthetic oligonucleotide; TTT chr11 5314844 5314865 5314849 5314844 -
ttcctccattcatgaaccctat

SEQ ID NO: 128096 - DNA, 22 bp, Artificial Sequence
  Synthetic oligonucleotide; TTT chr11 5314843 5314864 5314848 5314843 -
tcctccattcatgaaccctatt

SEQ ID NO: 128097 - DNA, 22 bp, Artificial Sequence
  Synthetic oligonucleotide; TTT chr11 5314842 5314863 5314847 5314842 -
cctccattcatgaaccctatta

SEQ ID NO: 128098 - DNA, 22 bp, Artificial Sequence
  Synthetic oligonucleotide; TTC chr11 5314841 5314862 5314846 5314841 -
ctccattcatgaaccctattat

SEQ ID NO: 128099 - DNA, 22 bp, Artificial Sequence
  Synthetic oligonucleotide; CTC chr11 5314838 5314859 5314843 5314838 -
cattcatgaaccctattatata

SEQ ID NO: 128100 - DNA, 22 bp, Artificial Sequence
  Synthetic oligonucleotide; TTC chr11 5314833 5314854 5314838 5314833 -
atgaaccctattatatacagca

SEQ ID NO: 128101 - DNA, 22 bp, Artificial Sequence
  Synthetic oligonucleotide; CTA chr11 5314823 5314844 5314828 5314823 -
ttatatacagcatcaaaccaag

SEQ ID NO: 128102 - DNA, 22 bp, Artificial Sequence
  Synthetic oligonucleotide; TTA chr11 5314820 5314841 5314825 5314820 -
tatacagcatcaaaccaagcag

SEQ ID NO: 128103 - DNA, 22 bp, Artificial Sequence
  Synthetic oligonucleotide; TTG chr11 5314782 5314803 5314787 5314782 -
ttcgcctattttctgggcacag

SEQ ID NO: 128104 - DNA, 22 bp, Artificial Sequence
  Synthetic oligonucleotide; TTC chr11 5314779 5314800 5314784 5314779 -
gcctattttctgggcacagaat

SEQ ID NO: 128105 - DNA, 22 bp, Artificial Sequence
  Synthetic oligonucleotide; CTA chr11 5314774 5314795 5314779 5314774 -
ttttctgggcacagaatggctt

SEQ ID NO: 128106 - DNA, 22 bp, Artificial Sequence
  Synthetic oligonucleotide; TTT chr11 5314771 5314792 5314776 5314771 -
tctgggcacagaatggcttgag

SEQ ID NO: 128107 - DNA, 22 bp, Artificial Sequence
  Synthetic oligonucleotide; TTT chr11 5314770 5314791 5314775 5314770 -
ctgggcacagaatggcttgagc

SEQ ID NO: 128108 - DNA, 22 bp, Artificial Sequence
  Synthetic oligonucleotide; TTC chr11 5314769 5314790 5314774 5314769 -
tgggcacagaatggcttgagcc

SEQ ID NO: 128109 - DNA, 22 bp, Artificial Sequence
  Synthetic oligonucleotide; CTG chr11 5314767 5314788 5314772 5314767 -
ggcacagaatggcttgagccct

SEQ ID NO: 128110 - DNA, 22 bp, Artificial Sequence
  Synthetic oligonucleotide; CTT chr11 5314752 5314773 5314757 5314752 -
gagcccttttttcagaattttg

SEQ ID NO: 128111 - DNA, 22 bp, Artificial Sequence
  Synthetic oligonucleotide; TTG chr11 5314751 5314772 5314756 5314751 -
agcccttttttcagaattttgt

SEQ ID NO: 128112 - DNA, 22 bp, Artificial Sequence
  Synthetic oligonucleotide; CTT chr11 5314744 5314765 5314749 5314744 -
ttttcagaattttgtgatcttc

SEQ ID NO: 128113 - DNA, 22 bp, Artificial Sequence
  Synthetic oligonucleotide; TTT chr11 5314743 5314764 5314748 5314743 -
tttcagaattttgtgatcttca

SEQ ID NO: 128114 - DNA, 22 bp, Artificial Sequence
  Synthetic oligonucleotide; TTT chr11 5314742 5314763 5314747 5314742 -
ttcagaattttgtgatcttcat

SEQ ID NO: 128115 - DNA, 22 bp, Artificial Sequence
  Synthetic oligonucleotide; TTT chr11 5314741 5314762 5314746 5314741 -
tcagaattttgtgatcttcatg

SEQ ID NO: 128116 - DNA, 22 bp, Artificial Sequence
  Synthetic oligonucleotide; TTT chr11 5314740 5314761 5314745 5314740 -
cagaattttgtgatcttcatga

SEQ ID NO: 128117 - DNA, 22 bp, Artificial Sequence
  Synthetic oligonucleotide; TTC chr11 5314739 5314760 5314744 5314739 -
agaattttgtgatcttcatgat

SEQ ID NO: 128118 - DNA, 22 bp, Artificial Sequence
  Synthetic oligonucleotide; TTT chr11 5314732 5314753 5314737 5314732 -
tgtgatcttcatgatttctggg

SEQ ID NO: 128119 - DNA, 22 bp, Artificial Sequence
  Synthetic oligonucleotide; TTT chr11 5314731 5314752 5314736 5314731 -
gtgatcttcatgatttctgggc

SEQ ID NO: 128120 - DNA, 22 bp, Artificial Sequence
  Synthetic oligonucleotide; TTG chr11 5314730 5314751 5314735 5314730 -
tgatcttcatgatttctgggcc

SEQ ID NO: 128121 - DNA, 22 bp, Artificial Sequence
  Synthetic oligonucleotide; CTT chr11 5314723 5314744 5314728 5314723 -
catgatttctgggccttttgag

SEQ ID NO: 128122 - DNA, 22 bp, Artificial Sequence
  Synthetic oligonucleotide; TTC chr11 5314722 5314743 5314727 5314722 -
atgatttctgggccttttgagt

SEQ ID NO: 128123 - DNA, 22 bp, Artificial Sequence
  Synthetic oligonucleotide; TTT chr11 5314715 5314736 5314720 5314715 -
ctgggccttttgagtaattgga

SEQ ID NO: 128124 - DNA, 22 bp, Artificial Sequence
  Synthetic oligonucleotide; TTC chr11 5314714 5314735 5314719 5314714 -
tgggccttttgagtaattggaa

SEQ ID NO: 128125 - DNA, 22 bp, Artificial Sequence
  Synthetic oligonucleotide; CTG chr11 5314712 5314733 5314717 5314712 -
ggccttttgagtaattggaaag

SEQ ID NO: 128126 - DNA, 22 bp, Artificial Sequence
  Synthetic oligonucleotide; CTT chr11 5314706 5314727 5314711 5314706 -
ttgagtaattggaaaggagctt

SEQ ID NO: 128127 - DNA, 22 bp, Artificial Sequence
  Synthetic oligonucleotide; TTT chr11 5314705 5314726 5314710 5314705 -
tgagtaattggaaaggagctta

SEQ ID NO: 128128 - DNA, 22 bp, Artificial Sequence
  Synthetic oligonucleotide; TTT chr11 5314704 5314725 5314709 5314704 -
gagtaattggaaaggagcttat

SEQ ID NO: 128129 - DNA, 22 bp, Artificial Sequence
  Synthetic oligonucleotide; TTG chr11 5314703 5314724 5314708 5314703 -
agtaattggaaaggagcttatt

SEQ ID NO: 128130 - DNA, 22 bp, Artificial Sequence
  Synthetic oligonucleotide; TTG chr11 5314695 5314716 5314700 5314695 -
gaaaggagcttattttataccc

SEQ ID NO: 128131 - DNA, 22 bp, Artificial Sequence
  Synthetic oligonucleotide; CTT chr11 5314684 5314705 5314689 5314684 -
attttatacccaatatctcttg

SEQ ID NO: 128132 - DNA, 22 bp, Artificial Sequence
  Synthetic oligonucleotide; TTA chr11 5314683 5314704 5314688 5314683 -
ttttatacccaatatctcttgt

SEQ ID NO: 128133 - DNA, 22 bp, Artificial Sequence
  Synthetic oligonucleotide; TTT chr11 5314680 5314701 5314685 5314680 -
tatacccaatatctcttgtatc

SEQ ID NO: 128134 - DNA, 22 bp, Artificial Sequence
  Synthetic oligonucleotide; TTT chr11 5314679 5314700 5314684 5314679 -
atacccaatatctcttgtatca

SEQ ID NO: 128135 - DNA, 22 bp, Artificial Sequence
  Synthetic oligonucleotide; TTA chr11 5314678 5314699 5314683 5314678 -
tacccaatatctcttgtatcag

SEQ ID NO: 128136 - DNA, 22 bp, Artificial Sequence
  Synthetic oligonucleotide; CTC chr11 5314665 5314686 5314670 5314665 -
ttgtatcagtgttagataggct

SEQ ID NO: 128137 - DNA, 22 bp, Artificial Sequence
  Synthetic oligonucleotide; CTT chr11 5314663 5314684 5314668 5314663 -
gtatcagtgttagataggcttt

SEQ ID NO: 128138 - DNA, 22 bp, Artificial Sequence
  Synthetic oligonucleotide; TTG chr11 5314662 5314683 5314667 5314662 -
tatcagtgttagataggcttta

SEQ ID NO: 128139 - DNA, 22 bp, Artificial Sequence
  Synthetic oligonucleotide; TTA chr11 5314651 5314672 5314656 5314651 -
gataggctttaactattatcta

SEQ ID NO: 128140 - DNA, 22 bp, Artificial Sequence
  Synthetic oligonucleotide; CTT chr11 5314642 5314663 5314647 5314642 -
taactattatctaaagtgaaaa

SEQ ID NO: 128141 - DNA, 22 bp, Artificial Sequence
  Synthetic oligonucleotide; TTT chr11 5314641 5314662 5314646 5314641 -
aactattatctaaagtgaaaag

SEQ ID NO: 128142 - DNA, 22 bp, Artificial Sequence
  Synthetic oligonucleotide; TTA chr11 5314640 5314661 5314645 5314640 -
actattatctaaagtgaaaagc

SEQ ID NO: 128143 - DNA, 22 bp, Artificial Sequence
  Synthetic oligonucleotide; CTA chr11 5314636 5314657 5314641 5314636 -
ttatctaaagtgaaaagctaca

SEQ ID NO: 128144 - DNA, 22 bp, Artificial Sequence
  Synthetic oligonucleotide; TTA chr11 5314633 5314654 5314638 5314633 -
tctaaagtgaaaagctacatgg

SEQ ID NO: 128145 - DNA, 22 bp, Artificial Sequence
  Synthetic oligonucleotide; CTA chr11 5314629 5314650 5314634 5314629 -
aagtgaaaagctacatggaaca

SEQ ID NO: 128146 - DNA, 22 bp, Artificial Sequence
  Synthetic oligonucleotide; CTA chr11 5314616 5314637 5314621 5314616 -
catggaacaataatacaatgaa

SEQ ID NO: 128147 - DNA, 22 bp, Artificial Sequence
  Synthetic oligonucleotide; TTG chr11 5314579 5314600 5314584 5314579 -
atcaattgataaatacataaat

SEQ ID NO: 128148 - DNA, 22 bp, Artificial Sequence
  Synthetic oligonucleotide; TTG chr11 5314571 5314592 5314576 5314571 -
ataaatacataaatatatgtat

SEQ ID NO: 128149 - DNA, 22 bp, Artificial Sequence
  Synthetic oligonucleotide; TTC chr11 5314539 5314560 5314544 5314539 -
atatgtagatgtaaagctttat

SEQ ID NO: 128150 - DNA, 22 bp, Artificial Sequence
  Synthetic oligonucleotide; CTT chr11 5314520 5314541 5314525 5314520 -
tatcgagggagatatatctata

SEQ ID NO: 128151 - DNA, 22 bp, Artificial Sequence
  Synthetic oligonucleotide; TTT chr11 5314519 5314540 5314524 5314519 -
atcgagggagatatatctataa

SEQ ID NO: 128152 - DNA, 22 bp, Artificial Sequence
  Synthetic oligonucleotide; TTA chr11 5314518 5314539 5314523 5314518 -
tcgagggagatatatctataat

SEQ ID NO: 128153 - DNA, 22 bp, Artificial Sequence
  Synthetic oligonucleotide; CTA chr11 5314500 5314521 5314505 5314500 -
taatttacctatctattgagag

SEQ ID NO: 128154 - DNA, 22 bp, Artificial Sequence
  Synthetic oligonucleotide; TTT chr11 5314494 5314515 5314499 5314494 -
acctatctattgagagatacta

SEQ ID NO: 128155 - DNA, 22 bp, Artificial Sequence
  Synthetic oligonucleotide; TTA chr11 5314493 5314514 5314498 5314493 -
cctatctattgagagatactag

SEQ ID NO: 128156 - DNA, 22 bp, Artificial Sequence
  Synthetic oligonucleotide; CTA chr11 5314489 5314510 5314494 5314489 -
tctattgagagatactaggaaa

SEQ ID NO: 128157 - DNA, 22 bp, Artificial Sequence
  Synthetic oligonucleotide; CTA chr11 5314485 5314506 5314490 5314485 -
ttgagagatactaggaaagtgg

SEQ ID NO: 128158 - DNA, 22 bp, Artificial Sequence
  Synthetic oligonucleotide; TTG chr11 5314482 5314503 5314487 5314482 -
agagatactaggaaagtggaat

SEQ ID NO: 128159 - DNA, 22 bp, Artificial Sequence
  Synthetic oligonucleotide; CTA chr11 5314472 5314493 5314477 5314472 -
ggaaagtggaatactattgaat

SEQ ID NO: 128160 - DNA, 22 bp, Artificial Sequence
  Synthetic oligonucleotide; CTA chr11 5314456 5314477 5314461 5314456 -
ttgaatatggagataaaacatg

SEQ ID NO: 128161 - DNA, 22 bp, Artificial Sequence
  Synthetic oligonucleotide; TTG chr11 5314453 5314474 5314458 5314453 -
aatatggagataaaacatgtag

SEQ ID NO: 128162 - DNA, 22 bp, Artificial Sequence
  Synthetic oligonucleotide; CTA chr11 5314419 5314440 5314424 5314419 -
ataatcagggaaaatatggtta

SEQ ID NO: 128163 - DNA, 22 bp, Artificial Sequence
  Synthetic oligonucleotide; TTA chr11 5314397 5314418 5314402 5314397 -
ttcataacctgtattcataaga

SEQ ID NO: 128164 - DNA, 22 bp, Artificial Sequence
  Synthetic oligonucleotide; TTC chr11 5314394 5314415 5314399 5314394 -
ataacctgtattcataagaact

SEQ ID NO: 128165 - DNA, 22 bp, Artificial Sequence
  Synthetic oligonucleotide; CTG chr11 5314386 5314407 5314391 5314386 -
tattcataagaactgaaagtac

SEQ ID NO: 128166 - DNA, 22 bp, Artificial Sequence
  Synthetic oligonucleotide; TTC chr11 5314381 5314402 5314386 5314381 -
ataagaactgaaagtaccattt

SEQ ID NO: 128167 - DNA, 22 bp, Artificial Sequence
  Synthetic oligonucleotide; CTG chr11 5314371 5314392 5314376 5314371 -
aaagtaccattttaggaagagt

SEQ ID NO: 128168 - DNA, 22 bp, Artificial Sequence
  Synthetic oligonucleotide; TTT chr11 5314359 5314380 5314364 5314359 -
taggaagagtcaagtggccagt

SEQ ID NO: 128169 - DNA, 22 bp, Artificial Sequence
  Synthetic oligonucleotide; TTT chr11 5314358 5314379 5314363 5314358 -
aggaagagtcaagtggccagtc

SEQ ID NO: 128170 - DNA, 22 bp, Artificial Sequence
  Synthetic oligonucleotide; TTA chr11 5314357 5314378 5314362 5314357 -
ggaagagtcaagtggccagtct

SEQ ID NO: 128171 - DNA, 22 bp, Artificial Sequence
  Synthetic oligonucleotide; CTA chr11 5314334 5314355 5314339 5314334 -
gttcaaccaaagcctacagaag

SEQ ID NO: 128172 - DNA, 22 bp, Artificial Sequence
  Synthetic oligonucleotide; TTC chr11 5314330 5314351 5314335 5314330 -
aaccaaagcctacagaaggaaa

SEQ ID NO: 128173 - DNA, 22 bp, Artificial Sequence
  Synthetic oligonucleotide; CTA chr11 5314318 5314339 5314323 5314318 -
cagaaggaaaaatgtgcaattg

SEQ ID NO: 128174 - DNA, 22 bp, Artificial Sequence
  Synthetic oligonucleotide; TTG chr11 5314296 5314317 5314301 5314296 -
cagatctagttttggccatata

SEQ ID NO: 128175 - DNA, 22 bp, Artificial Sequence
  Synthetic oligonucleotide; CTA chr11 5314288 5314309 5314293 5314288 -
gttttggccatataaagatgaa

SEQ ID NO: 128176 - DNA, 22 bp, Artificial Sequence
  Synthetic oligonucleotide; TTT chr11 5314284 5314305 5314289 5314284 -
tggccatataaagatgaattat

SEQ ID NO: 128177 - DNA, 22 bp, Artificial Sequence
  Synthetic oligonucleotide; TTT chr11 5314283 5314304 5314288 5314283 -
ggccatataaagatgaattata

SEQ ID NO: 128178 - DNA, 22 bp, Artificial Sequence
  Synthetic oligonucleotide; TTG chr11 5314282 5314303 5314287 5314282 -
gccatataaagatgaattatag

SEQ ID NO: 128179 - DNA, 22 bp, Artificial Sequence
  Synthetic oligonucleotide; TTA chr11 5314263 5314284 5314268 5314263 -
tagcatgtgaattgaggtcatg

SEQ ID NO: 128180 - DNA, 22 bp, Artificial Sequence
  Synthetic oligonucleotide; TTG chr11 5314249 5314270 5314254 5314249 -
aggtcatggaactctactataa

SEQ ID NO: 128181 - DNA, 22 bp, Artificial Sequence
  Synthetic oligonucleotide; CTC chr11 5314235 5314256 5314240 5314235 -
tactataatctcaaaactactc

SEQ ID NO: 128182 - DNA, 22 bp, Artificial Sequence
  Synthetic oligonucleotide; CTA chr11 5314233 5314254 5314238 5314233 -
ctataatctcaaaactactcta

SEQ ID NO: 128183 - DNA, 22 bp, Artificial Sequence
  Synthetic oligonucleotide; CTA chr11 5314230 5314251 5314235 5314230 -
taatctcaaaactactctattt

SEQ ID NO: 128184 - DNA, 22 bp, Artificial Sequence
  Synthetic oligonucleotide; CTC chr11 5314223 5314244 5314228 5314223 -
aaaactactctatttcagggta

SEQ ID NO: 128185 - DNA, 22 bp, Artificial Sequence
  Synthetic oligonucleotide; CTA chr11 5314216 5314237 5314221 5314216 -
ctctatttcagggtagattttc

SEQ ID NO: 128186 - DNA, 22 bp, Artificial Sequence
  Synthetic oligonucleotide; CTC chr11 5314213 5314234 5314218 5314213 -
tatttcagggtagattttcctt

SEQ ID NO: 128187 - DNA, 22 bp, Artificial Sequence
  Synthetic oligonucleotide; CTA chr11 5314211 5314232 5314216 5314211 -
tttcagggtagattttcctttt

SEQ ID NO: 128188 - DNA, 22 bp, Artificial Sequence
  Synthetic oligonucleotide; TTT chr11 5314208 5314229 5314213 5314208 -
cagggtagattttccttttttt

SEQ ID NO: 128189 - DNA, 22 bp, Artificial Sequence
  Synthetic oligonucleotide; TTC chr11 5314207 5314228 5314212 5314207 -
agggtagattttcctttttttt

SEQ ID NO: 128190 - DNA, 22 bp, Artificial Sequence
  Synthetic oligonucleotide; TTT chr11 5314196 5314217 5314201 5314196 -
tcctttttttttttttttttta

SEQ ID NO: 128191 - DNA, 22 bp, Artificial Sequence
  Synthetic oligonucleotide; TTT chr11 5314195 5314216 5314200 5314195 -
ccttttttttttttttttttaa

SEQ ID NO: 128192 - DNA, 22 bp, Artificial Sequence
  Synthetic oligonucleotide; TTC chr11 5314194 5314215 5314199 5314194 -
cttttttttttttttttttaaa

SEQ ID NO: 128193 - DNA, 22 bp, Artificial Sequence
  Synthetic oligonucleotide; CTT chr11 5314191 5314212 5314196 5314191 -
ttttttttttttttttaaaata

SEQ ID NO: 128194 - DNA, 22 bp, Artificial Sequence
  Synthetic oligonucleotide; TTT chr11 5314190 5314211 5314195 5314190 -
tttttttttttttttaaaatag

SEQ ID NO: 128195 - DNA, 22 bp, Artificial Sequence
  Synthetic oligonucleotide; TTT chr11 5314189 5314210 5314194 5314189 -
ttttttttttttttaaaataga

SEQ ID NO: 128196 - DNA, 22 bp, Artificial Sequence
  Synthetic oligonucleotide; TTT chr11 5314188 5314209 5314193 5314188 -
tttttttttttttaaaatagat

SEQ ID NO: 128197 - DNA, 22 bp, Artificial Sequence
  Synthetic oligonucleotide; TTT chr11 5314187 5314208 5314192 5314187 -
ttttttttttttaaaatagatt

SEQ ID NO: 128198 - DNA, 22 bp, Artificial Sequence
  Synthetic oligonucleotide; TTT chr11 5314186 5314207 5314191 5314186 -
tttttttttttaaaatagattt

SEQ ID NO: 128199 - DNA, 22 bp, Artificial Sequence
  Synthetic oligonucleotide; TTT chr11 5314185 5314206 5314190 5314185 -
ttttttttttaaaatagatttt

SEQ ID NO: 128200 - DNA, 22 bp, Artificial Sequence
  Synthetic oligonucleotide; TTT chr11 5314184 5314205 5314189 5314184 -
tttttttttaaaatagatttta

SEQ ID NO: 128201 - DNA, 22 bp, Artificial Sequence
  Synthetic oligonucleotide; TTT chr11 5314183 5314204 5314188 5314183 -
ttttttttaaaatagattttat

SEQ ID NO: 128202 - DNA, 22 bp, Artificial Sequence
  Synthetic oligonucleotide; TTT chr11 5314182 5314203 5314187 5314182 -
tttttttaaaatagattttatt

SEQ ID NO: 128203 - DNA, 22 bp, Artificial Sequence
  Synthetic oligonucleotide; TTT chr11 5314181 5314202 5314186 5314181 -
ttttttaaaatagattttattt

SEQ ID NO: 128204 - DNA, 22 bp, Artificial Sequence
  Synthetic oligonucleotide; TTT chr11 5314180 5314201 5314185 5314180 -
tttttaaaatagattttatttt

SEQ ID NO: 128205 - DNA, 22 bp, Artificial Sequence
  Synthetic oligonucleotide; TTT chr11 5314179 5314200 5314184 5314179 -
ttttaaaatagattttattttc

SEQ ID NO: 128206 - DNA, 22 bp, Artificial Sequence
  Synthetic oligonucleotide; TTT chr11 5314178 5314199 5314183 5314178 -
tttaaaatagattttattttcc

SEQ ID NO: 128207 - DNA, 22 bp, Artificial Sequence
  Synthetic oligonucleotide; TTT chr11 5314177 5314198 5314182 5314177 -
ttaaaatagattttattttcct

SEQ ID NO: 128208 - DNA, 22 bp, Artificial Sequence
  Synthetic oligonucleotide; TTT chr11 5314176 5314197 5314181 5314176 -
taaaatagattttattttcctt

SEQ ID NO: 128209 - DNA, 22 bp, Artificial Sequence
  Synthetic oligonucleotide; TTT chr11 5314175 5314196 5314180 5314175 -
aaaatagattttattttccttc

SEQ ID NO: 128210 - DNA, 22 bp, Artificial Sequence
  Synthetic oligonucleotide; TTA chr11 5314174 5314195 5314179 5314174 -
aaatagattttattttccttca

SEQ ID NO: 128211 - DNA, 22 bp, Artificial Sequence
  Synthetic oligonucleotide; TTT chr11 5314164 5314185 5314169 5314164 -
tattttccttcaacttattagg

SEQ ID NO: 128212 - DNA, 22 bp, Artificial Sequence
  Synthetic oligonucleotide; TTT chr11 5314163 5314184 5314168 5314163 -
attttccttcaacttattaggt

SEQ ID NO: 128213 - DNA, 22 bp, Artificial Sequence
  Synthetic oligonucleotide; TTA chr11 5314162 5314183 5314167 5314162 -
ttttccttcaacttattaggta

SEQ ID NO: 128214 - DNA, 22 bp, Artificial Sequence
  Synthetic oligonucleotide; TTT chr11 5314159 5314180 5314164 5314159 -
tccttcaacttattaggtaggt

SEQ ID NO: 128215 - DNA, 22 bp, Artificial Sequence
  Synthetic oligonucleotide; TTT chr11 5314158 5314179 5314163 5314158 -
ccttcaacttattaggtaggtg

SEQ ID NO: 128216 - DNA, 22 bp, Artificial Sequence
  Synthetic oligonucleotide; TTC chr11 5314157 5314178 5314162 5314157 -
cttcaacttattaggtaggtgc

SEQ ID NO: 128217 - DNA, 22 bp, Artificial Sequence
  Synthetic oligonucleotide; CTT chr11 5314154 5314175 5314159 5314154 -
caacttattaggtaggtgcaaa

SEQ ID NO: 128218 - DNA, 22 bp, Artificial Sequence
  Synthetic oligonucleotide; TTC chr11 5314153 5314174 5314158 5314153 -
aacttattaggtaggtgcaaag

SEQ ID NO: 128219 - DNA, 22 bp, Artificial Sequence
  Synthetic oligonucleotide; CTT chr11 5314148 5314169 5314153 5314148 -
attaggtaggtgcaaaggtaat

SEQ ID NO: 128220 - DNA, 22 bp, Artificial Sequence
  Synthetic oligonucleotide; TTA chr11 5314147 5314168 5314152 5314147 -
ttaggtaggtgcaaaggtaatt

SEQ ID NO: 128221 - DNA, 22 bp, Artificial Sequence
  Synthetic oligonucleotide; TTA chr11 5314144 5314165 5314149 5314144 -
ggtaggtgcaaaggtaattgca

SEQ ID NO: 128222 - DNA, 22 bp, Artificial Sequence
  Synthetic oligonucleotide; TTG chr11 5314124 5314145 5314129 5314124 -
cagttcacagaaattacttttg

SEQ ID NO: 128223 - DNA, 22 bp, Artificial Sequence
  Synthetic oligonucleotide; TTC chr11 5314118 5314139 5314123 5314118 -
acagaaattacttttgtaccaa

SEQ ID NO: 128224 - DNA, 22 bp, Artificial Sequence
  Synthetic oligonucleotide; TTA chr11 5314108 5314129 5314113 5314108 -
cttttgtaccaacataatatat

SEQ ID NO: 128225 - DNA, 22 bp, Artificial Sequence
  Synthetic oligonucleotide; CTT chr11 5314105 5314126 5314110 5314105 -
ttgtaccaacataatatatttt

SEQ ID NO: 128226 - DNA, 22 bp, Artificial Sequence
  Synthetic oligonucleotide; TTT chr11 5314104 5314125 5314109 5314104 -
tgtaccaacataatatatttta

SEQ ID NO: 128227 - DNA, 22 bp, Artificial Sequence
  Synthetic oligonucleotide; TTT chr11 5314103 5314124 5314108 5314103 -
gtaccaacataatatattttaa

SEQ ID NO: 128228 - DNA, 22 bp, Artificial Sequence
  Synthetic oligonucleotide; TTG chr11 5314102 5314123 5314107 5314102 -
taccaacataatatattttaag

SEQ ID NO: 128229 - DNA, 22 bp, Artificial Sequence
  Synthetic oligonucleotide; TTT chr11 5314084 5314105 5314089 5314084 -
taagttccagggcacatgtgca

SEQ ID NO: 128230 - DNA, 22 bp, Artificial Sequence
  Synthetic oligonucleotide; TTT chr11 5314083 5314104 5314088 5314083 -
aagttccagggcacatgtgcag

SEQ ID NO: 128231 - DNA, 22 bp, Artificial Sequence
  Synthetic oligonucleotide; TTA chr11 5314082 5314103 5314087 5314082 -
agttccagggcacatgtgcagg

SEQ ID NO: 128232 - DNA, 22 bp, Artificial Sequence
  Synthetic oligonucleotide; TTC chr11 5314077 5314098 5314082 5314077 -
cagggcacatgtgcaggatgtg

SEQ ID NO: 128233 - DNA, 22 bp, Artificial Sequence
  Synthetic oligonucleotide; TTT chr11 5314048 5314069 5314053 5314048 -
attacataggtaaatgtgtgcc

SEQ ID NO: 128234 - DNA, 22 bp, Artificial Sequence
  Synthetic oligonucleotide; TTA chr11 5314047 5314068 5314052 5314047 -
ttacataggtaaatgtgtgcca

SEQ ID NO: 128235 - DNA, 22 bp, Artificial Sequence
  Synthetic oligonucleotide; TTA chr11 5314044 5314065 5314049 5314044 -
cataggtaaatgtgtgccatgc

SEQ ID NO: 128236 - DNA, 22 bp, Artificial Sequence
  Synthetic oligonucleotide; TTT chr11 5314016 5314037 5314021 5314016 -
gctgcattcgttagctattctt

SEQ ID NO: 128237 - DNA, 22 bp, Artificial Sequence
  Synthetic oligonucleotide; TTG chr11 5314015 5314036 5314020 5314015 -
ctgcattcgttagctattcttc

SEQ ID NO: 128238 - DNA, 22 bp, Artificial Sequence
  Synthetic oligonucleotide; CTG chr11 5314012 5314033 5314017 5314012 -
cattcgttagctattcttcctg

SEQ ID NO: 128239 - DNA, 22 bp, Artificial Sequence
  Synthetic oligonucleotide; TTC chr11 5314007 5314028 5314012 5314007 -
gttagctattcttcctggtgct

SEQ ID NO: 128240 - DNA, 22 bp, Artificial Sequence
  Synthetic oligonucleotide; TTA chr11 5314003 5314024 5314008 5314003 -
gctattcttcctggtgctctcc

SEQ ID NO: 128241 - DNA, 22 bp, Artificial Sequence
  Synthetic oligonucleotide; CTA chr11 5313999 5314020 5314004 5313999 -
ttcttcctggtgctctccctct

SEQ ID NO: 128242 - DNA, 22 bp, Artificial Sequence
  Synthetic oligonucleotide; TTC chr11 5313996 5314017 5314001 5313996 -
ttcctggtgctctccctctcct

SEQ ID NO: 128243 - DNA, 22 bp, Artificial Sequence
  Synthetic oligonucleotide; CTT chr11 5313994 5314015 5313999 5313994 -
cctggtgctctccctctcctcc

SEQ ID NO: 128244 - DNA, 22 bp, Artificial Sequence
  Synthetic oligonucleotide; TTC chr11 5313993 5314014 5313998 5313993 -
ctggtgctctccctctcctccc

SEQ ID NO: 128245 - DNA, 22 bp, Artificial Sequence
  Synthetic oligonucleotide; CTG chr11 5313990 5314011 5313995 5313990 -
gtgctctccctctcctccccac

SEQ ID NO: 128246 - DNA, 22 bp, Artificial Sequence
  Synthetic oligonucleotide; CTC chr11 5313984 5314005 5313989 5313984 -
tccctctcctccccacccacta

SEQ ID NO: 128247 - DNA, 22 bp, Artificial Sequence
  Synthetic oligonucleotide; CTC chr11 5313982 5314003 5313987 5313982 -
cctctcctccccacccactacc

SEQ ID NO: 128248 - DNA, 22 bp, Artificial Sequence
  Synthetic oligonucleotide; CTC chr11 5313978 5313999 5313983 5313978 -
tcctccccacccactaccggac

SEQ ID NO: 128249 - DNA, 22 bp, Artificial Sequence
  Synthetic oligonucleotide; CTC chr11 5313976 5313997 5313981 5313976 -
ctccccacccactaccggacag

SEQ ID NO: 128250 - DNA, 22 bp, Artificial Sequence
  Synthetic oligonucleotide; CTC chr11 5313973 5313994 5313978 5313973 -
cccacccactaccggacaggcc

SEQ ID NO: 128251 - DNA, 22 bp, Artificial Sequence
  Synthetic oligonucleotide; CTA chr11 5313962 5313983 5313967 5313962 -
ccggacaggcccctgtgtgtgt

SEQ ID NO: 128252 - DNA, 22 bp, Artificial Sequence
  Synthetic oligonucleotide; CTG chr11 5313947 5313968 5313952 5313947 -
tgtgtgttgttccccacaagtg

SEQ ID NO: 128253 - DNA, 22 bp, Artificial Sequence
  Synthetic oligonucleotide; TTG chr11 5313938 5313959 5313943 5313938 -
ttccccacaagtgtccatgtgt

SEQ ID NO: 128254 - DNA, 22 bp, Artificial Sequence
  Synthetic oligonucleotide; TTC chr11 5313935 5313956 5313940 5313935 -
cccacaagtgtccatgtgttct

SEQ ID NO: 128255 - DNA, 22 bp, Artificial Sequence
  Synthetic oligonucleotide; TTC chr11 5313914 5313935 5313919 5313914 -
tcactgttcagctcccatttct

SEQ ID NO: 128256 - DNA, 22 bp, Artificial Sequence
  Synthetic oligonucleotide; CTC chr11 5313912 5313933 5313917 5313912 -
actgttcagctcccatttctgt

SEQ ID NO: 128257 - DNA, 22 bp, Artificial Sequence
  Synthetic oligonucleotide; CTG chr11 5313908 5313929 5313913 5313908 -
ttcagctcccatttctgtgtga

SEQ ID NO: 128258 - DNA, 22 bp, Artificial Sequence
  Synthetic oligonucleotide; TTC chr11 5313905 5313926 5313910 5313905 -
agctcccatttctgtgtgagaa

SEQ ID NO: 128259 - DNA, 22 bp, Artificial Sequence
  Synthetic oligonucleotide; CTC chr11 5313900 5313921 5313905 5313900 -
ccatttctgtgtgagaacatgt

SEQ ID NO: 128260 - DNA, 22 bp, Artificial Sequence
  Synthetic oligonucleotide; TTT chr11 5313894 5313915 5313899 5313894 -
ctgtgtgagaacatgtgtgttt

SEQ ID NO: 128261 - DNA, 22 bp, Artificial Sequence
  Synthetic oligonucleotide; TTC chr11 5313893 5313914 5313898 5313893 -
tgtgtgagaacatgtgtgtttg

SEQ ID NO: 128262 - DNA, 22 bp, Artificial Sequence
  Synthetic oligonucleotide; CTG chr11 5313891 5313912 5313896 5313891 -
tgtgagaacatgtgtgtttggt

SEQ ID NO: 128263 - DNA, 22 bp, Artificial Sequence
  Synthetic oligonucleotide; TTT chr11 5313872 5313893 5313877 5313872 -
ggttttctgttcctgtgttagt

SEQ ID NO: 128264 - DNA, 22 bp, Artificial Sequence
  Synthetic oligonucleotide; TTG chr11 5313871 5313892 5313876 5313871 -
gttttctgttcctgtgttagtt

SEQ ID NO: 128265 - DNA, 22 bp, Artificial Sequence
  Synthetic oligonucleotide; TTT chr11 5313867 5313888 5313872 5313867 -
tctgttcctgtgttagtttgat

SEQ ID NO: 128266 - DNA, 22 bp, Artificial Sequence
  Synthetic oligonucleotide; TTT chr11 5313866 5313887 5313871 5313866 -
ctgttcctgtgttagtttgatg

SEQ ID NO: 128267 - DNA, 22 bp, Artificial Sequence
  Synthetic oligonucleotide; TTC chr11 5313865 5313886 5313870 5313865 -
tgttcctgtgttagtttgatga

SEQ ID NO: 128268 - DNA, 22 bp, Artificial Sequence
  Synthetic oligonucleotide; CTG chr11 5313863 5313884 5313868 5313863 -
ttcctgtgttagtttgatgagg

SEQ ID NO: 128269 - DNA, 22 bp, Artificial Sequence
  Synthetic oligonucleotide; TTC chr11 5313860 5313881 5313865 5313860 -
ctgtgttagtttgatgaggata

SEQ ID NO: 128270 - DNA, 22 bp, Artificial Sequence
  Synthetic oligonucleotide; CTG chr11 5313857 5313878 5313862 5313857 -
tgttagtttgatgaggataatg

SEQ ID NO: 128271 - DNA, 22 bp, Artificial Sequence
  Synthetic oligonucleotide; TTA chr11 5313852 5313873 5313857 5313852 -
gtttgatgaggataatggcttc

SEQ ID NO: 128272 - DNA, 22 bp, Artificial Sequence
  Synthetic oligonucleotide; TTT chr11 5313848 5313869 5313853 5313848 -
gatgaggataatggcttccagc

SEQ ID NO: 128273 - DNA, 22 bp, Artificial Sequence
  Synthetic oligonucleotide; TTG chr11 5313847 5313868 5313852 5313847 -
atgaggataatggcttccagct

SEQ ID NO: 128274 - DNA, 22 bp, Artificial Sequence
  Synthetic oligonucleotide; CTT chr11 5313831 5313852 5313836 5313831 -
ccagctccattcatgtccctgc

SEQ ID NO: 128275 - DNA, 22 bp, Artificial Sequence
  Synthetic oligonucleotide; TTC chr11 5313830 5313851 5313835 5313830 -
cagctccattcatgtccctgca

SEQ ID NO: 128276 - DNA, 22 bp, Artificial Sequence
  Synthetic oligonucleotide; CTC chr11 5313824 5313845 5313829 5313824 -
cattcatgtccctgcaaggaac

SEQ ID NO: 128277 - DNA, 22 bp, Artificial Sequence
  Synthetic oligonucleotide; TTC chr11 5313819 5313840 5313824 5313819 -
atgtccctgcaaggaacacaat

SEQ ID NO: 128278 - DNA, 22 bp, Artificial Sequence
  Synthetic oligonucleotide; CTG chr11 5313810 5313831 5313815 5313810 -
caaggaacacaatccttttcct

SEQ ID NO: 128279 - DNA, 22 bp, Artificial Sequence
  Synthetic oligonucleotide; CTT chr11 5313793 5313814 5313798 5313793 -
ttcctttttatggctgtatagt

SEQ ID NO: 128280 - DNA, 22 bp, Artificial Sequence
  Synthetic oligonucleotide; TTT chr11 5313792 5313813 5313797 5313792 -
tcctttttatggctgtatagta

SEQ ID NO: 128281 - DNA, 22 bp, Artificial Sequence
  Synthetic oligonucleotide; TTT chr11 5313791 5313812 5313796 5313791 -
cctttttatggctgtatagtat

SEQ ID NO: 128282 - DNA, 22 bp, Artificial Sequence
  Synthetic oligonucleotide; TTC chr11 5313790 5313811 5313795 5313790 -
ctttttatggctgtatagtatt

SEQ ID NO: 128283 - DNA, 22 bp, Artificial Sequence
  Synthetic oligonucleotide; CTT chr11 5313787 5313808 5313792 5313787 -
tttatggctgtatagtattcca

SEQ ID NO: 128284 - DNA, 22 bp, Artificial Sequence
  Synthetic oligonucleotide; TTT chr11 5313786 5313807 5313791 5313786 -
ttatggctgtatagtattccat

SEQ ID NO: 128285 - DNA, 22 bp, Artificial Sequence
  Synthetic oligonucleotide; TTT chr11 5313785 5313806 5313790 5313785 -
tatggctgtatagtattccatg

SEQ ID NO: 128286 - DNA, 22 bp, Artificial Sequence
  Synthetic oligonucleotide; TTT chr11 5313784 5313805 5313789 5313784 -
atggctgtatagtattccatgg

SEQ ID NO: 128287 - DNA, 22 bp, Artificial Sequence
  Synthetic oligonucleotide; TTA chr11 5313783 5313804 5313788 5313783 -
tggctgtatagtattccatggt

SEQ ID NO: 128288 - DNA, 22 bp, Artificial Sequence
  Synthetic oligonucleotide; CTG chr11 5313777 5313798 5313782 5313777 -
tatagtattccatggtatatat

SEQ ID NO: 128289 - DNA, 22 bp, Artificial Sequence
  Synthetic oligonucleotide; TTC chr11 5313767 5313788 5313772 5313767 -
catggtatatatgtaccacgtt

SEQ ID NO: 128290 - DNA, 22 bp, Artificial Sequence
  Synthetic oligonucleotide; TTT chr11 5313744 5313765 5313749 5313744 -
tctttatccactctatcattga

SEQ ID NO: 128291 - DNA, 22 bp, Artificial Sequence
  Synthetic oligonucleotide; TTT chr11 5313743 5313764 5313748 5313743 -
ctttatccactctatcattgat

SEQ ID NO: 128292 - DNA, 22 bp, Artificial Sequence
  Synthetic oligonucleotide; TTC chr11 5313742 5313763 5313747 5313742 -
tttatccactctatcattgatg

SEQ ID NO: 128293 - DNA, 22 bp, Artificial Sequence
  Synthetic oligonucleotide; CTT chr11 5313740 5313761 5313745 5313740 -
tatccactctatcattgatgga

SEQ ID NO: 128294 - DNA, 22 bp, Artificial Sequence
  Synthetic oligonucleotide; TTT chr11 5313739 5313760 5313744 5313739 -
atccactctatcattgatggac

SEQ ID NO: 128295 - DNA, 22 bp, Artificial Sequence
  Synthetic oligonucleotide; TTA chr11 5313738 5313759 5313743 5313738 -
tccactctatcattgatggaca

SEQ ID NO: 128296 - DNA, 22 bp, Artificial Sequence
  Synthetic oligonucleotide; CTC chr11 5313731 5313752 5313736 5313731 -
tatcattgatggacatttgggt

SEQ ID NO: 128297 - DNA, 22 bp, Artificial Sequence
  Synthetic oligonucleotide; CTA chr11 5313729 5313750 5313734 5313729 -
tcattgatggacatttgggttg

SEQ ID NO: 128298 - DNA, 22 bp, Artificial Sequence
  Synthetic oligonucleotide; TTG chr11 5313723 5313744 5313728 5313723 -
atggacatttgggttgattcca

SEQ ID NO: 128299 - DNA, 22 bp, Artificial Sequence
  Synthetic oligonucleotide; TTT chr11 5313713 5313734 5313718 5313713 -
gggttgattccacatcttggct

SEQ ID NO: 128300 - DNA, 22 bp, Artificial Sequence
  Synthetic oligonucleotide; TTG chr11 5313712 5313733 5313717 5313712 -
ggttgattccacatcttggcta

SEQ ID NO: 128301 - DNA, 22 bp, Artificial Sequence
  Synthetic oligonucleotide; TTG chr11 5313707 5313728 5313712 5313707 -
attccacatcttggctattatg

SEQ ID NO: 128302 - DNA, 22 bp, Artificial Sequence
  Synthetic oligonucleotide; TTC chr11 5313703 5313724 5313708 5313703 -
cacatcttggctattatgaata

SEQ ID NO: 128303 - DNA, 22 bp, Artificial Sequence
  Synthetic oligonucleotide; CTT chr11 5313695 5313716 5313700 5313695 -
ggctattatgaataatgctgca

SEQ ID NO: 128304 - DNA, 22 bp, Artificial Sequence
  Synthetic oligonucleotide; TTG chr11 5313694 5313715 5313699 5313694 -
gctattatgaataatgctgcaa

SEQ ID NO: 128305 - DNA, 22 bp, Artificial Sequence
  Synthetic oligonucleotide; CTA chr11 5313690 5313711 5313695 5313690 -
ttatgaataatgctgcaatgaa

SEQ ID NO: 128306 - DNA, 22 bp, Artificial Sequence
  Synthetic oligonucleotide; TTA chr11 5313687 5313708 5313692 5313687 -
tgaataatgctgcaatgaacat

SEQ ID NO: 128307 - DNA, 22 bp, Artificial Sequence
  Synthetic oligonucleotide; CTG chr11 5313675 5313696 5313680 5313675 -
caatgaacataagcatgcctgt

SEQ ID NO: 128308 - DNA, 22 bp, Artificial Sequence
  Synthetic oligonucleotide; CTG chr11 5313654 5313675 5313659 5313654 -
tatttttataatagattgattt

SEQ ID NO: 128309 - DNA, 22 bp, Artificial Sequence
  Synthetic oligonucleotide; TTT chr11 5313649 5313670 5313654 5313649 -
ttataatagattgatttatatt

SEQ ID NO: 128310 - DNA, 22 bp, Artificial Sequence
  Synthetic oligonucleotide; TTT chr11 5313648 5313669 5313653 5313648 -
tataatagattgatttatattc

SEQ ID NO: 128311 - DNA, 22 bp, Artificial Sequence
  Synthetic oligonucleotide; TTT chr11 5313647 5313668 5313652 5313647 -
ataatagattgatttatattcc

SEQ ID NO: 128312 - DNA, 22 bp, Artificial Sequence
  Synthetic oligonucleotide; TTA chr11 5313646 5313667 5313651 5313646 -
taatagattgatttatattcct

SEQ ID NO: 128313 - DNA, 22 bp, Artificial Sequence
  Synthetic oligonucleotide; TTG chr11 5313636 5313657 5313641 5313636 -
atttatattcctttgggtatat

SEQ ID NO: 128314 - DNA, 22 bp, Artificial Sequence
  Synthetic oligonucleotide; TTT chr11 5313632 5313653 5313637 5313632 -
atattcctttgggtatataccc

SEQ ID NO: 128315 - DNA, 22 bp, Artificial Sequence
  Synthetic oligonucleotide; TTA chr11 5313631 5313652 5313636 5313631 -
tattcctttgggtatataccca

SEQ ID NO: 128316 - DNA, 22 bp, Artificial Sequence
  Synthetic oligonucleotide; TTC chr11 5313626 5313647 5313631 5313626 -
ctttgggtatatacccagtaat

SEQ ID NO: 128317 - DNA, 22 bp, Artificial Sequence
  Synthetic oligonucleotide; CTT chr11 5313623 5313644 5313628 5313623 -
tgggtatatacccagtaatgag

SEQ ID NO: 128318 - DNA, 22 bp, Artificial Sequence
  Synthetic oligonucleotide; TTT chr11 5313622 5313643 5313627 5313622 -
gggtatatacccagtaatgaga

SEQ ID NO: 128319 - DNA, 22 bp, Artificial Sequence
  Synthetic oligonucleotide; TTG chr11 5313621 5313642 5313626 5313621 -
ggtatatacccagtaatgagat

SEQ ID NO: 128320 - DNA, 22 bp, Artificial Sequence
  Synthetic oligonucleotide; TTG chr11 5313597 5313618 5313602 5313597 -
ctgagtcaagtggtatttctgc

SEQ ID NO: 128321 - DNA, 22 bp, Artificial Sequence
  Synthetic oligonucleotide; CTG chr11 5313594 5313615 5313599 5313594 -
agtcaagtggtatttctgcttc

SEQ ID NO: 128322 - DNA, 22 bp, Artificial Sequence
  Synthetic oligonucleotide; TTT chr11 5313579 5313600 5313584 5313579 -
ctgcttctacatctttgaggaa

SEQ ID NO: 128323 - DNA, 22 bp, Artificial Sequence
  Synthetic oligonucleotide; TTC chr11 5313578 5313599 5313583 5313578 -
tgcttctacatctttgaggaaa

SEQ ID NO: 128324 - DNA, 22 bp, Artificial Sequence
  Synthetic oligonucleotide; CTG chr11 5313576 5313597 5313581 5313576 -
cttctacatctttgaggaaagg

SEQ ID NO: 128325 - DNA, 22 bp, Artificial Sequence
  Synthetic oligonucleotide; CTT chr11 5313573 5313594 5313578 5313573 -
ctacatctttgaggaaaggcta

SEQ ID NO: 128326 - DNA, 22 bp, Artificial Sequence
  Synthetic oligonucleotide; TTC chr11 5313572 5313593 5313577 5313572 -
tacatctttgaggaaaggctac

SEQ ID NO: 128327 - DNA, 22 bp, Artificial Sequence
  Synthetic oligonucleotide; CTA chr11 5313570 5313591 5313575 5313570 -
catctttgaggaaaggctacac

SEQ ID NO: 128328 - DNA, 22 bp, Artificial Sequence
  Synthetic oligonucleotide; CTT chr11 5313564 5313585 5313569 5313564 -
tgaggaaaggctacactctctt

SEQ ID NO: 128329 - DNA, 22 bp, Artificial Sequence
  Synthetic oligonucleotide; TTT chr11 5313563 5313584 5313568 5313563 -
gaggaaaggctacactctcttc

SEQ ID NO: 128330 - DNA, 22 bp, Artificial Sequence
  Synthetic oligonucleotide; TTG chr11 5313562 5313583 5313567 5313562 -
aggaaaggctacactctcttcc

SEQ ID NO: 128331 - DNA, 22 bp, Artificial Sequence
  Synthetic oligonucleotide; CTA chr11 5313551 5313572 5313556 5313551 -
cactctcttccacaatgtttga

SEQ ID NO: 128332 - DNA, 22 bp, Artificial Sequence
  Synthetic oligonucleotide; CTC chr11 5313546 5313567 5313551 5313546 -
tcttccacaatgtttgaactaa

SEQ ID NO: 128333 - DNA, 22 bp, Artificial Sequence
  Synthetic oligonucleotide; CTC chr11 5313544 5313565 5313549 5313544 -
ttccacaatgtttgaactaatt

SEQ ID NO: 128334 - DNA, 22 bp, Artificial Sequence
  Synthetic oligonucleotide; CTT chr11 5313542 5313563 5313547 5313542 -
ccacaatgtttgaactaattta

SEQ ID NO: 128335 - DNA, 22 bp, Artificial Sequence
  Synthetic oligonucleotide; TTC chr11 5313541 5313562 5313546 5313541 -
cacaatgtttgaactaatttac

SEQ ID NO: 128336 - DNA, 22 bp, Artificial Sequence
  Synthetic oligonucleotide; TTT chr11 5313531 5313552 5313536 5313531 -
gaactaatttactctcccgtta

SEQ ID NO: 128337 - DNA, 22 bp, Artificial Sequence
  Synthetic oligonucleotide; TTG chr11 5313530 5313551 5313535 5313530 -
aactaatttactctcccgttaa

SEQ ID NO: 128338 - DNA, 22 bp, Artificial Sequence
  Synthetic oligonucleotide; CTA chr11 5313525 5313546 5313530 5313525 -
atttactctcccgttaacagtg

SEQ ID NO: 128339 - DNA, 22 bp, Artificial Sequence
  Synthetic oligonucleotide; TTT chr11 5313521 5313542 5313526 5313521 -
actctcccgttaacagtgtaaa

SEQ ID NO: 128340 - DNA, 22 bp, Artificial Sequence
  Synthetic oligonucleotide; TTA chr11 5313520 5313541 5313525 5313520 -
ctctcccgttaacagtgtaaaa

SEQ ID NO: 128341 - DNA, 22 bp, Artificial Sequence
  Synthetic oligonucleotide; CTC chr11 5313517 5313538 5313522 5313517 -
tcccgttaacagtgtaaaagca

SEQ ID NO: 128342 - DNA, 22 bp, Artificial Sequence
  Synthetic oligonucleotide; CTC chr11 5313515 5313536 5313520 5313515 -
ccgttaacagtgtaaaagcatt

SEQ ID NO: 128343 - DNA, 22 bp, Artificial Sequence
  Synthetic oligonucleotide; TTA chr11 5313509 5313530 5313514 5313509 -
acagtgtaaaagcattccattc

SEQ ID NO: 128344 - DNA, 22 bp, Artificial Sequence
  Synthetic oligonucleotide; TTC chr11 5313492 5313513 5313497 5313492 -
cattcctttctctctgcaacct

SEQ ID NO: 128345 - DNA, 22 bp, Artificial Sequence
  Synthetic oligonucleotide; TTC chr11 5313487 5313508 5313492 5313487 -
ctttctctctgcaaccttgcca

SEQ ID NO: 128346 - DNA, 22 bp, Artificial Sequence
  Synthetic oligonucleotide; CTT chr11 5313484 5313505 5313489 5313484 -
tctctctgcaaccttgccagca

SEQ ID NO: 128347 - DNA, 22 bp, Artificial Sequence
  Synthetic oligonucleotide; TTT chr11 5313483 5313504 5313488 5313483 -
ctctctgcaaccttgccagcaa

SEQ ID NO: 128348 - DNA, 22 bp, Artificial Sequence
  Synthetic oligonucleotide; TTC chr11 5313482 5313503 5313487 5313482 -
tctctgcaaccttgccagcaac

SEQ ID NO: 128349 - DNA, 22 bp, Artificial Sequence
  Synthetic oligonucleotide; CTC chr11 5313480 5313501 5313485 5313480 -
tctgcaaccttgccagcaactg

SEQ ID NO: 128350 - DNA, 22 bp, Artificial Sequence
  Synthetic oligonucleotide; CTC chr11 5313478 5313499 5313483 5313478 -
tgcaaccttgccagcaactgtt

SEQ ID NO: 128351 - DNA, 22 bp, Artificial Sequence
  Synthetic oligonucleotide; CTG chr11 5313476 5313497 5313481 5313476 -
caaccttgccagcaactgttgt

SEQ ID NO: 128352 - DNA, 22 bp, Artificial Sequence
  Synthetic oligonucleotide; CTT chr11 5313469 5313490 5313474 5313469 -
gccagcaactgttgtttcttga

SEQ ID NO: 128353 - DNA, 22 bp, Artificial Sequence
  Synthetic oligonucleotide; TTG chr11 5313468 5313489 5313473 5313468 -
ccagcaactgttgtttcttgac

SEQ ID NO: 128354 - DNA, 22 bp, Artificial Sequence
  Synthetic oligonucleotide; CTG chr11 5313458 5313479 5313463 5313458 -
ttgtttcttgactttttaataa

SEQ ID NO: 128355 - DNA, 22 bp, Artificial Sequence
  Synthetic oligonucleotide; TTG chr11 5313455 5313476 5313460 5313455 -
tttcttgactttttaataattg

SEQ ID NO: 128356 - DNA, 22 bp, Artificial Sequence
  Synthetic oligonucleotide; TTT chr11 5313452 5313473 5313457 5313452 -
cttgactttttaataattgcca

SEQ ID NO: 128357 - DNA, 22 bp, Artificial Sequence
  Synthetic oligonucleotide; TTC chr11 5313451 5313472 5313456 5313451 -
ttgactttttaataattgccat

SEQ ID NO: 128358 - DNA, 22 bp, Artificial Sequence
  Synthetic oligonucleotide; CTT chr11 5313449 5313470 5313454 5313449 -
gactttttaataattgccattc

SEQ ID NO: 128359 - DNA, 22 bp, Artificial Sequence
  Synthetic oligonucleotide; TTG chr11 5313448 5313469 5313453 5313448 -
actttttaataattgccattct

SEQ ID NO: 128360 - DNA, 22 bp, Artificial Sequence
  Synthetic oligonucleotide; CTT chr11 5313444 5313465 5313449 5313444 -
tttaataattgccattctgact

SEQ ID NO: 128361 - DNA, 22 bp, Artificial Sequence
  Synthetic oligonucleotide; TTT chr11 5313443 5313464 5313448 5313443 -
ttaataattgccattctgactg

SEQ ID NO: 128362 - DNA, 22 bp, Artificial Sequence
  Synthetic oligonucleotide; TTT chr11 5313442 5313463 5313447 5313442 -
taataattgccattctgactgg

SEQ ID NO: 128363 - DNA, 22 bp, Artificial Sequence
  Synthetic oligonucleotide; TTT chr11 5313441 5313462 5313446 5313441 -
aataattgccattctgactggt

SEQ ID NO: 128364 - DNA, 22 bp, Artificial Sequence
  Synthetic oligonucleotide; TTA chr11 5313440 5313461 5313445 5313440 -
ataattgccattctgactggtg

SEQ ID NO: 128365 - DNA, 22 bp, Artificial Sequence
  Synthetic oligonucleotide; TTG chr11 5313433 5313454 5313438 5313433 -
ccattctgactggtgtgagatg

SEQ ID NO: 128366 - DNA, 22 bp, Artificial Sequence
  Synthetic oligonucleotide; TTC chr11 5313427 5313448 5313432 5313427 -
tgactggtgtgagatggtatcc

SEQ ID NO: 128367 - DNA, 22 bp, Artificial Sequence
  Synthetic oligonucleotide; CTG chr11 5313425 5313446 5313430 5313425 -
actggtgtgagatggtatccca

SEQ ID NO: 128368 - DNA, 22 bp, Artificial Sequence
  Synthetic oligonucleotide; CTG chr11 5313421 5313442 5313426 5313421 -
gtgtgagatggtatcccattgt

SEQ ID NO: 128369 - DNA, 22 bp, Artificial Sequence
  Synthetic oligonucleotide; TTG chr11 5313400 5313421 5313405 5313400 -
tggttttgatttgcatttttct

SEQ ID NO: 128370 - DNA, 22 bp, Artificial Sequence
  Synthetic oligonucleotide; TTT chr11 5313394 5313415 5313399 5313394 -
tgatttgcatttttctaatgac

SEQ ID NO: 128371 - DNA, 22 bp, Artificial Sequence
  Synthetic oligonucleotide; TTT chr11 5313393 5313414 5313398 5313393 -
gatttgcatttttctaatgacc

SEQ ID NO: 128372 - DNA, 22 bp, Artificial Sequence
  Synthetic oligonucleotide; TTG chr11 5313392 5313413 5313397 5313392 -
atttgcatttttctaatgacca

SEQ ID NO: 128373 - DNA, 22 bp, Artificial Sequence
  Synthetic oligonucleotide; TTT chr11 5313388 5313409 5313393 5313388 -
gcatttttctaatgaccagtaa

SEQ ID NO: 128374 - DNA, 22 bp, Artificial Sequence
  Synthetic oligonucleotide; TTG chr11 5313387 5313408 5313392 5313387 -
catttttctaatgaccagtaag

SEQ ID NO: 128375 - DNA, 22 bp, Artificial Sequence
  Synthetic oligonucleotide; TTT chr11 5313382 5313403 5313387 5313382 -
ttctaatgaccagtaaggttga

SEQ ID NO: 128376 - DNA, 22 bp, Artificial Sequence
  Synthetic oligonucleotide; TTT chr11 5313381 5313402 5313386 5313381 -
tctaatgaccagtaaggttgag

SEQ ID NO: 128377 - DNA, 22 bp, Artificial Sequence
  Synthetic oligonucleotide; TTT chr11 5313380 5313401 5313385 5313380 -
ctaatgaccagtaaggttgagc

SEQ ID NO: 128378 - DNA, 22 bp, Artificial Sequence
  Synthetic oligonucleotide; TTC chr11 5313379 5313400 5313384 5313379 -
taatgaccagtaaggttgagct

SEQ ID NO: 128379 - DNA, 22 bp, Artificial Sequence
  Synthetic oligonucleotide; CTA chr11 5313377 5313398 5313382 5313377 -
atgaccagtaaggttgagcttt

SEQ ID NO: 128380 - DNA, 22 bp, Artificial Sequence
  Synthetic oligonucleotide; TTG chr11 5313361 5313382 5313366 5313361 -
agctttttttttttcatatgtt

SEQ ID NO: 128381 - DNA, 22 bp, Artificial Sequence
  Synthetic oligonucleotide; CTT chr11 5313356 5313377 5313361 5313356 -
tttttttttcatatgtttatta

SEQ ID NO: 128382 - DNA, 22 bp, Artificial Sequence
  Synthetic oligonucleotide; TTT chr11 5313355 5313376 5313360 5313355 -
ttttttttcatatgtttattag

SEQ ID NO: 128383 - DNA, 22 bp, Artificial Sequence
  Synthetic oligonucleotide; TTT chr11 5313354 5313375 5313359 5313354 -
tttttttcatatgtttattaga

SEQ ID NO: 128384 - DNA, 22 bp, Artificial Sequence
  Synthetic oligonucleotide; TTT chr11 5313353 5313374 5313358 5313353 -
ttttttcatatgtttattagaa

SEQ ID NO: 128385 - DNA, 22 bp, Artificial Sequence
  Synthetic oligonucleotide; TTT chr11 5313352 5313373 5313357 5313352 -
tttttcatatgtttattagaag

SEQ ID NO: 128386 - DNA, 22 bp, Artificial Sequence
  Synthetic oligonucleotide; TTT chr11 5313351 5313372 5313356 5313351 -
ttttcatatgtttattagaagc

SEQ ID NO: 128387 - DNA, 22 bp, Artificial Sequence
  Synthetic oligonucleotide; TTT chr11 5313350 5313371 5313355 5313350 -
tttcatatgtttattagaagca

SEQ ID NO: 128388 - DNA, 22 bp, Artificial Sequence
  Synthetic oligonucleotide; TTT chr11 5313349 5313370 5313354 5313349 -
ttcatatgtttattagaagcat

SEQ ID NO: 128389 - DNA, 22 bp, Artificial Sequence
  Synthetic oligonucleotide; TTT chr11 5313348 5313369 5313353 5313348 -
tcatatgtttattagaagcatg

SEQ ID NO: 128390 - DNA, 22 bp, Artificial Sequence
  Synthetic oligonucleotide; TTT chr11 5313347 5313368 5313352 5313347 -
catatgtttattagaagcatga

SEQ ID NO: 128391 - DNA, 22 bp, Artificial Sequence
  Synthetic oligonucleotide; TTC chr11 5313346 5313367 5313351 5313346 -
atatgtttattagaagcatgaa

SEQ ID NO: 128392 - DNA, 22 bp, Artificial Sequence
  Synthetic oligonucleotide; TTT chr11 5313338 5313359 5313343 5313338 -
attagaagcatgaatgtcttct

SEQ ID NO: 128393 - DNA, 22 bp, Artificial Sequence
  Synthetic oligonucleotide; TTA chr11 5313337 5313358 5313342 5313337 -
ttagaagcatgaatgtcttctt

SEQ ID NO: 128394 - DNA, 22 bp, Artificial Sequence
  Synthetic oligonucleotide; TTA chr11 5313334 5313355 5313339 5313334 -
gaagcatgaatgtcttctttag

SEQ ID NO: 128395 - DNA, 22 bp, Artificial Sequence
  Synthetic oligonucleotide; CTT chr11 5313318 5313339 5313323 5313318 -
ctttagagaagtgtctattcat

SEQ ID NO: 128396 - DNA, 22 bp, Artificial Sequence
  Synthetic oligonucleotide; TTC chr11 5313317 5313338 5313322 5313317 -
tttagagaagtgtctattcatg

SEQ ID NO: 128397 - DNA, 22 bp, Artificial Sequence
  Synthetic oligonucleotide; CTT chr11 5313315 5313336 5313320 5313315 -
tagagaagtgtctattcatgtc

SEQ ID NO: 128398 - DNA, 22 bp, Artificial Sequence
  Synthetic oligonucleotide; TTT chr11 5313314 5313335 5313319 5313314 -
agagaagtgtctattcatgtca

SEQ ID NO: 128399 - DNA, 22 bp, Artificial Sequence
  Synthetic oligonucleotide; TTA chr11 5313313 5313334 5313318 5313313 -
gagaagtgtctattcatgtcat

SEQ ID NO: 128400 - DNA, 22 bp, Artificial Sequence
  Synthetic oligonucleotide; CTA chr11 5313301 5313322 5313306 5313301 -
ttcatgtcattccccacttttt

SEQ ID NO: 128401 - DNA, 22 bp, Artificial Sequence
  Synthetic oligonucleotide; TTC chr11 5313298 5313319 5313303 5313298 -
atgtcattccccactttttaat

SEQ ID NO: 128402 - DNA, 22 bp, Artificial Sequence
  Synthetic oligonucleotide; TTC chr11 5313289 5313310 5313294 5313289 -
cccactttttaatggggttgtt

SEQ ID NO: 128403 - DNA, 22 bp, Artificial Sequence
  Synthetic oligonucleotide; CTT chr11 5313282 5313303 5313287 5313282 -
tttaatggggttgtttttttct

SEQ ID NO: 128404 - DNA, 22 bp, Artificial Sequence
  Synthetic oligonucleotide; TTT chr11 5313281 5313302 5313286 5313281 -
ttaatggggttgtttttttctt

SEQ ID NO: 128405 - DNA, 22 bp, Artificial Sequence
  Synthetic oligonucleotide; TTT chr11 5313280 5313301 5313285 5313280 -
taatggggttgtttttttcttg

SEQ ID NO: 128406 - DNA, 22 bp, Artificial Sequence
  Synthetic oligonucleotide; TTT chr11 5313279 5313300 5313284 5313279 -
aatggggttgtttttttcttgt

SEQ ID NO: 128407 - DNA, 22 bp, Artificial Sequence
  Synthetic oligonucleotide; TTA chr11 5313278 5313299 5313283 5313278 -
atggggttgtttttttcttgta

SEQ ID NO: 128408 - DNA, 22 bp, Artificial Sequence
  Synthetic oligonucleotide; TTG chr11 5313269 5313290 5313274 5313269 -
tttttttcttgtaaatttgttt

SEQ ID NO: 128409 - DNA, 22 bp, Artificial Sequence
  Synthetic oligonucleotide; TTT chr11 5313266 5313287 5313271 5313266 -
ttttcttgtaaatttgttttag

SEQ ID NO: 128410 - DNA, 22 bp, Artificial Sequence
  Synthetic oligonucleotide; TTT chr11 5313265 5313286 5313270 5313265 -
tttcttgtaaatttgttttagt

SEQ ID NO: 128411 - DNA, 22 bp, Artificial Sequence
  Synthetic oligonucleotide; TTT chr11 5313264 5313285 5313269 5313264 -
ttcttgtaaatttgttttagtt

SEQ ID NO: 128412 - DNA, 22 bp, Artificial Sequence
  Synthetic oligonucleotide; TTT chr11 5313263 5313284 5313268 5313263 -
tcttgtaaatttgttttagttc

SEQ ID NO: 128413 - DNA, 22 bp, Artificial Sequence
  Synthetic oligonucleotide; TTT chr11 5313262 5313283 5313267 5313262 -
cttgtaaatttgttttagttcc

SEQ ID NO: 128414 - DNA, 22 bp, Artificial Sequence
  Synthetic oligonucleotide; TTC chr11 5313261 5313282 5313266 5313261 -
ttgtaaatttgttttagttcct

SEQ ID NO: 128415 - DNA, 22 bp, Artificial Sequence
  Synthetic oligonucleotide; CTT chr11 5313259 5313280 5313264 5313259 -
gtaaatttgttttagttcctca

SEQ ID NO: 128416 - DNA, 22 bp, Artificial Sequence
  Synthetic oligonucleotide; TTG chr11 5313258 5313279 5313263 5313258 -
taaatttgttttagttcctcat

SEQ ID NO: 128417 - DNA, 22 bp, Artificial Sequence
  Synthetic oligonucleotide; TTT chr11 5313251 5313272 5313256 5313251 -
gttttagttcctcatagactcc

SEQ ID NO: 128418 - DNA, 22 bp, Artificial Sequence
  Synthetic oligonucleotide; TTG chr11 5313250 5313271 5313255 5313250 -
ttttagttcctcatagactcca

SEQ ID NO: 128419 - DNA, 22 bp, Artificial Sequence
  Synthetic oligonucleotide; TTT chr11 5313247 5313268 5313252 5313247 -
tagttcctcatagactccagat

SEQ ID NO: 128420 - DNA, 22 bp, Artificial Sequence
  Synthetic oligonucleotide; TTT chr11 5313246 5313267 5313251 5313246 -
agttcctcatagactccagata

SEQ ID NO: 128421 - DNA, 22 bp, Artificial Sequence
  Synthetic oligonucleotide; TTA chr11 5313245 5313266 5313250 5313245 -
gttcctcatagactccagatat

SEQ ID NO: 128422 - DNA, 22 bp, Artificial Sequence
  Synthetic oligonucleotide; TTC chr11 5313241 5313262 5313246 5313241 -
ctcatagactccagatattaga

SEQ ID NO: 128423 - DNA, 22 bp, Artificial Sequence
  Synthetic oligonucleotide; CTC chr11 5313238 5313259 5313243 5313238 -
atagactccagatattagactt

SEQ ID NO: 128424 - DNA, 22 bp, Artificial Sequence
  Synthetic oligonucleotide; CTC chr11 5313230 5313251 5313235 5313230 -
cagatattagacttttgtcaga

SEQ ID NO: 128425 - DNA, 22 bp, Artificial Sequence
  Synthetic oligonucleotide; TTA chr11 5313221 5313242 5313226 5313221 -
gacttttgtcagatggagaaat

SEQ ID NO: 128426 - DNA, 22 bp, Artificial Sequence
  Synthetic oligonucleotide; CTT chr11 5313216 5313237 5313221 5313216 -
ttgtcagatggagaaattgcaa

SEQ ID NO: 128427 - DNA, 22 bp, Artificial Sequence
  Synthetic oligonucleotide; TTT chr11 5313215 5313236 5313220 5313215 -
tgtcagatggagaaattgcaaa

SEQ ID NO: 128428 - DNA, 22 bp, Artificial Sequence
  Synthetic oligonucleotide; TTT chr11 5313214 5313235 5313219 5313214 -
gtcagatggagaaattgcaaaa

SEQ ID NO: 128429 - DNA, 22 bp, Artificial Sequence
  Synthetic oligonucleotide; TTG chr11 5313213 5313234 5313218 5313213 -
tcagatggagaaattgcaaaaa

SEQ ID NO: 128430 - DNA, 22 bp, Artificial Sequence
  Synthetic oligonucleotide; TTG chr11 5313197 5313218 5313202 5313197 -
caaaaattttcttctattctgt

SEQ ID NO: 128431 - DNA, 22 bp, Artificial Sequence
  Synthetic oligonucleotide; TTT chr11 5313188 5313209 5313193 5313188 -
tcttctattctgtaggttgtct

SEQ ID NO: 128432 - DNA, 22 bp, Artificial Sequence
  Synthetic oligonucleotide; TTT chr11 5313187 5313208 5313192 5313187 -
cttctattctgtaggttgtctg

SEQ ID NO: 128433 - DNA, 22 bp, Artificial Sequence
  Synthetic oligonucleotide; TTC chr11 5313186 5313207 5313191 5313186 -
ttctattctgtaggttgtctgt

SEQ ID NO: 128434 - DNA, 22 bp, Artificial Sequence
  Synthetic oligonucleotide; CTT chr11 5313184 5313205 5313189 5313184 -
ctattctgtaggttgtctgtta

SEQ ID NO: 128435 - DNA, 22 bp, Artificial Sequence
  Synthetic oligonucleotide; TTC chr11 5313183 5313204 5313188 5313183 -
tattctgtaggttgtctgttat

SEQ ID NO: 128436 - DNA, 22 bp, Artificial Sequence
  Synthetic oligonucleotide; CTA chr11 5313181 5313202 5313186 5313181 -
ttctgtaggttgtctgttatct

SEQ ID NO: 128437 - DNA, 22 bp, Artificial Sequence
  Synthetic oligonucleotide; TTC chr11 5313178 5313199 5313183 5313178 -
tgtaggttgtctgttatctctg

SEQ ID NO: 128438 - DNA, 22 bp, Artificial Sequence
  Synthetic oligonucleotide; CTG chr11 5313176 5313197 5313181 5313176 -
taggttgtctgttatctctgat

SEQ ID NO: 128439 - DNA, 22 bp, Artificial Sequence
  Synthetic oligonucleotide; TTG chr11 5313169 5313190 5313174 5313169 -
tctgttatctctgatgatagtt

SEQ ID NO: 128440 - DNA, 22 bp, Artificial Sequence
  Synthetic oligonucleotide; CTG chr11 5313165 5313186 5313170 5313165 -
ttatctctgatgatagtttctt

SEQ ID NO: 128441 - DNA, 22 bp, Artificial Sequence
  Synthetic oligonucleotide; TTA chr11 5313162 5313183 5313167 5313162 -
tctctgatgatagtttcttttg

SEQ ID NO: 128442 - DNA, 22 bp, Artificial Sequence
  Synthetic oligonucleotide; CTC chr11 5313158 5313179 5313163 5313158 -
tgatgatagtttcttttgctgt

SEQ ID NO: 128443 - DNA, 22 bp, Artificial Sequence
  Synthetic oligonucleotide; CTG chr11 5313156 5313177 5313161 5313156 -
atgatagtttcttttgctgtgc

SEQ ID NO: 128444 - DNA, 22 bp, Artificial Sequence
  Synthetic oligonucleotide; TTT chr11 5313146 5313167 5313151 5313146 -
cttttgctgtgcagaagctctt

SEQ ID NO: 128445 - DNA, 22 bp, Artificial Sequence
  Synthetic oligonucleotide; TTC chr11 5313145 5313166 5313150 5313145 -
ttttgctgtgcagaagctcttt

SEQ ID NO: 128446 - DNA, 22 bp, Artificial Sequence
  Synthetic oligonucleotide; CTT chr11 5313143 5313164 5313148 5313143 -
ttgctgtgcagaagctctttaa

SEQ ID NO: 128447 - DNA, 22 bp, Artificial Sequence
  Synthetic oligonucleotide; TTT chr11 5313142 5313163 5313147 5313142 -
tgctgtgcagaagctctttaat

SEQ ID NO: 128448 - DNA, 22 bp, Artificial Sequence
  Synthetic oligonucleotide; TTT chr11 5313141 5313162 5313146 5313141 -
gctgtgcagaagctctttaatt

SEQ ID NO: 128449 - DNA, 22 bp, Artificial Sequence
  Synthetic oligonucleotide; TTG chr11 5313140 5313161 5313145 5313140 -
ctgtgcagaagctctttaattt

SEQ ID NO: 128450 - DNA, 22 bp, Artificial Sequence
  Synthetic oligonucleotide; CTG chr11 5313137 5313158 5313142 5313137 -
tgcagaagctctttaatttaat

SEQ ID NO: 128451 - DNA, 22 bp, Artificial Sequence
  Synthetic oligonucleotide; CTC chr11 5313126 5313147 5313131 5313126 -
tttaatttaattagatcccatt

SEQ ID NO: 128452 - DNA, 22 bp, Artificial Sequence
  Synthetic oligonucleotide; CTT chr11 5313124 5313145 5313129 5313124 -
taatttaattagatcccatttg

SEQ ID NO: 128453 - DNA, 22 bp, Artificial Sequence
  Synthetic oligonucleotide; TTT chr11 5313123 5313144 5313128 5313123 -
aatttaattagatcccatttgt

SEQ ID NO: 128454 - DNA, 22 bp, Artificial Sequence
  Synthetic oligonucleotide; TTA chr11 5313122 5313143 5313127 5313122 -
atttaattagatcccatttgtc

SEQ ID NO: 128455 - DNA, 22 bp, Artificial Sequence
  Synthetic oligonucleotide; TTT chr11 5313118 5313139 5313123 5313118 -
aattagatcccatttgtcaatt

SEQ ID NO: 128456 - DNA, 22 bp, Artificial Sequence
  Synthetic oligonucleotide; TTA chr11 5313117 5313138 5313122 5313117 -
attagatcccatttgtcaattt

SEQ ID NO: 128457 - DNA, 22 bp, Artificial Sequence
  Synthetic oligonucleotide; TTA chr11 5313113 5313134 5313118 5313113 -
gatcccatttgtcaattttttt

SEQ ID NO: 128458 - DNA, 22 bp, Artificial Sequence
  Synthetic oligonucleotide; TTT chr11 5313103 5313124 5313108 5313103 -
gtcaatttttttttgcagttgc

SEQ ID NO: 128459 - DNA, 22 bp, Artificial Sequence
  Synthetic oligonucleotide; TTG chr11 5313102 5313123 5313107 5313102 -
tcaatttttttttgcagttgct

SEQ ID NO: 128460 - DNA, 22 bp, Artificial Sequence
  Synthetic oligonucleotide; TTT chr11 5313095 5313116 5313100 5313095 -
ttttttgcagttgcttttggtg

SEQ ID NO: 128461 - DNA, 22 bp, Artificial Sequence
  Synthetic oligonucleotide; TTT chr11 5313094 5313115 5313099 5313094 -
tttttgcagttgcttttggtgt

SEQ ID NO: 128462 - DNA, 22 bp, Artificial Sequence
  Synthetic oligonucleotide; TTT chr11 5313093 5313114 5313098 5313093 -
ttttgcagttgcttttggtgtc

SEQ ID NO: 128463 - DNA, 22 bp, Artificial Sequence
  Synthetic oligonucleotide; TTT chr11 5313092 5313113 5313097 5313092 -
tttgcagttgcttttggtgtct

SEQ ID NO: 128464 - DNA, 22 bp, Artificial Sequence
  Synthetic oligonucleotide; TTT chr11 5313091 5313112 5313096 5313091 -
ttgcagttgcttttggtgtctt

SEQ ID NO: 128465 - DNA, 22 bp, Artificial Sequence
  Synthetic oligonucleotide; TTT chr11 5313090 5313111 5313095 5313090 -
tgcagttgcttttggtgtcttg

SEQ ID NO: 128466 - DNA, 22 bp, Artificial Sequence
  Synthetic oligonucleotide; TTT chr11 5313089 5313110 5313094 5313089 -
gcagttgcttttggtgtcttga

SEQ ID NO: 128467 - DNA, 22 bp, Artificial Sequence
  Synthetic oligonucleotide; TTG chr11 5313088 5313109 5313093 5313088 -
cagttgcttttggtgtcttgag

SEQ ID NO: 128468 - DNA, 22 bp, Artificial Sequence
  Synthetic oligonucleotide; TTG chr11 5313082 5313103 5313087 5313082 -
cttttggtgtcttgagttttct

SEQ ID NO: 128469 - DNA, 22 bp, Artificial Sequence
  Synthetic oligonucleotide; CTT chr11 5313079 5313100 5313084 5313079 -
ttggtgtcttgagttttctttc

SEQ ID NO: 128470 - DNA, 22 bp, Artificial Sequence
  Synthetic oligonucleotide; TTT chr11 5313078 5313099 5313083 5313078 -
tggtgtcttgagttttctttca

SEQ ID NO: 128471 - DNA, 22 bp, Artificial Sequence
  Synthetic oligonucleotide; TTT chr11 5313077 5313098 5313082 5313077 -
ggtgtcttgagttttctttcaa

SEQ ID NO: 128472 - DNA, 22 bp, Artificial Sequence
  Synthetic oligonucleotide; TTG chr11 5313076 5313097 5313081 5313076 -
gtgtcttgagttttctttcaaa

SEQ ID NO: 128473 - DNA, 22 bp, Artificial Sequence
  Synthetic oligonucleotide; CTT chr11 5313069 5313090 5313074 5313069 -
gagttttctttcaaaatgatac

SEQ ID NO: 128474 - DNA, 22 bp, Artificial Sequence
  Synthetic oligonucleotide; TTG chr11 5313068 5313089 5313073 5313068 -
agttttctttcaaaatgataca

SEQ ID NO: 128475 - DNA, 22 bp, Artificial Sequence
  Synthetic oligonucleotide; TTT chr11 5313063 5313084 5313068 5313063 -
tctttcaaaatgatacaatgtc

SEQ ID NO: 128476 - DNA, 22 bp, Artificial Sequence
  Synthetic oligonucleotide; TTT chr11 5313062 5313083 5313067 5313062 -
ctttcaaaatgatacaatgtca

SEQ ID NO: 128477 - DNA, 22 bp, Artificial Sequence
  Synthetic oligonucleotide; TTC chr11 5313061 5313082 5313066 5313061 -
tttcaaaatgatacaatgtcat

SEQ ID NO: 128478 - DNA, 22 bp, Artificial Sequence
  Synthetic oligonucleotide; CTT chr11 5313059 5313080 5313064 5313059 -
tcaaaatgatacaatgtcatct

SEQ ID NO: 128479 - DNA, 22 bp, Artificial Sequence
  Synthetic oligonucleotide; TTT chr11 5313058 5313079 5313063 5313058 -
caaaatgatacaatgtcatcta

SEQ ID NO: 128480 - DNA, 22 bp, Artificial Sequence
  Synthetic oligonucleotide; TTC chr11 5313057 5313078 5313062 5313057 -
aaaatgatacaatgtcatctat

SEQ ID NO: 128481 - DNA, 22 bp, Artificial Sequence
  Synthetic oligonucleotide; CTA chr11 5313036 5313057 5313041 5313036 -
taaagttttacagtagagactc

SEQ ID NO: 128482 - DNA, 22 bp, Artificial Sequence
  Synthetic oligonucleotide; TTT chr11 5313028 5313049 5313033 5313028 -
tacagtagagactctctaaatt

SEQ ID NO: 128483 - DNA, 22 bp, Artificial Sequence
  Synthetic oligonucleotide; TTT chr11 5313027 5313048 5313032 5313027 -
acagtagagactctctaaattc

SEQ ID NO: 128484 - DNA, 22 bp, Artificial Sequence
  Synthetic oligonucleotide; TTA chr11 5313026 5313047 5313031 5313026 -
cagtagagactctctaaattca

SEQ ID NO: 128485 - DNA, 22 bp, Artificial Sequence
  Synthetic oligonucleotide; CTC chr11 5313014 5313035 5313019 5313014 -
tctaaattcataaatttcctag

SEQ ID NO: 128486 - DNA, 22 bp, Artificial Sequence
  Synthetic oligonucleotide; CTC chr11 5313012 5313033 5313017 5313012 -
taaattcataaatttcctagtt

SEQ ID NO: 128487 - DNA, 22 bp, Artificial Sequence
  Synthetic oligonucleotide; CTA chr11 5313010 5313031 5313015 5313010 -
aattcataaatttcctagttgc

SEQ ID NO: 128488 - DNA, 22 bp, Artificial Sequence
  Synthetic oligonucleotide; TTC chr11 5313005 5313026 5313010 5313005 -
ataaatttcctagttgctcatt

SEQ ID NO: 128489 - DNA, 22 bp, Artificial Sequence
  Synthetic oligonucleotide; TTT chr11 5312997 5313018 5313002 5312997 -
cctagttgctcatttcatgagt

SEQ ID NO: 128490 - DNA, 22 bp, Artificial Sequence
  Synthetic oligonucleotide; TTC chr11 5312996 5313017 5313001 5312996 -
ctagttgctcatttcatgagtt

SEQ ID NO: 128491 - DNA, 22 bp, Artificial Sequence
  Synthetic oligonucleotide; CTA chr11 5312993 5313014 5312998 5312993 -
gttgctcatttcatgagttaat

SEQ ID NO: 128492 - DNA, 22 bp, Artificial Sequence
  Synthetic oligonucleotide; TTG chr11 5312989 5313010 5312994 5312989 -
ctcatttcatgagttaatgtat

SEQ ID NO: 128493 - DNA, 22 bp, Artificial Sequence
  Synthetic oligonucleotide; CTC chr11 5312986 5313007 5312991 5312986 -
atttcatgagttaatgtatttc

SEQ ID NO: 128494 - DNA, 22 bp, Artificial Sequence
  Synthetic oligonucleotide; TTT chr11 5312982 5313003 5312987 5312982 -
catgagttaatgtatttctttt

SEQ ID NO: 128495 - DNA, 22 bp, Artificial Sequence
  Synthetic oligonucleotide; TTC chr11 5312981 5313002 5312986 5312981 -
atgagttaatgtatttcttttg

SEQ ID NO: 128496 - DNA, 22 bp, Artificial Sequence
  Synthetic oligonucleotide; TTA chr11 5312973 5312994 5312978 5312973 -
atgtatttcttttgatcttgtg

SEQ ID NO: 128497 - DNA, 22 bp, Artificial Sequence
  Synthetic oligonucleotide; TTT chr11 5312965 5312986 5312970 5312965 -
cttttgatcttgtgttctctct

SEQ ID NO: 128498 - DNA, 22 bp, Artificial Sequence
  Synthetic oligonucleotide; TTC chr11 5312964 5312985 5312969 5312964 -
ttttgatcttgtgttctctcta

SEQ ID NO: 128499 - DNA, 22 bp, Artificial Sequence
  Synthetic oligonucleotide; CTT chr11 5312962 5312983 5312967 5312962 -
ttgatcttgtgttctctctaaa

SEQ ID NO: 128500 - DNA, 22 bp, Artificial Sequence
  Synthetic oligonucleotide; TTT chr11 5312961 5312982 5312966 5312961 -
tgatcttgtgttctctctaaat

SEQ ID NO: 128501 - DNA, 22 bp, Artificial Sequence
  Synthetic oligonucleotide; TTT chr11 5312960 5312981 5312965 5312960 -
gatcttgtgttctctctaaatg

SEQ ID NO: 128502 - DNA, 22 bp, Artificial Sequence
  Synthetic oligonucleotide; TTG chr11 5312959 5312980 5312964 5312959 -
atcttgtgttctctctaaatgc

SEQ ID NO: 128503 - DNA, 22 bp, Artificial Sequence
  Synthetic oligonucleotide; CTT chr11 5312954 5312975 5312959 5312954 -
gtgttctctctaaatgctggat

SEQ ID NO: 128504 - DNA, 22 bp, Artificial Sequence
  Synthetic oligonucleotide; TTG chr11 5312953 5312974 5312958 5312953 -
tgttctctctaaatgctggata

SEQ ID NO: 128505 - DNA, 22 bp, Artificial Sequence
  Synthetic oligonucleotide; TTC chr11 5312948 5312969 5312953 5312948 -
tctctaaatgctggatagaaac

SEQ ID NO: 128506 - DNA, 22 bp, Artificial Sequence
  Synthetic oligonucleotide; CTC chr11 5312946 5312967 5312951 5312946 -
tctaaatgctggatagaaacat

SEQ ID NO: 128507 - DNA, 22 bp, Artificial Sequence
  Synthetic oligonucleotide; CTC chr11 5312944 5312965 5312949 5312944 -
taaatgctggatagaaacattt

SEQ ID NO: 128508 - DNA, 22 bp, Artificial Sequence
  Synthetic oligonucleotide; CTA chr11 5312942 5312963 5312947 5312942 -
aatgctggatagaaacatttct

SEQ ID NO: 128509 - DNA, 22 bp, Artificial Sequence
  Synthetic oligonucleotide; CTG chr11 5312935 5312956 5312940 5312935 -
gatagaaacatttctgatatgt

SEQ ID NO: 128510 - DNA, 22 bp, Artificial Sequence
  Synthetic oligonucleotide; TTT chr11 5312922 5312943 5312927 5312922 -
ctgatatgtccaatagatgaaa

SEQ ID NO: 128511 - DNA, 22 bp, Artificial Sequence
  Synthetic oligonucleotide; TTC chr11 5312921 5312942 5312926 5312921 -
tgatatgtccaatagatgaaat

SEQ ID NO: 128512 - DNA, 22 bp, Artificial Sequence
  Synthetic oligonucleotide; CTG chr11 5312919 5312940 5312924 5312919 -
atatgtccaatagatgaaatat

SEQ ID NO: 128513 - DNA, 22 bp, Artificial Sequence
  Synthetic oligonucleotide; CTG chr11 5312891 5312912 5312896 5312891 -
atattttcctttttgtatattc

SEQ ID NO: 128514 - DNA, 22 bp, Artificial Sequence
  Synthetic oligonucleotide; TTT chr11 5312885 5312906 5312890 5312885 -
tcctttttgtatattcaattta

SEQ ID NO: 128515 - DNA, 22 bp, Artificial Sequence
  Synthetic oligonucleotide; TTT chr11 5312884 5312905 5312889 5312884 -
cctttttgtatattcaatttat

SEQ ID NO: 128516 - DNA, 22 bp, Artificial Sequence
  Synthetic oligonucleotide; TTC chr11 5312883 5312904 5312888 5312883 -
ctttttgtatattcaatttatt

SEQ ID NO: 128517 - DNA, 22 bp, Artificial Sequence
  Synthetic oligonucleotide; CTT chr11 5312880 5312901 5312885 5312880 -
tttgtatattcaatttattttt

SEQ ID NO: 128518 - DNA, 22 bp, Artificial Sequence
  Synthetic oligonucleotide; TTT chr11 5312879 5312900 5312884 5312879 -
ttgtatattcaatttatttttt

SEQ ID NO: 128519 - DNA, 22 bp, Artificial Sequence
  Synthetic oligonucleotide; TTT chr11 5312878 5312899 5312883 5312878 -
tgtatattcaatttatttttta

SEQ ID NO: 128520 - DNA, 22 bp, Artificial Sequence
  Synthetic oligonucleotide; TTT chr11 5312877 5312898 5312882 5312877 -
gtatattcaatttattttttat

SEQ ID NO: 128521 - DNA, 22 bp, Artificial Sequence
  Synthetic oligonucleotide; TTG chr11 5312876 5312897 5312881 5312876 -
tatattcaatttattttttatt

SEQ ID NO: 128522 - DNA, 22 bp, Artificial Sequence
  Synthetic oligonucleotide; TTC chr11 5312869 5312890 5312874 5312869 -
aatttattttttattctaataa

SEQ ID NO: 128523 - DNA, 22 bp, Artificial Sequence
  Synthetic oligonucleotide; TTT chr11 5312864 5312885 5312869 5312864 -
attttttattctaataaatcac

SEQ ID NO: 128524 - DNA, 22 bp, Artificial Sequence
  Synthetic oligonucleotide; TTA chr11 5312863 5312884 5312868 5312863 -
ttttttattctaataaatcaca

SEQ ID NO: 128525 - DNA, 22 bp, Artificial Sequence
  Synthetic oligonucleotide; TTT chr11 5312860 5312881 5312865 5312860 -
tttattctaataaatcacaagt

SEQ ID NO: 128526 - DNA, 22 bp, Artificial Sequence
  Synthetic oligonucleotide; TTT chr11 5312859 5312880 5312864 5312859 -
ttattctaataaatcacaagtg

SEQ ID NO: 128527 - DNA, 22 bp, Artificial Sequence
  Synthetic oligonucleotide; TTT chr11 5312858 5312879 5312863 5312858 -
tattctaataaatcacaagtga

SEQ ID NO: 128528 - DNA, 22 bp, Artificial Sequence
  Synthetic oligonucleotide; TTT chr11 5312857 5312878 5312862 5312857 -
attctaataaatcacaagtgat

SEQ ID NO: 128529 - DNA, 22 bp, Artificial Sequence
  Synthetic oligonucleotide; TTA chr11 5312856 5312877 5312861 5312856 -
ttctaataaatcacaagtgatc

SEQ ID NO: 128530 - DNA, 22 bp, Artificial Sequence
  Synthetic oligonucleotide; TTC chr11 5312853 5312874 5312858 5312853 -
taataaatcacaagtgatctca

SEQ ID NO: 128531 - DNA, 22 bp, Artificial Sequence
  Synthetic oligonucleotide; CTA chr11 5312851 5312872 5312856 5312851 -
ataaatcacaagtgatctcaat

SEQ ID NO: 128532 - DNA, 22 bp, Artificial Sequence
  Synthetic oligonucleotide; CTC chr11 5312832 5312853 5312837 5312832 -
aatttgttgcagcaacttggaa

SEQ ID NO: 128533 - DNA, 22 bp, Artificial Sequence
  Synthetic oligonucleotide; TTT chr11 5312827 5312848 5312832 5312827 -
gttgcagcaacttggaaatctc

SEQ ID NO: 128534 - DNA, 22 bp, Artificial Sequence
  Synthetic oligonucleotide; TTG chr11 5312826 5312847 5312831 5312826 -
ttgcagcaacttggaaatctca

SEQ ID NO: 128535 - DNA, 22 bp, Artificial Sequence
  Synthetic oligonucleotide; TTG chr11 5312823 5312844 5312828 5312823 -
cagcaacttggaaatctcacta

SEQ ID NO: 128536 - DNA, 22 bp, Artificial Sequence
  Synthetic oligonucleotide; CTT chr11 5312814 5312835 5312819 5312814 -
ggaaatctcactaggatttatt

SEQ ID NO: 128537 - DNA, 22 bp, Artificial Sequence
  Synthetic oligonucleotide; TTG chr11 5312813 5312834 5312818 5312813 -
gaaatctcactaggatttattt

SEQ ID NO: 128538 - DNA, 22 bp, Artificial Sequence
  Synthetic oligonucleotide; CTC chr11 5312805 5312826 5312810 5312805 -
actaggatttatttgatcatat

SEQ ID NO: 128539 - DNA, 22 bp, Artificial Sequence
  Synthetic oligonucleotide; CTA chr11 5312801 5312822 5312806 5312801 -
ggatttatttgatcatatattt

SEQ ID NO: 128540 - DNA, 22 bp, Artificial Sequence
  Synthetic oligonucleotide; TTT chr11 5312795 5312816 5312800 5312795 -
atttgatcatatattttgctaa

SEQ ID NO: 128541 - DNA, 22 bp, Artificial Sequence
  Synthetic oligonucleotide; TTA chr11 5312794 5312815 5312799 5312794 -
tttgatcatatattttgctaat

SEQ ID NO: 128542 - DNA, 22 bp, Artificial Sequence
  Synthetic oligonucleotide; TTT chr11 5312791 5312812 5312796 5312791 -
gatcatatattttgctaatttt

SEQ ID NO: 128543 - DNA, 22 bp, Artificial Sequence
  Synthetic oligonucleotide; TTG chr11 5312790 5312811 5312795 5312790 -
atcatatattttgctaattttc

SEQ ID NO: 128544 - DNA, 22 bp, Artificial Sequence
  Synthetic oligonucleotide; TTT chr11 5312779 5312800 5312784 5312779 -
tgctaattttcatccttttata

SEQ ID NO: 128545 - DNA, 22 bp, Artificial Sequence
  Synthetic oligonucleotide; TTT chr11 5312778 5312799 5312783 5312778 -
gctaattttcatccttttataa

SEQ ID NO: 128546 - DNA, 22 bp, Artificial Sequence
  Synthetic oligonucleotide; TTG chr11 5312777 5312798 5312782 5312777 -
ctaattttcatccttttataat

SEQ ID NO: 128547 - DNA, 22 bp, Artificial Sequence
  Synthetic oligonucleotide; CTA chr11 5312774 5312795 5312779 5312774 -
attttcatccttttataattga

SEQ ID NO: 128548 - DNA, 22 bp, Artificial Sequence
  Synthetic oligonucleotide; TTT chr11 5312770 5312791 5312775 5312770 -
tcatccttttataattgatttt

SEQ ID NO: 128549 - DNA, 22 bp, Artificial Sequence
  Synthetic oligonucleotide; TTT chr11 5312769 5312790 5312774 5312769 -
catccttttataattgatttta

SEQ ID NO: 128550 - DNA, 22 bp, Artificial Sequence
  Synthetic oligonucleotide; TTC chr11 5312768 5312789 5312773 5312768 -
atccttttataattgattttaa

SEQ ID NO: 128551 - DNA, 22 bp, Artificial Sequence
  Synthetic oligonucleotide; CTT chr11 5312762 5312783 5312767 5312762 -
ttataattgattttaagaagtt

SEQ ID NO: 128552 - DNA, 22 bp, Artificial Sequence
  Synthetic oligonucleotide; TTT chr11 5312761 5312782 5312766 5312761 -
tataattgattttaagaagttt

SEQ ID NO: 128553 - DNA, 22 bp, Artificial Sequence
  Synthetic oligonucleotide; TTT chr11 5312760 5312781 5312765 5312760 -
ataattgattttaagaagttta

SEQ ID NO: 128554 - DNA, 22 bp, Artificial Sequence
  Synthetic oligonucleotide; TTA chr11 5312759 5312780 5312764 5312759 -
taattgattttaagaagtttat

SEQ ID NO: 128555 - DNA, 22 bp, Artificial Sequence
  Synthetic oligonucleotide; TTG chr11 5312753 5312774 5312758 5312753 -
attttaagaagtttattatgta

SEQ ID NO: 128556 - DNA, 22 bp, Artificial Sequence
  Synthetic oligonucleotide; TTT chr11 5312749 5312770 5312754 5312749 -
taagaagtttattatgtattat

SEQ ID NO: 128557 - DNA, 22 bp, Artificial Sequence
  Synthetic oligonucleotide; TTT chr11 5312748 5312769 5312753 5312748 -
aagaagtttattatgtattatc

SEQ ID NO: 128558 - DNA, 22 bp, Artificial Sequence
  Synthetic oligonucleotide; TTA chr11 5312747 5312768 5312752 5312747 -
agaagtttattatgtattatct

SEQ ID NO: 128559 - DNA, 22 bp, Artificial Sequence
  Synthetic oligonucleotide; TTT chr11 5312739 5312760 5312744 5312739 -
attatgtattatctctagtgtt

SEQ ID NO: 128560 - DNA, 22 bp, Artificial Sequence
  Synthetic oligonucleotide; TTA chr11 5312738 5312759 5312743 5312738 -
ttatgtattatctctagtgttt

SEQ ID NO: 128561 - DNA, 22 bp, Artificial Sequence
  Synthetic oligonucleotide; TTA chr11 5312735 5312756 5312740 5312735 -
tgtattatctctagtgttttat

SEQ ID NO: 128562 - DNA, 22 bp, Artificial Sequence
  Synthetic oligonucleotide; TTA chr11 5312728 5312749 5312733 5312728 -
tctctagtgttttatttttagt

SEQ ID NO: 128563 - DNA, 22 bp, Artificial Sequence
  Synthetic oligonucleotide; CTC chr11 5312724 5312745 5312729 5312724 -
tagtgttttatttttagtgtac

SEQ ID NO: 128564 - DNA, 22 bp, Artificial Sequence
  Synthetic oligonucleotide; CTA chr11 5312722 5312743 5312727 5312722 -
gtgttttatttttagtgtacgt

SEQ ID NO: 128565 - DNA, 22 bp, Artificial Sequence
  Synthetic oligonucleotide; TTT chr11 5312716 5312737 5312721 5312716 -
tatttttagtgtacgtattttc

SEQ ID NO: 128566 - DNA, 22 bp, Artificial Sequence
  Synthetic oligonucleotide; TTT chr11 5312715 5312736 5312720 5312715 -
atttttagtgtacgtattttcc

SEQ ID NO: 128567 - DNA, 22 bp, Artificial Sequence
  Synthetic oligonucleotide; TTA chr11 5312714 5312735 5312719 5312714 -
tttttagtgtacgtattttccc

SEQ ID NO: 128568 - DNA, 22 bp, Artificial Sequence
  Synthetic oligonucleotide; TTT chr11 5312711 5312732 5312716 5312711 -
ttagtgtacgtattttcccagt

SEQ ID NO: 128569 - DNA, 22 bp, Artificial Sequence
  Synthetic oligonucleotide; TTT chr11 5312710 5312731 5312715 5312710 -
tagtgtacgtattttcccagtt

SEQ ID NO: 128570 - DNA, 22 bp, Artificial Sequence
  Synthetic oligonucleotide; TTT chr11 5312709 5312730 5312714 5312709 -
agtgtacgtattttcccagttt

SEQ ID NO: 128571 - DNA, 22 bp, Artificial Sequence
  Synthetic oligonucleotide; TTA chr11 5312708 5312729 5312713 5312708 -
gtgtacgtattttcccagtttt

SEQ ID NO: 128572 - DNA, 22 bp, Artificial Sequence
  Synthetic oligonucleotide; TTT chr11 5312696 5312717 5312701 5312696 -
tcccagttttctgtttgtcttg

SEQ ID NO: 128573 - DNA, 22 bp, Artificial Sequence
  Synthetic oligonucleotide; TTT chr11 5312695 5312716 5312700 5312695 -
cccagttttctgtttgtcttgc

SEQ ID NO: 128574 - DNA, 22 bp, Artificial Sequence
  Synthetic oligonucleotide; TTC chr11 5312694 5312715 5312699 5312694 -
ccagttttctgtttgtcttgct

SEQ ID NO: 128575 - DNA, 22 bp, Artificial Sequence
  Synthetic oligonucleotide; TTT chr11 5312687 5312708 5312692 5312687 -
tctgtttgtcttgctatataca

SEQ ID NO: 128576 - DNA, 22 bp, Artificial Sequence
  Synthetic oligonucleotide; TTT chr11 5312686 5312707 5312691 5312686 -
ctgtttgtcttgctatatacac

SEQ ID NO: 128577 - DNA, 22 bp, Artificial Sequence
  Synthetic oligonucleotide; TTC chr11 5312685 5312706 5312690 5312685 -
tgtttgtcttgctatatacaca

SEQ ID NO: 128578 - DNA, 22 bp, Artificial Sequence
  Synthetic oligonucleotide; CTG chr11 5312683 5312704 5312688 5312683 -
tttgtcttgctatatacacaat

SEQ ID NO: 128579 - DNA, 22 bp, Artificial Sequence
  Synthetic oligonucleotide; TTT chr11 5312680 5312701 5312685 5312680 -
gtcttgctatatacacaattta

SEQ ID NO: 128580 - DNA, 22 bp, Artificial Sequence
  Synthetic oligonucleotide; TTG chr11 5312679 5312700 5312684 5312679 -
tcttgctatatacacaatttaa

SEQ ID NO: 128581 - DNA, 22 bp, Artificial Sequence
  Synthetic oligonucleotide; CTT chr11 5312675 5312696 5312680 5312675 -
gctatatacacaatttaaaagc

SEQ ID NO: 128582 - DNA, 22 bp, Artificial Sequence
  Synthetic oligonucleotide; TTG chr11 5312674 5312695 5312679 5312674 -
ctatatacacaatttaaaagct

SEQ ID NO: 128583 - DNA, 22 bp, Artificial Sequence
  Synthetic oligonucleotide; CTA chr11 5312671 5312692 5312676 5312671 -
tatacacaatttaaaagcttac

SEQ ID NO: 128584 - DNA, 22 bp, Artificial Sequence
  Synthetic oligonucleotide; TTT chr11 5312659 5312680 5312664 5312659 -
aaaagcttacatatacattatt

SEQ ID NO: 128585 - DNA, 22 bp, Artificial Sequence
  Synthetic oligonucleotide; TTA chr11 5312658 5312679 5312663 5312658 -
aaagcttacatatacattattt

SEQ ID NO: 128586 - DNA, 22 bp, Artificial Sequence
  Synthetic oligonucleotide; CTT chr11 5312651 5312672 5312656 5312651 -
acatatacattattttattatt

SEQ ID NO: 128587 - DNA, 22 bp, Artificial Sequence
  Synthetic oligonucleotide; TTA chr11 5312650 5312671 5312655 5312650 -
catatacattattttattattt

SEQ ID NO: 128588 - DNA, 22 bp, Artificial Sequence
  Synthetic oligonucleotide; TTA chr11 5312639 5312660 5312644 5312639 -
ttttattatttactttatctac

SEQ ID NO: 128589 - DNA, 22 bp, Artificial Sequence
  Synthetic oligonucleotide; TTT chr11 5312636 5312657 5312641 5312636 -
tattatttactttatctactga

SEQ ID NO: 128590 - DNA, 22 bp, Artificial Sequence
  Synthetic oligonucleotide; TTT chr11 5312635 5312656 5312640 5312635 -
attatttactttatctactgaa

SEQ ID NO: 128591 - DNA, 22 bp, Artificial Sequence
  Synthetic oligonucleotide; TTA chr11 5312634 5312655 5312639 5312634 -
ttatttactttatctactgaag

SEQ ID NO: 128592 - DNA, 22 bp, Artificial Sequence
  Synthetic oligonucleotide; TTA chr11 5312631 5312652 5312636 5312631 -
tttactttatctactgaagtat

SEQ ID NO: 128593 - DNA, 22 bp, Artificial Sequence
  Synthetic oligonucleotide; TTT chr11 5312628 5312649 5312633 5312628 -
actttatctactgaagtattgg

SEQ ID NO: 128594 - DNA, 22 bp, Artificial Sequence
  Synthetic oligonucleotide; TTA chr11 5312627 5312648 5312632 5312627 -
ctttatctactgaagtattgga

SEQ ID NO: 128595 - DNA, 22 bp, Artificial Sequence
  Synthetic oligonucleotide; CTT chr11 5312624 5312645 5312629 5312624 -
tatctactgaagtattggagcc

SEQ ID NO: 128596 - DNA, 22 bp, Artificial Sequence
  Synthetic oligonucleotide; TTT chr11 5312623 5312644 5312628 5312623 -
atctactgaagtattggagcca

SEQ ID NO: 128597 - DNA, 22 bp, Artificial Sequence
  Synthetic oligonucleotide; TTA chr11 5312622 5312643 5312627 5312622 -
tctactgaagtattggagccat

SEQ ID NO: 128598 - DNA, 22 bp, Artificial Sequence
  Synthetic oligonucleotide; CTA chr11 5312618 5312639 5312623 5312618 -
ctgaagtattggagccatacta

SEQ ID NO: 128599 - DNA, 22 bp, Artificial Sequence
  Synthetic oligonucleotide; CTG chr11 5312615 5312636 5312620 5312615 -
aagtattggagccatactatca

SEQ ID NO: 128600 - DNA, 22 bp, Artificial Sequence
  Synthetic oligonucleotide; TTG chr11 5312607 5312628 5312612 5312607 -
gagccatactatcaaagccctt

SEQ ID NO: 128601 - DNA, 22 bp, Artificial Sequence
  Synthetic oligonucleotide; CTA chr11 5312596 5312617 5312601 5312596 -
tcaaagcccttgctgacttcag

SEQ ID NO: 128602 - DNA, 22 bp, Artificial Sequence
  Synthetic oligonucleotide; CTT chr11 5312585 5312606 5312590 5312585 -
gctgacttcaggtttatttata

SEQ ID NO: 128603 - DNA, 22 bp, Artificial Sequence
  Synthetic oligonucleotide; TTG chr11 5312584 5312605 5312589 5312584 -
ctgacttcaggtttatttatat

SEQ ID NO: 128604 - DNA, 22 bp, Artificial Sequence
  Synthetic oligonucleotide; CTG chr11 5312581 5312602 5312586 5312581 -
acttcaggtttatttatatctt

SEQ ID NO: 128605 - DNA, 22 bp, Artificial Sequence
  Synthetic oligonucleotide; CTT chr11 5312577 5312598 5312582 5312577 -
caggtttatttatatctttttc

SEQ ID NO: 128606 - DNA, 22 bp, Artificial Sequence
  Synthetic oligonucleotide; TTC chr11 5312576 5312597 5312581 5312576 -
aggtttatttatatctttttct

SEQ ID NO: 128607 - DNA, 22 bp, Artificial Sequence
  Synthetic oligonucleotide; TTT chr11 5312570 5312591 5312575 5312570 -
atttatatctttttcttatact

SEQ ID NO: 128608 - DNA, 22 bp, Artificial Sequence
  Synthetic oligonucleotide; TTA chr11 5312569 5312590 5312574 5312569 -
tttatatctttttcttatactt

SEQ ID NO: 128609 - DNA, 22 bp, Artificial Sequence
  Synthetic oligonucleotide; TTT chr11 5312566 5312587 5312571 5312566 -
atatctttttcttatacttttg

SEQ ID NO: 128610 - DNA, 22 bp, Artificial Sequence
  Synthetic oligonucleotide; TTA chr11 5312565 5312586 5312570 5312565 -
tatctttttcttatacttttgc

SEQ ID NO: 128611 - DNA, 22 bp, Artificial Sequence
  Synthetic oligonucleotide; CTT chr11 5312559 5312580 5312564 5312559 -
tttcttatacttttgcctaatt

SEQ ID NO: 128612 - DNA, 22 bp, Artificial Sequence
  Synthetic oligonucleotide; TTT chr11 5312558 5312579 5312563 5312558 -
ttcttatacttttgcctaattt

SEQ ID NO: 128613 - DNA, 22 bp, Artificial Sequence
  Synthetic oligonucleotide; TTT chr11 5312557 5312578 5312562 5312557 -
tcttatacttttgcctaattta

SEQ ID NO: 128614 - DNA, 22 bp, Artificial Sequence
  Synthetic oligonucleotide; TTT chr11 5312556 5312577 5312561 5312556 -
cttatacttttgcctaatttat

SEQ ID NO: 128615 - DNA, 22 bp, Artificial Sequence
  Synthetic oligonucleotide; TTC chr11 5312555 5312576 5312560 5312555 -
ttatacttttgcctaatttatt

SEQ ID NO: 128616 - DNA, 22 bp, Artificial Sequence
  Synthetic oligonucleotide; CTT chr11 5312553 5312574 5312558 5312553 -
atacttttgcctaatttatttg

SEQ ID NO: 128617 - DNA, 22 bp, Artificial Sequence
  Synthetic oligonucleotide; TTA chr11 5312552 5312573 5312557 5312552 -
tacttttgcctaatttatttgt

SEQ ID NO: 128618 - DNA, 22 bp, Artificial Sequence
  Synthetic oligonucleotide; CTT chr11 5312547 5312568 5312552 5312547 -
ttgcctaatttatttgtacata

SEQ ID NO: 128619 - DNA, 22 bp, Artificial Sequence
  Synthetic oligonucleotide; TTT chr11 5312546 5312567 5312551 5312546 -
tgcctaatttatttgtacatat

SEQ ID NO: 128620 - DNA, 22 bp, Artificial Sequence
  Synthetic oligonucleotide; TTT chr11 5312545 5312566 5312550 5312545 -
gcctaatttatttgtacatatc

SEQ ID NO: 128621 - DNA, 22 bp, Artificial Sequence
  Synthetic oligonucleotide; TTG chr11 5312544 5312565 5312549 5312544 -
cctaatttatttgtacatatcc

SEQ ID NO: 128622 - DNA, 22 bp, Artificial Sequence
  Synthetic oligonucleotide; CTA chr11 5312540 5312561 5312545 5312540 -
atttatttgtacatatcctatg

SEQ ID NO: 128623 - DNA, 22 bp, Artificial Sequence
  Synthetic oligonucleotide; TTT chr11 5312536 5312557 5312541 5312536 -
atttgtacatatcctatgttta

SEQ ID NO: 128624 - DNA, 22 bp, Artificial Sequence
  Synthetic oligonucleotide; TTA chr11 5312535 5312556 5312540 5312535 -
tttgtacatatcctatgtttaa

SEQ ID NO: 128625 - DNA, 22 bp, Artificial Sequence
  Synthetic oligonucleotide; TTT chr11 5312532 5312553 5312537 5312532 -
gtacatatcctatgtttaaaag

SEQ ID NO: 128626 - DNA, 22 bp, Artificial Sequence
  Synthetic oligonucleotide; TTG chr11 5312531 5312552 5312536 5312531 -
tacatatcctatgtttaaaagg

SEQ ID NO: 128627 - DNA, 22 bp, Artificial Sequence
  Synthetic oligonucleotide; CTA chr11 5312520 5312541 5312525 5312520 -
tgtttaaaagggtttgtgtttg

SEQ ID NO: 128628 - DNA, 22 bp, Artificial Sequence
  Synthetic oligonucleotide; TTT chr11 5312515 5312536 5312520 5312515 -
aaaagggtttgtgtttggagga

SEQ ID NO: 128629 - DNA, 22 bp, Artificial Sequence
  Synthetic oligonucleotide; TTA chr11 5312514 5312535 5312519 5312514 -
aaagggtttgtgtttggaggag

SEQ ID NO: 128630 - DNA, 22 bp, Artificial Sequence
  Synthetic oligonucleotide; TTT chr11 5312505 5312526 5312510 5312505 -
gtgtttggaggagagtaggact

SEQ ID NO: 128631 - DNA, 22 bp, Artificial Sequence
  Synthetic oligonucleotide; TTG chr11 5312504 5312525 5312509 5312504 -
tgtttggaggagagtaggactt

SEQ ID NO: 128632 - DNA, 22 bp, Artificial Sequence
  Synthetic oligonucleotide; TTT chr11 5312499 5312520 5312504 5312499 -
ggaggagagtaggactttaaat

SEQ ID NO: 128633 - DNA, 22 bp, Artificial Sequence
  Synthetic oligonucleotide; TTG chr11 5312498 5312519 5312503 5312498 -
gaggagagtaggactttaaatc

SEQ ID NO: 128634 - DNA, 22 bp, Artificial Sequence
  Synthetic oligonucleotide; CTT chr11 5312482 5312503 5312487 5312482 -
taaatcattcctcatgtgccta

SEQ ID NO: 128635 - DNA, 22 bp, Artificial Sequence
  Synthetic oligonucleotide; TTT chr11 5312481 5312502 5312486 5312481 -
aaatcattcctcatgtgcctat

SEQ ID NO: 128636 - DNA, 22 bp, Artificial Sequence
  Synthetic oligonucleotide; TTA chr11 5312480 5312501 5312485 5312480 -
aatcattcctcatgtgcctatt

SEQ ID NO: 128637 - DNA, 22 bp, Artificial Sequence
  Synthetic oligonucleotide; TTC chr11 5312472 5312493 5312477 5312472 -
ctcatgtgcctattttcgtgga

SEQ ID NO: 128638 - DNA, 22 bp, Artificial Sequence
  Synthetic oligonucleotide; CTC chr11 5312469 5312490 5312474 5312469 -
atgtgcctattttcgtggaaac

SEQ ID NO: 128639 - DNA, 22 bp, Artificial Sequence
  Synthetic oligonucleotide; CTA chr11 5312460 5312481 5312465 5312460 -
ttttcgtggaaacaccactaat

SEQ ID NO: 128640 - DNA, 22 bp, Artificial Sequence
  Synthetic oligonucleotide; TTT chr11 5312457 5312478 5312462 5312457 -
tcgtggaaacaccactaatatt

SEQ ID NO: 128641 - DNA, 22 bp, Artificial Sequence
  Synthetic oligonucleotide; TTT chr11 5312456 5312477 5312461 5312456 -
cgtggaaacaccactaatattt

SEQ ID NO: 128642 - DNA, 22 bp, Artificial Sequence
  Synthetic oligonucleotide; TTC chr11 5312455 5312476 5312460 5312455 -
gtggaaacaccactaatattta

SEQ ID NO: 128643 - DNA, 22 bp, Artificial Sequence
  Synthetic oligonucleotide; CTA chr11 5312440 5312461 5312445 5312440 -
atatttaatcattcctttggtt

SEQ ID NO: 128644 - DNA, 22 bp, Artificial Sequence
  Synthetic oligonucleotide; TTT chr11 5312434 5312455 5312439 5312434 -
aatcattcctttggttaatttt

SEQ ID NO: 128645 - DNA, 22 bp, Artificial Sequence
  Synthetic oligonucleotide; TTA chr11 5312433 5312454 5312438 5312433 -
atcattcctttggttaattttt

SEQ ID NO: 128646 - DNA, 22 bp, Artificial Sequence
  Synthetic oligonucleotide; TTC chr11 5312426 5312447 5312431 5312426 -
ctttggttaattttttaagggc

SEQ ID NO: 128647 - DNA, 22 bp, Artificial Sequence
  Synthetic oligonucleotide; CTT chr11 5312423 5312444 5312428 5312423 -
tggttaattttttaagggcact

SEQ ID NO: 128648 - DNA, 22 bp, Artificial Sequence
  Synthetic oligonucleotide; TTT chr11 5312422 5312443 5312427 5312422 -
ggttaattttttaagggcacta

SEQ ID NO: 128649 - DNA, 22 bp, Artificial Sequence
  Synthetic oligonucleotide; TTG chr11 5312421 5312442 5312426 5312421 -
gttaattttttaagggcactat

SEQ ID NO: 128650 - DNA, 22 bp, Artificial Sequence
  Synthetic oligonucleotide; TTA chr11 5312417 5312438 5312422 5312417 -
attttttaagggcactattatg

SEQ ID NO: 128651 - DNA, 22 bp, Artificial Sequence
  Synthetic oligonucleotide; TTT chr11 5312413 5312434 5312418 5312413 -
tttaagggcactattatgggtc

SEQ ID NO: 128652 - DNA, 22 bp, Artificial Sequence
  Synthetic oligonucleotide; TTT chr11 5312412 5312433 5312417 5312412 -
ttaagggcactattatgggtca

SEQ ID NO: 128653 - DNA, 22 bp, Artificial Sequence
  Synthetic oligonucleotide; TTT chr11 5312411 5312432 5312416 5312411 -
taagggcactattatgggtcac

SEQ ID NO: 128654 - DNA, 22 bp, Artificial Sequence
  Synthetic oligonucleotide; TTT chr11 5312410 5312431 5312415 5312410 -
aagggcactattatgggtcacc

SEQ ID NO: 128655 - DNA, 22 bp, Artificial Sequence
  Synthetic oligonucleotide; TTA chr11 5312409 5312430 5312414 5312409 -
agggcactattatgggtcacct

SEQ ID NO: 128656 - DNA, 22 bp, Artificial Sequence
  Synthetic oligonucleotide; CTA chr11 5312400 5312421 5312405 5312400 -
ttatgggtcaccttgctaagca

SEQ ID NO: 128657 - DNA, 22 bp, Artificial Sequence
  Synthetic oligonucleotide; TTA chr11 5312397 5312418 5312402 5312397 -
tgggtcaccttgctaagcaaaa

SEQ ID NO: 128658 - DNA, 22 bp, Artificial Sequence
  Synthetic oligonucleotide; CTT chr11 5312386 5312407 5312391 5312386 -
gctaagcaaaaatgatataaga

SEQ ID NO: 128659 - DNA, 22 bp, Artificial Sequence
  Synthetic oligonucleotide; TTG chr11 5312385 5312406 5312390 5312385 -
ctaagcaaaaatgatataagag

SEQ ID NO: 128660 - DNA, 22 bp, Artificial Sequence
  Synthetic oligonucleotide; CTA chr11 5312382 5312403 5312387 5312382 -
agcaaaaatgatataagagagc

SEQ ID NO: 128661 - DNA, 22 bp, Artificial Sequence
  Synthetic oligonucleotide; CTT chr11 5312346 5312367 5312351 5312346 -
ttcttcttaaagtcttcaaata

SEQ ID NO: 128662 - DNA, 22 bp, Artificial Sequence
  Synthetic oligonucleotide; TTT chr11 5312345 5312366 5312350 5312345 -
tcttcttaaagtcttcaaataa

SEQ ID NO: 128663 - DNA, 22 bp, Artificial Sequence
  Synthetic oligonucleotide; TTT chr11 5312344 5312365 5312349 5312344 -
cttcttaaagtcttcaaataag

SEQ ID NO: 128664 - DNA, 22 bp, Artificial Sequence
  Synthetic oligonucleotide; TTC chr11 5312343 5312364 5312348 5312343 -
ttcttaaagtcttcaaataagt

SEQ ID NO: 128665 - DNA, 22 bp, Artificial Sequence
  Synthetic oligonucleotide; CTT chr11 5312341 5312362 5312346 5312341 -
cttaaagtcttcaaataagtgg

SEQ ID NO: 128666 - DNA, 22 bp, Artificial Sequence
  Synthetic oligonucleotide; TTC chr11 5312340 5312361 5312345 5312340 -
ttaaagtcttcaaataagtggg

SEQ ID NO: 128667 - DNA, 22 bp, Artificial Sequence
  Synthetic oligonucleotide; CTT chr11 5312338 5312359 5312343 5312338 -
aaagtcttcaaataagtgggga

SEQ ID NO: 128668 - DNA, 22 bp, Artificial Sequence
  Synthetic oligonucleotide; TTA chr11 5312337 5312358 5312342 5312337 -
aagtcttcaaataagtggggac

SEQ ID NO: 128669 - DNA, 22 bp, Artificial Sequence
  Synthetic oligonucleotide; CTT chr11 5312330 5312351 5312335 5312330 -
caaataagtggggactcaaaga

SEQ ID NO: 128670 - DNA, 22 bp, Artificial Sequence
  Synthetic oligonucleotide; TTC chr11 5312329 5312350 5312334 5312329 -
aaataagtggggactcaaagaa

SEQ ID NO: 128671 - DNA, 22 bp, Artificial Sequence
  Synthetic oligonucleotide; CTC chr11 5312313 5312334 5312318 5312313 -
aaagaataaaagaaatccaaat

SEQ ID NO: 128672 - DNA, 22 bp, Artificial Sequence
  Synthetic oligonucleotide; TTT chr11 5312289 5312310 5312294 5312289 -
aaaacaagtgctgtgattaatc

SEQ ID NO: 128673 - DNA, 22 bp, Artificial Sequence
  Synthetic oligonucleotide; TTA chr11 5312288 5312309 5312293 5312288 -
aaacaagtgctgtgattaatca

SEQ ID NO: 128674 - DNA, 22 bp, Artificial Sequence
  Synthetic oligonucleotide; CTG chr11 5312276 5312297 5312281 5312276 -
tgattaatcataaagcagaaag

SEQ ID NO: 128675 - DNA, 22 bp, Artificial Sequence
  Synthetic oligonucleotide; TTA chr11 5312270 5312291 5312275 5312270 -
atcataaagcagaaagaagaca

SEQ ID NO: 128676 - DNA, 22 bp, Artificial Sequence
  Synthetic oligonucleotide; CTG chr11 5312245 5312266 5312250 5312245 -
aatggagagtgtgggtctcaaa

SEQ ID NO: 128677 - DNA, 22 bp, Artificial Sequence
  Synthetic oligonucleotide; CTC chr11 5312226 5312247 5312231 5312226 -
aaaaaaggcttgaggttatggc

SEQ ID NO: 128678 - DNA, 22 bp, Artificial Sequence
  Synthetic oligonucleotide; CTT chr11 5312215 5312236 5312220 5312215 -
gaggttatggcttgaaataagg

SEQ ID NO: 128679 - DNA, 22 bp, Artificial Sequence
  Synthetic oligonucleotide; TTG chr11 5312214 5312235 5312219 5312214 -
aggttatggcttgaaataaggg

SEQ ID NO: 128680 - DNA, 22 bp, Artificial Sequence
  Synthetic oligonucleotide; TTA chr11 5312208 5312229 5312213 5312208 -
tggcttgaaataagggtaagat

SEQ ID NO: 128681 - DNA, 22 bp, Artificial Sequence
  Synthetic oligonucleotide; CTT chr11 5312202 5312223 5312207 5312202 -
gaaataagggtaagattccctg

SEQ ID NO: 128682 - DNA, 22 bp, Artificial Sequence
  Synthetic oligonucleotide; TTG chr11 5312201 5312222 5312206 5312201 -
aaataagggtaagattccctga

SEQ ID NO: 128683 - DNA, 22 bp, Artificial Sequence
  Synthetic oligonucleotide; TTC chr11 5312184 5312205 5312189 5312184 -
cctgagaaagtgtcccttcagc

SEQ ID NO: 128684 - DNA, 22 bp, Artificial Sequence
  Synthetic oligonucleotide; CTG chr11 5312180 5312201 5312185 5312180 -
agaaagtgtcccttcagctgag

SEQ ID NO: 128685 - DNA, 22 bp, Artificial Sequence
  Synthetic oligonucleotide; CTT chr11 5312166 5312187 5312171 5312166 -
cagctgagacctgaaaatggat

SEQ ID NO: 128686 - DNA, 22 bp, Artificial Sequence
  Synthetic oligonucleotide; TTC chr11 5312165 5312186 5312170 5312165 -
agctgagacctgaaaatggatt

SEQ ID NO: 128687 - DNA, 22 bp, Artificial Sequence
  Synthetic oligonucleotide; CTG chr11 5312160 5312181 5312165 5312160 -
agacctgaaaatggattagaaa

SEQ ID NO: 128688 - DNA, 22 bp, Artificial Sequence
  Synthetic oligonucleotide; CTG chr11 5312153 5312174 5312158 5312153 -
aaaatggattagaaactaactg

SEQ ID NO: 128689 - DNA, 22 bp, Artificial Sequence
  Synthetic oligonucleotide; TTA chr11 5312142 5312163 5312147 5312142 -
gaaactaactggtgaaaataca

SEQ ID NO: 128690 - DNA, 22 bp, Artificial Sequence
  Synthetic oligonucleotide; CTA chr11 5312135 5312156 5312140 5312135 -
actggtgaaaatacagacaaga

SEQ ID NO: 128691 - DNA, 22 bp, Artificial Sequence
  Synthetic oligonucleotide; CTG chr11 5312131 5312152 5312136 5312131 -
gtgaaaatacagacaagaatat

SEQ ID NO: 128692 - DNA, 22 bp, Artificial Sequence
  Synthetic oligonucleotide; TTC chr11 5312107 5312128 5312112 5312107 -
taagactgaaggagtgtgtgtg

SEQ ID NO: 128693 - DNA, 22 bp, Artificial Sequence
  Synthetic oligonucleotide; CTA chr11 5312105 5312126 5312110 5312105 -
agactgaaggagtgtgtgtgga

SEQ ID NO: 128694 - DNA, 22 bp, Artificial Sequence
  Synthetic oligonucleotide; CTG chr11 5312099 5312120 5312104 5312099 -
aaggagtgtgtgtggagacctc

SEQ ID NO: 128695 - DNA, 22 bp, Artificial Sequence
  Synthetic oligonucleotide; CTC chr11 5312077 5312098 5312082 5312077 -
agctaggttggtttatattagg

SEQ ID NO: 128696 - DNA, 22 bp, Artificial Sequence
  Synthetic oligonucleotide; CTA chr11 5312072 5312093 5312077 5312072 -
ggttggtttatattagggaagg

SEQ ID NO: 128697 - DNA, 22 bp, Artificial Sequence
  Synthetic oligonucleotide; TTG chr11 5312067 5312088 5312072 5312067 -
gtttatattagggaaggtggct

SEQ ID NO: 128698 - DNA, 22 bp, Artificial Sequence
  Synthetic oligonucleotide; TTT chr11 5312063 5312084 5312068 5312063 -
atattagggaaggtggctactg

SEQ ID NO: 128699 - DNA, 22 bp, Artificial Sequence
  Synthetic oligonucleotide; TTA chr11 5312062 5312083 5312067 5312062 -
tattagggaaggtggctactgg

SEQ ID NO: 128700 - DNA, 22 bp, Artificial Sequence
  Synthetic oligonucleotide; TTA chr11 5312057 5312078 5312062 5312057 -
gggaaggtggctactggaagag

SEQ ID NO: 128701 - DNA, 22 bp, Artificial Sequence
  Synthetic oligonucleotide; CTA chr11 5312044 5312065 5312049 5312044 -
ctggaagagggtgtttgctttg

SEQ ID NO: 128702 - DNA, 22 bp, Artificial Sequence
  Synthetic oligonucleotide; CTG chr11 5312041 5312062 5312046 5312041 -
gaagagggtgtttgctttgaga

SEQ ID NO: 128703 - DNA, 22 bp, Artificial Sequence
  Synthetic oligonucleotide; TTT chr11 5312028 5312049 5312033 5312028 -
gctttgagaagaggctgaagag

SEQ ID NO: 128704 - DNA, 22 bp, Artificial Sequence
  Synthetic oligonucleotide; TTG chr11 5312027 5312048 5312032 5312027 -
ctttgagaagaggctgaagagg

SEQ ID NO: 128705 - DNA, 22 bp, Artificial Sequence
  Synthetic oligonucleotide; CTT chr11 5312024 5312045 5312029 5312024 -
tgagaagaggctgaagagggaa

SEQ ID NO: 128706 - DNA, 22 bp, Artificial Sequence
  Synthetic oligonucleotide; TTT chr11 5312023 5312044 5312028 5312023 -
gagaagaggctgaagagggaag

SEQ ID NO: 128707 - DNA, 22 bp, Artificial Sequence
  Synthetic oligonucleotide; TTG chr11 5312022 5312043 5312027 5312022 -
agaagaggctgaagagggaagg

SEQ ID NO: 128708 - DNA, 22 bp, Artificial Sequence
  Synthetic oligonucleotide; CTG chr11 5312011 5312032 5312016 5312011 -
aagagggaaggaatggccttat

SEQ ID NO: 128709 - DNA, 22 bp, Artificial Sequence
  Synthetic oligonucleotide; CTT chr11 5311991 5312012 5311996 5311991 -
attggtcatcataagagtttga

SEQ ID NO: 128710 - DNA, 22 bp, Artificial Sequence
  Synthetic oligonucleotide; TTA chr11 5311990 5312011 5311995 5311990 -
ttggtcatcataagagtttgag

SEQ ID NO: 128711 - DNA, 22 bp, Artificial Sequence
  Synthetic oligonucleotide; TTG chr11 5311987 5312008 5311992 5311987 -
gtcatcataagagtttgagtct

SEQ ID NO: 128712 - DNA, 22 bp, Artificial Sequence
  Synthetic oligonucleotide; TTT chr11 5311971 5311992 5311976 5311971 -
gagtctctactcggagtcatgg

SEQ ID NO: 128713 - DNA, 22 bp, Artificial Sequence
  Synthetic oligonucleotide; TTG chr11 5311970 5311991 5311975 5311970 -
agtctctactcggagtcatgga

SEQ ID NO: 128714 - DNA, 22 bp, Artificial Sequence
  Synthetic oligonucleotide; CTC chr11 5311964 5311985 5311969 5311964 -
tactcggagtcatggaaagcta

SEQ ID NO: 128715 - DNA, 22 bp, Artificial Sequence
  Synthetic oligonucleotide; CTA chr11 5311962 5311983 5311967 5311962 -
ctcggagtcatggaaagctact

SEQ ID NO: 128716 - DNA, 22 bp, Artificial Sequence
  Synthetic oligonucleotide; CTC chr11 5311959 5311980 5311964 5311959 -
ggagtcatggaaagctactgaa

SEQ ID NO: 128717 - DNA, 22 bp, Artificial Sequence
  Synthetic oligonucleotide; CTA chr11 5311942 5311963 5311947 5311942 -
ctgaaagaagctgcataattca

SEQ ID NO: 128718 - DNA, 22 bp, Artificial Sequence
  Synthetic oligonucleotide; CTG chr11 5311939 5311960 5311944 5311939 -
aaagaagctgcataattcattg

SEQ ID NO: 128719 - DNA, 22 bp, Artificial Sequence
  Synthetic oligonucleotide; CTG chr11 5311929 5311950 5311934 5311929 -
cataattcattgatgttttaaa

SEQ ID NO: 128720 - DNA, 22 bp, Artificial Sequence
  Synthetic oligonucleotide; TTC chr11 5311921 5311942 5311926 5311921 -
attgatgttttaaaattacttc

SEQ ID NO: 128721 - DNA, 22 bp, Artificial Sequence
  Synthetic oligonucleotide; TTG chr11 5311917 5311938 5311922 5311917 -
atgttttaaaattacttcaata

SEQ ID NO: 128722 - DNA, 22 bp, Artificial Sequence
  Synthetic oligonucleotide; TTT chr11 5311911 5311932 5311916 5311911 -
taaaattacttcaatattattt

SEQ ID NO: 128723 - DNA, 22 bp, Artificial Sequence
  Synthetic oligonucleotide; TTT chr11 5311910 5311931 5311915 5311910 -
aaaattacttcaatattattta

SEQ ID NO: 128724 - DNA, 22 bp, Artificial Sequence
  Synthetic oligonucleotide; TTA chr11 5311909 5311930 5311914 5311909 -
aaattacttcaatattatttat

SEQ ID NO: 128725 - DNA, 22 bp, Artificial Sequence
  Synthetic oligonucleotide; TTA chr11 5311903 5311924 5311908 5311903 -
cttcaatattatttataaaatg

SEQ ID NO: 128726 - DNA, 22 bp, Artificial Sequence
  Synthetic oligonucleotide; CTT chr11 5311900 5311921 5311905 5311900 -
caatattatttataaaatggaa

SEQ ID NO: 128727 - DNA, 22 bp, Artificial Sequence
  Synthetic oligonucleotide; TTC chr11 5311899 5311920 5311904 5311899 -
aatattatttataaaatggaat

SEQ ID NO: 128728 - DNA, 22 bp, Artificial Sequence
  Synthetic oligonucleotide; TTA chr11 5311892 5311913 5311897 5311892 -
tttataaaatggaattgaggga

SEQ ID NO: 128729 - DNA, 22 bp, Artificial Sequence
  Synthetic oligonucleotide; TTT chr11 5311889 5311910 5311894 5311889 -
ataaaatggaattgagggaggc

SEQ ID NO: 128730 - DNA, 22 bp, Artificial Sequence
  Synthetic oligonucleotide; TTA chr11 5311888 5311909 5311893 5311888 -
taaaatggaattgagggaggca

SEQ ID NO: 128731 - DNA, 22 bp, Artificial Sequence
  Synthetic oligonucleotide; TTG chr11 5311875 5311896 5311880 5311875 -
agggaggcagggaaagggcaga

SEQ ID NO: 128732 - DNA, 22 bp, Artificial Sequence
  Synthetic oligonucleotide; TTA chr11 5311847 5311868 5311852 5311847 -
gagtaatttgaagaaagataat

SEQ ID NO: 128733 - DNA, 22 bp, Artificial Sequence
  Synthetic oligonucleotide; TTT chr11 5311838 5311859 5311843 5311838 -
gaagaaagataatagtaactca

SEQ ID NO: 128734 - DNA, 22 bp, Artificial Sequence
  Synthetic oligonucleotide; TTG chr11 5311837 5311858 5311842 5311837 -
aagaaagataatagtaactcaa

SEQ ID NO: 128735 - DNA, 22 bp, Artificial Sequence
  Synthetic oligonucleotide; CTC chr11 5311817 5311838 5311822 5311817 -
aatttaggaaagtggaaatggt

SEQ ID NO: 128736 - DNA, 22 bp, Artificial Sequence
  Synthetic oligonucleotide; TTT chr11 5311812 5311833 5311817 5311812 -
aggaaagtggaaatggtaatgg

SEQ ID NO: 128737 - DNA, 22 bp, Artificial Sequence
  Synthetic oligonucleotide; TTA chr11 5311811 5311832 5311816 5311811 -
ggaaagtggaaatggtaatgga

SEQ ID NO: 128738 - DNA, 22 bp, Artificial Sequence
  Synthetic oligonucleotide; TTT chr11 5311771 5311792 5311776 5311771 -
aaggtctaaatataataaggtt

SEQ ID NO: 128739 - DNA, 22 bp, Artificial Sequence
  Synthetic oligonucleotide; TTA chr11 5311770 5311791 5311775 5311770 -
aggtctaaatataataaggttt

SEQ ID NO: 128740 - DNA, 22 bp, Artificial Sequence
  Synthetic oligonucleotide; CTA chr11 5311763 5311784 5311768 5311763 -
aatataataaggtttacaggtt

SEQ ID NO: 128741 - DNA, 22 bp, Artificial Sequence
  Synthetic oligonucleotide; TTT chr11 5311748 5311769 5311753 5311748 -
acaggttatttagaaaagcaga

SEQ ID NO: 128742 - DNA, 22 bp, Artificial Sequence
  Synthetic oligonucleotide; TTA chr11 5311747 5311768 5311752 5311747 -
caggttatttagaaaagcagag

SEQ ID NO: 128743 - DNA, 22 bp, Artificial Sequence
  Synthetic oligonucleotide; TTA chr11 5311740 5311761 5311745 5311740 -
tttagaaaagcagaggaaagaa

SEQ ID NO: 128744 - DNA, 22 bp, Artificial Sequence
  Synthetic oligonucleotide; TTT chr11 5311737 5311758 5311742 5311737 -
agaaaagcagaggaaagaaaga

SEQ ID NO: 128745 - DNA, 22 bp, Artificial Sequence
  Synthetic oligonucleotide; TTA chr11 5311736 5311757 5311741 5311736 -
gaaaagcagaggaaagaaagag

SEQ ID NO: 128746 - DNA, 22 bp, Artificial Sequence
  Synthetic oligonucleotide; TTG chr11 5311711 5311732 5311716 5311711 -
gaaaggagcaaaaatcaccatc

SEQ ID NO: 128747 - DNA, 22 bp, Artificial Sequence
  Synthetic oligonucleotide; TTT chr11 5311684 5311705 5311689 5311684 -
ctgacatgttcttggaagaaag

SEQ ID NO: 128748 - DNA, 22 bp, Artificial Sequence
  Synthetic oligonucleotide; TTC chr11 5311683 5311704 5311688 5311683 -
tgacatgttcttggaagaaagg

SEQ ID NO: 128749 - DNA, 22 bp, Artificial Sequence
  Synthetic oligonucleotide; CTG chr11 5311681 5311702 5311686 5311681 -
acatgttcttggaagaaaggca

SEQ ID NO: 128750 - DNA, 22 bp, Artificial Sequence
  Synthetic oligonucleotide; TTC chr11 5311673 5311694 5311678 5311673 -
ttggaagaaaggcagtgccaaa

SEQ ID NO: 128751 - DNA, 22 bp, Artificial Sequence
  Synthetic oligonucleotide; CTT chr11 5311671 5311692 5311676 5311671 -
ggaagaaaggcagtgccaaaag

SEQ ID NO: 128752 - DNA, 22 bp, Artificial Sequence
  Synthetic oligonucleotide; TTG chr11 5311670 5311691 5311675 5311670 -
gaagaaaggcagtgccaaaaga

SEQ ID NO: 128753 - DNA, 22 bp, Artificial Sequence
  Synthetic oligonucleotide; CTG chr11 5311635 5311656 5311640 5311635 -
attatgtattgtctataaataa

SEQ ID NO: 128754 - DNA, 22 bp, Artificial Sequence
  Synthetic oligonucleotide; TTA chr11 5311631 5311652 5311636 5311631 -
tgtattgtctataaataagaag

SEQ ID NO: 128755 - DNA, 22 bp, Artificial Sequence
  Synthetic oligonucleotide; TTG chr11 5311624 5311645 5311629 5311624 -
tctataaataagaagaatcatt

SEQ ID NO: 128756 - DNA, 22 bp, Artificial Sequence
  Synthetic oligonucleotide; CTA chr11 5311620 5311641 5311625 5311620 -
taaataagaagaatcattataa

SEQ ID NO: 128757 - DNA, 22 bp, Artificial Sequence
  Synthetic oligonucleotide; TTA chr11 5311601 5311622 5311606 5311601 -
taatttttaaagttgtgggaca

SEQ ID NO: 128758 - DNA, 22 bp, Artificial Sequence
  Synthetic oligonucleotide; TTT chr11 5311595 5311616 5311600 5311595 -
ttaaagttgtgggacactgaga

SEQ ID NO: 128759 - DNA, 22 bp, Artificial Sequence
  Synthetic oligonucleotide; TTT chr11 5311594 5311615 5311599 5311594 -
taaagttgtgggacactgagaa

SEQ ID NO: 128760 - DNA, 22 bp, Artificial Sequence
  Synthetic oligonucleotide; TTT chr11 5311593 5311614 5311598 5311593 -
aaagttgtgggacactgagaat

SEQ ID NO: 128761 - DNA, 22 bp, Artificial Sequence
  Synthetic oligonucleotide; TTA chr11 5311592 5311613 5311597 5311592 -
aagttgtgggacactgagaatg

SEQ ID NO: 128762 - DNA, 22 bp, Artificial Sequence
  Synthetic oligonucleotide; TTG chr11 5311586 5311607 5311591 5311586 -
tgggacactgagaatgagtcaa

SEQ ID NO: 128763 - DNA, 22 bp, Artificial Sequence
  Synthetic oligonucleotide; CTG chr11 5311576 5311597 5311581 5311576 -
agaatgagtcaaaataataaac

SEQ ID NO: 128764 - DNA, 22 bp, Artificial Sequence
  Synthetic oligonucleotide; TTT chr11 5311545 5311566 5311550 5311545 -
aagaaagcaattgaaggaagta

SEQ ID NO: 128765 - DNA, 22 bp, Artificial Sequence
  Synthetic oligonucleotide; TTA chr11 5311544 5311565 5311549 5311544 -
agaaagcaattgaaggaagtat

SEQ ID NO: 128766 - DNA, 22 bp, Artificial Sequence
  Synthetic oligonucleotide; TTG chr11 5311532 5311553 5311537 5311532 -
aaggaagtatttcaaactgtag

SEQ ID NO: 128767 - DNA, 22 bp, Artificial Sequence
  Synthetic oligonucleotide; TTT chr11 5311520 5311541 5311525 5311520 -
caaactgtagaactagactttt

SEQ ID NO: 128768 - DNA, 22 bp, Artificial Sequence
  Synthetic oligonucleotide; TTC chr11 5311519 5311540 5311524 5311519 -
aaactgtagaactagactttta

SEQ ID NO: 128769 - DNA, 22 bp, Artificial Sequence
  Synthetic oligonucleotide; CTG chr11 5311513 5311534 5311518 5311513 -
tagaactagacttttaaaaaca

SEQ ID NO: 128770 - DNA, 22 bp, Artificial Sequence
  Synthetic oligonucleotide; CTA chr11 5311505 5311526 5311510 5311505 -
gacttttaaaaacaaaatatta

SEQ ID NO: 128771 - DNA, 22 bp, Artificial Sequence
  Synthetic oligonucleotide; CTT chr11 5311500 5311521 5311505 5311500 -
ttaaaaacaaaatattagctta

SEQ ID NO: 128772 - DNA, 22 bp, Artificial Sequence
  Synthetic oligonucleotide; TTT chr11 5311499 5311520 5311504 5311499 -
taaaaacaaaatattagcttaa

SEQ ID NO: 128773 - DNA, 22 bp, Artificial Sequence
  Synthetic oligonucleotide; TTT chr11 5311498 5311519 5311503 5311498 -
aaaaacaaaatattagcttaat

SEQ ID NO: 128774 - DNA, 22 bp, Artificial Sequence
  Synthetic oligonucleotide; TTA chr11 5311497 5311518 5311502 5311497 -
aaaacaaaatattagcttaata

SEQ ID NO: 128775 - DNA, 22 bp, Artificial Sequence
  Synthetic oligonucleotide; TTA chr11 5311483 5311504 5311488 5311483 -
gcttaataattaaaaaaatcat

SEQ ID NO: 128776 - DNA, 22 bp, Artificial Sequence
  Synthetic oligonucleotide; CTT chr11 5311479 5311500 5311484 5311479 -
aataattaaaaaaatcattcat

SEQ ID NO: 128777 - DNA, 22 bp, Artificial Sequence
  Synthetic oligonucleotide; TTA chr11 5311478 5311499 5311483 5311478 -
ataattaaaaaaatcattcatt

SEQ ID NO: 128778 - DNA, 22 bp, Artificial Sequence
  Synthetic oligonucleotide; TTA chr11 5311471 5311492 5311476 5311471 -
aaaaaatcattcattcaaatca

SEQ ID NO: 128779 - DNA, 22 bp, Artificial Sequence
  Synthetic oligonucleotide; TTC chr11 5311459 5311480 5311464 5311459 -
attcaaatcatttcagtatgta

SEQ ID NO: 128780 - DNA, 22 bp, Artificial Sequence
  Synthetic oligonucleotide; TTC chr11 5311455 5311476 5311460 5311455 -
aaatcatttcagtatgtatttc

SEQ ID NO: 128781 - DNA, 22 bp, Artificial Sequence
  Synthetic oligonucleotide; TTT chr11 5311446 5311467 5311451 5311446 -
cagtatgtatttctttttgcct

SEQ ID NO: 128782 - DNA, 22 bp, Artificial Sequence
  Synthetic oligonucleotide; TTC chr11 5311445 5311466 5311450 5311445 -
agtatgtatttctttttgcctg

SEQ ID NO: 128783 - DNA, 22 bp, Artificial Sequence
  Synthetic oligonucleotide; TTT chr11 5311434 5311455 5311439 5311434 -
ctttttgcctgatcatgaagag

SEQ ID NO: 128784 - DNA, 22 bp, Artificial Sequence
  Synthetic oligonucleotide; TTC chr11 5311433 5311454 5311438 5311433 -
tttttgcctgatcatgaagagt

SEQ ID NO: 128785 - DNA, 22 bp, Artificial Sequence
  Synthetic oligonucleotide; CTT chr11 5311431 5311452 5311436 5311431 -
tttgcctgatcatgaagagtca

SEQ ID NO: 128786 - DNA, 22 bp, Artificial Sequence
  Synthetic oligonucleotide; TTT chr11 5311430 5311451 5311435 5311430 -
ttgcctgatcatgaagagtcat

SEQ ID NO: 128787 - DNA, 22 bp, Artificial Sequence
  Synthetic oligonucleotide; TTT chr11 5311429 5311450 5311434 5311429 -
tgcctgatcatgaagagtcata

SEQ ID NO: 128788 - DNA, 22 bp, Artificial Sequence
  Synthetic oligonucleotide; TTT chr11 5311428 5311449 5311433 5311428 -
gcctgatcatgaagagtcatag

SEQ ID NO: 128789 - DNA, 22 bp, Artificial Sequence
  Synthetic oligonucleotide; TTG chr11 5311427 5311448 5311432 5311427 -
cctgatcatgaagagtcatagt

SEQ ID NO: 128790 - DNA, 22 bp, Artificial Sequence
  Synthetic oligonucleotide; CTG chr11 5311423 5311444 5311428 5311423 -
atcatgaagagtcatagtaaag

SEQ ID NO: 128791 - DNA, 22 bp, Artificial Sequence
  Synthetic oligonucleotide; TTT chr11 5311369 5311390 5311374 5311369 -
acagatgcaagacaacagaaac

SEQ ID NO: 128792 - DNA, 22 bp, Artificial Sequence
  Synthetic oligonucleotide; TTA chr11 5311368 5311389 5311373 5311368 -
cagatgcaagacaacagaaaca

SEQ ID NO: 128793 - DNA, 22 bp, Artificial Sequence
  Synthetic oligonucleotide; CTG chr11 5311341 5311362 5311346 5311341 -
aagcagatgacacccaaagaag

SEQ ID NO: 128794 - DNA, 22 bp, Artificial Sequence
  Synthetic oligonucleotide; CTC chr11 5311292 5311313 5311297 5311292 -
actatcctaggagaaagcagga

SEQ ID NO: 128795 - DNA, 22 bp, Artificial Sequence
  Synthetic oligonucleotide; CTA chr11 5311288 5311309 5311293 5311288 -
tcctaggagaaagcaggataga

SEQ ID NO: 128796 - DNA, 22 bp, Artificial Sequence
  Synthetic oligonucleotide; CTA chr11 5311283 5311304 5311288 5311283 -
ggagaaagcaggatagatccgg

SEQ ID NO: 128797 - DNA, 22 bp, Artificial Sequence
  Synthetic oligonucleotide; TTT chr11 5311257 5311278 5311262 5311257 -
ttcttgggtgtcattcactgaa

SEQ ID NO: 128798 - DNA, 22 bp, Artificial Sequence
  Synthetic oligonucleotide; TTT chr11 5311256 5311277 5311261 5311256 -
tcttgggtgtcattcactgaag

SEQ ID NO: 128799 - DNA, 22 bp, Artificial Sequence
  Synthetic oligonucleotide; TTT chr11 5311255 5311276 5311260 5311255 -
cttgggtgtcattcactgaagt

SEQ ID NO: 128800 - DNA, 22 bp, Artificial Sequence
  Synthetic oligonucleotide; TTC chr11 5311254 5311275 5311259 5311254 -
ttgggtgtcattcactgaagta

SEQ ID NO: 128801 - DNA, 22 bp, Artificial Sequence
  Synthetic oligonucleotide; CTT chr11 5311252 5311273 5311257 5311252 -
gggtgtcattcactgaagtaga

SEQ ID NO: 128802 - DNA, 22 bp, Artificial Sequence
  Synthetic oligonucleotide; TTG chr11 5311251 5311272 5311256 5311251 -
ggtgtcattcactgaagtagac

SEQ ID NO: 128803 - DNA, 22 bp, Artificial Sequence
  Synthetic oligonucleotide; TTC chr11 5311241 5311262 5311246 5311241 -
actgaagtagacccagttttaa

SEQ ID NO: 128804 - DNA, 22 bp, Artificial Sequence
  Synthetic oligonucleotide; CTG chr11 5311237 5311258 5311242 5311237 -
aagtagacccagttttaaaata

SEQ ID NO: 128805 - DNA, 22 bp, Artificial Sequence
  Synthetic oligonucleotide; TTT chr11 5311222 5311243 5311227 5311222 -
taaaatagcagtccaaaaaata

SEQ ID NO: 128806 - DNA, 22 bp, Artificial Sequence
  Synthetic oligonucleotide; TTT chr11 5311221 5311242 5311226 5311221 -
aaaatagcagtccaaaaaatac

SEQ ID NO: 128807 - DNA, 22 bp, Artificial Sequence
  Synthetic oligonucleotide; TTA chr11 5311220 5311241 5311225 5311220 -
aaatagcagtccaaaaaatact

SEQ ID NO: 128808 - DNA, 22 bp, Artificial Sequence
  Synthetic oligonucleotide; CTG chr11 5311197 5311218 5311202 5311197 -
ccaaacgtgagataatatatca

SEQ ID NO: 128809 - DNA, 22 bp, Artificial Sequence
  Synthetic oligonucleotide; TTA chr11 5311171 5311192 5311176 5311171 -
tatgatacaactggttagagcc

SEQ ID NO: 128810 - DNA, 22 bp, Artificial Sequence
  Synthetic oligonucleotide; CTG chr11 5311158 5311179 5311163 5311158 -
gttagagccagataatctgata

SEQ ID NO: 128811 - DNA, 22 bp, Artificial Sequence
  Synthetic oligonucleotide; TTA chr11 5311154 5311175 5311159 5311154 -
gagccagataatctgatacaaa

SEQ ID NO: 128812 - DNA, 22 bp, Artificial Sequence
  Synthetic oligonucleotide; CTG chr11 5311139 5311160 5311144 5311139 -
atacaaacataaataggaagat

SEQ ID NO: 128813 - DNA, 22 bp, Artificial Sequence
  Synthetic oligonucleotide; TTA chr11 5311111 5311132 5311116 5311111 -
actaaattctgaattaccagat

SEQ ID NO: 128814 - DNA, 22 bp, Artificial Sequence
  Synthetic oligonucleotide; CTA chr11 5311107 5311128 5311112 5311107 -
aattctgaattaccagatgagt

SEQ ID NO: 128815 - DNA, 22 bp, Artificial Sequence
  Synthetic oligonucleotide; TTC chr11 5311102 5311123 5311107 5311102 -
tgaattaccagatgagtaaata

SEQ ID NO: 128816 - DNA, 22 bp, Artificial Sequence
  Synthetic oligonucleotide; CTG chr11 5311100 5311121 5311105 5311100 -
aattaccagatgagtaaataac

SEQ ID NO: 128817 - DNA, 22 bp, Artificial Sequence
  Synthetic oligonucleotide; TTA chr11 5311095 5311116 5311100 5311095 -
ccagatgagtaaataacaagaa

SEQ ID NO: 128818 - DNA, 22 bp, Artificial Sequence
  Synthetic oligonucleotide; TTT chr11 5311070 5311091 5311075 5311070 -
attgaaaaatgaagttttttca

SEQ ID NO: 128819 - DNA, 22 bp, Artificial Sequence
  Synthetic oligonucleotide; TTA chr11 5311069 5311090 5311074 5311069 -
ttgaaaaatgaagttttttcat

SEQ ID NO: 128820 - DNA, 22 bp, Artificial Sequence
  Synthetic oligonucleotide; TTG chr11 5311066 5311087 5311071 5311066 -
aaaaatgaagttttttcatgag

SEQ ID NO: 128821 - DNA, 22 bp, Artificial Sequence
  Synthetic oligonucleotide; TTT chr11 5311053 5311074 5311058 5311053 -
tttcatgagtgcttatgttagt

SEQ ID NO: 128822 - DNA, 22 bp, Artificial Sequence
  Synthetic oligonucleotide; TTT chr11 5311052 5311073 5311057 5311052 -
ttcatgagtgcttatgttagtt

SEQ ID NO: 128823 - DNA, 22 bp, Artificial Sequence
  Synthetic oligonucleotide; TTT chr11 5311051 5311072 5311056 5311051 -
tcatgagtgcttatgttagtta

SEQ ID NO: 128824 - DNA, 22 bp, Artificial Sequence
  Synthetic oligonucleotide; TTT chr11 5311050 5311071 5311055 5311050 -
catgagtgcttatgttagttac

SEQ ID NO: 128825 - DNA, 22 bp, Artificial Sequence
  Synthetic oligonucleotide; TTC chr11 5311049 5311070 5311054 5311049 -
atgagtgcttatgttagttacc

SEQ ID NO: 128826 - DNA, 22 bp, Artificial Sequence
  Synthetic oligonucleotide; CTT chr11 5311039 5311060 5311044 5311039 -
atgttagttaccctagatttgc

SEQ ID NO: 128827 - DNA, 22 bp, Artificial Sequence
  Synthetic oligonucleotide; TTA chr11 5311038 5311059 5311043 5311038 -
tgttagttaccctagatttgcg

SEQ ID NO: 128828 - DNA, 22 bp, Artificial Sequence
  Synthetic oligonucleotide; TTA chr11 5311033 5311054 5311038 5311033 -
gttaccctagatttgcggcatg

SEQ ID NO: 128829 - DNA, 22 bp, Artificial Sequence
  Synthetic oligonucleotide; TTA chr11 5311029 5311050 5311034 5311029 -
ccctagatttgcggcatgcctt

SEQ ID NO: 128830 - DNA, 22 bp, Artificial Sequence
  Synthetic oligonucleotide; CTA chr11 5311024 5311045 5311029 5311024 -
gatttgcggcatgccttcacag

SEQ ID NO: 128831 - DNA, 22 bp, Artificial Sequence
  Synthetic oligonucleotide; TTT chr11 5311019 5311040 5311024 5311019 -
gcggcatgccttcacagatgtc

SEQ ID NO: 128832 - DNA, 22 bp, Artificial Sequence
  Synthetic oligonucleotide; TTG chr11 5311018 5311039 5311023 5311018 -
cggcatgccttcacagatgtcc

SEQ ID NO: 128833 - DNA, 22 bp, Artificial Sequence
  Synthetic oligonucleotide; CTT chr11 5311007 5311028 5311012 5311007 -
cacagatgtccaatcatagata

SEQ ID NO: 128834 - DNA, 22 bp, Artificial Sequence
  Synthetic oligonucleotide; TTC chr11 5311006 5311027 5311011 5311006 -
acagatgtccaatcatagatat

SEQ ID NO: 128835 - DNA, 22 bp, Artificial Sequence
  Synthetic oligonucleotide; TTT chr11 5310982 5311003 5310987 5310982 -
gaggaggaccatatggaactga

SEQ ID NO: 128836 - DNA, 22 bp, Artificial Sequence
  Synthetic oligonucleotide; TTG chr11 5310981 5311002 5310986 5310981 -
aggaggaccatatggaactgaa

SEQ ID NO: 128837 - DNA, 22 bp, Artificial Sequence
  Synthetic oligonucleotide; CTG chr11 5310961 5310982 5310966 5310961 -
aaaataatctatgcttgattct

SEQ ID NO: 128838 - DNA, 22 bp, Artificial Sequence
  Synthetic oligonucleotide; CTA chr11 5310950 5310971 5310955 5310950 -
tgcttgattctttctctcaagt

SEQ ID NO: 128839 - DNA, 22 bp, Artificial Sequence
  Synthetic oligonucleotide; CTT chr11 5310945 5310966 5310950 5310945 -
gattctttctctcaagtgaaat

SEQ ID NO: 128840 - DNA, 22 bp, Artificial Sequence
  Synthetic oligonucleotide; TTG chr11 5310944 5310965 5310949 5310944 -
attctttctctcaagtgaaatt

SEQ ID NO: 128841 - DNA, 22 bp, Artificial Sequence
  Synthetic oligonucleotide; TTC chr11 5310940 5310961 5310945 5310940 -
tttctctcaagtgaaattgttg

SEQ ID NO: 128842 - DNA, 22 bp, Artificial Sequence
  Synthetic oligonucleotide; CTT chr11 5310938 5310959 5310943 5310938 -
tctctcaagtgaaattgttgag

SEQ ID NO: 128843 - DNA, 22 bp, Artificial Sequence
  Synthetic oligonucleotide; TTT chr11 5310937 5310958 5310942 5310937 -
ctctcaagtgaaattgttgagt

SEQ ID NO: 128844 - DNA, 22 bp, Artificial Sequence
  Synthetic oligonucleotide; TTC chr11 5310936 5310957 5310941 5310936 -
tctcaagtgaaattgttgagtc

SEQ ID NO: 128845 - DNA, 22 bp, Artificial Sequence
  Synthetic oligonucleotide; CTC chr11 5310934 5310955 5310939 5310934 -
tcaagtgaaattgttgagtcaa

SEQ ID NO: 128846 - DNA, 22 bp, Artificial Sequence
  Synthetic oligonucleotide; CTC chr11 5310932 5310953 5310937 5310932 -
aagtgaaattgttgagtcaacc

SEQ ID NO: 128847 - DNA, 22 bp, Artificial Sequence
  Synthetic oligonucleotide; TTG chr11 5310921 5310942 5310926 5310921 -
ttgagtcaaccatcctattcta

SEQ ID NO: 128848 - DNA, 22 bp, Artificial Sequence
  Synthetic oligonucleotide; TTG chr11 5310918 5310939 5310923 5310918 -
agtcaaccatcctattctattt

SEQ ID NO: 128849 - DNA, 22 bp, Artificial Sequence
  Synthetic oligonucleotide; CTA chr11 5310904 5310925 5310909 5310904 -
ttctatttattaaaatcaaata

SEQ ID NO: 128850 - DNA, 22 bp, Artificial Sequence
  Synthetic oligonucleotide; TTC chr11 5310901 5310922 5310906 5310901 -
tatttattaaaatcaaataaat

SEQ ID NO: 128851 - DNA, 22 bp, Artificial Sequence
  Synthetic oligonucleotide; CTA chr11 5310899 5310920 5310904 5310899 -
tttattaaaatcaaataaatgg

SEQ ID NO: 128852 - DNA, 22 bp, Artificial Sequence
  Synthetic oligonucleotide; TTT chr11 5310896 5310917 5310901 5310896 -
attaaaatcaaataaatggtct

SEQ ID NO: 128853 - DNA, 22 bp, Artificial Sequence
  Synthetic oligonucleotide; TTA chr11 5310895 5310916 5310900 5310895 -
ttaaaatcaaataaatggtctt

SEQ ID NO: 128854 - DNA, 22 bp, Artificial Sequence
  Synthetic oligonucleotide; TTA chr11 5310892 5310913 5310897 5310892 -
aaatcaaataaatggtctttaa

SEQ ID NO: 128855 - DNA, 22 bp, Artificial Sequence
  Synthetic oligonucleotide; CTT chr11 5310873 5310894 5310878 5310873 -
taagatataagagactttatcc

SEQ ID NO: 128856 - DNA, 22 bp, Artificial Sequence
  Synthetic oligonucleotide; TTT chr11 5310872 5310893 5310877 5310872 -
aagatataagagactttatcct

SEQ ID NO: 128857 - DNA, 22 bp, Artificial Sequence
  Synthetic oligonucleotide; TTA chr11 5310871 5310892 5310876 5310871 -
agatataagagactttatccta

SEQ ID NO: 128858 - DNA, 22 bp, Artificial Sequence
  Synthetic oligonucleotide; CTT chr11 5310856 5310877 5310861 5310856 -
tatcctagtatgtatatatata

SEQ ID NO: 128859 - DNA, 22 bp, Artificial Sequence
  Synthetic oligonucleotide; TTT chr11 5310855 5310876 5310860 5310855 -
atcctagtatgtatatatatag

SEQ ID NO: 128860 - DNA, 22 bp, Artificial Sequence
  Synthetic oligonucleotide; TTA chr11 5310854 5310875 5310859 5310854 -
tcctagtatgtatatatatagt

SEQ ID NO: 128861 - DNA, 22 bp, Artificial Sequence
  Synthetic oligonucleotide; CTA chr11 5310849 5310870 5310854 5310849 -
gtatgtatatatatagttgtgt

SEQ ID NO: 128862 - DNA, 22 bp, Artificial Sequence
  Synthetic oligonucleotide; TTG chr11 5310830 5310851 5310835 5310830 -
tgtttgcatgtgtgtgtggaca

SEQ ID NO: 128863 - DNA, 22 bp, Artificial Sequence
  Synthetic oligonucleotide; TTT chr11 5310825 5310846 5310830 5310825 -
gcatgtgtgtgtggacacctgc

SEQ ID NO: 128864 - DNA, 22 bp, Artificial Sequence
  Synthetic oligonucleotide; TTG chr11 5310824 5310845 5310829 5310824 -
catgtgtgtgtggacacctgca

SEQ ID NO: 128865 - DNA, 22 bp, Artificial Sequence
  Synthetic oligonucleotide; CTG chr11 5310804 5310825 5310809 5310804 -
cacatgtggaataaatctttta

SEQ ID NO: 128866 - DNA, 22 bp, Artificial Sequence
  Synthetic oligonucleotide; CTT chr11 5310785 5310806 5310790 5310785 -
ttaatattttatcttagacata

SEQ ID NO: 128867 - DNA, 22 bp, Artificial Sequence
  Synthetic oligonucleotide; TTT chr11 5310784 5310805 5310789 5310784 -
taatattttatcttagacataa

SEQ ID NO: 128868 - DNA, 22 bp, Artificial Sequence
  Synthetic oligonucleotide; TTT chr11 5310783 5310804 5310788 5310783 -
aatattttatcttagacataat

SEQ ID NO: 128869 - DNA, 22 bp, Artificial Sequence
  Synthetic oligonucleotide; TTA chr11 5310782 5310803 5310787 5310782 -
atattttatcttagacataatt

SEQ ID NO: 128870 - DNA, 22 bp, Artificial Sequence
  Synthetic oligonucleotide; TTT chr11 5310776 5310797 5310781 5310776 -
tatcttagacataatttttaac

SEQ ID NO: 128871 - DNA, 22 bp, Artificial Sequence
  Synthetic oligonucleotide; TTT chr11 5310775 5310796 5310780 5310775 -
atcttagacataatttttaacc

SEQ ID NO: 128872 - DNA, 22 bp, Artificial Sequence
  Synthetic oligonucleotide; TTA chr11 5310774 5310795 5310779 5310774 -
tcttagacataatttttaacct

SEQ ID NO: 128873 - DNA, 22 bp, Artificial Sequence
  Synthetic oligonucleotide; CTT chr11 5310770 5310791 5310775 5310770 -
agacataatttttaacctcaaa

SEQ ID NO: 128874 - DNA, 22 bp, Artificial Sequence
  Synthetic oligonucleotide; TTA chr11 5310769 5310790 5310774 5310769 -
gacataatttttaacctcaaac

SEQ ID NO: 128875 - DNA, 22 bp, Artificial Sequence
  Synthetic oligonucleotide; TTT chr11 5310759 5310780 5310764 5310759 -
ttaacctcaaactcttgttttt

SEQ ID NO: 128876 - DNA, 22 bp, Artificial Sequence
  Synthetic oligonucleotide; TTT chr11 5310758 5310779 5310763 5310758 -
taacctcaaactcttgttttta

SEQ ID NO: 128877 - DNA, 22 bp, Artificial Sequence
  Synthetic oligonucleotide; TTT chr11 5310757 5310778 5310762 5310757 -
aacctcaaactcttgtttttaa

SEQ ID NO: 128878 - DNA, 22 bp, Artificial Sequence
  Synthetic oligonucleotide; TTA chr11 5310756 5310777 5310761 5310756 -
acctcaaactcttgtttttaaa

SEQ ID NO: 128879 - DNA, 22 bp, Artificial Sequence
  Synthetic oligonucleotide; CTC chr11 5310751 5310772 5310756 5310751 -
aaactcttgtttttaaaccttt

SEQ ID NO: 128880 - DNA, 22 bp, Artificial Sequence
  Synthetic oligonucleotide; CTC chr11 5310745 5310766 5310750 5310745 -
ttgtttttaaacctttcacaat

SEQ ID NO: 128881 - DNA, 22 bp, Artificial Sequence
  Synthetic oligonucleotide; CTT chr11 5310743 5310764 5310748 5310743 -
gtttttaaacctttcacaataa

SEQ ID NO: 128882 - DNA, 22 bp, Artificial Sequence
  Synthetic oligonucleotide; TTG chr11 5310742 5310763 5310747 5310742 -
tttttaaacctttcacaataaa

SEQ ID NO: 128883 - DNA, 22 bp, Artificial Sequence
  Synthetic oligonucleotide; TTT chr11 5310739 5310760 5310744 5310739 -
ttaaacctttcacaataaattt

SEQ ID NO: 128884 - DNA, 22 bp, Artificial Sequence
  Synthetic oligonucleotide; TTT chr11 5310738 5310759 5310743 5310738 -
taaacctttcacaataaattta

SEQ ID NO: 128885 - DNA, 22 bp, Artificial Sequence
  Synthetic oligonucleotide; TTT chr11 5310737 5310758 5310742 5310737 -
aaacctttcacaataaatttaa

SEQ ID NO: 128886 - DNA, 22 bp, Artificial Sequence
  Synthetic oligonucleotide; TTA chr11 5310736 5310757 5310741 5310736 -
aacctttcacaataaatttaat

SEQ ID NO: 128887 - DNA, 22 bp, Artificial Sequence
  Synthetic oligonucleotide; CTT chr11 5310730 5310751 5310735 5310730 -
tcacaataaatttaatgaattg

SEQ ID NO: 128888 - DNA, 22 bp, Artificial Sequence
  Synthetic oligonucleotide; TTT chr11 5310729 5310750 5310734 5310729 -
cacaataaatttaatgaattga

SEQ ID NO: 128889 - DNA, 22 bp, Artificial Sequence
  Synthetic oligonucleotide; TTC chr11 5310728 5310749 5310733 5310728 -
acaataaatttaatgaattgaa

SEQ ID NO: 128890 - DNA, 22 bp, Artificial Sequence
  Synthetic oligonucleotide; TTT chr11 5310717 5310738 5310722 5310717 -
aatgaattgaaatacatttatt

SEQ ID NO: 128891 - DNA, 22 bp, Artificial Sequence
  Synthetic oligonucleotide; TTA chr11 5310716 5310737 5310721 5310716 -
atgaattgaaatacatttattg

SEQ ID NO: 128892 - DNA, 22 bp, Artificial Sequence
  Synthetic oligonucleotide; TTG chr11 5310708 5310729 5310713 5310708 -
aaatacatttattgttttattt

SEQ ID NO: 128893 - DNA, 22 bp, Artificial Sequence
  Synthetic oligonucleotide; TTT chr11 5310698 5310719 5310703 5310698 -
attgttttatttttatagtggt

SEQ ID NO: 128894 - DNA, 22 bp, Artificial Sequence
  Synthetic oligonucleotide; TTA chr11 5310697 5310718 5310702 5310697 -
ttgttttatttttatagtggta

SEQ ID NO: 128895 - DNA, 22 bp, Artificial Sequence
  Synthetic oligonucleotide; TTG chr11 5310694 5310715 5310699 5310694 -
ttttatttttatagtggtaata

SEQ ID NO: 128896 - DNA, 22 bp, Artificial Sequence
  Synthetic oligonucleotide; TTT chr11 5310691 5310712 5310696 5310691 -
tatttttatagtggtaatatat

SEQ ID NO: 128897 - DNA, 22 bp, Artificial Sequence
  Synthetic oligonucleotide; TTT chr11 5310690 5310711 5310695 5310690 -
atttttatagtggtaatatata

SEQ ID NO: 128898 - DNA, 22 bp, Artificial Sequence
  Synthetic oligonucleotide; TTA chr11 5310689 5310710 5310694 5310689 -
tttttatagtggtaatatatac

SEQ ID NO: 128899 - DNA, 22 bp, Artificial Sequence
  Synthetic oligonucleotide; TTT chr11 5310686 5310707 5310691 5310686 -
ttatagtggtaatatatacaat

SEQ ID NO: 128900 - DNA, 22 bp, Artificial Sequence
  Synthetic oligonucleotide; TTT chr11 5310685 5310706 5310690 5310685 -
tatagtggtaatatatacaatt

SEQ ID NO: 128901 - DNA, 22 bp, Artificial Sequence
  Synthetic oligonucleotide; TTT chr11 5310684 5310705 5310689 5310684 -
atagtggtaatatatacaattt

SEQ ID NO: 128902 - DNA, 22 bp, Artificial Sequence
  Synthetic oligonucleotide; TTA chr11 5310683 5310704 5310688 5310683 -
tagtggtaatatatacaatttg

SEQ ID NO: 128903 - DNA, 22 bp, Artificial Sequence
  Synthetic oligonucleotide; TTT chr11 5310662 5310683 5310667 5310662 -
gccactttagcctttttataat

SEQ ID NO: 128904 - DNA, 22 bp, Artificial Sequence
  Synthetic oligonucleotide; TTG chr11 5310661 5310682 5310666 5310661 -
ccactttagcctttttataatg

SEQ ID NO: 128905 - DNA, 22 bp, Artificial Sequence
  Synthetic oligonucleotide; CTT chr11 5310655 5310676 5310660 5310655 -
tagcctttttataatgtataat

SEQ ID NO: 128906 - DNA, 22 bp, Artificial Sequence
  Synthetic oligonucleotide; TTT chr11 5310654 5310675 5310659 5310654 -
agcctttttataatgtataatg

SEQ ID NO: 128907 - DNA, 22 bp, Artificial Sequence
  Synthetic oligonucleotide; TTA chr11 5310653 5310674 5310658 5310653 -
gcctttttataatgtataatgc

SEQ ID NO: 128908 - DNA, 22 bp, Artificial Sequence
  Synthetic oligonucleotide; CTT chr11 5310648 5310669 5310653 5310648 -
tttataatgtataatgcagtgg

SEQ ID NO: 128909 - DNA, 22 bp, Artificial Sequence
  Synthetic oligonucleotide; TTT chr11 5310647 5310668 5310652 5310647 -
ttataatgtataatgcagtggc

SEQ ID NO: 128910 - DNA, 22 bp, Artificial Sequence
  Synthetic oligonucleotide; TTT chr11 5310646 5310667 5310651 5310646 -
tataatgtataatgcagtggca

SEQ ID NO: 128911 - DNA, 22 bp, Artificial Sequence
  Synthetic oligonucleotide; TTT chr11 5310645 5310666 5310650 5310645 -
ataatgtataatgcagtggcac

SEQ ID NO: 128912 - DNA, 22 bp, Artificial Sequence
  Synthetic oligonucleotide; TTA chr11 5310644 5310665 5310649 5310644 -
taatgtataatgcagtggcact

SEQ ID NO: 128913 - DNA, 22 bp, Artificial Sequence
  Synthetic oligonucleotide; CTT chr11 5310621 5310642 5310626 5310621 -
attacatttgccatgttgtgca

SEQ ID NO: 128914 - DNA, 22 bp, Artificial Sequence
  Synthetic oligonucleotide; TTA chr11 5310620 5310641 5310625 5310620 -
ttacatttgccatgttgtgcaa

SEQ ID NO: 128915 - DNA, 22 bp, Artificial Sequence
  Synthetic oligonucleotide; TTA chr11 5310617 5310638 5310622 5310617 -
catttgccatgttgtgcaatca

SEQ ID NO: 128916 - DNA, 22 bp, Artificial Sequence
  Synthetic oligonucleotide; TTT chr11 5310612 5310633 5310617 5310612 -
gccatgttgtgcaatcaccacc

SEQ ID NO: 128917 - DNA, 22 bp, Artificial Sequence
  Synthetic oligonucleotide; TTG chr11 5310611 5310632 5310616 5310611 -
ccatgttgtgcaatcaccacca

SEQ ID NO: 128918 - DNA, 22 bp, Artificial Sequence
  Synthetic oligonucleotide; TTG chr11 5310603 5310624 5310608 5310603 -
tgcaatcaccaccactatttct

SEQ ID NO: 128919 - DNA, 22 bp, Artificial Sequence
  Synthetic oligonucleotide; CTA chr11 5310586 5310607 5310591 5310586 -
tttctaaaattttgtattacac

SEQ ID NO: 128920 - DNA, 22 bp, Artificial Sequence
  Synthetic oligonucleotide; TTT chr11 5310583 5310604 5310588 5310583 -
ctaaaattttgtattacaccaa

SEQ ID NO: 128921 - DNA, 22 bp, Artificial Sequence
  Synthetic oligonucleotide; TTC chr11 5310582 5310603 5310587 5310582 -
taaaattttgtattacaccaaa

SEQ ID NO: 128922 - DNA, 22 bp, Artificial Sequence
  Synthetic oligonucleotide; CTA chr11 5310580 5310601 5310585 5310580 -
aaattttgtattacaccaaata

SEQ ID NO: 128923 - DNA, 22 bp, Artificial Sequence
  Synthetic oligonucleotide; TTT chr11 5310574 5310595 5310579 5310574 -
tgtattacaccaaataaaaact

SEQ ID NO: 128924 - DNA, 22 bp, Artificial Sequence
  Synthetic oligonucleotide; TTT chr11 5310573 5310594 5310578 5310573 -
gtattacaccaaataaaaactc

SEQ ID NO: 128925 - DNA, 22 bp, Artificial Sequence
  Synthetic oligonucleotide; TTG chr11 5310572 5310593 5310577 5310572 -
tattacaccaaataaaaactct

SEQ ID NO: 128926 - DNA, 22 bp, Artificial Sequence
  Synthetic oligonucleotide; TTA chr11 5310567 5310588 5310572 5310567 -
caccaaataaaaactctatatt

SEQ ID NO: 128927 - DNA, 22 bp, Artificial Sequence
  Synthetic oligonucleotide; CTC chr11 5310551 5310572 5310556 5310551 -
tatattgattaatcagttactc

SEQ ID NO: 128928 - DNA, 22 bp, Artificial Sequence
  Synthetic oligonucleotide; CTA chr11 5310549 5310570 5310554 5310549 -
tattgattaatcagttactccc

SEQ ID NO: 128929 - DNA, 22 bp, Artificial Sequence
  Synthetic oligonucleotide; TTG chr11 5310544 5310565 5310549 5310544 -
attaatcagttactccccaatc

SEQ ID NO: 128930 - DNA, 22 bp, Artificial Sequence
  Synthetic oligonucleotide; TTA chr11 5310540 5310561 5310545 5310540 -
atcagttactccccaatccatg

SEQ ID NO: 128931 - DNA, 22 bp, Artificial Sequence
  Synthetic oligonucleotide; TTA chr11 5310532 5310553 5310537 5310532 -
ctccccaatccatgttcttcct

SEQ ID NO: 128932 - DNA, 22 bp, Artificial Sequence
  Synthetic oligonucleotide; CTC chr11 5310529 5310550 5310534 5310529 -
cccaatccatgttcttcctaca

SEQ ID NO: 128933 - DNA, 22 bp, Artificial Sequence
  Synthetic oligonucleotide; TTC chr11 5310515 5310536 5310520 5310515 -
ttcctacactctggtaacttct

SEQ ID NO: 128934 - DNA, 22 bp, Artificial Sequence
  Synthetic oligonucleotide; CTT chr11 5310513 5310534 5310518 5310513 -
cctacactctggtaacttctaa

SEQ ID NO: 128935 - DNA, 22 bp, Artificial Sequence
  Synthetic oligonucleotide; TTC chr11 5310512 5310533 5310517 5310512 -
ctacactctggtaacttctaat

SEQ ID NO: 128936 - DNA, 22 bp, Artificial Sequence
  Synthetic oligonucleotide; CTA chr11 5310509 5310530 5310514 5310509 -
cactctggtaacttctaatcta

SEQ ID NO: 128937 - DNA, 22 bp, Artificial Sequence
  Synthetic oligonucleotide; CTC chr11 5310504 5310525 5310509 5310504 -
tggtaacttctaatctactttt

SEQ ID NO: 128938 - DNA, 22 bp, Artificial Sequence
  Synthetic oligonucleotide; CTG chr11 5310502 5310523 5310507 5310502 -
gtaacttctaatctactttttg

SEQ ID NO: 128939 - DNA, 22 bp, Artificial Sequence
  Synthetic oligonucleotide; CTT chr11 5310495 5310516 5310500 5310495 -
ctaatctactttttgtctctat

SEQ ID NO: 128940 - DNA, 22 bp, Artificial Sequence
  Synthetic oligonucleotide; TTC chr11 5310494 5310515 5310499 5310494 -
taatctactttttgtctctatg

SEQ ID NO: 128941 - DNA, 22 bp, Artificial Sequence
  Synthetic oligonucleotide; CTA chr11 5310492 5310513 5310497 5310492 -
atctactttttgtctctatgaa

SEQ ID NO: 128942 - DNA, 22 bp, Artificial Sequence
  Synthetic oligonucleotide; CTA chr11 5310487 5310508 5310492 5310487 -
ctttttgtctctatgaatttgc

SEQ ID NO: 128943 - DNA, 22 bp, Artificial Sequence
  Synthetic oligonucleotide; CTT chr11 5310484 5310505 5310489 5310484 -
tttgtctctatgaatttgccta

SEQ ID NO: 128944 - DNA, 22 bp, Artificial Sequence
  Synthetic oligonucleotide; TTT chr11 5310483 5310504 5310488 5310483 -
ttgtctctatgaatttgcctat

SEQ ID NO: 128945 - DNA, 22 bp, Artificial Sequence
  Synthetic oligonucleotide; TTT chr11 5310482 5310503 5310487 5310482 -
tgtctctatgaatttgcctatt

SEQ ID NO: 128946 - DNA, 22 bp, Artificial Sequence
  Synthetic oligonucleotide; TTT chr11 5310481 5310502 5310486 5310481 -
gtctctatgaatttgcctattc

SEQ ID NO: 128947 - DNA, 22 bp, Artificial Sequence
  Synthetic oligonucleotide; TTG chr11 5310480 5310501 5310485 5310480 -
tctctatgaatttgcctattct

SEQ ID NO: 128948 - DNA, 22 bp, Artificial Sequence
  Synthetic oligonucleotide; CTC chr11 5310476 5310497 5310481 5310476 -
tatgaatttgcctattctagat

SEQ ID NO: 128949 - DNA, 22 bp, Artificial Sequence
  Synthetic oligonucleotide; CTA chr11 5310474 5310495 5310479 5310474 -
tgaatttgcctattctagatag

SEQ ID NO: 128950 - DNA, 22 bp, Artificial Sequence
  Synthetic oligonucleotide; TTT chr11 5310467 5310488 5310472 5310467 -
gcctattctagatagctcatgt

SEQ ID NO: 128951 - DNA, 22 bp, Artificial Sequence
  Synthetic oligonucleotide; TTG chr11 5310466 5310487 5310471 5310466 -
cctattctagatagctcatgta

SEQ ID NO: 128952 - DNA, 22 bp, Artificial Sequence
  Synthetic oligonucleotide; CTA chr11 5310462 5310483 5310467 5310462 -
ttctagatagctcatgtaagtg

SEQ ID NO: 128953 - DNA, 22 bp, Artificial Sequence
  Synthetic oligonucleotide; TTC chr11 5310459 5310480 5310464 5310459 -
tagatagctcatgtaagtgaaa

SEQ ID NO: 128954 - DNA, 22 bp, Artificial Sequence
  Synthetic oligonucleotide; CTA chr11 5310457 5310478 5310462 5310457 -
gatagctcatgtaagtgaaatc

SEQ ID NO: 128955 - DNA, 22 bp, Artificial Sequence
  Synthetic oligonucleotide; CTC chr11 5310449 5310470 5310454 5310449 -
atgtaagtgaaatcagacaatg

SEQ ID NO: 128956 - DNA, 22 bp, Artificial Sequence
  Synthetic oligonucleotide; TTC chr11 5310424 5310445 5310429 5310424 -
ttttgcgtatgacttattgcac

SEQ ID NO: 128957 - DNA, 22 bp, Artificial Sequence
  Synthetic oligonucleotide; CTT chr11 5310422 5310443 5310427 5310422 -
ttgcgtatgacttattgcactt

SEQ ID NO: 128958 - DNA, 22 bp, Artificial Sequence
  Synthetic oligonucleotide; TTT chr11 5310421 5310442 5310426 5310421 -
tgcgtatgacttattgcactta

SEQ ID NO: 128959 - DNA, 22 bp, Artificial Sequence
  Synthetic oligonucleotide; TTT chr11 5310420 5310441 5310425 5310420 -
gcgtatgacttattgcacttag

SEQ ID NO: 128960 - DNA, 22 bp, Artificial Sequence
  Synthetic oligonucleotide; TTG chr11 5310419 5310440 5310424 5310419 -
cgtatgacttattgcacttagg

SEQ ID NO: 128961 - DNA, 22 bp, Artificial Sequence
  Synthetic oligonucleotide; CTT chr11 5310409 5310430 5310414 5310409 -
attgcacttaggatagtttttt

SEQ ID NO: 128962 - DNA, 22 bp, Artificial Sequence
  Synthetic oligonucleotide; TTA chr11 5310408 5310429 5310413 5310408 -
ttgcacttaggatagtttttta

SEQ ID NO: 128963 - DNA, 22 bp, Artificial Sequence
  Synthetic oligonucleotide; TTG chr11 5310405 5310426 5310410 5310405 -
cacttaggatagttttttaagg

SEQ ID NO: 128964 - DNA, 22 bp, Artificial Sequence
  Synthetic oligonucleotide; CTT chr11 5310400 5310421 5310405 5310400 -
aggatagttttttaaggtttat

SEQ ID NO: 128965 - DNA, 22 bp, Artificial Sequence
  Synthetic oligonucleotide; TTA chr11 5310399 5310420 5310404 5310399 -
ggatagttttttaaggtttatt

SEQ ID NO: 128966 - DNA, 22 bp, Artificial Sequence
  Synthetic oligonucleotide; TTT chr11 5310390 5310411 5310395 5310390 -
tttaaggtttattcatgttgta

SEQ ID NO: 128967 - DNA, 22 bp, Artificial Sequence
  Synthetic oligonucleotide; TTT chr11 5310389 5310410 5310394 5310389 -
ttaaggtttattcatgttgtag

SEQ ID NO: 128968 - DNA, 22 bp, Artificial Sequence
  Synthetic oligonucleotide; TTT chr11 5310388 5310409 5310393 5310388 -
taaggtttattcatgttgtagc

SEQ ID NO: 128969 - DNA, 22 bp, Artificial Sequence
  Synthetic oligonucleotide; TTT chr11 5310387 5310408 5310392 5310387 -
aaggtttattcatgttgtagca

SEQ ID NO: 128970 - DNA, 22 bp, Artificial Sequence
  Synthetic oligonucleotide; TTA chr11 5310386 5310407 5310391 5310386 -
aggtttattcatgttgtagcat

SEQ ID NO: 128971 - DNA, 22 bp, Artificial Sequence
  Synthetic oligonucleotide; TTT chr11 5310380 5310401 5310385 5310380 -
attcatgttgtagcatgtgtca

SEQ ID NO: 128972 - DNA, 22 bp, Artificial Sequence
  Synthetic oligonucleotide; TTA chr11 5310379 5310400 5310384 5310379 -
ttcatgttgtagcatgtgtcag

SEQ ID NO: 128973 - DNA, 22 bp, Artificial Sequence
  Synthetic oligonucleotide; TTC chr11 5310376 5310397 5310381 5310376 -
atgttgtagcatgtgtcagacc

SEQ ID NO: 128974 - DNA, 22 bp, Artificial Sequence
  Synthetic oligonucleotide; TTG chr11 5310370 5310391 5310375 5310370 -
tagcatgtgtcagacctacttt

SEQ ID NO: 128975 - DNA, 22 bp, Artificial Sequence
  Synthetic oligonucleotide; CTA chr11 5310352 5310373 5310357 5310352 -
ctttttatagataaataatatt

SEQ ID NO: 128976 - DNA, 22 bp, Artificial Sequence
  Synthetic oligonucleotide; CTT chr11 5310349 5310370 5310354 5310349 -
tttatagataaataatattcta

SEQ ID NO: 128977 - DNA, 22 bp, Artificial Sequence
  Synthetic oligonucleotide; TTT chr11 5310348 5310369 5310353 5310348 -
ttatagataaataatattctat

SEQ ID NO: 128978 - DNA, 22 bp, Artificial Sequence
  Synthetic oligonucleotide; TTT chr11 5310347 5310368 5310352 5310347 -
tatagataaataatattctatc

SEQ ID NO: 128979 - DNA, 22 bp, Artificial Sequence
  Synthetic oligonucleotide; TTT chr11 5310346 5310367 5310351 5310346 -
atagataaataatattctatca

SEQ ID NO: 128980 - DNA, 22 bp, Artificial Sequence
  Synthetic oligonucleotide; TTA chr11 5310345 5310366 5310350 5310345 -
tagataaataatattctatcac

SEQ ID NO: 128981 - DNA, 22 bp, Artificial Sequence
  Synthetic oligonucleotide; TTC chr11 5310329 5310350 5310334 5310329 -
tatcacatatataagacatttt

SEQ ID NO: 128982 - DNA, 22 bp, Artificial Sequence
  Synthetic oligonucleotide; CTA chr11 5310327 5310348 5310332 5310327 -
tcacatatataagacattttgt

SEQ ID NO: 128983 - DNA, 22 bp, Artificial Sequence
  Synthetic oligonucleotide; TTT chr11 5310308 5310329 5310313 5310308 -
tgttgatatacgcatctgttga

SEQ ID NO: 128984 - DNA, 22 bp, Artificial Sequence
  Synthetic oligonucleotide; TTT chr11 5310307 5310328 5310312 5310307 -
gttgatatacgcatctgttgat

SEQ ID NO: 128985 - DNA, 22 bp, Artificial Sequence
  Synthetic oligonucleotide; TTG chr11 5310306 5310327 5310311 5310306 -
ttgatatacgcatctgttgata

SEQ ID NO: 128986 - DNA, 22 bp, Artificial Sequence
  Synthetic oligonucleotide; TTG chr11 5310303 5310324 5310308 5310303 -
atatacgcatctgttgatagat

SEQ ID NO: 128987 - DNA, 22 bp, Artificial Sequence
  Synthetic oligonucleotide; CTG chr11 5310290 5310311 5310295 5310290 -
ttgatagatacttgtattgttt

SEQ ID NO: 128988 - DNA, 22 bp, Artificial Sequence
  Synthetic oligonucleotide; TTG chr11 5310287 5310308 5310292 5310287 -
atagatacttgtattgtttcta

SEQ ID NO: 128989 - DNA, 22 bp, Artificial Sequence
  Synthetic oligonucleotide; CTT chr11 5310277 5310298 5310282 5310277 -
gtattgtttctattccttggct

SEQ ID NO: 128990 - DNA, 22 bp, Artificial Sequence
  Synthetic oligonucleotide; TTG chr11 5310276 5310297 5310281 5310276 -
tattgtttctattccttggcta

SEQ ID NO: 128991 - DNA, 22 bp, Artificial Sequence
  Synthetic oligonucleotide; TTG chr11 5310271 5310292 5310276 5310271 -
tttctattccttggctactgtg

SEQ ID NO: 128992 - DNA, 22 bp, Artificial Sequence
  Synthetic oligonucleotide; TTT chr11 5310268 5310289 5310273 5310268 -
ctattccttggctactgtgaat

SEQ ID NO: 128993 - DNA, 22 bp, Artificial Sequence
  Synthetic oligonucleotide; TTC chr11 5310267 5310288 5310272 5310267 -
tattccttggctactgtgaatt

SEQ ID NO: 128994 - DNA, 22 bp, Artificial Sequence
  Synthetic oligonucleotide; CTA chr11 5310265 5310286 5310270 5310265 -
ttccttggctactgtgaattat

SEQ ID NO: 128995 - DNA, 22 bp, Artificial Sequence
  Synthetic oligonucleotide; TTC chr11 5310262 5310283 5310267 5310262 -
cttggctactgtgaattattga

SEQ ID NO: 128996 - DNA, 22 bp, Artificial Sequence
  Synthetic oligonucleotide; CTT chr11 5310259 5310280 5310264 5310259 -
ggctactgtgaattattgatgt

SEQ ID NO: 128997 - DNA, 22 bp, Artificial Sequence
  Synthetic oligonucleotide; TTG chr11 5310258 5310279 5310263 5310258 -
gctactgtgaattattgatgtc

SEQ ID NO: 128998 - DNA, 22 bp, Artificial Sequence
  Synthetic oligonucleotide; CTA chr11 5310254 5310275 5310259 5310254 -
ctgtgaattattgatgtcttcc

SEQ ID NO: 128999 - DNA, 22 bp, Artificial Sequence
  Synthetic oligonucleotide; CTG chr11 5310251 5310272 5310256 5310251 -
tgaattattgatgtcttccctt

SEQ ID NO: 129000 - DNA, 22 bp, Artificial Sequence
  Synthetic oligonucleotide; TTA chr11 5310244 5310265 5310249 5310244 -
ttgatgtcttcccttcaatatg

SEQ ID NO: 129001 - DNA, 22 bp, Artificial Sequence
  Synthetic oligonucleotide; TTG chr11 5310241 5310262 5310246 5310241 -
atgtcttcccttcaatatgccc

SEQ ID NO: 129002 - DNA, 22 bp, Artificial Sequence
  Synthetic oligonucleotide; CTT chr11 5310234 5310255 5310239 5310234 -
cccttcaatatgcccagattct

SEQ ID NO: 129003 - DNA, 22 bp, Artificial Sequence
  Synthetic oligonucleotide; TTC chr11 5310233 5310254 5310238 5310233 -
ccttcaatatgcccagattcta

SEQ ID NO: 129004 - DNA, 22 bp, Artificial Sequence
  Synthetic oligonucleotide; CTT chr11 5310229 5310250 5310234 5310229 -
caatatgcccagattctaccta

SEQ ID NO: 129005 - DNA, 22 bp, Artificial Sequence
  Synthetic oligonucleotide; TTC chr11 5310228 5310249 5310233 5310228 -
aatatgcccagattctacctaa

SEQ ID NO: 129006 - DNA, 22 bp, Artificial Sequence
  Synthetic oligonucleotide; TTC chr11 5310213 5310234 5310218 5310213 -
tacctaaatatatctctctact

SEQ ID NO: 129007 - DNA, 22 bp, Artificial Sequence
  Synthetic oligonucleotide; CTA chr11 5310211 5310232 5310216 5310211 -
cctaaatatatctctctacttc

SEQ ID NO: 129008 - DNA, 22 bp, Artificial Sequence
  Synthetic oligonucleotide; CTA chr11 5310207 5310228 5310212 5310207 -
aatatatctctctacttcctct

SEQ ID NO: 129009 - DNA, 22 bp, Artificial Sequence
  Synthetic oligonucleotide; CTC chr11 5310197 5310218 5310202 5310197 -
tctacttcctctcactctgaat

SEQ ID NO: 129010 - DNA, 22 bp, Artificial Sequence
  Synthetic oligonucleotide; CTC chr11 5310195 5310216 5310200 5310195 -
tacttcctctcactctgaatat

SEQ ID NO: 129011 - DNA, 22 bp, Artificial Sequence
  Synthetic oligonucleotide; CTA chr11 5310193 5310214 5310198 5310193 -
cttcctctcactctgaatattc

SEQ ID NO: 129012 - DNA, 22 bp, Artificial Sequence
  Synthetic oligonucleotide; CTT chr11 5310190 5310211 5310195 5310190 -
cctctcactctgaatattctgc

SEQ ID NO: 129013 - DNA, 22 bp, Artificial Sequence
  Synthetic oligonucleotide; TTC chr11 5310189 5310210 5310194 5310189 -
ctctcactctgaatattctgct

SEQ ID NO: 129014 - DNA, 22 bp, Artificial Sequence
  Synthetic oligonucleotide; CTC chr11 5310186 5310207 5310191 5310186 -
tcactctgaatattctgctttt

SEQ ID NO: 129015 - DNA, 22 bp, Artificial Sequence
  Synthetic oligonucleotide; CTC chr11 5310184 5310205 5310189 5310184 -
actctgaatattctgcttttca

SEQ ID NO: 129016 - DNA, 22 bp, Artificial Sequence
  Synthetic oligonucleotide; CTC chr11 5310180 5310201 5310185 5310180 -
tgaatattctgcttttcaaaga

SEQ ID NO: 129017 - DNA, 22 bp, Artificial Sequence
  Synthetic oligonucleotide; CTG chr11 5310178 5310199 5310183 5310178 -
aatattctgcttttcaaagaat

SEQ ID NO: 129018 - DNA, 22 bp, Artificial Sequence
  Synthetic oligonucleotide; TTC chr11 5310171 5310192 5310176 5310171 -
tgcttttcaaagaatattcctt

SEQ ID NO: 129019 - DNA, 22 bp, Artificial Sequence
  Synthetic oligonucleotide; CTG chr11 5310169 5310190 5310174 5310169 -
cttttcaaagaatattccttgg

SEQ ID NO: 129020 - DNA, 22 bp, Artificial Sequence
  Synthetic oligonucleotide; CTT chr11 5310166 5310187 5310171 5310166 -
ttcaaagaatattccttggaat

SEQ ID NO: 129021 - DNA, 22 bp, Artificial Sequence
  Synthetic oligonucleotide; TTT chr11 5310165 5310186 5310170 5310165 -
tcaaagaatattccttggaata

SEQ ID NO: 129022 - DNA, 22 bp, Artificial Sequence
  Synthetic oligonucleotide; TTT chr11 5310164 5310185 5310169 5310164 -
caaagaatattccttggaatat

SEQ ID NO: 129023 - DNA, 22 bp, Artificial Sequence
  Synthetic oligonucleotide; TTC chr11 5310163 5310184 5310168 5310163 -
aaagaatattccttggaatatt

SEQ ID NO: 129024 - DNA, 22 bp, Artificial Sequence
  Synthetic oligonucleotide; TTC chr11 5310152 5310173 5310157 5310152 -
cttggaatattccatggaagaa

SEQ ID NO: 129025 - DNA, 22 bp, Artificial Sequence
  Synthetic oligonucleotide; CTT chr11 5310149 5310170 5310154 5310149 -
ggaatattccatggaagaagaa

SEQ ID NO: 129026 - DNA, 22 bp, Artificial Sequence
  Synthetic oligonucleotide; TTG chr11 5310148 5310169 5310153 5310148 -
gaatattccatggaagaagaaa

SEQ ID NO: 129027 - DNA, 22 bp, Artificial Sequence
  Synthetic oligonucleotide; TTC chr11 5310140 5310161 5310145 5310140 -
catggaagaagaaaatgagaca

SEQ ID NO: 129028 - DNA, 22 bp, Artificial Sequence
  Synthetic oligonucleotide; CTT chr11 5310113 5310134 5310118 5310113 -
tctggagaaaggaagttttcag

SEQ ID NO: 129029 - DNA, 22 bp, Artificial Sequence
  Synthetic oligonucleotide; TTT chr11 5310112 5310133 5310117 5310112 -
ctggagaaaggaagttttcagt

SEQ ID NO: 129030 - DNA, 22 bp, Artificial Sequence
  Synthetic oligonucleotide; TTC chr11 5310111 5310132 5310116 5310111 -
tggagaaaggaagttttcagtg

SEQ ID NO: 129031 - DNA, 22 bp, Artificial Sequence
  Synthetic oligonucleotide; CTG chr11 5310109 5310130 5310114 5310109 -
gagaaaggaagttttcagtgcc

SEQ ID NO: 129032 - DNA, 22 bp, Artificial Sequence
  Synthetic oligonucleotide; TTT chr11 5310095 5310116 5310100 5310095 -
tcagtgccttgatctcggctga

SEQ ID NO: 129033 - DNA, 22 bp, Artificial Sequence
  Synthetic oligonucleotide; TTT chr11 5310094 5310115 5310099 5310094 -
cagtgccttgatctcggctgac

SEQ ID NO: 129034 - DNA, 22 bp, Artificial Sequence
  Synthetic oligonucleotide; TTC chr11 5310093 5310114 5310098 5310093 -
agtgccttgatctcggctgact

SEQ ID NO: 129035 - DNA, 22 bp, Artificial Sequence
  Synthetic oligonucleotide; CTT chr11 5310085 5310106 5310090 5310085 -
gatctcggctgactgcaacctc

SEQ ID NO: 129036 - DNA, 22 bp, Artificial Sequence
  Synthetic oligonucleotide; TTG chr11 5310084 5310105 5310089 5310084 -
atctcggctgactgcaacctct

SEQ ID NO: 129037 - DNA, 22 bp, Artificial Sequence
  Synthetic oligonucleotide; CTC chr11 5310079 5310100 5310084 5310079 -
ggctgactgcaacctctgcctc

SEQ ID NO: 129038 - DNA, 22 bp, Artificial Sequence
  Synthetic oligonucleotide; CTG chr11 5310074 5310095 5310079 5310074 -
actgcaacctctgcctcctggg

SEQ ID NO: 129039 - DNA, 22 bp, Artificial Sequence
  Synthetic oligonucleotide; CTG chr11 5310070 5310091 5310075 5310070 -
caacctctgcctcctgggttca

SEQ ID NO: 129040 - DNA, 22 bp, Artificial Sequence
  Synthetic oligonucleotide; CTC chr11 5310063 5310084 5310068 5310063 -
tgcctcctgggttcagttttca

SEQ ID NO: 129041 - DNA, 22 bp, Artificial Sequence
  Synthetic oligonucleotide; CTG chr11 5310061 5310082 5310066 5310061 -
cctcctgggttcagttttcagt

SEQ ID NO: 129042 - DNA, 22 bp, Artificial Sequence
  Synthetic oligonucleotide; CTC chr11 5310057 5310078 5310062 5310057 -
ctgggttcagttttcagttaaa

SEQ ID NO: 129043 - DNA, 22 bp, Artificial Sequence
  Synthetic oligonucleotide; CTG chr11 5310054 5310075 5310059 5310054 -
ggttcagttttcagttaaagaa

SEQ ID NO: 129044 - DNA, 22 bp, Artificial Sequence
  Synthetic oligonucleotide; TTC chr11 5310049 5310070 5310054 5310049 -
agttttcagttaaagaaatgat

SEQ ID NO: 129045 - DNA, 22 bp, Artificial Sequence
  Synthetic oligonucleotide; TTT chr11 5310044 5310065 5310049 5310044 -
tcagttaaagaaatgatttaac

SEQ ID NO: 129046 - DNA, 22 bp, Artificial Sequence
  Synthetic oligonucleotide; TTT chr11 5310043 5310064 5310048 5310043 -
cagttaaagaaatgatttaaca

SEQ ID NO: 129047 - DNA, 22 bp, Artificial Sequence
  Synthetic oligonucleotide; TTC chr11 5310042 5310063 5310047 5310042 -
agttaaagaaatgatttaacaa

SEQ ID NO: 129048 - DNA, 22 bp, Artificial Sequence
  Synthetic oligonucleotide; TTA chr11 5310037 5310058 5310042 5310037 -
aagaaatgatttaacaaatttt

SEQ ID NO: 129049 - DNA, 22 bp, Artificial Sequence
  Synthetic oligonucleotide; TTT chr11 5310025 5310046 5310030 5310025 -
aacaaattttttcactcaacta

SEQ ID NO: 129050 - DNA, 22 bp, Artificial Sequence
  Synthetic oligonucleotide; TTA chr11 5310024 5310045 5310029 5310024 -
acaaattttttcactcaactag

SEQ ID NO: 129051 - DNA, 22 bp, Artificial Sequence
  Synthetic oligonucleotide; TTT chr11 5310016 5310037 5310021 5310016 -
tttcactcaactagagatttta

SEQ ID NO: 129052 - DNA, 22 bp, Artificial Sequence
  Synthetic oligonucleotide; TTT chr11 5310015 5310036 5310020 5310015 -
ttcactcaactagagattttat

SEQ ID NO: 129053 - DNA, 22 bp, Artificial Sequence
  Synthetic oligonucleotide; TTT chr11 5310014 5310035 5310019 5310014 -
tcactcaactagagattttatg

SEQ ID NO: 129054 - DNA, 22 bp, Artificial Sequence
  Synthetic oligonucleotide; TTT chr11 5310013 5310034 5310018 5310013 -
cactcaactagagattttatga

SEQ ID NO: 129055 - DNA, 22 bp, Artificial Sequence
  Synthetic oligonucleotide; TTC chr11 5310012 5310033 5310017 5310012 -
actcaactagagattttatgat

SEQ ID NO: 129056 - DNA, 22 bp, Artificial Sequence
  Synthetic oligonucleotide; CTC chr11 5310008 5310029 5310013 5310008 -
aactagagattttatgataatg

SEQ ID NO: 129057 - DNA, 22 bp, Artificial Sequence
  Synthetic oligonucleotide; CTA chr11 5310003 5310024 5310008 5310003 -
gagattttatgataatgcaata

SEQ ID NO: 129058 - DNA, 22 bp, Artificial Sequence
  Synthetic oligonucleotide; TTT chr11 5309996 5310017 5310001 5309996 -
tatgataatgcaatacagataa

SEQ ID NO: 129059 - DNA, 22 bp, Artificial Sequence
  Synthetic oligonucleotide; TTT chr11 5309995 5310016 5310000 5309995 -
atgataatgcaatacagataaa

SEQ ID NO: 129060 - DNA, 22 bp, Artificial Sequence
  Synthetic oligonucleotide; TTA chr11 5309994 5310015 5309999 5309994 -
tgataatgcaatacagataaaa

SEQ ID NO: 129061 - DNA, 22 bp, Artificial Sequence
  Synthetic oligonucleotide; CTT chr11 5309957 5309978 5309962 5309957 -
ccagacctaaaaatatgtggca

SEQ ID NO: 129062 - DNA, 22 bp, Artificial Sequence
  Synthetic oligonucleotide; TTC chr11 5309956 5309977 5309961 5309956 -
cagacctaaaaatatgtggcat

SEQ ID NO: 129063 - DNA, 22 bp, Artificial Sequence
  Synthetic oligonucleotide; CTA chr11 5309948 5309969 5309953 5309948 -
aaaatatgtggcatccacattt

SEQ ID NO: 129064 - DNA, 22 bp, Artificial Sequence
  Synthetic oligonucleotide; TTT chr11 5309926 5309947 5309931 5309926 -
tacaggtacattttcacggaga

SEQ ID NO: 129065 - DNA, 22 bp, Artificial Sequence
  Synthetic oligonucleotide; TTT chr11 5309925 5309946 5309930 5309925 -
acaggtacattttcacggagaa

SEQ ID NO: 129066 - DNA, 22 bp, Artificial Sequence
  Synthetic oligonucleotide; TTA chr11 5309924 5309945 5309929 5309924 -
caggtacattttcacggagaaa

SEQ ID NO: 129067 - DNA, 22 bp, Artificial Sequence
  Synthetic oligonucleotide; TTT chr11 5309913 5309934 5309918 5309913 -
tcacggagaaagataagaactg

SEQ ID NO: 129068 - DNA, 22 bp, Artificial Sequence
  Synthetic oligonucleotide; TTT chr11 5309912 5309933 5309917 5309912 -
cacggagaaagataagaactgg

SEQ ID NO: 129069 - DNA, 22 bp, Artificial Sequence
  Synthetic oligonucleotide; TTC chr11 5309911 5309932 5309916 5309911 -
acggagaaagataagaactggt

SEQ ID NO: 129070 - DNA, 22 bp, Artificial Sequence
  Synthetic oligonucleotide; CTG chr11 5309891 5309912 5309896 5309891 -
gtgatttgtttgcaacaaatct

SEQ ID NO: 129071 - DNA, 22 bp, Artificial Sequence
  Synthetic oligonucleotide; TTT chr11 5309884 5309905 5309889 5309884 -
gtttgcaacaaatctttgctct

SEQ ID NO: 129072 - DNA, 22 bp, Artificial Sequence
  Synthetic oligonucleotide; TTG chr11 5309883 5309904 5309888 5309883 -
tttgcaacaaatctttgctctg

SEQ ID NO: 129073 - DNA, 22 bp, Artificial Sequence
  Synthetic oligonucleotide; TTT chr11 5309880 5309901 5309885 5309880 -
gcaacaaatctttgctctggac

SEQ ID NO: 129074 - DNA, 22 bp, Artificial Sequence
  Synthetic oligonucleotide; TTG chr11 5309879 5309900 5309884 5309879 -
caacaaatctttgctctggact

SEQ ID NO: 129075 - DNA, 22 bp, Artificial Sequence
  Synthetic oligonucleotide; CTT chr11 5309868 5309889 5309873 5309868 -
tgctctggacttcactgagtaa

SEQ ID NO: 129076 - DNA, 22 bp, Artificial Sequence
  Synthetic oligonucleotide; TTT chr11 5309867 5309888 5309872 5309867 -
gctctggacttcactgagtaaa

SEQ ID NO: 129077 - DNA, 22 bp, Artificial Sequence
  Synthetic oligonucleotide; TTG chr11 5309866 5309887 5309871 5309866 -
ctctggacttcactgagtaaag

SEQ ID NO: 129078 - DNA, 22 bp, Artificial Sequence
  Synthetic oligonucleotide; CTC chr11 5309863 5309884 5309868 5309863 -
tggacttcactgagtaaagttt

SEQ ID NO: 129079 - DNA, 22 bp, Artificial Sequence
  Synthetic oligonucleotide; CTG chr11 5309861 5309882 5309866 5309861 -
gacttcactgagtaaagttttt

SEQ ID NO: 129080 - DNA, 22 bp, Artificial Sequence
  Synthetic oligonucleotide; CTT chr11 5309856 5309877 5309861 5309856 -
cactgagtaaagttttttttgc

SEQ ID NO: 129081 - DNA, 22 bp, Artificial Sequence
  Synthetic oligonucleotide; TTC chr11 5309855 5309876 5309860 5309855 -
actgagtaaagttttttttgct

SEQ ID NO: 129082 - DNA, 22 bp, Artificial Sequence
  Synthetic oligonucleotide; CTG chr11 5309851 5309872 5309856 5309851 -
agtaaagttttttttgctttgt

SEQ ID NO: 129083 - DNA, 22 bp, Artificial Sequence
  Synthetic oligonucleotide; TTT chr11 5309841 5309862 5309846 5309841 -
tttttgctttgttttgttttgt

SEQ ID NO: 129084 - DNA, 22 bp, Artificial Sequence
  Synthetic oligonucleotide; TTT chr11 5309840 5309861 5309845 5309840 -
ttttgctttgttttgttttgtt

SEQ ID NO: 129085 - DNA, 22 bp, Artificial Sequence
  Synthetic oligonucleotide; TTT chr11 5309839 5309860 5309844 5309839 -
tttgctttgttttgttttgttt

SEQ ID NO: 129086 - DNA, 22 bp, Artificial Sequence
  Synthetic oligonucleotide; TTT chr11 5309838 5309859 5309843 5309838 -
ttgctttgttttgttttgtttt

SEQ ID NO: 129087 - DNA, 22 bp, Artificial Sequence
  Synthetic oligonucleotide; TTT chr11 5309837 5309858 5309842 5309837 -
tgctttgttttgttttgttttt

SEQ ID NO: 129088 - DNA, 22 bp, Artificial Sequence
  Synthetic oligonucleotide; TTT chr11 5309836 5309857 5309841 5309836 -
gctttgttttgttttgtttttg

SEQ ID NO: 129089 - DNA, 22 bp, Artificial Sequence
  Synthetic oligonucleotide; TTG chr11 5309835 5309856 5309840 5309835 -
ctttgttttgttttgtttttga

SEQ ID NO: 129090 - DNA, 22 bp, Artificial Sequence
  Synthetic oligonucleotide; CTT chr11 5309832 5309853 5309837 5309832 -
tgttttgttttgtttttgagat

SEQ ID NO: 129091 - DNA, 22 bp, Artificial Sequence
  Synthetic oligonucleotide; TTT chr11 5309831 5309852 5309836 5309831 -
gttttgttttgtttttgagatg

SEQ ID NO: 129092 - DNA, 22 bp, Artificial Sequence
  Synthetic oligonucleotide; TTG chr11 5309830 5309851 5309835 5309830 -
ttttgttttgtttttgagatgg

SEQ ID NO: 129093 - DNA, 22 bp, Artificial Sequence
  Synthetic oligonucleotide; TTT chr11 5309827 5309848 5309832 5309827 -
tgttttgtttttgagatggagt

SEQ ID NO: 129094 - DNA, 22 bp, Artificial Sequence
  Synthetic oligonucleotide; TTT chr11 5309826 5309847 5309831 5309826 -
gttttgtttttgagatggagtc

SEQ ID NO: 129095 - DNA, 22 bp, Artificial Sequence
  Synthetic oligonucleotide; TTG chr11 5309825 5309846 5309830 5309825 -
ttttgtttttgagatggagtct

SEQ ID NO: 129096 - DNA, 22 bp, Artificial Sequence
  Synthetic oligonucleotide; TTT chr11 5309822 5309843 5309827 5309822 -
tgtttttgagatggagtctcgc

SEQ ID NO: 129097 - DNA, 22 bp, Artificial Sequence
  Synthetic oligonucleotide; TTT chr11 5309821 5309842 5309826 5309821 -
gtttttgagatggagtctcgct

SEQ ID NO: 129098 - DNA, 22 bp, Artificial Sequence
  Synthetic oligonucleotide; TTG chr11 5309820 5309841 5309825 5309820 -
tttttgagatggagtctcgctc

SEQ ID NO: 129099 - DNA, 22 bp, Artificial Sequence
  Synthetic oligonucleotide; TTT chr11 5309817 5309838 5309822 5309817 -
ttgagatggagtctcgctctgt

SEQ ID NO: 129100 - DNA, 22 bp, Artificial Sequence
  Synthetic oligonucleotide; TTT chr11 5309816 5309837 5309821 5309816 -
tgagatggagtctcgctctgtc

SEQ ID NO: 129101 - DNA, 22 bp, Artificial Sequence
  Synthetic oligonucleotide; TTT chr11 5309815 5309836 5309820 5309815 -
gagatggagtctcgctctgtcg

SEQ ID NO: 129102 - DNA, 22 bp, Artificial Sequence
  Synthetic oligonucleotide; TTG chr11 5309814 5309835 5309819 5309814 -
agatggagtctcgctctgtcgc

SEQ ID NO: 129103 - DNA, 22 bp, Artificial Sequence
  Synthetic oligonucleotide; CTC chr11 5309802 5309823 5309807 5309802 -
gctctgtcgcccaggctggagt

SEQ ID NO: 129104 - DNA, 22 bp, Artificial Sequence
  Synthetic oligonucleotide; CTC chr11 5309798 5309819 5309803 5309798 -
tgtcgcccaggctggagtgcag

SEQ ID NO: 129105 - DNA, 22 bp, Artificial Sequence
  Synthetic oligonucleotide; CTG chr11 5309796 5309817 5309801 5309796 -
tcgcccaggctggagtgcagtg

SEQ ID NO: 129106 - DNA, 22 bp, Artificial Sequence
  Synthetic oligonucleotide; CTG chr11 5309784 5309805 5309789 5309784 -
gagtgcagtggcgtgatctcag

SEQ ID NO: 129107 - DNA, 22 bp, Artificial Sequence
  Synthetic oligonucleotide; CTC chr11 5309764 5309785 5309769 5309764 -
agctcactgcaagctctgcctc

SEQ ID NO: 129108 - DNA, 22 bp, Artificial Sequence
  Synthetic oligonucleotide; CTC chr11 5309759 5309780 5309764 5309759 -
actgcaagctctgcctcccggg

SEQ ID NO: 129109 - DNA, 22 bp, Artificial Sequence
  Synthetic oligonucleotide; CTG chr11 5309755 5309776 5309760 5309755 -
caagctctgcctcccgggttca

SEQ ID NO: 129110 - DNA, 22 bp, Artificial Sequence
  Synthetic oligonucleotide; CTC chr11 5309748 5309769 5309753 5309748 -
tgcctcccgggttcacgccatt

SEQ ID NO: 129111 - DNA, 22 bp, Artificial Sequence
  Synthetic oligonucleotide; CTG chr11 5309746 5309767 5309751 5309746 -
cctcccgggttcacgccattct

SEQ ID NO: 129112 - DNA, 22 bp, Artificial Sequence
  Synthetic oligonucleotide; CTC chr11 5309742 5309763 5309747 5309742 -
ccgggttcacgccattctcctg

SEQ ID NO: 129113 - DNA, 22 bp, Artificial Sequence
  Synthetic oligonucleotide; TTC chr11 5309734 5309755 5309739 5309734 -
acgccattctcctgcctcagcc

SEQ ID NO: 129114 - DNA, 22 bp, Artificial Sequence
  Synthetic oligonucleotide; TTC chr11 5309725 5309746 5309730 5309725 -
tcctgcctcagcctcccgagta

SEQ ID NO: 129115 - DNA, 22 bp, Artificial Sequence
  Synthetic oligonucleotide; CTC chr11 5309723 5309744 5309728 5309723 -
ctgcctcagcctcccgagtagc

SEQ ID NO: 129116 - DNA, 22 bp, Artificial Sequence
  Synthetic oligonucleotide; CTG chr11 5309720 5309741 5309725 5309720 -
cctcagcctcccgagtagctgg

SEQ ID NO: 129117 - DNA, 22 bp, Artificial Sequence
  Synthetic oligonucleotide; CTC chr11 5309716 5309737 5309721 5309716 -
agcctcccgagtagctgggact

SEQ ID NO: 129118 - DNA, 22 bp, Artificial Sequence
  Synthetic oligonucleotide; CTC chr11 5309710 5309731 5309715 5309710 -
ccgagtagctgggactacaggc

SEQ ID NO: 129119 - DNA, 22 bp, Artificial Sequence
  Synthetic oligonucleotide; CTG chr11 5309699 5309720 5309704 5309699 -
ggactacaggcgcccgccacca

SEQ ID NO: 129120 - DNA, 22 bp, Artificial Sequence
  Synthetic oligonucleotide; CTA chr11 5309693 5309714 5309698 5309693 -
caggcgcccgccaccacgccag

SEQ ID NO: 129121 - DNA, 22 bp, Artificial Sequence
  Synthetic oligonucleotide; TTT chr11 5309663 5309684 5309668 5309663 -
ttttgtctttttagtagagacg

SEQ ID NO: 129122 - DNA, 22 bp, Artificial Sequence
  Synthetic oligonucleotide; TTT chr11 5309662 5309683 5309667 5309662 -
tttgtctttttagtagagacgg

SEQ ID NO: 129123 - DNA, 22 bp, Artificial Sequence
  Synthetic oligonucleotide; TTT chr11 5309661 5309682 5309666 5309661 -
ttgtctttttagtagagacggg

SEQ ID NO: 129124 - DNA, 22 bp, Artificial Sequence
  Synthetic oligonucleotide; TTT chr11 5309660 5309681 5309665 5309660 -
tgtctttttagtagagacgggg

SEQ ID NO: 129125 - DNA, 22 bp, Artificial Sequence
  Synthetic oligonucleotide; TTT chr11 5309659 5309680 5309664 5309659 -
gtctttttagtagagacggggt

SEQ ID NO: 129126 - DNA, 22 bp, Artificial Sequence
  Synthetic oligonucleotide; TTG chr11 5309658 5309679 5309663 5309658 -
tctttttagtagagacggggtt

SEQ ID NO: 129127 - DNA, 22 bp, Artificial Sequence
  Synthetic oligonucleotide; CTT chr11 5309654 5309675 5309659 5309654 -
tttagtagagacggggtttcac

SEQ ID NO: 129128 - DNA, 22 bp, Artificial Sequence
  Synthetic oligonucleotide; TTT chr11 5309653 5309674 5309658 5309653 -
ttagtagagacggggtttcact

SEQ ID NO: 129129 - DNA, 22 bp, Artificial Sequence
  Synthetic oligonucleotide; TTT chr11 5309652 5309673 5309657 5309652 -
tagtagagacggggtttcactg

SEQ ID NO: 129130 - DNA, 22 bp, Artificial Sequence
  Synthetic oligonucleotide; TTT chr11 5309651 5309672 5309656 5309651 -
agtagagacggggtttcactgt

SEQ ID NO: 129131 - DNA, 22 bp, Artificial Sequence
  Synthetic oligonucleotide; TTA chr11 5309650 5309671 5309655 5309650 -
gtagagacggggtttcactgtg

SEQ ID NO: 129132 - DNA, 22 bp, Artificial Sequence
  Synthetic oligonucleotide; TTT chr11 5309635 5309656 5309640 5309635 -
cactgtgttagccaggatggtc

SEQ ID NO: 129133 - DNA, 22 bp, Artificial Sequence
  Synthetic oligonucleotide; TTC chr11 5309634 5309655 5309639 5309634 -
actgtgttagccaggatggtct

SEQ ID NO: 129134 - DNA, 22 bp, Artificial Sequence
  Synthetic oligonucleotide; CTG chr11 5309630 5309651 5309635 5309630 -
tgttagccaggatggtctcgat

SEQ ID NO: 129135 - DNA, 22 bp, Artificial Sequence
  Synthetic oligonucleotide; TTA chr11 5309625 5309646 5309630 5309625 -
gccaggatggtctcgatctccc

SEQ ID NO: 129136 - DNA, 22 bp, Artificial Sequence
  Synthetic oligonucleotide; CTC chr11 5309611 5309632 5309616 5309611 -
gatctcccgacctcgtgatcca

SEQ ID NO: 129137 - DNA, 22 bp, Artificial Sequence
  Synthetic oligonucleotide; CTC chr11 5309605 5309626 5309610 5309605 -
ccgacctcgtgatccacccgcc

SEQ ID NO: 129138 - DNA, 22 bp, Artificial Sequence
  Synthetic oligonucleotide; CTC chr11 5309597 5309618 5309602 5309597 -
gtgatccacccgcctcggcctc

SEQ ID NO: 129139 - DNA, 22 bp, Artificial Sequence
  Synthetic oligonucleotide; CTC chr11 5309581 5309602 5309586 5309581 -
ggcctcccaaagtgctgggatt

SEQ ID NO: 129140 - DNA, 22 bp, Artificial Sequence
  Synthetic oligonucleotide; CTC chr11 5309575 5309596 5309580 5309575 -
ccaaagtgctgggattacaggc

SEQ ID NO: 129141 - DNA, 22 bp, Artificial Sequence
  Synthetic oligonucleotide; CTG chr11 5309564 5309585 5309569 5309564 -
ggattacaggcgtgagccaccg

SEQ ID NO: 129142 - DNA, 22 bp, Artificial Sequence
  Synthetic oligonucleotide; TTA chr11 5309558 5309579 5309563 5309558 -
caggcgtgagccaccgcgcccg

SEQ ID NO: 129143 - DNA, 22 bp, Artificial Sequence
  Synthetic oligonucleotide; CTG chr11 5309531 5309552 5309536 5309531 -
agtaaagttttatattgggaag

SEQ ID NO: 129144 - DNA, 22 bp, Artificial Sequence
  Synthetic oligonucleotide; TTT chr11 5309521 5309542 5309526 5309521 -
tatattgggaagacataaaaat

SEQ ID NO: 129145 - DNA, 22 bp, Artificial Sequence
  Synthetic oligonucleotide; TTT chr11 5309520 5309541 5309525 5309520 -
atattgggaagacataaaaatg

SEQ ID NO: 129146 - DNA, 22 bp, Artificial Sequence
  Synthetic oligonucleotide; TTA chr11 5309519 5309540 5309524 5309519 -
tattgggaagacataaaaatgt

SEQ ID NO: 129147 - DNA, 22 bp, Artificial Sequence
  Synthetic oligonucleotide; TTG chr11 5309514 5309535 5309519 5309514 -
ggaagacataaaaatgtggaga

SEQ ID NO: 129148 - DNA, 22 bp, Artificial Sequence
  Synthetic oligonucleotide; CTA chr11 5309474 5309495 5309479 5309474 -
tggaatgcttaaaaaaataggt

SEQ ID NO: 129149 - DNA, 22 bp, Artificial Sequence
  Synthetic oligonucleotide; CTT chr11 5309464 5309485 5309469 5309464 -
aaaaaaataggtgtaggcgcaa

SEQ ID NO: 129150 - DNA, 22 bp, Artificial Sequence
  Synthetic oligonucleotide; TTA chr11 5309463 5309484 5309468 5309463 -
aaaaaataggtgtaggcgcaag

SEQ ID NO: 129151 - DNA, 22 bp, Artificial Sequence
  Synthetic oligonucleotide; TTT chr11 5309438 5309459 5309443 5309438 -
tctgtatgtccttgtattaaaa

SEQ ID NO: 129152 - DNA, 22 bp, Artificial Sequence
  Synthetic oligonucleotide; TTT chr11 5309437 5309458 5309442 5309437 -
ctgtatgtccttgtattaaaac

SEQ ID NO: 129153 - DNA, 22 bp, Artificial Sequence
  Synthetic oligonucleotide; TTC chr11 5309436 5309457 5309441 5309436 -
tgtatgtccttgtattaaaact

SEQ ID NO: 129154 - DNA, 22 bp, Artificial Sequence
  Synthetic oligonucleotide; CTG chr11 5309434 5309455 5309439 5309434 -
tatgtccttgtattaaaacttt

SEQ ID NO: 129155 - DNA, 22 bp, Artificial Sequence
  Synthetic oligonucleotide; CTT chr11 5309425 5309446 5309430 5309425 -
gtattaaaactttttcatactg

SEQ ID NO: 129156 - DNA, 22 bp, Artificial Sequence
  Synthetic oligonucleotide; TTG chr11 5309424 5309445 5309429 5309424 -
tattaaaactttttcatactga

SEQ ID NO: 129157 - DNA, 22 bp, Artificial Sequence
  Synthetic oligonucleotide; TTA chr11 5309419 5309440 5309424 5309419 -
aaactttttcatactgaatcaa

SEQ ID NO: 129158 - DNA, 22 bp, Artificial Sequence
  Synthetic oligonucleotide; CTT chr11 5309413 5309434 5309418 5309413 -
tttcatactgaatcaattgtaa

SEQ ID NO: 129159 - DNA, 22 bp, Artificial Sequence
  Synthetic oligonucleotide; TTT chr11 5309412 5309433 5309417 5309412 -
ttcatactgaatcaattgtaaa

SEQ ID NO: 129160 - DNA, 22 bp, Artificial Sequence
  Synthetic oligonucleotide; TTT chr11 5309411 5309432 5309416 5309411 -
tcatactgaatcaattgtaaaa

SEQ ID NO: 129161 - DNA, 22 bp, Artificial Sequence
  Synthetic oligonucleotide; TTT chr11 5309410 5309431 5309415 5309410 -
catactgaatcaattgtaaaac

SEQ ID NO: 129162 - DNA, 22 bp, Artificial Sequence
  Synthetic oligonucleotide; TTC chr11 5309409 5309430 5309414 5309409 -
atactgaatcaattgtaaaacc

SEQ ID NO: 129163 - DNA, 22 bp, Artificial Sequence
  Synthetic oligonucleotide; CTG chr11 5309403 5309424 5309408 5309403 -
aatcaattgtaaaaccgattat

SEQ ID NO: 129164 - DNA, 22 bp, Artificial Sequence
  Synthetic oligonucleotide; TTG chr11 5309394 5309415 5309399 5309394 -
taaaaccgattatttacccaat

SEQ ID NO: 129165 - DNA, 22 bp, Artificial Sequence
  Synthetic oligonucleotide; TTA chr11 5309382 5309403 5309387 5309382 -
tttacccaatgcatgctgtaag

SEQ ID NO: 129166 - DNA, 22 bp, Artificial Sequence
  Synthetic oligonucleotide; TTT chr11 5309379 5309400 5309384 5309379 -
acccaatgcatgctgtaagcaa

SEQ ID NO: 129167 - DNA, 22 bp, Artificial Sequence
  Synthetic oligonucleotide; TTA chr11 5309378 5309399 5309383 5309378 -
cccaatgcatgctgtaagcaaa

SEQ ID NO: 129168 - DNA, 22 bp, Artificial Sequence
  Synthetic oligonucleotide; CTG chr11 5309364 5309385 5309369 5309364 -
taagcaaaattatatgctattg

SEQ ID NO: 129169 - DNA, 22 bp, Artificial Sequence
  Synthetic oligonucleotide; TTA chr11 5309352 5309373 5309357 5309352 -
tatgctattgagtacaatgttt

SEQ ID NO: 129170 - DNA, 22 bp, Artificial Sequence
  Synthetic oligonucleotide; CTA chr11 5309345 5309366 5309350 5309345 -
ttgagtacaatgtttaagctat

SEQ ID NO: 129171 - DNA, 22 bp, Artificial Sequence
  Synthetic oligonucleotide; TTG chr11 5309342 5309363 5309347 5309342 -
agtacaatgtttaagctattga

SEQ ID NO: 129172 - DNA, 22 bp, Artificial Sequence
  Synthetic oligonucleotide; TTT chr11 5309330 5309351 5309335 5309330 -
aagctattgatactgagtataa

SEQ ID NO: 129173 - DNA, 22 bp, Artificial Sequence
  Synthetic oligonucleotide; TTA chr11 5309329 5309350 5309334 5309329 -
agctattgatactgagtataaa

SEQ ID NO: 129174 - DNA, 22 bp, Artificial Sequence
  Synthetic oligonucleotide; CTA chr11 5309324 5309345 5309329 5309324 -
ttgatactgagtataaacacaa

SEQ ID NO: 129175 - DNA, 22 bp, Artificial Sequence
  Synthetic oligonucleotide; TTG chr11 5309321 5309342 5309326 5309321 -
atactgagtataaacacaaatc

SEQ ID NO: 129176 - DNA, 22 bp, Artificial Sequence
  Synthetic oligonucleotide; CTG chr11 5309315 5309336 5309320 5309315 -
agtataaacacaaatcttaaaa

SEQ ID NO: 129177 - DNA, 22 bp, Artificial Sequence
  Synthetic oligonucleotide; CTT chr11 5309297 5309318 5309302 5309297 -
aaaatctggttatcccccaaag

SEQ ID NO: 129178 - DNA, 22 bp, Artificial Sequence
  Synthetic oligonucleotide; TTA chr11 5309296 5309317 5309301 5309296 -
aaatctggttatcccccaaaga

SEQ ID NO: 129179 - DNA, 22 bp, Artificial Sequence
  Synthetic oligonucleotide; CTG chr11 5309289 5309310 5309294 5309289 -
gttatcccccaaagactcctct

SEQ ID NO: 129180 - DNA, 22 bp, Artificial Sequence
  Synthetic oligonucleotide; TTA chr11 5309285 5309306 5309290 5309285 -
tcccccaaagactcctctgttt

SEQ ID NO: 129181 - DNA, 22 bp, Artificial Sequence
  Synthetic oligonucleotide; CTC chr11 5309271 5309292 5309276 5309271 -
ctctgtttctcataatgtgccc

SEQ ID NO: 129182 - DNA, 22 bp, Artificial Sequence
  Synthetic oligonucleotide; CTC chr11 5309268 5309289 5309273 5309268 -
tgtttctcataatgtgcccagt

SEQ ID NO: 129183 - DNA, 22 bp, Artificial Sequence
  Synthetic oligonucleotide; CTG chr11 5309266 5309287 5309271 5309266 -
tttctcataatgtgcccagtaa

SEQ ID NO: 129184 - DNA, 22 bp, Artificial Sequence
  Synthetic oligonucleotide; TTT chr11 5309263 5309284 5309268 5309263 -
ctcataatgtgcccagtaagtt

SEQ ID NO: 129185 - DNA, 22 bp, Artificial Sequence
  Synthetic oligonucleotide; TTC chr11 5309262 5309283 5309267 5309262 -
tcataatgtgcccagtaagttc

SEQ ID NO: 129186 - DNA, 22 bp, Artificial Sequence
  Synthetic oligonucleotide; CTC chr11 5309260 5309281 5309265 5309260 -
ataatgtgcccagtaagttcct

SEQ ID NO: 129187 - DNA, 22 bp, Artificial Sequence
  Synthetic oligonucleotide; TTC chr11 5309240 5309261 5309245 5309240 -
ctaatgtttattagtgtgttgg

SEQ ID NO: 129188 - DNA, 22 bp, Artificial Sequence
  Synthetic oligonucleotide; CTA chr11 5309237 5309258 5309242 5309237 -
atgtttattagtgtgttggtag

SEQ ID NO: 129189 - DNA, 22 bp, Artificial Sequence
  Synthetic oligonucleotide; TTT chr11 5309231 5309252 5309236 5309231 -
attagtgtgttggtaggaaatt

SEQ ID NO: 129190 - DNA, 22 bp, Artificial Sequence
  Synthetic oligonucleotide; TTA chr11 5309230 5309251 5309235 5309230 -
ttagtgtgttggtaggaaattt

SEQ ID NO: 129191 - DNA, 22 bp, Artificial Sequence
  Synthetic oligonucleotide; TTA chr11 5309227 5309248 5309232 5309227 -
gtgtgttggtaggaaatttcaa

SEQ ID NO: 129192 - DNA, 22 bp, Artificial Sequence
  Synthetic oligonucleotide; TTG chr11 5309219 5309240 5309224 5309219 -
gtaggaaatttcaaccccgatc

SEQ ID NO: 129193 - DNA, 22 bp, Artificial Sequence
  Synthetic oligonucleotide; TTT chr11 5309208 5309229 5309213 5309208 -
caaccccgatcatttccatctt

SEQ ID NO: 129194 - DNA, 22 bp, Artificial Sequence
  Synthetic oligonucleotide; TTC chr11 5309207 5309228 5309212 5309207 -
aaccccgatcatttccatcttg

SEQ ID NO: 129195 - DNA, 22 bp, Artificial Sequence
  Synthetic oligonucleotide; TTT chr11 5309193 5309214 5309198 5309193 -
ccatcttgatttgctgacctgg

SEQ ID NO: 129196 - DNA, 22 bp, Artificial Sequence
  Synthetic oligonucleotide; TTC chr11 5309192 5309213 5309197 5309192 -
catcttgatttgctgacctggg

SEQ ID NO: 129197 - DNA, 22 bp, Artificial Sequence
  Synthetic oligonucleotide; CTT chr11 5309186 5309207 5309191 5309186 -
gatttgctgacctgggtgcagg

SEQ ID NO: 129198 - DNA, 22 bp, Artificial Sequence
  Synthetic oligonucleotide; TTG chr11 5309185 5309206 5309190 5309185 -
atttgctgacctgggtgcaggt

SEQ ID NO: 129199 - DNA, 22 bp, Artificial Sequence
  Synthetic oligonucleotide; TTT chr11 5309181 5309202 5309186 5309181 -
gctgacctgggtgcaggttctt

SEQ ID NO: 129200 - DNA, 22 bp, Artificial Sequence
  Synthetic oligonucleotide; TTG chr11 5309180 5309201 5309185 5309180 -
ctgacctgggtgcaggttctta

SEQ ID NO: 129201 - DNA, 22 bp, Artificial Sequence
  Synthetic oligonucleotide; CTG chr11 5309177 5309198 5309182 5309177 -
acctgggtgcaggttcttatga

SEQ ID NO: 129202 - DNA, 22 bp, Artificial Sequence
  Synthetic oligonucleotide; CTG chr11 5309172 5309193 5309177 5309172 -
ggtgcaggttcttatgacagag

SEQ ID NO: 129203 - DNA, 22 bp, Artificial Sequence
  Synthetic oligonucleotide; TTC chr11 5309161 5309182 5309166 5309161 -
ttatgacagaggaaagactgtc

SEQ ID NO: 129204 - DNA, 22 bp, Artificial Sequence
  Synthetic oligonucleotide; CTT chr11 5309159 5309180 5309164 5309159 -
atgacagaggaaagactgtctt

SEQ ID NO: 129205 - DNA, 22 bp, Artificial Sequence
  Synthetic oligonucleotide; TTA chr11 5309158 5309179 5309163 5309158 -
tgacagaggaaagactgtcttt

SEQ ID NO: 129206 - DNA, 22 bp, Artificial Sequence
  Synthetic oligonucleotide; CTG chr11 5309141 5309162 5309146 5309141 -
tctttgtaagttattttggaag

SEQ ID NO: 129207 - DNA, 22 bp, Artificial Sequence
  Synthetic oligonucleotide; CTT chr11 5309137 5309158 5309142 5309137 -
tgtaagttattttggaagaata

SEQ ID NO: 129208 - DNA, 22 bp, Artificial Sequence
  Synthetic oligonucleotide; TTT chr11 5309136 5309157 5309141 5309136 -
gtaagttattttggaagaatag

SEQ ID NO: 129209 - DNA, 22 bp, Artificial Sequence
  Synthetic oligonucleotide; TTG chr11 5309135 5309156 5309140 5309135 -
taagttattttggaagaataga

SEQ ID NO: 129210 - DNA, 22 bp, Artificial Sequence
  Synthetic oligonucleotide; TTA chr11 5309128 5309149 5309133 5309128 -
ttttggaagaatagaaactgtg

SEQ ID NO: 129211 - DNA, 22 bp, Artificial Sequence
  Synthetic oligonucleotide; TTT chr11 5309125 5309146 5309130 5309125 -
tggaagaatagaaactgtgaaa

SEQ ID NO: 129212 - DNA, 22 bp, Artificial Sequence
  Synthetic oligonucleotide; TTT chr11 5309124 5309145 5309129 5309124 -
ggaagaatagaaactgtgaaaa

SEQ ID NO: 129213 - DNA, 22 bp, Artificial Sequence
  Synthetic oligonucleotide; TTG chr11 5309123 5309144 5309128 5309123 -
gaagaatagaaactgtgaaaaa

SEQ ID NO: 129214 - DNA, 22 bp, Artificial Sequence
  Synthetic oligonucleotide; CTG chr11 5309108 5309129 5309113 5309108 -
tgaaaaatatatggcttctttg

SEQ ID NO: 129215 - DNA, 22 bp, Artificial Sequence
  Synthetic oligonucleotide; CTT chr11 5309091 5309112 5309096 5309091 -
ctttggtgctcatgaggtattt

SEQ ID NO: 129216 - DNA, 22 bp, Artificial Sequence
  Synthetic oligonucleotide; TTC chr11 5309090 5309111 5309095 5309090 -
tttggtgctcatgaggtatttt

SEQ ID NO: 129217 - DNA, 22 bp, Artificial Sequence
  Synthetic oligonucleotide; CTT chr11 5309088 5309109 5309093 5309088 -
tggtgctcatgaggtattttga

SEQ ID NO: 129218 - DNA, 22 bp, Artificial Sequence
  Synthetic oligonucleotide; TTT chr11 5309087 5309108 5309092 5309087 -
ggtgctcatgaggtattttgat

SEQ ID NO: 129219 - DNA, 22 bp, Artificial Sequence
  Synthetic oligonucleotide; TTG chr11 5309086 5309107 5309091 5309086 -
gtgctcatgaggtattttgata

SEQ ID NO: 129220 - DNA, 22 bp, Artificial Sequence
  Synthetic oligonucleotide; CTC chr11 5309080 5309101 5309085 5309080 -
atgaggtattttgatactgcat

SEQ ID NO: 129221 - DNA, 22 bp, Artificial Sequence
  Synthetic oligonucleotide; TTT chr11 5309069 5309090 5309074 5309069 -
tgatactgcatgctgctccaat

SEQ ID NO: 129222 - DNA, 22 bp, Artificial Sequence
  Synthetic oligonucleotide; TTT chr11 5309068 5309089 5309073 5309068 -
gatactgcatgctgctccaata

SEQ ID NO: 129223 - DNA, 22 bp, Artificial Sequence
  Synthetic oligonucleotide; TTG chr11 5309067 5309088 5309072 5309067 -
atactgcatgctgctccaatat

SEQ ID NO: 129224 - DNA, 22 bp, Artificial Sequence
  Synthetic oligonucleotide; CTG chr11 5309061 5309082 5309066 5309061 -
catgctgctccaatatctaaat

SEQ ID NO: 129225 - DNA, 22 bp, Artificial Sequence
  Synthetic oligonucleotide; CTG chr11 5309054 5309075 5309059 5309054 -
ctccaatatctaaattatacat

SEQ ID NO: 129226 - DNA, 22 bp, Artificial Sequence
  Synthetic oligonucleotide; CTC chr11 5309051 5309072 5309056 5309051 -
caatatctaaattatacatctg

SEQ ID NO: 129227 - DNA, 22 bp, Artificial Sequence
  Synthetic oligonucleotide; CTA chr11 5309042 5309063 5309047 5309042 -
aattatacatctgctcctcttt

SEQ ID NO: 129228 - DNA, 22 bp, Artificial Sequence
  Synthetic oligonucleotide; TTA chr11 5309037 5309058 5309042 5309037 -
tacatctgctcctcttttacag

SEQ ID NO: 129229 - DNA, 22 bp, Artificial Sequence
  Synthetic oligonucleotide; CTG chr11 5309029 5309050 5309034 5309029 -
ctcctcttttacagctttatct

SEQ ID NO: 129230 - DNA, 22 bp, Artificial Sequence
  Synthetic oligonucleotide; CTC chr11 5309026 5309047 5309031 5309026 -
ctcttttacagctttatcttag

SEQ ID NO: 129231 - DNA, 22 bp, Artificial Sequence
  Synthetic oligonucleotide; CTC chr11 5309023 5309044 5309028 5309023 -
ttttacagctttatcttaggtg

SEQ ID NO: 129232 - DNA, 22 bp, Artificial Sequence
  Synthetic oligonucleotide; CTT chr11 5309021 5309042 5309026 5309021 -
ttacagctttatcttaggtgga

SEQ ID NO: 129233 - DNA, 22 bp, Artificial Sequence
  Synthetic oligonucleotide; TTT chr11 5309020 5309041 5309025 5309020 -
tacagctttatcttaggtggaa

SEQ ID NO: 129234 - DNA, 22 bp, Artificial Sequence
  Synthetic oligonucleotide; TTT chr11 5309019 5309040 5309024 5309019 -
acagctttatcttaggtggaag

SEQ ID NO: 129235 - DNA, 22 bp, Artificial Sequence
  Synthetic oligonucleotide; TTA chr11 5309018 5309039 5309023 5309018 -
cagctttatcttaggtggaagg

SEQ ID NO: 129236 - DNA, 22 bp, Artificial Sequence
  Synthetic oligonucleotide; CTT chr11 5309012 5309033 5309017 5309012 -
tatcttaggtggaagggacttc

SEQ ID NO: 129237 - DNA, 22 bp, Artificial Sequence
  Synthetic oligonucleotide; TTT chr11 5309011 5309032 5309016 5309011 -
atcttaggtggaagggacttca

SEQ ID NO: 129238 - DNA, 22 bp, Artificial Sequence
  Synthetic oligonucleotide; TTA chr11 5309010 5309031 5309015 5309010 -
tcttaggtggaagggacttcag

SEQ ID NO: 129239 - DNA, 22 bp, Artificial Sequence
  Synthetic oligonucleotide; CTT chr11 5309006 5309027 5309011 5309006 -
aggtggaagggacttcagctaa

SEQ ID NO: 129240 - DNA, 22 bp, Artificial Sequence
  Synthetic oligonucleotide; TTA chr11 5309005 5309026 5309010 5309005 -
ggtggaagggacttcagctaag

SEQ ID NO: 129241 - DNA, 22 bp, Artificial Sequence
  Synthetic oligonucleotide; CTT chr11 5308991 5309012 5308996 5308991 -
cagctaagttggctaaggccct

SEQ ID NO: 129242 - DNA, 22 bp, Artificial Sequence
  Synthetic oligonucleotide; TTC chr11 5308990 5309011 5308995 5308990 -
agctaagttggctaaggccctt

SEQ ID NO: 129243 - DNA, 22 bp, Artificial Sequence
  Synthetic oligonucleotide; CTA chr11 5308985 5309006 5308990 5308985 -
agttggctaaggcccttcaaat

SEQ ID NO: 129244 - DNA, 22 bp, Artificial Sequence
  Synthetic oligonucleotide; TTG chr11 5308980 5309001 5308985 5308980 -
gctaaggcccttcaaattaaaa

SEQ ID NO: 129245 - DNA, 22 bp, Artificial Sequence
  Synthetic oligonucleotide; CTA chr11 5308976 5308997 5308981 5308976 -
aggcccttcaaattaaaactct

SEQ ID NO: 129246 - DNA, 22 bp, Artificial Sequence
  Synthetic oligonucleotide; CTT chr11 5308968 5308989 5308973 5308968 -
caaattaaaactctgttagttt

SEQ ID NO: 129247 - DNA, 22 bp, Artificial Sequence
  Synthetic oligonucleotide; TTC chr11 5308967 5308988 5308972 5308967 -
aaattaaaactctgttagtttt

SEQ ID NO: 129248 - DNA, 22 bp, Artificial Sequence
  Synthetic oligonucleotide; TTA chr11 5308961 5308982 5308966 5308961 -
aaactctgttagtttttctcat

SEQ ID NO: 129249 - DNA, 22 bp, Artificial Sequence
  Synthetic oligonucleotide; CTC chr11 5308955 5308976 5308960 5308955 -
tgttagtttttctcatgcttag

SEQ ID NO: 129250 - DNA, 22 bp, Artificial Sequence
  Synthetic oligonucleotide; CTG chr11 5308953 5308974 5308958 5308953 -
ttagtttttctcatgcttagtg

SEQ ID NO: 129251 - DNA, 22 bp, Artificial Sequence
  Synthetic oligonucleotide; TTA chr11 5308950 5308971 5308955 5308950 -
gtttttctcatgcttagtgaga

SEQ ID NO: 129252 - DNA, 22 bp, Artificial Sequence
  Synthetic oligonucleotide; TTT chr11 5308946 5308967 5308951 5308946 -
ttctcatgcttagtgagaaaga

SEQ ID NO: 129253 - DNA, 22 bp, Artificial Sequence
  Synthetic oligonucleotide; TTT chr11 5308945 5308966 5308950 5308945 -
tctcatgcttagtgagaaagat

SEQ ID NO: 129254 - DNA, 22 bp, Artificial Sequence
  Synthetic oligonucleotide; TTT chr11 5308944 5308965 5308949 5308944 -
ctcatgcttagtgagaaagatg

SEQ ID NO: 129255 - DNA, 22 bp, Artificial Sequence
  Synthetic oligonucleotide; TTC chr11 5308943 5308964 5308948 5308943 -
tcatgcttagtgagaaagatgc

SEQ ID NO: 129256 - DNA, 22 bp, Artificial Sequence
  Synthetic oligonucleotide; CTC chr11 5308941 5308962 5308946 5308941 -
atgcttagtgagaaagatgcca

SEQ ID NO: 129257 - DNA, 22 bp, Artificial Sequence
  Synthetic oligonucleotide; CTT chr11 5308935 5308956 5308940 5308935 -
agtgagaaagatgccaactttc

SEQ ID NO: 129258 - DNA, 22 bp, Artificial Sequence
  Synthetic oligonucleotide; TTA chr11 5308934 5308955 5308939 5308934 -
gtgagaaagatgccaactttct

SEQ ID NO: 129259 - DNA, 22 bp, Artificial Sequence
  Synthetic oligonucleotide; CTT chr11 5308915 5308936 5308920 5308915 -
tctgctatgaaacttcaagtta

SEQ ID NO: 129260 - DNA, 22 bp, Artificial Sequence
  Synthetic oligonucleotide; TTT chr11 5308914 5308935 5308919 5308914 -
ctgctatgaaacttcaagttat

SEQ ID NO: 129261 - DNA, 22 bp, Artificial Sequence
  Synthetic oligonucleotide; TTC chr11 5308913 5308934 5308918 5308913 -
tgctatgaaacttcaagttata

SEQ ID NO: 129262 - DNA, 22 bp, Artificial Sequence
  Synthetic oligonucleotide; CTG chr11 5308911 5308932 5308916 5308911 -
ctatgaaacttcaagttatagt

SEQ ID NO: 129263 - DNA, 22 bp, Artificial Sequence
  Synthetic oligonucleotide; CTA chr11 5308908 5308929 5308913 5308908 -
tgaaacttcaagttatagtttt

SEQ ID NO: 129264 - DNA, 22 bp, Artificial Sequence
  Synthetic oligonucleotide; CTT chr11 5308900 5308921 5308905 5308900 -
caagttatagttttttcaataa

SEQ ID NO: 129265 - DNA, 22 bp, Artificial Sequence
  Synthetic oligonucleotide; TTC chr11 5308899 5308920 5308904 5308899 -
aagttatagttttttcaataac

SEQ ID NO: 129266 - DNA, 22 bp, Artificial Sequence
  Synthetic oligonucleotide; TTA chr11 5308893 5308914 5308898 5308893 -
tagttttttcaataacctgcaa

SEQ ID NO: 129267 - DNA, 22 bp, Artificial Sequence
  Synthetic oligonucleotide; TTT chr11 5308887 5308908 5308892 5308887 -
tttcaataacctgcaatttacg

SEQ ID NO: 129268 - DNA, 22 bp, Artificial Sequence
  Synthetic oligonucleotide; TTT chr11 5308886 5308907 5308891 5308886 -
ttcaataacctgcaatttacgt

SEQ ID NO: 129269 - DNA, 22 bp, Artificial Sequence
  Synthetic oligonucleotide; TTT chr11 5308885 5308906 5308890 5308885 -
tcaataacctgcaatttacgtc

SEQ ID NO: 129270 - DNA, 22 bp, Artificial Sequence
  Synthetic oligonucleotide; TTT chr11 5308884 5308905 5308889 5308884 -
caataacctgcaatttacgtcc

SEQ ID NO: 129271 - DNA, 22 bp, Artificial Sequence
  Synthetic oligonucleotide; TTC chr11 5308883 5308904 5308888 5308883 -
aataacctgcaatttacgtcca

SEQ ID NO: 129272 - DNA, 22 bp, Artificial Sequence
  Synthetic oligonucleotide; CTG chr11 5308874 5308895 5308879 5308874 -
caatttacgtccaagaagaaag

SEQ ID NO: 129273 - DNA, 22 bp, Artificial Sequence
  Synthetic oligonucleotide; TTT chr11 5308868 5308889 5308873 5308868 -
acgtccaagaagaaaggaagat

SEQ ID NO: 129274 - DNA, 22 bp, Artificial Sequence
  Synthetic oligonucleotide; TTA chr11 5308867 5308888 5308872 5308867 -
cgtccaagaagaaaggaagatt

SEQ ID NO: 129275 - DNA, 22 bp, Artificial Sequence
  Synthetic oligonucleotide; TTC chr11 5308844 5308865 5308849 5308844 -
aatctatcttcagtgatgacca

SEQ ID NO: 129276 - DNA, 22 bp, Artificial Sequence
  Synthetic oligonucleotide; CTA chr11 5308838 5308859 5308843 5308838 -
tcttcagtgatgaccagcatca

SEQ ID NO: 129277 - DNA, 22 bp, Artificial Sequence
  Synthetic oligonucleotide; CTT chr11 5308834 5308855 5308839 5308834 -
cagtgatgaccagcatcactga

SEQ ID NO: 129278 - DNA, 22 bp, Artificial Sequence
  Synthetic oligonucleotide; TTC chr11 5308833 5308854 5308838 5308833 -
agtgatgaccagcatcactgaa

SEQ ID NO: 129279 - DNA, 22 bp, Artificial Sequence
  Synthetic oligonucleotide; CTG chr11 5308813 5308834 5308818 5308813 -
aacggttatctgggcctgttgt

SEQ ID NO: 129280 - DNA, 22 bp, Artificial Sequence
  Synthetic oligonucleotide; TTA chr11 5308805 5308826 5308810 5308805 -
tctgggcctgttgtggattgtg

SEQ ID NO: 129281 - DNA, 22 bp, Artificial Sequence
  Synthetic oligonucleotide; CTG chr11 5308801 5308822 5308806 5308801 -
ggcctgttgtggattgtgaata

SEQ ID NO: 129282 - DNA, 22 bp, Artificial Sequence
  Synthetic oligonucleotide; CTG chr11 5308795 5308816 5308800 5308795 -
ttgtggattgtgaatatgacaa

SEQ ID NO: 129283 - DNA, 22 bp, Artificial Sequence
  Synthetic oligonucleotide; TTG chr11 5308792 5308813 5308797 5308792 -
tggattgtgaatatgacaatat

SEQ ID NO: 129284 - DNA, 22 bp, Artificial Sequence
  Synthetic oligonucleotide; TTG chr11 5308785 5308806 5308790 5308785 -
tgaatatgacaatatttgaatc

SEQ ID NO: 129285 - DNA, 22 bp, Artificial Sequence
  Synthetic oligonucleotide; TTT chr11 5308768 5308789 5308773 5308768 -
gaatctctctgacgaggtataa

SEQ ID NO: 129286 - DNA, 22 bp, Artificial Sequence
  Synthetic oligonucleotide; TTG chr11 5308767 5308788 5308772 5308767 -
aatctctctgacgaggtataag

SEQ ID NO: 129287 - DNA, 22 bp, Artificial Sequence
  Synthetic oligonucleotide; CTC chr11 5308761 5308782 5308766 5308761 -
tctgacgaggtataagagaggg

SEQ ID NO: 129288 - DNA, 22 bp, Artificial Sequence
  Synthetic oligonucleotide; CTC chr11 5308759 5308780 5308764 5308759 -
tgacgaggtataagagagggac

SEQ ID NO: 129289 - DNA, 22 bp, Artificial Sequence
  Synthetic oligonucleotide; CTG chr11 5308757 5308778 5308762 5308757 -
acgaggtataagagagggacac

SEQ ID NO: 129290 - DNA, 22 bp, Artificial Sequence
  Synthetic oligonucleotide; CTC chr11 5308733 5308754 5308738 5308733 -
acttttgaatatgcagggctgt

SEQ ID NO: 129291 - DNA, 22 bp, Artificial Sequence
  Synthetic oligonucleotide; CTT chr11 5308729 5308750 5308734 5308729 -
ttgaatatgcagggctgtttcc

SEQ ID NO: 129292 - DNA, 22 bp, Artificial Sequence
  Synthetic oligonucleotide; TTT chr11 5308728 5308749 5308733 5308728 -
tgaatatgcagggctgtttcca

SEQ ID NO: 129293 - DNA, 22 bp, Artificial Sequence
  Synthetic oligonucleotide; TTT chr11 5308727 5308748 5308732 5308727 -
gaatatgcagggctgtttccat

SEQ ID NO: 129294 - DNA, 22 bp, Artificial Sequence
  Synthetic oligonucleotide; TTG chr11 5308726 5308747 5308731 5308726 -
aatatgcagggctgtttccatg

SEQ ID NO: 129295 - DNA, 22 bp, Artificial Sequence
  Synthetic oligonucleotide; CTG chr11 5308712 5308733 5308717 5308712 -
tttccatgatggaggaaagaga

SEQ ID NO: 129296 - DNA, 22 bp, Artificial Sequence
  Synthetic oligonucleotide; TTT chr11 5308709 5308730 5308714 5308709 -
ccatgatggaggaaagagattg

SEQ ID NO: 129297 - DNA, 22 bp, Artificial Sequence
  Synthetic oligonucleotide; TTC chr11 5308708 5308729 5308713 5308708 -
catgatggaggaaagagattgg

SEQ ID NO: 129298 - DNA, 22 bp, Artificial Sequence
  Synthetic oligonucleotide; TTG chr11 5308687 5308708 5308692 5308687 -
gaggaatgtagatttatgggtg

SEQ ID NO: 129299 - DNA, 22 bp, Artificial Sequence
  Synthetic oligonucleotide; TTT chr11 5308672 5308693 5308677 5308672 -
atgggtgaagttgtttggcttg

SEQ ID NO: 129300 - DNA, 22 bp, Artificial Sequence
  Synthetic oligonucleotide; TTA chr11 5308671 5308692 5308676 5308671 -
tgggtgaagttgtttggcttgg

SEQ ID NO: 129301 - DNA, 22 bp, Artificial Sequence
  Synthetic oligonucleotide; TTG chr11 5308659 5308680 5308664 5308659 -
tttggcttggaagttggatggt

SEQ ID NO: 129302 - DNA, 22 bp, Artificial Sequence
  Synthetic oligonucleotide; TTT chr11 5308656 5308677 5308661 5308656 -
ggcttggaagttggatggtcag

SEQ ID NO: 129303 - DNA, 22 bp, Artificial Sequence
  Synthetic oligonucleotide; TTG chr11 5308655 5308676 5308660 5308655 -
gcttggaagttggatggtcagt

SEQ ID NO: 129304 - DNA, 22 bp, Artificial Sequence
  Synthetic oligonucleotide; CTT chr11 5308651 5308672 5308656 5308651 -
ggaagttggatggtcagttcca

SEQ ID NO: 129305 - DNA, 22 bp, Artificial Sequence
  Synthetic oligonucleotide; TTG chr11 5308650 5308671 5308655 5308650 -
gaagttggatggtcagttccag

SEQ ID NO: 129306 - DNA, 22 bp, Artificial Sequence
  Synthetic oligonucleotide; TTG chr11 5308643 5308664 5308648 5308643 -
gatggtcagttccaggtgctac

SEQ ID NO: 129307 - DNA, 22 bp, Artificial Sequence
  Synthetic oligonucleotide; TTC chr11 5308631 5308652 5308636 5308631 -
caggtgctaccattggtgctga

SEQ ID NO: 129308 - DNA, 22 bp, Artificial Sequence
  Synthetic oligonucleotide; CTA chr11 5308622 5308643 5308627 5308622 -
ccattggtgctgaaggagaacg

SEQ ID NO: 129309 - DNA, 22 bp, Artificial Sequence
  Synthetic oligonucleotide; TTG chr11 5308616 5308637 5308621 5308616 -
gtgctgaaggagaacgtttcca

SEQ ID NO: 129310 - DNA, 22 bp, Artificial Sequence
  Synthetic oligonucleotide; CTG chr11 5308610 5308631 5308615 5308610 -
aaggagaacgtttccaaaatgt

SEQ ID NO: 129311 - DNA, 22 bp, Artificial Sequence
  Synthetic oligonucleotide; TTT chr11 5308597 5308618 5308602 5308597 -
ccaaaatgtctttggggaaata

SEQ ID NO: 129312 - DNA, 22 bp, Artificial Sequence
  Synthetic oligonucleotide; TTC chr11 5308596 5308617 5308601 5308596 -
caaaatgtctttggggaaatac

SEQ ID NO: 129313 - DNA, 22 bp, Artificial Sequence
  Synthetic oligonucleotide; CTT chr11 5308585 5308606 5308590 5308585 -
tggggaaatacaatttcctatc

SEQ ID NO: 129314 - DNA, 22 bp, Artificial Sequence
  Synthetic oligonucleotide; TTT chr11 5308584 5308605 5308589 5308584 -
ggggaaatacaatttcctatcg

SEQ ID NO: 129315 - DNA, 22 bp, Artificial Sequence
  Synthetic oligonucleotide; TTG chr11 5308583 5308604 5308588 5308583 -
gggaaatacaatttcctatcgt

SEQ ID NO: 129316 - DNA, 22 bp, Artificial Sequence
  Synthetic oligonucleotide; TTT chr11 5308569 5308590 5308574 5308569 -
cctatcgttttgtttagttgac

SEQ ID NO: 129317 - DNA, 22 bp, Artificial Sequence
  Synthetic oligonucleotide; TTC chr11 5308568 5308589 5308573 5308568 -
ctatcgttttgtttagttgaca

SEQ ID NO: 129318 - DNA, 22 bp, Artificial Sequence
  Synthetic oligonucleotide; CTA chr11 5308565 5308586 5308570 5308565 -
tcgttttgtttagttgacacaa

SEQ ID NO: 129319 - DNA, 22 bp, Artificial Sequence
  Synthetic oligonucleotide; TTT chr11 5308559 5308580 5308564 5308559 -
tgtttagttgacacaaaatctt

SEQ ID NO: 129320 - DNA, 22 bp, Artificial Sequence
  Synthetic oligonucleotide; TTT chr11 5308558 5308579 5308563 5308558 -
gtttagttgacacaaaatctta

SEQ ID NO: 129321 - DNA, 22 bp, Artificial Sequence
  Synthetic oligonucleotide; TTG chr11 5308557 5308578 5308562 5308557 -
tttagttgacacaaaatcttac

SEQ ID NO: 129322 - DNA, 22 bp, Artificial Sequence
  Synthetic oligonucleotide; TTT chr11 5308554 5308575 5308559 5308554 -
agttgacacaaaatcttactca

SEQ ID NO: 129323 - DNA, 22 bp, Artificial Sequence
  Synthetic oligonucleotide; TTA chr11 5308553 5308574 5308558 5308553 -
gttgacacaaaatcttactcag

SEQ ID NO: 129324 - DNA, 22 bp, Artificial Sequence
  Synthetic oligonucleotide; TTG chr11 5308549 5308570 5308554 5308549 -
acacaaaatcttactcagcagg

SEQ ID NO: 129325 - DNA, 22 bp, Artificial Sequence
  Synthetic oligonucleotide; CTT chr11 5308537 5308558 5308542 5308537 -
actcagcaggggcccaaagtgc

SEQ ID NO: 129326 - DNA, 22 bp, Artificial Sequence
  Synthetic oligonucleotide; TTA chr11 5308536 5308557 5308541 5308536 -
ctcagcaggggcccaaagtgca

SEQ ID NO: 129327 - DNA, 22 bp, Artificial Sequence
  Synthetic oligonucleotide; CTC chr11 5308533 5308554 5308538 5308533 -
agcaggggcccaaagtgcaatt

SEQ ID NO: 129328 - DNA, 22 bp, Artificial Sequence
  Synthetic oligonucleotide; TTG chr11 5308510 5308531 5308515 5308510 -
gtctatattatcaactcctcta

SEQ ID NO: 129329 - DNA, 22 bp, Artificial Sequence
  Synthetic oligonucleotide; CTA chr11 5308505 5308526 5308510 5308505 -
tattatcaactcctctatacat

SEQ ID NO: 129330 - DNA, 22 bp, Artificial Sequence
  Synthetic oligonucleotide; TTA chr11 5308500 5308521 5308505 5308500 -
tcaactcctctatacatattta

SEQ ID NO: 129331 - DNA, 22 bp, Artificial Sequence
  Synthetic oligonucleotide; CTC chr11 5308493 5308514 5308498 5308493 -
ctctatacatatttagacactt

SEQ ID NO: 129332 - DNA, 22 bp, Artificial Sequence
  Synthetic oligonucleotide; CTC chr11 5308490 5308511 5308495 5308490 -
tatacatatttagacacttcgc

SEQ ID NO: 129333 - DNA, 22 bp, Artificial Sequence
  Synthetic oligonucleotide; CTA chr11 5308488 5308509 5308493 5308488 -
tacatatttagacacttcgcag

SEQ ID NO: 129334 - DNA, 22 bp, Artificial Sequence
  Synthetic oligonucleotide; TTT chr11 5308479 5308500 5308484 5308479 -
agacacttcgcaggtatcaagt

SEQ ID NO: 129335 - DNA, 22 bp, Artificial Sequence
  Synthetic oligonucleotide; TTA chr11 5308478 5308499 5308483 5308478 -
gacacttcgcaggtatcaagtc

SEQ ID NO: 129336 - DNA, 22 bp, Artificial Sequence
  Synthetic oligonucleotide; CTT chr11 5308471 5308492 5308476 5308471 -
cgcaggtatcaagtcattacca

SEQ ID NO: 129337 - DNA, 22 bp, Artificial Sequence
  Synthetic oligonucleotide; TTC chr11 5308470 5308491 5308475 5308470 -
gcaggtatcaagtcattaccag

SEQ ID NO: 129338 - DNA, 22 bp, Artificial Sequence
  Synthetic oligonucleotide; TTA chr11 5308452 5308473 5308457 5308452 -
ccaggagcaccagcttagttgt

SEQ ID NO: 129339 - DNA, 22 bp, Artificial Sequence
  Synthetic oligonucleotide; CTT chr11 5308436 5308457 5308441 5308436 -
agttgtttcatcttctacaacc

SEQ ID NO: 129340 - DNA, 22 bp, Artificial Sequence
  Synthetic oligonucleotide; TTA chr11 5308435 5308456 5308440 5308435 -
gttgtttcatcttctacaacct

SEQ ID NO: 129341 - DNA, 22 bp, Artificial Sequence
  Synthetic oligonucleotide; TTG chr11 5308431 5308452 5308436 5308431 -
tttcatcttctacaacctcatt

SEQ ID NO: 129342 - DNA, 22 bp, Artificial Sequence
  Synthetic oligonucleotide; TTT chr11 5308428 5308449 5308433 5308428 -
catcttctacaacctcattaga

SEQ ID NO: 129343 - DNA, 22 bp, Artificial Sequence
  Synthetic oligonucleotide; TTC chr11 5308427 5308448 5308432 5308427 -
atcttctacaacctcattagat

SEQ ID NO: 129344 - DNA, 22 bp, Artificial Sequence
  Synthetic oligonucleotide; CTT chr11 5308422 5308443 5308427 5308422 -
ctacaacctcattagattgact

SEQ ID NO: 129345 - DNA, 22 bp, Artificial Sequence
  Synthetic oligonucleotide; TTC chr11 5308421 5308442 5308426 5308421 -
tacaacctcattagattgactg

SEQ ID NO: 129346 - DNA, 22 bp, Artificial Sequence
  Synthetic oligonucleotide; CTA chr11 5308419 5308440 5308424 5308419 -
caacctcattagattgactgac

SEQ ID NO: 129347 - DNA, 22 bp, Artificial Sequence
  Synthetic oligonucleotide; CTC chr11 5308412 5308433 5308417 5308412 -
attagattgactgactgtaact

SEQ ID NO: 129348 - DNA, 22 bp, Artificial Sequence
  Synthetic oligonucleotide; TTA chr11 5308408 5308429 5308413 5308408 -
gattgactgactgtaacttctt

SEQ ID NO: 129349 - DNA, 22 bp, Artificial Sequence
  Synthetic oligonucleotide; TTG chr11 5308403 5308424 5308408 5308403 -
actgactgtaacttctttcaac

SEQ ID NO: 129350 - DNA, 22 bp, Artificial Sequence
  Synthetic oligonucleotide; CTG chr11 5308399 5308420 5308404 5308399 -
actgtaacttctttcaacgtaa

SEQ ID NO: 129351 - DNA, 22 bp, Artificial Sequence
  Synthetic oligonucleotide; CTG chr11 5308395 5308416 5308400 5308395 -
taacttctttcaacgtaatctc

SEQ ID NO: 129352 - DNA, 22 bp, Artificial Sequence
  Synthetic oligonucleotide; CTT chr11 5308389 5308410 5308394 5308389 -
ctttcaacgtaatctccagaaa

SEQ ID NO: 129353 - DNA, 22 bp, Artificial Sequence
  Synthetic oligonucleotide; TTC chr11 5308388 5308409 5308393 5308388 -
tttcaacgtaatctccagaaaa

SEQ ID NO: 129354 - DNA, 22 bp, Artificial Sequence
  Synthetic oligonucleotide; CTT chr11 5308386 5308407 5308391 5308386 -
tcaacgtaatctccagaaaaca

SEQ ID NO: 129355 - DNA, 22 bp, Artificial Sequence
  Synthetic oligonucleotide; TTT chr11 5308385 5308406 5308390 5308385 -
caacgtaatctccagaaaacaa

SEQ ID NO: 129356 - DNA, 22 bp, Artificial Sequence
  Synthetic oligonucleotide; TTC chr11 5308384 5308405 5308389 5308384 -
aacgtaatctccagaaaacaag

SEQ ID NO: 129357 - DNA, 22 bp, Artificial Sequence
  Synthetic oligonucleotide; CTC chr11 5308373 5308394 5308378 5308373 -
cagaaaacaagttttactgcat

SEQ ID NO: 129358 - DNA, 22 bp, Artificial Sequence
  Synthetic oligonucleotide; TTT chr11 5308359 5308380 5308364 5308359 -
tactgcataccttcaaccttaa

SEQ ID NO: 129359 - DNA, 22 bp, Artificial Sequence
  Synthetic oligonucleotide; TTT chr11 5308358 5308379 5308363 5308358 -
actgcataccttcaaccttaaa

SEQ ID NO: 129360 - DNA, 22 bp, Artificial Sequence
  Synthetic oligonucleotide; TTA chr11 5308357 5308378 5308362 5308357 -
ctgcataccttcaaccttaaaa

SEQ ID NO: 129361 - DNA, 22 bp, Artificial Sequence
  Synthetic oligonucleotide; CTG chr11 5308354 5308375 5308359 5308354 -
cataccttcaaccttaaaatgt

SEQ ID NO: 129362 - DNA, 22 bp, Artificial Sequence
  Synthetic oligonucleotide; CTT chr11 5308346 5308367 5308351 5308346 -
caaccttaaaatgtctcctttc

SEQ ID NO: 129363 - DNA, 22 bp, Artificial Sequence
  Synthetic oligonucleotide; TTC chr11 5308345 5308366 5308350 5308345 -
aaccttaaaatgtctcctttca

SEQ ID NO: 129364 - DNA, 22 bp, Artificial Sequence
  Synthetic oligonucleotide; CTT chr11 5308339 5308360 5308344 5308339 -
aaaatgtctcctttcagccttg

SEQ ID NO: 129365 - DNA, 22 bp, Artificial Sequence
  Synthetic oligonucleotide; TTA chr11 5308338 5308359 5308343 5308338 -
aaatgtctcctttcagccttgt

SEQ ID NO: 129366 - DNA, 22 bp, Artificial Sequence
  Synthetic oligonucleotide; CTC chr11 5308329 5308350 5308334 5308329 -
ctttcagccttgtccctgtact

SEQ ID NO: 129367 - DNA, 22 bp, Artificial Sequence
  Synthetic oligonucleotide; CTT chr11 5308326 5308347 5308331 5308326 -
tcagccttgtccctgtactatt

SEQ ID NO: 129368 - DNA, 22 bp, Artificial Sequence
  Synthetic oligonucleotide; TTT chr11 5308325 5308346 5308330 5308325 -
cagccttgtccctgtactatta

SEQ ID NO: 129369 - DNA, 22 bp, Artificial Sequence
  Synthetic oligonucleotide; TTC chr11 5308324 5308345 5308329 5308324 -
agccttgtccctgtactattag

SEQ ID NO: 129370 - DNA, 22 bp, Artificial Sequence
  Synthetic oligonucleotide; CTT chr11 5308318 5308339 5308323 5308318 -
gtccctgtactattagtcctat

SEQ ID NO: 129371 - DNA, 22 bp, Artificial Sequence
  Synthetic oligonucleotide; TTG chr11 5308317 5308338 5308322 5308317 -
tccctgtactattagtcctatt

SEQ ID NO: 129372 - DNA, 22 bp, Artificial Sequence
  Synthetic oligonucleotide; CTG chr11 5308311 5308332 5308316 5308311 -
tactattagtcctatttgcctt

SEQ ID NO: 129373 - DNA, 22 bp, Artificial Sequence
  Synthetic oligonucleotide; CTA chr11 5308306 5308327 5308311 5308306 -
ttagtcctatttgccttgcata

SEQ ID NO: 129374 - DNA, 22 bp, Artificial Sequence
  Synthetic oligonucleotide; TTA chr11 5308303 5308324 5308308 5308303 -
gtcctatttgccttgcatagat

SEQ ID NO: 129375 - DNA, 22 bp, Artificial Sequence
  Synthetic oligonucleotide; CTA chr11 5308297 5308318 5308302 5308297 -
tttgccttgcatagatgtgaga

SEQ ID NO: 129376 - DNA, 22 bp, Artificial Sequence
  Synthetic oligonucleotide; TTT chr11 5308294 5308315 5308299 5308294 -
gccttgcatagatgtgagatgg

SEQ ID NO: 129377 - DNA, 22 bp, Artificial Sequence
  Synthetic oligonucleotide; TTG chr11 5308293 5308314 5308298 5308293 -
ccttgcatagatgtgagatggt

SEQ ID NO: 129378 - DNA, 22 bp, Artificial Sequence
  Synthetic oligonucleotide; CTT chr11 5308289 5308310 5308294 5308289 -
gcatagatgtgagatggtacac

SEQ ID NO: 129379 - DNA, 22 bp, Artificial Sequence
  Synthetic oligonucleotide; TTG chr11 5308288 5308309 5308293 5308288 -
catagatgtgagatggtacaca

SEQ ID NO: 129380 - DNA, 22 bp, Artificial Sequence
  Synthetic oligonucleotide; TTT chr11 5308259 5308280 5308264 5308259 -
cacttataattttctttctctt

SEQ ID NO: 129381 - DNA, 22 bp, Artificial Sequence
  Synthetic oligonucleotide; TTC chr11 5308258 5308279 5308263 5308258 -
acttataattttctttctcttc

SEQ ID NO: 129382 - DNA, 22 bp, Artificial Sequence
  Synthetic oligonucleotide; CTT chr11 5308254 5308275 5308259 5308254 -
ataattttctttctcttcctat

SEQ ID NO: 129383 - DNA, 22 bp, Artificial Sequence
  Synthetic oligonucleotide; TTA chr11 5308253 5308274 5308258 5308253 -
taattttctttctcttcctata

SEQ ID NO: 129384 - DNA, 22 bp, Artificial Sequence
  Synthetic oligonucleotide; TTT chr11 5308247 5308268 5308252 5308247 -
tctttctcttcctatatggtaa

SEQ ID NO: 129385 - DNA, 22 bp, Artificial Sequence
  Synthetic oligonucleotide; TTT chr11 5308246 5308267 5308251 5308246 -
ctttctcttcctatatggtaac

SEQ ID NO: 129386 - DNA, 22 bp, Artificial Sequence
  Synthetic oligonucleotide; TTC chr11 5308245 5308266 5308250 5308245 -
tttctcttcctatatggtaaca

SEQ ID NO: 129387 - DNA, 22 bp, Artificial Sequence
  Synthetic oligonucleotide; CTT chr11 5308243 5308264 5308248 5308243 -
tctcttcctatatggtaacata

SEQ ID NO: 129388 - DNA, 22 bp, Artificial Sequence
  Synthetic oligonucleotide; TTT chr11 5308242 5308263 5308247 5308242 -
ctcttcctatatggtaacataa

SEQ ID NO: 129389 - DNA, 22 bp, Artificial Sequence
  Synthetic oligonucleotide; TTC chr11 5308241 5308262 5308246 5308241 -
tcttcctatatggtaacataac

SEQ ID NO: 129390 - DNA, 22 bp, Artificial Sequence
  Synthetic oligonucleotide; CTC chr11 5308239 5308260 5308244 5308239 -
ttcctatatggtaacataactg

SEQ ID NO: 129391 - DNA, 22 bp, Artificial Sequence
  Synthetic oligonucleotide; CTT chr11 5308237 5308258 5308242 5308237 -
cctatatggtaacataactgat

SEQ ID NO: 129392 - DNA, 22 bp, Artificial Sequence
  Synthetic oligonucleotide; TTC chr11 5308236 5308257 5308241 5308236 -
ctatatggtaacataactgata

SEQ ID NO: 129393 - DNA, 22 bp, Artificial Sequence
  Synthetic oligonucleotide; CTA chr11 5308233 5308254 5308238 5308233 -
tatggtaacataactgataaga

SEQ ID NO: 129394 - DNA, 22 bp, Artificial Sequence
  Synthetic oligonucleotide; CTG chr11 5308217 5308238 5308222 5308217 -
ataagacacaaagaagataaaa

SEQ ID NO: 129395 - DNA, 22 bp, Artificial Sequence
  Synthetic oligonucleotide; CTG chr11 5308178 5308199 5308183 5308178 -
atatattattgttggggtacag

SEQ ID NO: 129396 - DNA, 22 bp, Artificial Sequence
  Synthetic oligonucleotide; TTA chr11 5308170 5308191 5308175 5308170 -
ttgttggggtacagttctttat

SEQ ID NO: 129397 - DNA, 22 bp, Artificial Sequence
  Synthetic oligonucleotide; TTG chr11 5308167 5308188 5308172 5308167 -
ttggggtacagttctttattga

SEQ ID NO: 129398 - DNA, 22 bp, Artificial Sequence
  Synthetic oligonucleotide; TTG chr11 5308164 5308185 5308169 5308164 -
gggtacagttctttattgagaa

SEQ ID NO: 129399 - DNA, 22 bp, Artificial Sequence
  Synthetic oligonucleotide; TTC chr11 5308153 5308174 5308158 5308153 -
tttattgagaataagagtttct

SEQ ID NO: 129400 - DNA, 22 bp, Artificial Sequence
  Synthetic oligonucleotide; CTT chr11 5308151 5308172 5308156 5308151 -
tattgagaataagagtttcttt

SEQ ID NO: 129401 - DNA, 22 bp, Artificial Sequence
  Synthetic oligonucleotide; TTT chr11 5308150 5308171 5308155 5308150 -
attgagaataagagtttctttt

SEQ ID NO: 129402 - DNA, 22 bp, Artificial Sequence
  Synthetic oligonucleotide; TTA chr11 5308149 5308170 5308154 5308149 -
ttgagaataagagtttcttttc

SEQ ID NO: 129403 - DNA, 22 bp, Artificial Sequence
  Synthetic oligonucleotide; TTG chr11 5308146 5308167 5308151 5308146 -
agaataagagtttcttttcatg

SEQ ID NO: 129404 - DNA, 22 bp, Artificial Sequence
  Synthetic oligonucleotide; TTT chr11 5308133 5308154 5308138 5308133 -
cttttcatgtattggtctagct

SEQ ID NO: 129405 - DNA, 22 bp, Artificial Sequence
  Synthetic oligonucleotide; TTC chr11 5308132 5308153 5308137 5308132 -
ttttcatgtattggtctagcta

SEQ ID NO: 129406 - DNA, 22 bp, Artificial Sequence
  Synthetic oligonucleotide; CTT chr11 5308130 5308151 5308135 5308130 -
ttcatgtattggtctagctatt

SEQ ID NO: 129407 - DNA, 22 bp, Artificial Sequence
  Synthetic oligonucleotide; TTT chr11 5308129 5308150 5308134 5308129 -
tcatgtattggtctagctattt

SEQ ID NO: 129408 - DNA, 22 bp, Artificial Sequence
  Synthetic oligonucleotide; TTT chr11 5308128 5308149 5308133 5308128 -
catgtattggtctagctattta

SEQ ID NO: 129409 - DNA, 22 bp, Artificial Sequence
  Synthetic oligonucleotide; TTC chr11 5308127 5308148 5308132 5308127 -
atgtattggtctagctatttag

SEQ ID NO: 129410 - DNA, 22 bp, Artificial Sequence
  Synthetic oligonucleotide; TTG chr11 5308119 5308140 5308124 5308119 -
gtctagctatttagtagtatag

SEQ ID NO: 129411 - DNA, 22 bp, Artificial Sequence
  Synthetic oligonucleotide; CTA chr11 5308114 5308135 5308119 5308114 -
gctatttagtagtatagataga

SEQ ID NO: 129412 - DNA, 22 bp, Artificial Sequence
  Synthetic oligonucleotide; CTA chr11 5308110 5308131 5308115 5308110 -
tttagtagtatagatagatcac

SEQ ID NO: 129413 - DNA, 22 bp, Artificial Sequence
  Synthetic oligonucleotide; TTT chr11 5308107 5308128 5308112 5308107 -
agtagtatagatagatcacagg

SEQ ID NO: 129414 - DNA, 22 bp, Artificial Sequence
  Synthetic oligonucleotide; TTA chr11 5308106 5308127 5308111 5308106 -
gtagtatagatagatcacagga

SEQ ID NO: 129415 - DNA, 22 bp, Artificial Sequence
  Synthetic oligonucleotide; TTG chr11 5308079 5308100 5308084 5308079 -
tagacttggtgtatttagacat

SEQ ID NO: 129416 - DNA, 22 bp, Artificial Sequence
  Synthetic oligonucleotide; CTT chr11 5308072 5308093 5308077 5308072 -
ggtgtatttagacatcaacaaa

SEQ ID NO: 129417 - DNA, 22 bp, Artificial Sequence
  Synthetic oligonucleotide; TTG chr11 5308071 5308092 5308076 5308071 -
gtgtatttagacatcaacaaaa

SEQ ID NO: 129418 - DNA, 22 bp, Artificial Sequence
  Synthetic oligonucleotide; TTT chr11 5308063 5308084 5308068 5308063 -
agacatcaacaaaaacattttc

SEQ ID NO: 129419 - DNA, 22 bp, Artificial Sequence
  Synthetic oligonucleotide; TTA chr11 5308062 5308083 5308067 5308062 -
gacatcaacaaaaacattttca

SEQ ID NO: 129420 - DNA, 22 bp, Artificial Sequence
  Synthetic oligonucleotide; TTT chr11 5308043 5308064 5308048 5308043 -
tcaaagtagtcttttcattgga

SEQ ID NO: 129421 - DNA, 22 bp, Artificial Sequence
  Synthetic oligonucleotide; TTT chr11 5308042 5308063 5308047 5308042 -
caaagtagtcttttcattggaa

SEQ ID NO: 129422 - DNA, 22 bp, Artificial Sequence
  Synthetic oligonucleotide; TTC chr11 5308041 5308062 5308046 5308041 -
aaagtagtcttttcattggaat

SEQ ID NO: 129423 - DNA, 22 bp, Artificial Sequence
  Synthetic oligonucleotide; CTT chr11 5308030 5308051 5308035 5308030 -
ttcattggaatgggagaatata

SEQ ID NO: 129424 - DNA, 22 bp, Artificial Sequence
  Synthetic oligonucleotide; TTT chr11 5308029 5308050 5308034 5308029 -
tcattggaatgggagaatataa

SEQ ID NO: 129425 - DNA, 22 bp, Artificial Sequence
  Synthetic oligonucleotide; TTT chr11 5308028 5308049 5308033 5308028 -
cattggaatgggagaatataag

SEQ ID NO: 129426 - DNA, 22 bp, Artificial Sequence
  Synthetic oligonucleotide; TTC chr11 5308027 5308048 5308032 5308027 -
attggaatgggagaatataagt

SEQ ID NO: 129427 - DNA, 22 bp, Artificial Sequence
  Synthetic oligonucleotide; TTG chr11 5308023 5308044 5308028 5308023 -
gaatgggagaatataagttcca

SEQ ID NO: 129428 - DNA, 22 bp, Artificial Sequence
  Synthetic oligonucleotide; TTC chr11 5308003 5308024 5308008 5308003 -
cataagtggttaaaacatctta

SEQ ID NO: 129429 - DNA, 22 bp, Artificial Sequence
  Synthetic oligonucleotide; TTA chr11 5307991 5308012 5307996 5307991 -
aaacatcttaccttgagactca

SEQ ID NO: 129430 - DNA, 22 bp, Artificial Sequence
  Synthetic oligonucleotide; CTT chr11 5307982 5308003 5307987 5307982 -
accttgagactcacttgcagcc

SEQ ID NO: 129431 - DNA, 22 bp, Artificial Sequence
  Synthetic oligonucleotide; TTA chr11 5307981 5308002 5307986 5307981 -
ccttgagactcacttgcagcca

SEQ ID NO: 129432 - DNA, 22 bp, Artificial Sequence
  Synthetic oligonucleotide; CTT chr11 5307977 5307998 5307982 5307977 -
gagactcacttgcagccaaagt

SEQ ID NO: 129433 - DNA, 22 bp, Artificial Sequence
  Synthetic oligonucleotide; TTG chr11 5307976 5307997 5307981 5307976 -
agactcacttgcagccaaagta

SEQ ID NO: 129434 - DNA, 22 bp, Artificial Sequence
  Synthetic oligonucleotide; CTC chr11 5307970 5307991 5307975 5307970 -
acttgcagccaaagtactaaga

SEQ ID NO: 129435 - DNA, 22 bp, Artificial Sequence
  Synthetic oligonucleotide; CTT chr11 5307966 5307987 5307971 5307966 -
gcagccaaagtactaagaagga

SEQ ID NO: 129436 - DNA, 22 bp, Artificial Sequence
  Synthetic oligonucleotide; TTG chr11 5307965 5307986 5307970 5307965 -
cagccaaagtactaagaaggaa

SEQ ID NO: 129437 - DNA, 22 bp, Artificial Sequence
  Synthetic oligonucleotide; CTA chr11 5307951 5307972 5307956 5307951 -
agaaggaaaaaaacacataaat

SEQ ID NO: 129438 - DNA, 22 bp, Artificial Sequence
  Synthetic oligonucleotide; CTC chr11 5307924 5307945 5307929 5307924 -
ttctcatgtggtcacagctatt

SEQ ID NO: 129439 - DNA, 22 bp, Artificial Sequence
  Synthetic oligonucleotide; CTT chr11 5307922 5307943 5307927 5307922 -
ctcatgtggtcacagctatttg

SEQ ID NO: 129440 - DNA, 22 bp, Artificial Sequence
  Synthetic oligonucleotide; TTC chr11 5307921 5307942 5307926 5307921 -
tcatgtggtcacagctatttgg

SEQ ID NO: 129441 - DNA, 22 bp, Artificial Sequence
  Synthetic oligonucleotide; CTC chr11 5307919 5307940 5307924 5307919 -
atgtggtcacagctatttggga

SEQ ID NO: 129442 - DNA, 22 bp, Artificial Sequence
  Synthetic oligonucleotide; CTA chr11 5307904 5307925 5307909 5307904 -
tttgggaggctgaggtgtaaaa

SEQ ID NO: 129443 - DNA, 22 bp, Artificial Sequence
  Synthetic oligonucleotide; TTT chr11 5307901 5307922 5307906 5307901 -
gggaggctgaggtgtaaaaatc

SEQ ID NO: 129444 - DNA, 22 bp, Artificial Sequence
  Synthetic oligonucleotide; TTG chr11 5307900 5307921 5307905 5307900 -
ggaggctgaggtgtaaaaatca

SEQ ID NO: 129445 - DNA, 22 bp, Artificial Sequence
  Synthetic oligonucleotide; CTG chr11 5307892 5307913 5307897 5307892 -
aggtgtaaaaatcacttaagcc

SEQ ID NO: 129446 - DNA, 22 bp, Artificial Sequence
  Synthetic oligonucleotide; CTT chr11 5307875 5307896 5307880 5307875 -
aagcctaaaagcttgaggctgc

SEQ ID NO: 129447 - DNA, 22 bp, Artificial Sequence
  Synthetic oligonucleotide; TTA chr11 5307874 5307895 5307879 5307874 -
agcctaaaagcttgaggctgca

SEQ ID NO: 129448 - DNA, 22 bp, Artificial Sequence
  Synthetic oligonucleotide; CTA chr11 5307868 5307889 5307873 5307868 -
aaagcttgaggctgcagtaaac

SEQ ID NO: 129449 - DNA, 22 bp, Artificial Sequence
  Synthetic oligonucleotide; CTT chr11 5307861 5307882 5307866 5307861 -
gaggctgcagtaaactatgatc

SEQ ID NO: 129450 - DNA, 22 bp, Artificial Sequence
  Synthetic oligonucleotide; TTG chr11 5307860 5307881 5307865 5307860 -
aggctgcagtaaactatgatct

SEQ ID NO: 129451 - DNA, 22 bp, Artificial Sequence
  Synthetic oligonucleotide; CTG chr11 5307854 5307875 5307859 5307854 -
cagtaaactatgatctcaccac

SEQ ID NO: 129452 - DNA, 22 bp, Artificial Sequence
  Synthetic oligonucleotide; CTA chr11 5307844 5307865 5307849 5307844 -
tgatctcaccactgcactccct

SEQ ID NO: 129453 - DNA, 22 bp, Artificial Sequence
  Synthetic oligonucleotide; CTC chr11 5307837 5307858 5307842 5307837 -
accactgcactccctcctgggt

SEQ ID NO: 129454 - DNA, 22 bp, Artificial Sequence
  Synthetic oligonucleotide; CTG chr11 5307830 5307851 5307835 5307830 -
cactccctcctgggtgacagag

SEQ ID NO: 129455 - DNA, 22 bp, Artificial Sequence
  Synthetic oligonucleotide; CTC chr11 5307825 5307846 5307830 5307825 -
cctcctgggtgacagagcaaga

SEQ ID NO: 129456 - DNA, 22 bp, Artificial Sequence
  Synthetic oligonucleotide; CTC chr11 5307821 5307842 5307826 5307821 -
ctgggtgacagagcaagacact

SEQ ID NO: 129457 - DNA, 22 bp, Artificial Sequence
  Synthetic oligonucleotide; CTG chr11 5307818 5307839 5307823 5307818 -
ggtgacagagcaagacactgtc

SEQ ID NO: 129458 - DNA, 22 bp, Artificial Sequence
  Synthetic oligonucleotide; CTG chr11 5307798 5307819 5307803 5307798 -
tctcaaaagagaggaaagaaaa

SEQ ID NO: 129459 - DNA, 22 bp, Artificial Sequence
  Synthetic oligonucleotide; CTC chr11 5307794 5307815 5307799 5307794 -
aaaagagaggaaagaaaagaaa

SEQ ID NO: 129460 - DNA, 22 bp, Artificial Sequence
  Synthetic oligonucleotide; CTT chr11 5307601 5307622 5307606 5307601 -
caaaaaatctttcttcttgatg

SEQ ID NO: 129461 - DNA, 22 bp, Artificial Sequence
  Synthetic oligonucleotide; TTC chr11 5307600 5307621 5307605 5307600 -
aaaaaatctttcttcttgatgt

SEQ ID NO: 129462 - DNA, 22 bp, Artificial Sequence
  Synthetic oligonucleotide; CTT chr11 5307590 5307611 5307595 5307590 -
tcttcttgatgttgttatggat

SEQ ID NO: 129463 - DNA, 22 bp, Artificial Sequence
  Synthetic oligonucleotide; TTT chr11 5307589 5307610 5307594 5307589 -
cttcttgatgttgttatggatt

SEQ ID NO: 129464 - DNA, 22 bp, Artificial Sequence
  Synthetic oligonucleotide; TTC chr11 5307588 5307609 5307593 5307588 -
ttcttgatgttgttatggattt

SEQ ID NO: 129465 - DNA, 22 bp, Artificial Sequence
  Synthetic oligonucleotide; CTT chr11 5307586 5307607 5307591 5307586 -
cttgatgttgttatggattttt

SEQ ID NO: 129466 - DNA, 22 bp, Artificial Sequence
  Synthetic oligonucleotide; TTC chr11 5307585 5307606 5307590 5307585 -
ttgatgttgttatggatttttc

SEQ ID NO: 129467 - DNA, 22 bp, Artificial Sequence
  Synthetic oligonucleotide; CTT chr11 5307583 5307604 5307588 5307583 -
gatgttgttatggatttttctc

SEQ ID NO: 129468 - DNA, 22 bp, Artificial Sequence
  Synthetic oligonucleotide; TTG chr11 5307582 5307603 5307587 5307582 -
atgttgttatggatttttctct

SEQ ID NO: 129469 - DNA, 22 bp, Artificial Sequence
  Synthetic oligonucleotide; TTG chr11 5307576 5307597 5307581 5307576 -
ttatggatttttctctgaacca

SEQ ID NO: 129470 - DNA, 22 bp, Artificial Sequence
  Synthetic oligonucleotide; TTA chr11 5307573 5307594 5307578 5307573 -
tggatttttctctgaaccatga

SEQ ID NO: 129471 - DNA, 22 bp, Artificial Sequence
  Synthetic oligonucleotide; TTT chr11 5307566 5307587 5307571 5307566 -
ttctctgaaccatgattgatgt

SEQ ID NO: 129472 - DNA, 22 bp, Artificial Sequence
  Synthetic oligonucleotide; TTT chr11 5307565 5307586 5307570 5307565 -
tctctgaaccatgattgatgta

SEQ ID NO: 129473 - DNA, 22 bp, Artificial Sequence
  Synthetic oligonucleotide; TTT chr11 5307564 5307585 5307569 5307564 -
ctctgaaccatgattgatgtaa

SEQ ID NO: 129474 - DNA, 22 bp, Artificial Sequence
  Synthetic oligonucleotide; TTC chr11 5307563 5307584 5307568 5307563 -
tctgaaccatgattgatgtaaa

SEQ ID NO: 129475 - DNA, 22 bp, Artificial Sequence
  Synthetic oligonucleotide; CTC chr11 5307561 5307582 5307566 5307561 -
tgaaccatgattgatgtaaaaa

SEQ ID NO: 129476 - DNA, 22 bp, Artificial Sequence
  Synthetic oligonucleotide; CTG chr11 5307559 5307580 5307564 5307559 -
aaccatgattgatgtaaaaatt

SEQ ID NO: 129477 - DNA, 22 bp, Artificial Sequence
  Synthetic oligonucleotide; TTG chr11 5307548 5307569 5307553 5307548 -
atgtaaaaattagagacatcga

SEQ ID NO: 129478 - DNA, 22 bp, Artificial Sequence
  Synthetic oligonucleotide; TTA chr11 5307536 5307557 5307541 5307536 -
gagacatcgaagtactaaacaa

SEQ ID NO: 129479 - DNA, 22 bp, Artificial Sequence
  Synthetic oligonucleotide; CTA chr11 5307519 5307540 5307524 5307519 -
aacaataaagaaaaggagatag

SEQ ID NO: 129480 - DNA, 22 bp, Artificial Sequence
  Synthetic oligonucleotide; TTG chr11 5307492 5307513 5307497 5307492 -
tttggcatgcttgaactagtaa

SEQ ID NO: 129481 - DNA, 22 bp, Artificial Sequence
  Synthetic oligonucleotide; TTT chr11 5307489 5307510 5307494 5307489 -
ggcatgcttgaactagtaatct

SEQ ID NO: 129482 - DNA, 22 bp, Artificial Sequence
  Synthetic oligonucleotide; TTG chr11 5307488 5307509 5307493 5307488 -
gcatgcttgaactagtaatctt

SEQ ID NO: 129483 - DNA, 22 bp, Artificial Sequence
  Synthetic oligonucleotide; CTT chr11 5307480 5307501 5307485 5307480 -
gaactagtaatcttattacaaa

SEQ ID NO: 129484 - DNA, 22 bp, Artificial Sequence
  Synthetic oligonucleotide; TTG chr11 5307479 5307500 5307484 5307479 -
aactagtaatcttattacaaac

SEQ ID NO: 129485 - DNA, 22 bp, Artificial Sequence
  Synthetic oligonucleotide; CTA chr11 5307474 5307495 5307479 5307474 -
gtaatcttattacaaacagatg

SEQ ID NO: 129486 - DNA, 22 bp, Artificial Sequence
  Synthetic oligonucleotide; CTT chr11 5307466 5307487 5307471 5307466 -
attacaaacagatgtagaggtt

SEQ ID NO: 129487 - DNA, 22 bp, Artificial Sequence
  Synthetic oligonucleotide; TTA chr11 5307465 5307486 5307470 5307465 -
ttacaaacagatgtagaggttg

SEQ ID NO: 129488 - DNA, 22 bp, Artificial Sequence
  Synthetic oligonucleotide; TTA chr11 5307462 5307483 5307467 5307462 -
caaacagatgtagaggttgtaa

SEQ ID NO: 129489 - DNA, 22 bp, Artificial Sequence
  Synthetic oligonucleotide; TTG chr11 5307443 5307464 5307448 5307443 -
taaaggtctacaatttggctac

SEQ ID NO: 129490 - DNA, 22 bp, Artificial Sequence
  Synthetic oligonucleotide; CTA chr11 5307433 5307454 5307438 5307433 -
caatttggctacaaaaccaatg

SEQ ID NO: 129491 - DNA, 22 bp, Artificial Sequence
  Synthetic oligonucleotide; TTT chr11 5307427 5307448 5307432 5307427 -
ggctacaaaaccaatggcttga

SEQ ID NO: 129492 - DNA, 22 bp, Artificial Sequence
  Synthetic oligonucleotide; TTG chr11 5307426 5307447 5307431 5307426 -
gctacaaaaccaatggcttgat

SEQ ID NO: 129493 - DNA, 22 bp, Artificial Sequence
  Synthetic oligonucleotide; CTA chr11 5307422 5307443 5307427 5307422 -
caaaaccaatggcttgatcaca

SEQ ID NO: 129494 - DNA, 22 bp, Artificial Sequence
  Synthetic oligonucleotide; CTT chr11 5307407 5307428 5307412 5307407 -
gatcacaagaatagcattcatt

SEQ ID NO: 129495 - DNA, 22 bp, Artificial Sequence
  Synthetic oligonucleotide; TTG chr11 5307406 5307427 5307411 5307406 -
atcacaagaatagcattcattt

SEQ ID NO: 129496 - DNA, 22 bp, Artificial Sequence
  Synthetic oligonucleotide; TTC chr11 5307388 5307409 5307393 5307388 -
atttgcttaactagtacttact

SEQ ID NO: 129497 - DNA, 22 bp, Artificial Sequence
  Synthetic oligonucleotide; TTT chr11 5307384 5307405 5307389 5307384 -
gcttaactagtacttactgagc

SEQ ID NO: 129498 - DNA, 22 bp, Artificial Sequence
  Synthetic oligonucleotide; TTG chr11 5307383 5307404 5307388 5307383 -
cttaactagtacttactgagca

SEQ ID NO: 129499 - DNA, 22 bp, Artificial Sequence
  Synthetic oligonucleotide; CTT chr11 5307380 5307401 5307385 5307380 -
aactagtacttactgagcaccc

SEQ ID NO: 129500 - DNA, 22 bp, Artificial Sequence
  Synthetic oligonucleotide; TTA chr11 5307379 5307400 5307384 5307379 -
actagtacttactgagcaccca

SEQ ID NO: 129501 - DNA, 22 bp, Artificial Sequence
  Synthetic oligonucleotide; CTA chr11 5307375 5307396 5307380 5307375 -
gtacttactgagcacccactat

SEQ ID NO: 129502 - DNA, 22 bp, Artificial Sequence
  Synthetic oligonucleotide; CTT chr11 5307369 5307390 5307374 5307369 -
actgagcacccactatatgtta

SEQ ID NO: 129503 - DNA, 22 bp, Artificial Sequence
  Synthetic oligonucleotide; TTA chr11 5307368 5307389 5307373 5307368 -
ctgagcacccactatatgttaa

SEQ ID NO: 129504 - DNA, 22 bp, Artificial Sequence
  Synthetic oligonucleotide; CTG chr11 5307365 5307386 5307370 5307365 -
agcacccactatatgttaagct

SEQ ID NO: 129505 - DNA, 22 bp, Artificial Sequence
  Synthetic oligonucleotide; CTA chr11 5307354 5307375 5307359 5307354 -
tatgttaagctccattttaagc

SEQ ID NO: 129506 - DNA, 22 bp, Artificial Sequence
  Synthetic oligonucleotide; TTA chr11 5307347 5307368 5307352 5307347 -
agctccattttaagcactgaaa

SEQ ID NO: 129507 - DNA, 22 bp, Artificial Sequence
  Synthetic oligonucleotide; CTC chr11 5307342 5307363 5307347 5307342 -
cattttaagcactgaaaatgtc

SEQ ID NO: 129508 - DNA, 22 bp, Artificial Sequence
  Synthetic oligonucleotide; TTT chr11 5307337 5307358 5307342 5307337 -
taagcactgaaaatgtcactca

SEQ ID NO: 129509 - DNA, 22 bp, Artificial Sequence
  Synthetic oligonucleotide; TTT chr11 5307336 5307357 5307341 5307336 -
aagcactgaaaatgtcactcac

SEQ ID NO: 129510 - DNA, 22 bp, Artificial Sequence
  Synthetic oligonucleotide; TTA chr11 5307335 5307356 5307340 5307335 -
agcactgaaaatgtcactcact

SEQ ID NO: 129511 - DNA, 22 bp, Artificial Sequence
  Synthetic oligonucleotide; CTG chr11 5307328 5307349 5307333 5307328 -
aaaatgtcactcacttaaaatc

SEQ ID NO: 129512 - DNA, 22 bp, Artificial Sequence
  Synthetic oligonucleotide; CTC chr11 5307316 5307337 5307321 5307316 -
acttaaaatctttcagaagttt

SEQ ID NO: 129513 - DNA, 22 bp, Artificial Sequence
  Synthetic oligonucleotide; CTT chr11 5307312 5307333 5307317 5307312 -
aaaatctttcagaagttttgtt

SEQ ID NO: 129514 - DNA, 22 bp, Artificial Sequence
  Synthetic oligonucleotide; TTA chr11 5307311 5307332 5307316 5307311 -
aaatctttcagaagttttgttt

SEQ ID NO: 129515 - DNA, 22 bp, Artificial Sequence
  Synthetic oligonucleotide; CTT chr11 5307304 5307325 5307309 5307304 -
tcagaagttttgttttactgtg

SEQ ID NO: 129516 - DNA, 22 bp, Artificial Sequence
  Synthetic oligonucleotide; TTT chr11 5307303 5307324 5307308 5307303 -
cagaagttttgttttactgtga

SEQ ID NO: 129517 - DNA, 22 bp, Artificial Sequence
  Synthetic oligonucleotide; TTC chr11 5307302 5307323 5307307 5307302 -
agaagttttgttttactgtgag

SEQ ID NO: 129518 - DNA, 22 bp, Artificial Sequence
  Synthetic oligonucleotide; TTT chr11 5307294 5307315 5307299 5307294 -
tgttttactgtgagtacaaaga

SEQ ID NO: 129519 - DNA, 22 bp, Artificial Sequence
  Synthetic oligonucleotide; TTT chr11 5307293 5307314 5307298 5307293 -
gttttactgtgagtacaaagag

SEQ ID NO: 129520 - DNA, 22 bp, Artificial Sequence
  Synthetic oligonucleotide; TTG chr11 5307292 5307313 5307297 5307292 -
ttttactgtgagtacaaagaga

SEQ ID NO: 129521 - DNA, 22 bp, Artificial Sequence
  Synthetic oligonucleotide; TTT chr11 5307289 5307310 5307294 5307289 -
tactgtgagtacaaagagaact

SEQ ID NO: 129522 - DNA, 22 bp, Artificial Sequence
  Synthetic oligonucleotide; TTT chr11 5307288 5307309 5307293 5307288 -
actgtgagtacaaagagaactg

SEQ ID NO: 129523 - DNA, 22 bp, Artificial Sequence
  Synthetic oligonucleotide; TTA chr11 5307287 5307308 5307292 5307287 -
ctgtgagtacaaagagaactga

SEQ ID NO: 129524 - DNA, 22 bp, Artificial Sequence
  Synthetic oligonucleotide; CTG chr11 5307284 5307305 5307289 5307284 -
tgagtacaaagagaactgactt

SEQ ID NO: 129525 - DNA, 22 bp, Artificial Sequence
  Synthetic oligonucleotide; CTG chr11 5307266 5307287 5307271 5307266 -
actttatgatatggttatttac

SEQ ID NO: 129526 - DNA, 22 bp, Artificial Sequence
  Synthetic oligonucleotide; CTT chr11 5307262 5307283 5307267 5307262 -
tatgatatggttatttaccaag

SEQ ID NO: 129527 - DNA, 22 bp, Artificial Sequence
  Synthetic oligonucleotide; TTT chr11 5307261 5307282 5307266 5307261 -
atgatatggttatttaccaagc

SEQ ID NO: 129528 - DNA, 22 bp, Artificial Sequence
  Synthetic oligonucleotide; TTA chr11 5307260 5307281 5307265 5307260 -
tgatatggttatttaccaagcc

SEQ ID NO: 129529 - DNA, 22 bp, Artificial Sequence
  Synthetic oligonucleotide; TTA chr11 5307249 5307270 5307254 5307249 -
tttaccaagccgtcacttctta

SEQ ID NO: 129530 - DNA, 22 bp, Artificial Sequence
  Synthetic oligonucleotide; TTT chr11 5307246 5307267 5307251 5307246 -
accaagccgtcacttcttagct

SEQ ID NO: 129531 - DNA, 22 bp, Artificial Sequence
  Synthetic oligonucleotide; TTA chr11 5307245 5307266 5307250 5307245 -
ccaagccgtcacttcttagcta

SEQ ID NO: 129532 - DNA, 22 bp, Artificial Sequence
  Synthetic oligonucleotide; CTT chr11 5307231 5307252 5307236 5307231 -
cttagctacaagtctagaatca

SEQ ID NO: 129533 - DNA, 22 bp, Artificial Sequence
  Synthetic oligonucleotide; TTC chr11 5307230 5307251 5307235 5307230 -
ttagctacaagtctagaatcaa

SEQ ID NO: 129534 - DNA, 22 bp, Artificial Sequence
  Synthetic oligonucleotide; CTT chr11 5307228 5307249 5307233 5307228 -
agctacaagtctagaatcaaca

SEQ ID NO: 129535 - DNA, 22 bp, Artificial Sequence
  Synthetic oligonucleotide; TTA chr11 5307227 5307248 5307232 5307227 -
gctacaagtctagaatcaacag

SEQ ID NO: 129536 - DNA, 22 bp, Artificial Sequence
  Synthetic oligonucleotide; CTA chr11 5307223 5307244 5307228 5307223 -
caagtctagaatcaacaggttc

SEQ ID NO: 129537 - DNA, 22 bp, Artificial Sequence
  Synthetic oligonucleotide; CTA chr11 5307215 5307236 5307220 5307215 -
gaatcaacaggttctgcaaaat

SEQ ID NO: 129538 - DNA, 22 bp, Artificial Sequence
  Synthetic oligonucleotide; TTC chr11 5307201 5307222 5307206 5307201 -
tgcaaaatgaattctggaatgc

SEQ ID NO: 129539 - DNA, 22 bp, Artificial Sequence
  Synthetic oligonucleotide; CTG chr11 5307199 5307220 5307204 5307199 -
caaaatgaattctggaatgcat

SEQ ID NO: 129540 - DNA, 22 bp, Artificial Sequence
  Synthetic oligonucleotide; TTC chr11 5307187 5307208 5307192 5307187 -
tggaatgcatttattgctgtat

SEQ ID NO: 129541 - DNA, 22 bp, Artificial Sequence
  Synthetic oligonucleotide; CTG chr11 5307185 5307206 5307190 5307185 -
gaatgcatttattgctgtatga

SEQ ID NO: 129542 - DNA, 22 bp, Artificial Sequence
  Synthetic oligonucleotide; TTT chr11 5307175 5307196 5307180 5307175 -
attgctgtatgacctaaaatca

SEQ ID NO: 129543 - DNA, 22 bp, Artificial Sequence
  Synthetic oligonucleotide; TTA chr11 5307174 5307195 5307179 5307174 -
ttgctgtatgacctaaaatcac

SEQ ID NO: 129544 - DNA, 22 bp, Artificial Sequence
  Synthetic oligonucleotide; TTG chr11 5307171 5307192 5307176 5307171 -
ctgtatgacctaaaatcacgtt

SEQ ID NO: 129545 - DNA, 22 bp, Artificial Sequence
  Synthetic oligonucleotide; CTG chr11 5307168 5307189 5307173 5307168 -
tatgacctaaaatcacgttttg

SEQ ID NO: 129546 - DNA, 22 bp, Artificial Sequence
  Synthetic oligonucleotide; CTA chr11 5307159 5307180 5307164 5307159 -
aaatcacgttttggcaaaatct

SEQ ID NO: 129547 - DNA, 22 bp, Artificial Sequence
  Synthetic oligonucleotide; TTT chr11 5307148 5307169 5307153 5307148 -
tggcaaaatcttacctgaatat

SEQ ID NO: 129548 - DNA, 22 bp, Artificial Sequence
  Synthetic oligonucleotide; TTT chr11 5307147 5307168 5307152 5307147 -
ggcaaaatcttacctgaatata

SEQ ID NO: 129549 - DNA, 22 bp, Artificial Sequence
  Synthetic oligonucleotide; TTG chr11 5307146 5307167 5307151 5307146 -
gcaaaatcttacctgaatatat

SEQ ID NO: 129550 - DNA, 22 bp, Artificial Sequence
  Synthetic oligonucleotide; CTT chr11 5307136 5307157 5307141 5307136 -
acctgaatatatgagaggatat

SEQ ID NO: 129551 - DNA, 22 bp, Artificial Sequence
  Synthetic oligonucleotide; TTA chr11 5307135 5307156 5307140 5307135 -
cctgaatatatgagaggatatt

SEQ ID NO: 129552 - DNA, 22 bp, Artificial Sequence
  Synthetic oligonucleotide; CTG chr11 5307131 5307152 5307136 5307131 -
aatatatgagaggatatttagg

SEQ ID NO: 129553 - DNA, 22 bp, Artificial Sequence
  Synthetic oligonucleotide; TTT chr11 5307112 5307133 5307117 5307112 -
aggtttttttcccctaagtata

SEQ ID NO: 129554 - DNA, 22 bp, Artificial Sequence
  Synthetic oligonucleotide; TTA chr11 5307111 5307132 5307116 5307111 -
ggtttttttcccctaagtataa

SEQ ID NO: 129555 - DNA, 22 bp, Artificial Sequence
  Synthetic oligonucleotide; TTT chr11 5307106 5307127 5307111 5307106 -
ttttcccctaagtataaacagg

SEQ ID NO: 129556 - DNA, 22 bp, Artificial Sequence
  Synthetic oligonucleotide; TTT chr11 5307105 5307126 5307110 5307105 -
tttcccctaagtataaacaggt

SEQ ID NO: 129557 - DNA, 22 bp, Artificial Sequence
  Synthetic oligonucleotide; TTT chr11 5307104 5307125 5307109 5307104 -
ttcccctaagtataaacaggtg

SEQ ID NO: 129558 - DNA, 22 bp, Artificial Sequence
  Synthetic oligonucleotide; TTT chr11 5307103 5307124 5307108 5307103 -
tcccctaagtataaacaggtga

SEQ ID NO: 129559 - DNA, 22 bp, Artificial Sequence
  Synthetic oligonucleotide; TTT chr11 5307102 5307123 5307107 5307102 -
cccctaagtataaacaggtgat

SEQ ID NO: 129560 - DNA, 22 bp, Artificial Sequence
  Synthetic oligonucleotide; TTC chr11 5307101 5307122 5307106 5307101 -
ccctaagtataaacaggtgata

SEQ ID NO: 129561 - DNA, 22 bp, Artificial Sequence
  Synthetic oligonucleotide; CTA chr11 5307096 5307117 5307101 5307096 -
agtataaacaggtgatagtaaa

SEQ ID NO: 129562 - DNA, 22 bp, Artificial Sequence
  Synthetic oligonucleotide; CTT chr11 5307063 5307084 5307068 5307063 -
gctgcgagtgtcacatatatta

SEQ ID NO: 129563 - DNA, 22 bp, Artificial Sequence
  Synthetic oligonucleotide; TTG chr11 5307062 5307083 5307067 5307062 -
ctgcgagtgtcacatatattat

SEQ ID NO: 129564 - DNA, 22 bp, Artificial Sequence
  Synthetic oligonucleotide; CTG chr11 5307059 5307080 5307064 5307059 -
cgagtgtcacatatattatgta

SEQ ID NO: 129565 - DNA, 22 bp, Artificial Sequence
  Synthetic oligonucleotide; TTA chr11 5307041 5307062 5307046 5307041 -
tgtagaatatgcattttatcac

SEQ ID NO: 129566 - DNA, 22 bp, Artificial Sequence
  Synthetic oligonucleotide; TTT chr11 5307025 5307046 5307030 5307025 -
tatcactattttaaatctgaaa

SEQ ID NO: 129567 - DNA, 22 bp, Artificial Sequence
  Synthetic oligonucleotide; TTT chr11 5307024 5307045 5307029 5307024 -
atcactattttaaatctgaaag

SEQ ID NO: 129568 - DNA, 22 bp, Artificial Sequence
  Synthetic oligonucleotide; TTA chr11 5307023 5307044 5307028 5307023 -
tcactattttaaatctgaaaga

SEQ ID NO: 129569 - DNA, 22 bp, Artificial Sequence
  Synthetic oligonucleotide; CTA chr11 5307017 5307038 5307022 5307017 -
ttttaaatctgaaagactgaat

SEQ ID NO: 129570 - DNA, 22 bp, Artificial Sequence
  Synthetic oligonucleotide; TTT chr11 5307014 5307035 5307019 5307014 -
taaatctgaaagactgaatttg

SEQ ID NO: 129571 - DNA, 22 bp, Artificial Sequence
  Synthetic oligonucleotide; TTT chr11 5307013 5307034 5307018 5307013 -
aaatctgaaagactgaatttga

SEQ ID NO: 129572 - DNA, 22 bp, Artificial Sequence
  Synthetic oligonucleotide; TTA chr11 5307012 5307033 5307017 5307012 -
aatctgaaagactgaatttgac

SEQ ID NO: 129573 - DNA, 22 bp, Artificial Sequence
  Synthetic oligonucleotide; CTG chr11 5307006 5307027 5307011 5307006 -
aaagactgaatttgacatgttt

SEQ ID NO: 129574 - DNA, 22 bp, Artificial Sequence
  Synthetic oligonucleotide; CTG chr11 5306998 5307019 5307003 5306998 -
aatttgacatgttttgagataa

SEQ ID NO: 129575 - DNA, 22 bp, Artificial Sequence
  Synthetic oligonucleotide; TTT chr11 5306993 5307014 5306998 5306993 -
gacatgttttgagataagagtt

SEQ ID NO: 129576 - DNA, 22 bp, Artificial Sequence
  Synthetic oligonucleotide; TTG chr11 5306992 5307013 5306997 5306992 -
acatgttttgagataagagttt

SEQ ID NO: 129577 - DNA, 22 bp, Artificial Sequence
  Synthetic oligonucleotide; TTT chr11 5306984 5307005 5306989 5306984 -
tgagataagagtttagggtaga

SEQ ID NO: 129578 - DNA, 22 bp, Artificial Sequence
  Synthetic oligonucleotide; TTT chr11 5306983 5307004 5306988 5306983 -
gagataagagtttagggtagag

SEQ ID NO: 129579 - DNA, 22 bp, Artificial Sequence
  Synthetic oligonucleotide; TTG chr11 5306982 5307003 5306987 5306982 -
agataagagtttagggtagagt

SEQ ID NO: 129580 - DNA, 22 bp, Artificial Sequence
  Synthetic oligonucleotide; TTT chr11 5306970 5306991 5306975 5306970 -
agggtagagttgtgtatctgca

SEQ ID NO: 129581 - DNA, 22 bp, Artificial Sequence
  Synthetic oligonucleotide; TTA chr11 5306969 5306990 5306974 5306969 -
gggtagagttgtgtatctgcac

SEQ ID NO: 129582 - DNA, 22 bp, Artificial Sequence
  Synthetic oligonucleotide; TTG chr11 5306958 5306979 5306963 5306958 -
tgtatctgcacgatcttagact

SEQ ID NO: 129583 - DNA, 22 bp, Artificial Sequence
  Synthetic oligonucleotide; CTG chr11 5306950 5306971 5306955 5306950 -
cacgatcttagactacttaaat

SEQ ID NO: 129584 - DNA, 22 bp, Artificial Sequence
  Synthetic oligonucleotide; CTT chr11 5306941 5306962 5306946 5306941 -
agactacttaaatagaaactca

SEQ ID NO: 129585 - DNA, 22 bp, Artificial Sequence
  Synthetic oligonucleotide; TTA chr11 5306940 5306961 5306945 5306940 -
gactacttaaatagaaactcag

SEQ ID NO: 129586 - DNA, 22 bp, Artificial Sequence
  Synthetic oligonucleotide; CTA chr11 5306935 5306956 5306940 5306935 -
cttaaatagaaactcagcacat

SEQ ID NO: 129587 - DNA, 22 bp, Artificial Sequence
  Synthetic oligonucleotide; CTT chr11 5306932 5306953 5306937 5306932 -
aaatagaaactcagcacataat

SEQ ID NO: 129588 - DNA, 22 bp, Artificial Sequence
  Synthetic oligonucleotide; TTA chr11 5306931 5306952 5306936 5306931 -
aatagaaactcagcacataatc

SEQ ID NO: 129589 - DNA, 22 bp, Artificial Sequence
  Synthetic oligonucleotide; CTC chr11 5306920 5306941 5306925 5306920 -
agcacataatccaatgaaaaaa

SEQ ID NO: 129590 - DNA, 22 bp, Artificial Sequence
  Synthetic oligonucleotide; TTT chr11 5306891 5306912 5306896 5306891 -
cagaatgggactaatatgacaa

SEQ ID NO: 129591 - DNA, 22 bp, Artificial Sequence
  Synthetic oligonucleotide; TTC chr11 5306890 5306911 5306895 5306890 -
agaatgggactaatatgacaac

SEQ ID NO: 129592 - DNA, 22 bp, Artificial Sequence
  Synthetic oligonucleotide; CTA chr11 5306878 5306899 5306883 5306878 -
atatgacaacatctggattatt

SEQ ID NO: 129593 - DNA, 22 bp, Artificial Sequence
  Synthetic oligonucleotide; CTG chr11 5306863 5306884 5306868 5306863 -
gattattatgttcaataaggtg

SEQ ID NO: 129594 - DNA, 22 bp, Artificial Sequence
  Synthetic oligonucleotide; TTA chr11 5306858 5306879 5306863 5306858 -
ttatgttcaataaggtggagca

SEQ ID NO: 129595 - DNA, 22 bp, Artificial Sequence
  Synthetic oligonucleotide; TTA chr11 5306855 5306876 5306860 5306855 -
tgttcaataaggtggagcatca

SEQ ID NO: 129596 - DNA, 22 bp, Artificial Sequence
  Synthetic oligonucleotide; TTC chr11 5306850 5306871 5306855 5306850 -
aataaggtggagcatcatagga

SEQ ID NO: 129597 - DNA, 22 bp, Artificial Sequence
  Synthetic oligonucleotide; TTA chr11 5306813 5306834 5306818 5306813 -
ggaataattacatgataaacat

SEQ ID NO: 129598 - DNA, 22 bp, Artificial Sequence
  Synthetic oligonucleotide; TTA chr11 5306803 5306824 5306808 5306803 -
catgataaacatttaaaggact

SEQ ID NO: 129599 - DNA, 22 bp, Artificial Sequence
  Synthetic oligonucleotide; TTT chr11 5306789 5306810 5306794 5306789 -
aaaggactgttgatattggttc

SEQ ID NO: 129600 - DNA, 22 bp, Artificial Sequence
  Synthetic oligonucleotide; TTA chr11 5306788 5306809 5306793 5306788 -
aaggactgttgatattggttca

SEQ ID NO: 129601 - DNA, 22 bp, Artificial Sequence
  Synthetic oligonucleotide; CTG chr11 5306780 5306801 5306785 5306780 -
ttgatattggttcacccatcag

SEQ ID NO: 129602 - DNA, 22 bp, Artificial Sequence
  Synthetic oligonucleotide; TTG chr11 5306777 5306798 5306782 5306777 -
atattggttcacccatcaggaa

SEQ ID NO: 129603 - DNA, 22 bp, Artificial Sequence
  Synthetic oligonucleotide; TTG chr11 5306771 5306792 5306776 5306771 -
gttcacccatcaggaaagaagt

SEQ ID NO: 129604 - DNA, 22 bp, Artificial Sequence
  Synthetic oligonucleotide; TTC chr11 5306767 5306788 5306772 5306767 -
acccatcaggaaagaagtctta

SEQ ID NO: 129605 - DNA, 22 bp, Artificial Sequence
  Synthetic oligonucleotide; CTT chr11 5306746 5306767 5306751 5306746 -
agggtttttaatgcagatatct

SEQ ID NO: 129606 - DNA, 22 bp, Artificial Sequence
  Synthetic oligonucleotide; TTA chr11 5306745 5306766 5306750 5306745 -
gggtttttaatgcagatatctt

SEQ ID NO: 129607 - DNA, 22 bp, Artificial Sequence
  Synthetic oligonucleotide; TTT chr11 5306739 5306760 5306744 5306739 -
ttaatgcagatatctttataca

SEQ ID NO: 129608 - DNA, 22 bp, Artificial Sequence
  Synthetic oligonucleotide; TTT chr11 5306738 5306759 5306743 5306738 -
taatgcagatatctttatacat

SEQ ID NO: 129609 - DNA, 22 bp, Artificial Sequence
  Synthetic oligonucleotide; TTT chr11 5306737 5306758 5306742 5306737 -
aatgcagatatctttatacatc

SEQ ID NO: 129610 - DNA, 22 bp, Artificial Sequence
  Synthetic oligonucleotide; TTA chr11 5306736 5306757 5306741 5306736 -
atgcagatatctttatacatct

SEQ ID NO: 129611 - DNA, 22 bp, Artificial Sequence
  Synthetic oligonucleotide; CTT chr11 5306723 5306744 5306728 5306723 -
tatacatctagaaaaaaattat

SEQ ID NO: 129612 - DNA, 22 bp, Artificial Sequence
  Synthetic oligonucleotide; TTT chr11 5306722 5306743 5306727 5306722 -
atacatctagaaaaaaattatg

SEQ ID NO: 129613 - DNA, 22 bp, Artificial Sequence
  Synthetic oligonucleotide; TTA chr11 5306721 5306742 5306726 5306721 -
tacatctagaaaaaaattatgt

SEQ ID NO: 129614 - DNA, 22 bp, Artificial Sequence
  Synthetic oligonucleotide; CTA chr11 5306713 5306734 5306718 5306713 -
gaaaaaaattatgtatgaatat

SEQ ID NO: 129615 - DNA, 22 bp, Artificial Sequence
  Synthetic oligonucleotide; TTA chr11 5306702 5306723 5306707 5306702 -
tgtatgaatataatggctaata

SEQ ID NO: 129616 - DNA, 22 bp, Artificial Sequence
  Synthetic oligonucleotide; CTA chr11 5306683 5306704 5306688 5306683 -
atatatggttattttattctgg

SEQ ID NO: 129617 - DNA, 22 bp, Artificial Sequence
  Synthetic oligonucleotide; TTA chr11 5306672 5306693 5306677 5306672 -
ttttattctggagatcagacct

SEQ ID NO: 129618 - DNA, 22 bp, Artificial Sequence
  Synthetic oligonucleotide; TTT chr11 5306669 5306690 5306674 5306669 -
tattctggagatcagacctaaa

SEQ ID NO: 129619 - DNA, 22 bp, Artificial Sequence
  Synthetic oligonucleotide; TTT chr11 5306668 5306689 5306673 5306668 -
attctggagatcagacctaaat

SEQ ID NO: 129620 - DNA, 22 bp, Artificial Sequence
  Synthetic oligonucleotide; TTA chr11 5306667 5306688 5306672 5306667 -
ttctggagatcagacctaaata

SEQ ID NO: 129621 - DNA, 22 bp, Artificial Sequence
  Synthetic oligonucleotide; TTC chr11 5306664 5306685 5306669 5306664 -
tggagatcagacctaaatataa

SEQ ID NO: 129622 - DNA, 22 bp, Artificial Sequence
  Synthetic oligonucleotide; CTG chr11 5306662 5306683 5306667 5306662 -
gagatcagacctaaatataagg

SEQ ID NO: 129623 - DNA, 22 bp, Artificial Sequence
  Synthetic oligonucleotide; CTA chr11 5306649 5306670 5306654 5306649 -
aatataaggagtagatattata

SEQ ID NO: 129624 - DNA, 22 bp, Artificial Sequence
  Synthetic oligonucleotide; TTA chr11 5306629 5306650 5306634 5306629 -
tatgtttcagagaagtatatgt

SEQ ID NO: 129625 - DNA, 22 bp, Artificial Sequence
  Synthetic oligonucleotide; TTT chr11 5306622 5306643 5306627 5306622 -
cagagaagtatatgtctctctc

SEQ ID NO: 129626 - DNA, 22 bp, Artificial Sequence
  Synthetic oligonucleotide; TTC chr11 5306621 5306642 5306626 5306621 -
agagaagtatatgtctctctct

SEQ ID NO: 129627 - DNA, 22 bp, Artificial Sequence
  Synthetic oligonucleotide; CTC chr11 5306604 5306625 5306609 5306604 -
tctctctctctcactgtctctg

SEQ ID NO: 129628 - DNA, 22 bp, Artificial Sequence
  Synthetic oligonucleotide; CTC chr11 5306602 5306623 5306607 5306602 -
tctctctctcactgtctctgtc

SEQ ID NO: 129629 - DNA, 22 bp, Artificial Sequence
  Synthetic oligonucleotide; CTC chr11 5306600 5306621 5306605 5306600 -
tctctctcactgtctctgtctg

SEQ ID NO: 129630 - DNA, 22 bp, Artificial Sequence
  Synthetic oligonucleotide; CTC chr11 5306598 5306619 5306603 5306598 -
tctctcactgtctctgtctgtg

SEQ ID NO: 129631 - DNA, 22 bp, Artificial Sequence
  Synthetic oligonucleotide; CTC chr11 5306596 5306617 5306601 5306596 -
tctcactgtctctgtctgtgaa

SEQ ID NO: 129632 - DNA, 22 bp, Artificial Sequence
  Synthetic oligonucleotide; CTC chr11 5306594 5306615 5306599 5306594 -
tcactgtctctgtctgtgaata

SEQ ID NO: 129633 - DNA, 22 bp, Artificial Sequence
  Synthetic oligonucleotide; CTC chr11 5306592 5306613 5306597 5306592 -
actgtctctgtctgtgaatata

SEQ ID NO: 129634 - DNA, 22 bp, Artificial Sequence
  Synthetic oligonucleotide; CTG chr11 5306588 5306609 5306593 5306588 -
tctctgtctgtgaatatatata

SEQ ID NO: 129635 - DNA, 22 bp, Artificial Sequence
  Synthetic oligonucleotide; CTC chr11 5306584 5306605 5306589 5306584 -
tgtctgtgaatatatatataca

SEQ ID NO: 129636 - DNA, 22 bp, Artificial Sequence
  Synthetic oligonucleotide; CTG chr11 5306582 5306603 5306587 5306582 -
tctgtgaatatatatatacaca

SEQ ID NO: 129637 - DNA, 22 bp, Artificial Sequence
  Synthetic oligonucleotide; CTG chr11 5306578 5306599 5306583 5306578 -
tgaatatatatatacacacaca

SEQ ID NO: 129638 - DNA, 22 bp, Artificial Sequence
  Synthetic oligonucleotide; CTA chr11 5306544 5306565 5306549 5306544 -
tgcatacatatattgatagtaa

SEQ ID NO: 129639 - DNA, 22 bp, Artificial Sequence
  Synthetic oligonucleotide; TTG chr11 5306529 5306550 5306534 5306529 -
atagtaaataccatatatacat

SEQ ID NO: 129640 - DNA, 22 bp, Artificial Sequence
  Synthetic oligonucleotide; CTA chr11 5306501 5306522 5306506 5306501 -
aataattaaatgaaacccacat

SEQ ID NO: 129641 - DNA, 22 bp, Artificial Sequence
  Synthetic oligonucleotide; TTA chr11 5306493 5306514 5306498 5306493 -
aatgaaacccacatatatatga

SEQ ID NO: 129642 - DNA, 22 bp, Artificial Sequence
  Synthetic oligonucleotide; CTC chr11 5306459 5306480 5306464 5306459 -
agggtagggtagtgagttttga

SEQ ID NO: 129643 - DNA, 22 bp, Artificial Sequence
  Synthetic oligonucleotide; TTT chr11 5306440 5306461 5306445 5306440 -
tgaatcaatagaaagaataaat

SEQ ID NO: 129644 - DNA, 22 bp, Artificial Sequence
  Synthetic oligonucleotide; TTT chr11 5306439 5306460 5306444 5306439 -
gaatcaatagaaagaataaata

SEQ ID NO: 129645 - DNA, 22 bp, Artificial Sequence
  Synthetic oligonucleotide; TTG chr11 5306438 5306459 5306443 5306438 -
aatcaatagaaagaataaataa

SEQ ID NO: 129646 - DNA, 22 bp, Artificial Sequence
  Synthetic oligonucleotide; CTG chr11 5306409 5306430 5306414 5306409 -
atgaataatcatcaagacgaaa

SEQ ID NO: 129647 - DNA, 22 bp, Artificial Sequence
  Synthetic oligonucleotide; TTT chr11 5306381 5306402 5306386 5306381 -
ggtggtggctcaaggattttgt

SEQ ID NO: 129648 - DNA, 22 bp, Artificial Sequence
  Synthetic oligonucleotide; TTG chr11 5306380 5306401 5306385 5306380 -
gtggtggctcaaggattttgta

SEQ ID NO: 129649 - DNA, 22 bp, Artificial Sequence
  Synthetic oligonucleotide; CTC chr11 5306370 5306391 5306375 5306370 -
aaggattttgtaaagggttgaa

SEQ ID NO: 129650 - DNA, 22 bp, Artificial Sequence
  Synthetic oligonucleotide; TTT chr11 5306362 5306383 5306367 5306362 -
tgtaaagggttgaattagagaa

SEQ ID NO: 129651 - DNA, 22 bp, Artificial Sequence
  Synthetic oligonucleotide; TTT chr11 5306361 5306382 5306366 5306361 -
gtaaagggttgaattagagaat

SEQ ID NO: 129652 - DNA, 22 bp, Artificial Sequence
  Synthetic oligonucleotide; TTG chr11 5306360 5306381 5306365 5306360 -
taaagggttgaattagagaata

SEQ ID NO: 129653 - DNA, 22 bp, Artificial Sequence
  Synthetic oligonucleotide; TTG chr11 5306350 5306371 5306355 5306350 -
aattagagaatataatacagtt

SEQ ID NO: 129654 - DNA, 22 bp, Artificial Sequence
  Synthetic oligonucleotide; TTA chr11 5306345 5306366 5306350 5306345 -
gagaatataatacagtttgaaa

SEQ ID NO: 129655 - DNA, 22 bp, Artificial Sequence
  Synthetic oligonucleotide; TTT chr11 5306327 5306348 5306332 5306327 -
gaaaaggggcaatgttcttcaa

SEQ ID NO: 129656 - DNA, 22 bp, Artificial Sequence
  Synthetic oligonucleotide; TTG chr11 5306326 5306347 5306331 5306326 -
aaaaggggcaatgttcttcaaa

SEQ ID NO: 129657 - DNA, 22 bp, Artificial Sequence
  Synthetic oligonucleotide; TTC chr11 5306310 5306331 5306315 5306310 -
ttcaaatgttaacatttacaaa

SEQ ID NO: 129658 - DNA, 22 bp, Artificial Sequence
  Synthetic oligonucleotide; CTT chr11 5306308 5306329 5306313 5306308 -
caaatgttaacatttacaaaga

SEQ ID NO: 129659 - DNA, 22 bp, Artificial Sequence
  Synthetic oligonucleotide; TTC chr11 5306307 5306328 5306312 5306307 -
aaatgttaacatttacaaagac

SEQ ID NO: 129660 - DNA, 22 bp, Artificial Sequence
  Synthetic oligonucleotide; TTA chr11 5306299 5306320 5306304 5306299 -
acatttacaaagacaaagtgac

SEQ ID NO: 129661 - DNA, 22 bp, Artificial Sequence
  Synthetic oligonucleotide; TTT chr11 5306293 5306314 5306298 5306293 -
acaaagacaaagtgactggtct

SEQ ID NO: 129662 - DNA, 22 bp, Artificial Sequence
  Synthetic oligonucleotide; TTA chr11 5306292 5306313 5306297 5306292 -
caaagacaaagtgactggtctt

SEQ ID NO: 129663 - DNA, 22 bp, Artificial Sequence
  Synthetic oligonucleotide; CTG chr11 5306275 5306296 5306280 5306275 -
gtcttcccactctaagaccaat

SEQ ID NO: 129664 - DNA, 22 bp, Artificial Sequence
  Synthetic oligonucleotide; CTT chr11 5306270 5306291 5306275 5306270 -
cccactctaagaccaatggaac

SEQ ID NO: 129665 - DNA, 22 bp, Artificial Sequence
  Synthetic oligonucleotide; TTC chr11 5306269 5306290 5306274 5306269 -
ccactctaagaccaatggaaca

SEQ ID NO: 129666 - DNA, 22 bp, Artificial Sequence
  Synthetic oligonucleotide; CTC chr11 5306263 5306284 5306268 5306263 -
taagaccaatggaacacttgag

SEQ ID NO: 129667 - DNA, 22 bp, Artificial Sequence
  Synthetic oligonucleotide; CTA chr11 5306261 5306282 5306266 5306261 -
agaccaatggaacacttgagag

SEQ ID NO: 129668 - DNA, 22 bp, Artificial Sequence
  Synthetic oligonucleotide; CTT chr11 5306244 5306265 5306249 5306244 -
gagagtgactcatttcggtcat

SEQ ID NO: 129669 - DNA, 22 bp, Artificial Sequence
  Synthetic oligonucleotide; TTG chr11 5306243 5306264 5306248 5306243 -
agagtgactcatttcggtcatg

SEQ ID NO: 129670 - DNA, 22 bp, Artificial Sequence
  Synthetic oligonucleotide; CTC chr11 5306233 5306254 5306238 5306233 -
atttcggtcatgcctcatctga

SEQ ID NO: 129671 - DNA, 22 bp, Artificial Sequence
  Synthetic oligonucleotide; TTT chr11 5306229 5306250 5306234 5306229 -
cggtcatgcctcatctgatgtt

SEQ ID NO: 129672 - DNA, 22 bp, Artificial Sequence
  Synthetic oligonucleotide; TTC chr11 5306228 5306249 5306233 5306228 -
ggtcatgcctcatctgatgtta

SEQ ID NO: 129673 - DNA, 22 bp, Artificial Sequence
  Synthetic oligonucleotide; CTC chr11 5306217 5306238 5306222 5306217 -
atctgatgttagagacacaact

SEQ ID NO: 129674 - DNA, 22 bp, Artificial Sequence
  Synthetic oligonucleotide; CTG chr11 5306212 5306233 5306217 5306212 -
atgttagagacacaacttctct

SEQ ID NO: 129675 - DNA, 22 bp, Artificial Sequence
  Synthetic oligonucleotide; TTA chr11 5306206 5306227 5306211 5306206 -
gagacacaacttctcttagaga

SEQ ID NO: 129676 - DNA, 22 bp, Artificial Sequence
  Synthetic oligonucleotide; CTT chr11 5306194 5306215 5306199 5306194 -
ctcttagagactctccttccaa

SEQ ID NO: 129677 - DNA, 22 bp, Artificial Sequence
  Synthetic oligonucleotide; TTC chr11 5306193 5306214 5306198 5306193 -
tcttagagactctccttccaaa

SEQ ID NO: 129678 - DNA, 22 bp, Artificial Sequence
  Synthetic oligonucleotide; CTC chr11 5306191 5306212 5306196 5306191 -
ttagagactctccttccaaaga

SEQ ID NO: 129679 - DNA, 22 bp, Artificial Sequence
  Synthetic oligonucleotide; CTT chr11 5306189 5306210 5306194 5306189 -
agagactctccttccaaagaaa

SEQ ID NO: 129680 - DNA, 22 bp, Artificial Sequence
  Synthetic oligonucleotide; TTA chr11 5306188 5306209 5306193 5306188 -
gagactctccttccaaagaaaa

SEQ ID NO: 129681 - DNA, 22 bp, Artificial Sequence
  Synthetic oligonucleotide; CTC chr11 5306181 5306202 5306186 5306181 -
tccttccaaagaaaaaataaag

SEQ ID NO: 129682 - DNA, 22 bp, Artificial Sequence
  Synthetic oligonucleotide; CTC chr11 5306179 5306200 5306184 5306179 -
cttccaaagaaaaaataaaggc

SEQ ID NO: 129683 - DNA, 22 bp, Artificial Sequence
  Synthetic oligonucleotide; CTT chr11 5306176 5306197 5306181 5306176 -
ccaaagaaaaaataaaggccat

SEQ ID NO: 129684 - DNA, 22 bp, Artificial Sequence
  Synthetic oligonucleotide; TTC chr11 5306175 5306196 5306180 5306175 -
caaagaaaaaataaaggccatg

SEQ ID NO: 129685 - DNA, 22 bp, Artificial Sequence
  Synthetic oligonucleotide; TTT chr11 5306142 5306163 5306147 5306142 -
caatggcccagatctttcccag

SEQ ID NO: 129686 - DNA, 22 bp, Artificial Sequence
  Synthetic oligonucleotide; TTC chr11 5306141 5306162 5306146 5306141 -
aatggcccagatctttcccagg

SEQ ID NO: 129687 - DNA, 22 bp, Artificial Sequence
  Synthetic oligonucleotide; CTT chr11 5306126 5306147 5306131 5306126 -
tcccaggttggggaggaaaaga

SEQ ID NO: 129688 - DNA, 22 bp, Artificial Sequence
  Synthetic oligonucleotide; TTT chr11 5306125 5306146 5306130 5306125 -
cccaggttggggaggaaaagag

SEQ ID NO: 129689 - DNA, 22 bp, Artificial Sequence
  Synthetic oligonucleotide; TTC chr11 5306124 5306145 5306129 5306124 -
ccaggttggggaggaaaagaga

SEQ ID NO: 129690 - DNA, 22 bp, Artificial Sequence
  Synthetic oligonucleotide; TTG chr11 5306116 5306137 5306121 5306116 -
gggaggaaaagagaattatttg

SEQ ID NO: 129691 - DNA, 22 bp, Artificial Sequence
  Synthetic oligonucleotide; TTA chr11 5306098 5306119 5306103 5306098 -
tttggtacactattcccaaata

SEQ ID NO: 129692 - DNA, 22 bp, Artificial Sequence
  Synthetic oligonucleotide; TTT chr11 5306095 5306116 5306100 5306095 -
ggtacactattcccaaatatcc

SEQ ID NO: 129693 - DNA, 22 bp, Artificial Sequence
  Synthetic oligonucleotide; TTG chr11 5306094 5306115 5306099 5306094 -
gtacactattcccaaatatcct

SEQ ID NO: 129694 - DNA, 22 bp, Artificial Sequence
  Synthetic oligonucleotide; CTA chr11 5306086 5306107 5306091 5306086 -
ttcccaaatatcctatgtggaa

SEQ ID NO: 129695 - DNA, 22 bp, Artificial Sequence
  Synthetic oligonucleotide; TTC chr11 5306083 5306104 5306088 5306083 -
ccaaatatcctatgtggaaatg

SEQ ID NO: 129696 - DNA, 22 bp, Artificial Sequence
  Synthetic oligonucleotide; CTA chr11 5306071 5306092 5306076 5306071 -
tgtggaaatgagctagaataac

SEQ ID NO: 129697 - DNA, 22 bp, Artificial Sequence
  Synthetic oligonucleotide; CTA chr11 5306056 5306077 5306061 5306056 -
gaataaccccttgagagttgtt

SEQ ID NO: 129698 - DNA, 22 bp, Artificial Sequence
  Synthetic oligonucleotide; CTT chr11 5306044 5306065 5306049 5306044 -
gagagttgtttgtgtaacaaat

SEQ ID NO: 129699 - DNA, 22 bp, Artificial Sequence
  Synthetic oligonucleotide; TTG chr11 5306043 5306064 5306048 5306043 -
agagttgtttgtgtaacaaata

SEQ ID NO: 129700 - DNA, 22 bp, Artificial Sequence
  Synthetic oligonucleotide; TTG chr11 5306036 5306057 5306041 5306036 -
tttgtgtaacaaatatatctct

SEQ ID NO: 129701 - DNA, 22 bp, Artificial Sequence
  Synthetic oligonucleotide; TTT chr11 5306033 5306054 5306038 5306033 -
gtgtaacaaatatatctctcat

SEQ ID NO: 129702 - DNA, 22 bp, Artificial Sequence
  Synthetic oligonucleotide; TTG chr11 5306032 5306053 5306037 5306032 -
tgtaacaaatatatctctcatc

SEQ ID NO: 129703 - DNA, 22 bp, Artificial Sequence
  Synthetic oligonucleotide; CTC chr11 5306015 5306036 5306020 5306015 -
tcatcagaattaagagtaaata

SEQ ID NO: 129704 - DNA, 22 bp, Artificial Sequence
  Synthetic oligonucleotide; CTC chr11 5306013 5306034 5306018 5306013 -
atcagaattaagagtaaatact

SEQ ID NO: 129705 - DNA, 22 bp, Artificial Sequence
  Synthetic oligonucleotide; TTA chr11 5306003 5306024 5306008 5306003 -
agagtaaatactgaggatatag

SEQ ID NO: 129706 - DNA, 22 bp, Artificial Sequence
  Synthetic oligonucleotide; CTG chr11 5305990 5306011 5305995 5305990 -
aggatatagcaaacaaccaata

SEQ ID NO: 129707 - DNA, 22 bp, Artificial Sequence
  Synthetic oligonucleotide; TTC chr11 5305965 5305986 5305970 5305965 -
aggtcatgctcagaaaccgcaa

SEQ ID NO: 129708 - DNA, 22 bp, Artificial Sequence
  Synthetic oligonucleotide; CTC chr11 5305954 5305975 5305959 5305954 -
agaaaccgcaaagagaaaactg

SEQ ID NO: 129709 - DNA, 22 bp, Artificial Sequence
  Synthetic oligonucleotide; CTG chr11 5305932 5305953 5305937 5305932 -
tggctcaggtaagaaaagccaa

SEQ ID NO: 129710 - DNA, 22 bp, Artificial Sequence
  Synthetic oligonucleotide; CTC chr11 5305926 5305947 5305931 5305926 -
aggtaagaaaagccaaggattc

SEQ ID NO: 129711 - DNA, 22 bp, Artificial Sequence
  Synthetic oligonucleotide; TTC chr11 5305904 5305925 5305909 5305904 -
aaatacgggaagcaagtttaac

SEQ ID NO: 129712 - DNA, 22 bp, Artificial Sequence
  Synthetic oligonucleotide; TTT chr11 5305885 5305906 5305890 5305885 -
aaccatttccatttgatggaca

SEQ ID NO: 129713 - DNA, 22 bp, Artificial Sequence
  Synthetic oligonucleotide; TTA chr11 5305884 5305905 5305889 5305884 -
accatttccatttgatggacat

SEQ ID NO: 129714 - DNA, 22 bp, Artificial Sequence
  Synthetic oligonucleotide; TTT chr11 5305877 5305898 5305882 5305877 -
ccatttgatggacattggttga

SEQ ID NO: 129715 - DNA, 22 bp, Artificial Sequence
  Synthetic oligonucleotide; TTC chr11 5305876 5305897 5305881 5305876 -
catttgatggacattggttgag

SEQ ID NO: 129716 - DNA, 22 bp, Artificial Sequence
  Synthetic oligonucleotide; TTT chr11 5305871 5305892 5305876 5305871 -
gatggacattggttgagaatat

SEQ ID NO: 129717 - DNA, 22 bp, Artificial Sequence
  Synthetic oligonucleotide; TTG chr11 5305870 5305891 5305875 5305870 -
atggacattggttgagaatatg

SEQ ID NO: 129718 - DNA, 22 bp, Artificial Sequence
  Synthetic oligonucleotide; TTG chr11 5305860 5305881 5305865 5305860 -
gttgagaatatgagcttgggtt

SEQ ID NO: 129719 - DNA, 22 bp, Artificial Sequence
  Synthetic oligonucleotide; TTG chr11 5305856 5305877 5305861 5305856 -
agaatatgagcttgggttttgg

SEQ ID NO: 129720 - DNA, 22 bp, Artificial Sequence
  Synthetic oligonucleotide; CTT chr11 5305843 5305864 5305848 5305843 -
gggttttgggttagataaacct

SEQ ID NO: 129721 - DNA, 22 bp, Artificial Sequence
  Synthetic oligonucleotide; TTG chr11 5305842 5305863 5305847 5305842 -
ggttttgggttagataaacctg

SEQ ID NO: 129722 - DNA, 22 bp, Artificial Sequence
  Synthetic oligonucleotide; TTT chr11 5305837 5305858 5305842 5305837 -
tgggttagataaacctgtgttt

SEQ ID NO: 129723 - DNA, 22 bp, Artificial Sequence
  Synthetic oligonucleotide; TTT chr11 5305836 5305857 5305841 5305836 -
gggttagataaacctgtgtttg

SEQ ID NO: 129724 - DNA, 22 bp, Artificial Sequence
  Synthetic oligonucleotide; TTG chr11 5305835 5305856 5305840 5305835 -
ggttagataaacctgtgtttga

SEQ ID NO: 129725 - DNA, 22 bp, Artificial Sequence
  Synthetic oligonucleotide; TTA chr11 5305830 5305851 5305835 5305830 -
gataaacctgtgtttgaattcc

SEQ ID NO: 129726 - DNA, 22 bp, Artificial Sequence
  Synthetic oligonucleotide; CTG chr11 5305820 5305841 5305825 5305820 -
tgtttgaattcctttatgacac

SEQ ID NO: 129727 - DNA, 22 bp, Artificial Sequence
  Synthetic oligonucleotide; TTT chr11 5305815 5305836 5305820 5305815 -
gaattcctttatgacacatatt

SEQ ID NO: 129728 - DNA, 22 bp, Artificial Sequence
  Synthetic oligonucleotide; TTG chr11 5305814 5305835 5305819 5305814 -
aattcctttatgacacatatta

SEQ ID NO: 129729 - DNA, 22 bp, Artificial Sequence
  Synthetic oligonucleotide; TTC chr11 5305809 5305830 5305814 5305809 -
ctttatgacacatattagttgc

SEQ ID NO: 129730 - DNA, 22 bp, Artificial Sequence
  Synthetic oligonucleotide; CTT chr11 5305806 5305827 5305811 5305806 -
tatgacacatattagttgcgtg

SEQ ID NO: 129731 - DNA, 22 bp, Artificial Sequence
  Synthetic oligonucleotide; TTT chr11 5305805 5305826 5305810 5305805 -
atgacacatattagttgcgtga

SEQ ID NO: 129732 - DNA, 22 bp, Artificial Sequence
  Synthetic oligonucleotide; TTA chr11 5305804 5305825 5305809 5305804 -
tgacacatattagttgcgtgat

SEQ ID NO: 129733 - DNA, 22 bp, Artificial Sequence
  Synthetic oligonucleotide; TTA chr11 5305792 5305813 5305797 5305792 -
gttgcgtgatcttaggctaatt

SEQ ID NO: 129734 - DNA, 22 bp, Artificial Sequence
  Synthetic oligonucleotide; TTG chr11 5305788 5305809 5305793 5305788 -
cgtgatcttaggctaattgctt

SEQ ID NO: 129735 - DNA, 22 bp, Artificial Sequence
  Synthetic oligonucleotide; CTT chr11 5305779 5305800 5305784 5305779 -
aggctaattgcttaacttgtct

SEQ ID NO: 129736 - DNA, 22 bp, Artificial Sequence
  Synthetic oligonucleotide; TTA chr11 5305778 5305799 5305783 5305778 -
ggctaattgcttaacttgtcta

SEQ ID NO: 129737 - DNA, 22 bp, Artificial Sequence
  Synthetic oligonucleotide; CTA chr11 5305773 5305794 5305778 5305773 -
attgcttaacttgtctaaggct

SEQ ID NO: 129738 - DNA, 22 bp, Artificial Sequence
  Synthetic oligonucleotide; TTG chr11 5305769 5305790 5305774 5305769 -
cttaacttgtctaaggctcaat

SEQ ID NO: 129739 - DNA, 22 bp, Artificial Sequence
  Synthetic oligonucleotide; CTT chr11 5305766 5305787 5305771 5305766 -
aacttgtctaaggctcaatttc

SEQ ID NO: 129740 - DNA, 22 bp, Artificial Sequence
  Synthetic oligonucleotide; TTA chr11 5305765 5305786 5305770 5305765 -
acttgtctaaggctcaatttcc

SEQ ID NO: 129741 - DNA, 22 bp, Artificial Sequence
  Synthetic oligonucleotide; CTT chr11 5305761 5305782 5305766 5305761 -
gtctaaggctcaatttcctcac

SEQ ID NO: 129742 - DNA, 22 bp, Artificial Sequence
  Synthetic oligonucleotide; TTG chr11 5305760 5305781 5305765 5305760 -
tctaaggctcaatttcctcacc

SEQ ID NO: 129743 - DNA, 22 bp, Artificial Sequence
  Synthetic oligonucleotide; CTA chr11 5305756 5305777 5305761 5305756 -
aggctcaatttcctcaccataa

SEQ ID NO: 129744 - DNA, 22 bp, Artificial Sequence
  Synthetic oligonucleotide; CTC chr11 5305750 5305771 5305755 5305750 -
aatttcctcaccataacaatat

SEQ ID NO: 129745 - DNA, 22 bp, Artificial Sequence
  Synthetic oligonucleotide; TTT chr11 5305745 5305766 5305750 5305745 -
cctcaccataacaatataaata

SEQ ID NO: 129746 - DNA, 22 bp, Artificial Sequence
  Synthetic oligonucleotide; TTC chr11 5305744 5305765 5305749 5305744 -
ctcaccataacaatataaataa

SEQ ID NO: 129747 - DNA, 22 bp, Artificial Sequence
  Synthetic oligonucleotide; CTC chr11 5305741 5305762 5305746 5305741 -
accataacaatataaataaaat

SEQ ID NO: 129748 - DNA, 22 bp, Artificial Sequence
  Synthetic oligonucleotide; TTG chr11 5305710 5305731 5305715 5305710 -
tctttactttcttgttttttac

SEQ ID NO: 129749 - DNA, 22 bp, Artificial Sequence
  Synthetic oligonucleotide; CTT chr11 5305706 5305727 5305711 5305706 -
tactttcttgttttttactcac

SEQ ID NO: 129750 - DNA, 22 bp, Artificial Sequence
  Synthetic oligonucleotide; TTT chr11 5305705 5305726 5305710 5305705 -
actttcttgttttttactcact

SEQ ID NO: 129751 - DNA, 22 bp, Artificial Sequence
  Synthetic oligonucleotide; TTA chr11 5305704 5305725 5305709 5305704 -
ctttcttgttttttactcactt

SEQ ID NO: 129752 - DNA, 22 bp, Artificial Sequence
  Synthetic oligonucleotide; CTT chr11 5305701 5305722 5305706 5305701 -
tcttgttttttactcacttttc

SEQ ID NO: 129753 - DNA, 22 bp, Artificial Sequence
  Synthetic oligonucleotide; TTT chr11 5305700 5305721 5305705 5305700 -
cttgttttttactcacttttct

SEQ ID NO: 129754 - DNA, 22 bp, Artificial Sequence
  Synthetic oligonucleotide; TTC chr11 5305699 5305720 5305704 5305699 -
ttgttttttactcacttttctt

SEQ ID NO: 129755 - DNA, 22 bp, Artificial Sequence
  Synthetic oligonucleotide; CTT chr11 5305697 5305718 5305702 5305697 -
gttttttactcacttttctttt

SEQ ID NO: 129756 - DNA, 22 bp, Artificial Sequence
  Synthetic oligonucleotide; TTG chr11 5305696 5305717 5305701 5305696 -
ttttttactcacttttcttttc

SEQ ID NO: 129757 - DNA, 22 bp, Artificial Sequence
  Synthetic oligonucleotide; TTT chr11 5305693 5305714 5305698 5305693 -
tttactcacttttcttttctct

SEQ ID NO: 129758 - DNA, 22 bp, Artificial Sequence
  Synthetic oligonucleotide; TTT chr11 5305692 5305713 5305697 5305692 -
ttactcacttttcttttctctc

SEQ ID NO: 129759 - DNA, 22 bp, Artificial Sequence
  Synthetic oligonucleotide; TTT chr11 5305691 5305712 5305696 5305691 -
tactcacttttcttttctctct

SEQ ID NO: 129760 - DNA, 22 bp, Artificial Sequence
  Synthetic oligonucleotide; TTT chr11 5305690 5305711 5305695 5305690 -
actcacttttcttttctctctc

SEQ ID NO: 129761 - DNA, 22 bp, Artificial Sequence
  Synthetic oligonucleotide; TTA chr11 5305689 5305710 5305694 5305689 -
ctcacttttcttttctctctct

SEQ ID NO: 129762 - DNA, 22 bp, Artificial Sequence
  Synthetic oligonucleotide; CTC chr11 5305686 5305707 5305691 5305686 -
acttttcttttctctctctctc

SEQ ID NO: 129763 - DNA, 22 bp, Artificial Sequence
  Synthetic oligonucleotide; CTT chr11 5305682 5305703 5305687 5305682 -
ttcttttctctctctctcttta

SEQ ID NO: 129764 - DNA, 22 bp, Artificial Sequence
  Synthetic oligonucleotide; TTT chr11 5305681 5305702 5305686 5305681 -
tcttttctctctctctctttaa

SEQ ID NO: 129765 - DNA, 22 bp, Artificial Sequence
  Synthetic oligonucleotide; TTT chr11 5305680 5305701 5305685 5305680 -
cttttctctctctctctttaac

SEQ ID NO: 129766 - DNA, 22 bp, Artificial Sequence
  Synthetic oligonucleotide; TTC chr11 5305679 5305700 5305684 5305679 -
ttttctctctctctctttaaca

SEQ ID NO: 129767 - DNA, 22 bp, Artificial Sequence
  Synthetic oligonucleotide; CTT chr11 5305677 5305698 5305682 5305677 -
ttctctctctctctttaacaga

SEQ ID NO: 129768 - DNA, 22 bp, Artificial Sequence
  Synthetic oligonucleotide; TTT chr11 5305676 5305697 5305681 5305676 -
tctctctctctctttaacagat

SEQ ID NO: 129769 - DNA, 22 bp, Artificial Sequence
  Synthetic oligonucleotide; TTT chr11 5305675 5305696 5305680 5305675 -
ctctctctctctttaacagatt

SEQ ID NO: 129770 - DNA, 22 bp, Artificial Sequence
  Synthetic oligonucleotide; TTC chr11 5305674 5305695 5305679 5305674 -
tctctctctctttaacagattt

SEQ ID NO: 129771 - DNA, 22 bp, Artificial Sequence
  Synthetic oligonucleotide; CTC chr11 5305672 5305693 5305677 5305672 -
tctctctctttaacagattttt

SEQ ID NO: 129772 - DNA, 22 bp, Artificial Sequence
  Synthetic oligonucleotide; CTC chr11 5305670 5305691 5305675 5305670 -
tctctctttaacagatttttct

SEQ ID NO: 129773 - DNA, 22 bp, Artificial Sequence
  Synthetic oligonucleotide; CTC chr11 5305668 5305689 5305673 5305668 -
tctctttaacagatttttctct

SEQ ID NO: 129774 - DNA, 22 bp, Artificial Sequence
  Synthetic oligonucleotide; CTC chr11 5305666 5305687 5305671 5305666 -
tctttaacagatttttctctgt

SEQ ID NO: 129775 - DNA, 22 bp, Artificial Sequence
  Synthetic oligonucleotide; CTC chr11 5305664 5305685 5305669 5305664 -
tttaacagatttttctctgttg

SEQ ID NO: 129776 - DNA, 22 bp, Artificial Sequence
  Synthetic oligonucleotide; CTT chr11 5305662 5305683 5305667 5305662 -
taacagatttttctctgttgcc

SEQ ID NO: 129777 - DNA, 22 bp, Artificial Sequence
  Synthetic oligonucleotide; TTT chr11 5305661 5305682 5305666 5305661 -
aacagatttttctctgttgccc

SEQ ID NO: 129778 - DNA, 22 bp, Artificial Sequence
  Synthetic oligonucleotide; TTA chr11 5305660 5305681 5305665 5305660 -
acagatttttctctgttgccca

SEQ ID NO: 129779 - DNA, 22 bp, Artificial Sequence
  Synthetic oligonucleotide; TTT chr11 5305652 5305673 5305657 5305652 -
ttctctgttgcccaggctagag

SEQ ID NO: 129780 - DNA, 22 bp, Artificial Sequence
  Synthetic oligonucleotide; TTT chr11 5305651 5305672 5305656 5305651 -
tctctgttgcccaggctagagt

SEQ ID NO: 129781 - DNA, 22 bp, Artificial Sequence
  Synthetic oligonucleotide; TTT chr11 5305650 5305671 5305655 5305650 -
ctctgttgcccaggctagagtg

SEQ ID NO: 129782 - DNA, 22 bp, Artificial Sequence
  Synthetic oligonucleotide; TTC chr11 5305649 5305670 5305654 5305649 -
tctgttgcccaggctagagtgc

SEQ ID NO: 129783 - DNA, 22 bp, Artificial Sequence
  Synthetic oligonucleotide; CTC chr11 5305647 5305668 5305652 5305647 -
tgttgcccaggctagagtgcag

SEQ ID NO: 129784 - DNA, 22 bp, Artificial Sequence
  Synthetic oligonucleotide; CTG chr11 5305645 5305666 5305650 5305645 -
ttgcccaggctagagtgcagtg

SEQ ID NO: 129785 - DNA, 22 bp, Artificial Sequence
  Synthetic oligonucleotide; TTG chr11 5305642 5305663 5305647 5305642 -
cccaggctagagtgcagtggtg

SEQ ID NO: 129786 - DNA, 22 bp, Artificial Sequence
  Synthetic oligonucleotide; CTA chr11 5305633 5305654 5305638 5305633 -
gagtgcagtggtgcgatctcag

SEQ ID NO: 129787 - DNA, 22 bp, Artificial Sequence
  Synthetic oligonucleotide; CTC chr11 5305613 5305634 5305618 5305613 -
agctcactgcgacctcctccac

SEQ ID NO: 129788 - DNA, 22 bp, Artificial Sequence
  Synthetic oligonucleotide; CTC chr11 5305608 5305629 5305613 5305608 -
actgcgacctcctccaccaggg

SEQ ID NO: 129789 - DNA, 22 bp, Artificial Sequence
  Synthetic oligonucleotide; CTG chr11 5305604 5305625 5305609 5305604 -
cgacctcctccaccagggttca

SEQ ID NO: 129790 - DNA, 22 bp, Artificial Sequence
  Synthetic oligonucleotide; CTC chr11 5305597 5305618 5305602 5305597 -
ctccaccagggttcaggggatt

SEQ ID NO: 129791 - DNA, 22 bp, Artificial Sequence
  Synthetic oligonucleotide; CTC chr11 5305594 5305615 5305599 5305594 -
caccagggttcaggggattctc

SEQ ID NO: 129792 - DNA, 22 bp, Artificial Sequence
  Synthetic oligonucleotide; TTC chr11 5305583 5305604 5305588 5305583 -
aggggattctcatgcctcagcc

SEQ ID NO: 129793 - DNA, 22 bp, Artificial Sequence
  Synthetic oligonucleotide; TTC chr11 5305574 5305595 5305579 5305574 -
tcatgcctcagcctccagagta

SEQ ID NO: 129794 - DNA, 22 bp, Artificial Sequence
  Synthetic oligonucleotide; CTC chr11 5305572 5305593 5305577 5305572 -
atgcctcagcctccagagtagc

SEQ ID NO: 129795 - DNA, 22 bp, Artificial Sequence
  Synthetic oligonucleotide; CTC chr11 5305565 5305586 5305570 5305565 -
agcctccagagtagctgggatt

SEQ ID NO: 129796 - DNA, 22 bp, Artificial Sequence
  Synthetic oligonucleotide; CTC chr11 5305559 5305580 5305564 5305559 -
cagagtagctgggattatgatc

SEQ ID NO: 129797 - DNA, 22 bp, Artificial Sequence
  Synthetic oligonucleotide; CTG chr11 5305548 5305569 5305553 5305548 -
ggattatgatcatgtgccacca

SEQ ID NO: 129798 - DNA, 22 bp, Artificial Sequence
  Synthetic oligonucleotide; TTA chr11 5305542 5305563 5305547 5305542 -
tgatcatgtgccaccacacctg

SEQ ID NO: 129799 - DNA, 22 bp, Artificial Sequence
  Synthetic oligonucleotide; CTG chr11 5305520 5305541 5305525 5305520 -
gcttatttttgtaattatagta

SEQ ID NO: 129800 - DNA, 22 bp, Artificial Sequence
  Synthetic oligonucleotide; CTT chr11 5305516 5305537 5305521 5305516 -
atttttgtaattatagtagtga

SEQ ID NO: 129801 - DNA, 22 bp, Artificial Sequence
  Synthetic oligonucleotide; TTA chr11 5305515 5305536 5305520 5305515 -
tttttgtaattatagtagtgat

SEQ ID NO: 129802 - DNA, 22 bp, Artificial Sequence
  Synthetic oligonucleotide; TTT chr11 5305512 5305533 5305517 5305512 -
ttgtaattatagtagtgatggt

SEQ ID NO: 129803 - DNA, 22 bp, Artificial Sequence
  Synthetic oligonucleotide; TTT chr11 5305511 5305532 5305516 5305511 -
tgtaattatagtagtgatggtg

SEQ ID NO: 129804 - DNA, 22 bp, Artificial Sequence
  Synthetic oligonucleotide; TTT chr11 5305510 5305531 5305515 5305510 -
gtaattatagtagtgatggtgt

SEQ ID NO: 129805 - DNA, 22 bp, Artificial Sequence
  Synthetic oligonucleotide; TTG chr11 5305509 5305530 5305514 5305509 -
taattatagtagtgatggtgtt

SEQ ID NO: 129806 - DNA, 22 bp, Artificial Sequence
  Synthetic oligonucleotide; TTA chr11 5305503 5305524 5305508 5305503 -
tagtagtgatggtgttttgcca

SEQ ID NO: 129807 - DNA, 22 bp, Artificial Sequence
  Synthetic oligonucleotide; TTT chr11 5305486 5305507 5305491 5305486 -
tgccatgttggcccagctggtc

SEQ ID NO: 129808 - DNA, 22 bp, Artificial Sequence
  Synthetic oligonucleotide; TTT chr11 5305485 5305506 5305490 5305485 -
gccatgttggcccagctggtct

SEQ ID NO: 129809 - DNA, 22 bp, Artificial Sequence
  Synthetic oligonucleotide; TTG chr11 5305484 5305505 5305489 5305484 -
ccatgttggcccagctggtctc

SEQ ID NO: 129810 - DNA, 22 bp, Artificial Sequence
  Synthetic oligonucleotide; TTG chr11 5305476 5305497 5305481 5305476 -
gcccagctggtctcgaactcct

SEQ ID NO: 129811 - DNA, 22 bp, Artificial Sequence
  Synthetic oligonucleotide; CTG chr11 5305467 5305488 5305472 5305467 -
gtctcgaactcctgaactcaag

SEQ ID NO: 129812 - DNA, 22 bp, Artificial Sequence
  Synthetic oligonucleotide; CTC chr11 5305462 5305483 5305467 5305462 -
gaactcctgaactcaagtgatc

SEQ ID NO: 129813 - DNA, 22 bp, Artificial Sequence
  Synthetic oligonucleotide; CTC chr11 5305456 5305477 5305461 5305456 -
ctgaactcaagtgatccaccct

SEQ ID NO: 129814 - DNA, 22 bp, Artificial Sequence
  Synthetic oligonucleotide; CTG chr11 5305453 5305474 5305458 5305453 -
aactcaagtgatccaccctcct

SEQ ID NO: 129815 - DNA, 22 bp, Artificial Sequence
  Synthetic oligonucleotide; CTC chr11 5305448 5305469 5305453 5305448 -
aagtgatccaccctcctcggcc

SEQ ID NO: 129816 - DNA, 22 bp, Artificial Sequence
  Synthetic oligonucleotide; CTC chr11 5305433 5305454 5305438 5305433 -
ctcggcctcccaaagtgctggg

SEQ ID NO: 129817 - DNA, 22 bp, Artificial Sequence
  Synthetic oligonucleotide; CTC chr11 5305430 5305451 5305435 5305430 -
ggcctcccaaagtgctgggatt

SEQ ID NO: 129818 - DNA, 22 bp, Artificial Sequence
  Synthetic oligonucleotide; CTC chr11 5305424 5305445 5305429 5305424 -
ccaaagtgctgggattataggc

SEQ ID NO: 129819 - DNA, 22 bp, Artificial Sequence
  Synthetic oligonucleotide; CTG chr11 5305413 5305434 5305418 5305413 -
ggattataggcatgagccaccg

SEQ ID NO: 129820 - DNA, 22 bp, Artificial Sequence
  Synthetic oligonucleotide; TTA chr11 5305407 5305428 5305412 5305407 -
taggcatgagccaccgtgccca

SEQ ID NO: 129821 - DNA, 22 bp, Artificial Sequence
  Synthetic oligonucleotide; CTG chr11 5305381 5305402 5305386 5305381 -
ttttttactcactttttgtctc

SEQ ID NO: 129822 - DNA, 22 bp, Artificial Sequence
  Synthetic oligonucleotide; TTT chr11 5305378 5305399 5305383 5305378 -
tttactcactttttgtctcaca

SEQ ID NO: 129823 - DNA, 22 bp, Artificial Sequence
  Synthetic oligonucleotide; TTT chr11 5305377 5305398 5305382 5305377 -
ttactcactttttgtctcacag

SEQ ID NO: 129824 - DNA, 22 bp, Artificial Sequence
  Synthetic oligonucleotide; TTT chr11 5305376 5305397 5305381 5305376 -
tactcactttttgtctcacagt

SEQ ID NO: 129825 - DNA, 22 bp, Artificial Sequence
  Synthetic oligonucleotide; TTT chr11 5305375 5305396 5305380 5305375 -
actcactttttgtctcacagtc

SEQ ID NO: 129826 - DNA, 22 bp, Artificial Sequence
  Synthetic oligonucleotide; TTA chr11 5305374 5305395 5305379 5305374 -
ctcactttttgtctcacagtca

SEQ ID NO: 129827 - DNA, 22 bp, Artificial Sequence
  Synthetic oligonucleotide; CTC chr11 5305371 5305392 5305376 5305371 -
actttttgtctcacagtcatta

SEQ ID NO: 129828 - DNA, 22 bp, Artificial Sequence
  Synthetic oligonucleotide; CTT chr11 5305367 5305388 5305372 5305367 -
tttgtctcacagtcattaggca

SEQ ID NO: 129829 - DNA, 22 bp, Artificial Sequence
  Synthetic oligonucleotide; TTT chr11 5305366 5305387 5305371 5305366 -
ttgtctcacagtcattaggcat

SEQ ID NO: 129830 - DNA, 22 bp, Artificial Sequence
  Synthetic oligonucleotide; TTT chr11 5305365 5305386 5305370 5305365 -
tgtctcacagtcattaggcatt

SEQ ID NO: 129831 - DNA, 22 bp, Artificial Sequence
  Synthetic oligonucleotide; TTT chr11 5305364 5305385 5305369 5305364 -
gtctcacagtcattaggcattc

SEQ ID NO: 129832 - DNA, 22 bp, Artificial Sequence
  Synthetic oligonucleotide; TTG chr11 5305363 5305384 5305368 5305363 -
tctcacagtcattaggcattca

SEQ ID NO: 129833 - DNA, 22 bp, Artificial Sequence
  Synthetic oligonucleotide; CTC chr11 5305359 5305380 5305364 5305359 -
acagtcattaggcattcatttc

SEQ ID NO: 129834 - DNA, 22 bp, Artificial Sequence
  Synthetic oligonucleotide; TTA chr11 5305349 5305370 5305354 5305349 -
ggcattcatttctgccattatg

SEQ ID NO: 129835 - DNA, 22 bp, Artificial Sequence
  Synthetic oligonucleotide; TTC chr11 5305342 5305363 5305347 5305342 -
atttctgccattatgttgaaat

SEQ ID NO: 129836 - DNA, 22 bp, Artificial Sequence
  Synthetic oligonucleotide; TTT chr11 5305338 5305359 5305343 5305338 -
ctgccattatgttgaaattgtc

SEQ ID NO: 129837 - DNA, 22 bp, Artificial Sequence
  Synthetic oligonucleotide; TTC chr11 5305337 5305358 5305342 5305337 -
tgccattatgttgaaattgtca

SEQ ID NO: 129838 - DNA, 22 bp, Artificial Sequence
  Synthetic oligonucleotide; CTG chr11 5305335 5305356 5305340 5305335 -
ccattatgttgaaattgtcaat

SEQ ID NO: 129839 - DNA, 22 bp, Artificial Sequence
  Synthetic oligonucleotide; TTA chr11 5305329 5305350 5305334 5305329 -
tgttgaaattgtcaatattacc

SEQ ID NO: 129840 - DNA, 22 bp, Artificial Sequence
  Synthetic oligonucleotide; TTG chr11 5305324 5305345 5305329 5305324 -
aaattgtcaatattaccaaaga

SEQ ID NO: 129841 - DNA, 22 bp, Artificial Sequence
  Synthetic oligonucleotide; TTG chr11 5305318 5305339 5305323 5305318 -
tcaatattaccaaagacctagt

SEQ ID NO: 129842 - DNA, 22 bp, Artificial Sequence
  Synthetic oligonucleotide; TTA chr11 5305309 5305330 5305314 5305309 -
ccaaagacctagttgccccaaa

SEQ ID NO: 129843 - DNA, 22 bp, Artificial Sequence
  Synthetic oligonucleotide; CTA chr11 5305298 5305319 5305303 5305298 -
gttgccccaaacaatcaacacc

SEQ ID NO: 129844 - DNA, 22 bp, Artificial Sequence
  Synthetic oligonucleotide; TTG chr11 5305294 5305315 5305299 5305294 -
ccccaaacaatcaacacctcta

SEQ ID NO: 129845 - DNA, 22 bp, Artificial Sequence
  Synthetic oligonucleotide; CTC chr11 5305274 5305295 5305279 5305274 -
tatgtttatattaattgataat

SEQ ID NO: 129846 - DNA, 22 bp, Artificial Sequence
  Synthetic oligonucleotide; CTA chr11 5305272 5305293 5305277 5305272 -
tgtttatattaattgataattc

SEQ ID NO: 129847 - DNA, 22 bp, Artificial Sequence
  Synthetic oligonucleotide; TTT chr11 5305267 5305288 5305272 5305267 -
atattaattgataattctatat

SEQ ID NO: 129848 - DNA, 22 bp, Artificial Sequence
  Synthetic oligonucleotide; TTA chr11 5305266 5305287 5305271 5305266 -
tattaattgataattctatatt

SEQ ID NO: 129849 - DNA, 22 bp, Artificial Sequence
  Synthetic oligonucleotide; TTA chr11 5305261 5305282 5305266 5305261 -
attgataattctatatttttca

SEQ ID NO: 129850 - DNA, 22 bp, Artificial Sequence
  Synthetic oligonucleotide; TTG chr11 5305257 5305278 5305262 5305257 -
ataattctatatttttcactat

SEQ ID NO: 129851 - DNA, 22 bp, Artificial Sequence
  Synthetic oligonucleotide; TTC chr11 5305250 5305271 5305255 5305250 -
tatatttttcactattaaccta

SEQ ID NO: 129852 - DNA, 22 bp, Artificial Sequence
  Synthetic oligonucleotide; CTA chr11 5305248 5305269 5305253 5305248 -
tatttttcactattaacctacc

SEQ ID NO: 129853 - DNA, 22 bp, Artificial Sequence
  Synthetic oligonucleotide; TTT chr11 5305243 5305264 5305248 5305243 -
ttcactattaacctaccatagt

SEQ ID NO: 129854 - DNA, 22 bp, Artificial Sequence
  Synthetic oligonucleotide; TTT chr11 5305242 5305263 5305247 5305242 -
tcactattaacctaccatagta

SEQ ID NO: 129855 - DNA, 22 bp, Artificial Sequence
  Synthetic oligonucleotide; TTT chr11 5305241 5305262 5305246 5305241 -
cactattaacctaccatagtat

SEQ ID NO: 129856 - DNA, 22 bp, Artificial Sequence
  Synthetic oligonucleotide; TTC chr11 5305240 5305261 5305245 5305240 -
actattaacctaccatagtatc

SEQ ID NO: 129857 - DNA, 22 bp, Artificial Sequence
  Synthetic oligonucleotide; CTA chr11 5305236 5305257 5305241 5305236 -
ttaacctaccatagtatccact

SEQ ID NO: 129858 - DNA, 22 bp, Artificial Sequence
  Synthetic oligonucleotide; TTA chr11 5305233 5305254 5305238 5305233 -
acctaccatagtatccactcct

SEQ ID NO: 129859 - DNA, 22 bp, Artificial Sequence
  Synthetic oligonucleotide; CTA chr11 5305228 5305249 5305233 5305228 -
ccatagtatccactcctataaa

SEQ ID NO: 129860 - DNA, 22 bp, Artificial Sequence
  Synthetic oligonucleotide; CTC chr11 5305213 5305234 5305218 5305213 -
ctataaacttcccttttcattg

SEQ ID NO: 129861 - DNA, 22 bp, Artificial Sequence
  Synthetic oligonucleotide; CTA chr11 5305210 5305231 5305215 5305210 -
taaacttcccttttcattgttt

SEQ ID NO: 129862 - DNA, 22 bp, Artificial Sequence
  Synthetic oligonucleotide; CTT chr11 5305203 5305224 5305208 5305203 -
cccttttcattgtttttttgta

SEQ ID NO: 129863 - DNA, 22 bp, Artificial Sequence
  Synthetic oligonucleotide; TTC chr11 5305202 5305223 5305207 5305202 -
ccttttcattgtttttttgtaa

SEQ ID NO: 129864 - DNA, 22 bp, Artificial Sequence
  Synthetic oligonucleotide; CTT chr11 5305198 5305219 5305203 5305198 -
ttcattgtttttttgtaaatac

SEQ ID NO: 129865 - DNA, 22 bp, Artificial Sequence
  Synthetic oligonucleotide; TTT chr11 5305197 5305218 5305202 5305197 -
tcattgtttttttgtaaataca

SEQ ID NO: 129866 - DNA, 22 bp, Artificial Sequence
  Synthetic oligonucleotide; TTT chr11 5305196 5305217 5305201 5305196 -
cattgtttttttgtaaatacag

SEQ ID NO: 129867 - DNA, 22 bp, Artificial Sequence
  Synthetic oligonucleotide; TTC chr11 5305195 5305216 5305200 5305195 -
attgtttttttgtaaatacaga

SEQ ID NO: 129868 - DNA, 22 bp, Artificial Sequence
  Synthetic oligonucleotide; TTG chr11 5305191 5305212 5305196 5305191 -
tttttttgtaaatacagatcaa

SEQ ID NO: 129869 - DNA, 22 bp, Artificial Sequence
  Synthetic oligonucleotide; TTT chr11 5305188 5305209 5305193 5305188 -
ttttgtaaatacagatcaactt

SEQ ID NO: 129870 - DNA, 22 bp, Artificial Sequence
  Synthetic oligonucleotide; TTT chr11 5305187 5305208 5305192 5305187 -
tttgtaaatacagatcaacttt

SEQ ID NO: 129871 - DNA, 22 bp, Artificial Sequence
  Synthetic oligonucleotide; TTT chr11 5305186 5305207 5305191 5305186 -
ttgtaaatacagatcaactttg

SEQ ID NO: 129872 - DNA, 22 bp, Artificial Sequence
  Synthetic oligonucleotide; TTT chr11 5305185 5305206 5305190 5305185 -
tgtaaatacagatcaactttgc

SEQ ID NO: 129873 - DNA, 22 bp, Artificial Sequence
  Synthetic oligonucleotide; TTT chr11 5305184 5305205 5305189 5305184 -
gtaaatacagatcaactttgct

SEQ ID NO: 129874 - DNA, 22 bp, Artificial Sequence
  Synthetic oligonucleotide; TTG chr11 5305183 5305204 5305188 5305183 -
taaatacagatcaactttgcta

SEQ ID NO: 129875 - DNA, 22 bp, Artificial Sequence
  Synthetic oligonucleotide; CTT chr11 5305166 5305187 5305171 5305166 -
tgctatcctcttacatctgtgc

SEQ ID NO: 129876 - DNA, 22 bp, Artificial Sequence
  Synthetic oligonucleotide; TTT chr11 5305165 5305186 5305170 5305165 -
gctatcctcttacatctgtgcc

SEQ ID NO: 129877 - DNA, 22 bp, Artificial Sequence
  Synthetic oligonucleotide; TTG chr11 5305164 5305185 5305169 5305164 -
ctatcctcttacatctgtgcct

SEQ ID NO: 129878 - DNA, 22 bp, Artificial Sequence
  Synthetic oligonucleotide; CTA chr11 5305161 5305182 5305166 5305161 -
tcctcttacatctgtgcctgct

SEQ ID NO: 129879 - DNA, 22 bp, Artificial Sequence
  Synthetic oligonucleotide; CTC chr11 5305156 5305177 5305161 5305156 -
ttacatctgtgcctgcttcttt

SEQ ID NO: 129880 - DNA, 22 bp, Artificial Sequence
  Synthetic oligonucleotide; CTT chr11 5305154 5305175 5305159 5305154 -
acatctgtgcctgcttctttgt

SEQ ID NO: 129881 - DNA, 22 bp, Artificial Sequence
  Synthetic oligonucleotide; TTA chr11 5305153 5305174 5305158 5305153 -
catctgtgcctgcttctttgtc

SEQ ID NO: 129882 - DNA, 22 bp, Artificial Sequence
  Synthetic oligonucleotide; CTG chr11 5305147 5305168 5305152 5305147 -
tgcctgcttctttgtctatctc

SEQ ID NO: 129883 - DNA, 22 bp, Artificial Sequence
  Synthetic oligonucleotide; CTG chr11 5305141 5305162 5305146 5305141 -
cttctttgtctatctcctttga

SEQ ID NO: 129884 - DNA, 22 bp, Artificial Sequence
  Synthetic oligonucleotide; CTT chr11 5305138 5305159 5305143 5305138 -
ctttgtctatctcctttgagat

SEQ ID NO: 129885 - DNA, 22 bp, Artificial Sequence
  Synthetic oligonucleotide; TTC chr11 5305137 5305158 5305142 5305137 -
tttgtctatctcctttgagatc

SEQ ID NO: 129886 - DNA, 22 bp, Artificial Sequence
  Synthetic oligonucleotide; CTT chr11 5305135 5305156 5305140 5305135 -
tgtctatctcctttgagatctt

SEQ ID NO: 129887 - DNA, 22 bp, Artificial Sequence
  Synthetic oligonucleotide; TTT chr11 5305134 5305155 5305139 5305134 -
gtctatctcctttgagatcttt

SEQ ID NO: 129888 - DNA, 22 bp, Artificial Sequence
  Synthetic oligonucleotide; TTG chr11 5305133 5305154 5305138 5305133 -
tctatctcctttgagatctttc

SEQ ID NO: 129889 - DNA, 22 bp, Artificial Sequence
  Synthetic oligonucleotide; CTA chr11 5305129 5305150 5305134 5305129 -
tctcctttgagatctttctttt

SEQ ID NO: 129890 - DNA, 22 bp, Artificial Sequence
  Synthetic oligonucleotide; CTC chr11 5305125 5305146 5305130 5305125 -
ctttgagatctttctttttact

SEQ ID NO: 129891 - DNA, 22 bp, Artificial Sequence
  Synthetic oligonucleotide; CTT chr11 5305122 5305143 5305127 5305122 -
tgagatctttctttttactgag

SEQ ID NO: 129892 - DNA, 22 bp, Artificial Sequence
  Synthetic oligonucleotide; TTT chr11 5305121 5305142 5305126 5305121 -
gagatctttctttttactgaga

SEQ ID NO: 129893 - DNA, 22 bp, Artificial Sequence
  Synthetic oligonucleotide; TTG chr11 5305120 5305141 5305125 5305120 -
agatctttctttttactgagag

SEQ ID NO: 129894 - DNA, 22 bp, Artificial Sequence
  Synthetic oligonucleotide; CTT chr11 5305113 5305134 5305118 5305113 -
tctttttactgagagcaaaatt

SEQ ID NO: 129895 - DNA, 22 bp, Artificial Sequence
  Synthetic oligonucleotide; TTT chr11 5305112 5305133 5305117 5305112 -
ctttttactgagagcaaaattt

SEQ ID NO: 129896 - DNA, 22 bp, Artificial Sequence
  Synthetic oligonucleotide; TTC chr11 5305111 5305132 5305116 5305111 -
tttttactgagagcaaaatttg

SEQ ID NO: 129897 - DNA, 22 bp, Artificial Sequence
  Synthetic oligonucleotide; CTT chr11 5305109 5305130 5305114 5305109 -
tttactgagagcaaaatttgtc

SEQ ID NO: 129898 - DNA, 22 bp, Artificial Sequence
  Synthetic oligonucleotide; TTT chr11 5305108 5305129 5305113 5305108 -
ttactgagagcaaaatttgtcc

SEQ ID NO: 129899 - DNA, 22 bp, Artificial Sequence
  Synthetic oligonucleotide; TTT chr11 5305107 5305128 5305112 5305107 -
tactgagagcaaaatttgtcct

SEQ ID NO: 129900 - DNA, 22 bp, Artificial Sequence
  Synthetic oligonucleotide; TTT chr11 5305106 5305127 5305111 5305106 -
actgagagcaaaatttgtccta

SEQ ID NO: 129901 - DNA, 22 bp, Artificial Sequence
  Synthetic oligonucleotide; TTA chr11 5305105 5305126 5305110 5305105 -
ctgagagcaaaatttgtcctag

SEQ ID NO: 129902 - DNA, 22 bp, Artificial Sequence
  Synthetic oligonucleotide; CTG chr11 5305102 5305123 5305107 5305102 -
agagcaaaatttgtcctagttt

SEQ ID NO: 129903 - DNA, 22 bp, Artificial Sequence
  Synthetic oligonucleotide; TTT chr11 5305090 5305111 5305095 5305090 -
gtcctagtttcccaatgtttct

SEQ ID NO: 129904 - DNA, 22 bp, Artificial Sequence
  Synthetic oligonucleotide; TTG chr11 5305089 5305110 5305094 5305089 -
tcctagtttcccaatgtttctc

SEQ ID NO: 129905 - DNA, 22 bp, Artificial Sequence
  Synthetic oligonucleotide; CTA chr11 5305084 5305105 5305089 5305084 -
gtttcccaatgtttctctccaa

SEQ ID NO: 129906 - DNA, 22 bp, Artificial Sequence
  Synthetic oligonucleotide; TTT chr11 5305080 5305101 5305085 5305080 -
cccaatgtttctctccaaacct

SEQ ID NO: 129907 - DNA, 22 bp, Artificial Sequence
  Synthetic oligonucleotide; TTC chr11 5305079 5305100 5305084 5305079 -
ccaatgtttctctccaaacctt

SEQ ID NO: 129908 - DNA, 22 bp, Artificial Sequence
  Synthetic oligonucleotide; TTT chr11 5305070 5305091 5305075 5305070 -
ctctccaaaccttttttttttt

SEQ ID NO: 129909 - DNA, 22 bp, Artificial Sequence
  Synthetic oligonucleotide; TTC chr11 5305069 5305090 5305074 5305069 -
tctccaaacctttttttttttt

SEQ ID NO: 129910 - DNA, 22 bp, Artificial Sequence
  Synthetic oligonucleotide; CTC chr11 5305067 5305088 5305072 5305067 -
tccaaacctttttttttttttt

SEQ ID NO: 129911 - DNA, 22 bp, Artificial Sequence
  Synthetic oligonucleotide; CTC chr11 5305065 5305086 5305070 5305065 -
caaacctttttttttttttttt

SEQ ID NO: 129912 - DNA, 22 bp, Artificial Sequence
  Synthetic oligonucleotide; CTT chr11 5305057 5305078 5305062 5305057 -
ttttttttttttttttgagaca

SEQ ID NO: 129913 - DNA, 22 bp, Artificial Sequence
  Synthetic oligonucleotide; TTT chr11 5305056 5305077 5305061 5305056 -
tttttttttttttttgagacag

SEQ ID NO: 129914 - DNA, 22 bp, Artificial Sequence
  Synthetic oligonucleotide; TTT chr11 5305055 5305076 5305060 5305055 -
ttttttttttttttgagacaga

SEQ ID NO: 129915 - DNA, 22 bp, Artificial Sequence
  Synthetic oligonucleotide; TTT chr11 5305054 5305075 5305059 5305054 -
tttttttttttttgagacagag

SEQ ID NO: 129916 - DNA, 22 bp, Artificial Sequence
  Synthetic oligonucleotide; TTT chr11 5305053 5305074 5305058 5305053 -
ttttttttttttgagacagagc

SEQ ID NO: 129917 - DNA, 22 bp, Artificial Sequence
  Synthetic oligonucleotide; TTT chr11 5305052 5305073 5305057 5305052 -
tttttttttttgagacagagcc

SEQ ID NO: 129918 - DNA, 22 bp, Artificial Sequence
  Synthetic oligonucleotide; TTT chr11 5305051 5305072 5305056 5305051 -
ttttttttttgagacagagcct

SEQ ID NO: 129919 - DNA, 22 bp, Artificial Sequence
  Synthetic oligonucleotide; TTT chr11 5305050 5305071 5305055 5305050 -
tttttttttgagacagagcctt

SEQ ID NO: 129920 - DNA, 22 bp, Artificial Sequence
  Synthetic oligonucleotide; TTT chr11 5305049 5305070 5305054 5305049 -
ttttttttgagacagagccttg

SEQ ID NO: 129921 - DNA, 22 bp, Artificial Sequence
  Synthetic oligonucleotide; TTT chr11 5305048 5305069 5305053 5305048 -
tttttttgagacagagccttgc

SEQ ID NO: 129922 - DNA, 22 bp, Artificial Sequence
  Synthetic oligonucleotide; TTT chr11 5305047 5305068 5305052 5305047 -
ttttttgagacagagccttgct

SEQ ID NO: 129923 - DNA, 22 bp, Artificial Sequence
  Synthetic oligonucleotide; TTT chr11 5305046 5305067 5305051 5305046 -
tttttgagacagagccttgctt

SEQ ID NO: 129924 - DNA, 22 bp, Artificial Sequence
  Synthetic oligonucleotide; TTT chr11 5305045 5305066 5305050 5305045 -
ttttgagacagagccttgcttt

SEQ ID NO: 129925 - DNA, 22 bp, Artificial Sequence
  Synthetic oligonucleotide; TTT chr11 5305044 5305065 5305049 5305044 -
tttgagacagagccttgctttg

SEQ ID NO: 129926 - DNA, 22 bp, Artificial Sequence
  Synthetic oligonucleotide; TTT chr11 5305043 5305064 5305048 5305043 -
ttgagacagagccttgctttgt

SEQ ID NO: 129927 - DNA, 22 bp, Artificial Sequence
  Synthetic oligonucleotide; TTT chr11 5305042 5305063 5305047 5305042 -
tgagacagagccttgctttgtc

SEQ ID NO: 129928 - DNA, 22 bp, Artificial Sequence
  Synthetic oligonucleotide; TTT chr11 5305041 5305062 5305046 5305041 -
gagacagagccttgctttgtcg

SEQ ID NO: 129929 - DNA, 22 bp, Artificial Sequence
  Synthetic oligonucleotide; TTG chr11 5305040 5305061 5305045 5305040 -
agacagagccttgctttgtcgc

SEQ ID NO: 129930 - DNA, 22 bp, Artificial Sequence
  Synthetic oligonucleotide; CTT chr11 5305028 5305049 5305033 5305028 -
gctttgtcgcccaggctgtagt

SEQ ID NO: 129931 - DNA, 22 bp, Artificial Sequence
  Synthetic oligonucleotide; TTG chr11 5305027 5305048 5305032 5305027 -
ctttgtcgcccaggctgtagtg

SEQ ID NO: 129932 - DNA, 22 bp, Artificial Sequence
  Synthetic oligonucleotide; CTT chr11 5305024 5305045 5305029 5305024 -
tgtcgcccaggctgtagtgcag

SEQ ID NO: 129933 - DNA, 22 bp, Artificial Sequence
  Synthetic oligonucleotide; TTT chr11 5305023 5305044 5305028 5305023 -
gtcgcccaggctgtagtgcagt

SEQ ID NO: 129934 - DNA, 22 bp, Artificial Sequence
  Synthetic oligonucleotide; TTG chr11 5305022 5305043 5305027 5305022 -
tcgcccaggctgtagtgcagtg

SEQ ID NO: 129935 - DNA, 22 bp, Artificial Sequence
  Synthetic oligonucleotide; CTG chr11 5305010 5305031 5305015 5305010 -
tagtgcagtggcacaatcttgg

SEQ ID NO: 129936 - DNA, 22 bp, Artificial Sequence
  Synthetic oligonucleotide; CTT chr11 5304990 5305011 5304995 5304990 -
ggctcactgcgacgacctctgc

SEQ ID NO: 129937 - DNA, 22 bp, Artificial Sequence
  Synthetic oligonucleotide; TTG chr11 5304989 5305010 5304994 5304989 -
gctcactgcgacgacctctgct

SEQ ID NO: 129938 - DNA, 22 bp, Artificial Sequence
  Synthetic oligonucleotide; CTC chr11 5304985 5305006 5304990 5304985 -
actgcgacgacctctgctcccc

SEQ ID NO: 129939 - DNA, 22 bp, Artificial Sequence
  Synthetic oligonucleotide; CTG chr11 5304981 5305002 5304986 5304981 -
cgacgacctctgctccccagtt

SEQ ID NO: 129940 - DNA, 22 bp, Artificial Sequence
  Synthetic oligonucleotide; CTC chr11 5304971 5304992 5304976 5304971 -
tgctccccagtttttttaaagc

SEQ ID NO: 129941 - DNA, 22 bp, Artificial Sequence
  Synthetic oligonucleotide; CTG chr11 5304969 5304990 5304974 5304969 -
ctccccagtttttttaaagcaa

SEQ ID NO: 129942 - DNA, 22 bp, Artificial Sequence
  Synthetic oligonucleotide; CTC chr11 5304966 5304987 5304971 5304966 -
cccagtttttttaaagcaattc

SEQ ID NO: 129943 - DNA, 22 bp, Artificial Sequence
  Synthetic oligonucleotide; TTT chr11 5304958 5304979 5304963 5304958 -
ttttaaagcaattctcctgcct

SEQ ID NO: 129944 - DNA, 22 bp, Artificial Sequence
  Synthetic oligonucleotide; TTT chr11 5304957 5304978 5304962 5304957 -
tttaaagcaattctcctgcctc

SEQ ID NO: 129945 - DNA, 22 bp, Artificial Sequence
  Synthetic oligonucleotide; TTT chr11 5304956 5304977 5304961 5304956 -
ttaaagcaattctcctgcctca

SEQ ID NO: 129946 - DNA, 22 bp, Artificial Sequence
  Synthetic oligonucleotide; TTT chr11 5304955 5304976 5304960 5304955 -
taaagcaattctcctgcctcag

SEQ ID NO: 129947 - DNA, 22 bp, Artificial Sequence
  Synthetic oligonucleotide; TTT chr11 5304954 5304975 5304959 5304954 -
aaagcaattctcctgcctcagc

SEQ ID NO: 129948 - DNA, 22 bp, Artificial Sequence
  Synthetic oligonucleotide; TTA chr11 5304953 5304974 5304958 5304953 -
aagcaattctcctgcctcagcc

SEQ ID NO: 129949 - DNA, 22 bp, Artificial Sequence
  Synthetic oligonucleotide; TTC chr11 5304944 5304965 5304949 5304944 -
tcctgcctcagcctcccgagta

SEQ ID NO: 129950 - DNA, 22 bp, Artificial Sequence
  Synthetic oligonucleotide; CTC chr11 5304942 5304963 5304947 5304942 -
ctgcctcagcctcccgagtagc

SEQ ID NO: 129951 - DNA, 22 bp, Artificial Sequence
  Synthetic oligonucleotide; CTG chr11 5304939 5304960 5304944 5304939 -
cctcagcctcccgagtagctgg

SEQ ID NO: 129952 - DNA, 22 bp, Artificial Sequence
  Synthetic oligonucleotide; CTC chr11 5304935 5304956 5304940 5304935 -
agcctcccgagtagctgggatt

SEQ ID NO: 129953 - DNA, 22 bp, Artificial Sequence
  Synthetic oligonucleotide; CTC chr11 5304929 5304950 5304934 5304929 -
ccgagtagctgggattacaggc

SEQ ID NO: 129954 - DNA, 22 bp, Artificial Sequence
  Synthetic oligonucleotide; CTG chr11 5304918 5304939 5304923 5304918 -
ggattacaggcgctcaccacca

SEQ ID NO: 129955 - DNA, 22 bp, Artificial Sequence
  Synthetic oligonucleotide; TTA chr11 5304912 5304933 5304917 5304912 -
caggcgctcaccaccacaccca

SEQ ID NO: 129956 - DNA, 22 bp, Artificial Sequence
  Synthetic oligonucleotide; CTC chr11 5304903 5304924 5304908 5304903 -
accaccacacccagctaatttt

SEQ ID NO: 129957 - DNA, 22 bp, Artificial Sequence
  Synthetic oligonucleotide; CTA chr11 5304886 5304907 5304891 5304886 -
atttttgtatttttagtagaga

SEQ ID NO: 129958 - DNA, 22 bp, Artificial Sequence
  Synthetic oligonucleotide; TTT chr11 5304882 5304903 5304887 5304882 -
ttgtatttttagtagagacagg

SEQ ID NO: 129959 - DNA, 22 bp, Artificial Sequence
  Synthetic oligonucleotide; TTT chr11 5304881 5304902 5304886 5304881 -
tgtatttttagtagagacaggg

SEQ ID NO: 129960 - DNA, 22 bp, Artificial Sequence
  Synthetic oligonucleotide; TTT chr11 5304880 5304901 5304885 5304880 -
gtatttttagtagagacagggt

SEQ ID NO: 129961 - DNA, 22 bp, Artificial Sequence
  Synthetic oligonucleotide; TTG chr11 5304879 5304900 5304884 5304879 -
tatttttagtagagacagggtt

SEQ ID NO: 129962 - DNA, 22 bp, Artificial Sequence
  Synthetic oligonucleotide; TTT chr11 5304874 5304895 5304879 5304874 -
ttagtagagacagggtttcacc

SEQ ID NO: 129963 - DNA, 22 bp, Artificial Sequence
  Synthetic oligonucleotide; TTT chr11 5304873 5304894 5304878 5304873 -
tagtagagacagggtttcacca

SEQ ID NO: 129964 - DNA, 22 bp, Artificial Sequence
  Synthetic oligonucleotide; TTT chr11 5304872 5304893 5304877 5304872 -
agtagagacagggtttcaccat

SEQ ID NO: 129965 - DNA, 22 bp, Artificial Sequence
  Synthetic oligonucleotide; TTA chr11 5304871 5304892 5304876 5304871 -
gtagagacagggtttcaccatg

SEQ ID NO: 129966 - DNA, 22 bp, Artificial Sequence
  Synthetic oligonucleotide; TTT chr11 5304856 5304877 5304861 5304856 -
caccatgttggccaggctagtc

SEQ ID NO: 129967 - DNA, 22 bp, Artificial Sequence
  Synthetic oligonucleotide; TTC chr11 5304855 5304876 5304860 5304855 -
accatgttggccaggctagtct

SEQ ID NO: 129968 - DNA, 22 bp, Artificial Sequence
  Synthetic oligonucleotide; TTG chr11 5304846 5304867 5304851 5304846 -
gccaggctagtctcaaactgct

SEQ ID NO: 129969 - DNA, 22 bp, Artificial Sequence
  Synthetic oligonucleotide; CTA chr11 5304837 5304858 5304842 5304837 -
gtctcaaactgctgacctcgtg

SEQ ID NO: 129970 - DNA, 22 bp, Artificial Sequence
  Synthetic oligonucleotide; CTC chr11 5304832 5304853 5304837 5304832 -
aaactgctgacctcgtgatcca

SEQ ID NO: 129971 - DNA, 22 bp, Artificial Sequence
  Synthetic oligonucleotide; CTG chr11 5304826 5304847 5304831 5304826 -
ctgacctcgtgatccacctcag

SEQ ID NO: 129972 - DNA, 22 bp, Artificial Sequence
  Synthetic oligonucleotide; CTG chr11 5304823 5304844 5304828 5304823 -
acctcgtgatccacctcagcct

SEQ ID NO: 129973 - DNA, 22 bp, Artificial Sequence
  Synthetic oligonucleotide; CTC chr11 5304818 5304839 5304823 5304818 -
gtgatccacctcagccttccaa

SEQ ID NO: 129974 - DNA, 22 bp, Artificial Sequence
  Synthetic oligonucleotide; CTC chr11 5304806 5304827 5304811 5304806 -
agccttccaaagtgctaggatt

SEQ ID NO: 129975 - DNA, 22 bp, Artificial Sequence
  Synthetic oligonucleotide; CTT chr11 5304800 5304821 5304805 5304800 -
ccaaagtgctaggattacaggc

SEQ ID NO: 129976 - DNA, 22 bp, Artificial Sequence
  Synthetic oligonucleotide; TTC chr11 5304799 5304820 5304804 5304799 -
caaagtgctaggattacaggca

SEQ ID NO: 129977 - DNA, 22 bp, Artificial Sequence
  Synthetic oligonucleotide; CTA chr11 5304789 5304810 5304794 5304789 -
ggattacaggcatgagcctctg

SEQ ID NO: 129978 - DNA, 22 bp, Artificial Sequence
  Synthetic oligonucleotide; TTA chr11 5304783 5304804 5304788 5304783 -
caggcatgagcctctgtgcctg

SEQ ID NO: 129979 - DNA, 22 bp, Artificial Sequence
  Synthetic oligonucleotide; CTC chr11 5304769 5304790 5304774 5304769 -
tgtgcctggccacctcttccat

SEQ ID NO: 129980 - DNA, 22 bp, Artificial Sequence
  Synthetic oligonucleotide; CTG chr11 5304767 5304788 5304772 5304767 -
tgcctggccacctcttccattt

SEQ ID NO: 129981 - DNA, 22 bp, Artificial Sequence
  Synthetic oligonucleotide; CTG chr11 5304761 5304782 5304766 5304761 -
gccacctcttccattttaattt

SEQ ID NO: 129982 - DNA, 22 bp, Artificial Sequence
  Synthetic oligonucleotide; CTC chr11 5304753 5304774 5304758 5304753 -
ttccattttaatttgtacttaa

SEQ ID NO: 129983 - DNA, 22 bp, Artificial Sequence
  Synthetic oligonucleotide; CTT chr11 5304751 5304772 5304756 5304751 -
ccattttaatttgtacttaagg

SEQ ID NO: 129984 - DNA, 22 bp, Artificial Sequence
  Synthetic oligonucleotide; TTC chr11 5304750 5304771 5304755 5304750 -
cattttaatttgtacttaaggt

SEQ ID NO: 129985 - DNA, 22 bp, Artificial Sequence
  Synthetic oligonucleotide; TTT chr11 5304745 5304766 5304750 5304745 -
taatttgtacttaaggtaagat

SEQ ID NO: 129986 - DNA, 22 bp, Artificial Sequence
  Synthetic oligonucleotide; TTT chr11 5304744 5304765 5304749 5304744 -
aatttgtacttaaggtaagata

SEQ ID NO: 129987 - DNA, 22 bp, Artificial Sequence
  Synthetic oligonucleotide; TTA chr11 5304743 5304764 5304748 5304743 -
atttgtacttaaggtaagatat

SEQ ID NO: 129988 - DNA, 22 bp, Artificial Sequence
  Synthetic oligonucleotide; TTT chr11 5304739 5304760 5304744 5304739 -
gtacttaaggtaagatataaaa

SEQ ID NO: 129989 - DNA, 22 bp, Artificial Sequence
  Synthetic oligonucleotide; TTG chr11 5304738 5304759 5304743 5304738 -
tacttaaggtaagatataaaaa

SEQ ID NO: 129990 - DNA, 22 bp, Artificial Sequence
  Synthetic oligonucleotide; CTT chr11 5304733 5304754 5304738 5304733 -
aaggtaagatataaaaaagtca

SEQ ID NO: 129991 - DNA, 22 bp, Artificial Sequence
  Synthetic oligonucleotide; TTA chr11 5304732 5304753 5304737 5304732 -
aggtaagatataaaaaagtcac

SEQ ID NO: 129992 - DNA, 22 bp, Artificial Sequence
  Synthetic oligonucleotide; CTT chr11 5304708 5304729 5304713 5304708 -
aaaagctgagatttttcagata

SEQ ID NO: 129993 - DNA, 22 bp, Artificial Sequence
  Synthetic oligonucleotide; TTA chr11 5304707 5304728 5304712 5304707 -
aaagctgagatttttcagatat

SEQ ID NO: 129994 - DNA, 22 bp, Artificial Sequence
  Synthetic oligonucleotide; CTG chr11 5304700 5304721 5304705 5304700 -
agatttttcagatattttgtct

SEQ ID NO: 129995 - DNA, 22 bp, Artificial Sequence
  Synthetic oligonucleotide; TTT chr11 5304694 5304715 5304699 5304694 -
ttcagatattttgtcttcatct

SEQ ID NO: 129996 - DNA, 22 bp, Artificial Sequence
  Synthetic oligonucleotide; TTT chr11 5304693 5304714 5304698 5304693 -
tcagatattttgtcttcatctc

SEQ ID NO: 129997 - DNA, 22 bp, Artificial Sequence
  Synthetic oligonucleotide; TTT chr11 5304692 5304713 5304697 5304692 -
cagatattttgtcttcatctca

SEQ ID NO: 129998 - DNA, 22 bp, Artificial Sequence
  Synthetic oligonucleotide; TTC chr11 5304691 5304712 5304696 5304691 -
agatattttgtcttcatctcat

SEQ ID NO: 129999 - DNA, 22 bp, Artificial Sequence
  Synthetic oligonucleotide; TTT chr11 5304683 5304704 5304688 5304683 -
tgtcttcatctcatggcttccc

SEQ ID NO: 130000 - DNA, 22 bp, Artificial Sequence
  Synthetic oligonucleotide; TTT chr11 5304682 5304703 5304687 5304682 -
gtcttcatctcatggcttccca

SEQ ID NO: 130001 - DNA, 22 bp, Artificial Sequence
  Synthetic oligonucleotide; TTG chr11 5304681 5304702 5304686 5304681 -
tcttcatctcatggcttcccat

SEQ ID NO: 130002 - DNA, 22 bp, Artificial Sequence
  Synthetic oligonucleotide; CTT chr11 5304677 5304698 5304682 5304677 -
catctcatggcttcccattgtc

SEQ ID NO: 130003 - DNA, 22 bp, Artificial Sequence
  Synthetic oligonucleotide; TTC chr11 5304676 5304697 5304681 5304676 -
atctcatggcttcccattgtca

SEQ ID NO: 130004 - DNA, 22 bp, Artificial Sequence
  Synthetic oligonucleotide; CTC chr11 5304671 5304692 5304676 5304671 -
atggcttcccattgtcagttga

SEQ ID NO: 130005 - DNA, 22 bp, Artificial Sequence
  Synthetic oligonucleotide; CTT chr11 5304664 5304685 5304669 5304664 -
cccattgtcagttgactttaaa

SEQ ID NO: 130006 - DNA, 22 bp, Artificial Sequence
  Synthetic oligonucleotide; TTC chr11 5304663 5304684 5304668 5304663 -
ccattgtcagttgactttaaat

SEQ ID NO: 130007 - DNA, 22 bp, Artificial Sequence
  Synthetic oligonucleotide; TTG chr11 5304657 5304678 5304662 5304657 -
tcagttgactttaaatatttat

SEQ ID NO: 130008 - DNA, 22 bp, Artificial Sequence
  Synthetic oligonucleotide; TTG chr11 5304650 5304671 5304655 5304650 -
actttaaatatttattttggta

SEQ ID NO: 130009 - DNA, 22 bp, Artificial Sequence
  Synthetic oligonucleotide; CTT chr11 5304646 5304667 5304651 5304646 -
taaatatttattttggtatatt

SEQ ID NO: 130010 - DNA, 22 bp, Artificial Sequence
  Synthetic oligonucleotide; TTT chr11 5304645 5304666 5304650 5304645 -
aaatatttattttggtatattt

SEQ ID NO: 130011 - DNA, 22 bp, Artificial Sequence
  Synthetic oligonucleotide; TTA chr11 5304644 5304665 5304649 5304644 -
aatatttattttggtatattta

SEQ ID NO: 130012 - DNA, 22 bp, Artificial Sequence
  Synthetic oligonucleotide; TTT chr11 5304637 5304658 5304642 5304637 -
attttggtatatttattaattt

SEQ ID NO: 130013 - DNA, 22 bp, Artificial Sequence
  Synthetic oligonucleotide; TTA chr11 5304636 5304657 5304641 5304636 -
ttttggtatatttattaatttc

SEQ ID NO: 130014 - DNA, 22 bp, Artificial Sequence
  Synthetic oligonucleotide; TTT chr11 5304633 5304654 5304638 5304633 -
tggtatatttattaatttcttc

SEQ ID NO: 130015 - DNA, 22 bp, Artificial Sequence
  Synthetic oligonucleotide; TTT chr11 5304632 5304653 5304637 5304632 -
ggtatatttattaatttcttct

SEQ ID NO: 130016 - DNA, 22 bp, Artificial Sequence
  Synthetic oligonucleotide; TTG chr11 5304631 5304652 5304636 5304631 -
gtatatttattaatttcttcta

SEQ ID NO: 130017 - DNA, 22 bp, Artificial Sequence
  Synthetic oligonucleotide; TTT chr11 5304623 5304644 5304628 5304623 -
attaatttcttctataggaaca

SEQ ID NO: 130018 - DNA, 22 bp, Artificial Sequence
  Synthetic oligonucleotide; TTA chr11 5304622 5304643 5304627 5304622 -
ttaatttcttctataggaacac

SEQ ID NO: 130019 - DNA, 22 bp, Artificial Sequence
  Synthetic oligonucleotide; TTA chr11 5304619 5304640 5304624 5304619 -
atttcttctataggaacacaat

SEQ ID NO: 130020 - DNA, 22 bp, Artificial Sequence
  Synthetic oligonucleotide; TTT chr11 5304615 5304636 5304620 5304615 -
cttctataggaacacaattttg

SEQ ID NO: 130021 - DNA, 22 bp, Artificial Sequence
  Synthetic oligonucleotide; TTC chr11 5304614 5304635 5304619 5304614 -
ttctataggaacacaattttgg

SEQ ID NO: 130022 - DNA, 22 bp, Artificial Sequence
  Synthetic oligonucleotide; CTT chr11 5304612 5304633 5304617 5304612 -
ctataggaacacaattttgggg

SEQ ID NO: 130023 - DNA, 22 bp, Artificial Sequence
  Synthetic oligonucleotide; TTC chr11 5304611 5304632 5304616 5304611 -
tataggaacacaattttggggc

SEQ ID NO: 130024 - DNA, 22 bp, Artificial Sequence
  Synthetic oligonucleotide; CTA chr11 5304609 5304630 5304614 5304609 -
taggaacacaattttggggcaa

SEQ ID NO: 130025 - DNA, 22 bp, Artificial Sequence
  Synthetic oligonucleotide; TTT chr11 5304595 5304616 5304600 5304595 -
tggggcaatatgtggagatgaa

SEQ ID NO: 130026 - DNA, 22 bp, Artificial Sequence
  Synthetic oligonucleotide; TTT chr11 5304594 5304615 5304599 5304594 -
ggggcaatatgtggagatgaaa

SEQ ID NO: 130027 - DNA, 22 bp, Artificial Sequence
  Synthetic oligonucleotide; TTG chr11 5304593 5304614 5304598 5304593 -
gggcaatatgtggagatgaaaa

SEQ ID NO: 130028 - DNA, 22 bp, Artificial Sequence
  Synthetic oligonucleotide; TTC chr11 5304562 5304583 5304567 5304562 -
aggggacactgattgtacaggg

SEQ ID NO: 130029 - DNA, 22 bp, Artificial Sequence
  Synthetic oligonucleotide; CTG chr11 5304551 5304572 5304556 5304551 -
attgtacagggcacttgcagat

SEQ ID NO: 130030 - DNA, 22 bp, Artificial Sequence
  Synthetic oligonucleotide; TTG chr11 5304547 5304568 5304552 5304547 -
tacagggcacttgcagattatc

SEQ ID NO: 130031 - DNA, 22 bp, Artificial Sequence
  Synthetic oligonucleotide; CTT chr11 5304535 5304556 5304540 5304535 -
gcagattatctggaactaaacg

SEQ ID NO: 130032 - DNA, 22 bp, Artificial Sequence
  Synthetic oligonucleotide; TTG chr11 5304534 5304555 5304539 5304534 -
cagattatctggaactaaacgg

SEQ ID NO: 130033 - DNA, 22 bp, Artificial Sequence
  Synthetic oligonucleotide; TTA chr11 5304527 5304548 5304532 5304527 -
tctggaactaaacggaagactg

SEQ ID NO: 130034 - DNA, 22 bp, Artificial Sequence
  Synthetic oligonucleotide; CTG chr11 5304523 5304544 5304528 5304523 -
gaactaaacggaagactgttct

SEQ ID NO: 130035 - DNA, 22 bp, Artificial Sequence
  Synthetic oligonucleotide; CTA chr11 5304517 5304538 5304522 5304517 -
aacggaagactgttctttttta

SEQ ID NO: 130036 - DNA, 22 bp, Artificial Sequence
  Synthetic oligonucleotide; CTG chr11 5304505 5304526 5304510 5304505 -
ttcttttttaacacgatcttaa

SEQ ID NO: 130037 - DNA, 22 bp, Artificial Sequence
  Synthetic oligonucleotide; TTC chr11 5304502 5304523 5304507 5304502 -
ttttttaacacgatcttaatat

SEQ ID NO: 130038 - DNA, 22 bp, Artificial Sequence
  Synthetic oligonucleotide; CTT chr11 5304500 5304521 5304505 5304500 -
ttttaacacgatcttaatattc

SEQ ID NO: 130039 - DNA, 22 bp, Artificial Sequence
  Synthetic oligonucleotide; TTT chr11 5304499 5304520 5304504 5304499 -
tttaacacgatcttaatattct

SEQ ID NO: 130040 - DNA, 22 bp, Artificial Sequence
  Synthetic oligonucleotide; TTT chr11 5304498 5304519 5304503 5304498 -
ttaacacgatcttaatattctc

SEQ ID NO: 130041 - DNA, 22 bp, Artificial Sequence
  Synthetic oligonucleotide; TTT chr11 5304497 5304518 5304502 5304497 -
taacacgatcttaatattctct

SEQ ID NO: 130042 - DNA, 22 bp, Artificial Sequence
  Synthetic oligonucleotide; TTT chr11 5304496 5304517 5304501 5304496 -
aacacgatcttaatattctctt

SEQ ID NO: 130043 - DNA, 22 bp, Artificial Sequence
  Synthetic oligonucleotide; TTA chr11 5304495 5304516 5304500 5304495 -
acacgatcttaatattctcttt

SEQ ID NO: 130044 - DNA, 22 bp, Artificial Sequence
  Synthetic oligonucleotide; CTT chr11 5304485 5304506 5304490 5304485 -
aatattctctttttgtcttctc

SEQ ID NO: 130045 - DNA, 22 bp, Artificial Sequence
  Synthetic oligonucleotide; TTA chr11 5304484 5304505 5304489 5304484 -
atattctctttttgtcttctca

SEQ ID NO: 130046 - DNA, 22 bp, Artificial Sequence
  Synthetic oligonucleotide; TTC chr11 5304478 5304499 5304483 5304478 -
tctttttgtcttctcattttag

SEQ ID NO: 130047 - DNA, 22 bp, Artificial Sequence
  Synthetic oligonucleotide; CTC chr11 5304476 5304497 5304481 5304476 -
tttttgtcttctcattttagtt

SEQ ID NO: 130048 - DNA, 22 bp, Artificial Sequence
  Synthetic oligonucleotide; CTT chr11 5304474 5304495 5304479 5304474 -
tttgtcttctcattttagttta

SEQ ID NO: 130049 - DNA, 22 bp, Artificial Sequence
  Synthetic oligonucleotide; TTT chr11 5304473 5304494 5304478 5304473 -
ttgtcttctcattttagtttat

SEQ ID NO: 130050 - DNA, 22 bp, Artificial Sequence
  Synthetic oligonucleotide; TTT chr11 5304472 5304493 5304477 5304472 -
tgtcttctcattttagtttatg

SEQ ID NO: 130051 - DNA, 22 bp, Artificial Sequence
  Synthetic oligonucleotide; TTT chr11 5304471 5304492 5304476 5304471 -
gtcttctcattttagtttatgt

SEQ ID NO: 130052 - DNA, 22 bp, Artificial Sequence
  Synthetic oligonucleotide; TTG chr11 5304470 5304491 5304475 5304470 -
tcttctcattttagtttatgtc

SEQ ID NO: 130053 - DNA, 22 bp, Artificial Sequence
  Synthetic oligonucleotide; CTT chr11 5304466 5304487 5304471 5304466 -
ctcattttagtttatgtcttta

SEQ ID NO: 130054 - DNA, 22 bp, Artificial Sequence
  Synthetic oligonucleotide; TTC chr11 5304465 5304486 5304470 5304465 -
tcattttagtttatgtctttat

SEQ ID NO: 130055 - DNA, 22 bp, Artificial Sequence
  Synthetic oligonucleotide; CTC chr11 5304463 5304484 5304468 5304463 -
attttagtttatgtctttataa

SEQ ID NO: 130056 - DNA, 22 bp, Artificial Sequence
  Synthetic oligonucleotide; TTT chr11 5304459 5304480 5304464 5304459 -
tagtttatgtctttataaatgg

SEQ ID NO: 130057 - DNA, 22 bp, Artificial Sequence
  Synthetic oligonucleotide; TTT chr11 5304458 5304479 5304463 5304458 -
agtttatgtctttataaatggt

SEQ ID NO: 130058 - DNA, 22 bp, Artificial Sequence
  Synthetic oligonucleotide; TTA chr11 5304457 5304478 5304462 5304457 -
gtttatgtctttataaatggtt

SEQ ID NO: 130059 - DNA, 22 bp, Artificial Sequence
  Synthetic oligonucleotide; TTT chr11 5304453 5304474 5304458 5304453 -
atgtctttataaatggtttcct

SEQ ID NO: 130060 - DNA, 22 bp, Artificial Sequence
  Synthetic oligonucleotide; TTA chr11 5304452 5304473 5304457 5304452 -
tgtctttataaatggtttcctg

SEQ ID NO: 130061 - DNA, 22 bp, Artificial Sequence
  Synthetic oligonucleotide; CTT chr11 5304446 5304467 5304451 5304446 -
tataaatggtttcctgaacagt

SEQ ID NO: 130062 - DNA, 22 bp, Artificial Sequence
  Synthetic oligonucleotide; TTT chr11 5304445 5304466 5304450 5304445 -
ataaatggtttcctgaacagtt

SEQ ID NO: 130063 - DNA, 22 bp, Artificial Sequence
  Synthetic oligonucleotide; TTA chr11 5304444 5304465 5304449 5304444 -
taaatggtttcctgaacagttc

SEQ ID NO: 130064 - DNA, 22 bp, Artificial Sequence
  Synthetic oligonucleotide; TTT chr11 5304434 5304455 5304439 5304434 -
cctgaacagttcctaagctttt

SEQ ID NO: 130065 - DNA, 22 bp, Artificial Sequence
  Synthetic oligonucleotide; TTC chr11 5304433 5304454 5304438 5304433 -
ctgaacagttcctaagcttttt

SEQ ID NO: 130066 - DNA, 22 bp, Artificial Sequence
  Synthetic oligonucleotide; CTG chr11 5304430 5304451 5304435 5304430 -
aacagttcctaagctttttgtc

SEQ ID NO: 130067 - DNA, 22 bp, Artificial Sequence
  Synthetic oligonucleotide; TTC chr11 5304422 5304443 5304427 5304422 -
ctaagctttttgtcagcatggc

SEQ ID NO: 130068 - DNA, 22 bp, Artificial Sequence
  Synthetic oligonucleotide; CTA chr11 5304419 5304440 5304424 5304419 -
agctttttgtcagcatggcaag

SEQ ID NO: 130069 - DNA, 22 bp, Artificial Sequence
  Synthetic oligonucleotide; CTT chr11 5304414 5304435 5304419 5304414 -
tttgtcagcatggcaagttgaa

SEQ ID NO: 130070 - DNA, 22 bp, Artificial Sequence
  Synthetic oligonucleotide; TTT chr11 5304413 5304434 5304418 5304413 -
ttgtcagcatggcaagttgaag

SEQ ID NO: 130071 - DNA, 22 bp, Artificial Sequence
  Synthetic oligonucleotide; TTT chr11 5304412 5304433 5304417 5304412 -
tgtcagcatggcaagttgaaga

SEQ ID NO: 130072 - DNA, 22 bp, Artificial Sequence
  Synthetic oligonucleotide; TTT chr11 5304411 5304432 5304416 5304411 -
gtcagcatggcaagttgaagaa

SEQ ID NO: 130073 - DNA, 22 bp, Artificial Sequence
  Synthetic oligonucleotide; TTG chr11 5304410 5304431 5304415 5304410 -
tcagcatggcaagttgaagaag

SEQ ID NO: 130074 - DNA, 22 bp, Artificial Sequence
  Synthetic oligonucleotide; TTG chr11 5304394 5304415 5304399 5304394 -
aagaagctctggatgatggatc

SEQ ID NO: 130075 - DNA, 22 bp, Artificial Sequence
  Synthetic oligonucleotide; CTC chr11 5304385 5304406 5304390 5304385 -
tggatgatggatctatgttacc

SEQ ID NO: 130076 - DNA, 22 bp, Artificial Sequence
  Synthetic oligonucleotide; CTG chr11 5304383 5304404 5304388 5304383 -
gatgatggatctatgttacctt

SEQ ID NO: 130077 - DNA, 22 bp, Artificial Sequence
  Synthetic oligonucleotide; CTA chr11 5304370 5304391 5304375 5304370 -
tgttaccttcagaaactcttga

SEQ ID NO: 130078 - DNA, 22 bp, Artificial Sequence
  Synthetic oligonucleotide; TTA chr11 5304365 5304386 5304370 5304365 -
ccttcagaaactcttgaggact

SEQ ID NO: 130079 - DNA, 22 bp, Artificial Sequence
  Synthetic oligonucleotide; CTT chr11 5304361 5304382 5304366 5304361 -
cagaaactcttgaggactctgg

SEQ ID NO: 130080 - DNA, 22 bp, Artificial Sequence
  Synthetic oligonucleotide; TTC chr11 5304360 5304381 5304365 5304360 -
agaaactcttgaggactctggg

SEQ ID NO: 130081 - DNA, 22 bp, Artificial Sequence
  Synthetic oligonucleotide; CTC chr11 5304352 5304373 5304357 5304352 -
ttgaggactctgggatagttgc

SEQ ID NO: 130082 - DNA, 22 bp, Artificial Sequence
  Synthetic oligonucleotide; CTT chr11 5304350 5304371 5304355 5304350 -
gaggactctgggatagttgctg

SEQ ID NO: 130083 - DNA, 22 bp, Artificial Sequence
  Synthetic oligonucleotide; TTG chr11 5304349 5304370 5304354 5304349 -
aggactctgggatagttgctgt

SEQ ID NO: 130084 - DNA, 22 bp, Artificial Sequence
  Synthetic oligonucleotide; CTC chr11 5304342 5304363 5304347 5304342 -
tgggatagttgctgtcaaagaa

SEQ ID NO: 130085 - DNA, 22 bp, Artificial Sequence
  Synthetic oligonucleotide; CTG chr11 5304340 5304361 5304345 5304340 -
ggatagttgctgtcaaagaatc

SEQ ID NO: 130086 - DNA, 22 bp, Artificial Sequence
  Synthetic oligonucleotide; TTG chr11 5304331 5304352 5304336 5304331 -
ctgtcaaagaatcagtccaaag

SEQ ID NO: 130087 - DNA, 22 bp, Artificial Sequence
  Synthetic oligonucleotide; CTG chr11 5304328 5304349 5304333 5304328 -
tcaaagaatcagtccaaaggca

SEQ ID NO: 130088 - DNA, 22 bp, Artificial Sequence
  Synthetic oligonucleotide; CTC chr11 5304303 5304324 5304308 5304303 -
agaaaggggcaagagaacagtg

SEQ ID NO: 130089 - DNA, 22 bp, Artificial Sequence
  Synthetic oligonucleotide; TTT chr11 5304269 5304290 5304274 5304269 -
ttgcatccctcagggggcctct

SEQ ID NO: 130090 - DNA, 22 bp, Artificial Sequence
  Synthetic oligonucleotide; TTT chr11 5304268 5304289 5304273 5304268 -
tgcatccctcagggggcctcta

SEQ ID NO: 130091 - DNA, 22 bp, Artificial Sequence
  Synthetic oligonucleotide; TTT chr11 5304267 5304288 5304272 5304267 -
gcatccctcagggggcctctat

SEQ ID NO: 130092 - DNA, 22 bp, Artificial Sequence
  Synthetic oligonucleotide; TTG chr11 5304266 5304287 5304271 5304266 -
catccctcagggggcctctatg

SEQ ID NO: 130093 - DNA, 22 bp, Artificial Sequence
  Synthetic oligonucleotide; CTC chr11 5304258 5304279 5304263 5304258 -
agggggcctctatgcttgcctg

SEQ ID NO: 130094 - DNA, 22 bp, Artificial Sequence
  Synthetic oligonucleotide; CTC chr11 5304248 5304269 5304253 5304248 -
tatgcttgcctgagagtgataa

SEQ ID NO: 130095 - DNA, 22 bp, Artificial Sequence
  Synthetic oligonucleotide; CTA chr11 5304246 5304267 5304251 5304246 -
tgcttgcctgagagtgataaat

SEQ ID NO: 130096 - DNA, 22 bp, Artificial Sequence
  Synthetic oligonucleotide; CTT chr11 5304241 5304262 5304246 5304241 -
gcctgagagtgataaattccac

SEQ ID NO: 130097 - DNA, 22 bp, Artificial Sequence
  Synthetic oligonucleotide; TTG chr11 5304240 5304261 5304245 5304240 -
cctgagagtgataaattccact

SEQ ID NO: 130098 - DNA, 22 bp, Artificial Sequence
  Synthetic oligonucleotide; CTG chr11 5304236 5304257 5304241 5304236 -
agagtgataaattccactaaag

SEQ ID NO: 130099 - DNA, 22 bp, Artificial Sequence
  Synthetic oligonucleotide; TTC chr11 5304222 5304243 5304227 5304222 -
cactaaagttatgactctcact

SEQ ID NO: 130100 - DNA, 22 bp, Artificial Sequence
  Synthetic oligonucleotide; CTA chr11 5304217 5304238 5304222 5304217 -
aagttatgactctcacttttgt

SEQ ID NO: 130101 - DNA, 22 bp, Artificial Sequence
  Synthetic oligonucleotide; TTA chr11 5304211 5304232 5304216 5304211 -
tgactctcacttttgtcatgta

SEQ ID NO: 130102 - DNA, 22 bp, Artificial Sequence
  Synthetic oligonucleotide; CTC chr11 5304205 5304226 5304210 5304205 -
tcacttttgtcatgtatcacat

SEQ ID NO: 130103 - DNA, 22 bp, Artificial Sequence
  Synthetic oligonucleotide; CTC chr11 5304203 5304224 5304208 5304203 -
acttttgtcatgtatcacattc

SEQ ID NO: 130104 - DNA, 22 bp, Artificial Sequence
  Synthetic oligonucleotide; CTT chr11 5304199 5304220 5304204 5304199 -
ttgtcatgtatcacattctagg

SEQ ID NO: 130105 - DNA, 22 bp, Artificial Sequence
  Synthetic oligonucleotide; TTT chr11 5304198 5304219 5304203 5304198 -
tgtcatgtatcacattctagga

SEQ ID NO: 130106 - DNA, 22 bp, Artificial Sequence
  Synthetic oligonucleotide; TTT chr11 5304197 5304218 5304202 5304197 -
gtcatgtatcacattctaggag

SEQ ID NO: 130107 - DNA, 22 bp, Artificial Sequence
  Synthetic oligonucleotide; TTG chr11 5304196 5304217 5304201 5304196 -
tcatgtatcacattctaggaga

SEQ ID NO: 130108 - DNA, 22 bp, Artificial Sequence
  Synthetic oligonucleotide; TTC chr11 5304181 5304202 5304186 5304181 -
taggagactccctaaactatta

SEQ ID NO: 130109 - DNA, 22 bp, Artificial Sequence
  Synthetic oligonucleotide; CTA chr11 5304179 5304200 5304184 5304179 -
ggagactccctaaactattagg

SEQ ID NO: 130110 - DNA, 22 bp, Artificial Sequence
  Synthetic oligonucleotide; CTC chr11 5304171 5304192 5304176 5304171 -
cctaaactattagggcaactat

SEQ ID NO: 130111 - DNA, 22 bp, Artificial Sequence
  Synthetic oligonucleotide; CTA chr11 5304167 5304188 5304172 5304167 -
aactattagggcaactattctc

SEQ ID NO: 130112 - DNA, 22 bp, Artificial Sequence
  Synthetic oligonucleotide; CTA chr11 5304162 5304183 5304167 5304162 -
ttagggcaactattctccctgg

SEQ ID NO: 130113 - DNA, 22 bp, Artificial Sequence
  Synthetic oligonucleotide; TTA chr11 5304159 5304180 5304164 5304159 -
gggcaactattctccctggaat

SEQ ID NO: 130114 - DNA, 22 bp, Artificial Sequence
  Synthetic oligonucleotide; CTA chr11 5304150 5304171 5304155 5304150 -
ttctccctggaatatttgggta

SEQ ID NO: 130115 - DNA, 22 bp, Artificial Sequence
  Synthetic oligonucleotide; TTC chr11 5304147 5304168 5304152 5304147 -
tccctggaatatttgggtatgt

SEQ ID NO: 130116 - DNA, 22 bp, Artificial Sequence
  Synthetic oligonucleotide; CTC chr11 5304145 5304166 5304150 5304145 -
cctggaatatttgggtatgtgg

SEQ ID NO: 130117 - DNA, 22 bp, Artificial Sequence
  Synthetic oligonucleotide; CTG chr11 5304141 5304162 5304146 5304141 -
gaatatttgggtatgtggacag

SEQ ID NO: 130118 - DNA, 22 bp, Artificial Sequence
  Synthetic oligonucleotide; TTT chr11 5304133 5304154 5304138 5304133 -
gggtatgtggacagtttctggt

SEQ ID NO: 130119 - DNA, 22 bp, Artificial Sequence
  Synthetic oligonucleotide; TTG chr11 5304132 5304153 5304137 5304132 -
ggtatgtggacagtttctggta

SEQ ID NO: 130120 - DNA, 22 bp, Artificial Sequence
  Synthetic oligonucleotide; TTT chr11 5304116 5304137 5304121 5304116 -
ctggtactaccaaatttgccac

SEQ ID NO: 130121 - DNA, 22 bp, Artificial Sequence
  Synthetic oligonucleotide; TTC chr11 5304115 5304136 5304120 5304115 -
tggtactaccaaatttgccaca

SEQ ID NO: 130122 - DNA, 22 bp, Artificial Sequence
  Synthetic oligonucleotide; CTG chr11 5304113 5304134 5304118 5304113 -
gtactaccaaatttgccacaat

SEQ ID NO: 130123 - DNA, 22 bp, Artificial Sequence
  Synthetic oligonucleotide; CTA chr11 5304107 5304128 5304112 5304107 -
ccaaatttgccacaattaaatg

SEQ ID NO: 130124 - DNA, 22 bp, Artificial Sequence
  Synthetic oligonucleotide; TTT chr11 5304099 5304120 5304104 5304099 -
gccacaattaaatgccagcgta

SEQ ID NO: 130125 - DNA, 22 bp, Artificial Sequence
  Synthetic oligonucleotide; TTG chr11 5304098 5304119 5304103 5304098 -
ccacaattaaatgccagcgtag

SEQ ID NO: 130126 - DNA, 22 bp, Artificial Sequence
  Synthetic oligonucleotide; TTA chr11 5304089 5304110 5304094 5304089 -
aatgccagcgtagctgttttgc

SEQ ID NO: 130127 - DNA, 22 bp, Artificial Sequence
  Synthetic oligonucleotide; CTG chr11 5304073 5304094 5304078 5304073 -
ttttgctagagactgcagatgt

SEQ ID NO: 130128 - DNA, 22 bp, Artificial Sequence
  Synthetic oligonucleotide; TTT chr11 5304070 5304091 5304075 5304070 -
tgctagagactgcagatgttaa

SEQ ID NO: 130129 - DNA, 22 bp, Artificial Sequence
  Synthetic oligonucleotide; TTT chr11 5304069 5304090 5304074 5304069 -
gctagagactgcagatgttaaa

SEQ ID NO: 130130 - DNA, 22 bp, Artificial Sequence
  Synthetic oligonucleotide; TTG chr11 5304068 5304089 5304073 5304068 -
ctagagactgcagatgttaaat

SEQ ID NO: 130131 - DNA, 22 bp, Artificial Sequence
  Synthetic oligonucleotide; CTA chr11 5304065 5304086 5304070 5304065 -
gagactgcagatgttaaataga

SEQ ID NO: 130132 - DNA, 22 bp, Artificial Sequence
  Synthetic oligonucleotide; CTG chr11 5304058 5304079 5304063 5304058 -
cagatgttaaatagagggctat

SEQ ID NO: 130133 - DNA, 22 bp, Artificial Sequence
  Synthetic oligonucleotide; TTA chr11 5304049 5304070 5304054 5304049 -
aatagagggctatctttaggtc

SEQ ID NO: 130134 - DNA, 22 bp, Artificial Sequence
  Synthetic oligonucleotide; CTA chr11 5304037 5304058 5304042 5304037 -
tctttaggtcaataaaatatac

SEQ ID NO: 130135 - DNA, 22 bp, Artificial Sequence
  Synthetic oligonucleotide; CTT chr11 5304033 5304054 5304038 5304033 -
taggtcaataaaatatacttat

SEQ ID NO: 130136 - DNA, 22 bp, Artificial Sequence
  Synthetic oligonucleotide; TTT chr11 5304032 5304053 5304037 5304032 -
aggtcaataaaatatacttata

SEQ ID NO: 130137 - DNA, 22 bp, Artificial Sequence
  Synthetic oligonucleotide; TTA chr11 5304031 5304052 5304036 5304031 -
ggtcaataaaatatacttataa

SEQ ID NO: 130138 - DNA, 22 bp, Artificial Sequence
  Synthetic oligonucleotide; CTT chr11 5304013 5304034 5304018 5304013 -
ataaattgtattaactatttcc

SEQ ID NO: 130139 - DNA, 22 bp, Artificial Sequence
  Synthetic oligonucleotide; TTA chr11 5304012 5304033 5304017 5304012 -
taaattgtattaactatttccc

SEQ ID NO: 130140 - DNA, 22 bp, Artificial Sequence
  Synthetic oligonucleotide; TTG chr11 5304005 5304026 5304010 5304005 -
tattaactatttccccagtaat

SEQ ID NO: 130141 - DNA, 22 bp, Artificial Sequence
  Synthetic oligonucleotide; TTA chr11 5304000 5304021 5304005 5304000 -
actatttccccagtaattacca

SEQ ID NO: 130142 - DNA, 22 bp, Artificial Sequence
  Synthetic oligonucleotide; CTA chr11 5303996 5304017 5304001 5303996 -
tttccccagtaattaccacaca

SEQ ID NO: 130143 - DNA, 22 bp, Artificial Sequence
  Synthetic oligonucleotide; TTT chr11 5303993 5304014 5303998 5303993 -
ccccagtaattaccacacagtt

SEQ ID NO: 130144 - DNA, 22 bp, Artificial Sequence
  Synthetic oligonucleotide; TTC chr11 5303992 5304013 5303997 5303992 -
cccagtaattaccacacagttt

SEQ ID NO: 130145 - DNA, 22 bp, Artificial Sequence
  Synthetic oligonucleotide; TTA chr11 5303981 5304002 5303986 5303981 -
ccacacagttttaataaaaccc

SEQ ID NO: 130146 - DNA, 22 bp, Artificial Sequence
  Synthetic oligonucleotide; TTT chr11 5303970 5303991 5303975 5303970 -
taataaaaccctgtgcatccgc

SEQ ID NO: 130147 - DNA, 22 bp, Artificial Sequence
  Synthetic oligonucleotide; TTT chr11 5303969 5303990 5303974 5303969 -
aataaaaccctgtgcatccgca

SEQ ID NO: 130148 - DNA, 22 bp, Artificial Sequence
  Synthetic oligonucleotide; TTA chr11 5303968 5303989 5303973 5303968 -
ataaaaccctgtgcatccgcat

SEQ ID NO: 130149 - DNA, 22 bp, Artificial Sequence
  Synthetic oligonucleotide; CTG chr11 5303957 5303978 5303962 5303957 -
tgcatccgcatgtcccaaacgc

SEQ ID NO: 130150 - DNA, 22 bp, Artificial Sequence
  Synthetic oligonucleotide; CTC chr11 5303930 5303951 5303935 5303930 -
aggttttgaaaacacgactata

SEQ ID NO: 130151 - DNA, 22 bp, Artificial Sequence
  Synthetic oligonucleotide; TTT chr11 5303924 5303945 5303929 5303924 -
tgaaaacacgactatagtttaa

SEQ ID NO: 130152 - DNA, 22 bp, Artificial Sequence
  Synthetic oligonucleotide; TTT chr11 5303923 5303944 5303928 5303923 -
gaaaacacgactatagtttaag

SEQ ID NO: 130153 - DNA, 22 bp, Artificial Sequence
  Synthetic oligonucleotide; TTG chr11 5303922 5303943 5303927 5303922 -
aaaacacgactatagtttaaga

SEQ ID NO: 130154 - DNA, 22 bp, Artificial Sequence
  Synthetic oligonucleotide; CTA chr11 5303910 5303931 5303915 5303910 -
tagtttaagaataatcaggcct

SEQ ID NO: 130155 - DNA, 22 bp, Artificial Sequence
  Synthetic oligonucleotide; TTT chr11 5303904 5303925 5303909 5303904 -
aagaataatcaggcctcctccg

SEQ ID NO: 130156 - DNA, 22 bp, Artificial Sequence
  Synthetic oligonucleotide; TTA chr11 5303903 5303924 5303908 5303903 -
agaataatcaggcctcctccgg

SEQ ID NO: 130157 - DNA, 22 bp, Artificial Sequence
  Synthetic oligonucleotide; CTC chr11 5303887 5303908 5303892 5303887 -
ctccggcttcctccatctggtc

SEQ ID NO: 130158 - DNA, 22 bp, Artificial Sequence
  Synthetic oligonucleotide; CTC chr11 5303884 5303905 5303889 5303884 -
cggcttcctccatctggtccat

SEQ ID NO: 130159 - DNA, 22 bp, Artificial Sequence
  Synthetic oligonucleotide; CTT chr11 5303878 5303899 5303883 5303878 -
cctccatctggtccattatctg

SEQ ID NO: 130160 - DNA, 22 bp, Artificial Sequence
  Synthetic oligonucleotide; TTC chr11 5303877 5303898 5303882 5303877 -
ctccatctggtccattatctgg

SEQ ID NO: 130161 - DNA, 22 bp, Artificial Sequence
  Synthetic oligonucleotide; CTC chr11 5303874 5303895 5303879 5303874 -
catctggtccattatctgggtg

SEQ ID NO: 130162 - DNA, 22 bp, Artificial Sequence
  Synthetic oligonucleotide; CTG chr11 5303868 5303889 5303873 5303868 -
gtccattatctgggtgacagta

SEQ ID NO: 130163 - DNA, 22 bp, Artificial Sequence
  Synthetic oligonucleotide; TTA chr11 5303860 5303881 5303865 5303860 -
tctgggtgacagtagatccaaa

SEQ ID NO: 130164 - DNA, 22 bp, Artificial Sequence
  Synthetic oligonucleotide; CTG chr11 5303856 5303877 5303861 5303856 -
ggtgacagtagatccaaataag

SEQ ID NO: 130165 - DNA, 22 bp, Artificial Sequence
  Synthetic oligonucleotide; TTA chr11 5303828 5303849 5303833 5303828 -
gctcttatcctgtacaacaaat

SEQ ID NO: 130166 - DNA, 22 bp, Artificial Sequence
  Synthetic oligonucleotide; CTC chr11 5303824 5303845 5303829 5303824 -
ttatcctgtacaacaaattttg

SEQ ID NO: 130167 - DNA, 22 bp, Artificial Sequence
  Synthetic oligonucleotide; CTT chr11 5303822 5303843 5303827 5303822 -
atcctgtacaacaaattttggc

SEQ ID NO: 130168 - DNA, 22 bp, Artificial Sequence
  Synthetic oligonucleotide; TTA chr11 5303821 5303842 5303826 5303821 -
tcctgtacaacaaattttggca

SEQ ID NO: 130169 - DNA, 22 bp, Artificial Sequence
  Synthetic oligonucleotide; CTG chr11 5303816 5303837 5303821 5303816 -
tacaacaaattttggcattaat

SEQ ID NO: 130170 - DNA, 22 bp, Artificial Sequence
  Synthetic oligonucleotide; TTT chr11 5303804 5303825 5303809 5303804 -
tggcattaatccattctcttat

SEQ ID NO: 130171 - DNA, 22 bp, Artificial Sequence
  Synthetic oligonucleotide; TTT chr11 5303803 5303824 5303808 5303803 -
ggcattaatccattctcttata

SEQ ID NO: 130172 - DNA, 22 bp, Artificial Sequence
  Synthetic oligonucleotide; TTG chr11 5303802 5303823 5303807 5303802 -
gcattaatccattctcttataa

SEQ ID NO: 130173 - DNA, 22 bp, Artificial Sequence
  Synthetic oligonucleotide; TTA chr11 5303796 5303817 5303801 5303796 -
atccattctcttataaggcaac

SEQ ID NO: 130174 - DNA, 22 bp, Artificial Sequence
  Synthetic oligonucleotide; TTC chr11 5303788 5303809 5303793 5303788 -
tcttataaggcaacattggaag

SEQ ID NO: 130175 - DNA, 22 bp, Artificial Sequence
  Synthetic oligonucleotide; CTC chr11 5303786 5303807 5303791 5303786 -
ttataaggcaacattggaaggt

SEQ ID NO: 130176 - DNA, 22 bp, Artificial Sequence
  Synthetic oligonucleotide; CTT chr11 5303784 5303805 5303789 5303784 -
ataaggcaacattggaaggtta

SEQ ID NO: 130177 - DNA, 22 bp, Artificial Sequence
  Synthetic oligonucleotide; TTA chr11 5303783 5303804 5303788 5303783 -
taaggcaacattggaaggttaa

SEQ ID NO: 130178 - DNA, 22 bp, Artificial Sequence
  Synthetic oligonucleotide; TTG chr11 5303770 5303791 5303775 5303770 -
gaaggttaagagaacttataat

SEQ ID NO: 130179 - DNA, 22 bp, Artificial Sequence
  Synthetic oligonucleotide; TTA chr11 5303762 5303783 5303767 5303762 -
agagaacttataatgatataca

SEQ ID NO: 130180 - DNA, 22 bp, Artificial Sequence
  Synthetic oligonucleotide; CTT chr11 5303753 5303774 5303758 5303753 -
ataatgatatacacatcactcc

SEQ ID NO: 130181 - DNA, 22 bp, Artificial Sequence
  Synthetic oligonucleotide; TTA chr11 5303752 5303773 5303757 5303752 -
taatgatatacacatcactcct

SEQ ID NO: 130182 - DNA, 22 bp, Artificial Sequence
  Synthetic oligonucleotide; CTC chr11 5303732 5303753 5303737 5303732 -
ctgtggcggtagataagttctg

SEQ ID NO: 130183 - DNA, 22 bp, Artificial Sequence
  Synthetic oligonucleotide; CTG chr11 5303729 5303750 5303734 5303729 -
tggcggtagataagttctgcca

SEQ ID NO: 130184 - DNA, 22 bp, Artificial Sequence
  Synthetic oligonucleotide; TTC chr11 5303712 5303733 5303717 5303712 -
tgccacattaagcactatgcag

SEQ ID NO: 130185 - DNA, 22 bp, Artificial Sequence
  Synthetic oligonucleotide; CTG chr11 5303710 5303731 5303715 5303710 -
ccacattaagcactatgcaggt

SEQ ID NO: 130186 - DNA, 22 bp, Artificial Sequence
  Synthetic oligonucleotide; TTA chr11 5303702 5303723 5303707 5303702 -
agcactatgcaggtcataattc

SEQ ID NO: 130187 - DNA, 22 bp, Artificial Sequence
  Synthetic oligonucleotide; CTA chr11 5303695 5303716 5303700 5303695 -
tgcaggtcataattcagtggat

SEQ ID NO: 130188 - DNA, 22 bp, Artificial Sequence
  Synthetic oligonucleotide; TTC chr11 5303680 5303701 5303685 5303680 -
agtggatcaagttagttagcag

SEQ ID NO: 130189 - DNA, 22 bp, Artificial Sequence
  Synthetic oligonucleotide; TTA chr11 5303666 5303687 5303671 5303666 -
gttagcagtgtttttagtatcc

SEQ ID NO: 130190 - DNA, 22 bp, Artificial Sequence
  Synthetic oligonucleotide; TTA chr11 5303662 5303683 5303667 5303662 -
gcagtgtttttagtatccatat

SEQ ID NO: 130191 - DNA, 22 bp, Artificial Sequence
  Synthetic oligonucleotide; TTT chr11 5303653 5303674 5303658 5303653 -
ttagtatccatatgaacatagt

SEQ ID NO: 130192 - DNA, 22 bp, Artificial Sequence
  Synthetic oligonucleotide; TTT chr11 5303652 5303673 5303657 5303652 -
tagtatccatatgaacatagtc

SEQ ID NO: 130193 - DNA, 22 bp, Artificial Sequence
  Synthetic oligonucleotide; TTT chr11 5303651 5303672 5303656 5303651 -
agtatccatatgaacatagtct

SEQ ID NO: 130194 - DNA, 22 bp, Artificial Sequence
  Synthetic oligonucleotide; TTA chr11 5303650 5303671 5303655 5303650 -
gtatccatatgaacatagtctc

SEQ ID NO: 130195 - DNA, 22 bp, Artificial Sequence
  Synthetic oligonucleotide; CTC chr11 5303628 5303649 5303633 5303628 -
tgctactgcagtgcctagactg

SEQ ID NO: 130196 - DNA, 22 bp, Artificial Sequence
  Synthetic oligonucleotide; CTG chr11 5303626 5303647 5303631 5303626 -
ctactgcagtgcctagactgac

SEQ ID NO: 130197 - DNA, 22 bp, Artificial Sequence
  Synthetic oligonucleotide; CTA chr11 5303623 5303644 5303628 5303623 -
ctgcagtgcctagactgacatt

SEQ ID NO: 130198 - DNA, 22 bp, Artificial Sequence
  Synthetic oligonucleotide; CTG chr11 5303620 5303641 5303625 5303620 -
cagtgcctagactgacattttt

SEQ ID NO: 130199 - DNA, 22 bp, Artificial Sequence
  Synthetic oligonucleotide; CTA chr11 5303611 5303632 5303616 5303611 -
gactgacatttttgttatcaac

SEQ ID NO: 130200 - DNA, 22 bp, Artificial Sequence
  Synthetic oligonucleotide; CTG chr11 5303606 5303627 5303611 5303606 -
acatttttgttatcaacagtgt

SEQ ID NO: 130201 - DNA, 22 bp, Artificial Sequence
  Synthetic oligonucleotide; TTT chr11 5303600 5303621 5303605 5303600 -
ttgttatcaacagtgtcccctg

SEQ ID NO: 130202 - DNA, 22 bp, Artificial Sequence
  Synthetic oligonucleotide; TTT chr11 5303599 5303620 5303604 5303599 -
tgttatcaacagtgtcccctga

SEQ ID NO: 130203 - DNA, 22 bp, Artificial Sequence
  Synthetic oligonucleotide; TTT chr11 5303598 5303619 5303603 5303598 -
gttatcaacagtgtcccctgaa

SEQ ID NO: 130204 - DNA, 22 bp, Artificial Sequence
  Synthetic oligonucleotide; TTG chr11 5303597 5303618 5303602 5303597 -
ttatcaacagtgtcccctgaag

SEQ ID NO: 130205 - DNA, 22 bp, Artificial Sequence
  Synthetic oligonucleotide; TTA chr11 5303594 5303615 5303599 5303594 -
tcaacagtgtcccctgaagtag

SEQ ID NO: 130206 - DNA, 22 bp, Artificial Sequence
  Synthetic oligonucleotide; CTG chr11 5303578 5303599 5303583 5303578 -
aagtagcagccctttcaaaagt

SEQ ID NO: 130207 - DNA, 22 bp, Artificial Sequence
  Synthetic oligonucleotide; CTT chr11 5303564 5303585 5303569 5303564 -
tcaaaagtcctttcacctttcc

SEQ ID NO: 130208 - DNA, 22 bp, Artificial Sequence
  Synthetic oligonucleotide; TTT chr11 5303563 5303584 5303568 5303563 -
caaaagtcctttcacctttcct

SEQ ID NO: 130209 - DNA, 22 bp, Artificial Sequence
  Synthetic oligonucleotide; TTC chr11 5303562 5303583 5303567 5303562 -
aaaagtcctttcacctttcctc

SEQ ID NO: 130210 - DNA, 22 bp, Artificial Sequence
  Synthetic oligonucleotide; CTT chr11 5303552 5303573 5303557 5303552 -
tcacctttcctctgtccatctc

SEQ ID NO: 130211 - DNA, 22 bp, Artificial Sequence
  Synthetic oligonucleotide; TTT chr11 5303551 5303572 5303556 5303551 -
cacctttcctctgtccatctct

SEQ ID NO: 130212 - DNA, 22 bp, Artificial Sequence
  Synthetic oligonucleotide; TTC chr11 5303550 5303571 5303555 5303550 -
acctttcctctgtccatctctc

SEQ ID NO: 130213 - DNA, 22 bp, Artificial Sequence
  Synthetic oligonucleotide; CTT chr11 5303545 5303566 5303550 5303545 -
tcctctgtccatctctctccac

SEQ ID NO: 130214 - DNA, 22 bp, Artificial Sequence
  Synthetic oligonucleotide; TTT chr11 5303544 5303565 5303549 5303544 -
cctctgtccatctctctccacc

SEQ ID NO: 130215 - DNA, 22 bp, Artificial Sequence
  Synthetic oligonucleotide; TTC chr11 5303543 5303564 5303548 5303543 -
ctctgtccatctctctccacca

SEQ ID NO: 130216 - DNA, 22 bp, Artificial Sequence
  Synthetic oligonucleotide; CTC chr11 5303540 5303561 5303545 5303540 -
tgtccatctctctccaccaata

SEQ ID NO: 130217 - DNA, 22 bp, Artificial Sequence
  Synthetic oligonucleotide; CTG chr11 5303538 5303559 5303543 5303538 -
tccatctctctccaccaataat

SEQ ID NO: 130218 - DNA, 22 bp, Artificial Sequence
  Synthetic oligonucleotide; CTC chr11 5303530 5303551 5303535 5303530 -
tctccaccaataattgcttata

SEQ ID NO: 130219 - DNA, 22 bp, Artificial Sequence
  Synthetic oligonucleotide; CTC chr11 5303528 5303549 5303533 5303528 -
tccaccaataattgcttatatt

SEQ ID NO: 130220 - DNA, 22 bp, Artificial Sequence
  Synthetic oligonucleotide; CTC chr11 5303526 5303547 5303531 5303526 -
caccaataattgcttatattag

SEQ ID NO: 130221 - DNA, 22 bp, Artificial Sequence
  Synthetic oligonucleotide; TTG chr11 5303514 5303535 5303519 5303514 -
cttatattagagatgttactat

SEQ ID NO: 130222 - DNA, 22 bp, Artificial Sequence
  Synthetic oligonucleotide; CTT chr11 5303511 5303532 5303516 5303511 -
atattagagatgttactatgtg

SEQ ID NO: 130223 - DNA, 22 bp, Artificial Sequence
  Synthetic oligonucleotide; TTA chr11 5303510 5303531 5303515 5303510 -
tattagagatgttactatgtgc

SEQ ID NO: 130224 - DNA, 22 bp, Artificial Sequence
  Synthetic oligonucleotide; TTA chr11 5303505 5303526 5303510 5303505 -
gagatgttactatgtgccaaaa

SEQ ID NO: 130225 - DNA, 22 bp, Artificial Sequence
  Synthetic oligonucleotide; TTA chr11 5303496 5303517 5303501 5303496 -
ctatgtgccaaaattctgaaac

SEQ ID NO: 130226 - DNA, 22 bp, Artificial Sequence
  Synthetic oligonucleotide; CTA chr11 5303493 5303514 5303498 5303493 -
tgtgccaaaattctgaaacata

SEQ ID NO: 130227 - DNA, 22 bp, Artificial Sequence
  Synthetic oligonucleotide; TTC chr11 5303480 5303501 5303485 5303480 -
tgaaacatataattattattgt

SEQ ID NO: 130228 - DNA, 22 bp, Artificial Sequence
  Synthetic oligonucleotide; CTG chr11 5303478 5303499 5303483 5303478 -
aaacatataattattattgttt

SEQ ID NO: 130229 - DNA, 22 bp, Artificial Sequence
  Synthetic oligonucleotide; TTA chr11 5303465 5303486 5303470 5303465 -
ttattgtttctataggttttta

SEQ ID NO: 130230 - DNA, 22 bp, Artificial Sequence
  Synthetic oligonucleotide; TTA chr11 5303462 5303483 5303467 5303462 -
ttgtttctataggtttttataa

SEQ ID NO: 130231 - DNA, 22 bp, Artificial Sequence
  Synthetic oligonucleotide; TTG chr11 5303459 5303480 5303464 5303459 -
tttctataggtttttataaaat

SEQ ID NO: 130232 - DNA, 22 bp, Artificial Sequence
  Synthetic oligonucleotide; TTT chr11 5303456 5303477 5303461 5303456 -
ctataggtttttataaaataaa

SEQ ID NO: 130233 - DNA, 22 bp, Artificial Sequence
  Synthetic oligonucleotide; TTC chr11 5303455 5303476 5303460 5303455 -
tataggtttttataaaataaaa

SEQ ID NO: 130234 - DNA, 22 bp, Artificial Sequence
  Synthetic oligonucleotide; CTA chr11 5303453 5303474 5303458 5303453 -
taggtttttataaaataaaaaa

SEQ ID NO: 130235 - DNA, 22 bp, Artificial Sequence
  Synthetic oligonucleotide; TTT chr11 5303446 5303467 5303451 5303446 -
ttataaaataaaaaaggtgcaa

SEQ ID NO: 130236 - DNA, 22 bp, Artificial Sequence
  Synthetic oligonucleotide; TTT chr11 5303445 5303466 5303450 5303445 -
tataaaataaaaaaggtgcaaa

SEQ ID NO: 130237 - DNA, 22 bp, Artificial Sequence
  Synthetic oligonucleotide; TTT chr11 5303444 5303465 5303449 5303444 -
ataaaataaaaaaggtgcaaag

SEQ ID NO: 130238 - DNA, 22 bp, Artificial Sequence
  Synthetic oligonucleotide; TTA chr11 5303443 5303464 5303448 5303443 -
taaaataaaaaaggtgcaaaga

SEQ ID NO: 130239 - DNA, 22 bp, Artificial Sequence
  Synthetic oligonucleotide; TTG chr11 5303418 5303439 5303423 5303418 -
ttatcacttcatttttactgaa

SEQ ID NO: 130240 - DNA, 22 bp, Artificial Sequence
  Synthetic oligonucleotide; TTA chr11 5303415 5303436 5303420 5303415 -
tcacttcatttttactgaatta

SEQ ID NO: 130241 - DNA, 22 bp, Artificial Sequence
  Synthetic oligonucleotide; CTT chr11 5303409 5303430 5303414 5303409 -
catttttactgaattacacttc

SEQ ID NO: 130242 - DNA, 22 bp, Artificial Sequence
  Synthetic oligonucleotide; TTC chr11 5303408 5303429 5303413 5303408 -
atttttactgaattacacttca

SEQ ID NO: 130243 - DNA, 22 bp, Artificial Sequence
  Synthetic oligonucleotide; TTT chr11 5303404 5303425 5303409 5303404 -
ttactgaattacacttcaaagg

SEQ ID NO: 130244 - DNA, 22 bp, Artificial Sequence
  Synthetic oligonucleotide; TTT chr11 5303403 5303424 5303408 5303403 -
tactgaattacacttcaaaggt

SEQ ID NO: 130245 - DNA, 22 bp, Artificial Sequence
  Synthetic oligonucleotide; TTT chr11 5303402 5303423 5303407 5303402 -
actgaattacacttcaaaggtg

SEQ ID NO: 130246 - DNA, 22 bp, Artificial Sequence
  Synthetic oligonucleotide; TTA chr11 5303401 5303422 5303406 5303401 -
ctgaattacacttcaaaggtgt

SEQ ID NO: 130247 - DNA, 22 bp, Artificial Sequence
  Synthetic oligonucleotide; CTG chr11 5303398 5303419 5303403 5303398 -
aattacacttcaaaggtgtcgg

SEQ ID NO: 130248 - DNA, 22 bp, Artificial Sequence
  Synthetic oligonucleotide; TTA chr11 5303393 5303414 5303398 5303393 -
cacttcaaaggtgtcggtagta

SEQ ID NO: 130249 - DNA, 22 bp, Artificial Sequence
  Synthetic oligonucleotide; CTT chr11 5303388 5303409 5303393 5303388 -
caaaggtgtcggtagtaatatt

SEQ ID NO: 130250 - DNA, 22 bp, Artificial Sequence
  Synthetic oligonucleotide; TTC chr11 5303387 5303408 5303392 5303387 -
aaaggtgtcggtagtaatattt

SEQ ID NO: 130251 - DNA, 22 bp, Artificial Sequence
  Synthetic oligonucleotide; TTT chr11 5303365 5303386 5303370 5303365 -
ataatattgaatgatattttaa

SEQ ID NO: 130252 - DNA, 22 bp, Artificial Sequence
  Synthetic oligonucleotide; TTA chr11 5303364 5303385 5303369 5303364 -
taatattgaatgatattttaaa

SEQ ID NO: 130253 - DNA, 22 bp, Artificial Sequence
  Synthetic oligonucleotide; TTG chr11 5303356 5303377 5303361 5303356 -
aatgatattttaaaagactctg

SEQ ID NO: 130254 - DNA, 22 bp, Artificial Sequence
  Synthetic oligonucleotide; TTT chr11 5303346 5303367 5303351 5303346 -
taaaagactctggacacataca

SEQ ID NO: 130255 - DNA, 22 bp, Artificial Sequence
  Synthetic oligonucleotide; TTT chr11 5303345 5303366 5303350 5303345 -
aaaagactctggacacatacag

SEQ ID NO: 130256 - DNA, 22 bp, Artificial Sequence
  Synthetic oligonucleotide; TTA chr11 5303344 5303365 5303349 5303344 -
aaagactctggacacatacaga

SEQ ID NO: 130257 - DNA, 22 bp, Artificial Sequence
  Synthetic oligonucleotide; CTC chr11 5303336 5303357 5303341 5303336 -
tggacacatacagaatcaattg

SEQ ID NO: 130258 - DNA, 22 bp, Artificial Sequence
  Synthetic oligonucleotide; CTG chr11 5303334 5303355 5303339 5303334 -
gacacatacagaatcaattgaa

SEQ ID NO: 130259 - DNA, 22 bp, Artificial Sequence
  Synthetic oligonucleotide; TTG chr11 5303314 5303335 5303319 5303314 -
aatttgggagaaactgagtttc

SEQ ID NO: 130260 - DNA, 22 bp, Artificial Sequence
  Synthetic oligonucleotide; TTT chr11 5303309 5303330 5303314 5303309 -
gggagaaactgagtttcccttg

SEQ ID NO: 130261 - DNA, 22 bp, Artificial Sequence
  Synthetic oligonucleotide; TTG chr11 5303308 5303329 5303313 5303308 -
ggagaaactgagtttcccttgt

SEQ ID NO: 130262 - DNA, 22 bp, Artificial Sequence
  Synthetic oligonucleotide; CTG chr11 5303298 5303319 5303303 5303298 -
agtttcccttgtagttctcttt

SEQ ID NO: 130263 - DNA, 22 bp, Artificial Sequence
  Synthetic oligonucleotide; TTT chr11 5303293 5303314 5303298 5303293 -
cccttgtagttctctttgtttt

SEQ ID NO: 130264 - DNA, 22 bp, Artificial Sequence
  Synthetic oligonucleotide; TTC chr11 5303292 5303313 5303297 5303292 -
ccttgtagttctctttgttttc

SEQ ID NO: 130265 - DNA, 22 bp, Artificial Sequence
  Synthetic oligonucleotide; CTT chr11 5303288 5303309 5303293 5303288 -
gtagttctctttgttttcccaa

SEQ ID NO: 130266 - DNA, 22 bp, Artificial Sequence
  Synthetic oligonucleotide; TTG chr11 5303287 5303308 5303292 5303287 -
tagttctctttgttttcccaat

SEQ ID NO: 130267 - DNA, 22 bp, Artificial Sequence
  Synthetic oligonucleotide; TTC chr11 5303281 5303302 5303286 5303281 -
tctttgttttcccaataaacct

SEQ ID NO: 130268 - DNA, 22 bp, Artificial Sequence
  Synthetic oligonucleotide; CTC chr11 5303279 5303300 5303284 5303279 -
tttgttttcccaataaacctgc

SEQ ID NO: 130269 - DNA, 22 bp, Artificial Sequence
  Synthetic oligonucleotide; CTT chr11 5303277 5303298 5303282 5303277 -
tgttttcccaataaacctgcta

SEQ ID NO: 130270 - DNA, 22 bp, Artificial Sequence
  Synthetic oligonucleotide; TTT chr11 5303276 5303297 5303281 5303276 -
gttttcccaataaacctgctac

SEQ ID NO: 130271 - DNA, 22 bp, Artificial Sequence
  Synthetic oligonucleotide; TTG chr11 5303275 5303296 5303280 5303275 -
ttttcccaataaacctgctaca

SEQ ID NO: 130272 - DNA, 22 bp, Artificial Sequence
  Synthetic oligonucleotide; TTT chr11 5303272 5303293 5303277 5303272 -
tcccaataaacctgctacaaaa

SEQ ID NO: 130273 - DNA, 22 bp, Artificial Sequence
  Synthetic oligonucleotide; TTT chr11 5303271 5303292 5303276 5303271 -
cccaataaacctgctacaaaat

SEQ ID NO: 130274 - DNA, 22 bp, Artificial Sequence
  Synthetic oligonucleotide; TTC chr11 5303270 5303291 5303275 5303270 -
ccaataaacctgctacaaaatt

SEQ ID NO: 130275 - DNA, 22 bp, Artificial Sequence
  Synthetic oligonucleotide; CTG chr11 5303258 5303279 5303263 5303258 -
ctacaaaatttcttggtatcac

SEQ ID NO: 130276 - DNA, 22 bp, Artificial Sequence
  Synthetic oligonucleotide; CTA chr11 5303255 5303276 5303260 5303255 -
caaaatttcttggtatcacaac

SEQ ID NO: 130277 - DNA, 22 bp, Artificial Sequence
  Synthetic oligonucleotide; TTT chr11 5303247 5303268 5303252 5303247 -
cttggtatcacaacaacaaaaa

SEQ ID NO: 130278 - DNA, 22 bp, Artificial Sequence
  Synthetic oligonucleotide; TTC chr11 5303246 5303267 5303251 5303246 -
ttggtatcacaacaacaaaaat

SEQ ID NO: 130279 - DNA, 22 bp, Artificial Sequence
  Synthetic oligonucleotide; CTT chr11 5303244 5303265 5303249 5303244 -
ggtatcacaacaacaaaaatct

SEQ ID NO: 130280 - DNA, 22 bp, Artificial Sequence
  Synthetic oligonucleotide; TTG chr11 5303243 5303264 5303248 5303243 -
gtatcacaacaacaaaaatctt

SEQ ID NO: 130281 - DNA, 22 bp, Artificial Sequence
  Synthetic oligonucleotide; CTT chr11 5303221 5303242 5303226 5303221 -
gactttgtaaaagtgtaattat

SEQ ID NO: 130282 - DNA, 22 bp, Artificial Sequence
  Synthetic oligonucleotide; TTG chr11 5303220 5303241 5303225 5303220 -
actttgtaaaagtgtaattata

SEQ ID NO: 130283 - DNA, 22 bp, Artificial Sequence
  Synthetic oligonucleotide; CTT chr11 5303216 5303237 5303221 5303216 -
tgtaaaagtgtaattataaata

SEQ ID NO: 130284 - DNA, 22 bp, Artificial Sequence
  Synthetic oligonucleotide; TTT chr11 5303215 5303236 5303220 5303215 -
gtaaaagtgtaattataaatat

SEQ ID NO: 130285 - DNA, 22 bp, Artificial Sequence
  Synthetic oligonucleotide; TTG chr11 5303214 5303235 5303219 5303214 -
taaaagtgtaattataaatata

SEQ ID NO: 130286 - DNA, 22 bp, Artificial Sequence
  Synthetic oligonucleotide; TTA chr11 5303200 5303221 5303205 5303200 -
taaatataaataaatattaatt

SEQ ID NO: 130287 - DNA, 22 bp, Artificial Sequence
  Synthetic oligonucleotide; TTA chr11 5303181 5303202 5303186 5303181 -
attataaatagacttcatagtt

SEQ ID NO: 130288 - DNA, 22 bp, Artificial Sequence
  Synthetic oligonucleotide; TTA chr11 5303177 5303198 5303182 5303177 -
taaatagacttcatagttccct

SEQ ID NO: 130289 - DNA, 22 bp, Artificial Sequence
  Synthetic oligonucleotide; CTT chr11 5303166 5303187 5303171 5303166 -
catagttccctatgaggatcct

SEQ ID NO: 130290 - DNA, 22 bp, Artificial Sequence
  Synthetic oligonucleotide; TTC chr11 5303165 5303186 5303170 5303165 -
atagttccctatgaggatcctt

SEQ ID NO: 130291 - DNA, 22 bp, Artificial Sequence
  Synthetic oligonucleotide; TTC chr11 5303158 5303179 5303163 5303158 -
cctatgaggatccttgtgaatt

SEQ ID NO: 130292 - DNA, 22 bp, Artificial Sequence
  Synthetic oligonucleotide; CTA chr11 5303154 5303175 5303159 5303154 -
tgaggatccttgtgaatttttc

SEQ ID NO: 130293 - DNA, 22 bp, Artificial Sequence
  Synthetic oligonucleotide; CTT chr11 5303143 5303164 5303148 5303143 -
gtgaatttttctcaatacgagt

SEQ ID NO: 130294 - DNA, 22 bp, Artificial Sequence
  Synthetic oligonucleotide; TTG chr11 5303142 5303163 5303147 5303142 -
tgaatttttctcaatacgagtc

SEQ ID NO: 130295 - DNA, 22 bp, Artificial Sequence
  Synthetic oligonucleotide; TTT chr11 5303135 5303156 5303140 5303135 -
ttctcaatacgagtcttacaga

SEQ ID NO: 130296 - DNA, 22 bp, Artificial Sequence
  Synthetic oligonucleotide; TTT chr11 5303134 5303155 5303139 5303134 -
tctcaatacgagtcttacagat

SEQ ID NO: 130297 - DNA, 22 bp, Artificial Sequence
  Synthetic oligonucleotide; TTT chr11 5303133 5303154 5303138 5303133 -
ctcaatacgagtcttacagatt

SEQ ID NO: 130298 - DNA, 22 bp, Artificial Sequence
  Synthetic oligonucleotide; TTC chr11 5303132 5303153 5303137 5303132 -
tcaatacgagtcttacagattc

SEQ ID NO: 130299 - DNA, 22 bp, Artificial Sequence
  Synthetic oligonucleotide; CTC chr11 5303130 5303151 5303135 5303130 -
aatacgagtcttacagattcat

SEQ ID NO: 130300 - DNA, 22 bp, Artificial Sequence
  Synthetic oligonucleotide; CTT chr11 5303118 5303139 5303123 5303118 -
acagattcataatgattagagg

SEQ ID NO: 130301 - DNA, 22 bp, Artificial Sequence
  Synthetic oligonucleotide; TTA chr11 5303117 5303138 5303122 5303117 -
cagattcataatgattagaggg

SEQ ID NO: 130302 - DNA, 22 bp, Artificial Sequence
  Synthetic oligonucleotide; TTC chr11 5303110 5303131 5303115 5303110 -
ataatgattagagggtctgtaa

SEQ ID NO: 130303 - DNA, 22 bp, Artificial Sequence
  Synthetic oligonucleotide; TTA chr11 5303100 5303121 5303105 5303100 -
gagggtctgtaagattgtctcc

SEQ ID NO: 130304 - DNA, 22 bp, Artificial Sequence
  Synthetic oligonucleotide; CTG chr11 5303091 5303112 5303096 5303091 -
taagattgtctccatcagcaac

SEQ ID NO: 130305 - DNA, 22 bp, Artificial Sequence
  Synthetic oligonucleotide; TTG chr11 5303083 5303104 5303088 5303083 -
tctccatcagcaacatagttgc

SEQ ID NO: 130306 - DNA, 22 bp, Artificial Sequence
  Synthetic oligonucleotide; CTC chr11 5303079 5303100 5303084 5303079 -
catcagcaacatagttgccgta

SEQ ID NO: 130307 - DNA, 22 bp, Artificial Sequence
  Synthetic oligonucleotide; TTG chr11 5303062 5303083 5303067 5303062 -
ccgtattttctctctgggagtg

SEQ ID NO: 130308 - DNA, 22 bp, Artificial Sequence
  Synthetic oligonucleotide; TTT chr11 5303054 5303075 5303059 5303054 -
tctctctgggagtgcttatctt

SEQ ID NO: 130309 - DNA, 22 bp, Artificial Sequence
  Synthetic oligonucleotide; TTT chr11 5303053 5303074 5303058 5303053 -
ctctctgggagtgcttatcttt

SEQ ID NO: 130310 - DNA, 22 bp, Artificial Sequence
  Synthetic oligonucleotide; TTC chr11 5303052 5303073 5303057 5303052 -
tctctgggagtgcttatctttt

SEQ ID NO: 130311 - DNA, 22 bp, Artificial Sequence
  Synthetic oligonucleotide; CTC chr11 5303050 5303071 5303055 5303050 -
tctgggagtgcttatcttttcc

SEQ ID NO: 130312 - DNA, 22 bp, Artificial Sequence
  Synthetic oligonucleotide; CTC chr11 5303048 5303069 5303053 5303048 -
tgggagtgcttatcttttccct

SEQ ID NO: 130313 - DNA, 22 bp, Artificial Sequence
  Synthetic oligonucleotide; CTG chr11 5303046 5303067 5303051 5303046 -
ggagtgcttatcttttccctag

SEQ ID NO: 130314 - DNA, 22 bp, Artificial Sequence
  Synthetic oligonucleotide; CTT chr11 5303037 5303058 5303042 5303037 -
atcttttccctagaactggttg

SEQ ID NO: 130315 - DNA, 22 bp, Artificial Sequence
  Synthetic oligonucleotide; TTA chr11 5303036 5303057 5303041 5303036 -
tcttttccctagaactggttgt

SEQ ID NO: 130316 - DNA, 22 bp, Artificial Sequence
  Synthetic oligonucleotide; CTT chr11 5303032 5303053 5303037 5303032 -
ttccctagaactggttgtgtga

SEQ ID NO: 130317 - DNA, 22 bp, Artificial Sequence
  Synthetic oligonucleotide; TTT chr11 5303031 5303052 5303036 5303031 -
tccctagaactggttgtgtgaa

SEQ ID NO: 130318 - DNA, 22 bp, Artificial Sequence
  Synthetic oligonucleotide; TTT chr11 5303030 5303051 5303035 5303030 -
ccctagaactggttgtgtgaag

SEQ ID NO: 130319 - DNA, 22 bp, Artificial Sequence
  Synthetic oligonucleotide; TTC chr11 5303029 5303050 5303034 5303029 -
cctagaactggttgtgtgaagt

SEQ ID NO: 130320 - DNA, 22 bp, Artificial Sequence
  Synthetic oligonucleotide; CTA chr11 5303025 5303046 5303030 5303025 -
gaactggttgtgtgaagtttat

SEQ ID NO: 130321 - DNA, 22 bp, Artificial Sequence
  Synthetic oligonucleotide; CTG chr11 5303019 5303040 5303024 5303019 -
gttgtgtgaagtttattaactc

SEQ ID NO: 130322 - DNA, 22 bp, Artificial Sequence
  Synthetic oligonucleotide; TTG chr11 5303015 5303036 5303020 5303015 -
tgtgaagtttattaactcaatt

SEQ ID NO: 130323 - DNA, 22 bp, Artificial Sequence
  Synthetic oligonucleotide; TTT chr11 5303005 5303026 5303010 5303005 -
attaactcaattaccaacttcc

SEQ ID NO: 130324 - DNA, 22 bp, Artificial Sequence
  Synthetic oligonucleotide; TTA chr11 5303004 5303025 5303009 5303004 -
ttaactcaattaccaacttccg

SEQ ID NO: 130325 - DNA, 22 bp, Artificial Sequence
  Synthetic oligonucleotide; TTA chr11 5303001 5303022 5303006 5303001 -
actcaattaccaacttccgata

SEQ ID NO: 130326 - DNA, 22 bp, Artificial Sequence
  Synthetic oligonucleotide; CTC chr11 5302997 5303018 5303002 5302997 -
aattaccaacttccgatattac

SEQ ID NO: 130327 - DNA, 22 bp, Artificial Sequence
  Synthetic oligonucleotide; TTA chr11 5302992 5303013 5302997 5302992 -
ccaacttccgatattactattg

SEQ ID NO: 130328 - DNA, 22 bp, Artificial Sequence
  Synthetic oligonucleotide; CTT chr11 5302985 5303006 5302990 5302985 -
ccgatattactattgcccttca

SEQ ID NO: 130329 - DNA, 22 bp, Artificial Sequence
  Synthetic oligonucleotide; TTC chr11 5302984 5303005 5302989 5302984 -
cgatattactattgcccttcag

SEQ ID NO: 130330 - DNA, 22 bp, Artificial Sequence
  Synthetic oligonucleotide; TTA chr11 5302976 5302997 5302981 5302976 -
ctattgcccttcagatcaacat

SEQ ID NO: 130331 - DNA, 22 bp, Artificial Sequence
  Synthetic oligonucleotide; CTA chr11 5302973 5302994 5302978 5302973 -
ttgcccttcagatcaacatact

SEQ ID NO: 130332 - DNA, 22 bp, Artificial Sequence
  Synthetic oligonucleotide; TTG chr11 5302970 5302991 5302975 5302970 -
cccttcagatcaacatacttac

SEQ ID NO: 130333 - DNA, 22 bp, Artificial Sequence
  Synthetic oligonucleotide; CTT chr11 5302965 5302986 5302970 5302965 -
cagatcaacatacttacgaatc

SEQ ID NO: 130334 - DNA, 22 bp, Artificial Sequence
  Synthetic oligonucleotide; TTC chr11 5302964 5302985 5302969 5302964 -
agatcaacatacttacgaatct

SEQ ID NO: 130335 - DNA, 22 bp, Artificial Sequence
  Synthetic oligonucleotide; CTT chr11 5302950 5302971 5302955 5302950 -
acgaatctatgactctaacaag

SEQ ID NO: 130336 - DNA, 22 bp, Artificial Sequence
  Synthetic oligonucleotide; TTA chr11 5302949 5302970 5302954 5302949 -
cgaatctatgactctaacaagt

SEQ ID NO: 130337 - DNA, 22 bp, Artificial Sequence
  Synthetic oligonucleotide; CTA chr11 5302941 5302962 5302946 5302941 -
tgactctaacaagtattaggct

SEQ ID NO: 130338 - DNA, 22 bp, Artificial Sequence
  Synthetic oligonucleotide; CTC chr11 5302935 5302956 5302940 5302935 -
taacaagtattaggcttttgtg

SEQ ID NO: 130339 - DNA, 22 bp, Artificial Sequence
  Synthetic oligonucleotide; CTA chr11 5302933 5302954 5302938 5302933 -
acaagtattaggcttttgtgga

SEQ ID NO: 130340 - DNA, 22 bp, Artificial Sequence
  Synthetic oligonucleotide; TTA chr11 5302923 5302944 5302928 5302923 -
ggcttttgtggaggccctcatt

SEQ ID NO: 130341 - DNA, 22 bp, Artificial Sequence
  Synthetic oligonucleotide; CTT chr11 5302918 5302939 5302923 5302918 -
ttgtggaggccctcattgtaga

SEQ ID NO: 130342 - DNA, 22 bp, Artificial Sequence
  Synthetic oligonucleotide; TTT chr11 5302917 5302938 5302922 5302917 -
tgtggaggccctcattgtagaa

SEQ ID NO: 130343 - DNA, 22 bp, Artificial Sequence
  Synthetic oligonucleotide; TTT chr11 5302916 5302937 5302921 5302916 -
gtggaggccctcattgtagaag

SEQ ID NO: 130344 - DNA, 22 bp, Artificial Sequence
  Synthetic oligonucleotide; TTG chr11 5302915 5302936 5302920 5302915 -
tggaggccctcattgtagaagt

SEQ ID NO: 130345 - DNA, 22 bp, Artificial Sequence
  Synthetic oligonucleotide; CTC chr11 5302904 5302925 5302909 5302904 -
attgtagaagtatgtccttaaa

SEQ ID NO: 130346 - DNA, 22 bp, Artificial Sequence
  Synthetic oligonucleotide; TTG chr11 5302900 5302921 5302905 5302900 -
tagaagtatgtccttaaaatat

SEQ ID NO: 130347 - DNA, 22 bp, Artificial Sequence
  Synthetic oligonucleotide; CTT chr11 5302885 5302906 5302890 5302885 -
aaaatatttccgttatgagctt

SEQ ID NO: 130348 - DNA, 22 bp, Artificial Sequence
  Synthetic oligonucleotide; TTA chr11 5302884 5302905 5302889 5302884 -
aaatatttccgttatgagcttc

SEQ ID NO: 130349 - DNA, 22 bp, Artificial Sequence
  Synthetic oligonucleotide; TTT chr11 5302876 5302897 5302881 5302876 -
ccgttatgagcttccaacatga

SEQ ID NO: 130350 - DNA, 22 bp, Artificial Sequence
  Synthetic oligonucleotide; TTC chr11 5302875 5302896 5302880 5302875 -
cgttatgagcttccaacatgag

SEQ ID NO: 130351 - DNA, 22 bp, Artificial Sequence
  Synthetic oligonucleotide; TTA chr11 5302870 5302891 5302875 5302870 -
tgagcttccaacatgagtctcc

SEQ ID NO: 130352 - DNA, 22 bp, Artificial Sequence
  Synthetic oligonucleotide; CTT chr11 5302863 5302884 5302868 5302863 -
ccaacatgagtctcctattttc

SEQ ID NO: 130353 - DNA, 22 bp, Artificial Sequence
  Synthetic oligonucleotide; TTC chr11 5302862 5302883 5302867 5302862 -
caacatgagtctcctattttca

SEQ ID NO: 130354 - DNA, 22 bp, Artificial Sequence
  Synthetic oligonucleotide; CTC chr11 5302849 5302870 5302854 5302849 -
ctattttcatgtttgtccctaa

SEQ ID NO: 130355 - DNA, 22 bp, Artificial Sequence
  Synthetic oligonucleotide; CTA chr11 5302846 5302867 5302851 5302846 -
ttttcatgtttgtccctaatgt

SEQ ID NO: 130356 - DNA, 22 bp, Artificial Sequence
  Synthetic oligonucleotide; TTT chr11 5302843 5302864 5302848 5302843 -
tcatgtttgtccctaatgtgcc

SEQ ID NO: 130357 - DNA, 22 bp, Artificial Sequence
  Synthetic oligonucleotide; TTT chr11 5302842 5302863 5302847 5302842 -
catgtttgtccctaatgtgcca

SEQ ID NO: 130358 - DNA, 22 bp, Artificial Sequence
  Synthetic oligonucleotide; TTC chr11 5302841 5302862 5302846 5302841 -
atgtttgtccctaatgtgccaa

SEQ ID NO: 130359 - DNA, 22 bp, Artificial Sequence
  Synthetic oligonucleotide; TTT chr11 5302835 5302856 5302840 5302835 -
gtccctaatgtgccaaaactca

SEQ ID NO: 130360 - DNA, 22 bp, Artificial Sequence
  Synthetic oligonucleotide; TTG chr11 5302834 5302855 5302839 5302834 -
tccctaatgtgccaaaactcag

SEQ ID NO: 130361 - DNA, 22 bp, Artificial Sequence
  Synthetic oligonucleotide; CTA chr11 5302828 5302849 5302833 5302828 -
atgtgccaaaactcagactttt

SEQ ID NO: 130362 - DNA, 22 bp, Artificial Sequence
  Synthetic oligonucleotide; CTC chr11 5302814 5302835 5302819 5302814 -
agactttttgcagcatagggaa

SEQ ID NO: 130363 - DNA, 22 bp, Artificial Sequence
  Synthetic oligonucleotide; CTT chr11 5302808 5302829 5302813 5302808 -
tttgcagcatagggaacttgct

SEQ ID NO: 130364 - DNA, 22 bp, Artificial Sequence
  Synthetic oligonucleotide; TTT chr11 5302807 5302828 5302812 5302807 -
ttgcagcatagggaacttgctg

SEQ ID NO: 130365 - DNA, 22 bp, Artificial Sequence
  Synthetic oligonucleotide; TTT chr11 5302806 5302827 5302811 5302806 -
tgcagcatagggaacttgctga

SEQ ID NO: 130366 - DNA, 22 bp, Artificial Sequence
  Synthetic oligonucleotide; TTT chr11 5302805 5302826 5302810 5302805 -
gcagcatagggaacttgctgag

SEQ ID NO: 130367 - DNA, 22 bp, Artificial Sequence
  Synthetic oligonucleotide; TTG chr11 5302804 5302825 5302809 5302804 -
cagcatagggaacttgctgagt

SEQ ID NO: 130368 - DNA, 22 bp, Artificial Sequence
  Synthetic oligonucleotide; CTT chr11 5302789 5302810 5302794 5302789 -
gctgagtcccaagtccactgag

SEQ ID NO: 130369 - DNA, 22 bp, Artificial Sequence
  Synthetic oligonucleotide; TTG chr11 5302788 5302809 5302793 5302788 -
ctgagtcccaagtccactgagt

SEQ ID NO: 130370 - DNA, 22 bp, Artificial Sequence
  Synthetic oligonucleotide; CTG chr11 5302785 5302806 5302790 5302785 -
agtcccaagtccactgagtaat

SEQ ID NO: 130371 - DNA, 22 bp, Artificial Sequence
  Synthetic oligonucleotide; CTG chr11 5302769 5302790 5302774 5302769 -
agtaattacacctttctaaaat

SEQ ID NO: 130372 - DNA, 22 bp, Artificial Sequence
  Synthetic oligonucleotide; TTA chr11 5302761 5302782 5302766 5302761 -
cacctttctaaaatgagtttac

SEQ ID NO: 130373 - DNA, 22 bp, Artificial Sequence
  Synthetic oligonucleotide; CTT chr11 5302755 5302776 5302760 5302755 -
tctaaaatgagtttactaactt

SEQ ID NO: 130374 - DNA, 22 bp, Artificial Sequence
  Synthetic oligonucleotide; TTT chr11 5302754 5302775 5302759 5302754 -
ctaaaatgagtttactaacttt

SEQ ID NO: 130375 - DNA, 22 bp, Artificial Sequence
  Synthetic oligonucleotide; TTC chr11 5302753 5302774 5302758 5302753 -
taaaatgagtttactaacttta

SEQ ID NO: 130376 - DNA, 22 bp, Artificial Sequence
  Synthetic oligonucleotide; CTA chr11 5302751 5302772 5302756 5302751 -
aaatgagtttactaactttacc

SEQ ID NO: 130377 - DNA, 22 bp, Artificial Sequence
  Synthetic oligonucleotide; TTT chr11 5302741 5302762 5302746 5302741 -
actaactttacccacttgttca

SEQ ID NO: 130378 - DNA, 22 bp, Artificial Sequence
  Synthetic oligonucleotide; TTA chr11 5302740 5302761 5302745 5302740 -
ctaactttacccacttgttcag

SEQ ID NO: 130379 - DNA, 22 bp, Artificial Sequence
  Synthetic oligonucleotide; CTA chr11 5302737 5302758 5302742 5302737 -
actttacccacttgttcaggtg

SEQ ID NO: 130380 - DNA, 22 bp, Artificial Sequence
  Synthetic oligonucleotide; CTT chr11 5302733 5302754 5302738 5302733 -
tacccacttgttcaggtgttca

SEQ ID NO: 130381 - DNA, 22 bp, Artificial Sequence
  Synthetic oligonucleotide; TTT chr11 5302732 5302753 5302737 5302732 -
acccacttgttcaggtgttcag

SEQ ID NO: 130382 - DNA, 22 bp, Artificial Sequence
  Synthetic oligonucleotide; TTA chr11 5302731 5302752 5302736 5302731 -
cccacttgttcaggtgttcaga

SEQ ID NO: 130383 - DNA, 22 bp, Artificial Sequence
  Synthetic oligonucleotide; CTT chr11 5302724 5302745 5302729 5302724 -
gttcaggtgttcagatttctgt

SEQ ID NO: 130384 - DNA, 22 bp, Artificial Sequence
  Synthetic oligonucleotide; TTG chr11 5302723 5302744 5302728 5302723 -
ttcaggtgttcagatttctgtg

SEQ ID NO: 130385 - DNA, 22 bp, Artificial Sequence
  Synthetic oligonucleotide; TTC chr11 5302720 5302741 5302725 5302720 -
aggtgttcagatttctgtggaa

SEQ ID NO: 130386 - DNA, 22 bp, Artificial Sequence
  Synthetic oligonucleotide; TTC chr11 5302712 5302733 5302717 5302712 -
agatttctgtggaaactcacaa

SEQ ID NO: 130387 - DNA, 22 bp, Artificial Sequence
  Synthetic oligonucleotide; TTT chr11 5302706 5302727 5302711 5302706 -
ctgtggaaactcacaatagatg

SEQ ID NO: 130388 - DNA, 22 bp, Artificial Sequence
  Synthetic oligonucleotide; TTC chr11 5302705 5302726 5302710 5302705 -
tgtggaaactcacaatagatga

SEQ ID NO: 130389 - DNA, 22 bp, Artificial Sequence
  Synthetic oligonucleotide; CTG chr11 5302703 5302724 5302708 5302703 -
tggaaactcacaatagatgagt

SEQ ID NO: 130390 - DNA, 22 bp, Artificial Sequence
  Synthetic oligonucleotide; CTC chr11 5302694 5302715 5302699 5302694 -
acaatagatgagttattttctt

SEQ ID NO: 130391 - DNA, 22 bp, Artificial Sequence
  Synthetic oligonucleotide; TTA chr11 5302679 5302700 5302684 5302679 -
ttttctttcgttttattttatt

SEQ ID NO: 130392 - DNA, 22 bp, Artificial Sequence
  Synthetic oligonucleotide; TTT chr11 5302676 5302697 5302681 5302676 -
tctttcgttttattttatttta

SEQ ID NO: 130393 - DNA, 22 bp, Artificial Sequence
  Synthetic oligonucleotide; TTT chr11 5302675 5302696 5302680 5302675 -
ctttcgttttattttattttat

SEQ ID NO: 130394 - DNA, 22 bp, Artificial Sequence
  Synthetic oligonucleotide; TTC chr11 5302674 5302695 5302679 5302674 -
tttcgttttattttattttatt

SEQ ID NO: 130395 - DNA, 22 bp, Artificial Sequence
  Synthetic oligonucleotide; CTT chr11 5302672 5302693 5302677 5302672 -
tcgttttattttattttatttt

SEQ ID NO: 130396 - DNA, 22 bp, Artificial Sequence
  Synthetic oligonucleotide; TTT chr11 5302671 5302692 5302676 5302671 -
cgttttattttattttattttt

SEQ ID NO: 130397 - DNA, 22 bp, Artificial Sequence
  Synthetic oligonucleotide; TTC chr11 5302670 5302691 5302675 5302670 -
gttttattttattttatttttt

SEQ ID NO: 130398 - DNA, 22 bp, Artificial Sequence
  Synthetic oligonucleotide; TTT chr11 5302666 5302687 5302671 5302666 -
tattttattttattttttatag

SEQ ID NO: 130399 - DNA, 22 bp, Artificial Sequence
  Synthetic oligonucleotide; TTT chr11 5302665 5302686 5302670 5302665 -
attttattttattttttataga

SEQ ID NO: 130400 - DNA, 22 bp, Artificial Sequence
  Synthetic oligonucleotide; TTA chr11 5302664 5302685 5302669 5302664 -
ttttattttattttttatagag

SEQ ID NO: 130401 - DNA, 22 bp, Artificial Sequence
  Synthetic oligonucleotide; TTT chr11 5302661 5302682 5302666 5302661 -
tattttattttttatagagaca

SEQ ID NO: 130402 - DNA, 22 bp, Artificial Sequence
  Synthetic oligonucleotide; TTT chr11 5302660 5302681 5302665 5302660 -
attttattttttatagagacag

SEQ ID NO: 130403 - DNA, 22 bp, Artificial Sequence
  Synthetic oligonucleotide; TTA chr11 5302659 5302680 5302664 5302659 -
ttttattttttatagagacaga

SEQ ID NO: 130404 - DNA, 22 bp, Artificial Sequence
  Synthetic oligonucleotide; TTT chr11 5302656 5302677 5302661 5302656 -
tattttttatagagacagagtc

SEQ ID NO: 130405 - DNA, 22 bp, Artificial Sequence
  Synthetic oligonucleotide; TTT chr11 5302655 5302676 5302660 5302655 -
attttttatagagacagagtct

SEQ ID NO: 130406 - DNA, 22 bp, Artificial Sequence
  Synthetic oligonucleotide; TTA chr11 5302654 5302675 5302659 5302654 -
ttttttatagagacagagtctg

SEQ ID NO: 130407 - DNA, 22 bp, Artificial Sequence
  Synthetic oligonucleotide; TTT chr11 5302651 5302672 5302656 5302651 -
tttatagagacagagtctgact

SEQ ID NO: 130408 - DNA, 22 bp, Artificial Sequence
  Synthetic oligonucleotide; TTT chr11 5302650 5302671 5302655 5302650 -
ttatagagacagagtctgactc

SEQ ID NO: 130409 - DNA, 22 bp, Artificial Sequence
  Synthetic oligonucleotide; TTT chr11 5302649 5302670 5302654 5302649 -
tatagagacagagtctgactcc

SEQ ID NO: 130410 - DNA, 22 bp, Artificial Sequence
  Synthetic oligonucleotide; TTT chr11 5302648 5302669 5302653 5302648 -
atagagacagagtctgactccg

SEQ ID NO: 130411 - DNA, 22 bp, Artificial Sequence
  Synthetic oligonucleotide; TTA chr11 5302647 5302668 5302652 5302647 -
tagagacagagtctgactccgt

SEQ ID NO: 130412 - DNA, 22 bp, Artificial Sequence
  Synthetic oligonucleotide; CTG chr11 5302632 5302653 5302637 5302632 -
actccgttgcccaggctggaga

SEQ ID NO: 130413 - DNA, 22 bp, Artificial Sequence
  Synthetic oligonucleotide; CTC chr11 5302628 5302649 5302633 5302628 -
cgttgcccaggctggagagcag

SEQ ID NO: 130414 - DNA, 22 bp, Artificial Sequence
  Synthetic oligonucleotide; TTG chr11 5302623 5302644 5302628 5302623 -
cccaggctggagagcagtgctg

SEQ ID NO: 130415 - DNA, 22 bp, Artificial Sequence
  Synthetic oligonucleotide; CTG chr11 5302614 5302635 5302619 5302614 -
gagagcagtgctgcaatcatag

SEQ ID NO: 130416 - DNA, 22 bp, Artificial Sequence
  Synthetic oligonucleotide; CTG chr11 5302601 5302622 5302606 5302601 -
caatcatagctccctgcagcct

SEQ ID NO: 130417 - DNA, 22 bp, Artificial Sequence
  Synthetic oligonucleotide; CTC chr11 5302589 5302610 5302594 5302589 -
cctgcagcctcacagtcctggg

SEQ ID NO: 130418 - DNA, 22 bp, Artificial Sequence
  Synthetic oligonucleotide; CTG chr11 5302585 5302606 5302590 5302585 -
cagcctcacagtcctgggctca

SEQ ID NO: 130419 - DNA, 22 bp, Artificial Sequence
  Synthetic oligonucleotide; CTC chr11 5302578 5302599 5302583 5302578 -
acagtcctgggctcaggtgatg

SEQ ID NO: 130420 - DNA, 22 bp, Artificial Sequence
  Synthetic oligonucleotide; CTG chr11 5302569 5302590 5302574 5302569 -
ggctcaggtgatgtgtgcccct

SEQ ID NO: 130421 - DNA, 22 bp, Artificial Sequence
  Synthetic oligonucleotide; CTC chr11 5302564 5302585 5302569 5302564 -
aggtgatgtgtgcccctgtgcc

SEQ ID NO: 130422 - DNA, 22 bp, Artificial Sequence
  Synthetic oligonucleotide; CTG chr11 5302546 5302567 5302551 5302546 -
tgcccagctaatttttatcttt

SEQ ID NO: 130423 - DNA, 22 bp, Artificial Sequence
  Synthetic oligonucleotide; CTA chr11 5302536 5302557 5302541 5302536 -
atttttatcttttctttttttt

SEQ ID NO: 130424 - DNA, 22 bp, Artificial Sequence
  Synthetic oligonucleotide; TTT chr11 5302532 5302553 5302537 5302532 -
ttatcttttcttttttttttgg

SEQ ID NO: 130425 - DNA, 22 bp, Artificial Sequence
  Synthetic oligonucleotide; TTT chr11 5302531 5302552 5302536 5302531 -
tatcttttcttttttttttggt

SEQ ID NO: 130426 - DNA, 22 bp, Artificial Sequence
  Synthetic oligonucleotide; TTT chr11 5302530 5302551 5302535 5302530 -
atcttttcttttttttttggtg

SEQ ID NO: 130427 - DNA, 22 bp, Artificial Sequence
  Synthetic oligonucleotide; TTA chr11 5302529 5302550 5302534 5302529 -
tcttttcttttttttttggtgg

SEQ ID NO: 130428 - DNA, 22 bp, Artificial Sequence
  Synthetic oligonucleotide; CTT chr11 5302525 5302546 5302530 5302525 -
ttcttttttttttggtggaggc

SEQ ID NO: 130429 - DNA, 22 bp, Artificial Sequence
  Synthetic oligonucleotide; TTT chr11 5302524 5302545 5302529 5302524 -
tcttttttttttggtggaggca

SEQ ID NO: 130430 - DNA, 22 bp, Artificial Sequence
  Synthetic oligonucleotide; TTT chr11 5302523 5302544 5302528 5302523 -
cttttttttttggtggaggcag

SEQ ID NO: 130431 - DNA, 22 bp, Artificial Sequence
  Synthetic oligonucleotide; TTC chr11 5302522 5302543 5302527 5302522 -
ttttttttttggtggaggcagg

SEQ ID NO: 130432 - DNA, 22 bp, Artificial Sequence
  Synthetic oligonucleotide; CTT chr11 5302520 5302541 5302525 5302520 -
ttttttttggtggaggcagggt

SEQ ID NO: 130433 - DNA, 22 bp, Artificial Sequence
  Synthetic oligonucleotide; TTT chr11 5302519 5302540 5302524 5302519 -
tttttttggtggaggcagggtc

SEQ ID NO: 130434 - DNA, 22 bp, Artificial Sequence
  Synthetic oligonucleotide; TTT chr11 5302518 5302539 5302523 5302518 -
ttttttggtggaggcagggtct

SEQ ID NO: 130435 - DNA, 22 bp, Artificial Sequence
  Synthetic oligonucleotide; TTT chr11 5302517 5302538 5302522 5302517 -
tttttggtggaggcagggtcta

SEQ ID NO: 130436 - DNA, 22 bp, Artificial Sequence
  Synthetic oligonucleotide; TTT chr11 5302516 5302537 5302521 5302516 -
ttttggtggaggcagggtctag

SEQ ID NO: 130437 - DNA, 22 bp, Artificial Sequence
  Synthetic oligonucleotide; TTT chr11 5302515 5302536 5302520 5302515 -
tttggtggaggcagggtctagc

SEQ ID NO: 130438 - DNA, 22 bp, Artificial Sequence
  Synthetic oligonucleotide; TTT chr11 5302514 5302535 5302519 5302514 -
ttggtggaggcagggtctagct

SEQ ID NO: 130439 - DNA, 22 bp, Artificial Sequence
  Synthetic oligonucleotide; TTT chr11 5302513 5302534 5302518 5302513 -
tggtggaggcagggtctagcta

SEQ ID NO: 130440 - DNA, 22 bp, Artificial Sequence
  Synthetic oligonucleotide; TTT chr11 5302512 5302533 5302517 5302512 -
ggtggaggcagggtctagctat

SEQ ID NO: 130441 - DNA, 22 bp, Artificial Sequence
  Synthetic oligonucleotide; TTG chr11 5302511 5302532 5302516 5302511 -
gtggaggcagggtctagctatg

SEQ ID NO: 130442 - DNA, 22 bp, Artificial Sequence
  Synthetic oligonucleotide; CTA chr11 5302495 5302516 5302500 5302495 -
gctatgttgcccaggctgggtt

SEQ ID NO: 130443 - DNA, 22 bp, Artificial Sequence
  Synthetic oligonucleotide; CTA chr11 5302491 5302512 5302496 5302491 -
tgttgcccaggctgggttctct

SEQ ID NO: 130444 - DNA, 22 bp, Artificial Sequence
  Synthetic oligonucleotide; TTG chr11 5302486 5302507 5302491 5302486 -
cccaggctgggttctcttctta

SEQ ID NO: 130445 - DNA, 22 bp, Artificial Sequence
  Synthetic oligonucleotide; CTG chr11 5302477 5302498 5302482 5302477 -
ggttctcttcttattcacagtc

SEQ ID NO: 130446 - DNA, 22 bp, Artificial Sequence
  Synthetic oligonucleotide; TTC chr11 5302472 5302493 5302477 5302472 -
tcttcttattcacagtccactt

SEQ ID NO: 130447 - DNA, 22 bp, Artificial Sequence
  Synthetic oligonucleotide; CTC chr11 5302470 5302491 5302475 5302470 -
ttcttattcacagtccacttga

SEQ ID NO: 130448 - DNA, 22 bp, Artificial Sequence
  Synthetic oligonucleotide; CTT chr11 5302468 5302489 5302473 5302468 -
cttattcacagtccacttgaga

SEQ ID NO: 130449 - DNA, 22 bp, Artificial Sequence
  Synthetic oligonucleotide; TTC chr11 5302467 5302488 5302472 5302467 -
ttattcacagtccacttgagat

SEQ ID NO: 130450 - DNA, 22 bp, Artificial Sequence
  Synthetic oligonucleotide; CTT chr11 5302465 5302486 5302470 5302465 -
attcacagtccacttgagatag

SEQ ID NO: 130451 - DNA, 22 bp, Artificial Sequence
  Synthetic oligonucleotide; TTA chr11 5302464 5302485 5302469 5302464 -
ttcacagtccacttgagatagc

SEQ ID NO: 130452 - DNA, 22 bp, Artificial Sequence
  Synthetic oligonucleotide; TTC chr11 5302461 5302482 5302466 5302461 -
acagtccacttgagatagcaac

SEQ ID NO: 130453 - DNA, 22 bp, Artificial Sequence
  Synthetic oligonucleotide; CTT chr11 5302450 5302471 5302455 5302450 -
gagatagcaacattgatcacaa

SEQ ID NO: 130454 - DNA, 22 bp, Artificial Sequence
  Synthetic oligonucleotide; TTG chr11 5302449 5302470 5302454 5302449 -
agatagcaacattgatcacaat

SEQ ID NO: 130455 - DNA, 22 bp, Artificial Sequence
  Synthetic oligonucleotide; TTG chr11 5302435 5302456 5302440 5302435 -
atcacaatatttctcagtcatt

SEQ ID NO: 130456 - DNA, 22 bp, Artificial Sequence
  Synthetic oligonucleotide; TTT chr11 5302423 5302444 5302428 5302423 -
ctcagtcatttctattgaataa

SEQ ID NO: 130457 - DNA, 22 bp, Artificial Sequence
  Synthetic oligonucleotide; TTC chr11 5302422 5302443 5302427 5302422 -
tcagtcatttctattgaataag

SEQ ID NO: 130458 - DNA, 22 bp, Artificial Sequence
  Synthetic oligonucleotide; CTC chr11 5302420 5302441 5302425 5302420 -
agtcatttctattgaataagca

SEQ ID NO: 130459 - DNA, 22 bp, Artificial Sequence
  Synthetic oligonucleotide; TTT chr11 5302412 5302433 5302417 5302412 -
ctattgaataagcattttcctc

SEQ ID NO: 130460 - DNA, 22 bp, Artificial Sequence
  Synthetic oligonucleotide; TTC chr11 5302411 5302432 5302416 5302411 -
tattgaataagcattttcctca

SEQ ID NO: 130461 - DNA, 22 bp, Artificial Sequence
  Synthetic oligonucleotide; CTA chr11 5302409 5302430 5302414 5302409 -
ttgaataagcattttcctcagt

SEQ ID NO: 130462 - DNA, 22 bp, Artificial Sequence
  Synthetic oligonucleotide; TTG chr11 5302406 5302427 5302411 5302406 -
aataagcattttcctcagtggt

SEQ ID NO: 130463 - DNA, 22 bp, Artificial Sequence
  Synthetic oligonucleotide; TTT chr11 5302395 5302416 5302400 5302395 -
tcctcagtggttaatcctaaat

SEQ ID NO: 130464 - DNA, 22 bp, Artificial Sequence
  Synthetic oligonucleotide; TTT chr11 5302394 5302415 5302399 5302394 -
cctcagtggttaatcctaaata

SEQ ID NO: 130465 - DNA, 22 bp, Artificial Sequence
  Synthetic oligonucleotide; TTC chr11 5302393 5302414 5302398 5302393 -
ctcagtggttaatcctaaatac

SEQ ID NO: 130466 - DNA, 22 bp, Artificial Sequence
  Synthetic oligonucleotide; CTC chr11 5302390 5302411 5302395 5302390 -
agtggttaatcctaaatacagc

SEQ ID NO: 130467 - DNA, 22 bp, Artificial Sequence
  Synthetic oligonucleotide; TTA chr11 5302382 5302403 5302387 5302382 -
atcctaaatacagctgtcccat

SEQ ID NO: 130468 - DNA, 22 bp, Artificial Sequence
  Synthetic oligonucleotide; CTA chr11 5302376 5302397 5302381 5302376 -
aatacagctgtcccattagttt

SEQ ID NO: 130469 - DNA, 22 bp, Artificial Sequence
  Synthetic oligonucleotide; CTG chr11 5302366 5302387 5302371 5302366 -
tcccattagtttcaagagaaaa

SEQ ID NO: 130470 - DNA, 22 bp, Artificial Sequence
  Synthetic oligonucleotide; TTA chr11 5302358 5302379 5302363 5302358 -
gtttcaagagaaaaaatttgaa

SEQ ID NO: 130471 - DNA, 22 bp, Artificial Sequence
  Synthetic oligonucleotide; TTT chr11 5302354 5302375 5302359 5302354 -
caagagaaaaaatttgaactga

SEQ ID NO: 130472 - DNA, 22 bp, Artificial Sequence
  Synthetic oligonucleotide; TTC chr11 5302353 5302374 5302358 5302353 -
aagagaaaaaatttgaactgac

SEQ ID NO: 130473 - DNA, 22 bp, Artificial Sequence
  Synthetic oligonucleotide; TTT chr11 5302339 5302360 5302344 5302339 -
gaactgactcaacttggatagt

SEQ ID NO: 130474 - DNA, 22 bp, Artificial Sequence
  Synthetic oligonucleotide; TTG chr11 5302338 5302359 5302343 5302338 -
aactgactcaacttggatagta

SEQ ID NO: 130475 - DNA, 22 bp, Artificial Sequence
  Synthetic oligonucleotide; CTG chr11 5302333 5302354 5302338 5302333 -
actcaacttggatagtaacaca

SEQ ID NO: 130476 - DNA, 22 bp, Artificial Sequence
  Synthetic oligonucleotide; CTC chr11 5302329 5302350 5302334 5302329 -
aacttggatagtaacacagtaa

SEQ ID NO: 130477 - DNA, 22 bp, Artificial Sequence
  Synthetic oligonucleotide; CTT chr11 5302324 5302345 5302329 5302324 -
ggatagtaacacagtaagggcc

SEQ ID NO: 130478 - DNA, 22 bp, Artificial Sequence
  Synthetic oligonucleotide; TTG chr11 5302323 5302344 5302328 5302323 -
gatagtaacacagtaagggccc

SEQ ID NO: 130479 - DNA, 22 bp, Artificial Sequence
  Synthetic oligonucleotide; CTA chr11 5302236 5302257 5302241 5302236 -
tttgggaccaagagtcaaggct

SEQ ID NO: 130480 - DNA, 22 bp, Artificial Sequence
  Synthetic oligonucleotide; TTT chr11 5302233 5302254 5302238 5302233 -
gggaccaagagtcaaggctatg

SEQ ID NO: 130481 - DNA, 22 bp, Artificial Sequence
  Synthetic oligonucleotide; TTG chr11 5302232 5302253 5302237 5302232 -
ggaccaagagtcaaggctatga

SEQ ID NO: 130482 - DNA, 22 bp, Artificial Sequence
  Synthetic oligonucleotide; CTA chr11 5302213 5302234 5302218 5302213 -
tgagcacagacgtaagatgagt

SEQ ID NO: 130483 - DNA, 22 bp, Artificial Sequence
  Synthetic oligonucleotide; TTG chr11 5302187 5302208 5302192 5302187 -
aaaaaataaaggttgtatgctt

SEQ ID NO: 130484 - DNA, 22 bp, Artificial Sequence
  Synthetic oligonucleotide; TTG chr11 5302172 5302193 5302177 5302172 -
tatgcttcatagtgaattggaa

SEQ ID NO: 130485 - DNA, 22 bp, Artificial Sequence
  Synthetic oligonucleotide; CTT chr11 5302165 5302186 5302170 5302165 -
catagtgaattggaattattat

SEQ ID NO: 130486 - DNA, 22 bp, Artificial Sequence
  Synthetic oligonucleotide; TTC chr11 5302164 5302185 5302169 5302164 -
atagtgaattggaattattatt

SEQ ID NO: 130487 - DNA, 22 bp, Artificial Sequence
  Synthetic oligonucleotide; TTG chr11 5302153 5302174 5302158 5302153 -
gaattattattctgaccatgat

SEQ ID NO: 130488 - DNA, 22 bp, Artificial Sequence
  Synthetic oligonucleotide; TTA chr11 5302147 5302168 5302152 5302147 -
ttattctgaccatgatttttgt

SEQ ID NO: 130489 - DNA, 22 bp, Artificial Sequence
  Synthetic oligonucleotide; TTA chr11 5302144 5302165 5302149 5302144 -
ttctgaccatgatttttgttat

SEQ ID NO: 130490 - DNA, 22 bp, Artificial Sequence
  Synthetic oligonucleotide; TTC chr11 5302141 5302162 5302146 5302141 -
tgaccatgatttttgttatttg

SEQ ID NO: 130491 - DNA, 22 bp, Artificial Sequence
  Synthetic oligonucleotide; CTG chr11 5302139 5302160 5302144 5302139 -
accatgatttttgttatttgtt

SEQ ID NO: 130492 - DNA, 22 bp, Artificial Sequence
  Synthetic oligonucleotide; TTT chr11 5302129 5302150 5302134 5302129 -
ttgttatttgttattctaggga

SEQ ID NO: 130493 - DNA, 22 bp, Artificial Sequence
  Synthetic oligonucleotide; TTT chr11 5302128 5302149 5302133 5302128 -
tgttatttgttattctagggaa

SEQ ID NO: 130494 - DNA, 22 bp, Artificial Sequence
  Synthetic oligonucleotide; TTT chr11 5302127 5302148 5302132 5302127 -
gttatttgttattctagggaaa

SEQ ID NO: 130495 - DNA, 22 bp, Artificial Sequence
  Synthetic oligonucleotide; TTG chr11 5302126 5302147 5302131 5302126 -
ttatttgttattctagggaaag

SEQ ID NO: 130496 - DNA, 22 bp, Artificial Sequence
  Synthetic oligonucleotide; TTA chr11 5302123 5302144 5302128 5302123 -
tttgttattctagggaaaggcc

SEQ ID NO: 130497 - DNA, 22 bp, Artificial Sequence
  Synthetic oligonucleotide; TTT chr11 5302120 5302141 5302125 5302120 -
gttattctagggaaaggccttg

SEQ ID NO: 130498 - DNA, 22 bp, Artificial Sequence
  Synthetic oligonucleotide; TTG chr11 5302119 5302140 5302124 5302119 -
ttattctagggaaaggccttgt

SEQ ID NO: 130499 - DNA, 22 bp, Artificial Sequence
  Synthetic oligonucleotide; TTA chr11 5302116 5302137 5302121 5302116 -
ttctagggaaaggccttgtgag

SEQ ID NO: 130500 - DNA, 22 bp, Artificial Sequence
  Synthetic oligonucleotide; TTC chr11 5302113 5302134 5302118 5302113 -
tagggaaaggccttgtgagtac

SEQ ID NO: 130501 - DNA, 22 bp, Artificial Sequence
  Synthetic oligonucleotide; CTA chr11 5302111 5302132 5302116 5302111 -
gggaaaggccttgtgagtacag

SEQ ID NO: 130502 - DNA, 22 bp, Artificial Sequence
  Synthetic oligonucleotide; CTT chr11 5302099 5302120 5302104 5302099 -
gtgagtacaggcttacaattaa

SEQ ID NO: 130503 - DNA, 22 bp, Artificial Sequence
  Synthetic oligonucleotide; TTG chr11 5302098 5302119 5302103 5302098 -
tgagtacaggcttacaattaat

SEQ ID NO: 130504 - DNA, 22 bp, Artificial Sequence
  Synthetic oligonucleotide; CTT chr11 5302085 5302106 5302090 5302085 -
acaattaattaagtatgagaca

SEQ ID NO: 130505 - DNA, 22 bp, Artificial Sequence
  Synthetic oligonucleotide; TTA chr11 5302084 5302105 5302089 5302084 -
caattaattaagtatgagacaa

SEQ ID NO: 130506 - DNA, 22 bp, Artificial Sequence
  Synthetic oligonucleotide; TTA chr11 5302078 5302099 5302083 5302078 -
attaagtatgagacaatccaga

SEQ ID NO: 130507 - DNA, 22 bp, Artificial Sequence
  Synthetic oligonucleotide; TTA chr11 5302074 5302095 5302079 5302074 -
agtatgagacaatccagaaaaa

SEQ ID NO: 130508 - DNA, 22 bp, Artificial Sequence
  Synthetic oligonucleotide; TTT chr11 5302047 5302068 5302052 5302047 -
aagttttgaggtaaaaaatggc

SEQ ID NO: 130509 - DNA, 22 bp, Artificial Sequence
  Synthetic oligonucleotide; TTA chr11 5302046 5302067 5302051 5302046 -
agttttgaggtaaaaaatggcc

SEQ ID NO: 130510 - DNA, 22 bp, Artificial Sequence
  Synthetic oligonucleotide; TTT chr11 5302041 5302062 5302046 5302041 -
tgaggtaaaaaatggcctgatg

SEQ ID NO: 130511 - DNA, 22 bp, Artificial Sequence
  Synthetic oligonucleotide; TTT chr11 5302040 5302061 5302045 5302040 -
gaggtaaaaaatggcctgatga

SEQ ID NO: 130512 - DNA, 22 bp, Artificial Sequence
  Synthetic oligonucleotide; TTG chr11 5302039 5302060 5302044 5302039 -
aggtaaaaaatggcctgatgat

SEQ ID NO: 130513 - DNA, 22 bp, Artificial Sequence
  Synthetic oligonucleotide; CTG chr11 5302022 5302043 5302027 5302022 -
atgatgtgctacaagaagattg

SEQ ID NO: 130514 - DNA, 22 bp, Artificial Sequence
  Synthetic oligonucleotide; CTA chr11 5302011 5302032 5302016 5302011 -
caagaagattgtgagagaaaaa

SEQ ID NO: 130515 - DNA, 22 bp, Artificial Sequence
  Synthetic oligonucleotide; TTG chr11 5302000 5302021 5302005 5302000 -
tgagagaaaaaagaaaactgca

SEQ ID NO: 130516 - DNA, 22 bp, Artificial Sequence
  Synthetic oligonucleotide; CTG chr11 5301980 5302001 5301985 5301980 -
catctttggaggtcatcacccc

SEQ ID NO: 130517 - DNA, 22 bp, Artificial Sequence
  Synthetic oligonucleotide; CTT chr11 5301974 5301995 5301979 5301974 -
tggaggtcatcacccctaaaaa

SEQ ID NO: 130518 - DNA, 22 bp, Artificial Sequence
  Synthetic oligonucleotide; TTT chr11 5301973 5301994 5301978 5301973 -
ggaggtcatcacccctaaaaaa

SEQ ID NO: 130519 - DNA, 22 bp, Artificial Sequence
  Synthetic oligonucleotide; TTG chr11 5301972 5301993 5301977 5301972 -
gaggtcatcacccctaaaaaat

SEQ ID NO: 130520 - DNA, 22 bp, Artificial Sequence
  Synthetic oligonucleotide; CTA chr11 5301956 5301977 5301961 5301956 -
aaaaatatcttctccacctgca

SEQ ID NO: 130521 - DNA, 22 bp, Artificial Sequence
  Synthetic oligonucleotide; CTT chr11 5301945 5301966 5301950 5301945 -
ctccacctgcaaaacctaccat

SEQ ID NO: 130522 - DNA, 22 bp, Artificial Sequence
  Synthetic oligonucleotide; TTC chr11 5301944 5301965 5301949 5301944 -
tccacctgcaaaacctaccatg

SEQ ID NO: 130523 - DNA, 22 bp, Artificial Sequence
  Synthetic oligonucleotide; CTC chr11 5301942 5301963 5301947 5301942 -
cacctgcaaaacctaccatgtg

SEQ ID NO: 130524 - DNA, 22 bp, Artificial Sequence
  Synthetic oligonucleotide; CTG chr11 5301936 5301957 5301941 5301936 -
caaaacctaccatgtggtataa

SEQ ID NO: 130525 - DNA, 22 bp, Artificial Sequence
  Synthetic oligonucleotide; CTA chr11 5301927 5301948 5301932 5301927 -
ccatgtggtataacaacagtgc

SEQ ID NO: 130526 - DNA, 22 bp, Artificial Sequence
  Synthetic oligonucleotide; CTG chr11 5301903 5301924 5301908 5301903 -
gccccttcttgctgactggctt

SEQ ID NO: 130527 - DNA, 22 bp, Artificial Sequence
  Synthetic oligonucleotide; CTT chr11 5301896 5301917 5301901 5301896 -
cttgctgactggcttcttgggc

SEQ ID NO: 130528 - DNA, 22 bp, Artificial Sequence
  Synthetic oligonucleotide; TTC chr11 5301895 5301916 5301900 5301895 -
ttgctgactggcttcttgggct

SEQ ID NO: 130529 - DNA, 22 bp, Artificial Sequence
  Synthetic oligonucleotide; CTT chr11 5301893 5301914 5301898 5301893 -
gctgactggcttcttgggctca

SEQ ID NO: 130530 - DNA, 22 bp, Artificial Sequence
  Synthetic oligonucleotide; TTG chr11 5301892 5301913 5301897 5301892 -
ctgactggcttcttgggctcag

SEQ ID NO: 130531 - DNA, 22 bp, Artificial Sequence
  Synthetic oligonucleotide; CTG chr11 5301889 5301910 5301894 5301889 -
actggcttcttgggctcagagg

SEQ ID NO: 130532 - DNA, 22 bp, Artificial Sequence
  Synthetic oligonucleotide; CTG chr11 5301885 5301906 5301890 5301885 -
gcttcttgggctcagaggcagt

SEQ ID NO: 130533 - DNA, 22 bp, Artificial Sequence
  Synthetic oligonucleotide; CTT chr11 5301881 5301902 5301886 5301881 -
cttgggctcagaggcagttcac

SEQ ID NO: 130534 - DNA, 22 bp, Artificial Sequence
  Synthetic oligonucleotide; TTC chr11 5301880 5301901 5301885 5301880 -
ttgggctcagaggcagttcact

SEQ ID NO: 130535 - DNA, 22 bp, Artificial Sequence
  Synthetic oligonucleotide; CTT chr11 5301878 5301899 5301883 5301878 -
gggctcagaggcagttcactac

SEQ ID NO: 130536 - DNA, 22 bp, Artificial Sequence
  Synthetic oligonucleotide; TTG chr11 5301877 5301898 5301882 5301877 -
ggctcagaggcagttcactacc

SEQ ID NO: 130537 - DNA, 22 bp, Artificial Sequence
  Synthetic oligonucleotide; CTC chr11 5301872 5301893 5301877 5301872 -
agaggcagttcactaccggatc

SEQ ID NO: 130538 - DNA, 22 bp, Artificial Sequence
  Synthetic oligonucleotide; TTC chr11 5301861 5301882 5301866 5301861 -
actaccggatctctatgtcctt

SEQ ID NO: 130539 - DNA, 22 bp, Artificial Sequence
  Synthetic oligonucleotide; CTA chr11 5301857 5301878 5301862 5301857 -
ccggatctctatgtccttcttt

SEQ ID NO: 130540 - DNA, 22 bp, Artificial Sequence
  Synthetic oligonucleotide; CTC chr11 5301848 5301869 5301853 5301848 -
tatgtccttctttgtcatctac

SEQ ID NO: 130541 - DNA, 22 bp, Artificial Sequence
  Synthetic oligonucleotide; CTA chr11 5301846 5301867 5301851 5301846 -
tgtccttctttgtcatctactt

SEQ ID NO: 130542 - DNA, 22 bp, Artificial Sequence
  Synthetic oligonucleotide; CTT chr11 5301839 5301860 5301844 5301839 -
ctttgtcatctacttctccgtc

SEQ ID NO: 130543 - DNA, 22 bp, Artificial Sequence
  Synthetic oligonucleotide; TTC chr11 5301838 5301859 5301843 5301838 -
tttgtcatctacttctccgtcc

SEQ ID NO: 130544 - DNA, 22 bp, Artificial Sequence
  Synthetic oligonucleotide; CTT chr11 5301836 5301857 5301841 5301836 -
tgtcatctacttctccgtcctt

SEQ ID NO: 130545 - DNA, 22 bp, Artificial Sequence
  Synthetic oligonucleotide; TTT chr11 5301835 5301856 5301840 5301835 -
gtcatctacttctccgtccttt

SEQ ID NO: 130546 - DNA, 22 bp, Artificial Sequence
  Synthetic oligonucleotide; TTG chr11 5301834 5301855 5301839 5301834 -
tcatctacttctccgtcctttt

SEQ ID NO: 130547 - DNA, 22 bp, Artificial Sequence
  Synthetic oligonucleotide; CTA chr11 5301827 5301848 5301832 5301827 -
cttctccgtcctttttggaaat

SEQ ID NO: 130548 - DNA, 22 bp, Artificial Sequence
  Synthetic oligonucleotide; CTT chr11 5301824 5301845 5301829 5301824 -
ctccgtcctttttggaaatggc

SEQ ID NO: 130549 - DNA, 22 bp, Artificial Sequence
  Synthetic oligonucleotide; TTC chr11 5301823 5301844 5301828 5301823 -
tccgtcctttttggaaatggca

SEQ ID NO: 130550 - DNA, 22 bp, Artificial Sequence
  Synthetic oligonucleotide; CTC chr11 5301821 5301842 5301826 5301821 -
cgtcctttttggaaatggcact

SEQ ID NO: 130551 - DNA, 22 bp, Artificial Sequence
  Synthetic oligonucleotide; CTT chr11 5301814 5301835 5301819 5301814 -
tttggaaatggcactcttcttg

SEQ ID NO: 130552 - DNA, 22 bp, Artificial Sequence
  Synthetic oligonucleotide; TTT chr11 5301813 5301834 5301818 5301813 -
ttggaaatggcactcttcttgt

SEQ ID NO: 130553 - DNA, 22 bp, Artificial Sequence
  Synthetic oligonucleotide; TTT chr11 5301812 5301833 5301817 5301812 -
tggaaatggcactcttcttgtc

SEQ ID NO: 130554 - DNA, 22 bp, Artificial Sequence
  Synthetic oligonucleotide; TTT chr11 5301811 5301832 5301816 5301811 -
ggaaatggcactcttcttgtcc

SEQ ID NO: 130555 - DNA, 22 bp, Artificial Sequence
  Synthetic oligonucleotide; TTG chr11 5301810 5301831 5301815 5301810 -
gaaatggcactcttcttgtcct

SEQ ID NO: 130556 - DNA, 22 bp, Artificial Sequence
  Synthetic oligonucleotide; CTC chr11 5301798 5301819 5301803 5301798 -
ttcttgtcctcatttggaatga

SEQ ID NO: 130557 - DNA, 22 bp, Artificial Sequence
  Synthetic oligonucleotide; CTT chr11 5301796 5301817 5301801 5301796 -
cttgtcctcatttggaatgatc

SEQ ID NO: 130558 - DNA, 22 bp, Artificial Sequence
  Synthetic oligonucleotide; TTC chr11 5301795 5301816 5301800 5301795 -
ttgtcctcatttggaatgatca

SEQ ID NO: 130559 - DNA, 22 bp, Artificial Sequence
  Synthetic oligonucleotide; CTT chr11 5301793 5301814 5301798 5301793 -
gtcctcatttggaatgatcaca

SEQ ID NO: 130560 - DNA, 22 bp, Artificial Sequence
  Synthetic oligonucleotide; TTG chr11 5301792 5301813 5301797 5301792 -
tcctcatttggaatgatcacag

SEQ ID NO: 130561 - DNA, 22 bp, Artificial Sequence
  Synthetic oligonucleotide; CTC chr11 5301787 5301808 5301792 5301787 -
atttggaatgatcacagcctcc

SEQ ID NO: 130562 - DNA, 22 bp, Artificial Sequence
  Synthetic oligonucleotide; TTT chr11 5301783 5301804 5301788 5301783 -
ggaatgatcacagcctccatga

SEQ ID NO: 130563 - DNA, 22 bp, Artificial Sequence
  Synthetic oligonucleotide; TTG chr11 5301782 5301803 5301787 5301782 -
gaatgatcacagcctccatgag

SEQ ID NO: 130564 - DNA, 22 bp, Artificial Sequence
  Synthetic oligonucleotide; CTC chr11 5301766 5301787 5301771 5301766 -
catgagcccatgtactacttcc

SEQ ID NO: 130565 - DNA, 22 bp, Artificial Sequence
  Synthetic oligonucleotide; CTA chr11 5301749 5301770 5301754 5301749 -
cttcctggctatgctggcagac

SEQ ID NO: 130566 - DNA, 22 bp, Artificial Sequence
  Synthetic oligonucleotide; CTT chr11 5301746 5301767 5301751 5301746 -
cctggctatgctggcagacacg

SEQ ID NO: 130567 - DNA, 22 bp, Artificial Sequence
  Synthetic oligonucleotide; TTC chr11 5301745 5301766 5301750 5301745 -
ctggctatgctggcagacacgg

SEQ ID NO: 130568 - DNA, 22 bp, Artificial Sequence
  Synthetic oligonucleotide; CTG chr11 5301742 5301763 5301747 5301742 -
gctatgctggcagacacggacc

SEQ ID NO: 130569 - DNA, 22 bp, Artificial Sequence
  Synthetic oligonucleotide; CTA chr11 5301738 5301759 5301743 5301738 -
tgctggcagacacggaccttgg

SEQ ID NO: 130570 - DNA, 22 bp, Artificial Sequence
  Synthetic oligonucleotide; CTG chr11 5301733 5301754 5301738 5301733 -
gcagacacggaccttgggatga

SEQ ID NO: 130571 - DNA, 22 bp, Artificial Sequence
  Synthetic oligonucleotide; CTT chr11 5301718 5301739 5301723 5301718 -
gggatgacattcactacaatgc

SEQ ID NO: 130572 - DNA, 22 bp, Artificial Sequence
  Synthetic oligonucleotide; TTG chr11 5301717 5301738 5301722 5301717 -
ggatgacattcactacaatgcc

SEQ ID NO: 130573 - DNA, 22 bp, Artificial Sequence
  Synthetic oligonucleotide; TTC chr11 5301706 5301727 5301711 5301706 -
actacaatgcccacagtcctgg

SEQ ID NO: 130574 - DNA, 22 bp, Artificial Sequence
  Synthetic oligonucleotide; CTA chr11 5301702 5301723 5301707 5301702 -
caatgcccacagtcctgggtgt

SEQ ID NO: 130575 - DNA, 22 bp, Artificial Sequence
  Synthetic oligonucleotide; CTG chr11 5301685 5301706 5301690 5301685 -
ggtgtcctgctgctagaccaga

SEQ ID NO: 130576 - DNA, 22 bp, Artificial Sequence
  Synthetic oligonucleotide; CTG chr11 5301676 5301697 5301681 5301676 -
ctgctagaccagagggagattg

SEQ ID NO: 130577 - DNA, 22 bp, Artificial Sequence
  Synthetic oligonucleotide; CTG chr11 5301673 5301694 5301678 5301673 -
ctagaccagagggagattgccc

SEQ ID NO: 130578 - DNA, 22 bp, Artificial Sequence
  Synthetic oligonucleotide; CTA chr11 5301670 5301691 5301675 5301670 -
gaccagagggagattgcccatg

SEQ ID NO: 130579 - DNA, 22 bp, Artificial Sequence
  Synthetic oligonucleotide; TTG chr11 5301654 5301675 5301659 5301654 -
cccatgctgcctgtttcaccca

SEQ ID NO: 130580 - DNA, 22 bp, Artificial Sequence
  Synthetic oligonucleotide; CTG chr11 5301645 5301666 5301650 5301645 -
cctgtttcacccaatccttcat

SEQ ID NO: 130581 - DNA, 22 bp, Artificial Sequence
  Synthetic oligonucleotide; CTG chr11 5301641 5301662 5301646 5301641 -
tttcacccaatccttcattcat

SEQ ID NO: 130582 - DNA, 22 bp, Artificial Sequence
  Synthetic oligonucleotide; TTT chr11 5301638 5301659 5301643 5301638 -
cacccaatccttcattcattca

SEQ ID NO: 130583 - DNA, 22 bp, Artificial Sequence
  Synthetic oligonucleotide; TTC chr11 5301637 5301658 5301642 5301637 -
acccaatccttcattcattcac

SEQ ID NO: 130584 - DNA, 22 bp, Artificial Sequence
  Synthetic oligonucleotide; CTT chr11 5301626 5301647 5301631 5301626 -
cattcattcactggccattgta

SEQ ID NO: 130585 - DNA, 22 bp, Artificial Sequence
  Synthetic oligonucleotide; TTC chr11 5301625 5301646 5301630 5301625 -
attcattcactggccattgtag

SEQ ID NO: 130586 - DNA, 22 bp, Artificial Sequence
  Synthetic oligonucleotide; TTC chr11 5301621 5301642 5301626 5301621 -
attcactggccattgtagaatc

SEQ ID NO: 130587 - DNA, 22 bp, Artificial Sequence
  Synthetic oligonucleotide; TTC chr11 5301617 5301638 5301622 5301617 -
actggccattgtagaatcaggt

SEQ ID NO: 130588 - DNA, 22 bp, Artificial Sequence
  Synthetic oligonucleotide; CTG chr11 5301613 5301634 5301618 5301613 -
gccattgtagaatcaggtatct

SEQ ID NO: 130589 - DNA, 22 bp, Artificial Sequence
  Synthetic oligonucleotide; TTG chr11 5301606 5301627 5301611 5301606 -
tagaatcaggtatcttgcttgt

SEQ ID NO: 130590 - DNA, 22 bp, Artificial Sequence
  Synthetic oligonucleotide; CTT chr11 5301590 5301611 5301595 5301590 -
gcttgttttggcctatgactgt

SEQ ID NO: 130591 - DNA, 22 bp, Artificial Sequence
  Synthetic oligonucleotide; TTG chr11 5301589 5301610 5301594 5301589 -
cttgttttggcctatgactgtt

SEQ ID NO: 130592 - DNA, 22 bp, Artificial Sequence
  Synthetic oligonucleotide; CTT chr11 5301586 5301607 5301591 5301586 -
gttttggcctatgactgtttca

SEQ ID NO: 130593 - DNA, 22 bp, Artificial Sequence
  Synthetic oligonucleotide; TTG chr11 5301585 5301606 5301590 5301585 -
ttttggcctatgactgtttcat

SEQ ID NO: 130594 - DNA, 22 bp, Artificial Sequence
  Synthetic oligonucleotide; TTT chr11 5301582 5301603 5301587 5301582 -
tggcctatgactgtttcattgc

SEQ ID NO: 130595 - DNA, 22 bp, Artificial Sequence
  Synthetic oligonucleotide; TTT chr11 5301581 5301602 5301586 5301581 -
ggcctatgactgtttcattgcc

SEQ ID NO: 130596 - DNA, 22 bp, Artificial Sequence
  Synthetic oligonucleotide; TTG chr11 5301580 5301601 5301585 5301580 -
gcctatgactgtttcattgcca

SEQ ID NO: 130597 - DNA, 22 bp, Artificial Sequence
  Synthetic oligonucleotide; CTA chr11 5301575 5301596 5301580 5301575 -
tgactgtttcattgccatccgc

SEQ ID NO: 130598 - DNA, 22 bp, Artificial Sequence
  Synthetic oligonucleotide; CTG chr11 5301569 5301590 5301574 5301569 -
tttcattgccatccgcacacca

SEQ ID NO: 130599 - DNA, 22 bp, Artificial Sequence
  Synthetic oligonucleotide; TTT chr11 5301566 5301587 5301571 5301566 -
cattgccatccgcacaccactg

SEQ ID NO: 130600 - DNA, 22 bp, Artificial Sequence
  Synthetic oligonucleotide; TTC chr11 5301565 5301586 5301570 5301565 -
attgccatccgcacaccactga

SEQ ID NO: 130601 - DNA, 22 bp, Artificial Sequence
  Synthetic oligonucleotide; TTG chr11 5301561 5301582 5301566 5301561 -
ccatccgcacaccactgaggta

SEQ ID NO: 130602 - DNA, 22 bp, Artificial Sequence
  Synthetic oligonucleotide; CTG chr11 5301544 5301565 5301549 5301544 -
aggtacaactgcattcttacca

SEQ ID NO: 130603 - DNA, 22 bp, Artificial Sequence
  Synthetic oligonucleotide; CTG chr11 5301533 5301554 5301538 5301533 -
cattcttaccaattcccgagtg

SEQ ID NO: 130604 - DNA, 22 bp, Artificial Sequence
  Synthetic oligonucleotide; TTC chr11 5301528 5301549 5301533 5301528 -
ttaccaattcccgagtgatgaa

SEQ ID NO: 130605 - DNA, 22 bp, Artificial Sequence
  Synthetic oligonucleotide; CTT chr11 5301526 5301547 5301531 5301526 -
accaattcccgagtgatgaaca

SEQ ID NO: 130606 - DNA, 22 bp, Artificial Sequence
  Synthetic oligonucleotide; TTA chr11 5301525 5301546 5301530 5301525 -
ccaattcccgagtgatgaacat

SEQ ID NO: 130607 - DNA, 22 bp, Artificial Sequence
  Synthetic oligonucleotide; TTC chr11 5301518 5301539 5301523 5301518 -
ccgagtgatgaacataggactg

SEQ ID NO: 130608 - DNA, 22 bp, Artificial Sequence
  Synthetic oligonucleotide; CTG chr11 5301496 5301517 5301501 5301496 -
ggggtactgatgagaggtttta

SEQ ID NO: 130609 - DNA, 22 bp, Artificial Sequence
  Synthetic oligonucleotide; CTG chr11 5301487 5301508 5301492 5301487 -
atgagaggttttatgtccattt

SEQ ID NO: 130610 - DNA, 22 bp, Artificial Sequence
  Synthetic oligonucleotide; TTT chr11 5301476 5301497 5301481 5301476 -
tatgtccattttgcccataatt

SEQ ID NO: 130611 - DNA, 22 bp, Artificial Sequence
  Synthetic oligonucleotide; TTT chr11 5301475 5301496 5301480 5301475 -
atgtccattttgcccataattc

SEQ ID NO: 130612 - DNA, 22 bp, Artificial Sequence
  Synthetic oligonucleotide; TTA chr11 5301474 5301495 5301479 5301474 -
tgtccattttgcccataattct

SEQ ID NO: 130613 - DNA, 22 bp, Artificial Sequence
  Synthetic oligonucleotide; TTT chr11 5301465 5301486 5301470 5301465 -
tgcccataattctttcactcta

SEQ ID NO: 130614 - DNA, 22 bp, Artificial Sequence
  Synthetic oligonucleotide; TTT chr11 5301464 5301485 5301469 5301464 -
gcccataattctttcactctac

SEQ ID NO: 130615 - DNA, 22 bp, Artificial Sequence
  Synthetic oligonucleotide; TTG chr11 5301463 5301484 5301468 5301463 -
cccataattctttcactctact

SEQ ID NO: 130616 - DNA, 22 bp, Artificial Sequence
  Synthetic oligonucleotide; TTC chr11 5301453 5301474 5301458 5301453 -
tttcactctactgctacccata

SEQ ID NO: 130617 - DNA, 22 bp, Artificial Sequence
  Synthetic oligonucleotide; CTT chr11 5301451 5301472 5301456 5301451 -
tcactctactgctacccatatt

SEQ ID NO: 130618 - DNA, 22 bp, Artificial Sequence
  Synthetic oligonucleotide; TTT chr11 5301450 5301471 5301455 5301450 -
cactctactgctacccatattg

SEQ ID NO: 130619 - DNA, 22 bp, Artificial Sequence
  Synthetic oligonucleotide; TTC chr11 5301449 5301470 5301454 5301449 -
actctactgctacccatattgt

SEQ ID NO: 130620 - DNA, 22 bp, Artificial Sequence
  Synthetic oligonucleotide; CTC chr11 5301445 5301466 5301450 5301445 -
tactgctacccatattgtggtt

SEQ ID NO: 130621 - DNA, 22 bp, Artificial Sequence
  Synthetic oligonucleotide; CTA chr11 5301443 5301464 5301448 5301443 -
ctgctacccatattgtggttcc

SEQ ID NO: 130622 - DNA, 22 bp, Artificial Sequence
  Synthetic oligonucleotide; CTG chr11 5301440 5301461 5301445 5301440 -
ctacccatattgtggttcccgt

SEQ ID NO: 130623 - DNA, 22 bp, Artificial Sequence
  Synthetic oligonucleotide; CTA chr11 5301437 5301458 5301442 5301437 -
cccatattgtggttcccgtgcc

SEQ ID NO: 130624 - DNA, 22 bp, Artificial Sequence
  Synthetic oligonucleotide; TTG chr11 5301428 5301449 5301433 5301428 -
tggttcccgtgccctcttgcac

SEQ ID NO: 130625 - DNA, 22 bp, Artificial Sequence
  Synthetic oligonucleotide; TTC chr11 5301422 5301443 5301427 5301422 -
ccgtgccctcttgcacacattt

SEQ ID NO: 130626 - DNA, 22 bp, Artificial Sequence
  Synthetic oligonucleotide; CTC chr11 5301412 5301433 5301417 5301412 -
ttgcacacattttgcctccatc

SEQ ID NO: 130627 - DNA, 22 bp, Artificial Sequence
  Synthetic oligonucleotide; CTT chr11 5301410 5301431 5301415 5301410 -
gcacacattttgcctccatcaa

SEQ ID NO: 130628 - DNA, 22 bp, Artificial Sequence
  Synthetic oligonucleotide; TTG chr11 5301409 5301430 5301414 5301409 -
cacacattttgcctccatcaag

SEQ ID NO: 130629 - DNA, 22 bp, Artificial Sequence
  Synthetic oligonucleotide; TTT chr11 5301400 5301421 5301405 5301400 -
tgcctccatcaagatgtcataa

SEQ ID NO: 130630 - DNA, 22 bp, Artificial Sequence
  Synthetic oligonucleotide; TTT chr11 5301399 5301420 5301404 5301399 -
gcctccatcaagatgtcataaa

SEQ ID NO: 130631 - DNA, 22 bp, Artificial Sequence
  Synthetic oligonucleotide; TTG chr11 5301398 5301419 5301403 5301398 -
cctccatcaagatgtcataaaa

SEQ ID NO: 130632 - DNA, 22 bp, Artificial Sequence
  Synthetic oligonucleotide; CTC chr11 5301394 5301415 5301399 5301394 -
catcaagatgtcataaaactcg

SEQ ID NO: 130633 - DNA, 22 bp, Artificial Sequence
  Synthetic oligonucleotide; CTC chr11 5301373 5301394 5301378 5301373 -
gcctgtgctgatatcacgttta

SEQ ID NO: 130634 - DNA, 22 bp, Artificial Sequence
  Synthetic oligonucleotide; CTG chr11 5301368 5301389 5301373 5301368 -
tgctgatatcacgtttaatcac

SEQ ID NO: 130635 - DNA, 22 bp, Artificial Sequence
  Synthetic oligonucleotide; CTG chr11 5301363 5301384 5301368 5301363 -
atatcacgtttaatcacatata

SEQ ID NO: 130636 - DNA, 22 bp, Artificial Sequence
  Synthetic oligonucleotide; TTT chr11 5301352 5301373 5301357 5301352 -
aatcacatatatccaattattc

SEQ ID NO: 130637 - DNA, 22 bp, Artificial Sequence
  Synthetic oligonucleotide; TTA chr11 5301351 5301372 5301356 5301351 -
atcacatatatccaattattca

SEQ ID NO: 130638 - DNA, 22 bp, Artificial Sequence
  Synthetic oligonucleotide; TTA chr11 5301333 5301354 5301338 5301333 -
ttcagacttctttgactgtctt

SEQ ID NO: 130639 - DNA, 22 bp, Artificial Sequence
  Synthetic oligonucleotide; TTC chr11 5301330 5301351 5301335 5301330 -
agacttctttgactgtcttttt

SEQ ID NO: 130640 - DNA, 22 bp, Artificial Sequence
  Synthetic oligonucleotide; CTT chr11 5301324 5301345 5301329 5301324 -
ctttgactgtctttttagatgc

SEQ ID NO: 130641 - DNA, 22 bp, Artificial Sequence
  Synthetic oligonucleotide; TTC chr11 5301323 5301344 5301328 5301323 -
tttgactgtctttttagatgct

SEQ ID NO: 130642 - DNA, 22 bp, Artificial Sequence
  Synthetic oligonucleotide; CTT chr11 5301321 5301342 5301326 5301321 -
tgactgtctttttagatgctct

SEQ ID NO: 130643 - DNA, 22 bp, Artificial Sequence
  Synthetic oligonucleotide; TTT chr11 5301320 5301341 5301325 5301320 -
gactgtctttttagatgctcta

SEQ ID NO: 130644 - DNA, 22 bp, Artificial Sequence
  Synthetic oligonucleotide; TTG chr11 5301319 5301340 5301324 5301319 -
actgtctttttagatgctctaa

SEQ ID NO: 130645 - DNA, 22 bp, Artificial Sequence
  Synthetic oligonucleotide; CTG chr11 5301315 5301336 5301320 5301315 -
tctttttagatgctctaatcat

SEQ ID NO: 130646 - DNA, 22 bp, Artificial Sequence
  Synthetic oligonucleotide; CTT chr11 5301311 5301332 5301316 5301311 -
tttagatgctctaatcatcatc

SEQ ID NO: 130647 - DNA, 22 bp, Artificial Sequence
  Synthetic oligonucleotide; TTT chr11 5301310 5301331 5301315 5301310 -
ttagatgctctaatcatcatct

SEQ ID NO: 130648 - DNA, 22 bp, Artificial Sequence
  Synthetic oligonucleotide; TTT chr11 5301309 5301330 5301314 5301309 -
tagatgctctaatcatcatctt

SEQ ID NO: 130649 - DNA, 22 bp, Artificial Sequence
  Synthetic oligonucleotide; TTT chr11 5301308 5301329 5301313 5301308 -
agatgctctaatcatcatcttt

SEQ ID NO: 130650 - DNA, 22 bp, Artificial Sequence
  Synthetic oligonucleotide; TTA chr11 5301307 5301328 5301312 5301307 -
gatgctctaatcatcatctttt

SEQ ID NO: 130651 - DNA, 22 bp, Artificial Sequence
  Synthetic oligonucleotide; CTC chr11 5301300 5301321 5301305 5301300 -
taatcatcatcttttcttatat

SEQ ID NO: 130652 - DNA, 22 bp, Artificial Sequence
  Synthetic oligonucleotide; CTA chr11 5301298 5301319 5301303 5301298 -
atcatcatcttttcttatatac

SEQ ID NO: 130653 - DNA, 22 bp, Artificial Sequence
  Synthetic oligonucleotide; CTT chr11 5301287 5301308 5301292 5301287 -
ttcttatatactaatcctcaag

SEQ ID NO: 130654 - DNA, 22 bp, Artificial Sequence
  Synthetic oligonucleotide; TTT chr11 5301286 5301307 5301291 5301286 -
tcttatatactaatcctcaaga

SEQ ID NO: 130655 - DNA, 22 bp, Artificial Sequence
  Synthetic oligonucleotide; TTT chr11 5301285 5301306 5301290 5301285 -
cttatatactaatcctcaagac

SEQ ID NO: 130656 - DNA, 22 bp, Artificial Sequence
  Synthetic oligonucleotide; TTC chr11 5301284 5301305 5301289 5301284 -
ttatatactaatcctcaagaca

SEQ ID NO: 130657 - DNA, 22 bp, Artificial Sequence
  Synthetic oligonucleotide; CTT chr11 5301282 5301303 5301287 5301282 -
atatactaatcctcaagacagt

SEQ ID NO: 130658 - DNA, 22 bp, Artificial Sequence
  Synthetic oligonucleotide; TTA chr11 5301281 5301302 5301286 5301281 -
tatactaatcctcaagacagtg

SEQ ID NO: 130659 - DNA, 22 bp, Artificial Sequence
  Synthetic oligonucleotide; CTA chr11 5301274 5301295 5301279 5301274 -
atcctcaagacagtgatgggca

SEQ ID NO: 130660 - DNA, 22 bp, Artificial Sequence
  Synthetic oligonucleotide; CTC chr11 5301268 5301289 5301273 5301268 -
aagacagtgatgggcattgcgt

SEQ ID NO: 130661 - DNA, 22 bp, Artificial Sequence
  Synthetic oligonucleotide; TTG chr11 5301249 5301270 5301254 5301249 -
cgtctggacaagaggaagctaa

SEQ ID NO: 130662 - DNA, 22 bp, Artificial Sequence
  Synthetic oligonucleotide; CTG chr11 5301243 5301264 5301248 5301243 -
gacaagaggaagctaaatctct

SEQ ID NO: 130663 - DNA, 22 bp, Artificial Sequence
  Synthetic oligonucleotide; CTA chr11 5301228 5301249 5301233 5301228 -
aatctctcaacacttgtgtctc

SEQ ID NO: 130664 - DNA, 22 bp, Artificial Sequence
  Synthetic oligonucleotide; CTC chr11 5301222 5301243 5301227 5301222 -
tcaacacttgtgtctcccatat

SEQ ID NO: 130665 - DNA, 22 bp, Artificial Sequence
  Synthetic oligonucleotide; CTC chr11 5301220 5301241 5301225 5301220 -
aacacttgtgtctcccatatta

SEQ ID NO: 130666 - DNA, 22 bp, Artificial Sequence
  Synthetic oligonucleotide; CTT chr11 5301213 5301234 5301218 5301213 -
gtgtctcccatattagctgtgt

SEQ ID NO: 130667 - DNA, 22 bp, Artificial Sequence
  Synthetic oligonucleotide; TTG chr11 5301212 5301233 5301217 5301212 -
tgtctcccatattagctgtgtc

SEQ ID NO: 130668 - DNA, 22 bp, Artificial Sequence
  Synthetic oligonucleotide; CTC chr11 5301206 5301227 5301211 5301206 -
ccatattagctgtgtcctagta

SEQ ID NO: 130669 - DNA, 22 bp, Artificial Sequence
  Synthetic oligonucleotide; TTA chr11 5301198 5301219 5301203 5301198 -
gctgtgtcctagtatttcacat

SEQ ID NO: 130670 - DNA, 22 bp, Artificial Sequence
  Synthetic oligonucleotide; CTG chr11 5301194 5301215 5301199 5301194 -
tgtcctagtatttcacatcact

SEQ ID NO: 130671 - DNA, 22 bp, Artificial Sequence
  Synthetic oligonucleotide; CTA chr11 5301187 5301208 5301192 5301187 -
gtatttcacatcactgtgatgg

SEQ ID NO: 130672 - DNA, 22 bp, Artificial Sequence
  Synthetic oligonucleotide; TTT chr11 5301181 5301202 5301186 5301181 -
cacatcactgtgatgggactgt

SEQ ID NO: 130673 - DNA, 22 bp, Artificial Sequence
  Synthetic oligonucleotide; TTC chr11 5301180 5301201 5301185 5301180 -
acatcactgtgatgggactgtc

SEQ ID NO: 130674 - DNA, 22 bp, Artificial Sequence
  Synthetic oligonucleotide; CTG chr11 5301171 5301192 5301176 5301171 -
tgatgggactgtcattcattca

SEQ ID NO: 130675 - DNA, 22 bp, Artificial Sequence
  Synthetic oligonucleotide; CTG chr11 5301160 5301181 5301165 5301160 -
tcattcattcacaggtttggga

SEQ ID NO: 130676 - DNA, 22 bp, Artificial Sequence
  Synthetic oligonucleotide; TTC chr11 5301154 5301175 5301159 5301154 -
attcacaggtttgggaaacatg

SEQ ID NO: 130677 - DNA, 22 bp, Artificial Sequence
  Synthetic oligonucleotide; TTC chr11 5301150 5301171 5301155 5301150 -
acaggtttgggaaacatgcacc

SEQ ID NO: 130678 - DNA, 22 bp, Artificial Sequence
  Synthetic oligonucleotide; TTT chr11 5301142 5301163 5301147 5301142 -
gggaaacatgcacctcatgtgg

SEQ ID NO: 130679 - DNA, 22 bp, Artificial Sequence
  Synthetic oligonucleotide; TTG chr11 5301141 5301162 5301146 5301141 -
ggaaacatgcacctcatgtggt

SEQ ID NO: 130680 - DNA, 22 bp, Artificial Sequence
  Synthetic oligonucleotide; CTC chr11 5301126 5301147 5301131 5301126 -
atgtggtccccattaccatgag

SEQ ID NO: 130681 - DNA, 22 bp, Artificial Sequence
  Synthetic oligonucleotide; TTA chr11 5301111 5301132 5301116 5301111 -
ccatgagctatgtccattttct

SEQ ID NO: 130682 - DNA, 22 bp, Artificial Sequence
  Synthetic oligonucleotide; CTA chr11 5301101 5301122 5301106 5301101 -
tgtccattttctctttcctcca

SEQ ID NO: 130683 - DNA, 22 bp, Artificial Sequence
  Synthetic oligonucleotide; TTT chr11 5301092 5301113 5301097 5301092 -
tctctttcctccattcgtgaat

SEQ ID NO: 130684 - DNA, 22 bp, Artificial Sequence
  Synthetic oligonucleotide; TTT chr11 5301091 5301112 5301096 5301091 -
ctctttcctccattcgtgaatc

SEQ ID NO: 130685 - DNA, 22 bp, Artificial Sequence
  Synthetic oligonucleotide; TTC chr11 5301090 5301111 5301095 5301090 -
tctttcctccattcgtgaatcc

SEQ ID NO: 130686 - DNA, 22 bp, Artificial Sequence
  Synthetic oligonucleotide; CTC chr11 5301088 5301109 5301093 5301088 -
tttcctccattcgtgaatccta

SEQ ID NO: 130687 - DNA, 22 bp, Artificial Sequence
  Synthetic oligonucleotide; CTT chr11 5301086 5301107 5301091 5301086 -
tcctccattcgtgaatcctatc

SEQ ID NO: 130688 - DNA, 22 bp, Artificial Sequence
  Synthetic oligonucleotide; TTT chr11 5301085 5301106 5301090 5301085 -
cctccattcgtgaatcctatca

SEQ ID NO: 130689 - DNA, 22 bp, Artificial Sequence
  Synthetic oligonucleotide; TTC chr11 5301084 5301105 5301089 5301084 -
ctccattcgtgaatcctatcat

SEQ ID NO: 130690 - DNA, 22 bp, Artificial Sequence
  Synthetic oligonucleotide; CTC chr11 5301081 5301102 5301086 5301081 -
cattcgtgaatcctatcattta

SEQ ID NO: 130691 - DNA, 22 bp, Artificial Sequence
  Synthetic oligonucleotide; TTC chr11 5301076 5301097 5301081 5301076 -
gtgaatcctatcatttatagca

SEQ ID NO: 130692 - DNA, 22 bp, Artificial Sequence
  Synthetic oligonucleotide; CTA chr11 5301066 5301087 5301071 5301066 -
tcatttatagcatcaagaccaa

SEQ ID NO: 130693 - DNA, 22 bp, Artificial Sequence
  Synthetic oligonucleotide; TTT chr11 5301060 5301081 5301065 5301060 -
atagcatcaagaccaagcagat

SEQ ID NO: 130694 - DNA, 22 bp, Artificial Sequence
  Synthetic oligonucleotide; TTA chr11 5301059 5301080 5301064 5301059 -
tagcatcaagaccaagcagatt

SEQ ID NO: 130695 - DNA, 22 bp, Artificial Sequence
  Synthetic oligonucleotide; TTC chr11 5301036 5301057 5301041 5301036 -
aaagaagcattattcgcctatt

SEQ ID NO: 130696 - DNA, 22 bp, Artificial Sequence
  Synthetic oligonucleotide; TTA chr11 5301024 5301045 5301029 5301024 -
ttcgcctattttctgggcagag

SEQ ID NO: 130697 - DNA, 22 bp, Artificial Sequence
  Synthetic oligonucleotide; TTC chr11 5301021 5301042 5301026 5301021 -
gcctattttctgggcagagtag

SEQ ID NO: 130698 - DNA, 22 bp, Artificial Sequence
  Synthetic oligonucleotide; CTA chr11 5301016 5301037 5301021 5301016 -
ttttctgggcagagtagggctt

SEQ ID NO: 130699 - DNA, 22 bp, Artificial Sequence
  Synthetic oligonucleotide; TTT chr11 5301013 5301034 5301018 5301013 -
tctgggcagagtagggcttgag

SEQ ID NO: 130700 - DNA, 22 bp, Artificial Sequence
  Synthetic oligonucleotide; TTT chr11 5301012 5301033 5301017 5301012 -
ctgggcagagtagggcttgagc

SEQ ID NO: 130701 - DNA, 22 bp, Artificial Sequence
  Synthetic oligonucleotide; TTC chr11 5301011 5301032 5301016 5301011 -
tgggcagagtagggcttgagcc

SEQ ID NO: 130702 - DNA, 22 bp, Artificial Sequence
  Synthetic oligonucleotide; CTG chr11 5301009 5301030 5301014 5301009 -
ggcagagtagggcttgagccct

SEQ ID NO: 130703 - DNA, 22 bp, Artificial Sequence
  Synthetic oligonucleotide; CTT chr11 5300994 5301015 5300999 5300994 -
gagcccttatttcagaatctca

SEQ ID NO: 130704 - DNA, 22 bp, Artificial Sequence
  Synthetic oligonucleotide; TTG chr11 5300993 5301014 5300998 5300993 -
agcccttatttcagaatctcaa

SEQ ID NO: 130705 - DNA, 22 bp, Artificial Sequence
  Synthetic oligonucleotide; CTT chr11 5300986 5301007 5300991 5300986 -
atttcagaatctcaagatctct

SEQ ID NO: 130706 - DNA, 22 bp, Artificial Sequence
  Synthetic oligonucleotide; TTA chr11 5300985 5301006 5300990 5300985 -
tttcagaatctcaagatctcta

SEQ ID NO: 130707 - DNA, 22 bp, Artificial Sequence
  Synthetic oligonucleotide; TTT chr11 5300982 5301003 5300987 5300982 -
cagaatctcaagatctctagga

SEQ ID NO: 130708 - DNA, 22 bp, Artificial Sequence
  Synthetic oligonucleotide; TTC chr11 5300981 5301002 5300986 5300981 -
agaatctcaagatctctaggat

SEQ ID NO: 130709 - DNA, 22 bp, Artificial Sequence
  Synthetic oligonucleotide; CTC chr11 5300973 5300994 5300978 5300973 -
aagatctctaggatttctgggc

SEQ ID NO: 130710 - DNA, 22 bp, Artificial Sequence
  Synthetic oligonucleotide; CTC chr11 5300965 5300986 5300970 5300965 -
taggatttctgggcctctccca

SEQ ID NO: 130711 - DNA, 22 bp, Artificial Sequence
  Synthetic oligonucleotide; CTA chr11 5300963 5300984 5300968 5300963 -
ggatttctgggcctctcccatt

SEQ ID NO: 130712 - DNA, 22 bp, Artificial Sequence
  Synthetic oligonucleotide; TTT chr11 5300957 5300978 5300962 5300957 -
ctgggcctctcccattactgaa

SEQ ID NO: 130713 - DNA, 22 bp, Artificial Sequence
  Synthetic oligonucleotide; TTC chr11 5300956 5300977 5300961 5300956 -
tgggcctctcccattactgaaa

SEQ ID NO: 130714 - DNA, 22 bp, Artificial Sequence
  Synthetic oligonucleotide; CTG chr11 5300954 5300975 5300959 5300954 -
ggcctctcccattactgaaaag

SEQ ID NO: 130715 - DNA, 22 bp, Artificial Sequence
  Synthetic oligonucleotide; CTC chr11 5300948 5300969 5300953 5300948 -
tcccattactgaaaaggaaccc

SEQ ID NO: 130716 - DNA, 22 bp, Artificial Sequence
  Synthetic oligonucleotide; CTC chr11 5300946 5300967 5300951 5300946 -
ccattactgaaaaggaaccctg

SEQ ID NO: 130717 - DNA, 22 bp, Artificial Sequence
  Synthetic oligonucleotide; TTA chr11 5300940 5300961 5300945 5300940 -
ctgaaaaggaaccctggtttta

SEQ ID NO: 130718 - DNA, 22 bp, Artificial Sequence
  Synthetic oligonucleotide; CTG chr11 5300937 5300958 5300942 5300937 -
aaaaggaaccctggttttatat

SEQ ID NO: 130719 - DNA, 22 bp, Artificial Sequence
  Synthetic oligonucleotide; CTG chr11 5300924 5300945 5300929 5300924 -
gttttatatccacacttttttt

SEQ ID NO: 130720 - DNA, 22 bp, Artificial Sequence
  Synthetic oligonucleotide; TTT chr11 5300920 5300941 5300925 5300920 -
tatatccacacttttttttcct

SEQ ID NO: 130721 - DNA, 22 bp, Artificial Sequence
  Synthetic oligonucleotide; TTT chr11 5300919 5300940 5300924 5300919 -
atatccacacttttttttcctc

SEQ ID NO: 130722 - DNA, 22 bp, Artificial Sequence
  Synthetic oligonucleotide; TTA chr11 5300918 5300939 5300923 5300918 -
tatccacacttttttttcctca

SEQ ID NO: 130723 - DNA, 22 bp, Artificial Sequence
  Synthetic oligonucleotide; CTT chr11 5300907 5300928 5300912 5300907 -
ttttttcctcagagttagattc

SEQ ID NO: 130724 - DNA, 22 bp, Artificial Sequence
  Synthetic oligonucleotide; TTT chr11 5300906 5300927 5300911 5300906 -
tttttcctcagagttagattca

SEQ ID NO: 130725 - DNA, 22 bp, Artificial Sequence
  Synthetic oligonucleotide; TTT chr11 5300905 5300926 5300910 5300905 -
ttttcctcagagttagattcaa

SEQ ID NO: 130726 - DNA, 22 bp, Artificial Sequence
  Synthetic oligonucleotide; TTT chr11 5300904 5300925 5300909 5300904 -
tttcctcagagttagattcaat

SEQ ID NO: 130727 - DNA, 22 bp, Artificial Sequence
  Synthetic oligonucleotide; TTT chr11 5300903 5300924 5300908 5300903 -
ttcctcagagttagattcaatt

SEQ ID NO: 130728 - DNA, 22 bp, Artificial Sequence
  Synthetic oligonucleotide; TTT chr11 5300902 5300923 5300907 5300902 -
tcctcagagttagattcaattt

SEQ ID NO: 130729 - DNA, 22 bp, Artificial Sequence
  Synthetic oligonucleotide; TTT chr11 5300901 5300922 5300906 5300901 -
cctcagagttagattcaatttt

SEQ ID NO: 130730 - DNA, 22 bp, Artificial Sequence
  Synthetic oligonucleotide; TTC chr11 5300900 5300921 5300905 5300900 -
ctcagagttagattcaatttta

SEQ ID NO: 130731 - DNA, 22 bp, Artificial Sequence
  Synthetic oligonucleotide; CTC chr11 5300897 5300918 5300902 5300897 -
agagttagattcaattttaatt

SEQ ID NO: 130732 - DNA, 22 bp, Artificial Sequence
  Synthetic oligonucleotide; TTA chr11 5300890 5300911 5300895 5300890 -
gattcaattttaattatcacat

SEQ ID NO: 130733 - DNA, 22 bp, Artificial Sequence
  Synthetic oligonucleotide; TTC chr11 5300885 5300906 5300890 5300885 -
aattttaattatcacatgaaaa

SEQ ID NO: 130734 - DNA, 22 bp, Artificial Sequence
  Synthetic oligonucleotide; TTT chr11 5300880 5300901 5300885 5300880 -
taattatcacatgaaaaagctg

SEQ ID NO: 130735 - DNA, 22 bp, Artificial Sequence
  Synthetic oligonucleotide; TTT chr11 5300879 5300900 5300884 5300879 -
aattatcacatgaaaaagctga

SEQ ID NO: 130736 - DNA, 22 bp, Artificial Sequence
  Synthetic oligonucleotide; TTA chr11 5300878 5300899 5300883 5300878 -
attatcacatgaaaaagctgat

SEQ ID NO: 130737 - DNA, 22 bp, Artificial Sequence
  Synthetic oligonucleotide; TTA chr11 5300874 5300895 5300879 5300874 -
tcacatgaaaaagctgatgtga

SEQ ID NO: 130738 - DNA, 22 bp, Artificial Sequence
  Synthetic oligonucleotide; CTG chr11 5300858 5300879 5300863 5300858 -
atgtgagcgagaaatttttata

SEQ ID NO: 130739 - DNA, 22 bp, Artificial Sequence
  Synthetic oligonucleotide; TTT chr11 5300841 5300862 5300846 5300841 -
ttatacatatgtgtgtgtgtgt

SEQ ID NO: 130740 - DNA, 22 bp, Artificial Sequence
  Synthetic oligonucleotide; TTT chr11 5300840 5300861 5300845 5300840 -
tatacatatgtgtgtgtgtgtg

SEQ ID NO: 130741 - DNA, 22 bp, Artificial Sequence
  Synthetic oligonucleotide; TTT chr11 5300839 5300860 5300844 5300839 -
atacatatgtgtgtgtgtgtgt

SEQ ID NO: 130742 - DNA, 22 bp, Artificial Sequence
  Synthetic oligonucleotide; TTA chr11 5300838 5300859 5300843 5300838 -
tacatatgtgtgtgtgtgtgtg

SEQ ID NO: 130743 - DNA, 22 bp, Artificial Sequence
  Synthetic oligonucleotide; CTA chr11 5300787 5300808 5300792 5300787 -
ataaagagggaatgccagtgat

SEQ ID NO: 130744 - DNA, 22 bp, Artificial Sequence
  Synthetic oligonucleotide; CTG chr11 5300761 5300782 5300766 5300761 -
aagaaaaagaatacaggaagca

SEQ ID NO: 130745 - DNA, 22 bp, Artificial Sequence
  Synthetic oligonucleotide; CTA chr11 5300705 5300726 5300710 5300705 -
tgatttcagaaatagtcaagat

SEQ ID NO: 130746 - DNA, 22 bp, Artificial Sequence
  Synthetic oligonucleotide; TTT chr11 5300699 5300720 5300704 5300699 -
cagaaatagtcaagataagtgg

SEQ ID NO: 130747 - DNA, 22 bp, Artificial Sequence
  Synthetic oligonucleotide; TTC chr11 5300698 5300719 5300703 5300698 -
agaaatagtcaagataagtgga

SEQ ID NO: 130748 - DNA, 22 bp, Artificial Sequence
  Synthetic oligonucleotide; CTA chr11 5300673 5300694 5300678 5300673 -
aagcagcttgggtcaaatacag

SEQ ID NO: 130749 - DNA, 22 bp, Artificial Sequence
  Synthetic oligonucleotide; CTT chr11 5300664 5300685 5300669 5300664 -
gggtcaaatacagttcatctaa

SEQ ID NO: 130750 - DNA, 22 bp, Artificial Sequence
  Synthetic oligonucleotide; TTG chr11 5300663 5300684 5300668 5300663 -
ggtcaaatacagttcatctaaa

SEQ ID NO: 130751 - DNA, 22 bp, Artificial Sequence
  Synthetic oligonucleotide; TTC chr11 5300648 5300669 5300653 5300648 -
atctaaagaaaaatgtgcagtt

SEQ ID NO: 130752 - DNA, 22 bp, Artificial Sequence
  Synthetic oligonucleotide; CTA chr11 5300643 5300664 5300648 5300643 -
aagaaaaatgtgcagttggagg

SEQ ID NO: 130753 - DNA, 22 bp, Artificial Sequence
  Synthetic oligonucleotide; TTG chr11 5300625 5300646 5300630 5300625 -
gaggtacattttatgtgtctta

SEQ ID NO: 130754 - DNA, 22 bp, Artificial Sequence
  Synthetic oligonucleotide; TTT chr11 5300614 5300635 5300619 5300614 -
tatgtgtcttataaaggtgaat

SEQ ID NO: 130755 - DNA, 22 bp, Artificial Sequence
  Synthetic oligonucleotide; TTT chr11 5300613 5300634 5300618 5300613 -
atgtgtcttataaaggtgaatt

SEQ ID NO: 130756 - DNA, 22 bp, Artificial Sequence
  Synthetic oligonucleotide; TTA chr11 5300612 5300633 5300617 5300612 -
tgtgtcttataaaggtgaattt

SEQ ID NO: 130757 - DNA, 22 bp, Artificial Sequence
  Synthetic oligonucleotide; CTT chr11 5300604 5300625 5300609 5300604 -
ataaaggtgaatttgaataata

SEQ ID NO: 130758 - DNA, 22 bp, Artificial Sequence
  Synthetic oligonucleotide; TTA chr11 5300603 5300624 5300608 5300603 -
taaaggtgaatttgaataatac

SEQ ID NO: 130759 - DNA, 22 bp, Artificial Sequence
  Synthetic oligonucleotide; TTT chr11 5300590 5300611 5300595 5300590 -
gaataatacatgatcatatttt

SEQ ID NO: 130760 - DNA, 22 bp, Artificial Sequence
  Synthetic oligonucleotide; TTG chr11 5300589 5300610 5300594 5300589 -
aataatacatgatcatattttc

SEQ ID NO: 130761 - DNA, 22 bp, Artificial Sequence
  Synthetic oligonucleotide; TTT chr11 5300569 5300590 5300574 5300569 -
tcatctccatactttgaaacta

SEQ ID NO: 130762 - DNA, 22 bp, Artificial Sequence
  Synthetic oligonucleotide; TTT chr11 5300568 5300589 5300573 5300568 -
catctccatactttgaaactag

SEQ ID NO: 130763 - DNA, 22 bp, Artificial Sequence
  Synthetic oligonucleotide; TTC chr11 5300567 5300588 5300572 5300567 -
atctccatactttgaaactagt

SEQ ID NO: 130764 - DNA, 22 bp, Artificial Sequence
  Synthetic oligonucleotide; CTC chr11 5300562 5300583 5300567 5300562 -
catactttgaaactagttactc

SEQ ID NO: 130765 - DNA, 22 bp, Artificial Sequence
  Synthetic oligonucleotide; CTT chr11 5300555 5300576 5300560 5300555 -
tgaaactagttactctgaaaag

SEQ ID NO: 130766 - DNA, 22 bp, Artificial Sequence
  Synthetic oligonucleotide; TTT chr11 5300554 5300575 5300559 5300554 -
gaaactagttactctgaaaagg

SEQ ID NO: 130767 - DNA, 22 bp, Artificial Sequence
  Synthetic oligonucleotide; TTG chr11 5300553 5300574 5300558 5300553 -
aaactagttactctgaaaagga

SEQ ID NO: 130768 - DNA, 22 bp, Artificial Sequence
  Synthetic oligonucleotide; CTA chr11 5300547 5300568 5300552 5300547 -
gttactctgaaaaggatcttgc

SEQ ID NO: 130769 - DNA, 22 bp, Artificial Sequence
  Synthetic oligonucleotide; TTA chr11 5300543 5300564 5300548 5300543 -
ctctgaaaaggatcttgcttga

SEQ ID NO: 130770 - DNA, 22 bp, Artificial Sequence
  Synthetic oligonucleotide; CTC chr11 5300540 5300561 5300545 5300540 -
tgaaaaggatcttgcttgatta

SEQ ID NO: 130771 - DNA, 22 bp, Artificial Sequence
  Synthetic oligonucleotide; CTG chr11 5300538 5300559 5300543 5300538 -
aaaaggatcttgcttgattagt

SEQ ID NO: 130772 - DNA, 22 bp, Artificial Sequence
  Synthetic oligonucleotide; CTT chr11 5300527 5300548 5300532 5300527 -
gcttgattagtaagcaaacttg

SEQ ID NO: 130773 - DNA, 22 bp, Artificial Sequence
  Synthetic oligonucleotide; TTG chr11 5300526 5300547 5300531 5300526 -
cttgattagtaagcaaacttgt

SEQ ID NO: 130774 - DNA, 22 bp, Artificial Sequence
  Synthetic oligonucleotide; CTT chr11 5300523 5300544 5300528 5300523 -
gattagtaagcaaacttgtgtg

SEQ ID NO: 130775 - DNA, 22 bp, Artificial Sequence
  Synthetic oligonucleotide; TTG chr11 5300522 5300543 5300527 5300522 -
attagtaagcaaacttgtgtga

SEQ ID NO: 130776 - DNA, 22 bp, Artificial Sequence
  Synthetic oligonucleotide; TTA chr11 5300518 5300539 5300523 5300518 -
gtaagcaaacttgtgtgaggct

SEQ ID NO: 130777 - DNA, 22 bp, Artificial Sequence
  Synthetic oligonucleotide; CTT chr11 5300506 5300527 5300511 5300506 -
gtgtgaggctaaacagcaaata

SEQ ID NO: 130778 - DNA, 22 bp, Artificial Sequence
  Synthetic oligonucleotide; TTG chr11 5300505 5300526 5300510 5300505 -
tgtgaggctaaacagcaaatat

SEQ ID NO: 130779 - DNA, 22 bp, Artificial Sequence
  Synthetic oligonucleotide; CTA chr11 5300495 5300516 5300500 5300495 -
aacagcaaatatctagaacttt

SEQ ID NO: 130780 - DNA, 22 bp, Artificial Sequence
  Synthetic oligonucleotide; CTA chr11 5300480 5300501 5300485 5300480 -
gaactttaggaagcttactcat

SEQ ID NO: 130781 - DNA, 22 bp, Artificial Sequence
  Synthetic oligonucleotide; CTT chr11 5300474 5300495 5300479 5300474 -
taggaagcttactcatgaaatg

SEQ ID NO: 130782 - DNA, 22 bp, Artificial Sequence
  Synthetic oligonucleotide; TTT chr11 5300473 5300494 5300478 5300473 -
aggaagcttactcatgaaatgt

SEQ ID NO: 130783 - DNA, 22 bp, Artificial Sequence
  Synthetic oligonucleotide; TTA chr11 5300472 5300493 5300477 5300472 -
ggaagcttactcatgaaatgta

SEQ ID NO: 130784 - DNA, 22 bp, Artificial Sequence
  Synthetic oligonucleotide; CTT chr11 5300464 5300485 5300469 5300464 -
actcatgaaatgtaatttccct

SEQ ID NO: 130785 - DNA, 22 bp, Artificial Sequence
  Synthetic oligonucleotide; TTA chr11 5300463 5300484 5300468 5300463 -
ctcatgaaatgtaatttccctt

SEQ ID NO: 130786 - DNA, 22 bp, Artificial Sequence
  Synthetic oligonucleotide; CTC chr11 5300460 5300481 5300465 5300460 -
atgaaatgtaatttcccttagt

SEQ ID NO: 130787 - DNA, 22 bp, Artificial Sequence
  Synthetic oligonucleotide; TTT chr11 5300446 5300467 5300451 5300446 -
cccttagtagactggcatattt

SEQ ID NO: 130788 - DNA, 22 bp, Artificial Sequence
  Synthetic oligonucleotide; TTC chr11 5300445 5300466 5300450 5300445 -
ccttagtagactggcatatttt

SEQ ID NO: 130789 - DNA, 22 bp, Artificial Sequence
  Synthetic oligonucleotide; CTT chr11 5300441 5300462 5300446 5300441 -
agtagactggcatattttacta

SEQ ID NO: 130790 - DNA, 22 bp, Artificial Sequence
  Synthetic oligonucleotide; TTA chr11 5300440 5300461 5300445 5300440 -
gtagactggcatattttactac

SEQ ID NO: 130791 - DNA, 22 bp, Artificial Sequence
  Synthetic oligonucleotide; CTG chr11 5300432 5300453 5300437 5300432 -
gcatattttactactaaaaggc

SEQ ID NO: 130792 - DNA, 22 bp, Artificial Sequence
  Synthetic oligonucleotide; TTT chr11 5300424 5300445 5300429 5300424 -
tactactaaaaggcgtgtgata

SEQ ID NO: 130793 - DNA, 22 bp, Artificial Sequence
  Synthetic oligonucleotide; TTT chr11 5300423 5300444 5300428 5300423 -
actactaaaaggcgtgtgatac

SEQ ID NO: 130794 - DNA, 22 bp, Artificial Sequence
  Synthetic oligonucleotide; TTA chr11 5300422 5300443 5300427 5300422 -
ctactaaaaggcgtgtgataca

SEQ ID NO: 130795 - DNA, 22 bp, Artificial Sequence
  Synthetic oligonucleotide; CTA chr11 5300419 5300440 5300424 5300419 -
ctaaaaggcgtgtgatacagac

SEQ ID NO: 130796 - DNA, 22 bp, Artificial Sequence
  Synthetic oligonucleotide; CTA chr11 5300416 5300437 5300421 5300416 -
aaaggcgtgtgatacagactaa

SEQ ID NO: 130797 - DNA, 22 bp, Artificial Sequence
  Synthetic oligonucleotide; CTA chr11 5300395 5300416 5300400 5300395 -
acagctaaatagcagcaaacac

SEQ ID NO: 130798 - DNA, 22 bp, Artificial Sequence
  Synthetic oligonucleotide; CTA chr11 5300388 5300409 5300393 5300388 -
aatagcagcaaacacatttctt

SEQ ID NO: 130799 - DNA, 22 bp, Artificial Sequence
  Synthetic oligonucleotide; TTT chr11 5300369 5300390 5300374 5300369 -
cttatcatctcgtggaagccag

SEQ ID NO: 130800 - DNA, 22 bp, Artificial Sequence
  Synthetic oligonucleotide; TTC chr11 5300368 5300389 5300373 5300368 -
ttatcatctcgtggaagccaga

SEQ ID NO: 130801 - DNA, 22 bp, Artificial Sequence
  Synthetic oligonucleotide; CTT chr11 5300366 5300387 5300371 5300366 -
atcatctcgtggaagccagata

SEQ ID NO: 130802 - DNA, 22 bp, Artificial Sequence
  Synthetic oligonucleotide; TTA chr11 5300365 5300386 5300370 5300365 -
tcatctcgtggaagccagatat

SEQ ID NO: 130803 - DNA, 22 bp, Artificial Sequence
  Synthetic oligonucleotide; CTC chr11 5300358 5300379 5300363 5300358 -
gtggaagccagatatcccagcc

SEQ ID NO: 130804 - DNA, 22 bp, Artificial Sequence
  Synthetic oligonucleotide; TTT chr11 5300330 5300351 5300335 5300330 -
tccttcttcccattgtctgctg

SEQ ID NO: 130805 - DNA, 22 bp, Artificial Sequence
  Synthetic oligonucleotide; TTT chr11 5300329 5300350 5300334 5300329 -
ccttcttcccattgtctgctga

SEQ ID NO: 130806 - DNA, 22 bp, Artificial Sequence
  Synthetic oligonucleotide; TTC chr11 5300328 5300349 5300333 5300328 -
cttcttcccattgtctgctgaa

SEQ ID NO: 130807 - DNA, 22 bp, Artificial Sequence
  Synthetic oligonucleotide; CTT chr11 5300325 5300346 5300330 5300325 -
cttcccattgtctgctgaaact

SEQ ID NO: 130808 - DNA, 22 bp, Artificial Sequence
  Synthetic oligonucleotide; TTC chr11 5300324 5300345 5300329 5300324 -
ttcccattgtctgctgaaacta

SEQ ID NO: 130809 - DNA, 22 bp, Artificial Sequence
  Synthetic oligonucleotide; CTT chr11 5300322 5300343 5300327 5300322 -
cccattgtctgctgaaactaac

SEQ ID NO: 130810 - DNA, 22 bp, Artificial Sequence
  Synthetic oligonucleotide; TTC chr11 5300321 5300342 5300326 5300321 -
ccattgtctgctgaaactaact

SEQ ID NO: 130811 - DNA, 22 bp, Artificial Sequence
  Synthetic oligonucleotide; TTG chr11 5300315 5300336 5300320 5300315 -
tctgctgaaactaacttaatac

SEQ ID NO: 130812 - DNA, 22 bp, Artificial Sequence
  Synthetic oligonucleotide; CTG chr11 5300311 5300332 5300316 5300311 -
ctgaaactaacttaatactttt

SEQ ID NO: 130813 - DNA, 22 bp, Artificial Sequence
  Synthetic oligonucleotide; CTG chr11 5300308 5300329 5300313 5300308 -
aaactaacttaatactttttct

SEQ ID NO: 130814 - DNA, 22 bp, Artificial Sequence
  Synthetic oligonucleotide; CTA chr11 5300302 5300323 5300307 5300302 -
acttaatactttttcttctttc

SEQ ID NO: 130815 - DNA, 22 bp, Artificial Sequence
  Synthetic oligonucleotide; CTT chr11 5300298 5300319 5300303 5300298 -
aatactttttcttctttccagc

SEQ ID NO: 130816 - DNA, 22 bp, Artificial Sequence
  Synthetic oligonucleotide; TTA chr11 5300297 5300318 5300302 5300297 -
atactttttcttctttccagct

SEQ ID NO: 130817 - DNA, 22 bp, Artificial Sequence
  Synthetic oligonucleotide; CTT chr11 5300291 5300312 5300296 5300291 -
tttcttctttccagctttctat

SEQ ID NO: 130818 - DNA, 22 bp, Artificial Sequence
  Synthetic oligonucleotide; TTT chr11 5300290 5300311 5300295 5300290 -
ttcttctttccagctttctatt

SEQ ID NO: 130819 - DNA, 22 bp, Artificial Sequence
  Synthetic oligonucleotide; TTT chr11 5300289 5300310 5300294 5300289 -
tcttctttccagctttctattt

SEQ ID NO: 130820 - DNA, 22 bp, Artificial Sequence
  Synthetic oligonucleotide; TTT chr11 5300288 5300309 5300293 5300288 -
cttctttccagctttctatttt

SEQ ID NO: 130821 - DNA, 22 bp, Artificial Sequence
  Synthetic oligonucleotide; TTC chr11 5300287 5300308 5300292 5300287 -
ttctttccagctttctattttg

SEQ ID NO: 130822 - DNA, 22 bp, Artificial Sequence
  Synthetic oligonucleotide; CTT chr11 5300285 5300306 5300290 5300285 -
ctttccagctttctattttgtc

SEQ ID NO: 130823 - DNA, 22 bp, Artificial Sequence
  Synthetic oligonucleotide; TTC chr11 5300284 5300305 5300289 5300284 -
tttccagctttctattttgtct

SEQ ID NO: 130824 - DNA, 22 bp, Artificial Sequence
  Synthetic oligonucleotide; CTT chr11 5300282 5300303 5300287 5300282 -
tccagctttctattttgtctcc

SEQ ID NO: 130825 - DNA, 22 bp, Artificial Sequence
  Synthetic oligonucleotide; TTT chr11 5300281 5300302 5300286 5300281 -
ccagctttctattttgtctcct

SEQ ID NO: 130826 - DNA, 22 bp, Artificial Sequence
  Synthetic oligonucleotide; TTC chr11 5300280 5300301 5300285 5300280 -
cagctttctattttgtctcctg

SEQ ID NO: 130827 - DNA, 22 bp, Artificial Sequence
  Synthetic oligonucleotide; CTT chr11 5300274 5300295 5300279 5300274 -
tctattttgtctcctgacattt

SEQ ID NO: 130828 - DNA, 22 bp, Artificial Sequence
  Synthetic oligonucleotide; TTT chr11 5300273 5300294 5300278 5300273 -
ctattttgtctcctgacatttt

SEQ ID NO: 130829 - DNA, 22 bp, Artificial Sequence
  Synthetic oligonucleotide; TTC chr11 5300272 5300293 5300277 5300272 -
tattttgtctcctgacattttt

SEQ ID NO: 130830 - DNA, 22 bp, Artificial Sequence
  Synthetic oligonucleotide; CTA chr11 5300270 5300291 5300275 5300270 -
ttttgtctcctgacatttttct

SEQ ID NO: 130831 - DNA, 22 bp, Artificial Sequence
  Synthetic oligonucleotide; TTT chr11 5300267 5300288 5300272 5300267 -
tgtctcctgacatttttcttct

SEQ ID NO: 130832 - DNA, 22 bp, Artificial Sequence
  Synthetic oligonucleotide; TTT chr11 5300266 5300287 5300271 5300266 -
gtctcctgacatttttcttctg

SEQ ID NO: 130833 - DNA, 22 bp, Artificial Sequence
  Synthetic oligonucleotide; TTG chr11 5300265 5300286 5300270 5300265 -
tctcctgacatttttcttctga

SEQ ID NO: 130834 - DNA, 22 bp, Artificial Sequence
  Synthetic oligonucleotide; CTC chr11 5300261 5300282 5300266 5300261 -
ctgacatttttcttctgaaaaa

SEQ ID NO: 130835 - DNA, 22 bp, Artificial Sequence
  Synthetic oligonucleotide; CTG chr11 5300258 5300279 5300263 5300258 -
acatttttcttctgaaaaaaat

SEQ ID NO: 130836 - DNA, 22 bp, Artificial Sequence
  Synthetic oligonucleotide; TTT chr11 5300252 5300273 5300257 5300252 -
ttcttctgaaaaaaataaccaa

SEQ ID NO: 130837 - DNA, 22 bp, Artificial Sequence
  Synthetic oligonucleotide; TTT chr11 5300251 5300272 5300256 5300251 -
tcttctgaaaaaaataaccaac

SEQ ID NO: 130838 - DNA, 22 bp, Artificial Sequence
  Synthetic oligonucleotide; TTT chr11 5300250 5300271 5300255 5300250 -
cttctgaaaaaaataaccaact

SEQ ID NO: 130839 - DNA, 22 bp, Artificial Sequence
  Synthetic oligonucleotide; TTC chr11 5300249 5300270 5300254 5300249 -
ttctgaaaaaaataaccaacta

SEQ ID NO: 130840 - DNA, 22 bp, Artificial Sequence
  Synthetic oligonucleotide; CTT chr11 5300247 5300268 5300252 5300247 -
ctgaaaaaaataaccaactata

SEQ ID NO: 130841 - DNA, 22 bp, Artificial Sequence
  Synthetic oligonucleotide; TTC chr11 5300246 5300267 5300251 5300246 -
tgaaaaaaataaccaactataa

SEQ ID NO: 130842 - DNA, 22 bp, Artificial Sequence
  Synthetic oligonucleotide; CTG chr11 5300244 5300265 5300249 5300244 -
aaaaaaataaccaactataaat

SEQ ID NO: 130843 - DNA, 22 bp, Artificial Sequence
  Synthetic oligonucleotide; CTA chr11 5300227 5300248 5300232 5300227 -
taaatttagatatcaccaccca

SEQ ID NO: 130844 - DNA, 22 bp, Artificial Sequence
  Synthetic oligonucleotide; TTT chr11 5300220 5300241 5300225 5300220 -
agatatcaccacccatttctat

SEQ ID NO: 130845 - DNA, 22 bp, Artificial Sequence
  Synthetic oligonucleotide; TTA chr11 5300219 5300240 5300224 5300219 -
gatatcaccacccatttctatt

SEQ ID NO: 130846 - DNA, 22 bp, Artificial Sequence
  Synthetic oligonucleotide; TTT chr11 5300202 5300223 5300207 5300202 -
ctatttcccctcttgcttctca

SEQ ID NO: 130847 - DNA, 22 bp, Artificial Sequence
  Synthetic oligonucleotide; TTC chr11 5300201 5300222 5300206 5300201 -
tatttcccctcttgcttctcac

SEQ ID NO: 130848 - DNA, 22 bp, Artificial Sequence
  Synthetic oligonucleotide; CTA chr11 5300199 5300220 5300204 5300199 -
tttcccctcttgcttctcacat

SEQ ID NO: 130849 - DNA, 22 bp, Artificial Sequence
  Synthetic oligonucleotide; TTT chr11 5300196 5300217 5300201 5300196 -
cccctcttgcttctcacataaa

SEQ ID NO: 130850 - DNA, 22 bp, Artificial Sequence
  Synthetic oligonucleotide; TTC chr11 5300195 5300216 5300200 5300195 -
ccctcttgcttctcacataaaa

SEQ ID NO: 130851 - DNA, 22 bp, Artificial Sequence
  Synthetic oligonucleotide; CTC chr11 5300190 5300211 5300195 5300190 -
ttgcttctcacataaaaaatct

SEQ ID NO: 130852 - DNA, 22 bp, Artificial Sequence
  Synthetic oligonucleotide; CTT chr11 5300188 5300209 5300193 5300188 -
gcttctcacataaaaaatctcg

SEQ ID NO: 130853 - DNA, 22 bp, Artificial Sequence
  Synthetic oligonucleotide; TTG chr11 5300187 5300208 5300192 5300187 -
cttctcacataaaaaatctcga

SEQ ID NO: 130854 - DNA, 22 bp, Artificial Sequence
  Synthetic oligonucleotide; CTT chr11 5300184 5300205 5300189 5300184 -
ctcacataaaaaatctcgagac

SEQ ID NO: 130855 - DNA, 22 bp, Artificial Sequence
  Synthetic oligonucleotide; TTC chr11 5300183 5300204 5300188 5300183 -
tcacataaaaaatctcgagact

SEQ ID NO: 130856 - DNA, 22 bp, Artificial Sequence
  Synthetic oligonucleotide; CTC chr11 5300181 5300202 5300186 5300181 -
acataaaaaatctcgagacttt

SEQ ID NO: 130857 - DNA, 22 bp, Artificial Sequence
  Synthetic oligonucleotide; CTC chr11 5300167 5300188 5300172 5300167 -
gagactttttcacttcatgaaa

SEQ ID NO: 130858 - DNA, 22 bp, Artificial Sequence
  Synthetic oligonucleotide; CTT chr11 5300160 5300181 5300165 5300160 -
tttcacttcatgaaatagtttt

SEQ ID NO: 130859 - DNA, 22 bp, Artificial Sequence
  Synthetic oligonucleotide; TTT chr11 5300159 5300180 5300164 5300159 -
ttcacttcatgaaatagttttg

SEQ ID NO: 130860 - DNA, 22 bp, Artificial Sequence
  Synthetic oligonucleotide; TTT chr11 5300158 5300179 5300163 5300158 -
tcacttcatgaaatagttttga

SEQ ID NO: 130861 - DNA, 22 bp, Artificial Sequence
  Synthetic oligonucleotide; TTT chr11 5300157 5300178 5300162 5300157 -
cacttcatgaaatagttttgat

SEQ ID NO: 130862 - DNA, 22 bp, Artificial Sequence
  Synthetic oligonucleotide; TTC chr11 5300156 5300177 5300161 5300156 -
acttcatgaaatagttttgata

SEQ ID NO: 130863 - DNA, 22 bp, Artificial Sequence
  Synthetic oligonucleotide; CTT chr11 5300152 5300173 5300157 5300152 -
catgaaatagttttgataatta

SEQ ID NO: 130864 - DNA, 22 bp, Artificial Sequence
  Synthetic oligonucleotide; TTC chr11 5300151 5300172 5300156 5300151 -
atgaaatagttttgataattaa

SEQ ID NO: 130865 - DNA, 22 bp, Artificial Sequence
  Synthetic oligonucleotide; TTT chr11 5300139 5300160 5300144 5300139 -
tgataattaatgcaaaaacttg

SEQ ID NO: 130866 - DNA, 22 bp, Artificial Sequence
  Synthetic oligonucleotide; TTT chr11 5300138 5300159 5300143 5300138 -
gataattaatgcaaaaacttgg

SEQ ID NO: 130867 - DNA, 22 bp, Artificial Sequence
  Synthetic oligonucleotide; TTG chr11 5300137 5300158 5300142 5300137 -
ataattaatgcaaaaacttggc

SEQ ID NO: 130868 - DNA, 22 bp, Artificial Sequence
  Synthetic oligonucleotide; TTA chr11 5300130 5300151 5300135 5300130 -
atgcaaaaacttggcaaaggta

SEQ ID NO: 130869 - DNA, 22 bp, Artificial Sequence
  Synthetic oligonucleotide; CTT chr11 5300118 5300139 5300123 5300118 -
ggcaaaggtaatgttatatttt

SEQ ID NO: 130870 - DNA, 22 bp, Artificial Sequence
  Synthetic oligonucleotide; TTG chr11 5300117 5300138 5300122 5300117 -
gcaaaggtaatgttatatttta

SEQ ID NO: 130871 - DNA, 22 bp, Artificial Sequence
  Synthetic oligonucleotide; TTA chr11 5300102 5300123 5300107 5300102 -
tattttagaaatttttcactga

SEQ ID NO: 130872 - DNA, 22 bp, Artificial Sequence
  Synthetic oligonucleotide; TTT chr11 5300097 5300118 5300102 5300097 -
tagaaatttttcactgatggaa

SEQ ID NO: 130873 - DNA, 22 bp, Artificial Sequence
  Synthetic oligonucleotide; TTT chr11 5300096 5300117 5300101 5300096 -
agaaatttttcactgatggaat

SEQ ID NO: 130874 - DNA, 22 bp, Artificial Sequence
  Synthetic oligonucleotide; TTA chr11 5300095 5300116 5300100 5300095 -
gaaatttttcactgatggaata

SEQ ID NO: 130875 - DNA, 22 bp, Artificial Sequence
  Synthetic oligonucleotide; TTT chr11 5300088 5300109 5300093 5300088 -
ttcactgatggaatagtttctt

SEQ ID NO: 130876 - DNA, 22 bp, Artificial Sequence
  Synthetic oligonucleotide; TTT chr11 5300087 5300108 5300092 5300087 -
tcactgatggaatagtttcttc

SEQ ID NO: 130877 - DNA, 22 bp, Artificial Sequence
  Synthetic oligonucleotide; TTT chr11 5300086 5300107 5300091 5300086 -
cactgatggaatagtttcttcc

SEQ ID NO: 130878 - DNA, 22 bp, Artificial Sequence
  Synthetic oligonucleotide; TTC chr11 5300085 5300106 5300090 5300085 -
actgatggaatagtttcttcct

SEQ ID NO: 130879 - DNA, 22 bp, Artificial Sequence
  Synthetic oligonucleotide; CTG chr11 5300081 5300102 5300086 5300081 -
atggaatagtttcttccttcaa

SEQ ID NO: 130880 - DNA, 22 bp, Artificial Sequence
  Synthetic oligonucleotide; TTT chr11 5300069 5300090 5300074 5300069 -
cttccttcaatcttcttcaaag

SEQ ID NO: 130881 - DNA, 22 bp, Artificial Sequence
  Synthetic oligonucleotide; TTC chr11 5300068 5300089 5300073 5300068 -
ttccttcaatcttcttcaaagt

SEQ ID NO: 130882 - DNA, 22 bp, Artificial Sequence
  Synthetic oligonucleotide; CTT chr11 5300066 5300087 5300071 5300066 -
ccttcaatcttcttcaaagtgt

SEQ ID NO: 130883 - DNA, 22 bp, Artificial Sequence
  Synthetic oligonucleotide; TTC chr11 5300065 5300086 5300070 5300065 -
cttcaatcttcttcaaagtgtt

SEQ ID NO: 130884 - DNA, 22 bp, Artificial Sequence
  Synthetic oligonucleotide; CTT chr11 5300062 5300083 5300067 5300062 -
caatcttcttcaaagtgtttgt

SEQ ID NO: 130885 - DNA, 22 bp, Artificial Sequence
  Synthetic oligonucleotide; TTC chr11 5300061 5300082 5300066 5300061 -
aatcttcttcaaagtgtttgta

SEQ ID NO: 130886 - DNA, 22 bp, Artificial Sequence
  Synthetic oligonucleotide; CTT chr11 5300055 5300076 5300060 5300055 -
cttcaaagtgtttgtaagtctt

SEQ ID NO: 130887 - DNA, 22 bp, Artificial Sequence
  Synthetic oligonucleotide; TTC chr11 5300054 5300075 5300059 5300054 -
ttcaaagtgtttgtaagtcttt

SEQ ID NO: 130888 - DNA, 22 bp, Artificial Sequence
  Synthetic oligonucleotide; CTT chr11 5300052 5300073 5300057 5300052 -
caaagtgtttgtaagtctttat

SEQ ID NO: 130889 - DNA, 22 bp, Artificial Sequence
  Synthetic oligonucleotide; TTC chr11 5300051 5300072 5300056 5300051 -
aaagtgtttgtaagtctttatg

SEQ ID NO: 130890 - DNA, 22 bp, Artificial Sequence
  Synthetic oligonucleotide; TTT chr11 5300042 5300063 5300047 5300042 -
gtaagtctttatgctgttcatt

SEQ ID NO: 130891 - DNA, 22 bp, Artificial Sequence
  Synthetic oligonucleotide; TTG chr11 5300041 5300062 5300046 5300041 -
taagtctttatgctgttcattg

SEQ ID NO: 130892 - DNA, 22 bp, Artificial Sequence
  Synthetic oligonucleotide; CTT chr11 5300033 5300054 5300038 5300033 -
tatgctgttcattgggtctgaa

SEQ ID NO: 130893 - DNA, 22 bp, Artificial Sequence
  Synthetic oligonucleotide; TTT chr11 5300032 5300053 5300037 5300032 -
atgctgttcattgggtctgaac

SEQ ID NO: 130894 - DNA, 22 bp, Artificial Sequence
  Synthetic oligonucleotide; TTA chr11 5300031 5300052 5300036 5300031 -
tgctgttcattgggtctgaacc

SEQ ID NO: 130895 - DNA, 22 bp, Artificial Sequence
  Synthetic oligonucleotide; CTG chr11 5300026 5300047 5300031 5300026 -
ttcattgggtctgaaccgcagt

SEQ ID NO: 130896 - DNA, 22 bp, Artificial Sequence
  Synthetic oligonucleotide; TTC chr11 5300023 5300044 5300028 5300023 -
attgggtctgaaccgcagtcta

SEQ ID NO: 130897 - DNA, 22 bp, Artificial Sequence
  Synthetic oligonucleotide; TTG chr11 5300019 5300040 5300024 5300019 -
ggtctgaaccgcagtctaccac

SEQ ID NO: 130898 - DNA, 22 bp, Artificial Sequence
  Synthetic oligonucleotide; CTG chr11 5300013 5300034 5300018 5300013 -
aaccgcagtctaccacttgcta

SEQ ID NO: 130899 - DNA, 22 bp, Artificial Sequence
  Synthetic oligonucleotide; CTA chr11 5300001 5300022 5300006 5300001 -
ccacttgctattagtgtaacag

SEQ ID NO: 130900 - DNA, 22 bp, Artificial Sequence
  Synthetic oligonucleotide; CTT chr11 5299995 5300016 5300000 5299995 -
gctattagtgtaacaggggatg

SEQ ID NO: 130901 - DNA, 22 bp, Artificial Sequence
  Synthetic oligonucleotide; TTG chr11 5299994 5300015 5299999 5299994 -
ctattagtgtaacaggggatga

SEQ ID NO: 130902 - DNA, 22 bp, Artificial Sequence
  Synthetic oligonucleotide; CTA chr11 5299991 5300012 5299996 5299991 -
ttagtgtaacaggggatgacaa

SEQ ID NO: 130903 - DNA, 22 bp, Artificial Sequence
  Synthetic oligonucleotide; TTA chr11 5299988 5300009 5299993 5299988 -
gtgtaacaggggatgacaattt

SEQ ID NO: 130904 - DNA, 22 bp, Artificial Sequence
  Synthetic oligonucleotide; TTT chr11 5299966 5299987 5299971 5299966 -
cttcatctactgctagttctgc

SEQ ID NO: 130905 - DNA, 22 bp, Artificial Sequence
  Synthetic oligonucleotide; TTC chr11 5299965 5299986 5299970 5299965 -
ttcatctactgctagttctgcg

SEQ ID NO: 130906 - DNA, 22 bp, Artificial Sequence
  Synthetic oligonucleotide; CTT chr11 5299963 5299984 5299968 5299963 -
catctactgctagttctgcgct

SEQ ID NO: 130907 - DNA, 22 bp, Artificial Sequence
  Synthetic oligonucleotide; TTC chr11 5299962 5299983 5299967 5299962 -
atctactgctagttctgcgcta

SEQ ID NO: 130908 - DNA, 22 bp, Artificial Sequence
  Synthetic oligonucleotide; CTA chr11 5299957 5299978 5299962 5299957 -
ctgctagttctgcgctagtatt

SEQ ID NO: 130909 - DNA, 22 bp, Artificial Sequence
  Synthetic oligonucleotide; CTG chr11 5299954 5299975 5299959 5299954 -
ctagttctgcgctagtatttgc

SEQ ID NO: 130910 - DNA, 22 bp, Artificial Sequence
  Synthetic oligonucleotide; CTA chr11 5299951 5299972 5299956 5299951 -
gttctgcgctagtatttgcagc

SEQ ID NO: 130911 - DNA, 22 bp, Artificial Sequence
  Synthetic oligonucleotide; TTC chr11 5299947 5299968 5299952 5299947 -
tgcgctagtatttgcagctgat

SEQ ID NO: 130912 - DNA, 22 bp, Artificial Sequence
  Synthetic oligonucleotide; CTG chr11 5299945 5299966 5299950 5299945 -
cgctagtatttgcagctgatct

SEQ ID NO: 130913 - DNA, 22 bp, Artificial Sequence
  Synthetic oligonucleotide; CTA chr11 5299940 5299961 5299945 5299940 -
gtatttgcagctgatctcctta

SEQ ID NO: 130914 - DNA, 22 bp, Artificial Sequence
  Synthetic oligonucleotide; TTT chr11 5299934 5299955 5299939 5299934 -
gcagctgatctccttataggaa

SEQ ID NO: 130915 - DNA, 22 bp, Artificial Sequence
  Synthetic oligonucleotide; TTG chr11 5299933 5299954 5299938 5299933 -
cagctgatctccttataggaaa

SEQ ID NO: 130916 - DNA, 22 bp, Artificial Sequence
  Synthetic oligonucleotide; CTG chr11 5299927 5299948 5299932 5299927 -
atctccttataggaaactaatc

SEQ ID NO: 130917 - DNA, 22 bp, Artificial Sequence
  Synthetic oligonucleotide; CTC chr11 5299922 5299943 5299927 5299922 -
cttataggaaactaatctcaaa

SEQ ID NO: 130918 - DNA, 22 bp, Artificial Sequence
  Synthetic oligonucleotide; CTT chr11 5299919 5299940 5299924 5299919 -
ataggaaactaatctcaaaagt

SEQ ID NO: 130919 - DNA, 22 bp, Artificial Sequence
  Synthetic oligonucleotide; TTA chr11 5299918 5299939 5299923 5299918 -
taggaaactaatctcaaaagtt

SEQ ID NO: 130920 - DNA, 22 bp, Artificial Sequence
  Synthetic oligonucleotide; CTA chr11 5299908 5299929 5299913 5299908 -
atctcaaaagttgcattcattc

SEQ ID NO: 130921 - DNA, 22 bp, Artificial Sequence
  Synthetic oligonucleotide; CTC chr11 5299903 5299924 5299908 5299903 -
aaaagttgcattcattcctctc

SEQ ID NO: 130922 - DNA, 22 bp, Artificial Sequence
  Synthetic oligonucleotide; TTG chr11 5299895 5299916 5299900 5299895 -
cattcattcctctctgaagact

SEQ ID NO: 130923 - DNA, 22 bp, Artificial Sequence
  Synthetic oligonucleotide; TTC chr11 5299890 5299911 5299895 5299890 -
attcctctctgaagactgctgt

SEQ ID NO: 130924 - DNA, 22 bp, Artificial Sequence
  Synthetic oligonucleotide; TTC chr11 5299886 5299907 5299891 5299886 -
ctctctgaagactgctgtttct

SEQ ID NO: 130925 - DNA, 22 bp, Artificial Sequence
  Synthetic oligonucleotide; CTC chr11 5299883 5299904 5299888 5299883 -
tctgaagactgctgtttcttcc

SEQ ID NO: 130926 - DNA, 22 bp, Artificial Sequence
  Synthetic oligonucleotide; CTC chr11 5299881 5299902 5299886 5299881 -
tgaagactgctgtttcttccaa

SEQ ID NO: 130927 - DNA, 22 bp, Artificial Sequence
  Synthetic oligonucleotide; CTG chr11 5299879 5299900 5299884 5299879 -
aagactgctgtttcttccaatt

SEQ ID NO: 130928 - DNA, 22 bp, Artificial Sequence
  Synthetic oligonucleotide; CTG chr11 5299872 5299893 5299877 5299872 -
ctgtttcttccaatttttaagt

SEQ ID NO: 130929 - DNA, 22 bp, Artificial Sequence
  Synthetic oligonucleotide; CTG chr11 5299869 5299890 5299874 5299869 -
tttcttccaatttttaagttct

SEQ ID NO: 130930 - DNA, 22 bp, Artificial Sequence
  Synthetic oligonucleotide; TTT chr11 5299866 5299887 5299871 5299866 -
cttccaatttttaagttctcgt

SEQ ID NO: 130931 - DNA, 22 bp, Artificial Sequence
  Synthetic oligonucleotide; TTC chr11 5299865 5299886 5299870 5299865 -
ttccaatttttaagttctcgtt

SEQ ID NO: 130932 - DNA, 22 bp, Artificial Sequence
  Synthetic oligonucleotide; CTT chr11 5299863 5299884 5299868 5299863 -
ccaatttttaagttctcgttga

SEQ ID NO: 130933 - DNA, 22 bp, Artificial Sequence
  Synthetic oligonucleotide; TTC chr11 5299862 5299883 5299867 5299862 -
caatttttaagttctcgttgag

SEQ ID NO: 130934 - DNA, 22 bp, Artificial Sequence
  Synthetic oligonucleotide; TTT chr11 5299856 5299877 5299861 5299856 -
ttaagttctcgttgagcttgct

SEQ ID NO: 130935 - DNA, 22 bp, Artificial Sequence
  Synthetic oligonucleotide; TTT chr11 5299855 5299876 5299860 5299855 -
taagttctcgttgagcttgctt

SEQ ID NO: 130936 - DNA, 22 bp, Artificial Sequence
  Synthetic oligonucleotide; TTT chr11 5299854 5299875 5299859 5299854 -
aagttctcgttgagcttgcttc

SEQ ID NO: 130937 - DNA, 22 bp, Artificial Sequence
  Synthetic oligonucleotide; TTA chr11 5299853 5299874 5299858 5299853 -
agttctcgttgagcttgcttct

SEQ ID NO: 130938 - DNA, 22 bp, Artificial Sequence
  Synthetic oligonucleotide; TTC chr11 5299848 5299869 5299853 5299848 -
tcgttgagcttgcttctaatat

SEQ ID NO: 130939 - DNA, 22 bp, Artificial Sequence
  Synthetic oligonucleotide; CTC chr11 5299846 5299867 5299851 5299846 -
gttgagcttgcttctaatattt

SEQ ID NO: 130940 - DNA, 22 bp, Artificial Sequence
  Synthetic oligonucleotide; TTG chr11 5299842 5299863 5299847 5299842 -
agcttgcttctaatattttctt

SEQ ID NO: 130941 - DNA, 22 bp, Artificial Sequence
  Synthetic oligonucleotide; CTT chr11 5299837 5299858 5299842 5299837 -
gcttctaatattttcttttctg

SEQ ID NO: 130942 - DNA, 22 bp, Artificial Sequence
  Synthetic oligonucleotide; TTG chr11 5299836 5299857 5299841 5299836 -
cttctaatattttcttttctga

SEQ ID NO: 130943 - DNA, 22 bp, Artificial Sequence
  Synthetic oligonucleotide; CTT chr11 5299833 5299854 5299838 5299833 -
ctaatattttcttttctgattg

SEQ ID NO: 130944 - DNA, 22 bp, Artificial Sequence
  Synthetic oligonucleotide; TTC chr11 5299832 5299853 5299837 5299832 -
taatattttcttttctgattga

SEQ ID NO: 130945 - DNA, 22 bp, Artificial Sequence
  Synthetic oligonucleotide; CTA chr11 5299830 5299851 5299835 5299830 -
atattttcttttctgattgaaa

SEQ ID NO: 130946 - DNA, 22 bp, Artificial Sequence
  Synthetic oligonucleotide; TTT chr11 5299824 5299845 5299829 5299824 -
tcttttctgattgaaagtccat

SEQ ID NO: 130947 - DNA, 22 bp, Artificial Sequence
  Synthetic oligonucleotide; TTT chr11 5299823 5299844 5299828 5299823 -
cttttctgattgaaagtccatg

SEQ ID NO: 130948 - DNA, 22 bp, Artificial Sequence
  Synthetic oligonucleotide; TTC chr11 5299822 5299843 5299827 5299822 -
ttttctgattgaaagtccatgt

SEQ ID NO: 130949 - DNA, 22 bp, Artificial Sequence
  Synthetic oligonucleotide; CTT chr11 5299820 5299841 5299825 5299820 -
ttctgattgaaagtccatgttc

SEQ ID NO: 130950 - DNA, 22 bp, Artificial Sequence
  Synthetic oligonucleotide; TTT chr11 5299819 5299840 5299824 5299819 -
tctgattgaaagtccatgttca

SEQ ID NO: 130951 - DNA, 22 bp, Artificial Sequence
  Synthetic oligonucleotide; TTT chr11 5299818 5299839 5299823 5299818 -
ctgattgaaagtccatgttcag

SEQ ID NO: 130952 - DNA, 22 bp, Artificial Sequence
  Synthetic oligonucleotide; TTC chr11 5299817 5299838 5299822 5299817 -
tgattgaaagtccatgttcaga

SEQ ID NO: 130953 - DNA, 22 bp, Artificial Sequence
  Synthetic oligonucleotide; CTG chr11 5299815 5299836 5299820 5299815 -
attgaaagtccatgttcagaac

SEQ ID NO: 130954 - DNA, 22 bp, Artificial Sequence
  Synthetic oligonucleotide; TTG chr11 5299811 5299832 5299816 5299811 -
aaagtccatgttcagaacccag

SEQ ID NO: 130955 - DNA, 22 bp, Artificial Sequence
  Synthetic oligonucleotide; TTC chr11 5299798 5299819 5299803 5299798 -
agaacccagtatataattattc

SEQ ID NO: 130956 - DNA, 22 bp, Artificial Sequence
  Synthetic oligonucleotide; TTA chr11 5299779 5299800 5299784 5299779 -
ttccattctaaattctctctgc

SEQ ID NO: 130957 - DNA, 22 bp, Artificial Sequence
  Synthetic oligonucleotide; TTC chr11 5299776 5299797 5299781 5299776 -
cattctaaattctctctgcttc

SEQ ID NO: 130958 - DNA, 22 bp, Artificial Sequence
  Synthetic oligonucleotide; TTC chr11 5299771 5299792 5299776 5299771 -
taaattctctctgcttcactta

SEQ ID NO: 130959 - DNA, 22 bp, Artificial Sequence
  Synthetic oligonucleotide; CTA chr11 5299769 5299790 5299774 5299769 -
aattctctctgcttcacttaag

SEQ ID NO: 130960 - DNA, 22 bp, Artificial Sequence
  Synthetic oligonucleotide; TTC chr11 5299764 5299785 5299769 5299764 -
tctctgcttcacttaagaaatc

SEQ ID NO: 130961 - DNA, 22 bp, Artificial Sequence
  Synthetic oligonucleotide; CTC chr11 5299762 5299783 5299767 5299762 -
tctgcttcacttaagaaatctt

SEQ ID NO: 130962 - DNA, 22 bp, Artificial Sequence
  Synthetic oligonucleotide; CTC chr11 5299760 5299781 5299765 5299760 -
tgcttcacttaagaaatctttc

SEQ ID NO: 130963 - DNA, 22 bp, Artificial Sequence
  Synthetic oligonucleotide; CTG chr11 5299758 5299779 5299763 5299758 -
cttcacttaagaaatctttcat

SEQ ID NO: 130964 - DNA, 22 bp, Artificial Sequence
  Synthetic oligonucleotide; CTT chr11 5299755 5299776 5299760 5299755 -
cacttaagaaatctttcatatt

SEQ ID NO: 130965 - DNA, 22 bp, Artificial Sequence
  Synthetic oligonucleotide; TTC chr11 5299754 5299775 5299759 5299754 -
acttaagaaatctttcatattt

SEQ ID NO: 130966 - DNA, 22 bp, Artificial Sequence
  Synthetic oligonucleotide; CTT chr11 5299750 5299771 5299755 5299750 -
aagaaatctttcatatttattt

SEQ ID NO: 130967 - DNA, 22 bp, Artificial Sequence
  Synthetic oligonucleotide; TTA chr11 5299749 5299770 5299754 5299749 -
agaaatctttcatatttatttt

SEQ ID NO: 130968 - DNA, 22 bp, Artificial Sequence
  Synthetic oligonucleotide; CTT chr11 5299740 5299761 5299745 5299740 -
tcatatttattttacatctgga

SEQ ID NO: 130969 - DNA, 22 bp, Artificial Sequence
  Synthetic oligonucleotide; TTT chr11 5299739 5299760 5299744 5299739 -
catatttattttacatctggac

SEQ ID NO: 130970 - DNA, 22 bp, Artificial Sequence
  Synthetic oligonucleotide; TTC chr11 5299738 5299759 5299743 5299738 -
atatttattttacatctggaca

SEQ ID NO: 130971 - DNA, 22 bp, Artificial Sequence
  Synthetic oligonucleotide; TTT chr11 5299732 5299753 5299737 5299732 -
attttacatctggacagtgagc

SEQ ID NO: 130972 - DNA, 22 bp, Artificial Sequence
  Synthetic oligonucleotide; TTA chr11 5299731 5299752 5299736 5299731 -
ttttacatctggacagtgagca

SEQ ID NO: 130973 - DNA, 22 bp, Artificial Sequence
  Synthetic oligonucleotide; TTT chr11 5299728 5299749 5299733 5299728 -
tacatctggacagtgagcactc

SEQ ID NO: 130974 - DNA, 22 bp, Artificial Sequence
  Synthetic oligonucleotide; TTT chr11 5299727 5299748 5299732 5299727 -
acatctggacagtgagcactct

SEQ ID NO: 130975 - DNA, 22 bp, Artificial Sequence
  Synthetic oligonucleotide; TTA chr11 5299726 5299747 5299731 5299726 -
catctggacagtgagcactctg

SEQ ID NO: 130976 - DNA, 22 bp, Artificial Sequence
  Synthetic oligonucleotide; CTG chr11 5299720 5299741 5299725 5299720 -
gacagtgagcactctgaaaata

SEQ ID NO: 130977 - DNA, 22 bp, Artificial Sequence
  Synthetic oligonucleotide; CTC chr11 5299706 5299727 5299711 5299706 -
tgaaaatattccagagatttga

SEQ ID NO: 130978 - DNA, 22 bp, Artificial Sequence
  Synthetic oligonucleotide; CTG chr11 5299704 5299725 5299709 5299704 -
aaaatattccagagatttgata

SEQ ID NO: 130979 - DNA, 22 bp, Artificial Sequence
  Synthetic oligonucleotide; TTC chr11 5299695 5299716 5299700 5299695 -
cagagatttgataagaaaatac

SEQ ID NO: 130980 - DNA, 22 bp, Artificial Sequence
  Synthetic oligonucleotide; TTT chr11 5299686 5299707 5299691 5299686 -
gataagaaaatacttactgaaa

SEQ ID NO: 130981 - DNA, 22 bp, Artificial Sequence
  Synthetic oligonucleotide; TTG chr11 5299685 5299706 5299690 5299685 -
ataagaaaatacttactgaaaa

SEQ ID NO: 130982 - DNA, 22 bp, Artificial Sequence
  Synthetic oligonucleotide; CTT chr11 5299671 5299692 5299676 5299671 -
actgaaaactaaagctaaataa

SEQ ID NO: 130983 - DNA, 22 bp, Artificial Sequence
  Synthetic oligonucleotide; TTA chr11 5299670 5299691 5299675 5299670 -
ctgaaaactaaagctaaataat

SEQ ID NO: 130984 - DNA, 22 bp, Artificial Sequence
  Synthetic oligonucleotide; CTG chr11 5299667 5299688 5299672 5299667 -
aaaactaaagctaaataatgca

SEQ ID NO: 130985 - DNA, 22 bp, Artificial Sequence
  Synthetic oligonucleotide; CTA chr11 5299660 5299681 5299665 5299660 -
aagctaaataatgcagtatttc

SEQ ID NO: 130986 - DNA, 22 bp, Artificial Sequence
  Synthetic oligonucleotide; CTA chr11 5299654 5299675 5299659 5299654 -
aataatgcagtatttctccaaa

SEQ ID NO: 130987 - DNA, 22 bp, Artificial Sequence
  Synthetic oligonucleotide; TTT chr11 5299639 5299660 5299644 5299639 -
ctccaaattagaaggcccattt

SEQ ID NO: 130988 - DNA, 22 bp, Artificial Sequence
  Synthetic oligonucleotide; TTC chr11 5299638 5299659 5299643 5299638 -
tccaaattagaaggcccatttg

SEQ ID NO: 130989 - DNA, 22 bp, Artificial Sequence
  Synthetic oligonucleotide; CTC chr11 5299636 5299657 5299641 5299636 -
caaattagaaggcccatttgga

SEQ ID NO: 130990 - DNA, 22 bp, Artificial Sequence
  Synthetic oligonucleotide; TTA chr11 5299629 5299650 5299634 5299629 -
gaaggcccatttggatgcagga

SEQ ID NO: 130991 - DNA, 22 bp, Artificial Sequence
  Synthetic oligonucleotide; TTT chr11 5299617 5299638 5299622 5299617 -
ggatgcaggaaaaataaaaact

SEQ ID NO: 130992 - DNA, 22 bp, Artificial Sequence
  Synthetic oligonucleotide; TTG chr11 5299616 5299637 5299621 5299616 -
gatgcaggaaaaataaaaacta

SEQ ID NO: 130993 - DNA, 22 bp, Artificial Sequence
  Synthetic oligonucleotide; CTA chr11 5299594 5299615 5299599 5299594 -
ataaatgactactcctgaagga

SEQ ID NO: 130994 - DNA, 22 bp, Artificial Sequence
  Synthetic oligonucleotide; CTA chr11 5299583 5299604 5299588 5299583 -
ctcctgaaggattcagttattg

SEQ ID NO: 130995 - DNA, 22 bp, Artificial Sequence
  Synthetic oligonucleotide; CTC chr11 5299580 5299601 5299585 5299580 -
ctgaaggattcagttattgtgc

SEQ ID NO: 130996 - DNA, 22 bp, Artificial Sequence
  Synthetic oligonucleotide; CTG chr11 5299577 5299598 5299582 5299577 -
aaggattcagttattgtgcgaa

SEQ ID NO: 130997 - DNA, 22 bp, Artificial Sequence
  Synthetic oligonucleotide; TTC chr11 5299569 5299590 5299574 5299569 -
agttattgtgcgaattgtttgt

SEQ ID NO: 130998 - DNA, 22 bp, Artificial Sequence
  Synthetic oligonucleotide; TTA chr11 5299564 5299585 5299569 5299564 -
ttgtgcgaattgtttgtgagag

SEQ ID NO: 130999 - DNA, 22 bp, Artificial Sequence
  Synthetic oligonucleotide; TTG chr11 5299561 5299582 5299566 5299561 -
tgcgaattgtttgtgagagttc

SEQ ID NO: 131000 - DNA, 22 bp, Artificial Sequence
  Synthetic oligonucleotide; TTG chr11 5299552 5299573 5299557 5299552 -
tttgtgagagttctttgaaagt

SEQ ID NO: 131001 - DNA, 22 bp, Artificial Sequence
  Synthetic oligonucleotide; TTT chr11 5299549 5299570 5299554 5299549 -
gtgagagttctttgaaagtagg

SEQ ID NO: 131002 - DNA, 22 bp, Artificial Sequence
  Synthetic oligonucleotide; TTG chr11 5299548 5299569 5299553 5299548 -
tgagagttctttgaaagtagga

SEQ ID NO: 131003 - DNA, 22 bp, Artificial Sequence
  Synthetic oligonucleotide; TTC chr11 5299539 5299560 5299544 5299539 -
tttgaaagtaggacgtgggggg

SEQ ID NO: 131004 - DNA, 22 bp, Artificial Sequence
  Synthetic oligonucleotide; CTT chr11 5299537 5299558 5299542 5299537 -
tgaaagtaggacgtggggggtt

SEQ ID NO: 131005 - DNA, 22 bp, Artificial Sequence
  Synthetic oligonucleotide; TTT chr11 5299536 5299557 5299541 5299536 -
gaaagtaggacgtggggggttt

SEQ ID NO: 131006 - DNA, 22 bp, Artificial Sequence
  Synthetic oligonucleotide; TTG chr11 5299535 5299556 5299540 5299535 -
aaagtaggacgtggggggttta

SEQ ID NO: 131007 - DNA, 22 bp, Artificial Sequence
  Synthetic oligonucleotide; TTT chr11 5299514 5299535 5299519 5299514 -
attcattgtcattttagttgtt

SEQ ID NO: 131008 - DNA, 22 bp, Artificial Sequence
  Synthetic oligonucleotide; TTA chr11 5299513 5299534 5299518 5299513 -
ttcattgtcattttagttgtta

SEQ ID NO: 131009 - DNA, 22 bp, Artificial Sequence
  Synthetic oligonucleotide; TTC chr11 5299510 5299531 5299515 5299510 -
attgtcattttagttgttattc

SEQ ID NO: 131010 - DNA, 22 bp, Artificial Sequence
  Synthetic oligonucleotide; TTG chr11 5299506 5299527 5299511 5299506 -
tcattttagttgttattctctg

SEQ ID NO: 131011 - DNA, 22 bp, Artificial Sequence
  Synthetic oligonucleotide; TTT chr11 5299500 5299521 5299505 5299500 -
tagttgttattctctgtgtaaa

SEQ ID NO: 131012 - DNA, 22 bp, Artificial Sequence
  Synthetic oligonucleotide; TTT chr11 5299499 5299520 5299504 5299499 -
agttgttattctctgtgtaaaa

SEQ ID NO: 131013 - DNA, 22 bp, Artificial Sequence
  Synthetic oligonucleotide; TTA chr11 5299498 5299519 5299503 5299498 -
gttgttattctctgtgtaaaat

SEQ ID NO: 131014 - DNA, 22 bp, Artificial Sequence
  Synthetic oligonucleotide; TTG chr11 5299494 5299515 5299499 5299494 -
ttattctctgtgtaaaatttat

SEQ ID NO: 131015 - DNA, 22 bp, Artificial Sequence
  Synthetic oligonucleotide; TTA chr11 5299491 5299512 5299496 5299491 -
ttctctgtgtaaaatttattta

SEQ ID NO: 131016 - DNA, 22 bp, Artificial Sequence
  Synthetic oligonucleotide; TTC chr11 5299488 5299509 5299493 5299488 -
tctgtgtaaaatttatttattt

SEQ ID NO: 131017 - DNA, 22 bp, Artificial Sequence
  Synthetic oligonucleotide; CTC chr11 5299486 5299507 5299491 5299486 -
tgtgtaaaatttatttatttgt

SEQ ID NO: 131018 - DNA, 22 bp, Artificial Sequence
  Synthetic oligonucleotide; CTG chr11 5299484 5299505 5299489 5299484 -
tgtaaaatttatttatttgttt

SEQ ID NO: 131019 - DNA, 22 bp, Artificial Sequence
  Synthetic oligonucleotide; TTT chr11 5299474 5299495 5299479 5299474 -
atttatttgtttttccaaagtt

SEQ ID NO: 131020 - DNA, 22 bp, Artificial Sequence
  Synthetic oligonucleotide; TTA chr11 5299473 5299494 5299478 5299473 -
tttatttgtttttccaaagttg

SEQ ID NO: 131021 - DNA, 22 bp, Artificial Sequence
  Synthetic oligonucleotide; TTT chr11 5299470 5299491 5299475 5299470 -
atttgtttttccaaagttggca

SEQ ID NO: 131022 - DNA, 22 bp, Artificial Sequence
  Synthetic oligonucleotide; TTA chr11 5299469 5299490 5299474 5299469 -
tttgtttttccaaagttggcat

SEQ ID NO: 131023 - DNA, 22 bp, Artificial Sequence
  Synthetic oligonucleotide; TTT chr11 5299466 5299487 5299471 5299466 -
gtttttccaaagttggcataca

SEQ ID NO: 131024 - DNA, 22 bp, Artificial Sequence
  Synthetic oligonucleotide; TTG chr11 5299465 5299486 5299470 5299465 -
tttttccaaagttggcatacag

SEQ ID NO: 131025 - DNA, 22 bp, Artificial Sequence
  Synthetic oligonucleotide; TTT chr11 5299462 5299483 5299467 5299462 -
ttccaaagttggcatacagagt

SEQ ID NO: 131026 - DNA, 22 bp, Artificial Sequence
  Synthetic oligonucleotide; TTT chr11 5299461 5299482 5299466 5299461 -
tccaaagttggcatacagagtt

SEQ ID NO: 131027 - DNA, 22 bp, Artificial Sequence
  Synthetic oligonucleotide; TTT chr11 5299460 5299481 5299465 5299460 -
ccaaagttggcatacagagttt

SEQ ID NO: 131028 - DNA, 22 bp, Artificial Sequence
  Synthetic oligonucleotide; TTC chr11 5299459 5299480 5299464 5299459 -
caaagttggcatacagagttta

SEQ ID NO: 131029 - DNA, 22 bp, Artificial Sequence
  Synthetic oligonucleotide; TTG chr11 5299451 5299472 5299456 5299451 -
gcatacagagtttattctattt

SEQ ID NO: 131030 - DNA, 22 bp, Artificial Sequence
  Synthetic oligonucleotide; TTT chr11 5299438 5299459 5299443 5299438 -
attctatttagaaacgtcgttt

SEQ ID NO: 131031 - DNA, 22 bp, Artificial Sequence
  Synthetic oligonucleotide; TTA chr11 5299437 5299458 5299442 5299437 -
ttctatttagaaacgtcgtttt

SEQ ID NO: 131032 - DNA, 22 bp, Artificial Sequence
  Synthetic oligonucleotide; TTC chr11 5299434 5299455 5299439 5299434 -
tatttagaaacgtcgttttctg

SEQ ID NO: 131033 - DNA, 22 bp, Artificial Sequence
  Synthetic oligonucleotide; CTA chr11 5299432 5299453 5299437 5299432 -
tttagaaacgtcgttttctggt

SEQ ID NO: 131034 - DNA, 22 bp, Artificial Sequence
  Synthetic oligonucleotide; TTT chr11 5299429 5299450 5299434 5299429 -
agaaacgtcgttttctggttgc

SEQ ID NO: 131035 - DNA, 22 bp, Artificial Sequence
  Synthetic oligonucleotide; TTA chr11 5299428 5299449 5299433 5299428 -
gaaacgtcgttttctggttgcc

SEQ ID NO: 131036 - DNA, 22 bp, Artificial Sequence
  Synthetic oligonucleotide; TTT chr11 5299416 5299437 5299421 5299416 -
tctggttgcctttgttgtttgg

SEQ ID NO: 131037 - DNA, 22 bp, Artificial Sequence
  Synthetic oligonucleotide; TTT chr11 5299415 5299436 5299420 5299415 -
ctggttgcctttgttgtttggt

SEQ ID NO: 131038 - DNA, 22 bp, Artificial Sequence
  Synthetic oligonucleotide; TTC chr11 5299414 5299435 5299419 5299414 -
tggttgcctttgttgtttggtc

SEQ ID NO: 131039 - DNA, 22 bp, Artificial Sequence
  Synthetic oligonucleotide; CTG chr11 5299412 5299433 5299417 5299412 -
gttgcctttgttgtttggtcta

SEQ ID NO: 131040 - DNA, 22 bp, Artificial Sequence
  Synthetic oligonucleotide; TTG chr11 5299408 5299429 5299413 5299408 -
cctttgttgtttggtctaaaat

SEQ ID NO: 131041 - DNA, 22 bp, Artificial Sequence
  Synthetic oligonucleotide; CTT chr11 5299404 5299425 5299409 5299404 -
tgttgtttggtctaaaatgcac

SEQ ID NO: 131042 - DNA, 22 bp, Artificial Sequence
  Synthetic oligonucleotide; TTT chr11 5299403 5299424 5299408 5299403 -
gttgtttggtctaaaatgcaca

SEQ ID NO: 131043 - DNA, 22 bp, Artificial Sequence
  Synthetic oligonucleotide; TTG chr11 5299402 5299423 5299407 5299402 -
ttgtttggtctaaaatgcacat

SEQ ID NO: 131044 - DNA, 22 bp, Artificial Sequence
  Synthetic oligonucleotide; TTG chr11 5299399 5299420 5299404 5299399 -
tttggtctaaaatgcacattgt

SEQ ID NO: 131045 - DNA, 22 bp, Artificial Sequence
  Synthetic oligonucleotide; TTT chr11 5299396 5299417 5299401 5299396 -
ggtctaaaatgcacattgtgct

SEQ ID NO: 131046 - DNA, 22 bp, Artificial Sequence
  Synthetic oligonucleotide; TTG chr11 5299395 5299416 5299400 5299395 -
gtctaaaatgcacattgtgcta

SEQ ID NO: 131047 - DNA, 22 bp, Artificial Sequence
  Synthetic oligonucleotide; CTA chr11 5299390 5299411 5299395 5299390 -
aaatgcacattgtgctaacata

SEQ ID NO: 131048 - DNA, 22 bp, Artificial Sequence
  Synthetic oligonucleotide; TTG chr11 5299378 5299399 5299383 5299378 -
tgctaacatacaaactacattt

SEQ ID NO: 131049 - DNA, 22 bp, Artificial Sequence
  Synthetic oligonucleotide; CTA chr11 5299373 5299394 5299378 5299373 -
acatacaaactacatttaggaa

SEQ ID NO: 131050 - DNA, 22 bp, Artificial Sequence
  Synthetic oligonucleotide; CTA chr11 5299361 5299382 5299366 5299361 -
catttaggaaagctgcatctct

SEQ ID NO: 131051 - DNA, 22 bp, Artificial Sequence
  Synthetic oligonucleotide; TTT chr11 5299356 5299377 5299361 5299356 -
aggaaagctgcatctctattga

SEQ ID NO: 131052 - DNA, 22 bp, Artificial Sequence
  Synthetic oligonucleotide; TTA chr11 5299355 5299376 5299360 5299355 -
ggaaagctgcatctctattgac

SEQ ID NO: 131053 - DNA, 22 bp, Artificial Sequence
  Synthetic oligonucleotide; CTG chr11 5299346 5299367 5299351 5299346 -
catctctattgaccactgaaag

SEQ ID NO: 131054 - DNA, 22 bp, Artificial Sequence
  Synthetic oligonucleotide; CTC chr11 5299340 5299361 5299345 5299340 -
tattgaccactgaaaggatgtc

SEQ ID NO: 131055 - DNA, 22 bp, Artificial Sequence
  Synthetic oligonucleotide; CTA chr11 5299338 5299359 5299343 5299338 -
ttgaccactgaaaggatgtctg

SEQ ID NO: 131056 - DNA, 22 bp, Artificial Sequence
  Synthetic oligonucleotide; TTG chr11 5299335 5299356 5299340 5299335 -
accactgaaaggatgtctgtaa

SEQ ID NO: 131057 - DNA, 22 bp, Artificial Sequence
  Synthetic oligonucleotide; CTG chr11 5299328 5299349 5299333 5299328 -
aaaggatgtctgtaagagtaaa

SEQ ID NO: 131058 - DNA, 22 bp, Artificial Sequence
  Synthetic oligonucleotide; CTG chr11 5299316 5299337 5299321 5299316 -
taagagtaaaaaacatagcggt

SEQ ID NO: 131059 - DNA, 22 bp, Artificial Sequence
  Synthetic oligonucleotide; TTA chr11 5299290 5299311 5299295 5299290 -
aaattttcaggcgaataagggt

SEQ ID NO: 131060 - DNA, 22 bp, Artificial Sequence
  Synthetic oligonucleotide; TTT chr11 5299284 5299305 5299289 5299284 -
tcaggcgaataagggttttttg

SEQ ID NO: 131061 - DNA, 22 bp, Artificial Sequence
  Synthetic oligonucleotide; TTT chr11 5299283 5299304 5299288 5299283 -
caggcgaataagggttttttgt

SEQ ID NO: 131062 - DNA, 22 bp, Artificial Sequence
  Synthetic oligonucleotide; TTC chr11 5299282 5299303 5299287 5299282 -
aggcgaataagggttttttgta

SEQ ID NO: 131063 - DNA, 22 bp, Artificial Sequence
  Synthetic oligonucleotide; TTT chr11 5299266 5299287 5299271 5299266 -
tttgtaaaaatggcaaatgtat

SEQ ID NO: 131064 - DNA, 22 bp, Artificial Sequence
  Synthetic oligonucleotide; TTT chr11 5299265 5299286 5299270 5299265 -
ttgtaaaaatggcaaatgtatt

SEQ ID NO: 131065 - DNA, 22 bp, Artificial Sequence
  Synthetic oligonucleotide; TTT chr11 5299264 5299285 5299269 5299264 -
tgtaaaaatggcaaatgtattt

SEQ ID NO: 131066 - DNA, 22 bp, Artificial Sequence
  Synthetic oligonucleotide; TTT chr11 5299263 5299284 5299268 5299263 -
gtaaaaatggcaaatgtatttg

SEQ ID NO: 131067 - DNA, 22 bp, Artificial Sequence
  Synthetic oligonucleotide; TTG chr11 5299262 5299283 5299267 5299262 -
taaaaatggcaaatgtatttgt

SEQ ID NO: 131068 - DNA, 22 bp, Artificial Sequence
  Synthetic oligonucleotide; TTT chr11 5299242 5299263 5299247 5299242 -
gtcagtaggggattgcgatgct

SEQ ID NO: 131069 - DNA, 22 bp, Artificial Sequence
  Synthetic oligonucleotide; TTG chr11 5299241 5299262 5299246 5299241 -
tcagtaggggattgcgatgctg

SEQ ID NO: 131070 - DNA, 22 bp, Artificial Sequence
  Synthetic oligonucleotide; TTG chr11 5299227 5299248 5299232 5299227 -
cgatgctgttttcttgattgtt

SEQ ID NO: 131071 - DNA, 22 bp, Artificial Sequence
  Synthetic oligonucleotide; CTG chr11 5299219 5299240 5299224 5299219 -
ttttcttgattgttataagaag

SEQ ID NO: 131072 - DNA, 22 bp, Artificial Sequence
  Synthetic oligonucleotide; TTT chr11 5299216 5299237 5299221 5299216 -
tcttgattgttataagaagaca

SEQ ID NO: 131073 - DNA, 22 bp, Artificial Sequence
  Synthetic oligonucleotide; TTT chr11 5299215 5299236 5299220 5299215 -
cttgattgttataagaagacag

SEQ ID NO: 131074 - DNA, 22 bp, Artificial Sequence
  Synthetic oligonucleotide; TTC chr11 5299214 5299235 5299219 5299214 -
ttgattgttataagaagacagc

SEQ ID NO: 131075 - DNA, 22 bp, Artificial Sequence
  Synthetic oligonucleotide; CTT chr11 5299212 5299233 5299217 5299212 -
gattgttataagaagacagcct

SEQ ID NO: 131076 - DNA, 22 bp, Artificial Sequence
  Synthetic oligonucleotide; TTG chr11 5299211 5299232 5299216 5299211 -
attgttataagaagacagccta

SEQ ID NO: 131077 - DNA, 22 bp, Artificial Sequence
  Synthetic oligonucleotide; TTG chr11 5299207 5299228 5299212 5299207 -
ttataagaagacagcctacaac

SEQ ID NO: 131078 - DNA, 22 bp, Artificial Sequence
  Synthetic oligonucleotide; TTA chr11 5299204 5299225 5299209 5299204 -
taagaagacagcctacaacaat

SEQ ID NO: 131079 - DNA, 22 bp, Artificial Sequence
  Synthetic oligonucleotide; CTA chr11 5299189 5299210 5299194 5299189 -
caacaatgtgtaaatgtgtaat

SEQ ID NO: 131080 - DNA, 22 bp, Artificial Sequence
  Synthetic oligonucleotide; CTT chr11 5299159 5299180 5299164 5299159 -
aggggcgatgtgctgaaaataa

SEQ ID NO: 131081 - DNA, 22 bp, Artificial Sequence
  Synthetic oligonucleotide; TTA chr11 5299158 5299179 5299163 5299158 -
ggggcgatgtgctgaaaataag

SEQ ID NO: 131082 - DNA, 22 bp, Artificial Sequence
  Synthetic oligonucleotide; CTG chr11 5299144 5299165 5299149 5299144 -
aaaataaggtatgatagcgaag

SEQ ID NO: 131083 - DNA, 22 bp, Artificial Sequence
  Synthetic oligonucleotide; CTA chr11 5299118 5299139 5299123 5299118 -
agaaacagaggtatctaattat

SEQ ID NO: 131084 - DNA, 22 bp, Artificial Sequence
  Synthetic oligonucleotide; CTA chr11 5299101 5299122 5299106 5299101 -
attataaataagaagaagtggg

SEQ ID NO: 131085 - DNA, 22 bp, Artificial Sequence
  Synthetic oligonucleotide; TTA chr11 5299097 5299118 5299102 5299097 -
taaataagaagaagtgggaaga

SEQ ID NO: 131086 - DNA, 22 bp, Artificial Sequence
  Synthetic oligonucleotide; TTG chr11 5299067 5299088 5299072 5299067 -
agagctcaagtttactcatatg

SEQ ID NO: 131087 - DNA, 22 bp, Artificial Sequence
  Synthetic oligonucleotide; CTC chr11 5299060 5299081 5299065 5299060 -
aagtttactcatatgttagcaa

SEQ ID NO: 131088 - DNA, 22 bp, Artificial Sequence
  Synthetic oligonucleotide; TTT chr11 5299054 5299075 5299059 5299054 -
actcatatgttagcaagggatg

SEQ ID NO: 131089 - DNA, 22 bp, Artificial Sequence
  Synthetic oligonucleotide; TTA chr11 5299053 5299074 5299058 5299053 -
ctcatatgttagcaagggatga

SEQ ID NO: 131090 - DNA, 22 bp, Artificial Sequence
  Synthetic oligonucleotide; CTC chr11 5299050 5299071 5299055 5299050 -
atatgttagcaagggatgacat

SEQ ID NO: 131091 - DNA, 22 bp, Artificial Sequence
  Synthetic oligonucleotide; TTA chr11 5299042 5299063 5299047 5299042 -
gcaagggatgacataatatgat

SEQ ID NO: 131092 - DNA, 22 bp, Artificial Sequence
  Synthetic oligonucleotide; TTA chr11 5299016 5299037 5299021 5299016 -
tagcctattgatctttaaacag

SEQ ID NO: 131093 - DNA, 22 bp, Artificial Sequence
  Synthetic oligonucleotide; CTA chr11 5299009 5299030 5299014 5299009 -
ttgatctttaaacagcctgtat

SEQ ID NO: 131094 - DNA, 22 bp, Artificial Sequence
  Synthetic oligonucleotide; TTG chr11 5299006 5299027 5299011 5299006 -
atctttaaacagcctgtatcaa

SEQ ID NO: 131095 - DNA, 22 bp, Artificial Sequence
  Synthetic oligonucleotide; CTT chr11 5299001 5299022 5299006 5299001 -
taaacagcctgtatcaatagtc

SEQ ID NO: 131096 - DNA, 22 bp, Artificial Sequence
  Synthetic oligonucleotide; TTT chr11 5299000 5299021 5299005 5299000 -
aaacagcctgtatcaatagtca

SEQ ID NO: 131097 - DNA, 22 bp, Artificial Sequence
  Synthetic oligonucleotide; TTA chr11 5298999 5299020 5299004 5298999 -
aacagcctgtatcaatagtcaa

SEQ ID NO: 131098 - DNA, 22 bp, Artificial Sequence
  Synthetic oligonucleotide; CTG chr11 5298990 5299011 5298995 5298990 -
tatcaatagtcaaaaatcaatt

SEQ ID NO: 131099 - DNA, 22 bp, Artificial Sequence
  Synthetic oligonucleotide; TTA chr11 5298967 5298988 5298972 5298967 -
aaaaggataaattttaaaaatc

SEQ ID NO: 131100 - DNA, 22 bp, Artificial Sequence
  Synthetic oligonucleotide; TTT chr11 5298953 5298974 5298958 5298953 -
taaaaatcactcattttcttaa

SEQ ID NO: 131101 - DNA, 22 bp, Artificial Sequence
  Synthetic oligonucleotide; TTT chr11 5298952 5298973 5298957 5298952 -
aaaaatcactcattttcttaag

SEQ ID NO: 131102 - DNA, 22 bp, Artificial Sequence
  Synthetic oligonucleotide; TTA chr11 5298951 5298972 5298956 5298951 -
aaaatcactcattttcttaagt

SEQ ID NO: 131103 - DNA, 22 bp, Artificial Sequence
  Synthetic oligonucleotide; CTC chr11 5298941 5298962 5298946 5298941 -
attttcttaagtaaatgtatat

SEQ ID NO: 131104 - DNA, 22 bp, Artificial Sequence
  Synthetic oligonucleotide; TTT chr11 5298937 5298958 5298942 5298937 -
tcttaagtaaatgtatatttat

SEQ ID NO: 131105 - DNA, 22 bp, Artificial Sequence
  Synthetic oligonucleotide; TTT chr11 5298936 5298957 5298941 5298936 -
cttaagtaaatgtatatttatg

SEQ ID NO: 131106 - DNA, 22 bp, Artificial Sequence
  Synthetic oligonucleotide; TTC chr11 5298935 5298956 5298940 5298935 -
ttaagtaaatgtatatttatgc

SEQ ID NO: 131107 - DNA, 22 bp, Artificial Sequence
  Synthetic oligonucleotide; CTT chr11 5298933 5298954 5298938 5298933 -
aagtaaatgtatatttatgcgt

SEQ ID NO: 131108 - DNA, 22 bp, Artificial Sequence
  Synthetic oligonucleotide; TTA chr11 5298932 5298953 5298937 5298932 -
agtaaatgtatatttatgcgtt

SEQ ID NO: 131109 - DNA, 22 bp, Artificial Sequence
  Synthetic oligonucleotide; TTT chr11 5298917 5298938 5298922 5298917 -
atgcgttttaattttaattata

SEQ ID NO: 131110 - DNA, 22 bp, Artificial Sequence
  Synthetic oligonucleotide; TTA chr11 5298916 5298937 5298921 5298916 -
tgcgttttaattttaattatat

SEQ ID NO: 131111 - DNA, 22 bp, Artificial Sequence
  Synthetic oligonucleotide; TTT chr11 5298909 5298930 5298914 5298909 -
taattttaattatattcataac

SEQ ID NO: 131112 - DNA, 22 bp, Artificial Sequence
  Synthetic oligonucleotide; TTT chr11 5298908 5298929 5298913 5298908 -
aattttaattatattcataacc

SEQ ID NO: 131113 - DNA, 22 bp, Artificial Sequence
  Synthetic oligonucleotide; TTA chr11 5298907 5298928 5298912 5298907 -
attttaattatattcataacct

SEQ ID NO: 131114 - DNA, 22 bp, Artificial Sequence
  Synthetic oligonucleotide; TTT chr11 5298903 5298924 5298908 5298903 -
taattatattcataacctatat

SEQ ID NO: 131115 - DNA, 22 bp, Artificial Sequence
  Synthetic oligonucleotide; TTT chr11 5298902 5298923 5298907 5298902 -
aattatattcataacctatata

SEQ ID NO: 131116 - DNA, 22 bp, Artificial Sequence
  Synthetic oligonucleotide; TTA chr11 5298901 5298922 5298906 5298901 -
attatattcataacctatatat

SEQ ID NO: 131117 - DNA, 22 bp, Artificial Sequence
  Synthetic oligonucleotide; TTA chr11 5298897 5298918 5298902 5298897 -
tattcataacctatatattata

SEQ ID NO: 131118 - DNA, 22 bp, Artificial Sequence
  Synthetic oligonucleotide; TTC chr11 5298892 5298913 5298897 5298892 -
ataacctatatattatatttta

SEQ ID NO: 131119 - DNA, 22 bp, Artificial Sequence
  Synthetic oligonucleotide; CTA chr11 5298884 5298905 5298889 5298884 -
tatattatattttacaacttct

SEQ ID NO: 131120 - DNA, 22 bp, Artificial Sequence
  Synthetic oligonucleotide; TTA chr11 5298877 5298898 5298882 5298877 -
tattttacaacttcttagtttg

SEQ ID NO: 131121 - DNA, 22 bp, Artificial Sequence
  Synthetic oligonucleotide; TTT chr11 5298872 5298893 5298877 5298872 -
tacaacttcttagtttgaaaat

SEQ ID NO: 131122 - DNA, 22 bp, Artificial Sequence
  Synthetic oligonucleotide; TTT chr11 5298871 5298892 5298876 5298871 -
acaacttcttagtttgaaaatc

SEQ ID NO: 131123 - DNA, 22 bp, Artificial Sequence
  Synthetic oligonucleotide; TTA chr11 5298870 5298891 5298875 5298870 -
caacttcttagtttgaaaatcc

SEQ ID NO: 131124 - DNA, 22 bp, Artificial Sequence
  Synthetic oligonucleotide; CTT chr11 5298864 5298885 5298869 5298864 -
cttagtttgaaaatcctttcaa

SEQ ID NO: 131125 - DNA, 22 bp, Artificial Sequence
  Synthetic oligonucleotide; TTC chr11 5298863 5298884 5298868 5298863 -
ttagtttgaaaatcctttcaat

SEQ ID NO: 131126 - DNA, 22 bp, Artificial Sequence
  Synthetic oligonucleotide; CTT chr11 5298861 5298882 5298866 5298861 -
agtttgaaaatcctttcaatta

SEQ ID NO: 131127 - DNA, 22 bp, Artificial Sequence
  Synthetic oligonucleotide; TTA chr11 5298860 5298881 5298865 5298860 -
gtttgaaaatcctttcaattat

SEQ ID NO: 131128 - DNA, 22 bp, Artificial Sequence
  Synthetic oligonucleotide; TTT chr11 5298856 5298877 5298861 5298856 -
gaaaatcctttcaattattaag

SEQ ID NO: 131129 - DNA, 22 bp, Artificial Sequence
  Synthetic oligonucleotide; TTG chr11 5298855 5298876 5298860 5298855 -
aaaatcctttcaattattaagt

SEQ ID NO: 131130 - DNA, 22 bp, Artificial Sequence
  Synthetic oligonucleotide; CTT chr11 5298846 5298867 5298851 5298846 -
tcaattattaagtcagcatcca

SEQ ID NO: 131131 - DNA, 22 bp, Artificial Sequence
  Synthetic oligonucleotide; TTT chr11 5298845 5298866 5298850 5298845 -
caattattaagtcagcatccac

SEQ ID NO: 131132 - DNA, 22 bp, Artificial Sequence
  Synthetic oligonucleotide; TTC chr11 5298844 5298865 5298849 5298844 -
aattattaagtcagcatccacc

SEQ ID NO: 131133 - DNA, 22 bp, Artificial Sequence
  Synthetic oligonucleotide; TTA chr11 5298839 5298860 5298844 5298839 -
ttaagtcagcatccacctgctg

SEQ ID NO: 131134 - DNA, 22 bp, Artificial Sequence
  Synthetic oligonucleotide; TTA chr11 5298836 5298857 5298841 5298836 -
agtcagcatccacctgctgatc

SEQ ID NO: 131135 - DNA, 22 bp, Artificial Sequence
  Synthetic oligonucleotide; CTG chr11 5298820 5298841 5298825 5298820 -
ctgatccagtgatatataagga

SEQ ID NO: 131136 - DNA, 22 bp, Artificial Sequence
  Synthetic oligonucleotide; CTG chr11 5298817 5298838 5298822 5298817 -
atccagtgatatataaggacat

SEQ ID NO: 131137 - DNA, 22 bp, Artificial Sequence
  Synthetic oligonucleotide; TTT chr11 5298793 5298814 5298798 5298793 -
attgcaccactgaagtaaaatc

SEQ ID NO: 131138 - DNA, 22 bp, Artificial Sequence
  Synthetic oligonucleotide; TTA chr11 5298792 5298813 5298797 5298792 -
ttgcaccactgaagtaaaatca

SEQ ID NO: 131139 - DNA, 22 bp, Artificial Sequence
  Synthetic oligonucleotide; TTG chr11 5298789 5298810 5298794 5298789 -
caccactgaagtaaaatcagtg

SEQ ID NO: 131140 - DNA, 22 bp, Artificial Sequence
  Synthetic oligonucleotide; CTG chr11 5298781 5298802 5298786 5298781 -
aagtaaaatcagtgtcctttca

SEQ ID NO: 131141 - DNA, 22 bp, Artificial Sequence
  Synthetic oligonucleotide; CTT chr11 5298762 5298783 5298767 5298762 -
tcaaacaagtgcagcttccaga

SEQ ID NO: 131142 - DNA, 22 bp, Artificial Sequence
  Synthetic oligonucleotide; TTT chr11 5298761 5298782 5298766 5298761 -
caaacaagtgcagcttccagac

SEQ ID NO: 131143 - DNA, 22 bp, Artificial Sequence
  Synthetic oligonucleotide; TTC chr11 5298760 5298781 5298765 5298760 -
aaacaagtgcagcttccagaca

SEQ ID NO: 131144 - DNA, 22 bp, Artificial Sequence
  Synthetic oligonucleotide; CTT chr11 5298745 5298766 5298750 5298745 -
ccagacaagtctcttagacctc

SEQ ID NO: 131145 - DNA, 22 bp, Artificial Sequence
  Synthetic oligonucleotide; TTC chr11 5298744 5298765 5298749 5298744 -
cagacaagtctcttagacctca

SEQ ID NO: 131146 - DNA, 22 bp, Artificial Sequence
  Synthetic oligonucleotide; CTC chr11 5298732 5298753 5298737 5298732 -
ttagacctcatcctcagtctca

SEQ ID NO: 131147 - DNA, 22 bp, Artificial Sequence
  Synthetic oligonucleotide; CTT chr11 5298730 5298751 5298735 5298730 -
agacctcatcctcagtctcacc

SEQ ID NO: 131148 - DNA, 22 bp, Artificial Sequence
  Synthetic oligonucleotide; TTA chr11 5298729 5298750 5298734 5298729 -
gacctcatcctcagtctcaccc

SEQ ID NO: 131149 - DNA, 22 bp, Artificial Sequence
  Synthetic oligonucleotide; CTC chr11 5298723 5298744 5298728 5298723 -
atcctcagtctcaccctgactg

SEQ ID NO: 131150 - DNA, 22 bp, Artificial Sequence
  Synthetic oligonucleotide; CTC chr11 5298717 5298738 5298722 5298717 -
agtctcaccctgactgacaagt

SEQ ID NO: 131151 - DNA, 22 bp, Artificial Sequence
  Synthetic oligonucleotide; CTC chr11 5298711 5298732 5298716 5298711 -
accctgactgacaagtttgcca

SEQ ID NO: 131152 - DNA, 22 bp, Artificial Sequence
  Synthetic oligonucleotide; CTG chr11 5298705 5298726 5298710 5298705 -
actgacaagtttgccatacttg

SEQ ID NO: 131153 - DNA, 22 bp, Artificial Sequence
  Synthetic oligonucleotide; CTG chr11 5298701 5298722 5298706 5298701 -
acaagtttgccatacttgagaa

SEQ ID NO: 131154 - DNA, 22 bp, Artificial Sequence
  Synthetic oligonucleotide; TTT chr11 5298693 5298714 5298698 5298693 -
gccatacttgagaaccttgtga

SEQ ID NO: 131155 - DNA, 22 bp, Artificial Sequence
  Synthetic oligonucleotide; TTG chr11 5298692 5298713 5298697 5298692 -
ccatacttgagaaccttgtgaa

SEQ ID NO: 131156 - DNA, 22 bp, Artificial Sequence
  Synthetic oligonucleotide; CTT chr11 5298684 5298705 5298689 5298684 -
gagaaccttgtgaagcaggcgt

SEQ ID NO: 131157 - DNA, 22 bp, Artificial Sequence
  Synthetic oligonucleotide; TTG chr11 5298683 5298704 5298688 5298683 -
agaaccttgtgaagcaggcgtt

SEQ ID NO: 131158 - DNA, 22 bp, Artificial Sequence
  Synthetic oligonucleotide; CTT chr11 5298675 5298696 5298680 5298675 -
gtgaagcaggcgttgtgtctat

SEQ ID NO: 131159 - DNA, 22 bp, Artificial Sequence
  Synthetic oligonucleotide; TTG chr11 5298674 5298695 5298679 5298674 -
tgaagcaggcgttgtgtctata

SEQ ID NO: 131160 - DNA, 22 bp, Artificial Sequence
  Synthetic oligonucleotide; TTG chr11 5298660 5298681 5298665 5298660 -
tgtctataagctctcttagaga

SEQ ID NO: 131161 - DNA, 22 bp, Artificial Sequence
  Synthetic oligonucleotide; CTA chr11 5298654 5298675 5298659 5298654 -
taagctctcttagagatctgct

SEQ ID NO: 131162 - DNA, 22 bp, Artificial Sequence
  Synthetic oligonucleotide; CTC chr11 5298647 5298668 5298652 5298647 -
tcttagagatctgctctgagga

SEQ ID NO: 131163 - DNA, 22 bp, Artificial Sequence
  Synthetic oligonucleotide; CTC chr11 5298645 5298666 5298650 5298645 -
ttagagatctgctctgaggaat

SEQ ID NO: 131164 - DNA, 22 bp, Artificial Sequence
  Synthetic oligonucleotide; CTT chr11 5298643 5298664 5298648 5298643 -
agagatctgctctgaggaatta

SEQ ID NO: 131165 - DNA, 22 bp, Artificial Sequence
  Synthetic oligonucleotide; TTA chr11 5298642 5298663 5298647 5298642 -
gagatctgctctgaggaattat

SEQ ID NO: 131166 - DNA, 22 bp, Artificial Sequence
  Synthetic oligonucleotide; CTG chr11 5298634 5298655 5298639 5298634 -
ctctgaggaattatcaagtcag

SEQ ID NO: 131167 - DNA, 22 bp, Artificial Sequence
  Synthetic oligonucleotide; CTC chr11 5298631 5298652 5298636 5298631 -
tgaggaattatcaagtcagcac

SEQ ID NO: 131168 - DNA, 22 bp, Artificial Sequence
  Synthetic oligonucleotide; CTG chr11 5298629 5298650 5298634 5298629 -
aggaattatcaagtcagcacag

SEQ ID NO: 131169 - DNA, 22 bp, Artificial Sequence
  Synthetic oligonucleotide; TTA chr11 5298621 5298642 5298626 5298621 -
tcaagtcagcacagttaattct

SEQ ID NO: 131170 - DNA, 22 bp, Artificial Sequence
  Synthetic oligonucleotide; TTA chr11 5298604 5298625 5298609 5298604 -
attctctgtcatactgtgagtt

SEQ ID NO: 131171 - DNA, 22 bp, Artificial Sequence
  Synthetic oligonucleotide; TTC chr11 5298600 5298621 5298605 5298600 -
tctgtcatactgtgagtttagt

SEQ ID NO: 131172 - DNA, 22 bp, Artificial Sequence
  Synthetic oligonucleotide; CTC chr11 5298598 5298619 5298603 5298598 -
tgtcatactgtgagtttagtca

SEQ ID NO: 131173 - DNA, 22 bp, Artificial Sequence
  Synthetic oligonucleotide; CTG chr11 5298596 5298617 5298601 5298596 -
tcatactgtgagtttagtcagg

SEQ ID NO: 131174 - DNA, 22 bp, Artificial Sequence
  Synthetic oligonucleotide; CTG chr11 5298588 5298609 5298593 5298588 -
tgagtttagtcagggcagtaat

SEQ ID NO: 131175 - DNA, 22 bp, Artificial Sequence
  Synthetic oligonucleotide; TTT chr11 5298581 5298602 5298586 5298581 -
agtcagggcagtaattatattt

SEQ ID NO: 131176 - DNA, 22 bp, Artificial Sequence
  Synthetic oligonucleotide; TTA chr11 5298580 5298601 5298585 5298580 -
gtcagggcagtaattatatttc

SEQ ID NO: 131177 - DNA, 22 bp, Artificial Sequence
  Synthetic oligonucleotide; TTA chr11 5298564 5298585 5298569 5298564 -
tatttccccatcagcatattgt

SEQ ID NO: 131178 - DNA, 22 bp, Artificial Sequence
  Synthetic oligonucleotide; TTT chr11 5298559 5298580 5298564 5298559 -
ccccatcagcatattgtcttcc

SEQ ID NO: 131179 - DNA, 22 bp, Artificial Sequence
  Synthetic oligonucleotide; TTC chr11 5298558 5298579 5298563 5298558 -
cccatcagcatattgtcttccc

SEQ ID NO: 131180 - DNA, 22 bp, Artificial Sequence
  Synthetic oligonucleotide; TTG chr11 5298543 5298564 5298548 5298543 -
tcttcccaaggataactacctg

SEQ ID NO: 131181 - DNA, 22 bp, Artificial Sequence
  Synthetic oligonucleotide; CTT chr11 5298539 5298560 5298544 5298539 -
cccaaggataactacctgccat

SEQ ID NO: 131182 - DNA, 22 bp, Artificial Sequence
  Synthetic oligonucleotide; TTC chr11 5298538 5298559 5298543 5298538 -
ccaaggataactacctgccatt

SEQ ID NO: 131183 - DNA, 22 bp, Artificial Sequence
  Synthetic oligonucleotide; CTA chr11 5298525 5298546 5298530 5298525 -
cctgccattctgtaaaccccca

SEQ ID NO: 131184 - DNA, 22 bp, Artificial Sequence
  Synthetic oligonucleotide; CTG chr11 5298521 5298542 5298526 5298521 -
ccattctgtaaacccccaaatt

SEQ ID NO: 131185 - DNA, 22 bp, Artificial Sequence
  Synthetic oligonucleotide; TTC chr11 5298515 5298536 5298520 5298515 -
tgtaaacccccaaatttattaa

SEQ ID NO: 131186 - DNA, 22 bp, Artificial Sequence
  Synthetic oligonucleotide; CTG chr11 5298513 5298534 5298518 5298513 -
taaacccccaaatttattaatg

SEQ ID NO: 131187 - DNA, 22 bp, Artificial Sequence
  Synthetic oligonucleotide; TTT chr11 5298498 5298519 5298503 5298498 -
attaatgcagtcctttaaaaat

SEQ ID NO: 131188 - DNA, 22 bp, Artificial Sequence
  Synthetic oligonucleotide; TTA chr11 5298497 5298518 5298502 5298497 -
ttaatgcagtcctttaaaaata

SEQ ID NO: 131189 - DNA, 22 bp, Artificial Sequence
  Synthetic oligonucleotide; TTA chr11 5298494 5298515 5298499 5298494 -
atgcagtcctttaaaaatacac

SEQ ID NO: 131190 - DNA, 22 bp, Artificial Sequence
  Synthetic oligonucleotide; CTT chr11 5298483 5298504 5298488 5298483 -
taaaaatacacaatgttacttg

SEQ ID NO: 131191 - DNA, 22 bp, Artificial Sequence
  Synthetic oligonucleotide; TTT chr11 5298482 5298503 5298487 5298482 -
aaaaatacacaatgttacttgt

SEQ ID NO: 131192 - DNA, 22 bp, Artificial Sequence
  Synthetic oligonucleotide; TTA chr11 5298481 5298502 5298486 5298481 -
aaaatacacaatgttacttgtc

SEQ ID NO: 131193 - DNA, 22 bp, Artificial Sequence
  Synthetic oligonucleotide; TTA chr11 5298465 5298486 5298470 5298465 -
cttgtctggtgtggctaaagct

SEQ ID NO: 131194 - DNA, 22 bp, Artificial Sequence
  Synthetic oligonucleotide; CTT chr11 5298462 5298483 5298467 5298462 -
gtctggtgtggctaaagcttat

SEQ ID NO: 131195 - DNA, 22 bp, Artificial Sequence
  Synthetic oligonucleotide; TTG chr11 5298461 5298482 5298466 5298461 -
tctggtgtggctaaagcttatt

SEQ ID NO: 131196 - DNA, 22 bp, Artificial Sequence
  Synthetic oligonucleotide; CTG chr11 5298457 5298478 5298462 5298457 -
gtgtggctaaagcttatttatt

SEQ ID NO: 131197 - DNA, 22 bp, Artificial Sequence
  Synthetic oligonucleotide; CTA chr11 5298448 5298469 5298453 5298448 -
aagcttatttatttatttattt

SEQ ID NO: 131198 - DNA, 22 bp, Artificial Sequence
  Synthetic oligonucleotide; CTT chr11 5298442 5298463 5298447 5298442 -
atttatttatttatttatttat

SEQ ID NO: 131199 - DNA, 22 bp, Artificial Sequence
  Synthetic oligonucleotide; TTA chr11 5298441 5298462 5298446 5298441 -
tttatttatttatttatttatt

SEQ ID NO: 131200 - DNA, 22 bp, Artificial Sequence
  Synthetic oligonucleotide; TTT chr11 5298438 5298459 5298443 5298438 -
atttatttatttatttattttt

SEQ ID NO: 131201 - DNA, 22 bp, Artificial Sequence
  Synthetic oligonucleotide; TTA chr11 5298437 5298458 5298442 5298437 -
tttatttatttatttattttta

SEQ ID NO: 131202 - DNA, 22 bp, Artificial Sequence
  Synthetic oligonucleotide; TTT chr11 5298434 5298455 5298439 5298434 -
atttatttatttatttttatag

SEQ ID NO: 131203 - DNA, 22 bp, Artificial Sequence
  Synthetic oligonucleotide; TTA chr11 5298433 5298454 5298438 5298433 -
tttatttatttatttttataga

SEQ ID NO: 131204 - DNA, 22 bp, Artificial Sequence
  Synthetic oligonucleotide; TTT chr11 5298430 5298451 5298435 5298430 -
atttatttatttttatagacat

SEQ ID NO: 131205 - DNA, 22 bp, Artificial Sequence
  Synthetic oligonucleotide; TTA chr11 5298429 5298450 5298434 5298429 -
tttatttatttttatagacatg

SEQ ID NO: 131206 - DNA, 22 bp, Artificial Sequence
  Synthetic oligonucleotide; TTT chr11 5298426 5298447 5298431 5298426 -
atttatttttatagacatgatc

SEQ ID NO: 131207 - DNA, 22 bp, Artificial Sequence
  Synthetic oligonucleotide; TTA chr11 5298425 5298446 5298430 5298425 -
tttatttttatagacatgatct

SEQ ID NO: 131208 - DNA, 22 bp, Artificial Sequence
  Synthetic oligonucleotide; TTT chr11 5298422 5298443 5298427 5298422 -
atttttatagacatgatcttgc

SEQ ID NO: 131209 - DNA, 22 bp, Artificial Sequence
  Synthetic oligonucleotide; TTA chr11 5298421 5298442 5298426 5298421 -
tttttatagacatgatcttgct

SEQ ID NO: 131210 - DNA, 22 bp, Artificial Sequence
  Synthetic oligonucleotide; TTT chr11 5298418 5298439 5298423 5298418 -
ttatagacatgatcttgctctg

SEQ ID NO: 131211 - DNA, 22 bp, Artificial Sequence
  Synthetic oligonucleotide; TTT chr11 5298417 5298438 5298422 5298417 -
tatagacatgatcttgctctgt

SEQ ID NO: 131212 - DNA, 22 bp, Artificial Sequence
  Synthetic oligonucleotide; TTT chr11 5298416 5298437 5298421 5298416 -
atagacatgatcttgctctgtt

SEQ ID NO: 131213 - DNA, 22 bp, Artificial Sequence
  Synthetic oligonucleotide; TTA chr11 5298415 5298436 5298420 5298415 -
tagacatgatcttgctctgttg

SEQ ID NO: 131214 - DNA, 22 bp, Artificial Sequence
  Synthetic oligonucleotide; CTT chr11 5298402 5298423 5298407 5298402 -
gctctgttgcccaggctggagt

SEQ ID NO: 131215 - DNA, 22 bp, Artificial Sequence
  Synthetic oligonucleotide; TTG chr11 5298401 5298422 5298406 5298401 -
ctctgttgcccaggctggagtg

SEQ ID NO: 131216 - DNA, 22 bp, Artificial Sequence
  Synthetic oligonucleotide; CTC chr11 5298398 5298419 5298403 5298398 -
tgttgcccaggctggagtgcag

SEQ ID NO: 131217 - DNA, 22 bp, Artificial Sequence
  Synthetic oligonucleotide; CTG chr11 5298396 5298417 5298401 5298396 -
ttgcccaggctggagtgcagtg

SEQ ID NO: 131218 - DNA, 22 bp, Artificial Sequence
  Synthetic oligonucleotide; TTG chr11 5298393 5298414 5298398 5298393 -
cccaggctggagtgcagtggtg

SEQ ID NO: 131219 - DNA, 22 bp, Artificial Sequence
  Synthetic oligonucleotide; CTG chr11 5298384 5298405 5298389 5298384 -
gagtgcagtggtgccatcacag

SEQ ID NO: 131220 - DNA, 22 bp, Artificial Sequence
  Synthetic oligonucleotide; CTC chr11 5298359 5298380 5298364 5298359 -
actgcagccttgaaatcctggg

SEQ ID NO: 131221 - DNA, 22 bp, Artificial Sequence
  Synthetic oligonucleotide; CTG chr11 5298355 5298376 5298360 5298355 -
cagccttgaaatcctgggctca

SEQ ID NO: 131222 - DNA, 22 bp, Artificial Sequence
  Synthetic oligonucleotide; CTT chr11 5298348 5298369 5298353 5298348 -
gaaatcctgggctcaagcaatc

SEQ ID NO: 131223 - DNA, 22 bp, Artificial Sequence
  Synthetic oligonucleotide; TTG chr11 5298347 5298368 5298352 5298347 -
aaatcctgggctcaagcaatcc

SEQ ID NO: 131224 - DNA, 22 bp, Artificial Sequence
  Synthetic oligonucleotide; CTG chr11 5298339 5298360 5298344 5298339 -
ggctcaagcaatccttcttcct

SEQ ID NO: 131225 - DNA, 22 bp, Artificial Sequence
  Synthetic oligonucleotide; CTC chr11 5298334 5298355 5298339 5298334 -
aagcaatccttcttcctcagct

SEQ ID NO: 131226 - DNA, 22 bp, Artificial Sequence
  Synthetic oligonucleotide; CTT chr11 5298323 5298344 5298328 5298323 -
cttcctcagctttttgagtacc

SEQ ID NO: 131227 - DNA, 22 bp, Artificial Sequence
  Synthetic oligonucleotide; TTC chr11 5298322 5298343 5298327 5298322 -
ttcctcagctttttgagtacct

SEQ ID NO: 131228 - DNA, 22 bp, Artificial Sequence
  Synthetic oligonucleotide; CTT chr11 5298320 5298341 5298325 5298320 -
cctcagctttttgagtacctag

SEQ ID NO: 131229 - DNA, 22 bp, Artificial Sequence
  Synthetic oligonucleotide; TTC chr11 5298319 5298340 5298324 5298319 -
ctcagctttttgagtacctagg

SEQ ID NO: 131230 - DNA, 22 bp, Artificial Sequence
  Synthetic oligonucleotide; CTC chr11 5298316 5298337 5298321 5298316 -
agctttttgagtacctaggact

SEQ ID NO: 131231 - DNA, 22 bp, Artificial Sequence
  Synthetic oligonucleotide; CTT chr11 5298311 5298332 5298316 5298311 -
tttgagtacctaggactacagg

SEQ ID NO: 131232 - DNA, 22 bp, Artificial Sequence
  Synthetic oligonucleotide; TTT chr11 5298310 5298331 5298315 5298310 -
ttgagtacctaggactacaggt

SEQ ID NO: 131233 - DNA, 22 bp, Artificial Sequence
  Synthetic oligonucleotide; TTT chr11 5298309 5298330 5298314 5298309 -
tgagtacctaggactacaggtt

SEQ ID NO: 131234 - DNA, 22 bp, Artificial Sequence
  Synthetic oligonucleotide; TTT chr11 5298308 5298329 5298313 5298308 -
gagtacctaggactacaggttt

SEQ ID NO: 131235 - DNA, 22 bp, Artificial Sequence
  Synthetic oligonucleotide; TTG chr11 5298307 5298328 5298312 5298307 -
agtacctaggactacaggttta

SEQ ID NO: 131236 - DNA, 22 bp, Artificial Sequence
  Synthetic oligonucleotide; CTA chr11 5298299 5298320 5298304 5298299 -
ggactacaggtttatgccactg

SEQ ID NO: 131237 - DNA, 22 bp, Artificial Sequence
  Synthetic oligonucleotide; CTA chr11 5298293 5298314 5298298 5298293 -
caggtttatgccactgcaccta

SEQ ID NO: 131238 - DNA, 22 bp, Artificial Sequence
  Synthetic oligonucleotide; TTT chr11 5298286 5298307 5298291 5298286 -
atgccactgcacctagctaatg

SEQ ID NO: 131239 - DNA, 22 bp, Artificial Sequence
  Synthetic oligonucleotide; TTA chr11 5298285 5298306 5298290 5298285 -
tgccactgcacctagctaatgt

SEQ ID NO: 131240 - DNA, 22 bp, Artificial Sequence
  Synthetic oligonucleotide; CTG chr11 5298277 5298298 5298282 5298277 -
cacctagctaatgtttttattt

SEQ ID NO: 131241 - DNA, 22 bp, Artificial Sequence
  Synthetic oligonucleotide; CTA chr11 5298271 5298292 5298276 5298271 -
gctaatgtttttattttttgta

SEQ ID NO: 131242 - DNA, 22 bp, Artificial Sequence
  Synthetic oligonucleotide; CTA chr11 5298267 5298288 5298272 5298267 -
atgtttttattttttgtaaata

SEQ ID NO: 131243 - DNA, 22 bp, Artificial Sequence
  Synthetic oligonucleotide; TTT chr11 5298261 5298282 5298266 5298261 -
ttattttttgtaaatatgggat

SEQ ID NO: 131244 - DNA, 22 bp, Artificial Sequence
  Synthetic oligonucleotide; TTT chr11 5298260 5298281 5298265 5298260 -
tattttttgtaaatatgggatc

SEQ ID NO: 131245 - DNA, 22 bp, Artificial Sequence
  Synthetic oligonucleotide; TTT chr11 5298259 5298280 5298264 5298259 -
attttttgtaaatatgggatca

SEQ ID NO: 131246 - DNA, 22 bp, Artificial Sequence
  Synthetic oligonucleotide; TTA chr11 5298258 5298279 5298263 5298258 -
ttttttgtaaatatgggatcat

SEQ ID NO: 131247 - DNA, 22 bp, Artificial Sequence
  Synthetic oligonucleotide; TTT chr11 5298255 5298276 5298260 5298255 -
tttgtaaatatgggatcatgtt

SEQ ID NO: 131248 - DNA, 22 bp, Artificial Sequence
  Synthetic oligonucleotide; TTT chr11 5298254 5298275 5298259 5298254 -
ttgtaaatatgggatcatgtta

SEQ ID NO: 131249 - DNA, 22 bp, Artificial Sequence
  Synthetic oligonucleotide; TTT chr11 5298253 5298274 5298258 5298253 -
tgtaaatatgggatcatgttat

SEQ ID NO: 131250 - DNA, 22 bp, Artificial Sequence
  Synthetic oligonucleotide; TTT chr11 5298252 5298273 5298257 5298252 -
gtaaatatgggatcatgttatg

SEQ ID NO: 131251 - DNA, 22 bp, Artificial Sequence
  Synthetic oligonucleotide; TTG chr11 5298251 5298272 5298256 5298251 -
taaatatgggatcatgttatgt

SEQ ID NO: 131252 - DNA, 22 bp, Artificial Sequence
  Synthetic oligonucleotide; TTA chr11 5298232 5298253 5298237 5298232 -
tgttgccgaggctgctctccaa

SEQ ID NO: 131253 - DNA, 22 bp, Artificial Sequence
  Synthetic oligonucleotide; TTG chr11 5298227 5298248 5298232 5298227 -
ccgaggctgctctccaattcct

SEQ ID NO: 131254 - DNA, 22 bp, Artificial Sequence
  Synthetic oligonucleotide; CTG chr11 5298218 5298239 5298223 5298218 -
ctctccaattcctaacctcaag

SEQ ID NO: 131255 - DNA, 22 bp, Artificial Sequence
  Synthetic oligonucleotide; CTC chr11 5298215 5298236 5298220 5298215 -
tccaattcctaacctcaagcaa

SEQ ID NO: 131256 - DNA, 22 bp, Artificial Sequence
  Synthetic oligonucleotide; CTC chr11 5298213 5298234 5298218 5298213 -
caattcctaacctcaagcaatc

SEQ ID NO: 131257 - DNA, 22 bp, Artificial Sequence
  Synthetic oligonucleotide; TTC chr11 5298207 5298228 5298212 5298207 -
ctaacctcaagcaatcctccca

SEQ ID NO: 131258 - DNA, 22 bp, Artificial Sequence
  Synthetic oligonucleotide; CTA chr11 5298204 5298225 5298209 5298204 -
acctcaagcaatcctcccaccc

SEQ ID NO: 131259 - DNA, 22 bp, Artificial Sequence
  Synthetic oligonucleotide; CTC chr11 5298199 5298220 5298204 5298199 -
aagcaatcctcccaccctggcc

SEQ ID NO: 131260 - DNA, 22 bp, Artificial Sequence
  Synthetic oligonucleotide; CTC chr11 5298188 5298209 5298193 5298188 -
ccaccctggcctcctaatgata

SEQ ID NO: 131261 - DNA, 22 bp, Artificial Sequence
  Synthetic oligonucleotide; CTG chr11 5298180 5298201 5298185 5298180 -
gcctcctaatgatagggacagg

SEQ ID NO: 131262 - DNA, 22 bp, Artificial Sequence
  Synthetic oligonucleotide; CTC chr11 5298175 5298196 5298180 5298175 -
ctaatgatagggacaggaggca

SEQ ID NO: 131263 - DNA, 22 bp, Artificial Sequence
  Synthetic oligonucleotide; CTA chr11 5298172 5298193 5298177 5298172 -
atgatagggacaggaggcagag

SEQ ID NO: 131264 - DNA, 22 bp, Artificial Sequence
  Synthetic oligonucleotide; TTT chr11 5298144 5298165 5298149 5298144 -
taggcagaaaagggcggggtcc

SEQ ID NO: 131265 - DNA, 22 bp, Artificial Sequence
  Synthetic oligonucleotide; TTT chr11 5298143 5298164 5298148 5298143 -
aggcagaaaagggcggggtccc

SEQ ID NO: 131266 - DNA, 22 bp, Artificial Sequence
  Synthetic oligonucleotide; TTA chr11 5298142 5298163 5298147 5298142 -
ggcagaaaagggcggggtccct

SEQ ID NO: 131267 - DNA, 22 bp, Artificial Sequence
  Synthetic oligonucleotide; CTG chr11 5298119 5298140 5298124 5298119 -
gcatgggtcctaccctgaagcc

SEQ ID NO: 131268 - DNA, 22 bp, Artificial Sequence
  Synthetic oligonucleotide; CTA chr11 5298107 5298128 5298112 5298107 -
ccctgaagcctggaacatggcc

SEQ ID NO: 131269 - DNA, 22 bp, Artificial Sequence
  Synthetic oligonucleotide; CTG chr11 5298102 5298123 5298107 5298102 -
aagcctggaacatggccattcc

SEQ ID NO: 131270 - DNA, 22 bp, Artificial Sequence
  Synthetic oligonucleotide; CTG chr11 5298095 5298116 5298100 5298095 -
gaacatggccattcctgagata

SEQ ID NO: 131271 - DNA, 22 bp, Artificial Sequence
  Synthetic oligonucleotide; TTC chr11 5298081 5298102 5298086 5298081 -
ctgagatatttctctcagccag

SEQ ID NO: 131272 - DNA, 22 bp, Artificial Sequence
  Synthetic oligonucleotide; CTG chr11 5298078 5298099 5298083 5298078 -
agatatttctctcagccagaac

SEQ ID NO: 131273 - DNA, 22 bp, Artificial Sequence
  Synthetic oligonucleotide; TTT chr11 5298070 5298091 5298075 5298070 -
ctctcagccagaactgtttcac

SEQ ID NO: 131274 - DNA, 22 bp, Artificial Sequence
  Synthetic oligonucleotide; TTC chr11 5298069 5298090 5298074 5298069 -
tctcagccagaactgtttcaca

SEQ ID NO: 131275 - DNA, 22 bp, Artificial Sequence
  Synthetic oligonucleotide; CTC chr11 5298067 5298088 5298072 5298067 -
tcagccagaactgtttcacatt

SEQ ID NO: 131276 - DNA, 22 bp, Artificial Sequence
  Synthetic oligonucleotide; CTC chr11 5298065 5298086 5298070 5298065 -
agccagaactgtttcacattca

SEQ ID NO: 131277 - DNA, 22 bp, Artificial Sequence
  Synthetic oligonucleotide; CTG chr11 5298054 5298075 5298059 5298054 -
tttcacattcacattttaagtg

SEQ ID NO: 131278 - DNA, 22 bp, Artificial Sequence
  Synthetic oligonucleotide; TTT chr11 5298051 5298072 5298056 5298051 -
cacattcacattttaagtgcca

SEQ ID NO: 131279 - DNA, 22 bp, Artificial Sequence
  Synthetic oligonucleotide; TTC chr11 5298050 5298071 5298055 5298050 -
acattcacattttaagtgccag

SEQ ID NO: 131280 - DNA, 22 bp, Artificial Sequence
  Synthetic oligonucleotide; TTC chr11 5298044 5298065 5298049 5298044 -
acattttaagtgccaggtcttt

SEQ ID NO: 131281 - DNA, 22 bp, Artificial Sequence
  Synthetic oligonucleotide; TTT chr11 5298038 5298059 5298043 5298038 -
taagtgccaggtctttctatct

SEQ ID NO: 131282 - DNA, 22 bp, Artificial Sequence
  Synthetic oligonucleotide; TTT chr11 5298037 5298058 5298042 5298037 -
aagtgccaggtctttctatctt

SEQ ID NO: 131283 - DNA, 22 bp, Artificial Sequence
  Synthetic oligonucleotide; TTA chr11 5298036 5298057 5298041 5298036 -
agtgccaggtctttctatcttt

SEQ ID NO: 131284 - DNA, 22 bp, Artificial Sequence
  Synthetic oligonucleotide; CTT chr11 5298023 5298044 5298028 5298023 -
tctatctttctagctgtcttat

SEQ ID NO: 131285 - DNA, 22 bp, Artificial Sequence
  Synthetic oligonucleotide; TTT chr11 5298022 5298043 5298027 5298022 -
ctatctttctagctgtcttatt

SEQ ID NO: 131286 - DNA, 22 bp, Artificial Sequence
  Synthetic oligonucleotide; TTC chr11 5298021 5298042 5298026 5298021 -
tatctttctagctgtcttattc

SEQ ID NO: 131287 - DNA, 22 bp, Artificial Sequence
  Synthetic oligonucleotide; CTA chr11 5298019 5298040 5298024 5298019 -
tctttctagctgtcttattcat

SEQ ID NO: 131288 - DNA, 22 bp, Artificial Sequence
  Synthetic oligonucleotide; CTT chr11 5298015 5298036 5298020 5298015 -
tctagctgtcttattcatgcac

SEQ ID NO: 131289 - DNA, 22 bp, Artificial Sequence
  Synthetic oligonucleotide; TTT chr11 5298014 5298035 5298019 5298014 -
ctagctgtcttattcatgcact

SEQ ID NO: 131290 - DNA, 22 bp, Artificial Sequence
  Synthetic oligonucleotide; TTC chr11 5298013 5298034 5298018 5298013 -
tagctgtcttattcatgcactt

SEQ ID NO: 131291 - DNA, 22 bp, Artificial Sequence
  Synthetic oligonucleotide; CTA chr11 5298011 5298032 5298016 5298011 -
gctgtcttattcatgcactttc

SEQ ID NO: 131292 - DNA, 22 bp, Artificial Sequence
  Synthetic oligonucleotide; CTG chr11 5298007 5298028 5298012 5298007 -
tcttattcatgcactttctaga

SEQ ID NO: 131293 - DNA, 22 bp, Artificial Sequence
  Synthetic oligonucleotide; CTT chr11 5298003 5298024 5298008 5298003 -
attcatgcactttctagaaatc

SEQ ID NO: 131294 - DNA, 22 bp, Artificial Sequence
  Synthetic oligonucleotide; TTA chr11 5298002 5298023 5298007 5298002 -
ttcatgcactttctagaaatca

SEQ ID NO: 131295 - DNA, 22 bp, Artificial Sequence
  Synthetic oligonucleotide; TTC chr11 5297999 5298020 5298004 5297999 -
atgcactttctagaaatcactt

SEQ ID NO: 131296 - DNA, 22 bp, Artificial Sequence
  Synthetic oligonucleotide; CTT chr11 5297991 5298012 5297996 5297991 -
tctagaaatcacttgtatatta

SEQ ID NO: 131297 - DNA, 22 bp, Artificial Sequence
  Synthetic oligonucleotide; TTT chr11 5297990 5298011 5297995 5297990 -
ctagaaatcacttgtatattaa

SEQ ID NO: 131298 - DNA, 22 bp, Artificial Sequence
  Synthetic oligonucleotide; TTC chr11 5297989 5298010 5297994 5297989 -
tagaaatcacttgtatattaac

SEQ ID NO: 131299 - DNA, 22 bp, Artificial Sequence
  Synthetic oligonucleotide; CTA chr11 5297987 5298008 5297992 5297987 -
gaaatcacttgtatattaacat

SEQ ID NO: 131300 - DNA, 22 bp, Artificial Sequence
  Synthetic oligonucleotide; CTT chr11 5297977 5297998 5297982 5297977 -
gtatattaacatgcctatatta

SEQ ID NO: 131301 - DNA, 22 bp, Artificial Sequence
  Synthetic oligonucleotide; TTG chr11 5297976 5297997 5297981 5297976 -
tatattaacatgcctatattat

SEQ ID NO: 131302 - DNA, 22 bp, Artificial Sequence
  Synthetic oligonucleotide; TTA chr11 5297969 5297990 5297974 5297969 -
acatgcctatattatatttaca

SEQ ID NO: 131303 - DNA, 22 bp, Artificial Sequence
  Synthetic oligonucleotide; CTA chr11 5297960 5297981 5297965 5297960 -
tattatatttacattcccttca

SEQ ID NO: 131304 - DNA, 22 bp, Artificial Sequence
  Synthetic oligonucleotide; TTA chr11 5297955 5297976 5297960 5297955 -
tatttacattcccttcatttct

SEQ ID NO: 131305 - DNA, 22 bp, Artificial Sequence
  Synthetic oligonucleotide; TTT chr11 5297950 5297971 5297955 5297950 -
acattcccttcatttctttatt

SEQ ID NO: 131306 - DNA, 22 bp, Artificial Sequence
  Synthetic oligonucleotide; TTA chr11 5297949 5297970 5297954 5297949 -
cattcccttcatttctttattc

SEQ ID NO: 131307 - DNA, 22 bp, Artificial Sequence
  Synthetic oligonucleotide; TTC chr11 5297944 5297965 5297949 5297944 -
ccttcatttctttattctctgt

SEQ ID NO: 131308 - DNA, 22 bp, Artificial Sequence
  Synthetic oligonucleotide; CTT chr11 5297940 5297961 5297945 5297940 -
catttctttattctctgtttgt

SEQ ID NO: 131309 - DNA, 22 bp, Artificial Sequence
  Synthetic oligonucleotide; TTC chr11 5297939 5297960 5297944 5297939 -
atttctttattctctgtttgtc

SEQ ID NO: 131310 - DNA, 22 bp, Artificial Sequence
  Synthetic oligonucleotide; TTT chr11 5297935 5297956 5297940 5297935 -
ctttattctctgtttgtctcat

SEQ ID NO: 131311 - DNA, 22 bp, Artificial Sequence
  Synthetic oligonucleotide; TTC chr11 5297934 5297955 5297939 5297934 -
tttattctctgtttgtctcatg

SEQ ID NO: 131312 - DNA, 22 bp, Artificial Sequence
  Synthetic oligonucleotide; CTT chr11 5297932 5297953 5297937 5297932 -
tattctctgtttgtctcatgaa

SEQ ID NO: 131313 - DNA, 22 bp, Artificial Sequence
  Synthetic oligonucleotide; TTT chr11 5297931 5297952 5297936 5297931 -
attctctgtttgtctcatgaat

SEQ ID NO: 131314 - DNA, 22 bp, Artificial Sequence
  Synthetic oligonucleotide; TTA chr11 5297930 5297951 5297935 5297930 -
ttctctgtttgtctcatgaata

SEQ ID NO: 131315 - DNA, 22 bp, Artificial Sequence
  Synthetic oligonucleotide; TTC chr11 5297927 5297948 5297932 5297927 -
tctgtttgtctcatgaatattc

SEQ ID NO: 131316 - DNA, 22 bp, Artificial Sequence
  Synthetic oligonucleotide; CTC chr11 5297925 5297946 5297930 5297925 -
tgtttgtctcatgaatattccc

SEQ ID NO: 131317 - DNA, 22 bp, Artificial Sequence
  Synthetic oligonucleotide; CTG chr11 5297923 5297944 5297928 5297923 -
tttgtctcatgaatattccctc

SEQ ID NO: 131318 - DNA, 22 bp, Artificial Sequence
  Synthetic oligonucleotide; TTT chr11 5297920 5297941 5297925 5297920 -
gtctcatgaatattccctcagg

SEQ ID NO: 131319 - DNA, 22 bp, Artificial Sequence
  Synthetic oligonucleotide; TTG chr11 5297919 5297940 5297924 5297919 -
tctcatgaatattccctcagga

SEQ ID NO: 131320 - DNA, 22 bp, Artificial Sequence
  Synthetic oligonucleotide; CTC chr11 5297915 5297936 5297920 5297915 -
atgaatattccctcaggaaaca

SEQ ID NO: 131321 - DNA, 22 bp, Artificial Sequence
  Synthetic oligonucleotide; TTC chr11 5297905 5297926 5297910 5297905 -
cctcaggaaacaccctcccacg

SEQ ID NO: 131322 - DNA, 22 bp, Artificial Sequence
  Synthetic oligonucleotide; CTC chr11 5297901 5297922 5297906 5297901 -
aggaaacaccctcccacgccgt

SEQ ID NO: 131323 - DNA, 22 bp, Artificial Sequence
  Synthetic oligonucleotide; CTC chr11 5297888 5297909 5297893 5297888 -
ccacgccgttccctttatctag

SEQ ID NO: 131324 - DNA, 22 bp, Artificial Sequence
  Synthetic oligonucleotide; TTC chr11 5297877 5297898 5297882 5297877 -
cctttatctagcttcttattca

SEQ ID NO: 131325 - DNA, 22 bp, Artificial Sequence
  Synthetic oligonucleotide; CTT chr11 5297873 5297894 5297878 5297873 -
tatctagcttcttattcattcc

SEQ ID NO: 131326 - DNA, 22 bp, Artificial Sequence
  Synthetic oligonucleotide; TTT chr11 5297872 5297893 5297877 5297872 -
atctagcttcttattcattcct

SEQ ID NO: 131327 - DNA, 22 bp, Artificial Sequence
  Synthetic oligonucleotide; TTA chr11 5297871 5297892 5297876 5297871 -
tctagcttcttattcattcctc

SEQ ID NO: 131328 - DNA, 22 bp, Artificial Sequence
  Synthetic oligonucleotide; CTA chr11 5297867 5297888 5297872 5297867 -
gcttcttattcattcctcttgc

SEQ ID NO: 131329 - DNA, 22 bp, Artificial Sequence
  Synthetic oligonucleotide; CTT chr11 5297863 5297884 5297868 5297863 -
cttattcattcctcttgctgta

SEQ ID NO: 131330 - DNA, 22 bp, Artificial Sequence
  Synthetic oligonucleotide; TTC chr11 5297862 5297883 5297867 5297862 -
ttattcattcctcttgctgtac

SEQ ID NO: 131331 - DNA, 22 bp, Artificial Sequence
  Synthetic oligonucleotide; CTT chr11 5297860 5297881 5297865 5297860 -
attcattcctcttgctgtactg

SEQ ID NO: 131332 - DNA, 22 bp, Artificial Sequence
  Synthetic oligonucleotide; TTA chr11 5297859 5297880 5297864 5297859 -
ttcattcctcttgctgtactga

SEQ ID NO: 131333 - DNA, 22 bp, Artificial Sequence
  Synthetic oligonucleotide; TTC chr11 5297856 5297877 5297861 5297856 -
attcctcttgctgtactgatta

SEQ ID NO: 131334 - DNA, 22 bp, Artificial Sequence
  Synthetic oligonucleotide; TTC chr11 5297852 5297873 5297857 5297852 -
ctcttgctgtactgattagcct

SEQ ID NO: 131335 - DNA, 22 bp, Artificial Sequence
  Synthetic oligonucleotide; CTC chr11 5297849 5297870 5297854 5297849 -
ttgctgtactgattagccttga

SEQ ID NO: 131336 - DNA, 22 bp, Artificial Sequence
  Synthetic oligonucleotide; CTT chr11 5297847 5297868 5297852 5297847 -
gctgtactgattagccttgact

SEQ ID NO: 131337 - DNA, 22 bp, Artificial Sequence
  Synthetic oligonucleotide; TTG chr11 5297846 5297867 5297851 5297846 -
ctgtactgattagccttgactc

SEQ ID NO: 131338 - DNA, 22 bp, Artificial Sequence
  Synthetic oligonucleotide; CTG chr11 5297843 5297864 5297848 5297843 -
tactgattagccttgactcctc

SEQ ID NO: 131339 - DNA, 22 bp, Artificial Sequence
  Synthetic oligonucleotide; CTG chr11 5297838 5297859 5297843 5297838 -
attagccttgactcctcttata

SEQ ID NO: 131340 - DNA, 22 bp, Artificial Sequence
  Synthetic oligonucleotide; TTA chr11 5297834 5297855 5297839 5297834 -
gccttgactcctcttatagctc

SEQ ID NO: 131341 - DNA, 22 bp, Artificial Sequence
  Synthetic oligonucleotide; CTT chr11 5297829 5297850 5297834 5297829 -
gactcctcttatagctcacccc

SEQ ID NO: 131342 - DNA, 22 bp, Artificial Sequence
  Synthetic oligonucleotide; TTG chr11 5297828 5297849 5297833 5297828 -
actcctcttatagctcacccca

SEQ ID NO: 131343 - DNA, 22 bp, Artificial Sequence
  Synthetic oligonucleotide; CTC chr11 5297824 5297845 5297829 5297824 -
ctcttatagctcaccccagcct

SEQ ID NO: 131344 - DNA, 22 bp, Artificial Sequence
  Synthetic oligonucleotide; CTC chr11 5297821 5297842 5297826 5297821 -
ttatagctcaccccagcctctt

SEQ ID NO: 131345 - DNA, 22 bp, Artificial Sequence
  Synthetic oligonucleotide; CTT chr11 5297819 5297840 5297824 5297819 -
atagctcaccccagcctcttgg

SEQ ID NO: 131346 - DNA, 22 bp, Artificial Sequence
  Synthetic oligonucleotide; TTA chr11 5297818 5297839 5297823 5297818 -
tagctcaccccagcctcttggc

SEQ ID NO: 131347 - DNA, 22 bp, Artificial Sequence
  Synthetic oligonucleotide; CTC chr11 5297812 5297833 5297817 5297812 -
accccagcctcttggcattatt

SEQ ID NO: 131348 - DNA, 22 bp, Artificial Sequence
  Synthetic oligonucleotide; CTC chr11 5297801 5297822 5297806 5297801 -
ttggcattattatcaagtgtta

SEQ ID NO: 131349 - DNA, 22 bp, Artificial Sequence
  Synthetic oligonucleotide; CTT chr11 5297799 5297820 5297804 5297799 -
ggcattattatcaagtgttacc

SEQ ID NO: 131350 - DNA, 22 bp, Artificial Sequence
  Synthetic oligonucleotide; TTG chr11 5297798 5297819 5297803 5297798 -
gcattattatcaagtgttacca

SEQ ID NO: 131351 - DNA, 22 bp, Artificial Sequence
  Synthetic oligonucleotide; TTA chr11 5297792 5297813 5297797 5297792 -
ttatcaagtgttaccacagttg

SEQ ID NO: 131352 - DNA, 22 bp, Artificial Sequence
  Synthetic oligonucleotide; TTA chr11 5297789 5297810 5297794 5297789 -
tcaagtgttaccacagttgaac

SEQ ID NO: 131353 - DNA, 22 bp, Artificial Sequence
  Synthetic oligonucleotide; TTA chr11 5297779 5297800 5297784 5297779 -
ccacagttgaacagctggatcc

SEQ ID NO: 131354 - DNA, 22 bp, Artificial Sequence
  Synthetic oligonucleotide; TTG chr11 5297770 5297791 5297775 5297770 -
aacagctggatccaaaagtatt

SEQ ID NO: 131355 - DNA, 22 bp, Artificial Sequence
  Synthetic oligonucleotide; CTG chr11 5297762 5297783 5297767 5297762 -
gatccaaaagtattgaccaata

SEQ ID NO: 131356 - DNA, 22 bp, Artificial Sequence
  Synthetic oligonucleotide; TTG chr11 5297747 5297768 5297752 5297747 -
accaataaggaacagaaaataa

SEQ ID NO: 131357 - DNA, 22 bp, Artificial Sequence
  Synthetic oligonucleotide; CTT chr11 5297720 5297741 5297725 5297720 -
gcaatgtaaattataatatgga

SEQ ID NO: 131358 - DNA, 22 bp, Artificial Sequence
  Synthetic oligonucleotide; TTG chr11 5297719 5297740 5297724 5297719 -
caatgtaaattataatatggat

SEQ ID NO: 131359 - DNA, 22 bp, Artificial Sequence
  Synthetic oligonucleotide; TTA chr11 5297707 5297728 5297712 5297707 -
taatatggataagcattggtac

SEQ ID NO: 131360 - DNA, 22 bp, Artificial Sequence
  Synthetic oligonucleotide; TTG chr11 5297689 5297710 5297694 5297689 -
gtactaaacctgaagttagtat

SEQ ID NO: 131361 - DNA, 22 bp, Artificial Sequence
  Synthetic oligonucleotide; CTA chr11 5297683 5297704 5297688 5297683 -
aacctgaagttagtattttact

SEQ ID NO: 131362 - DNA, 22 bp, Artificial Sequence
  Synthetic oligonucleotide; CTG chr11 5297677 5297698 5297682 5297677 -
aagttagtattttactctatac

SEQ ID NO: 131363 - DNA, 22 bp, Artificial Sequence
  Synthetic oligonucleotide; TTA chr11 5297671 5297692 5297676 5297671 -
gtattttactctatacctacaa

SEQ ID NO: 131364 - DNA, 22 bp, Artificial Sequence
  Synthetic oligonucleotide; TTT chr11 5297665 5297686 5297670 5297665 -
tactctatacctacaaggaaga

SEQ ID NO: 131365 - DNA, 22 bp, Artificial Sequence
  Synthetic oligonucleotide; TTT chr11 5297664 5297685 5297669 5297664 -
actctatacctacaaggaagat

SEQ ID NO: 131366 - DNA, 22 bp, Artificial Sequence
  Synthetic oligonucleotide; TTA chr11 5297663 5297684 5297668 5297663 -
ctctatacctacaaggaagata

SEQ ID NO: 131367 - DNA, 22 bp, Artificial Sequence
  Synthetic oligonucleotide; CTC chr11 5297660 5297681 5297665 5297660 -
tatacctacaaggaagatatac

SEQ ID NO: 131368 - DNA, 22 bp, Artificial Sequence
  Synthetic oligonucleotide; CTA chr11 5297658 5297679 5297663 5297658 -
tacctacaaggaagatatacaa

SEQ ID NO: 131369 - DNA, 22 bp, Artificial Sequence
  Synthetic oligonucleotide; CTA chr11 5297652 5297673 5297657 5297652 -
caaggaagatatacaagtattt

SEQ ID NO: 131370 - DNA, 22 bp, Artificial Sequence
  Synthetic oligonucleotide; TTT chr11 5297630 5297651 5297635 5297630 -
ctctaaggtagtttgaaaagcc

SEQ ID NO: 131371 - DNA, 22 bp, Artificial Sequence
  Synthetic oligonucleotide; TTC chr11 5297629 5297650 5297634 5297629 -
tctaaggtagtttgaaaagcct

SEQ ID NO: 131372 - DNA, 22 bp, Artificial Sequence
  Synthetic oligonucleotide; CTC chr11 5297627 5297648 5297632 5297627 -
taaggtagtttgaaaagcctag

SEQ ID NO: 131373 - DNA, 22 bp, Artificial Sequence
  Synthetic oligonucleotide; CTA chr11 5297625 5297646 5297630 5297625 -
aggtagtttgaaaagcctagat

SEQ ID NO: 131374 - DNA, 22 bp, Artificial Sequence
  Synthetic oligonucleotide; TTT chr11 5297616 5297637 5297621 5297616 -
gaaaagcctagatatagaaact

SEQ ID NO: 131375 - DNA, 22 bp, Artificial Sequence
  Synthetic oligonucleotide; TTG chr11 5297615 5297636 5297620 5297615 -
aaaagcctagatatagaaactg

SEQ ID NO: 131376 - DNA, 22 bp, Artificial Sequence
  Synthetic oligonucleotide; CTA chr11 5297606 5297627 5297611 5297606 -
gatatagaaactggatcctcac

SEQ ID NO: 131377 - DNA, 22 bp, Artificial Sequence
  Synthetic oligonucleotide; CTG chr11 5297593 5297614 5297598 5297593 -
gatcctcacatgagttcagtat

SEQ ID NO: 131378 - DNA, 22 bp, Artificial Sequence
  Synthetic oligonucleotide; CTC chr11 5297586 5297607 5297591 5297586 -
acatgagttcagtatataattg

SEQ ID NO: 131379 - DNA, 22 bp, Artificial Sequence
  Synthetic oligonucleotide; TTC chr11 5297576 5297597 5297581 5297576 -
agtatataattgtaacagaata

SEQ ID NO: 131380 - DNA, 22 bp, Artificial Sequence
  Synthetic oligonucleotide; TTG chr11 5297564 5297585 5297569 5297564 -
taacagaataaaaaatcaatta

SEQ ID NO: 131381 - DNA, 22 bp, Artificial Sequence
  Synthetic oligonucleotide; TTA chr11 5297542 5297563 5297547 5297542 -
tgtattcaagttgctagtgtct

SEQ ID NO: 131382 - DNA, 22 bp, Artificial Sequence
  Synthetic oligonucleotide; TTC chr11 5297535 5297556 5297540 5297535 -
aagttgctagtgtcttaagagg

SEQ ID NO: 131383 - DNA, 22 bp, Artificial Sequence
  Synthetic oligonucleotide; TTG chr11 5297529 5297550 5297534 5297529 -
ctagtgtcttaagaggttcaca

SEQ ID NO: 131384 - DNA, 22 bp, Artificial Sequence
  Synthetic oligonucleotide; CTA chr11 5297526 5297547 5297531 5297526 -
gtgtcttaagaggttcacattt

SEQ ID NO: 131385 - DNA, 22 bp, Artificial Sequence
  Synthetic oligonucleotide; CTT chr11 5297519 5297540 5297524 5297519 -
aagaggttcacatttttatcta

SEQ ID NO: 131386 - DNA, 22 bp, Artificial Sequence
  Synthetic oligonucleotide; TTA chr11 5297518 5297539 5297523 5297518 -
agaggttcacatttttatctaa

SEQ ID NO: 131387 - DNA, 22 bp, Artificial Sequence
  Synthetic oligonucleotide; TTC chr11 5297510 5297531 5297515 5297510 -
acatttttatctaactgattat

SEQ ID NO: 131388 - DNA, 22 bp, Artificial Sequence
  Synthetic oligonucleotide; TTT chr11 5297504 5297525 5297509 5297504 -
ttatctaactgattatcacaaa

SEQ ID NO: 131389 - DNA, 22 bp, Artificial Sequence
  Synthetic oligonucleotide; TTT chr11 5297503 5297524 5297508 5297503 -
tatctaactgattatcacaaaa

SEQ ID NO: 131390 - DNA, 22 bp, Artificial Sequence
  Synthetic oligonucleotide; TTT chr11 5297502 5297523 5297507 5297502 -
atctaactgattatcacaaaaa

SEQ ID NO: 131391 - DNA, 22 bp, Artificial Sequence
  Synthetic oligonucleotide; TTA chr11 5297501 5297522 5297506 5297501 -
tctaactgattatcacaaaaat

SEQ ID NO: 131392 - DNA, 22 bp, Artificial Sequence
  Synthetic oligonucleotide; CTA chr11 5297497 5297518 5297502 5297497 -
actgattatcacaaaaatactt

SEQ ID NO: 131393 - DNA, 22 bp, Artificial Sequence
  Synthetic oligonucleotide; CTG chr11 5297493 5297514 5297498 5297493 -
attatcacaaaaatacttcgag

SEQ ID NO: 131394 - DNA, 22 bp, Artificial Sequence
  Synthetic oligonucleotide; TTA chr11 5297489 5297510 5297494 5297489 -
tcacaaaaatacttcgagttac

SEQ ID NO: 131395 - DNA, 22 bp, Artificial Sequence
  Synthetic oligonucleotide; CTT chr11 5297475 5297496 5297480 5297475 -
cgagttacttttcattataatt

SEQ ID NO: 131396 - DNA, 22 bp, Artificial Sequence
  Synthetic oligonucleotide; TTC chr11 5297474 5297495 5297479 5297474 -
gagttacttttcattataattc

SEQ ID NO: 131397 - DNA, 22 bp, Artificial Sequence
  Synthetic oligonucleotide; TTA chr11 5297468 5297489 5297473 5297468 -
cttttcattataattcctgact

SEQ ID NO: 131398 - DNA, 22 bp, Artificial Sequence
  Synthetic oligonucleotide; CTT chr11 5297465 5297486 5297470 5297465 -
ttcattataattcctgactaca

SEQ ID NO: 131399 - DNA, 22 bp, Artificial Sequence
  Synthetic oligonucleotide; TTT chr11 5297464 5297485 5297469 5297464 -
tcattataattcctgactacac

SEQ ID NO: 131400 - DNA, 22 bp, Artificial Sequence
  Synthetic oligonucleotide; TTT chr11 5297463 5297484 5297468 5297463 -
cattataattcctgactacaca

SEQ ID NO: 131401 - DNA, 22 bp, Artificial Sequence
  Synthetic oligonucleotide; TTC chr11 5297462 5297483 5297467 5297462 -
attataattcctgactacacat

SEQ ID NO: 131402 - DNA, 22 bp, Artificial Sequence
  Synthetic oligonucleotide; TTA chr11 5297458 5297479 5297463 5297458 -
taattcctgactacacatgaag

SEQ ID NO: 131403 - DNA, 22 bp, Artificial Sequence
  Synthetic oligonucleotide; TTC chr11 5297452 5297473 5297457 5297452 -
ctgactacacatgaagagactg

SEQ ID NO: 131404 - DNA, 22 bp, Artificial Sequence
  Synthetic oligonucleotide; CTG chr11 5297449 5297470 5297454 5297449 -
actacacatgaagagactgaca

SEQ ID NO: 131405 - DNA, 22 bp, Artificial Sequence
  Synthetic oligonucleotide; CTA chr11 5297445 5297466 5297450 5297445 -
cacatgaagagactgacacgta

SEQ ID NO: 131406 - DNA, 22 bp, Artificial Sequence
  Synthetic oligonucleotide; CTG chr11 5297430 5297451 5297435 5297430 -
acacgtaggtgccttacttagg

SEQ ID NO: 131407 - DNA, 22 bp, Artificial Sequence
  Synthetic oligonucleotide; CTT chr11 5297415 5297436 5297420 5297415 -
acttaggtaggttaagtaattt

SEQ ID NO: 131408 - DNA, 22 bp, Artificial Sequence
  Synthetic oligonucleotide; TTA chr11 5297414 5297435 5297419 5297414 -
cttaggtaggttaagtaattta

SEQ ID NO: 131409 - DNA, 22 bp, Artificial Sequence
  Synthetic oligonucleotide; CTT chr11 5297411 5297432 5297416 5297411 -
aggtaggttaagtaatttatcc

SEQ ID NO: 131410 - DNA, 22 bp, Artificial Sequence
  Synthetic oligonucleotide; TTA chr11 5297410 5297431 5297415 5297410 -
ggtaggttaagtaatttatcca

SEQ ID NO: 131411 - DNA, 22 bp, Artificial Sequence
  Synthetic oligonucleotide; TTA chr11 5297401 5297422 5297406 5297401 -
agtaatttatccaaaaccacac

SEQ ID NO: 131412 - DNA, 22 bp, Artificial Sequence
  Synthetic oligonucleotide; TTT chr11 5297393 5297414 5297398 5297393 -
atccaaaaccacacaatgtaga

SEQ ID NO: 131413 - DNA, 22 bp, Artificial Sequence
  Synthetic oligonucleotide; TTA chr11 5297392 5297413 5297397 5297392 -
tccaaaaccacacaatgtagaa

SEQ ID NO: 131414 - DNA, 22 bp, Artificial Sequence
  Synthetic oligonucleotide; CTA chr11 5297366 5297387 5297371 5297366 -
agctgattcggccatagaaaca

SEQ ID NO: 131415 - DNA, 22 bp, Artificial Sequence
  Synthetic oligonucleotide; CTG chr11 5297361 5297382 5297366 5297361 -
attcggccatagaaacacaata

SEQ ID NO: 131416 - DNA, 22 bp, Artificial Sequence
  Synthetic oligonucleotide; TTC chr11 5297357 5297378 5297362 5297357 -
ggccatagaaacacaatatgtg

SEQ ID NO: 131417 - DNA, 22 bp, Artificial Sequence
  Synthetic oligonucleotide; TTT chr11 5297312 5297333 5297317 5297312 -
ctctccttcctatgctgtcaga

SEQ ID NO: 131418 - DNA, 22 bp, Artificial Sequence
  Synthetic oligonucleotide; TTC chr11 5297311 5297332 5297316 5297311 -
tctccttcctatgctgtcagat

SEQ ID NO: 131419 - DNA, 22 bp, Artificial Sequence
  Synthetic oligonucleotide; CTC chr11 5297309 5297330 5297314 5297309 -
tccttcctatgctgtcagatga

SEQ ID NO: 131420 - DNA, 22 bp, Artificial Sequence
  Synthetic oligonucleotide; CTC chr11 5297307 5297328 5297312 5297307 -
cttcctatgctgtcagatgaat

SEQ ID NO: 131421 - DNA, 22 bp, Artificial Sequence
  Synthetic oligonucleotide; CTT chr11 5297304 5297325 5297309 5297304 -
cctatgctgtcagatgaatact

SEQ ID NO: 131422 - DNA, 22 bp, Artificial Sequence
  Synthetic oligonucleotide; TTC chr11 5297303 5297324 5297308 5297303 -
ctatgctgtcagatgaatactg

SEQ ID NO: 131423 - DNA, 22 bp, Artificial Sequence
  Synthetic oligonucleotide; CTA chr11 5297300 5297321 5297305 5297300 -
tgctgtcagatgaatactgaga

SEQ ID NO: 131424 - DNA, 22 bp, Artificial Sequence
  Synthetic oligonucleotide; CTG chr11 5297295 5297316 5297300 5297295 -
tcagatgaatactgagatagaa

SEQ ID NO: 131425 - DNA, 22 bp, Artificial Sequence
  Synthetic oligonucleotide; CTG chr11 5297281 5297302 5297286 5297281 -
agatagaatatttagttcatct

SEQ ID NO: 131426 - DNA, 22 bp, Artificial Sequence
  Synthetic oligonucleotide; TTT chr11 5297268 5297289 5297273 5297268 -
agttcatctatcacacattaaa

SEQ ID NO: 131427 - DNA, 22 bp, Artificial Sequence
  Synthetic oligonucleotide; TTA chr11 5297267 5297288 5297272 5297267 -
gttcatctatcacacattaaac

SEQ ID NO: 131428 - DNA, 22 bp, Artificial Sequence
  Synthetic oligonucleotide; TTC chr11 5297263 5297284 5297268 5297263 -
atctatcacacattaaacggga

SEQ ID NO: 131429 - DNA, 22 bp, Artificial Sequence
  Synthetic oligonucleotide; CTA chr11 5297258 5297279 5297263 5297258 -
tcacacattaaacgggacttta

SEQ ID NO: 131430 - DNA, 22 bp, Artificial Sequence
  Synthetic oligonucleotide; TTA chr11 5297248 5297269 5297253 5297248 -
aacgggactttacatttctgtc

SEQ ID NO: 131431 - DNA, 22 bp, Artificial Sequence
  Synthetic oligonucleotide; CTT chr11 5297238 5297259 5297243 5297238 -
tacatttctgtctgttgaagat

SEQ ID NO: 131432 - DNA, 22 bp, Artificial Sequence
  Synthetic oligonucleotide; TTT chr11 5297237 5297258 5297242 5297237 -
acatttctgtctgttgaagatt

SEQ ID NO: 131433 - DNA, 22 bp, Artificial Sequence
  Synthetic oligonucleotide; TTA chr11 5297236 5297257 5297241 5297236 -
catttctgtctgttgaagattt

SEQ ID NO: 131434 - DNA, 22 bp, Artificial Sequence
  Synthetic oligonucleotide; TTT chr11 5297231 5297252 5297236 5297231 -
ctgtctgttgaagatttgggtg

SEQ ID NO: 131435 - DNA, 22 bp, Artificial Sequence
  Synthetic oligonucleotide; TTC chr11 5297230 5297251 5297235 5297230 -
tgtctgttgaagatttgggtgt

SEQ ID NO: 131436 - DNA, 22 bp, Artificial Sequence
  Synthetic oligonucleotide; CTG chr11 5297228 5297249 5297233 5297228 -
tctgttgaagatttgggtgtgg

SEQ ID NO: 131437 - DNA, 22 bp, Artificial Sequence
  Synthetic oligonucleotide; CTG chr11 5297224 5297245 5297229 5297224 -
ttgaagatttgggtgtggggat

SEQ ID NO: 131438 - DNA, 22 bp, Artificial Sequence
  Synthetic oligonucleotide; TTG chr11 5297221 5297242 5297226 5297221 -
aagatttgggtgtggggataac

SEQ ID NO: 131439 - DNA, 22 bp, Artificial Sequence
  Synthetic oligonucleotide; TTT chr11 5297214 5297235 5297219 5297214 -
gggtgtggggataactcaaggt

SEQ ID NO: 131440 - DNA, 22 bp, Artificial Sequence
  Synthetic oligonucleotide; TTG chr11 5297213 5297234 5297218 5297213 -
ggtgtggggataactcaaggta

SEQ ID NO: 131441 - DNA, 22 bp, Artificial Sequence
  Synthetic oligonucleotide; CTC chr11 5297197 5297218 5297202 5297197 -
aaggtatcatatccaagggatg

SEQ ID NO: 131442 - DNA, 22 bp, Artificial Sequence
  Synthetic oligonucleotide; CTC chr11 5297157 5297178 5297162 5297157 -
taacagaaagggaaaggatgtt

SEQ ID NO: 131443 - DNA, 22 bp, Artificial Sequence
  Synthetic oligonucleotide; CTA chr11 5297155 5297176 5297160 5297155 -
acagaaagggaaaggatgttgg

SEQ ID NO: 131444 - DNA, 22 bp, Artificial Sequence
  Synthetic oligonucleotide; TTG chr11 5297134 5297155 5297139 5297134 -
gcaaggctatgttcatgaaagt

SEQ ID NO: 131445 - DNA, 22 bp, Artificial Sequence
  Synthetic oligonucleotide; CTA chr11 5297125 5297146 5297130 5297125 -
tgttcatgaaagtatatgtaaa

SEQ ID NO: 131446 - DNA, 22 bp, Artificial Sequence
  Synthetic oligonucleotide; TTC chr11 5297120 5297141 5297125 5297120 -
atgaaagtatatgtaaaatcca

SEQ ID NO: 131447 - DNA, 22 bp, Artificial Sequence
  Synthetic oligonucleotide; TTA chr11 5297093 5297114 5297098 5297093 -
agcttctttctgcatgcattgg

SEQ ID NO: 131448 - DNA, 22 bp, Artificial Sequence
  Synthetic oligonucleotide; CTT chr11 5297088 5297109 5297093 5297088 -
ctttctgcatgcattggcaatg

SEQ ID NO: 131449 - DNA, 22 bp, Artificial Sequence
  Synthetic oligonucleotide; TTC chr11 5297087 5297108 5297092 5297087 -
tttctgcatgcattggcaatgt

SEQ ID NO: 131450 - DNA, 22 bp, Artificial Sequence
  Synthetic oligonucleotide; CTT chr11 5297085 5297106 5297090 5297085 -
tctgcatgcattggcaatgttt

SEQ ID NO: 131451 - DNA, 22 bp, Artificial Sequence
  Synthetic oligonucleotide; TTT chr11 5297084 5297105 5297089 5297084 -
ctgcatgcattggcaatgttta

SEQ ID NO: 131452 - DNA, 22 bp, Artificial Sequence
  Synthetic oligonucleotide; TTC chr11 5297083 5297104 5297088 5297083 -
tgcatgcattggcaatgtttat

SEQ ID NO: 131453 - DNA, 22 bp, Artificial Sequence
  Synthetic oligonucleotide; CTG chr11 5297081 5297102 5297086 5297081 -
catgcattggcaatgtttatga

SEQ ID NO: 131454 - DNA, 22 bp, Artificial Sequence
  Synthetic oligonucleotide; TTG chr11 5297072 5297093 5297077 5297072 -
gcaatgtttatgaataatgtgt

SEQ ID NO: 131455 - DNA, 22 bp, Artificial Sequence
  Synthetic oligonucleotide; TTT chr11 5297063 5297084 5297068 5297063 -
atgaataatgtgtatgtaaaag

SEQ ID NO: 131456 - DNA, 22 bp, Artificial Sequence
  Synthetic oligonucleotide; TTA chr11 5297062 5297083 5297067 5297062 -
tgaataatgtgtatgtaaaagt

SEQ ID NO: 131457 - DNA, 22 bp, Artificial Sequence
  Synthetic oligonucleotide; CTG chr11 5297034 5297055 5297039 5297034 -
tatattcaaaagtgtttcatgt

SEQ ID NO: 131458 - DNA, 22 bp, Artificial Sequence
  Synthetic oligonucleotide; TTC chr11 5297027 5297048 5297032 5297027 -
aaaagtgtttcatgtgcctagg

SEQ ID NO: 131459 - DNA, 22 bp, Artificial Sequence
  Synthetic oligonucleotide; TTT chr11 5297017 5297038 5297022 5297017 -
catgtgcctaggggtgtcaaat

SEQ ID NO: 131460 - DNA, 22 bp, Artificial Sequence
  Synthetic oligonucleotide; TTC chr11 5297016 5297037 5297021 5297016 -
atgtgcctaggggtgtcaaata

SEQ ID NO: 131461 - DNA, 22 bp, Artificial Sequence
  Synthetic oligonucleotide; CTA chr11 5297007 5297028 5297012 5297007 -
ggggtgtcaaatactttgagtt

SEQ ID NO: 131462 - DNA, 22 bp, Artificial Sequence
  Synthetic oligonucleotide; CTT chr11 5296991 5297012 5296996 5296991 -
tgagtttgtaagtatatacttc

SEQ ID NO: 131463 - DNA, 22 bp, Artificial Sequence
  Synthetic oligonucleotide; TTT chr11 5296990 5297011 5296995 5296990 -
gagtttgtaagtatatacttct

SEQ ID NO: 131464 - DNA, 22 bp, Artificial Sequence
  Synthetic oligonucleotide; TTG chr11 5296989 5297010 5296994 5296989 -
agtttgtaagtatatacttctc

SEQ ID NO: 131465 - DNA, 22 bp, Artificial Sequence
  Synthetic oligonucleotide; TTT chr11 5296984 5297005 5296989 5296984 -
gtaagtatatacttctctgtaa

SEQ ID NO: 131466 - DNA, 22 bp, Artificial Sequence
  Synthetic oligonucleotide; TTG chr11 5296983 5297004 5296988 5296983 -
taagtatatacttctctgtaat

SEQ ID NO: 131467 - DNA, 22 bp, Artificial Sequence
  Synthetic oligonucleotide; CTT chr11 5296970 5296991 5296975 5296970 -
ctctgtaatgtgtctgaatatc

SEQ ID NO: 131468 - DNA, 22 bp, Artificial Sequence
  Synthetic oligonucleotide; TTC chr11 5296969 5296990 5296974 5296969 -
tctgtaatgtgtctgaatatct

SEQ ID NO: 131469 - DNA, 22 bp, Artificial Sequence
  Synthetic oligonucleotide; CTC chr11 5296967 5296988 5296972 5296967 -
tgtaatgtgtctgaatatctct

SEQ ID NO: 131470 - DNA, 22 bp, Artificial Sequence
  Synthetic oligonucleotide; CTG chr11 5296965 5296986 5296970 5296965 -
taatgtgtctgaatatctctat

SEQ ID NO: 131471 - DNA, 22 bp, Artificial Sequence
  Synthetic oligonucleotide; CTG chr11 5296954 5296975 5296959 5296954 -
aatatctctatttacttgattc

SEQ ID NO: 131472 - DNA, 22 bp, Artificial Sequence
  Synthetic oligonucleotide; CTC chr11 5296946 5296967 5296951 5296946 -
tatttacttgattctcaataag

SEQ ID NO: 131473 - DNA, 22 bp, Artificial Sequence
  Synthetic oligonucleotide; CTA chr11 5296944 5296965 5296949 5296944 -
tttacttgattctcaataagta

SEQ ID NO: 131474 - DNA, 22 bp, Artificial Sequence
  Synthetic oligonucleotide; TTT chr11 5296941 5296962 5296946 5296941 -
acttgattctcaataagtaggt

SEQ ID NO: 131475 - DNA, 22 bp, Artificial Sequence
  Synthetic oligonucleotide; TTA chr11 5296940 5296961 5296945 5296940 -
cttgattctcaataagtaggta

SEQ ID NO: 131476 - DNA, 22 bp, Artificial Sequence
  Synthetic oligonucleotide; CTT chr11 5296937 5296958 5296942 5296937 -
gattctcaataagtaggtatca

SEQ ID NO: 131477 - DNA, 22 bp, Artificial Sequence
  Synthetic oligonucleotide; TTG chr11 5296936 5296957 5296941 5296936 -
attctcaataagtaggtatcat

SEQ ID NO: 131478 - DNA, 22 bp, Artificial Sequence
  Synthetic oligonucleotide; TTC chr11 5296932 5296953 5296937 5296932 -
tcaataagtaggtatcatagtg

SEQ ID NO: 131479 - DNA, 22 bp, Artificial Sequence
  Synthetic oligonucleotide; CTC chr11 5296930 5296951 5296935 5296930 -
aataagtaggtatcatagtgaa

SEQ ID NO: 131480 - DNA, 22 bp, Artificial Sequence
  Synthetic oligonucleotide; CTG chr11 5296902 5296923 5296907 5296902 -
acaaatgtttgaggaacaattt

SEQ ID NO: 131481 - DNA, 22 bp, Artificial Sequence
  Synthetic oligonucleotide; TTT chr11 5296892 5296913 5296897 5296892 -
gaggaacaatttagtgtttacc

SEQ ID NO: 131482 - DNA, 22 bp, Artificial Sequence
  Synthetic oligonucleotide; TTG chr11 5296891 5296912 5296896 5296891 -
aggaacaatttagtgtttacct

SEQ ID NO: 131483 - DNA, 22 bp, Artificial Sequence
  Synthetic oligonucleotide; TTT chr11 5296880 5296901 5296885 5296880 -
agtgtttacctattcaccaaaa

SEQ ID NO: 131484 - DNA, 22 bp, Artificial Sequence
  Synthetic oligonucleotide; TTA chr11 5296879 5296900 5296884 5296879 -
gtgtttacctattcaccaaaat

SEQ ID NO: 131485 - DNA, 22 bp, Artificial Sequence
  Synthetic oligonucleotide; TTT chr11 5296873 5296894 5296878 5296873 -
acctattcaccaaaatttatta

SEQ ID NO: 131486 - DNA, 22 bp, Artificial Sequence
  Synthetic oligonucleotide; TTA chr11 5296872 5296893 5296877 5296872 -
cctattcaccaaaatttattaa

SEQ ID NO: 131487 - DNA, 22 bp, Artificial Sequence
  Synthetic oligonucleotide; CTA chr11 5296868 5296889 5296873 5296868 -
ttcaccaaaatttattaaatgc

SEQ ID NO: 131488 - DNA, 22 bp, Artificial Sequence
  Synthetic oligonucleotide; TTC chr11 5296865 5296886 5296870 5296865 -
accaaaatttattaaatgccta

SEQ ID NO: 131489 - DNA, 22 bp, Artificial Sequence
  Synthetic oligonucleotide; TTT chr11 5296855 5296876 5296860 5296855 -
attaaatgcctaatctgtatca

SEQ ID NO: 131490 - DNA, 22 bp, Artificial Sequence
  Synthetic oligonucleotide; TTA chr11 5296854 5296875 5296859 5296854 -
ttaaatgcctaatctgtatcag

SEQ ID NO: 131491 - DNA, 22 bp, Artificial Sequence
  Synthetic oligonucleotide; TTA chr11 5296851 5296872 5296856 5296851 -
aatgcctaatctgtatcagata

SEQ ID NO: 131492 - DNA, 22 bp, Artificial Sequence
  Synthetic oligonucleotide; CTA chr11 5296843 5296864 5296848 5296843 -
atctgtatcagatatacaatta

SEQ ID NO: 131493 - DNA, 22 bp, Artificial Sequence
  Synthetic oligonucleotide; CTG chr11 5296838 5296859 5296843 5296838 -
tatcagatatacaattatctgg

SEQ ID NO: 131494 - DNA, 22 bp, Artificial Sequence
  Synthetic oligonucleotide; TTA chr11 5296821 5296842 5296826 5296821 -
tctggcgaaatctgtaattcct

SEQ ID NO: 131495 - DNA, 22 bp, Artificial Sequence
  Synthetic oligonucleotide; CTG chr11 5296817 5296838 5296822 5296817 -
gcgaaatctgtaattcctaatt

SEQ ID NO: 131496 - DNA, 22 bp, Artificial Sequence
  Synthetic oligonucleotide; CTG chr11 5296807 5296828 5296812 5296807 -
taattcctaatttaaacagctg

SEQ ID NO: 131497 - DNA, 22 bp, Artificial Sequence
  Synthetic oligonucleotide; TTC chr11 5296801 5296822 5296806 5296801 -
ctaatttaaacagctgtgtagc

SEQ ID NO: 131498 - DNA, 22 bp, Artificial Sequence
  Synthetic oligonucleotide; CTA chr11 5296798 5296819 5296803 5296798 -
atttaaacagctgtgtagccta

SEQ ID NO: 131499 - DNA, 22 bp, Artificial Sequence
  Synthetic oligonucleotide; TTT chr11 5296794 5296815 5296799 5296794 -
aaacagctgtgtagcctaatta

SEQ ID NO: 131500 - DNA, 22 bp, Artificial Sequence
  Synthetic oligonucleotide; TTA chr11 5296793 5296814 5296798 5296793 -
aacagctgtgtagcctaattag

SEQ ID NO: 131501 - DNA, 22 bp, Artificial Sequence
  Synthetic oligonucleotide; CTG chr11 5296785 5296806 5296790 5296785 -
tgtagcctaattagggataaag

SEQ ID NO: 131502 - DNA, 22 bp, Artificial Sequence
  Synthetic oligonucleotide; CTA chr11 5296776 5296797 5296781 5296776 -
attagggataaaggcatgcaaa

SEQ ID NO: 131503 - DNA, 22 bp, Artificial Sequence
  Synthetic oligonucleotide; TTA chr11 5296772 5296793 5296777 5296772 -
gggataaaggcatgcaaaccca

SEQ ID NO: 131504 - DNA, 22 bp, Artificial Sequence
  Synthetic oligonucleotide; TTT chr11 5296744 5296765 5296749 5296744 -
gtgtaggttgaaatgagctata

SEQ ID NO: 131505 - DNA, 22 bp, Artificial Sequence
  Synthetic oligonucleotide; TTG chr11 5296743 5296764 5296748 5296743 -
tgtaggttgaaatgagctatag

SEQ ID NO: 131506 - DNA, 22 bp, Artificial Sequence
  Synthetic oligonucleotide; TTG chr11 5296734 5296755 5296739 5296734 -
aaatgagctatagaaaaatgca

SEQ ID NO: 131507 - DNA, 22 bp, Artificial Sequence
  Synthetic oligonucleotide; CTA chr11 5296724 5296745 5296729 5296724 -
tagaaaaatgcagtatatttat

SEQ ID NO: 131508 - DNA, 22 bp, Artificial Sequence
  Synthetic oligonucleotide; TTT chr11 5296704 5296725 5296709 5296704 -
atcagaagtctttagggtcatg

SEQ ID NO: 131509 - DNA, 22 bp, Artificial Sequence
  Synthetic oligonucleotide; TTA chr11 5296703 5296724 5296708 5296703 -
tcagaagtctttagggtcatga

SEQ ID NO: 131510 - DNA, 22 bp, Artificial Sequence
  Synthetic oligonucleotide; CTT chr11 5296692 5296713 5296697 5296692 -
tagggtcatgaaaaggaatggt

SEQ ID NO: 131511 - DNA, 22 bp, Artificial Sequence
  Synthetic oligonucleotide; TTT chr11 5296691 5296712 5296696 5296691 -
agggtcatgaaaaggaatggtc

SEQ ID NO: 131512 - DNA, 22 bp, Artificial Sequence
  Synthetic oligonucleotide; TTA chr11 5296690 5296711 5296695 5296690 -
gggtcatgaaaaggaatggtca

SEQ ID NO: 131513 - DNA, 22 bp, Artificial Sequence
  Synthetic oligonucleotide; CTG chr11 5296664 5296685 5296669 5296664 -
acactgccagggactcatatgt

SEQ ID NO: 131514 - DNA, 22 bp, Artificial Sequence
  Synthetic oligonucleotide; CTG chr11 5296658 5296679 5296663 5296658 -
ccagggactcatatgtaagaga

SEQ ID NO: 131515 - DNA, 22 bp, Artificial Sequence
  Synthetic oligonucleotide; CTC chr11 5296648 5296669 5296653 5296648 -
atatgtaagagataactaatgt

SEQ ID NO: 131516 - DNA, 22 bp, Artificial Sequence
  Synthetic oligonucleotide; CTA chr11 5296630 5296651 5296635 5296630 -
atgtgaagtgactttaaaggag

SEQ ID NO: 131517 - DNA, 22 bp, Artificial Sequence
  Synthetic oligonucleotide; CTT chr11 5296616 5296637 5296621 5296616 -
taaaggagaaattagcagaagt

SEQ ID NO: 131518 - DNA, 22 bp, Artificial Sequence
  Synthetic oligonucleotide; TTT chr11 5296615 5296636 5296620 5296615 -
aaaggagaaattagcagaagtt

SEQ ID NO: 131519 - DNA, 22 bp, Artificial Sequence
  Synthetic oligonucleotide; TTA chr11 5296614 5296635 5296619 5296614 -
aaggagaaattagcagaagttt

SEQ ID NO: 131520 - DNA, 22 bp, Artificial Sequence
  Synthetic oligonucleotide; TTA chr11 5296602 5296623 5296607 5296602 -
gcagaagttttctttccatgtc

SEQ ID NO: 131521 - DNA, 22 bp, Artificial Sequence
  Synthetic oligonucleotide; TTT chr11 5296592 5296613 5296597 5296592 -
tctttccatgtctcctcatcat

SEQ ID NO: 131522 - DNA, 22 bp, Artificial Sequence
  Synthetic oligonucleotide; TTT chr11 5296591 5296612 5296596 5296591 -
ctttccatgtctcctcatcatg

SEQ ID NO: 131523 - DNA, 22 bp, Artificial Sequence
  Synthetic oligonucleotide; TTC chr11 5296590 5296611 5296595 5296590 -
tttccatgtctcctcatcatgt

SEQ ID NO: 131524 - DNA, 22 bp, Artificial Sequence
  Synthetic oligonucleotide; CTT chr11 5296588 5296609 5296593 5296588 -
tccatgtctcctcatcatgtta

SEQ ID NO: 131525 - DNA, 22 bp, Artificial Sequence
  Synthetic oligonucleotide; TTT chr11 5296587 5296608 5296592 5296587 -
ccatgtctcctcatcatgttac

SEQ ID NO: 131526 - DNA, 22 bp, Artificial Sequence
  Synthetic oligonucleotide; TTC chr11 5296586 5296607 5296591 5296586 -
catgtctcctcatcatgttaca

SEQ ID NO: 131527 - DNA, 22 bp, Artificial Sequence
  Synthetic oligonucleotide; CTC chr11 5296578 5296599 5296583 5296578 -
ctcatcatgttacaataacgga

SEQ ID NO: 131528 - DNA, 22 bp, Artificial Sequence
  Synthetic oligonucleotide; CTC chr11 5296575 5296596 5296580 5296575 -
atcatgttacaataacggaaga

SEQ ID NO: 131529 - DNA, 22 bp, Artificial Sequence
  Synthetic oligonucleotide; TTA chr11 5296566 5296587 5296571 5296566 -
caataacggaagagattaaaac

SEQ ID NO: 131530 - DNA, 22 bp, Artificial Sequence
  Synthetic oligonucleotide; TTA chr11 5296548 5296569 5296553 5296548 -
aaacaacaaatacatttagaca

SEQ ID NO: 131531 - DNA, 22 bp, Artificial Sequence
  Synthetic oligonucleotide; TTT chr11 5296531 5296552 5296536 5296531 -
agacagcaatgtttatcctggt

SEQ ID NO: 131532 - DNA, 22 bp, Artificial Sequence
  Synthetic oligonucleotide; TTA chr11 5296530 5296551 5296535 5296530 -
gacagcaatgtttatcctggtt

SEQ ID NO: 131533 - DNA, 22 bp, Artificial Sequence
  Synthetic oligonucleotide; TTT chr11 5296517 5296538 5296522 5296517 -
atcctggttagatgttttaatc

SEQ ID NO: 131534 - DNA, 22 bp, Artificial Sequence
  Synthetic oligonucleotide; TTA chr11 5296516 5296537 5296521 5296516 -
tcctggttagatgttttaatct

SEQ ID NO: 131535 - DNA, 22 bp, Artificial Sequence
  Synthetic oligonucleotide; CTG chr11 5296511 5296532 5296516 5296511 -
gttagatgttttaatctaaatc

SEQ ID NO: 131536 - DNA, 22 bp, Artificial Sequence
  Synthetic oligonucleotide; TTA chr11 5296507 5296528 5296512 5296507 -
gatgttttaatctaaatctatc

SEQ ID NO: 131537 - DNA, 22 bp, Artificial Sequence
  Synthetic oligonucleotide; TTT chr11 5296500 5296521 5296505 5296500 -
taatctaaatctatcttggagt

SEQ ID NO: 131538 - DNA, 22 bp, Artificial Sequence
  Synthetic oligonucleotide; TTT chr11 5296499 5296520 5296504 5296499 -
aatctaaatctatcttggagtg

SEQ ID NO: 131539 - DNA, 22 bp, Artificial Sequence
  Synthetic oligonucleotide; TTA chr11 5296498 5296519 5296503 5296498 -
atctaaatctatcttggagtgt

SEQ ID NO: 131540 - DNA, 22 bp, Artificial Sequence
  Synthetic oligonucleotide; CTA chr11 5296493 5296514 5296498 5296493 -
aatctatcttggagtgttaaaa

SEQ ID NO: 131541 - DNA, 22 bp, Artificial Sequence
  Synthetic oligonucleotide; CTA chr11 5296487 5296508 5296492 5296487 -
tcttggagtgttaaaatgcatt

SEQ ID NO: 131542 - DNA, 22 bp, Artificial Sequence
  Synthetic oligonucleotide; CTT chr11 5296483 5296504 5296488 5296483 -
ggagtgttaaaatgcatttgct

SEQ ID NO: 131543 - DNA, 22 bp, Artificial Sequence
  Synthetic oligonucleotide; TTG chr11 5296482 5296503 5296487 5296482 -
gagtgttaaaatgcatttgctc

SEQ ID NO: 131544 - DNA, 22 bp, Artificial Sequence
  Synthetic oligonucleotide; TTA chr11 5296474 5296495 5296479 5296474 -
aaatgcatttgctcacctactt

SEQ ID NO: 131545 - DNA, 22 bp, Artificial Sequence
  Synthetic oligonucleotide; TTT chr11 5296464 5296485 5296469 5296464 -
gctcacctactttaaaatataa

SEQ ID NO: 131546 - DNA, 22 bp, Artificial Sequence
  Synthetic oligonucleotide; TTG chr11 5296463 5296484 5296468 5296463 -
ctcacctactttaaaatataaa

SEQ ID NO: 131547 - DNA, 22 bp, Artificial Sequence
  Synthetic oligonucleotide; CTC chr11 5296460 5296481 5296465 5296460 -
acctactttaaaatataaatga

SEQ ID NO: 131548 - DNA, 22 bp, Artificial Sequence
  Synthetic oligonucleotide; CTA chr11 5296455 5296476 5296460 5296455 -
ctttaaaatataaatgaaggta

SEQ ID NO: 131549 - DNA, 22 bp, Artificial Sequence
  Synthetic oligonucleotide; CTT chr11 5296452 5296473 5296457 5296452 -
taaaatataaatgaaggtagga

SEQ ID NO: 131550 - DNA, 22 bp, Artificial Sequence
  Synthetic oligonucleotide; TTT chr11 5296451 5296472 5296456 5296451 -
aaaatataaatgaaggtaggaa

SEQ ID NO: 131551 - DNA, 22 bp, Artificial Sequence
  Synthetic oligonucleotide; TTA chr11 5296450 5296471 5296455 5296450 -
aaatataaatgaaggtaggaac

SEQ ID NO: 131552 - DNA, 22 bp, Artificial Sequence
  Synthetic oligonucleotide; CTG chr11 5296425 5296446 5296430 5296425 -
tagatacaaaaagttggagaaa

SEQ ID NO: 131553 - DNA, 22 bp, Artificial Sequence
  Synthetic oligonucleotide; TTG chr11 5296409 5296430 5296414 5296409 -
gagaaaaaaagacaataaagat

SEQ ID NO: 131554 - DNA, 22 bp, Artificial Sequence
  Synthetic oligonucleotide; CTA chr11 5296375 5296396 5296380 5296375 -
ttaatccttgatagaaaatgag

SEQ ID NO: 131555 - DNA, 22 bp, Artificial Sequence
  Synthetic oligonucleotide; TTA chr11 5296372 5296393 5296377 5296372 -
atccttgatagaaaatgagaag

SEQ ID NO: 131556 - DNA, 22 bp, Artificial Sequence
  Synthetic oligonucleotide; CTT chr11 5296366 5296387 5296371 5296366 -
gatagaaaatgagaagagataa

SEQ ID NO: 131557 - DNA, 22 bp, Artificial Sequence
  Synthetic oligonucleotide; TTG chr11 5296365 5296386 5296370 5296365 -
atagaaaatgagaagagataaa

SEQ ID NO: 131558 - DNA, 22 bp, Artificial Sequence
  Synthetic oligonucleotide; CTG chr11 5296337 5296358 5296342 5296337 -
gtttacataaagaaaataagat

SEQ ID NO: 131559 - DNA, 22 bp, Artificial Sequence
  Synthetic oligonucleotide; TTT chr11 5296333 5296354 5296338 5296333 -
acataaagaaaataagatggat

SEQ ID NO: 131560 - DNA, 22 bp, Artificial Sequence
  Synthetic oligonucleotide; TTA chr11 5296332 5296353 5296337 5296332 -
cataaagaaaataagatggata

SEQ ID NO: 131561 - DNA, 22 bp, Artificial Sequence
  Synthetic oligonucleotide; CTT chr11 5296296 5296317 5296301 5296296 -
ataaaagtgataatttgagaaa

SEQ ID NO: 131562 - DNA, 22 bp, Artificial Sequence
  Synthetic oligonucleotide; TTA chr11 5296295 5296316 5296300 5296295 -
taaaagtgataatttgagaaaa

SEQ ID NO: 131563 - DNA, 22 bp, Artificial Sequence
  Synthetic oligonucleotide; TTT chr11 5296280 5296301 5296285 5296280 -
gagaaaaaaaatactccatatt

SEQ ID NO: 131564 - DNA, 22 bp, Artificial Sequence
  Synthetic oligonucleotide; TTG chr11 5296279 5296300 5296284 5296279 -
agaaaaaaaatactccatattc

SEQ ID NO: 131565 - DNA, 22 bp, Artificial Sequence
  Synthetic oligonucleotide; CTC chr11 5296264 5296285 5296269 5296264 -
catattctgagtttcttcacat

SEQ ID NO: 131566 - DNA, 22 bp, Artificial Sequence
  Synthetic oligonucleotide; TTC chr11 5296257 5296278 5296262 5296257 -
tgagtttcttcacataaaataa

SEQ ID NO: 131567 - DNA, 22 bp, Artificial Sequence
  Synthetic oligonucleotide; CTG chr11 5296255 5296276 5296260 5296255 -
agtttcttcacataaaataata

SEQ ID NO: 131568 - DNA, 22 bp, Artificial Sequence
  Synthetic oligonucleotide; TTT chr11 5296250 5296271 5296255 5296250 -
cttcacataaaataatacaaat

SEQ ID NO: 131569 - DNA, 22 bp, Artificial Sequence
  Synthetic oligonucleotide; TTC chr11 5296249 5296270 5296254 5296249 -
ttcacataaaataatacaaatc

SEQ ID NO: 131570 - DNA, 22 bp, Artificial Sequence
  Synthetic oligonucleotide; CTT chr11 5296247 5296268 5296252 5296247 -
cacataaaataatacaaatctg

SEQ ID NO: 131571 - DNA, 22 bp, Artificial Sequence
  Synthetic oligonucleotide; TTC chr11 5296246 5296267 5296251 5296246 -
acataaaataatacaaatctgc

SEQ ID NO: 131572 - DNA, 22 bp, Artificial Sequence
  Synthetic oligonucleotide; CTG chr11 5296225 5296246 5296230 5296225 -
ctgtggtaagttacaaagagat

SEQ ID NO: 131573 - DNA, 22 bp, Artificial Sequence
  Synthetic oligonucleotide; CTG chr11 5296222 5296243 5296227 5296222 -
tggtaagttacaaagagataga

SEQ ID NO: 131574 - DNA, 22 bp, Artificial Sequence
  Synthetic oligonucleotide; TTA chr11 5296212 5296233 5296217 5296212 -
caaagagatagattttttatca

SEQ ID NO: 131575 - DNA, 22 bp, Artificial Sequence
  Synthetic oligonucleotide; TTT chr11 5296197 5296218 5296202 5296197 -
tttatcattatataaaagatat

SEQ ID NO: 131576 - DNA, 22 bp, Artificial Sequence
  Synthetic oligonucleotide; TTT chr11 5296196 5296217 5296201 5296196 -
ttatcattatataaaagatatt

SEQ ID NO: 131577 - DNA, 22 bp, Artificial Sequence
  Synthetic oligonucleotide; TTT chr11 5296195 5296216 5296200 5296195 -
tatcattatataaaagatattt

SEQ ID NO: 131578 - DNA, 22 bp, Artificial Sequence
  Synthetic oligonucleotide; TTT chr11 5296194 5296215 5296199 5296194 -
atcattatataaaagatatttt

SEQ ID NO: 131579 - DNA, 22 bp, Artificial Sequence
  Synthetic oligonucleotide; TTA chr11 5296193 5296214 5296198 5296193 -
tcattatataaaagatatttta

SEQ ID NO: 131580 - DNA, 22 bp, Artificial Sequence
  Synthetic oligonucleotide; TTA chr11 5296187 5296208 5296192 5296187 -
tataaaagatattttaaacaga

SEQ ID NO: 131581 - DNA, 22 bp, Artificial Sequence
  Synthetic oligonucleotide; TTT chr11 5296173 5296194 5296178 5296173 -
taaacagagttatacaacaaag

SEQ ID NO: 131582 - DNA, 22 bp, Artificial Sequence
  Synthetic oligonucleotide; TTT chr11 5296172 5296193 5296177 5296172 -
aaacagagttatacaacaaagg

SEQ ID NO: 131583 - DNA, 22 bp, Artificial Sequence
  Synthetic oligonucleotide; TTA chr11 5296171 5296192 5296176 5296171 -
aacagagttatacaacaaagga

SEQ ID NO: 131584 - DNA, 22 bp, Artificial Sequence
  Synthetic oligonucleotide; TTA chr11 5296161 5296182 5296166 5296161 -
tacaacaaaggaacagactatg

SEQ ID NO: 131585 - DNA, 22 bp, Artificial Sequence
  Synthetic oligonucleotide; CTA chr11 5296141 5296162 5296146 5296141 -
tgtcatatattctcacttatca

SEQ ID NO: 131586 - DNA, 22 bp, Artificial Sequence
  Synthetic oligonucleotide; TTC chr11 5296129 5296150 5296134 5296129 -
tcacttatcactataaacatct

SEQ ID NO: 131587 - DNA, 22 bp, Artificial Sequence
  Synthetic oligonucleotide; CTC chr11 5296127 5296148 5296132 5296127 -
acttatcactataaacatctca

SEQ ID NO: 131588 - DNA, 22 bp, Artificial Sequence
  Synthetic oligonucleotide; CTT chr11 5296123 5296144 5296128 5296123 -
atcactataaacatctcagaaa

SEQ ID NO: 131589 - DNA, 22 bp, Artificial Sequence
  Synthetic oligonucleotide; TTA chr11 5296122 5296143 5296127 5296122 -
tcactataaacatctcagaaaa

SEQ ID NO: 131590 - DNA, 22 bp, Artificial Sequence
  Synthetic oligonucleotide; CTA chr11 5296116 5296137 5296121 5296116 -
taaacatctcagaaaaatctgc

SEQ ID NO: 131591 - DNA, 22 bp, Artificial Sequence
  Synthetic oligonucleotide; CTC chr11 5296106 5296127 5296111 5296106 -
agaaaaatctgcaaaatcattt

SEQ ID NO: 131592 - DNA, 22 bp, Artificial Sequence
  Synthetic oligonucleotide; CTG chr11 5296095 5296116 5296100 5296095 -
caaaatcatttcatagcatttt

SEQ ID NO: 131593 - DNA, 22 bp, Artificial Sequence
  Synthetic oligonucleotide; TTT chr11 5296084 5296105 5296089 5296084 -
catagcattttaaatagttagg

SEQ ID NO: 131594 - DNA, 22 bp, Artificial Sequence
  Synthetic oligonucleotide; TTC chr11 5296083 5296104 5296088 5296083 -
atagcattttaaatagttagga

SEQ ID NO: 131595 - DNA, 22 bp, Artificial Sequence
  Synthetic oligonucleotide; TTT chr11 5296074 5296095 5296079 5296074 -
taaatagttaggaataatgtag

SEQ ID NO: 131596 - DNA, 22 bp, Artificial Sequence
  Synthetic oligonucleotide; TTT chr11 5296073 5296094 5296078 5296073 -
aaatagttaggaataatgtaga

SEQ ID NO: 131597 - DNA, 22 bp, Artificial Sequence
  Synthetic oligonucleotide; TTA chr11 5296072 5296093 5296077 5296072 -
aatagttaggaataatgtagaa

SEQ ID NO: 131598 - DNA, 22 bp, Artificial Sequence
  Synthetic oligonucleotide; TTA chr11 5296064 5296085 5296069 5296064 -
ggaataatgtagaaaactgaaa

SEQ ID NO: 131599 - DNA, 22 bp, Artificial Sequence
  Synthetic oligonucleotide; CTG chr11 5296045 5296066 5296050 5296045 -
aaacagttctaagtttcccaca

SEQ ID NO: 131600 - DNA, 22 bp, Artificial Sequence
  Synthetic oligonucleotide; TTC chr11 5296036 5296057 5296041 5296036 -
taagtttcccacaaacttagag

SEQ ID NO: 131601 - DNA, 22 bp, Artificial Sequence
  Synthetic oligonucleotide; CTA chr11 5296034 5296055 5296039 5296034 -
agtttcccacaaacttagagtc

SEQ ID NO: 131602 - DNA, 22 bp, Artificial Sequence
  Synthetic oligonucleotide; TTT chr11 5296029 5296050 5296034 5296029 -
cccacaaacttagagtctcaaa

SEQ ID NO: 131603 - DNA, 22 bp, Artificial Sequence
  Synthetic oligonucleotide; TTC chr11 5296028 5296049 5296033 5296028 -
ccacaaacttagagtctcaaat

SEQ ID NO: 131604 - DNA, 22 bp, Artificial Sequence
  Synthetic oligonucleotide; CTT chr11 5296018 5296039 5296023 5296018 -
agagtctcaaatgttgcattac

SEQ ID NO: 131605 - DNA, 22 bp, Artificial Sequence
  Synthetic oligonucleotide; TTA chr11 5296017 5296038 5296022 5296017 -
gagtctcaaatgttgcattacc

SEQ ID NO: 131606 - DNA, 22 bp, Artificial Sequence
  Synthetic oligonucleotide; CTC chr11 5296010 5296031 5296015 5296010 -
aaatgttgcattacctaactta

SEQ ID NO: 131607 - DNA, 22 bp, Artificial Sequence
  Synthetic oligonucleotide; TTG chr11 5296002 5296023 5296007 5296002 -
cattacctaacttacctgcaaa

SEQ ID NO: 131608 - DNA, 22 bp, Artificial Sequence
  Synthetic oligonucleotide; TTA chr11 5295997 5296018 5296002 5295997 -
cctaacttacctgcaaatattt

SEQ ID NO: 131609 - DNA, 22 bp, Artificial Sequence
  Synthetic oligonucleotide; CTA chr11 5295993 5296014 5295998 5295993 -
acttacctgcaaatattttata

SEQ ID NO: 131610 - DNA, 22 bp, Artificial Sequence
  Synthetic oligonucleotide; CTT chr11 5295989 5296010 5295994 5295989 -
acctgcaaatattttatacaaa

SEQ ID NO: 131611 - DNA, 22 bp, Artificial Sequence
  Synthetic oligonucleotide; TTA chr11 5295988 5296009 5295993 5295988 -
cctgcaaatattttatacaaat

SEQ ID NO: 131612 - DNA, 22 bp, Artificial Sequence
  Synthetic oligonucleotide; CTG chr11 5295984 5296005 5295989 5295984 -
caaatattttatacaaatttgc

SEQ ID NO: 131613 - DNA, 22 bp, Artificial Sequence
  Synthetic oligonucleotide; TTT chr11 5295975 5295996 5295980 5295975 -
tatacaaatttgcacatgctac

SEQ ID NO: 131614 - DNA, 22 bp, Artificial Sequence
  Synthetic oligonucleotide; TTT chr11 5295974 5295995 5295979 5295974 -
atacaaatttgcacatgctact

SEQ ID NO: 131615 - DNA, 22 bp, Artificial Sequence
  Synthetic oligonucleotide; TTA chr11 5295973 5295994 5295978 5295973 -
tacaaatttgcacatgctactc

SEQ ID NO: 131616 - DNA, 22 bp, Artificial Sequence
  Synthetic oligonucleotide; TTT chr11 5295964 5295985 5295969 5295964 -
gcacatgctactctagtcaaaa

SEQ ID NO: 131617 - DNA, 22 bp, Artificial Sequence
  Synthetic oligonucleotide; TTG chr11 5295963 5295984 5295968 5295963 -
cacatgctactctagtcaaaaa

SEQ ID NO: 131618 - DNA, 22 bp, Artificial Sequence
  Synthetic oligonucleotide; CTA chr11 5295954 5295975 5295959 5295954 -
ctctagtcaaaaatatatgtac

SEQ ID NO: 131619 - DNA, 22 bp, Artificial Sequence
  Synthetic oligonucleotide; CTC chr11 5295951 5295972 5295956 5295951 -
tagtcaaaaatatatgtacatt

SEQ ID NO: 131620 - DNA, 22 bp, Artificial Sequence
  Synthetic oligonucleotide; CTA chr11 5295949 5295970 5295954 5295949 -
gtcaaaaatatatgtacattat

SEQ ID NO: 131621 - DNA, 22 bp, Artificial Sequence
  Synthetic oligonucleotide; TTA chr11 5295928 5295949 5295933 5295928 -
tgggtattttctgtgtgtaact

SEQ ID NO: 131622 - DNA, 22 bp, Artificial Sequence
  Synthetic oligonucleotide; TTT chr11 5295919 5295940 5295924 5295919 -
tctgtgtgtaacttggttctag

SEQ ID NO: 131623 - DNA, 22 bp, Artificial Sequence
  Synthetic oligonucleotide; TTT chr11 5295918 5295939 5295923 5295918 -
ctgtgtgtaacttggttctagt

SEQ ID NO: 131624 - DNA, 22 bp, Artificial Sequence
  Synthetic oligonucleotide; TTC chr11 5295917 5295938 5295922 5295917 -
tgtgtgtaacttggttctagtt

SEQ ID NO: 131625 - DNA, 22 bp, Artificial Sequence
  Synthetic oligonucleotide; CTG chr11 5295915 5295936 5295920 5295915 -
tgtgtaacttggttctagttgc

SEQ ID NO: 131626 - DNA, 22 bp, Artificial Sequence
  Synthetic oligonucleotide; CTT chr11 5295905 5295926 5295910 5295905 -
ggttctagttgcttctttcaga

SEQ ID NO: 131627 - DNA, 22 bp, Artificial Sequence
  Synthetic oligonucleotide; TTG chr11 5295904 5295925 5295909 5295904 -
gttctagttgcttctttcagaa

SEQ ID NO: 131628 - DNA, 22 bp, Artificial Sequence
  Synthetic oligonucleotide; TTC chr11 5295900 5295921 5295905 5295900 -
tagttgcttctttcagaaatag

SEQ ID NO: 131629 - DNA, 22 bp, Artificial Sequence
  Synthetic oligonucleotide; CTA chr11 5295898 5295919 5295903 5295898 -
gttgcttctttcagaaatagcc

SEQ ID NO: 131630 - DNA, 22 bp, Artificial Sequence
  Synthetic oligonucleotide; TTG chr11 5295894 5295915 5295899 5295894 -
cttctttcagaaatagcctcta

SEQ ID NO: 131631 - DNA, 22 bp, Artificial Sequence
  Synthetic oligonucleotide; CTT chr11 5295891 5295912 5295896 5295891 -
ctttcagaaatagcctctattt

SEQ ID NO: 131632 - DNA, 22 bp, Artificial Sequence
  Synthetic oligonucleotide; TTC chr11 5295890 5295911 5295895 5295890 -
tttcagaaatagcctctatttt

SEQ ID NO: 131633 - DNA, 22 bp, Artificial Sequence
  Synthetic oligonucleotide; CTT chr11 5295888 5295909 5295893 5295888 -
tcagaaatagcctctatttttg

SEQ ID NO: 131634 - DNA, 22 bp, Artificial Sequence
  Synthetic oligonucleotide; TTT chr11 5295887 5295908 5295892 5295887 -
cagaaatagcctctatttttga

SEQ ID NO: 131635 - DNA, 22 bp, Artificial Sequence
  Synthetic oligonucleotide; TTC chr11 5295886 5295907 5295891 5295886 -
agaaatagcctctatttttgat

SEQ ID NO: 131636 - DNA, 22 bp, Artificial Sequence
  Synthetic oligonucleotide; CTC chr11 5295874 5295895 5295879 5295874 -
tatttttgatttacctgataaa

SEQ ID NO: 131637 - DNA, 22 bp, Artificial Sequence
  Synthetic oligonucleotide; CTA chr11 5295872 5295893 5295877 5295872 -
tttttgatttacctgataaaat

SEQ ID NO: 131638 - DNA, 22 bp, Artificial Sequence
  Synthetic oligonucleotide; TTT chr11 5295869 5295890 5295874 5295869 -
ttgatttacctgataaaatcac

SEQ ID NO: 131639 - DNA, 22 bp, Artificial Sequence
  Synthetic oligonucleotide; TTT chr11 5295868 5295889 5295873 5295868 -
tgatttacctgataaaatcaca

SEQ ID NO: 131640 - DNA, 22 bp, Artificial Sequence
  Synthetic oligonucleotide; TTT chr11 5295867 5295888 5295872 5295867 -
gatttacctgataaaatcacat

SEQ ID NO: 131641 - DNA, 22 bp, Artificial Sequence
  Synthetic oligonucleotide; TTG chr11 5295866 5295887 5295871 5295866 -
atttacctgataaaatcacatt

SEQ ID NO: 131642 - DNA, 22 bp, Artificial Sequence
  Synthetic oligonucleotide; TTT chr11 5295862 5295883 5295867 5295862 -
acctgataaaatcacattcctc

SEQ ID NO: 131643 - DNA, 22 bp, Artificial Sequence
  Synthetic oligonucleotide; TTA chr11 5295861 5295882 5295866 5295861 -
cctgataaaatcacattcctct

SEQ ID NO: 131644 - DNA, 22 bp, Artificial Sequence
  Synthetic oligonucleotide; CTG chr11 5295857 5295878 5295862 5295857 -
ataaaatcacattcctctccaa

SEQ ID NO: 131645 - DNA, 22 bp, Artificial Sequence
  Synthetic oligonucleotide; TTC chr11 5295843 5295864 5295848 5295843 -
ctctccaaagccttctaaatac

SEQ ID NO: 131646 - DNA, 22 bp, Artificial Sequence
  Synthetic oligonucleotide; CTC chr11 5295840 5295861 5295845 5295840 -
tccaaagccttctaaatacttc

SEQ ID NO: 131647 - DNA, 22 bp, Artificial Sequence
  Synthetic oligonucleotide; CTC chr11 5295838 5295859 5295843 5295838 -
caaagccttctaaatacttcca

SEQ ID NO: 131648 - DNA, 22 bp, Artificial Sequence
  Synthetic oligonucleotide; CTT chr11 5295829 5295850 5295834 5295829 -
ctaaatacttccagactaacta

SEQ ID NO: 131649 - DNA, 22 bp, Artificial Sequence
  Synthetic oligonucleotide; TTC chr11 5295828 5295849 5295833 5295828 -
taaatacttccagactaactac

SEQ ID NO: 131650 - DNA, 22 bp, Artificial Sequence
  Synthetic oligonucleotide; CTA chr11 5295826 5295847 5295831 5295826 -
aatacttccagactaactactt

SEQ ID NO: 131651 - DNA, 22 bp, Artificial Sequence
  Synthetic oligonucleotide; CTT chr11 5295819 5295840 5295824 5295819 -
ccagactaactactttttagta

SEQ ID NO: 131652 - DNA, 22 bp, Artificial Sequence
  Synthetic oligonucleotide; TTC chr11 5295818 5295839 5295823 5295818 -
cagactaactactttttagtac

SEQ ID NO: 131653 - DNA, 22 bp, Artificial Sequence
  Synthetic oligonucleotide; CTA chr11 5295811 5295832 5295816 5295811 -
actactttttagtacatctaag

SEQ ID NO: 131654 - DNA, 22 bp, Artificial Sequence
  Synthetic oligonucleotide; CTA chr11 5295807 5295828 5295812 5295807 -
ctttttagtacatctaagaaga

SEQ ID NO: 131655 - DNA, 22 bp, Artificial Sequence
  Synthetic oligonucleotide; CTT chr11 5295804 5295825 5295809 5295804 -
tttagtacatctaagaagaaaa

SEQ ID NO: 131656 - DNA, 22 bp, Artificial Sequence
  Synthetic oligonucleotide; TTT chr11 5295803 5295824 5295808 5295803 -
ttagtacatctaagaagaaaag

SEQ ID NO: 131657 - DNA, 22 bp, Artificial Sequence
  Synthetic oligonucleotide; TTT chr11 5295802 5295823 5295807 5295802 -
tagtacatctaagaagaaaaga

SEQ ID NO: 131658 - DNA, 22 bp, Artificial Sequence
  Synthetic oligonucleotide; TTT chr11 5295801 5295822 5295806 5295801 -
agtacatctaagaagaaaagag

SEQ ID NO: 131659 - DNA, 22 bp, Artificial Sequence
  Synthetic oligonucleotide; TTA chr11 5295800 5295821 5295805 5295800 -
gtacatctaagaagaaaagagt

SEQ ID NO: 131660 - DNA, 22 bp, Artificial Sequence
  Synthetic oligonucleotide; CTA chr11 5295791 5295812 5295796 5295791 -
agaagaaaagagttttgtctct

SEQ ID NO: 131661 - DNA, 22 bp, Artificial Sequence
  Synthetic oligonucleotide; TTT chr11 5295776 5295797 5295781 5295776 -
tgtctcttatccacctctgagt

SEQ ID NO: 131662 - DNA, 22 bp, Artificial Sequence
  Synthetic oligonucleotide; TTT chr11 5295775 5295796 5295780 5295775 -
gtctcttatccacctctgagtc

SEQ ID NO: 131663 - DNA, 22 bp, Artificial Sequence
  Synthetic oligonucleotide; TTG chr11 5295774 5295795 5295779 5295774 -
tctcttatccacctctgagtca

SEQ ID NO: 131664 - DNA, 22 bp, Artificial Sequence
  Synthetic oligonucleotide; CTC chr11 5295770 5295791 5295775 5295770 -
ttatccacctctgagtcaaaaa

SEQ ID NO: 131665 - DNA, 22 bp, Artificial Sequence
  Synthetic oligonucleotide; CTT chr11 5295768 5295789 5295773 5295768 -
atccacctctgagtcaaaaagc

SEQ ID NO: 131666 - DNA, 22 bp, Artificial Sequence
  Synthetic oligonucleotide; TTA chr11 5295767 5295788 5295772 5295767 -
tccacctctgagtcaaaaagca

SEQ ID NO: 131667 - DNA, 22 bp, Artificial Sequence
  Synthetic oligonucleotide; CTC chr11 5295759 5295780 5295764 5295759 -
tgagtcaaaaagcagcatgtcc

SEQ ID NO: 131668 - DNA, 22 bp, Artificial Sequence
  Synthetic oligonucleotide; CTG chr11 5295757 5295778 5295762 5295757 -
agtcaaaaagcagcatgtccat

SEQ ID NO: 131669 - DNA, 22 bp, Artificial Sequence
  Synthetic oligonucleotide; TTG chr11 5295729 5295750 5295734 5295729 -
gtacatagttcccacagcccca

SEQ ID NO: 131670 - DNA, 22 bp, Artificial Sequence
  Synthetic oligonucleotide; TTC chr11 5295718 5295739 5295723 5295718 -
ccacagccccacttagctctgg

SEQ ID NO: 131671 - DNA, 22 bp, Artificial Sequence
  Synthetic oligonucleotide; CTT chr11 5295704 5295725 5295709 5295704 -
agctctggattggagttctact

SEQ ID NO: 131672 - DNA, 22 bp, Artificial Sequence
  Synthetic oligonucleotide; TTA chr11 5295703 5295724 5295708 5295703 -
gctctggattggagttctactt

SEQ ID NO: 131673 - DNA, 22 bp, Artificial Sequence
  Synthetic oligonucleotide; CTC chr11 5295699 5295720 5295704 5295699 -
tggattggagttctacttggca

SEQ ID NO: 131674 - DNA, 22 bp, Artificial Sequence
  Synthetic oligonucleotide; CTG chr11 5295697 5295718 5295702 5295697 -
gattggagttctacttggcatt

SEQ ID NO: 131675 - DNA, 22 bp, Artificial Sequence
  Synthetic oligonucleotide; TTG chr11 5295692 5295713 5295697 5295692 -
gagttctacttggcattgtttg

SEQ ID NO: 131676 - DNA, 22 bp, Artificial Sequence
  Synthetic oligonucleotide; TTC chr11 5295686 5295707 5295691 5295686 -
tacttggcattgtttgcaacta

SEQ ID NO: 131677 - DNA, 22 bp, Artificial Sequence
  Synthetic oligonucleotide; CTA chr11 5295684 5295705 5295689 5295684 -
cttggcattgtttgcaactaca

SEQ ID NO: 131678 - DNA, 22 bp, Artificial Sequence
  Synthetic oligonucleotide; CTT chr11 5295681 5295702 5295686 5295681 -
ggcattgtttgcaactacatgg

SEQ ID NO: 131679 - DNA, 22 bp, Artificial Sequence
  Synthetic oligonucleotide; TTG chr11 5295680 5295701 5295685 5295680 -
gcattgtttgcaactacatgga

SEQ ID NO: 131680 - DNA, 22 bp, Artificial Sequence
  Synthetic oligonucleotide; TTG chr11 5295674 5295695 5295679 5295674 -
tttgcaactacatggacgtaaa

SEQ ID NO: 131681 - DNA, 22 bp, Artificial Sequence
  Synthetic oligonucleotide; TTT chr11 5295671 5295692 5295676 5295671 -
gcaactacatggacgtaaaatg

SEQ ID NO: 131682 - DNA, 22 bp, Artificial Sequence
  Synthetic oligonucleotide; TTG chr11 5295670 5295691 5295675 5295670 -
caactacatggacgtaaaatgc

SEQ ID NO: 131683 - DNA, 22 bp, Artificial Sequence
  Synthetic oligonucleotide; CTA chr11 5295664 5295685 5295669 5295664 -
catggacgtaaaatgcatggat

SEQ ID NO: 131684 - DNA, 22 bp, Artificial Sequence
  Synthetic oligonucleotide; TTC chr11 5295640 5295661 5295645 5295640 -
tcttgaaaaaatgtttctgcca

SEQ ID NO: 131685 - DNA, 22 bp, Artificial Sequence
  Synthetic oligonucleotide; CTC chr11 5295638 5295659 5295643 5295638 -
ttgaaaaaatgtttctgccatg

SEQ ID NO: 131686 - DNA, 22 bp, Artificial Sequence
  Synthetic oligonucleotide; CTT chr11 5295636 5295657 5295641 5295636 -
gaaaaaatgtttctgccatgat

SEQ ID NO: 131687 - DNA, 22 bp, Artificial Sequence
  Synthetic oligonucleotide; TTG chr11 5295635 5295656 5295640 5295635 -
aaaaaatgtttctgccatgatg

SEQ ID NO: 131688 - DNA, 22 bp, Artificial Sequence
  Synthetic oligonucleotide; TTT chr11 5295624 5295645 5295629 5295624 -
ctgccatgatgttctctgaaag

SEQ ID NO: 131689 - DNA, 22 bp, Artificial Sequence
  Synthetic oligonucleotide; TTC chr11 5295623 5295644 5295628 5295623 -
tgccatgatgttctctgaaaga

SEQ ID NO: 131690 - DNA, 22 bp, Artificial Sequence
  Synthetic oligonucleotide; CTG chr11 5295621 5295642 5295626 5295621 -
ccatgatgttctctgaaagaga

SEQ ID NO: 131691 - DNA, 22 bp, Artificial Sequence
  Synthetic oligonucleotide; TTC chr11 5295610 5295631 5295615 5295610 -
tctgaaagagactaaccttccc

SEQ ID NO: 131692 - DNA, 22 bp, Artificial Sequence
  Synthetic oligonucleotide; CTC chr11 5295608 5295629 5295613 5295608 -
tgaaagagactaaccttccctc

SEQ ID NO: 131693 - DNA, 22 bp, Artificial Sequence
  Synthetic oligonucleotide; CTG chr11 5295606 5295627 5295611 5295606 -
aaagagactaaccttccctcgc

SEQ ID NO: 131694 - DNA, 22 bp, Artificial Sequence
  Synthetic oligonucleotide; CTA chr11 5295596 5295617 5295601 5295596 -
accttccctcgctttgcagaga

SEQ ID NO: 131695 - DNA, 22 bp, Artificial Sequence
  Synthetic oligonucleotide; CTT chr11 5295591 5295612 5295596 5295591 -
ccctcgctttgcagagaaagac

SEQ ID NO: 131696 - DNA, 22 bp, Artificial Sequence
  Synthetic oligonucleotide; TTC chr11 5295590 5295611 5295595 5295590 -
cctcgctttgcagagaaagact

SEQ ID NO: 131697 - DNA, 22 bp, Artificial Sequence
  Synthetic oligonucleotide; CTC chr11 5295586 5295607 5295591 5295586 -
gctttgcagagaaagactcgtg

SEQ ID NO: 131698 - DNA, 22 bp, Artificial Sequence
  Synthetic oligonucleotide; CTT chr11 5295582 5295603 5295587 5295582 -
tgcagagaaagactcgtgtaat

SEQ ID NO: 131699 - DNA, 22 bp, Artificial Sequence
  Synthetic oligonucleotide; TTT chr11 5295581 5295602 5295586 5295581 -
gcagagaaagactcgtgtaatc

SEQ ID NO: 131700 - DNA, 22 bp, Artificial Sequence
  Synthetic oligonucleotide; TTG chr11 5295580 5295601 5295585 5295580 -
cagagaaagactcgtgtaatcc

SEQ ID NO: 131701 - DNA, 22 bp, Artificial Sequence
  Synthetic oligonucleotide; CTC chr11 5295567 5295588 5295572 5295567 -
gtgtaatccttgacaatgtcat

SEQ ID NO: 131702 - DNA, 22 bp, Artificial Sequence
  Synthetic oligonucleotide; CTT chr11 5295556 5295577 5295561 5295556 -
gacaatgtcatctcatctattt

SEQ ID NO: 131703 - DNA, 22 bp, Artificial Sequence
  Synthetic oligonucleotide; TTG chr11 5295555 5295576 5295560 5295555 -
acaatgtcatctcatctattta

SEQ ID NO: 131704 - DNA, 22 bp, Artificial Sequence
  Synthetic oligonucleotide; CTC chr11 5295542 5295563 5295547 5295542 -
atctatttattcccatgtctac

SEQ ID NO: 131705 - DNA, 22 bp, Artificial Sequence
  Synthetic oligonucleotide; CTA chr11 5295537 5295558 5295542 5295537 -
tttattcccatgtctacccata

SEQ ID NO: 131706 - DNA, 22 bp, Artificial Sequence
  Synthetic oligonucleotide; TTT chr11 5295534 5295555 5295539 5295534 -
attcccatgtctacccatatgt

SEQ ID NO: 131707 - DNA, 22 bp, Artificial Sequence
  Synthetic oligonucleotide; TTA chr11 5295533 5295554 5295538 5295533 -
ttcccatgtctacccatatgtg

SEQ ID NO: 131708 - DNA, 22 bp, Artificial Sequence
  Synthetic oligonucleotide; TTC chr11 5295530 5295551 5295535 5295530 -
ccatgtctacccatatgtgacc

SEQ ID NO: 131709 - DNA, 22 bp, Artificial Sequence
  Synthetic oligonucleotide; CTA chr11 5295521 5295542 5295526 5295521 -
cccatatgtgaccttcatgtct

SEQ ID NO: 131710 - DNA, 22 bp, Artificial Sequence
  Synthetic oligonucleotide; CTT chr11 5295506 5295527 5295511 5295506 -
catgtctttgctctaagcccct

SEQ ID NO: 131711 - DNA, 22 bp, Artificial Sequence
  Synthetic oligonucleotide; TTC chr11 5295505 5295526 5295510 5295505 -
atgtctttgctctaagccccta

SEQ ID NO: 131712 - DNA, 22 bp, Artificial Sequence
  Synthetic oligonucleotide; CTT chr11 5295498 5295519 5295503 5295498 -
tgctctaagcccctacatcctc

SEQ ID NO: 131713 - DNA, 22 bp, Artificial Sequence
  Synthetic oligonucleotide; TTT chr11 5295497 5295518 5295502 5295497 -
gctctaagcccctacatcctca

SEQ ID NO: 131714 - DNA, 22 bp, Artificial Sequence
  Synthetic oligonucleotide; TTG chr11 5295496 5295517 5295501 5295496 -
ctctaagcccctacatcctcaa

SEQ ID NO: 131715 - DNA, 22 bp, Artificial Sequence
  Synthetic oligonucleotide; CTC chr11 5295493 5295514 5295498 5295493 -
taagcccctacatcctcaatct

SEQ ID NO: 131716 - DNA, 22 bp, Artificial Sequence
  Synthetic oligonucleotide; CTA chr11 5295491 5295512 5295496 5295491 -
agcccctacatcctcaatctac

SEQ ID NO: 131717 - DNA, 22 bp, Artificial Sequence
  Synthetic oligonucleotide; CTA chr11 5295483 5295504 5295488 5295483 -
catcctcaatctacacactagg

SEQ ID NO: 131718 - DNA, 22 bp, Artificial Sequence
  Synthetic oligonucleotide; CTC chr11 5295476 5295497 5295481 5295476 -
aatctacacactaggatagtat

SEQ ID NO: 131719 - DNA, 22 bp, Artificial Sequence
  Synthetic oligonucleotide; CTA chr11 5295470 5295491 5295475 5295470 -
cacactaggatagtataaaagt

SEQ ID NO: 131720 - DNA, 22 bp, Artificial Sequence
  Synthetic oligonucleotide; CTA chr11 5295463 5295484 5295468 5295463 -
ggatagtataaaagtaatagta

SEQ ID NO: 131721 - DNA, 22 bp, Artificial Sequence
  Synthetic oligonucleotide; TTA chr11 5295405 5295426 5295410 5295405 -
tggcttatactatacacaagac

SEQ ID NO: 131722 - DNA, 22 bp, Artificial Sequence
  Synthetic oligonucleotide; CTT chr11 5295399 5295420 5295404 5295399 -
atactatacacaagacactgtt

SEQ ID NO: 131723 - DNA, 22 bp, Artificial Sequence
  Synthetic oligonucleotide; TTA chr11 5295398 5295419 5295403 5295398 -
tactatacacaagacactgttg

SEQ ID NO: 131724 - DNA, 22 bp, Artificial Sequence
  Synthetic oligonucleotide; CTA chr11 5295393 5295414 5295398 5295393 -
tacacaagacactgttgatata

SEQ ID NO: 131725 - DNA, 22 bp, Artificial Sequence
  Synthetic oligonucleotide; CTG chr11 5295379 5295400 5295384 5295379 -
ttgatatattatttcatttagt

SEQ ID NO: 131726 - DNA, 22 bp, Artificial Sequence
  Synthetic oligonucleotide; TTG chr11 5295376 5295397 5295381 5295376 -
atatattatttcatttagtatt

SEQ ID NO: 131727 - DNA, 22 bp, Artificial Sequence
  Synthetic oligonucleotide; TTA chr11 5295368 5295389 5295373 5295368 -
tttcatttagtattcacagtaa

SEQ ID NO: 131728 - DNA, 22 bp, Artificial Sequence
  Synthetic oligonucleotide; TTT chr11 5295365 5295386 5295370 5295365 -
catttagtattcacagtaactc

SEQ ID NO: 131729 - DNA, 22 bp, Artificial Sequence
  Synthetic oligonucleotide; TTC chr11 5295364 5295385 5295369 5295364 -
atttagtattcacagtaactct

SEQ ID NO: 131730 - DNA, 22 bp, Artificial Sequence
  Synthetic oligonucleotide; TTT chr11 5295360 5295381 5295365 5295360 -
agtattcacagtaactctgtgc

SEQ ID NO: 131731 - DNA, 22 bp, Artificial Sequence
  Synthetic oligonucleotide; TTA chr11 5295359 5295380 5295364 5295359 -
gtattcacagtaactctgtgcc

SEQ ID NO: 131732 - DNA, 22 bp, Artificial Sequence
  Synthetic oligonucleotide; TTC chr11 5295353 5295374 5295358 5295353 -
acagtaactctgtgcctcaagt

SEQ ID NO: 131733 - DNA, 22 bp, Artificial Sequence
  Synthetic oligonucleotide; CTC chr11 5295343 5295364 5295348 5295343 -
tgtgcctcaagtactattgtaa

SEQ ID NO: 131734 - DNA, 22 bp, Artificial Sequence
  Synthetic oligonucleotide; CTG chr11 5295341 5295362 5295346 5295341 -
tgcctcaagtactattgtaata

SEQ ID NO: 131735 - DNA, 22 bp, Artificial Sequence
  Synthetic oligonucleotide; CTC chr11 5295335 5295356 5295340 5295335 -
aagtactattgtaatacccttt

SEQ ID NO: 131736 - DNA, 22 bp, Artificial Sequence
  Synthetic oligonucleotide; CTA chr11 5295327 5295348 5295332 5295327 -
ttgtaataccctttaagaggag

SEQ ID NO: 131737 - DNA, 22 bp, Artificial Sequence
  Synthetic oligonucleotide; TTG chr11 5295324 5295345 5295329 5295324 -
taataccctttaagaggaggaa

SEQ ID NO: 131738 - DNA, 22 bp, Artificial Sequence
  Synthetic oligonucleotide; CTT chr11 5295314 5295335 5295319 5295314 -
taagaggaggaaactgaggcac

SEQ ID NO: 131739 - DNA, 22 bp, Artificial Sequence
  Synthetic oligonucleotide; TTT chr11 5295313 5295334 5295318 5295313 -
aagaggaggaaactgaggcaca

SEQ ID NO: 131740 - DNA, 22 bp, Artificial Sequence
  Synthetic oligonucleotide; TTA chr11 5295312 5295333 5295317 5295312 -
agaggaggaaactgaggcacag

SEQ ID NO: 131741 - DNA, 22 bp, Artificial Sequence
  Synthetic oligonucleotide; CTG chr11 5295298 5295319 5295303 5295298 -
aggcacagggccctaaagtaat

SEQ ID NO: 131742 - DNA, 22 bp, Artificial Sequence
  Synthetic oligonucleotide; CTA chr11 5295283 5295304 5295288 5295283 -
aagtaatattccaagatgaagt

SEQ ID NO: 131743 - DNA, 22 bp, Artificial Sequence
  Synthetic oligonucleotide; TTC chr11 5295272 5295293 5295277 5295272 -
caagatgaagtggctactaact

SEQ ID NO: 131744 - DNA, 22 bp, Artificial Sequence
  Synthetic oligonucleotide; CTA chr11 5295256 5295277 5295261 5295256 -
ctaactgacagagggcataatt

SEQ ID NO: 131745 - DNA, 22 bp, Artificial Sequence
  Synthetic oligonucleotide; CTA chr11 5295253 5295274 5295258 5295253 -
actgacagagggcataattcaa

SEQ ID NO: 131746 - DNA, 22 bp, Artificial Sequence
  Synthetic oligonucleotide; CTG chr11 5295249 5295270 5295254 5295249 -
acagagggcataattcaactca

SEQ ID NO: 131747 - DNA, 22 bp, Artificial Sequence
  Synthetic oligonucleotide; TTC chr11 5295233 5295254 5295238 5295233 -
aactcatgatatttggctctag

SEQ ID NO: 131748 - DNA, 22 bp, Artificial Sequence
  Synthetic oligonucleotide; CTC chr11 5295228 5295249 5295233 5295228 -
atgatatttggctctagaatac

SEQ ID NO: 131749 - DNA, 22 bp, Artificial Sequence
  Synthetic oligonucleotide; TTT chr11 5295219 5295240 5295224 5295219 -
ggctctagaatacatgctctga

SEQ ID NO: 131750 - DNA, 22 bp, Artificial Sequence
  Synthetic oligonucleotide; TTG chr11 5295218 5295239 5295223 5295218 -
gctctagaatacatgctctgaa

SEQ ID NO: 131751 - DNA, 22 bp, Artificial Sequence
  Synthetic oligonucleotide; CTC chr11 5295214 5295235 5295219 5295214 -
tagaatacatgctctgaatcat

SEQ ID NO: 131752 - DNA, 22 bp, Artificial Sequence
  Synthetic oligonucleotide; CTA chr11 5295212 5295233 5295217 5295212 -
gaatacatgctctgaatcatta

SEQ ID NO: 131753 - DNA, 22 bp, Artificial Sequence
  Synthetic oligonucleotide; CTC chr11 5295200 5295221 5295205 5295200 -
tgaatcattatacaataataat

SEQ ID NO: 131754 - DNA, 22 bp, Artificial Sequence
  Synthetic oligonucleotide; CTG chr11 5295198 5295219 5295203 5295198 -
aatcattatacaataataattc

SEQ ID NO: 131755 - DNA, 22 bp, Artificial Sequence
  Synthetic oligonucleotide; TTA chr11 5295190 5295211 5295195 5295190 -
tacaataataattcatgaggaa

SEQ ID NO: 131756 - DNA, 22 bp, Artificial Sequence
  Synthetic oligonucleotide; TTC chr11 5295176 5295197 5295181 5295176 -
atgaggaaacattttttaaagc

SEQ ID NO: 131757 - DNA, 22 bp, Artificial Sequence
  Synthetic oligonucleotide; TTT chr11 5295162 5295183 5295167 5295162 -
tttaaagcctaagttatttgct

SEQ ID NO: 131758 - DNA, 22 bp, Artificial Sequence
  Synthetic oligonucleotide; TTT chr11 5295161 5295182 5295166 5295161 -
ttaaagcctaagttatttgctc

SEQ ID NO: 131759 - DNA, 22 bp, Artificial Sequence
  Synthetic oligonucleotide; TTT chr11 5295160 5295181 5295165 5295160 -
taaagcctaagttatttgctct

SEQ ID NO: 131760 - DNA, 22 bp, Artificial Sequence
  Synthetic oligonucleotide; TTT chr11 5295159 5295180 5295164 5295159 -
aaagcctaagttatttgctctg

SEQ ID NO: 131761 - DNA, 22 bp, Artificial Sequence
  Synthetic oligonucleotide; TTA chr11 5295158 5295179 5295163 5295158 -
aagcctaagttatttgctctga

SEQ ID NO: 131762 - DNA, 22 bp, Artificial Sequence
  Synthetic oligonucleotide; CTA chr11 5295151 5295172 5295156 5295151 -
agttatttgctctgaaataaga

SEQ ID NO: 131763 - DNA, 22 bp, Artificial Sequence
  Synthetic oligonucleotide; TTA chr11 5295146 5295167 5295151 5295146 -
tttgctctgaaataagacataa

SEQ ID NO: 131764 - DNA, 22 bp, Artificial Sequence
  Synthetic oligonucleotide; TTT chr11 5295143 5295164 5295148 5295143 -
gctctgaaataagacataattt

SEQ ID NO: 131765 - DNA, 22 bp, Artificial Sequence
  Synthetic oligonucleotide; TTG chr11 5295142 5295163 5295147 5295142 -
ctctgaaataagacataatttg

SEQ ID NO: 131766 - DNA, 22 bp, Artificial Sequence
  Synthetic oligonucleotide; CTC chr11 5295139 5295160 5295144 5295139 -
tgaaataagacataatttgggg

SEQ ID NO: 131767 - DNA, 22 bp, Artificial Sequence
  Synthetic oligonucleotide; CTG chr11 5295137 5295158 5295142 5295137 -
aaataagacataatttggggtg

SEQ ID NO: 131768 - DNA, 22 bp, Artificial Sequence
  Synthetic oligonucleotide; TTT chr11 5295121 5295142 5295126 5295121 -
ggggtgagaaagcttagattcc

SEQ ID NO: 131769 - DNA, 22 bp, Artificial Sequence
  Synthetic oligonucleotide; TTG chr11 5295120 5295141 5295125 5295120 -
gggtgagaaagcttagattcca

SEQ ID NO: 131770 - DNA, 22 bp, Artificial Sequence
  Synthetic oligonucleotide; CTT chr11 5295106 5295127 5295111 5295106 -
agattccatgaagtattacagc

SEQ ID NO: 131771 - DNA, 22 bp, Artificial Sequence
  Synthetic oligonucleotide; TTA chr11 5295105 5295126 5295110 5295105 -
gattccatgaagtattacagca

SEQ ID NO: 131772 - DNA, 22 bp, Artificial Sequence
  Synthetic oligonucleotide; TTC chr11 5295100 5295121 5295105 5295100 -
catgaagtattacagcatttgg

SEQ ID NO: 131773 - DNA, 22 bp, Artificial Sequence
  Synthetic oligonucleotide; TTA chr11 5295088 5295109 5295093 5295088 -
cagcatttggtagtctttttgc

SEQ ID NO: 131774 - DNA, 22 bp, Artificial Sequence
  Synthetic oligonucleotide; TTT chr11 5295080 5295101 5295085 5295080 -
ggtagtctttttgcactccagg

SEQ ID NO: 131775 - DNA, 22 bp, Artificial Sequence
  Synthetic oligonucleotide; TTG chr11 5295079 5295100 5295084 5295079 -
gtagtctttttgcactccaggt

SEQ ID NO: 131776 - DNA, 22 bp, Artificial Sequence
  Synthetic oligonucleotide; CTT chr11 5295071 5295092 5295076 5295071 -
tttgcactccaggtcttatttt

SEQ ID NO: 131777 - DNA, 22 bp, Artificial Sequence
  Synthetic oligonucleotide; TTT chr11 5295070 5295091 5295075 5295070 -
ttgcactccaggtcttattttt

SEQ ID NO: 131778 - DNA, 22 bp, Artificial Sequence
  Synthetic oligonucleotide; TTT chr11 5295069 5295090 5295074 5295069 -
tgcactccaggtcttattttta

SEQ ID NO: 131779 - DNA, 22 bp, Artificial Sequence
  Synthetic oligonucleotide; TTT chr11 5295068 5295089 5295073 5295068 -
gcactccaggtcttatttttac

SEQ ID NO: 131780 - DNA, 22 bp, Artificial Sequence
  Synthetic oligonucleotide; TTG chr11 5295067 5295088 5295072 5295067 -
cactccaggtcttatttttact

SEQ ID NO: 131781 - DNA, 22 bp, Artificial Sequence
  Synthetic oligonucleotide; CTC chr11 5295062 5295083 5295067 5295062 -
caggtcttatttttactgctta

SEQ ID NO: 131782 - DNA, 22 bp, Artificial Sequence
  Synthetic oligonucleotide; CTT chr11 5295054 5295075 5295059 5295054 -
atttttactgcttaaacataat

SEQ ID NO: 131783 - DNA, 22 bp, Artificial Sequence
  Synthetic oligonucleotide; TTA chr11 5295053 5295074 5295058 5295053 -
tttttactgcttaaacataata

SEQ ID NO: 131784 - DNA, 22 bp, Artificial Sequence
  Synthetic oligonucleotide; TTT chr11 5295050 5295071 5295055 5295050 -
ttactgcttaaacataataaaa

SEQ ID NO: 131785 - DNA, 22 bp, Artificial Sequence
  Synthetic oligonucleotide; TTT chr11 5295049 5295070 5295054 5295049 -
tactgcttaaacataataaaac

SEQ ID NO: 131786 - DNA, 22 bp, Artificial Sequence
  Synthetic oligonucleotide; TTT chr11 5295048 5295069 5295053 5295048 -
actgcttaaacataataaaaca

SEQ ID NO: 131787 - DNA, 22 bp, Artificial Sequence
  Synthetic oligonucleotide; TTA chr11 5295047 5295068 5295052 5295047 -
ctgcttaaacataataaaacat

SEQ ID NO: 131788 - DNA, 22 bp, Artificial Sequence
  Synthetic oligonucleotide; CTG chr11 5295044 5295065 5295049 5295044 -
cttaaacataataaaacatatg

SEQ ID NO: 131789 - DNA, 22 bp, Artificial Sequence
  Synthetic oligonucleotide; CTT chr11 5295041 5295062 5295046 5295041 -
aaacataataaaacatatggtt

SEQ ID NO: 131790 - DNA, 22 bp, Artificial Sequence
  Synthetic oligonucleotide; TTA chr11 5295040 5295061 5295045 5295040 -
aacataataaaacatatggttc

SEQ ID NO: 131791 - DNA, 22 bp, Artificial Sequence
  Synthetic oligonucleotide; TTC chr11 5295018 5295039 5295023 5295018 -
agtatgcctttgattttacaat

SEQ ID NO: 131792 - DNA, 22 bp, Artificial Sequence
  Synthetic oligonucleotide; CTT chr11 5295008 5295029 5295013 5295008 -
tgattttacaataatattcctg

SEQ ID NO: 131793 - DNA, 22 bp, Artificial Sequence
  Synthetic oligonucleotide; TTT chr11 5295007 5295028 5295012 5295007 -
gattttacaataatattcctgt

SEQ ID NO: 131794 - DNA, 22 bp, Artificial Sequence
  Synthetic oligonucleotide; TTG chr11 5295006 5295027 5295011 5295006 -
attttacaataatattcctgtt

SEQ ID NO: 131795 - DNA, 22 bp, Artificial Sequence
  Synthetic oligonucleotide; TTT chr11 5295002 5295023 5295007 5295002 -
tacaataatattcctgttattt

SEQ ID NO: 131796 - DNA, 22 bp, Artificial Sequence
  Synthetic oligonucleotide; TTT chr11 5295001 5295022 5295006 5295001 -
acaataatattcctgttatttt

SEQ ID NO: 131797 - DNA, 22 bp, Artificial Sequence
  Synthetic oligonucleotide; TTA chr11 5295000 5295021 5295005 5295000 -
caataatattcctgttattttt

SEQ ID NO: 131798 - DNA, 22 bp, Artificial Sequence
  Synthetic oligonucleotide; TTC chr11 5294989 5295010 5294994 5294989 -
ctgttatttttggaagcacagg

SEQ ID NO: 131799 - DNA, 22 bp, Artificial Sequence
  Synthetic oligonucleotide; CTG chr11 5294986 5295007 5294991 5294986 -
ttatttttggaagcacagggtg

SEQ ID NO: 131800 - DNA, 22 bp, Artificial Sequence
  Synthetic oligonucleotide; TTA chr11 5294983 5295004 5294988 5294983 -
tttttggaagcacagggtgtgg

SEQ ID NO: 131801 - DNA, 22 bp, Artificial Sequence
  Synthetic oligonucleotide; TTT chr11 5294980 5295001 5294985 5294980 -
ttggaagcacagggtgtgggat

SEQ ID NO: 131802 - DNA, 22 bp, Artificial Sequence
  Synthetic oligonucleotide; TTT chr11 5294979 5295000 5294984 5294979 -
tggaagcacagggtgtgggata

SEQ ID NO: 131803 - DNA, 22 bp, Artificial Sequence
  Synthetic oligonucleotide; TTT chr11 5294978 5294999 5294983 5294978 -
ggaagcacagggtgtgggataa

SEQ ID NO: 131804 - DNA, 22 bp, Artificial Sequence
  Synthetic oligonucleotide; TTG chr11 5294977 5294998 5294982 5294977 -
gaagcacagggtgtgggataat

SEQ ID NO: 131805 - DNA, 22 bp, Artificial Sequence
  Synthetic oligonucleotide; CTA chr11 5294951 5294972 5294956 5294951 -
attactagtgattagtattgag

SEQ ID NO: 131806 - DNA, 22 bp, Artificial Sequence
  Synthetic oligonucleotide; TTA chr11 5294947 5294968 5294952 5294947 -
ctagtgattagtattgagaggt

SEQ ID NO: 131807 - DNA, 22 bp, Artificial Sequence
  Synthetic oligonucleotide; CTA chr11 5294944 5294965 5294949 5294944 -
gtgattagtattgagaggtgac

SEQ ID NO: 131808 - DNA, 22 bp, Artificial Sequence
  Synthetic oligonucleotide; TTA chr11 5294937 5294958 5294942 5294937 -
gtattgagaggtgacagcgtgc

SEQ ID NO: 131809 - DNA, 22 bp, Artificial Sequence
  Synthetic oligonucleotide; TTG chr11 5294931 5294952 5294936 5294931 -
agaggtgacagcgtgctggcag

SEQ ID NO: 131810 - DNA, 22 bp, Artificial Sequence
  Synthetic oligonucleotide; CTG chr11 5294913 5294934 5294918 5294913 -
gcagtcctcacagccctcgctc

SEQ ID NO: 131811 - DNA, 22 bp, Artificial Sequence
  Synthetic oligonucleotide; CTC chr11 5294904 5294925 5294909 5294904 -
acagccctcgctcgctcttggc

SEQ ID NO: 131812 - DNA, 22 bp, Artificial Sequence
  Synthetic oligonucleotide; CTC chr11 5294895 5294916 5294900 5294895 -
gctcgctcttggcgcctcctct

SEQ ID NO: 131813 - DNA, 22 bp, Artificial Sequence
  Synthetic oligonucleotide; CTC chr11 5294891 5294912 5294896 5294891 -
gctcttggcgcctcctctgcct

SEQ ID NO: 131814 - DNA, 22 bp, Artificial Sequence
  Synthetic oligonucleotide; CTC chr11 5294887 5294908 5294892 5294887 -
ttggcgcctcctctgcctgggc

SEQ ID NO: 131815 - DNA, 22 bp, Artificial Sequence
  Synthetic oligonucleotide; CTT chr11 5294885 5294906 5294890 5294885 -
ggcgcctcctctgcctgggctc

SEQ ID NO: 131816 - DNA, 22 bp, Artificial Sequence
  Synthetic oligonucleotide; TTG chr11 5294884 5294905 5294889 5294884 -
gcgcctcctctgcctgggctcc

SEQ ID NO: 131817 - DNA, 22 bp, Artificial Sequence
  Synthetic oligonucleotide; CTC chr11 5294877 5294898 5294882 5294877 -
ctctgcctgggctcccacattg

SEQ ID NO: 131818 - DNA, 22 bp, Artificial Sequence
  Synthetic oligonucleotide; CTC chr11 5294874 5294895 5294879 5294874 -
tgcctgggctcccacattggtg

SEQ ID NO: 131819 - DNA, 22 bp, Artificial Sequence
  Synthetic oligonucleotide; CTG chr11 5294872 5294893 5294877 5294872 -
cctgggctcccacattggtggc

SEQ ID NO: 131820 - DNA, 22 bp, Artificial Sequence
  Synthetic oligonucleotide; CTG chr11 5294868 5294889 5294873 5294868 -
ggctcccacattggtggcactt

SEQ ID NO: 131821 - DNA, 22 bp, Artificial Sequence
  Synthetic oligonucleotide; CTC chr11 5294863 5294884 5294868 5294863 -
ccacattggtggcacttgagga

SEQ ID NO: 131822 - DNA, 22 bp, Artificial Sequence
  Synthetic oligonucleotide; TTG chr11 5294855 5294876 5294860 5294855 -
gtggcacttgaggagcccttca

SEQ ID NO: 131823 - DNA, 22 bp, Artificial Sequence
  Synthetic oligonucleotide; CTT chr11 5294846 5294867 5294851 5294846 -
gaggagcccttcagccggccgc

SEQ ID NO: 131824 - DNA, 22 bp, Artificial Sequence
  Synthetic oligonucleotide; TTG chr11 5294845 5294866 5294850 5294845 -
aggagcccttcagccggccgct

SEQ ID NO: 131825 - DNA, 22 bp, Artificial Sequence
  Synthetic oligonucleotide; CTT chr11 5294835 5294856 5294840 5294835 -
cagccggccgctgcactgtggg

SEQ ID NO: 131826 - DNA, 22 bp, Artificial Sequence
  Synthetic oligonucleotide; TTC chr11 5294834 5294855 5294839 5294834 -
agccggccgctgcactgtggga

SEQ ID NO: 131827 - DNA, 22 bp, Artificial Sequence
  Synthetic oligonucleotide; CTG chr11 5294822 5294843 5294827 5294822 -
cactgtgggagcccttttctgg

SEQ ID NO: 131828 - DNA, 22 bp, Artificial Sequence
  Synthetic oligonucleotide; CTG chr11 5294817 5294838 5294822 5294817 -
tgggagcccttttctgggctgg

SEQ ID NO: 131829 - DNA, 22 bp, Artificial Sequence
  Synthetic oligonucleotide; CTT chr11 5294806 5294827 5294811 5294806 -
ttctgggctggccaaggccaga

SEQ ID NO: 131830 - DNA, 22 bp, Artificial Sequence
  Synthetic oligonucleotide; TTT chr11 5294805 5294826 5294810 5294805 -
tctgggctggccaaggccagag

SEQ ID NO: 131831 - DNA, 22 bp, Artificial Sequence
  Synthetic oligonucleotide; TTT chr11 5294804 5294825 5294809 5294804 -
ctgggctggccaaggccagagc

SEQ ID NO: 131832 - DNA, 22 bp, Artificial Sequence
  Synthetic oligonucleotide; TTC chr11 5294803 5294824 5294808 5294803 -
tgggctggccaaggccagagcc

SEQ ID NO: 131833 - DNA, 22 bp, Artificial Sequence
  Synthetic oligonucleotide; CTG chr11 5294801 5294822 5294806 5294801 -
ggctggccaaggccagagccgg

SEQ ID NO: 131834 - DNA, 22 bp, Artificial Sequence
  Synthetic oligonucleotide; CTG chr11 5294796 5294817 5294801 5294796 -
gccaaggccagagccggctccc

SEQ ID NO: 131835 - DNA, 22 bp, Artificial Sequence
  Synthetic oligonucleotide; CTC chr11 5294776 5294797 5294781 5294776 -
cctcagcttgccaggaggtgtg

SEQ ID NO: 131836 - DNA, 22 bp, Artificial Sequence
  Synthetic oligonucleotide; CTC chr11 5294772 5294793 5294777 5294772 -
agcttgccaggaggtgtggagg

SEQ ID NO: 131837 - DNA, 22 bp, Artificial Sequence
  Synthetic oligonucleotide; CTT chr11 5294767 5294788 5294772 5294767 -
gccaggaggtgtggagggacag

SEQ ID NO: 131838 - DNA, 22 bp, Artificial Sequence
  Synthetic oligonucleotide; TTG chr11 5294766 5294787 5294771 5294766 -
ccaggaggtgtggagggacaga

SEQ ID NO: 131839 - DNA, 22 bp, Artificial Sequence
  Synthetic oligonucleotide; CTG chr11 5294724 5294745 5294729 5294724 -
tgcgccgtgcttgagggagttc

SEQ ID NO: 131840 - DNA, 22 bp, Artificial Sequence
  Synthetic oligonucleotide; CTT chr11 5294712 5294733 5294717 5294712 -
gagggagttccgggtgggcatg

SEQ ID NO: 131841 - DNA, 22 bp, Artificial Sequence
  Synthetic oligonucleotide; TTG chr11 5294711 5294732 5294716 5294711 -
agggagttccgggtgggcatgg

SEQ ID NO: 131842 - DNA, 22 bp, Artificial Sequence
  Synthetic oligonucleotide; TTC chr11 5294702 5294723 5294707 5294702 -
cgggtgggcatgggctccgagg

SEQ ID NO: 131843 - DNA, 22 bp, Artificial Sequence
  Synthetic oligonucleotide; CTC chr11 5294685 5294706 5294690 5294685 -
cgaggaccccgcactcggagcc

SEQ ID NO: 131844 - DNA, 22 bp, Artificial Sequence
  Synthetic oligonucleotide; CTC chr11 5294669 5294690 5294674 5294669 -
ggagccgccagccggccccacc

SEQ ID NO: 131845 - DNA, 22 bp, Artificial Sequence
  Synthetic oligonucleotide; CTT chr11 5294625 5294646 5294630 5294625 -
agcacctgggccagcagctgct

SEQ ID NO: 131846 - DNA, 22 bp, Artificial Sequence
  Synthetic oligonucleotide; TTA chr11 5294624 5294645 5294629 5294624 -
gcacctgggccagcagctgctg

SEQ ID NO: 131847 - DNA, 22 bp, Artificial Sequence
  Synthetic oligonucleotide; CTG chr11 5294617 5294638 5294622 5294617 -
ggccagcagctgctgtgctcaa

SEQ ID NO: 131848 - DNA, 22 bp, Artificial Sequence
  Synthetic oligonucleotide; CTG chr11 5294605 5294626 5294610 5294605 -
ctgtgctcaattcctcgccggg

SEQ ID NO: 131849 - DNA, 22 bp, Artificial Sequence
  Synthetic oligonucleotide; CTG chr11 5294602 5294623 5294607 5294602 -
tgctcaattcctcgccgggcct

SEQ ID NO: 131850 - DNA, 22 bp, Artificial Sequence
  Synthetic oligonucleotide; CTC chr11 5294597 5294618 5294602 5294597 -
aattcctcgccgggccttagct

SEQ ID NO: 131851 - DNA, 22 bp, Artificial Sequence
  Synthetic oligonucleotide; TTC chr11 5294592 5294613 5294597 5294592 -
ctcgccgggccttagctgcctt

SEQ ID NO: 131852 - DNA, 22 bp, Artificial Sequence
  Synthetic oligonucleotide; CTC chr11 5294589 5294610 5294594 5294589 -
gccgggccttagctgccttcct

SEQ ID NO: 131853 - DNA, 22 bp, Artificial Sequence
  Synthetic oligonucleotide; CTT chr11 5294579 5294600 5294584 5294579 -
agctgccttcctgcggggcagg

SEQ ID NO: 131854 - DNA, 22 bp, Artificial Sequence
  Synthetic oligonucleotide; TTA chr11 5294578 5294599 5294583 5294578 -
gctgccttcctgcggggcaggg

SEQ ID NO: 131855 - DNA, 22 bp, Artificial Sequence
  Synthetic oligonucleotide; CTG chr11 5294574 5294595 5294579 5294574 -
ccttcctgcggggcagggctcg

SEQ ID NO: 131856 - DNA, 22 bp, Artificial Sequence
  Synthetic oligonucleotide; CTT chr11 5294570 5294591 5294575 5294570 -
cctgcggggcagggctcgggac

SEQ ID NO: 131857 - DNA, 22 bp, Artificial Sequence
  Synthetic oligonucleotide; TTC chr11 5294569 5294590 5294574 5294569 -
ctgcggggcagggctcgggacc

SEQ ID NO: 131858 - DNA, 22 bp, Artificial Sequence
  Synthetic oligonucleotide; CTG chr11 5294566 5294587 5294571 5294566 -
cggggcagggctcgggacctgc

SEQ ID NO: 131859 - DNA, 22 bp, Artificial Sequence
  Synthetic oligonucleotide; CTC chr11 5294553 5294574 5294558 5294553 -
gggacctgcagcgcgccatgcc

SEQ ID NO: 131860 - DNA, 22 bp, Artificial Sequence
  Synthetic oligonucleotide; CTG chr11 5294545 5294566 5294550 5294545 -
cagcgcgccatgcctgagcctc

SEQ ID NO: 131861 - DNA, 22 bp, Artificial Sequence
  Synthetic oligonucleotide; CTG chr11 5294529 5294550 5294534 5294529 -
agcctccccaccttcatgggct

SEQ ID NO: 131862 - DNA, 22 bp, Artificial Sequence
  Synthetic oligonucleotide; CTC chr11 5294523 5294544 5294528 5294523 -
cccaccttcatgggctcctgtg

SEQ ID NO: 131863 - DNA, 22 bp, Artificial Sequence
  Synthetic oligonucleotide; CTT chr11 5294515 5294536 5294520 5294515 -
catgggctcctgtgcggcccga

SEQ ID NO: 131864 - DNA, 22 bp, Artificial Sequence
  Synthetic oligonucleotide; TTC chr11 5294514 5294535 5294519 5294514 -
atgggctcctgtgcggcccgag

SEQ ID NO: 131865 - DNA, 22 bp, Artificial Sequence
  Synthetic oligonucleotide; CTC chr11 5294506 5294527 5294511 5294506 -
ctgtgcggcccgagcctcgccg

SEQ ID NO: 131866 - DNA, 22 bp, Artificial Sequence
  Synthetic oligonucleotide; CTG chr11 5294503 5294524 5294508 5294503 -
tgcggcccgagcctcgccgacg

SEQ ID NO: 131867 - DNA, 22 bp, Artificial Sequence
  Synthetic oligonucleotide; CTC chr11 5294488 5294509 5294493 5294488 -
gccgacgagcgccgccccctgc

SEQ ID NO: 131868 - DNA, 22 bp, Artificial Sequence
  Synthetic oligonucleotide; CTG chr11 5294467 5294488 5294472 5294467 -
ctccagggcacccagtcccatc

SEQ ID NO: 131869 - DNA, 22 bp, Artificial Sequence
  Synthetic oligonucleotide; CTC chr11 5294464 5294485 5294469 5294464 -
cagggcacccagtcccatcgac

SEQ ID NO: 131870 - DNA, 22 bp, Artificial Sequence
  Synthetic oligonucleotide; CTG chr11 5294429 5294450 5294434 5294429 -
aagagtgcgggcgcacggcagg

SEQ ID NO: 131871 - DNA, 22 bp, Artificial Sequence
  Synthetic oligonucleotide; CTG chr11 5294401 5294422 5294406 5294401 -
gcaggcagctccccctgcagcc

SEQ ID NO: 131872 - DNA, 22 bp, Artificial Sequence
  Synthetic oligonucleotide; CTC chr11 5294390 5294411 5294395 5294390 -
cccctgcagcccaggtgcggga

SEQ ID NO: 131873 - DNA, 22 bp, Artificial Sequence
  Synthetic oligonucleotide; CTG chr11 5294384 5294405 5294389 5294384 -
cagcccaggtgcgggatccact

SEQ ID NO: 131874 - DNA, 22 bp, Artificial Sequence
  Synthetic oligonucleotide; CTG chr11 5294361 5294382 5294366 5294361 -
ggtgaagccggctaggctcctg

SEQ ID NO: 131875 - DNA, 22 bp, Artificial Sequence
  Synthetic oligonucleotide; CTA chr11 5294347 5294368 5294352 5294347 -
ggctcctgagtttgctggggat

SEQ ID NO: 131876 - DNA, 22 bp, Artificial Sequence
  Synthetic oligonucleotide; CTC chr11 5294342 5294363 5294347 5294342 -
ctgagtttgctggggatgcgaa

SEQ ID NO: 131877 - DNA, 22 bp, Artificial Sequence
  Synthetic oligonucleotide; CTG chr11 5294339 5294360 5294344 5294339 -
agtttgctggggatgcgaagaa

SEQ ID NO: 131878 - DNA, 22 bp, Artificial Sequence
  Synthetic oligonucleotide; TTT chr11 5294334 5294355 5294339 5294334 -
gctggggatgcgaagaaccctt

SEQ ID NO: 131879 - DNA, 22 bp, Artificial Sequence
  Synthetic oligonucleotide; TTG chr11 5294333 5294354 5294338 5294333 -
ctggggatgcgaagaaccctta

SEQ ID NO: 131880 - DNA, 22 bp, Artificial Sequence
  Synthetic oligonucleotide; CTG chr11 5294330 5294351 5294335 5294330 -
gggatgcgaagaacccttatgt

SEQ ID NO: 131881 - DNA, 22 bp, Artificial Sequence
  Synthetic oligonucleotide; CTT chr11 5294312 5294333 5294317 5294312 -
atgtctagataagggattgtaa

SEQ ID NO: 131882 - DNA, 22 bp, Artificial Sequence
  Synthetic oligonucleotide; TTA chr11 5294311 5294332 5294316 5294311 -
tgtctagataagggattgtaaa

SEQ ID NO: 131883 - DNA, 22 bp, Artificial Sequence
  Synthetic oligonucleotide; CTA chr11 5294305 5294326 5294310 5294305 -
gataagggattgtaaatacacc

SEQ ID NO: 131884 - DNA, 22 bp, Artificial Sequence
  Synthetic oligonucleotide; TTG chr11 5294293 5294314 5294298 5294293 -
taaatacaccaattggcactct

SEQ ID NO: 131885 - DNA, 22 bp, Artificial Sequence
  Synthetic oligonucleotide; TTG chr11 5294278 5294299 5294283 5294278 -
gcactctgtatctagctcaagg

SEQ ID NO: 131886 - DNA, 22 bp, Artificial Sequence
  Synthetic oligonucleotide; CTC chr11 5294272 5294293 5294277 5294272 -
tgtatctagctcaaggtttgta

SEQ ID NO: 131887 - DNA, 22 bp, Artificial Sequence
  Synthetic oligonucleotide; CTG chr11 5294270 5294291 5294275 5294270 -
tatctagctcaaggtttgtaaa

SEQ ID NO: 131888 - DNA, 22 bp, Artificial Sequence
  Synthetic oligonucleotide; CTA chr11 5294264 5294285 5294269 5294264 -
gctcaaggtttgtaaacacacc

SEQ ID NO: 131889 - DNA, 22 bp, Artificial Sequence
  Synthetic oligonucleotide; CTC chr11 5294260 5294281 5294265 5294260 -
aaggtttgtaaacacaccaatc

SEQ ID NO: 131890 - DNA, 22 bp, Artificial Sequence
  Synthetic oligonucleotide; TTT chr11 5294253 5294274 5294258 5294253 -
gtaaacacaccaatcagcaccc

SEQ ID NO: 131891 - DNA, 22 bp, Artificial Sequence
  Synthetic oligonucleotide; TTG chr11 5294252 5294273 5294257 5294252 -
taaacacaccaatcagcaccct

SEQ ID NO: 131892 - DNA, 22 bp, Artificial Sequence
  Synthetic oligonucleotide; CTG chr11 5294229 5294250 5294234 5294229 -
tgtctagctcagggtttgtgaa

SEQ ID NO: 131893 - DNA, 22 bp, Artificial Sequence
  Synthetic oligonucleotide; CTA chr11 5294223 5294244 5294228 5294223 -
gctcagggtttgtgaatgcacc

SEQ ID NO: 131894 - DNA, 22 bp, Artificial Sequence
  Synthetic oligonucleotide; CTC chr11 5294219 5294240 5294224 5294219 -
agggtttgtgaatgcaccaatc

SEQ ID NO: 131895 - DNA, 22 bp, Artificial Sequence
  Synthetic oligonucleotide; TTT chr11 5294212 5294233 5294217 5294212 -
gtgaatgcaccaatcaacactc

SEQ ID NO: 131896 - DNA, 22 bp, Artificial Sequence
  Synthetic oligonucleotide; TTG chr11 5294211 5294232 5294216 5294211 -
tgaatgcaccaatcaacactct

SEQ ID NO: 131897 - DNA, 22 bp, Artificial Sequence
  Synthetic oligonucleotide; CTC chr11 5294190 5294211 5294195 5294190 -
tatctagctactctggtggggc

SEQ ID NO: 131898 - DNA, 22 bp, Artificial Sequence
  Synthetic oligonucleotide; CTA chr11 5294188 5294209 5294193 5294188 -
tctagctactctggtggggcct

SEQ ID NO: 131899 - DNA, 22 bp, Artificial Sequence
  Synthetic oligonucleotide; CTA chr11 5294184 5294205 5294189 5294184 -
gctactctggtggggccttgga

SEQ ID NO: 131900 - DNA, 22 bp, Artificial Sequence
  Synthetic oligonucleotide; CTA chr11 5294180 5294201 5294185 5294180 -
ctctggtggggccttggagaac

SEQ ID NO: 131901 - DNA, 22 bp, Artificial Sequence
  Synthetic oligonucleotide; CTC chr11 5294177 5294198 5294182 5294177 -
tggtggggccttggagaacctt

SEQ ID NO: 131902 - DNA, 22 bp, Artificial Sequence
  Synthetic oligonucleotide; CTG chr11 5294175 5294196 5294180 5294175 -
gtggggccttggagaaccttta

SEQ ID NO: 131903 - DNA, 22 bp, Artificial Sequence
  Synthetic oligonucleotide; CTT chr11 5294165 5294186 5294170 5294165 -
ggagaacctttatgtctagctc

SEQ ID NO: 131904 - DNA, 22 bp, Artificial Sequence
  Synthetic oligonucleotide; TTG chr11 5294164 5294185 5294169 5294164 -
gagaacctttatgtctagctca

SEQ ID NO: 131905 - DNA, 22 bp, Artificial Sequence
  Synthetic oligonucleotide; CTT chr11 5294155 5294176 5294160 5294155 -
tatgtctagctcagggattgta

SEQ ID NO: 131906 - DNA, 22 bp, Artificial Sequence
  Synthetic oligonucleotide; TTT chr11 5294154 5294175 5294159 5294154 -
atgtctagctcagggattgtaa

SEQ ID NO: 131907 - DNA, 22 bp, Artificial Sequence
  Synthetic oligonucleotide; TTA chr11 5294153 5294174 5294158 5294153 -
tgtctagctcagggattgtaaa

SEQ ID NO: 131908 - DNA, 22 bp, Artificial Sequence
  Synthetic oligonucleotide; CTA chr11 5294147 5294168 5294152 5294147 -
gctcagggattgtaaatacacc

SEQ ID NO: 131909 - DNA, 22 bp, Artificial Sequence
  Synthetic oligonucleotide; CTC chr11 5294143 5294164 5294148 5294143 -
agggattgtaaatacaccaatc

SEQ ID NO: 131910 - DNA, 22 bp, Artificial Sequence
  Synthetic oligonucleotide; TTG chr11 5294135 5294156 5294140 5294135 -
taaatacaccaatcggcagtct

SEQ ID NO: 131911 - DNA, 22 bp, Artificial Sequence
  Synthetic oligonucleotide; CTG chr11 5294112 5294133 5294117 5294112 -
tatctagctcaaggtttgtaaa

SEQ ID NO: 131912 - DNA, 22 bp, Artificial Sequence
  Synthetic oligonucleotide; CTA chr11 5294106 5294127 5294111 5294106 -
gctcaaggtttgtaaacacacc

SEQ ID NO: 131913 - DNA, 22 bp, Artificial Sequence
  Synthetic oligonucleotide; CTC chr11 5294102 5294123 5294107 5294102 -
aaggtttgtaaacacaccaatc

SEQ ID NO: 131914 - DNA, 22 bp, Artificial Sequence
  Synthetic oligonucleotide; TTT chr11 5294095 5294116 5294100 5294095 -
gtaaacacaccaatcagcaccc

SEQ ID NO: 131915 - DNA, 22 bp, Artificial Sequence
  Synthetic oligonucleotide; TTG chr11 5294094 5294115 5294099 5294094 -
taaacacaccaatcagcaccct

SEQ ID NO: 131916 - DNA, 22 bp, Artificial Sequence
  Synthetic oligonucleotide; CTG chr11 5294071 5294092 5294076 5294071 -
tgtctagctcagggtttgtgaa

SEQ ID NO: 131917 - DNA, 22 bp, Artificial Sequence
  Synthetic oligonucleotide; CTA chr11 5294065 5294086 5294070 5294065 -
gctcagggtttgtgaatgcacc

SEQ ID NO: 131918 - DNA, 22 bp, Artificial Sequence
  Synthetic oligonucleotide; CTC chr11 5294061 5294082 5294066 5294061 -
agggtttgtgaatgcaccaatc

SEQ ID NO: 131919 - DNA, 22 bp, Artificial Sequence
  Synthetic oligonucleotide; TTT chr11 5294054 5294075 5294059 5294054 -
gtgaatgcaccaatcaacactc

SEQ ID NO: 131920 - DNA, 22 bp, Artificial Sequence
  Synthetic oligonucleotide; TTG chr11 5294053 5294074 5294058 5294053 -
tgaatgcaccaatcaacactct

SEQ ID NO: 131921 - DNA, 22 bp, Artificial Sequence
  Synthetic oligonucleotide; CTC chr11 5294032 5294053 5294037 5294032 -
tgtatctagctactctggtggg

SEQ ID NO: 131922 - DNA, 22 bp, Artificial Sequence
  Synthetic oligonucleotide; CTG chr11 5294030 5294051 5294035 5294030 -
tatctagctactctggtgggga

SEQ ID NO: 131923 - DNA, 22 bp, Artificial Sequence
  Synthetic oligonucleotide; CTA chr11 5294024 5294045 5294029 5294024 -
gctactctggtggggacgtgga

SEQ ID NO: 131924 - DNA, 22 bp, Artificial Sequence
  Synthetic oligonucleotide; CTA chr11 5294020 5294041 5294025 5294020 -
ctctggtggggacgtggagaac

SEQ ID NO: 131925 - DNA, 22 bp, Artificial Sequence
  Synthetic oligonucleotide; CTC chr11 5294017 5294038 5294022 5294017 -
tggtggggacgtggagaacctt

SEQ ID NO: 131926 - DNA, 22 bp, Artificial Sequence
  Synthetic oligonucleotide; CTG chr11 5294015 5294036 5294020 5294015 -
gtggggacgtggagaaccttta

SEQ ID NO: 131927 - DNA, 22 bp, Artificial Sequence
  Synthetic oligonucleotide; CTT chr11 5293995 5294016 5294000 5293995 -
tatgtctagctcagggattgta

SEQ ID NO: 131928 - DNA, 22 bp, Artificial Sequence
  Synthetic oligonucleotide; TTT chr11 5293994 5294015 5293999 5293994 -
atgtctagctcagggattgtaa

SEQ ID NO: 131929 - DNA, 22 bp, Artificial Sequence
  Synthetic oligonucleotide; TTA chr11 5293993 5294014 5293998 5293993 -
tgtctagctcagggattgtaaa

SEQ ID NO: 131930 - DNA, 22 bp, Artificial Sequence
  Synthetic oligonucleotide; CTA chr11 5293987 5294008 5293992 5293987 -
gctcagggattgtaaatacacc

SEQ ID NO: 131931 - DNA, 22 bp, Artificial Sequence
  Synthetic oligonucleotide; CTC chr11 5293983 5294004 5293988 5293983 -
agggattgtaaatacaccactc

SEQ ID NO: 131932 - DNA, 22 bp, Artificial Sequence
  Synthetic oligonucleotide; TTG chr11 5293975 5293996 5293980 5293975 -
taaatacaccactcggcagtct

SEQ ID NO: 131933 - DNA, 22 bp, Artificial Sequence
  Synthetic oligonucleotide; CTC chr11 5293961 5293982 5293966 5293961 -
ggcagtctgtatctagctcaag

SEQ ID NO: 131934 - DNA, 22 bp, Artificial Sequence
  Synthetic oligonucleotide; CTG chr11 5293952 5293973 5293957 5293952 -
tatctagctcaaggtttgtaaa

SEQ ID NO: 131935 - DNA, 22 bp, Artificial Sequence
  Synthetic oligonucleotide; CTA chr11 5293946 5293967 5293951 5293946 -
gctcaaggtttgtaaacacacc

SEQ ID NO: 131936 - DNA, 22 bp, Artificial Sequence
  Synthetic oligonucleotide; CTC chr11 5293942 5293963 5293947 5293942 -
aaggtttgtaaacacaccaatc

SEQ ID NO: 131937 - DNA, 22 bp, Artificial Sequence
  Synthetic oligonucleotide; TTT chr11 5293935 5293956 5293940 5293935 -
gtaaacacaccaatcagcaccc

SEQ ID NO: 131938 - DNA, 22 bp, Artificial Sequence
  Synthetic oligonucleotide; TTG chr11 5293934 5293955 5293939 5293934 -
taaacacaccaatcagcaccct

SEQ ID NO: 131939 - DNA, 22 bp, Artificial Sequence
  Synthetic oligonucleotide; CTG chr11 5293911 5293932 5293916 5293911 -
tgtctagctcagggtttgtgaa

SEQ ID NO: 131940 - DNA, 22 bp, Artificial Sequence
  Synthetic oligonucleotide; CTA chr11 5293905 5293926 5293910 5293905 -
gctcagggtttgtgaatgcacc

SEQ ID NO: 131941 - DNA, 22 bp, Artificial Sequence
  Synthetic oligonucleotide; CTC chr11 5293901 5293922 5293906 5293901 -
agggtttgtgaatgcaccaatc

SEQ ID NO: 131942 - DNA, 22 bp, Artificial Sequence
  Synthetic oligonucleotide; TTT chr11 5293894 5293915 5293899 5293894 -
gtgaatgcaccaatcaacactc

SEQ ID NO: 131943 - DNA, 22 bp, Artificial Sequence
  Synthetic oligonucleotide; TTG chr11 5293893 5293914 5293898 5293893 -
tgaatgcaccaatcaacactct

SEQ ID NO: 131944 - DNA, 22 bp, Artificial Sequence
  Synthetic oligonucleotide; CTC chr11 5293872 5293893 5293877 5293872 -
tgtatctagctactctggtggg

SEQ ID NO: 131945 - DNA, 22 bp, Artificial Sequence
  Synthetic oligonucleotide; CTG chr11 5293870 5293891 5293875 5293870 -
tatctagctactctggtgggga

SEQ ID NO: 131946 - DNA, 22 bp, Artificial Sequence
  Synthetic oligonucleotide; CTA chr11 5293864 5293885 5293869 5293864 -
gctactctggtggggacttgga

SEQ ID NO: 131947 - DNA, 22 bp, Artificial Sequence
  Synthetic oligonucleotide; CTA chr11 5293860 5293881 5293865 5293860 -
ctctggtggggacttggagaac

SEQ ID NO: 131948 - DNA, 22 bp, Artificial Sequence
  Synthetic oligonucleotide; CTC chr11 5293857 5293878 5293862 5293857 -
tggtggggacttggagaacctt

SEQ ID NO: 131949 - DNA, 22 bp, Artificial Sequence
  Synthetic oligonucleotide; CTG chr11 5293855 5293876 5293860 5293855 -
gtggggacttggagaacctttg

SEQ ID NO: 131950 - DNA, 22 bp, Artificial Sequence
  Synthetic oligonucleotide; CTT chr11 5293845 5293866 5293850 5293845 -
ggagaacctttgtgtggacact

SEQ ID NO: 131951 - DNA, 22 bp, Artificial Sequence
  Synthetic oligonucleotide; TTG chr11 5293844 5293865 5293849 5293844 -
gagaacctttgtgtggacactc

SEQ ID NO: 131952 - DNA, 22 bp, Artificial Sequence
  Synthetic oligonucleotide; CTT chr11 5293835 5293856 5293840 5293835 -
tgtgtggacactctgtatctag

SEQ ID NO: 131953 - DNA, 22 bp, Artificial Sequence
  Synthetic oligonucleotide; TTT chr11 5293834 5293855 5293839 5293834 -
gtgtggacactctgtatctagc

SEQ ID NO: 131954 - DNA, 22 bp, Artificial Sequence
  Synthetic oligonucleotide; TTG chr11 5293833 5293854 5293838 5293833 -
tgtggacactctgtatctagct

SEQ ID NO: 131955 - DNA, 22 bp, Artificial Sequence
  Synthetic oligonucleotide; CTC chr11 5293822 5293843 5293827 5293822 -
tgtatctagctaatctggtggg

SEQ ID NO: 131956 - DNA, 22 bp, Artificial Sequence
  Synthetic oligonucleotide; CTG chr11 5293820 5293841 5293825 5293820 -
tatctagctaatctggtgggga

SEQ ID NO: 131957 - DNA, 22 bp, Artificial Sequence
  Synthetic oligonucleotide; CTA chr11 5293814 5293835 5293819 5293814 -
gctaatctggtggggacgtgga

SEQ ID NO: 131958 - DNA, 22 bp, Artificial Sequence
  Synthetic oligonucleotide; CTA chr11 5293810 5293831 5293815 5293810 -
atctggtggggacgtggagaac

SEQ ID NO: 131959 - DNA, 22 bp, Artificial Sequence
  Synthetic oligonucleotide; CTG chr11 5293805 5293826 5293810 5293805 -
gtggggacgtggagaacctttg

SEQ ID NO: 131960 - DNA, 22 bp, Artificial Sequence
  Synthetic oligonucleotide; CTT chr11 5293785 5293806 5293790 5293785 -
tgtgtctagctcatggattgta

SEQ ID NO: 131961 - DNA, 22 bp, Artificial Sequence
  Synthetic oligonucleotide; TTT chr11 5293784 5293805 5293789 5293784 -
gtgtctagctcatggattgtaa

SEQ ID NO: 131962 - DNA, 22 bp, Artificial Sequence
  Synthetic oligonucleotide; TTG chr11 5293783 5293804 5293788 5293783 -
tgtctagctcatggattgtaaa

SEQ ID NO: 131963 - DNA, 22 bp, Artificial Sequence
  Synthetic oligonucleotide; CTA chr11 5293777 5293798 5293782 5293777 -
gctcatggattgtaaatgcacc

SEQ ID NO: 131964 - DNA, 22 bp, Artificial Sequence
  Synthetic oligonucleotide; CTC chr11 5293773 5293794 5293778 5293773 -
atggattgtaaatgcaccaatc

SEQ ID NO: 131965 - DNA, 22 bp, Artificial Sequence
  Synthetic oligonucleotide; TTG chr11 5293765 5293786 5293770 5293765 -
taaatgcaccaatcagtgccct

SEQ ID NO: 131966 - DNA, 22 bp, Artificial Sequence
  Synthetic oligonucleotide; CTG chr11 5293742 5293763 5293747 5293742 -
tcaaaacagaccactgggctct

SEQ ID NO: 131967 - DNA, 22 bp, Artificial Sequence
  Synthetic oligonucleotide; CTG chr11 5293726 5293747 5293731 5293726 -
ggctctaccaatcagcaggatg

SEQ ID NO: 131968 - DNA, 22 bp, Artificial Sequence
  Synthetic oligonucleotide; CTC chr11 5293721 5293742 5293726 5293721 -
taccaatcagcaggatgtgggt

SEQ ID NO: 131969 - DNA, 22 bp, Artificial Sequence
  Synthetic oligonucleotide; CTA chr11 5293719 5293740 5293724 5293719 -
ccaatcagcaggatgtgggtgg

SEQ ID NO: 131970 - DNA, 22 bp, Artificial Sequence
  Synthetic oligonucleotide; CTG chr11 5293669 5293690 5293674 5293669 -
cccgagccagcagtggcaaccc

SEQ ID NO: 131971 - DNA, 22 bp, Artificial Sequence
  Synthetic oligonucleotide; CTC chr11 5293643 5293664 5293648 5293643 -
gggtccccttccacactgtgga

SEQ ID NO: 131972 - DNA, 22 bp, Artificial Sequence
  Synthetic oligonucleotide; CTT chr11 5293633 5293654 5293638 5293633 -
ccacactgtggaagctttgttc

SEQ ID NO: 131973 - DNA, 22 bp, Artificial Sequence
  Synthetic oligonucleotide; TTC chr11 5293632 5293653 5293637 5293632 -
cacactgtggaagctttgttct

SEQ ID NO: 131974 - DNA, 22 bp, Artificial Sequence
  Synthetic oligonucleotide; CTG chr11 5293625 5293646 5293630 5293625 -
tggaagctttgttctttcgctc

SEQ ID NO: 131975 - DNA, 22 bp, Artificial Sequence
  Synthetic oligonucleotide; CTT chr11 5293616 5293637 5293621 5293616 -
tgttctttcgctctttgcaata

SEQ ID NO: 131976 - DNA, 22 bp, Artificial Sequence
  Synthetic oligonucleotide; TTT chr11 5293615 5293636 5293620 5293615 -
gttctttcgctctttgcaataa

SEQ ID NO: 131977 - DNA, 22 bp, Artificial Sequence
  Synthetic oligonucleotide; TTG chr11 5293614 5293635 5293619 5293614 -
ttctttcgctctttgcaataaa

SEQ ID NO: 131978 - DNA, 22 bp, Artificial Sequence
  Synthetic oligonucleotide; TTC chr11 5293611 5293632 5293616 5293611 -
tttcgctctttgcaataaatct

SEQ ID NO: 131979 - DNA, 22 bp, Artificial Sequence
  Synthetic oligonucleotide; CTT chr11 5293609 5293630 5293614 5293609 -
tcgctctttgcaataaatcttg

SEQ ID NO: 131980 - DNA, 22 bp, Artificial Sequence
  Synthetic oligonucleotide; TTT chr11 5293608 5293629 5293613 5293608 -
cgctctttgcaataaatcttgc

SEQ ID NO: 131981 - DNA, 22 bp, Artificial Sequence
  Synthetic oligonucleotide; TTC chr11 5293607 5293628 5293612 5293607 -
gctctttgcaataaatcttgct

SEQ ID NO: 131982 - DNA, 22 bp, Artificial Sequence
  Synthetic oligonucleotide; CTC chr11 5293603 5293624 5293608 5293603 -
tttgcaataaatcttgctgctg

SEQ ID NO: 131983 - DNA, 22 bp, Artificial Sequence
  Synthetic oligonucleotide; CTT chr11 5293601 5293622 5293606 5293601 -
tgcaataaatcttgctgctgct

SEQ ID NO: 131984 - DNA, 22 bp, Artificial Sequence
  Synthetic oligonucleotide; TTT chr11 5293600 5293621 5293605 5293600 -
gcaataaatcttgctgctgctc

SEQ ID NO: 131985 - DNA, 22 bp, Artificial Sequence
  Synthetic oligonucleotide; TTG chr11 5293599 5293620 5293604 5293599 -
caataaatcttgctgctgctca

SEQ ID NO: 131986 - DNA, 22 bp, Artificial Sequence
  Synthetic oligonucleotide; CTT chr11 5293588 5293609 5293593 5293588 -
gctgctgctcactgtttgggtc

SEQ ID NO: 131987 - DNA, 22 bp, Artificial Sequence
  Synthetic oligonucleotide; TTG chr11 5293587 5293608 5293592 5293587 -
ctgctgctcactgtttgggtct

SEQ ID NO: 131988 - DNA, 22 bp, Artificial Sequence
  Synthetic oligonucleotide; CTG chr11 5293584 5293605 5293589 5293584 -
ctgctcactgtttgggtctaca

SEQ ID NO: 131989 - DNA, 22 bp, Artificial Sequence
  Synthetic oligonucleotide; CTG chr11 5293581 5293602 5293586 5293581 -
ctcactgtttgggtctacactg

SEQ ID NO: 131990 - DNA, 22 bp, Artificial Sequence
  Synthetic oligonucleotide; CTC chr11 5293578 5293599 5293583 5293578 -
actgtttgggtctacactgcct

SEQ ID NO: 131991 - DNA, 22 bp, Artificial Sequence
  Synthetic oligonucleotide; CTG chr11 5293574 5293595 5293579 5293574 -
tttgggtctacactgcctttat

SEQ ID NO: 131992 - DNA, 22 bp, Artificial Sequence
  Synthetic oligonucleotide; TTT chr11 5293571 5293592 5293576 5293571 -
gggtctacactgcctttatgag

SEQ ID NO: 131993 - DNA, 22 bp, Artificial Sequence
  Synthetic oligonucleotide; TTG chr11 5293570 5293591 5293575 5293570 -
ggtctacactgcctttatgagc

SEQ ID NO: 131994 - DNA, 22 bp, Artificial Sequence
  Synthetic oligonucleotide; CTA chr11 5293564 5293585 5293569 5293564 -
cactgcctttatgagctgtaac

SEQ ID NO: 131995 - DNA, 22 bp, Artificial Sequence
  Synthetic oligonucleotide; CTG chr11 5293559 5293580 5293564 5293559 -
cctttatgagctgtaacgctca

SEQ ID NO: 131996 - DNA, 22 bp, Artificial Sequence
  Synthetic oligonucleotide; CTT chr11 5293555 5293576 5293560 5293555 -
tatgagctgtaacgctcaccgc

SEQ ID NO: 131997 - DNA, 22 bp, Artificial Sequence
  Synthetic oligonucleotide; TTT chr11 5293554 5293575 5293559 5293554 -
atgagctgtaacgctcaccgcg

SEQ ID NO: 131998 - DNA, 22 bp, Artificial Sequence
  Synthetic oligonucleotide; TTA chr11 5293553 5293574 5293558 5293553 -
tgagctgtaacgctcaccgcga

SEQ ID NO: 131999 - DNA, 22 bp, Artificial Sequence
  Synthetic oligonucleotide; CTG chr11 5293546 5293567 5293551 5293546 -
taacgctcaccgcgaaggtctg

SEQ ID NO: 132000 - DNA, 22 bp, Artificial Sequence
  Synthetic oligonucleotide; CTC chr11 5293538 5293559 5293543 5293538 -
accgcgaaggtctgcagcttca

SEQ ID NO: 132001 - DNA, 22 bp, Artificial Sequence
  Synthetic oligonucleotide; CTG chr11 5293524 5293545 5293529 5293524 -
cagcttcactcttgaagccagc

SEQ ID NO: 132002 - DNA, 22 bp, Artificial Sequence
  Synthetic oligonucleotide; CTT chr11 5293518 5293539 5293523 5293518 -
cactcttgaagccagcgagacc

SEQ ID NO: 132003 - DNA, 22 bp, Artificial Sequence
  Synthetic oligonucleotide; TTC chr11 5293517 5293538 5293522 5293517 -
actcttgaagccagcgagacca

SEQ ID NO: 132004 - DNA, 22 bp, Artificial Sequence
  Synthetic oligonucleotide; CTC chr11 5293513 5293534 5293518 5293513 -
ttgaagccagcgagaccacgaa

SEQ ID NO: 132005 - DNA, 22 bp, Artificial Sequence
  Synthetic oligonucleotide; CTT chr11 5293511 5293532 5293516 5293511 -
gaagccagcgagaccacgaacc

SEQ ID NO: 132006 - DNA, 22 bp, Artificial Sequence
  Synthetic oligonucleotide; TTG chr11 5293510 5293531 5293515 5293510 -
aagccagcgagaccacgaaccc

SEQ ID NO: 132007 - DNA, 22 bp, Artificial Sequence
  Synthetic oligonucleotide; CTC chr11 5293467 5293488 5293472 5293467 -
cagaggcgccgccttaagagct

SEQ ID NO: 132008 - DNA, 22 bp, Artificial Sequence
  Synthetic oligonucleotide; CTT chr11 5293452 5293473 5293457 5293452 -
aagagctggaacgttcactgtg

SEQ ID NO: 132009 - DNA, 22 bp, Artificial Sequence
  Synthetic oligonucleotide; TTA chr11 5293451 5293472 5293456 5293451 -
agagctggaacgttcactgtga

SEQ ID NO: 132010 - DNA, 22 bp, Artificial Sequence
  Synthetic oligonucleotide; CTG chr11 5293444 5293465 5293449 5293444 -
gaacgttcactgtgaaggtctg

SEQ ID NO: 132011 - DNA, 22 bp, Artificial Sequence
  Synthetic oligonucleotide; TTC chr11 5293436 5293457 5293441 5293436 -
actgtgaaggtctgcagcttca

SEQ ID NO: 132012 - DNA, 22 bp, Artificial Sequence
  Synthetic oligonucleotide; CTG chr11 5293432 5293453 5293437 5293432 -
tgaaggtctgcagcttcactcc

SEQ ID NO: 132013 - DNA, 22 bp, Artificial Sequence
  Synthetic oligonucleotide; CTG chr11 5293422 5293443 5293427 5293422 -
cagcttcactcctgagccagcg

SEQ ID NO: 132014 - DNA, 22 bp, Artificial Sequence
  Synthetic oligonucleotide; CTT chr11 5293416 5293437 5293421 5293416 -
cactcctgagccagcgagacca

SEQ ID NO: 132015 - DNA, 22 bp, Artificial Sequence
  Synthetic oligonucleotide; TTC chr11 5293415 5293436 5293420 5293415 -
actcctgagccagcgagaccac

SEQ ID NO: 132016 - DNA, 22 bp, Artificial Sequence
  Synthetic oligonucleotide; CTC chr11 5293411 5293432 5293416 5293411 -
ctgagccagcgagaccacgaac

SEQ ID NO: 132017 - DNA, 22 bp, Artificial Sequence
  Synthetic oligonucleotide; CTG chr11 5293408 5293429 5293413 5293408 -
agccagcgagaccacgaaccca

SEQ ID NO: 132018 - DNA, 22 bp, Artificial Sequence
  Synthetic oligonucleotide; CTC chr11 5293369 5293390 5293374 5293369 -
cgaacacatccaaacatcagaa

SEQ ID NO: 132019 - DNA, 22 bp, Artificial Sequence
  Synthetic oligonucleotide; CTC chr11 5293336 5293357 5293341 5293336 -
cacacacgcagcctttaagaac

SEQ ID NO: 132020 - DNA, 22 bp, Artificial Sequence
  Synthetic oligonucleotide; CTT chr11 5293321 5293342 5293326 5293321 -
taagaactgtaacactcaccac

SEQ ID NO: 132021 - DNA, 22 bp, Artificial Sequence
  Synthetic oligonucleotide; TTT chr11 5293320 5293341 5293325 5293320 -
aagaactgtaacactcaccacg

SEQ ID NO: 132022 - DNA, 22 bp, Artificial Sequence
  Synthetic oligonucleotide; TTA chr11 5293319 5293340 5293324 5293319 -
agaactgtaacactcaccacga

SEQ ID NO: 132023 - DNA, 22 bp, Artificial Sequence
  Synthetic oligonucleotide; CTG chr11 5293312 5293333 5293317 5293312 -
taacactcaccacgagggtccc

SEQ ID NO: 132024 - DNA, 22 bp, Artificial Sequence
  Synthetic oligonucleotide; CTC chr11 5293304 5293325 5293309 5293304 -
accacgagggtccccggcttca

SEQ ID NO: 132025 - DNA, 22 bp, Artificial Sequence
  Synthetic oligonucleotide; CTT chr11 5293284 5293305 5293289 5293284 -
cattcttgaagtcagtgaaacc

SEQ ID NO: 132026 - DNA, 22 bp, Artificial Sequence
  Synthetic oligonucleotide; TTC chr11 5293283 5293304 5293288 5293283 -
attcttgaagtcagtgaaacca

SEQ ID NO: 132027 - DNA, 22 bp, Artificial Sequence
  Synthetic oligonucleotide; TTC chr11 5293279 5293300 5293284 5293279 -
ttgaagtcagtgaaaccaagaa

SEQ ID NO: 132028 - DNA, 22 bp, Artificial Sequence
  Synthetic oligonucleotide; CTT chr11 5293277 5293298 5293282 5293277 -
gaagtcagtgaaaccaagaacc

SEQ ID NO: 132029 - DNA, 22 bp, Artificial Sequence
  Synthetic oligonucleotide; TTG chr11 5293276 5293297 5293281 5293276 -
aagtcagtgaaaccaagaaccc

SEQ ID NO: 132030 - DNA, 22 bp, Artificial Sequence
  Synthetic oligonucleotide; TTC chr11 5293246 5293267 5293251 5293246 -
cggacacagtatgtcagaaaca

SEQ ID NO: 132031 - DNA, 22 bp, Artificial Sequence
  Synthetic oligonucleotide; CTA chr11 5293211 5293232 5293216 5293211 -
aatcaatatacttctcaacaat

SEQ ID NO: 132032 - DNA, 22 bp, Artificial Sequence
  Synthetic oligonucleotide; CTT chr11 5293198 5293219 5293203 5293198 -
ctcaacaatttccaacagccct

SEQ ID NO: 132033 - DNA, 22 bp, Artificial Sequence
  Synthetic oligonucleotide; TTC chr11 5293197 5293218 5293202 5293197 -
tcaacaatttccaacagccctt

SEQ ID NO: 132034 - DNA, 22 bp, Artificial Sequence
  Synthetic oligonucleotide; CTC chr11 5293195 5293216 5293200 5293195 -
aacaatttccaacagcccttgc

SEQ ID NO: 132035 - DNA, 22 bp, Artificial Sequence
  Synthetic oligonucleotide; TTT chr11 5293187 5293208 5293192 5293187 -
ccaacagcccttgcaattaact

SEQ ID NO: 132036 - DNA, 22 bp, Artificial Sequence
  Synthetic oligonucleotide; TTC chr11 5293186 5293207 5293191 5293186 -
caacagcccttgcaattaactt

SEQ ID NO: 132037 - DNA, 22 bp, Artificial Sequence
  Synthetic oligonucleotide; CTT chr11 5293175 5293196 5293180 5293175 -
gcaattaacttggccatgtgac

SEQ ID NO: 132038 - DNA, 22 bp, Artificial Sequence
  Synthetic oligonucleotide; TTG chr11 5293174 5293195 5293179 5293174 -
caattaacttggccatgtgact

SEQ ID NO: 132039 - DNA, 22 bp, Artificial Sequence
  Synthetic oligonucleotide; TTA chr11 5293168 5293189 5293173 5293168 -
acttggccatgtgactggttgt

SEQ ID NO: 132040 - DNA, 22 bp, Artificial Sequence
  Synthetic oligonucleotide; CTT chr11 5293164 5293185 5293169 5293164 -
ggccatgtgactggttgtgact

SEQ ID NO: 132041 - DNA, 22 bp, Artificial Sequence
  Synthetic oligonucleotide; TTG chr11 5293163 5293184 5293168 5293163 -
gccatgtgactggttgtgacta

SEQ ID NO: 132042 - DNA, 22 bp, Artificial Sequence
  Synthetic oligonucleotide; CTG chr11 5293151 5293172 5293156 5293151 -
gttgtgactaaaataatgtgga

SEQ ID NO: 132043 - DNA, 22 bp, Artificial Sequence
  Synthetic oligonucleotide; TTG chr11 5293147 5293168 5293152 5293147 -
tgactaaaataatgtggagata

SEQ ID NO: 132044 - DNA, 22 bp, Artificial Sequence
  Synthetic oligonucleotide; CTA chr11 5293141 5293162 5293146 5293141 -
aaataatgtggagataataatg

SEQ ID NO: 132045 - DNA, 22 bp, Artificial Sequence
  Synthetic oligonucleotide; TTA chr11 5293114 5293135 5293119 5293114 -
ctccctaaggcagagtgccctt

SEQ ID NO: 132046 - DNA, 22 bp, Artificial Sequence
  Synthetic oligonucleotide; CTC chr11 5293111 5293132 5293116 5293111 -
cctaaggcagagtgcccttcta

SEQ ID NO: 132047 - DNA, 22 bp, Artificial Sequence
  Synthetic oligonucleotide; CTA chr11 5293107 5293128 5293112 5293107 -
aggcagagtgcccttctatcat

SEQ ID NO: 132048 - DNA, 22 bp, Artificial Sequence
  Synthetic oligonucleotide; CTT chr11 5293092 5293113 5293097 5293092 -
ctatcattctctttcccttcct

SEQ ID NO: 132049 - DNA, 22 bp, Artificial Sequence
  Synthetic oligonucleotide; TTC chr11 5293091 5293112 5293096 5293091 -
tatcattctctttcccttcctc

SEQ ID NO: 132050 - DNA, 22 bp, Artificial Sequence
  Synthetic oligonucleotide; CTA chr11 5293089 5293110 5293094 5293089 -
tcattctctttcccttcctcta

SEQ ID NO: 132051 - DNA, 22 bp, Artificial Sequence
  Synthetic oligonucleotide; TTC chr11 5293083 5293104 5293088 5293083 -
tctttcccttcctctatgtggc

SEQ ID NO: 132052 - DNA, 22 bp, Artificial Sequence
  Synthetic oligonucleotide; CTC chr11 5293081 5293102 5293086 5293081 -
tttcccttcctctatgtggcag

SEQ ID NO: 132053 - DNA, 22 bp, Artificial Sequence
  Synthetic oligonucleotide; CTT chr11 5293079 5293100 5293084 5293079 -
tcccttcctctatgtggcagaa

SEQ ID NO: 132054 - DNA, 22 bp, Artificial Sequence
  Synthetic oligonucleotide; TTT chr11 5293078 5293099 5293083 5293078 -
cccttcctctatgtggcagaaa

SEQ ID NO: 132055 - DNA, 22 bp, Artificial Sequence
  Synthetic oligonucleotide; TTC chr11 5293077 5293098 5293082 5293077 -
ccttcctctatgtggcagaaag

SEQ ID NO: 132056 - DNA, 22 bp, Artificial Sequence
  Synthetic oligonucleotide; CTT chr11 5293073 5293094 5293078 5293073 -
cctctatgtggcagaaagtaaa

SEQ ID NO: 132057 - DNA, 22 bp, Artificial Sequence
  Synthetic oligonucleotide; TTC chr11 5293072 5293093 5293077 5293072 -
ctctatgtggcagaaagtaaaa

SEQ ID NO: 132058 - DNA, 22 bp, Artificial Sequence
  Synthetic oligonucleotide; CTC chr11 5293069 5293090 5293074 5293069 -
tatgtggcagaaagtaaaagat

SEQ ID NO: 132059 - DNA, 22 bp, Artificial Sequence
  Synthetic oligonucleotide; CTA chr11 5293067 5293088 5293072 5293067 -
tgtggcagaaagtaaaagattc

SEQ ID NO: 132060 - DNA, 22 bp, Artificial Sequence
  Synthetic oligonucleotide; TTC chr11 5293045 5293066 5293050 5293045 -
tgaaatgataaagtcaatcaca

SEQ ID NO: 132061 - DNA, 22 bp, Artificial Sequence
  Synthetic oligonucleotide; CTG chr11 5293043 5293064 5293048 5293043 -
aaatgataaagtcaatcacagg

SEQ ID NO: 132062 - DNA, 22 bp, Artificial Sequence
  Synthetic oligonucleotide; CTG chr11 5293011 5293032 5293016 5293011 -
gactcctggcccactgcttgga

SEQ ID NO: 132063 - DNA, 22 bp, Artificial Sequence
  Synthetic oligonucleotide; CTC chr11 5293006 5293027 5293011 5293006 -
ctggcccactgcttggaggaga

SEQ ID NO: 132064 - DNA, 22 bp, Artificial Sequence
  Synthetic oligonucleotide; CTG chr11 5293003 5293024 5293008 5293003 -
gcccactgcttggaggagagca

SEQ ID NO: 132065 - DNA, 22 bp, Artificial Sequence
  Synthetic oligonucleotide; CTG chr11 5292995 5293016 5293000 5292995 -
cttggaggagagcactcaggac

SEQ ID NO: 132066 - DNA, 22 bp, Artificial Sequence
  Synthetic oligonucleotide; CTT chr11 5292992 5293013 5292997 5292992 -
ggaggagagcactcaggaccat

SEQ ID NO: 132067 - DNA, 22 bp, Artificial Sequence
  Synthetic oligonucleotide; TTG chr11 5292991 5293012 5292996 5292991 -
gaggagagcactcaggaccatg

SEQ ID NO: 132068 - DNA, 22 bp, Artificial Sequence
  Synthetic oligonucleotide; CTC chr11 5292978 5292999 5292983 5292978 -
aggaccatgaacatctgactgt

SEQ ID NO: 132069 - DNA, 22 bp, Artificial Sequence
  Synthetic oligonucleotide; CTG chr11 5292961 5292982 5292966 5292961 -
actgtgacgtagcaataaagaa

SEQ ID NO: 132070 - DNA, 22 bp, Artificial Sequence
  Synthetic oligonucleotide; CTG chr11 5292957 5292978 5292962 5292957 -
tgacgtagcaataaagaaaccc

SEQ ID NO: 132071 - DNA, 22 bp, Artificial Sequence
  Synthetic oligonucleotide; TTT chr11 5292929 5292950 5292934 5292929 -
catatgaaactgcttaaaatta

SEQ ID NO: 132072 - DNA, 22 bp, Artificial Sequence
  Synthetic oligonucleotide; TTC chr11 5292928 5292949 5292933 5292928 -
atatgaaactgcttaaaattaa

SEQ ID NO: 132073 - DNA, 22 bp, Artificial Sequence
  Synthetic oligonucleotide; CTG chr11 5292917 5292938 5292922 5292917 -
cttaaaattaatggcacaagtc

SEQ ID NO: 132074 - DNA, 22 bp, Artificial Sequence
  Synthetic oligonucleotide; CTT chr11 5292914 5292935 5292919 5292914 -
aaaattaatggcacaagtcatg

SEQ ID NO: 132075 - DNA, 22 bp, Artificial Sequence
  Synthetic oligonucleotide; TTA chr11 5292913 5292934 5292918 5292913 -
aaattaatggcacaagtcatgt

SEQ ID NO: 132076 - DNA, 22 bp, Artificial Sequence
  Synthetic oligonucleotide; TTA chr11 5292907 5292928 5292912 5292907 -
atggcacaagtcatgtttttga

SEQ ID NO: 132077 - DNA, 22 bp, Artificial Sequence
  Synthetic oligonucleotide; TTT chr11 5292889 5292910 5292894 5292889 -
ttgatgttgcacatttgtcttt

SEQ ID NO: 132078 - DNA, 22 bp, Artificial Sequence
  Synthetic oligonucleotide; TTT chr11 5292888 5292909 5292893 5292888 -
tgatgttgcacatttgtcttta

SEQ ID NO: 132079 - DNA, 22 bp, Artificial Sequence
  Synthetic oligonucleotide; TTT chr11 5292887 5292908 5292892 5292887 -
gatgttgcacatttgtctttat

SEQ ID NO: 132080 - DNA, 22 bp, Artificial Sequence
  Synthetic oligonucleotide; TTG chr11 5292886 5292907 5292891 5292886 -
atgttgcacatttgtctttatt

SEQ ID NO: 132081 - DNA, 22 bp, Artificial Sequence
  Synthetic oligonucleotide; TTG chr11 5292880 5292901 5292885 5292880 -
cacatttgtctttatttgtggc

SEQ ID NO: 132082 - DNA, 22 bp, Artificial Sequence
  Synthetic oligonucleotide; TTT chr11 5292873 5292894 5292878 5292873 -
gtctttatttgtggcttgtttt

SEQ ID NO: 132083 - DNA, 22 bp, Artificial Sequence
  Synthetic oligonucleotide; TTG chr11 5292872 5292893 5292877 5292872 -
tctttatttgtggcttgttttg

SEQ ID NO: 132084 - DNA, 22 bp, Artificial Sequence
  Synthetic oligonucleotide; CTT chr11 5292868 5292889 5292873 5292868 -
tatttgtggcttgttttgcttc

SEQ ID NO: 132085 - DNA, 22 bp, Artificial Sequence
  Synthetic oligonucleotide; TTT chr11 5292867 5292888 5292872 5292867 -
atttgtggcttgttttgcttcc

SEQ ID NO: 132086 - DNA, 22 bp, Artificial Sequence
  Synthetic oligonucleotide; TTA chr11 5292866 5292887 5292871 5292866 -
tttgtggcttgttttgcttcca

SEQ ID NO: 132087 - DNA, 22 bp, Artificial Sequence
  Synthetic oligonucleotide; TTT chr11 5292863 5292884 5292868 5292863 -
gtggcttgttttgcttccacat

SEQ ID NO: 132088 - DNA, 22 bp, Artificial Sequence
  Synthetic oligonucleotide; TTG chr11 5292862 5292883 5292867 5292862 -
tggcttgttttgcttccacatc

SEQ ID NO: 132089 - DNA, 22 bp, Artificial Sequence
  Synthetic oligonucleotide; CTT chr11 5292856 5292877 5292861 5292856 -
gttttgcttccacatcaatcca

SEQ ID NO: 132090 - DNA, 22 bp, Artificial Sequence
  Synthetic oligonucleotide; TTG chr11 5292855 5292876 5292860 5292855 -
ttttgcttccacatcaatccac

SEQ ID NO: 132091 - DNA, 22 bp, Artificial Sequence
  Synthetic oligonucleotide; TTT chr11 5292852 5292873 5292857 5292852 -
tgcttccacatcaatccactca

SEQ ID NO: 132092 - DNA, 22 bp, Artificial Sequence
  Synthetic oligonucleotide; TTT chr11 5292851 5292872 5292856 5292851 -
gcttccacatcaatccactcaa

SEQ ID NO: 132093 - DNA, 22 bp, Artificial Sequence
  Synthetic oligonucleotide; TTG chr11 5292850 5292871 5292855 5292850 -
cttccacatcaatccactcaag

SEQ ID NO: 132094 - DNA, 22 bp, Artificial Sequence
  Synthetic oligonucleotide; CTT chr11 5292847 5292868 5292852 5292847 -
ccacatcaatccactcaaggcc

SEQ ID NO: 132095 - DNA, 22 bp, Artificial Sequence
  Synthetic oligonucleotide; TTC chr11 5292846 5292867 5292851 5292846 -
cacatcaatccactcaaggcct

SEQ ID NO: 132096 - DNA, 22 bp, Artificial Sequence
  Synthetic oligonucleotide; CTC chr11 5292831 5292852 5292836 5292831 -
aaggcctacattctgctataat

SEQ ID NO: 132097 - DNA, 22 bp, Artificial Sequence
  Synthetic oligonucleotide; CTA chr11 5292823 5292844 5292828 5292823 -
cattctgctataatgcaatttc

SEQ ID NO: 132098 - DNA, 22 bp, Artificial Sequence
  Synthetic oligonucleotide; TTC chr11 5292818 5292839 5292823 5292818 -
tgctataatgcaatttcaagtt

SEQ ID NO: 132099 - DNA, 22 bp, Artificial Sequence
  Synthetic oligonucleotide; CTG chr11 5292816 5292837 5292821 5292816 -
ctataatgcaatttcaagttct

SEQ ID NO: 132100 - DNA, 22 bp, Artificial Sequence
  Synthetic oligonucleotide; CTA chr11 5292813 5292834 5292818 5292813 -
taatgcaatttcaagttcttta

SEQ ID NO: 132101 - DNA, 22 bp, Artificial Sequence
  Synthetic oligonucleotide; TTT chr11 5292802 5292823 5292807 5292802 -
caagttctttacaggccgagaa

SEQ ID NO: 132102 - DNA, 22 bp, Artificial Sequence
  Synthetic oligonucleotide; TTC chr11 5292801 5292822 5292806 5292801 -
aagttctttacaggccgagaaa

SEQ ID NO: 132103 - DNA, 22 bp, Artificial Sequence
  Synthetic oligonucleotide; TTC chr11 5292795 5292816 5292800 5292795 -
tttacaggccgagaaaaatgaa

SEQ ID NO: 132104 - DNA, 22 bp, Artificial Sequence
  Synthetic oligonucleotide; CTT chr11 5292793 5292814 5292798 5292793 -
tacaggccgagaaaaatgaatc

SEQ ID NO: 132105 - DNA, 22 bp, Artificial Sequence
  Synthetic oligonucleotide; TTT chr11 5292792 5292813 5292797 5292792 -
acaggccgagaaaaatgaatct

SEQ ID NO: 132106 - DNA, 22 bp, Artificial Sequence
  Synthetic oligonucleotide; TTA chr11 5292791 5292812 5292796 5292791 -
caggccgagaaaaatgaatctg

SEQ ID NO: 132107 - DNA, 22 bp, Artificial Sequence
  Synthetic oligonucleotide; CTG chr11 5292769 5292790 5292774 5292769 -
aattcctgacctccaaaagtga

SEQ ID NO: 132108 - DNA, 22 bp, Artificial Sequence
  Synthetic oligonucleotide; TTC chr11 5292764 5292785 5292769 5292764 -
ctgacctccaaaagtgatcaag

SEQ ID NO: 132109 - DNA, 22 bp, Artificial Sequence
  Synthetic oligonucleotide; CTG chr11 5292761 5292782 5292766 5292761 -
acctccaaaagtgatcaagata

SEQ ID NO: 132110 - DNA, 22 bp, Artificial Sequence
  Synthetic oligonucleotide; CTC chr11 5292756 5292777 5292761 5292756 -
caaaagtgatcaagatattttt

SEQ ID NO: 132111 - DNA, 22 bp, Artificial Sequence
  Synthetic oligonucleotide; TTT chr11 5292736 5292757 5292741 5292736 -
ttagttcaggctccaaaatttt

SEQ ID NO: 132112 - DNA, 22 bp, Artificial Sequence
  Synthetic oligonucleotide; TTT chr11 5292735 5292756 5292740 5292735 -
tagttcaggctccaaaattttc

SEQ ID NO: 132113 - DNA, 22 bp, Artificial Sequence
  Synthetic oligonucleotide; TTT chr11 5292734 5292755 5292739 5292734 -
agttcaggctccaaaattttct

SEQ ID NO: 132114 - DNA, 22 bp, Artificial Sequence
  Synthetic oligonucleotide; TTA chr11 5292733 5292754 5292738 5292733 -
gttcaggctccaaaattttctc

SEQ ID NO: 132115 - DNA, 22 bp, Artificial Sequence
  Synthetic oligonucleotide; TTC chr11 5292729 5292750 5292734 5292729 -
aggctccaaaattttctcattt

SEQ ID NO: 132116 - DNA, 22 bp, Artificial Sequence
  Synthetic oligonucleotide; CTC chr11 5292723 5292744 5292728 5292723 -
caaaattttctcattttcatag

SEQ ID NO: 132117 - DNA, 22 bp, Artificial Sequence
  Synthetic oligonucleotide; TTT chr11 5292715 5292736 5292720 5292715 -
tctcattttcataggttttcct

SEQ ID NO: 132118 - DNA, 22 bp, Artificial Sequence
  Synthetic oligonucleotide; TTT chr11 5292714 5292735 5292719 5292714 -
ctcattttcataggttttcctc

SEQ ID NO: 132119 - DNA, 22 bp, Artificial Sequence
  Synthetic oligonucleotide; TTC chr11 5292713 5292734 5292718 5292713 -
tcattttcataggttttcctcg

SEQ ID NO: 132120 - DNA, 22 bp, Artificial Sequence
  Synthetic oligonucleotide; CTC chr11 5292711 5292732 5292716 5292711 -
attttcataggttttcctcgat

SEQ ID NO: 132121 - DNA, 22 bp, Artificial Sequence
  Synthetic oligonucleotide; TTT chr11 5292707 5292728 5292712 5292707 -
tcataggttttcctcgattgat

SEQ ID NO: 132122 - DNA, 22 bp, Artificial Sequence
  Synthetic oligonucleotide; TTT chr11 5292706 5292727 5292711 5292706 -
cataggttttcctcgattgatc

SEQ ID NO: 132123 - DNA, 22 bp, Artificial Sequence
  Synthetic oligonucleotide; TTC chr11 5292705 5292726 5292710 5292705 -
ataggttttcctcgattgatca

SEQ ID NO: 132124 - DNA, 22 bp, Artificial Sequence
  Synthetic oligonucleotide; TTT chr11 5292697 5292718 5292702 5292697 -
tcctcgattgatcattattcat

SEQ ID NO: 132125 - DNA, 22 bp, Artificial Sequence
  Synthetic oligonucleotide; TTT chr11 5292696 5292717 5292701 5292696 -
cctcgattgatcattattcatg

SEQ ID NO: 132126 - DNA, 22 bp, Artificial Sequence
  Synthetic oligonucleotide; TTC chr11 5292695 5292716 5292700 5292695 -
ctcgattgatcattattcatga

SEQ ID NO: 132127 - DNA, 22 bp, Artificial Sequence
  Synthetic oligonucleotide; CTC chr11 5292692 5292713 5292697 5292692 -
gattgatcattattcatgattt

SEQ ID NO: 132128 - DNA, 22 bp, Artificial Sequence
  Synthetic oligonucleotide; TTG chr11 5292687 5292708 5292692 5292687 -
atcattattcatgatttgcaag

SEQ ID NO: 132129 - DNA, 22 bp, Artificial Sequence
  Synthetic oligonucleotide; TTA chr11 5292680 5292701 5292685 5292680 -
ttcatgatttgcaaggaatcat

SEQ ID NO: 132130 - DNA, 22 bp, Artificial Sequence
  Synthetic oligonucleotide; TTC chr11 5292677 5292698 5292682 5292677 -
atgatttgcaaggaatcattca

SEQ ID NO: 132131 - DNA, 22 bp, Artificial Sequence
  Synthetic oligonucleotide; TTT chr11 5292670 5292691 5292675 5292670 -
gcaaggaatcattcaatgtttt

SEQ ID NO: 132132 - DNA, 22 bp, Artificial Sequence
  Synthetic oligonucleotide; TTG chr11 5292669 5292690 5292674 5292669 -
caaggaatcattcaatgttttc

SEQ ID NO: 132133 - DNA, 22 bp, Artificial Sequence
  Synthetic oligonucleotide; TTC chr11 5292656 5292677 5292661 5292656 -
aatgttttctaaatctattact

SEQ ID NO: 132134 - DNA, 22 bp, Artificial Sequence
  Synthetic oligonucleotide; TTT chr11 5292649 5292670 5292654 5292649 -
tctaaatctattactgcatcct

SEQ ID NO: 132135 - DNA, 22 bp, Artificial Sequence
  Synthetic oligonucleotide; TTT chr11 5292648 5292669 5292653 5292648 -
ctaaatctattactgcatcctg

SEQ ID NO: 132136 - DNA, 22 bp, Artificial Sequence
  Synthetic oligonucleotide; TTC chr11 5292647 5292668 5292652 5292647 -
taaatctattactgcatcctga

SEQ ID NO: 132137 - DNA, 22 bp, Artificial Sequence
  Synthetic oligonucleotide; CTA chr11 5292645 5292666 5292650 5292645 -
aatctattactgcatcctgaca

SEQ ID NO: 132138 - DNA, 22 bp, Artificial Sequence
  Synthetic oligonucleotide; CTA chr11 5292639 5292660 5292644 5292639 -
ttactgcatcctgacacatatg

SEQ ID NO: 132139 - DNA, 22 bp, Artificial Sequence
  Synthetic oligonucleotide; TTA chr11 5292636 5292657 5292641 5292636 -
ctgcatcctgacacatatgaca

SEQ ID NO: 132140 - DNA, 22 bp, Artificial Sequence
  Synthetic oligonucleotide; CTG chr11 5292633 5292654 5292638 5292633 -
catcctgacacatatgacattt

SEQ ID NO: 132141 - DNA, 22 bp, Artificial Sequence
  Synthetic oligonucleotide; CTG chr11 5292626 5292647 5292631 5292626 -
acacatatgacattttaactat

SEQ ID NO: 132142 - DNA, 22 bp, Artificial Sequence
  Synthetic oligonucleotide; TTT chr11 5292611 5292632 5292616 5292611 -
taactatgttccagatttttga

SEQ ID NO: 132143 - DNA, 22 bp, Artificial Sequence
  Synthetic oligonucleotide; TTT chr11 5292610 5292631 5292615 5292610 -
aactatgttccagatttttgaa

SEQ ID NO: 132144 - DNA, 22 bp, Artificial Sequence
  Synthetic oligonucleotide; TTA chr11 5292609 5292630 5292614 5292609 -
actatgttccagatttttgaat

SEQ ID NO: 132145 - DNA, 22 bp, Artificial Sequence
  Synthetic oligonucleotide; CTA chr11 5292605 5292626 5292610 5292605 -
tgttccagatttttgaatgaag

SEQ ID NO: 132146 - DNA, 22 bp, Artificial Sequence
  Synthetic oligonucleotide; TTC chr11 5292600 5292621 5292605 5292600 -
cagatttttgaatgaagagtgt

SEQ ID NO: 132147 - DNA, 22 bp, Artificial Sequence
  Synthetic oligonucleotide; TTT chr11 5292593 5292614 5292598 5292593 -
ttgaatgaagagtgtaaatttt

SEQ ID NO: 132148 - DNA, 22 bp, Artificial Sequence
  Synthetic oligonucleotide; TTT chr11 5292592 5292613 5292597 5292592 -
tgaatgaagagtgtaaatttta

SEQ ID NO: 132149 - DNA, 22 bp, Artificial Sequence
  Synthetic oligonucleotide; TTT chr11 5292591 5292612 5292596 5292591 -
gaatgaagagtgtaaattttaa

SEQ ID NO: 132150 - DNA, 22 bp, Artificial Sequence
  Synthetic oligonucleotide; TTG chr11 5292590 5292611 5292595 5292590 -
aatgaagagtgtaaattttaaa

SEQ ID NO: 132151 - DNA, 22 bp, Artificial Sequence
  Synthetic oligonucleotide; TTT chr11 5292572 5292593 5292577 5292572 -
taaatgttttcaccacaaaaaa

SEQ ID NO: 132152 - DNA, 22 bp, Artificial Sequence
  Synthetic oligonucleotide; TTT chr11 5292571 5292592 5292576 5292571 -
aaatgttttcaccacaaaaaat

SEQ ID NO: 132153 - DNA, 22 bp, Artificial Sequence
  Synthetic oligonucleotide; TTA chr11 5292570 5292591 5292575 5292570 -
aatgttttcaccacaaaaaata

SEQ ID NO: 132154 - DNA, 22 bp, Artificial Sequence
  Synthetic oligonucleotide; TTT chr11 5292563 5292584 5292568 5292563 -
tcaccacaaaaaataagtatgt

SEQ ID NO: 132155 - DNA, 22 bp, Artificial Sequence
  Synthetic oligonucleotide; TTT chr11 5292562 5292583 5292567 5292562 -
caccacaaaaaataagtatgtg

SEQ ID NO: 132156 - DNA, 22 bp, Artificial Sequence
  Synthetic oligonucleotide; TTC chr11 5292561 5292582 5292566 5292561 -
accacaaaaaataagtatgtga

SEQ ID NO: 132157 - DNA, 22 bp, Artificial Sequence
  Synthetic oligonucleotide; TTT chr11 5292527 5292548 5292532 5292527 -
gttaattagccttatttaacca

SEQ ID NO: 132158 - DNA, 22 bp, Artificial Sequence
  Synthetic oligonucleotide; TTG chr11 5292526 5292547 5292531 5292526 -
ttaattagccttatttaaccat

SEQ ID NO: 132159 - DNA, 22 bp, Artificial Sequence
  Synthetic oligonucleotide; TTA chr11 5292523 5292544 5292528 5292523 -
attagccttatttaaccattta

SEQ ID NO: 132160 - DNA, 22 bp, Artificial Sequence
  Synthetic oligonucleotide; TTA chr11 5292519 5292540 5292524 5292519 -
gccttatttaaccatttaatat

SEQ ID NO: 132161 - DNA, 22 bp, Artificial Sequence
  Synthetic oligonucleotide; CTT chr11 5292514 5292535 5292519 5292514 -
atttaaccatttaatattgtac

SEQ ID NO: 132162 - DNA, 22 bp, Artificial Sequence
  Synthetic oligonucleotide; TTA chr11 5292513 5292534 5292518 5292513 -
tttaaccatttaatattgtaca

SEQ ID NO: 132163 - DNA, 22 bp, Artificial Sequence
  Synthetic oligonucleotide; TTT chr11 5292510 5292531 5292515 5292510 -
aaccatttaatattgtacacgt

SEQ ID NO: 132164 - DNA, 22 bp, Artificial Sequence
  Synthetic oligonucleotide; TTA chr11 5292509 5292530 5292514 5292509 -
accatttaatattgtacacgta

SEQ ID NO: 132165 - DNA, 22 bp, Artificial Sequence
  Synthetic oligonucleotide; TTT chr11 5292502 5292523 5292507 5292502 -
aatattgtacacgtacaccaaa

SEQ ID NO: 132166 - DNA, 22 bp, Artificial Sequence
  Synthetic oligonucleotide; TTA chr11 5292501 5292522 5292506 5292501 -
atattgtacacgtacaccaaag

SEQ ID NO: 132167 - DNA, 22 bp, Artificial Sequence
  Synthetic oligonucleotide; TTG chr11 5292495 5292516 5292500 5292495 -
tacacgtacaccaaagcatcat

SEQ ID NO: 132168 - DNA, 22 bp, Artificial Sequence
  Synthetic oligonucleotide; TTG chr11 5292469 5292490 5292474 5292469 -
taccccatgaatacacacaatt

SEQ ID NO: 132169 - DNA, 22 bp, Artificial Sequence
  Synthetic oligonucleotide; TTA chr11 5292446 5292467 5292451 5292446 -
ttatttgtcaatttaaaatgaa

SEQ ID NO: 132170 - DNA, 22 bp, Artificial Sequence
  Synthetic oligonucleotide; TTA chr11 5292443 5292464 5292448 5292443 -
tttgtcaatttaaaatgaaata

SEQ ID NO: 132171 - DNA, 22 bp, Artificial Sequence
  Synthetic oligonucleotide; TTT chr11 5292440 5292461 5292445 5292440 -
gtcaatttaaaatgaaataata

SEQ ID NO: 132172 - DNA, 22 bp, Artificial Sequence
  Synthetic oligonucleotide; TTG chr11 5292439 5292460 5292444 5292439 -
tcaatttaaaatgaaataataa

SEQ ID NO: 132173 - DNA, 22 bp, Artificial Sequence
  Synthetic oligonucleotide; TTT chr11 5292432 5292453 5292437 5292432 -
aaaatgaaataataaaaaataa

SEQ ID NO: 132174 - DNA, 22 bp, Artificial Sequence
  Synthetic oligonucleotide; TTA chr11 5292431 5292452 5292436 5292431 -
aaatgaaataataaaaaataac

SEQ ID NO: 132175 - DNA, 22 bp, Artificial Sequence
  Synthetic oligonucleotide; TTA chr11 5292399 5292420 5292404 5292399 -
gcctctgcattgcctttaccgg

SEQ ID NO: 132176 - DNA, 22 bp, Artificial Sequence
  Synthetic oligonucleotide; CTC chr11 5292394 5292415 5292399 5292394 -
tgcattgcctttaccggtcatc

SEQ ID NO: 132177 - DNA, 22 bp, Artificial Sequence
  Synthetic oligonucleotide; CTG chr11 5292392 5292413 5292397 5292392 -
cattgcctttaccggtcatcct

SEQ ID NO: 132178 - DNA, 22 bp, Artificial Sequence
  Synthetic oligonucleotide; TTG chr11 5292387 5292408 5292392 5292387 -
cctttaccggtcatcctcacgg

SEQ ID NO: 132179 - DNA, 22 bp, Artificial Sequence
  Synthetic oligonucleotide; CTT chr11 5292383 5292404 5292388 5292383 -
taccggtcatcctcacggtgac

SEQ ID NO: 132180 - DNA, 22 bp, Artificial Sequence
  Synthetic oligonucleotide; TTT chr11 5292382 5292403 5292387 5292382 -
accggtcatcctcacggtgact

SEQ ID NO: 132181 - DNA, 22 bp, Artificial Sequence
  Synthetic oligonucleotide; TTA chr11 5292381 5292402 5292386 5292381 -
ccggtcatcctcacggtgacta

SEQ ID NO: 132182 - DNA, 22 bp, Artificial Sequence
  Synthetic oligonucleotide; CTC chr11 5292369 5292390 5292374 5292369 -
acggtgactaacgcaaaaaacg

SEQ ID NO: 132183 - DNA, 22 bp, Artificial Sequence
  Synthetic oligonucleotide; CTA chr11 5292359 5292380 5292364 5292359 -
acgcaaaaaacgttctatttca

SEQ ID NO: 132184 - DNA, 22 bp, Artificial Sequence
  Synthetic oligonucleotide; TTC chr11 5292344 5292365 5292349 5292344 -
tatttcatccttacaaacatcc

SEQ ID NO: 132185 - DNA, 22 bp, Artificial Sequence
  Synthetic oligonucleotide; CTA chr11 5292342 5292363 5292347 5292342 -
tttcatccttacaaacatccct

SEQ ID NO: 132186 - DNA, 22 bp, Artificial Sequence
  Synthetic oligonucleotide; TTT chr11 5292339 5292360 5292344 5292339 -
catccttacaaacatccctatc

SEQ ID NO: 132187 - DNA, 22 bp, Artificial Sequence
  Synthetic oligonucleotide; TTC chr11 5292338 5292359 5292343 5292338 -
atccttacaaacatccctatct

SEQ ID NO: 132188 - DNA, 22 bp, Artificial Sequence
  Synthetic oligonucleotide; CTT chr11 5292332 5292353 5292337 5292332 -
acaaacatccctatctttgatg

SEQ ID NO: 132189 - DNA, 22 bp, Artificial Sequence
  Synthetic oligonucleotide; TTA chr11 5292331 5292352 5292336 5292331 -
caaacatccctatctttgatgc

SEQ ID NO: 132190 - DNA, 22 bp, Artificial Sequence
  Synthetic oligonucleotide; CTA chr11 5292319 5292340 5292324 5292319 -
tctttgatgcctctttgtctag

SEQ ID NO: 132191 - DNA, 22 bp, Artificial Sequence
  Synthetic oligonucleotide; CTT chr11 5292315 5292336 5292320 5292315 -
tgatgcctctttgtctagatct

SEQ ID NO: 132192 - DNA, 22 bp, Artificial Sequence
  Synthetic oligonucleotide; TTT chr11 5292314 5292335 5292319 5292314 -
gatgcctctttgtctagatctc

SEQ ID NO: 132193 - DNA, 22 bp, Artificial Sequence
  Synthetic oligonucleotide; TTG chr11 5292313 5292334 5292318 5292313 -
atgcctctttgtctagatctct

SEQ ID NO: 132194 - DNA, 22 bp, Artificial Sequence
  Synthetic oligonucleotide; CTC chr11 5292306 5292327 5292311 5292306 -
tttgtctagatctctatcccct

SEQ ID NO: 132195 - DNA, 22 bp, Artificial Sequence
  Synthetic oligonucleotide; CTT chr11 5292304 5292325 5292309 5292304 -
tgtctagatctctatcccctcc

SEQ ID NO: 132196 - DNA, 22 bp, Artificial Sequence
  Synthetic oligonucleotide; TTT chr11 5292303 5292324 5292308 5292303 -
gtctagatctctatcccctcct

SEQ ID NO: 132197 - DNA, 22 bp, Artificial Sequence
  Synthetic oligonucleotide; TTG chr11 5292302 5292323 5292307 5292302 -
tctagatctctatcccctcctg

SEQ ID NO: 132198 - DNA, 22 bp, Artificial Sequence
  Synthetic oligonucleotide; CTA chr11 5292298 5292319 5292303 5292298 -
gatctctatcccctcctgtttt

SEQ ID NO: 132199 - DNA, 22 bp, Artificial Sequence
  Synthetic oligonucleotide; CTC chr11 5292292 5292313 5292297 5292292 -
tatcccctcctgttttctctac

SEQ ID NO: 132200 - DNA, 22 bp, Artificial Sequence
  Synthetic oligonucleotide; CTA chr11 5292290 5292311 5292295 5292290 -
tcccctcctgttttctctacgt

SEQ ID NO: 132201 - DNA, 22 bp, Artificial Sequence
  Synthetic oligonucleotide; CTC chr11 5292283 5292304 5292288 5292283 -
ctgttttctctacgttatttat

SEQ ID NO: 132202 - DNA, 22 bp, Artificial Sequence
  Synthetic oligonucleotide; CTG chr11 5292280 5292301 5292285 5292280 -
ttttctctacgttatttatatg

SEQ ID NO: 132203 - DNA, 22 bp, Artificial Sequence
  Synthetic oligonucleotide; TTT chr11 5292277 5292298 5292282 5292277 -
tctctacgttatttatatgggt

SEQ ID NO: 132204 - DNA, 22 bp, Artificial Sequence
  Synthetic oligonucleotide; TTT chr11 5292276 5292297 5292281 5292276 -
ctctacgttatttatatgggta

SEQ ID NO: 132205 - DNA, 22 bp, Artificial Sequence
  Synthetic oligonucleotide; TTC chr11 5292275 5292296 5292280 5292275 -
tctacgttatttatatgggtat

SEQ ID NO: 132206 - DNA, 22 bp, Artificial Sequence
  Synthetic oligonucleotide; CTC chr11 5292273 5292294 5292278 5292273 -
tacgttatttatatgggtatca

SEQ ID NO: 132207 - DNA, 22 bp, Artificial Sequence
  Synthetic oligonucleotide; CTA chr11 5292271 5292292 5292276 5292271 -
cgttatttatatgggtatcatc

SEQ ID NO: 132208 - DNA, 22 bp, Artificial Sequence
  Synthetic oligonucleotide; TTA chr11 5292266 5292287 5292271 5292266 -
tttatatgggtatcatcaccat

SEQ ID NO: 132209 - DNA, 22 bp, Artificial Sequence
  Synthetic oligonucleotide; TTT chr11 5292263 5292284 5292268 5292263 -
atatgggtatcatcaccatcct

SEQ ID NO: 132210 - DNA, 22 bp, Artificial Sequence
  Synthetic oligonucleotide; TTA chr11 5292262 5292283 5292267 5292262 -
tatgggtatcatcaccatcctg

SEQ ID NO: 132211 - DNA, 22 bp, Artificial Sequence
  Synthetic oligonucleotide; CTG chr11 5292240 5292261 5292245 5292240 -
gacaacatcaggacagatatcc

SEQ ID NO: 132212 - DNA, 22 bp, Artificial Sequence
  Synthetic oligonucleotide; CTC chr11 5292215 5292236 5292220 5292215 -
accaagccaatgttcctctcta

SEQ ID NO: 132213 - DNA, 22 bp, Artificial Sequence
  Synthetic oligonucleotide; TTC chr11 5292200 5292221 5292205 5292200 -
ctctctatgttggctcaaatgt

SEQ ID NO: 132214 - DNA, 22 bp, Artificial Sequence
  Synthetic oligonucleotide; CTC chr11 5292197 5292218 5292202 5292197 -
tctatgttggctcaaatgtcct

SEQ ID NO: 132215 - DNA, 22 bp, Artificial Sequence
  Synthetic oligonucleotide; CTC chr11 5292195 5292216 5292200 5292195 -
tatgttggctcaaatgtccttg

SEQ ID NO: 132216 - DNA, 22 bp, Artificial Sequence
  Synthetic oligonucleotide; CTA chr11 5292193 5292214 5292198 5292193 -
tgttggctcaaatgtccttgaa

SEQ ID NO: 132217 - DNA, 22 bp, Artificial Sequence
  Synthetic oligonucleotide; TTG chr11 5292188 5292209 5292193 5292188 -
gctcaaatgtccttgaactttc

SEQ ID NO: 132218 - DNA, 22 bp, Artificial Sequence
  Synthetic oligonucleotide; CTC chr11 5292184 5292205 5292189 5292184 -
aaatgtccttgaactttccttt

SEQ ID NO: 132219 - DNA, 22 bp, Artificial Sequence
  Synthetic oligonucleotide; CTT chr11 5292174 5292195 5292179 5292174 -
gaactttcctttcaccaccctt

SEQ ID NO: 132220 - DNA, 22 bp, Artificial Sequence
  Synthetic oligonucleotide; TTG chr11 5292173 5292194 5292178 5292173 -
aactttcctttcaccacccttt

SEQ ID NO: 132221 - DNA, 22 bp, Artificial Sequence
  Synthetic oligonucleotide; CTT chr11 5292168 5292189 5292173 5292168 -
tcctttcaccaccctttccaca

SEQ ID NO: 132222 - DNA, 22 bp, Artificial Sequence
  Synthetic oligonucleotide; TTT chr11 5292167 5292188 5292172 5292167 -
cctttcaccaccctttccacag

SEQ ID NO: 132223 - DNA, 22 bp, Artificial Sequence
  Synthetic oligonucleotide; TTC chr11 5292166 5292187 5292171 5292166 -
ctttcaccaccctttccacagt

SEQ ID NO: 132224 - DNA, 22 bp, Artificial Sequence
  Synthetic oligonucleotide; CTT chr11 5292163 5292184 5292168 5292163 -
tcaccaccctttccacagtcaa

SEQ ID NO: 132225 - DNA, 22 bp, Artificial Sequence
  Synthetic oligonucleotide; TTT chr11 5292162 5292183 5292167 5292162 -
caccaccctttccacagtcaaa

SEQ ID NO: 132226 - DNA, 22 bp, Artificial Sequence
  Synthetic oligonucleotide; TTC chr11 5292161 5292182 5292166 5292161 -
accaccctttccacagtcaaaa

SEQ ID NO: 132227 - DNA, 22 bp, Artificial Sequence
  Synthetic oligonucleotide; CTT chr11 5292152 5292173 5292157 5292152 -
tccacagtcaaaaggatattgt

SEQ ID NO: 132228 - DNA, 22 bp, Artificial Sequence
  Synthetic oligonucleotide; TTT chr11 5292151 5292172 5292156 5292151 -
ccacagtcaaaaggatattgta

SEQ ID NO: 132229 - DNA, 22 bp, Artificial Sequence
  Synthetic oligonucleotide; TTC chr11 5292150 5292171 5292155 5292150 -
cacagtcaaaaggatattgtag

SEQ ID NO: 132230 - DNA, 22 bp, Artificial Sequence
  Synthetic oligonucleotide; TTG chr11 5292131 5292152 5292136 5292131 -
tagtttaatgcctcagagttca

SEQ ID NO: 132231 - DNA, 22 bp, Artificial Sequence
  Synthetic oligonucleotide; TTT chr11 5292125 5292146 5292130 5292125 -
aatgcctcagagttcagctttt

SEQ ID NO: 132232 - DNA, 22 bp, Artificial Sequence
  Synthetic oligonucleotide; TTA chr11 5292124 5292145 5292129 5292124 -
atgcctcagagttcagctttta

SEQ ID NO: 132233 - DNA, 22 bp, Artificial Sequence
  Synthetic oligonucleotide; CTC chr11 5292117 5292138 5292122 5292117 -
agagttcagcttttaagcttct

SEQ ID NO: 132234 - DNA, 22 bp, Artificial Sequence
  Synthetic oligonucleotide; TTC chr11 5292110 5292131 5292115 5292110 -
agcttttaagcttctgacaaat

SEQ ID NO: 132235 - DNA, 22 bp, Artificial Sequence
  Synthetic oligonucleotide; CTT chr11 5292105 5292126 5292110 5292105 -
ttaagcttctgacaaattattc

SEQ ID NO: 132236 - DNA, 22 bp, Artificial Sequence
  Synthetic oligonucleotide; TTT chr11 5292104 5292125 5292109 5292104 -
taagcttctgacaaattattct

SEQ ID NO: 132237 - DNA, 22 bp, Artificial Sequence
  Synthetic oligonucleotide; TTT chr11 5292103 5292124 5292108 5292103 -
aagcttctgacaaattattctt

SEQ ID NO: 132238 - DNA, 22 bp, Artificial Sequence
  Synthetic oligonucleotide; TTA chr11 5292102 5292123 5292107 5292102 -
agcttctgacaaattattcttc

SEQ ID NO: 132239 - DNA, 22 bp, Artificial Sequence
  Synthetic oligonucleotide; CTT chr11 5292097 5292118 5292102 5292097 -
ctgacaaattattcttcctctt

SEQ ID NO: 132240 - DNA, 22 bp, Artificial Sequence
  Synthetic oligonucleotide; TTC chr11 5292096 5292117 5292101 5292096 -
tgacaaattattcttcctcttt

SEQ ID NO: 132241 - DNA, 22 bp, Artificial Sequence
  Synthetic oligonucleotide; CTG chr11 5292094 5292115 5292099 5292094 -
acaaattattcttcctctttag

SEQ ID NO: 132242 - DNA, 22 bp, Artificial Sequence
  Synthetic oligonucleotide; TTA chr11 5292086 5292107 5292091 5292086 -
ttcttcctctttaggttctcct

SEQ ID NO: 132243 - DNA, 22 bp, Artificial Sequence
  Synthetic oligonucleotide; TTC chr11 5292083 5292104 5292088 5292083 -
ttcctctttaggttctccttta

SEQ ID NO: 132244 - DNA, 22 bp, Artificial Sequence
  Synthetic oligonucleotide; CTT chr11 5292081 5292102 5292086 5292081 -
cctctttaggttctcctttatg

SEQ ID NO: 132245 - DNA, 22 bp, Artificial Sequence
  Synthetic oligonucleotide; TTC chr11 5292080 5292101 5292085 5292080 -
ctctttaggttctcctttatgg

SEQ ID NO: 132246 - DNA, 22 bp, Artificial Sequence
  Synthetic oligonucleotide; CTC chr11 5292077 5292098 5292082 5292077 -
tttaggttctcctttatggaat

SEQ ID NO: 132247 - DNA, 22 bp, Artificial Sequence
  Synthetic oligonucleotide; CTT chr11 5292075 5292096 5292080 5292075 -
taggttctcctttatggaatct

SEQ ID NO: 132248 - DNA, 22 bp, Artificial Sequence
  Synthetic oligonucleotide; TTT chr11 5292074 5292095 5292079 5292074 -
aggttctcctttatggaatctt

SEQ ID NO: 132249 - DNA, 22 bp, Artificial Sequence
  Synthetic oligonucleotide; TTA chr11 5292073 5292094 5292078 5292073 -
ggttctcctttatggaatcttc

SEQ ID NO: 132250 - DNA, 22 bp, Artificial Sequence
  Synthetic oligonucleotide; TTC chr11 5292068 5292089 5292073 5292068 -
tcctttatggaatcttctgtac

SEQ ID NO: 132251 - DNA, 22 bp, Artificial Sequence
  Synthetic oligonucleotide; CTC chr11 5292066 5292087 5292071 5292066 -
ctttatggaatcttctgtactg

SEQ ID NO: 132252 - DNA, 22 bp, Artificial Sequence
  Synthetic oligonucleotide; CTT chr11 5292063 5292084 5292068 5292063 -
tatggaatcttctgtactgatg

SEQ ID NO: 132253 - DNA, 22 bp, Artificial Sequence
  Synthetic oligonucleotide; TTT chr11 5292062 5292083 5292067 5292062 -
atggaatcttctgtactgatgg

SEQ ID NO: 132254 - DNA, 22 bp, Artificial Sequence
  Synthetic oligonucleotide; TTA chr11 5292061 5292082 5292066 5292061 -
tggaatcttctgtactgatggc

SEQ ID NO: 132255 - DNA, 22 bp, Artificial Sequence
  Synthetic oligonucleotide; CTT chr11 5292052 5292073 5292057 5292052 -
ctgtactgatggccatgtcctt

SEQ ID NO: 132256 - DNA, 22 bp, Artificial Sequence
  Synthetic oligonucleotide; TTC chr11 5292051 5292072 5292056 5292051 -
tgtactgatggccatgtccttt

SEQ ID NO: 132257 - DNA, 22 bp, Artificial Sequence
  Synthetic oligonucleotide; CTG chr11 5292049 5292070 5292054 5292049 -
tactgatggccatgtcctttaa

SEQ ID NO: 132258 - DNA, 22 bp, Artificial Sequence
  Synthetic oligonucleotide; CTG chr11 5292044 5292065 5292049 5292044 -
atggccatgtcctttaactact

SEQ ID NO: 132259 - DNA, 22 bp, Artificial Sequence
  Synthetic oligonucleotide; CTT chr11 5292030 5292051 5292035 5292030 -
taactactatgtagatatctgc

SEQ ID NO: 132260 - DNA, 22 bp, Artificial Sequence
  Synthetic oligonucleotide; TTT chr11 5292029 5292050 5292034 5292029 -
aactactatgtagatatctgct

SEQ ID NO: 132261 - DNA, 22 bp, Artificial Sequence
  Synthetic oligonucleotide; TTA chr11 5292028 5292049 5292033 5292028 -
actactatgtagatatctgcta

SEQ ID NO: 132262 - DNA, 22 bp, Artificial Sequence
  Synthetic oligonucleotide; CTA chr11 5292024 5292045 5292029 5292024 -
ctatgtagatatctgctactac

SEQ ID NO: 132263 - DNA, 22 bp, Artificial Sequence
  Synthetic oligonucleotide; CTA chr11 5292021 5292042 5292026 5292021 -
tgtagatatctgctactacctg

SEQ ID NO: 132264 - DNA, 22 bp, Artificial Sequence
  Synthetic oligonucleotide; CTG chr11 5292009 5292030 5292014 5292009 -
ctactacctgtattatgcctct

SEQ ID NO: 132265 - DNA, 22 bp, Artificial Sequence
  Synthetic oligonucleotide; CTA chr11 5292006 5292027 5292011 5292006 -
ctacctgtattatgcctctacc

SEQ ID NO: 132266 - DNA, 22 bp, Artificial Sequence
  Synthetic oligonucleotide; CTA chr11 5292003 5292024 5292008 5292003 -
cctgtattatgcctctaccttt

SEQ ID NO: 132267 - DNA, 22 bp, Artificial Sequence
  Synthetic oligonucleotide; CTG chr11 5291999 5292020 5292004 5291999 -
tattatgcctctacctttatta

SEQ ID NO: 132268 - DNA, 22 bp, Artificial Sequence
  Synthetic oligonucleotide; TTA chr11 5291994 5292015 5291999 5291994 -
tgcctctacctttattagcaga

SEQ ID NO: 132269 - DNA, 22 bp, Artificial Sequence
  Synthetic oligonucleotide; CTC chr11 5291988 5292009 5291993 5291988 -
tacctttattagcagagttatc

SEQ ID NO: 132270 - DNA, 22 bp, Artificial Sequence
  Synthetic oligonucleotide; CTA chr11 5291986 5292007 5291991 5291986 -
cctttattagcagagttatctg

SEQ ID NO: 132271 - DNA, 22 bp, Artificial Sequence
  Synthetic oligonucleotide; CTT chr11 5291982 5292003 5291987 5291982 -
tattagcagagttatctgtact

SEQ ID NO: 132272 - DNA, 22 bp, Artificial Sequence
  Synthetic oligonucleotide; TTT chr11 5291981 5292002 5291986 5291981 -
attagcagagttatctgtactg

SEQ ID NO: 132273 - DNA, 22 bp, Artificial Sequence
  Synthetic oligonucleotide; TTA chr11 5291980 5292001 5291985 5291980 -
ttagcagagttatctgtactgt

SEQ ID NO: 132274 - DNA, 22 bp, Artificial Sequence
  Synthetic oligonucleotide; TTA chr11 5291977 5291998 5291982 5291977 -
gcagagttatctgtactgttgg

SEQ ID NO: 132275 - DNA, 22 bp, Artificial Sequence
  Synthetic oligonucleotide; TTA chr11 5291968 5291989 5291973 5291968 -
tctgtactgttggcatgacaat

SEQ ID NO: 132276 - DNA, 22 bp, Artificial Sequence
  Synthetic oligonucleotide; CTG chr11 5291964 5291985 5291969 5291964 -
tactgttggcatgacaatcatt

SEQ ID NO: 132277 - DNA, 22 bp, Artificial Sequence
  Synthetic oligonucleotide; CTG chr11 5291959 5291980 5291964 5291959 -
ttggcatgacaatcatttgtta

SEQ ID NO: 132278 - DNA, 22 bp, Artificial Sequence
  Synthetic oligonucleotide; TTG chr11 5291956 5291977 5291961 5291956 -
gcatgacaatcatttgttaata

SEQ ID NO: 132279 - DNA, 22 bp, Artificial Sequence
  Synthetic oligonucleotide; TTT chr11 5291941 5291962 5291946 5291941 -
gttaatatgacttgcctttcct

SEQ ID NO: 132280 - DNA, 22 bp, Artificial Sequence
  Synthetic oligonucleotide; TTG chr11 5291940 5291961 5291945 5291940 -
ttaatatgacttgcctttcctt

SEQ ID NO: 132281 - DNA, 22 bp, Artificial Sequence
  Synthetic oligonucleotide; TTA chr11 5291937 5291958 5291942 5291937 -
atatgacttgcctttccttttt

SEQ ID NO: 132282 - DNA, 22 bp, Artificial Sequence
  Synthetic oligonucleotide; CTT chr11 5291928 5291949 5291933 5291928 -
gcctttcctttttctgctattc

SEQ ID NO: 132283 - DNA, 22 bp, Artificial Sequence
  Synthetic oligonucleotide; TTG chr11 5291927 5291948 5291932 5291927 -
cctttcctttttctgctattct

SEQ ID NO: 132284 - DNA, 22 bp, Artificial Sequence
  Synthetic oligonucleotide; CTT chr11 5291923 5291944 5291928 5291923 -
tcctttttctgctattcttgat

SEQ ID NO: 132285 - DNA, 22 bp, Artificial Sequence
  Synthetic oligonucleotide; TTT chr11 5291922 5291943 5291927 5291922 -
cctttttctgctattcttgatc

SEQ ID NO: 132286 - DNA, 22 bp, Artificial Sequence
  Synthetic oligonucleotide; TTC chr11 5291921 5291942 5291926 5291921 -
ctttttctgctattcttgatca

SEQ ID NO: 132287 - DNA, 22 bp, Artificial Sequence
  Synthetic oligonucleotide; CTT chr11 5291918 5291939 5291923 5291918 -
tttctgctattcttgatcaaat

SEQ ID NO: 132288 - DNA, 22 bp, Artificial Sequence
  Synthetic oligonucleotide; TTT chr11 5291917 5291938 5291922 5291917 -
ttctgctattcttgatcaaatg

SEQ ID NO: 132289 - DNA, 22 bp, Artificial Sequence
  Synthetic oligonucleotide; TTT chr11 5291916 5291937 5291921 5291916 -
tctgctattcttgatcaaatgg

SEQ ID NO: 132290 - DNA, 22 bp, Artificial Sequence
  Synthetic oligonucleotide; TTT chr11 5291915 5291936 5291920 5291915 -
ctgctattcttgatcaaatggc

SEQ ID NO: 132291 - DNA, 22 bp, Artificial Sequence
  Synthetic oligonucleotide; TTC chr11 5291914 5291935 5291919 5291914 -
tgctattcttgatcaaatggct

SEQ ID NO: 132292 - DNA, 22 bp, Artificial Sequence
  Synthetic oligonucleotide; CTG chr11 5291912 5291933 5291917 5291912 -
ctattcttgatcaaatggctcc

SEQ ID NO: 132293 - DNA, 22 bp, Artificial Sequence
  Synthetic oligonucleotide; CTA chr11 5291909 5291930 5291914 5291909 -
ttcttgatcaaatggctcctct

SEQ ID NO: 132294 - DNA, 22 bp, Artificial Sequence
  Synthetic oligonucleotide; TTC chr11 5291906 5291927 5291911 5291906 -
ttgatcaaatggctcctctttc

SEQ ID NO: 132295 - DNA, 22 bp, Artificial Sequence
  Synthetic oligonucleotide; CTT chr11 5291904 5291925 5291909 5291904 -
gatcaaatggctcctctttctt

SEQ ID NO: 132296 - DNA, 22 bp, Artificial Sequence
  Synthetic oligonucleotide; TTG chr11 5291903 5291924 5291908 5291903 -
atcaaatggctcctctttcttg

SEQ ID NO: 132297 - DNA, 22 bp, Artificial Sequence
  Synthetic oligonucleotide; CTC chr11 5291891 5291912 5291896 5291891 -
ctctttcttgctcctctcattt

SEQ ID NO: 132298 - DNA, 22 bp, Artificial Sequence
  Synthetic oligonucleotide; CTC chr11 5291888 5291909 5291893 5291888 -
tttcttgctcctctcatttctc

SEQ ID NO: 132299 - DNA, 22 bp, Artificial Sequence
  Synthetic oligonucleotide; CTT chr11 5291886 5291907 5291891 5291886 -
tcttgctcctctcatttctcct

SEQ ID NO: 132300 - DNA, 22 bp, Artificial Sequence
  Synthetic oligonucleotide; TTT chr11 5291885 5291906 5291890 5291885 -
cttgctcctctcatttctcctg

SEQ ID NO: 132301 - DNA, 22 bp, Artificial Sequence
  Synthetic oligonucleotide; TTC chr11 5291884 5291905 5291889 5291884 -
ttgctcctctcatttctcctgc

SEQ ID NO: 132302 - DNA, 22 bp, Artificial Sequence
  Synthetic oligonucleotide; CTT chr11 5291882 5291903 5291887 5291882 -
gctcctctcatttctcctgcct

SEQ ID NO: 132303 - DNA, 22 bp, Artificial Sequence
  Synthetic oligonucleotide; TTG chr11 5291881 5291902 5291886 5291881 -
ctcctctcatttctcctgcctt

SEQ ID NO: 132304 - DNA, 22 bp, Artificial Sequence
  Synthetic oligonucleotide; CTC chr11 5291878 5291899 5291883 5291878 -
ctctcatttctcctgccttcac

SEQ ID NO: 132305 - DNA, 22 bp, Artificial Sequence
  Synthetic oligonucleotide; CTC chr11 5291875 5291896 5291880 5291875 -
tcatttctcctgccttcacttg

SEQ ID NO: 132306 - DNA, 22 bp, Artificial Sequence
  Synthetic oligonucleotide; CTC chr11 5291873 5291894 5291878 5291873 -
atttctcctgccttcacttgga

SEQ ID NO: 132307 - DNA, 22 bp, Artificial Sequence
  Synthetic oligonucleotide; TTT chr11 5291869 5291890 5291874 5291869 -
ctcctgccttcacttggacgtg

SEQ ID NO: 132308 - DNA, 22 bp, Artificial Sequence
  Synthetic oligonucleotide; TTC chr11 5291868 5291889 5291873 5291868 -
tcctgccttcacttggacgtgc

SEQ ID NO: 132309 - DNA, 22 bp, Artificial Sequence
  Synthetic oligonucleotide; CTC chr11 5291866 5291887 5291871 5291866 -
ctgccttcacttggacgtgctt

SEQ ID NO: 132310 - DNA, 22 bp, Artificial Sequence
  Synthetic oligonucleotide; CTG chr11 5291863 5291884 5291868 5291863 -
ccttcacttggacgtgcttcac

SEQ ID NO: 132311 - DNA, 22 bp, Artificial Sequence
  Synthetic oligonucleotide; CTT chr11 5291859 5291880 5291864 5291859 -
cacttggacgtgcttcacgtag

SEQ ID NO: 132312 - DNA, 22 bp, Artificial Sequence
  Synthetic oligonucleotide; TTC chr11 5291858 5291879 5291863 5291858 -
acttggacgtgcttcacgtagt

SEQ ID NO: 132313 - DNA, 22 bp, Artificial Sequence
  Synthetic oligonucleotide; CTT chr11 5291854 5291875 5291859 5291854 -
ggacgtgcttcacgtagtctgt

SEQ ID NO: 132314 - DNA, 22 bp, Artificial Sequence
  Synthetic oligonucleotide; TTG chr11 5291853 5291874 5291858 5291853 -
gacgtgcttcacgtagtctgtg

SEQ ID NO: 132315 - DNA, 22 bp, Artificial Sequence
  Synthetic oligonucleotide; CTT chr11 5291844 5291865 5291849 5291844 -
cacgtagtctgtgcttatgact

SEQ ID NO: 132316 - DNA, 22 bp, Artificial Sequence
  Synthetic oligonucleotide; TTC chr11 5291843 5291864 5291848 5291843 -
acgtagtctgtgcttatgactg

SEQ ID NO: 132317 - DNA, 22 bp, Artificial Sequence
  Synthetic oligonucleotide; CTG chr11 5291833 5291854 5291838 5291833 -
tgcttatgactggattaaaaat

SEQ ID NO: 132318 - DNA, 22 bp, Artificial Sequence
  Synthetic oligonucleotide; CTT chr11 5291828 5291849 5291833 5291828 -
atgactggattaaaaattgata

SEQ ID NO: 132319 - DNA, 22 bp, Artificial Sequence
  Synthetic oligonucleotide; TTA chr11 5291827 5291848 5291832 5291827 -
tgactggattaaaaattgatat

SEQ ID NO: 132320 - DNA, 22 bp, Artificial Sequence
  Synthetic oligonucleotide; CTG chr11 5291821 5291842 5291826 5291821 -
gattaaaaattgatatggactt

SEQ ID NO: 132321 - DNA, 22 bp, Artificial Sequence
  Synthetic oligonucleotide; TTA chr11 5291816 5291837 5291821 5291816 -
aaaattgatatggacttatcct

SEQ ID NO: 132322 - DNA, 22 bp, Artificial Sequence
  Synthetic oligonucleotide; TTG chr11 5291809 5291830 5291814 5291809 -
atatggacttatcctaatgttg

SEQ ID NO: 132323 - DNA, 22 bp, Artificial Sequence
  Synthetic oligonucleotide; CTT chr11 5291799 5291820 5291804 5291799 -
atcctaatgttgttcgtcataa

SEQ ID NO: 132324 - DNA, 22 bp, Artificial Sequence
  Synthetic oligonucleotide; TTA chr11 5291798 5291819 5291803 5291798 -
tcctaatgttgttcgtcataat

SEQ ID NO: 132325 - DNA, 22 bp, Artificial Sequence
  Synthetic oligonucleotide; CTA chr11 5291793 5291814 5291798 5291793 -
atgttgttcgtcataatatggg

SEQ ID NO: 132326 - DNA, 22 bp, Artificial Sequence
  Synthetic oligonucleotide; TTG chr11 5291787 5291808 5291792 5291787 -
ttcgtcataatatgggttttat

SEQ ID NO: 132327 - DNA, 22 bp, Artificial Sequence
  Synthetic oligonucleotide; TTC chr11 5291784 5291805 5291789 5291784 -
gtcataatatgggttttatggt

SEQ ID NO: 132328 - DNA, 22 bp, Artificial Sequence
  Synthetic oligonucleotide; TTT chr11 5291768 5291789 5291773 5291768 -
tatggtccattattatttccta

SEQ ID NO: 132329 - DNA, 22 bp, Artificial Sequence
  Synthetic oligonucleotide; TTT chr11 5291767 5291788 5291772 5291767 -
atggtccattattatttcctat

SEQ ID NO: 132330 - DNA, 22 bp, Artificial Sequence
  Synthetic oligonucleotide; TTA chr11 5291766 5291787 5291771 5291766 -
tggtccattattatttcctatg

SEQ ID NO: 132331 - DNA, 22 bp, Artificial Sequence
  Synthetic oligonucleotide; TTA chr11 5291756 5291777 5291761 5291756 -
ttatttcctatgcattgatctg

SEQ ID NO: 132332 - DNA, 22 bp, Artificial Sequence
  Synthetic oligonucleotide; TTA chr11 5291753 5291774 5291758 5291753 -
tttcctatgcattgatctggag

SEQ ID NO: 132333 - DNA, 22 bp, Artificial Sequence
  Synthetic oligonucleotide; TTT chr11 5291750 5291771 5291755 5291750 -
cctatgcattgatctggagaag

SEQ ID NO: 132334 - DNA, 22 bp, Artificial Sequence
  Synthetic oligonucleotide; TTC chr11 5291749 5291770 5291754 5291749 -
ctatgcattgatctggagaagg

SEQ ID NO: 132335 - DNA, 22 bp, Artificial Sequence
  Synthetic oligonucleotide; CTA chr11 5291746 5291767 5291751 5291746 -
tgcattgatctggagaaggctt

SEQ ID NO: 132336 - DNA, 22 bp, Artificial Sequence
  Synthetic oligonucleotide; TTG chr11 5291739 5291760 5291744 5291739 -
atctggagaaggcttcaatcct

SEQ ID NO: 132337 - DNA, 22 bp, Artificial Sequence
  Synthetic oligonucleotide; CTG chr11 5291734 5291755 5291739 5291734 -
gagaaggcttcaatccttttac

SEQ ID NO: 132338 - DNA, 22 bp, Artificial Sequence
  Synthetic oligonucleotide; CTT chr11 5291724 5291745 5291729 5291724 -
caatccttttactctttgtgga

SEQ ID NO: 132339 - DNA, 22 bp, Artificial Sequence
  Synthetic oligonucleotide; TTC chr11 5291723 5291744 5291728 5291723 -
aatccttttactctttgtggaa

SEQ ID NO: 132340 - DNA, 22 bp, Artificial Sequence
  Synthetic oligonucleotide; CTT chr11 5291716 5291737 5291721 5291716 -
ttactctttgtggaaaatatct

SEQ ID NO: 132341 - DNA, 22 bp, Artificial Sequence
  Synthetic oligonucleotide; TTT chr11 5291715 5291736 5291720 5291715 -
tactctttgtggaaaatatctg

SEQ ID NO: 132342 - DNA, 22 bp, Artificial Sequence
  Synthetic oligonucleotide; TTT chr11 5291714 5291735 5291719 5291714 -
actctttgtggaaaatatctgt

SEQ ID NO: 132343 - DNA, 22 bp, Artificial Sequence
  Synthetic oligonucleotide; TTA chr11 5291713 5291734 5291718 5291713 -
ctctttgtggaaaatatctgta

SEQ ID NO: 132344 - DNA, 22 bp, Artificial Sequence
  Synthetic oligonucleotide; CTC chr11 5291710 5291731 5291715 5291710 -
tttgtggaaaatatctgtaaac

SEQ ID NO: 132345 - DNA, 22 bp, Artificial Sequence
  Synthetic oligonucleotide; CTT chr11 5291708 5291729 5291713 5291708 -
tgtggaaaatatctgtaaacct

SEQ ID NO: 132346 - DNA, 22 bp, Artificial Sequence
  Synthetic oligonucleotide; TTT chr11 5291707 5291728 5291712 5291707 -
gtggaaaatatctgtaaacctt

SEQ ID NO: 132347 - DNA, 22 bp, Artificial Sequence
  Synthetic oligonucleotide; TTG chr11 5291706 5291727 5291711 5291706 -
tggaaaatatctgtaaaccttc

SEQ ID NO: 132348 - DNA, 22 bp, Artificial Sequence
  Synthetic oligonucleotide; CTG chr11 5291693 5291714 5291698 5291693 -
taaaccttctggttcactctgc

SEQ ID NO: 132349 - DNA, 22 bp, Artificial Sequence
  Synthetic oligonucleotide; CTT chr11 5291685 5291706 5291690 5291685 -
ctggttcactctgctatagcaa

SEQ ID NO: 132350 - DNA, 22 bp, Artificial Sequence
  Synthetic oligonucleotide; TTC chr11 5291684 5291705 5291689 5291684 -
tggttcactctgctatagcaat

SEQ ID NO: 132351 - DNA, 22 bp, Artificial Sequence
  Synthetic oligonucleotide; CTG chr11 5291682 5291703 5291687 5291682 -
gttcactctgctatagcaattt

SEQ ID NO: 132352 - DNA, 22 bp, Artificial Sequence
  Synthetic oligonucleotide; TTC chr11 5291678 5291699 5291683 5291678 -
actctgctatagcaatttcagt

SEQ ID NO: 132353 - DNA, 22 bp, Artificial Sequence
  Synthetic oligonucleotide; CTC chr11 5291674 5291695 5291679 5291674 -
tgctatagcaatttcagtttag

SEQ ID NO: 132354 - DNA, 22 bp, Artificial Sequence
  Synthetic oligonucleotide; CTG chr11 5291672 5291693 5291677 5291672 -
ctatagcaatttcagtttaggc

SEQ ID NO: 132355 - DNA, 22 bp, Artificial Sequence
  Synthetic oligonucleotide; CTA chr11 5291669 5291690 5291674 5291669 -
tagcaatttcagtttaggctag

SEQ ID NO: 132356 - DNA, 22 bp, Artificial Sequence
  Synthetic oligonucleotide; TTT chr11 5291660 5291681 5291665 5291660 -
cagtttaggctagtaagcatga

SEQ ID NO: 132357 - DNA, 22 bp, Artificial Sequence
  Synthetic oligonucleotide; TTC chr11 5291659 5291680 5291664 5291659 -
agtttaggctagtaagcatgag

SEQ ID NO: 132358 - DNA, 22 bp, Artificial Sequence
  Synthetic oligonucleotide; TTT chr11 5291654 5291675 5291659 5291654 -
aggctagtaagcatgaggatgc

SEQ ID NO: 132359 - DNA, 22 bp, Artificial Sequence
  Synthetic oligonucleotide; TTA chr11 5291653 5291674 5291658 5291653 -
ggctagtaagcatgaggatgcc

SEQ ID NO: 132360 - DNA, 22 bp, Artificial Sequence
  Synthetic oligonucleotide; CTA chr11 5291648 5291669 5291653 5291648 -
gtaagcatgaggatgcctcctt

SEQ ID NO: 132361 - DNA, 22 bp, Artificial Sequence
  Synthetic oligonucleotide; CTC chr11 5291629 5291650 5291634 5291629 -
cttctctgatttttcccacagt

SEQ ID NO: 132362 - DNA, 22 bp, Artificial Sequence
  Synthetic oligonucleotide; CTT chr11 5291626 5291647 5291631 5291626 -
ctctgatttttcccacagtctg

SEQ ID NO: 132363 - DNA, 22 bp, Artificial Sequence
  Synthetic oligonucleotide; TTC chr11 5291625 5291646 5291630 5291625 -
tctgatttttcccacagtctgt

SEQ ID NO: 132364 - DNA, 22 bp, Artificial Sequence
  Synthetic oligonucleotide; CTC chr11 5291623 5291644 5291628 5291623 -
tgatttttcccacagtctgttg

SEQ ID NO: 132365 - DNA, 22 bp, Artificial Sequence
  Synthetic oligonucleotide; CTG chr11 5291621 5291642 5291626 5291621 -
atttttcccacagtctgttggt

SEQ ID NO: 132366 - DNA, 22 bp, Artificial Sequence
  Synthetic oligonucleotide; TTT chr11 5291617 5291638 5291622 5291617 -
ttcccacagtctgttggtcaca

SEQ ID NO: 132367 - DNA, 22 bp, Artificial Sequence
  Synthetic oligonucleotide; TTT chr11 5291616 5291637 5291621 5291616 -
tcccacagtctgttggtcacag

SEQ ID NO: 132368 - DNA, 22 bp, Artificial Sequence
  Synthetic oligonucleotide; TTT chr11 5291615 5291636 5291620 5291615 -
cccacagtctgttggtcacaga

SEQ ID NO: 132369 - DNA, 22 bp, Artificial Sequence
  Synthetic oligonucleotide; TTC chr11 5291614 5291635 5291619 5291614 -
ccacagtctgttggtcacagaa

SEQ ID NO: 132370 - DNA, 22 bp, Artificial Sequence
  Synthetic oligonucleotide; CTG chr11 5291604 5291625 5291609 5291604 -
ttggtcacagaataacctgagt

SEQ ID NO: 132371 - DNA, 22 bp, Artificial Sequence
  Synthetic oligonucleotide; TTG chr11 5291601 5291622 5291606 5291601 -
gtcacagaataacctgagtgat

SEQ ID NO: 132372 - DNA, 22 bp, Artificial Sequence
  Synthetic oligonucleotide; CTG chr11 5291585 5291606 5291590 5291585 -
agtgattactgatgaaagagtg

SEQ ID NO: 132373 - DNA, 22 bp, Artificial Sequence
  Synthetic oligonucleotide; TTA chr11 5291577 5291598 5291582 5291577 -
ctgatgaaagagtgagaatgtt

SEQ ID NO: 132374 - DNA, 22 bp, Artificial Sequence
  Synthetic oligonucleotide; CTG chr11 5291574 5291595 5291579 5291574 -
atgaaagagtgagaatgttatt

SEQ ID NO: 132375 - DNA, 22 bp, Artificial Sequence
  Synthetic oligonucleotide; TTA chr11 5291554 5291575 5291559 5291554 -
ttgatagtcacaatgacaaaaa

SEQ ID NO: 132376 - DNA, 22 bp, Artificial Sequence
  Synthetic oligonucleotide; TTG chr11 5291551 5291572 5291556 5291551 -
atagtcacaatgacaaaaaaca

SEQ ID NO: 132377 - DNA, 22 bp, Artificial Sequence
  Synthetic oligonucleotide; CTA chr11 5291521 5291542 5291526 5291521 -
cagtcaaaatgtttctcttttt

SEQ ID NO: 132378 - DNA, 22 bp, Artificial Sequence
  Synthetic oligonucleotide; TTT chr11 5291507 5291528 5291512 5291507 -
ctctttttattagtggattata

SEQ ID NO: 132379 - DNA, 22 bp, Artificial Sequence
  Synthetic oligonucleotide; TTC chr11 5291506 5291527 5291511 5291506 -
tctttttattagtggattatat

SEQ ID NO: 132380 - DNA, 22 bp, Artificial Sequence
  Synthetic oligonucleotide; CTC chr11 5291504 5291525 5291509 5291504 -
tttttattagtggattatattt

SEQ ID NO: 132381 - DNA, 22 bp, Artificial Sequence
  Synthetic oligonucleotide; CTT chr11 5291502 5291523 5291507 5291502 -
tttattagtggattatatttcc

SEQ ID NO: 132382 - DNA, 22 bp, Artificial Sequence
  Synthetic oligonucleotide; TTT chr11 5291501 5291522 5291506 5291501 -
ttattagtggattatatttcct

SEQ ID NO: 132383 - DNA, 22 bp, Artificial Sequence
  Synthetic oligonucleotide; TTT chr11 5291500 5291521 5291505 5291500 -
tattagtggattatatttcctg

SEQ ID NO: 132384 - DNA, 22 bp, Artificial Sequence
  Synthetic oligonucleotide; TTT chr11 5291499 5291520 5291504 5291499 -
attagtggattatatttcctga

SEQ ID NO: 132385 - DNA, 22 bp, Artificial Sequence
  Synthetic oligonucleotide; TTA chr11 5291498 5291519 5291503 5291498 -
ttagtggattatatttcctgac

SEQ ID NO: 132386 - DNA, 22 bp, Artificial Sequence
  Synthetic oligonucleotide; TTA chr11 5291495 5291516 5291500 5291495 -
gtggattatatttcctgaccta

SEQ ID NO: 132387 - DNA, 22 bp, Artificial Sequence
  Synthetic oligonucleotide; TTA chr11 5291487 5291508 5291492 5291487 -
tatttcctgacctatatctggc

SEQ ID NO: 132388 - DNA, 22 bp, Artificial Sequence
  Synthetic oligonucleotide; TTT chr11 5291482 5291503 5291487 5291482 -
cctgacctatatctggcaggac

SEQ ID NO: 132389 - DNA, 22 bp, Artificial Sequence
  Synthetic oligonucleotide; TTC chr11 5291481 5291502 5291486 5291481 -
ctgacctatatctggcaggact

SEQ ID NO: 132390 - DNA, 22 bp, Artificial Sequence
  Synthetic oligonucleotide; CTG chr11 5291478 5291499 5291483 5291478 -
acctatatctggcaggactctt

SEQ ID NO: 132391 - DNA, 22 bp, Artificial Sequence
  Synthetic oligonucleotide; CTA chr11 5291473 5291494 5291478 5291473 -
tatctggcaggactctttagag

SEQ ID NO: 132392 - DNA, 22 bp, Artificial Sequence
  Synthetic oligonucleotide; CTG chr11 5291467 5291488 5291472 5291467 -
gcaggactctttagagaggtag

SEQ ID NO: 132393 - DNA, 22 bp, Artificial Sequence
  Synthetic oligonucleotide; CTC chr11 5291458 5291479 5291463 5291458 -
tttagagaggtagctgaagctg

SEQ ID NO: 132394 - DNA, 22 bp, Artificial Sequence
  Synthetic oligonucleotide; CTT chr11 5291456 5291477 5291461 5291456 -
tagagaggtagctgaagctgct

SEQ ID NO: 132395 - DNA, 22 bp, Artificial Sequence
  Synthetic oligonucleotide; TTT chr11 5291455 5291476 5291460 5291455 -
agagaggtagctgaagctgctg

SEQ ID NO: 132396 - DNA, 22 bp, Artificial Sequence
  Synthetic oligonucleotide; TTA chr11 5291454 5291475 5291459 5291454 -
gagaggtagctgaagctgctgt

SEQ ID NO: 132397 - DNA, 22 bp, Artificial Sequence
  Synthetic oligonucleotide; CTG chr11 5291442 5291463 5291447 5291442 -
aagctgctgttatgaccactag

SEQ ID NO: 132398 - DNA, 22 bp, Artificial Sequence
  Synthetic oligonucleotide; CTG chr11 5291436 5291457 5291441 5291436 -
ctgttatgaccactagagggaa

SEQ ID NO: 132399 - DNA, 22 bp, Artificial Sequence
  Synthetic oligonucleotide; CTG chr11 5291433 5291454 5291438 5291433 -
ttatgaccactagagggaagaa

SEQ ID NO: 132400 - DNA, 22 bp, Artificial Sequence
  Synthetic oligonucleotide; TTA chr11 5291430 5291451 5291435 5291430 -
tgaccactagagggaagaagat

SEQ ID NO: 132401 - DNA, 22 bp, Artificial Sequence
  Synthetic oligonucleotide; CTA chr11 5291421 5291442 5291426 5291421 -
gagggaagaagatacctgtgga

SEQ ID NO: 132402 - DNA, 22 bp, Artificial Sequence
  Synthetic oligonucleotide; CTG chr11 5291403 5291424 5291408 5291403 -
tggagctaatggtccaagatgg

SEQ ID NO: 132403 - DNA, 22 bp, Artificial Sequence
  Synthetic oligonucleotide; CTA chr11 5291395 5291416 5291400 5291395 -
atggtccaagatggtggagccc

SEQ ID NO: 132404 - DNA, 22 bp, Artificial Sequence
  Synthetic oligonucleotide; TTG chr11 5291358 5291379 5291363 5291358 -
ttaaggagcccttttgattgaa

SEQ ID NO: 132405 - DNA, 22 bp, Artificial Sequence
  Synthetic oligonucleotide; TTA chr11 5291355 5291376 5291360 5291355 -
aggagcccttttgattgaaggt

SEQ ID NO: 132406 - DNA, 22 bp, Artificial Sequence
  Synthetic oligonucleotide; CTT chr11 5291345 5291366 5291350 5291345 -
ttgattgaaggtgggtgccccc

SEQ ID NO: 132407 - DNA, 22 bp, Artificial Sequence
  Synthetic oligonucleotide; TTT chr11 5291344 5291365 5291349 5291344 -
tgattgaaggtgggtgccccca

SEQ ID NO: 132408 - DNA, 22 bp, Artificial Sequence
  Synthetic oligonucleotide; TTT chr11 5291343 5291364 5291348 5291343 -
gattgaaggtgggtgcccccac

SEQ ID NO: 132409 - DNA, 22 bp, Artificial Sequence
  Synthetic oligonucleotide; TTG chr11 5291342 5291363 5291347 5291342 -
attgaaggtgggtgcccccacc

SEQ ID NO: 132410 - DNA, 22 bp, Artificial Sequence
  Synthetic oligonucleotide; TTG chr11 5291338 5291359 5291343 5291338 -
aaggtgggtgcccccaccttac

SEQ ID NO: 132411 - DNA, 22 bp, Artificial Sequence
  Synthetic oligonucleotide; CTT chr11 5291318 5291339 5291323 5291318 -
acagggacaggacatctggata

SEQ ID NO: 132412 - DNA, 22 bp, Artificial Sequence
  Synthetic oligonucleotide; TTA chr11 5291317 5291338 5291322 5291317 -
cagggacaggacatctggatac

SEQ ID NO: 132413 - DNA, 22 bp, Artificial Sequence
  Synthetic oligonucleotide; CTG chr11 5291300 5291321 5291305 5291300 -
gatactcctcccagtttctcca

SEQ ID NO: 132414 - DNA, 22 bp, Artificial Sequence
  Synthetic oligonucleotide; CTC chr11 5291293 5291314 5291298 5291293 -
ctcccagtttctccagtttccc

SEQ ID NO: 132415 - DNA, 22 bp, Artificial Sequence
  Synthetic oligonucleotide; CTC chr11 5291290 5291311 5291295 5291290 -
ccagtttctccagtttcccttt

SEQ ID NO: 132416 - DNA, 22 bp, Artificial Sequence
  Synthetic oligonucleotide; TTT chr11 5291283 5291304 5291288 5291283 -
ctccagtttccctttttcctaa

SEQ ID NO: 132417 - DNA, 22 bp, Artificial Sequence
  Synthetic oligonucleotide; TTC chr11 5291282 5291303 5291287 5291282 -
tccagtttccctttttcctaat

SEQ ID NO: 132418 - DNA, 22 bp, Artificial Sequence
  Synthetic oligonucleotide; CTC chr11 5291280 5291301 5291285 5291280 -
cagtttccctttttcctaatat

SEQ ID NO: 132419 - DNA, 22 bp, Artificial Sequence
  Synthetic oligonucleotide; TTT chr11 5291274 5291295 5291279 5291274 -
ccctttttcctaatatatctcc

SEQ ID NO: 132420 - DNA, 22 bp, Artificial Sequence
  Synthetic oligonucleotide; TTC chr11 5291273 5291294 5291278 5291273 -
cctttttcctaatatatctcct

SEQ ID NO: 132421 - DNA, 22 bp, Artificial Sequence
  Synthetic oligonucleotide; CTT chr11 5291269 5291290 5291274 5291269 -
tttcctaatatatctcctgata

SEQ ID NO: 132422 - DNA, 22 bp, Artificial Sequence
  Synthetic oligonucleotide; TTT chr11 5291268 5291289 5291273 5291268 -
ttcctaatatatctcctgataa

SEQ ID NO: 132423 - DNA, 22 bp, Artificial Sequence
  Synthetic oligonucleotide; TTT chr11 5291267 5291288 5291272 5291267 -
tcctaatatatctcctgataaa

SEQ ID NO: 132424 - DNA, 22 bp, Artificial Sequence
  Synthetic oligonucleotide; TTT chr11 5291266 5291287 5291271 5291266 -
cctaatatatctcctgataaaa

SEQ ID NO: 132425 - DNA, 22 bp, Artificial Sequence
  Synthetic oligonucleotide; TTC chr11 5291265 5291286 5291270 5291265 -
ctaatatatctcctgataaaat

SEQ ID NO: 132426 - DNA, 22 bp, Artificial Sequence
  Synthetic oligonucleotide; CTA chr11 5291262 5291283 5291267 5291262 -
atatatctcctgataaaatgtc

SEQ ID NO: 132427 - DNA, 22 bp, Artificial Sequence
  Synthetic oligonucleotide; CTC chr11 5291253 5291274 5291258 5291253 -
ctgataaaatgtctatactcac

SEQ ID NO: 132428 - DNA, 22 bp, Artificial Sequence
  Synthetic oligonucleotide; CTG chr11 5291250 5291271 5291255 5291250 -
ataaaatgtctatactcacttc

SEQ ID NO: 132429 - DNA, 22 bp, Artificial Sequence
  Synthetic oligonucleotide; CTA chr11 5291238 5291259 5291243 5291238 -
tactcacttccccatttctaat

SEQ ID NO: 132430 - DNA, 22 bp, Artificial Sequence
  Synthetic oligonucleotide; CTC chr11 5291233 5291254 5291238 5291233 -
acttccccatttctaataataa

SEQ ID NO: 132431 - DNA, 22 bp, Artificial Sequence
  Synthetic oligonucleotide; CTT chr11 5291229 5291250 5291234 5291229 -
ccccatttctaataataaagca

SEQ ID NO: 132432 - DNA, 22 bp, Artificial Sequence
  Synthetic oligonucleotide; TTC chr11 5291228 5291249 5291233 5291228 -
cccatttctaataataaagcaa

SEQ ID NO: 132433 - DNA, 22 bp, Artificial Sequence
  Synthetic oligonucleotide; TTT chr11 5291221 5291242 5291226 5291221 -
ctaataataaagcaaaggctag

SEQ ID NO: 132434 - DNA, 22 bp, Artificial Sequence
  Synthetic oligonucleotide; TTC chr11 5291220 5291241 5291225 5291220 -
taataataaagcaaaggctagt

SEQ ID NO: 132435 - DNA, 22 bp, Artificial Sequence
  Synthetic oligonucleotide; CTA chr11 5291218 5291239 5291223 5291218 -
ataataaagcaaaggctagtta

SEQ ID NO: 132436 - DNA, 22 bp, Artificial Sequence
  Synthetic oligonucleotide; CTA chr11 5291200 5291221 5291205 5291200 -
gttagtaagacatcaccttgca

SEQ ID NO: 132437 - DNA, 22 bp, Artificial Sequence
  Synthetic oligonucleotide; TTA chr11 5291196 5291217 5291201 5291196 -
gtaagacatcaccttgcatttt

SEQ ID NO: 132438 - DNA, 22 bp, Artificial Sequence
  Synthetic oligonucleotide; CTT chr11 5291181 5291202 5291186 5291181 -
gcattttgaaaatgccatagac

SEQ ID NO: 132439 - DNA, 22 bp, Artificial Sequence
  Synthetic oligonucleotide; TTG chr11 5291180 5291201 5291185 5291180 -
cattttgaaaatgccatagact

SEQ ID NO: 132440 - DNA, 22 bp, Artificial Sequence
  Synthetic oligonucleotide; TTT chr11 5291175 5291196 5291180 5291175 -
tgaaaatgccatagactttcaa

SEQ ID NO: 132441 - DNA, 22 bp, Artificial Sequence
  Synthetic oligonucleotide; TTT chr11 5291174 5291195 5291179 5291174 -
gaaaatgccatagactttcaaa

SEQ ID NO: 132442 - DNA, 22 bp, Artificial Sequence
  Synthetic oligonucleotide; TTG chr11 5291173 5291194 5291178 5291173 -
aaaatgccatagactttcaaaa

SEQ ID NO: 132443 - DNA, 22 bp, Artificial Sequence
  Synthetic oligonucleotide; CTT chr11 5291157 5291178 5291162 5291157 -
tcaaaattatttcatacatcgg

SEQ ID NO: 132444 - DNA, 22 bp, Artificial Sequence
  Synthetic oligonucleotide; TTT chr11 5291156 5291177 5291161 5291156 -
caaaattatttcatacatcggt

SEQ ID NO: 132445 - DNA, 22 bp, Artificial Sequence
  Synthetic oligonucleotide; TTC chr11 5291155 5291176 5291160 5291155 -
aaaattatttcatacatcggtc

SEQ ID NO: 132446 - DNA, 22 bp, Artificial Sequence
  Synthetic oligonucleotide; TTA chr11 5291148 5291169 5291153 5291148 -
tttcatacatcggtctttcttt

SEQ ID NO: 132447 - DNA, 22 bp, Artificial Sequence
  Synthetic oligonucleotide; TTT chr11 5291145 5291166 5291150 5291145 -
catacatcggtctttctttatt

SEQ ID NO: 132448 - DNA, 22 bp, Artificial Sequence
  Synthetic oligonucleotide; TTC chr11 5291144 5291165 5291149 5291144 -
atacatcggtctttctttattt

SEQ ID NO: 132449 - DNA, 22 bp, Artificial Sequence
  Synthetic oligonucleotide; CTT chr11 5291131 5291152 5291136 5291131 -
tctttatttcaagagtccagaa

SEQ ID NO: 132450 - DNA, 22 bp, Artificial Sequence
  Synthetic oligonucleotide; TTT chr11 5291130 5291151 5291135 5291130 -
ctttatttcaagagtccagaaa

SEQ ID NO: 132451 - DNA, 22 bp, Artificial Sequence
  Synthetic oligonucleotide; TTC chr11 5291129 5291150 5291134 5291129 -
tttatttcaagagtccagaaat

SEQ ID NO: 132452 - DNA, 22 bp, Artificial Sequence
  Synthetic oligonucleotide; CTT chr11 5291127 5291148 5291132 5291127 -
tatttcaagagtccagaaatgg

SEQ ID NO: 132453 - DNA, 22 bp, Artificial Sequence
  Synthetic oligonucleotide; TTT chr11 5291126 5291147 5291131 5291126 -
atttcaagagtccagaaatggc

SEQ ID NO: 132454 - DNA, 22 bp, Artificial Sequence
  Synthetic oligonucleotide; TTA chr11 5291125 5291146 5291130 5291125 -
tttcaagagtccagaaatggca

SEQ ID NO: 132455 - DNA, 22 bp, Artificial Sequence
  Synthetic oligonucleotide; TTT chr11 5291122 5291143 5291127 5291122 -
caagagtccagaaatggcaaca

SEQ ID NO: 132456 - DNA, 22 bp, Artificial Sequence
  Synthetic oligonucleotide; TTC chr11 5291121 5291142 5291126 5291121 -
aagagtccagaaatggcaacat

SEQ ID NO: 132457 - DNA, 22 bp, Artificial Sequence
  Synthetic oligonucleotide; TTA chr11 5291097 5291118 5291102 5291097 -
cctttgattcaatgtaatggaa

SEQ ID NO: 132458 - DNA, 22 bp, Artificial Sequence
  Synthetic oligonucleotide; CTT chr11 5291093 5291114 5291098 5291093 -
tgattcaatgtaatggaaagag

SEQ ID NO: 132459 - DNA, 22 bp, Artificial Sequence
  Synthetic oligonucleotide; TTT chr11 5291092 5291113 5291097 5291092 -
gattcaatgtaatggaaagagc

SEQ ID NO: 132460 - DNA, 22 bp, Artificial Sequence
  Synthetic oligonucleotide; TTG chr11 5291091 5291112 5291096 5291091 -
attcaatgtaatggaaagagct

SEQ ID NO: 132461 - DNA, 22 bp, Artificial Sequence
  Synthetic oligonucleotide; TTC chr11 5291087 5291108 5291092 5291087 -
aatgtaatggaaagagctcttt

SEQ ID NO: 132462 - DNA, 22 bp, Artificial Sequence
  Synthetic oligonucleotide; CTC chr11 5291068 5291089 5291073 5291068 -
tttcaagagacagagaaaagaa

SEQ ID NO: 132463 - DNA, 22 bp, Artificial Sequence
  Synthetic oligonucleotide; CTT chr11 5291066 5291087 5291071 5291066 -
tcaagagacagagaaaagaata

SEQ ID NO: 132464 - DNA, 22 bp, Artificial Sequence
  Synthetic oligonucleotide; TTT chr11 5291065 5291086 5291070 5291065 -
caagagacagagaaaagaataa

SEQ ID NO: 132465 - DNA, 22 bp, Artificial Sequence
  Synthetic oligonucleotide; TTC chr11 5291064 5291085 5291069 5291064 -
aagagacagagaaaagaataat

SEQ ID NO: 132466 - DNA, 22 bp, Artificial Sequence
  Synthetic oligonucleotide; TTT chr11 5291040 5291061 5291045 5291040 -
aatttctttccccacacctcct

SEQ ID NO: 132467 - DNA, 22 bp, Artificial Sequence
  Synthetic oligonucleotide; TTA chr11 5291039 5291060 5291044 5291039 -
atttctttccccacacctcctt

SEQ ID NO: 132468 - DNA, 22 bp, Artificial Sequence
  Synthetic oligonucleotide; TTT chr11 5291035 5291056 5291040 5291035 -
ctttccccacacctccttccct

SEQ ID NO: 132469 - DNA, 22 bp, Artificial Sequence
  Synthetic oligonucleotide; TTC chr11 5291034 5291055 5291039 5291034 -
tttccccacacctccttccctg

SEQ ID NO: 132470 - DNA, 22 bp, Artificial Sequence
  Synthetic oligonucleotide; CTT chr11 5291032 5291053 5291037 5291032 -
tccccacacctccttccctgtc

SEQ ID NO: 132471 - DNA, 22 bp, Artificial Sequence
  Synthetic oligonucleotide; TTT chr11 5291031 5291052 5291036 5291031 -
ccccacacctccttccctgtct

SEQ ID NO: 132472 - DNA, 22 bp, Artificial Sequence
  Synthetic oligonucleotide; TTC chr11 5291030 5291051 5291035 5291030 -
cccacacctccttccctgtctc

SEQ ID NO: 132473 - DNA, 22 bp, Artificial Sequence
  Synthetic oligonucleotide; CTC chr11 5291020 5291041 5291025 5291020 -
cttccctgtctcttaccctatc

SEQ ID NO: 132474 - DNA, 22 bp, Artificial Sequence
  Synthetic oligonucleotide; CTT chr11 5291017 5291038 5291022 5291017 -
ccctgtctcttaccctatcttc

SEQ ID NO: 132475 - DNA, 22 bp, Artificial Sequence
  Synthetic oligonucleotide; TTC chr11 5291016 5291037 5291021 5291016 -
cctgtctcttaccctatcttcc

SEQ ID NO: 132476 - DNA, 22 bp, Artificial Sequence
  Synthetic oligonucleotide; CTG chr11 5291012 5291033 5291017 5291012 -
tctcttaccctatcttccttcc

SEQ ID NO: 132477 - DNA, 22 bp, Artificial Sequence
  Synthetic oligonucleotide; CTC chr11 5291008 5291029 5291013 5291008 -
ttaccctatcttccttccttct

SEQ ID NO: 132478 - DNA, 22 bp, Artificial Sequence
  Synthetic oligonucleotide; CTT chr11 5291006 5291027 5291011 5291006 -
accctatcttccttccttctac

SEQ ID NO: 132479 - DNA, 22 bp, Artificial Sequence
  Synthetic oligonucleotide; TTA chr11 5291005 5291026 5291010 5291005 -
ccctatcttccttccttctacc

SEQ ID NO: 132480 - DNA, 22 bp, Artificial Sequence
  Synthetic oligonucleotide; CTA chr11 5291000 5291021 5291005 5291000 -
tcttccttccttctaccctccc

SEQ ID NO: 132481 - DNA, 22 bp, Artificial Sequence
  Synthetic oligonucleotide; CTT chr11 5290996 5291017 5291001 5290996 -
ccttccttctaccctccccatt

SEQ ID NO: 132482 - DNA, 22 bp, Artificial Sequence
  Synthetic oligonucleotide; TTC chr11 5290995 5291016 5291000 5290995 -
cttccttctaccctccccattt

SEQ ID NO: 132483 - DNA, 22 bp, Artificial Sequence
  Synthetic oligonucleotide; CTT chr11 5290992 5291013 5290997 5290992 -
ccttctaccctccccatttctc

SEQ ID NO: 132484 - DNA, 22 bp, Artificial Sequence
  Synthetic oligonucleotide; TTC chr11 5290991 5291012 5290996 5290991 -
cttctaccctccccatttctct

SEQ ID NO: 132485 - DNA, 22 bp, Artificial Sequence
  Synthetic oligonucleotide; CTT chr11 5290988 5291009 5290993 5290988 -
ctaccctccccatttctctctc

SEQ ID NO: 132486 - DNA, 22 bp, Artificial Sequence
  Synthetic oligonucleotide; TTC chr11 5290987 5291008 5290992 5290987 -
taccctccccatttctctctct

SEQ ID NO: 132487 - DNA, 22 bp, Artificial Sequence
  Synthetic oligonucleotide; CTA chr11 5290985 5291006 5290990 5290985 -
ccctccccatttctctctctca

SEQ ID NO: 132488 - DNA, 22 bp, Artificial Sequence
  Synthetic oligonucleotide; CTC chr11 5290980 5291001 5290985 5290980 -
cccatttctctctctcatttct

SEQ ID NO: 132489 - DNA, 22 bp, Artificial Sequence
  Synthetic oligonucleotide; TTT chr11 5290973 5290994 5290978 5290973 -
ctctctctcatttctcagaagt

SEQ ID NO: 132490 - DNA, 22 bp, Artificial Sequence
  Synthetic oligonucleotide; TTC chr11 5290972 5290993 5290977 5290972 -
tctctctcatttctcagaagta

SEQ ID NO: 132491 - DNA, 22 bp, Artificial Sequence
  Synthetic oligonucleotide; CTC chr11 5290970 5290991 5290975 5290970 -
tctctcatttctcagaagtata

SEQ ID NO: 132492 - DNA, 22 bp, Artificial Sequence
  Synthetic oligonucleotide; CTC chr11 5290968 5290989 5290973 5290968 -
tctcatttctcagaagtatatt

SEQ ID NO: 132493 - DNA, 22 bp, Artificial Sequence
  Synthetic oligonucleotide; CTC chr11 5290966 5290987 5290971 5290966 -
tcatttctcagaagtatatttt

SEQ ID NO: 132494 - DNA, 22 bp, Artificial Sequence
  Synthetic oligonucleotide; CTC chr11 5290964 5290985 5290969 5290964 -
atttctcagaagtatattttga

SEQ ID NO: 132495 - DNA, 22 bp, Artificial Sequence
  Synthetic oligonucleotide; TTT chr11 5290960 5290981 5290965 5290960 -
ctcagaagtatattttgaaagg

SEQ ID NO: 132496 - DNA, 22 bp, Artificial Sequence
  Synthetic oligonucleotide; TTC chr11 5290959 5290980 5290964 5290959 -
tcagaagtatattttgaaagga

SEQ ID NO: 132497 - DNA, 22 bp, Artificial Sequence
  Synthetic oligonucleotide; CTC chr11 5290957 5290978 5290962 5290957 -
agaagtatattttgaaaggatt

SEQ ID NO: 132498 - DNA, 22 bp, Artificial Sequence
  Synthetic oligonucleotide; TTT chr11 5290945 5290966 5290950 5290945 -
tgaaaggattcatagcagacag

SEQ ID NO: 132499 - DNA, 22 bp, Artificial Sequence
  Synthetic oligonucleotide; TTT chr11 5290944 5290965 5290949 5290944 -
gaaaggattcatagcagacagc

SEQ ID NO: 132500 - DNA, 22 bp, Artificial Sequence
  Synthetic oligonucleotide; TTG chr11 5290943 5290964 5290948 5290943 -
aaaggattcatagcagacagct

SEQ ID NO: 132501 - DNA, 22 bp, Artificial Sequence
  Synthetic oligonucleotide; TTC chr11 5290934 5290955 5290939 5290934 -
atagcagacagctaaggctggt

SEQ ID NO: 132502 - DNA, 22 bp, Artificial Sequence
  Synthetic oligonucleotide; CTA chr11 5290920 5290941 5290925 5290920 -
aggctggttttttctaagtgaa

SEQ ID NO: 132503 - DNA, 22 bp, Artificial Sequence
  Synthetic oligonucleotide; CTG chr11 5290914 5290935 5290919 5290914 -
gttttttctaagtgaagaagtg

SEQ ID NO: 132504 - DNA, 22 bp, Artificial Sequence
  Synthetic oligonucleotide; TTT chr11 5290910 5290931 5290915 5290910 -
tttctaagtgaagaagtgatat

SEQ ID NO: 132505 - DNA, 22 bp, Artificial Sequence
  Synthetic oligonucleotide; TTT chr11 5290909 5290930 5290914 5290909 -
ttctaagtgaagaagtgatatt

SEQ ID NO: 132506 - DNA, 22 bp, Artificial Sequence
  Synthetic oligonucleotide; TTT chr11 5290908 5290929 5290913 5290908 -
tctaagtgaagaagtgatattg

SEQ ID NO: 132507 - DNA, 22 bp, Artificial Sequence
  Synthetic oligonucleotide; TTT chr11 5290907 5290928 5290912 5290907 -
ctaagtgaagaagtgatattga

SEQ ID NO: 132508 - DNA, 22 bp, Artificial Sequence
  Synthetic oligonucleotide; TTC chr11 5290906 5290927 5290911 5290906 -
taagtgaagaagtgatattgag

SEQ ID NO: 132509 - DNA, 22 bp, Artificial Sequence
  Synthetic oligonucleotide; CTA chr11 5290904 5290925 5290909 5290904 -
agtgaagaagtgatattgagaa

SEQ ID NO: 132510 - DNA, 22 bp, Artificial Sequence
  Synthetic oligonucleotide; TTG chr11 5290886 5290907 5290891 5290886 -
agaaggtagggttgcatgagcc

SEQ ID NO: 132511 - DNA, 22 bp, Artificial Sequence
  Synthetic oligonucleotide; TTG chr11 5290872 5290893 5290877 5290872 -
catgagccctttcagtttttta

SEQ ID NO: 132512 - DNA, 22 bp, Artificial Sequence
  Synthetic oligonucleotide; CTT chr11 5290861 5290882 5290866 5290861 -
tcagttttttagtttatataca

SEQ ID NO: 132513 - DNA, 22 bp, Artificial Sequence
  Synthetic oligonucleotide; TTT chr11 5290860 5290881 5290865 5290860 -
cagttttttagtttatatacat

SEQ ID NO: 132514 - DNA, 22 bp, Artificial Sequence
  Synthetic oligonucleotide; TTC chr11 5290859 5290880 5290864 5290859 -
agttttttagtttatatacatc

SEQ ID NO: 132515 - DNA, 22 bp, Artificial Sequence
  Synthetic oligonucleotide; TTT chr11 5290854 5290875 5290859 5290854 -
tttagtttatatacatctgtat

SEQ ID NO: 132516 - DNA, 22 bp, Artificial Sequence
  Synthetic oligonucleotide; TTT chr11 5290853 5290874 5290858 5290853 -
ttagtttatatacatctgtatt

SEQ ID NO: 132517 - DNA, 22 bp, Artificial Sequence
  Synthetic oligonucleotide; TTT chr11 5290852 5290873 5290857 5290852 -
tagtttatatacatctgtattg

SEQ ID NO: 132518 - DNA, 22 bp, Artificial Sequence
  Synthetic oligonucleotide; TTT chr11 5290851 5290872 5290856 5290851 -
agtttatatacatctgtattgt

SEQ ID NO: 132519 - DNA, 22 bp, Artificial Sequence
  Synthetic oligonucleotide; TTA chr11 5290850 5290871 5290855 5290850 -
gtttatatacatctgtattgtt

SEQ ID NO: 132520 - DNA, 22 bp, Artificial Sequence
  Synthetic oligonucleotide; TTT chr11 5290846 5290867 5290851 5290846 -
atatacatctgtattgttagaa

SEQ ID NO: 132521 - DNA, 22 bp, Artificial Sequence
  Synthetic oligonucleotide; TTA chr11 5290845 5290866 5290850 5290845 -
tatacatctgtattgttagaat

SEQ ID NO: 132522 - DNA, 22 bp, Artificial Sequence
  Synthetic oligonucleotide; CTG chr11 5290835 5290856 5290840 5290835 -
tattgttagaatgttttataat

SEQ ID NO: 132523 - DNA, 22 bp, Artificial Sequence
  Synthetic oligonucleotide; TTG chr11 5290830 5290851 5290835 5290830 -
ttagaatgttttataatataaa

SEQ ID NO: 132524 - DNA, 22 bp, Artificial Sequence
  Synthetic oligonucleotide; TTA chr11 5290827 5290848 5290832 5290827 -
gaatgttttataatataaataa

SEQ ID NO: 132525 - DNA, 22 bp, Artificial Sequence
  Synthetic oligonucleotide; TTT chr11 5290819 5290840 5290824 5290819 -
tataatataaataaaattattt

SEQ ID NO: 132526 - DNA, 22 bp, Artificial Sequence
  Synthetic oligonucleotide; TTT chr11 5290818 5290839 5290823 5290818 -
ataatataaataaaattatttc

SEQ ID NO: 132527 - DNA, 22 bp, Artificial Sequence
  Synthetic oligonucleotide; TTA chr11 5290817 5290838 5290822 5290817 -
taatataaataaaattatttct

SEQ ID NO: 132528 - DNA, 22 bp, Artificial Sequence
  Synthetic oligonucleotide; TTA chr11 5290800 5290821 5290805 5290800 -
tttctcagttatatactagcta

SEQ ID NO: 132529 - DNA, 22 bp, Artificial Sequence
  Synthetic oligonucleotide; TTT chr11 5290797 5290818 5290802 5290797 -
ctcagttatatactagctatgt

SEQ ID NO: 132530 - DNA, 22 bp, Artificial Sequence
  Synthetic oligonucleotide; TTC chr11 5290796 5290817 5290801 5290796 -
tcagttatatactagctatgta

SEQ ID NO: 132531 - DNA, 22 bp, Artificial Sequence
  Synthetic oligonucleotide; CTC chr11 5290794 5290815 5290799 5290794 -
agttatatactagctatgtaac

SEQ ID NO: 132532 - DNA, 22 bp, Artificial Sequence
  Synthetic oligonucleotide; TTA chr11 5290789 5290810 5290794 5290789 -
tatactagctatgtaacctgtg

SEQ ID NO: 132533 - DNA, 22 bp, Artificial Sequence
  Synthetic oligonucleotide; CTA chr11 5290782 5290803 5290787 5290782 -
gctatgtaacctgtggatattt

SEQ ID NO: 132534 - DNA, 22 bp, Artificial Sequence
  Synthetic oligonucleotide; CTA chr11 5290778 5290799 5290783 5290778 -
tgtaacctgtggatatttcctt

SEQ ID NO: 132535 - DNA, 22 bp, Artificial Sequence
  Synthetic oligonucleotide; CTG chr11 5290769 5290790 5290774 5290769 -
tggatatttccttaagtattac

SEQ ID NO: 132536 - DNA, 22 bp, Artificial Sequence
  Synthetic oligonucleotide; TTT chr11 5290760 5290781 5290765 5290760 -
ccttaagtattacaagctatac

SEQ ID NO: 132537 - DNA, 22 bp, Artificial Sequence
  Synthetic oligonucleotide; TTC chr11 5290759 5290780 5290764 5290759 -
cttaagtattacaagctatact

SEQ ID NO: 132538 - DNA, 22 bp, Artificial Sequence
  Synthetic oligonucleotide; CTT chr11 5290756 5290777 5290761 5290756 -
aagtattacaagctatacttaa

SEQ ID NO: 132539 - DNA, 22 bp, Artificial Sequence
  Synthetic oligonucleotide; TTA chr11 5290755 5290776 5290760 5290755 -
agtattacaagctatacttaac

SEQ ID NO: 132540 - DNA, 22 bp, Artificial Sequence
  Synthetic oligonucleotide; TTA chr11 5290748 5290769 5290753 5290748 -
caagctatacttaactcacttg

SEQ ID NO: 132541 - DNA, 22 bp, Artificial Sequence
  Synthetic oligonucleotide; CTA chr11 5290741 5290762 5290746 5290741 -
tacttaactcacttggaaaact

SEQ ID NO: 132542 - DNA, 22 bp, Artificial Sequence
  Synthetic oligonucleotide; CTT chr11 5290736 5290757 5290741 5290736 -
aactcacttggaaaactcaaat

SEQ ID NO: 132543 - DNA, 22 bp, Artificial Sequence
  Synthetic oligonucleotide; TTA chr11 5290735 5290756 5290740 5290735 -
actcacttggaaaactcaaata

SEQ ID NO: 132544 - DNA, 22 bp, Artificial Sequence
  Synthetic oligonucleotide; CTC chr11 5290731 5290752 5290736 5290731 -
acttggaaaactcaaataaata

SEQ ID NO: 132545 - DNA, 22 bp, Artificial Sequence
  Synthetic oligonucleotide; CTT chr11 5290727 5290748 5290732 5290727 -
ggaaaactcaaataaatacctg

SEQ ID NO: 132546 - DNA, 22 bp, Artificial Sequence
  Synthetic oligonucleotide; TTG chr11 5290726 5290747 5290731 5290726 -
gaaaactcaaataaatacctgc

SEQ ID NO: 132547 - DNA, 22 bp, Artificial Sequence
  Synthetic oligonucleotide; CTC chr11 5290718 5290739 5290723 5290718 -
aaataaatacctgcttcatagt

SEQ ID NO: 132548 - DNA, 22 bp, Artificial Sequence
  Synthetic oligonucleotide; CTG chr11 5290705 5290726 5290710 5290705 -
cttcatagttattaataaggat

SEQ ID NO: 132549 - DNA, 22 bp, Artificial Sequence
  Synthetic oligonucleotide; CTT chr11 5290702 5290723 5290707 5290702 -
catagttattaataaggattaa

SEQ ID NO: 132550 - DNA, 22 bp, Artificial Sequence
  Synthetic oligonucleotide; TTC chr11 5290701 5290722 5290706 5290701 -
atagttattaataaggattaag

SEQ ID NO: 132551 - DNA, 22 bp, Artificial Sequence
  Synthetic oligonucleotide; TTA chr11 5290694 5290715 5290699 5290694 -
ttaataaggattaagtgagata

SEQ ID NO: 132552 - DNA, 22 bp, Artificial Sequence
  Synthetic oligonucleotide; TTA chr11 5290691 5290712 5290696 5290691 -
ataaggattaagtgagataatg

SEQ ID NO: 132553 - DNA, 22 bp, Artificial Sequence
  Synthetic oligonucleotide; TTA chr11 5290681 5290702 5290686 5290681 -
agtgagataatgcccataagat

SEQ ID NO: 132554 - DNA, 22 bp, Artificial Sequence
  Synthetic oligonucleotide; TTC chr11 5290657 5290678 5290662 5290657 -
ctattaataacagataaataca

SEQ ID NO: 132555 - DNA, 22 bp, Artificial Sequence
  Synthetic oligonucleotide; CTA chr11 5290654 5290675 5290659 5290654 -
ttaataacagataaatacatac

SEQ ID NO: 132556 - DNA, 22 bp, Artificial Sequence
  Synthetic oligonucleotide; TTA chr11 5290651 5290672 5290656 5290651 -
ataacagataaatacatacaca

SEQ ID NO: 132557 - DNA, 22 bp, Artificial Sequence
  Synthetic oligonucleotide; TTG chr11 5290616 5290637 5290621 5290616 -
aaaggattcttactttgtgcta

SEQ ID NO: 132558 - DNA, 22 bp, Artificial Sequence
  Synthetic oligonucleotide; TTC chr11 5290607 5290628 5290612 5290607 -
ttactttgtgctaggaactata

SEQ ID NO: 132559 - DNA, 22 bp, Artificial Sequence
  Synthetic oligonucleotide; CTT chr11 5290605 5290626 5290610 5290605 -
actttgtgctaggaactataat

SEQ ID NO: 132560 - DNA, 22 bp, Artificial Sequence
  Synthetic oligonucleotide; TTA chr11 5290604 5290625 5290609 5290604 -
ctttgtgctaggaactataata

SEQ ID NO: 132561 - DNA, 22 bp, Artificial Sequence
  Synthetic oligonucleotide; CTT chr11 5290601 5290622 5290606 5290601 -
tgtgctaggaactataataagt

SEQ ID NO: 132562 - DNA, 22 bp, Artificial Sequence
  Synthetic oligonucleotide; TTT chr11 5290600 5290621 5290605 5290600 -
gtgctaggaactataataagtt

SEQ ID NO: 132563 - DNA, 22 bp, Artificial Sequence
  Synthetic oligonucleotide; TTG chr11 5290599 5290620 5290604 5290599 -
tgctaggaactataataagttc

SEQ ID NO: 132564 - DNA, 22 bp, Artificial Sequence
  Synthetic oligonucleotide; CTA chr11 5290594 5290615 5290599 5290594 -
ggaactataataagttcattga

SEQ ID NO: 132565 - DNA, 22 bp, Artificial Sequence
  Synthetic oligonucleotide; CTA chr11 5290587 5290608 5290592 5290587 -
taataagttcattgatgcatta

SEQ ID NO: 132566 - DNA, 22 bp, Artificial Sequence
  Synthetic oligonucleotide; TTC chr11 5290577 5290598 5290582 5290577 -
attgatgcattatatcattaag

SEQ ID NO: 132567 - DNA, 22 bp, Artificial Sequence
  Synthetic oligonucleotide; TTG chr11 5290573 5290594 5290578 5290573 -
atgcattatatcattaagttct

SEQ ID NO: 132568 - DNA, 22 bp, Artificial Sequence
  Synthetic oligonucleotide; TTA chr11 5290565 5290586 5290570 5290565 -
tatcattaagttctaatttcaa

SEQ ID NO: 132569 - DNA, 22 bp, Artificial Sequence
  Synthetic oligonucleotide; TTA chr11 5290557 5290578 5290562 5290557 -
agttctaatttcaacactagaa

SEQ ID NO: 132570 - DNA, 22 bp, Artificial Sequence
  Synthetic oligonucleotide; TTC chr11 5290552 5290573 5290557 5290552 -
taatttcaacactagaaggcag

SEQ ID NO: 132571 - DNA, 22 bp, Artificial Sequence
  Synthetic oligonucleotide; CTA chr11 5290550 5290571 5290555 5290550 -
atttcaacactagaaggcaggt

SEQ ID NO: 132572 - DNA, 22 bp, Artificial Sequence
  Synthetic oligonucleotide; TTT chr11 5290546 5290567 5290551 5290546 -
caacactagaaggcaggtatta

SEQ ID NO: 132573 - DNA, 22 bp, Artificial Sequence
  Synthetic oligonucleotide; TTC chr11 5290545 5290566 5290550 5290545 -
aacactagaaggcaggtattat

SEQ ID NO: 132574 - DNA, 22 bp, Artificial Sequence
  Synthetic oligonucleotide; CTA chr11 5290538 5290559 5290543 5290538 -
gaaggcaggtattatctaaatt

SEQ ID NO: 132575 - DNA, 22 bp, Artificial Sequence
  Synthetic oligonucleotide; TTA chr11 5290524 5290545 5290529 5290524 -
tctaaatttcatactggatacc

SEQ ID NO: 132576 - DNA, 22 bp, Artificial Sequence
  Synthetic oligonucleotide; CTA chr11 5290520 5290541 5290525 5290520 -
aatttcatactggatacctcca

SEQ ID NO: 132577 - DNA, 22 bp, Artificial Sequence
  Synthetic oligonucleotide; TTT chr11 5290515 5290536 5290520 5290515 -
catactggatacctccaaactc

SEQ ID NO: 132578 - DNA, 22 bp, Artificial Sequence
  Synthetic oligonucleotide; TTC chr11 5290514 5290535 5290519 5290514 -
atactggatacctccaaactca

SEQ ID NO: 132579 - DNA, 22 bp, Artificial Sequence
  Synthetic oligonucleotide; CTG chr11 5290508 5290529 5290513 5290508 -
gatacctccaaactcataaaga

SEQ ID NO: 132580 - DNA, 22 bp, Artificial Sequence
  Synthetic oligonucleotide; CTC chr11 5290500 5290521 5290505 5290500 -
caaactcataaagataattaaa

SEQ ID NO: 132581 - DNA, 22 bp, Artificial Sequence
  Synthetic oligonucleotide; CTC chr11 5290493 5290514 5290498 5290493 -
ataaagataattaaattgcctt

SEQ ID NO: 132582 - DNA, 22 bp, Artificial Sequence
  Synthetic oligonucleotide; TTA chr11 5290480 5290501 5290485 5290480 -
aattgccttttgtcatatattt

SEQ ID NO: 132583 - DNA, 22 bp, Artificial Sequence
  Synthetic oligonucleotide; TTG chr11 5290475 5290496 5290480 5290475 -
ccttttgtcatatatttattca

SEQ ID NO: 132584 - DNA, 22 bp, Artificial Sequence
  Synthetic oligonucleotide; CTT chr11 5290471 5290492 5290476 5290471 -
ttgtcatatatttattcaaaag

SEQ ID NO: 132585 - DNA, 22 bp, Artificial Sequence
  Synthetic oligonucleotide; TTT chr11 5290470 5290491 5290475 5290470 -
tgtcatatatttattcaaaagg

SEQ ID NO: 132586 - DNA, 22 bp, Artificial Sequence
  Synthetic oligonucleotide; TTT chr11 5290469 5290490 5290474 5290469 -
gtcatatatttattcaaaaggg

SEQ ID NO: 132587 - DNA, 22 bp, Artificial Sequence
  Synthetic oligonucleotide; TTG chr11 5290468 5290489 5290473 5290468 -
tcatatatttattcaaaagggt

SEQ ID NO: 132588 - DNA, 22 bp, Artificial Sequence
  Synthetic oligonucleotide; TTT chr11 5290458 5290479 5290463 5290458 -
attcaaaagggtaaactcaaac

SEQ ID NO: 132589 - DNA, 22 bp, Artificial Sequence
  Synthetic oligonucleotide; TTA chr11 5290457 5290478 5290462 5290457 -
ttcaaaagggtaaactcaaact

SEQ ID NO: 132590 - DNA, 22 bp, Artificial Sequence
  Synthetic oligonucleotide; TTC chr11 5290454 5290475 5290459 5290454 -
aaaagggtaaactcaaactatg

SEQ ID NO: 132591 - DNA, 22 bp, Artificial Sequence
  Synthetic oligonucleotide; CTC chr11 5290440 5290461 5290445 5290440 -
aaactatggcttgtctaatttt

SEQ ID NO: 132592 - DNA, 22 bp, Artificial Sequence
  Synthetic oligonucleotide; CTA chr11 5290434 5290455 5290439 5290434 -
tggcttgtctaattttatatat

SEQ ID NO: 132593 - DNA, 22 bp, Artificial Sequence
  Synthetic oligonucleotide; CTT chr11 5290428 5290449 5290433 5290428 -
gtctaattttatatatcaccct

SEQ ID NO: 132594 - DNA, 22 bp, Artificial Sequence
  Synthetic oligonucleotide; TTG chr11 5290427 5290448 5290432 5290427 -
tctaattttatatatcacccta

SEQ ID NO: 132595 - DNA, 22 bp, Artificial Sequence
  Synthetic oligonucleotide; CTA chr11 5290423 5290444 5290428 5290423 -
attttatatatcaccctactga

SEQ ID NO: 132596 - DNA, 22 bp, Artificial Sequence
  Synthetic oligonucleotide; TTT chr11 5290419 5290440 5290424 5290419 -
tatatatcaccctactgaacat

SEQ ID NO: 132597 - DNA, 22 bp, Artificial Sequence
  Synthetic oligonucleotide; TTT chr11 5290418 5290439 5290423 5290418 -
atatatcaccctactgaacatg

SEQ ID NO: 132598 - DNA, 22 bp, Artificial Sequence
  Synthetic oligonucleotide; TTA chr11 5290417 5290438 5290422 5290417 -
tatatcaccctactgaacatga

SEQ ID NO: 132599 - DNA, 22 bp, Artificial Sequence
  Synthetic oligonucleotide; CTA chr11 5290405 5290426 5290410 5290405 -
ctgaacatgaccctattgtgat

SEQ ID NO: 132600 - DNA, 22 bp, Artificial Sequence
  Synthetic oligonucleotide; CTG chr11 5290402 5290423 5290407 5290402 -
aacatgaccctattgtgatatt

SEQ ID NO: 132601 - DNA, 22 bp, Artificial Sequence
  Synthetic oligonucleotide; CTA chr11 5290390 5290411 5290395 5290390 -
ttgtgatattttataaaattat

SEQ ID NO: 132602 - DNA, 22 bp, Artificial Sequence
  Synthetic oligonucleotide; TTG chr11 5290387 5290408 5290392 5290387 -
tgatattttataaaattattct

SEQ ID NO: 132603 - DNA, 22 bp, Artificial Sequence
  Synthetic oligonucleotide; TTT chr11 5290379 5290400 5290384 5290379 -
tataaaattattctcaagttat

SEQ ID NO: 132604 - DNA, 22 bp, Artificial Sequence
  Synthetic oligonucleotide; TTT chr11 5290378 5290399 5290383 5290378 -
ataaaattattctcaagttatt

SEQ ID NO: 132605 - DNA, 22 bp, Artificial Sequence
  Synthetic oligonucleotide; TTA chr11 5290377 5290398 5290382 5290377 -
taaaattattctcaagttatta

SEQ ID NO: 132606 - DNA, 22 bp, Artificial Sequence
  Synthetic oligonucleotide; TTA chr11 5290369 5290390 5290374 5290369 -
ttctcaagttattatgaggatg

SEQ ID NO: 132607 - DNA, 22 bp, Artificial Sequence
  Synthetic oligonucleotide; TTC chr11 5290366 5290387 5290371 5290366 -
tcaagttattatgaggatgttg

SEQ ID NO: 132608 - DNA, 22 bp, Artificial Sequence
  Synthetic oligonucleotide; CTC chr11 5290364 5290385 5290369 5290364 -
aagttattatgaggatgttgaa

SEQ ID NO: 132609 - DNA, 22 bp, Artificial Sequence
  Synthetic oligonucleotide; TTA chr11 5290358 5290379 5290363 5290358 -
ttatgaggatgttgaaagacag

SEQ ID NO: 132610 - DNA, 22 bp, Artificial Sequence
  Synthetic oligonucleotide; TTA chr11 5290355 5290376 5290360 5290355 -
tgaggatgttgaaagacagaga

SEQ ID NO: 132611 - DNA, 22 bp, Artificial Sequence
  Synthetic oligonucleotide; TTG chr11 5290344 5290365 5290349 5290344 -
aaagacagagaggatggggtgc

SEQ ID NO: 132612 - DNA, 22 bp, Artificial Sequence
  Synthetic oligonucleotide; CTA chr11 5290320 5290341 5290325 5290320 -
tgccccaaatcagcctcacaat

SEQ ID NO: 132613 - DNA, 22 bp, Artificial Sequence
  Synthetic oligonucleotide; CTC chr11 5290303 5290324 5290308 5290303 -
acaattaagctaagcagctaag

SEQ ID NO: 132614 - DNA, 22 bp, Artificial Sequence
  Synthetic oligonucleotide; TTA chr11 5290296 5290317 5290301 5290296 -
agctaagcagctaagagtcttg

SEQ ID NO: 132615 - DNA, 22 bp, Artificial Sequence
  Synthetic oligonucleotide; CTA chr11 5290291 5290312 5290296 5290291 -
agcagctaagagtcttgcaggg

SEQ ID NO: 132616 - DNA, 22 bp, Artificial Sequence
  Synthetic oligonucleotide; CTA chr11 5290283 5290304 5290288 5290283 -
agagtcttgcagggtagtgtag

SEQ ID NO: 132617 - DNA, 22 bp, Artificial Sequence
  Synthetic oligonucleotide; CTT chr11 5290275 5290296 5290280 5290275 -
gcagggtagtgtagggaccaca

SEQ ID NO: 132618 - DNA, 22 bp, Artificial Sequence
  Synthetic oligonucleotide; TTG chr11 5290274 5290295 5290279 5290274 -
cagggtagtgtagggaccacag

SEQ ID NO: 132619 - DNA, 22 bp, Artificial Sequence
  Synthetic oligonucleotide; TTA chr11 5290247 5290268 5290252 5290247 -
agggggcagtagaattatactc

SEQ ID NO: 132620 - DNA, 22 bp, Artificial Sequence
  Synthetic oligonucleotide; TTA chr11 5290230 5290251 5290235 5290230 -
tactcccactttagtttcattt

SEQ ID NO: 132621 - DNA, 22 bp, Artificial Sequence
  Synthetic oligonucleotide; CTC chr11 5290225 5290246 5290230 5290225 -
ccactttagtttcatttcaaac

SEQ ID NO: 132622 - DNA, 22 bp, Artificial Sequence
  Synthetic oligonucleotide; CTT chr11 5290219 5290240 5290224 5290219 -
tagtttcatttcaaacaatcca

SEQ ID NO: 132623 - DNA, 22 bp, Artificial Sequence
  Synthetic oligonucleotide; TTT chr11 5290218 5290239 5290223 5290218 -
agtttcatttcaaacaatccat

SEQ ID NO: 132624 - DNA, 22 bp, Artificial Sequence
  Synthetic oligonucleotide; TTA chr11 5290217 5290238 5290222 5290217 -
gtttcatttcaaacaatccata

SEQ ID NO: 132625 - DNA, 22 bp, Artificial Sequence
  Synthetic oligonucleotide; TTT chr11 5290213 5290234 5290218 5290213 -
catttcaaacaatccatacaca

SEQ ID NO: 132626 - DNA, 22 bp, Artificial Sequence
  Synthetic oligonucleotide; TTC chr11 5290212 5290233 5290217 5290212 -
atttcaaacaatccatacacac

SEQ ID NO: 132627 - DNA, 22 bp, Artificial Sequence
  Synthetic oligonucleotide; TTT chr11 5290208 5290229 5290213 5290208 -
caaacaatccatacacacacag

SEQ ID NO: 132628 - DNA, 22 bp, Artificial Sequence
  Synthetic oligonucleotide; TTC chr11 5290207 5290228 5290212 5290207 -
aaacaatccatacacacacagc

SEQ ID NO: 132629 - DNA, 22 bp, Artificial Sequence
  Synthetic oligonucleotide; CTG chr11 5290181 5290202 5290186 5290181 -
agcacttacaaattatactacg

SEQ ID NO: 132630 - DNA, 22 bp, Artificial Sequence
  Synthetic oligonucleotide; CTT chr11 5290174 5290195 5290179 5290174 -
acaaattatactacgctctata

SEQ ID NO: 132631 - DNA, 22 bp, Artificial Sequence
  Synthetic oligonucleotide; TTA chr11 5290173 5290194 5290178 5290173 -
caaattatactacgctctatac

SEQ ID NO: 132632 - DNA, 22 bp, Artificial Sequence
  Synthetic oligonucleotide; TTA chr11 5290166 5290187 5290171 5290166 -
tactacgctctatactttttgt

SEQ ID NO: 132633 - DNA, 22 bp, Artificial Sequence
  Synthetic oligonucleotide; CTA chr11 5290161 5290182 5290166 5290161 -
cgctctatactttttgtttaaa

SEQ ID NO: 132634 - DNA, 22 bp, Artificial Sequence
  Synthetic oligonucleotide; CTC chr11 5290156 5290177 5290161 5290156 -
tatactttttgtttaaatgtat

SEQ ID NO: 132635 - DNA, 22 bp, Artificial Sequence
  Synthetic oligonucleotide; CTA chr11 5290154 5290175 5290159 5290154 -
tactttttgtttaaatgtataa

SEQ ID NO: 132636 - DNA, 22 bp, Artificial Sequence
  Synthetic oligonucleotide; CTT chr11 5290149 5290170 5290154 5290149 -
tttgtttaaatgtataaataag

SEQ ID NO: 132637 - DNA, 22 bp, Artificial Sequence
  Synthetic oligonucleotide; TTT chr11 5290148 5290169 5290153 5290148 -
ttgtttaaatgtataaataagt

SEQ ID NO: 132638 - DNA, 22 bp, Artificial Sequence
  Synthetic oligonucleotide; TTT chr11 5290147 5290168 5290152 5290147 -
tgtttaaatgtataaataagtg

SEQ ID NO: 132639 - DNA, 22 bp, Artificial Sequence
  Synthetic oligonucleotide; TTT chr11 5290146 5290167 5290151 5290146 -
gtttaaatgtataaataagtgg

SEQ ID NO: 132640 - DNA, 22 bp, Artificial Sequence
  Synthetic oligonucleotide; TTG chr11 5290145 5290166 5290150 5290145 -
tttaaatgtataaataagtgga

SEQ ID NO: 132641 - DNA, 22 bp, Artificial Sequence
  Synthetic oligonucleotide; TTT chr11 5290142 5290163 5290147 5290142 -
aaatgtataaataagtggatga

SEQ ID NO: 132642 - DNA, 22 bp, Artificial Sequence
  Synthetic oligonucleotide; TTA chr11 5290141 5290162 5290146 5290141 -
aatgtataaataagtggatgaa

SEQ ID NO: 132643 - DNA, 22 bp, Artificial Sequence
  Synthetic oligonucleotide; CTT chr11 5290070 5290091 5290075 5290070 -
gccttcatagctgtctccctac

SEQ ID NO: 132644 - DNA, 22 bp, Artificial Sequence
  Synthetic oligonucleotide; TTG chr11 5290069 5290090 5290074 5290069 -
ccttcatagctgtctccctacc

SEQ ID NO: 132645 - DNA, 22 bp, Artificial Sequence
  Synthetic oligonucleotide; CTT chr11 5290065 5290086 5290070 5290065 -
catagctgtctccctaccttgt

SEQ ID NO: 132646 - DNA, 22 bp, Artificial Sequence
  Synthetic oligonucleotide; TTC chr11 5290064 5290085 5290069 5290064 -
atagctgtctccctaccttgtt

SEQ ID NO: 132647 - DNA, 22 bp, Artificial Sequence
  Synthetic oligonucleotide; CTG chr11 5290057 5290078 5290062 5290057 -
tctccctaccttgttcaaaatg

SEQ ID NO: 132648 - DNA, 22 bp, Artificial Sequence
  Synthetic oligonucleotide; CTC chr11 5290053 5290074 5290058 5290053 -
cctaccttgttcaaaatgttcc

SEQ ID NO: 132649 - DNA, 22 bp, Artificial Sequence
  Synthetic oligonucleotide; CTA chr11 5290049 5290070 5290054 5290049 -
ccttgttcaaaatgttcctgtc

SEQ ID NO: 132650 - DNA, 22 bp, Artificial Sequence
  Synthetic oligonucleotide; CTT chr11 5290045 5290066 5290050 5290045 -
gttcaaaatgttcctgtccaga

SEQ ID NO: 132651 - DNA, 22 bp, Artificial Sequence
  Synthetic oligonucleotide; TTG chr11 5290044 5290065 5290049 5290044 -
ttcaaaatgttcctgtccagac

SEQ ID NO: 132652 - DNA, 22 bp, Artificial Sequence
  Synthetic oligonucleotide; TTC chr11 5290041 5290062 5290046 5290041 -
aaaatgttcctgtccagaccaa

SEQ ID NO: 132653 - DNA, 22 bp, Artificial Sequence
  Synthetic oligonucleotide; TTC chr11 5290032 5290053 5290037 5290032 -
ctgtccagaccaaagtaccttg

SEQ ID NO: 132654 - DNA, 22 bp, Artificial Sequence
  Synthetic oligonucleotide; CTG chr11 5290029 5290050 5290034 5290029 -
tccagaccaaagtaccttgcct

SEQ ID NO: 132655 - DNA, 22 bp, Artificial Sequence
  Synthetic oligonucleotide; CTT chr11 5290011 5290032 5290016 5290011 -
gccttcacttaagtaatcaatt

SEQ ID NO: 132656 - DNA, 22 bp, Artificial Sequence
  Synthetic oligonucleotide; TTG chr11 5290010 5290031 5290015 5290010 -
ccttcacttaagtaatcaattc

SEQ ID NO: 132657 - DNA, 22 bp, Artificial Sequence
  Synthetic oligonucleotide; CTT chr11 5290006 5290027 5290011 5290006 -
cacttaagtaatcaattcctag

SEQ ID NO: 132658 - DNA, 22 bp, Artificial Sequence
  Synthetic oligonucleotide; TTC chr11 5290005 5290026 5290010 5290005 -
acttaagtaatcaattcctagg

SEQ ID NO: 132659 - DNA, 22 bp, Artificial Sequence
  Synthetic oligonucleotide; CTT chr11 5290001 5290022 5290006 5290001 -
aagtaatcaattcctaggttat

SEQ ID NO: 132660 - DNA, 22 bp, Artificial Sequence
  Synthetic oligonucleotide; TTA chr11 5290000 5290021 5290005 5290000 -
agtaatcaattcctaggttata

SEQ ID NO: 132661 - DNA, 22 bp, Artificial Sequence
  Synthetic oligonucleotide; TTC chr11 5289988 5290009 5289993 5289988 -
ctaggttatattctgatgtcaa

SEQ ID NO: 132662 - DNA, 22 bp, Artificial Sequence
  Synthetic oligonucleotide; CTA chr11 5289985 5290006 5289990 5289985 -
ggttatattctgatgtcaaagg

SEQ ID NO: 132663 - DNA, 22 bp, Artificial Sequence
  Synthetic oligonucleotide; TTA chr11 5289980 5290001 5289985 5289980 -
tattctgatgtcaaaggaagtc

SEQ ID NO: 132664 - DNA, 22 bp, Artificial Sequence
  Synthetic oligonucleotide; TTC chr11 5289975 5289996 5289980 5289975 -
tgatgtcaaaggaagtcaaaag

SEQ ID NO: 132665 - DNA, 22 bp, Artificial Sequence
  Synthetic oligonucleotide; CTG chr11 5289973 5289994 5289978 5289973 -
atgtcaaaggaagtcaaaagat

SEQ ID NO: 132666 - DNA, 22 bp, Artificial Sequence
  Synthetic oligonucleotide; TTT chr11 5289937 5289958 5289942 5289937 -
ctgacccacaactcatgctttg

SEQ ID NO: 132667 - DNA, 22 bp, Artificial Sequence
  Synthetic oligonucleotide; TTC chr11 5289936 5289957 5289941 5289936 -
tgacccacaactcatgctttgt

SEQ ID NO: 132668 - DNA, 22 bp, Artificial Sequence
  Synthetic oligonucleotide; CTG chr11 5289934 5289955 5289939 5289934 -
acccacaactcatgctttgtag

SEQ ID NO: 132669 - DNA, 22 bp, Artificial Sequence
  Synthetic oligonucleotide; CTC chr11 5289923 5289944 5289928 5289923 -
atgctttgtagatgactagatc

SEQ ID NO: 132670 - DNA, 22 bp, Artificial Sequence
  Synthetic oligonucleotide; CTT chr11 5289917 5289938 5289922 5289917 -
tgtagatgactagatcaaaaaa

SEQ ID NO: 132671 - DNA, 22 bp, Artificial Sequence
  Synthetic oligonucleotide; TTT chr11 5289916 5289937 5289921 5289916 -
gtagatgactagatcaaaaaat

SEQ ID NO: 132672 - DNA, 22 bp, Artificial Sequence
  Synthetic oligonucleotide; TTG chr11 5289915 5289936 5289920 5289915 -
tagatgactagatcaaaaaatt

SEQ ID NO: 132673 - DNA, 22 bp, Artificial Sequence
  Synthetic oligonucleotide; CTA chr11 5289905 5289926 5289910 5289905 -
gatcaaaaaatttcagccatat

SEQ ID NO: 132674 - DNA, 22 bp, Artificial Sequence
  Synthetic oligonucleotide; TTT chr11 5289892 5289913 5289897 5289892 -
cagccatatcttaacagtgagt

SEQ ID NO: 132675 - DNA, 22 bp, Artificial Sequence
  Synthetic oligonucleotide; TTC chr11 5289891 5289912 5289896 5289891 -
agccatatcttaacagtgagtg

SEQ ID NO: 132676 - DNA, 22 bp, Artificial Sequence
  Synthetic oligonucleotide; CTT chr11 5289880 5289901 5289885 5289880 -
aacagtgagtgaacaggaaatc

SEQ ID NO: 132677 - DNA, 22 bp, Artificial Sequence
  Synthetic oligonucleotide; TTA chr11 5289879 5289900 5289884 5289879 -
acagtgagtgaacaggaaatct

SEQ ID NO: 132678 - DNA, 22 bp, Artificial Sequence
  Synthetic oligonucleotide; CTC chr11 5289856 5289877 5289861 5289856 -
ctcttttccctacatctgagat

SEQ ID NO: 132679 - DNA, 22 bp, Artificial Sequence
  Synthetic oligonucleotide; CTC chr11 5289853 5289874 5289858 5289853 -
ttttccctacatctgagatccc

SEQ ID NO: 132680 - DNA, 22 bp, Artificial Sequence
  Synthetic oligonucleotide; CTT chr11 5289851 5289872 5289856 5289851 -
ttccctacatctgagatcccag

SEQ ID NO: 132681 - DNA, 22 bp, Artificial Sequence
  Synthetic oligonucleotide; TTT chr11 5289850 5289871 5289855 5289850 -
tccctacatctgagatcccagc

SEQ ID NO: 132682 - DNA, 22 bp, Artificial Sequence
  Synthetic oligonucleotide; TTT chr11 5289849 5289870 5289854 5289849 -
ccctacatctgagatcccagct

SEQ ID NO: 132683 - DNA, 22 bp, Artificial Sequence
  Synthetic oligonucleotide; TTC chr11 5289848 5289869 5289853 5289848 -
cctacatctgagatcccagctt

SEQ ID NO: 132684 - DNA, 22 bp, Artificial Sequence
  Synthetic oligonucleotide; CTA chr11 5289844 5289865 5289849 5289844 -
catctgagatcccagcttctaa

SEQ ID NO: 132685 - DNA, 22 bp, Artificial Sequence
  Synthetic oligonucleotide; CTG chr11 5289838 5289859 5289843 5289838 -
agatcccagcttctaagacctt

SEQ ID NO: 132686 - DNA, 22 bp, Artificial Sequence
  Synthetic oligonucleotide; CTT chr11 5289826 5289847 5289831 5289826 -
ctaagaccttcaattctcactc

SEQ ID NO: 132687 - DNA, 22 bp, Artificial Sequence
  Synthetic oligonucleotide; TTC chr11 5289825 5289846 5289830 5289825 -
taagaccttcaattctcactct

SEQ ID NO: 132688 - DNA, 22 bp, Artificial Sequence
  Synthetic oligonucleotide; CTA chr11 5289823 5289844 5289828 5289823 -
agaccttcaattctcactcttg

SEQ ID NO: 132689 - DNA, 22 bp, Artificial Sequence
  Synthetic oligonucleotide; CTT chr11 5289816 5289837 5289821 5289816 -
caattctcactcttgatgcaac

SEQ ID NO: 132690 - DNA, 22 bp, Artificial Sequence
  Synthetic oligonucleotide; TTC chr11 5289815 5289836 5289820 5289815 -
aattctcactcttgatgcaaca

SEQ ID NO: 132691 - DNA, 22 bp, Artificial Sequence
  Synthetic oligonucleotide; TTC chr11 5289810 5289831 5289815 5289810 -
tcactcttgatgcaacagacct

SEQ ID NO: 132692 - DNA, 22 bp, Artificial Sequence
  Synthetic oligonucleotide; CTC chr11 5289808 5289829 5289813 5289808 -
actcttgatgcaacagaccttg

SEQ ID NO: 132693 - DNA, 22 bp, Artificial Sequence
  Synthetic oligonucleotide; CTC chr11 5289804 5289825 5289809 5289804 -
ttgatgcaacagaccttggaag

SEQ ID NO: 132694 - DNA, 22 bp, Artificial Sequence
  Synthetic oligonucleotide; CTT chr11 5289802 5289823 5289807 5289802 -
gatgcaacagaccttggaagca

SEQ ID NO: 132695 - DNA, 22 bp, Artificial Sequence
  Synthetic oligonucleotide; TTG chr11 5289801 5289822 5289806 5289801 -
atgcaacagaccttggaagcat

SEQ ID NO: 132696 - DNA, 22 bp, Artificial Sequence
  Synthetic oligonucleotide; CTT chr11 5289787 5289808 5289792 5289787 -
ggaagcatacaggagagctgaa

SEQ ID NO: 132697 - DNA, 22 bp, Artificial Sequence
  Synthetic oligonucleotide; TTG chr11 5289786 5289807 5289791 5289786 -
gaagcatacaggagagctgaac

SEQ ID NO: 132698 - DNA, 22 bp, Artificial Sequence
  Synthetic oligonucleotide; CTG chr11 5289767 5289788 5289772 5289767 -
aacttggtcaacaaaggagaaa

SEQ ID NO: 132699 - DNA, 22 bp, Artificial Sequence
  Synthetic oligonucleotide; CTT chr11 5289762 5289783 5289767 5289762 -
ggtcaacaaaggagaaaagttt

SEQ ID NO: 132700 - DNA, 22 bp, Artificial Sequence
  Synthetic oligonucleotide; TTG chr11 5289761 5289782 5289766 5289761 -
gtcaacaaaggagaaaagtttg

SEQ ID NO: 132701 - DNA, 22 bp, Artificial Sequence
  Synthetic oligonucleotide; TTT chr11 5289740 5289761 5289745 5289740 -
gttggcctccaaaggcacagct

SEQ ID NO: 132702 - DNA, 22 bp, Artificial Sequence
  Synthetic oligonucleotide; TTG chr11 5289739 5289760 5289744 5289739 -
ttggcctccaaaggcacagctc

SEQ ID NO: 132703 - DNA, 22 bp, Artificial Sequence
  Synthetic oligonucleotide; TTG chr11 5289736 5289757 5289741 5289736 -
gcctccaaaggcacagctcaaa

SEQ ID NO: 132704 - DNA, 22 bp, Artificial Sequence
  Synthetic oligonucleotide; CTC chr11 5289731 5289752 5289736 5289731 -
caaaggcacagctcaaactttt

SEQ ID NO: 132705 - DNA, 22 bp, Artificial Sequence
  Synthetic oligonucleotide; CTC chr11 5289717 5289738 5289722 5289717 -
aaacttttcaagccttctctaa

SEQ ID NO: 132706 - DNA, 22 bp, Artificial Sequence
  Synthetic oligonucleotide; CTT chr11 5289711 5289732 5289716 5289711 -
ttcaagccttctctaatcttaa

SEQ ID NO: 132707 - DNA, 22 bp, Artificial Sequence
  Synthetic oligonucleotide; TTT chr11 5289710 5289731 5289715 5289710 -
tcaagccttctctaatcttaaa

SEQ ID NO: 132708 - DNA, 22 bp, Artificial Sequence
  Synthetic oligonucleotide; TTT chr11 5289709 5289730 5289714 5289709 -
caagccttctctaatcttaaag

SEQ ID NO: 132709 - DNA, 22 bp, Artificial Sequence
  Synthetic oligonucleotide; TTC chr11 5289708 5289729 5289713 5289708 -
aagccttctctaatcttaaagg

SEQ ID NO: 132710 - DNA, 22 bp, Artificial Sequence
  Synthetic oligonucleotide; CTT chr11 5289701 5289722 5289706 5289701 -
ctctaatcttaaaggtaaacaa

SEQ ID NO: 132711 - DNA, 22 bp, Artificial Sequence
  Synthetic oligonucleotide; TTC chr11 5289700 5289721 5289705 5289700 -
tctaatcttaaaggtaaacaag

SEQ ID NO: 132712 - DNA, 22 bp, Artificial Sequence
  Synthetic oligonucleotide; CTC chr11 5289698 5289719 5289703 5289698 -
taatcttaaaggtaaacaaggg

SEQ ID NO: 132713 - DNA, 22 bp, Artificial Sequence
  Synthetic oligonucleotide; CTA chr11 5289696 5289717 5289701 5289696 -
atcttaaaggtaaacaagggtc

SEQ ID NO: 132714 - DNA, 22 bp, Artificial Sequence
  Synthetic oligonucleotide; CTT chr11 5289691 5289712 5289696 5289691 -
aaaggtaaacaagggtctcatt

SEQ ID NO: 132715 - DNA, 22 bp, Artificial Sequence
  Synthetic oligonucleotide; TTA chr11 5289690 5289711 5289695 5289690 -
aaggtaaacaagggtctcattt

SEQ ID NO: 132716 - DNA, 22 bp, Artificial Sequence
  Synthetic oligonucleotide; CTC chr11 5289672 5289693 5289677 5289672 -
atttctttgagaacttcaggga

SEQ ID NO: 132717 - DNA, 22 bp, Artificial Sequence
  Synthetic oligonucleotide; TTT chr11 5289668 5289689 5289673 5289668 -
ctttgagaacttcagggaaaat

SEQ ID NO: 132718 - DNA, 22 bp, Artificial Sequence
  Synthetic oligonucleotide; TTC chr11 5289667 5289688 5289672 5289667 -
tttgagaacttcagggaaaata

SEQ ID NO: 132719 - DNA, 22 bp, Artificial Sequence
  Synthetic oligonucleotide; CTT chr11 5289665 5289686 5289670 5289665 -
tgagaacttcagggaaaataga

SEQ ID NO: 132720 - DNA, 22 bp, Artificial Sequence
  Synthetic oligonucleotide; TTT chr11 5289664 5289685 5289669 5289664 -
gagaacttcagggaaaatagac

SEQ ID NO: 132721 - DNA, 22 bp, Artificial Sequence
  Synthetic oligonucleotide; TTG chr11 5289663 5289684 5289668 5289663 -
agaacttcagggaaaatagaca

SEQ ID NO: 132722 - DNA, 22 bp, Artificial Sequence
  Synthetic oligonucleotide; CTT chr11 5289656 5289677 5289661 5289656 -
cagggaaaatagacaaggactt

SEQ ID NO: 132723 - DNA, 22 bp, Artificial Sequence
  Synthetic oligonucleotide; TTC chr11 5289655 5289676 5289660 5289655 -
agggaaaatagacaaggacttg

SEQ ID NO: 132724 - DNA, 22 bp, Artificial Sequence
  Synthetic oligonucleotide; CTT chr11 5289634 5289655 5289639 5289634 -
gcctggtgcttttggtagggga

SEQ ID NO: 132725 - DNA, 22 bp, Artificial Sequence
  Synthetic oligonucleotide; TTG chr11 5289633 5289654 5289638 5289633 -
cctggtgcttttggtaggggag

SEQ ID NO: 132726 - DNA, 22 bp, Artificial Sequence
  Synthetic oligonucleotide; CTG chr11 5289629 5289650 5289634 5289629 -
gtgcttttggtaggggagcttg

SEQ ID NO: 132727 - DNA, 22 bp, Artificial Sequence
  Synthetic oligonucleotide; CTT chr11 5289623 5289644 5289628 5289623 -
ttggtaggggagcttgcacttt

SEQ ID NO: 132728 - DNA, 22 bp, Artificial Sequence
  Synthetic oligonucleotide; TTT chr11 5289622 5289643 5289627 5289622 -
tggtaggggagcttgcactttc

SEQ ID NO: 132729 - DNA, 22 bp, Artificial Sequence
  Synthetic oligonucleotide; TTT chr11 5289621 5289642 5289626 5289621 -
ggtaggggagcttgcactttcc

SEQ ID NO: 132730 - DNA, 22 bp, Artificial Sequence
  Synthetic oligonucleotide; TTG chr11 5289620 5289641 5289625 5289620 -
gtaggggagcttgcactttccc

SEQ ID NO: 132731 - DNA, 22 bp, Artificial Sequence
  Synthetic oligonucleotide; CTT chr11 5289608 5289629 5289613 5289608 -
gcactttccccctttctggagg

SEQ ID NO: 132732 - DNA, 22 bp, Artificial Sequence
  Synthetic oligonucleotide; TTG chr11 5289607 5289628 5289612 5289607 -
cactttccccctttctggagga

SEQ ID NO: 132733 - DNA, 22 bp, Artificial Sequence
  Synthetic oligonucleotide; CTT chr11 5289602 5289623 5289607 5289602 -
tccccctttctggaggaaatat

SEQ ID NO: 132734 - DNA, 22 bp, Artificial Sequence
  Synthetic oligonucleotide; TTT chr11 5289601 5289622 5289606 5289601 -
ccccctttctggaggaaatatt

SEQ ID NO: 132735 - DNA, 22 bp, Artificial Sequence
  Synthetic oligonucleotide; TTC chr11 5289600 5289621 5289605 5289600 -
cccctttctggaggaaatattt

SEQ ID NO: 132736 - DNA, 22 bp, Artificial Sequence
  Synthetic oligonucleotide; CTT chr11 5289594 5289615 5289599 5289594 -
tctggaggaaatatttatcccc

SEQ ID NO: 132737 - DNA, 22 bp, Artificial Sequence
  Synthetic oligonucleotide; TTT chr11 5289593 5289614 5289598 5289593 -
ctggaggaaatatttatcccca

SEQ ID NO: 132738 - DNA, 22 bp, Artificial Sequence
  Synthetic oligonucleotide; TTC chr11 5289592 5289613 5289597 5289592 -
tggaggaaatatttatccccag

SEQ ID NO: 132739 - DNA, 22 bp, Artificial Sequence
  Synthetic oligonucleotide; CTG chr11 5289590 5289611 5289595 5289590 -
gaggaaatatttatccccaggt

SEQ ID NO: 132740 - DNA, 22 bp, Artificial Sequence
  Synthetic oligonucleotide; TTT chr11 5289578 5289599 5289583 5289578 -
atccccaggtagttcccttttt

SEQ ID NO: 132741 - DNA, 22 bp, Artificial Sequence
  Synthetic oligonucleotide; TTA chr11 5289577 5289598 5289582 5289577 -
tccccaggtagttccctttttg

SEQ ID NO: 132742 - DNA, 22 bp, Artificial Sequence
  Synthetic oligonucleotide; TTC chr11 5289563 5289584 5289568 5289563 -
cctttttgcaccagtggttctt

SEQ ID NO: 132743 - DNA, 22 bp, Artificial Sequence
  Synthetic oligonucleotide; CTT chr11 5289559 5289580 5289564 5289559 -
tttgcaccagtggttctttgaa

SEQ ID NO: 132744 - DNA, 22 bp, Artificial Sequence
  Synthetic oligonucleotide; TTT chr11 5289558 5289579 5289563 5289558 -
ttgcaccagtggttctttgaag

SEQ ID NO: 132745 - DNA, 22 bp, Artificial Sequence
  Synthetic oligonucleotide; TTT chr11 5289557 5289578 5289562 5289557 -
tgcaccagtggttctttgaaga

SEQ ID NO: 132746 - DNA, 22 bp, Artificial Sequence
  Synthetic oligonucleotide; TTT chr11 5289556 5289577 5289561 5289556 -
gcaccagtggttctttgaagag

SEQ ID NO: 132747 - DNA, 22 bp, Artificial Sequence
  Synthetic oligonucleotide; TTG chr11 5289555 5289576 5289560 5289555 -
caccagtggttctttgaagaga

SEQ ID NO: 132748 - DNA, 22 bp, Artificial Sequence
  Synthetic oligonucleotide; TTC chr11 5289543 5289564 5289548 5289543 -
tttgaagagacttccacctggg

SEQ ID NO: 132749 - DNA, 22 bp, Artificial Sequence
  Synthetic oligonucleotide; CTT chr11 5289541 5289562 5289546 5289541 -
tgaagagacttccacctgggaa

SEQ ID NO: 132750 - DNA, 22 bp, Artificial Sequence
  Synthetic oligonucleotide; TTT chr11 5289540 5289561 5289545 5289540 -
gaagagacttccacctgggaac

SEQ ID NO: 132751 - DNA, 22 bp, Artificial Sequence
  Synthetic oligonucleotide; TTG chr11 5289539 5289560 5289544 5289539 -
aagagacttccacctgggaaca

SEQ ID NO: 132752 - DNA, 22 bp, Artificial Sequence
  Synthetic oligonucleotide; CTT chr11 5289530 5289551 5289535 5289530 -
ccacctgggaacagttaaacag

SEQ ID NO: 132753 - DNA, 22 bp, Artificial Sequence
  Synthetic oligonucleotide; TTC chr11 5289529 5289550 5289534 5289529 -
cacctgggaacagttaaacagc

SEQ ID NO: 132754 - DNA, 22 bp, Artificial Sequence
  Synthetic oligonucleotide; CTG chr11 5289523 5289544 5289528 5289523 -
ggaacagttaaacagcaactac

SEQ ID NO: 132755 - DNA, 22 bp, Artificial Sequence
  Synthetic oligonucleotide; TTA chr11 5289513 5289534 5289518 5289513 -
aacagcaactacagggccttga

SEQ ID NO: 132756 - DNA, 22 bp, Artificial Sequence
  Synthetic oligonucleotide; CTA chr11 5289502 5289523 5289507 5289502 -
cagggccttgaactgcacactt

SEQ ID NO: 132757 - DNA, 22 bp, Artificial Sequence
  Synthetic oligonucleotide; CTT chr11 5289493 5289514 5289498 5289493 -
gaactgcacactttcagtccgg

SEQ ID NO: 132758 - DNA, 22 bp, Artificial Sequence
  Synthetic oligonucleotide; TTG chr11 5289492 5289513 5289497 5289492 -
aactgcacactttcagtccggt

SEQ ID NO: 132759 - DNA, 22 bp, Artificial Sequence
  Synthetic oligonucleotide; CTG chr11 5289487 5289508 5289492 5289487 -
cacactttcagtccggtcctca

SEQ ID NO: 132760 - DNA, 22 bp, Artificial Sequence
  Synthetic oligonucleotide; CTT chr11 5289480 5289501 5289485 5289480 -
tcagtccggtcctcacagttga

SEQ ID NO: 132761 - DNA, 22 bp, Artificial Sequence
  Synthetic oligonucleotide; TTT chr11 5289479 5289500 5289484 5289479 -
cagtccggtcctcacagttgaa

SEQ ID NO: 132762 - DNA, 22 bp, Artificial Sequence
  Synthetic oligonucleotide; TTC chr11 5289478 5289499 5289483 5289478 -
agtccggtcctcacagttgaaa

SEQ ID NO: 132763 - DNA, 22 bp, Artificial Sequence
  Synthetic oligonucleotide; CTC chr11 5289466 5289487 5289471 5289466 -
acagttgaaaagacctaagctt

SEQ ID NO: 132764 - DNA, 22 bp, Artificial Sequence
  Synthetic oligonucleotide; TTG chr11 5289459 5289480 5289464 5289459 -
aaaagacctaagcttgtgcctg

SEQ ID NO: 132765 - DNA, 22 bp, Artificial Sequence
  Synthetic oligonucleotide; CTA chr11 5289449 5289470 5289454 5289449 -
agcttgtgcctgatttaagcct

SEQ ID NO: 132766 - DNA, 22 bp, Artificial Sequence
  Synthetic oligonucleotide; CTT chr11 5289444 5289465 5289449 5289444 -
gtgcctgatttaagcctttttg

SEQ ID NO: 132767 - DNA, 22 bp, Artificial Sequence
  Synthetic oligonucleotide; TTG chr11 5289443 5289464 5289448 5289443 -
tgcctgatttaagcctttttgg

SEQ ID NO: 132768 - DNA, 22 bp, Artificial Sequence
  Synthetic oligonucleotide; CTG chr11 5289437 5289458 5289442 5289437 -
atttaagcctttttggtcataa

SEQ ID NO: 132769 - DNA, 22 bp, Artificial Sequence
  Synthetic oligonucleotide; TTT chr11 5289433 5289454 5289438 5289433 -
aagcctttttggtcataaaaca

SEQ ID NO: 132770 - DNA, 22 bp, Artificial Sequence
  Synthetic oligonucleotide; TTA chr11 5289432 5289453 5289437 5289432 -
agcctttttggtcataaaacat

SEQ ID NO: 132771 - DNA, 22 bp, Artificial Sequence
  Synthetic oligonucleotide; CTT chr11 5289426 5289447 5289431 5289426 -
tttggtcataaaacattgaatt

SEQ ID NO: 132772 - DNA, 22 bp, Artificial Sequence
  Synthetic oligonucleotide; TTT chr11 5289425 5289446 5289430 5289425 -
ttggtcataaaacattgaattc

SEQ ID NO: 132773 - DNA, 22 bp, Artificial Sequence
  Synthetic oligonucleotide; TTT chr11 5289424 5289445 5289429 5289424 -
tggtcataaaacattgaattct

SEQ ID NO: 132774 - DNA, 22 bp, Artificial Sequence
  Synthetic oligonucleotide; TTT chr11 5289423 5289444 5289428 5289423 -
ggtcataaaacattgaattcta

SEQ ID NO: 132775 - DNA, 22 bp, Artificial Sequence
  Synthetic oligonucleotide; TTG chr11 5289422 5289443 5289427 5289422 -
gtcataaaacattgaattctaa

SEQ ID NO: 132776 - DNA, 22 bp, Artificial Sequence
  Synthetic oligonucleotide; TTG chr11 5289408 5289429 5289413 5289408 -
aattctaatctccctctcaacc

SEQ ID NO: 132777 - DNA, 22 bp, Artificial Sequence
  Synthetic oligonucleotide; TTC chr11 5289403 5289424 5289408 5289403 -
taatctccctctcaaccctaca

SEQ ID NO: 132778 - DNA, 22 bp, Artificial Sequence
  Synthetic oligonucleotide; CTA chr11 5289401 5289422 5289406 5289401 -
atctccctctcaaccctacagt

SEQ ID NO: 132779 - DNA, 22 bp, Artificial Sequence
  Synthetic oligonucleotide; CTC chr11 5289396 5289417 5289401 5289396 -
cctctcaaccctacagtcaccc

SEQ ID NO: 132780 - DNA, 22 bp, Artificial Sequence
  Synthetic oligonucleotide; CTC chr11 5289392 5289413 5289397 5289392 -
tcaaccctacagtcacccattt

SEQ ID NO: 132781 - DNA, 22 bp, Artificial Sequence
  Synthetic oligonucleotide; CTC chr11 5289390 5289411 5289395 5289390 -
aaccctacagtcacccatttgg

SEQ ID NO: 132782 - DNA, 22 bp, Artificial Sequence
  Synthetic oligonucleotide; CTA chr11 5289383 5289404 5289388 5289383 -
cagtcacccatttggtatatta

SEQ ID NO: 132783 - DNA, 22 bp, Artificial Sequence
  Synthetic oligonucleotide; TTT chr11 5289370 5289391 5289375 5289370 -
ggtatattaaagatgtgttgtc

SEQ ID NO: 132784 - DNA, 22 bp, Artificial Sequence
  Synthetic oligonucleotide; TTG chr11 5289369 5289390 5289374 5289369 -
gtatattaaagatgtgttgtct

SEQ ID NO: 132785 - DNA, 22 bp, Artificial Sequence
  Synthetic oligonucleotide; TTA chr11 5289361 5289382 5289366 5289361 -
aagatgtgttgtctactgtcta

SEQ ID NO: 132786 - DNA, 22 bp, Artificial Sequence
  Synthetic oligonucleotide; TTG chr11 5289350 5289371 5289355 5289350 -
tctactgtctagtatccctcaa

SEQ ID NO: 132787 - DNA, 22 bp, Artificial Sequence
  Synthetic oligonucleotide; CTA chr11 5289346 5289367 5289351 5289346 -
ctgtctagtatccctcaagtag

SEQ ID NO: 132788 - DNA, 22 bp, Artificial Sequence
  Synthetic oligonucleotide; CTG chr11 5289343 5289364 5289348 5289343 -
tctagtatccctcaagtagtgt

SEQ ID NO: 132789 - DNA, 22 bp, Artificial Sequence
  Synthetic oligonucleotide; CTA chr11 5289339 5289360 5289344 5289339 -
gtatccctcaagtagtgtcagg

SEQ ID NO: 132790 - DNA, 22 bp, Artificial Sequence
  Synthetic oligonucleotide; CTC chr11 5289330 5289351 5289335 5289330 -
aagtagtgtcaggaattagtca

SEQ ID NO: 132791 - DNA, 22 bp, Artificial Sequence
  Synthetic oligonucleotide; TTA chr11 5289312 5289333 5289317 5289312 -
gtcatttaaatagtctgcaagc

SEQ ID NO: 132792 - DNA, 22 bp, Artificial Sequence
  Synthetic oligonucleotide; TTT chr11 5289305 5289326 5289310 5289305 -
aaatagtctgcaagccaggagt

SEQ ID NO: 132793 - DNA, 22 bp, Artificial Sequence
  Synthetic oligonucleotide; TTA chr11 5289304 5289325 5289309 5289304 -
aatagtctgcaagccaggagtg

SEQ ID NO: 132794 - DNA, 22 bp, Artificial Sequence
  Synthetic oligonucleotide; CTG chr11 5289295 5289316 5289300 5289295 -
caagccaggagtggtggctcat

SEQ ID NO: 132795 - DNA, 22 bp, Artificial Sequence
  Synthetic oligonucleotide; CTC chr11 5289275 5289296 5289280 5289275 -
atgtctgtaattccagcacttg

SEQ ID NO: 132796 - DNA, 22 bp, Artificial Sequence
  Synthetic oligonucleotide; CTG chr11 5289268 5289289 5289273 5289268 -
taattccagcacttgagaggta

SEQ ID NO: 132797 - DNA, 22 bp, Artificial Sequence
  Synthetic oligonucleotide; TTC chr11 5289262 5289283 5289267 5289262 -
cagcacttgagaggtagaagtg

SEQ ID NO: 132798 - DNA, 22 bp, Artificial Sequence
  Synthetic oligonucleotide; CTT chr11 5289254 5289275 5289259 5289254 -
gagaggtagaagtgggaggact

SEQ ID NO: 132799 - DNA, 22 bp, Artificial Sequence
  Synthetic oligonucleotide; TTG chr11 5289253 5289274 5289258 5289253 -
agaggtagaagtgggaggactg

SEQ ID NO: 132800 - DNA, 22 bp, Artificial Sequence
  Synthetic oligonucleotide; CTG chr11 5289231 5289252 5289236 5289231 -
cttgagctcaagagtttgatat

SEQ ID NO: 132801 - DNA, 22 bp, Artificial Sequence
  Synthetic oligonucleotide; CTT chr11 5289228 5289249 5289233 5289228 -
gagctcaagagtttgatattat

SEQ ID NO: 132802 - DNA, 22 bp, Artificial Sequence
  Synthetic oligonucleotide; TTG chr11 5289227 5289248 5289232 5289227 -
agctcaagagtttgatattatc

SEQ ID NO: 132803 - DNA, 22 bp, Artificial Sequence
  Synthetic oligonucleotide; CTC chr11 5289222 5289243 5289227 5289222 -
aagagtttgatattatcctgga

SEQ ID NO: 132804 - DNA, 22 bp, Artificial Sequence
  Synthetic oligonucleotide; TTT chr11 5289214 5289235 5289219 5289214 -
gatattatcctggacaacatag

SEQ ID NO: 132805 - DNA, 22 bp, Artificial Sequence
  Synthetic oligonucleotide; TTG chr11 5289213 5289234 5289218 5289213 -
atattatcctggacaacatagc

SEQ ID NO: 132806 - DNA, 22 bp, Artificial Sequence
  Synthetic oligonucleotide; TTA chr11 5289207 5289228 5289212 5289207 -
tcctggacaacatagcaagacc

SEQ ID NO: 132807 - DNA, 22 bp, Artificial Sequence
  Synthetic oligonucleotide; CTG chr11 5289202 5289223 5289207 5289202 -
gacaacatagcaagacctcgtc

SEQ ID NO: 132808 - DNA, 22 bp, Artificial Sequence
  Synthetic oligonucleotide; CTC chr11 5289183 5289204 5289188 5289183 -
gtctctacttaaaaaaaaaaaa

SEQ ID NO: 132809 - DNA, 22 bp, Artificial Sequence
  Synthetic oligonucleotide; CTC chr11 5289178 5289199 5289183 5289178 -
tacttaaaaaaaaaaaaaaaat

SEQ ID NO: 132810 - DNA, 22 bp, Artificial Sequence
  Synthetic oligonucleotide; CTA chr11 5289176 5289197 5289181 5289176 -
cttaaaaaaaaaaaaaaaatta

SEQ ID NO: 132811 - DNA, 22 bp, Artificial Sequence
  Synthetic oligonucleotide; CTT chr11 5289173 5289194 5289178 5289173 -
aaaaaaaaaaaaaaaattagcc

SEQ ID NO: 132812 - DNA, 22 bp, Artificial Sequence
  Synthetic oligonucleotide; TTA chr11 5289172 5289193 5289177 5289172 -
aaaaaaaaaaaaaaattagcca

SEQ ID NO: 132813 - DNA, 22 bp, Artificial Sequence
  Synthetic oligonucleotide; TTA chr11 5289154 5289175 5289159 5289154 -
gccaggcatgtgatgtacacct

SEQ ID NO: 132814 - DNA, 22 bp, Artificial Sequence
  Synthetic oligonucleotide; CTG chr11 5289131 5289152 5289136 5289131 -
tagtcccagctactcaggaggc

SEQ ID NO: 132815 - DNA, 22 bp, Artificial Sequence
  Synthetic oligonucleotide; CTA chr11 5289119 5289140 5289124 5289119 -
ctcaggaggccgaaatgggagg

SEQ ID NO: 132816 - DNA, 22 bp, Artificial Sequence
  Synthetic oligonucleotide; CTC chr11 5289116 5289137 5289121 5289116 -
aggaggccgaaatgggaggatc

SEQ ID NO: 132817 - DNA, 22 bp, Artificial Sequence
  Synthetic oligonucleotide; CTT chr11 5289090 5289111 5289095 5289090 -
gagctcaggaggtcaaggctgc

SEQ ID NO: 132818 - DNA, 22 bp, Artificial Sequence
  Synthetic oligonucleotide; TTG chr11 5289089 5289110 5289094 5289089 -
agctcaggaggtcaaggctgca

SEQ ID NO: 132819 - DNA, 22 bp, Artificial Sequence
  Synthetic oligonucleotide; CTC chr11 5289084 5289105 5289089 5289084 -
aggaggtcaaggctgcagtgag

SEQ ID NO: 132820 - DNA, 22 bp, Artificial Sequence
  Synthetic oligonucleotide; CTG chr11 5289069 5289090 5289074 5289069 -
cagtgagacatgatcttgccac

SEQ ID NO: 132821 - DNA, 22 bp, Artificial Sequence
  Synthetic oligonucleotide; CTT chr11 5289052 5289073 5289057 5289052 -
gccactgcactccagcctggac

SEQ ID NO: 132822 - DNA, 22 bp, Artificial Sequence
  Synthetic oligonucleotide; TTG chr11 5289051 5289072 5289056 5289051 -
ccactgcactccagcctggaca

SEQ ID NO: 132823 - DNA, 22 bp, Artificial Sequence
  Synthetic oligonucleotide; CTG chr11 5289045 5289066 5289050 5289045 -
cactccagcctggacagcagag

SEQ ID NO: 132824 - DNA, 22 bp, Artificial Sequence
  Synthetic oligonucleotide; CTC chr11 5289040 5289061 5289045 5289040 -
cagcctggacagcagagtgaaa

SEQ ID NO: 132825 - DNA, 22 bp, Artificial Sequence
  Synthetic oligonucleotide; CTG chr11 5289033 5289054 5289038 5289033 -
gacagcagagtgaaaccttgcc

SEQ ID NO: 132826 - DNA, 22 bp, Artificial Sequence
  Synthetic oligonucleotide; CTT chr11 5289014 5289035 5289019 5289014 -
gcctcacgaaacagaatacaaa

SEQ ID NO: 132827 - DNA, 22 bp, Artificial Sequence
  Synthetic oligonucleotide; TTG chr11 5289013 5289034 5289018 5289013 -
cctcacgaaacagaatacaaaa

SEQ ID NO: 132828 - DNA, 22 bp, Artificial Sequence
  Synthetic oligonucleotide; CTC chr11 5289009 5289030 5289014 5289009 -
acgaaacagaatacaaaaacaa

SEQ ID NO: 132829 - DNA, 22 bp, Artificial Sequence
  Synthetic oligonucleotide; CTG chr11 5288972 5288993 5288977 5288972 -
ctccgcaatgcgcttccttgat

SEQ ID NO: 132830 - DNA, 22 bp, Artificial Sequence
  Synthetic oligonucleotide; CTC chr11 5288969 5288990 5288974 5288969 -
cgcaatgcgcttccttgatgct

SEQ ID NO: 132831 - DNA, 22 bp, Artificial Sequence
  Synthetic oligonucleotide; CTT chr11 5288957 5288978 5288962 5288957 -
ccttgatgctctaccacatagg

SEQ ID NO: 132832 - DNA, 22 bp, Artificial Sequence
  Synthetic oligonucleotide; TTC chr11 5288956 5288977 5288961 5288956 -
cttgatgctctaccacataggt

SEQ ID NO: 132833 - DNA, 22 bp, Artificial Sequence
  Synthetic oligonucleotide; CTT chr11 5288953 5288974 5288958 5288953 -
gatgctctaccacataggtctg

SEQ ID NO: 132834 - DNA, 22 bp, Artificial Sequence
  Synthetic oligonucleotide; TTG chr11 5288952 5288973 5288957 5288952 -
atgctctaccacataggtctgg

SEQ ID NO: 132835 - DNA, 22 bp, Artificial Sequence
  Synthetic oligonucleotide; CTC chr11 5288946 5288967 5288951 5288946 -
taccacataggtctgggtactt

SEQ ID NO: 132836 - DNA, 22 bp, Artificial Sequence
  Synthetic oligonucleotide; CTA chr11 5288944 5288965 5288949 5288944 -
ccacataggtctgggtactttg

SEQ ID NO: 132837 - DNA, 22 bp, Artificial Sequence
  Synthetic oligonucleotide; CTG chr11 5288931 5288952 5288936 5288931 -
ggtactttgtacacattatctc

SEQ ID NO: 132838 - DNA, 22 bp, Artificial Sequence
  Synthetic oligonucleotide; CTT chr11 5288924 5288945 5288929 5288924 -
tgtacacattatctcattgctg

SEQ ID NO: 132839 - DNA, 22 bp, Artificial Sequence
  Synthetic oligonucleotide; TTT chr11 5288923 5288944 5288928 5288923 -
gtacacattatctcattgctgt

SEQ ID NO: 132840 - DNA, 22 bp, Artificial Sequence
  Synthetic oligonucleotide; TTG chr11 5288922 5288943 5288927 5288922 -
tacacattatctcattgctgtt

SEQ ID NO: 132841 - DNA, 22 bp, Artificial Sequence
  Synthetic oligonucleotide; TTA chr11 5288913 5288934 5288918 5288913 -
tctcattgctgttcataattgt

SEQ ID NO: 132842 - DNA, 22 bp, Artificial Sequence
  Synthetic oligonucleotide; CTC chr11 5288909 5288930 5288914 5288909 -
attgctgttcataattgttaga

SEQ ID NO: 132843 - DNA, 22 bp, Artificial Sequence
  Synthetic oligonucleotide; TTG chr11 5288905 5288926 5288910 5288905 -
ctgttcataattgttagattaa

SEQ ID NO: 132844 - DNA, 22 bp, Artificial Sequence
  Synthetic oligonucleotide; CTG chr11 5288902 5288923 5288907 5288902 -
ttcataattgttagattaattt

SEQ ID NO: 132845 - DNA, 22 bp, Artificial Sequence
  Synthetic oligonucleotide; TTC chr11 5288899 5288920 5288904 5288899 -
ataattgttagattaattttgt

SEQ ID NO: 132846 - DNA, 22 bp, Artificial Sequence
  Synthetic oligonucleotide; TTG chr11 5288892 5288913 5288897 5288892 -
ttagattaattttgtaatattg

SEQ ID NO: 132847 - DNA, 22 bp, Artificial Sequence
  Synthetic oligonucleotide; TTA chr11 5288889 5288910 5288894 5288889 -
gattaattttgtaatattgata

SEQ ID NO: 132848 - DNA, 22 bp, Artificial Sequence
  Synthetic oligonucleotide; TTA chr11 5288884 5288905 5288889 5288884 -
attttgtaatattgatattatt

SEQ ID NO: 132849 - DNA, 22 bp, Artificial Sequence
  Synthetic oligonucleotide; TTT chr11 5288880 5288901 5288885 5288880 -
tgtaatattgatattattccta

SEQ ID NO: 132850 - DNA, 22 bp, Artificial Sequence
  Synthetic oligonucleotide; TTT chr11 5288879 5288900 5288884 5288879 -
gtaatattgatattattcctag

SEQ ID NO: 132851 - DNA, 22 bp, Artificial Sequence
  Synthetic oligonucleotide; TTG chr11 5288878 5288899 5288883 5288878 -
taatattgatattattcctaga

SEQ ID NO: 132852 - DNA, 22 bp, Artificial Sequence
  Synthetic oligonucleotide; TTG chr11 5288870 5288891 5288875 5288870 -
atattattcctagaaagctgag

SEQ ID NO: 132853 - DNA, 22 bp, Artificial Sequence
  Synthetic oligonucleotide; TTA chr11 5288864 5288885 5288869 5288864 -
ttcctagaaagctgaggcctca

SEQ ID NO: 132854 - DNA, 22 bp, Artificial Sequence
  Synthetic oligonucleotide; TTC chr11 5288861 5288882 5288866 5288861 -
ctagaaagctgaggcctcaaga

SEQ ID NO: 132855 - DNA, 22 bp, Artificial Sequence
  Synthetic oligonucleotide; CTA chr11 5288858 5288879 5288863 5288858 -
gaaagctgaggcctcaagatga

SEQ ID NO: 132856 - DNA, 22 bp, Artificial Sequence
  Synthetic oligonucleotide; CTG chr11 5288850 5288871 5288855 5288850 -
aggcctcaagatgataactttt

SEQ ID NO: 132857 - DNA, 22 bp, Artificial Sequence
  Synthetic oligonucleotide; CTC chr11 5288843 5288864 5288848 5288843 -
aagatgataacttttattttct

SEQ ID NO: 132858 - DNA, 22 bp, Artificial Sequence
  Synthetic oligonucleotide; CTT chr11 5288830 5288851 5288835 5288830 -
ttattttctggacttgtaatag

SEQ ID NO: 132859 - DNA, 22 bp, Artificial Sequence
  Synthetic oligonucleotide; TTT chr11 5288829 5288850 5288834 5288829 -
tattttctggacttgtaatagc

SEQ ID NO: 132860 - DNA, 22 bp, Artificial Sequence
  Synthetic oligonucleotide; TTT chr11 5288828 5288849 5288833 5288828 -
attttctggacttgtaatagct

SEQ ID NO: 132861 - DNA, 22 bp, Artificial Sequence
  Synthetic oligonucleotide; TTA chr11 5288827 5288848 5288832 5288827 -
ttttctggacttgtaatagctt

SEQ ID NO: 132862 - DNA, 22 bp, Artificial Sequence
  Synthetic oligonucleotide; TTT chr11 5288824 5288845 5288829 5288824 -
tctggacttgtaatagctttct

SEQ ID NO: 132863 - DNA, 22 bp, Artificial Sequence
  Synthetic oligonucleotide; TTT chr11 5288823 5288844 5288828 5288823 -
ctggacttgtaatagctttctc

SEQ ID NO: 132864 - DNA, 22 bp, Artificial Sequence
  Synthetic oligonucleotide; TTC chr11 5288822 5288843 5288827 5288822 -
tggacttgtaatagctttctct

SEQ ID NO: 132865 - DNA, 22 bp, Artificial Sequence
  Synthetic oligonucleotide; CTG chr11 5288820 5288841 5288825 5288820 -
gacttgtaatagctttctcttg

SEQ ID NO: 132866 - DNA, 22 bp, Artificial Sequence
  Synthetic oligonucleotide; CTT chr11 5288815 5288836 5288820 5288815 -
gtaatagctttctcttgtattc

SEQ ID NO: 132867 - DNA, 22 bp, Artificial Sequence
  Synthetic oligonucleotide; TTG chr11 5288814 5288835 5288819 5288814 -
taatagctttctcttgtattca

SEQ ID NO: 132868 - DNA, 22 bp, Artificial Sequence
  Synthetic oligonucleotide; CTT chr11 5288805 5288826 5288810 5288805 -
tctcttgtattcaccatgttgt

SEQ ID NO: 132869 - DNA, 22 bp, Artificial Sequence
  Synthetic oligonucleotide; TTT chr11 5288804 5288825 5288809 5288804 -
ctcttgtattcaccatgttgta

SEQ ID NO: 132870 - DNA, 22 bp, Artificial Sequence
  Synthetic oligonucleotide; TTC chr11 5288803 5288824 5288808 5288803 -
tcttgtattcaccatgttgtaa

SEQ ID NO: 132871 - DNA, 22 bp, Artificial Sequence
  Synthetic oligonucleotide; CTC chr11 5288801 5288822 5288806 5288801 -
ttgtattcaccatgttgtaact

SEQ ID NO: 132872 - DNA, 22 bp, Artificial Sequence
  Synthetic oligonucleotide; CTT chr11 5288799 5288820 5288804 5288799 -
gtattcaccatgttgtaacttt

SEQ ID NO: 132873 - DNA, 22 bp, Artificial Sequence
  Synthetic oligonucleotide; TTG chr11 5288798 5288819 5288803 5288798 -
tattcaccatgttgtaactttc

SEQ ID NO: 132874 - DNA, 22 bp, Artificial Sequence
  Synthetic oligonucleotide; TTC chr11 5288793 5288814 5288798 5288793 -
accatgttgtaactttcttaga

SEQ ID NO: 132875 - DNA, 22 bp, Artificial Sequence
  Synthetic oligonucleotide; TTG chr11 5288784 5288805 5288789 5288784 -
taactttcttagagtagtaaca

SEQ ID NO: 132876 - DNA, 22 bp, Artificial Sequence
  Synthetic oligonucleotide; CTT chr11 5288778 5288799 5288783 5288778 -
tcttagagtagtaacaatataa

SEQ ID NO: 132877 - DNA, 22 bp, Artificial Sequence
  Synthetic oligonucleotide; TTT chr11 5288777 5288798 5288782 5288777 -
cttagagtagtaacaatataaa

SEQ ID NO: 132878 - DNA, 22 bp, Artificial Sequence
  Synthetic oligonucleotide; TTC chr11 5288776 5288797 5288781 5288776 -
ttagagtagtaacaatataaag

SEQ ID NO: 132879 - DNA, 22 bp, Artificial Sequence
  Synthetic oligonucleotide; CTT chr11 5288774 5288795 5288779 5288774 -
agagtagtaacaatataaagtt

SEQ ID NO: 132880 - DNA, 22 bp, Artificial Sequence
  Synthetic oligonucleotide; TTA chr11 5288773 5288794 5288778 5288773 -
gagtagtaacaatataaagtta

SEQ ID NO: 132881 - DNA, 22 bp, Artificial Sequence
  Synthetic oligonucleotide; TTA chr11 5288751 5288772 5288756 5288751 -
ttgtgagtttttgcaaacacag

SEQ ID NO: 132882 - DNA, 22 bp, Artificial Sequence
  Synthetic oligonucleotide; TTG chr11 5288748 5288769 5288753 5288748 -
tgagtttttgcaaacacagcaa

SEQ ID NO: 132883 - DNA, 22 bp, Artificial Sequence
  Synthetic oligonucleotide; TTT chr11 5288741 5288762 5288746 5288741 -
ttgcaaacacagcaaacacaac

SEQ ID NO: 132884 - DNA, 22 bp, Artificial Sequence
  Synthetic oligonucleotide; TTT chr11 5288740 5288761 5288745 5288740 -
tgcaaacacagcaaacacaacg

SEQ ID NO: 132885 - DNA, 22 bp, Artificial Sequence
  Synthetic oligonucleotide; TTT chr11 5288739 5288760 5288744 5288739 -
gcaaacacagcaaacacaacga

SEQ ID NO: 132886 - DNA, 22 bp, Artificial Sequence
  Synthetic oligonucleotide; TTG chr11 5288738 5288759 5288743 5288738 -
caaacacagcaaacacaacgac

SEQ ID NO: 132887 - DNA, 22 bp, Artificial Sequence
  Synthetic oligonucleotide; TTG chr11 5288702 5288723 5288707 5288702 -
atgtgaaattgtctattgtcaa

SEQ ID NO: 132888 - DNA, 22 bp, Artificial Sequence
  Synthetic oligonucleotide; TTG chr11 5288691 5288712 5288696 5288691 -
tctattgtcaatttatgggaaa

SEQ ID NO: 132889 - DNA, 22 bp, Artificial Sequence
  Synthetic oligonucleotide; CTA chr11 5288687 5288708 5288692 5288687 -
ttgtcaatttatgggaaaacaa

SEQ ID NO: 132890 - DNA, 22 bp, Artificial Sequence
  Synthetic oligonucleotide; TTG chr11 5288684 5288705 5288689 5288684 -
tcaatttatgggaaaacaagta

SEQ ID NO: 132891 - DNA, 22 bp, Artificial Sequence
  Synthetic oligonucleotide; TTT chr11 5288677 5288698 5288682 5288677 -
atgggaaaacaagtatgtactt

SEQ ID NO: 132892 - DNA, 22 bp, Artificial Sequence
  Synthetic oligonucleotide; TTA chr11 5288676 5288697 5288681 5288676 -
tgggaaaacaagtatgtacttt

SEQ ID NO: 132893 - DNA, 22 bp, Artificial Sequence
  Synthetic oligonucleotide; CTT chr11 5288655 5288676 5288660 5288655 -
tttctactaagccattgaaaca

SEQ ID NO: 132894 - DNA, 22 bp, Artificial Sequence
  Synthetic oligonucleotide; TTT chr11 5288654 5288675 5288659 5288654 -
ttctactaagccattgaaacag

SEQ ID NO: 132895 - DNA, 22 bp, Artificial Sequence
  Synthetic oligonucleotide; TTT chr11 5288653 5288674 5288658 5288653 -
tctactaagccattgaaacagg

SEQ ID NO: 132896 - DNA, 22 bp, Artificial Sequence
  Synthetic oligonucleotide; TTT chr11 5288652 5288673 5288657 5288652 -
ctactaagccattgaaacagga

SEQ ID NO: 132897 - DNA, 22 bp, Artificial Sequence
  Synthetic oligonucleotide; TTC chr11 5288651 5288672 5288656 5288651 -
tactaagccattgaaacaggaa

SEQ ID NO: 132898 - DNA, 22 bp, Artificial Sequence
  Synthetic oligonucleotide; CTA chr11 5288649 5288670 5288654 5288649 -
ctaagccattgaaacaggaata

SEQ ID NO: 132899 - DNA, 22 bp, Artificial Sequence
  Synthetic oligonucleotide; CTA chr11 5288646 5288667 5288651 5288646 -
agccattgaaacaggaataaca

SEQ ID NO: 132900 - DNA, 22 bp, Artificial Sequence
  Synthetic oligonucleotide; TTG chr11 5288638 5288659 5288643 5288638 -
aaacaggaataacagaacaaga

SEQ ID NO: 132901 - DNA, 22 bp, Artificial Sequence
  Synthetic oligonucleotide; TTG chr11 5288613 5288634 5288618 5288613 -
aaagaatacattttccgaaatt

SEQ ID NO: 132902 - DNA, 22 bp, Artificial Sequence
  Synthetic oligonucleotide; TTT chr11 5288600 5288621 5288605 5288600 -
tccgaaattacttgagtattat

SEQ ID NO: 132903 - DNA, 22 bp, Artificial Sequence
  Synthetic oligonucleotide; TTT chr11 5288599 5288620 5288604 5288599 -
ccgaaattacttgagtattata

SEQ ID NO: 132904 - DNA, 22 bp, Artificial Sequence
  Synthetic oligonucleotide; TTC chr11 5288598 5288619 5288603 5288598 -
cgaaattacttgagtattatac

SEQ ID NO: 132905 - DNA, 22 bp, Artificial Sequence
  Synthetic oligonucleotide; TTA chr11 5288590 5288611 5288595 5288590 -
cttgagtattatacaaagacaa

SEQ ID NO: 132906 - DNA, 22 bp, Artificial Sequence
  Synthetic oligonucleotide; CTT chr11 5288587 5288608 5288592 5288587 -
gagtattatacaaagacaagca

SEQ ID NO: 132907 - DNA, 22 bp, Artificial Sequence
  Synthetic oligonucleotide; TTG chr11 5288586 5288607 5288591 5288586 -
agtattatacaaagacaagcac

SEQ ID NO: 132908 - DNA, 22 bp, Artificial Sequence
  Synthetic oligonucleotide; TTA chr11 5288579 5288600 5288584 5288579 -
tacaaagacaagcacgtggacc

SEQ ID NO: 132909 - DNA, 22 bp, Artificial Sequence
  Synthetic oligonucleotide; CTG chr11 5288555 5288576 5288560 5288555 -
ggaggagggttattgtccatga

SEQ ID NO: 132910 - DNA, 22 bp, Artificial Sequence
  Synthetic oligonucleotide; TTA chr11 5288543 5288564 5288548 5288543 -
ttgtccatgactggtgtgtgga

SEQ ID NO: 132911 - DNA, 22 bp, Artificial Sequence
  Synthetic oligonucleotide; TTG chr11 5288540 5288561 5288545 5288540 -
tccatgactggtgtgtggagac

SEQ ID NO: 132912 - DNA, 22 bp, Artificial Sequence
  Synthetic oligonucleotide; CTG chr11 5288530 5288551 5288535 5288530 -
gtgtgtggagacaaatgcaggt

SEQ ID NO: 132913 - DNA, 22 bp, Artificial Sequence
  Synthetic oligonucleotide; TTT chr11 5288506 5288527 5288511 5288506 -
ataatagatgggatggcatcta

SEQ ID NO: 132914 - DNA, 22 bp, Artificial Sequence
  Synthetic oligonucleotide; TTA chr11 5288505 5288526 5288510 5288505 -
taatagatgggatggcatctag

SEQ ID NO: 132915 - DNA, 22 bp, Artificial Sequence
  Synthetic oligonucleotide; CTA chr11 5288484 5288505 5288489 5288484 -
gcgcaatgactttgccatcact

SEQ ID NO: 132916 - DNA, 22 bp, Artificial Sequence
  Synthetic oligonucleotide; CTT chr11 5288472 5288493 5288477 5288472 -
tgccatcacttttagagagctc

SEQ ID NO: 132917 - DNA, 22 bp, Artificial Sequence
  Synthetic oligonucleotide; TTT chr11 5288471 5288492 5288476 5288471 -
gccatcacttttagagagctct

SEQ ID NO: 132918 - DNA, 22 bp, Artificial Sequence
  Synthetic oligonucleotide; TTG chr11 5288470 5288491 5288475 5288470 -
ccatcacttttagagagctctt

SEQ ID NO: 132919 - DNA, 22 bp, Artificial Sequence
  Synthetic oligonucleotide; CTT chr11 5288461 5288482 5288466 5288461 -
ttagagagctcttggggacccc

SEQ ID NO: 132920 - DNA, 22 bp, Artificial Sequence
  Synthetic oligonucleotide; TTT chr11 5288460 5288481 5288465 5288460 -
tagagagctcttggggacccca

SEQ ID NO: 132921 - DNA, 22 bp, Artificial Sequence
  Synthetic oligonucleotide; TTT chr11 5288459 5288480 5288464 5288459 -
agagagctcttggggaccccag

SEQ ID NO: 132922 - DNA, 22 bp, Artificial Sequence
  Synthetic oligonucleotide; TTA chr11 5288458 5288479 5288463 5288458 -
gagagctcttggggaccccagt

SEQ ID NO: 132923 - DNA, 22 bp, Artificial Sequence
  Synthetic oligonucleotide; CTC chr11 5288450 5288471 5288455 5288450 -
ttggggaccccagtacacaaga

SEQ ID NO: 132924 - DNA, 22 bp, Artificial Sequence
  Synthetic oligonucleotide; CTT chr11 5288448 5288469 5288453 5288448 -
ggggaccccagtacacaagagg

SEQ ID NO: 132925 - DNA, 22 bp, Artificial Sequence
  Synthetic oligonucleotide; TTG chr11 5288447 5288468 5288452 5288447 -
gggaccccagtacacaagaggg

SEQ ID NO: 132926 - DNA, 22 bp, Artificial Sequence
  Synthetic oligonucleotide; CTC chr11 5288400 5288421 5288405 5288400 -
attctttttcttagtgtgagaa

SEQ ID NO: 132927 - DNA, 22 bp, Artificial Sequence
  Synthetic oligonucleotide; TTC chr11 5288396 5288417 5288401 5288396 -
tttttcttagtgtgagaataag

SEQ ID NO: 132928 - DNA, 22 bp, Artificial Sequence
  Synthetic oligonucleotide; CTT chr11 5288394 5288415 5288399 5288394 -
tttcttagtgtgagaataagaa

SEQ ID NO: 132929 - DNA, 22 bp, Artificial Sequence
  Synthetic oligonucleotide; TTT chr11 5288393 5288414 5288398 5288393 -
ttcttagtgtgagaataagaat

SEQ ID NO: 132930 - DNA, 22 bp, Artificial Sequence
  Synthetic oligonucleotide; TTT chr11 5288392 5288413 5288397 5288392 -
tcttagtgtgagaataagaata

SEQ ID NO: 132931 - DNA, 22 bp, Artificial Sequence
  Synthetic oligonucleotide; TTT chr11 5288391 5288412 5288396 5288391 -
cttagtgtgagaataagaatag

SEQ ID NO: 132932 - DNA, 22 bp, Artificial Sequence
  Synthetic oligonucleotide; TTC chr11 5288390 5288411 5288395 5288390 -
ttagtgtgagaataagaatagc

SEQ ID NO: 132933 - DNA, 22 bp, Artificial Sequence
  Synthetic oligonucleotide; CTT chr11 5288388 5288409 5288393 5288388 -
agtgtgagaataagaatagcca

SEQ ID NO: 132934 - DNA, 22 bp, Artificial Sequence
  Synthetic oligonucleotide; TTA chr11 5288387 5288408 5288392 5288387 -
gtgtgagaataagaatagccat

SEQ ID NO: 132935 - DNA, 22 bp, Artificial Sequence
  Synthetic oligonucleotide; CTG chr11 5288359 5288380 5288364 5288359 -
agtttatagacaatgagccctt

SEQ ID NO: 132936 - DNA, 22 bp, Artificial Sequence
  Synthetic oligonucleotide; TTT chr11 5288354 5288375 5288359 5288354 -
atagacaatgagcccttttctc

SEQ ID NO: 132937 - DNA, 22 bp, Artificial Sequence
  Synthetic oligonucleotide; TTA chr11 5288353 5288374 5288358 5288353 -
tagacaatgagcccttttctct

SEQ ID NO: 132938 - DNA, 22 bp, Artificial Sequence
  Synthetic oligonucleotide; CTT chr11 5288337 5288358 5288342 5288337 -
ttctctctcccactcagcagct

SEQ ID NO: 132939 - DNA, 22 bp, Artificial Sequence
  Synthetic oligonucleotide; TTT chr11 5288336 5288357 5288341 5288336 -
tctctctcccactcagcagcta

SEQ ID NO: 132940 - DNA, 22 bp, Artificial Sequence
  Synthetic oligonucleotide; TTT chr11 5288335 5288356 5288340 5288335 -
ctctctcccactcagcagctat

SEQ ID NO: 132941 - DNA, 22 bp, Artificial Sequence
  Synthetic oligonucleotide; TTC chr11 5288334 5288355 5288339 5288334 -
tctctcccactcagcagctatg

SEQ ID NO: 132942 - DNA, 22 bp, Artificial Sequence
  Synthetic oligonucleotide; CTC chr11 5288332 5288353 5288337 5288332 -
tctcccactcagcagctatgag

SEQ ID NO: 132943 - DNA, 22 bp, Artificial Sequence
  Synthetic oligonucleotide; CTC chr11 5288330 5288351 5288335 5288330 -
tcccactcagcagctatgagat

SEQ ID NO: 132944 - DNA, 22 bp, Artificial Sequence
  Synthetic oligonucleotide; CTC chr11 5288328 5288349 5288333 5288328 -
ccactcagcagctatgagatgg

SEQ ID NO: 132945 - DNA, 22 bp, Artificial Sequence
  Synthetic oligonucleotide; CTC chr11 5288322 5288343 5288327 5288322 -
agcagctatgagatggcttgcc

SEQ ID NO: 132946 - DNA, 22 bp, Artificial Sequence
  Synthetic oligonucleotide; CTA chr11 5288314 5288335 5288319 5288314 -
tgagatggcttgccctgcctct

SEQ ID NO: 132947 - DNA, 22 bp, Artificial Sequence
  Synthetic oligonucleotide; CTT chr11 5288303 5288324 5288308 5288303 -
gccctgcctctctactaggctg

SEQ ID NO: 132948 - DNA, 22 bp, Artificial Sequence
  Synthetic oligonucleotide; TTG chr11 5288302 5288323 5288307 5288302 -
ccctgcctctctactaggctga

SEQ ID NO: 132949 - DNA, 22 bp, Artificial Sequence
  Synthetic oligonucleotide; CTG chr11 5288297 5288318 5288302 5288297 -
cctctctactaggctgactcac

SEQ ID NO: 132950 - DNA, 22 bp, Artificial Sequence
  Synthetic oligonucleotide; CTC chr11 5288293 5288314 5288298 5288293 -
tctactaggctgactcactcca

SEQ ID NO: 132951 - DNA, 22 bp, Artificial Sequence
  Synthetic oligonucleotide; CTC chr11 5288291 5288312 5288296 5288291 -
tactaggctgactcactccaag

SEQ ID NO: 132952 - DNA, 22 bp, Artificial Sequence
  Synthetic oligonucleotide; CTA chr11 5288289 5288310 5288294 5288289 -
ctaggctgactcactccaaggc

SEQ ID NO: 132953 - DNA, 22 bp, Artificial Sequence
  Synthetic oligonucleotide; CTA chr11 5288286 5288307 5288291 5288286 -
ggctgactcactccaaggccca

SEQ ID NO: 132954 - DNA, 22 bp, Artificial Sequence
  Synthetic oligonucleotide; CTG chr11 5288281 5288302 5288286 5288281 -
actcactccaaggcccagcaat

SEQ ID NO: 132955 - DNA, 22 bp, Artificial Sequence
  Synthetic oligonucleotide; CTC chr11 5288277 5288298 5288282 5288277 -
actccaaggcccagcaatgggc

SEQ ID NO: 132956 - DNA, 22 bp, Artificial Sequence
  Synthetic oligonucleotide; CTC chr11 5288273 5288294 5288278 5288273 -
caaggcccagcaatgggcaggg

SEQ ID NO: 132957 - DNA, 22 bp, Artificial Sequence
  Synthetic oligonucleotide; CTC chr11 5288248 5288269 5288253 5288248 -
tgtcagggctttgatagcacta

SEQ ID NO: 132958 - DNA, 22 bp, Artificial Sequence
  Synthetic oligonucleotide; CTG chr11 5288246 5288267 5288251 5288246 -
tcagggctttgatagcactatc

SEQ ID NO: 132959 - DNA, 22 bp, Artificial Sequence
  Synthetic oligonucleotide; CTT chr11 5288237 5288258 5288242 5288237 -
tgatagcactatctgcagagcc

SEQ ID NO: 132960 - DNA, 22 bp, Artificial Sequence
  Synthetic oligonucleotide; TTT chr11 5288236 5288257 5288241 5288236 -
gatagcactatctgcagagcca

SEQ ID NO: 132961 - DNA, 22 bp, Artificial Sequence
  Synthetic oligonucleotide; TTG chr11 5288235 5288256 5288240 5288235 -
atagcactatctgcagagccag

SEQ ID NO: 132962 - DNA, 22 bp, Artificial Sequence
  Synthetic oligonucleotide; CTA chr11 5288226 5288247 5288231 5288226 -
tctgcagagccagggccgagaa

SEQ ID NO: 132963 - DNA, 22 bp, Artificial Sequence
  Synthetic oligonucleotide; CTG chr11 5288222 5288243 5288227 5288222 -
cagagccagggccgagaagggg

SEQ ID NO: 132964 - DNA, 22 bp, Artificial Sequence
  Synthetic oligonucleotide; CTC chr11 5288193 5288214 5288198 5288193 -
cagagactctccctcccattcc

SEQ ID NO: 132965 - DNA, 22 bp, Artificial Sequence
  Synthetic oligonucleotide; CTC chr11 5288184 5288205 5288189 5288184 -
tccctcccattcccgagcaggg

SEQ ID NO: 132966 - DNA, 22 bp, Artificial Sequence
  Synthetic oligonucleotide; CTC chr11 5288182 5288203 5288187 5288182 -
cctcccattcccgagcagggtt

SEQ ID NO: 132967 - DNA, 22 bp, Artificial Sequence
  Synthetic oligonucleotide; CTC chr11 5288178 5288199 5288183 5288178 -
ccattcccgagcagggtttgct

SEQ ID NO: 132968 - DNA, 22 bp, Artificial Sequence
  Synthetic oligonucleotide; TTC chr11 5288172 5288193 5288177 5288172 -
ccgagcagggtttgcttattta

SEQ ID NO: 132969 - DNA, 22 bp, Artificial Sequence
  Synthetic oligonucleotide; TTT chr11 5288159 5288180 5288164 5288159 -
gcttatttatgcatttaaatga

SEQ ID NO: 132970 - DNA, 22 bp, Artificial Sequence
  Synthetic oligonucleotide; TTG chr11 5288158 5288179 5288163 5288158 -
cttatttatgcatttaaatgat

SEQ ID NO: 132971 - DNA, 22 bp, Artificial Sequence
  Synthetic oligonucleotide; CTT chr11 5288155 5288176 5288160 5288155 -
atttatgcatttaaatgatata

SEQ ID NO: 132972 - DNA, 22 bp, Artificial Sequence
  Synthetic oligonucleotide; TTA chr11 5288154 5288175 5288159 5288154 -
tttatgcatttaaatgatatat

SEQ ID NO: 132973 - DNA, 22 bp, Artificial Sequence
  Synthetic oligonucleotide; TTT chr11 5288151 5288172 5288156 5288151 -
atgcatttaaatgatatattta

SEQ ID NO: 132974 - DNA, 22 bp, Artificial Sequence
  Synthetic oligonucleotide; TTA chr11 5288150 5288171 5288155 5288150 -
tgcatttaaatgatatatttat

SEQ ID NO: 132975 - DNA, 22 bp, Artificial Sequence
  Synthetic oligonucleotide; TTT chr11 5288143 5288164 5288148 5288143 -
aaatgatatatttattttaaaa

SEQ ID NO: 132976 - DNA, 22 bp, Artificial Sequence
  Synthetic oligonucleotide; TTA chr11 5288142 5288163 5288147 5288142 -
aatgatatatttattttaaaag

SEQ ID NO: 132977 - DNA, 22 bp, Artificial Sequence
  Synthetic oligonucleotide; TTT chr11 5288130 5288151 5288135 5288130 -
attttaaaagaaataacaggag

SEQ ID NO: 132978 - DNA, 22 bp, Artificial Sequence
  Synthetic oligonucleotide; TTA chr11 5288129 5288150 5288134 5288129 -
ttttaaaagaaataacaggaga

SEQ ID NO: 132979 - DNA, 22 bp, Artificial Sequence
  Synthetic oligonucleotide; TTT chr11 5288126 5288147 5288131 5288126 -
taaaagaaataacaggagactg

SEQ ID NO: 132980 - DNA, 22 bp, Artificial Sequence
  Synthetic oligonucleotide; TTT chr11 5288125 5288146 5288130 5288125 -
aaaagaaataacaggagactgc

SEQ ID NO: 132981 - DNA, 22 bp, Artificial Sequence
  Synthetic oligonucleotide; TTA chr11 5288124 5288145 5288129 5288124 -
aaagaaataacaggagactgcc

SEQ ID NO: 132982 - DNA, 22 bp, Artificial Sequence
  Synthetic oligonucleotide; CTG chr11 5288104 5288125 5288109 5288104 -
cccagccctggctgtgacatgg

SEQ ID NO: 132983 - DNA, 22 bp, Artificial Sequence
  Synthetic oligonucleotide; CTG chr11 5288094 5288115 5288099 5288094 -
gctgtgacatggaaactatgta

SEQ ID NO: 132984 - DNA, 22 bp, Artificial Sequence
  Synthetic oligonucleotide; CTG chr11 5288090 5288111 5288095 5288090 -
tgacatggaaactatgtagaat

SEQ ID NO: 132985 - DNA, 22 bp, Artificial Sequence
  Synthetic oligonucleotide; CTA chr11 5288076 5288097 5288081 5288076 -
tgtagaatattttgggttccat

SEQ ID NO: 132986 - DNA, 22 bp, Artificial Sequence
  Synthetic oligonucleotide; TTT chr11 5288064 5288085 5288069 5288064 -
tgggttccatttttttttcctt

SEQ ID NO: 132987 - DNA, 22 bp, Artificial Sequence
  Synthetic oligonucleotide; TTT chr11 5288063 5288084 5288068 5288063 -
gggttccatttttttttccttc

SEQ ID NO: 132988 - DNA, 22 bp, Artificial Sequence
  Synthetic oligonucleotide; TTG chr11 5288062 5288083 5288067 5288062 -
ggttccatttttttttccttct

SEQ ID NO: 132989 - DNA, 22 bp, Artificial Sequence
  Synthetic oligonucleotide; TTC chr11 5288057 5288078 5288062 5288057 -
catttttttttccttctttcag

SEQ ID NO: 132990 - DNA, 22 bp, Artificial Sequence
  Synthetic oligonucleotide; TTT chr11 5288052 5288073 5288057 5288052 -
ttttttccttctttcagttaga

SEQ ID NO: 132991 - DNA, 22 bp, Artificial Sequence
  Synthetic oligonucleotide; TTT chr11 5288051 5288072 5288056 5288051 -
tttttccttctttcagttagag

SEQ ID NO: 132992 - DNA, 22 bp, Artificial Sequence
  Synthetic oligonucleotide; TTT chr11 5288050 5288071 5288055 5288050 -
ttttccttctttcagttagagg

SEQ ID NO: 132993 - DNA, 22 bp, Artificial Sequence
  Synthetic oligonucleotide; TTT chr11 5288049 5288070 5288054 5288049 -
tttccttctttcagttagagga

SEQ ID NO: 132994 - DNA, 22 bp, Artificial Sequence
  Synthetic oligonucleotide; TTT chr11 5288048 5288069 5288053 5288048 -
ttccttctttcagttagaggaa

SEQ ID NO: 132995 - DNA, 22 bp, Artificial Sequence
  Synthetic oligonucleotide; TTT chr11 5288047 5288068 5288052 5288047 -
tccttctttcagttagaggaaa

SEQ ID NO: 132996 - DNA, 22 bp, Artificial Sequence
  Synthetic oligonucleotide; TTT chr11 5288046 5288067 5288051 5288046 -
ccttctttcagttagaggaaaa

SEQ ID NO: 132997 - DNA, 22 bp, Artificial Sequence
  Synthetic oligonucleotide; TTC chr11 5288045 5288066 5288050 5288045 -
cttctttcagttagaggaaaag

SEQ ID NO: 132998 - DNA, 22 bp, Artificial Sequence
  Synthetic oligonucleotide; CTT chr11 5288042 5288063 5288047 5288042 -
ctttcagttagaggaaaagggg

SEQ ID NO: 132999 - DNA, 22 bp, Artificial Sequence
  Synthetic oligonucleotide; TTC chr11 5288041 5288062 5288046 5288041 -
tttcagttagaggaaaaggggc

SEQ ID NO: 133000 - DNA, 22 bp, Artificial Sequence
  Synthetic oligonucleotide; CTT chr11 5288039 5288060 5288044 5288039 -
tcagttagaggaaaaggggctc

SEQ ID NO: 133001 - DNA, 22 bp, Artificial Sequence
  Synthetic oligonucleotide; TTT chr11 5288038 5288059 5288043 5288038 -
cagttagaggaaaaggggctca

SEQ ID NO: 133002 - DNA, 22 bp, Artificial Sequence
  Synthetic oligonucleotide; TTC chr11 5288037 5288058 5288042 5288037 -
agttagaggaaaaggggctcac

SEQ ID NO: 133003 - DNA, 22 bp, Artificial Sequence
  Synthetic oligonucleotide; TTA chr11 5288032 5288053 5288037 5288032 -
gaggaaaaggggctcactgcac

SEQ ID NO: 133004 - DNA, 22 bp, Artificial Sequence
  Synthetic oligonucleotide; CTC chr11 5288017 5288038 5288022 5288017 -
actgcacatacactagacagaa

SEQ ID NO: 133005 - DNA, 22 bp, Artificial Sequence
  Synthetic oligonucleotide; CTG chr11 5288013 5288034 5288018 5288013 -
cacatacactagacagaaagtc

SEQ ID NO: 133006 - DNA, 22 bp, Artificial Sequence
  Synthetic oligonucleotide; CTA chr11 5288002 5288023 5288007 5288002 -
gacagaaagtcaggagctttga

SEQ ID NO: 133007 - DNA, 22 bp, Artificial Sequence
  Synthetic oligonucleotide; CTT chr11 5287983 5288004 5287988 5287983 -
tgaatccaagcctgatcatttc

SEQ ID NO: 133008 - DNA, 22 bp, Artificial Sequence
  Synthetic oligonucleotide; TTT chr11 5287982 5288003 5287987 5287982 -
gaatccaagcctgatcatttcc

SEQ ID NO: 133009 - DNA, 22 bp, Artificial Sequence
  Synthetic oligonucleotide; TTG chr11 5287981 5288002 5287986 5287981 -
aatccaagcctgatcatttcca

SEQ ID NO: 133010 - DNA, 22 bp, Artificial Sequence
  Synthetic oligonucleotide; CTG chr11 5287969 5287990 5287974 5287969 -
atcatttccatgtcatactgag

SEQ ID NO: 133011 - DNA, 22 bp, Artificial Sequence
  Synthetic oligonucleotide; TTT chr11 5287962 5287983 5287967 5287962 -
ccatgtcatactgagaaagtcc

SEQ ID NO: 133012 - DNA, 22 bp, Artificial Sequence
  Synthetic oligonucleotide; TTC chr11 5287961 5287982 5287966 5287961 -
catgtcatactgagaaagtccc

SEQ ID NO: 133013 - DNA, 22 bp, Artificial Sequence
  Synthetic oligonucleotide; CTG chr11 5287949 5287970 5287954 5287949 -
agaaagtccccacccttctctg

SEQ ID NO: 133014 - DNA, 22 bp, Artificial Sequence
  Synthetic oligonucleotide; CTT chr11 5287932 5287953 5287937 5287932 -
ctctgagcctcagtttctcttt

SEQ ID NO: 133015 - DNA, 22 bp, Artificial Sequence
  Synthetic oligonucleotide; TTC chr11 5287931 5287952 5287936 5287931 -
tctgagcctcagtttctctttt

SEQ ID NO: 133016 - DNA, 22 bp, Artificial Sequence
  Synthetic oligonucleotide; CTC chr11 5287929 5287950 5287934 5287929 -
tgagcctcagtttctcttttta

SEQ ID NO: 133017 - DNA, 22 bp, Artificial Sequence
  Synthetic oligonucleotide; CTG chr11 5287927 5287948 5287932 5287927 -
agcctcagtttctctttttata

SEQ ID NO: 133018 - DNA, 22 bp, Artificial Sequence
  Synthetic oligonucleotide; CTC chr11 5287921 5287942 5287926 5287921 -
agtttctctttttataagtagg

SEQ ID NO: 133019 - DNA, 22 bp, Artificial Sequence
  Synthetic oligonucleotide; TTT chr11 5287916 5287937 5287921 5287916 -
ctctttttataagtaggagtct

SEQ ID NO: 133020 - DNA, 22 bp, Artificial Sequence
  Synthetic oligonucleotide; TTC chr11 5287915 5287936 5287920 5287915 -
tctttttataagtaggagtctg

SEQ ID NO: 133021 - DNA, 22 bp, Artificial Sequence
  Synthetic oligonucleotide; CTC chr11 5287913 5287934 5287918 5287913 -
tttttataagtaggagtctgga

SEQ ID NO: 133022 - DNA, 22 bp, Artificial Sequence
  Synthetic oligonucleotide; CTT chr11 5287911 5287932 5287916 5287911 -
tttataagtaggagtctggagt

SEQ ID NO: 133023 - DNA, 22 bp, Artificial Sequence
  Synthetic oligonucleotide; TTT chr11 5287910 5287931 5287915 5287910 -
ttataagtaggagtctggagta

SEQ ID NO: 133024 - DNA, 22 bp, Artificial Sequence
  Synthetic oligonucleotide; TTT chr11 5287909 5287930 5287914 5287909 -
tataagtaggagtctggagtaa

SEQ ID NO: 133025 - DNA, 22 bp, Artificial Sequence
  Synthetic oligonucleotide; TTT chr11 5287908 5287929 5287913 5287908 -
ataagtaggagtctggagtaaa

SEQ ID NO: 133026 - DNA, 22 bp, Artificial Sequence
  Synthetic oligonucleotide; TTA chr11 5287907 5287928 5287912 5287907 -
taagtaggagtctggagtaaat

SEQ ID NO: 133027 - DNA, 22 bp, Artificial Sequence
  Synthetic oligonucleotide; CTG chr11 5287893 5287914 5287898 5287893 -
gagtaaatgatttccaatggct

SEQ ID NO: 133028 - DNA, 22 bp, Artificial Sequence
  Synthetic oligonucleotide; TTT chr11 5287880 5287901 5287885 5287880 -
ccaatggctctcatttcaatac

SEQ ID NO: 133029 - DNA, 22 bp, Artificial Sequence
  Synthetic oligonucleotide; TTC chr11 5287879 5287900 5287884 5287879 -
caatggctctcatttcaataca

SEQ ID NO: 133030 - DNA, 22 bp, Artificial Sequence
  Synthetic oligonucleotide; CTC chr11 5287870 5287891 5287875 5287870 -
tcatttcaatacaaaatttccg

SEQ ID NO: 133031 - DNA, 22 bp, Artificial Sequence
  Synthetic oligonucleotide; CTC chr11 5287868 5287889 5287873 5287868 -
atttcaatacaaaatttccgtt

SEQ ID NO: 133032 - DNA, 22 bp, Artificial Sequence
  Synthetic oligonucleotide; TTT chr11 5287864 5287885 5287869 5287864 -
caatacaaaatttccgtttatt

SEQ ID NO: 133033 - DNA, 22 bp, Artificial Sequence
  Synthetic oligonucleotide; TTC chr11 5287863 5287884 5287868 5287863 -
aatacaaaatttccgtttatta

SEQ ID NO: 133034 - DNA, 22 bp, Artificial Sequence
  Synthetic oligonucleotide; TTT chr11 5287851 5287872 5287856 5287851 -
ccgtttattaaatgcatgagct

SEQ ID NO: 133035 - DNA, 22 bp, Artificial Sequence
  Synthetic oligonucleotide; TTC chr11 5287850 5287871 5287855 5287850 -
cgtttattaaatgcatgagctt

SEQ ID NO: 133036 - DNA, 22 bp, Artificial Sequence
  Synthetic oligonucleotide; TTT chr11 5287845 5287866 5287850 5287845 -
attaaatgcatgagcttctgtt

SEQ ID NO: 133037 - DNA, 22 bp, Artificial Sequence
  Synthetic oligonucleotide; TTA chr11 5287844 5287865 5287849 5287844 -
ttaaatgcatgagcttctgtta

SEQ ID NO: 133038 - DNA, 22 bp, Artificial Sequence
  Synthetic oligonucleotide; TTA chr11 5287841 5287862 5287846 5287841 -
aatgcatgagcttctgttactc

SEQ ID NO: 133039 - DNA, 22 bp, Artificial Sequence
  Synthetic oligonucleotide; CTT chr11 5287828 5287849 5287833 5287828 -
ctgttactccaagactgagaag

SEQ ID NO: 133040 - DNA, 22 bp, Artificial Sequence
  Synthetic oligonucleotide; TTC chr11 5287827 5287848 5287832 5287827 -
tgttactccaagactgagaagg

SEQ ID NO: 133041 - DNA, 22 bp, Artificial Sequence
  Synthetic oligonucleotide; CTG chr11 5287825 5287846 5287830 5287825 -
ttactccaagactgagaaggaa

SEQ ID NO: 133042 - DNA, 22 bp, Artificial Sequence
  Synthetic oligonucleotide; TTA chr11 5287822 5287843 5287827 5287822 -
ctccaagactgagaaggaaatt

SEQ ID NO: 133043 - DNA, 22 bp, Artificial Sequence
  Synthetic oligonucleotide; CTC chr11 5287819 5287840 5287824 5287819 -
caagactgagaaggaaattgaa

SEQ ID NO: 133044 - DNA, 22 bp, Artificial Sequence
  Synthetic oligonucleotide; CTG chr11 5287811 5287832 5287816 5287811 -
agaaggaaattgaacctgagac

SEQ ID NO: 133045 - DNA, 22 bp, Artificial Sequence
  Synthetic oligonucleotide; TTG chr11 5287799 5287820 5287804 5287799 -
aacctgagactcattgactggc

SEQ ID NO: 133046 - DNA, 22 bp, Artificial Sequence
  Synthetic oligonucleotide; CTG chr11 5287793 5287814 5287798 5287793 -
agactcattgactggcaagatg

SEQ ID NO: 133047 - DNA, 22 bp, Artificial Sequence
  Synthetic oligonucleotide; CTC chr11 5287787 5287808 5287792 5287787 -
attgactggcaagatgtcccca

SEQ ID NO: 133048 - DNA, 22 bp, Artificial Sequence
  Synthetic oligonucleotide; TTG chr11 5287783 5287804 5287788 5287783 -
actggcaagatgtccccagagg

SEQ ID NO: 133049 - DNA, 22 bp, Artificial Sequence
  Synthetic oligonucleotide; CTG chr11 5287779 5287800 5287784 5287779 -
gcaagatgtccccagaggctct

SEQ ID NO: 133050 - DNA, 22 bp, Artificial Sequence
  Synthetic oligonucleotide; CTC chr11 5287758 5287779 5287763 5287758 -
tcattcagcaataaaattctca

SEQ ID NO: 133051 - DNA, 22 bp, Artificial Sequence
  Synthetic oligonucleotide; CTC chr11 5287756 5287777 5287761 5287756 -
attcagcaataaaattctcacc

SEQ ID NO: 133052 - DNA, 22 bp, Artificial Sequence
  Synthetic oligonucleotide; TTC chr11 5287752 5287773 5287757 5287752 -
agcaataaaattctcaccttca

SEQ ID NO: 133053 - DNA, 22 bp, Artificial Sequence
  Synthetic oligonucleotide; TTC chr11 5287739 5287760 5287744 5287739 -
tcaccttcacccaggcccactg

SEQ ID NO: 133054 - DNA, 22 bp, Artificial Sequence
  Synthetic oligonucleotide; CTC chr11 5287737 5287758 5287742 5287737 -
accttcacccaggcccactgag

SEQ ID NO: 133055 - DNA, 22 bp, Artificial Sequence
  Synthetic oligonucleotide; CTT chr11 5287732 5287753 5287737 5287732 -
cacccaggcccactgagtgtca

SEQ ID NO: 133056 - DNA, 22 bp, Artificial Sequence
  Synthetic oligonucleotide; TTC chr11 5287731 5287752 5287736 5287731 -
acccaggcccactgagtgtcag

SEQ ID NO: 133057 - DNA, 22 bp, Artificial Sequence
  Synthetic oligonucleotide; CTG chr11 5287717 5287738 5287722 5287717 -
agtgtcagatttgcatgcacta

SEQ ID NO: 133058 - DNA, 22 bp, Artificial Sequence
  Synthetic oligonucleotide; TTT chr11 5287705 5287726 5287710 5287705 -
gcatgcactagttcacgtgtgt

SEQ ID NO: 133059 - DNA, 22 bp, Artificial Sequence
  Synthetic oligonucleotide; TTG chr11 5287704 5287725 5287709 5287704 -
catgcactagttcacgtgtgta

SEQ ID NO: 133060 - DNA, 22 bp, Artificial Sequence
  Synthetic oligonucleotide; CTA chr11 5287695 5287716 5287700 5287695 -
gttcacgtgtgtaaaaaggagg

SEQ ID NO: 133061 - DNA, 22 bp, Artificial Sequence
  Synthetic oligonucleotide; TTC chr11 5287691 5287712 5287696 5287691 -
acgtgtgtaaaaaggaggatgc

SEQ ID NO: 133062 - DNA, 22 bp, Artificial Sequence
  Synthetic oligonucleotide; CTT chr11 5287667 5287688 5287672 5287667 -
ctttcctttgtattctcacata

SEQ ID NO: 133063 - DNA, 22 bp, Artificial Sequence
  Synthetic oligonucleotide; TTC chr11 5287666 5287687 5287671 5287666 -
tttcctttgtattctcacatac

SEQ ID NO: 133064 - DNA, 22 bp, Artificial Sequence
  Synthetic oligonucleotide; CTT chr11 5287664 5287685 5287669 5287664 -
tcctttgtattctcacatacct

SEQ ID NO: 133065 - DNA, 22 bp, Artificial Sequence
  Synthetic oligonucleotide; TTT chr11 5287663 5287684 5287668 5287663 -
cctttgtattctcacatacctt

SEQ ID NO: 133066 - DNA, 22 bp, Artificial Sequence
  Synthetic oligonucleotide; TTC chr11 5287662 5287683 5287667 5287662 -
ctttgtattctcacataccttt

SEQ ID NO: 133067 - DNA, 22 bp, Artificial Sequence
  Synthetic oligonucleotide; CTT chr11 5287659 5287680 5287664 5287659 -
tgtattctcacatacctttagg

SEQ ID NO: 133068 - DNA, 22 bp, Artificial Sequence
  Synthetic oligonucleotide; TTT chr11 5287658 5287679 5287663 5287658 -
gtattctcacatacctttagga

SEQ ID NO: 133069 - DNA, 22 bp, Artificial Sequence
  Synthetic oligonucleotide; TTG chr11 5287657 5287678 5287662 5287657 -
tattctcacatacctttaggaa

SEQ ID NO: 133070 - DNA, 22 bp, Artificial Sequence
  Synthetic oligonucleotide; TTC chr11 5287652 5287673 5287657 5287652 -
tcacatacctttaggaaagaac

SEQ ID NO: 133071 - DNA, 22 bp, Artificial Sequence
  Synthetic oligonucleotide; CTC chr11 5287650 5287671 5287655 5287650 -
acatacctttaggaaagaactt

SEQ ID NO: 133072 - DNA, 22 bp, Artificial Sequence
  Synthetic oligonucleotide; CTT chr11 5287641 5287662 5287646 5287641 -
taggaaagaacttagcaccctt

SEQ ID NO: 133073 - DNA, 22 bp, Artificial Sequence
  Synthetic oligonucleotide; TTT chr11 5287640 5287661 5287645 5287640 -
aggaaagaacttagcacccttc

SEQ ID NO: 133074 - DNA, 22 bp, Artificial Sequence
  Synthetic oligonucleotide; TTA chr11 5287639 5287660 5287644 5287639 -
ggaaagaacttagcacccttcc

SEQ ID NO: 133075 - DNA, 22 bp, Artificial Sequence
  Synthetic oligonucleotide; CTT chr11 5287628 5287649 5287633 5287628 -
agcacccttcccacacagccat

SEQ ID NO: 133076 - DNA, 22 bp, Artificial Sequence
  Synthetic oligonucleotide; TTA chr11 5287627 5287648 5287632 5287627 -
gcacccttcccacacagccatc

SEQ ID NO: 133077 - DNA, 22 bp, Artificial Sequence
  Synthetic oligonucleotide; CTT chr11 5287619 5287640 5287624 5287619 -
cccacacagccatcccaataac

SEQ ID NO: 133078 - DNA, 22 bp, Artificial Sequence
  Synthetic oligonucleotide; TTC chr11 5287618 5287639 5287623 5287618 -
ccacacagccatcccaataact

SEQ ID NO: 133079 - DNA, 22 bp, Artificial Sequence
  Synthetic oligonucleotide; CTC chr11 5287595 5287616 5287600 5287595 -
atttcagtgactcaacccttga

SEQ ID NO: 133080 - DNA, 22 bp, Artificial Sequence
  Synthetic oligonucleotide; TTT chr11 5287591 5287612 5287596 5287591 -
cagtgactcaacccttgacttt

SEQ ID NO: 133081 - DNA, 22 bp, Artificial Sequence
  Synthetic oligonucleotide; TTC chr11 5287590 5287611 5287595 5287590 -
agtgactcaacccttgacttta

SEQ ID NO: 133082 - DNA, 22 bp, Artificial Sequence
  Synthetic oligonucleotide; CTC chr11 5287582 5287603 5287587 5287582 -
aacccttgactttataaaagtc

SEQ ID NO: 133083 - DNA, 22 bp, Artificial Sequence
  Synthetic oligonucleotide; CTT chr11 5287575 5287596 5287580 5287575 -
gactttataaaagtcttgggca

SEQ ID NO: 133084 - DNA, 22 bp, Artificial Sequence
  Synthetic oligonucleotide; TTG chr11 5287574 5287595 5287579 5287574 -
actttataaaagtcttgggcag

SEQ ID NO: 133085 - DNA, 22 bp, Artificial Sequence
  Synthetic oligonucleotide; CTT chr11 5287570 5287591 5287575 5287570 -
tataaaagtcttgggcagtata

SEQ ID NO: 133086 - DNA, 22 bp, Artificial Sequence
  Synthetic oligonucleotide; TTT chr11 5287569 5287590 5287574 5287569 -
ataaaagtcttgggcagtatag

SEQ ID NO: 133087 - DNA, 22 bp, Artificial Sequence
  Synthetic oligonucleotide; TTA chr11 5287568 5287589 5287573 5287568 -
taaaagtcttgggcagtataga

SEQ ID NO: 133088 - DNA, 22 bp, Artificial Sequence
  Synthetic oligonucleotide; CTT chr11 5287558 5287579 5287563 5287558 -
gggcagtatagagcagagatta

SEQ ID NO: 133089 - DNA, 22 bp, Artificial Sequence
  Synthetic oligonucleotide; TTG chr11 5287557 5287578 5287562 5287557 -
ggcagtatagagcagagattaa

SEQ ID NO: 133090 - DNA, 22 bp, Artificial Sequence
  Synthetic oligonucleotide; TTA chr11 5287536 5287557 5287541 5287536 -
agagtacagatgctggagccag

SEQ ID NO: 133091 - DNA, 22 bp, Artificial Sequence
  Synthetic oligonucleotide; CTG chr11 5287521 5287542 5287526 5287521 -
gagccagaccacctgagtgatt

SEQ ID NO: 133092 - DNA, 22 bp, Artificial Sequence
  Synthetic oligonucleotide; CTG chr11 5287506 5287527 5287511 5287506 -
agtgattagtgactcagtttct

SEQ ID NO: 133093 - DNA, 22 bp, Artificial Sequence
  Synthetic oligonucleotide; TTA chr11 5287498 5287519 5287503 5287498 -
gtgactcagtttctcttagtag

SEQ ID NO: 133094 - DNA, 22 bp, Artificial Sequence
  Synthetic oligonucleotide; CTC chr11 5287491 5287512 5287496 5287491 -
agtttctcttagtagttgtatg

SEQ ID NO: 133095 - DNA, 22 bp, Artificial Sequence
  Synthetic oligonucleotide; TTT chr11 5287486 5287507 5287491 5287486 -
ctcttagtagttgtatgactca

SEQ ID NO: 133096 - DNA, 22 bp, Artificial Sequence
  Synthetic oligonucleotide; TTC chr11 5287485 5287506 5287490 5287485 -
tcttagtagttgtatgactcag

SEQ ID NO: 133097 - DNA, 22 bp, Artificial Sequence
  Synthetic oligonucleotide; CTC chr11 5287483 5287504 5287488 5287483 -
ttagtagttgtatgactcagtt

SEQ ID NO: 133098 - DNA, 22 bp, Artificial Sequence
  Synthetic oligonucleotide; CTT chr11 5287481 5287502 5287486 5287481 -
agtagttgtatgactcagtttc

SEQ ID NO: 133099 - DNA, 22 bp, Artificial Sequence
  Synthetic oligonucleotide; TTA chr11 5287480 5287501 5287485 5287480 -
gtagttgtatgactcagtttct

SEQ ID NO: 133100 - DNA, 22 bp, Artificial Sequence
  Synthetic oligonucleotide; TTG chr11 5287473 5287494 5287478 5287473 -
tatgactcagtttcttcatctg

SEQ ID NO: 133101 - DNA, 22 bp, Artificial Sequence
  Synthetic oligonucleotide; CTC chr11 5287465 5287486 5287470 5287465 -
agtttcttcatctgtaaaatgg

SEQ ID NO: 133102 - DNA, 22 bp, Artificial Sequence
  Synthetic oligonucleotide; TTT chr11 5287460 5287481 5287465 5287460 -
cttcatctgtaaaatggagggt

SEQ ID NO: 133103 - DNA, 22 bp, Artificial Sequence
  Synthetic oligonucleotide; TTC chr11 5287459 5287480 5287464 5287459 -
ttcatctgtaaaatggagggtt

SEQ ID NO: 133104 - DNA, 22 bp, Artificial Sequence
  Synthetic oligonucleotide; CTT chr11 5287457 5287478 5287462 5287457 -
catctgtaaaatggagggtttt

SEQ ID NO: 133105 - DNA, 22 bp, Artificial Sequence
  Synthetic oligonucleotide; TTC chr11 5287456 5287477 5287461 5287456 -
atctgtaaaatggagggttttt

SEQ ID NO: 133106 - DNA, 22 bp, Artificial Sequence
  Synthetic oligonucleotide; CTG chr11 5287451 5287472 5287456 5287451 -
taaaatggagggttttttaatt

SEQ ID NO: 133107 - DNA, 22 bp, Artificial Sequence
  Synthetic oligonucleotide; TTT chr11 5287436 5287457 5287441 5287436 -
tttaattagtttgtttttgaga

SEQ ID NO: 133108 - DNA, 22 bp, Artificial Sequence
  Synthetic oligonucleotide; TTT chr11 5287435 5287456 5287440 5287435 -
ttaattagtttgtttttgagaa

SEQ ID NO: 133109 - DNA, 22 bp, Artificial Sequence
  Synthetic oligonucleotide; TTT chr11 5287434 5287455 5287439 5287434 -
taattagtttgtttttgagaaa

SEQ ID NO: 133110 - DNA, 22 bp, Artificial Sequence
  Synthetic oligonucleotide; TTT chr11 5287433 5287454 5287438 5287433 -
aattagtttgtttttgagaaag

SEQ ID NO: 133111 - DNA, 22 bp, Artificial Sequence
  Synthetic oligonucleotide; TTA chr11 5287432 5287453 5287437 5287432 -
attagtttgtttttgagaaagg

SEQ ID NO: 133112 - DNA, 22 bp, Artificial Sequence
  Synthetic oligonucleotide; TTA chr11 5287428 5287449 5287433 5287428 -
gtttgtttttgagaaagggtct

SEQ ID NO: 133113 - DNA, 22 bp, Artificial Sequence
  Synthetic oligonucleotide; TTT chr11 5287424 5287445 5287429 5287424 -
gtttttgagaaagggtctcact

SEQ ID NO: 133114 - DNA, 22 bp, Artificial Sequence
  Synthetic oligonucleotide; TTG chr11 5287423 5287444 5287428 5287423 -
tttttgagaaagggtctcactc

SEQ ID NO: 133115 - DNA, 22 bp, Artificial Sequence
  Synthetic oligonucleotide; TTT chr11 5287420 5287441 5287425 5287420 -
ttgagaaagggtctcactctgt

SEQ ID NO: 133116 - DNA, 22 bp, Artificial Sequence
  Synthetic oligonucleotide; TTT chr11 5287419 5287440 5287424 5287419 -
tgagaaagggtctcactctgtc

SEQ ID NO: 133117 - DNA, 22 bp, Artificial Sequence
  Synthetic oligonucleotide; TTT chr11 5287418 5287439 5287423 5287418 -
gagaaagggtctcactctgtca

SEQ ID NO: 133118 - DNA, 22 bp, Artificial Sequence
  Synthetic oligonucleotide; TTG chr11 5287417 5287438 5287422 5287417 -
agaaagggtctcactctgtcac

SEQ ID NO: 133119 - DNA, 22 bp, Artificial Sequence
  Synthetic oligonucleotide; CTC chr11 5287405 5287426 5287410 5287405 -
actctgtcacccaaatgggagt

SEQ ID NO: 133120 - DNA, 22 bp, Artificial Sequence
  Synthetic oligonucleotide; CTC chr11 5287401 5287422 5287406 5287401 -
tgtcacccaaatgggagtgtag

SEQ ID NO: 133121 - DNA, 22 bp, Artificial Sequence
  Synthetic oligonucleotide; CTG chr11 5287399 5287420 5287404 5287399 -
tcacccaaatgggagtgtagtg

SEQ ID NO: 133122 - DNA, 22 bp, Artificial Sequence
  Synthetic oligonucleotide; CTC chr11 5287367 5287388 5287372 5287367 -
ggctcactgcaacttgcacttc

SEQ ID NO: 133123 - DNA, 22 bp, Artificial Sequence
  Synthetic oligonucleotide; CTC chr11 5287362 5287383 5287367 5287362 -
actgcaacttgcacttcccagg

SEQ ID NO: 133124 - DNA, 22 bp, Artificial Sequence
  Synthetic oligonucleotide; CTG chr11 5287358 5287379 5287363 5287358 -
caacttgcacttcccaggctca

SEQ ID NO: 133125 - DNA, 22 bp, Artificial Sequence
  Synthetic oligonucleotide; CTT chr11 5287352 5287373 5287357 5287352 -
gcacttcccaggctcaagcggt

SEQ ID NO: 133126 - DNA, 22 bp, Artificial Sequence
  Synthetic oligonucleotide; TTG chr11 5287351 5287372 5287356 5287351 -
cacttcccaggctcaagcggtc

SEQ ID NO: 133127 - DNA, 22 bp, Artificial Sequence
  Synthetic oligonucleotide; CTT chr11 5287346 5287367 5287351 5287346 -
cccaggctcaagcggtcctccc

SEQ ID NO: 133128 - DNA, 22 bp, Artificial Sequence
  Synthetic oligonucleotide; TTC chr11 5287345 5287366 5287350 5287345 -
ccaggctcaagcggtcctccca

SEQ ID NO: 133129 - DNA, 22 bp, Artificial Sequence
  Synthetic oligonucleotide; CTC chr11 5287337 5287358 5287342 5287337 -
aagcggtcctcccacctcaaca

SEQ ID NO: 133130 - DNA, 22 bp, Artificial Sequence
  Synthetic oligonucleotide; CTC chr11 5287326 5287347 5287331 5287326 -
ccacctcaacatcctgagtagc

SEQ ID NO: 133131 - DNA, 22 bp, Artificial Sequence
  Synthetic oligonucleotide; CTC chr11 5287319 5287340 5287324 5287319 -
aacatcctgagtagctggaacc

SEQ ID NO: 133132 - DNA, 22 bp, Artificial Sequence
  Synthetic oligonucleotide; CTG chr11 5287310 5287331 5287315 5287310 -
agtagctggaaccacaggtaca

SEQ ID NO: 133133 - DNA, 22 bp, Artificial Sequence
  Synthetic oligonucleotide; CTG chr11 5287302 5287323 5287307 5287302 -
gaaccacaggtacacaccacca

SEQ ID NO: 133134 - DNA, 22 bp, Artificial Sequence
  Synthetic oligonucleotide; CTC chr11 5287274 5287295 5287279 5287274 -
gctaattttttgtatttttggt

SEQ ID NO: 133135 - DNA, 22 bp, Artificial Sequence
  Synthetic oligonucleotide; CTA chr11 5287270 5287291 5287275 5287270 -
attttttgtatttttggtagag

SEQ ID NO: 133136 - DNA, 22 bp, Artificial Sequence
  Synthetic oligonucleotide; TTT chr11 5287266 5287287 5287271 5287266 -
tttgtatttttggtagagatgg

SEQ ID NO: 133137 - DNA, 22 bp, Artificial Sequence
  Synthetic oligonucleotide; TTT chr11 5287265 5287286 5287270 5287265 -
ttgtatttttggtagagatggg

SEQ ID NO: 133138 - DNA, 22 bp, Artificial Sequence
  Synthetic oligonucleotide; TTT chr11 5287264 5287285 5287269 5287264 -
tgtatttttggtagagatgggg

SEQ ID NO: 133139 - DNA, 22 bp, Artificial Sequence
  Synthetic oligonucleotide; TTT chr11 5287263 5287284 5287268 5287263 -
gtatttttggtagagatggggt

SEQ ID NO: 133140 - DNA, 22 bp, Artificial Sequence
  Synthetic oligonucleotide; TTG chr11 5287262 5287283 5287267 5287262 -
tatttttggtagagatggggtt

SEQ ID NO: 133141 - DNA, 22 bp, Artificial Sequence
  Synthetic oligonucleotide; TTT chr11 5287257 5287278 5287262 5287257 -
ttggtagagatggggtttcaca

SEQ ID NO: 133142 - DNA, 22 bp, Artificial Sequence
  Synthetic oligonucleotide; TTT chr11 5287256 5287277 5287261 5287256 -
tggtagagatggggtttcacat

SEQ ID NO: 133143 - DNA, 22 bp, Artificial Sequence
  Synthetic oligonucleotide; TTT chr11 5287255 5287276 5287260 5287255 -
ggtagagatggggtttcacatg

SEQ ID NO: 133144 - DNA, 22 bp, Artificial Sequence
  Synthetic oligonucleotide; TTG chr11 5287254 5287275 5287259 5287254 -
gtagagatggggtttcacatgt

SEQ ID NO: 133145 - DNA, 22 bp, Artificial Sequence
  Synthetic oligonucleotide; TTT chr11 5287239 5287260 5287244 5287239 -
cacatgttacacaggatggtct

SEQ ID NO: 133146 - DNA, 22 bp, Artificial Sequence
  Synthetic oligonucleotide; TTC chr11 5287238 5287259 5287243 5287238 -
acatgttacacaggatggtctc

SEQ ID NO: 133147 - DNA, 22 bp, Artificial Sequence
  Synthetic oligonucleotide; TTA chr11 5287230 5287251 5287235 5287230 -
cacaggatggtctcagactccg

SEQ ID NO: 133148 - DNA, 22 bp, Artificial Sequence
  Synthetic oligonucleotide; CTC chr11 5287216 5287237 5287221 5287216 -
agactccggagctcaagcaatc

SEQ ID NO: 133149 - DNA, 22 bp, Artificial Sequence
  Synthetic oligonucleotide; CTC chr11 5287210 5287231 5287215 5287210 -
cggagctcaagcaatctgccca

SEQ ID NO: 133150 - DNA, 22 bp, Artificial Sequence
  Synthetic oligonucleotide; CTC chr11 5287202 5287223 5287207 5287202 -
aagcaatctgcccacctcagcc

SEQ ID NO: 133151 - DNA, 22 bp, Artificial Sequence
  Synthetic oligonucleotide; CTG chr11 5287192 5287213 5287197 5287192 -
cccacctcagccttccaaagtg

SEQ ID NO: 133152 - DNA, 22 bp, Artificial Sequence
  Synthetic oligonucleotide; CTC chr11 5287184 5287205 5287189 5287184 -
agccttccaaagtgctgggatt

SEQ ID NO: 133153 - DNA, 22 bp, Artificial Sequence
  Synthetic oligonucleotide; CTT chr11 5287178 5287199 5287183 5287178 -
ccaaagtgctgggattataagc

SEQ ID NO: 133154 - DNA, 22 bp, Artificial Sequence
  Synthetic oligonucleotide; TTC chr11 5287177 5287198 5287182 5287177 -
caaagtgctgggattataagca

SEQ ID NO: 133155 - DNA, 22 bp, Artificial Sequence
  Synthetic oligonucleotide; CTG chr11 5287167 5287188 5287172 5287167 -
ggattataagcatgattacagg

SEQ ID NO: 133156 - DNA, 22 bp, Artificial Sequence
  Synthetic oligonucleotide; TTA chr11 5287161 5287182 5287166 5287161 -
taagcatgattacaggagtttt

SEQ ID NO: 133157 - DNA, 22 bp, Artificial Sequence
  Synthetic oligonucleotide; TTA chr11 5287149 5287170 5287154 5287149 -
caggagttttaacaggctcata

SEQ ID NO: 133158 - DNA, 22 bp, Artificial Sequence
  Synthetic oligonucleotide; TTT chr11 5287140 5287161 5287145 5287140 -
taacaggctcataagattgttc

SEQ ID NO: 133159 - DNA, 22 bp, Artificial Sequence
  Synthetic oligonucleotide; TTT chr11 5287139 5287160 5287144 5287139 -
aacaggctcataagattgttct

SEQ ID NO: 133160 - DNA, 22 bp, Artificial Sequence
  Synthetic oligonucleotide; TTA chr11 5287138 5287159 5287143 5287138 -
acaggctcataagattgttctg

SEQ ID NO: 133161 - DNA, 22 bp, Artificial Sequence
  Synthetic oligonucleotide; CTC chr11 5287130 5287151 5287135 5287130 -
ataagattgttctgcagcccga

SEQ ID NO: 133162 - DNA, 22 bp, Artificial Sequence
  Synthetic oligonucleotide; TTG chr11 5287121 5287142 5287126 5287121 -
ttctgcagcccgagtgagttaa

SEQ ID NO: 133163 - DNA, 22 bp, Artificial Sequence
  Synthetic oligonucleotide; TTC chr11 5287118 5287139 5287123 5287118 -
tgcagcccgagtgagttaatac

SEQ ID NO: 133164 - DNA, 22 bp, Artificial Sequence
  Synthetic oligonucleotide; CTG chr11 5287116 5287137 5287121 5287116 -
cagcccgagtgagttaatacat

SEQ ID NO: 133165 - DNA, 22 bp, Artificial Sequence
  Synthetic oligonucleotide; TTA chr11 5287100 5287121 5287105 5287100 -
atacatgcaaagagtttaaagc

SEQ ID NO: 133166 - DNA, 22 bp, Artificial Sequence
  Synthetic oligonucleotide; TTT chr11 5287083 5287104 5287088 5287083 -
aaagcagtgacttataaatgct

SEQ ID NO: 133167 - DNA, 22 bp, Artificial Sequence
  Synthetic oligonucleotide; TTA chr11 5287082 5287103 5287087 5287082 -
aagcagtgacttataaatgcta

SEQ ID NO: 133168 - DNA, 22 bp, Artificial Sequence
  Synthetic oligonucleotide; CTT chr11 5287070 5287091 5287075 5287070 -
ataaatgctaactactctagaa

SEQ ID NO: 133169 - DNA, 22 bp, Artificial Sequence
  Synthetic oligonucleotide; TTA chr11 5287069 5287090 5287074 5287069 -
taaatgctaactactctagaaa

SEQ ID NO: 133170 - DNA, 22 bp, Artificial Sequence
  Synthetic oligonucleotide; CTA chr11 5287060 5287081 5287065 5287060 -
actactctagaaatgtttgcta

SEQ ID NO: 133171 - DNA, 22 bp, Artificial Sequence
  Synthetic oligonucleotide; CTA chr11 5287056 5287077 5287061 5287056 -
ctctagaaatgtttgctagtat

SEQ ID NO: 133172 - DNA, 22 bp, Artificial Sequence
  Synthetic oligonucleotide; CTC chr11 5287053 5287074 5287058 5287053 -
tagaaatgtttgctagtatttt

SEQ ID NO: 133173 - DNA, 22 bp, Artificial Sequence
  Synthetic oligonucleotide; CTA chr11 5287051 5287072 5287056 5287051 -
gaaatgtttgctagtatttttt

SEQ ID NO: 133174 - DNA, 22 bp, Artificial Sequence
  Synthetic oligonucleotide; TTT chr11 5287042 5287063 5287047 5287042 -
gctagtattttttgtttaactg

SEQ ID NO: 133175 - DNA, 22 bp, Artificial Sequence
  Synthetic oligonucleotide; TTG chr11 5287041 5287062 5287046 5287041 -
ctagtattttttgtttaactgc

SEQ ID NO: 133176 - DNA, 22 bp, Artificial Sequence
  Synthetic oligonucleotide; CTA chr11 5287038 5287059 5287043 5287038 -
gtattttttgtttaactgcaat

SEQ ID NO: 133177 - DNA, 22 bp, Artificial Sequence
  Synthetic oligonucleotide; TTT chr11 5287032 5287053 5287037 5287032 -
tttgtttaactgcaatcattct

SEQ ID NO: 133178 - DNA, 22 bp, Artificial Sequence
  Synthetic oligonucleotide; TTT chr11 5287031 5287052 5287036 5287031 -
ttgtttaactgcaatcattctt

SEQ ID NO: 133179 - DNA, 22 bp, Artificial Sequence
  Synthetic oligonucleotide; TTT chr11 5287030 5287051 5287035 5287030 -
tgtttaactgcaatcattcttg

SEQ ID NO: 133180 - DNA, 22 bp, Artificial Sequence
  Synthetic oligonucleotide; TTT chr11 5287029 5287050 5287034 5287029 -
gtttaactgcaatcattcttgc

SEQ ID NO: 133181 - DNA, 22 bp, Artificial Sequence
  Synthetic oligonucleotide; TTG chr11 5287028 5287049 5287033 5287028 -
tttaactgcaatcattcttgct

SEQ ID NO: 133182 - DNA, 22 bp, Artificial Sequence
  Synthetic oligonucleotide; TTT chr11 5287025 5287046 5287030 5287025 -
aactgcaatcattcttgctgca

SEQ ID NO: 133183 - DNA, 22 bp, Artificial Sequence
  Synthetic oligonucleotide; TTA chr11 5287024 5287045 5287029 5287024 -
actgcaatcattcttgctgcag

SEQ ID NO: 133184 - DNA, 22 bp, Artificial Sequence
  Synthetic oligonucleotide; CTG chr11 5287020 5287041 5287025 5287020 -
caatcattcttgctgcaggtga

SEQ ID NO: 133185 - DNA, 22 bp, Artificial Sequence
  Synthetic oligonucleotide; TTC chr11 5287011 5287032 5287016 5287011 -
ttgctgcaggtgaaaactagtg

SEQ ID NO: 133186 - DNA, 22 bp, Artificial Sequence
  Synthetic oligonucleotide; CTT chr11 5287009 5287030 5287014 5287009 -
gctgcaggtgaaaactagtgtt

SEQ ID NO: 133187 - DNA, 22 bp, Artificial Sequence
  Synthetic oligonucleotide; TTG chr11 5287008 5287029 5287013 5287008 -
ctgcaggtgaaaactagtgttc

SEQ ID NO: 133188 - DNA, 22 bp, Artificial Sequence
  Synthetic oligonucleotide; CTG chr11 5287005 5287026 5287010 5287005 -
caggtgaaaactagtgttctgt

SEQ ID NO: 133189 - DNA, 22 bp, Artificial Sequence
  Synthetic oligonucleotide; CTA chr11 5286992 5287013 5286997 5286992 -
gtgttctgtactttatgcccat

SEQ ID NO: 133190 - DNA, 22 bp, Artificial Sequence
  Synthetic oligonucleotide; TTC chr11 5286986 5287007 5286991 5286986 -
tgtactttatgcccattcatct

SEQ ID NO: 133191 - DNA, 22 bp, Artificial Sequence
  Synthetic oligonucleotide; CTG chr11 5286984 5287005 5286989 5286984 -
tactttatgcccattcatcttt

SEQ ID NO: 133192 - DNA, 22 bp, Artificial Sequence
  Synthetic oligonucleotide; CTT chr11 5286979 5287000 5286984 5286979 -
tatgcccattcatctttaactg

SEQ ID NO: 133193 - DNA, 22 bp, Artificial Sequence
  Synthetic oligonucleotide; TTT chr11 5286978 5286999 5286983 5286978 -
atgcccattcatctttaactgt

SEQ ID NO: 133194 - DNA, 22 bp, Artificial Sequence
  Synthetic oligonucleotide; TTA chr11 5286977 5286998 5286982 5286977 -
tgcccattcatctttaactgta

SEQ ID NO: 133195 - DNA, 22 bp, Artificial Sequence
  Synthetic oligonucleotide; TTC chr11 5286968 5286989 5286973 5286968 -
atctttaactgtaataataaaa

SEQ ID NO: 133196 - DNA, 22 bp, Artificial Sequence
  Synthetic oligonucleotide; CTT chr11 5286963 5286984 5286968 5286963 -
taactgtaataataaaaataac

SEQ ID NO: 133197 - DNA, 22 bp, Artificial Sequence
  Synthetic oligonucleotide; TTT chr11 5286962 5286983 5286967 5286962 -
aactgtaataataaaaataact

SEQ ID NO: 133198 - DNA, 22 bp, Artificial Sequence
  Synthetic oligonucleotide; TTA chr11 5286961 5286982 5286966 5286961 -
actgtaataataaaaataactg

SEQ ID NO: 133199 - DNA, 22 bp, Artificial Sequence
  Synthetic oligonucleotide; CTG chr11 5286957 5286978 5286962 5286957 -
taataataaaaataactgacat

SEQ ID NO: 133200 - DNA, 22 bp, Artificial Sequence
  Synthetic oligonucleotide; CTG chr11 5286939 5286960 5286944 5286939 -
acatttattgaaggctatcaga

SEQ ID NO: 133201 - DNA, 22 bp, Artificial Sequence
  Synthetic oligonucleotide; TTT chr11 5286933 5286954 5286938 5286933 -
attgaaggctatcagagactgt

SEQ ID NO: 133202 - DNA, 22 bp, Artificial Sequence
  Synthetic oligonucleotide; TTA chr11 5286932 5286953 5286937 5286932 -
ttgaaggctatcagagactgta

SEQ ID NO: 133203 - DNA, 22 bp, Artificial Sequence
  Synthetic oligonucleotide; TTG chr11 5286929 5286950 5286934 5286929 -
aaggctatcagagactgtaatt

SEQ ID NO: 133204 - DNA, 22 bp, Artificial Sequence
  Synthetic oligonucleotide; CTA chr11 5286922 5286943 5286927 5286922 -
tcagagactgtaattagtgctt

SEQ ID NO: 133205 - DNA, 22 bp, Artificial Sequence
  Synthetic oligonucleotide; CTG chr11 5286912 5286933 5286917 5286912 -
taattagtgctttgcataatta

SEQ ID NO: 133206 - DNA, 22 bp, Artificial Sequence
  Synthetic oligonucleotide; TTA chr11 5286906 5286927 5286911 5286906 -
gtgctttgcataattaatcata

SEQ ID NO: 133207 - DNA, 22 bp, Artificial Sequence
  Synthetic oligonucleotide; CTT chr11 5286900 5286921 5286905 5286900 -
tgcataattaatcatatttaat

SEQ ID NO: 133208 - DNA, 22 bp, Artificial Sequence
  Synthetic oligonucleotide; TTT chr11 5286899 5286920 5286904 5286899 -
gcataattaatcatatttaata

SEQ ID NO: 133209 - DNA, 22 bp, Artificial Sequence
  Synthetic oligonucleotide; TTG chr11 5286898 5286919 5286903 5286898 -
cataattaatcatatttaatac

SEQ ID NO: 133210 - DNA, 22 bp, Artificial Sequence
  Synthetic oligonucleotide; TTA chr11 5286890 5286911 5286895 5286890 -
atcatatttaatactcttggat

SEQ ID NO: 133211 - DNA, 22 bp, Artificial Sequence
  Synthetic oligonucleotide; TTT chr11 5286881 5286902 5286886 5286881 -
aatactcttggattctttcagg

SEQ ID NO: 133212 - DNA, 22 bp, Artificial Sequence
  Synthetic oligonucleotide; TTA chr11 5286880 5286901 5286885 5286880 -
atactcttggattctttcaggt

SEQ ID NO: 133213 - DNA, 22 bp, Artificial Sequence
  Synthetic oligonucleotide; CTC chr11 5286874 5286895 5286879 5286874 -
ttggattctttcaggtagatac

SEQ ID NO: 133214 - DNA, 22 bp, Artificial Sequence
  Synthetic oligonucleotide; CTT chr11 5286872 5286893 5286877 5286872 -
ggattctttcaggtagatacta

SEQ ID NO: 133215 - DNA, 22 bp, Artificial Sequence
  Synthetic oligonucleotide; TTG chr11 5286871 5286892 5286876 5286871 -
gattctttcaggtagatactat

SEQ ID NO: 133216 - DNA, 22 bp, Artificial Sequence
  Synthetic oligonucleotide; TTC chr11 5286866 5286887 5286871 5286866 -
tttcaggtagatactattatta

SEQ ID NO: 133217 - DNA, 22 bp, Artificial Sequence
  Synthetic oligonucleotide; CTT chr11 5286864 5286885 5286869 5286864 -
tcaggtagatactattattatc

SEQ ID NO: 133218 - DNA, 22 bp, Artificial Sequence
  Synthetic oligonucleotide; TTT chr11 5286863 5286884 5286868 5286863 -
caggtagatactattattatcc

SEQ ID NO: 133219 - DNA, 22 bp, Artificial Sequence
  Synthetic oligonucleotide; TTC chr11 5286862 5286883 5286867 5286862 -
aggtagatactattattatccc

SEQ ID NO: 133220 - DNA, 22 bp, Artificial Sequence
  Synthetic oligonucleotide; CTA chr11 5286850 5286871 5286855 5286850 -
ttattatccccattttactaca

SEQ ID NO: 133221 - DNA, 22 bp, Artificial Sequence
  Synthetic oligonucleotide; TTA chr11 5286847 5286868 5286852 5286847 -
ttatccccattttactacagtt

SEQ ID NO: 133222 - DNA, 22 bp, Artificial Sequence
  Synthetic oligonucleotide; TTA chr11 5286844 5286865 5286849 5286844 -
tccccattttactacagttaaa

SEQ ID NO: 133223 - DNA, 22 bp, Artificial Sequence
  Synthetic oligonucleotide; TTT chr11 5286835 5286856 5286840 5286835 -
tactacagttaaaaaaactacc

SEQ ID NO: 133224 - DNA, 22 bp, Artificial Sequence
  Synthetic oligonucleotide; TTT chr11 5286834 5286855 5286839 5286834 -
actacagttaaaaaaactacct

SEQ ID NO: 133225 - DNA, 22 bp, Artificial Sequence
  Synthetic oligonucleotide; TTA chr11 5286833 5286854 5286838 5286833 -
ctacagttaaaaaaactacctc

SEQ ID NO: 133226 - DNA, 22 bp, Artificial Sequence
  Synthetic oligonucleotide; CTA chr11 5286830 5286851 5286835 5286830 -
cagttaaaaaaactacctctca

SEQ ID NO: 133227 - DNA, 22 bp, Artificial Sequence
  Synthetic oligonucleotide; TTA chr11 5286824 5286845 5286829 5286824 -
aaaaaactacctctcaacttgc

SEQ ID NO: 133228 - DNA, 22 bp, Artificial Sequence
  Synthetic oligonucleotide; CTA chr11 5286815 5286836 5286820 5286815 -
cctctcaacttgctcaagcata

SEQ ID NO: 133229 - DNA, 22 bp, Artificial Sequence
  Synthetic oligonucleotide; CTC chr11 5286811 5286832 5286816 5286811 -
tcaacttgctcaagcatacact

SEQ ID NO: 133230 - DNA, 22 bp, Artificial Sequence
  Synthetic oligonucleotide; CTC chr11 5286809 5286830 5286814 5286809 -
aacttgctcaagcatacactct

SEQ ID NO: 133231 - DNA, 22 bp, Artificial Sequence
  Synthetic oligonucleotide; CTT chr11 5286804 5286825 5286809 5286804 -
gctcaagcatacactctcacac

SEQ ID NO: 133232 - DNA, 22 bp, Artificial Sequence
  Synthetic oligonucleotide; TTG chr11 5286803 5286824 5286808 5286803 -
ctcaagcatacactctcacaca

SEQ ID NO: 133233 - DNA, 22 bp, Artificial Sequence
  Synthetic oligonucleotide; CTC chr11 5286800 5286821 5286805 5286800 -
aagcatacactctcacacacac

SEQ ID NO: 133234 - DNA, 22 bp, Artificial Sequence
  Synthetic oligonucleotide; CTC chr11 5286788 5286809 5286793 5286788 -
tcacacacacaaacataaacta

SEQ ID NO: 133235 - DNA, 22 bp, Artificial Sequence
  Synthetic oligonucleotide; CTC chr11 5286786 5286807 5286791 5286786 -
acacacacaaacataaactact

SEQ ID NO: 133236 - DNA, 22 bp, Artificial Sequence
  Synthetic oligonucleotide; CTA chr11 5286766 5286787 5286771 5286766 -
ctagcaaatagtagaattgaga

SEQ ID NO: 133237 - DNA, 22 bp, Artificial Sequence
  Synthetic oligonucleotide; CTA chr11 5286763 5286784 5286768 5286763 -
gcaaatagtagaattgagattt

SEQ ID NO: 133238 - DNA, 22 bp, Artificial Sequence
  Synthetic oligonucleotide; TTG chr11 5286747 5286768 5286752 5286747 -
agatttggtcctaattatgtct

SEQ ID NO: 133239 - DNA, 22 bp, Artificial Sequence
  Synthetic oligonucleotide; TTT chr11 5286741 5286762 5286746 5286741 -
ggtcctaattatgtctttgctc

SEQ ID NO: 133240 - DNA, 22 bp, Artificial Sequence
  Synthetic oligonucleotide; TTG chr11 5286740 5286761 5286745 5286740 -
gtcctaattatgtctttgctca

SEQ ID NO: 133241 - DNA, 22 bp, Artificial Sequence
  Synthetic oligonucleotide; CTA chr11 5286734 5286755 5286739 5286734 -
attatgtctttgctcactatcc

SEQ ID NO: 133242 - DNA, 22 bp, Artificial Sequence
  Synthetic oligonucleotide; TTA chr11 5286730 5286751 5286735 5286730 -
tgtctttgctcactatccaata

SEQ ID NO: 133243 - DNA, 22 bp, Artificial Sequence
  Synthetic oligonucleotide; CTT chr11 5286724 5286745 5286729 5286724 -
tgctcactatccaataaatatt

SEQ ID NO: 133244 - DNA, 22 bp, Artificial Sequence
  Synthetic oligonucleotide; TTT chr11 5286723 5286744 5286728 5286723 -
gctcactatccaataaatattt

SEQ ID NO: 133245 - DNA, 22 bp, Artificial Sequence
  Synthetic oligonucleotide; TTG chr11 5286722 5286743 5286727 5286722 -
ctcactatccaataaatattta

SEQ ID NO: 133246 - DNA, 22 bp, Artificial Sequence
  Synthetic oligonucleotide; CTC chr11 5286719 5286740 5286724 5286719 -
actatccaataaatatttattg

SEQ ID NO: 133247 - DNA, 22 bp, Artificial Sequence
  Synthetic oligonucleotide; CTA chr11 5286715 5286736 5286720 5286715 -
tccaataaatatttattgacat

SEQ ID NO: 133248 - DNA, 22 bp, Artificial Sequence
  Synthetic oligonucleotide; TTT chr11 5286701 5286722 5286706 5286701 -
attgacatgtacttcttggcag

SEQ ID NO: 133249 - DNA, 22 bp, Artificial Sequence
  Synthetic oligonucleotide; TTA chr11 5286700 5286721 5286705 5286700 -
ttgacatgtacttcttggcagt

SEQ ID NO: 133250 - DNA, 22 bp, Artificial Sequence
  Synthetic oligonucleotide; TTG chr11 5286697 5286718 5286702 5286697 -
acatgtacttcttggcagtctg

SEQ ID NO: 133251 - DNA, 22 bp, Artificial Sequence
  Synthetic oligonucleotide; CTT chr11 5286687 5286708 5286692 5286687 -
cttggcagtctgtatgctggat

SEQ ID NO: 133252 - DNA, 22 bp, Artificial Sequence
  Synthetic oligonucleotide; TTC chr11 5286686 5286707 5286691 5286686 -
ttggcagtctgtatgctggatg

SEQ ID NO: 133253 - DNA, 22 bp, Artificial Sequence
  Synthetic oligonucleotide; CTT chr11 5286684 5286705 5286689 5286684 -
ggcagtctgtatgctggatgct

SEQ ID NO: 133254 - DNA, 22 bp, Artificial Sequence
  Synthetic oligonucleotide; TTG chr11 5286683 5286704 5286688 5286683 -
gcagtctgtatgctggatgctg

SEQ ID NO: 133255 - DNA, 22 bp, Artificial Sequence
  Synthetic oligonucleotide; CTG chr11 5286675 5286696 5286680 5286675 -
tatgctggatgctggggataca

SEQ ID NO: 133256 - DNA, 22 bp, Artificial Sequence
  Synthetic oligonucleotide; CTG chr11 5286668 5286689 5286673 5286668 -
gatgctggggatacaaagatgt

SEQ ID NO: 133257 - DNA, 22 bp, Artificial Sequence
  Synthetic oligonucleotide; CTG chr11 5286661 5286682 5286666 5286661 -
gggatacaaagatgtttaaatt

SEQ ID NO: 133258 - DNA, 22 bp, Artificial Sequence
  Synthetic oligonucleotide; TTT chr11 5286644 5286665 5286649 5286644 -
aaatttaagctccagtctctgc

SEQ ID NO: 133259 - DNA, 22 bp, Artificial Sequence
  Synthetic oligonucleotide; TTA chr11 5286643 5286664 5286648 5286643 -
aatttaagctccagtctctgct

SEQ ID NO: 133260 - DNA, 22 bp, Artificial Sequence
  Synthetic oligonucleotide; TTT chr11 5286638 5286659 5286643 5286638 -
aagctccagtctctgcttccaa

SEQ ID NO: 133261 - DNA, 22 bp, Artificial Sequence
  Synthetic oligonucleotide; TTA chr11 5286637 5286658 5286642 5286637 -
agctccagtctctgcttccaaa

SEQ ID NO: 133262 - DNA, 22 bp, Artificial Sequence
  Synthetic oligonucleotide; CTC chr11 5286632 5286653 5286637 5286632 -
cagtctctgcttccaaaggcct

SEQ ID NO: 133263 - DNA, 22 bp, Artificial Sequence
  Synthetic oligonucleotide; CTC chr11 5286625 5286646 5286630 5286625 -
tgcttccaaaggcctcccaggc

SEQ ID NO: 133264 - DNA, 22 bp, Artificial Sequence
  Synthetic oligonucleotide; CTG chr11 5286623 5286644 5286628 5286623 -
cttccaaaggcctcccaggcca

SEQ ID NO: 133265 - DNA, 22 bp, Artificial Sequence
  Synthetic oligonucleotide; CTT chr11 5286620 5286641 5286625 5286620 -
ccaaaggcctcccaggccaagt

SEQ ID NO: 133266 - DNA, 22 bp, Artificial Sequence
  Synthetic oligonucleotide; TTC chr11 5286619 5286640 5286624 5286619 -
caaaggcctcccaggccaagtt

SEQ ID NO: 133267 - DNA, 22 bp, Artificial Sequence
  Synthetic oligonucleotide; CTC chr11 5286609 5286630 5286614 5286609 -
ccaggccaagttatccattcag

SEQ ID NO: 133268 - DNA, 22 bp, Artificial Sequence
  Synthetic oligonucleotide; TTA chr11 5286596 5286617 5286601 5286596 -
tccattcagaaagcatttttta

SEQ ID NO: 133269 - DNA, 22 bp, Artificial Sequence
  Synthetic oligonucleotide; TTC chr11 5286589 5286610 5286594 5286589 -
agaaagcattttttactctttg

SEQ ID NO: 133270 - DNA, 22 bp, Artificial Sequence
  Synthetic oligonucleotide; TTT chr11 5286578 5286599 5286583 5286578 -
tttactctttgcattccactgt

SEQ ID NO: 133271 - DNA, 22 bp, Artificial Sequence
  Synthetic oligonucleotide; TTT chr11 5286577 5286598 5286582 5286577 -
ttactctttgcattccactgtt

SEQ ID NO: 133272 - DNA, 22 bp, Artificial Sequence
  Synthetic oligonucleotide; TTT chr11 5286576 5286597 5286581 5286576 -
tactctttgcattccactgttt

SEQ ID NO: 133273 - DNA, 22 bp, Artificial Sequence
  Synthetic oligonucleotide; TTT chr11 5286575 5286596 5286580 5286575 -
actctttgcattccactgtttt

SEQ ID NO: 133274 - DNA, 22 bp, Artificial Sequence
  Synthetic oligonucleotide; TTA chr11 5286574 5286595 5286579 5286574 -
ctctttgcattccactgttttt

SEQ ID NO: 133275 - DNA, 22 bp, Artificial Sequence
  Synthetic oligonucleotide; CTC chr11 5286571 5286592 5286576 5286571 -
tttgcattccactgtttttcct

SEQ ID NO: 133276 - DNA, 22 bp, Artificial Sequence
  Synthetic oligonucleotide; CTT chr11 5286569 5286590 5286574 5286569 -
tgcattccactgtttttcctaa

SEQ ID NO: 133277 - DNA, 22 bp, Artificial Sequence
  Synthetic oligonucleotide; TTT chr11 5286568 5286589 5286573 5286568 -
gcattccactgtttttcctaag

SEQ ID NO: 133278 - DNA, 22 bp, Artificial Sequence
  Synthetic oligonucleotide; TTG chr11 5286567 5286588 5286572 5286567 -
cattccactgtttttcctaagt

SEQ ID NO: 133279 - DNA, 22 bp, Artificial Sequence
  Synthetic oligonucleotide; TTC chr11 5286562 5286583 5286567 5286562 -
cactgtttttcctaagtgacta

SEQ ID NO: 133280 - DNA, 22 bp, Artificial Sequence
  Synthetic oligonucleotide; CTG chr11 5286557 5286578 5286562 5286557 -
tttttcctaagtgactaaaaaa

SEQ ID NO: 133281 - DNA, 22 bp, Artificial Sequence
  Synthetic oligonucleotide; TTT chr11 5286554 5286575 5286559 5286554 -
ttcctaagtgactaaaaaatta

SEQ ID NO: 133282 - DNA, 22 bp, Artificial Sequence
  Synthetic oligonucleotide; TTT chr11 5286553 5286574 5286558 5286553 -
tcctaagtgactaaaaaattac

SEQ ID NO: 133283 - DNA, 22 bp, Artificial Sequence
  Synthetic oligonucleotide; TTT chr11 5286552 5286573 5286557 5286552 -
cctaagtgactaaaaaattaca

SEQ ID NO: 133284 - DNA, 22 bp, Artificial Sequence
  Synthetic oligonucleotide; TTC chr11 5286551 5286572 5286556 5286551 -
ctaagtgactaaaaaattacac

SEQ ID NO: 133285 - DNA, 22 bp, Artificial Sequence
  Synthetic oligonucleotide; CTA chr11 5286548 5286569 5286553 5286548 -
agtgactaaaaaattacacttt

SEQ ID NO: 133286 - DNA, 22 bp, Artificial Sequence
  Synthetic oligonucleotide; CTA chr11 5286540 5286561 5286545 5286540 -
aaaaattacactttattcgtct

SEQ ID NO: 133287 - DNA, 22 bp, Artificial Sequence
  Synthetic oligonucleotide; TTA chr11 5286532 5286553 5286537 5286532 -
cactttattcgtctgtgtcctg

SEQ ID NO: 133288 - DNA, 22 bp, Artificial Sequence
  Synthetic oligonucleotide; CTT chr11 5286527 5286548 5286532 5286527 -
tattcgtctgtgtcctgctctg

SEQ ID NO: 133289 - DNA, 22 bp, Artificial Sequence
  Synthetic oligonucleotide; TTT chr11 5286526 5286547 5286531 5286526 -
attcgtctgtgtcctgctctgg

SEQ ID NO: 133290 - DNA, 22 bp, Artificial Sequence
  Synthetic oligonucleotide; TTA chr11 5286525 5286546 5286530 5286525 -
ttcgtctgtgtcctgctctggg

SEQ ID NO: 133291 - DNA, 22 bp, Artificial Sequence
  Synthetic oligonucleotide; TTC chr11 5286522 5286543 5286527 5286522 -
gtctgtgtcctgctctgggatg

SEQ ID NO: 133292 - DNA, 22 bp, Artificial Sequence
  Synthetic oligonucleotide; CTG chr11 5286517 5286538 5286522 5286517 -
tgtcctgctctgggatgatagt

SEQ ID NO: 133293 - DNA, 22 bp, Artificial Sequence
  Synthetic oligonucleotide; CTG chr11 5286510 5286531 5286515 5286510 -
ctctgggatgatagtctgactt

SEQ ID NO: 133294 - DNA, 22 bp, Artificial Sequence
  Synthetic oligonucleotide; CTC chr11 5286507 5286528 5286512 5286507 -
tgggatgatagtctgactttcc

SEQ ID NO: 133295 - DNA, 22 bp, Artificial Sequence
  Synthetic oligonucleotide; CTG chr11 5286505 5286526 5286510 5286505 -
ggatgatagtctgactttccta

SEQ ID NO: 133296 - DNA, 22 bp, Artificial Sequence
  Synthetic oligonucleotide; CTG chr11 5286492 5286513 5286497 5286492 -
actttcctaacctgagcctaac

SEQ ID NO: 133297 - DNA, 22 bp, Artificial Sequence
  Synthetic oligonucleotide; CTT chr11 5286488 5286509 5286493 5286488 -
tcctaacctgagcctaacatcc

SEQ ID NO: 133298 - DNA, 22 bp, Artificial Sequence
  Synthetic oligonucleotide; TTT chr11 5286487 5286508 5286492 5286487 -
cctaacctgagcctaacatccc

SEQ ID NO: 133299 - DNA, 22 bp, Artificial Sequence
  Synthetic oligonucleotide; TTC chr11 5286486 5286507 5286491 5286486 -
ctaacctgagcctaacatccct

SEQ ID NO: 133300 - DNA, 22 bp, Artificial Sequence
  Synthetic oligonucleotide; CTA chr11 5286483 5286504 5286488 5286483 -
acctgagcctaacatccctgac

SEQ ID NO: 133301 - DNA, 22 bp, Artificial Sequence
  Synthetic oligonucleotide; CTG chr11 5286478 5286499 5286483 5286478 -
agcctaacatccctgacatcag

SEQ ID NO: 133302 - DNA, 22 bp, Artificial Sequence
  Synthetic oligonucleotide; CTA chr11 5286472 5286493 5286477 5286472 -
acatccctgacatcaggaaaga

SEQ ID NO: 133303 - DNA, 22 bp, Artificial Sequence
  Synthetic oligonucleotide; CTG chr11 5286463 5286484 5286468 5286463 -
acatcaggaaagactacaccat

SEQ ID NO: 133304 - DNA, 22 bp, Artificial Sequence
  Synthetic oligonucleotide; CTA chr11 5286447 5286468 5286452 5286447 -
caccatgtggagaaggggtggt

SEQ ID NO: 133305 - DNA, 22 bp, Artificial Sequence
  Synthetic oligonucleotide; TTT chr11 5286420 5286441 5286425 5286420 -
tgattgctgctgtcttcagtta

SEQ ID NO: 133306 - DNA, 22 bp, Artificial Sequence
  Synthetic oligonucleotide; TTT chr11 5286419 5286440 5286424 5286419 -
gattgctgctgtcttcagttag

SEQ ID NO: 133307 - DNA, 22 bp, Artificial Sequence
  Synthetic oligonucleotide; TTG chr11 5286418 5286439 5286423 5286418 -
attgctgctgtcttcagttaga

SEQ ID NO: 133308 - DNA, 22 bp, Artificial Sequence
  Synthetic oligonucleotide; TTG chr11 5286414 5286435 5286419 5286414 -
ctgctgtcttcagttagatggt

SEQ ID NO: 133309 - DNA, 22 bp, Artificial Sequence
  Synthetic oligonucleotide; CTG chr11 5286411 5286432 5286416 5286411 -
ctgtcttcagttagatggttaa

SEQ ID NO: 133310 - DNA, 22 bp, Artificial Sequence
  Synthetic oligonucleotide; CTG chr11 5286408 5286429 5286413 5286408 -
tcttcagttagatggttaactt

SEQ ID NO: 133311 - DNA, 22 bp, Artificial Sequence
  Synthetic oligonucleotide; CTT chr11 5286404 5286425 5286409 5286404 -
cagttagatggttaactttgtg

SEQ ID NO: 133312 - DNA, 22 bp, Artificial Sequence
  Synthetic oligonucleotide; TTC chr11 5286403 5286424 5286408 5286403 -
agttagatggttaactttgtga

SEQ ID NO: 133313 - DNA, 22 bp, Artificial Sequence
  Synthetic oligonucleotide; TTA chr11 5286398 5286419 5286403 5286398 -
gatggttaactttgtgaagttg

SEQ ID NO: 133314 - DNA, 22 bp, Artificial Sequence
  Synthetic oligonucleotide; TTA chr11 5286390 5286411 5286395 5286390 -
actttgtgaagttgaaaactgt

SEQ ID NO: 133315 - DNA, 22 bp, Artificial Sequence
  Synthetic oligonucleotide; CTT chr11 5286386 5286407 5286391 5286386 -
tgtgaagttgaaaactgtggct

SEQ ID NO: 133316 - DNA, 22 bp, Artificial Sequence
  Synthetic oligonucleotide; TTT chr11 5286385 5286406 5286390 5286385 -
gtgaagttgaaaactgtggctc

SEQ ID NO: 133317 - DNA, 22 bp, Artificial Sequence
  Synthetic oligonucleotide; TTG chr11 5286384 5286405 5286389 5286384 -
tgaagttgaaaactgtggctct

SEQ ID NO: 133318 - DNA, 22 bp, Artificial Sequence
  Synthetic oligonucleotide; TTG chr11 5286376 5286397 5286381 5286376 -
aaaactgtggctctctggttga

SEQ ID NO: 133319 - DNA, 22 bp, Artificial Sequence
  Synthetic oligonucleotide; CTG chr11 5286369 5286390 5286374 5286369 -
tggctctctggttgactgttag

SEQ ID NO: 133320 - DNA, 22 bp, Artificial Sequence
  Synthetic oligonucleotide; CTC chr11 5286363 5286384 5286368 5286363 -
tctggttgactgttagagttct

SEQ ID NO: 133321 - DNA, 22 bp, Artificial Sequence
  Synthetic oligonucleotide; CTC chr11 5286361 5286382 5286366 5286361 -
tggttgactgttagagttctgg

SEQ ID NO: 133322 - DNA, 22 bp, Artificial Sequence
  Synthetic oligonucleotide; CTG chr11 5286359 5286380 5286364 5286359 -
gttgactgttagagttctggca

SEQ ID NO: 133323 - DNA, 22 bp, Artificial Sequence
  Synthetic oligonucleotide; TTG chr11 5286355 5286376 5286360 5286355 -
actgttagagttctggcacttg

SEQ ID NO: 133324 - DNA, 22 bp, Artificial Sequence
  Synthetic oligonucleotide; CTG chr11 5286351 5286372 5286356 5286351 -
ttagagttctggcacttgtcac

SEQ ID NO: 133325 - DNA, 22 bp, Artificial Sequence
  Synthetic oligonucleotide; TTA chr11 5286348 5286369 5286353 5286348 -
gagttctggcacttgtcactat

SEQ ID NO: 133326 - DNA, 22 bp, Artificial Sequence
  Synthetic oligonucleotide; TTC chr11 5286342 5286363 5286347 5286342 -
tggcacttgtcactatgcctat

SEQ ID NO: 133327 - DNA, 22 bp, Artificial Sequence
  Synthetic oligonucleotide; CTG chr11 5286340 5286361 5286345 5286340 -
gcacttgtcactatgcctatta

SEQ ID NO: 133328 - DNA, 22 bp, Artificial Sequence
  Synthetic oligonucleotide; CTT chr11 5286334 5286355 5286339 5286334 -
gtcactatgcctattatttaac

SEQ ID NO: 133329 - DNA, 22 bp, Artificial Sequence
  Synthetic oligonucleotide; TTG chr11 5286333 5286354 5286338 5286333 -
tcactatgcctattatttaaca

SEQ ID NO: 133330 - DNA, 22 bp, Artificial Sequence
  Synthetic oligonucleotide; CTA chr11 5286327 5286348 5286332 5286327 -
tgcctattatttaacaaatgca

SEQ ID NO: 133331 - DNA, 22 bp, Artificial Sequence
  Synthetic oligonucleotide; CTA chr11 5286321 5286342 5286326 5286321 -
ttatttaacaaatgcatgaatg

SEQ ID NO: 133332 - DNA, 22 bp, Artificial Sequence
  Synthetic oligonucleotide; TTA chr11 5286318 5286339 5286323 5286318 -
tttaacaaatgcatgaatgctt

SEQ ID NO: 133333 - DNA, 22 bp, Artificial Sequence
  Synthetic oligonucleotide; TTT chr11 5286315 5286336 5286320 5286315 -
aacaaatgcatgaatgcttcag

SEQ ID NO: 133334 - DNA, 22 bp, Artificial Sequence
  Synthetic oligonucleotide; TTA chr11 5286314 5286335 5286319 5286314 -
acaaatgcatgaatgcttcaga

SEQ ID NO: 133335 - DNA, 22 bp, Artificial Sequence
  Synthetic oligonucleotide; CTT chr11 5286296 5286317 5286301 5286296 -
cagaatatgggaatattatctt

SEQ ID NO: 133336 - DNA, 22 bp, Artificial Sequence
  Synthetic oligonucleotide; TTC chr11 5286295 5286316 5286300 5286295 -
agaatatgggaatattatcttc

SEQ ID NO: 133337 - DNA, 22 bp, Artificial Sequence
  Synthetic oligonucleotide; TTA chr11 5286278 5286299 5286283 5286278 -
tcttctggaatagggaatcaag

SEQ ID NO: 133338 - DNA, 22 bp, Artificial Sequence
  Synthetic oligonucleotide; CTT chr11 5286274 5286295 5286279 5286274 -
ctggaatagggaatcaagttat

SEQ ID NO: 133339 - DNA, 22 bp, Artificial Sequence
  Synthetic oligonucleotide; TTC chr11 5286273 5286294 5286278 5286273 -
tggaatagggaatcaagttata

SEQ ID NO: 133340 - DNA, 22 bp, Artificial Sequence
  Synthetic oligonucleotide; CTG chr11 5286271 5286292 5286276 5286271 -
gaatagggaatcaagttatatt

SEQ ID NO: 133341 - DNA, 22 bp, Artificial Sequence
  Synthetic oligonucleotide; TTA chr11 5286253 5286274 5286258 5286253 -
tattatgtaacccaggattaga

SEQ ID NO: 133342 - DNA, 22 bp, Artificial Sequence
  Synthetic oligonucleotide; TTA chr11 5286248 5286269 5286253 5286248 -
tgtaacccaggattagaagatt

SEQ ID NO: 133343 - DNA, 22 bp, Artificial Sequence
  Synthetic oligonucleotide; TTA chr11 5286233 5286254 5286238 5286233 -
gaagattcttctgtgtgtaaga

SEQ ID NO: 133344 - DNA, 22 bp, Artificial Sequence
  Synthetic oligonucleotide; TTC chr11 5286225 5286246 5286230 5286225 -
ttctgtgtgtaagaatttcata

SEQ ID NO: 133345 - DNA, 22 bp, Artificial Sequence
  Synthetic oligonucleotide; CTT chr11 5286223 5286244 5286228 5286223 -
ctgtgtgtaagaatttcataaa

SEQ ID NO: 133346 - DNA, 22 bp, Artificial Sequence
  Synthetic oligonucleotide; TTC chr11 5286222 5286243 5286227 5286222 -
tgtgtgtaagaatttcataaac

SEQ ID NO: 133347 - DNA, 22 bp, Artificial Sequence
  Synthetic oligonucleotide; CTG chr11 5286220 5286241 5286225 5286220 -
tgtgtaagaatttcataaacat

SEQ ID NO: 133348 - DNA, 22 bp, Artificial Sequence
  Synthetic oligonucleotide; TTT chr11 5286207 5286228 5286212 5286207 -
cataaacattaagctgtctagc

SEQ ID NO: 133349 - DNA, 22 bp, Artificial Sequence
  Synthetic oligonucleotide; TTC chr11 5286206 5286227 5286211 5286206 -
ataaacattaagctgtctagca

SEQ ID NO: 133350 - DNA, 22 bp, Artificial Sequence
  Synthetic oligonucleotide; TTA chr11 5286196 5286217 5286201 5286196 -
agctgtctagcaaaagcaaggg

SEQ ID NO: 133351 - DNA, 22 bp, Artificial Sequence
  Synthetic oligonucleotide; CTG chr11 5286191 5286212 5286196 5286191 -
tctagcaaaagcaagggcttgg

SEQ ID NO: 133352 - DNA, 22 bp, Artificial Sequence
  Synthetic oligonucleotide; CTA chr11 5286187 5286208 5286192 5286187 -
gcaaaagcaagggcttggaaaa

SEQ ID NO: 133353 - DNA, 22 bp, Artificial Sequence
  Synthetic oligonucleotide; CTT chr11 5286171 5286192 5286176 5286171 -
ggaaaatctgtgagctcctcac

SEQ ID NO: 133354 - DNA, 22 bp, Artificial Sequence
  Synthetic oligonucleotide; TTG chr11 5286170 5286191 5286175 5286170 -
gaaaatctgtgagctcctcacc

SEQ ID NO: 133355 - DNA, 22 bp, Artificial Sequence
  Synthetic oligonucleotide; CTG chr11 5286161 5286182 5286166 5286161 -
tgagctcctcaccatatagaaa

SEQ ID NO: 133356 - DNA, 22 bp, Artificial Sequence
  Synthetic oligonucleotide; CTC chr11 5286154 5286175 5286159 5286154 -
ctcaccatatagaaagctttta

SEQ ID NO: 133357 - DNA, 22 bp, Artificial Sequence
  Synthetic oligonucleotide; CTC chr11 5286151 5286172 5286156 5286151 -
accatatagaaagcttttaacc

SEQ ID NO: 133358 - DNA, 22 bp, Artificial Sequence
  Synthetic oligonucleotide; CTT chr11 5286135 5286156 5286140 5286135 -
ttaacccatcattgaataaatc

SEQ ID NO: 133359 - DNA, 22 bp, Artificial Sequence
  Synthetic oligonucleotide; TTT chr11 5286134 5286155 5286139 5286134 -
taacccatcattgaataaatcc

SEQ ID NO: 133360 - DNA, 22 bp, Artificial Sequence
  Synthetic oligonucleotide; TTT chr11 5286133 5286154 5286138 5286133 -
aacccatcattgaataaatccc

SEQ ID NO: 133361 - DNA, 22 bp, Artificial Sequence
  Synthetic oligonucleotide; TTA chr11 5286132 5286153 5286137 5286132 -
acccatcattgaataaatccct

SEQ ID NO: 133362 - DNA, 22 bp, Artificial Sequence
  Synthetic oligonucleotide; TTG chr11 5286121 5286142 5286126 5286121 -
aataaatccctataggggattt

SEQ ID NO: 133363 - DNA, 22 bp, Artificial Sequence
  Synthetic oligonucleotide; CTA chr11 5286109 5286130 5286114 5286109 -
taggggatttctaccctgagca

SEQ ID NO: 133364 - DNA, 22 bp, Artificial Sequence
  Synthetic oligonucleotide; TTT chr11 5286099 5286120 5286104 5286099 -
ctaccctgagcaaaaggctggt

SEQ ID NO: 133365 - DNA, 22 bp, Artificial Sequence
  Synthetic oligonucleotide; TTC chr11 5286098 5286119 5286103 5286098 -
taccctgagcaaaaggctggtc

SEQ ID NO: 133366 - DNA, 22 bp, Artificial Sequence
  Synthetic oligonucleotide; CTA chr11 5286096 5286117 5286101 5286096 -
ccctgagcaaaaggctggtctt

SEQ ID NO: 133367 - DNA, 22 bp, Artificial Sequence
  Synthetic oligonucleotide; CTG chr11 5286091 5286112 5286096 5286091 -
agcaaaaggctggtcttgatta

SEQ ID NO: 133368 - DNA, 22 bp, Artificial Sequence
  Synthetic oligonucleotide; CTG chr11 5286079 5286100 5286084 5286079 -
gtcttgattaattcccaaactc

SEQ ID NO: 133369 - DNA, 22 bp, Artificial Sequence
  Synthetic oligonucleotide; CTT chr11 5286074 5286095 5286079 5286074 -
gattaattcccaaactcatata

SEQ ID NO: 133370 - DNA, 22 bp, Artificial Sequence
  Synthetic oligonucleotide; TTG chr11 5286073 5286094 5286078 5286073 -
attaattcccaaactcatatag

SEQ ID NO: 133371 - DNA, 22 bp, Artificial Sequence
  Synthetic oligonucleotide; TTA chr11 5286069 5286090 5286074 5286069 -
attcccaaactcatatagctct

SEQ ID NO: 133372 - DNA, 22 bp, Artificial Sequence
  Synthetic oligonucleotide; TTC chr11 5286065 5286086 5286070 5286065 -
ccaaactcatatagctctgaga

SEQ ID NO: 133373 - DNA, 22 bp, Artificial Sequence
  Synthetic oligonucleotide; CTC chr11 5286057 5286078 5286062 5286057 -
atatagctctgagaaagtctat

SEQ ID NO: 133374 - DNA, 22 bp, Artificial Sequence
  Synthetic oligonucleotide; CTC chr11 5286048 5286069 5286053 5286048 -
tgagaaagtctatgctgttaac

SEQ ID NO: 133375 - DNA, 22 bp, Artificial Sequence
  Synthetic oligonucleotide; CTG chr11 5286046 5286067 5286051 5286046 -
agaaagtctatgctgttaacgt

SEQ ID NO: 133376 - DNA, 22 bp, Artificial Sequence
  Synthetic oligonucleotide; CTA chr11 5286036 5286057 5286041 5286036 -
tgctgttaacgttttcttgtct

SEQ ID NO: 133377 - DNA, 22 bp, Artificial Sequence
  Synthetic oligonucleotide; CTG chr11 5286031 5286052 5286036 5286031 -
ttaacgttttcttgtctgctac

SEQ ID NO: 133378 - DNA, 22 bp, Artificial Sequence
  Synthetic oligonucleotide; TTA chr11 5286028 5286049 5286033 5286028 -
acgttttcttgtctgctacccc

SEQ ID NO: 133379 - DNA, 22 bp, Artificial Sequence
  Synthetic oligonucleotide; TTT chr11 5286022 5286043 5286027 5286022 -
tcttgtctgctaccccatcata

SEQ ID NO: 133380 - DNA, 22 bp, Artificial Sequence
  Synthetic oligonucleotide; TTT chr11 5286021 5286042 5286026 5286021 -
cttgtctgctaccccatcatat

SEQ ID NO: 133381 - DNA, 22 bp, Artificial Sequence
  Synthetic oligonucleotide; TTC chr11 5286020 5286041 5286025 5286020 -
ttgtctgctaccccatcatatg

SEQ ID NO: 133382 - DNA, 22 bp, Artificial Sequence
  Synthetic oligonucleotide; CTT chr11 5286018 5286039 5286023 5286018 -
gtctgctaccccatcatatgca

SEQ ID NO: 133383 - DNA, 22 bp, Artificial Sequence
  Synthetic oligonucleotide; TTG chr11 5286017 5286038 5286022 5286017 -
tctgctaccccatcatatgcac

SEQ ID NO: 133384 - DNA, 22 bp, Artificial Sequence
  Synthetic oligonucleotide; CTG chr11 5286013 5286034 5286018 5286013 -
ctaccccatcatatgcacaaca

SEQ ID NO: 133385 - DNA, 22 bp, Artificial Sequence
  Synthetic oligonucleotide; CTA chr11 5286010 5286031 5286015 5286010 -
ccccatcatatgcacaacaata

SEQ ID NO: 133386 - DNA, 22 bp, Artificial Sequence
  Synthetic oligonucleotide; CTA chr11 5285976 5285997 5285981 5285976 -
ggcatgactgaaggctctctca

SEQ ID NO: 133387 - DNA, 22 bp, Artificial Sequence
  Synthetic oligonucleotide; CTG chr11 5285966 5285987 5285971 5285966 -
aaggctctctcataattcttgg

SEQ ID NO: 133388 - DNA, 22 bp, Artificial Sequence
  Synthetic oligonucleotide; CTC chr11 5285959 5285980 5285964 5285959 -
tctcataattcttggttgcatg

SEQ ID NO: 133389 - DNA, 22 bp, Artificial Sequence
  Synthetic oligonucleotide; CTC chr11 5285957 5285978 5285962 5285957 -
tcataattcttggttgcatgaa

SEQ ID NO: 133390 - DNA, 22 bp, Artificial Sequence
  Synthetic oligonucleotide; CTC chr11 5285955 5285976 5285960 5285955 -
ataattcttggttgcatgaatc

SEQ ID NO: 133391 - DNA, 22 bp, Artificial Sequence
  Synthetic oligonucleotide; TTC chr11 5285948 5285969 5285953 5285948 -
ttggttgcatgaatcagattat

SEQ ID NO: 133392 - DNA, 22 bp, Artificial Sequence
  Synthetic oligonucleotide; CTT chr11 5285946 5285967 5285951 5285946 -
ggttgcatgaatcagattatca

SEQ ID NO: 133393 - DNA, 22 bp, Artificial Sequence
  Synthetic oligonucleotide; TTG chr11 5285945 5285966 5285950 5285945 -
gttgcatgaatcagattatcaa

SEQ ID NO: 133394 - DNA, 22 bp, Artificial Sequence
  Synthetic oligonucleotide; TTG chr11 5285941 5285962 5285946 5285941 -
catgaatcagattatcaacaga

SEQ ID NO: 133395 - DNA, 22 bp, Artificial Sequence
  Synthetic oligonucleotide; TTA chr11 5285927 5285948 5285932 5285927 -
tcaacagaaatgttgagacaaa

SEQ ID NO: 133396 - DNA, 22 bp, Artificial Sequence
  Synthetic oligonucleotide; TTG chr11 5285912 5285933 5285917 5285912 -
agacaaactatggggaagcagg

SEQ ID NO: 133397 - DNA, 22 bp, Artificial Sequence
  Synthetic oligonucleotide; CTA chr11 5285902 5285923 5285907 5285902 -
tggggaagcagggtatgaaaga

SEQ ID NO: 133398 - DNA, 22 bp, Artificial Sequence
  Synthetic oligonucleotide; CTC chr11 5285876 5285897 5285881 5285876 -
tgaatgaaatggaaaccgcaat

SEQ ID NO: 133399 - DNA, 22 bp, Artificial Sequence
  Synthetic oligonucleotide; CTG chr11 5285874 5285895 5285879 5285874 -
aatgaaatggaaaccgcaatgc

SEQ ID NO: 133400 - DNA, 22 bp, Artificial Sequence
  Synthetic oligonucleotide; CTT chr11 5285850 5285871 5285855 5285850 -
cctgcccattcagggctccagc

SEQ ID NO: 133401 - DNA, 22 bp, Artificial Sequence
  Synthetic oligonucleotide; TTC chr11 5285849 5285870 5285854 5285849 -
ctgcccattcagggctccagca

SEQ ID NO: 133402 - DNA, 22 bp, Artificial Sequence
  Synthetic oligonucleotide; CTG chr11 5285846 5285867 5285851 5285846 -
cccattcagggctccagcatgt

SEQ ID NO: 133403 - DNA, 22 bp, Artificial Sequence
  Synthetic oligonucleotide; TTC chr11 5285839 5285860 5285844 5285839 -
agggctccagcatgtagaaatc

SEQ ID NO: 133404 - DNA, 22 bp, Artificial Sequence
  Synthetic oligonucleotide; CTC chr11 5285832 5285853 5285837 5285832 -
cagcatgtagaaatctggggct

SEQ ID NO: 133405 - DNA, 22 bp, Artificial Sequence
  Synthetic oligonucleotide; CTG chr11 5285815 5285836 5285820 5285815 -
gggctttgtgaagactggctta

SEQ ID NO: 133406 - DNA, 22 bp, Artificial Sequence
  Synthetic oligonucleotide; CTT chr11 5285809 5285830 5285814 5285809 -
tgtgaagactggcttaaaatca

SEQ ID NO: 133407 - DNA, 22 bp, Artificial Sequence
  Synthetic oligonucleotide; TTT chr11 5285808 5285829 5285813 5285808 -
gtgaagactggcttaaaatcag

SEQ ID NO: 133408 - DNA, 22 bp, Artificial Sequence
  Synthetic oligonucleotide; TTG chr11 5285807 5285828 5285812 5285807 -
tgaagactggcttaaaatcaga

SEQ ID NO: 133409 - DNA, 22 bp, Artificial Sequence
  Synthetic oligonucleotide; CTG chr11 5285798 5285819 5285803 5285798 -
gcttaaaatcagaagccccatt

SEQ ID NO: 133410 - DNA, 22 bp, Artificial Sequence
  Synthetic oligonucleotide; CTT chr11 5285794 5285815 5285799 5285794 -
aaaatcagaagccccattggat

SEQ ID NO: 133411 - DNA, 22 bp, Artificial Sequence
  Synthetic oligonucleotide; TTA chr11 5285793 5285814 5285798 5285793 -
aaatcagaagccccattggata

SEQ ID NO: 133412 - DNA, 22 bp, Artificial Sequence
  Synthetic oligonucleotide; TTG chr11 5285775 5285796 5285780 5285775 -
gataagagtagggaagaaccta

SEQ ID NO: 133413 - DNA, 22 bp, Artificial Sequence
  Synthetic oligonucleotide; CTA chr11 5285753 5285774 5285758 5285753 -
gagcctacgctgagcaggtttc

SEQ ID NO: 133414 - DNA, 22 bp, Artificial Sequence
  Synthetic oligonucleotide; CTA chr11 5285746 5285767 5285751 5285746 -
cgctgagcaggtttccttcatg

SEQ ID NO: 133415 - DNA, 22 bp, Artificial Sequence
  Synthetic oligonucleotide; CTG chr11 5285741 5285762 5285746 5285741 -
agcaggtttccttcatgtgaca

SEQ ID NO: 133416 - DNA, 22 bp, Artificial Sequence
  Synthetic oligonucleotide; TTT chr11 5285732 5285753 5285737 5285732 -
ccttcatgtgacagggagcctc

SEQ ID NO: 133417 - DNA, 22 bp, Artificial Sequence
  Synthetic oligonucleotide; TTC chr11 5285731 5285752 5285736 5285731 -
cttcatgtgacagggagcctcc

SEQ ID NO: 133418 - DNA, 22 bp, Artificial Sequence
  Synthetic oligonucleotide; CTT chr11 5285728 5285749 5285733 5285728 -
catgtgacagggagcctcctgc

SEQ ID NO: 133419 - DNA, 22 bp, Artificial Sequence
  Synthetic oligonucleotide; TTC chr11 5285727 5285748 5285732 5285727 -
atgtgacagggagcctcctgcc

SEQ ID NO: 133420 - DNA, 22 bp, Artificial Sequence
  Synthetic oligonucleotide; CTC chr11 5285710 5285731 5285715 5285710 -
ctgccccgaacttccagggatc

SEQ ID NO: 133421 - DNA, 22 bp, Artificial Sequence
  Synthetic oligonucleotide; CTG chr11 5285707 5285728 5285712 5285707 -
ccccgaacttccagggatcctc

SEQ ID NO: 133422 - DNA, 22 bp, Artificial Sequence
  Synthetic oligonucleotide; CTT chr11 5285697 5285718 5285702 5285697 -
ccagggatcctctcttaagtgt

SEQ ID NO: 133423 - DNA, 22 bp, Artificial Sequence
  Synthetic oligonucleotide; TTC chr11 5285696 5285717 5285701 5285696 -
cagggatcctctcttaagtgtt

SEQ ID NO: 133424 - DNA, 22 bp, Artificial Sequence
  Synthetic oligonucleotide; CTC chr11 5285685 5285706 5285690 5285685 -
tcttaagtgtttcctgctggaa

SEQ ID NO: 133425 - DNA, 22 bp, Artificial Sequence
  Synthetic oligonucleotide; CTC chr11 5285683 5285704 5285688 5285683 -
ttaagtgtttcctgctggaatc

SEQ ID NO: 133426 - DNA, 22 bp, Artificial Sequence
  Synthetic oligonucleotide; CTT chr11 5285681 5285702 5285686 5285681 -
aagtgtttcctgctggaatctc

SEQ ID NO: 133427 - DNA, 22 bp, Artificial Sequence
  Synthetic oligonucleotide; TTA chr11 5285680 5285701 5285685 5285680 -
agtgtttcctgctggaatctcc

SEQ ID NO: 133428 - DNA, 22 bp, Artificial Sequence
  Synthetic oligonucleotide; TTT chr11 5285673 5285694 5285678 5285673 -
cctgctggaatctcctcacttc

SEQ ID NO: 133429 - DNA, 22 bp, Artificial Sequence
  Synthetic oligonucleotide; TTC chr11 5285672 5285693 5285677 5285672 -
ctgctggaatctcctcacttct

SEQ ID NO: 133430 - DNA, 22 bp, Artificial Sequence
  Synthetic oligonucleotide; CTG chr11 5285669 5285690 5285674 5285669 -
ctggaatctcctcacttctatc

SEQ ID NO: 133431 - DNA, 22 bp, Artificial Sequence
  Synthetic oligonucleotide; CTG chr11 5285666 5285687 5285671 5285666 -
gaatctcctcacttctatctgg

SEQ ID NO: 133432 - DNA, 22 bp, Artificial Sequence
  Synthetic oligonucleotide; CTC chr11 5285659 5285680 5285664 5285659 -
ctcacttctatctggaaatggt

SEQ ID NO: 133433 - DNA, 22 bp, Artificial Sequence
  Synthetic oligonucleotide; CTC chr11 5285656 5285677 5285661 5285656 -
acttctatctggaaatggtttc

SEQ ID NO: 133434 - DNA, 22 bp, Artificial Sequence
  Synthetic oligonucleotide; CTT chr11 5285652 5285673 5285657 5285652 -
ctatctggaaatggtttctcca

SEQ ID NO: 133435 - DNA, 22 bp, Artificial Sequence
  Synthetic oligonucleotide; TTC chr11 5285651 5285672 5285656 5285651 -
tatctggaaatggtttctccac

SEQ ID NO: 133436 - DNA, 22 bp, Artificial Sequence
  Synthetic oligonucleotide; CTA chr11 5285649 5285670 5285654 5285649 -
tctggaaatggtttctccacag

SEQ ID NO: 133437 - DNA, 22 bp, Artificial Sequence
  Synthetic oligonucleotide; CTG chr11 5285645 5285666 5285650 5285645 -
gaaatggtttctccacagtcca

SEQ ID NO: 133438 - DNA, 22 bp, Artificial Sequence
  Synthetic oligonucleotide; TTT chr11 5285635 5285656 5285640 5285635 -
ctccacagtccagcccctggct

SEQ ID NO: 133439 - DNA, 22 bp, Artificial Sequence
  Synthetic oligonucleotide; TTC chr11 5285634 5285655 5285639 5285634 -
tccacagtccagcccctggcta

SEQ ID NO: 133440 - DNA, 22 bp, Artificial Sequence
  Synthetic oligonucleotide; CTC chr11 5285632 5285653 5285637 5285632 -
cacagtccagcccctggctagt

SEQ ID NO: 133441 - DNA, 22 bp, Artificial Sequence
  Synthetic oligonucleotide; CTG chr11 5285616 5285637 5285621 5285616 -
gctagttgaaagagttacccat

SEQ ID NO: 133442 - DNA, 22 bp, Artificial Sequence
  Synthetic oligonucleotide; CTA chr11 5285612 5285633 5285617 5285612 -
gttgaaagagttacccatgcag

SEQ ID NO: 133443 - DNA, 22 bp, Artificial Sequence
  Synthetic oligonucleotide; TTG chr11 5285608 5285629 5285613 5285608 -
aaagagttacccatgcagaggc

SEQ ID NO: 133444 - DNA, 22 bp, Artificial Sequence
  Synthetic oligonucleotide; TTA chr11 5285599 5285620 5285604 5285599 -
cccatgcagaggccctcctagc

SEQ ID NO: 133445 - DNA, 22 bp, Artificial Sequence
  Synthetic oligonucleotide; CTC chr11 5285582 5285603 5285587 5285582 -
ctagcatccagagactagtgct

SEQ ID NO: 133446 - DNA, 22 bp, Artificial Sequence
  Synthetic oligonucleotide; CTA chr11 5285579 5285600 5285584 5285579 -
gcatccagagactagtgcttag

SEQ ID NO: 133447 - DNA, 22 bp, Artificial Sequence
  Synthetic oligonucleotide; CTA chr11 5285565 5285586 5285570 5285565 -
gtgcttagattcctactttcag

SEQ ID NO: 133448 - DNA, 22 bp, Artificial Sequence
  Synthetic oligonucleotide; CTT chr11 5285559 5285580 5285564 5285559 -
agattcctactttcagcgttgg

SEQ ID NO: 133449 - DNA, 22 bp, Artificial Sequence
  Synthetic oligonucleotide; TTA chr11 5285558 5285579 5285563 5285558 -
gattcctactttcagcgttgga

SEQ ID NO: 133450 - DNA, 22 bp, Artificial Sequence
  Synthetic oligonucleotide; TTC chr11 5285553 5285574 5285558 5285553 -
ctactttcagcgttggacaacc

SEQ ID NO: 133451 - DNA, 22 bp, Artificial Sequence
  Synthetic oligonucleotide; CTA chr11 5285550 5285571 5285555 5285550 -
ctttcagcgttggacaacctgg

SEQ ID NO: 133452 - DNA, 22 bp, Artificial Sequence
  Synthetic oligonucleotide; CTT chr11 5285547 5285568 5285552 5285547 -
tcagcgttggacaacctggatc

SEQ ID NO: 133453 - DNA, 22 bp, Artificial Sequence
  Synthetic oligonucleotide; TTT chr11 5285546 5285567 5285551 5285546 -
cagcgttggacaacctggatcc

SEQ ID NO: 133454 - DNA, 22 bp, Artificial Sequence
  Synthetic oligonucleotide; TTC chr11 5285545 5285566 5285550 5285545 -
agcgttggacaacctggatcca

SEQ ID NO: 133455 - DNA, 22 bp, Artificial Sequence
  Synthetic oligonucleotide; TTG chr11 5285538 5285559 5285543 5285538 -
gacaacctggatccacttgccc

SEQ ID NO: 133456 - DNA, 22 bp, Artificial Sequence
  Synthetic oligonucleotide; CTG chr11 5285529 5285550 5285534 5285529 -
gatccacttgcccagtgttctt

SEQ ID NO: 133457 - DNA, 22 bp, Artificial Sequence
  Synthetic oligonucleotide; CTT chr11 5285520 5285541 5285525 5285520 -
gcccagtgttcttccttagttc

SEQ ID NO: 133458 - DNA, 22 bp, Artificial Sequence
  Synthetic oligonucleotide; TTG chr11 5285519 5285540 5285524 5285519 -
cccagtgttcttccttagttcc

SEQ ID NO: 133459 - DNA, 22 bp, Artificial Sequence
  Synthetic oligonucleotide; TTC chr11 5285509 5285530 5285514 5285509 -
ttccttagttcctaccttcgac

SEQ ID NO: 133460 - DNA, 22 bp, Artificial Sequence
  Synthetic oligonucleotide; CTT chr11 5285507 5285528 5285512 5285507 -
ccttagttcctaccttcgacct

SEQ ID NO: 133461 - DNA, 22 bp, Artificial Sequence
  Synthetic oligonucleotide; TTC chr11 5285506 5285527 5285511 5285506 -
cttagttcctaccttcgacctt

SEQ ID NO: 133462 - DNA, 22 bp, Artificial Sequence
  Synthetic oligonucleotide; CTT chr11 5285503 5285524 5285508 5285503 -
agttcctaccttcgaccttgat

SEQ ID NO: 133463 - DNA, 22 bp, Artificial Sequence
  Synthetic oligonucleotide; TTA chr11 5285502 5285523 5285507 5285502 -
gttcctaccttcgaccttgatc

SEQ ID NO: 133464 - DNA, 22 bp, Artificial Sequence
  Synthetic oligonucleotide; TTC chr11 5285498 5285519 5285503 5285498 -
ctaccttcgaccttgatcctcc

SEQ ID NO: 133465 - DNA, 22 bp, Artificial Sequence
  Synthetic oligonucleotide; CTA chr11 5285495 5285516 5285500 5285495 -
ccttcgaccttgatcctccttt

SEQ ID NO: 133466 - DNA, 22 bp, Artificial Sequence
  Synthetic oligonucleotide; CTT chr11 5285491 5285512 5285496 5285491 -
cgaccttgatcctcctttatct

SEQ ID NO: 133467 - DNA, 22 bp, Artificial Sequence
  Synthetic oligonucleotide; TTC chr11 5285490 5285511 5285495 5285490 -
gaccttgatcctcctttatctt

SEQ ID NO: 133468 - DNA, 22 bp, Artificial Sequence
  Synthetic oligonucleotide; CTT chr11 5285484 5285505 5285489 5285484 -
gatcctcctttatcttcctgaa

SEQ ID NO: 133469 - DNA, 22 bp, Artificial Sequence
  Synthetic oligonucleotide; TTG chr11 5285483 5285504 5285488 5285483 -
atcctcctttatcttcctgaac

SEQ ID NO: 133470 - DNA, 22 bp, Artificial Sequence
  Synthetic oligonucleotide; CTC chr11 5285477 5285498 5285482 5285477 -
ctttatcttcctgaaccctgct

SEQ ID NO: 133471 - DNA, 22 bp, Artificial Sequence
  Synthetic oligonucleotide; CTT chr11 5285474 5285495 5285479 5285474 -
tatcttcctgaaccctgctgag

SEQ ID NO: 133472 - DNA, 22 bp, Artificial Sequence
  Synthetic oligonucleotide; TTT chr11 5285473 5285494 5285478 5285473 -
atcttcctgaaccctgctgaga

SEQ ID NO: 133473 - DNA, 22 bp, Artificial Sequence
  Synthetic oligonucleotide; TTA chr11 5285472 5285493 5285477 5285472 -
tcttcctgaaccctgctgagat

SEQ ID NO: 133474 - DNA, 22 bp, Artificial Sequence
  Synthetic oligonucleotide; CTT chr11 5285468 5285489 5285473 5285468 -
cctgaaccctgctgagatgatc

SEQ ID NO: 133475 - DNA, 22 bp, Artificial Sequence
  Synthetic oligonucleotide; TTC chr11 5285467 5285488 5285472 5285467 -
ctgaaccctgctgagatgatct

SEQ ID NO: 133476 - DNA, 22 bp, Artificial Sequence
  Synthetic oligonucleotide; CTG chr11 5285464 5285485 5285469 5285464 -
aaccctgctgagatgatctatg

SEQ ID NO: 133477 - DNA, 22 bp, Artificial Sequence
  Synthetic oligonucleotide; CTG chr11 5285457 5285478 5285462 5285457 -
ctgagatgatctatgtggggag

SEQ ID NO: 133478 - DNA, 22 bp, Artificial Sequence
  Synthetic oligonucleotide; CTG chr11 5285454 5285475 5285459 5285454 -
agatgatctatgtggggagaat

SEQ ID NO: 133479 - DNA, 22 bp, Artificial Sequence
  Synthetic oligonucleotide; CTA chr11 5285444 5285465 5285449 5285444 -
tgtggggagaatggcttctttg

SEQ ID NO: 133480 - DNA, 22 bp, Artificial Sequence
  Synthetic oligonucleotide; CTT chr11 5285427 5285448 5285432 5285427 -
ctttgagaaacatcttcttcgt

SEQ ID NO: 133481 - DNA, 22 bp, Artificial Sequence
  Synthetic oligonucleotide; TTC chr11 5285426 5285447 5285431 5285426 -
tttgagaaacatcttcttcgtt

SEQ ID NO: 133482 - DNA, 22 bp, Artificial Sequence
  Synthetic oligonucleotide; CTT chr11 5285424 5285445 5285429 5285424 -
tgagaaacatcttcttcgttag

SEQ ID NO: 133483 - DNA, 22 bp, Artificial Sequence
  Synthetic oligonucleotide; TTT chr11 5285423 5285444 5285428 5285423 -
gagaaacatcttcttcgttagt

SEQ ID NO: 133484 - DNA, 22 bp, Artificial Sequence
  Synthetic oligonucleotide; TTG chr11 5285422 5285443 5285427 5285422 -
agaaacatcttcttcgttagtg

SEQ ID NO: 133485 - DNA, 22 bp, Artificial Sequence
  Synthetic oligonucleotide; CTT chr11 5285411 5285432 5285416 5285411 -
cttcgttagtggcctgcccctc

SEQ ID NO: 133486 - DNA, 22 bp, Artificial Sequence
  Synthetic oligonucleotide; TTC chr11 5285410 5285431 5285415 5285410 -
ttcgttagtggcctgcccctca

SEQ ID NO: 133487 - DNA, 22 bp, Artificial Sequence
  Synthetic oligonucleotide; CTT chr11 5285408 5285429 5285413 5285408 -
cgttagtggcctgcccctcatt

SEQ ID NO: 133488 - DNA, 22 bp, Artificial Sequence
  Synthetic oligonucleotide; TTC chr11 5285407 5285428 5285412 5285407 -
gttagtggcctgcccctcattc

SEQ ID NO: 133489 - DNA, 22 bp, Artificial Sequence
  Synthetic oligonucleotide; TTA chr11 5285403 5285424 5285408 5285403 -
gtggcctgcccctcattcccac

SEQ ID NO: 133490 - DNA, 22 bp, Artificial Sequence
  Synthetic oligonucleotide; CTG chr11 5285395 5285416 5285400 5285395 -
cccctcattcccactttaatat

SEQ ID NO: 133491 - DNA, 22 bp, Artificial Sequence
  Synthetic oligonucleotide; CTC chr11 5285389 5285410 5285394 5285389 -
attcccactttaatatccagaa

SEQ ID NO: 133492 - DNA, 22 bp, Artificial Sequence
  Synthetic oligonucleotide; TTC chr11 5285385 5285406 5285390 5285385 -
ccactttaatatccagaatcac

SEQ ID NO: 133493 - DNA, 22 bp, Artificial Sequence
  Synthetic oligonucleotide; CTT chr11 5285379 5285400 5285384 5285379 -
taatatccagaatcactataag

SEQ ID NO: 133494 - DNA, 22 bp, Artificial Sequence
  Synthetic oligonucleotide; TTT chr11 5285378 5285399 5285383 5285378 -
aatatccagaatcactataaga

SEQ ID NO: 133495 - DNA, 22 bp, Artificial Sequence
  Synthetic oligonucleotide; TTA chr11 5285377 5285398 5285382 5285377 -
atatccagaatcactataagaa

SEQ ID NO: 133496 - DNA, 22 bp, Artificial Sequence
  Synthetic oligonucleotide; CTA chr11 5285361 5285382 5285366 5285361 -
taagaagaatataataagagga

SEQ ID NO: 133497 - DNA, 22 bp, Artificial Sequence
  Synthetic oligonucleotide; CTC chr11 5285332 5285353 5285337 5285332 -
ttattataggtaagggaaaatt

SEQ ID NO: 133498 - DNA, 22 bp, Artificial Sequence
  Synthetic oligonucleotide; CTT chr11 5285330 5285351 5285335 5285330 -
attataggtaagggaaaattaa

SEQ ID NO: 133499 - DNA, 22 bp, Artificial Sequence
  Synthetic oligonucleotide; TTA chr11 5285329 5285350 5285334 5285329 -
ttataggtaagggaaaattaag

SEQ ID NO: 133500 - DNA, 22 bp, Artificial Sequence
  Synthetic oligonucleotide; TTA chr11 5285326 5285347 5285331 5285326 -
taggtaagggaaaattaagagg

SEQ ID NO: 133501 - DNA, 22 bp, Artificial Sequence
  Synthetic oligonucleotide; TTA chr11 5285309 5285330 5285314 5285309 -
agaggcatacgtgatgggatga

SEQ ID NO: 133502 - DNA, 22 bp, Artificial Sequence
  Synthetic oligonucleotide; TTA chr11 5285263 5285284 5285268 5285263 -
atggacgataaaatctactact

SEQ ID NO: 133503 - DNA, 22 bp, Artificial Sequence
  Synthetic oligonucleotide; CTA chr11 5285246 5285267 5285251 5285246 -
ctactatttgttgagacctttt

SEQ ID NO: 133504 - DNA, 22 bp, Artificial Sequence
  Synthetic oligonucleotide; CTA chr11 5285243 5285264 5285248 5285243 -
ctatttgttgagaccttttata

SEQ ID NO: 133505 - DNA, 22 bp, Artificial Sequence
  Synthetic oligonucleotide; CTA chr11 5285240 5285261 5285245 5285240 -
tttgttgagaccttttatagtc

SEQ ID NO: 133506 - DNA, 22 bp, Artificial Sequence
  Synthetic oligonucleotide; TTT chr11 5285237 5285258 5285242 5285237 -
gttgagaccttttatagtctaa

SEQ ID NO: 133507 - DNA, 22 bp, Artificial Sequence
  Synthetic oligonucleotide; TTG chr11 5285236 5285257 5285241 5285236 -
ttgagaccttttatagtctaat

SEQ ID NO: 133508 - DNA, 22 bp, Artificial Sequence
  Synthetic oligonucleotide; TTG chr11 5285233 5285254 5285238 5285233 -
agaccttttatagtctaatcaa

SEQ ID NO: 133509 - DNA, 22 bp, Artificial Sequence
  Synthetic oligonucleotide; CTT chr11 5285226 5285247 5285231 5285226 -
ttatagtctaatcaattttgct

SEQ ID NO: 133510 - DNA, 22 bp, Artificial Sequence
  Synthetic oligonucleotide; TTT chr11 5285225 5285246 5285230 5285225 -
tatagtctaatcaattttgcta

SEQ ID NO: 133511 - DNA, 22 bp, Artificial Sequence
  Synthetic oligonucleotide; TTT chr11 5285224 5285245 5285229 5285224 -
atagtctaatcaattttgctat

SEQ ID NO: 133512 - DNA, 22 bp, Artificial Sequence
  Synthetic oligonucleotide; TTA chr11 5285223 5285244 5285228 5285223 -
tagtctaatcaattttgctatt

SEQ ID NO: 133513 - DNA, 22 bp, Artificial Sequence
  Synthetic oligonucleotide; CTA chr11 5285216 5285237 5285221 5285216 -
atcaattttgctattgttttcc

SEQ ID NO: 133514 - DNA, 22 bp, Artificial Sequence
  Synthetic oligonucleotide; TTT chr11 5285208 5285229 5285213 5285208 -
tgctattgttttccatcctcac

SEQ ID NO: 133515 - DNA, 22 bp, Artificial Sequence
  Synthetic oligonucleotide; TTT chr11 5285207 5285228 5285212 5285207 -
gctattgttttccatcctcacg

SEQ ID NO: 133516 - DNA, 22 bp, Artificial Sequence
  Synthetic oligonucleotide; TTG chr11 5285206 5285227 5285211 5285206 -
ctattgttttccatcctcacgc

SEQ ID NO: 133517 - DNA, 22 bp, Artificial Sequence
  Synthetic oligonucleotide; CTA chr11 5285203 5285224 5285208 5285203 -
ttgttttccatcctcacgctaa

SEQ ID NO: 133518 - DNA, 22 bp, Artificial Sequence
  Synthetic oligonucleotide; TTG chr11 5285200 5285221 5285205 5285200 -
ttttccatcctcacgctaactc

SEQ ID NO: 133519 - DNA, 22 bp, Artificial Sequence
  Synthetic oligonucleotide; TTT chr11 5285197 5285218 5285202 5285197 -
tccatcctcacgctaactccat

SEQ ID NO: 133520 - DNA, 22 bp, Artificial Sequence
  Synthetic oligonucleotide; TTT chr11 5285196 5285217 5285201 5285196 -
ccatcctcacgctaactccata

SEQ ID NO: 133521 - DNA, 22 bp, Artificial Sequence
  Synthetic oligonucleotide; TTC chr11 5285195 5285216 5285200 5285195 -
catcctcacgctaactccataa

SEQ ID NO: 133522 - DNA, 22 bp, Artificial Sequence
  Synthetic oligonucleotide; CTC chr11 5285188 5285209 5285193 5285188 -
acgctaactccataaaaaaaca

SEQ ID NO: 133523 - DNA, 22 bp, Artificial Sequence
  Synthetic oligonucleotide; CTA chr11 5285182 5285203 5285187 5285182 -
actccataaaaaaacactatta

SEQ ID NO: 133524 - DNA, 22 bp, Artificial Sequence
  Synthetic oligonucleotide; CTC chr11 5285178 5285199 5285183 5285178 -
cataaaaaaacactattattat

SEQ ID NO: 133525 - DNA, 22 bp, Artificial Sequence
  Synthetic oligonucleotide; CTA chr11 5285163 5285184 5285168 5285163 -
ttattatctttattttgccatg

SEQ ID NO: 133526 - DNA, 22 bp, Artificial Sequence
  Synthetic oligonucleotide; TTA chr11 5285160 5285181 5285165 5285160 -
ttatctttattttgccatgaca

SEQ ID NO: 133527 - DNA, 22 bp, Artificial Sequence
  Synthetic oligonucleotide; TTA chr11 5285157 5285178 5285162 5285157 -
tctttattttgccatgacaaga

SEQ ID NO: 133528 - DNA, 22 bp, Artificial Sequence
  Synthetic oligonucleotide; CTT chr11 5285153 5285174 5285158 5285153 -
tattttgccatgacaagactga

SEQ ID NO: 133529 - DNA, 22 bp, Artificial Sequence
  Synthetic oligonucleotide; TTT chr11 5285152 5285173 5285157 5285152 -
attttgccatgacaagactgag

SEQ ID NO: 133530 - DNA, 22 bp, Artificial Sequence
  Synthetic oligonucleotide; TTA chr11 5285151 5285172 5285156 5285151 -
ttttgccatgacaagactgagc

SEQ ID NO: 133531 - DNA, 22 bp, Artificial Sequence
  Synthetic oligonucleotide; TTT chr11 5285148 5285169 5285153 5285148 -
tgccatgacaagactgagctca

SEQ ID NO: 133532 - DNA, 22 bp, Artificial Sequence
  Synthetic oligonucleotide; TTT chr11 5285147 5285168 5285152 5285147 -
gccatgacaagactgagctcag

SEQ ID NO: 133533 - DNA, 22 bp, Artificial Sequence
  Synthetic oligonucleotide; TTG chr11 5285146 5285167 5285151 5285146 -
ccatgacaagactgagctcaga

SEQ ID NO: 133534 - DNA, 22 bp, Artificial Sequence
  Synthetic oligonucleotide; CTG chr11 5285132 5285153 5285137 5285132 -
agctcagaagagtcaagcattt

SEQ ID NO: 133535 - DNA, 22 bp, Artificial Sequence
  Synthetic oligonucleotide; CTC chr11 5285127 5285148 5285132 5285127 -
agaagagtcaagcatttgccta

SEQ ID NO: 133536 - DNA, 22 bp, Artificial Sequence
  Synthetic oligonucleotide; TTT chr11 5285110 5285131 5285115 5285110 -
gcctaaggtcggacatgtcaga

SEQ ID NO: 133537 - DNA, 22 bp, Artificial Sequence
  Synthetic oligonucleotide; TTG chr11 5285109 5285130 5285114 5285109 -
cctaaggtcggacatgtcagag

SEQ ID NO: 133538 - DNA, 22 bp, Artificial Sequence
  Synthetic oligonucleotide; CTA chr11 5285105 5285126 5285110 5285105 -
aggtcggacatgtcagaggcag

SEQ ID NO: 133539 - DNA, 22 bp, Artificial Sequence
  Synthetic oligonucleotide; CTA chr11 5285072 5285093 5285077 5285072 -
tgtgagactctgcagctactgc

SEQ ID NO: 133540 - DNA, 22 bp, Artificial Sequence
  Synthetic oligonucleotide; CTC chr11 5285062 5285083 5285067 5285062 -
tgcagctactgctcatgggccc

SEQ ID NO: 133541 - DNA, 22 bp, Artificial Sequence
  Synthetic oligonucleotide; CTG chr11 5285060 5285081 5285065 5285060 -
cagctactgctcatgggccctg

SEQ ID NO: 133542 - DNA, 22 bp, Artificial Sequence
  Synthetic oligonucleotide; CTA chr11 5285054 5285075 5285059 5285054 -
ctgctcatgggccctgtgctgc

SEQ ID NO: 133543 - DNA, 22 bp, Artificial Sequence
  Synthetic oligonucleotide; CTG chr11 5285051 5285072 5285056 5285051 -
ctcatgggccctgtgctgcact

SEQ ID NO: 133544 - DNA, 22 bp, Artificial Sequence
  Synthetic oligonucleotide; CTC chr11 5285048 5285069 5285053 5285048 -
atgggccctgtgctgcactgat

SEQ ID NO: 133545 - DNA, 22 bp, Artificial Sequence
  Synthetic oligonucleotide; CTG chr11 5285038 5285059 5285043 5285038 -
tgctgcactgatgaggaggatc

SEQ ID NO: 133546 - DNA, 22 bp, Artificial Sequence
  Synthetic oligonucleotide; CTG chr11 5285033 5285054 5285038 5285033 -
cactgatgaggaggatcagatg

SEQ ID NO: 133547 - DNA, 22 bp, Artificial Sequence
  Synthetic oligonucleotide; CTG chr11 5285028 5285049 5285033 5285028 -
atgaggaggatcagatggatgg

SEQ ID NO: 133548 - DNA, 22 bp, Artificial Sequence
  Synthetic oligonucleotide; TTC chr11 5284982 5285003 5284987 5284982 -
tgtggataaaggagacagccat

SEQ ID NO: 133549 - DNA, 22 bp, Artificial Sequence
  Synthetic oligonucleotide; CTG chr11 5284980 5285001 5284985 5284980 -
tggataaaggagacagccatga

SEQ ID NO: 133550 - DNA, 22 bp, Artificial Sequence
  Synthetic oligonucleotide; CTA chr11 5284949 5284970 5284954 5284949 -
tgactgtaaatttgggagcagg

SEQ ID NO: 133551 - DNA, 22 bp, Artificial Sequence
  Synthetic oligonucleotide; CTG chr11 5284943 5284964 5284948 5284943 -
taaatttgggagcaggagtctc

SEQ ID NO: 133552 - DNA, 22 bp, Artificial Sequence
  Synthetic oligonucleotide; TTT chr11 5284936 5284957 5284941 5284936 -
gggagcaggagtctctaaggac

SEQ ID NO: 133553 - DNA, 22 bp, Artificial Sequence
  Synthetic oligonucleotide; TTG chr11 5284935 5284956 5284940 5284935 -
ggagcaggagtctctaaggact

SEQ ID NO: 133554 - DNA, 22 bp, Artificial Sequence
  Synthetic oligonucleotide; CTC chr11 5284921 5284942 5284926 5284921 -
taaggacttggatttcaaggaa

SEQ ID NO: 133555 - DNA, 22 bp, Artificial Sequence
  Synthetic oligonucleotide; CTA chr11 5284919 5284940 5284924 5284919 -
aggacttggatttcaaggaatt

SEQ ID NO: 133556 - DNA, 22 bp, Artificial Sequence
  Synthetic oligonucleotide; CTT chr11 5284912 5284933 5284917 5284912 -
ggatttcaaggaattttgactc

SEQ ID NO: 133557 - DNA, 22 bp, Artificial Sequence
  Synthetic oligonucleotide; TTG chr11 5284911 5284932 5284916 5284911 -
gatttcaaggaattttgactca

SEQ ID NO: 133558 - DNA, 22 bp, Artificial Sequence
  Synthetic oligonucleotide; TTT chr11 5284906 5284927 5284911 5284906 -
caaggaattttgactcagcaaa

SEQ ID NO: 133559 - DNA, 22 bp, Artificial Sequence
  Synthetic oligonucleotide; TTC chr11 5284905 5284926 5284910 5284905 -
aaggaattttgactcagcaaac

SEQ ID NO: 133560 - DNA, 22 bp, Artificial Sequence
  Synthetic oligonucleotide; TTT chr11 5284896 5284917 5284901 5284896 -
tgactcagcaaacacaagaccc

SEQ ID NO: 133561 - DNA, 22 bp, Artificial Sequence
  Synthetic oligonucleotide; TTT chr11 5284895 5284916 5284900 5284895 -
gactcagcaaacacaagaccct

SEQ ID NO: 133562 - DNA, 22 bp, Artificial Sequence
  Synthetic oligonucleotide; TTG chr11 5284894 5284915 5284899 5284894 -
actcagcaaacacaagaccctc

SEQ ID NO: 133563 - DNA, 22 bp, Artificial Sequence
  Synthetic oligonucleotide; CTC chr11 5284890 5284911 5284895 5284890 -
agcaaacacaagaccctcacgg

SEQ ID NO: 133564 - DNA, 22 bp, Artificial Sequence
  Synthetic oligonucleotide; CTC chr11 5284872 5284893 5284877 5284872 -
acggtgactttgcgagctggtg

SEQ ID NO: 133565 - DNA, 22 bp, Artificial Sequence
  Synthetic oligonucleotide; CTT chr11 5284862 5284883 5284867 5284862 -
tgcgagctggtgtgccagatgt

SEQ ID NO: 133566 - DNA, 22 bp, Artificial Sequence
  Synthetic oligonucleotide; TTT chr11 5284861 5284882 5284866 5284861 -
gcgagctggtgtgccagatgtg

SEQ ID NO: 133567 - DNA, 22 bp, Artificial Sequence
  Synthetic oligonucleotide; TTG chr11 5284860 5284881 5284865 5284860 -
cgagctggtgtgccagatgtgt

SEQ ID NO: 133568 - DNA, 22 bp, Artificial Sequence
  Synthetic oligonucleotide; CTG chr11 5284853 5284874 5284858 5284853 -
gtgtgccagatgtgtctatcag

SEQ ID NO: 133569 - DNA, 22 bp, Artificial Sequence
  Synthetic oligonucleotide; CTA chr11 5284835 5284856 5284840 5284835 -
tcagaggttccagggagggtgg

SEQ ID NO: 133570 - DNA, 22 bp, Artificial Sequence
  Synthetic oligonucleotide; TTC chr11 5284825 5284846 5284830 5284825 -
cagggagggtggggtggggtca

SEQ ID NO: 133571 - DNA, 22 bp, Artificial Sequence
  Synthetic oligonucleotide; CTG chr11 5284797 5284818 5284802 5284797 -
gccaccagctatcagggcccag

SEQ ID NO: 133572 - DNA, 22 bp, Artificial Sequence
  Synthetic oligonucleotide; CTA chr11 5284786 5284807 5284791 5284786 -
tcagggcccagatgggttatag

SEQ ID NO: 133573 - DNA, 22 bp, Artificial Sequence
  Synthetic oligonucleotide; TTA chr11 5284767 5284788 5284772 5284767 -
taggctggcaggctcagatagg

SEQ ID NO: 133574 - DNA, 22 bp, Artificial Sequence
  Synthetic oligonucleotide; CTG chr11 5284760 5284781 5284765 5284760 -
gcaggctcagataggtggttag

SEQ ID NO: 133575 - DNA, 22 bp, Artificial Sequence
  Synthetic oligonucleotide; CTC chr11 5284752 5284773 5284757 5284752 -
agataggtggttaggtcaggtt

SEQ ID NO: 133576 - DNA, 22 bp, Artificial Sequence
  Synthetic oligonucleotide; TTA chr11 5284739 5284760 5284744 5284739 -
ggtcaggttggtggtgctgggt

SEQ ID NO: 133577 - DNA, 22 bp, Artificial Sequence
  Synthetic oligonucleotide; TTG chr11 5284729 5284750 5284734 5284729 -
gtggtgctgggtggagtccatg

SEQ ID NO: 133578 - DNA, 22 bp, Artificial Sequence
  Synthetic oligonucleotide; CTG chr11 5284720 5284741 5284725 5284720 -
ggtggagtccatgactcccagg

SEQ ID NO: 133579 - DNA, 22 bp, Artificial Sequence
  Synthetic oligonucleotide; CTC chr11 5284703 5284724 5284708 5284703 -
ccaggagccaggagagatagac

SEQ ID NO: 133580 - DNA, 22 bp, Artificial Sequence
  Synthetic oligonucleotide; TTT chr11 5284626 5284647 5284631 5284626 -
ttcattctactactacatggga

SEQ ID NO: 133581 - DNA, 22 bp, Artificial Sequence
  Synthetic oligonucleotide; TTT chr11 5284625 5284646 5284630 5284625 -
tcattctactactacatgggac

SEQ ID NO: 133582 - DNA, 22 bp, Artificial Sequence
  Synthetic oligonucleotide; TTT chr11 5284624 5284645 5284629 5284624 -
cattctactactacatgggact

SEQ ID NO: 133583 - DNA, 22 bp, Artificial Sequence
  Synthetic oligonucleotide; TTC chr11 5284623 5284644 5284628 5284623 -
attctactactacatgggactg

SEQ ID NO: 133584 - DNA, 22 bp, Artificial Sequence
  Synthetic oligonucleotide; TTC chr11 5284619 5284640 5284624 5284619 -
tactactacatgggactgctcc

SEQ ID NO: 133585 - DNA, 22 bp, Artificial Sequence
  Synthetic oligonucleotide; CTA chr11 5284617 5284638 5284622 5284617 -
ctactacatgggactgctcccc

SEQ ID NO: 133586 - DNA, 22 bp, Artificial Sequence
  Synthetic oligonucleotide; CTA chr11 5284614 5284635 5284619 5284614 -
ctacatgggactgctcccctat

SEQ ID NO: 133587 - DNA, 22 bp, Artificial Sequence
  Synthetic oligonucleotide; CTA chr11 5284611 5284632 5284616 5284611 -
catgggactgctcccctatacc

SEQ ID NO: 133588 - DNA, 22 bp, Artificial Sequence
  Synthetic oligonucleotide; CTG chr11 5284601 5284622 5284606 5284601 -
ctcccctatacccccagctagg

SEQ ID NO: 133589 - DNA, 22 bp, Artificial Sequence
  Synthetic oligonucleotide; CTC chr11 5284598 5284619 5284603 5284598 -
ccctatacccccagctaggggc

SEQ ID NO: 133590 - DNA, 22 bp, Artificial Sequence
  Synthetic oligonucleotide; CTA chr11 5284593 5284614 5284598 5284593 -
tacccccagctaggggcaagtg

SEQ ID NO: 133591 - DNA, 22 bp, Artificial Sequence
  Synthetic oligonucleotide; CTA chr11 5284581 5284602 5284586 5284581 -
ggggcaagtgccttgactccta

SEQ ID NO: 133592 - DNA, 22 bp, Artificial Sequence
  Synthetic oligonucleotide; CTT chr11 5284567 5284588 5284572 5284567 -
gactcctatgttttcaggatca

SEQ ID NO: 133593 - DNA, 22 bp, Artificial Sequence
  Synthetic oligonucleotide; TTG chr11 5284566 5284587 5284571 5284566 -
actcctatgttttcaggatcat

SEQ ID NO: 133594 - DNA, 22 bp, Artificial Sequence
  Synthetic oligonucleotide; CTC chr11 5284562 5284583 5284567 5284562 -
ctatgttttcaggatcatcatc

SEQ ID NO: 133595 - DNA, 22 bp, Artificial Sequence
  Synthetic oligonucleotide; CTA chr11 5284559 5284580 5284564 5284559 -
tgttttcaggatcatcatctat

SEQ ID NO: 133596 - DNA, 22 bp, Artificial Sequence
  Synthetic oligonucleotide; TTT chr11 5284554 5284575 5284559 5284554 -
tcaggatcatcatctataaagt

SEQ ID NO: 133597 - DNA, 22 bp, Artificial Sequence
  Synthetic oligonucleotide; TTT chr11 5284553 5284574 5284558 5284553 -
caggatcatcatctataaagta

SEQ ID NO: 133598 - DNA, 22 bp, Artificial Sequence
  Synthetic oligonucleotide; TTC chr11 5284552 5284573 5284557 5284552 -
aggatcatcatctataaagtaa

SEQ ID NO: 133599 - DNA, 22 bp, Artificial Sequence
  Synthetic oligonucleotide; CTA chr11 5284538 5284559 5284543 5284538 -
taaagtaagagtaataattgtg

SEQ ID NO: 133600 - DNA, 22 bp, Artificial Sequence
  Synthetic oligonucleotide; TTG chr11 5284518 5284539 5284523 5284518 -
tgtctatctcatagggttatta

SEQ ID NO: 133601 - DNA, 22 bp, Artificial Sequence
  Synthetic oligonucleotide; CTA chr11 5284512 5284533 5284517 5284512 -
tctcatagggttattatgagga

SEQ ID NO: 133602 - DNA, 22 bp, Artificial Sequence
  Synthetic oligonucleotide; CTC chr11 5284508 5284529 5284513 5284508 -
atagggttattatgaggatcaa

SEQ ID NO: 133603 - DNA, 22 bp, Artificial Sequence
  Synthetic oligonucleotide; TTA chr11 5284499 5284520 5284504 5284499 -
ttatgaggatcaaaggagatgc

SEQ ID NO: 133604 - DNA, 22 bp, Artificial Sequence
  Synthetic oligonucleotide; TTA chr11 5284496 5284517 5284501 5284496 -
tgaggatcaaaggagatgcaca

SEQ ID NO: 133605 - DNA, 22 bp, Artificial Sequence
  Synthetic oligonucleotide; CTC chr11 5284471 5284492 5284476 5284471 -
tctggaccagtggcctaacagt

SEQ ID NO: 133606 - DNA, 22 bp, Artificial Sequence
  Synthetic oligonucleotide; CTC chr11 5284469 5284490 5284474 5284469 -
tggaccagtggcctaacagttc

SEQ ID NO: 133607 - DNA, 22 bp, Artificial Sequence
  Synthetic oligonucleotide; CTG chr11 5284467 5284488 5284472 5284467 -
gaccagtggcctaacagttcag

SEQ ID NO: 133608 - DNA, 22 bp, Artificial Sequence
  Synthetic oligonucleotide; CTA chr11 5284454 5284475 5284459 5284454 -
acagttcaggacagagctatgg

SEQ ID NO: 133609 - DNA, 22 bp, Artificial Sequence
  Synthetic oligonucleotide; TTC chr11 5284447 5284468 5284452 5284447 -
aggacagagctatgggcttcct

SEQ ID NO: 133610 - DNA, 22 bp, Artificial Sequence
  Synthetic oligonucleotide; CTA chr11 5284435 5284456 5284440 5284435 -
tgggcttcctatgtatgggtca

SEQ ID NO: 133611 - DNA, 22 bp, Artificial Sequence
  Synthetic oligonucleotide; CTT chr11 5284428 5284449 5284433 5284428 -
cctatgtatgggtcagtggtct

SEQ ID NO: 133612 - DNA, 22 bp, Artificial Sequence
  Synthetic oligonucleotide; TTC chr11 5284427 5284448 5284432 5284427 -
ctatgtatgggtcagtggtctc

SEQ ID NO: 133613 - DNA, 22 bp, Artificial Sequence
  Synthetic oligonucleotide; CTA chr11 5284424 5284445 5284429 5284424 -
tgtatgggtcagtggtctcaat

SEQ ID NO: 133614 - DNA, 22 bp, Artificial Sequence
  Synthetic oligonucleotide; CTC chr11 5284405 5284426 5284410 5284405 -
aatgtagcaggcaagttccaga

SEQ ID NO: 133615 - DNA, 22 bp, Artificial Sequence
  Synthetic oligonucleotide; TTC chr11 5284387 5284408 5284392 5284387 -
cagaagatagcatcaaccactg

SEQ ID NO: 133616 - DNA, 22 bp, Artificial Sequence
  Synthetic oligonucleotide; CTG chr11 5284365 5284386 5284370 5284365 -
ttagagatatactgccagtctc

SEQ ID NO: 133617 - DNA, 22 bp, Artificial Sequence
  Synthetic oligonucleotide; TTA chr11 5284362 5284383 5284367 5284362 -
gagatatactgccagtctcaga

SEQ ID NO: 133618 - DNA, 22 bp, Artificial Sequence
  Synthetic oligonucleotide; CTG chr11 5284351 5284372 5284356 5284351 -
ccagtctcagagcctgatgtta

SEQ ID NO: 133619 - DNA, 22 bp, Artificial Sequence
  Synthetic oligonucleotide; CTC chr11 5284343 5284364 5284348 5284343 -
agagcctgatgttaatttagca

SEQ ID NO: 133620 - DNA, 22 bp, Artificial Sequence
  Synthetic oligonucleotide; CTG chr11 5284335 5284356 5284340 5284335 -
atgttaatttagcaatgggctg

SEQ ID NO: 133621 - DNA, 22 bp, Artificial Sequence
  Synthetic oligonucleotide; TTA chr11 5284329 5284350 5284334 5284329 -
atttagcaatgggctgggaccc

SEQ ID NO: 133622 - DNA, 22 bp, Artificial Sequence
  Synthetic oligonucleotide; TTT chr11 5284325 5284346 5284330 5284325 -
agcaatgggctgggaccctcct

SEQ ID NO: 133623 - DNA, 22 bp, Artificial Sequence
  Synthetic oligonucleotide; TTA chr11 5284324 5284345 5284329 5284324 -
gcaatgggctgggaccctcctc

SEQ ID NO: 133624 - DNA, 22 bp, Artificial Sequence
  Synthetic oligonucleotide; CTG chr11 5284313 5284334 5284318 5284313 -
ggaccctcctccagtagaacct

SEQ ID NO: 133625 - DNA, 22 bp, Artificial Sequence
  Synthetic oligonucleotide; CTC chr11 5284305 5284326 5284310 5284305 -
ctccagtagaaccttctaacca

SEQ ID NO: 133626 - DNA, 22 bp, Artificial Sequence
  Synthetic oligonucleotide; CTC chr11 5284302 5284323 5284307 5284302 -
cagtagaaccttctaaccagct

SEQ ID NO: 133627 - DNA, 22 bp, Artificial Sequence
  Synthetic oligonucleotide; CTT chr11 5284290 5284311 5284295 5284290 -
ctaaccagctgctgcagtcaaa

SEQ ID NO: 133628 - DNA, 22 bp, Artificial Sequence
  Synthetic oligonucleotide; TTC chr11 5284289 5284310 5284294 5284289 -
taaccagctgctgcagtcaaag

SEQ ID NO: 133629 - DNA, 22 bp, Artificial Sequence
  Synthetic oligonucleotide; CTA chr11 5284287 5284308 5284292 5284287 -
accagctgctgcagtcaaagtc

SEQ ID NO: 133630 - DNA, 22 bp, Artificial Sequence
  Synthetic oligonucleotide; CTG chr11 5284279 5284300 5284284 5284279 -
ctgcagtcaaagtcgaatgcag

SEQ ID NO: 133631 - DNA, 22 bp, Artificial Sequence
  Synthetic oligonucleotide; CTG chr11 5284276 5284297 5284281 5284276 -
cagtcaaagtcgaatgcagctg

SEQ ID NO: 133632 - DNA, 22 bp, Artificial Sequence
  Synthetic oligonucleotide; CTG chr11 5284254 5284275 5284259 5284254 -
gttagactttttttaatgaaag

SEQ ID NO: 133633 - DNA, 22 bp, Artificial Sequence
  Synthetic oligonucleotide; TTA chr11 5284250 5284271 5284255 5284250 -
gactttttttaatgaaagctta

SEQ ID NO: 133634 - DNA, 22 bp, Artificial Sequence
  Synthetic oligonucleotide; CTT chr11 5284245 5284266 5284250 5284245 -
tttttaatgaaagcttagcttt

SEQ ID NO: 133635 - DNA, 22 bp, Artificial Sequence
  Synthetic oligonucleotide; TTT chr11 5284244 5284265 5284249 5284244 -
ttttaatgaaagcttagctttc

SEQ ID NO: 133636 - DNA, 22 bp, Artificial Sequence
  Synthetic oligonucleotide; TTT chr11 5284243 5284264 5284248 5284243 -
tttaatgaaagcttagctttca

SEQ ID NO: 133637 - DNA, 22 bp, Artificial Sequence
  Synthetic oligonucleotide; TTT chr11 5284242 5284263 5284247 5284242 -
ttaatgaaagcttagctttcat

SEQ ID NO: 133638 - DNA, 22 bp, Artificial Sequence
  Synthetic oligonucleotide; TTT chr11 5284241 5284262 5284246 5284241 -
taatgaaagcttagctttcatt

SEQ ID NO: 133639 - DNA, 22 bp, Artificial Sequence
  Synthetic oligonucleotide; TTT chr11 5284240 5284261 5284245 5284240 -
aatgaaagcttagctttcatta

SEQ ID NO: 133640 - DNA, 22 bp, Artificial Sequence
  Synthetic oligonucleotide; TTA chr11 5284239 5284260 5284244 5284239 -
atgaaagcttagctttcattaa

SEQ ID NO: 133641 - DNA, 22 bp, Artificial Sequence
  Synthetic oligonucleotide; CTT chr11 5284229 5284250 5284234 5284229 -
agctttcattaaagattaagct

SEQ ID NO: 133642 - DNA, 22 bp, Artificial Sequence
  Synthetic oligonucleotide; TTA chr11 5284228 5284249 5284233 5284228 -
gctttcattaaagattaagctc

SEQ ID NO: 133643 - DNA, 22 bp, Artificial Sequence
  Synthetic oligonucleotide; CTT chr11 5284224 5284245 5284229 5284224 -
tcattaaagattaagctcctaa

SEQ ID NO: 133644 - DNA, 22 bp, Artificial Sequence
  Synthetic oligonucleotide; TTT chr11 5284223 5284244 5284228 5284223 -
cattaaagattaagctcctaag

SEQ ID NO: 133645 - DNA, 22 bp, Artificial Sequence
  Synthetic oligonucleotide; TTC chr11 5284222 5284243 5284227 5284222 -
attaaagattaagctcctaagc

SEQ ID NO: 133646 - DNA, 22 bp, Artificial Sequence
  Synthetic oligonucleotide; TTA chr11 5284218 5284239 5284223 5284218 -
aagattaagctcctaagcaggg

SEQ ID NO: 133647 - DNA, 22 bp, Artificial Sequence
  Synthetic oligonucleotide; TTA chr11 5284211 5284232 5284216 5284211 -
agctcctaagcagggcacagat

SEQ ID NO: 133648 - DNA, 22 bp, Artificial Sequence
  Synthetic oligonucleotide; CTC chr11 5284206 5284227 5284211 5284206 -
ctaagcagggcacagatgaaat

SEQ ID NO: 133649 - DNA, 22 bp, Artificial Sequence
  Synthetic oligonucleotide; CTA chr11 5284203 5284224 5284208 5284203 -
agcagggcacagatgaaattgt

SEQ ID NO: 133650 - DNA, 22 bp, Artificial Sequence
  Synthetic oligonucleotide; TTG chr11 5284182 5284203 5284187 5284182 -
tctaacagcaactttgccatct

SEQ ID NO: 133651 - DNA, 22 bp, Artificial Sequence
  Synthetic oligonucleotide; CTA chr11 5284178 5284199 5284183 5284178 -
acagcaactttgccatctaaaa

SEQ ID NO: 133652 - DNA, 22 bp, Artificial Sequence
  Synthetic oligonucleotide; CTT chr11 5284168 5284189 5284173 5284168 -
tgccatctaaaaaaatctgact

SEQ ID NO: 133653 - DNA, 22 bp, Artificial Sequence
  Synthetic oligonucleotide; TTT chr11 5284167 5284188 5284172 5284167 -
gccatctaaaaaaatctgactt

SEQ ID NO: 133654 - DNA, 22 bp, Artificial Sequence
  Synthetic oligonucleotide; TTG chr11 5284166 5284187 5284171 5284166 -
ccatctaaaaaaatctgacttc

SEQ ID NO: 133655 - DNA, 22 bp, Artificial Sequence
  Synthetic oligonucleotide; CTA chr11 5284159 5284180 5284164 5284159 -
aaaaaatctgacttcactggaa

SEQ ID NO: 133656 - DNA, 22 bp, Artificial Sequence
  Synthetic oligonucleotide; CTG chr11 5284149 5284170 5284154 5284149 -
acttcactggaaacatggaagc

SEQ ID NO: 133657 - DNA, 22 bp, Artificial Sequence
  Synthetic oligonucleotide; CTT chr11 5284145 5284166 5284150 5284145 -
cactggaaacatggaagcccaa

SEQ ID NO: 133658 - DNA, 22 bp, Artificial Sequence
  Synthetic oligonucleotide; TTC chr11 5284144 5284165 5284149 5284144 -
actggaaacatggaagcccaag

SEQ ID NO: 133659 - DNA, 22 bp, Artificial Sequence
  Synthetic oligonucleotide; CTG chr11 5284140 5284161 5284145 5284140 -
gaaacatggaagcccaaggttc

SEQ ID NO: 133660 - DNA, 22 bp, Artificial Sequence
  Synthetic oligonucleotide; TTC chr11 5284118 5284139 5284123 5284118 -
tgaacatgagaaatttttagga

SEQ ID NO: 133661 - DNA, 22 bp, Artificial Sequence
  Synthetic oligonucleotide; CTG chr11 5284116 5284137 5284121 5284116 -
aacatgagaaatttttaggaat

SEQ ID NO: 133662 - DNA, 22 bp, Artificial Sequence
  Synthetic oligonucleotide; TTT chr11 5284102 5284123 5284107 5284102 -
ttaggaatctgcacaggagttg

SEQ ID NO: 133663 - DNA, 22 bp, Artificial Sequence
  Synthetic oligonucleotide; TTT chr11 5284101 5284122 5284106 5284101 -
taggaatctgcacaggagttga

SEQ ID NO: 133664 - DNA, 22 bp, Artificial Sequence
  Synthetic oligonucleotide; TTT chr11 5284100 5284121 5284105 5284100 -
aggaatctgcacaggagttgag

SEQ ID NO: 133665 - DNA, 22 bp, Artificial Sequence
  Synthetic oligonucleotide; TTA chr11 5284099 5284120 5284104 5284099 -
ggaatctgcacaggagttgaga

SEQ ID NO: 133666 - DNA, 22 bp, Artificial Sequence
  Synthetic oligonucleotide; CTG chr11 5284091 5284112 5284096 5284091 -
cacaggagttgagagggaaaca

SEQ ID NO: 133667 - DNA, 22 bp, Artificial Sequence
  Synthetic oligonucleotide; TTG chr11 5284080 5284101 5284085 5284080 -
agagggaaacaagatggtgaag

SEQ ID NO: 133668 - DNA, 22 bp, Artificial Sequence
  Synthetic oligonucleotide; CTA chr11 5284052 5284073 5284057 5284052 -
gaaaccacatgagagacacgag

SEQ ID NO: 133669 - DNA, 22 bp, Artificial Sequence
  Synthetic oligonucleotide; TTT chr11 5284014 5284035 5284019 5284014 -
aggctggaggtaaatgaaagag

SEQ ID NO: 133670 - DNA, 22 bp, Artificial Sequence
  Synthetic oligonucleotide; TTA chr11 5284013 5284034 5284018 5284013 -
ggctggaggtaaatgaaagaga

SEQ ID NO: 133671 - DNA, 22 bp, Artificial Sequence
  Synthetic oligonucleotide; CTG chr11 5284008 5284029 5284013 5284008 -
gaggtaaatgaaagagaagtgg

SEQ ID NO: 133672 - DNA, 22 bp, Artificial Sequence
  Synthetic oligonucleotide; TTA chr11 5283980 5284001 5283985 5283980 -
atacttactgaaatctttctat

SEQ ID NO: 133673 - DNA, 22 bp, Artificial Sequence
  Synthetic oligonucleotide; CTT chr11 5283974 5283995 5283979 5283974 -
actgaaatctttctatatgtca

SEQ ID NO: 133674 - DNA, 22 bp, Artificial Sequence
  Synthetic oligonucleotide; TTA chr11 5283973 5283994 5283978 5283973 -
ctgaaatctttctatatgtcag

SEQ ID NO: 133675 - DNA, 22 bp, Artificial Sequence
  Synthetic oligonucleotide; CTG chr11 5283970 5283991 5283975 5283970 -
aaatctttctatatgtcaggtg

SEQ ID NO: 133676 - DNA, 22 bp, Artificial Sequence
  Synthetic oligonucleotide; CTT chr11 5283963 5283984 5283968 5283963 -
tctatatgtcaggtgccatttt

SEQ ID NO: 133677 - DNA, 22 bp, Artificial Sequence
  Synthetic oligonucleotide; TTT chr11 5283962 5283983 5283967 5283962 -
ctatatgtcaggtgccatttta

SEQ ID NO: 133678 - DNA, 22 bp, Artificial Sequence
  Synthetic oligonucleotide; TTC chr11 5283961 5283982 5283966 5283961 -
tatatgtcaggtgccattttat

SEQ ID NO: 133679 - DNA, 22 bp, Artificial Sequence
  Synthetic oligonucleotide; CTA chr11 5283959 5283980 5283964 5283959 -
tatgtcaggtgccattttatga

SEQ ID NO: 133680 - DNA, 22 bp, Artificial Sequence
  Synthetic oligonucleotide; TTT chr11 5283942 5283963 5283947 5283942 -
tatgatatttaataatctcatt

SEQ ID NO: 133681 - DNA, 22 bp, Artificial Sequence
  Synthetic oligonucleotide; TTT chr11 5283941 5283962 5283946 5283941 -
atgatatttaataatctcatta

SEQ ID NO: 133682 - DNA, 22 bp, Artificial Sequence
  Synthetic oligonucleotide; TTA chr11 5283940 5283961 5283945 5283940 -
tgatatttaataatctcattac

SEQ ID NO: 133683 - DNA, 22 bp, Artificial Sequence
  Synthetic oligonucleotide; TTT chr11 5283932 5283953 5283937 5283932 -
aataatctcattacatatggta

SEQ ID NO: 133684 - DNA, 22 bp, Artificial Sequence
  Synthetic oligonucleotide; TTA chr11 5283931 5283952 5283936 5283931 -
ataatctcattacatatggtaa

SEQ ID NO: 133685 - DNA, 22 bp, Artificial Sequence
  Synthetic oligonucleotide; CTC chr11 5283923 5283944 5283928 5283923 -
attacatatggtaattctgtga

SEQ ID NO: 133686 - DNA, 22 bp, Artificial Sequence
  Synthetic oligonucleotide; TTA chr11 5283919 5283940 5283924 5283919 -
catatggtaattctgtgagata

SEQ ID NO: 133687 - DNA, 22 bp, Artificial Sequence
  Synthetic oligonucleotide; TTC chr11 5283906 5283927 5283911 5283906 -
tgtgagatatgtattattgaac

SEQ ID NO: 133688 - DNA, 22 bp, Artificial Sequence
  Synthetic oligonucleotide; CTG chr11 5283904 5283925 5283909 5283904 -
tgagatatgtattattgaacat

SEQ ID NO: 133689 - DNA, 22 bp, Artificial Sequence
  Synthetic oligonucleotide; TTA chr11 5283890 5283911 5283895 5283890 -
ttgaacatactataattaatac

SEQ ID NO: 133690 - DNA, 22 bp, Artificial Sequence
  Synthetic oligonucleotide; TTG chr11 5283887 5283908 5283892 5283887 -
aacatactataattaatactaa

SEQ ID NO: 133691 - DNA, 22 bp, Artificial Sequence
  Synthetic oligonucleotide; CTA chr11 5283878 5283899 5283883 5283878 -
taattaatactaatgataagta

SEQ ID NO: 133692 - DNA, 22 bp, Artificial Sequence
  Synthetic oligonucleotide; TTA chr11 5283872 5283893 5283877 5283872 -
atactaatgataagtaacacct

SEQ ID NO: 133693 - DNA, 22 bp, Artificial Sequence
  Synthetic oligonucleotide; CTA chr11 5283866 5283887 5283871 5283866 -
atgataagtaacacctcttgag

SEQ ID NO: 133694 - DNA, 22 bp, Artificial Sequence
  Synthetic oligonucleotide; CTC chr11 5283849 5283870 5283854 5283849 -
ttgagtacttagtatatgctag

SEQ ID NO: 133695 - DNA, 22 bp, Artificial Sequence
  Synthetic oligonucleotide; CTT chr11 5283847 5283868 5283852 5283847 -
gagtacttagtatatgctagaa

SEQ ID NO: 133696 - DNA, 22 bp, Artificial Sequence
  Synthetic oligonucleotide; TTG chr11 5283846 5283867 5283851 5283846 -
agtacttagtatatgctagaat

SEQ ID NO: 133697 - DNA, 22 bp, Artificial Sequence
  Synthetic oligonucleotide; CTT chr11 5283839 5283860 5283844 5283839 -
agtatatgctagaatcaaattt

SEQ ID NO: 133698 - DNA, 22 bp, Artificial Sequence
  Synthetic oligonucleotide; TTA chr11 5283838 5283859 5283843 5283838 -
gtatatgctagaatcaaattta

SEQ ID NO: 133699 - DNA, 22 bp, Artificial Sequence
  Synthetic oligonucleotide; CTA chr11 5283828 5283849 5283833 5283828 -
gaatcaaatttaagtttatcat

SEQ ID NO: 133700 - DNA, 22 bp, Artificial Sequence
  Synthetic oligonucleotide; TTT chr11 5283817 5283838 5283822 5283817 -
aagtttatcatatgaggccggg

SEQ ID NO: 133701 - DNA, 22 bp, Artificial Sequence
  Synthetic oligonucleotide; TTA chr11 5283816 5283837 5283821 5283816 -
agtttatcatatgaggccgggc

SEQ ID NO: 133702 - DNA, 22 bp, Artificial Sequence
  Synthetic oligonucleotide; TTT chr11 5283811 5283832 5283816 5283811 -
atcatatgaggccgggcacggt

SEQ ID NO: 133703 - DNA, 22 bp, Artificial Sequence
  Synthetic oligonucleotide; TTA chr11 5283810 5283831 5283815 5283810 -
tcatatgaggccgggcacggtg

SEQ ID NO: 133704 - DNA, 22 bp, Artificial Sequence
  Synthetic oligonucleotide; CTC chr11 5283784 5283805 5283789 5283784 -
atatatgggattacatgcctgt

SEQ ID NO: 133705 - DNA, 22 bp, Artificial Sequence
  Synthetic oligonucleotide; TTA chr11 5283771 5283792 5283776 5283771 -
catgcctgtaatcccagcactt

SEQ ID NO: 133706 - DNA, 22 bp, Artificial Sequence
  Synthetic oligonucleotide; CTG chr11 5283763 5283784 5283768 5283763 -
taatcccagcactttgggaggc

SEQ ID NO: 133707 - DNA, 22 bp, Artificial Sequence
  Synthetic oligonucleotide; CTT chr11 5283749 5283770 5283754 5283749 -
tgggaggccaaggcaattggat

SEQ ID NO: 133708 - DNA, 22 bp, Artificial Sequence
  Synthetic oligonucleotide; TTT chr11 5283748 5283769 5283753 5283748 -
gggaggccaaggcaattggatc

SEQ ID NO: 133709 - DNA, 22 bp, Artificial Sequence
  Synthetic oligonucleotide; TTG chr11 5283747 5283768 5283752 5283747 -
ggaggccaaggcaattggatca

SEQ ID NO: 133710 - DNA, 22 bp, Artificial Sequence
  Synthetic oligonucleotide; TTG chr11 5283730 5283751 5283735 5283730 -
gatcacctgaggtcaggagttc

SEQ ID NO: 133711 - DNA, 22 bp, Artificial Sequence
  Synthetic oligonucleotide; CTG chr11 5283721 5283742 5283726 5283721 -
aggtcaggagttccagaccagc

SEQ ID NO: 133712 - DNA, 22 bp, Artificial Sequence
  Synthetic oligonucleotide; TTC chr11 5283708 5283729 5283713 5283708 -
cagaccagcctggccaacatgg

SEQ ID NO: 133713 - DNA, 22 bp, Artificial Sequence
  Synthetic oligonucleotide; CTG chr11 5283696 5283717 5283701 5283696 -
gccaacatggtgaaaccccttc

SEQ ID NO: 133714 - DNA, 22 bp, Artificial Sequence
  Synthetic oligonucleotide; CTT chr11 5283675 5283696 5283680 5283675 -
ctctactaaaaaatacaaaaaa

SEQ ID NO: 133715 - DNA, 22 bp, Artificial Sequence
  Synthetic oligonucleotide; TTC chr11 5283674 5283695 5283679 5283674 -
tctactaaaaaatacaaaaaat

SEQ ID NO: 133716 - DNA, 22 bp, Artificial Sequence
  Synthetic oligonucleotide; CTC chr11 5283672 5283693 5283677 5283672 -
tactaaaaaatacaaaaaatca

SEQ ID NO: 133717 - DNA, 22 bp, Artificial Sequence
  Synthetic oligonucleotide; CTA chr11 5283670 5283691 5283675 5283670 -
ctaaaaaatacaaaaaatcagc

SEQ ID NO: 133718 - DNA, 22 bp, Artificial Sequence
  Synthetic oligonucleotide; CTA chr11 5283667 5283688 5283672 5283667 -
aaaaatacaaaaaatcagccag

SEQ ID NO: 133719 - DNA, 22 bp, Artificial Sequence
  Synthetic oligonucleotide; CTA chr11 5283626 5283647 5283631 5283626 -
taatcccagctactcaggaggc

SEQ ID NO: 133720 - DNA, 22 bp, Artificial Sequence
  Synthetic oligonucleotide; CTA chr11 5283614 5283635 5283619 5283614 -
ctcaggaggctgaggcaggaga

SEQ ID NO: 133721 - DNA, 22 bp, Artificial Sequence
  Synthetic oligonucleotide; CTC chr11 5283611 5283632 5283616 5283611 -
aggaggctgaggcaggagaatc

SEQ ID NO: 133722 - DNA, 22 bp, Artificial Sequence
  Synthetic oligonucleotide; CTG chr11 5283602 5283623 5283607 5283602 -
aggcaggagaatcacttgaacc

SEQ ID NO: 133723 - DNA, 22 bp, Artificial Sequence
  Synthetic oligonucleotide; CTT chr11 5283585 5283606 5283590 5283585 -
gaacccaggaggtggaggttgc

SEQ ID NO: 133724 - DNA, 22 bp, Artificial Sequence
  Synthetic oligonucleotide; TTG chr11 5283584 5283605 5283589 5283584 -
aacccaggaggtggaggttgca

SEQ ID NO: 133725 - DNA, 22 bp, Artificial Sequence
  Synthetic oligonucleotide; TTG chr11 5283564 5283585 5283569 5283564 -
cagtgagctaagattgcaccac

SEQ ID NO: 133726 - DNA, 22 bp, Artificial Sequence
  Synthetic oligonucleotide; CTA chr11 5283554 5283575 5283559 5283554 -
agattgcaccactgcactccag

SEQ ID NO: 133727 - DNA, 22 bp, Artificial Sequence
  Synthetic oligonucleotide; TTG chr11 5283548 5283569 5283553 5283548 -
caccactgcactccagcctagg

SEQ ID NO: 133728 - DNA, 22 bp, Artificial Sequence
  Synthetic oligonucleotide; CTG chr11 5283540 5283561 5283545 5283540 -
cactccagcctaggcgacagag

SEQ ID NO: 133729 - DNA, 22 bp, Artificial Sequence
  Synthetic oligonucleotide; CTC chr11 5283535 5283556 5283540 5283535 -
cagcctaggcgacagagtgaga

SEQ ID NO: 133730 - DNA, 22 bp, Artificial Sequence
  Synthetic oligonucleotide; CTA chr11 5283528 5283549 5283533 5283528 -
ggcgacagagtgagactccatc

SEQ ID NO: 133731 - DNA, 22 bp, Artificial Sequence
  Synthetic oligonucleotide; CTC chr11 5283510 5283531 5283515 5283510 -
catctcaaaaaaaaaaaaagaa

SEQ ID NO: 133732 - DNA, 22 bp, Artificial Sequence
  Synthetic oligonucleotide; CTC chr11 5283504 5283525 5283509 5283504 -
aaaaaaaaaaaaagaagtttat

SEQ ID NO: 133733 - DNA, 22 bp, Artificial Sequence
  Synthetic oligonucleotide; TTT chr11 5283484 5283505 5283489 5283484 -
attatatgaattaacttagttt

SEQ ID NO: 133734 - DNA, 22 bp, Artificial Sequence
  Synthetic oligonucleotide; TTA chr11 5283483 5283504 5283488 5283483 -
ttatatgaattaacttagtttt

SEQ ID NO: 133735 - DNA, 22 bp, Artificial Sequence
  Synthetic oligonucleotide; TTA chr11 5283480 5283501 5283485 5283480 -
tatgaattaacttagttttact

SEQ ID NO: 133736 - DNA, 22 bp, Artificial Sequence
  Synthetic oligonucleotide; TTA chr11 5283471 5283492 5283476 5283471 -
acttagttttactcacaccaat

SEQ ID NO: 133737 - DNA, 22 bp, Artificial Sequence
  Synthetic oligonucleotide; CTT chr11 5283467 5283488 5283472 5283467 -
agttttactcacaccaatactc

SEQ ID NO: 133738 - DNA, 22 bp, Artificial Sequence
  Synthetic oligonucleotide; TTA chr11 5283466 5283487 5283471 5283466 -
gttttactcacaccaatactca

SEQ ID NO: 133739 - DNA, 22 bp, Artificial Sequence
  Synthetic oligonucleotide; TTT chr11 5283462 5283483 5283467 5283462 -
tactcacaccaatactcagaag

SEQ ID NO: 133740 - DNA, 22 bp, Artificial Sequence
  Synthetic oligonucleotide; TTT chr11 5283461 5283482 5283466 5283461 -
actcacaccaatactcagaagt

SEQ ID NO: 133741 - DNA, 22 bp, Artificial Sequence
  Synthetic oligonucleotide; TTA chr11 5283460 5283481 5283465 5283460 -
ctcacaccaatactcagaagta

SEQ ID NO: 133742 - DNA, 22 bp, Artificial Sequence
  Synthetic oligonucleotide; CTC chr11 5283457 5283478 5283462 5283457 -
acaccaatactcagaagtagat

SEQ ID NO: 133743 - DNA, 22 bp, Artificial Sequence
  Synthetic oligonucleotide; CTC chr11 5283445 5283466 5283450 5283445 -
agaagtagattattacctcatt

SEQ ID NO: 133744 - DNA, 22 bp, Artificial Sequence
  Synthetic oligonucleotide; TTA chr11 5283433 5283454 5283438 5283433 -
ttacctcatttattgatgagga

SEQ ID NO: 133745 - DNA, 22 bp, Artificial Sequence
  Synthetic oligonucleotide; TTA chr11 5283430 5283451 5283435 5283430 -
cctcatttattgatgaggagcc

SEQ ID NO: 133746 - DNA, 22 bp, Artificial Sequence
  Synthetic oligonucleotide; CTC chr11 5283426 5283447 5283431 5283426 -
atttattgatgaggagcccaat

SEQ ID NO: 133747 - DNA, 22 bp, Artificial Sequence
  Synthetic oligonucleotide; TTT chr11 5283422 5283443 5283427 5283422 -
attgatgaggagcccaatgtac

SEQ ID NO: 133748 - DNA, 22 bp, Artificial Sequence
  Synthetic oligonucleotide; TTA chr11 5283421 5283442 5283426 5283421 -
ttgatgaggagcccaatgtact

SEQ ID NO: 133749 - DNA, 22 bp, Artificial Sequence
  Synthetic oligonucleotide; TTG chr11 5283418 5283439 5283423 5283418 -
atgaggagcccaatgtacttgt

SEQ ID NO: 133750 - DNA, 22 bp, Artificial Sequence
  Synthetic oligonucleotide; CTT chr11 5283398 5283419 5283403 5283398 -
gtagtgtagatcaacttattga

SEQ ID NO: 133751 - DNA, 22 bp, Artificial Sequence
  Synthetic oligonucleotide; TTG chr11 5283397 5283418 5283402 5283397 -
tagtgtagatcaacttattgaa

SEQ ID NO: 133752 - DNA, 22 bp, Artificial Sequence
  Synthetic oligonucleotide; CTT chr11 5283381 5283402 5283386 5283381 -
attgaaagcacaagctaataag

SEQ ID NO: 133753 - DNA, 22 bp, Artificial Sequence
  Synthetic oligonucleotide; TTA chr11 5283380 5283401 5283385 5283380 -
ttgaaagcacaagctaataagt

SEQ ID NO: 133754 - DNA, 22 bp, Artificial Sequence
  Synthetic oligonucleotide; TTG chr11 5283377 5283398 5283382 5283377 -
aaagcacaagctaataagtaga

SEQ ID NO: 133755 - DNA, 22 bp, Artificial Sequence
  Synthetic oligonucleotide; CTA chr11 5283364 5283385 5283369 5283364 -
ataagtagacaattagtaatta

SEQ ID NO: 133756 - DNA, 22 bp, Artificial Sequence
  Synthetic oligonucleotide; TTA chr11 5283349 5283370 5283354 5283349 -
gtaattagaagtcagatggtct

SEQ ID NO: 133757 - DNA, 22 bp, Artificial Sequence
  Synthetic oligonucleotide; TTA chr11 5283342 5283363 5283347 5283342 -
gaagtcagatggtctgagctct

SEQ ID NO: 133758 - DNA, 22 bp, Artificial Sequence
  Synthetic oligonucleotide; CTG chr11 5283326 5283347 5283331 5283326 -
agctctcctactgtctacatta

SEQ ID NO: 133759 - DNA, 22 bp, Artificial Sequence
  Synthetic oligonucleotide; CTC chr11 5283321 5283342 5283326 5283321 -
tcctactgtctacattacatga

SEQ ID NO: 133760 - DNA, 22 bp, Artificial Sequence
  Synthetic oligonucleotide; CTC chr11 5283319 5283340 5283324 5283319 -
ctactgtctacattacatgagc

SEQ ID NO: 133761 - DNA, 22 bp, Artificial Sequence
  Synthetic oligonucleotide; CTA chr11 5283316 5283337 5283321 5283316 -
ctgtctacattacatgagctct

SEQ ID NO: 133762 - DNA, 22 bp, Artificial Sequence
  Synthetic oligonucleotide; CTG chr11 5283313 5283334 5283318 5283313 -
tctacattacatgagctcttat

SEQ ID NO: 133763 - DNA, 22 bp, Artificial Sequence
  Synthetic oligonucleotide; CTA chr11 5283309 5283330 5283314 5283309 -
cattacatgagctcttattaac

SEQ ID NO: 133764 - DNA, 22 bp, Artificial Sequence
  Synthetic oligonucleotide; TTA chr11 5283304 5283325 5283309 5283304 -
catgagctcttattaactgggg

SEQ ID NO: 133765 - DNA, 22 bp, Artificial Sequence
  Synthetic oligonucleotide; CTC chr11 5283295 5283316 5283300 5283295 -
ttattaactggggactcgaaaa

SEQ ID NO: 133766 - DNA, 22 bp, Artificial Sequence
  Synthetic oligonucleotide; CTT chr11 5283293 5283314 5283298 5283293 -
attaactggggactcgaaaatc

SEQ ID NO: 133767 - DNA, 22 bp, Artificial Sequence
  Synthetic oligonucleotide; TTA chr11 5283292 5283313 5283297 5283292 -
ttaactggggactcgaaaatca

SEQ ID NO: 133768 - DNA, 22 bp, Artificial Sequence
  Synthetic oligonucleotide; TTA chr11 5283289 5283310 5283294 5283289 -
actggggactcgaaaatcaaag

SEQ ID NO: 133769 - DNA, 22 bp, Artificial Sequence
  Synthetic oligonucleotide; CTG chr11 5283285 5283306 5283290 5283285 -
gggactcgaaaatcaaagacat

SEQ ID NO: 133770 - DNA, 22 bp, Artificial Sequence
  Synthetic oligonucleotide; CTC chr11 5283278 5283299 5283283 5283278 -
gaaaatcaaagacatgaaataa

SEQ ID NO: 133771 - DNA, 22 bp, Artificial Sequence
  Synthetic oligonucleotide; TTT chr11 5283253 5283274 5283258 5283253 -
gtccaagcttacagaaccacca

SEQ ID NO: 133772 - DNA, 22 bp, Artificial Sequence
  Synthetic oligonucleotide; TTG chr11 5283252 5283273 5283257 5283252 -
tccaagcttacagaaccaccaa

SEQ ID NO: 133773 - DNA, 22 bp, Artificial Sequence
  Synthetic oligonucleotide; CTT chr11 5283243 5283264 5283248 5283243 -
acagaaccaccaagtagtaagg

SEQ ID NO: 133774 - DNA, 22 bp, Artificial Sequence
  Synthetic oligonucleotide; TTA chr11 5283242 5283263 5283247 5283242 -
cagaaccaccaagtagtaaggc

SEQ ID NO: 133775 - DNA, 22 bp, Artificial Sequence
  Synthetic oligonucleotide; CTA chr11 5283218 5283239 5283223 5283218 -
ggatgtagacccagttctgcta

SEQ ID NO: 133776 - DNA, 22 bp, Artificial Sequence
  Synthetic oligonucleotide; TTC chr11 5283201 5283222 5283206 5283201 -
tgctacctctgaagacagtgtt

SEQ ID NO: 133777 - DNA, 22 bp, Artificial Sequence
  Synthetic oligonucleotide; CTG chr11 5283199 5283220 5283204 5283199 -
ctacctctgaagacagtgtttt

SEQ ID NO: 133778 - DNA, 22 bp, Artificial Sequence
  Synthetic oligonucleotide; CTA chr11 5283196 5283217 5283201 5283196 -
cctctgaagacagtgttttttc

SEQ ID NO: 133779 - DNA, 22 bp, Artificial Sequence
  Synthetic oligonucleotide; CTC chr11 5283192 5283213 5283197 5283192 -
tgaagacagtgttttttccaca

SEQ ID NO: 133780 - DNA, 22 bp, Artificial Sequence
  Synthetic oligonucleotide; CTG chr11 5283190 5283211 5283195 5283190 -
aagacagtgttttttccacagc

SEQ ID NO: 133781 - DNA, 22 bp, Artificial Sequence
  Synthetic oligonucleotide; TTT chr11 5283178 5283199 5283183 5283178 -
tttccacagcaaaacacaaact

SEQ ID NO: 133782 - DNA, 22 bp, Artificial Sequence
  Synthetic oligonucleotide; TTT chr11 5283177 5283198 5283182 5283177 -
ttccacagcaaaacacaaactc

SEQ ID NO: 133783 - DNA, 22 bp, Artificial Sequence
  Synthetic oligonucleotide; TTT chr11 5283176 5283197 5283181 5283176 -
tccacagcaaaacacaaactca

SEQ ID NO: 133784 - DNA, 22 bp, Artificial Sequence
  Synthetic oligonucleotide; TTT chr11 5283175 5283196 5283180 5283175 -
ccacagcaaaacacaaactcag

SEQ ID NO: 133785 - DNA, 22 bp, Artificial Sequence
  Synthetic oligonucleotide; TTC chr11 5283174 5283195 5283179 5283174 -
cacagcaaaacacaaactcaga

SEQ ID NO: 133786 - DNA, 22 bp, Artificial Sequence
  Synthetic oligonucleotide; CTC chr11 5283155 5283176 5283160 5283155 -
agatattgtggatgcgagaaat

SEQ ID NO: 133787 - DNA, 22 bp, Artificial Sequence
  Synthetic oligonucleotide; TTG chr11 5283147 5283168 5283152 5283147 -
tggatgcgagaaattagaagta

SEQ ID NO: 133788 - DNA, 22 bp, Artificial Sequence
  Synthetic oligonucleotide; TTA chr11 5283131 5283152 5283136 5283131 -
gaagtagatattcctgccctgt

SEQ ID NO: 133789 - DNA, 22 bp, Artificial Sequence
  Synthetic oligonucleotide; TTC chr11 5283118 5283139 5283123 5283118 -
ctgccctgtggcccttgcttct

SEQ ID NO: 133790 - DNA, 22 bp, Artificial Sequence
  Synthetic oligonucleotide; CTG chr11 5283115 5283136 5283120 5283115 -
ccctgtggcccttgcttcttac

SEQ ID NO: 133791 - DNA, 22 bp, Artificial Sequence
  Synthetic oligonucleotide; CTG chr11 5283110 5283131 5283115 5283110 -
tggcccttgcttcttactttta

SEQ ID NO: 133792 - DNA, 22 bp, Artificial Sequence
  Synthetic oligonucleotide; CTT chr11 5283102 5283123 5283107 5283102 -
gcttcttacttttacttcttgt

SEQ ID NO: 133793 - DNA, 22 bp, Artificial Sequence
  Synthetic oligonucleotide; TTG chr11 5283101 5283122 5283106 5283101 -
cttcttacttttacttcttgtc

SEQ ID NO: 133794 - DNA, 22 bp, Artificial Sequence
  Synthetic oligonucleotide; CTT chr11 5283098 5283119 5283103 5283098 -
cttacttttacttcttgtcgat

SEQ ID NO: 133795 - DNA, 22 bp, Artificial Sequence
  Synthetic oligonucleotide; TTC chr11 5283097 5283118 5283102 5283097 -
ttacttttacttcttgtcgatt

SEQ ID NO: 133796 - DNA, 22 bp, Artificial Sequence
  Synthetic oligonucleotide; CTT chr11 5283095 5283116 5283100 5283095 -
acttttacttcttgtcgattgg

SEQ ID NO: 133797 - DNA, 22 bp, Artificial Sequence
  Synthetic oligonucleotide; TTA chr11 5283094 5283115 5283099 5283094 -
cttttacttcttgtcgattgga

SEQ ID NO: 133798 - DNA, 22 bp, Artificial Sequence
  Synthetic oligonucleotide; CTT chr11 5283091 5283112 5283096 5283091 -
ttacttcttgtcgattggaagt

SEQ ID NO: 133799 - DNA, 22 bp, Artificial Sequence
  Synthetic oligonucleotide; TTT chr11 5283090 5283111 5283095 5283090 -
tacttcttgtcgattggaagtt

SEQ ID NO: 133800 - DNA, 22 bp, Artificial Sequence
  Synthetic oligonucleotide; TTT chr11 5283089 5283110 5283094 5283089 -
acttcttgtcgattggaagttg

SEQ ID NO: 133801 - DNA, 22 bp, Artificial Sequence
  Synthetic oligonucleotide; TTA chr11 5283088 5283109 5283093 5283088 -
cttcttgtcgattggaagttgt

SEQ ID NO: 133802 - DNA, 22 bp, Artificial Sequence
  Synthetic oligonucleotide; CTT chr11 5283085 5283106 5283090 5283085 -
cttgtcgattggaagttgtggt

SEQ ID NO: 133803 - DNA, 22 bp, Artificial Sequence
  Synthetic oligonucleotide; TTC chr11 5283084 5283105 5283089 5283084 -
ttgtcgattggaagttgtggtc

SEQ ID NO: 133804 - DNA, 22 bp, Artificial Sequence
  Synthetic oligonucleotide; CTT chr11 5283082 5283103 5283087 5283082 -
gtcgattggaagttgtggtcca

SEQ ID NO: 133805 - DNA, 22 bp, Artificial Sequence
  Synthetic oligonucleotide; TTG chr11 5283081 5283102 5283086 5283081 -
tcgattggaagttgtggtccaa

SEQ ID NO: 133806 - DNA, 22 bp, Artificial Sequence
  Synthetic oligonucleotide; TTG chr11 5283074 5283095 5283079 5283074 -
gaagttgtggtccaagccacag

SEQ ID NO: 133807 - DNA, 22 bp, Artificial Sequence
  Synthetic oligonucleotide; TTG chr11 5283067 5283088 5283072 5283067 -
tggtccaagccacagttgcaga

SEQ ID NO: 133808 - DNA, 22 bp, Artificial Sequence
  Synthetic oligonucleotide; TTG chr11 5283049 5283070 5283054 5283049 -
cagaccatacttcctcaaccat

SEQ ID NO: 133809 - DNA, 22 bp, Artificial Sequence
  Synthetic oligonucleotide; CTT chr11 5283037 5283058 5283042 5283037 -
cctcaaccataattgcatttct

SEQ ID NO: 133810 - DNA, 22 bp, Artificial Sequence
  Synthetic oligonucleotide; TTC chr11 5283036 5283057 5283041 5283036 -
ctcaaccataattgcatttctt

SEQ ID NO: 133811 - DNA, 22 bp, Artificial Sequence
  Synthetic oligonucleotide; CTC chr11 5283033 5283054 5283038 5283033 -
aaccataattgcatttcttcag

SEQ ID NO: 133812 - DNA, 22 bp, Artificial Sequence
  Synthetic oligonucleotide; TTG chr11 5283022 5283043 5283027 5283022 -
catttcttcaggaaagtttgag

SEQ ID NO: 133813 - DNA, 22 bp, Artificial Sequence
  Synthetic oligonucleotide; TTT chr11 5283017 5283038 5283022 5283017 -
cttcaggaaagtttgagggaga

SEQ ID NO: 133814 - DNA, 22 bp, Artificial Sequence
  Synthetic oligonucleotide; TTC chr11 5283016 5283037 5283021 5283016 -
ttcaggaaagtttgagggagaa

SEQ ID NO: 133815 - DNA, 22 bp, Artificial Sequence
  Synthetic oligonucleotide; CTT chr11 5283014 5283035 5283019 5283014 -
caggaaagtttgagggagaaaa

SEQ ID NO: 133816 - DNA, 22 bp, Artificial Sequence
  Synthetic oligonucleotide; TTC chr11 5283013 5283034 5283018 5283013 -
aggaaagtttgagggagaaaaa

SEQ ID NO: 133817 - DNA, 22 bp, Artificial Sequence
  Synthetic oligonucleotide; TTT chr11 5283003 5283024 5283008 5283003 -
gagggagaaaaaggtaaagaaa

SEQ ID NO: 133818 - DNA, 22 bp, Artificial Sequence
  Synthetic oligonucleotide; TTG chr11 5283002 5283023 5283007 5283002 -
agggagaaaaaggtaaagaaaa

SEQ ID NO: 133819 - DNA, 22 bp, Artificial Sequence
  Synthetic oligonucleotide; TTT chr11 5282976 5282997 5282981 5282976 -
agaaacaacttcagaataaaga

SEQ ID NO: 133820 - DNA, 22 bp, Artificial Sequence
  Synthetic oligonucleotide; TTA chr11 5282975 5282996 5282980 5282975 -
gaaacaacttcagaataaagag

SEQ ID NO: 133821 - DNA, 22 bp, Artificial Sequence
  Synthetic oligonucleotide; CTT chr11 5282965 5282986 5282970 5282965 -
cagaataaagagattttctctt

SEQ ID NO: 133822 - DNA, 22 bp, Artificial Sequence
  Synthetic oligonucleotide; TTC chr11 5282964 5282985 5282969 5282964 -
agaataaagagattttctcttg

SEQ ID NO: 133823 - DNA, 22 bp, Artificial Sequence
  Synthetic oligonucleotide; TTT chr11 5282949 5282970 5282954 5282949 -
tctcttgggttacagagattgt

SEQ ID NO: 133824 - DNA, 22 bp, Artificial Sequence
  Synthetic oligonucleotide; TTT chr11 5282948 5282969 5282953 5282948 -
ctcttgggttacagagattgtc

SEQ ID NO: 133825 - DNA, 22 bp, Artificial Sequence
  Synthetic oligonucleotide; TTC chr11 5282947 5282968 5282952 5282947 -
tcttgggttacagagattgtca

SEQ ID NO: 133826 - DNA, 22 bp, Artificial Sequence
  Synthetic oligonucleotide; CTC chr11 5282945 5282966 5282950 5282945 -
ttgggttacagagattgtcata

SEQ ID NO: 133827 - DNA, 22 bp, Artificial Sequence
  Synthetic oligonucleotide; CTT chr11 5282943 5282964 5282948 5282943 -
gggttacagagattgtcatatg

SEQ ID NO: 133828 - DNA, 22 bp, Artificial Sequence
  Synthetic oligonucleotide; TTG chr11 5282942 5282963 5282947 5282942 -
ggttacagagattgtcatatga

SEQ ID NO: 133829 - DNA, 22 bp, Artificial Sequence
  Synthetic oligonucleotide; TTA chr11 5282937 5282958 5282942 5282937 -
cagagattgtcatatgacaaat

SEQ ID NO: 133830 - DNA, 22 bp, Artificial Sequence
  Synthetic oligonucleotide; TTG chr11 5282928 5282949 5282933 5282928 -
tcatatgacaaattataagcag

SEQ ID NO: 133831 - DNA, 22 bp, Artificial Sequence
  Synthetic oligonucleotide; TTA chr11 5282913 5282934 5282918 5282913 -
taagcagacacttgagaaaact

SEQ ID NO: 133832 - DNA, 22 bp, Artificial Sequence
  Synthetic oligonucleotide; CTT chr11 5282900 5282921 5282905 5282900 -
gagaaaactgaaggcccatgcc

SEQ ID NO: 133833 - DNA, 22 bp, Artificial Sequence
  Synthetic oligonucleotide; TTG chr11 5282899 5282920 5282904 5282899 -
agaaaactgaaggcccatgcct

SEQ ID NO: 133834 - DNA, 22 bp, Artificial Sequence
  Synthetic oligonucleotide; CTG chr11 5282890 5282911 5282895 5282890 -
aaggcccatgcctgcccaaatt

SEQ ID NO: 133835 - DNA, 22 bp, Artificial Sequence
  Synthetic oligonucleotide; CTG chr11 5282876 5282897 5282881 5282876 -
cccaaattaccctttgacccct

SEQ ID NO: 133836 - DNA, 22 bp, Artificial Sequence
  Synthetic oligonucleotide; TTA chr11 5282867 5282888 5282872 5282867 -
ccctttgaccccttggtcaagc

SEQ ID NO: 133837 - DNA, 22 bp, Artificial Sequence
  Synthetic oligonucleotide; CTT chr11 5282862 5282883 5282867 5282862 -
tgaccccttggtcaagctgcaa

SEQ ID NO: 133838 - DNA, 22 bp, Artificial Sequence
  Synthetic oligonucleotide; TTT chr11 5282861 5282882 5282866 5282861 -
gaccccttggtcaagctgcaac

SEQ ID NO: 133839 - DNA, 22 bp, Artificial Sequence
  Synthetic oligonucleotide; TTG chr11 5282860 5282881 5282865 5282860 -
accccttggtcaagctgcaact

SEQ ID NO: 133840 - DNA, 22 bp, Artificial Sequence
  Synthetic oligonucleotide; CTT chr11 5282853 5282874 5282858 5282853 -
ggtcaagctgcaactttggtta

SEQ ID NO: 133841 - DNA, 22 bp, Artificial Sequence
  Synthetic oligonucleotide; TTG chr11 5282852 5282873 5282857 5282852 -
gtcaagctgcaactttggttaa

SEQ ID NO: 133842 - DNA, 22 bp, Artificial Sequence
  Synthetic oligonucleotide; CTG chr11 5282843 5282864 5282848 5282843 -
caactttggttaaagggagtgt

SEQ ID NO: 133843 - DNA, 22 bp, Artificial Sequence
  Synthetic oligonucleotide; CTT chr11 5282837 5282858 5282842 5282837 -
tggttaaagggagtgtttatgt

SEQ ID NO: 133844 - DNA, 22 bp, Artificial Sequence
  Synthetic oligonucleotide; TTT chr11 5282836 5282857 5282841 5282836 -
ggttaaagggagtgtttatgtg

SEQ ID NO: 133845 - DNA, 22 bp, Artificial Sequence
  Synthetic oligonucleotide; TTG chr11 5282835 5282856 5282840 5282835 -
gttaaagggagtgtttatgtgt

SEQ ID NO: 133846 - DNA, 22 bp, Artificial Sequence
  Synthetic oligonucleotide; TTA chr11 5282831 5282852 5282836 5282831 -
aagggagtgtttatgtgttata

SEQ ID NO: 133847 - DNA, 22 bp, Artificial Sequence
  Synthetic oligonucleotide; TTT chr11 5282819 5282840 5282824 5282819 -
atgtgttatagtgttcatttac

SEQ ID NO: 133848 - DNA, 22 bp, Artificial Sequence
  Synthetic oligonucleotide; TTA chr11 5282818 5282839 5282823 5282818 -
tgtgttatagtgttcatttact

SEQ ID NO: 133849 - DNA, 22 bp, Artificial Sequence
  Synthetic oligonucleotide; TTA chr11 5282811 5282832 5282816 5282811 -
tagtgttcatttactcttctgg

SEQ ID NO: 133850 - DNA, 22 bp, Artificial Sequence
  Synthetic oligonucleotide; TTC chr11 5282803 5282824 5282808 5282803 -
atttactcttctggtctaaccc

SEQ ID NO: 133851 - DNA, 22 bp, Artificial Sequence
  Synthetic oligonucleotide; TTT chr11 5282799 5282820 5282804 5282799 -
actcttctggtctaacccattg

SEQ ID NO: 133852 - DNA, 22 bp, Artificial Sequence
  Synthetic oligonucleotide; TTA chr11 5282798 5282819 5282803 5282798 -
ctcttctggtctaacccattgg

SEQ ID NO: 133853 - DNA, 22 bp, Artificial Sequence
  Synthetic oligonucleotide; CTC chr11 5282795 5282816 5282800 5282795 -
ttctggtctaacccattggctc

SEQ ID NO: 133854 - DNA, 22 bp, Artificial Sequence
  Synthetic oligonucleotide; CTT chr11 5282793 5282814 5282798 5282793 -
ctggtctaacccattggctccg

SEQ ID NO: 133855 - DNA, 22 bp, Artificial Sequence
  Synthetic oligonucleotide; TTC chr11 5282792 5282813 5282797 5282792 -
tggtctaacccattggctccgt

SEQ ID NO: 133856 - DNA, 22 bp, Artificial Sequence
  Synthetic oligonucleotide; CTG chr11 5282790 5282811 5282795 5282790 -
gtctaacccattggctccgtct

SEQ ID NO: 133857 - DNA, 22 bp, Artificial Sequence
  Synthetic oligonucleotide; CTA chr11 5282785 5282806 5282790 5282785 -
acccattggctccgtcttcatc

SEQ ID NO: 133858 - DNA, 22 bp, Artificial Sequence
  Synthetic oligonucleotide; TTG chr11 5282777 5282798 5282782 5282777 -
gctccgtcttcatcctgcagtg

SEQ ID NO: 133859 - DNA, 22 bp, Artificial Sequence
  Synthetic oligonucleotide; CTC chr11 5282773 5282794 5282778 5282773 -
cgtcttcatcctgcagtgacct

SEQ ID NO: 133860 - DNA, 22 bp, Artificial Sequence
  Synthetic oligonucleotide; CTT chr11 5282767 5282788 5282772 5282767 -
catcctgcagtgacctcagtgc

SEQ ID NO: 133861 - DNA, 22 bp, Artificial Sequence
  Synthetic oligonucleotide; TTC chr11 5282766 5282787 5282771 5282766 -
atcctgcagtgacctcagtgcc

SEQ ID NO: 133862 - DNA, 22 bp, Artificial Sequence
  Synthetic oligonucleotide; CTG chr11 5282760 5282781 5282765 5282760 -
cagtgacctcagtgcctcagaa

SEQ ID NO: 133863 - DNA, 22 bp, Artificial Sequence
  Synthetic oligonucleotide; CTC chr11 5282750 5282771 5282755 5282750 -
agtgcctcagaaacatacatat

SEQ ID NO: 133864 - DNA, 22 bp, Artificial Sequence
  Synthetic oligonucleotide; CTC chr11 5282742 5282763 5282747 5282742 -
agaaacatacatatgtttgtct

SEQ ID NO: 133865 - DNA, 22 bp, Artificial Sequence
  Synthetic oligonucleotide; TTT chr11 5282724 5282745 5282729 5282724 -
gtctagtttaagtttgtgtgaa

SEQ ID NO: 133866 - DNA, 22 bp, Artificial Sequence
  Synthetic oligonucleotide; TTG chr11 5282723 5282744 5282728 5282723 -
tctagtttaagtttgtgtgaaa

SEQ ID NO: 133867 - DNA, 22 bp, Artificial Sequence
  Synthetic oligonucleotide; CTA chr11 5282719 5282740 5282724 5282719 -
gtttaagtttgtgtgaaattct

SEQ ID NO: 133868 - DNA, 22 bp, Artificial Sequence
  Synthetic oligonucleotide; TTT chr11 5282715 5282736 5282720 5282715 -
aagtttgtgtgaaattctaact

SEQ ID NO: 133869 - DNA, 22 bp, Artificial Sequence
  Synthetic oligonucleotide; TTA chr11 5282714 5282735 5282719 5282714 -
agtttgtgtgaaattctaacta

SEQ ID NO: 133870 - DNA, 22 bp, Artificial Sequence
  Synthetic oligonucleotide; TTT chr11 5282709 5282730 5282714 5282709 -
gtgtgaaattctaactagcgtc

SEQ ID NO: 133871 - DNA, 22 bp, Artificial Sequence
  Synthetic oligonucleotide; TTG chr11 5282708 5282729 5282713 5282708 -
tgtgaaattctaactagcgtca

SEQ ID NO: 133872 - DNA, 22 bp, Artificial Sequence
  Synthetic oligonucleotide; TTC chr11 5282698 5282719 5282703 5282698 -
taactagcgtcaagaactgagg

SEQ ID NO: 133873 - DNA, 22 bp, Artificial Sequence
  Synthetic oligonucleotide; CTA chr11 5282696 5282717 5282701 5282696 -
actagcgtcaagaactgagggc

SEQ ID NO: 133874 - DNA, 22 bp, Artificial Sequence
  Synthetic oligonucleotide; CTA chr11 5282692 5282713 5282697 5282692 -
gcgtcaagaactgagggcccta

SEQ ID NO: 133875 - DNA, 22 bp, Artificial Sequence
  Synthetic oligonucleotide; CTG chr11 5282679 5282700 5282684 5282679 -
agggccctaaactatgctagga

SEQ ID NO: 133876 - DNA, 22 bp, Artificial Sequence
  Synthetic oligonucleotide; CTA chr11 5282670 5282691 5282675 5282670 -
aactatgctaggaatagtgctg

SEQ ID NO: 133877 - DNA, 22 bp, Artificial Sequence
  Synthetic oligonucleotide; CTA chr11 5282665 5282686 5282670 5282665 -
tgctaggaatagtgctgtggtg

SEQ ID NO: 133878 - DNA, 22 bp, Artificial Sequence
  Synthetic oligonucleotide; CTA chr11 5282660 5282681 5282665 5282660 -
ggaatagtgctgtggtgctgtg

SEQ ID NO: 133879 - DNA, 22 bp, Artificial Sequence
  Synthetic oligonucleotide; CTG chr11 5282648 5282669 5282653 5282648 -
tggtgctgtgataggtacacaa

SEQ ID NO: 133880 - DNA, 22 bp, Artificial Sequence
  Synthetic oligonucleotide; CTG chr11 5282640 5282661 5282645 5282640 -
tgataggtacacaagaaatgag

SEQ ID NO: 133881 - DNA, 22 bp, Artificial Sequence
  Synthetic oligonucleotide; CTG chr11 5282609 5282630 5282614 5282609 -
cagattctctgcatctcccttt

SEQ ID NO: 133882 - DNA, 22 bp, Artificial Sequence
  Synthetic oligonucleotide; TTC chr11 5282602 5282623 5282607 5282602 -
tctgcatctccctttgccgggt

SEQ ID NO: 133883 - DNA, 22 bp, Artificial Sequence
  Synthetic oligonucleotide; CTC chr11 5282600 5282621 5282605 5282600 -
tgcatctccctttgccgggtct

SEQ ID NO: 133884 - DNA, 22 bp, Artificial Sequence
  Synthetic oligonucleotide; CTG chr11 5282598 5282619 5282603 5282598 -
catctccctttgccgggtctga

SEQ ID NO: 133885 - DNA, 22 bp, Artificial Sequence
  Synthetic oligonucleotide; CTC chr11 5282592 5282613 5282597 5282592 -
cctttgccgggtctgacaacaa

SEQ ID NO: 133886 - DNA, 22 bp, Artificial Sequence
  Synthetic oligonucleotide; CTT chr11 5282588 5282609 5282593 5282588 -
tgccgggtctgacaacaaagtt

SEQ ID NO: 133887 - DNA, 22 bp, Artificial Sequence
  Synthetic oligonucleotide; TTT chr11 5282587 5282608 5282592 5282587 -
gccgggtctgacaacaaagttt

SEQ ID NO: 133888 - DNA, 22 bp, Artificial Sequence
  Synthetic oligonucleotide; TTG chr11 5282586 5282607 5282591 5282586 -
ccgggtctgacaacaaagtttc

SEQ ID NO: 133889 - DNA, 22 bp, Artificial Sequence
  Synthetic oligonucleotide; CTG chr11 5282577 5282598 5282582 5282577 -
acaacaaagtttccccaaattt

SEQ ID NO: 133890 - DNA, 22 bp, Artificial Sequence
  Synthetic oligonucleotide; TTT chr11 5282565 5282586 5282570 5282565 -
ccccaaattttaccaatgcaag

SEQ ID NO: 133891 - DNA, 22 bp, Artificial Sequence
  Synthetic oligonucleotide; TTC chr11 5282564 5282585 5282569 5282564 -
cccaaattttaccaatgcaagc

SEQ ID NO: 133892 - DNA, 22 bp, Artificial Sequence
  Synthetic oligonucleotide; TTT chr11 5282555 5282576 5282560 5282555 -
taccaatgcaagccatttctcc

SEQ ID NO: 133893 - DNA, 22 bp, Artificial Sequence
  Synthetic oligonucleotide; TTT chr11 5282554 5282575 5282559 5282554 -
accaatgcaagccatttctcca

SEQ ID NO: 133894 - DNA, 22 bp, Artificial Sequence
  Synthetic oligonucleotide; TTA chr11 5282553 5282574 5282558 5282553 -
ccaatgcaagccatttctccat

SEQ ID NO: 133895 - DNA, 22 bp, Artificial Sequence
  Synthetic oligonucleotide; TTT chr11 5282537 5282558 5282542 5282537 -
ctccatatgctaactactttaa

SEQ ID NO: 133896 - DNA, 22 bp, Artificial Sequence
  Synthetic oligonucleotide; TTC chr11 5282536 5282557 5282541 5282536 -
tccatatgctaactactttaaa

SEQ ID NO: 133897 - DNA, 22 bp, Artificial Sequence
  Synthetic oligonucleotide; CTC chr11 5282534 5282555 5282539 5282534 -
catatgctaactactttaaaat

SEQ ID NO: 133898 - DNA, 22 bp, Artificial Sequence
  Synthetic oligonucleotide; CTA chr11 5282525 5282546 5282530 5282525 -
actactttaaaatcatttgggg

SEQ ID NO: 133899 - DNA, 22 bp, Artificial Sequence
  Synthetic oligonucleotide; CTA chr11 5282521 5282542 5282526 5282521 -
ctttaaaatcatttggggcttc

SEQ ID NO: 133900 - DNA, 22 bp, Artificial Sequence
  Synthetic oligonucleotide; CTT chr11 5282518 5282539 5282523 5282518 -
taaaatcatttggggcttcaca

SEQ ID NO: 133901 - DNA, 22 bp, Artificial Sequence
  Synthetic oligonucleotide; TTT chr11 5282517 5282538 5282522 5282517 -
aaaatcatttggggcttcacat

SEQ ID NO: 133902 - DNA, 22 bp, Artificial Sequence
  Synthetic oligonucleotide; TTA chr11 5282516 5282537 5282521 5282516 -
aaatcatttggggcttcacatt

SEQ ID NO: 133903 - DNA, 22 bp, Artificial Sequence
  Synthetic oligonucleotide; TTT chr11 5282507 5282528 5282512 5282507 -
ggggcttcacattgtctttctc

SEQ ID NO: 133904 - DNA, 22 bp, Artificial Sequence
  Synthetic oligonucleotide; TTG chr11 5282506 5282527 5282511 5282506 -
gggcttcacattgtctttctca

SEQ ID NO: 133905 - DNA, 22 bp, Artificial Sequence
  Synthetic oligonucleotide; CTT chr11 5282500 5282521 5282505 5282500 -
cacattgtctttctcatctgta

SEQ ID NO: 133906 - DNA, 22 bp, Artificial Sequence
  Synthetic oligonucleotide; TTC chr11 5282499 5282520 5282504 5282499 -
acattgtctttctcatctgtaa

SEQ ID NO: 133907 - DNA, 22 bp, Artificial Sequence
  Synthetic oligonucleotide; TTG chr11 5282493 5282514 5282498 5282493 -
tctttctcatctgtaaaaagaa

SEQ ID NO: 133908 - DNA, 22 bp, Artificial Sequence
  Synthetic oligonucleotide; CTT chr11 5282489 5282510 5282494 5282489 -
tctcatctgtaaaaagaatgga

SEQ ID NO: 133909 - DNA, 22 bp, Artificial Sequence
  Synthetic oligonucleotide; TTT chr11 5282488 5282509 5282493 5282488 -
ctcatctgtaaaaagaatggaa

SEQ ID NO: 133910 - DNA, 22 bp, Artificial Sequence
  Synthetic oligonucleotide; TTC chr11 5282487 5282508 5282492 5282487 -
tcatctgtaaaaagaatggaag

SEQ ID NO: 133911 - DNA, 22 bp, Artificial Sequence
  Synthetic oligonucleotide; CTC chr11 5282485 5282506 5282490 5282485 -
atctgtaaaaagaatggaagaa

SEQ ID NO: 133912 - DNA, 22 bp, Artificial Sequence
  Synthetic oligonucleotide; CTG chr11 5282480 5282501 5282485 5282480 -
taaaaagaatggaagaactcat

SEQ ID NO: 133913 - DNA, 22 bp, Artificial Sequence
  Synthetic oligonucleotide; CTC chr11 5282460 5282481 5282465 5282460 -
attcctacagaactccctatgt

SEQ ID NO: 133914 - DNA, 22 bp, Artificial Sequence
  Synthetic oligonucleotide; TTC chr11 5282456 5282477 5282461 5282456 -
ctacagaactccctatgtcttc

SEQ ID NO: 133915 - DNA, 22 bp, Artificial Sequence
  Synthetic oligonucleotide; CTA chr11 5282453 5282474 5282458 5282453 -
cagaactccctatgtcttccct

SEQ ID NO: 133916 - DNA, 22 bp, Artificial Sequence
  Synthetic oligonucleotide; CTC chr11 5282445 5282466 5282450 5282445 -
cctatgtcttccctgatgggct

SEQ ID NO: 133917 - DNA, 22 bp, Artificial Sequence
  Synthetic oligonucleotide; CTA chr11 5282441 5282462 5282446 5282441 -
tgtcttccctgatgggctagag

SEQ ID NO: 133918 - DNA, 22 bp, Artificial Sequence
  Synthetic oligonucleotide; CTT chr11 5282435 5282456 5282440 5282435 -
ccctgatgggctagagttcctc

SEQ ID NO: 133919 - DNA, 22 bp, Artificial Sequence
  Synthetic oligonucleotide; TTC chr11 5282434 5282455 5282439 5282434 -
cctgatgggctagagttcctct

SEQ ID NO: 133920 - DNA, 22 bp, Artificial Sequence
  Synthetic oligonucleotide; CTG chr11 5282430 5282451 5282435 5282430 -
atgggctagagttcctctttct

SEQ ID NO: 133921 - DNA, 22 bp, Artificial Sequence
  Synthetic oligonucleotide; CTA chr11 5282422 5282443 5282427 5282422 -
gagttcctctttctcaaaaatt

SEQ ID NO: 133922 - DNA, 22 bp, Artificial Sequence
  Synthetic oligonucleotide; TTC chr11 5282416 5282437 5282421 5282416 -
ctctttctcaaaaattagccat

SEQ ID NO: 133923 - DNA, 22 bp, Artificial Sequence
  Synthetic oligonucleotide; CTC chr11 5282413 5282434 5282418 5282413 -
tttctcaaaaattagccattat

SEQ ID NO: 133924 - DNA, 22 bp, Artificial Sequence
  Synthetic oligonucleotide; CTT chr11 5282411 5282432 5282416 5282411 -
tctcaaaaattagccattattg

SEQ ID NO: 133925 - DNA, 22 bp, Artificial Sequence
  Synthetic oligonucleotide; TTT chr11 5282410 5282431 5282415 5282410 -
ctcaaaaattagccattattgt

SEQ ID NO: 133926 - DNA, 22 bp, Artificial Sequence
  Synthetic oligonucleotide; TTC chr11 5282409 5282430 5282414 5282409 -
tcaaaaattagccattattgta

SEQ ID NO: 133927 - DNA, 22 bp, Artificial Sequence
  Synthetic oligonucleotide; CTC chr11 5282407 5282428 5282412 5282407 -
aaaaattagccattattgtatt

SEQ ID NO: 133928 - DNA, 22 bp, Artificial Sequence
  Synthetic oligonucleotide; TTA chr11 5282399 5282420 5282404 5282399 -
gccattattgtatttccttcta

SEQ ID NO: 133929 - DNA, 22 bp, Artificial Sequence
  Synthetic oligonucleotide; TTA chr11 5282392 5282413 5282397 5282392 -
ttgtatttccttctaagccaaa

SEQ ID NO: 133930 - DNA, 22 bp, Artificial Sequence
  Synthetic oligonucleotide; TTG chr11 5282389 5282410 5282394 5282389 -
tatttccttctaagccaaagct

SEQ ID NO: 133931 - DNA, 22 bp, Artificial Sequence
  Synthetic oligonucleotide; TTT chr11 5282384 5282405 5282389 5282384 -
ccttctaagccaaagctcagag

SEQ ID NO: 133932 - DNA, 22 bp, Artificial Sequence
  Synthetic oligonucleotide; TTC chr11 5282383 5282404 5282388 5282383 -
cttctaagccaaagctcagagg

SEQ ID NO: 133933 - DNA, 22 bp, Artificial Sequence
  Synthetic oligonucleotide; CTT chr11 5282380 5282401 5282385 5282380 -
ctaagccaaagctcagaggtct

SEQ ID NO: 133934 - DNA, 22 bp, Artificial Sequence
  Synthetic oligonucleotide; TTC chr11 5282379 5282400 5282384 5282379 -
taagccaaagctcagaggtctt

SEQ ID NO: 133935 - DNA, 22 bp, Artificial Sequence
  Synthetic oligonucleotide; CTA chr11 5282377 5282398 5282382 5282377 -
agccaaagctcagaggtcttgt

SEQ ID NO: 133936 - DNA, 22 bp, Artificial Sequence
  Synthetic oligonucleotide; CTC chr11 5282366 5282387 5282371 5282366 -
agaggtcttgtattgcccagtg

SEQ ID NO: 133937 - DNA, 22 bp, Artificial Sequence
  Synthetic oligonucleotide; CTT chr11 5282357 5282378 5282362 5282357 -
gtattgcccagtgacatgcaca

SEQ ID NO: 133938 - DNA, 22 bp, Artificial Sequence
  Synthetic oligonucleotide; TTG chr11 5282356 5282377 5282361 5282356 -
tattgcccagtgacatgcacac

SEQ ID NO: 133939 - DNA, 22 bp, Artificial Sequence
  Synthetic oligonucleotide; TTG chr11 5282351 5282372 5282356 5282351 -
cccagtgacatgcacactggtc

SEQ ID NO: 133940 - DNA, 22 bp, Artificial Sequence
  Synthetic oligonucleotide; CTG chr11 5282332 5282353 5282337 5282332 -
gtcaaaagtaggctaagtagaa

SEQ ID NO: 133941 - DNA, 22 bp, Artificial Sequence
  Synthetic oligonucleotide; CTA chr11 5282317 5282338 5282322 5282317 -
agtagaagggtactttcacagg

SEQ ID NO: 133942 - DNA, 22 bp, Artificial Sequence
  Synthetic oligonucleotide; CTT chr11 5282302 5282323 5282307 5282302 -
tcacaggaacagagagcaaaag

SEQ ID NO: 133943 - DNA, 22 bp, Artificial Sequence
  Synthetic oligonucleotide; TTT chr11 5282301 5282322 5282306 5282301 -
cacaggaacagagagcaaaaga

SEQ ID NO: 133944 - DNA, 22 bp, Artificial Sequence
  Synthetic oligonucleotide; TTC chr11 5282300 5282321 5282305 5282300 -
acaggaacagagagcaaaagag

SEQ ID NO: 133945 - DNA, 22 bp, Artificial Sequence
  Synthetic oligonucleotide; TTA chr11 5282233 5282254 5282238 5282233 -
caacatgatggcttgttgtcta

SEQ ID NO: 133946 - DNA, 22 bp, Artificial Sequence
  Synthetic oligonucleotide; CTT chr11 5282219 5282240 5282224 5282219 -
gttgtctaaatatctcctaggg

SEQ ID NO: 133947 - DNA, 22 bp, Artificial Sequence
  Synthetic oligonucleotide; TTG chr11 5282218 5282239 5282223 5282218 -
ttgtctaaatatctcctaggga

SEQ ID NO: 133948 - DNA, 22 bp, Artificial Sequence
  Synthetic oligonucleotide; TTG chr11 5282215 5282236 5282220 5282215 -
tctaaatatctcctagggaatt

SEQ ID NO: 133949 - DNA, 22 bp, Artificial Sequence
  Synthetic oligonucleotide; CTA chr11 5282211 5282232 5282216 5282211 -
aatatctcctagggaattattg

SEQ ID NO: 133950 - DNA, 22 bp, Artificial Sequence
  Synthetic oligonucleotide; CTC chr11 5282203 5282224 5282208 5282203 -
ctagggaattattgtgagaggt

SEQ ID NO: 133951 - DNA, 22 bp, Artificial Sequence
  Synthetic oligonucleotide; CTA chr11 5282200 5282221 5282205 5282200 -
gggaattattgtgagaggtctg

SEQ ID NO: 133952 - DNA, 22 bp, Artificial Sequence
  Synthetic oligonucleotide; TTA chr11 5282192 5282213 5282197 5282192 -
ttgtgagaggtctgaatagtgt

SEQ ID NO: 133953 - DNA, 22 bp, Artificial Sequence
  Synthetic oligonucleotide; TTG chr11 5282189 5282210 5282194 5282189 -
tgagaggtctgaatagtgttgt

SEQ ID NO: 133954 - DNA, 22 bp, Artificial Sequence
  Synthetic oligonucleotide; CTG chr11 5282178 5282199 5282183 5282178 -
aatagtgttgtaaaataagctg

SEQ ID NO: 133955 - DNA, 22 bp, Artificial Sequence
  Synthetic oligonucleotide; TTG chr11 5282168 5282189 5282173 5282168 -
taaaataagctgaatctgctgc

SEQ ID NO: 133956 - DNA, 22 bp, Artificial Sequence
  Synthetic oligonucleotide; CTG chr11 5282156 5282177 5282161 5282156 -
aatctgctgccaacattaacag

SEQ ID NO: 133957 - DNA, 22 bp, Artificial Sequence
  Synthetic oligonucleotide; CTG chr11 5282150 5282171 5282155 5282150 -
ctgccaacattaacagtcaaga

SEQ ID NO: 133958 - DNA, 22 bp, Artificial Sequence
  Synthetic oligonucleotide; CTG chr11 5282147 5282168 5282152 5282147 -
ccaacattaacagtcaagaaat

SEQ ID NO: 133959 - DNA, 22 bp, Artificial Sequence
  Synthetic oligonucleotide; TTA chr11 5282138 5282159 5282143 5282138 -
acagtcaagaaatacctccgaa

SEQ ID NO: 133960 - DNA, 22 bp, Artificial Sequence
  Synthetic oligonucleotide; CTC chr11 5282120 5282141 5282125 5282120 -
cgaataactgtacctccaatta

SEQ ID NO: 133961 - DNA, 22 bp, Artificial Sequence
  Synthetic oligonucleotide; CTG chr11 5282110 5282131 5282115 5282110 -
tacctccaattattctttaagg

SEQ ID NO: 133962 - DNA, 22 bp, Artificial Sequence
  Synthetic oligonucleotide; CTC chr11 5282104 5282125 5282109 5282104 -
caattattctttaaggtagcat

SEQ ID NO: 133963 - DNA, 22 bp, Artificial Sequence
  Synthetic oligonucleotide; TTA chr11 5282098 5282119 5282103 5282098 -
ttctttaaggtagcatgcaact

SEQ ID NO: 133964 - DNA, 22 bp, Artificial Sequence
  Synthetic oligonucleotide; TTC chr11 5282095 5282116 5282100 5282095 -
tttaaggtagcatgcaactgta

SEQ ID NO: 133965 - DNA, 22 bp, Artificial Sequence
  Synthetic oligonucleotide; CTT chr11 5282093 5282114 5282098 5282093 -
taaggtagcatgcaactgtaat

SEQ ID NO: 133966 - DNA, 22 bp, Artificial Sequence
  Synthetic oligonucleotide; TTT chr11 5282092 5282113 5282097 5282092 -
aaggtagcatgcaactgtaata

SEQ ID NO: 133967 - DNA, 22 bp, Artificial Sequence
  Synthetic oligonucleotide; TTA chr11 5282091 5282112 5282096 5282091 -
aggtagcatgcaactgtaatag

SEQ ID NO: 133968 - DNA, 22 bp, Artificial Sequence
  Synthetic oligonucleotide; CTG chr11 5282075 5282096 5282080 5282075 -
taatagttgcatgtatatattt

SEQ ID NO: 133969 - DNA, 22 bp, Artificial Sequence
  Synthetic oligonucleotide; TTG chr11 5282066 5282087 5282071 5282066 -
catgtatatatttatcataata

SEQ ID NO: 133970 - DNA, 22 bp, Artificial Sequence
  Synthetic oligonucleotide; TTT chr11 5282053 5282074 5282058 5282053 -
atcataatactgtaacagaaaa

SEQ ID NO: 133971 - DNA, 22 bp, Artificial Sequence
  Synthetic oligonucleotide; TTA chr11 5282052 5282073 5282057 5282052 -
tcataatactgtaacagaaaac

SEQ ID NO: 133972 - DNA, 22 bp, Artificial Sequence
  Synthetic oligonucleotide; CTG chr11 5282041 5282062 5282046 5282041 -
taacagaaaacacttactgaat

SEQ ID NO: 133973 - DNA, 22 bp, Artificial Sequence
  Synthetic oligonucleotide; CTT chr11 5282026 5282047 5282031 5282026 -
actgaatatatactgtgtccct

SEQ ID NO: 133974 - DNA, 22 bp, Artificial Sequence
  Synthetic oligonucleotide; TTA chr11 5282025 5282046 5282030 5282025 -
ctgaatatatactgtgtcccta

SEQ ID NO: 133975 - DNA, 22 bp, Artificial Sequence
  Synthetic oligonucleotide; CTG chr11 5282022 5282043 5282027 5282022 -
aatatatactgtgtccctagtt

SEQ ID NO: 133976 - DNA, 22 bp, Artificial Sequence
  Synthetic oligonucleotide; CTG chr11 5282011 5282032 5282016 5282011 -
tgtccctagttctttacacaat

SEQ ID NO: 133977 - DNA, 22 bp, Artificial Sequence
  Synthetic oligonucleotide; CTA chr11 5282003 5282024 5282008 5282003 -
gttctttacacaataaactaat

SEQ ID NO: 133978 - DNA, 22 bp, Artificial Sequence
  Synthetic oligonucleotide; TTC chr11 5281999 5282020 5282004 5281999 -
tttacacaataaactaatctca

SEQ ID NO: 133979 - DNA, 22 bp, Artificial Sequence
  Synthetic oligonucleotide; CTT chr11 5281997 5282018 5282002 5281997 -
tacacaataaactaatctcatc

SEQ ID NO: 133980 - DNA, 22 bp, Artificial Sequence
  Synthetic oligonucleotide; TTT chr11 5281996 5282017 5282001 5281996 -
acacaataaactaatctcatcc

SEQ ID NO: 133981 - DNA, 22 bp, Artificial Sequence
  Synthetic oligonucleotide; TTA chr11 5281995 5282016 5282000 5281995 -
cacaataaactaatctcatcct

SEQ ID NO: 133982 - DNA, 22 bp, Artificial Sequence
  Synthetic oligonucleotide; CTA chr11 5281983 5282004 5281988 5281983 -
atctcatcctcataattctatt

SEQ ID NO: 133983 - DNA, 22 bp, Artificial Sequence
  Synthetic oligonucleotide; CTC chr11 5281978 5281999 5281983 5281978 -
atcctcataattctattagcta

SEQ ID NO: 133984 - DNA, 22 bp, Artificial Sequence
  Synthetic oligonucleotide; CTC chr11 5281972 5281993 5281977 5281972 -
ataattctattagctaatacat

SEQ ID NO: 133985 - DNA, 22 bp, Artificial Sequence
  Synthetic oligonucleotide; TTC chr11 5281965 5281986 5281970 5281965 -
tattagctaatacatattatca

SEQ ID NO: 133986 - DNA, 22 bp, Artificial Sequence
  Synthetic oligonucleotide; CTA chr11 5281963 5281984 5281968 5281963 -
ttagctaatacatattatcatc

SEQ ID NO: 133987 - DNA, 22 bp, Artificial Sequence
  Synthetic oligonucleotide; TTA chr11 5281960 5281981 5281965 5281960 -
gctaatacatattatcatccta

SEQ ID NO: 133988 - DNA, 22 bp, Artificial Sequence
  Synthetic oligonucleotide; CTA chr11 5281956 5281977 5281961 5281956 -
atacatattatcatcctatatt

SEQ ID NO: 133989 - DNA, 22 bp, Artificial Sequence
  Synthetic oligonucleotide; TTA chr11 5281946 5281967 5281951 5281946 -
tcatcctatatttcagagactt

SEQ ID NO: 133990 - DNA, 22 bp, Artificial Sequence
  Synthetic oligonucleotide; CTA chr11 5281938 5281959 5281943 5281938 -
tatttcagagacttcaagaagt

SEQ ID NO: 133991 - DNA, 22 bp, Artificial Sequence
  Synthetic oligonucleotide; TTT chr11 5281933 5281954 5281938 5281933 -
cagagacttcaagaagttaagc

SEQ ID NO: 133992 - DNA, 22 bp, Artificial Sequence
  Synthetic oligonucleotide; TTC chr11 5281932 5281953 5281937 5281932 -
agagacttcaagaagttaagca

SEQ ID NO: 133993 - DNA, 22 bp, Artificial Sequence
  Synthetic oligonucleotide; CTT chr11 5281924 5281945 5281929 5281924 -
caagaagttaagcaacttgctc

SEQ ID NO: 133994 - DNA, 22 bp, Artificial Sequence
  Synthetic oligonucleotide; TTC chr11 5281923 5281944 5281928 5281923 -
aagaagttaagcaacttgctca

SEQ ID NO: 133995 - DNA, 22 bp, Artificial Sequence
  Synthetic oligonucleotide; TTA chr11 5281914 5281935 5281919 5281914 -
agcaacttgctcaagatcatct

SEQ ID NO: 133996 - DNA, 22 bp, Artificial Sequence
  Synthetic oligonucleotide; CTT chr11 5281906 5281927 5281911 5281906 -
gctcaagatcatctaagaagta

SEQ ID NO: 133997 - DNA, 22 bp, Artificial Sequence
  Synthetic oligonucleotide; TTG chr11 5281905 5281926 5281910 5281905 -
ctcaagatcatctaagaagtag

SEQ ID NO: 133998 - DNA, 22 bp, Artificial Sequence
  Synthetic oligonucleotide; CTC chr11 5281902 5281923 5281907 5281902 -
aagatcatctaagaagtaggtg

SEQ ID NO: 133999 - DNA, 22 bp, Artificial Sequence
  Synthetic oligonucleotide; CTA chr11 5281891 5281912 5281896 5281891 -
agaagtaggtggtatttctggg

SEQ ID NO: 134000 - DNA, 22 bp, Artificial Sequence
  Synthetic oligonucleotide; TTT chr11 5281874 5281895 5281879 5281874 -
ctgggctcatttggcccctcct

SEQ ID NO: 134001 - DNA, 22 bp, Artificial Sequence
  Synthetic oligonucleotide; TTC chr11 5281873 5281894 5281878 5281873 -
tgggctcatttggcccctccta

SEQ ID NO: 134002 - DNA, 22 bp, Artificial Sequence
  Synthetic oligonucleotide; CTG chr11 5281871 5281892 5281876 5281871 -
ggctcatttggcccctcctaat

SEQ ID NO: 134003 - DNA, 22 bp, Artificial Sequence
  Synthetic oligonucleotide; CTC chr11 5281866 5281887 5281871 5281866 -
atttggcccctcctaatctctc

SEQ ID NO: 134004 - DNA, 22 bp, Artificial Sequence
  Synthetic oligonucleotide; TTT chr11 5281862 5281883 5281867 5281862 -
ggcccctcctaatctctcatgg

SEQ ID NO: 134005 - DNA, 22 bp, Artificial Sequence
  Synthetic oligonucleotide; TTG chr11 5281861 5281882 5281866 5281861 -
gcccctcctaatctctcatggc

SEQ ID NO: 134006 - DNA, 22 bp, Artificial Sequence
  Synthetic oligonucleotide; CTC chr11 5281854 5281875 5281859 5281854 -
ctaatctctcatggcaacatgg

SEQ ID NO: 134007 - DNA, 22 bp, Artificial Sequence
  Synthetic oligonucleotide; CTA chr11 5281851 5281872 5281856 5281851 -
atctctcatggcaacatggctg

SEQ ID NO: 134008 - DNA, 22 bp, Artificial Sequence
  Synthetic oligonucleotide; CTC chr11 5281846 5281867 5281851 5281846 -
tcatggcaacatggctgcctaa

SEQ ID NO: 134009 - DNA, 22 bp, Artificial Sequence
  Synthetic oligonucleotide; CTC chr11 5281844 5281865 5281849 5281844 -
atggcaacatggctgcctaaag

SEQ ID NO: 134010 - DNA, 22 bp, Artificial Sequence
  Synthetic oligonucleotide; CTG chr11 5281829 5281850 5281834 5281829 -
cctaaagtgttgattgccttaa

SEQ ID NO: 134011 - DNA, 22 bp, Artificial Sequence
  Synthetic oligonucleotide; CTA chr11 5281825 5281846 5281830 5281825 -
aagtgttgattgccttaattca

SEQ ID NO: 134012 - DNA, 22 bp, Artificial Sequence
  Synthetic oligonucleotide; TTG chr11 5281817 5281838 5281822 5281817 -
attgccttaattcatcagggat

SEQ ID NO: 134013 - DNA, 22 bp, Artificial Sequence
  Synthetic oligonucleotide; TTG chr11 5281813 5281834 5281818 5281813 -
ccttaattcatcagggatgggc

SEQ ID NO: 134014 - DNA, 22 bp, Artificial Sequence
  Synthetic oligonucleotide; CTT chr11 5281809 5281830 5281814 5281809 -
aattcatcagggatgggctcat

SEQ ID NO: 134015 - DNA, 22 bp, Artificial Sequence
  Synthetic oligonucleotide; TTA chr11 5281808 5281829 5281813 5281808 -
attcatcagggatgggctcata

SEQ ID NO: 134016 - DNA, 22 bp, Artificial Sequence
  Synthetic oligonucleotide; TTC chr11 5281804 5281825 5281809 5281804 -
atcagggatgggctcatactca

SEQ ID NO: 134017 - DNA, 22 bp, Artificial Sequence
  Synthetic oligonucleotide; CTC chr11 5281789 5281810 5281794 5281789 -
atactcactgcagaccttaact

SEQ ID NO: 134018 - DNA, 22 bp, Artificial Sequence
  Synthetic oligonucleotide; CTC chr11 5281783 5281804 5281788 5281783 -
actgcagaccttaactggcatc

SEQ ID NO: 134019 - DNA, 22 bp, Artificial Sequence
  Synthetic oligonucleotide; CTG chr11 5281779 5281800 5281784 5281779 -
cagaccttaactggcatcctct

SEQ ID NO: 134020 - DNA, 22 bp, Artificial Sequence
  Synthetic oligonucleotide; CTT chr11 5281771 5281792 5281776 5281771 -
aactggcatcctcttttcttat

SEQ ID NO: 134021 - DNA, 22 bp, Artificial Sequence
  Synthetic oligonucleotide; TTA chr11 5281770 5281791 5281775 5281770 -
actggcatcctcttttcttatg

SEQ ID NO: 134022 - DNA, 22 bp, Artificial Sequence
  Synthetic oligonucleotide; CTG chr11 5281766 5281787 5281771 5281766 -
gcatcctcttttcttatgtgat

SEQ ID NO: 134023 - DNA, 22 bp, Artificial Sequence
  Synthetic oligonucleotide; CTC chr11 5281758 5281779 5281763 5281758 -
ttttcttatgtgatctgcctga

SEQ ID NO: 134024 - DNA, 22 bp, Artificial Sequence
  Synthetic oligonucleotide; CTT chr11 5281756 5281777 5281761 5281756 -
ttcttatgtgatctgcctgacc

SEQ ID NO: 134025 - DNA, 22 bp, Artificial Sequence
  Synthetic oligonucleotide; TTT chr11 5281755 5281776 5281760 5281755 -
tcttatgtgatctgcctgaccc

SEQ ID NO: 134026 - DNA, 22 bp, Artificial Sequence
  Synthetic oligonucleotide; TTT chr11 5281754 5281775 5281759 5281754 -
cttatgtgatctgcctgaccct

SEQ ID NO: 134027 - DNA, 22 bp, Artificial Sequence
  Synthetic oligonucleotide; TTC chr11 5281753 5281774 5281758 5281753 -
ttatgtgatctgcctgacccta

SEQ ID NO: 134028 - DNA, 22 bp, Artificial Sequence
  Synthetic oligonucleotide; CTT chr11 5281751 5281772 5281756 5281751 -
atgtgatctgcctgaccctagt

SEQ ID NO: 134029 - DNA, 22 bp, Artificial Sequence
  Synthetic oligonucleotide; TTA chr11 5281750 5281771 5281755 5281750 -
tgtgatctgcctgaccctagta

SEQ ID NO: 134030 - DNA, 22 bp, Artificial Sequence
  Synthetic oligonucleotide; CTG chr11 5281741 5281762 5281746 5281741 -
cctgaccctagtagacttatga

SEQ ID NO: 134031 - DNA, 22 bp, Artificial Sequence
  Synthetic oligonucleotide; CTG chr11 5281737 5281758 5281742 5281737 -
accctagtagacttatgaaatt

SEQ ID NO: 134032 - DNA, 22 bp, Artificial Sequence
  Synthetic oligonucleotide; CTA chr11 5281731 5281752 5281736 5281731 -
gtagacttatgaaatttctgat

SEQ ID NO: 134033 - DNA, 22 bp, Artificial Sequence
  Synthetic oligonucleotide; CTT chr11 5281723 5281744 5281728 5281723 -
atgaaatttctgatgagaaagg

SEQ ID NO: 134034 - DNA, 22 bp, Artificial Sequence
  Synthetic oligonucleotide; TTA chr11 5281722 5281743 5281727 5281722 -
tgaaatttctgatgagaaagga

SEQ ID NO: 134035 - DNA, 22 bp, Artificial Sequence
  Synthetic oligonucleotide; TTT chr11 5281714 5281735 5281719 5281714 -
ctgatgagaaaggagagaggag

SEQ ID NO: 134036 - DNA, 22 bp, Artificial Sequence
  Synthetic oligonucleotide; TTC chr11 5281713 5281734 5281718 5281713 -
tgatgagaaaggagagaggaga

SEQ ID NO: 134037 - DNA, 22 bp, Artificial Sequence
  Synthetic oligonucleotide; CTG chr11 5281711 5281732 5281716 5281711 -
atgagaaaggagagaggagaaa

SEQ ID NO: 134038 - DNA, 22 bp, Artificial Sequence
  Synthetic oligonucleotide; CTG chr11 5281679 5281700 5281684 5281679 -
actgtgatgagtgatgaaggtg

SEQ ID NO: 134039 - DNA, 22 bp, Artificial Sequence
  Synthetic oligonucleotide; CTG chr11 5281675 5281696 5281680 5281675 -
tgatgagtgatgaaggtgcctt

SEQ ID NO: 134040 - DNA, 22 bp, Artificial Sequence
  Synthetic oligonucleotide; CTT chr11 5281653 5281674 5281658 5281653 -
ctcatctgggtaccagtggggc

SEQ ID NO: 134041 - DNA, 22 bp, Artificial Sequence
  Synthetic oligonucleotide; TTC chr11 5281652 5281673 5281657 5281652 -
tcatctgggtaccagtggggcc

SEQ ID NO: 134042 - DNA, 22 bp, Artificial Sequence
  Synthetic oligonucleotide; CTC chr11 5281650 5281671 5281655 5281650 -
atctgggtaccagtggggcctc

SEQ ID NO: 134043 - DNA, 22 bp, Artificial Sequence
  Synthetic oligonucleotide; CTG chr11 5281645 5281666 5281650 5281645 -
ggtaccagtggggcctctaaga

SEQ ID NO: 134044 - DNA, 22 bp, Artificial Sequence
  Synthetic oligonucleotide; CTC chr11 5281628 5281649 5281633 5281628 -
taagactaagtcactctgtctc

SEQ ID NO: 134045 - DNA, 22 bp, Artificial Sequence
  Synthetic oligonucleotide; CTA chr11 5281626 5281647 5281631 5281626 -
agactaagtcactctgtctcac

SEQ ID NO: 134046 - DNA, 22 bp, Artificial Sequence
  Synthetic oligonucleotide; CTA chr11 5281620 5281641 5281625 5281620 -
agtcactctgtctcactgtgtc

SEQ ID NO: 134047 - DNA, 22 bp, Artificial Sequence
  Synthetic oligonucleotide; CTC chr11 5281612 5281633 5281617 5281612 -
tgtctcactgtgtcttagccag

SEQ ID NO: 134048 - DNA, 22 bp, Artificial Sequence
  Synthetic oligonucleotide; CTG chr11 5281610 5281631 5281615 5281610 -
tctcactgtgtcttagccagtt

SEQ ID NO: 134049 - DNA, 22 bp, Artificial Sequence
  Synthetic oligonucleotide; CTC chr11 5281606 5281627 5281611 5281606 -
actgtgtcttagccagttcctt

SEQ ID NO: 134050 - DNA, 22 bp, Artificial Sequence
  Synthetic oligonucleotide; CTG chr11 5281602 5281623 5281607 5281602 -
tgtcttagccagttccttacag

SEQ ID NO: 134051 - DNA, 22 bp, Artificial Sequence
  Synthetic oligonucleotide; CTT chr11 5281596 5281617 5281601 5281596 -
agccagttccttacagcttgcc

SEQ ID NO: 134052 - DNA, 22 bp, Artificial Sequence
  Synthetic oligonucleotide; TTA chr11 5281595 5281616 5281600 5281595 -
gccagttccttacagcttgccc

SEQ ID NO: 134053 - DNA, 22 bp, Artificial Sequence
  Synthetic oligonucleotide; TTC chr11 5281587 5281608 5281592 5281587 -
cttacagcttgccctgatggga

SEQ ID NO: 134054 - DNA, 22 bp, Artificial Sequence
  Synthetic oligonucleotide; CTT chr11 5281584 5281605 5281589 5281584 -
acagcttgccctgatgggagat

SEQ ID NO: 134055 - DNA, 22 bp, Artificial Sequence
  Synthetic oligonucleotide; TTA chr11 5281583 5281604 5281588 5281583 -
cagcttgccctgatgggagata

SEQ ID NO: 134056 - DNA, 22 bp, Artificial Sequence
  Synthetic oligonucleotide; CTT chr11 5281577 5281598 5281582 5281577 -
gccctgatgggagatagagaat

SEQ ID NO: 134057 - DNA, 22 bp, Artificial Sequence
  Synthetic oligonucleotide; TTG chr11 5281576 5281597 5281581 5281576 -
ccctgatgggagatagagaatg

SEQ ID NO: 134058 - DNA, 22 bp, Artificial Sequence
  Synthetic oligonucleotide; CTG chr11 5281571 5281592 5281576 5281571 -
atgggagatagagaatgggtat

SEQ ID NO: 134059 - DNA, 22 bp, Artificial Sequence
  Synthetic oligonucleotide; CTC chr11 5281545 5281566 5281550 5281545 -
caacaaaaaaataaattttcat

SEQ ID NO: 134060 - DNA, 22 bp, Artificial Sequence
  Synthetic oligonucleotide; TTT chr11 5281527 5281548 5281532 5281527 -
tcatttctcaaggtccaactta

SEQ ID NO: 134061 - DNA, 22 bp, Artificial Sequence
  Synthetic oligonucleotide; TTT chr11 5281526 5281547 5281531 5281526 -
catttctcaaggtccaacttat

SEQ ID NO: 134062 - DNA, 22 bp, Artificial Sequence
  Synthetic oligonucleotide; TTC chr11 5281525 5281546 5281530 5281525 -
atttctcaaggtccaacttatg

SEQ ID NO: 134063 - DNA, 22 bp, Artificial Sequence
  Synthetic oligonucleotide; TTT chr11 5281521 5281542 5281526 5281521 -
ctcaaggtccaacttatgtttt

SEQ ID NO: 134064 - DNA, 22 bp, Artificial Sequence
  Synthetic oligonucleotide; TTC chr11 5281520 5281541 5281525 5281520 -
tcaaggtccaacttatgttttc

SEQ ID NO: 134065 - DNA, 22 bp, Artificial Sequence
  Synthetic oligonucleotide; CTC chr11 5281518 5281539 5281523 5281518 -
aaggtccaacttatgttttctt

SEQ ID NO: 134066 - DNA, 22 bp, Artificial Sequence
  Synthetic oligonucleotide; CTT chr11 5281506 5281527 5281511 5281506 -
atgttttcttaatttttaaaaa

SEQ ID NO: 134067 - DNA, 22 bp, Artificial Sequence
  Synthetic oligonucleotide; TTA chr11 5281505 5281526 5281510 5281505 -
tgttttcttaatttttaaaaaa

SEQ ID NO: 134068 - DNA, 22 bp, Artificial Sequence
  Synthetic oligonucleotide; TTT chr11 5281500 5281521 5281505 5281500 -
tcttaatttttaaaaaaatctt

SEQ ID NO: 134069 - DNA, 22 bp, Artificial Sequence
  Synthetic oligonucleotide; TTT chr11 5281499 5281520 5281504 5281499 -
cttaatttttaaaaaaatcttg

SEQ ID NO: 134070 - DNA, 22 bp, Artificial Sequence
  Synthetic oligonucleotide; TTC chr11 5281498 5281519 5281503 5281498 -
ttaatttttaaaaaaatcttga

SEQ ID NO: 134071 - DNA, 22 bp, Artificial Sequence
  Synthetic oligonucleotide; CTT chr11 5281496 5281517 5281501 5281496 -
aatttttaaaaaaatcttgacc

SEQ ID NO: 134072 - DNA, 22 bp, Artificial Sequence
  Synthetic oligonucleotide; TTA chr11 5281495 5281516 5281500 5281495 -
atttttaaaaaaatcttgacca

SEQ ID NO: 134073 - DNA, 22 bp, Artificial Sequence
  Synthetic oligonucleotide; TTT chr11 5281491 5281512 5281496 5281491 -
ttaaaaaaatcttgaccattct

SEQ ID NO: 134074 - DNA, 22 bp, Artificial Sequence
  Synthetic oligonucleotide; TTT chr11 5281490 5281511 5281495 5281490 -
taaaaaaatcttgaccattctc

SEQ ID NO: 134075 - DNA, 22 bp, Artificial Sequence
  Synthetic oligonucleotide; TTT chr11 5281489 5281510 5281494 5281489 -
aaaaaaatcttgaccattctcc

SEQ ID NO: 134076 - DNA, 22 bp, Artificial Sequence
  Synthetic oligonucleotide; TTA chr11 5281488 5281509 5281493 5281488 -
aaaaaatcttgaccattctcca

SEQ ID NO: 134077 - DNA, 22 bp, Artificial Sequence
  Synthetic oligonucleotide; CTT chr11 5281478 5281499 5281483 5281478 -
gaccattctccactctctaaaa

SEQ ID NO: 134078 - DNA, 22 bp, Artificial Sequence
  Synthetic oligonucleotide; TTG chr11 5281477 5281498 5281482 5281477 -
accattctccactctctaaaat

SEQ ID NO: 134079 - DNA, 22 bp, Artificial Sequence
  Synthetic oligonucleotide; TTC chr11 5281470 5281491 5281475 5281470 -
tccactctctaaaataatccac

SEQ ID NO: 134080 - DNA, 22 bp, Artificial Sequence
  Synthetic oligonucleotide; CTC chr11 5281468 5281489 5281473 5281468 -
cactctctaaaataatccacag

SEQ ID NO: 134081 - DNA, 22 bp, Artificial Sequence
  Synthetic oligonucleotide; CTC chr11 5281463 5281484 5281468 5281463 -
tctaaaataatccacagtgaga

SEQ ID NO: 134082 - DNA, 22 bp, Artificial Sequence
  Synthetic oligonucleotide; CTC chr11 5281461 5281482 5281466 5281461 -
taaaataatccacagtgagaga

SEQ ID NO: 134083 - DNA, 22 bp, Artificial Sequence
  Synthetic oligonucleotide; CTA chr11 5281459 5281480 5281464 5281459 -
aaataatccacagtgagagaaa

SEQ ID NO: 134084 - DNA, 22 bp, Artificial Sequence
  Synthetic oligonucleotide; TTC chr11 5281432 5281453 5281437 5281432 -
ttttcccccatcccataaatac

SEQ ID NO: 134085 - DNA, 22 bp, Artificial Sequence
  Synthetic oligonucleotide; CTT chr11 5281430 5281451 5281435 5281430 -
ttcccccatcccataaatacct

SEQ ID NO: 134086 - DNA, 22 bp, Artificial Sequence
  Synthetic oligonucleotide; TTT chr11 5281429 5281450 5281434 5281429 -
tcccccatcccataaatacctc

SEQ ID NO: 134087 - DNA, 22 bp, Artificial Sequence
  Synthetic oligonucleotide; TTT chr11 5281428 5281449 5281433 5281428 -
cccccatcccataaatacctct

SEQ ID NO: 134088 - DNA, 22 bp, Artificial Sequence
  Synthetic oligonucleotide; TTC chr11 5281427 5281448 5281432 5281427 -
ccccatcccataaatacctcta

SEQ ID NO: 134089 - DNA, 22 bp, Artificial Sequence
  Synthetic oligonucleotide; CTC chr11 5281407 5281428 5281412 5281407 -
tattaaatatggaaaatctggg

SEQ ID NO: 134090 - DNA, 22 bp, Artificial Sequence
  Synthetic oligonucleotide; CTA chr11 5281405 5281426 5281410 5281405 -
ttaaatatggaaaatctgggca

SEQ ID NO: 134091 - DNA, 22 bp, Artificial Sequence
  Synthetic oligonucleotide; TTA chr11 5281402 5281423 5281407 5281402 -
aatatggaaaatctgggcatgg

SEQ ID NO: 134092 - DNA, 22 bp, Artificial Sequence
  Synthetic oligonucleotide; CTG chr11 5281387 5281408 5281392 5281387 -
ggcatggtgtctcacacctgta

SEQ ID NO: 134093 - DNA, 22 bp, Artificial Sequence
  Synthetic oligonucleotide; CTC chr11 5281374 5281395 5281379 5281374 -
acacctgtaatcccagcacttt

SEQ ID NO: 134094 - DNA, 22 bp, Artificial Sequence
  Synthetic oligonucleotide; CTG chr11 5281367 5281388 5281372 5281367 -
taatcccagcactttgggaggc

SEQ ID NO: 134095 - DNA, 22 bp, Artificial Sequence
  Synthetic oligonucleotide; CTT chr11 5281353 5281374 5281358 5281353 -
tgggaggctgaggtgggtggac

SEQ ID NO: 134096 - DNA, 22 bp, Artificial Sequence
  Synthetic oligonucleotide; TTT chr11 5281352 5281373 5281357 5281352 -
gggaggctgaggtgggtggact

SEQ ID NO: 134097 - DNA, 22 bp, Artificial Sequence
  Synthetic oligonucleotide; TTG chr11 5281351 5281372 5281356 5281351 -
ggaggctgaggtgggtggactg

SEQ ID NO: 134098 - DNA, 22 bp, Artificial Sequence
  Synthetic oligonucleotide; CTG chr11 5281343 5281364 5281348 5281343 -
aggtgggtggactgcttggagc

SEQ ID NO: 134099 - DNA, 22 bp, Artificial Sequence
  Synthetic oligonucleotide; CTG chr11 5281329 5281350 5281334 5281329 -
cttggagctcaggagttcaaga

SEQ ID NO: 134100 - DNA, 22 bp, Artificial Sequence
  Synthetic oligonucleotide; CTT chr11 5281326 5281347 5281331 5281326 -
ggagctcaggagttcaagacca

SEQ ID NO: 134101 - DNA, 22 bp, Artificial Sequence
  Synthetic oligonucleotide; TTG chr11 5281325 5281346 5281330 5281325 -
gagctcaggagttcaagaccat

SEQ ID NO: 134102 - DNA, 22 bp, Artificial Sequence
  Synthetic oligonucleotide; CTC chr11 5281319 5281340 5281324 5281319 -
aggagttcaagaccatcttgga

SEQ ID NO: 134103 - DNA, 22 bp, Artificial Sequence
  Synthetic oligonucleotide; TTC chr11 5281311 5281332 5281316 5281311 -
aagaccatcttggacaacatgg

SEQ ID NO: 134104 - DNA, 22 bp, Artificial Sequence
  Synthetic oligonucleotide; CTT chr11 5281300 5281321 5281305 5281300 -
ggacaacatggtgataccctgc

SEQ ID NO: 134105 - DNA, 22 bp, Artificial Sequence
  Synthetic oligonucleotide; TTG chr11 5281299 5281320 5281304 5281299 -
gacaacatggtgataccctgcc

SEQ ID NO: 134106 - DNA, 22 bp, Artificial Sequence
  Synthetic oligonucleotide; CTG chr11 5281279 5281300 5281284 5281279 -
cctctacaaaaagtacaaaaat

SEQ ID NO: 134107 - DNA, 22 bp, Artificial Sequence
  Synthetic oligonucleotide; CTC chr11 5281275 5281296 5281280 5281275 -
tacaaaaagtacaaaaattagc

SEQ ID NO: 134108 - DNA, 22 bp, Artificial Sequence
  Synthetic oligonucleotide; CTA chr11 5281273 5281294 5281278 5281273 -
caaaaagtacaaaaattagcct

SEQ ID NO: 134109 - DNA, 22 bp, Artificial Sequence
  Synthetic oligonucleotide; TTA chr11 5281255 5281276 5281260 5281255 -
gcctggcatggtggtgtgcacc

SEQ ID NO: 134110 - DNA, 22 bp, Artificial Sequence
  Synthetic oligonucleotide; CTG chr11 5281250 5281271 5281255 5281250 -
gcatggtggtgtgcacctgtaa

SEQ ID NO: 134111 - DNA, 22 bp, Artificial Sequence
  Synthetic oligonucleotide; CTG chr11 5281231 5281252 5281236 5281231 -
taatcccagctattagggtggc

SEQ ID NO: 134112 - DNA, 22 bp, Artificial Sequence
  Synthetic oligonucleotide; CTA chr11 5281219 5281240 5281224 5281219 -
ttagggtggctgaggcaggaga

SEQ ID NO: 134113 - DNA, 22 bp, Artificial Sequence
  Synthetic oligonucleotide; TTA chr11 5281216 5281237 5281221 5281216 -
gggtggctgaggcaggagaatt

SEQ ID NO: 134114 - DNA, 22 bp, Artificial Sequence
  Synthetic oligonucleotide; CTG chr11 5281207 5281228 5281212 5281207 -
aggcaggagaattgcttgaacc

SEQ ID NO: 134115 - DNA, 22 bp, Artificial Sequence
  Synthetic oligonucleotide; TTG chr11 5281193 5281214 5281198 5281193 -
cttgaacccgggaggcggaggt

SEQ ID NO: 134116 - DNA, 22 bp, Artificial Sequence
  Synthetic oligonucleotide; CTT chr11 5281190 5281211 5281195 5281190 -
gaacccgggaggcggaggttgc

SEQ ID NO: 134117 - DNA, 22 bp, Artificial Sequence
  Synthetic oligonucleotide; TTG chr11 5281189 5281210 5281194 5281189 -
aacccgggaggcggaggttgca

SEQ ID NO: 134118 - DNA, 22 bp, Artificial Sequence
  Synthetic oligonucleotide; TTG chr11 5281169 5281190 5281174 5281169 -
cagtgagctgagatcgtgccac

SEQ ID NO: 134119 - DNA, 22 bp, Artificial Sequence
  Synthetic oligonucleotide; CTG chr11 5281159 5281180 5281164 5281159 -
agatcgtgccactgcactccag

SEQ ID NO: 134120 - DNA, 22 bp, Artificial Sequence
  Synthetic oligonucleotide; CTG chr11 5281145 5281166 5281150 5281145 -
cactccagcctgggggacagag

SEQ ID NO: 134121 - DNA, 22 bp, Artificial Sequence
  Synthetic oligonucleotide; CTC chr11 5281140 5281161 5281145 5281140 -
cagcctgggggacagagcacat

SEQ ID NO: 134122 - DNA, 22 bp, Artificial Sequence
  Synthetic oligonucleotide; CTG chr11 5281133 5281154 5281138 5281133 -
ggggacagagcacattataatt

SEQ ID NO: 134123 - DNA, 22 bp, Artificial Sequence
  Synthetic oligonucleotide; TTA chr11 5281116 5281137 5281121 5281116 -
taattaactgttattttttact

SEQ ID NO: 134124 - DNA, 22 bp, Artificial Sequence
  Synthetic oligonucleotide; TTA chr11 5281110 5281131 5281115 5281110 -
actgttattttttacttggact

SEQ ID NO: 134125 - DNA, 22 bp, Artificial Sequence
  Synthetic oligonucleotide; CTG chr11 5281106 5281127 5281111 5281106 -
ttattttttacttggactcttg

SEQ ID NO: 134126 - DNA, 22 bp, Artificial Sequence
  Synthetic oligonucleotide; TTA chr11 5281103 5281124 5281108 5281103 -
ttttttacttggactcttgtgg

SEQ ID NO: 134127 - DNA, 22 bp, Artificial Sequence
  Synthetic oligonucleotide; TTT chr11 5281100 5281121 5281105 5281100 -
tttacttggactcttgtgggga

SEQ ID NO: 134128 - DNA, 22 bp, Artificial Sequence
  Synthetic oligonucleotide; TTT chr11 5281099 5281120 5281104 5281099 -
ttacttggactcttgtggggaa

SEQ ID NO: 134129 - DNA, 22 bp, Artificial Sequence
  Synthetic oligonucleotide; TTT chr11 5281098 5281119 5281103 5281098 -
tacttggactcttgtggggaat

SEQ ID NO: 134130 - DNA, 22 bp, Artificial Sequence
  Synthetic oligonucleotide; TTT chr11 5281097 5281118 5281102 5281097 -
acttggactcttgtggggaata

SEQ ID NO: 134131 - DNA, 22 bp, Artificial Sequence
  Synthetic oligonucleotide; TTA chr11 5281096 5281117 5281101 5281096 -
cttggactcttgtggggaataa

SEQ ID NO: 134132 - DNA, 22 bp, Artificial Sequence
  Synthetic oligonucleotide; CTT chr11 5281093 5281114 5281098 5281093 -
ggactcttgtggggaataagat

SEQ ID NO: 134133 - DNA, 22 bp, Artificial Sequence
  Synthetic oligonucleotide; TTG chr11 5281092 5281113 5281097 5281092 -
gactcttgtggggaataagata

SEQ ID NO: 134134 - DNA, 22 bp, Artificial Sequence
  Synthetic oligonucleotide; CTC chr11 5281087 5281108 5281092 5281087 -
ttgtggggaataagatacatgt

SEQ ID NO: 134135 - DNA, 22 bp, Artificial Sequence
  Synthetic oligonucleotide; CTT chr11 5281085 5281106 5281090 5281085 -
gtggggaataagatacatgttt

SEQ ID NO: 134136 - DNA, 22 bp, Artificial Sequence
  Synthetic oligonucleotide; TTG chr11 5281084 5281105 5281089 5281084 -
tggggaataagatacatgtttt

SEQ ID NO: 134137 - DNA, 22 bp, Artificial Sequence
  Synthetic oligonucleotide; TTT chr11 5281063 5281084 5281068 5281063 -
tattcttatttatgattcaagc

SEQ ID NO: 134138 - DNA, 22 bp, Artificial Sequence
  Synthetic oligonucleotide; TTT chr11 5281062 5281083 5281067 5281062 -
attcttatttatgattcaagca

SEQ ID NO: 134139 - DNA, 22 bp, Artificial Sequence
  Synthetic oligonucleotide; TTA chr11 5281061 5281082 5281066 5281061 -
ttcttatttatgattcaagcac

SEQ ID NO: 134140 - DNA, 22 bp, Artificial Sequence
  Synthetic oligonucleotide; TTC chr11 5281058 5281079 5281063 5281058 -
ttatttatgattcaagcactga

SEQ ID NO: 134141 - DNA, 22 bp, Artificial Sequence
  Synthetic oligonucleotide; CTT chr11 5281056 5281077 5281061 5281056 -
atttatgattcaagcactgaaa

SEQ ID NO: 134142 - DNA, 22 bp, Artificial Sequence
  Synthetic oligonucleotide; TTA chr11 5281055 5281076 5281060 5281055 -
tttatgattcaagcactgaaaa

SEQ ID NO: 134143 - DNA, 22 bp, Artificial Sequence
  Synthetic oligonucleotide; TTT chr11 5281052 5281073 5281057 5281052 -
atgattcaagcactgaaaatag

SEQ ID NO: 134144 - DNA, 22 bp, Artificial Sequence
  Synthetic oligonucleotide; TTA chr11 5281051 5281072 5281056 5281051 -
tgattcaagcactgaaaatagt

SEQ ID NO: 134145 - DNA, 22 bp, Artificial Sequence
  Synthetic oligonucleotide; TTC chr11 5281045 5281066 5281050 5281045 -
aagcactgaaaatagtgtttag

SEQ ID NO: 134146 - DNA, 22 bp, Artificial Sequence
  Synthetic oligonucleotide; CTG chr11 5281037 5281058 5281042 5281037 -
aaaatagtgtttagcatccagc

SEQ ID NO: 134147 - DNA, 22 bp, Artificial Sequence
  Synthetic oligonucleotide; TTT chr11 5281025 5281046 5281030 5281025 -
agcatccagcaggtgcttcaaa

SEQ ID NO: 134148 - DNA, 22 bp, Artificial Sequence
  Synthetic oligonucleotide; TTA chr11 5281024 5281045 5281029 5281024 -
gcatccagcaggtgcttcaaaa

SEQ ID NO: 134149 - DNA, 22 bp, Artificial Sequence
  Synthetic oligonucleotide; CTT chr11 5281007 5281028 5281012 5281007 -
caaaaccatttgctgaatgatt

SEQ ID NO: 134150 - DNA, 22 bp, Artificial Sequence
  Synthetic oligonucleotide; TTC chr11 5281006 5281027 5281011 5281006 -
aaaaccatttgctgaatgatta

SEQ ID NO: 134151 - DNA, 22 bp, Artificial Sequence
  Synthetic oligonucleotide; TTT chr11 5280996 5281017 5281001 5280996 -
gctgaatgattactatactttt

SEQ ID NO: 134152 - DNA, 22 bp, Artificial Sequence
  Synthetic oligonucleotide; TTG chr11 5280995 5281016 5281000 5280995 -
ctgaatgattactatacttttt

SEQ ID NO: 134153 - DNA, 22 bp, Artificial Sequence
  Synthetic oligonucleotide; CTG chr11 5280992 5281013 5280997 5280992 -
aatgattactatactttttaca

SEQ ID NO: 134154 - DNA, 22 bp, Artificial Sequence
  Synthetic oligonucleotide; TTA chr11 5280984 5281005 5280989 5280984 -
ctatactttttacaagctcagc

SEQ ID NO: 134155 - DNA, 22 bp, Artificial Sequence
  Synthetic oligonucleotide; CTA chr11 5280981 5281002 5280986 5280981 -
tactttttacaagctcagctcc

SEQ ID NO: 134156 - DNA, 22 bp, Artificial Sequence
  Synthetic oligonucleotide; CTT chr11 5280976 5280997 5280981 5280976 -
tttacaagctcagctccctcta

SEQ ID NO: 134157 - DNA, 22 bp, Artificial Sequence
  Synthetic oligonucleotide; TTT chr11 5280975 5280996 5280980 5280975 -
ttacaagctcagctccctctat

SEQ ID NO: 134158 - DNA, 22 bp, Artificial Sequence
  Synthetic oligonucleotide; TTT chr11 5280974 5280995 5280979 5280974 -
tacaagctcagctccctctatc

SEQ ID NO: 134159 - DNA, 22 bp, Artificial Sequence
  Synthetic oligonucleotide; TTT chr11 5280973 5280994 5280978 5280973 -
acaagctcagctccctctatcc

SEQ ID NO: 134160 - DNA, 22 bp, Artificial Sequence
  Synthetic oligonucleotide; TTA chr11 5280972 5280993 5280977 5280972 -
caagctcagctccctctatccc

SEQ ID NO: 134161 - DNA, 22 bp, Artificial Sequence
  Synthetic oligonucleotide; CTC chr11 5280965 5280986 5280970 5280965 -
agctccctctatcccttccagc

SEQ ID NO: 134162 - DNA, 22 bp, Artificial Sequence
  Synthetic oligonucleotide; CTC chr11 5280960 5280981 5280965 5280960 -
cctctatcccttccagcatcct

SEQ ID NO: 134163 - DNA, 22 bp, Artificial Sequence
  Synthetic oligonucleotide; CTC chr11 5280956 5280977 5280961 5280956 -
tatcccttccagcatcctcatc

SEQ ID NO: 134164 - DNA, 22 bp, Artificial Sequence
  Synthetic oligonucleotide; CTA chr11 5280954 5280975 5280959 5280954 -
tcccttccagcatcctcatctc

SEQ ID NO: 134165 - DNA, 22 bp, Artificial Sequence
  Synthetic oligonucleotide; CTT chr11 5280948 5280969 5280953 5280948 -
ccagcatcctcatctctgatta

SEQ ID NO: 134166 - DNA, 22 bp, Artificial Sequence
  Synthetic oligonucleotide; TTC chr11 5280947 5280968 5280952 5280947 -
cagcatcctcatctctgattaa

SEQ ID NO: 134167 - DNA, 22 bp, Artificial Sequence
  Synthetic oligonucleotide; CTC chr11 5280937 5280958 5280942 5280937 -
atctctgattaaataagcttca

SEQ ID NO: 134168 - DNA, 22 bp, Artificial Sequence
  Synthetic oligonucleotide; CTC chr11 5280932 5280953 5280937 5280932 -
tgattaaataagcttcagtttt

SEQ ID NO: 134169 - DNA, 22 bp, Artificial Sequence
  Synthetic oligonucleotide; CTG chr11 5280930 5280951 5280935 5280930 -
attaaataagcttcagtttttc

SEQ ID NO: 134170 - DNA, 22 bp, Artificial Sequence
  Synthetic oligonucleotide; TTA chr11 5280926 5280947 5280931 5280926 -
aataagcttcagtttttcctta

SEQ ID NO: 134171 - DNA, 22 bp, Artificial Sequence
  Synthetic oligonucleotide; CTT chr11 5280917 5280938 5280922 5280917 -
cagtttttccttagttcctgtt

SEQ ID NO: 134172 - DNA, 22 bp, Artificial Sequence
  Synthetic oligonucleotide; TTC chr11 5280916 5280937 5280921 5280916 -
agtttttccttagttcctgtta

SEQ ID NO: 134173 - DNA, 22 bp, Artificial Sequence
  Synthetic oligonucleotide; TTT chr11 5280911 5280932 5280916 5280911 -
ttccttagttcctgttacattt

SEQ ID NO: 134174 - DNA, 22 bp, Artificial Sequence
  Synthetic oligonucleotide; TTT chr11 5280910 5280931 5280915 5280910 -
tccttagttcctgttacatttc

SEQ ID NO: 134175 - DNA, 22 bp, Artificial Sequence
  Synthetic oligonucleotide; TTT chr11 5280909 5280930 5280914 5280909 -
ccttagttcctgttacatttct

SEQ ID NO: 134176 - DNA, 22 bp, Artificial Sequence
  Synthetic oligonucleotide; TTC chr11 5280908 5280929 5280913 5280908 -
cttagttcctgttacatttctg

SEQ ID NO: 134177 - DNA, 22 bp, Artificial Sequence
  Synthetic oligonucleotide; CTT chr11 5280905 5280926 5280910 5280905 -
agttcctgttacatttctgtgt

SEQ ID NO: 134178 - DNA, 22 bp, Artificial Sequence
  Synthetic oligonucleotide; TTA chr11 5280904 5280925 5280909 5280904 -
gttcctgttacatttctgtgtg

SEQ ID NO: 134179 - DNA, 22 bp, Artificial Sequence
  Synthetic oligonucleotide; TTC chr11 5280900 5280921 5280905 5280900 -
ctgttacatttctgtgtgtctc

SEQ ID NO: 134180 - DNA, 22 bp, Artificial Sequence
  Synthetic oligonucleotide; CTG chr11 5280897 5280918 5280902 5280897 -
ttacatttctgtgtgtctccat

SEQ ID NO: 134181 - DNA, 22 bp, Artificial Sequence
  Synthetic oligonucleotide; TTA chr11 5280894 5280915 5280899 5280894 -
catttctgtgtgtctccattag

SEQ ID NO: 134182 - DNA, 22 bp, Artificial Sequence
  Synthetic oligonucleotide; TTT chr11 5280889 5280910 5280894 5280889 -
ctgtgtgtctccattagtgacc

SEQ ID NO: 134183 - DNA, 22 bp, Artificial Sequence
  Synthetic oligonucleotide; TTC chr11 5280888 5280909 5280893 5280888 -
tgtgtgtctccattagtgacct

SEQ ID NO: 134184 - DNA, 22 bp, Artificial Sequence
  Synthetic oligonucleotide; CTG chr11 5280886 5280907 5280891 5280886 -
tgtgtctccattagtgacctcc

SEQ ID NO: 134185 - DNA, 22 bp, Artificial Sequence
  Synthetic oligonucleotide; CTC chr11 5280878 5280899 5280883 5280878 -
cattagtgacctcccatagtcc

SEQ ID NO: 134186 - DNA, 22 bp, Artificial Sequence
  Synthetic oligonucleotide; TTA chr11 5280873 5280894 5280878 5280873 -
gtgacctcccatagtccaagca

SEQ ID NO: 134187 - DNA, 22 bp, Artificial Sequence
  Synthetic oligonucleotide; CTC chr11 5280865 5280886 5280870 5280865 -
ccatagtccaagcatgagcagt

SEQ ID NO: 134188 - DNA, 22 bp, Artificial Sequence
  Synthetic oligonucleotide; TTC chr11 5280841 5280862 5280846 5280841 -
tggccaggcccctgtcggggtc

SEQ ID NO: 134189 - DNA, 22 bp, Artificial Sequence
  Synthetic oligonucleotide; CTG chr11 5280839 5280860 5280844 5280839 -
gccaggcccctgtcggggtcag

SEQ ID NO: 134190 - DNA, 22 bp, Artificial Sequence
  Synthetic oligonucleotide; CTG chr11 5280827 5280848 5280832 5280827 -
tcggggtcagtgccccaccccc

SEQ ID NO: 134191 - DNA, 22 bp, Artificial Sequence
  Synthetic oligonucleotide; CTT chr11 5280800 5280821 5280805 5280800 -
ctggttctgtgtaaccttctaa

SEQ ID NO: 134192 - DNA, 22 bp, Artificial Sequence
  Synthetic oligonucleotide; TTC chr11 5280799 5280820 5280804 5280799 -
tggttctgtgtaaccttctaag

SEQ ID NO: 134193 - DNA, 22 bp, Artificial Sequence
  Synthetic oligonucleotide; CTG chr11 5280797 5280818 5280802 5280797 -
gttctgtgtaaccttctaagca

SEQ ID NO: 134194 - DNA, 22 bp, Artificial Sequence
  Synthetic oligonucleotide; TTC chr11 5280793 5280814 5280798 5280793 -
tgtgtaaccttctaagcaaacc

SEQ ID NO: 134195 - DNA, 22 bp, Artificial Sequence
  Synthetic oligonucleotide; CTG chr11 5280791 5280812 5280796 5280791 -
tgtaaccttctaagcaaacctt

SEQ ID NO: 134196 - DNA, 22 bp, Artificial Sequence
  Synthetic oligonucleotide; CTT chr11 5280782 5280803 5280787 5280782 -
ctaagcaaaccttctggctcaa

SEQ ID NO: 134197 - DNA, 22 bp, Artificial Sequence
  Synthetic oligonucleotide; TTC chr11 5280781 5280802 5280786 5280781 -
taagcaaaccttctggctcaag

SEQ ID NO: 134198 - DNA, 22 bp, Artificial Sequence
  Synthetic oligonucleotide; CTA chr11 5280779 5280800 5280784 5280779 -
agcaaaccttctggctcaagca

SEQ ID NO: 134199 - DNA, 22 bp, Artificial Sequence
  Synthetic oligonucleotide; CTT chr11 5280769 5280790 5280774 5280769 -
ctggctcaagcacagcaatgct

SEQ ID NO: 134200 - DNA, 22 bp, Artificial Sequence
  Synthetic oligonucleotide; TTC chr11 5280768 5280789 5280773 5280768 -
tggctcaagcacagcaatgctg

SEQ ID NO: 134201 - DNA, 22 bp, Artificial Sequence
  Synthetic oligonucleotide; CTG chr11 5280766 5280787 5280771 5280766 -
gctcaagcacagcaatgctgag

SEQ ID NO: 134202 - DNA, 22 bp, Artificial Sequence
  Synthetic oligonucleotide; CTC chr11 5280762 5280783 5280767 5280762 -
aagcacagcaatgctgagtcat

SEQ ID NO: 134203 - DNA, 22 bp, Artificial Sequence
  Synthetic oligonucleotide; CTG chr11 5280746 5280767 5280751 5280746 -
agtcatgatgagtcatgctgag

SEQ ID NO: 134204 - DNA, 22 bp, Artificial Sequence
  Synthetic oligonucleotide; CTG chr11 5280726 5280747 5280731 5280726 -
aggcttagggtgtgtgcccaga

SEQ ID NO: 134205 - DNA, 22 bp, Artificial Sequence
  Synthetic oligonucleotide; CTT chr11 5280720 5280741 5280725 5280720 -
agggtgtgtgcccagatgttct

SEQ ID NO: 134206 - DNA, 22 bp, Artificial Sequence
  Synthetic oligonucleotide; TTA chr11 5280719 5280740 5280724 5280719 -
gggtgtgtgcccagatgttctc

SEQ ID NO: 134207 - DNA, 22 bp, Artificial Sequence
  Synthetic oligonucleotide; TTC chr11 5280699 5280720 5280704 5280699 -
tcagcctagagtgatgactcct

SEQ ID NO: 134208 - DNA, 22 bp, Artificial Sequence
  Synthetic oligonucleotide; CTC chr11 5280697 5280718 5280702 5280697 -
agcctagagtgatgactcctat

SEQ ID NO: 134209 - DNA, 22 bp, Artificial Sequence
  Synthetic oligonucleotide; CTA chr11 5280691 5280712 5280696 5280691 -
gagtgatgactcctatctgggt

SEQ ID NO: 134210 - DNA, 22 bp, Artificial Sequence
  Synthetic oligonucleotide; CTC chr11 5280679 5280700 5280684 5280679 -
ctatctgggtccccagcaggat

SEQ ID NO: 134211 - DNA, 22 bp, Artificial Sequence
  Synthetic oligonucleotide; CTA chr11 5280676 5280697 5280681 5280676 -
tctgggtccccagcaggatgct

SEQ ID NO: 134212 - DNA, 22 bp, Artificial Sequence
  Synthetic oligonucleotide; CTG chr11 5280672 5280693 5280677 5280672 -
ggtccccagcaggatgcttaca

SEQ ID NO: 134213 - DNA, 22 bp, Artificial Sequence
  Synthetic oligonucleotide; CTT chr11 5280653 5280674 5280658 5280653 -
acagggcagatggcaaaaaaaa

SEQ ID NO: 134214 - DNA, 22 bp, Artificial Sequence
  Synthetic oligonucleotide; TTA chr11 5280652 5280673 5280657 5280652 -
cagggcagatggcaaaaaaaag

SEQ ID NO: 134215 - DNA, 22 bp, Artificial Sequence
  Synthetic oligonucleotide; CTG chr11 5280621 5280642 5280626 5280621 -
accacctgactaaaactccacc

SEQ ID NO: 134216 - DNA, 22 bp, Artificial Sequence
  Synthetic oligonucleotide; CTG chr11 5280613 5280634 5280618 5280613 -
actaaaactccacctcaaacgg

SEQ ID NO: 134217 - DNA, 22 bp, Artificial Sequence
  Synthetic oligonucleotide; CTA chr11 5280609 5280630 5280614 5280609 -
aaactccacctcaaacggcatc

SEQ ID NO: 134218 - DNA, 22 bp, Artificial Sequence
  Synthetic oligonucleotide; CTC chr11 5280603 5280624 5280608 5280603 -
cacctcaaacggcatcataaag

SEQ ID NO: 134219 - DNA, 22 bp, Artificial Sequence
  Synthetic oligonucleotide; CTC chr11 5280597 5280618 5280602 5280597 -
aaacggcatcataaagaaaatg

SEQ ID NO: 134220 - DNA, 22 bp, Artificial Sequence
  Synthetic oligonucleotide; CTG chr11 5280567 5280588 5280572 5280567 -
agacagaatgtgacatattcta

SEQ ID NO: 134221 - DNA, 22 bp, Artificial Sequence
  Synthetic oligonucleotide; TTC chr11 5280547 5280568 5280552 5280547 -
tagaatatattatttcctgaat

SEQ ID NO: 134222 - DNA, 22 bp, Artificial Sequence
  Synthetic oligonucleotide; CTA chr11 5280545 5280566 5280550 5280545 -
gaatatattatttcctgaatat

SEQ ID NO: 134223 - DNA, 22 bp, Artificial Sequence
  Synthetic oligonucleotide; TTA chr11 5280535 5280556 5280540 5280535 -
tttcctgaatatatatatatat

SEQ ID NO: 134224 - DNA, 22 bp, Artificial Sequence
  Synthetic oligonucleotide; TTT chr11 5280532 5280553 5280537 5280532 -
cctgaatatatatatatatata

SEQ ID NO: 134225 - DNA, 22 bp, Artificial Sequence
  Synthetic oligonucleotide; TTC chr11 5280531 5280552 5280536 5280531 -
ctgaatatatatatatatatac

SEQ ID NO: 134226 - DNA, 22 bp, Artificial Sequence
  Synthetic oligonucleotide; CTG chr11 5280528 5280549 5280533 5280528 -
aatatatatatatatatacaca

SEQ ID NO: 134227 - DNA, 22 bp, Artificial Sequence
  Synthetic oligonucleotide; TTT chr11 5280475 5280496 5280480 5280475 -
gttgttatcaattgccatagaa

SEQ ID NO: 134228 - DNA, 22 bp, Artificial Sequence
  Synthetic oligonucleotide; TTG chr11 5280474 5280495 5280479 5280474 -
ttgttatcaattgccatagaat

SEQ ID NO: 134229 - DNA, 22 bp, Artificial Sequence
  Synthetic oligonucleotide; TTG chr11 5280471 5280492 5280476 5280471 -
ttatcaattgccatagaatgat

SEQ ID NO: 134230 - DNA, 22 bp, Artificial Sequence
  Synthetic oligonucleotide; TTA chr11 5280468 5280489 5280473 5280468 -
tcaattgccatagaatgattag

SEQ ID NO: 134231 - DNA, 22 bp, Artificial Sequence
  Synthetic oligonucleotide; TTG chr11 5280461 5280482 5280466 5280461 -
ccatagaatgattagttattgt

SEQ ID NO: 134232 - DNA, 22 bp, Artificial Sequence
  Synthetic oligonucleotide; TTA chr11 5280447 5280468 5280452 5280447 -
gttattgtgaatcaaatattta

SEQ ID NO: 134233 - DNA, 22 bp, Artificial Sequence
  Synthetic oligonucleotide; TTA chr11 5280443 5280464 5280448 5280443 -
ttgtgaatcaaatatttatctt

SEQ ID NO: 134234 - DNA, 22 bp, Artificial Sequence
  Synthetic oligonucleotide; TTG chr11 5280440 5280461 5280445 5280440 -
tgaatcaaatatttatcttgca

SEQ ID NO: 134235 - DNA, 22 bp, Artificial Sequence
  Synthetic oligonucleotide; TTT chr11 5280426 5280447 5280431 5280426 -
atcttgcaggtggcctctatac

SEQ ID NO: 134236 - DNA, 22 bp, Artificial Sequence
  Synthetic oligonucleotide; TTA chr11 5280425 5280446 5280430 5280425 -
tcttgcaggtggcctctatacc

SEQ ID NO: 134237 - DNA, 22 bp, Artificial Sequence
  Synthetic oligonucleotide; CTT chr11 5280421 5280442 5280426 5280421 -
gcaggtggcctctatacctaga

SEQ ID NO: 134238 - DNA, 22 bp, Artificial Sequence
  Synthetic oligonucleotide; TTG chr11 5280420 5280441 5280425 5280420 -
caggtggcctctatacctagaa

SEQ ID NO: 134239 - DNA, 22 bp, Artificial Sequence
  Synthetic oligonucleotide; CTC chr11 5280409 5280430 5280414 5280409 -
tatacctagaagcggcagaatc

SEQ ID NO: 134240 - DNA, 22 bp, Artificial Sequence
  Synthetic oligonucleotide; CTA chr11 5280407 5280428 5280412 5280407 -
tacctagaagcggcagaatcag

SEQ ID NO: 134241 - DNA, 22 bp, Artificial Sequence
  Synthetic oligonucleotide; CTA chr11 5280401 5280422 5280406 5280401 -
gaagcggcagaatcaggcttta

SEQ ID NO: 134242 - DNA, 22 bp, Artificial Sequence
  Synthetic oligonucleotide; CTT chr11 5280381 5280402 5280386 5280381 -
tattaatacatgtgtatagatt

SEQ ID NO: 134243 - DNA, 22 bp, Artificial Sequence
  Synthetic oligonucleotide; TTT chr11 5280380 5280401 5280385 5280380 -
attaatacatgtgtatagattt

SEQ ID NO: 134244 - DNA, 22 bp, Artificial Sequence
  Synthetic oligonucleotide; TTA chr11 5280379 5280400 5280384 5280379 -
ttaatacatgtgtatagatttt

SEQ ID NO: 134245 - DNA, 22 bp, Artificial Sequence
  Synthetic oligonucleotide; TTA chr11 5280376 5280397 5280381 5280376 -
atacatgtgtatagatttttag

SEQ ID NO: 134246 - DNA, 22 bp, Artificial Sequence
  Synthetic oligonucleotide; TTT chr11 5280358 5280379 5280363 5280358 -
ttaggatctatacacatgtatt

SEQ ID NO: 134247 - DNA, 22 bp, Artificial Sequence
  Synthetic oligonucleotide; TTT chr11 5280357 5280378 5280362 5280357 -
taggatctatacacatgtatta

SEQ ID NO: 134248 - DNA, 22 bp, Artificial Sequence
  Synthetic oligonucleotide; TTT chr11 5280356 5280377 5280361 5280356 -
aggatctatacacatgtattaa

SEQ ID NO: 134249 - DNA, 22 bp, Artificial Sequence
  Synthetic oligonucleotide; TTA chr11 5280355 5280376 5280360 5280355 -
ggatctatacacatgtattaat

SEQ ID NO: 134250 - DNA, 22 bp, Artificial Sequence
  Synthetic oligonucleotide; CTA chr11 5280348 5280369 5280353 5280348 -
tacacatgtattaatatgaaac

SEQ ID NO: 134251 - DNA, 22 bp, Artificial Sequence
  Synthetic oligonucleotide; TTA chr11 5280335 5280356 5280340 5280335 -
atatgaaacaaggatatggaag

SEQ ID NO: 134252 - DNA, 22 bp, Artificial Sequence
  Synthetic oligonucleotide; CTT chr11 5280277 5280298 5280282 5280277 -
gtttgccattttaaggcacccc

SEQ ID NO: 134253 - DNA, 22 bp, Artificial Sequence
  Synthetic oligonucleotide; TTG chr11 5280276 5280297 5280281 5280276 -
tttgccattttaaggcacccct

SEQ ID NO: 134254 - DNA, 22 bp, Artificial Sequence
  Synthetic oligonucleotide; TTT chr11 5280273 5280294 5280278 5280273 -
gccattttaaggcacccctgga

SEQ ID NO: 134255 - DNA, 22 bp, Artificial Sequence
  Synthetic oligonucleotide; TTG chr11 5280272 5280293 5280277 5280272 -
ccattttaaggcacccctggac

SEQ ID NO: 134256 - DNA, 22 bp, Artificial Sequence
  Synthetic oligonucleotide; TTT chr11 5280266 5280287 5280271 5280266 -
taaggcacccctggacagctag

SEQ ID NO: 134257 - DNA, 22 bp, Artificial Sequence
  Synthetic oligonucleotide; TTT chr11 5280265 5280286 5280270 5280265 -
aaggcacccctggacagctagg

SEQ ID NO: 134258 - DNA, 22 bp, Artificial Sequence
  Synthetic oligonucleotide; TTA chr11 5280264 5280285 5280269 5280264 -
aggcacccctggacagctaggt

SEQ ID NO: 134259 - DNA, 22 bp, Artificial Sequence
  Synthetic oligonucleotide; CTG chr11 5280253 5280274 5280258 5280253 -
gacagctaggtggcaaaaggcc

SEQ ID NO: 134260 - DNA, 22 bp, Artificial Sequence
  Synthetic oligonucleotide; CTA chr11 5280245 5280266 5280250 5280245 -
ggtggcaaaaggcctgtgctgt

SEQ ID NO: 134261 - DNA, 22 bp, Artificial Sequence
  Synthetic oligonucleotide; CTG chr11 5280229 5280250 5280234 5280229 -
tgctgttagaggacacatgctc

SEQ ID NO: 134262 - DNA, 22 bp, Artificial Sequence
  Synthetic oligonucleotide; CTG chr11 5280224 5280245 5280229 5280224 -
ttagaggacacatgctcacata

SEQ ID NO: 134263 - DNA, 22 bp, Artificial Sequence
  Synthetic oligonucleotide; TTA chr11 5280221 5280242 5280226 5280221 -
gaggacacatgctcacatacgg

SEQ ID NO: 134264 - DNA, 22 bp, Artificial Sequence
  Synthetic oligonucleotide; CTC chr11 5280207 5280228 5280212 5280207 -
acatacggggtcagatctgact

SEQ ID NO: 134265 - DNA, 22 bp, Artificial Sequence
  Synthetic oligonucleotide; CTG chr11 5280188 5280209 5280193 5280188 -
acttggggtgctactgggaagc

SEQ ID NO: 134266 - DNA, 22 bp, Artificial Sequence
  Synthetic oligonucleotide; CTT chr11 5280184 5280205 5280189 5280184 -
ggggtgctactgggaagctctc

SEQ ID NO: 134267 - DNA, 22 bp, Artificial Sequence
  Synthetic oligonucleotide; TTG chr11 5280183 5280204 5280188 5280183 -
gggtgctactgggaagctctca

SEQ ID NO: 134268 - DNA, 22 bp, Artificial Sequence
  Synthetic oligonucleotide; CTA chr11 5280175 5280196 5280180 5280175 -
ctgggaagctctcatcttaagg

SEQ ID NO: 134269 - DNA, 22 bp, Artificial Sequence
  Synthetic oligonucleotide; CTG chr11 5280172 5280193 5280177 5280172 -
ggaagctctcatcttaaggata

SEQ ID NO: 134270 - DNA, 22 bp, Artificial Sequence
  Synthetic oligonucleotide; CTC chr11 5280164 5280185 5280169 5280164 -
tcatcttaaggatacatctcag

SEQ ID NO: 134271 - DNA, 22 bp, Artificial Sequence
  Synthetic oligonucleotide; CTC chr11 5280162 5280183 5280167 5280162 -
atcttaaggatacatctcaggc

SEQ ID NO: 134272 - DNA, 22 bp, Artificial Sequence
  Synthetic oligonucleotide; CTT chr11 5280157 5280178 5280162 5280157 -
aaggatacatctcaggccagtc

SEQ ID NO: 134273 - DNA, 22 bp, Artificial Sequence
  Synthetic oligonucleotide; TTA chr11 5280156 5280177 5280161 5280156 -
aggatacatctcaggccagtct

SEQ ID NO: 134274 - DNA, 22 bp, Artificial Sequence
  Synthetic oligonucleotide; CTC chr11 5280144 5280165 5280149 5280144 -
aggccagtcttggtgcattagg

SEQ ID NO: 134275 - DNA, 22 bp, Artificial Sequence
  Synthetic oligonucleotide; CTT chr11 5280133 5280154 5280138 5280133 -
ggtgcattaggaagatgtaggc

SEQ ID NO: 134276 - DNA, 22 bp, Artificial Sequence
  Synthetic oligonucleotide; TTG chr11 5280132 5280153 5280137 5280132 -
gtgcattaggaagatgtaggca

SEQ ID NO: 134277 - DNA, 22 bp, Artificial Sequence
  Synthetic oligonucleotide; TTA chr11 5280124 5280145 5280129 5280124 -
ggaagatgtaggcaactctgat

SEQ ID NO: 134278 - DNA, 22 bp, Artificial Sequence
  Synthetic oligonucleotide; CTC chr11 5280106 5280127 5280111 5280106 -
tgatcctgagaggaaagaaaca

SEQ ID NO: 134279 - DNA, 22 bp, Artificial Sequence
  Synthetic oligonucleotide; CTG chr11 5280104 5280125 5280109 5280104 -
atcctgagaggaaagaaacatt

SEQ ID NO: 134280 - DNA, 22 bp, Artificial Sequence
  Synthetic oligonucleotide; CTG chr11 5280098 5280119 5280103 5280098 -
agaggaaagaaacattcctcca

SEQ ID NO: 134281 - DNA, 22 bp, Artificial Sequence
  Synthetic oligonucleotide; TTC chr11 5280081 5280102 5280086 5280081 -
ctccaggagagctaaaagggtt

SEQ ID NO: 134282 - DNA, 22 bp, Artificial Sequence
  Synthetic oligonucleotide; CTC chr11 5280078 5280099 5280083 5280078 -
caggagagctaaaagggttcac

SEQ ID NO: 134283 - DNA, 22 bp, Artificial Sequence
  Synthetic oligonucleotide; CTA chr11 5280067 5280088 5280072 5280067 -
aaagggttcacctgtgtgggta

SEQ ID NO: 134284 - DNA, 22 bp, Artificial Sequence
  Synthetic oligonucleotide; TTC chr11 5280058 5280079 5280063 5280058 -
acctgtgtgggtaactgtgaag

SEQ ID NO: 134285 - DNA, 22 bp, Artificial Sequence
  Synthetic oligonucleotide; CTG chr11 5280053 5280074 5280058 5280053 -
tgtgggtaactgtgaaggacta

SEQ ID NO: 134286 - DNA, 22 bp, Artificial Sequence
  Synthetic oligonucleotide; CTG chr11 5280041 5280062 5280046 5280041 -
tgaaggactacaagaggatgaa

SEQ ID NO: 134287 - DNA, 22 bp, Artificial Sequence
  Synthetic oligonucleotide; CTA chr11 5280031 5280052 5280036 5280031 -
caagaggatgaaaaacaatgac

SEQ ID NO: 134288 - DNA, 22 bp, Artificial Sequence
  Synthetic oligonucleotide; CTT chr11 5279992 5280013 5279997 5279992 -
gtgggagaaaaaacaggaggtc

SEQ ID NO: 134289 - DNA, 22 bp, Artificial Sequence
  Synthetic oligonucleotide; TTG chr11 5279991 5280012 5279996 5279991 -
tgggagaaaaaacaggaggtca

SEQ ID NO: 134290 - DNA, 22 bp, Artificial Sequence
  Synthetic oligonucleotide; CTT chr11 5279951 5279972 5279956 5279951 -
ccagaagaatggctttgaagct

SEQ ID NO: 134291 - DNA, 22 bp, Artificial Sequence
  Synthetic oligonucleotide; TTC chr11 5279950 5279971 5279955 5279950 -
cagaagaatggctttgaagctg

SEQ ID NO: 134292 - DNA, 22 bp, Artificial Sequence
  Synthetic oligonucleotide; CTT chr11 5279936 5279957 5279941 5279936 -
tgaagctggcttctgtaggagt

SEQ ID NO: 134293 - DNA, 22 bp, Artificial Sequence
  Synthetic oligonucleotide; TTT chr11 5279935 5279956 5279940 5279935 -
gaagctggcttctgtaggagtt

SEQ ID NO: 134294 - DNA, 22 bp, Artificial Sequence
  Synthetic oligonucleotide; TTG chr11 5279934 5279955 5279939 5279934 -
aagctggcttctgtaggagttc

SEQ ID NO: 134295 - DNA, 22 bp, Artificial Sequence
  Synthetic oligonucleotide; CTG chr11 5279928 5279949 5279933 5279928 -
gcttctgtaggagttcacagtg

SEQ ID NO: 134296 - DNA, 22 bp, Artificial Sequence
  Synthetic oligonucleotide; CTT chr11 5279924 5279945 5279929 5279924 -
ctgtaggagttcacagtggcaa

SEQ ID NO: 134297 - DNA, 22 bp, Artificial Sequence
  Synthetic oligonucleotide; TTC chr11 5279923 5279944 5279928 5279923 -
tgtaggagttcacagtggcaaa

SEQ ID NO: 134298 - DNA, 22 bp, Artificial Sequence
  Synthetic oligonucleotide; CTG chr11 5279921 5279942 5279926 5279921 -
taggagttcacagtggcaaaga

SEQ ID NO: 134299 - DNA, 22 bp, Artificial Sequence
  Synthetic oligonucleotide; TTC chr11 5279912 5279933 5279917 5279912 -
acagtggcaaagatgtttcaga

SEQ ID NO: 134300 - DNA, 22 bp, Artificial Sequence
  Synthetic oligonucleotide; TTT chr11 5279894 5279915 5279899 5279894 -
cagaaatgtgacatgacttaag

SEQ ID NO: 134301 - DNA, 22 bp, Artificial Sequence
  Synthetic oligonucleotide; TTC chr11 5279893 5279914 5279898 5279893 -
agaaatgtgacatgacttaagg

SEQ ID NO: 134302 - DNA, 22 bp, Artificial Sequence
  Synthetic oligonucleotide; CTT chr11 5279875 5279896 5279880 5279875 -
aaggaactatacaaaaaggaac

SEQ ID NO: 134303 - DNA, 22 bp, Artificial Sequence
  Synthetic oligonucleotide; TTA chr11 5279874 5279895 5279879 5279874 -
aggaactatacaaaaaggaaca

SEQ ID NO: 134304 - DNA, 22 bp, Artificial Sequence
  Synthetic oligonucleotide; CTA chr11 5279866 5279887 5279871 5279866 -
tacaaaaaggaacaaatttaag

SEQ ID NO: 134305 - DNA, 22 bp, Artificial Sequence
  Synthetic oligonucleotide; TTT chr11 5279847 5279868 5279852 5279847 -
aaggagaggcagataaattagt

SEQ ID NO: 134306 - DNA, 22 bp, Artificial Sequence
  Synthetic oligonucleotide; TTA chr11 5279846 5279867 5279851 5279846 -
aggagaggcagataaattagtt

SEQ ID NO: 134307 - DNA, 22 bp, Artificial Sequence
  Synthetic oligonucleotide; TTA chr11 5279827 5279848 5279832 5279827 -
gttcaacagacatgcaaggaat

SEQ ID NO: 134308 - DNA, 22 bp, Artificial Sequence
  Synthetic oligonucleotide; TTC chr11 5279823 5279844 5279828 5279823 -
aacagacatgcaaggaattttc

SEQ ID NO: 134309 - DNA, 22 bp, Artificial Sequence
  Synthetic oligonucleotide; TTT chr11 5279803 5279824 5279808 5279803 -
tcagatgaatgttatgtctcca

SEQ ID NO: 134310 - DNA, 22 bp, Artificial Sequence
  Synthetic oligonucleotide; TTT chr11 5279802 5279823 5279807 5279802 -
cagatgaatgttatgtctccac

SEQ ID NO: 134311 - DNA, 22 bp, Artificial Sequence
  Synthetic oligonucleotide; TTC chr11 5279801 5279822 5279806 5279801 -
agatgaatgttatgtctccact

SEQ ID NO: 134312 - DNA, 22 bp, Artificial Sequence
  Synthetic oligonucleotide; TTA chr11 5279789 5279810 5279794 5279789 -
tgtctccactgagcttcttgag

SEQ ID NO: 134313 - DNA, 22 bp, Artificial Sequence
  Synthetic oligonucleotide; CTC chr11 5279783 5279804 5279788 5279783 -
cactgagcttcttgaggttagc

SEQ ID NO: 134314 - DNA, 22 bp, Artificial Sequence
  Synthetic oligonucleotide; CTG chr11 5279778 5279799 5279783 5279778 -
agcttcttgaggttagcagctg

SEQ ID NO: 134315 - DNA, 22 bp, Artificial Sequence
  Synthetic oligonucleotide; CTT chr11 5279773 5279794 5279778 5279773 -
cttgaggttagcagctgtgagg

SEQ ID NO: 134316 - DNA, 22 bp, Artificial Sequence
  Synthetic oligonucleotide; TTC chr11 5279772 5279793 5279777 5279772 -
ttgaggttagcagctgtgaggg

SEQ ID NO: 134317 - DNA, 22 bp, Artificial Sequence
  Synthetic oligonucleotide; CTT chr11 5279770 5279791 5279775 5279770 -
gaggttagcagctgtgagggtt

SEQ ID NO: 134318 - DNA, 22 bp, Artificial Sequence
  Synthetic oligonucleotide; TTG chr11 5279769 5279790 5279774 5279769 -
aggttagcagctgtgagggttt

SEQ ID NO: 134319 - DNA, 22 bp, Artificial Sequence
  Synthetic oligonucleotide; TTA chr11 5279763 5279784 5279768 5279763 -
gcagctgtgagggttttgcagg

SEQ ID NO: 134320 - DNA, 22 bp, Artificial Sequence
  Synthetic oligonucleotide; CTG chr11 5279756 5279777 5279761 5279756 -
tgagggttttgcaggcccagga

SEQ ID NO: 134321 - DNA, 22 bp, Artificial Sequence
  Synthetic oligonucleotide; TTT chr11 5279747 5279768 5279752 5279747 -
tgcaggcccaggacccattaca

SEQ ID NO: 134322 - DNA, 22 bp, Artificial Sequence
  Synthetic oligonucleotide; TTT chr11 5279746 5279767 5279751 5279746 -
gcaggcccaggacccattacag

SEQ ID NO: 134323 - DNA, 22 bp, Artificial Sequence
  Synthetic oligonucleotide; TTG chr11 5279745 5279766 5279750 5279745 -
caggcccaggacccattacagg

SEQ ID NO: 134324 - DNA, 22 bp, Artificial Sequence
  Synthetic oligonucleotide; TTA chr11 5279727 5279748 5279732 5279727 -
caggacctcacgtatacttgac

SEQ ID NO: 134325 - DNA, 22 bp, Artificial Sequence
  Synthetic oligonucleotide; CTC chr11 5279718 5279739 5279723 5279718 -
acgtatacttgacactgttttt

SEQ ID NO: 134326 - DNA, 22 bp, Artificial Sequence
  Synthetic oligonucleotide; CTT chr11 5279708 5279729 5279713 5279708 -
gacactgttttttgtattcatt

SEQ ID NO: 134327 - DNA, 22 bp, Artificial Sequence
  Synthetic oligonucleotide; TTG chr11 5279707 5279728 5279712 5279707 -
acactgttttttgtattcattt

SEQ ID NO: 134328 - DNA, 22 bp, Artificial Sequence
  Synthetic oligonucleotide; CTG chr11 5279701 5279722 5279706 5279701 -
ttttttgtattcatttgtgaat

SEQ ID NO: 134329 - DNA, 22 bp, Artificial Sequence
  Synthetic oligonucleotide; TTT chr11 5279698 5279719 5279703 5279698 -
tttgtattcatttgtgaatgaa

SEQ ID NO: 134330 - DNA, 22 bp, Artificial Sequence
  Synthetic oligonucleotide; TTT chr11 5279697 5279718 5279702 5279697 -
ttgtattcatttgtgaatgaat

SEQ ID NO: 134331 - DNA, 22 bp, Artificial Sequence
  Synthetic oligonucleotide; TTT chr11 5279696 5279717 5279701 5279696 -
tgtattcatttgtgaatgaatg

SEQ ID NO: 134332 - DNA, 22 bp, Artificial Sequence
  Synthetic oligonucleotide; TTT chr11 5279695 5279716 5279700 5279695 -
gtattcatttgtgaatgaatga

SEQ ID NO: 134333 - DNA, 22 bp, Artificial Sequence
  Synthetic oligonucleotide; TTG chr11 5279694 5279715 5279699 5279694 -
tattcatttgtgaatgaatgac

SEQ ID NO: 134334 - DNA, 22 bp, Artificial Sequence
  Synthetic oligonucleotide; TTC chr11 5279689 5279710 5279694 5279689 -
atttgtgaatgaatgacctctt

SEQ ID NO: 134335 - DNA, 22 bp, Artificial Sequence
  Synthetic oligonucleotide; TTT chr11 5279685 5279706 5279690 5279685 -
gtgaatgaatgacctcttgtca

SEQ ID NO: 134336 - DNA, 22 bp, Artificial Sequence
  Synthetic oligonucleotide; TTG chr11 5279684 5279705 5279689 5279684 -
tgaatgaatgacctcttgtcag

SEQ ID NO: 134337 - DNA, 22 bp, Artificial Sequence
  Synthetic oligonucleotide; CTC chr11 5279669 5279690 5279674 5279669 -
ttgtcagtctactcggtttcgc

SEQ ID NO: 134338 - DNA, 22 bp, Artificial Sequence
  Synthetic oligonucleotide; CTT chr11 5279667 5279688 5279672 5279667 -
gtcagtctactcggtttcgctg

SEQ ID NO: 134339 - DNA, 22 bp, Artificial Sequence
  Synthetic oligonucleotide; TTG chr11 5279666 5279687 5279671 5279666 -
tcagtctactcggtttcgctgt

SEQ ID NO: 134340 - DNA, 22 bp, Artificial Sequence
  Synthetic oligonucleotide; CTA chr11 5279658 5279679 5279663 5279658 -
ctcggtttcgctgtgaatgaat

SEQ ID NO: 134341 - DNA, 22 bp, Artificial Sequence
  Synthetic oligonucleotide; CTC chr11 5279655 5279676 5279660 5279655 -
ggtttcgctgtgaatgaatgat

SEQ ID NO: 134342 - DNA, 22 bp, Artificial Sequence
  Synthetic oligonucleotide; TTT chr11 5279650 5279671 5279655 5279650 -
cgctgtgaatgaatgatgtctt

SEQ ID NO: 134343 - DNA, 22 bp, Artificial Sequence
  Synthetic oligonucleotide; TTC chr11 5279649 5279670 5279654 5279649 -
gctgtgaatgaatgatgtcttg

SEQ ID NO: 134344 - DNA, 22 bp, Artificial Sequence
  Synthetic oligonucleotide; CTG chr11 5279645 5279666 5279650 5279645 -
tgaatgaatgatgtcttgtcag

SEQ ID NO: 134345 - DNA, 22 bp, Artificial Sequence
  Synthetic oligonucleotide; CTT chr11 5279628 5279649 5279633 5279628 -
gtcagcctacttggtttcgcta

SEQ ID NO: 134346 - DNA, 22 bp, Artificial Sequence
  Synthetic oligonucleotide; TTG chr11 5279627 5279648 5279632 5279627 -
tcagcctacttggtttcgctaa

SEQ ID NO: 134347 - DNA, 22 bp, Artificial Sequence
  Synthetic oligonucleotide; CTA chr11 5279619 5279640 5279624 5279619 -
cttggtttcgctaagagcacag

SEQ ID NO: 134348 - DNA, 22 bp, Artificial Sequence
  Synthetic oligonucleotide; CTT chr11 5279616 5279637 5279621 5279616 -
ggtttcgctaagagcacagaga

SEQ ID NO: 134349 - DNA, 22 bp, Artificial Sequence
  Synthetic oligonucleotide; TTG chr11 5279615 5279636 5279620 5279615 -
gtttcgctaagagcacagagag

SEQ ID NO: 134350 - DNA, 22 bp, Artificial Sequence
  Synthetic oligonucleotide; TTT chr11 5279611 5279632 5279616 5279611 -
cgctaagagcacagagagaaga

SEQ ID NO: 134351 - DNA, 22 bp, Artificial Sequence
  Synthetic oligonucleotide; TTC chr11 5279610 5279631 5279615 5279610 -
gctaagagcacagagagaagat

SEQ ID NO: 134352 - DNA, 22 bp, Artificial Sequence
  Synthetic oligonucleotide; CTA chr11 5279606 5279627 5279611 5279606 -
agagcacagagagaagatttag

SEQ ID NO: 134353 - DNA, 22 bp, Artificial Sequence
  Synthetic oligonucleotide; TTT chr11 5279586 5279607 5279591 5279586 -
agtgatgctatgtaaaaacttc

SEQ ID NO: 134354 - DNA, 22 bp, Artificial Sequence
  Synthetic oligonucleotide; TTA chr11 5279585 5279606 5279590 5279585 -
gtgatgctatgtaaaaacttcc

SEQ ID NO: 134355 - DNA, 22 bp, Artificial Sequence
  Synthetic oligonucleotide; CTA chr11 5279576 5279597 5279581 5279576 -
tgtaaaaacttcctttttggtt

SEQ ID NO: 134356 - DNA, 22 bp, Artificial Sequence
  Synthetic oligonucleotide; CTT chr11 5279565 5279586 5279570 5279565 -
cctttttggttcaagtgtatgt

SEQ ID NO: 134357 - DNA, 22 bp, Artificial Sequence
  Synthetic oligonucleotide; TTC chr11 5279564 5279585 5279569 5279564 -
ctttttggttcaagtgtatgtt

SEQ ID NO: 134358 - DNA, 22 bp, Artificial Sequence
  Synthetic oligonucleotide; CTT chr11 5279561 5279582 5279566 5279561 -
tttggttcaagtgtatgtttgt

SEQ ID NO: 134359 - DNA, 22 bp, Artificial Sequence
  Synthetic oligonucleotide; TTT chr11 5279560 5279581 5279565 5279560 -
ttggttcaagtgtatgtttgtg

SEQ ID NO: 134360 - DNA, 22 bp, Artificial Sequence
  Synthetic oligonucleotide; TTT chr11 5279559 5279580 5279564 5279559 -
tggttcaagtgtatgtttgtga

SEQ ID NO: 134361 - DNA, 22 bp, Artificial Sequence
  Synthetic oligonucleotide; TTT chr11 5279558 5279579 5279563 5279558 -
ggttcaagtgtatgtttgtgat

SEQ ID NO: 134362 - DNA, 22 bp, Artificial Sequence
  Synthetic oligonucleotide; TTG chr11 5279557 5279578 5279562 5279557 -
gttcaagtgtatgtttgtgata

SEQ ID NO: 134363 - DNA, 22 bp, Artificial Sequence
  Synthetic oligonucleotide; TTC chr11 5279553 5279574 5279558 5279553 -
aagtgtatgtttgtgatagaaa

SEQ ID NO: 134364 - DNA, 22 bp, Artificial Sequence
  Synthetic oligonucleotide; TTT chr11 5279541 5279562 5279546 5279541 -
gtgatagaaatgaagacaggct

SEQ ID NO: 134365 - DNA, 22 bp, Artificial Sequence
  Synthetic oligonucleotide; TTG chr11 5279540 5279561 5279545 5279540 -
tgatagaaatgaagacaggcta

SEQ ID NO: 134366 - DNA, 22 bp, Artificial Sequence
  Synthetic oligonucleotide; CTA chr11 5279518 5279539 5279523 5279518 -
catgatgcatatctaacataaa

SEQ ID NO: 134367 - DNA, 22 bp, Artificial Sequence
  Synthetic oligonucleotide; CTA chr11 5279503 5279524 5279508 5279503 -
acataaacacaaacattaagaa

SEQ ID NO: 134368 - DNA, 22 bp, Artificial Sequence
  Synthetic oligonucleotide; TTA chr11 5279485 5279506 5279490 5279485 -
agaaaggaaatcaacctgaaga

SEQ ID NO: 134369 - DNA, 22 bp, Artificial Sequence
  Synthetic oligonucleotide; CTG chr11 5279467 5279488 5279472 5279467 -
aagagtatttatacagataaca

SEQ ID NO: 134370 - DNA, 22 bp, Artificial Sequence
  Synthetic oligonucleotide; TTT chr11 5279457 5279478 5279462 5279457 -
atacagataacaaaatacagag

SEQ ID NO: 134371 - DNA, 22 bp, Artificial Sequence
  Synthetic oligonucleotide; TTA chr11 5279456 5279477 5279461 5279456 -
tacagataacaaaatacagaga

SEQ ID NO: 134372 - DNA, 22 bp, Artificial Sequence
  Synthetic oligonucleotide; TTA chr11 5279426 5279447 5279431 5279426 -
aatgtgtaataactgtggcaca

SEQ ID NO: 134373 - DNA, 22 bp, Artificial Sequence
  Synthetic oligonucleotide; CTG chr11 5279411 5279432 5279416 5279411 -
tggcacaggctggaatatgagc

SEQ ID NO: 134374 - DNA, 22 bp, Artificial Sequence
  Synthetic oligonucleotide; CTG chr11 5279399 5279420 5279404 5279399 -
gaatatgagccatttaaatcac

SEQ ID NO: 134375 - DNA, 22 bp, Artificial Sequence
  Synthetic oligonucleotide; TTT chr11 5279384 5279405 5279389 5279384 -
aaatcacaaattaattagaaaa

SEQ ID NO: 134376 - DNA, 22 bp, Artificial Sequence
  Synthetic oligonucleotide; TTA chr11 5279383 5279404 5279388 5279383 -
aatcacaaattaattagaaaaa

SEQ ID NO: 134377 - DNA, 22 bp, Artificial Sequence
  Synthetic oligonucleotide; TTA chr11 5279371 5279392 5279376 5279371 -
attagaaaaaaaacagtgggga

SEQ ID NO: 134378 - DNA, 22 bp, Artificial Sequence
  Synthetic oligonucleotide; TTA chr11 5279367 5279388 5279372 5279367 -
gaaaaaaaacagtggggaaaaa

SEQ ID NO: 134379 - DNA, 22 bp, Artificial Sequence
  Synthetic oligonucleotide; TTC chr11 5279341 5279362 5279346 5279341 -
catggatgggtctagaaagact

SEQ ID NO: 134380 - DNA, 22 bp, Artificial Sequence
  Synthetic oligonucleotide; CTA chr11 5279327 5279348 5279332 5279327 -
gaaagactagcattgttttagg

SEQ ID NO: 134381 - DNA, 22 bp, Artificial Sequence
  Synthetic oligonucleotide; CTA chr11 5279318 5279339 5279323 5279318 -
gcattgttttaggttgagtggc

SEQ ID NO: 134382 - DNA, 22 bp, Artificial Sequence
  Synthetic oligonucleotide; TTG chr11 5279312 5279333 5279317 5279312 -
ttttaggttgagtggcagtgtt

SEQ ID NO: 134383 - DNA, 22 bp, Artificial Sequence
  Synthetic oligonucleotide; TTT chr11 5279309 5279330 5279314 5279309 -
taggttgagtggcagtgtttaa

SEQ ID NO: 134384 - DNA, 22 bp, Artificial Sequence
  Synthetic oligonucleotide; TTT chr11 5279308 5279329 5279313 5279308 -
aggttgagtggcagtgtttaaa

SEQ ID NO: 134385 - DNA, 22 bp, Artificial Sequence
  Synthetic oligonucleotide; TTA chr11 5279307 5279328 5279312 5279307 -
ggttgagtggcagtgtttaaag

SEQ ID NO: 134386 - DNA, 22 bp, Artificial Sequence
  Synthetic oligonucleotide; TTG chr11 5279302 5279323 5279307 5279302 -
agtggcagtgtttaaagggtga

SEQ ID NO: 134387 - DNA, 22 bp, Artificial Sequence
  Synthetic oligonucleotide; TTT chr11 5279289 5279310 5279294 5279289 -
aaagggtgatatcagactaaac

SEQ ID NO: 134388 - DNA, 22 bp, Artificial Sequence
  Synthetic oligonucleotide; TTA chr11 5279288 5279309 5279293 5279288 -
aagggtgatatcagactaaact

SEQ ID NO: 134389 - DNA, 22 bp, Artificial Sequence
  Synthetic oligonucleotide; CTA chr11 5279270 5279291 5279275 5279270 -
aacttgaaatatgtggctaaat

SEQ ID NO: 134390 - DNA, 22 bp, Artificial Sequence
  Synthetic oligonucleotide; CTT chr11 5279265 5279286 5279270 5279265 -
gaaatatgtggctaaataacta

SEQ ID NO: 134391 - DNA, 22 bp, Artificial Sequence
  Synthetic oligonucleotide; TTG chr11 5279264 5279285 5279269 5279264 -
aaatatgtggctaaataactag

SEQ ID NO: 134392 - DNA, 22 bp, Artificial Sequence
  Synthetic oligonucleotide; CTA chr11 5279251 5279272 5279256 5279251 -
aataactagaatactctttatt

SEQ ID NO: 134393 - DNA, 22 bp, Artificial Sequence
  Synthetic oligonucleotide; CTA chr11 5279243 5279264 5279248 5279243 -
gaatactctttattttttcgta

SEQ ID NO: 134394 - DNA, 22 bp, Artificial Sequence
  Synthetic oligonucleotide; CTC chr11 5279235 5279256 5279240 5279235 -
tttattttttcgtatcatgaat

SEQ ID NO: 134395 - DNA, 22 bp, Artificial Sequence
  Synthetic oligonucleotide; CTT chr11 5279233 5279254 5279238 5279233 -
tattttttcgtatcatgaatag

SEQ ID NO: 134396 - DNA, 22 bp, Artificial Sequence
  Synthetic oligonucleotide; TTT chr11 5279232 5279253 5279237 5279232 -
attttttcgtatcatgaatagc

SEQ ID NO: 134397 - DNA, 22 bp, Artificial Sequence
  Synthetic oligonucleotide; TTA chr11 5279231 5279252 5279236 5279231 -
ttttttcgtatcatgaatagca

SEQ ID NO: 134398 - DNA, 22 bp, Artificial Sequence
  Synthetic oligonucleotide; TTT chr11 5279228 5279249 5279233 5279228 -
tttcgtatcatgaatagcagat

SEQ ID NO: 134399 - DNA, 22 bp, Artificial Sequence
  Synthetic oligonucleotide; TTT chr11 5279227 5279248 5279232 5279227 -
ttcgtatcatgaatagcagata

SEQ ID NO: 134400 - DNA, 22 bp, Artificial Sequence
  Synthetic oligonucleotide; TTT chr11 5279226 5279247 5279231 5279226 -
tcgtatcatgaatagcagatat

SEQ ID NO: 134401 - DNA, 22 bp, Artificial Sequence
  Synthetic oligonucleotide; TTT chr11 5279225 5279246 5279230 5279225 -
cgtatcatgaatagcagatata

SEQ ID NO: 134402 - DNA, 22 bp, Artificial Sequence
  Synthetic oligonucleotide; TTC chr11 5279224 5279245 5279229 5279224 -
gtatcatgaatagcagatatag

SEQ ID NO: 134403 - DNA, 22 bp, Artificial Sequence
  Synthetic oligonucleotide; CTT chr11 5279199 5279220 5279204 5279199 -
gatggccccatgcttggtttaa

SEQ ID NO: 134404 - DNA, 22 bp, Artificial Sequence
  Synthetic oligonucleotide; TTG chr11 5279198 5279219 5279203 5279198 -
atggccccatgcttggtttaac

SEQ ID NO: 134405 - DNA, 22 bp, Artificial Sequence
  Synthetic oligonucleotide; CTT chr11 5279184 5279205 5279189 5279184 -
ggtttaacatccttgctgttcc

SEQ ID NO: 134406 - DNA, 22 bp, Artificial Sequence
  Synthetic oligonucleotide; TTG chr11 5279183 5279204 5279188 5279183 -
gtttaacatccttgctgttcct

SEQ ID NO: 134407 - DNA, 22 bp, Artificial Sequence
  Synthetic oligonucleotide; TTT chr11 5279179 5279200 5279184 5279179 -
aacatccttgctgttcctgaca

SEQ ID NO: 134408 - DNA, 22 bp, Artificial Sequence
  Synthetic oligonucleotide; TTA chr11 5279178 5279199 5279183 5279178 -
acatccttgctgttcctgacat

SEQ ID NO: 134409 - DNA, 22 bp, Artificial Sequence
  Synthetic oligonucleotide; CTT chr11 5279170 5279191 5279175 5279170 -
gctgttcctgacatgaaatcct

SEQ ID NO: 134410 - DNA, 22 bp, Artificial Sequence
  Synthetic oligonucleotide; TTG chr11 5279169 5279190 5279174 5279169 -
ctgttcctgacatgaaatcctt

SEQ ID NO: 134411 - DNA, 22 bp, Artificial Sequence
  Synthetic oligonucleotide; CTG chr11 5279166 5279187 5279171 5279166 -
ttcctgacatgaaatccttaat

SEQ ID NO: 134412 - DNA, 22 bp, Artificial Sequence
  Synthetic oligonucleotide; TTC chr11 5279163 5279184 5279168 5279163 -
ctgacatgaaatccttaatttt

SEQ ID NO: 134413 - DNA, 22 bp, Artificial Sequence
  Synthetic oligonucleotide; CTG chr11 5279160 5279181 5279165 5279160 -
acatgaaatccttaatttttga

SEQ ID NO: 134414 - DNA, 22 bp, Artificial Sequence
  Synthetic oligonucleotide; CTT chr11 5279147 5279168 5279152 5279147 -
aatttttgacaaaggggctatt

SEQ ID NO: 134415 - DNA, 22 bp, Artificial Sequence
  Synthetic oligonucleotide; TTA chr11 5279146 5279167 5279151 5279146 -
atttttgacaaaggggctattc

SEQ ID NO: 134416 - DNA, 22 bp, Artificial Sequence
  Synthetic oligonucleotide; TTT chr11 5279142 5279163 5279147 5279142 -
ttgacaaaggggctattcattt

SEQ ID NO: 134417 - DNA, 22 bp, Artificial Sequence
  Synthetic oligonucleotide; TTT chr11 5279141 5279162 5279146 5279141 -
tgacaaaggggctattcatttt

SEQ ID NO: 134418 - DNA, 22 bp, Artificial Sequence
  Synthetic oligonucleotide; TTT chr11 5279140 5279161 5279145 5279140 -
gacaaaggggctattcattttc

SEQ ID NO: 134419 - DNA, 22 bp, Artificial Sequence
  Synthetic oligonucleotide; TTG chr11 5279139 5279160 5279144 5279139 -
acaaaggggctattcattttca

SEQ ID NO: 134420 - DNA, 22 bp, Artificial Sequence
  Synthetic oligonucleotide; CTA chr11 5279127 5279148 5279132 5279127 -
ttcattttcattttatattggg

SEQ ID NO: 134421 - DNA, 22 bp, Artificial Sequence
  Synthetic oligonucleotide; TTC chr11 5279124 5279145 5279129 5279124 -
attttcattttatattgggcct

SEQ ID NO: 134422 - DNA, 22 bp, Artificial Sequence
  Synthetic oligonucleotide; TTT chr11 5279120 5279141 5279125 5279120 -
tcattttatattgggcctagaa

SEQ ID NO: 134423 - DNA, 22 bp, Artificial Sequence
  Synthetic oligonucleotide; TTT chr11 5279119 5279140 5279124 5279119 -
cattttatattgggcctagaaa

SEQ ID NO: 134424 - DNA, 22 bp, Artificial Sequence
  Synthetic oligonucleotide; TTC chr11 5279118 5279139 5279123 5279118 -
attttatattgggcctagaaat

SEQ ID NO: 134425 - DNA, 22 bp, Artificial Sequence
  Synthetic oligonucleotide; TTT chr11 5279114 5279135 5279119 5279114 -
tatattgggcctagaaattatg

SEQ ID NO: 134426 - DNA, 22 bp, Artificial Sequence
  Synthetic oligonucleotide; TTT chr11 5279113 5279134 5279118 5279113 -
atattgggcctagaaattatgt

SEQ ID NO: 134427 - DNA, 22 bp, Artificial Sequence
  Synthetic oligonucleotide; TTA chr11 5279112 5279133 5279117 5279112 -
tattgggcctagaaattatgta

SEQ ID NO: 134428 - DNA, 22 bp, Artificial Sequence
  Synthetic oligonucleotide; TTG chr11 5279107 5279128 5279112 5279107 -
ggcctagaaattatgtagatgg

SEQ ID NO: 134429 - DNA, 22 bp, Artificial Sequence
  Synthetic oligonucleotide; CTA chr11 5279101 5279122 5279106 5279101 -
gaaattatgtagatggtcctga

SEQ ID NO: 134430 - DNA, 22 bp, Artificial Sequence
  Synthetic oligonucleotide; TTA chr11 5279094 5279115 5279099 5279094 -
tgtagatggtcctgaggaaaag

SEQ ID NO: 134431 - DNA, 22 bp, Artificial Sequence
  Synthetic oligonucleotide; CTG chr11 5279080 5279101 5279085 5279080 -
aggaaaagtttatagcttgtct

SEQ ID NO: 134432 - DNA, 22 bp, Artificial Sequence
  Synthetic oligonucleotide; TTT chr11 5279069 5279090 5279074 5279069 -
atagcttgtctatttctctctc

SEQ ID NO: 134433 - DNA, 22 bp, Artificial Sequence
  Synthetic oligonucleotide; TTA chr11 5279068 5279089 5279073 5279068 -
tagcttgtctatttctctctct

SEQ ID NO: 134434 - DNA, 22 bp, Artificial Sequence
  Synthetic oligonucleotide; CTT chr11 5279062 5279083 5279067 5279062 -
gtctatttctctctctaacata

SEQ ID NO: 134435 - DNA, 22 bp, Artificial Sequence
  Synthetic oligonucleotide; TTG chr11 5279061 5279082 5279066 5279061 -
tctatttctctctctaacatag

SEQ ID NO: 134436 - DNA, 22 bp, Artificial Sequence
  Synthetic oligonucleotide; CTA chr11 5279057 5279078 5279062 5279057 -
tttctctctctaacatagttgt

SEQ ID NO: 134437 - DNA, 22 bp, Artificial Sequence
  Synthetic oligonucleotide; TTT chr11 5279054 5279075 5279059 5279054 -
ctctctctaacatagttgtcag

SEQ ID NO: 134438 - DNA, 22 bp, Artificial Sequence
  Synthetic oligonucleotide; TTC chr11 5279053 5279074 5279058 5279053 -
tctctctaacatagttgtcagc

SEQ ID NO: 134439 - DNA, 22 bp, Artificial Sequence
  Synthetic oligonucleotide; CTC chr11 5279051 5279072 5279056 5279051 -
tctctaacatagttgtcagcac

SEQ ID NO: 134440 - DNA, 22 bp, Artificial Sequence
  Synthetic oligonucleotide; CTC chr11 5279049 5279070 5279054 5279049 -
tctaacatagttgtcagcacaa

SEQ ID NO: 134441 - DNA, 22 bp, Artificial Sequence
  Synthetic oligonucleotide; CTC chr11 5279047 5279068 5279052 5279047 -
taacatagttgtcagcacaatg

SEQ ID NO: 134442 - DNA, 22 bp, Artificial Sequence
  Synthetic oligonucleotide; CTA chr11 5279045 5279066 5279050 5279045 -
acatagttgtcagcacaatgcc

SEQ ID NO: 134443 - DNA, 22 bp, Artificial Sequence
  Synthetic oligonucleotide; TTG chr11 5279036 5279057 5279041 5279036 -
tcagcacaatgcctaggctata

SEQ ID NO: 134444 - DNA, 22 bp, Artificial Sequence
  Synthetic oligonucleotide; CTA chr11 5279021 5279042 5279026 5279021 -
ggctataggaagtactcaaagc

SEQ ID NO: 134445 - DNA, 22 bp, Artificial Sequence
  Synthetic oligonucleotide; CTA chr11 5279016 5279037 5279021 5279016 -
taggaagtactcaaagcttgtt

SEQ ID NO: 134446 - DNA, 22 bp, Artificial Sequence
  Synthetic oligonucleotide; CTC chr11 5279004 5279025 5279009 5279004 -
aaagcttgttaaattgaattct

SEQ ID NO: 134447 - DNA, 22 bp, Artificial Sequence
  Synthetic oligonucleotide; CTT chr11 5278997 5279018 5279002 5278997 -
gttaaattgaattctatccttc

SEQ ID NO: 134448 - DNA, 22 bp, Artificial Sequence
  Synthetic oligonucleotide; TTG chr11 5278996 5279017 5279001 5278996 -
ttaaattgaattctatccttct

SEQ ID NO: 134449 - DNA, 22 bp, Artificial Sequence
  Synthetic oligonucleotide; TTA chr11 5278993 5279014 5278998 5278993 -
aattgaattctatccttcttat

SEQ ID NO: 134450 - DNA, 22 bp, Artificial Sequence
  Synthetic oligonucleotide; TTG chr11 5278988 5279009 5278993 5278988 -
aattctatccttcttattcaat

SEQ ID NO: 134451 - DNA, 22 bp, Artificial Sequence
  Synthetic oligonucleotide; TTC chr11 5278983 5279004 5278988 5278983 -
tatccttcttattcaattctac

SEQ ID NO: 134452 - DNA, 22 bp, Artificial Sequence
  Synthetic oligonucleotide; CTA chr11 5278981 5279002 5278986 5278981 -
tccttcttattcaattctacac

SEQ ID NO: 134453 - DNA, 22 bp, Artificial Sequence
  Synthetic oligonucleotide; CTT chr11 5278976 5278997 5278981 5278976 -
cttattcaattctacacatgga

SEQ ID NO: 134454 - DNA, 22 bp, Artificial Sequence
  Synthetic oligonucleotide; TTC chr11 5278975 5278996 5278980 5278975 -
ttattcaattctacacatggag

SEQ ID NO: 134455 - DNA, 22 bp, Artificial Sequence
  Synthetic oligonucleotide; CTT chr11 5278973 5278994 5278978 5278973 -
attcaattctacacatggagga

SEQ ID NO: 134456 - DNA, 22 bp, Artificial Sequence
  Synthetic oligonucleotide; TTA chr11 5278972 5278993 5278977 5278972 -
ttcaattctacacatggaggaa

SEQ ID NO: 134457 - DNA, 22 bp, Artificial Sequence
  Synthetic oligonucleotide; TTC chr11 5278969 5278990 5278974 5278969 -
aattctacacatggaggaaaaa

SEQ ID NO: 134458 - DNA, 22 bp, Artificial Sequence
  Synthetic oligonucleotide; TTC chr11 5278964 5278985 5278969 5278964 -
tacacatggaggaaaaactcat

SEQ ID NO: 134459 - DNA, 22 bp, Artificial Sequence
  Synthetic oligonucleotide; CTA chr11 5278962 5278983 5278967 5278962 -
cacatggaggaaaaactcatca

SEQ ID NO: 134460 - DNA, 22 bp, Artificial Sequence
  Synthetic oligonucleotide; CTC chr11 5278944 5278965 5278949 5278944 -
atcagggatggaggcacgcctc

SEQ ID NO: 134461 - DNA, 22 bp, Artificial Sequence
  Synthetic oligonucleotide; CTC chr11 5278922 5278943 5278927 5278922 -
taaggaaggcaggtgtggctct

SEQ ID NO: 134462 - DNA, 22 bp, Artificial Sequence
  Synthetic oligonucleotide; CTA chr11 5278920 5278941 5278925 5278920 -
aggaaggcaggtgtggctctgc

SEQ ID NO: 134463 - DNA, 22 bp, Artificial Sequence
  Synthetic oligonucleotide; CTC chr11 5278901 5278922 5278906 5278901 -
tgcagtgtgattgggtacttgc

SEQ ID NO: 134464 - DNA, 22 bp, Artificial Sequence
  Synthetic oligonucleotide; CTG chr11 5278899 5278920 5278904 5278899 -
cagtgtgattgggtacttgcag

SEQ ID NO: 134465 - DNA, 22 bp, Artificial Sequence
  Synthetic oligonucleotide; TTG chr11 5278888 5278909 5278893 5278888 -
ggtacttgcaggacgaagggtg

SEQ ID NO: 134466 - DNA, 22 bp, Artificial Sequence
  Synthetic oligonucleotide; CTT chr11 5278881 5278902 5278886 5278881 -
gcaggacgaagggtggggtggg

SEQ ID NO: 134467 - DNA, 22 bp, Artificial Sequence
  Synthetic oligonucleotide; TTG chr11 5278880 5278901 5278885 5278880 -
caggacgaagggtggggtggga

SEQ ID NO: 134468 - DNA, 22 bp, Artificial Sequence
  Synthetic oligonucleotide; CTA chr11 5278851 5278872 5278856 5278851 -
accttccattcctagtgcagag

SEQ ID NO: 134469 - DNA, 22 bp, Artificial Sequence
  Synthetic oligonucleotide; CTT chr11 5278846 5278867 5278851 5278846 -
ccattcctagtgcagaggtcac

SEQ ID NO: 134470 - DNA, 22 bp, Artificial Sequence
  Synthetic oligonucleotide; TTC chr11 5278845 5278866 5278850 5278845 -
cattcctagtgcagaggtcaca

SEQ ID NO: 134471 - DNA, 22 bp, Artificial Sequence
  Synthetic oligonucleotide; TTC chr11 5278840 5278861 5278845 5278840 -
ctagtgcagaggtcacagccta

SEQ ID NO: 134472 - DNA, 22 bp, Artificial Sequence
  Synthetic oligonucleotide; CTA chr11 5278837 5278858 5278842 5278837 -
gtgcagaggtcacagcctaaac

SEQ ID NO: 134473 - DNA, 22 bp, Artificial Sequence
  Synthetic oligonucleotide; CTA chr11 5278818 5278839 5278823 5278818 -
aacatcaaattccttgaggtgc

SEQ ID NO: 134474 - DNA, 22 bp, Artificial Sequence
  Synthetic oligonucleotide; TTC chr11 5278806 5278827 5278811 5278806 -
cttgaggtgcggtggctcactc

SEQ ID NO: 134475 - DNA, 22 bp, Artificial Sequence
  Synthetic oligonucleotide; CTT chr11 5278803 5278824 5278808 5278803 -
gaggtgcggtggctcactcctg

SEQ ID NO: 134476 - DNA, 22 bp, Artificial Sequence
  Synthetic oligonucleotide; TTG chr11 5278802 5278823 5278807 5278802 -
aggtgcggtggctcactcctgt

SEQ ID NO: 134477 - DNA, 22 bp, Artificial Sequence
  Synthetic oligonucleotide; CTC chr11 5278788 5278809 5278793 5278788 -
actcctgtaatcacagcagttt

SEQ ID NO: 134478 - DNA, 22 bp, Artificial Sequence
  Synthetic oligonucleotide; CTC chr11 5278784 5278805 5278789 5278784 -
ctgtaatcacagcagtttggga

SEQ ID NO: 134479 - DNA, 22 bp, Artificial Sequence
  Synthetic oligonucleotide; CTG chr11 5278781 5278802 5278786 5278781 -
taatcacagcagtttgggacgc

SEQ ID NO: 134480 - DNA, 22 bp, Artificial Sequence
  Synthetic oligonucleotide; TTT chr11 5278766 5278787 5278771 5278766 -
gggacgccaaggtgggcagatc

SEQ ID NO: 134481 - DNA, 22 bp, Artificial Sequence
  Synthetic oligonucleotide; TTG chr11 5278765 5278786 5278770 5278765 -
ggacgccaaggtgggcagatca

SEQ ID NO: 134482 - DNA, 22 bp, Artificial Sequence
  Synthetic oligonucleotide; CTT chr11 5278740 5278761 5278745 5278740 -
gaggtcaggagttggacaccag

SEQ ID NO: 134483 - DNA, 22 bp, Artificial Sequence
  Synthetic oligonucleotide; TTG chr11 5278739 5278760 5278744 5278739 -
aggtcaggagttggacaccagc

SEQ ID NO: 134484 - DNA, 22 bp, Artificial Sequence
  Synthetic oligonucleotide; TTG chr11 5278726 5278747 5278731 5278726 -
gacaccagcccagccaacatag

SEQ ID NO: 134485 - DNA, 22 bp, Artificial Sequence
  Synthetic oligonucleotide; CTG chr11 5278695 5278716 5278700 5278695 -
gtctctgcttaaaaatataaaa

SEQ ID NO: 134486 - DNA, 22 bp, Artificial Sequence
  Synthetic oligonucleotide; CTC chr11 5278690 5278711 5278695 5278690 -
tgcttaaaaatataaaaattag

SEQ ID NO: 134487 - DNA, 22 bp, Artificial Sequence
  Synthetic oligonucleotide; CTG chr11 5278688 5278709 5278693 5278688 -
cttaaaaatataaaaattagct

SEQ ID NO: 134488 - DNA, 22 bp, Artificial Sequence
  Synthetic oligonucleotide; CTT chr11 5278685 5278706 5278690 5278685 -
aaaaatataaaaattagctgga

SEQ ID NO: 134489 - DNA, 22 bp, Artificial Sequence
  Synthetic oligonucleotide; TTA chr11 5278684 5278705 5278689 5278684 -
aaaatataaaaattagctggac

SEQ ID NO: 134490 - DNA, 22 bp, Artificial Sequence
  Synthetic oligonucleotide; TTA chr11 5278669 5278690 5278674 5278669 -
gctggacgtggtgacgggagcc

SEQ ID NO: 134491 - DNA, 22 bp, Artificial Sequence
  Synthetic oligonucleotide; CTG chr11 5278665 5278686 5278670 5278665 -
gacgtggtgacgggagcctgta

SEQ ID NO: 134492 - DNA, 22 bp, Artificial Sequence
  Synthetic oligonucleotide; CTG chr11 5278645 5278666 5278650 5278645 -
taatccaactacttgggaggct

SEQ ID NO: 134493 - DNA, 22 bp, Artificial Sequence
  Synthetic oligonucleotide; CTA chr11 5278634 5278655 5278639 5278634 -
cttgggaggctgaggcaggaga

SEQ ID NO: 134494 - DNA, 22 bp, Artificial Sequence
  Synthetic oligonucleotide; CTT chr11 5278631 5278652 5278636 5278631 -
gggaggctgaggcaggagaatc

SEQ ID NO: 134495 - DNA, 22 bp, Artificial Sequence
  Synthetic oligonucleotide; TTG chr11 5278630 5278651 5278635 5278630 -
ggaggctgaggcaggagaatcg

SEQ ID NO: 134496 - DNA, 22 bp, Artificial Sequence
  Synthetic oligonucleotide; CTG chr11 5278622 5278643 5278627 5278622 -
aggcaggagaatcgcttgaacc

SEQ ID NO: 134497 - DNA, 22 bp, Artificial Sequence
  Synthetic oligonucleotide; CTT chr11 5278605 5278626 5278610 5278605 -
gaaccggggaggtggagtttgc

SEQ ID NO: 134498 - DNA, 22 bp, Artificial Sequence
  Synthetic oligonucleotide; TTG chr11 5278604 5278625 5278609 5278604 -
aaccggggaggtggagtttgca

SEQ ID NO: 134499 - DNA, 22 bp, Artificial Sequence
  Synthetic oligonucleotide; TTT chr11 5278585 5278606 5278590 5278585 -
gcactgagcagagatcatgcca

SEQ ID NO: 134500 - DNA, 22 bp, Artificial Sequence
  Synthetic oligonucleotide; TTG chr11 5278584 5278605 5278589 5278584 -
cactgagcagagatcatgccat

SEQ ID NO: 134501 - DNA, 22 bp, Artificial Sequence
  Synthetic oligonucleotide; CTG chr11 5278579 5278600 5278584 5278579 -
agcagagatcatgccattgcac

SEQ ID NO: 134502 - DNA, 22 bp, Artificial Sequence
  Synthetic oligonucleotide; TTG chr11 5278560 5278581 5278565 5278560 -
cactccagcctccagagcgaga

SEQ ID NO: 134503 - DNA, 22 bp, Artificial Sequence
  Synthetic oligonucleotide; CTC chr11 5278555 5278576 5278560 5278555 -
cagcctccagagcgagactctg

SEQ ID NO: 134504 - DNA, 22 bp, Artificial Sequence
  Synthetic oligonucleotide; CTC chr11 5278548 5278569 5278553 5278548 -
cagagcgagactctgtctaaag

SEQ ID NO: 134505 - DNA, 22 bp, Artificial Sequence
  Synthetic oligonucleotide; CTC chr11 5278535 5278556 5278540 5278535 -
tgtctaaagaaaaacgaaaaca

SEQ ID NO: 134506 - DNA, 22 bp, Artificial Sequence
  Synthetic oligonucleotide; CTG chr11 5278533 5278554 5278538 5278533 -
tctaaagaaaaacgaaaacaaa

SEQ ID NO: 134507 - DNA, 22 bp, Artificial Sequence
  Synthetic oligonucleotide; CTA chr11 5278529 5278550 5278534 5278529 -
aagaaaaacgaaaacaaacaaa

SEQ ID NO: 134508 - DNA, 22 bp, Artificial Sequence
  Synthetic oligonucleotide; TTC chr11 5278478 5278499 5278483 5278478 -
cctgaccgaacagaattctgtc

SEQ ID NO: 134509 - DNA, 22 bp, Artificial Sequence
  Synthetic oligonucleotide; CTG chr11 5278474 5278495 5278479 5278474 -
accgaacagaattctgtctgat

SEQ ID NO: 134510 - DNA, 22 bp, Artificial Sequence
  Synthetic oligonucleotide; TTC chr11 5278460 5278481 5278465 5278460 -
tgtctgattgttctctgactta

SEQ ID NO: 134511 - DNA, 22 bp, Artificial Sequence
  Synthetic oligonucleotide; CTG chr11 5278458 5278479 5278463 5278458 -
tctgattgttctctgacttatc

SEQ ID NO: 134512 - DNA, 22 bp, Artificial Sequence
  Synthetic oligonucleotide; CTG chr11 5278454 5278475 5278459 5278454 -
attgttctctgacttatctacc

SEQ ID NO: 134513 - DNA, 22 bp, Artificial Sequence
  Synthetic oligonucleotide; TTG chr11 5278450 5278471 5278455 5278450 -
ttctctgacttatctaccattt
